United States Patent Application Publication US 2022/0090207 A1 - sequence listing, part 20

SEQ ID NO: 257272 - DNA, 580 bp, Homo sapiens
  chr7:4781492-4782072
  hypo
agtcacacacgaacctcaggcgacagcctggatgcatggcacacagccctggccctggtcctgtcatacagggatgcaaaaacagacgtgtacttgaggctggagggttcatacattctttaatgatttacctcttcattgcggacatttctaaacgtggctggcttttctctcccaaccgcacgtctgtggctctgcagatgcgtggctgcgcgtggtttggtgccggagctgtggctcctccgcagcaccagcagtttctgcgtcgctcgcgcgtcaccagcaaaggtcaccccagtggaaaaagcagatcacatcttagggctgttgtgaacatggtgttgacctcacatataccctgaaaggggctcagggccctcggggacatctgtgaagcacgctctgggcatgctgatctgttggagcgagcgctgtggcaatcccaggctggtcacgtcagtccctccctgctgatctgcgcactctgctgaaccccggccgcaccttggcttgcttttttctttttttcctcttgcagctgtaggagaagaaagggcttttgtttgtatttcagagacag

SEQ ID NO: 257273 - DNA, 144 bp, Homo sapiens
  chr7:4783196-4783340
  hypo
tggtgaattttatgttatgggaattgcatctgaagaaagcagttgagcgcagtatatgtacttaagtcttcacctagtaccaccttaaaggcgctgtagaaatggtggccaagaccagctcacgtgctagtggaagctcacacc

SEQ ID NO: 257274 - DNA, 105 bp, Homo sapiens
  chr7:4800783-4800888
  hypo
gtccccggacacacggtcaccatcctgcagcccgccacacccgtgaccctcgggcagcaccaccttccagtccgggccgtgacccagaacggaaagcatgcggtt

SEQ ID NO: 257275 - DNA, 1370 bp, Homo sapiens
  chr7:4801646-4803016
  hypo
gggacggcagggcccgcagggagcagagcaagggtagccgtcctgcctggcaggggtgcactgacctccggttccggcttggtggcttagcccctgtataggggacttgaaaaaagcagctgggtcctaaccagaccccagagtaaccctcttcttcctccactccagccctcaccagccctttgcagctccttgcgacccaagcgagttcatccgcgccggtggtggtcacccgggtgtgcgaggtggggcccaaggagccagcagcagccgtcgcggccacggccaccaccaccccagccactgccaccaccgcctctgcctccgcctcttccactggagagcccgaggtcaaaaggtcccgggtggaggagcccagtggtgctgtaaccacaccggctggagtgatcgcagctgccggcccccaggggccaggcaccggggagtgaggtcacctgcaacgcgggggagtgggactcacccagcggcgaccccgaagctggacccggcagctcaggcggccgcacccacagacggaggagaacagcccgcggcggcctgtgggcatcggcggcacctggacacacccagccctttccatttgatcgcctgccttcccgtggtttaagacaaaaacacataaacaagttcagacaactgattgtatgattctgggaattctttgctttcctttccttctccctcggcaccacctcctctccccaggcctccctgtcgggcatggggaggaggttggagctcagcatcttgaggaatgtgtcaagacagcccctccgctccgcgctgcacggccagccgcctttgtccgggaggacagacagaaacgcagcaaggcacacaccaaggctgccggggaggcccgggcaccggacagatgcctgttgggaagccaggagctgccgagccacggaccacctaacagcctctccgcccggaacgtgacatagagagtgttggcattaactcggggggtgtccgatttcacttcagaccccaagtttttctttgtttgtttaaacatggaattcagacttcattgtacacctgagacagacacaaaagggatcatgtatttttgaggattttacctgttgacgtctgatgaccggccgtaggtccagggttcccgctgggtttaatcccctcgaagagtaaacctgccgctctgtctgataacttcaagtaagagcagcggcttcctgggttggcgttcgcggtggaaggttcctaggatgaaaggtgagcctggatccgccggccgcagacatcgcgctgctggggacgattggggccgctgctctgcagaccagaccttcccgaattatccgtggctccgatgtcccggtgct

SEQ ID NO: 257276 - DNA, 69 bp, Homo sapiens
  chr7:4803494-4803563
  hypo
ttgctggccgctccggcgctggctctcctgtccgggaccacaacgagaaacagcgacagattcgacgca

SEQ ID NO: 257277 - DNA, 831 bp, Homo sapiens
  chr7:4806263-4807094
  hypo
gagttgggccaggacgggggcttcaccctgccccctccagactgccgaagcccccaagaagttttgagcccagctgggcctcgcctccccggctcctgggtccattttctgtactggtttgagatcacaggcatcattcagcgaatgctcttgtgtcctctgcataaagagggccctccctggagcacccccggggagctgggactctccagaaagccccgggtgagggctccgtcttgagagagagagaaatcccttctttgggcgattcagtgagttcaggaggaggaggaagcttttccttggctttgaaatcagtgtttttatggagacaaagaacagacctcagtgggaaaaatgaaaacgtaatggaacacggggaggtgtcggagaagaaaggattttccccttcgctttcagagccggcgggagtgcaggtctgttttgcttcagaagcctcacattctgctttgcccttgagtgacttcatgcgggatgaggaactgttgacccctctagagaggacaccccaagtccatcctgggctcctcctcacccctctgagaaagcccccctaaaaaaaggcttcagagtcaccggcatgccgcctcacgttgcaggacggaatcgcgcgctcctcacgctggagtaagttacgaaacatgatcgtcaggctctttgcaaacgcagagccccagaacgctggatggaggcctcctcggccctgcgggcggcctggctgcggtaggtctgctgcaaggagccaccacggggactgcgccacactcctgatgaaaacgtgtttacccacagcctcgcctcgagcctcct

SEQ ID NO: 257278 - DNA, 152 bp, Homo sapiens
  chr7:4807419-4807571
  hypo
acgaaaagctgctacgtttggtgaccagagggagggtttggaatctgtgctttgcaggggatctcggtgggtaccgcggcccctcgcagggtggcgagtggggtccgtgcctcgagaagggggcccttacccacaccgtgcggcttgaattc

SEQ ID NO: 257279 - DNA, 122 bp, Homo sapiens
  chr7:4813799-4813921
  hypo
ggctccaggggcacccgccgcactccaccgactcccatccaccgctcaccatccaccgattcccatctcttcattctctgcaccaggtgccctcagacatcactgggcgccctagggcatct

SEQ ID NO: 257280 - DNA, 127 bp, Homo sapiens
  chr7:4823843-4823970
  hypo
tcaccgaggtggacggggcggtagccacagacttcttcacggtgctctccagcggccaccgcttcacagacgaccagtggctgaacgtgcaggccttctctatgctgcgggcgtggctgctgcacag

SEQ ID NO: 257281 - DNA, 151 bp, Homo sapiens; identical to SEQ ID NO: 211335
  chr7:4824492-4824643
  hypo

SEQ ID NO: 257282 - DNA, 225 bp, Homo sapiens
  chr7:4825103-4825328
  hypo
ggatgggaggcagcgactcggcccatttgatgtggtccatgtcccgcagtgcctggtggaggccgtgctggtgctggacgtgctgtgccggcaggacccgtccttcctgtaccgaagtctctcctgcctgaaggccctgcacgggcgggtgcgcggggacccggcctctgtgcgggtgctgctgcccctcgcccacttcttcctgagccacggtgagcccagggt

SEQ ID NO: 257283 - DNA, 97 bp, Homo sapiens
  chr7:4828437-4828534
  hypo
cgggcagcactcacggccacactgtgtcctcaggttggcgccactccaccagctgctgcagcccatggccggctgtgcccgcgtggcccagtgtgcc

SEQ ID NO: 257284 - DNA, 71 bp, Homo sapiens
  chr7:4839338-4839409
  hypo
gctgcggggctgcccgggagcagggtctggatgtagagcccgggggcgcccaggtgcgtgtgctggggaca

SEQ ID NO: 257285 - DNA, 188 bp, Homo sapiens
  chr7:4839816-4840004
  hypo
gcccatccccagcccggaggggcctcgttccagctccaccgtgaagacgtagcagaagtcctcggtgctggagctgcggctggacggggctggaggggactcctccgcaagggctgcagagtctcctgggtgggggccaggaaaggtgggtgggagtgaggcgccaggaatcacgacgaggaatggga

SEQ ID NO: 257286 - DNA, 868 bp, Homo sapiens
  chr7:4855714-4856582
  hypo
cacccctcagggacaccagacgctcagggagcaggaggccaaaaagggcagagccgcctccaggagctggcgagggaggcgccagcagccgtcatgtccaggaatgtgagcccccgacccctcaaccctgcacgaggccctcacccctgtcgaggagctggttgagaagcagtgtcccggagaagaagaagaggtaggcgagcatctgcgaggccacctcggggtgcacctgcagctgccgcaggaggtccagggctgcctggtacacagacaccacgcggcgcagctcctcgggcagttcgggggccgaggaccagctctcacggcgctccgtctggaatggcgggcactccaggagtgccgggaggcagatgtacagggactggcgggggcaagaggagaacagcaaccagcatttccaggagcgctggcggccgaacggggggcctgacccagcgagctccccacccacgcactgcttgcagggacccggcctcggtagcttcctgctggacaggccatggctttgcaaatgtccagtgtgggatgtggggacacaggagctgcctcctggggctgctgggagcagaggtggggtgcagggggctcagggggatctgctgtcggaggcacagatgaactcagaaggcgcacagaggtggcgcctggggggatgggctccaacaaaggggctccaacaaaatgacgggagagtcaccactcccccagaaagtggctcaccgcacccccgatgcaccccaagctggccagggccacagggggaccggcggcagcacctctggcacccgtgggtccagggtgacaacagggccatgtcccttgcgccccatgctggggcctcccccac

SEQ ID NO: 257287 - DNA, 798 bp, Homo sapiens
  chr7:4856612-4857410
  hypo
aagggggcgtttcaaggcgagggaaagggagctgggatggttctagggcttctgtgcgacctgaggaggagcgggtgtggggggtgcagctgggcctgtgcagaacctgcagccactgctccctgatgaagtggagcttgtcacggtcccctccctcagccccccagaaggctccttaggagagccacaggcacaagcttgagccccacttgatcccaggagctgcctgagtgcagaagcagagcccgtccgtgcaccttggagacatagtagacgcactgctggaaggcgtacagcaccacctcctccagcaccgccatggcctcctcgctggccgtcagcgtgcaggagaacagcgattccttcgagcctgccgggagacagccacgccaatggtcacaacgggcacagcgctcaggaacgcagcaactcagccagccgccagctctttccctggcgcgggcaccacccaacgcgcccatctggggtccagatgcgataaactggccgagggactctgggccctggctgggacgagcgcagcaaacctgccgccactcttacctggggaggggaatgccgggaggggcaggaggggtccagacacccaacatctcaatgcccagcccagcccagcccaagcgctcattcactcccacgttctggatacgttttctgttacaaccaactgcacccaacatagcaggtcctaactgcctccccacaggtcacctctcactcgcgacacgggtcacaggactctggcagcagcccctgagtggccgccactctgtggaa

SEQ ID NO: 257288 - DNA, 436 bp, Homo sapiens
  chr7:4857846-4858282
  hypo
cagggctgcatgggcggcgcctggtgagccaggccaacactcaccccagcgcgggcctcccaggagcacaggcccccagctgcccctctgccgggcagactgcaccggaggccggcccactcatggccaggacaatggtgcgccaagcccttggacaagcccctgtcactttcgctctgccgctcctggtgctcctccttcaggggcttggggctgcctggcccccacccaccaagcccgctccccaagaacctgtgaagccccccagtgcctgccccacagggtcacatctgggaaccaggcagggcagctggagggaccccggggtccggggcagtaaggggctctcgggctctgccaacctcaacactgtgcccagaagcctccaggcctgtggagacacacaaggtggcccgacggcgcccacagcgagtgc

SEQ ID NO: 257289 - DNA, 363 bp, Homo sapiens
  chr7:4861934-4862297
  hypo
ggccaactaggttccgaggacggcgaggagatgccacactcccctgcctggggtgctggcggggggaatggagggcagcgccagccgtacctgtgatgtccagctgctcctccatgctctgcatgtagagtgggcatttctgctggataaagtacaggagctcgatggagttagacatccagaaaagaatgggctgcaagtctggaaccagatcagccatggcgcagctggccagcgagatgggctcctggctaccaagacagaaagactaagagttacgcggggacccgaccctcaggaggctgaatctaccactctttctacataaggatgcgcgttttcatgggacgctgacaacaactg

SEQ ID NO: 257290 - DNA, 216 bp, Homo sapiens
  chr7:4864847-4865063
  hypo
cagcaggggcagcacggcccggcaggaggaacgggcgcagctggctgaggcaggctggtcaaggcgcgggtatctcctgcgggtggagggaagcactggagtcccactcctgggaaccaaggcgatggaaacactcgcagggcccacaaggagcacagagaccagagcatgggctgccggccacagcctatgcatgcctgtcgcgtccatcaggag

SEQ ID NO: 257291 - DNA, 34 bp, Homo sapiens; identical to SEQ ID NO: 211341
  chr7:4867284-4867318
  hypo

SEQ ID NO: 257292 - DNA, 398 bp, Homo sapiens
  chr7:4874066-4874464
  hypo
cctgtggggctggggggcagcgacaggcagggaaaggccgccctgcgctcagcagcacagcaccgtgggggtcagatagaggcgctcccgcctcccagccggggccagctccgggccccctcttcccccagaccggcacaggacccagaccgcccaccccagcacactgacccagacagtctcgcggatcagcctggctatcttgagcaggagctgcccgaatgtgcccggctggaagtgggtggccgagtgctggatgcagaggcacaggaggaaggcgggggtcagcttgtggtcgtcgccccccggctcgatcaacgtcatgatcctctgcagcagcgtgtcctccaggtggggctcaaactccaggagcagctgctggcgccggggcagggcgg

SEQ ID NO: 257293 - DNA, 175 bp, Homo sapiens
  chr7:4878540-4878715
  hypo
cagccagcaggacccgtgcactcgtgcacacatgcatgcacacgtgcacacgtgcacacgtacattcagcaccgcttgagttagcaaagcccagaacccacccaatcaccccccacagggagccgccatgcacgggaggagagctctgcagagagaagaccgtagccagctgtgt

SEQ ID NO: 257294 - DNA, 37 bp, Homo sapiens
  chr7:4902242-4902279
  hypo
ttacccaggctgggcgcagtggctcacgcctgtaatc

SEQ ID NO: 257295 - DNA, 286 bp, Homo sapiens
  chr7:4913158-4913444
  hypo
tgaaggggccctggcgtgcgctggacctcactgggcctgccctgcaggggcagatgtgatcctgccatcccgccgtccttttgaaactacaccacccacttcagtaggatttgtttcactgcagccccccaccttcccccaaagcgacacggtgacacatgccccacactgagggccactctcaggacaaacagacaccacagcagccccatcggtgcccagggaggcgcaggacaggcgggctgctggaaggcgcagagctcaccatcaccggaggtatgtaatg

SEQ ID NO: 257296 - DNA, 258 bp, Homo sapiens
  chr7:4913719-4913977
  hypo
agacctctcagaggcgggttccagggatgtgcacagaggccgcctccaacccacggaaaggccgtgcaggtgtctcacgcagggaacagttccaagtgggagactgtgtgtgtgagcacctgtgtggacatttctctgtccaggtacccatgtgtcaccacaacaaccgaacacactctagcgcaaagcttctgggcgcgggcctgtttgaggcagggctgtccagctacagtaaggtctgtgcggggtcatccccag

SEQ ID NO: 257297 - DNA, 269 bp, Homo sapiens; identical to SEQ ID NO: 211344
  chr7:4915141-4915410
  hypo

SEQ ID NO: 257298 - DNA, 281 bp, Homo sapiens
  chr7:4916207-4916488
  hypo
aggtgtgagccaccgcgcctggccaaaattattttttatgacacacacctattaagataatcaacttctttccaccaattgaataaatcaccagacacagtgggccccaggccccggggctctcaaactctgcggcaggcactcaacgccacccgtgctctcggcactcctcagaccgacaatgatcggctgcccgtggccaggccctcctcaggaaggcctcccaccacccaggcacccacagacccgcggtacgctgagtgcaccgtggtcacctctgg

SEQ ID NO: 257299 - DNA, 546 bp, Homo sapiens
  chr7:4917082-4917628
  hypo
ggcttcaaacatccaggacacgggctccgactgcctcctgcagagcgagcccgccccacgcatgtcccctgcaccactccttctccgcctacctcggctggccttctcagcgctcagacccacggctcttcctgaacctgtggcccccctcacctgccgtgatggtgtccacctccttggctgccagctcctccacgtccgacctcttcctcagctcaaacctccgggataaaccttctcggggtttccataattcctggatcaagaggggcttctcactgtccccaaacacccgaaagcaccgggcctgccaccgctgcccagcatcgccggcttggcccaccacgtcacacagcacgtactggccggcctgcctggggtccagggcgtaccgctccagcgcctccttcaccagctcacgggcgctggaggtgccggtggccaggacgctcttgtagtgggttcctgtgcagacactgtccccaaacaccttcaggacaccaggggccgacagctgggtggagagctcggcggggtcatcgctgg

SEQ ID NO: 257300 - DNA, 195 bp, Homo sapiens
  chr7:4918325-4918520
  hypo
aaacacaatgaggtcgcctaagtaagacacgctccgctgcagggcttggatttctggaaagtgctgggcgcagcgcccgtgtgcagtgagcatcaaggagcgccccacccggagccggccccagcaccatcacagccacagaagagcagcgggcagcccaagggcaaagcttcgcctctccgtaaacctcgtgtc

SEQ ID NO: 257301 - DNA, 35 bp, Homo sapiens
  chr7:4932640-4932675
  hypo
agctgactaattgcggtttctaagatagccacctc

SEQ ID NO: 257302 - DNA, 77 bp, Homo sapiens; identical to SEQ ID NO: 211346
  chr7:4985613-4985690
  hypo

SEQ ID NO: 257303 - DNA, 137 bp, Homo sapiens
  chr7:4985870-4986007
  hypo
cgcacaccccaccccgtgcacacaatcccaggagcttcacagagtcgaaacaccatccccgcatcctaagaatagccatgctccaaacatggacggatcaatttgtttccctctgcggcctttctctgaaagaaatg

SEQ ID NO: 257304 - DNA, 40 bp, Homo sapiens
  chr7:5041595-5041635
  hypo
tccccactgccctccgtgtccctcccgctagcaaacacca

SEQ ID NO: 257305 - DNA, 456 bp, Homo sapiens
  chr7:5157464-5157920
  hypo
gggtcgcgggccgccgcaaggccttcaacacggtggcgtcccacctcaccgtggctgtgctccactacggctgtgccacggccatgtatgccaggcccctgaacagccgttcccttgaggaggacaagctggtctcgctcatctatatcaacgtcaccccgctgctgtacccggccatctacacgctgcggaaccgggacatgcaggaggccctgcaatgcatggtcggccagaggacgctggggatggccaccaggtggattttgcctgatgctgggtgccaggcggtgtctgtcctgagatttctcccactgaggggaatctcaccattctggagccatctaagcctccccaacgcctacggggtgtaaatctaagtatagcacgcaaagaccagcaatccgactccagcctagcgctgctgtgtccgttgacgtcttgcgctggatggttctt

SEQ ID NO: 257306 - DNA, 276 bp, Homo sapiens; identical to SEQ ID NO: 211348
  chr7:5230916-5231192
  hypo

SEQ ID NO: 257307 - DNA, 263 bp, Homo sapiens
  chr7:5237698-5237961
  hypo
tatggactcataaacgcaaggccatgaaaccaatcctctgctttttccttgtaagccaacgacggggcctttgattccagactctaaggtagctttggagtccgtttcgtttccagcccactgctcagccatggcacagcacaggggtggagccacgggtagtaaaggcctgcagaagcacagagagatgcctgcgcccacctcgattttaaataccttcgtttaaaatttagaaaattcacttacttaactttttttttttt

SEQ ID NO: 257308 - DNA, 89 bp, Homo sapiens; identical to SEQ ID NO: 211349
  chr7:5240136-5240225
  hypo

SEQ ID NO: 257309 - DNA, 88 bp, Homo sapiens
  chr7:5240285-5240373
  hypo
cagcgattctgaactttgtgctggtgacttttaattatggtgttctcctggcccgccagcaggtgcggcctttcggactcgctcctgg

SEQ ID NO: 257310 - DNA, 121 bp, Homo sapiens
  chr7:5242891-5243012
  hypo
atcctacagaggagaaaccacgagcgtcccttggcctaaatctgtggtgctggaatgctggcctcttaccttgcatcctggcggagccgcagacacacacggaagtggattcaagcagtta

SEQ ID NO: 257311 - DNA, 114 bp, Homo sapiens; identical to SEQ ID NO: 211350
  chr7:5253973-5254087
  hypo

SEQ ID NO: 257312 - DNA, 602 bp, Homo sapiens
  chr7:5262386-5262988
  hypo
acccccaggagaattccacacgagcatttctagcccggctgggtcaccgggtaagatctgggcgtcggtcttgtcatgggaattgaagagcactttcagaaaagcaaattgggtttttgtttgcgatcccaccagctagcgtgagagttgtgaagagctcacgcaaccaggtgggccctccagtgcccggcagctcccagcctgctgtaagggacggggcggcgacgtcatgggtagcacaccctcccctttaaaggccacgctctgagaacctgttccagctctccagctccgcctccaccctcagcaaatggcattggccccttcttttaacccagaagccgcagcctggagttctcttgtcttcctccctccaggctgcaaagcttccctcatcggtgcttacatgcctcctgtggcgcctgctttggaggcaggactgtccctccctcgtcggacagtagagcgggggaggcctcgggctctggagcccgtgcctcagattggagccctagggagcactttcagtcgcatggccgtggtcggcgggaccccacctcaggtctgtggctccacgtctcggatcagtacctccctccctg

SEQ ID NO: 257313 - DNA, 271 bp, Homo sapiens
  chr7:5265609-5265880
  hypo
ccccacttgctgccgggatgagaggtaagcacggacccgcccaccctctgacatcgttagccagtgaagaccccggagctggccatggagcgagcacctccgcatccaggctcggcagtgaggaggatgggccccagcagatgagcttctcccacaggcagcacgcagggtagacagagccctcgcgtagggcatggagggcccaggtggacatccttttgtcagtgaagatggcctctcctcaggttcccctcacgacaaaagcgtttgt

SEQ ID NO: 257314 - DNA, 514 bp, Homo sapiens; identical to SEQ ID NO: 211353
  chr7:5272774-5273288
  hypo

SEQ ID NO: 257315 - DNA, 53 bp, Homo sapiens
  chr7:5305462-5305515
  hypo
agtgcgtgcatctgcgtgagattgagtgtgtgtgggtgcgtctttttgtgtgt

SEQ ID NO: 257316 - DNA, 98 bp, Homo sapiens; identical to SEQ ID NO: 211354
  chr7:5334869-5334967
  hypo

SEQ ID NO: 257317 - DNA, 118 bp, Homo sapiens
  chr7:5342789-5342907
  hypo
cagcactgtgttctgcgtttggtctcatacctgcgtctaccttccatctgtgtccagcggccccggctccagcccagccagcactctgcagggtcacacgcaccgtgtccccacccag

SEQ ID NO: 257318 - DNA, 110 bp, Homo sapiens; identical to SEQ ID NO: 211355
  chr7:5353278-5353388
  hypo

SEQ ID NO: 257319 - DNA, 395 bp, Homo sapiens
  chr7:5372388-5372783
  hypo
aggaagatgcgctcgctgcggcgccgcgtccacaggtcgtcgtcgctggcctcgggccccgcctcgaagccaggctccttggggccccgcagcttccgggccttgcgccccttctccaccgccagcttggccttgtctgggctgctggggtcgggaccgcgggcgccaggcgtgggtgcggccagggagggtcccggctcccccagccccttcttgggccgcagcagccccgcaggcgaccgcttgcgcaccttgacctcgctctctgagtcggtgtactcgaactctgtgcctgaacgcgggaggagggcgtgctggtcacagcctcgtggggaccccttccctcccacccagccacatggacaccattcctccccggcgggacctccccgcca

SEQ ID NO: 257320 - DNA, 42 bp, Homo sapiens
  chr7:5373542-5373584
  hypo
ctgaccctgggaagcagatccgagttctctgggatctccagc

SEQ ID NO: 257321 - DNA, 118 bp, Homo sapiens
  chr7:5384805-5384923
  hypo
tctcgggtaaccccacgtctctctcacgggccagactgggtgtcaccaacctggagtggcccccacaaaccccaggctgggtcagggacctccatggagctcccgcagcccctcaagt

SEQ ID NO: 257322 - DNA, 319 bp, Homo sapiens
  chr7:5390477-5390796
  hypo
ccgtcccttgatgcggcaacggagccgctttcgtattgaatgacagagaccaggggtgtcaaaggctctgggccctgcactgcctacgcacccttcaaaacagaaatacacgtgagaagacaagtgtttgtaaataatagtttttaaccactggcaagtaagaatagagctttaagaaaataaaagacaaaacaagcaactaaaaaaacatgatgatgctggaggtgaaggcgcttgattttaaacctgaaaaatgaaatgaatgccaatcgctaccagggatatttgaataacacaggcaagcggcaggcggcacggt

SEQ ID NO: 257323 - DNA, 55 bp, Homo sapiens
  chr7:5391379-5391434
  hypo
cctctcgctcactcgcacgcactctctcgctaggaaacacggaaggtattttgtg

SEQ ID NO: 257324 - DNA, 231 bp, Homo sapiens
  chr7:5396667-5396898
  hypo
ggaggatttcagagacaggccgaggcccttggccagcgccttcctgttcttccccagcaggctgtcgtaaggagtcaagtacctgccgcagcccccgctagttttcgatttccccccagcactgtccgaaaacttgaagggcgacttcaacttgtcctgcttggtgagggagagggccttgtcgagcttgcttgccaactgctcctggtcgctggccatcttcttcttctt

SEQ ID NO: 257325 - DNA, 103 bp, Homo sapiens
  chr7:5398875-5398978
  hypo
agattggagaagagtcattccggcattgaagacaaccacttctaaggtttctgtacaggaacaaagggcctgcgaagggagcgtgaactcttaacacaccctc

SEQ ID NO: 257326 - DNA, 557 bp, Homo sapiens; identical to SEQ ID NO: 211358
  chr7:5428494-5429051
  hypo

SEQ ID NO: 257327 - DNA, 88 bp, Homo sapiens
  chr7:5441350-5441438
  hypo
cagcattactaggtatgctacgagttattttttattcctagtcctatgctgcacatcggaggtactcaagtagtatttacggtaggaa

SEQ ID NO: 257328 - DNA, 286 bp, Homo sapiens; identical to SEQ ID NO: 211359
  chr7:5446686-5446972
  hypo

SEQ ID NO: 257329 - DNA, 81 bp, Homo sapiens; identical to SEQ ID NO: 211360
  chr7:5449226-5449307
  hypo

SEQ ID NO: 257330 - DNA, 160 bp, Homo sapiens; identical to SEQ ID NO: 211361
  chr7:5453845-5454005
  hypo

SEQ ID NO: 257331 - DNA, 249 bp, Homo sapiens
  chr7:5488162-5488411
  hypo
cccactttggccggcgagactttgaaaagaaagctggacgtgcaggagcaggggttgggaaggggaattccaggaaggggcctgggactggggccctggaaccatggtggccccccaggccagatccacccctggacaggtgcaaggactctgggagcggccccaaggatccaaataccttcctcagcagcccctttaatttgctttctgcagaaagtaagctaatgccggcagcggagacttcattta

SEQ ID NO: 257332 - DNA, 190 bp, Homo sapiens; identical to SEQ ID NO: 211363
  chr7:5491669-5491859
  hypo

SEQ ID NO: 257333 - DNA, 91 bp, Homo sapiens
  chr7:5521407-5521498
  hypo
accaccacaggttcggcggttcctcggccactctgctcttaaataaggtgatctcatccaggtgcaccagggggacgtcccggatgacgtc

SEQ ID NO: 257334 - DNA, 102 bp, Homo sapiens
  chr7:5521756-5521858
  hypo
ggagcacggcagccgggaacaggccacacgcttctctccaggctcagggggcacccgctccatgccagccacgaggatcagaggccccggaggccaaccctg

SEQ ID NO: 257335 - DNA, 156 bp, Homo sapiens
  chr7:5528281-5528437
  hypo
tctaggtgcacagtcgcagcctcccactggctggagggcctgtgagtggagcccagccgcaagcgcaagcgtatggggggcgaaggcccgaggctcttcccacatctgacaggacagagctagggcggagctgcctgcatccgccacacctgagaa

SEQ ID NO: 257336 - DNA, 69 bp, Homo sapiens
  chr7:5528739-5528808
  hypo
cgtgtttttaaaaccgccatgaaccagggcggaccacgacacccagatgagagccgtgaggacagcact

SEQ ID NO: 257337 - DNA, 336 bp, Homo sapiens
  chr7:5529739-5530075
  hypo
gcaagcagggttgtcggcgcccagtggctcgagacgtcctggctgatggctcttctcgcaactctgtgaacagctggggcctccttcctgtcacctctccccacctgcagggacacgaacactcagggcgttcatgtcctgctgcccccttggccgggcgcacgcctctctcaggagccctgatcactccagcagtcagcccgtcctcctgagaggtcttgaaatgcgtcactccccacatcgcctaccaagctccagctctctccaggaatcgcctcctcctaatttgtgttcaattctaggtgctcacctgacttcctgcgcagcagcagagca

SEQ ID NO: 257338 - DNA, 189 bp, Homo sapiens
  chr7:5530811-5531000
  hypo
gctggtgatttctgcggcccctgaagctgtacgcaacccacatcactcacctgcggagaagcgactgctgcaggctcttgcaggtggcgagggactccccggtgaacaggtggcacatgacaacctgcaggcagcgagccatgaaggccagcacggcatcgggctggagggtgccgctgcgagagacca

SEQ ID NO: 257339 - DNA, 254 bp, Homo sapiens
  chr7:5541327-5541581
  hypo
cagcagggcaccacgccgtaggagggagtgaacagcgtctgcttgagctcccgcacgcggctcagggtggccttgcactcgctgctcagctggctggcgtcgaagccggggctcacgtcgatggccagcgagcgcaggtgctgcagggccgagagcatcttggagaggcgcagggaagtgaggtggcagcccgagaggttcaccttcaccaggctgcggcagcgggccacgtgttccacggtggagccaggcag

SEQ ID NO: 257340 - DNA, 586 bp, Homo sapiens
  chr7:5647833-5648419
  hypo
ggggaagccaggccaggggccgggggcatctctggggtcccaggtgagatgcgggtcgagggagccaggccacggttctccagactcgcgtggaggccacgagcgtcttctggaggagcgggcactgcgcggaccggcagactctggggcgctcaggctccccatctcctgaccttttcctaccttcagttccctcctgtcaggacaggttctggggctcgccggggcagggagccagggcagagggtgcagtttccgctcctgcctgagtcaccttcgctttctcagcgattcttcattcacaagggcgtggcccatcacacgcactcacacacttgtgaacttgcacgcacacacacatatggacctgtgcaaagagccccatgcacaggcaggtacacgtgcatgtaggcgtgcacacagacacgcacagatgcaggcagaccaactcccaggaatctgtctccagcctacagggattcagcactcagggtaccagcctctgtcccgtgcacccccattcccggcagttctcccaggtgggtcgggggccactagggaccccataccccgagggtggctcctc

SEQ ID NO: 257341 - DNA, 32 bp, Homo sapiens
  chr7:5655102-5655134
  hypo
gcccagctgagcagcgccgtccaggtctgcac

SEQ ID NO: 257342 - DNA, 93 bp, Homo sapiens
  chr7:5655367-5655460
  hypo
tctgccctccctgccgtcctcggccaagcacttttcctgtctcccctccccagttctcacagcccgaggaagatgctgcggcgattcccactt

SEQ ID NO: 257343 - DNA, 153 bp, Homo sapiens
  chr7:5692777-5692930
  hypo
tgctcatcactcatcggcatggatgtcacccttaaaagtttcacttcatatataaacatgcatcttaaataatcaccacctttattctaggatccttcatagtttataaaatgctttcatatgtgccagaaactatcccacatcagtaagaat

SEQ ID NO: 257344 - DNA, 194 bp, Homo sapiens
  chr7:5697663-5697857
  hypo
cagtgtaatgtgcacgcacacacggcaggggagcatgcatgtgcatgcagaggagaaagaggtgagtcagacaaggattctttgcggagctgacatcttcatgggattgactacagtaagtgccatgagtaatcagaacctccatgcaaccaataaagtgcttctcctactgggatctacgtcttagtgaaacg

SEQ ID NO: 257345 - DNA, 138 bp, Homo sapiens
  chr7:5730673-5730811
  hypo
ccagctcacacagccgtgcaaagaactctgttctcacgggttgatctgccatgtttttaagttccgacagaagcacacccatttctctaaccgtgtgtgtagacggtgagcctgggtgatcaacgtgacagcacttct

SEQ ID NO: 257346 - DNA, 301 bp, Homo sapiens
  chr7:5870805-5871106
  hypo
tttcagtgggttgttttttccgtttccatctctggctagtcttgaaggctagacttgcgtaggagagcagacacgaggacatgagccagttctgctgagctgttactgtgtaaggagcagggagcgctggagggtggttgaaccgtgtccagccaggagttgagtgggcggtgggctggtcaccatggttaccgcagtgggccactagcttcacaattccgtagcatcgctttgtgctgcgaatgggaccttccgctcttgatcccctccttgtgttgacggctgctgcttgcatctccag

SEQ ID NO: 257347 - DNA, 222 bp, Homo sapiens
  chr7:5877162-5877384
  hypo
ccccactcccacatagctcccggtccctgctgctgcccccgggctgtgccctgcttgttgcccctcctctgcacgcgcttgtctcaccactggggacaatttgggtcgcccatttgcctatgaacatccgtcatcaccccagcagcatgtgtccagggggcccaccacagctctttatacccagcatccccccttgacctctgccacagtgatgaaagcccc

SEQ ID NO: 257348 - DNA, 159 bp, Homo sapiens
  chr7:5896910-5897069
  hypo
agctgggaaccgttcgtgtttccagcaggcaaagtgaaaaacctcataatacctggggcattgaatcaagtgttcagaggggcgttgccttcgtggtgcggcagaattggccctagactaagggttggtctagttctgcaagtctcaaaaggaccacgc

SEQ ID NO: 257349 - DNA, 94 bp, Homo sapiens; identical to SEQ ID NO: 211368
  chr7:5920562-5920656
  hypo

SEQ ID NO: 257350 - DNA, 83 bp, Homo sapiens
  chr7:5997467-5997550
  hypo
aatatacatgtgttgagaatcggcggagcatccgcctctgggtataagctgctaccccgcccgggcgtacctggatgcccctc

SEQ ID NO: 257351 - DNA, 141 bp, Homo sapiens
  chr7:6034953-6035094
  hypo
cactgcgcccggacagaaaagtcttcagttgaaacatctgaagctgggggccatctgcggtagacttctgtaaatgcacaaaataagataatgttaaagccatgtttctcaaagtcccgagctccacgtaaactgcctatt

SEQ ID NO: 257352 - DNA, 125 bp, Homo sapiens
  chr7:6054904-6055029
  hypo
tgtaaccaacataatccaagcggatgagcccacgactttaaccaccaatgcgctggacttgaattcagtgcttgggaaggtaggttcgttttgaaagctgaaacgttagtaggtactgagtggtt

SEQ ID NO: 257353 - DNA, 208 bp, Homo sapiens
  chr7:6058647-6058855
  hypo
agaaatgtaaacaaacgtgaagatgagcatgaaatcccaactgcgtaacattaattgtggaacaaacagactgtactgctggaataatttcacagccgcctccagcgtggggagtgtctgcttcaatctgcttcagacaccctgtgacgctaatcatctcggtgtgagcagctaattcatctctccaggaaattgcatgttgcagtca

SEQ ID NO: 257354 - DNA, 41 bp, Homo sapiens; identical to SEQ ID NO: 211369
  chr7:6059658-6059699
  hypo

SEQ ID NO: 257355 - DNA, 335 bp, Homo sapiens
  chr7:6060509-6060844
  hypo
tgtttatgatcaggcgagctcttacctataaaactgctaacacctgagacttaacgggaaaagataaacacagctgctgatcttttggttgtacaacgtctggacaagaacgctttttctggattaattccattgatgccttgtccttgaagtcaggatgtaccttgccagtaaggtacacctttttaaagttcttcaatgctgcaggcactcagagccccacgagttaacaccaagggcgtcaaagtcgtctacttgcccccaggctcattacacacagtactctatgaaattgtcagtgctatgaaagagaaccctggctgggcatggtggcg

SEQ ID NO: 257356 - DNA, 151 bp, Homo sapiens
  chr7:6068150-6068301
  hypo
gggattacaggcgtgagccactgcacccaaccctgtattgttatttaagactgcagaataagttgaatgaaagggcagaaagcaacaaatactaccttggcatcatactcagatccttccaactgttcgggtgaagcgtacagacaagtac

SEQ ID NO: 257357 - DNA, 185 bp, Homo sapiens; identical to SEQ ID NO: 211373
  chr7:6076894-6077079
  hypo

SEQ ID NO: 257358 - DNA, 240 bp, Homo sapiens
  chr7:6099499-6099739
  hypo
gggcgacagagcaagactcactctcaaaaaaaaaaaaaaacgggagatgccaactacattccaaaacgcgcagtgaatccaacctaacagaaattcctcttagaatttacaactgaaatgttttccttaaaaaaaaaaaaaaaaaaaatttaggttgagggatacaggtgcaggttcgttttccaaactaaaaccccccgccctggccacactccatctactatgggttgaaaccctcag

SEQ ID NO: 257359 - DNA, 142 bp, Homo sapiens
  chr7:6124191-6124333
  hypo
tccacatcgctgcccgcatcaccacgctgcggcatctgctgttgcatctgcgatccacaaggcctacaccattcgccatcgcacctggctgtttgttgcagatatttctcaggtctcttttacgccctgctacactcctcac

SEQ ID NO: 257360 - DNA, 100 bp, Homo sapiens
  chr7:6124621-6124721
  hypo
ttacaggtgcgagccaccgcacccagccaaggactcttaagtgtaactgatccaccctacttttctccctggcatgaacgactgtgcccagccttgtttt

SEQ ID NO: 257361 - DNA, 31 bp, Homo sapiens
  chr7:6143253-6143284
  hypo
ttgggcggtggctccggagtgtaatcccagc

SEQ ID NO: 257362 - DNA, 463 bp, Homo sapiens
  chr7:6188605-6189068
  hypo
aattcaggtatgtgaggagacgctgggaaggccacacgtgatctgttaactgactttcacgcctgcgcctccacgggggtgcagcagccatgggggaacctgcagcgagtctcactgcgtgaggagaatgtggagacgttgtggggcagtggtggggtcatggctgagtgagtggcggctgaagcagcccctactctccgcccacgtgaccgtctcctttgctccgaggcgagggtgattcctccttcctggcactctgcatcagcgagctcccaggaaacccaaccaggtagcaagtgtgtgactccatgccacaggtcctgctgatttcgatcagatctgggacagaacgagtttggtcggaggattgttttctgtgaaacatgtatgtcctgtttgttgatttattgccagaaaactagggcctgtggaaagtatgcgcgggtaggagggattgagaaaa

SEQ ID NO: 257363 - DNA, 217 bp, Homo sapiens
  chr7:6193772-6193989
  hypo
cggaggagccctgcgagcagccactccttgttcaccccagcggggaccacgcccgggacgctcaggacccatcccagagcttgggcgcacccgaggccgcagagcggccgccagctcctgtgctggacatggccccggccggtcacccggaaggggacgctgagcctagccccggcgagagggtcgaggacgccgcggcgccgaaagccccaggccc

SEQ ID NO: 257364 - DNA, 238 bp, Homo sapiens
  chr7:6204760-6204998
  hypo
ggctttggcagcccggccctctggggtttctggagacagaaggtccactcttgcacacggaagcatccatgttccagaccatcccccgccctccaaccggcacgagaagacgggcctggccccgcccccgaggccccactcacttgatggatttcatccactcctccttctcctccgggctcggggctgagatccggtacaccacatggttcccctctaccacgcggccgtcggcctc

SEQ ID NO: 257365 - DNA, 532 bp, Homo sapiens
  chr7:6207763-6208295
  hypo
cgttagcaggcaggcgcgtacgtgcacacacaggtccacatgcacacactttctgtatggcagctcggattgggccacctcctaggattttttttttttttttttttctggtgattgattcaagactcgaagtcttaagttaccaacaatcgtaagccacgcctgtgtacacagcagggctcctacgctctggcaaagcatccaggcctttttaagaccacctgttctaaaagcaaatctacaataagaatgcaaccaagccaggccgcactccccgctgagcacacgcctggaagcacgttctagatcctgcacccatctcgtctgcctccagccagggccctggctcgccagcctttggtctcgaactttgtttctgagaacacagcagacatacagggtgctgggagaggacaaggaagccagcccctagagcagcaggtgctcaccgggccgcccaccacactgaggccacgccagctggaccagcccctccagggcccctgcgcttggcacccggcgcccagccagc

SEQ ID NO: 257366 - DNA, 199 bp, Homo sapiens
  chr7:6222704-6222903
  hypo
ccacccaccgaggacgctgcctgttttcacggactaagtgctccctcttgcttttcccacctggagacacaatcactgctagacacaaggtcaggagagcgtgaccagtctcgacgtccctcccacagtcctgttccctgaatgtacctcctctgcactcggggaactctgaagctgctcttgccgcccccggcagttc

SEQ ID NO: 257367 - DNA, 44 bp, Homo sapiens; identical to SEQ ID NO: 211375
  chr7:6229682-6229726
  hypo

SEQ ID NO: 257368 - DNA, 147 bp, Homo sapiens
  chr7:6235848-6235995
  hypo
gagtggaatgaatgcgcaccacacttagcgttgaaggagaagaaacacaaagaaatcgagatcaagagataacgtgagaagtaggaaagaatgaaagccaataaagaatttcaacaggcagaaaaccaacatcgaatgcccagagag

SEQ ID NO: 257369 - DNA, 41 bp, Homo sapiens
  chr7:6295662-6295703
  hypo
ggattacaggcatgagccattgcgcccggccaacctttaat

SEQ ID NO: 257370 - DNA, 82 bp, Homo sapiens; identical to SEQ ID NO: 211376
  chr7:6308101-6308183
  hypo

SEQ ID NO: 257371 - DNA, 283 bp, Homo sapiens
  chr7:6386234-6386517
  hypo
ctcctgagcttaagcgacgcagacaccttggcctcccaaagtgttgggattacttacaggagtgagctactgtgcccagccatcttaactcaatttggatcaacagccggtgttaggtttcatgttaattaccatcacctgtgtcaggcaccagccacctgaagacctgctactgggacaatcatactttgatatggccaaaccgacgttagaaagggacggcacctgcagtgtggtggttctactgctcagactggttcattctgcacgccagggagcaacc

SEQ ID NO: 257372 - DNA, 94 bp, Homo sapiens
  chr7:6405541-6405635
  hypo
gcagaatttgggttgacatacggctgttcgctgtatatttctttcaacttttcggtgcatttgaaaatttgtaggccgggtacagtggctcatg

SEQ ID NO: 257373 - DNA, 160 bp, Homo sapiens; identical to SEQ ID NO: 211377
  chr7:6432515-6432675
  hypo

SEQ ID NO: 257374 - DNA, 63 bp, Homo sapiens
  chr7:6438069-6438132
  hypo
ctctgtcttcaccatcgttgaacttaacgcctgcttttgaccaggtagcgtggagtgtttcag

SEQ ID NO: 257375 - DNA, 250 bp, Homo sapiens
  chr7:6442403-6442653
  hypo
actacactgcattgttgtgccgagaacaccgagcactgaactttgcaaagaccttcgtctttgagaagacggtagcttctgcagttaggaggtgcagacacttgctctcctatgtagttctcagatgcgtaaagcagaacagcctcccgaatgaagcgttgccattgaactcaccagtgagttagcagcacgtgttcccgacataacattgtactgtaatggagtgagcgtagcagctcagctctttgga

SEQ ID NO: 257376 - DNA, 208 bp, Homo sapiens
  chr7:6443274-6443482
  hypo
tcactgtcttgccagattaccgacactgtcacttgaccaatactgaccctctttacctcgcccacgcggacacacgcctcctgtagtcgctttgcctattgatgttcctttgggtctgtgaggttctgtaaactgtgctagtgctgacgatgttctgtacaacttaactcactggcgagaatacagcgtgggacccttcagccactac

SEQ ID NO: 257377 - DNA, 507 bp, Homo sapiens
  chr7:6443684-6444191
  hypo
ggagacagtcattttcaatgcgtgtctccacacaggagggacagggagtgccacctccaggggagaactgggtgagcccaaatacggcaggagtggaggtgacattcatgtttggacctgtcgaacagtggcgaagctctgagggagaagcgcctatcggggtgtgtgtgcacatcctggcccagagctaggggctgaagatggagatgttgggaccctagactggccctggaagagtagaggttggtgaaccacatgcccttaagatcctttccagaggctgagtgcgtggcttacgcctctaagcccgacgctttgggaggctgacacaggaggagcgcttaagcccaggagttctagaccagcctggacaagaaagagacctacccaaaaaaaaaatgcaagagcctgaacttgtactacataaaggttcatgttagaattcgttttcttaatattcctttttattgctttgaagattgtttttgagtttttgtttttttttta

SEQ ID NO: 257378 - DNA, 191 bp, Homo sapiens; identical to SEQ ID NO: 211382
  chr7:6448757-6448948
  hypo

SEQ ID NO: 257379 - DNA, 69 bp, Homo sapiens
  chr7:6449561-6449630
  hypo
tctggcatgtggtcggtgagcatcttcggacctatgagtattttgctgaattccgcttcgtgtgaccac

SEQ ID NO: 257380 - DNA, 99 bp, Homo sapiens
  chr7:6450104-6450203
  hypo
gccctttgacccagaaaccccgcttggaagactccagcaaagatgcaccggcgagctgtgctgggtggcagccacctcggctcaggacaaggctctatg

SEQ ID NO: 257381 - DNA, 88 bp, Homo sapiens; identical to SEQ ID NO: 211383
  chr7:6484556-6484644
  hypo

SEQ ID NO: 257382 - DNA, 177 bp, Homo sapiens; identical to SEQ ID NO: 211384
  chr7:6500829-6501006
  hypo

SEQ ID NO: 257383 - DNA, 44 bp, Homo sapiens
  chr7:6524568-6524612
  hypo
aaattaggtagaaaagtgaacgtctgaccgggcgcggtggctca

SEQ ID NO: 257384 - DNA, 180 bp, Homo sapiens
  chr7:6524912-6525092
  hypo
tgaatatttctacgggatggggacgtcacaagaaattgcaaacaaaaaaagctgacaaacaggatctgctacataatttgcgggacggagtgcaaaacaaaaacgcacagttcgcagttcaaaaagcagggcgggggcgaggacctggtgcggtggctcatgcctgtagtcccaacactt

SEQ ID NO: 257385 - DNA, 261 bp, Homo sapiens
  chr7:6545733-6545994
  hypo
ctcctggggtcaatcgagactcaagacttggaacactactcgtgcagaagccagcaaggtgggactgcagcgggggcatgaaggagctgtgaagaggctagagccaagtaaggggctaccggaggtggctcaggggtctggctctgtcatcaggtctccttggagagcggtgagttcaccagggctgccctgggcagagtgagctggtgctgagagaactgcaactgtgacagcctaggggccagacgctggacacgtggc

SEQ ID NO: 257386 - DNA, 202 bp, Homo sapiens
  chr7:6560221-6560423
  hypo
agctctcgagggcccggcagaccccatagcgctcaggaggtgtgagtaggtgctccagctgctggctgaaggtcctcccttggacccggatgctggacggcaggatctccgccacccactgcagggaggtgagcgccgacgacgggttgggtgagtccagagaatcggagtctgctgggaccacaggcgggagaggcatgag

SEQ ID NO: 257387 - DNA, 126 bp, Homo sapiens
  chr7:6597055-6597181
  hypo
gactgcaatgaccacggagttcagagcacagtgctcccgggacgcccaaggacactcgcttgtggccggccctctgctgctcagggccttggcatcagttaccgatgtgcccgcagtgacagctgg

SEQ ID NO: 257388 - DNA, 41 bp, Homo sapiens; identical to SEQ ID NO: 211385
  chr7:6619099-6619140
  hypo

SEQ ID NO: 257389 - DNA, 332 bp, Homo sapiens; identical to SEQ ID NO: 211386
  chr7:6644210-6644542
  hypo

SEQ ID NO: 257390 - DNA, 203 bp, Homo sapiens; identical to SEQ ID NO: 211387
  chr7:6645603-6645806
  hypo

SEQ ID NO: 257391 - DNA, 52 bp, Homo sapiens
  chr7:6646146-6646198
  hypo
agagaccagtgcaggcgctgcagacacaggacccagccggagcaagatcctg

SEQ ID NO: 257392 - DNA, 1290 bp, Homo sapiens; identical to SEQ ID NO: 211388
  chr7:6647171-6648461
  hypo

SEQ ID NO: 257393 - DNA, 42 bp, Homo sapiens
  chr7:6650217-6650259
  hypo
cacacttccctgtcctggcacggttgatggcatttattgggt

SEQ ID NO: 257394 - DNA, 101 bp, Homo sapiens
  chr7:6661790-6661891
  hypo
cggtggagctaggcgcccagcagcaggaggtgcagctggagctgacccccgtgcagccggagctgcagctggaactggtgccagccgcagggggcggcgga

SEQ ID NO: 257395 - DNA, 133 bp, Homo sapiens
  chr7:6662671-6662804
  hypo
ccgggttcatgggcgctggaggcgtcctggaatatccctggagtaaaaggcttccaccatcatcatcatcatcatcttccggattccctgagaaaataccaggttcacagatttcaccgccagaaaaatccat

SEQ ID NO: 257396 - DNA, 173 bp, Homo sapiens; identical to SEQ ID NO: 211389
  chr7:6682659-6682832
  hypo

SEQ ID NO: 257397 - DNA, 132 bp, Homo sapiens
  chr7:6683068-6683200
  hypo
ccagtgcccacgctcggtttagttgctgctgcttgtccactcgggtgtgggccctccatggctgacatggccattgcactggcttgagccagactgcatgaagagggggactgggggcggggctccctgtct

SEQ ID NO: 257398 - DNA, 190 bp, Homo sapiens; identical to SEQ ID NO: 211390
  chr7:6686203-6686393
  hypo

SEQ ID NO: 257399 - DNA, 186 bp, Homo sapiens; identical to SEQ ID NO: 211391
  chr7:6692859-6693045
  hypo

SEQ ID NO: 257400 - DNA, 172 bp, Homo sapiens; identical to SEQ ID NO: 211392
  chr7:6694964-6695136
  hypo

SEQ ID NO: 257401 - DNA, 217 bp, Homo sapiens
  chr7:7097447-7097664
  hypo
aatccaggggcacacccctgcgatattgtgtgtaaagtccgggggtggagagaaggtgtacacacccctgcgattttgtccataatatccagaaagggagacgatgatgtatctctccatatcgcaggaggtgtacaccctactgcgatattgtccataataaccagggggtaaggatgctgttactccccatatcgcaggggctgtacaccctcca

SEQ ID NO: 257402 - DNA, 376 bp, Homo sapiens
  chr7:7097928-7098304
  hypo
accaatcatatcgccgtgtgtgtgtgcccccctgcgatattcttcgggatattcagtggtggagaggataatattactctctgtatcacggggggtgtacaccacactgacatattgttacccccagcgatatgaggagtagtagcaaccccctttccccccccggctactacgatccacatcgcagggggctgcacacaccccaccgtgatgcggggagtagtagcaaccccctctccccacctgactattacgatccacggtggacctacacagtgtttatgatattgtgagtaaatcatgtccccctcagcaaattacgaactatttcacagacgggtgtacaacctctgccgtattgggaacaatatcatcc

SEQ ID NO: 257403 - DNA, 155 bp, Homo sapiens
  chr7:7099524-7099679
  hypo
atatgaaacaatatgacaggcggggtggacacacctcgccatatagggagtaatatcaccctgtctccctccctggatattacgatccacgtggacacaccacgttgtttacgatattgtgagtaatgtcatctccccctctagaaattacgaac

SEQ ID NO: 257404 - DNA, 164 bp, Homo sapiens
  chr7:7102868-7103032
  hypo
tgttcctaatatcccggggggagtcagtgatattggcaatatcacagggtgtgtacaccacacctgttatattgttttttttttccggcaatgaagaaattgatactattgtcaaaacagaatgcgcggtacaccccgcatgagatattgtttctaatatccat

SEQ ID NO: 257405 - DNA, 43 bp, Homo sapiens
  chr7:7103152-7103195
  hypo
accgcccctgtgatatcgttctcaatatcgatgggggtagaaa

SEQ ID NO: 257406 - DNA, 114 bp, Homo sapiens
  chr7:7109415-7109529
  hypo
aaaaacggagatgacgttaccctagtatcacaaagggtgtatccccccctgtatattgttcgtaatatgcaaggggtgagatgacgttactcccagtatcgtagggggtgtacc

SEQ ID NO: 257407 - DNA, 90 bp, Homo sapiens
  chr7:7109912-7110002
  hypo
aaggggggagacgacgtcactcccagtgtcgcagggggtgtaccccttctgtgatactgttcttaatatttaaggggggagattatgtgc

SEQ ID NO: 257408 - DNA, 49 bp, Homo sapiens
  chr7:7188993-7189042
  hypo
tgtgtgtgtgcgtgcgtgtatgtgcgcacatgggcgcaaatgcctacca

SEQ ID NO: 257409 - DNA, 36 bp, Homo sapiens; identical to SEQ ID NO: 211393
  chr7:7249348-7249384
  hypo

SEQ ID NO: 257410 - DNA, 32 bp, Homo sapiens
  chr7:7284846-7284878
  hypo
agctaagtaatttcttttttcggagactgtct

SEQ ID NO: 257411 - DNA, 216 bp, Homo sapiens
  chr7:7605217-7605433
  hypo
aacttggaatcctctttcaccgtcattcacttggtcagtcaccaagctctgttcatcccgccttctaagtattccccagggcccccacttctctccatgcccactctccgtgccactggtaacctgcgtttctatcatccctcattctgatactctatccctccagctctctgcgcaaaaactgatcatactggccgggcacagtggctcatgcct

SEQ ID NO: 257412 - DNA, 246 bp, Homo sapiens
  chr7:7605822-7606068
  hypo
cttaatctctccccacttcctctgctcattcatccatacctactgcctcctcactgctatgtcctctctcctgacccggcacttgctctttcccagtcctagaaggctcttctcttccagttcccactgcccttttccctttcctggctaatcccatactcatccttcttgtctcaacctagtggtccttaaggaagctttgctgacccccgacaccgagcgggcgtccctcctgtgtagcactgt

SEQ ID NO: 257413 - DNA, 100 bp, Homo sapiens; identical to SEQ ID NO: 211395
  chr7:7612731-7612831
  hypo

SEQ ID NO: 257414 - DNA, 179 bp, Homo sapiens; identical to SEQ ID NO: 211396
  chr7:7613124-7613303
  hypo

SEQ ID NO: 257415 - DNA, 165 bp, Homo sapiens; identical to SEQ ID NO: 73410
  chr7:7621497-7621662
  hypo

SEQ ID NO: 257416 - DNA, 89 bp, Homo sapiens
  chr7:7666892-7666981
  hypo
ggattaaataaattagggaacgtttggtacaatgggctattttgcaaccattaaagacaatgagattattctatatgtcagttgccaag

SEQ ID NO: 257417 - DNA, 86 bp, Homo sapiens
  chr7:7799055-7799141
  hypo
attccataagagtccggttacatcgagcattttgcgccctctttaaacttgactgagaatttacaaggccacggggcttacagcat

SEQ ID NO: 257418 - DNA, 81 bp, Homo sapiens; identical to SEQ ID NO: 211397
  chr7:7807037-7807118
  hypo

SEQ ID NO: 257419 - DNA, 82 bp, Homo sapiens
  chr7:7822313-7822395
  hypo
ctgtgcctacaagccgaaacaatagcagaatgtcttgtgtataacctctctcttttttttttttttttttttgagacggagt

SEQ ID NO: 257420 - DNA, 59 bp, Homo sapiens
  chr7:7839194-7839253
  hypo
aaataatatttcttcgagtaaaggactttttatagtgcgttatacgtattttcttagaa

SEQ ID NO: 257421 - DNA, 97 bp, Homo sapiens
  chr7:7880864-7880961
  hypo
actttagtgactcccgaagatgtggttccactgaagaatgcaaggaattatagctacgaactgtcaatataacaagtgatctttttttttttttttt

SEQ ID NO: 257422 - DNA, 100 bp, Homo sapiens
  chr7:7935069-7935169
  hypo
ttattcaaacttcgcgttttaattgtttggaattcttagacagagtaggtggaatttcatcctttgtatgttttaaggagagcttcgctcctctctttac

SEQ ID NO: 257423 - DNA, 90 bp, Homo sapiens
  chr7:7998934-7999024
  hypo
gcttatgggtatatcgataggaatattttctcttttcttttttctttttttttgagacagagtccaatggtgtgatcttggctaaccaca

SEQ ID NO: 257424 - DNA, 36 bp, Homo sapiens; identical to SEQ ID NO: 211398
  chr7:8954796-8954832
  hypo

SEQ ID NO: 257425 - DNA, 42 bp, Homo sapiens
  chr7:9707913-9707955
  hypo
actatttatgttcaatatatcgttgtattatacaagacctaa

SEQ ID NO: 257426 - DNA, 704 bp, Homo sapiens
  chr7:9766087-9766791
  hypo
aatcaaactcaaggtgcccacgggcctccggggccaggcgcttctgaaagtgtggggccgcggctggcaggcggaggaggggctcctctttcacaaccagacctcggtgaccgtggacggccggggcgcttctgtattcatccagacggacaagcctgtgtacagaccccagcaccgagtgctcataagcatcttcaccgtctctccaaatctgaggcctgtcaacgagaagctggaagccaacatcctggacccccgaggctctcggatgatagagtggagacacttgaagccgttctgctgcggcatcaccaacatgagcttccccttgtccgaccagcctgtgttgggagaatggttcatttttgttgaaatgcaaggccacgcgtacaacaagtcttttgaagttcagaagtatgtgttgcccaagttcgagcttctgattgacccgccccggtatatccaagacctggacgcctgtgagacaggcactgtgcgggccaggtatacctttgggaaacctgtggctggtgccttaacgatcaacatgactgttaatggtgtagggtactacagccacgaggtgggacgccccgtcctcagaacatccaagatcctcggctcccgggacttcgacatctgcgtgagggacatgatcccagcggacgtccctgagcacttccggggcagggtcagcatctggg

SEQ ID NO: 257427 - DNA, 284 bp, Homo sapiens
  chr7:10516004-10516288
  hypo
tgtttagatatgtgatttttcgccaccggctccagcacccctgggccgtgcaacccggtccctacaggtgaggatccagctccacccctgctcgcctgccaggcggtggagacctcgaaatgaagacagcatgagttctgcaatactgggcctgccgcctaccctccctgagcctcagtttgctggcccgtgaagtgggcatagtcacgaagcgtctcatctccgtcgggctcagtgtcaggtgccgttgcccctttcagaccgctgtttaacaactttggaca

SEQ ID NO: 257428 - DNA, 32 bp, Homo sapiens
  chr7:11281035-11281067
  hypo
ggcgcggtggctcacgcctgtaatcccagcac

SEQ ID NO: 257429 - DNA, 136 bp, Homo sapiens
  chr7:12510651-12510787
  hypo
ctttgctggtgcgcgacggcgtgttgctgttcctcactgcctctcgcggcgtccgttcgcccctcgccttcctcaggttcaggctgagcgccgcgtgggccgcagccagagggggcgtagcggaacgggagcgggc

SEQ ID NO: 257430 - DNA, 99 bp, Homo sapiens
  chr7:12750831-12750930
  hypo
cttttcttatggcttagaagttcacagagttcataggcaattcatgtaaactcaaaatgtttgaatagccacacgaacgacttcagcttggcagtccct

SEQ ID NO: 257431 - DNA, 32 bp, Homo sapiens; identical to SEQ ID NO: 211400
  chr7:12763983-12764015
  hypo

SEQ ID NO: 257432 - DNA, 44 bp, Homo sapiens; identical to SEQ ID NO: 211401
  chr7:12795792-12795836
  hypo

SEQ ID NO: 257433 - DNA, 34 bp, Homo sapiens
  chr7:13761024-13761058
  hypo
cattaagagaaaacacagggcgggcgcggtggct

SEQ ID NO: 257434 - DNA, 31 bp, Homo sapiens
  chr7:15128782-15128813
  hypo
caccgtgcccggccagatgtgtacacatctt

SEQ ID NO: 257435 - DNA, 89 bp, Homo sapiens
  chr7:15436141-15436230
  hypo
acattgcaaagagcaaaagaacaaagctaccacaacgaggaaaaggacaacagcttgccgctccttgcttggatcgccagcttttattc

SEQ ID NO: 257436 - DNA, 78 bp, Homo sapiens
  chr7:16189282-16189360
  hypo
ttacagttaagttctaattacgtctatataattgataaaaactattggccaggagcgggggctcacgcctgtaatccc

SEQ ID NO: 257437 - DNA, 37 bp, Homo sapiens
  chr7:16256011-16256048
  hypo
tagtaaacactcagagaaaacgaggttgaaaaaccaa

SEQ ID NO: 257438 - DNA, 88 bp, Homo sapiens
  chr7:16313198-16313286
  hypo
aagccacttccactcgtcagtaaatcctccacattcaccacccttcaattaactgatgcagcctgattcctcccggacaccgaacaag

SEQ ID NO: 257439 - DNA, 38 bp, Homo sapiens; identical to SEQ ID NO: 211402
  chr7:16370912-16370950
  hypo

SEQ ID NO: 257440 - DNA, 131 bp, Homo sapiens; identical to SEQ ID NO: 211403
  chr7:16436345-16436476
  hypo

SEQ ID NO: 257441 - DNA, 135 bp, Homo sapiens; identical to SEQ ID NO: 211404
  chr7:16438008-16438143
  hypo

SEQ ID NO: 257442 - DNA, 161 bp, Homo sapiens
  chr7:16439151-16439312
  hypo
cacgtgactgacacgagattgacatgaatgacatgacacgtttgtgacatgtgacaagcgacttacacgattggcatgtgtccaacacgtgactgacccgatcgacacatgatcgacatgtaatcaacgtgtgacacgtggccgacgcatgaccagtgaca

SEQ ID NO: 257443 - DNA, 481 bp, Homo sapiens
  chr7:16439979-16440460
  hypo
cacatgaccaacacgtttgtgacacactgacctggttgacaggcctggcacatgactaacaggtgactgacatatgatcgacttgtgatcaacacttgtgtgacacatgaccgacacctgattgacccatgaccaacatgtataacacccgaacgacacgactggcacatgattgacactactgacacgtcgacacgatcgacacttgactgacacatttgtgacacacaattgacacgattggcatgtgatcaacacaaccgacatgatgtgatcgagtcatttttgacacgtgactgacacgtgtccataaccaacttgtgagatacataaccaactcgtgtatgacacgttacacgtttgtgacacgtgaccaacacctgtgacgtggcacatgaccaatatgtgtgatggaagacgtggacacatgcccaacatatgcccaacacatgcctgacacgtgtgtgacatttataaaagt

SEQ ID NO: 257444 - DNA, 182 bp, Homo sapiens
  chr7:16844194-16844376
  hypo
tatggggctttgctttagcccgtgggaaagaaagctttagatggtgactgagacgaaaatccctggaccctgtcccaggcttgaaaaatcctaggattcacctactcttggaaattttgtttcgcaaaagagaaagcatttctctgaactaactcgggaacgtcacactgtgccagctctag

SEQ ID NO: 257445 - DNA, 337 bp, Homo sapiens
  chr7:17214726-17215063
  hypo
ggaagcatcatctgcgttgtgagaccttccttctgatgtttttctgcagctggtctgttagctcctgaggcttacgctgttttcttgttcattgtgtgtaattttcttatatccccttagcacagccttgacaagtagtaattgctttacaagtgtttgttttatataactgaattgcagtgaatagcggggcttagcctgagcttcagctgattctttagacagaaaactaagtatttcaagccctgcgtgtaaatcccaggtgaggctattttggtcaggtgaatgttttagcacttgtcagctcatagcgtggaggtagcggccagctttccct

SEQ ID NO: 257446 - DNA, 36 bp, Homo sapiens
  chr7:17413227-17413263
  hypo
gctgggattacaggtgtgagccgccgcgcccaaccg

SEQ ID NO: 257447 - DNA, 33 bp, Homo sapiens
  chr7:18041863-18041896
  hypo
ggcatgagccgccacacccggcatgaacgttct

SEQ ID NO: 257448 - DNA, 39 bp, Homo sapiens; identical to SEQ ID NO: 211409
  chr7:18927745-18927784
  hypo

SEQ ID NO: 257449 - DNA, 40 bp, Homo sapiens
  chr7:19379034-19379074
  hypo
cttaccattcaaattgtctgcgagccaaaattttcatgga

SEQ ID NO: 257450 - DNA, 68 bp, Homo sapiens
  chr7:19740986-19741054
  hypo
gggattacagggaacggagggaagaagggagaaatgaataggtggagcacaagcggtttttaggagag

SEQ ID NO: 257451 - DNA, 185 bp, Homo sapiens; identical to SEQ ID NO: 211411
  chr7:20628397-20628582
  hypo

SEQ ID NO: 257452 - DNA, 38 bp, Homo sapiens
  chr7:20719883-20719921
  hypo
tgctaagagtgacttgaggccgagcgcggtggtcacgc

SEQ ID NO: 257453 - DNA, 120 bp, Homo sapiens; identical to SEQ ID NO: 211418
  chr7:20855065-20855185
  hypo

SEQ ID NO: 257454 - DNA, 42 bp, Homo sapiens
  chr7:20930362-20930404
  hypo
attattccttaatcttgcatcggtgatttattcaagtgcctt

SEQ ID NO: 257455 - DNA, 37 bp, Homo sapiens; identical to SEQ ID NO: 211419
  chr7:21409421-21409458
  hypo

SEQ ID NO: 257456 - DNA, 37 bp, Homo sapiens; identical to SEQ ID NO: 211420
  chr7:21501380-21501417
  hypo

SEQ ID NO: 257457 - DNA, 91 bp, Homo sapiens
  chr7:21924279-21924370
  hypo
atgcactgactcatcggctctttataaaaaccctatgaggtatgcagagctgacgctgttattcccttttctagaccgagatgctgaaaca

SEQ ID NO: 257458 - DNA, 31 bp, Homo sapiens
  chr7:22028252-22028283
  hypo
gcttggaagtgtcacgcgtaatttctgccca

SEQ ID NO: 257459 - DNA, 37 bp, Homo sapiens
  chr7:22083773-22083810
  hypo
ctaaaaaagtaaacttggcccgacacggtggttcacg

SEQ ID NO: 257460 - DNA, 38 bp, Homo sapiens
  chr7:22143965-22144003
  hypo
gggattacaggcgtgagccactgcgcctggccctactt

SEQ ID NO: 257461 - DNA, 160 bp, Homo sapiens
  chr7:22881609-22881769
  hypo
tagagtgaccaaagcaggcaacattgactggagttgtccagggcagattcccaaggcttgcccaacccaagagcgtgtgatcacatctcaggtttcagcagcaaactccagagacgacgtaagactgggaacagttgcatctcagcggtcactgtcctga

SEQ ID NO: 257462 - DNA, 75 bp, Homo sapiens
  chr7:22903374-22903449
  hypo
gtgccagtgttacccgagctctgagaaaccagaggtgctgcctacctcttaggttaaaggcgtccaaatgccctt

SEQ ID NO: 257463 - DNA, 104 bp, Homo sapiens; identical to SEQ ID NO: 211426
  chr7:23211637-23211741
  hypo

SEQ ID NO: 257464 - DNA, 39 bp, Homo sapiens
  chr7:23345800-23345839
  hypo
gaaactcaaaacaagaacgtctcaattaaaaaaaaaaaa

SEQ ID NO: 257465 - DNA, 32 bp, Homo sapiens
  chr7:23525031-23525063
  hypo
aacgtattgttggccgggcacggtggctcacg

SEQ ID NO: 257466 - DNA, 76 bp, Homo sapiens
  chr7:23529548-23529624
  hypo
ccgggattacaggcgtgatctcatttaattattaaatgaaattctaggaagttacggtaaacttatttcaccttct

SEQ ID NO: 257467 - DNA, 40 bp, Homo sapiens; identical to SEQ ID NO: 211429
  chr7:23550217-23550257
  hypo

SEQ ID NO: 257468 - DNA, 42 bp, Homo sapiens; identical to SEQ ID NO: 211430
  chr7:23556807-23556849
  hypo

SEQ ID NO: 257469 - DNA, 37 bp, Homo sapiens
  chr7:23568876-23568913
  hypo
aaattgcttttatggacctacgtatttacttattttt

SEQ ID NO: 257470 - DNA, 36 bp, Homo sapiens
  chr7:23569153-23569189
  hypo
acaggcgtgagccactgcgcccggccagaaacgatt

SEQ ID NO: 257471 - DNA, 83 bp, Homo sapiens
  chr7:23578781-23578864
  hypo
tgctggaattacaggcatgagctaccgcacccagccattttatagatttttaaagctgaggcggagagtagtaaagcaacttg

SEQ ID NO: 257472 - DNA, 642 bp, Homo sapiens
  chr7:23749559-23750201
  hypo
aaaatttaaatccacgtgaacagattaggaaagaccacgaaatcctacgtcacctctaaagtcacagcttgaagccttgcgaaaggaactggccctagaccccaccccggcctataaatcaccagggcgcagcctcagtgcctgggggtcggcagcagccagcgtcaggcggctcccgcacgcttcttcctaggcggcaggccgtggctgccacgtgactcccgctaacaccggatgatggcgcagcgctgtgcacgcaggcgcagtgtggggcccttgcggtcgaagctcacgcggtaagccgctgcacgtgtgctacggcgggcggagggccgaaagtccagtatgtgggtccagggtcactcttctagagcttccgcaacggaaagtgtgaggtcagtagtagtttttgtggtacgtgcagtggtggccgcttcaaggactattttcgtcgctgcttgcgttttaagtctccaatcctgggacgaggcccatttcagggttttctgtcaccttctagccgcccgccaccccagaggggtgccagatgccccagtttttgagtgcatgcaggcaggcgaaagtggctcgaaaagacctccggcctgaatgatctccatgaagacgcggtcacgcagcctc

SEQ ID NO: 257473 - DNA, 149 bp, Homo sapiens
  chr7:24099249-24099398
  hypo
tgtgcagattctctgtgccacgcagctggagacagcctaagactactgagttcccagggggaggggcggctgccatcaccgcagctccgccattgacagagttggggaggctgggcagtatggactagggaggtattccccacagcaca

SEQ ID NO: 257474 - DNA, 37 bp, Homo sapiens
  chr7:24990042-24990079
  hypo
aatacacaaaacatgtaggccgggcgcggtggctcac

SEQ ID NO: 257475 - DNA, 33 bp, Homo sapiens
  chr7:25132427-25132460
  hypo
aaattacttccggccgggcgcggtagtttatgc

SEQ ID NO: 257476 - DNA, 33 bp, Homo sapiens
  chr7:25132700-25132733
  hypo
aagcgatactccgtctcaaaaaaaaaaaaaaaa

SEQ ID NO: 257477 - DNA, 44 bp, Homo sapiens
  chr7:25133413-25133457
  hypo
caaaatgcaaatctttaggccgggcgcggtggctcacgcctgta

SEQ ID NO: 257478 - DNA, 146 bp, Homo sapiens; identical to SEQ ID NO: 211439
  chr7:25158787-25158933
  hypo

SEQ ID NO: 257479 - DNA, 49 bp, Homo sapiens
  chr7:25607208-25607257
  hypo
catagctgtcgtaccgctgtaggcattactcacacgtttgtggcgatgc

SEQ ID NO: 257480 - DNA, 83 bp, Homo sapiens
  chr7:25783409-25783492
  hypo
ggagggaaagggcttattgccgttgataaagaatgctgttcctggaggaggagccaagatggccgaataggaacagctccggt

SEQ ID NO: 257481 - DNA, 128 bp, Homo sapiens
  chr7:26098333-26098461
  hypo
aatacacggaccatcgtgtgagctggcggtgcagaagcataaagctccttggccatcattccgttcacaatcattccgttcacaacagggccatgctgcatctggggaaaggccggtgatcatgtgag

SEQ ID NO: 257482 - DNA, 97 bp, Homo sapiens
  chr7:26198602-26198699
  hypo
ggtggggcttgtaccgcttcttccccaatttactcccgtccattgtgttgtcaggtgcaggtttccaaagcacaccttggttcgtctctctgcgttt

SEQ ID NO: 257483 - DNA, 77 bp, Homo sapiens
  chr7:26217156-26217233
  hypo
cagcgagccaagatcacggcagtagagtccaggctcagcaatggagggagaccgtcgaaaggagggaaggagggagg

SEQ ID NO: 257484 - DNA, 180 bp, Homo sapiens
  chr7:26259534-26259714
  hypo
acaggcgtgaaccaccgcgccctgcccatagactcccttttatccttattctagaagttttgcattttagctccttaaaggagaaaataatatgacactaaaactaatattaaataatctttcatgccaacctttttccttatatgtcaatttctttttttttttttttctttttttgag

SEQ ID NO: 257485 - DNA, 240 bp, Homo sapiens
  chr7:26283743-26283983
  hypo
gtctcgactaatggtttctccgggagcccagttaacagggaaaaattcgcatggcctctcggtttcttcggtccgaaaatccaacgttggtccaagaaggctctggtgtgtgccaggcactcactgatcatctggtcttacggagacgcctctaagccatttgatcccgttccgggaacgaaaatggcagcggtgacggttgctccttttatggtctccctccggctgtccaggacggtc

SEQ ID NO: 257486 - DNA, 36 bp, Homo sapiens; identical to SEQ ID NO: 211445
  chr7:26291675-26291711
  hypo

SEQ ID NO: 257487 - DNA, 33 bp, Homo sapiens
  chr7:26298989-26299022
  hypo
aagcgctgggattacaggcgtgagccaccgcgc

SEQ ID NO: 257488 - DNA, 126 bp, Homo sapiens
  chr7:26417608-26417734
  hypo
agctctctgcatagcggtgtactgggagccctgtgctttcgtttaatttttttttaaacaaaagaaattacagaaaagtgcaaatttaacgtgtgacatttaacattttgccgtggcaggcagcct

SEQ ID NO: 257489 - DNA, 319 bp, Homo sapiens
  chr7:26439682-26440001
  hypo
agaaaagtgaatactgtgtacgcactgtaacaactattccataagtatttttggtgtacactgttcctcagcactcacaggcttcggagtaggggctcccggagtatgcattgacacgatgcgctgcaaatgatccgggcgtggggaagtccccgagtgtgcattgattccacacacggccacggctcctacagggcttttatggtgcagctcgccaatgatccgtgtgttaaagactccccaaatacacattgacacgatagactggagttgtttgggtctatcgtggcaatgatccggggataatggcagtgtctta

SEQ ID NO: 257490 - DNA, 142 bp, Homo sapiens
  chr7:26667940-26668082
  hypo
agcaaagtggtacttcaccacggggcagattaaaatatgcattttctcctaattgagcatagtgaaatcagccggcggtcctgtcacaagtgcaggaatgaattgtcacagcacgacacacacgactcgacagagcatctat

SEQ ID NO: 257491 - DNA, 95 bp, Homo sapiens
  chr7:26687816-26687911
  hypo
tgggagatcagttgcgccaacccttaaccttacagaggaggaaacttagtctcacggggatcaagaggctggcccaaggtcgttctgcgctgtgc

SEQ ID NO: 257492 - DNA, 44 bp, Homo sapiens
  chr7:26753490-26753534
  hypo
tacaggcatgagccatcgcgcccgacctaagatgcttatttgta

SEQ ID NO: 257493 - DNA, 87 bp, Homo sapiens; identical to SEQ ID NO: 211448
  chr7:27032268-27032355
  hypo

SEQ ID NO: 257494 - DNA, 35 bp, Homo sapiens
  chr7:27336400-27336435
  hypo
ctggttgacagaccgagactgtgtcttagaaaaaa

SEQ ID NO: 257495 - DNA, 38 bp, Homo sapiens
  chr7:27514343-27514381
  hypo
acatatttgggaggccgaggcgggcggatcacgaggtc

SEQ ID NO: 257496 - DNA, 531 bp, Homo sapiens
  chr7:27531192-27531723
  hypo
gagccatggggttggagtgccggctccagcagagttgtctgagcagcggcctgaggtgctgggtctgacatgattgttggccgtggaaggcctcgggccatcctgagctcagatcttggctgccggccgctagggcggctgcttctgcagcagggctagggtgtcccgcttctcaatggagcgcagctgctgctgctttgcccgcttgagcttggcagggtttcggatcacttggacgatctccaccttccgctcgttctccaggcggcatttcaggttctccgcccgacgctgtttcttctcctggcggcgcctctcctactcctcctccaggtgacgggcaaagtccttggccagcttcctctcctgcttcatcttccgctgccacgatatacgcaggggcttgtcctaaagcatctgagagaatcttttcttggagcggtccttccacacttgccccgacttgggcttccccttcgggattacaggaagctcctcctccttcagcttcttggacgctggggcctggga

SEQ ID NO: 257497 - DNA, 71 bp, Homo sapiens
  chr7:27591612-27591683
  hypo
ttaccagcgacattcgcagaaaaaggcgacagctgggacagaaagctgctactcaacgaacaatataatcc

SEQ ID NO: 257498 - DNA, 129 bp, Homo sapiens
  chr7:27651038-27651167
  hypo
tgtctagcattcattatagacgagagctgatcaagttggaaccaacactgtggtagcagacccactgcgtgtgtgcgcgcacacacacacacccacccacccacacacgtgtatgtatccaaaatggca

SEQ ID NO: 257499 - DNA, 188 bp, Homo sapiens
  chr7:27679515-27679703
  hypo
tttatttccctaataatccacgtacagtcaagcaaaagagatacgttctgagaaatgcgttgtgagaaaagaaaaataacttgaagtagtctgaactatgtgaggtttgcaaaatttatcaggcccagagagacgtaagcataggactttggtcaccgccaccctccgtgcccagtggcaattgctta

SEQ ID NO: 257500 - DNA, 180 bp, Homo sapiens
  chr7:27686737-27686917
  hypo
ctttggaccattatgaaataaaataagggttacctgaaaataagcacgcgatatcacaacacccgatcactgaggcggctagtaagtgactaatgggccagggagtgtctgcagcatggagacgctggacaaagggatgattcacatccaggttgggacagagctggacagcacaagatt

SEQ ID NO: 257501 - DNA, 41 bp, Homo sapiens
  chr7:27782388-27782429
  hypo
acgttcttaaattgtagaccgctgtttatagttctcactgc

SEQ ID NO: 257502 - DNA, 167 bp, Homo sapiens; identical to SEQ ID NO: 211456
  chr7:27831634-27831801
  hypo

SEQ ID NO: 257503 - DNA, 225 bp, Homo sapiens
  chr7:27882584-27882809
  hypo
actggatcaaaagcgatcagcccgaggcgttgaagcagcctacactgtctgcgtctcagggggaaggcacgtggtatccagccccaggcagggcaggaaggggacacacagcttaccctgcaagttggaacacttctgagagggaaaggtagtgtaggccgacaggtggtaagttggaactatcccaggcaaggtgggacacacaccactcggcagcagcttacc

SEQ ID NO: 257504 - DNA, 424 bp, Homo sapiens
  chr7:27903423-27903847
  hypo
ggaggaaggcatagcgaagacacacaaaaacgtcacctacctgagattcagcttccagcaaatgaaacgcctaagttcaattccctgtcacatttctctctgccagtttttggcaaagaagtgaaactcacaagttgatggaatgcttgtgggcagtggcacttcccgctaggtcaactgccagagaggagcacaggagaatgcaggggctgcctcctccaagccgccagctttgtgaacagagcccggactcaccaggagcgcagggccctgactaccgcctggccgctgtgacgagaccgtcgtcatcctaagggctaatgatgcacagaggaggctgtgactcacccctggctccctcactctgcatcagggaagaaggaagaatgtcaccctaattccatggcccgcgatttaatttgag

SEQ ID NO: 257505 - DNA, 536 bp, Homo sapiens
  chr7:27907623-27908159
  hypo
tttcttcatggactcgcttggtgactcaggcaagacattcaattccatttgccattttcttctcttgctacagagcccacttcagaggattcaatgagtgaatacgacaacggtgcttggatcagtgcctgccatactgtcagcactagtcgttactattttcactggttgaacagacacgtgagttcacacatgacaccatctattgggatgagtcacgttgcttgctcaacaactttaaggcctaggatcagtgacagaactccaggagcagcggggttaacacgggtgaccaatttctcctgcccactgtcactcacatggcccatgcctgctcctgcagatgccgttccccggtcctcaccgcaactccctgtggggttgactgccgcttgcttctcccgctcccatccccctctccagattcctccgcccctgcatgggccgcctcacgggggtttctcaccatccactctgaacaaggcgtggagttgcttgctccagcctggctggtcggctccccagctgccctgccc

SEQ ID NO: 257506 - DNA, 148 bp, Homo sapiens; identical to SEQ ID NO: 211460
  chr7:27914809-27914957
  hypo

SEQ ID NO: 257507 - DNA, 184 bp, Homo sapiens
  chr7:27984539-27984723
  hypo
aagccacaccctttccggaacgctgtcatctgctacggtgtgactggtaatacatttcggagttcgagaaataatccttgacacctccccactatgcattatcatcttaaaactatcacaagacccacaggaaaacagttcttctatctaggatctttggaaaagtgatcgagaactcactttg

SEQ ID NO: 257508 - DNA, 329 bp, Homo sapiens
  chr7:28109347-28109676
  hypo
ttagagtttggggcgcttttttctcctggaggtgccaggtacggctccatgctaggtctgcagcattcaccatgctgagcgttgagccgtgttctcaaaaactcatgcccccaagtttgaacaaactcatacttgtcccctaagaagtccctgtcatcccggtctgtcggccatgagctcgttactcccctgaccttgaggcccacagactgggatgaagccaggacctggctcctcactcaagtcctcccgcgccttctctggatgcctttctctccctgctcacggcacactgcactttgtaaaacgtcttcagatgtggagagctg

SEQ ID NO: 257509 - DNA, 120 bp, Homo sapiens
  chr7:28110708-28110828
  hypo
gcctaaaacggaatcggctctggagagccagaatccctgtgtgtagcgaaatactacaggtcagcaagcaatgcggtgtgatacaaagatccaactaggtgtagccggaagccagtgcac

SEQ ID NO: 257510 - DNA, 38 bp, Homo sapiens
  chr7:28176530-28176568
  hypo
gatgagtgttcacacgggaggctcgcaggagatgaggc

SEQ ID NO: 257511 - DNA, 129 bp, Homo sapiens
  chr7:28190080-28190209
  hypo
tcatcaaaaggcatcaccttcgaataaaggccacaaatgccgccgtatctaacttgaagaaacagtcatgacagcgtgtctatgtttttttctcattgcatgaggaccggtgggaacactgtcatgggg

SEQ ID NO: 257512 - DNA, 36 bp, Homo sapiens
  chr7:28266793-28266829
  hypo
ggcgtgagccatcgcgcctggcccagagtgtttttt

SEQ ID NO: 257513 - DNA, 202 bp, Homo sapiens
  chr7:28811874-28812076
  hypo
ttagtagccgaaaaccgctggaagttggggcaaaagagcaatgagggctgcagggtgacctgggcagcccaaggggtgactgcttgaggcaacactgggaatggagagcagggtgctcaggaagccaggtggaacggggagcccaactcactaccaaaggctgggagcccaggcgccgctcgagcctcgccactgtttgttt

SEQ ID NO: 257514 - DNA, 84 bp, Homo sapiens
  chr7:28989195-28989279
  hypo
gggcgagagtgagacaccgtctcaaaaaaaaaaaaaaaagtacagctgaccttcctgagtctcggattatgtatctgtgaattc

SEQ ID NO: 257515 - DNA, 49 bp, Homo sapiens
  chr7:29105618-29105667
  hypo
ggtttttaaaatgtcattaccgtgcaccgcaaaaagttatagtaattac

SEQ ID NO: 257516 - DNA, 135 bp, Homo sapiens
  chr7:29210728-29210863
  hypo
tgctggacataatgaactgccggtttccccccagttctgactcttgcctgcagagccctaacattgcttacatacgcactgctctttcacatgaaggaacagcgcagacatcacctaatacgcgtcctactgtat

SEQ ID NO: 257517 - DNA, 160 bp, Homo sapiens
  chr7:29362350-29362510
  hypo
attcctagtcagggacggcctagagttagaggatagacatgcctcgatttgggaagcactgtgtagccatgcctaacagcttcttgtaatggggaacgacctacctcctgaagcaacttttggagaccactagtgtgcttccttgtggctgggtgcggtg

SEQ ID NO: 257518 - DNA, 34 bp, Homo sapiens
  chr7:29372516-29372550
  hypo
ctctacagagacgacggctcgatcttggcttggg

SEQ ID NO: 257519 - DNA, 80 bp, Homo sapiens
  chr7:29390375-29390455
  hypo
aacttgctattgaccggacgttgtcccaagaatttcatatgcattgtctcatttaattcccacaatgcggccgggcgagg

SEQ ID NO: 257520 - DNA, 100 bp, Homo sapiens
  chr7:29410049-29410149
  hypo
atgagttataattttttctacgtacgttttcctattacatctcatccgttagctaagagcccgcatcttcctcttctacgcagctctgggccctttttct

SEQ ID NO: 257521 - DNA, 32 bp, Homo sapiens
  chr7:29452225-29452257
  hypo
tgagccaccgcgccaggacactaaagagtctt

SEQ ID NO: 257522 - DNA, 138 bp, Homo sapiens
  chr7:29482438-29482576
  hypo
atttattttttcagcgattaatacctgaatgctgcctaggtttttccttatttattccatttctatgattttctccacttaatccccatcgctttcaatttcattgaatttctttttttttttttttttgagacggag

SEQ ID NO: 257523 - DNA, 103 bp, Homo sapiens
  chr7:29682478-29682581
  hypo
atcaatagcacagctattctcgggagccgcggggtcaaaaggggtgtaagtccgatgggcctctgggaggcattctagaaacgctcctggtgactcatcaggc

SEQ ID NO: 257524 - DNA, 56 bp, Homo sapiens
  chr7:29689982-29690038
  hypo
atgagaaaatagtcgggcaaatgagaagtaagctcaaaagcgtaggctcaagagcc

SEQ ID NO: 257525 - DNA, 122 bp, Homo sapiens
  chr7:30205887-30206009
  hypo
gtgggcaggttggccgcgcagggtggtttaggataatagcagacacattttttttctggtatccatgtacttacaaagatttttgaaagtgactggaagaaccggggcgacaagtttataaa

SEQ ID NO: 257526 - DNA, 62 bp, Homo sapiens; identical to SEQ ID NO: 211471
  chr7:30341570-30341632
  hypo

SEQ ID NO: 257527 - DNA, 149 bp, Homo sapiens; identical to SEQ ID NO: 211472
  chr7:30516406-30516555
  hypo

SEQ ID NO: 257528 - DNA, 40 bp, Homo sapiens
  chr7:30596671-30596711
  hypo
tctggttgccatggcgctgaaagagcgctttctatacctg

SEQ ID NO: 257529 - DNA, 89 bp, Homo sapiens
  chr7:30599495-30599584
  hypo
agcaccgcttcactcgctgcactcaaacattgcttcacgtttccatagtgctcatcaccgcttgccagtacattgtattaaatagttct

SEQ ID NO: 257530 - DNA, 236 bp, Homo sapiens
  chr7:30603331-30603567
  hypo
aactcaccgactcaccgttctggaggctggaagaccaagatcaaagtgttggccgagccatgctcctgctgaagccgctgggggaggctccgtgtagtttctgggagccccaggcatttgtggcgtgtggcagcatctctccgatctctgcctccatcttcacacggcggtctctgctctgtgtgtgtccagatttccctcttcttaataaggacgcttgtcccactgggttcaga

SEQ ID NO: 257531 - DNA, 154 bp, Homo sapiens; identical to SEQ ID NO: 211474
  chr7:30656754-30656908
  hypo

SEQ ID NO: 257532 - DNA, 164 bp, Homo sapiens
  chr7:30675597-30675761
  hypo
tgatacctgagtgagggagacgggccggcagcagagctctctggttctgtctgtaccatgtttgcttgattttaagaacaagcagttgaagtgctgttttctaaatgaagagactctttacccacgagtttgcgtatgcatacgcacacacctcttctgttcaa

SEQ ID NO: 257533 - DNA, 412 bp, Homo sapiens
  chr7:30817952-30818364
  hypo
tcttggtgaacatcaggaatcgtttgcttgtgctttatgagaacagcgggttttgatttaagatggtaaacagcgattcagctttcttccctcagggcttaaagaagacatgtgtgaccatggaccaggaacgcccacgctctgacctcagcataaacaacagaaatgatcttcgaaaggttttgcatcttgaatttctctataaggagaacaaggtatgtgctttctaaggtgtggtgtggagtcttggaactgagtttggcactgccaaagcactcatgggccctgccagtgacaggagaggcttgaggttctcctggcctgtcacacttgcggtcagagagaaacggaccccccaaatgtggacagatccccagcgggagtgggttttccatctcggtcagctggtgcc

SEQ ID NO: 257534 - DNA, 276 bp, Homo sapiens
  chr7:30857133-30857409
  hypo
tacagagtcactgatggaagcgaggaaggagtacagcaccgctgtccctggtgggcacctccagtgtttgctgtgtgcatacctggccaagaagtgcttgcaggtggggaggggctgggtctgaaaagcggaagcccgggttcccgaagttttgtggttcttatagcccctcaaagacaactccggcaaaagggaggctgagactaggggcaatgcgtctgttgccaggtgatgccagtcttacctagcatgtgcgtgtccatccacttcctatat

SEQ ID NO: 257535 - DNA, 95 bp, Homo sapiens
  chr7:30902138-30902233
  hypo
aggtttgcggtgattcgcagggcaatgataacagttctggggctggaatcccacctctgcctgctgcctccggggctagccgctggcaaaggcct

SEQ ID NO: 257536 - DNA, 50 bp, Homo sapiens; identical to SEQ ID NO: 211477
  chr7:30921727-30921777
  hypo

SEQ ID NO: 257537 - DNA, 173 bp, Homo sapiens
  chr7:30922908-30923081
  hypo
agatgtggcaagtaccgttaggcccgaaggaggcaggacaggggtgcttacctgagggtgggggaggcttgagcaggataggaagctgggaggcctggcccagcctgggggtggcaggaggtgctgcctggagcgacaccctctgcttgcggaggagccggaggagcagctcc

SEQ ID NO: 257538 - DNA, 79 bp, Homo sapiens
  chr7:30925107-30925186
  hypo
caagagggaaactccgtctcaaaaaaacaaacaaacaaaaaacccaaaaccaaaaaacacaaagcgccgtgccccacac

SEQ ID NO: 257539 - DNA, 42 bp, Homo sapiens
  chr7:30928162-30928204
  hypo
ctcccctttctgtgcctgtccgcagttgttggttgcatatgc

SEQ ID NO: 257540 - DNA, 120 bp, Homo sapiens
  chr7:30934601-30934721
  hypo
tgagcccaaagggaacacagcgttgggggcaggacccagcccatccagaacaccagccgtggaagaggagcagcagcgctcccgcccgccgtgagggccggggctggtgaagtctcagag

SEQ ID NO: 257541 - DNA, 139 bp, Homo sapiens; identical to SEQ ID NO: 211478
  chr7:30944106-30944245
  hypo

SEQ ID NO: 257542 - DNA, 115 bp, Homo sapiens
  chr7:30946539-30946654
  hypo
tgctcagctctgcagcggggcatggtgggcagagacacagaggccaaggccctgcttcggggacggtgggcctgggatgagcatggccttggccttcgccgagagttctcttgtg

SEQ ID NO: 257543 - DNA, 42 bp, Homo sapiens
  chr7:30971902-30971944
  hypo
actcattttatttaagcaagcgtttaccaaacttgtttgtcc

SEQ ID NO: 257544 - DNA, 216 bp, Homo sapiens; identical to SEQ ID NO: 211479
  chr7:30972824-30973040
  hypo

SEQ ID NO: 257545 - DNA, 115 bp, Homo sapiens
  chr7:31018779-31018894
  hypo
ttctgccagcctggaggacccgtgctaagtggaccacgccttcccgctcggcggcaaaggtgctgacatctatgtgctaggctgcctcatcacgccactggagtccacacttgaa

SEQ ID NO: 257546 - DNA, 299 bp, Homo sapiens
  chr7:31032047-31032346
  hypo
gggcacaggcagtacgtgtccagcttggccgaggttgccactcctggtcctgcgggaatggtgtgcatgcctgcacgcacgcatgtgtgtgcgcacaggagcatgtgtgctgagggtgcaggcacgtgcctgggcttgtgcctgggcatgtgcccggctctgccctgacaaggcctgccggctccctagcagctggagcacccgctgtgctgacagggcctgcaatcacgggaaattaccaaacccagaactaaaattaaggctgctgctgctgctgctgctgccgccgccgccacaga

SEQ ID NO: 257547 - DNA, 163 bp, Homo sapiens
  chr7:31068265-31068428
  hypo
ttcctcgtctgccccgcagcatccatgggactgcagtagtgtgtatatgcggctgtggcccctgggagaggcacctctgggaccactggccatctggccctcggtagccgtgtggcgcagatttcctcctccgtggtctcccgggcaacgcggagctgcctgc

SEQ ID NO: 257548 - DNA, 137 bp, Homo sapiens
  chr7:31939010-31939147
  hypo
aaagtgctgggattacaggcgtaagtaagccactgcgcccggccggacagtcccgtttctacaactcagtcttgcctataggtcacaatgcagtgaaaagcggcagctgatagtgtaagccccgggagatcccaaat

SEQ ID NO: 257549 - DNA, 100 bp, Homo sapiens
  chr7:32128068-32128168
  hypo
caagtatttggggccgggcctttctaatctgcctagtccgccaaggcggccggagccctgcagtggtgaggaggccccatttggccgagctgctgctaag

SEQ ID NO: 257550 - DNA, 31 bp, Homo sapiens
  chr7:32416317-32416348
  hypo
gagaccaagtctcactctgtcgtccaggctg

SEQ ID NO: 257551 - DNA, 31 bp, Homo sapiens
  chr7:32416588-32416619
  hypo
gcgctcggccgacttcccctttctaaagatc

SEQ ID NO: 257552 - DNA, 130 bp, Homo sapiens
  chr7:32609661-32609791
  hypo
cagcagcatcatcttctctccgatgtcaccgttcgggggtttgttgctggagctactaacatcctttttcgacaacagaaacacctcagtgatgccattgtggaagtacgtttatgtgtgagtgtgtgta

SEQ ID NO: 257553 - DNA, 196 bp, Homo sapiens; identical to SEQ ID NO: 211482
  chr7:32630925-32631121
  hypo

SEQ ID NO: 257554 - DNA, 32 bp, Homo sapiens; identical to SEQ ID NO: 211487
  chr7:33026795-33026827
  hypo

SEQ ID NO: 257555 - DNA, 186 bp, Homo sapiens; identical to SEQ ID NO: 211488
  chr7:33139663-33139849
  hypo

SEQ ID NO: 257556 - DNA, 207 bp, Homo sapiens
  chr7:33542772-33542979
  hypo
ttttacttacaaaacgcaagctcaaaaataaaattactaagaatttcaaggcagagacagcagagcgttaaacaagttcaggcccgtcaaagctcgagcacagtttgcacaccctgcgtacagtcctgggcaaataccttatatttgctgagccgcagagttctcatctgtgaaagaaaatatcaactaagtcgcaggggagatgtg

SEQ ID NO: 257557 - DNA, 287 bp, Homo sapiens
  chr7:33725730-33726017
  hypo
aacagctcctctagtggcagcgcaattgggcatcctggctgctgtgtgtggcgcacgcggcccaggcctgagcgaggtgttcaggaggcgggagatcactcaggctgattctgcagggtgttctccttttgttcctgttagaactctctcttaccgtctgtcagaaagacaagctttctattgagaaagattacgccaggtcccactcggtaagcactgaggcggtaacctaacactcttgcgaggtgctttgggcttagctggccgattcctcattgaatgatgtt

SEQ ID NO: 257558 - DNA, 42 bp, Homo sapiens
  chr7:33737759-33737801
  hypo
gaactatgcccagccttgggcgagaaatggtttcccacatct

SEQ ID NO: 257559 - DNA, 227 bp, Homo sapiens
  chr7:33877124-33877351
  hypo
tcagccctcgcaggcgagctctggatcctgtcttaggggcccaactctgccttcagaggagacttgcagaactggcagatttcagtttggtttggagttttgttgtgtgtgtcttggcaggaggcgaccctcctccatccacagagcgccccggattaatggctaaagtaacacctactggcgggaccaacccaggctcagagcaggctttccgctgttgattcacg

SEQ ID NO: 257560 - DNA, 36 bp, Homo sapiens
  chr7:33899153-33899189
  hypo
tgagccaccgcgcccggcctgagcctggctttctaa

SEQ ID NO: 257561 - DNA, 42 bp, Homo sapiens; identical to SEQ ID NO: 211489
  chr7:34034217-34034259
  hypo

SEQ ID NO: 257562 - DNA, 140 bp, Homo sapiens; identical to SEQ ID NO: 211490
  chr7:34349352-34349492
  hypo

SEQ ID NO: 257563 - DNA, 44 bp, Homo sapiens
  chr7:34526629-34526673
  hypo
gaaaaaaatccagttctggccgggcgcggtggctcacgcctgta

SEQ ID NO: 257564 - DNA, 97 bp, Homo sapiens; identical to SEQ ID NO: 211491
  chr7:35042666-35042763
  hypo

SEQ ID NO: 257565 - DNA, 31 bp, Homo sapiens
  chr7:35066801-35066832
  hypo
gcaaaactccgtctcaaagaaaaaaaagaaa

SEQ ID NO: 257566 - DNA, 37 bp, Homo sapiens
  chr7:35190135-35190172
  hypo
acataatcttttttttgagacggggtcttgctctgtt

SEQ ID NO: 257567 - DNA, 36 bp, Homo sapiens; identical to SEQ ID NO: 211492
  chr7:35190412-35190448
  hypo

SEQ ID NO: 257568 - DNA, 160 bp, Homo sapiens
  chr7:35349991-35350151
  hypo
ttctgggctacgggcgatgtgcattgcttgacctgggagatggttacactggtataatcattttcactcaatgctcatgaatgtcttaactgccccatgcctcccacacccagacctcactccctggaagcgatcactgctaattacatccagttagaat

SEQ ID NO: 257569 - DNA, 41 bp, Homo sapiens
  chr7:35994751-35994792
  hypo
gcatccgaggggagacggtcagaggtcgactgctgtctcag

SEQ ID NO: 257570 - DNA, 133 bp, Homo sapiens
  chr7:36008765-36008898
  hypo
tgagccaggatggggacttgcgcgtccgagtgtccggagcaggcggcagaggcttcagtgtggcaaccacagccccggagcttgtgtggcaccagcagcgtcttaaagcctcgggtatatgctgagaactact

SEQ ID NO: 257571 - DNA, 289 bp, Homo sapiens; identical to SEQ ID NO: 211493
  chr7:36124378-36124667
  hypo

SEQ ID NO: 257572 - DNA, 41 bp, Homo sapiens
  chr7:36134137-36134178
  hypo
cttccaagctgcatgcgtcaagaggaggcatgcatctgtgc

SEQ ID NO: 257573 - DNA, 41 bp, Homo sapiens
  chr7:36134208-36134249
  hypo
ctgagtgactgtgtcctgcagaagttcgccccagttggcag

SEQ ID NO: 257574 - DNA, 506 bp, Homo sapiens
  chr7:36338990-36339496
  hypo
ggcgtgccaggcgcgtaccccaccaggtgggcaaagcagaaacctgcggggagcggagacgccttttatctctggatgccacagacctgagcagcattgggctggctgtccgctgctgactggatggcagcacaaagacaatatgagcagagggaggagaagaaggggtgctcaggctgcgggccacagtccagcagcgccagaagcactcatttctgaccaccaggctatgacgttcctgctgcgcattacagaaagcttttaactgtgatcaggcactctgctcagatacattgagtggcgatttttagttttgttttgaaaaaataaacagattaacctgcctcgctgcagtgagagcatgggacaagtccgccacagccctcccccgcccccttcccccgccccccaacgcgcagtgtgtatttgcaccacggcaggtgcctctgtgtggagctagggtcaagccctgagcagcttcacttcccctgcgccttttatgtccc

SEQ ID NO: 257575 - DNA, 34 bp, Homo sapiens
  chr7:36343958-36343992
  hypo
ggatgtgtacacaacgacacgtgctcatgtgtgc

SEQ ID NO: 257576 - DNA, 35 bp, Homo sapiens
  chr7:36349959-36349994
  hypo
acttttttttttgtttgaagcggagttttgctctg

SEQ ID NO: 257577 - DNA, 355 bp, Homo sapiens
  chr7:36352555-36352910
  hypo
gaggtccccttgagcggggacctgaccgggtgagtagcagatggcatccccggaagaggggaccaggagggccggggtgtggagggaggacagcagtgatgtggctgctcctggcaagagcttaggacgagatatggagaggagactgacgggagccacaggccagctcttccaaggcaggctaaggatgttgaggtggttctgcggcgctggggagcattgcaggcttgtgtgggagtaggaacaggtagaggagggggcctgcatccgcagtgccgggagcggcgcaggtatcggggcagggatgggggatggctctcgttgccggcatattattgtgcggtccttcggctaa

SEQ ID NO: 257578 - DNA, 88 bp, Homo sapiens
  chr7:36428640-36428728
  hypo
gctactgaaggccaacgggctagcagcacctgaaacacaagggctctttgtctggctctgtagcccaggctggaatgcagtggtgtga

SEQ ID NO: 257579 - DNA, 43 bp, Homo sapiens
  chr7:36823504-36823547
  hypo
tgggattacaagcgtgagccaccgtgcccggctcgaactctag

SEQ ID NO: 257580 - DNA, 240 bp, Homo sapiens
  chr7:36825465-36825705
  hypo
acattgtgaaaagccgcaagtatagagcgggcacgacttcttataattaagtatacgggtaaaagcacagctgaatttggaattttgcataagggagttttctaggcttttttttggctttaaagaaaaagcacaaataaggaggcagaatacaggagaggagacaggagtccggaacaaaagcaaataacctaatgagctattcaaaggcaaattcacaaactgcgcttctcgaagcct

SEQ ID NO: 257581 - DNA, 109 bp, Homo sapiens
  chr7:36836027-36836136
  hypo
gcacattctccccatgcctgcgtggattttctccagggcctcaggtttcctcccgcatcccaaagatgtgcacgtcaagtactttgacgtgtctcttttgtcccagtct

SEQ ID NO: 257582 - DNA, 553 bp, Homo sapiens; identical to SEQ ID NO: 211496
  chr7:36894941-36895494
  hypo

SEQ ID NO: 257583 - DNA, 177 bp, Homo sapiens
  chr7:36901365-36901542
  hypo
accttaaggaaaatcggcacatttcattttgcagttgcaaatggctgcacattgaccatggcatagggccagcttgtctagccaagcggagctgcaatgaggctgatggaaggaggaaccatgctcttcaaggttcacggcatgattccttctctccattcacggcggtctgtgaac

SEQ ID NO: 257584 - DNA, 45 bp, Homo sapiens
  chr7:36941501-36941546
  hypo
tattcaggacaaatcgaacagaatcggttccgacagattaaagag

SEQ ID NO: 257585 - DNA, 54 bp, Homo sapiens
  chr7:36985067-36985121
  hypo
catttaacttagcacgaagctttccgggaatccctagaacgatcatttagaatg

SEQ ID NO: 257586 - DNA, 104 bp, Homo sapiens; identical to SEQ ID NO: 211497
  chr7:37250876-37250980
  hypo

SEQ ID NO: 257587 - DNA, 117 bp, Homo sapiens
  chr7:37264494-37264611
  hypo
tggaatgagctggccgatggtgatctcctgcgccactttctggtagaggtcatggctattgagcaccatcgactccaaaatggccaaggaccgctgcaggatcgagatgtctatggc

SEQ ID NO: 257588 - DNA, 42 bp, Homo sapiens
  chr7:37424296-37424338
  hypo
tgggcgaaagagcaagactccgtctcaaaaaaaaaaaaaaga

SEQ ID NO: 257589 - DNA, 332 bp, Homo sapiens
  chr7:37458222-37458554
  hypo
gaatagcaacaccatggatgcgtcagagtcagctcagataacctcggtcagatgctgacctgcagaagtctcaggcagggccaagcgtggagatggaaaatccagaaacacacagatgcgggcaggcagaatcacagaagtcatctcgcaggtattataaggaggtgtcagtcatcaggttaagcgtgggaggcaaactgcagcttctgcagtgaaggggcagtgaggcgagatggggatggtaagagtcaagtgcccagctctcagggtgctgcagaggctaggagtcgggtactcgcaacaagactaagcagctacggaacatgagtcga

SEQ ID NO: 257590 - DNA, 142 bp, Homo sapiens
  chr7:38089576-38089718
  hypo
gctgcctccctgccgggcagggctcaggacctgcagcccgcctgcaggatccccgccccccaccaagggctgaagggtgcgggtgcctgcatgggactggcaggcagccccaccttccgtcgggtgtgggatccactaagca

SEQ ID NO: 257591 - DNA, 285 bp, Homo sapiens
  chr7:38725398-38725683
  hypo
attcagaaacctggcgtctgcgggttcctccaggttatcatgccaagacataggcttcctcgtaatcctgtgaaccttgcgcaggggattcacatggtactgcgtgtggagtttctgggttcgtaactctttgaggtacagctcccgcaagatctggttctgatggacctcatctgtgaccaccctctctttcgggtgtcccgccatagccttggggctgctccgtgggtccggggctctctcggcgtcctcttaccactcgcttggctgcgggccttctgcagt

SEQ ID NO: 257592 - DNA, 275 bp, Homo sapiens
  chr7:38726298-38726573
  hypo
acgaacagggcggcggcacacggacgccctggtagtaacagaggaagggccgggcaggaagttccttgaggtagggtactgggaaggggcgacattagtcagcttgggcaaacgggtagggcagaaaatcgaacaacttggacggctctggagaggaggctgacggcaggaagtttgaggagtaacggggggaaggagggctggaagacgagagcgggaaggaacagaaagaaaatgaggctggggttgaggccgagaaattggaggtagctttc

SEQ ID NO: 257593 - DNA, 66 bp, Homo sapiens
  chr7:38787793-38787859
  hypo
gtagacacacacaacacatgcgcgcgcgtgcgcgcacacacacgcggacaatgcagtgaaaataga

SEQ ID NO: 257594 - DNA, 132 bp, Homo sapiens
  chr7:38943827-38943959
  hypo
ctccaaggtgttaatgtgggcgcggcggaggctactaataatcagctagtgaagtggcctctagccgaccaattcaggtgaagataagtggaaaaactaacaaagcaatccgctagtccagcaaaactaatc

SEQ ID NO: 257595 - DNA, 131 bp, Homo sapiens
  chr7:38974187-38974318
  hypo
ccagcacacgtgcacgcgtgcacacacacacggtggtgtaaggactaaaattaaggttcaatgttatgtactgccttgatatctggtaaaactggaacagctttgactcacttaaccgcaagctcccctcc

SEQ ID NO: 257596 - DNA, 60 bp, Homo sapiens
  chr7:39503985-39504045
  hypo
atgcagaacctgaccgagtttatcgggagtgaaccatccaaaaagcgcaagcggcgcacc

SEQ ID NO: 257597 - DNA, 37 bp, Homo sapiens
  chr7:39942871-39942908
  hypo
aaataccaaagcagcgcggctcagtggttcacgcctg

SEQ ID NO: 257598 - DNA, 166 bp, Homo sapiens
  chr7:40027212-40027378
  hypo
ccgaagcagaagcccgtattcatctaggcattcaagatctcgtagcaggcacagattgtctagatccagaagtcgtcattctagtatttctcctagcacactaactctgaagagtagcctggcagctgaattgaacaagaataaaaaagcacgagcagcagaggca

SEQ ID NO: 257599 - DNA, 32 bp, Homo sapiens
  chr7:40156753-40156785
  hypo
cccactggagtgcagtggcacgatctcggctc

SEQ ID NO: 257600 - DNA, 92 bp, Homo sapiens
  chr7:40157025-40157117
  hypo
tactacagaatgctattatacttgtgaaattctcttgtctaacctgaatttacattccatgatgataacatggtatacgtattgttatgaaa

SEQ ID NO: 257601 - DNA, 106 bp, Homo sapiens; identical to SEQ ID NO: 211502
  chr7:40766265-40766371
  hypo

SEQ ID NO: 257602 - DNA, 38 bp, Homo sapiens
  chr7:40840156-40840194
  hypo
ctgggattacaggcgtgagccaccgcgcctggccctca

SEQ ID NO: 257603 - DNA, 218 bp, Homo sapiens
  chr7:40938914-40939132
  hypo
tttatttacccctccgcctcccattttggcacctcggtggctataaatacgccctgtgaatgcaattacgtgatggaacgcaggctgcgccaaagcctctttgctccaggctatggtgtcagccatttacctctgtgaagcatataaaaagacacgcgactcaagaggcaacgcacacgctgagacagaaagcaagagcacaacgaaaaatacaacaa

SEQ ID NO: 257604 - DNA, 145 bp, Homo sapiens
  chr7:40939651-40939796
  hypo
ctcgggggctgctgcgaggccttctcagcgaagcattggccaggctctgggaagagccgatgaccggctgtgctttccagatttggaaacttggctcatacttttccttaagcagcctccagcttctctgcgtatttcaaatcat

SEQ ID NO: 257605 - DNA, 299 bp, Homo sapiens
  chr7:41176259-41176558
  hypo
cgtcctcagctgcccggcagcctgccttcctgaactcactggtgcccaaagcttcagaggggggccgaggcggcgggggtgctggtgtgtcagtgctgcccggagcgcacacacacctggccaggttgcgacagtgcctgagcaagctcagcttcaaccttgctccaattggagcgggtgccaggagcagaagaggccaggcagtgggaataagcacttccaagcctgtgcggggagggggtttcccggccctgagaacacagggatgcctggatccgcagccacggctgggctgctgt

SEQ ID NO: 257606 - DNA, 153 bp, Homo sapiens
  chr7:41764777-41764930
  hypo
tcctcgtgagtcatgagttccgccatggcccagagctgccaaaatgccgttcttccccacacttttccacaggaactgggggtgcctcagcctttggaaagctaccttgtactctatccacactcaataaacgctgcttaataatgacaatga

SEQ ID NO: 257607 - DNA, 36 bp, Homo sapiens; identical to SEQ ID NO: 211503
  chr7:41840523-41840559
  hypo

SEQ ID NO: 257608 - DNA, 1365 bp, Homo sapiens
  chr7:42004852-42006217
  hypo
ccacaggcaccgtcgagtgcaccaggggccactggctgcctgttgagacagttcccatactgcggggccttacagggctgttcatggaaggcgtttccactggtgccacttccggggctgttgtggagcatcaagtgctctgggccaccgtaggggttgctgttctccccgagggtctgatagcccccagcaggcccgctcctcaaggggttctgcgggtggacgaccatgccgttgcagaacccaaaggcgcgagtctgcggcacagcgggccgcggcccacacttgagcttggaggaggacaggtcggcgcttccggagctgacttcgttccactgaatgggcaggtcggttttgctgccctcggggcagggctgctcgagggcatggaactgctggccagcgtggctgtctggcagcccgggcgcgtcaaagtcaccgggcccgtggggcactttgctgtcgtccgggagggcgctggggaagtgctgctcgtaccctgcttggttctgggaatttaaatactgcaccacgtcgtccggcaggaaatcctcatcgttcaggttggcatcagcgtccatggtcagggactccagggtgacgttctcggtgatgctgggaggacagggggacgagtggaagtttcgggactggccgccctcgggccgcgtgtaattctgaagcacgagactgcgcttctccgcggacgtggccatcgccggggggttgcagctgctgaggctgctgaagcgcggcacacgaggcagggccaggccctcggagcctgtccgcaccgggtcgctggccctcctcacgccgtggcccggcgcatcgtgcggctgcaggtggcgccgcccgtagccgtgggctcccccgtcgctgcacctcctcggggcatgaactggaggcagggccacgccaggctcgagggcatccccgagcagcgccaggcgcgtcttcaggctcatcctctccatgttgggcaggggcgtcggcggcggccctcctgtggcagccgcgtacttggccttgaggcggtactgctgggcgggcgtgaggctgagcaggctgggcaggccgtcgctctggctggcttcgctggagcggcgcgaggcgtcggtggagatggggtcgtaggagtcggccacgctcacgttctgcggccggccctcggcctgtgacgcctcgctggagcggcggctggagaagcagggcgagatccctgaggagcggcggctgctcaggtaggccgagctgatggtgctggcgctgctgtcccttctgttgagcatgttcagcatagtgacgtccaccccagagaggtcgcttctgcccgggagaagcgtcatgggcccacccaagctg

SEQ ID NO: 257609 - DNA, 57 bp, Homo sapiens
  chr7:42142438-42142495
  hypo
atgggagtgccatctcagttcgccggtcacactggcgcagaaatgcctaattgtggc

SEQ ID NO: 257610 - DNA, 31 bp, Homo sapiens; identical to SEQ ID NO: 211506
  chr7:42169114-42169145
  hypo

SEQ ID NO: 257611 - DNA, 31 bp, Homo sapiens; identical to SEQ ID NO: 211507
  chr7:42169385-42169416
  hypo

SEQ ID NO: 257612 - DNA, 272 bp, Homo sapiens
  chr7:42237186-42237458
  hypo
gtgctactggagcacggagcccttactcagtacagagaaggatgggggcctttgtcacctgaaattcaccactttgctatgttccggtcagcgggaggtacagttcgctactcacaggcctaaaagcagtgtcgggcttagctaccccagacaggagagtcagcgcctgctcatgcattgagactgaaacaatggtctgggcgtcacagcagctgtgcaaatccctgaaaattcagtccacgttaacgcaaggctctcgctctacataacct

SEQ ID NO: 257613 - DNA, 42 bp, Homo sapiens
  chr7:42353124-42353166
  hypo
aggagcattatgttagaatccgccttgtataaccccaacata

SEQ ID NO: 257614 - DNA, 143 bp, Homo sapiens
  chr7:42440833-42440976
  hypo
agcgataatgctttcggctctctgtgttggttggacagaatcgaatggcgcattgctttttccagtgttacaaaagagaaggctatgtaataatttttctagaaaaagtaaacagggacataatttctcgttttcaaagctgt

SEQ ID NO: 257615 - DNA, 178 bp, Homo sapiens
  chr7:42812190-42812368
  hypo
tagactgtgagaagaaacaccgtctaatttagtcctgctgtacccgccatgtctggagtcgtgcctgacacttggtgagcactccattcattcgtgatgaagtgttcacttccagttagagatgtgcggagcctcctgcacacagcatagagggcacgatggagggaggagagcagat

SEQ ID NO: 257616 - DNA, 221 bp, Homo sapiens
  chr7:42834367-42834588
  hypo
ttgagcacctcttggagaatcgctcgggttcgctccacgctgtcgcagccaccgctgtggtcgccagtcagccgaggggctgcgatactggttgcccgcggtgtgagcagaattcaacgtgtaccgctgccgtgaaaatggagaggcctttgtccgtgtttggggaccgcagcactggggaggcgatctgctcccagaacgttatggctgcagctttgatt

SEQ ID NO: 257617 - DNA, 33 bp, Homo sapiens
  chr7:42909818-42909851
  hypo
aaggtactgggagtaatggccgggcgcggtggc

SEQ ID NO: 257618 - DNA, 197 bp, Homo sapiens
  chr7:43116310-43116507
  hypo
aatcggcaacctttccgggtccccttccaccacgtggaagctttattttcgctttaataagtcttgctaccgcacactcattgggtctgtgcgtttctctaatcaagctgtaacactcgccgctgcggtccacagcttcattccttgaagcccgtgagaccacgaacgcttcaatcgagaaaaacctttgatctgaa

SEQ ID NO: 257619 - DNA, 144 bp, Homo sapiens
  chr7:43237314-43237458
  hypo
gggcaggtgggggactctgacgaacacagaccgcttccaggactggcaacataaccgtggccccagtgacaaaggaaaatgcgggacagcttgtgcaaaaattattaaggatttcaagatggcgacagcagagcattaaaccca

SEQ ID NO: 257620 - DNA, 32 bp, Homo sapiens
  chr7:43279648-43279680
  hypo
atgtcatcttttgccaggcacggtggctcacg

SEQ ID NO: 257621 - DNA, 32 bp, Homo sapiens
  chr7:43279920-43279952
  hypo
agcaagactccgtctcaaataaagtaataata

SEQ ID NO: 257622 - DNA, 77 bp, Homo sapiens
  chr7:43313712-43313789
  hypo
gtgctggagaaaagcgcgggtggcggcaggcacggaaaggacgccatgaaggcctcgggtgcactaaaagagtacaa

SEQ ID NO: 257623 - DNA, 32 bp, Homo sapiens
  chr7:43409045-43409077
  hypo
agcgaaactccgtctcaaaaaaaataaaaaaa

SEQ ID NO: 257624 - DNA, 93 bp, Homo sapiens
  chr7:43594218-43594311
  hypo
ctggttctgggctgcggtggagcgcttcaataatgagcagaggctgagattactgcagtttgtcacgggaacatccagcgtgccctacgaagg

SEQ ID NO: 257625 - DNA, 33 bp, Homo sapiens
  chr7:43799758-43799791
  hypo
ggcatgagtcaccgcgcccggccgatctttact

SEQ ID NO: 257626 - DNA, 185 bp, Homo sapiens
  chr7:43827245-43827430
  hypo
ctttctgtgggtactcggaaggttttcaacctaaagacatggtggagcaccttcaagaacaggttttggcgggactgacttctctccaagcccccatttcggggactgtctcatcccatcctgatgctgtggcttcctgtgtgttttgggctggcttccatcttgctcgtcgggaccctgccagc

SEQ ID NO: 257627 - DNA, 128 bp, Homo sapiens
  chr7:44097728-44097856
  hypo
aggaggaggagaaccgtcggctggaggaaaagcggcgggccgaggaggcacagcggcagctggagcaggagcgccgggagcgtgagctgcgtgaggctgcacgccgggagcagcgctatcaggagcag

SEQ ID NO: 257628 - DNA, 97 bp, Homo sapiens
  chr7:44151843-44151940
  hypo
agaggaaatgggtcccctaccgggtccccaacaataacttgcccatccctgaacgctacctttcgccagatgccacggtgaggctacagcctggctg

SEQ ID NO: 257629 - DNA, 54 bp, Homo sapiens
  chr7:44152191-44152245
  hypo
ggagaagaaccccttcgtgctgggagcaaatctgaacggcggcgagcggctagt

SEQ ID NO: 257630 - DNA, 485 bp, Homo sapiens
  chr7:44153137-44153622
  hypo
gggtgggggcctgggaggggcgctctggggcagccggatcgttctccctccgcagccagtggtggtgattactggcgaatcttgaacccgggtgagtaccgcgtgacagcccacgcggagggctacaccccgagcgccaagacctgcaatgttgactatgacatcggggccactcagtgcaacttcatcctggctcgctccaactggaagcgcatccgggagatcatggccatgaacgggaaccggcctatcccacacatagacccatcgcgccctatgaccccccaacagcgacgcctgcagcagcgacgcctacaacaccgcctgcggcttcgggcacagatgcggctgcggcgcctcaacgccaccaccaccctaggcccccacactgtgcctcccacgctgccccctgcccctgccaccaccctgagcactaccatagagccctggggcctcataccgccaaccaccgctggctgggagga

SEQ ID NO: 257631 - DNA, 36 bp, Homo sapiens
  chr7:44250466-44250502
  hypo
actattcttggaccgagtctcgacacctagaggtga

SEQ ID NO: 257632 - DNA, 322 bp, Homo sapiens
  chr7:44256925-44257247
  hypo
cgccaccaccacaccgcggacacctagctagcagaccggtgtggcttgctctttaggggtcatgcaaaagaattatcccccagaaaaaaaatccccaaattatcccagacaggcagctccgtggaggtgacaaggtgagagggagaggaggggaggaggccccaggacgccagggtggccggctgctgggccacgtgctgtccgtggtgagccctgccgctgtcccatggcccagggagccactggtgcggagcccggcagatgtttaccctgtgttcatggatggggacagctgtcctgggcacagcgtggacggaagatg

SEQ ID NO: 257633 - DNA, 305 bp, Homo sapiens
  chr7:44258444-44258749
  hypo
gccgaagggttgtccgtgctgggtgtgtggggataccgggcacggaaaacccacacctagcccttcaggggatgaaaggaagggaagggaaagcaggaacaacagcaactctcaggcacaactagcgggaaaggaggcagcccagcgggcccccacagcccctcccaagagacagctgacagtcacgacagccagcgagcacaccacgtggagcccatgcgttggcaggaggatgcagacaccttaggtgtggggtgtgtgcgttacctacaaactaacaccgttcagcacgcgacgggggcctg

SEQ ID NO: 257634 - DNA, 91 bp, Homo sapiens
  chr7:44279651-44279742
  hypo
ggatcacagacgctcgcacacggagtgtcggacgacggagaagccacaggtacagcttgtccagacctgggctgccggctccactccgggg

SEQ ID NO: 257635 - DNA, 37 bp, Homo sapiens
  chr7:44301708-44301745
  hypo
gtgatgagggttcagcgaccttcggagccaggcccag

SEQ ID NO: 257636 - DNA, 99 bp, Homo sapiens
  chr7:44311757-44311856
  hypo
tctggagatctggggcggggaattgggggggtgggcagcgaggacttggggagcccagtggtaggtctgaggcaggaataaccccggcccaaggtctgg

SEQ ID NO: 257637 - DNA, 226 bp, Homo sapiens
  chr7:44430995-44431221
  hypo
acgatgtattaatacgtgctgtaccggaaggtaagactaagacaatccagatacaccacaaggtaaggttcctccaagagacaaaatgagaagaaaatatcgatcagcgatcttcagggggaggaggcggtccgtgtttacagaacaaaaataaggagactgtgcccagcagatgacccctccccactgactcaaggctgcactgcgtccgcgtgccctgctgtac

SEQ ID NO: 257638 - DNA, 43 bp, Homo sapiens
  chr7:44517850-44517893
  hypo
atgggttatttactttgggccgggcgcggtggctcacgcctgt

SEQ ID NO: 257639 - DNA, 475 bp, Homo sapiens
  chr7:44582326-44582801
  hypo
gggaactggtggggacgtgcccaagaaggtcccctccaaggaataaggacacagacagctttccaccacattcatctgtcactggtagaggacattcctggaagatttcgccccagcacgtggcgggcaccttcagtgtcaaagggccttaggcagggccgtgggcacttgcgacaagaagacactgtcggcatgcacagagctgtgtcagaacaaagatatgaaaggcccaccctgcctttcatatgtttcttcccatgggggctgtctaggctaagcccctggagcccagctgtgcccagtctagcaccacagagagatagagtccagctatgtggtctcctggggtcatttgtgaaacacacgcagcataacagcggcacaatccggctcggaatgacagtgaaaatttcacacccgatctcccaacccagctgccggtgcctctggacacacgtgccgagctgtaaccata

SEQ ID NO: 257640 - DNA, 39 bp, Homo sapiens; identical to SEQ ID NO: 211512
  chr7:44583394-44583433
  hypo

SEQ ID NO: 257641 - DNA, 141 bp, Homo sapiens; identical to SEQ ID NO: 211513
  chr7:44611081-44611222
  hypo

SEQ ID NO: 257642 - DNA, 66 bp, Homo sapiens; identical to SEQ ID NO: 211514
  chr7:44612063-44612129
  hypo

SEQ ID NO: 257643 - DNA, 31 bp, Homo sapiens; identical to SEQ ID NO: 211515
  chr7:44740322-44740353
  hypo

SEQ ID NO: 257644 - DNA, 91 bp, Homo sapiens
  chr7:44740653-44740744
  hypo
acagcgagggagtgccctgctgccctgggataccgcgggggtgggagtatggggtggaggcttgcagctcggagtgtccccagcagtccaa

SEQ ID NO: 257645 - DNA, 502 bp, Homo sapiens
  chr7:44746536-44747038
  hypo
atactcttgtccccgaagtctgagccaagctgttttgaaggctagcctggtgttacttgatacccagagctggccatgtctgctgtgtatttgttacacgtaacgtgcttttcaaagtgtgcctggtctgagcaaatacagggcatcagaggctggtgaaggggaagcatctctaacccttgaaagctgcgtctcctggcagcagtccctggcacagccctgggcccaggagagctctcagccacatacctgagagaaccagcctagccatgggaactctcttgtaggaacccacttccagcgggtgatcccagaagatggccctgcagctcagaacccagaaaatgtcaaaaggcttctcttctgcaccggcaaagtgtattatgacctcacccgggagcgcaaagcacgcgacatggtggggcaggtggccatcacaaggattgagcaggtgagggcaggtggtgccatcagggtgtccccccagcgggggtcagggctc

SEQ ID NO: 257646 - DNA, 148 bp, Homo sapiens
  chr7:44750444-44750592
  hypo
tcctgaattgtcgccgttggggcagggcagacagggacataacctacccaacatcactgccaacatccttgcgcttttctggatataaaaaaggtacttctggatccgaaatatctaagctagatgtgagagcgtcagcttgctccac

SEQ ID NO: 257647 - DNA, 458 bp, Homo sapiens
  chr7:44801185-44801643
  hypo
taatgaggtgagctccgcctggcccccacctgacccccacgaggctctgttcctcctcccacactctcagggcccgttttctgggtgtccacccatcttcctgagcaggcctgacctggagctgcaattcaagtgctaccaccacgaggaccggcagatgaacaccaactggccagcctcggtgcaggtcagcgtcaatgccacgccgctcaccatcgagcgtggcgacaacaagacctcgcacaagccactctacctgaagcatgtgtgccagccaggccgcaacaccatccagatcaccgtcaccgcctgctgctgcgtgcgtgtcctgcgccgagggggcggtgctgtggcgtggggcggggtgtggtggggcctggcccagcggtgccgtggggtggggcggggtgtgggcggggcctggcccagcggcgcagtgggagcggagccaggacatg

SEQ ID NO: 257648 - DNA, 304 bp, Homo sapiens
  chr7:44835104-44835408
  hypo
ccgggctcaagcaatcctccccgcccagcctcctgagtagcgagcgcctcgacgcccagctaatttttatttttatttatttttttgtagagacggcgtctctctaagatgcccaggctggtggccggtgtcgaactcctaagatgaagcgatcctccccggccttggcctccgcgcctcctaaagcgccaggtatgagccaccgcgcctggcctacaagtgcattttaattaaagtattattaatgtctttgcctgaagaaattcgcttttaaattgtgacttatctttcacccaaaaatcaa

SEQ ID NO: 257649 - DNA, 32 bp, Homo sapiens
  chr7:44844994-44845026
  hypo
gagtttgctgtatatatccacgccttacacag

SEQ ID NO: 257650 - DNA, 96 bp, Homo sapiens
  chr7:44912167-44912263
  hypo
ccaggctccgcaagagagggagactgtagaaagagggagacggagagtgagagcgagagcgggagggagagagacggagagggagagggagaggga

SEQ ID NO: 257651 - DNA, 120 bp, Homo sapiens
  chr7:45046869-45046989
  hypo
ttgtgctctgggatctgtggcgggagcagtgagcccagccatgtcctctgcatgcatcgctgtgtccttgtgaacagtggatctttgttagcgcgcttcgcactccttggcttttttatc

SEQ ID NO: 257652 - DNA, 163 bp, Homo sapiens; identical to SEQ ID NO: 211521
  chr7:45091550-45091713
  hypo

SEQ ID NO: 257653 - DNA, 138 bp, Homo sapiens
  chr7:45115574-45115712
  hypo
ggatgagtgggaccgcatgatctcggacatcagcagcgacattgaggcgctgggctgcagcatggaccaggactcagcatgatggacagtggatgggggggcacccacaccttccgcgcagtcgtcataggccttccc

SEQ ID NO: 257654 - DNA, 226 bp, Homo sapiens
  chr7:45125649-45125875
  hypo
acagggctcccgccggtcccctcccaggatggtggtggcagcggccgcatcgcaggacagatctgtggagatagagaagatcatgaggtgcccctggatgcatctcccaggcaagggccaggcccggggagatgaattccggctgcatagggcccagaggaaggtggatccaggaaggcaggagagaaaagagaagaccctctgcacgctgcgtttgagggagaac

SEQ ID NO: 257655 - DNA, 214 bp, Homo sapiens
  chr7:45222825-45223039
  hypo
ctggcccagggcttcatcaccggcatccacaggcagttcttctccaactgcaccgtggacagggtccacttggaggaccccccagacgaggttctcatcccgctgatcgttatacccgtcgttctgactgtcgccatggctggcctggtggtgtggcgcagcaaacgcaccgacacgctgctgtgagggtcccggtgagatggagtgggtcaca

SEQ ID NO: 257656 - DNA, 103 bp, Homo sapiens
  chr7:45252688-45252791
  hypo
gttgaagggttgaatgtgaacgctctcccttttgtggctgtccccagtgcccgggaccccgtctcgctgctgctgtgtgtgcggtgaagggggtgctgtcagc

SEQ ID NO: 257657 - DNA, 153 bp, Homo sapiens; identical to SEQ ID NO: 211525
  chr7:45262245-45262398
  hypo

SEQ ID NO: 257658 - DNA, 96 bp, Homo sapiens
  chr7:45431198-45431294
  hypo
accacaaacagagctcaaagcggccagaggcaggctgcctcctccgcctccaggcaggcctccaggggcttggacggtggtgcccctgctccccaa

SEQ ID NO: 257659 - DNA, 240 bp, Homo sapiens
  chr7:45439018-45439258
  hypo
tctgattttggagcgaagttgaggccgagcctgggcactgttgtgatcctgccaggtgtacgcgtacttggggtggtgctgagacgccagccccctgctgccttggcctcctccagactttgggcgctgacaagcatgggagaaaggccgagaggaactgaaggaggctcctcaccggcctgtaggtgcccctcagaacgaacagcctgggtaccatggacgacaggattgatggcggta

SEQ ID NO: 257660 - DNA, 180 bp, Homo sapiens
  chr7:45632339-45632519
  hypo
ctccttctctccctgcagctcggtgccaatgccttgctcttcgtcggtgtgaacatgtatggggtctttgtgcggattctgactgagcgttcacagaggaaggcgttcctgcaggcccggagctgcattgaggaccgactgaggctggaggatgagaacgagaagcaggtcagtggcttg

SEQ ID NO: 257661 - DNA, 61 bp, Homo sapiens; identical to SEQ ID NO: 211526
  chr7:45743036-45743097
  hypo

SEQ ID NO: 257662 - DNA, 45 bp, Homo sapiens
  chr7:45809383-45809428
  hypo
ctcaccttggccatcagagttgtcgggattacaggcatgagggac

SEQ ID NO: 257663 - DNA, 147 bp, Homo sapiens; identical to SEQ ID NO: 211527
  chr7:47088919-47089066
  hypo

SEQ ID NO: 257664 - DNA, 282 bp, Homo sapiens
  chr7:47338286-47338568
  hypo
agtaaatacctccacggcgcactcccacagaggcccctcacatgcccccaggcctgaccggacccacagccaaggcatctgtctggccataggatgaaacgaatggtttcttttacacatttttcaatgtctgcaccgtggccctgtgcacaggatgagggcacggggaggagctcaacatgcccctggggatgaagcaggagcttctaaacagcacgcagtgggaaggatgggcaggaaaacacaggcaggctcaccgtgcatgcccgagactgctggtag

SEQ ID NO: 257665 - DNA, 84 bp, Homo sapiens
  chr7:47340361-47340445
  hypo
ggggccacagtcatcgggattcttgagacacaagcagggccagggtggtggcaacaggcacacagcatccggccgcagagaggc

SEQ ID NO: 257666 - DNA, 319 bp, Homo sapiens; identical to SEQ ID NO: 211529
  chr7:47343228-47343547
  hypo

SEQ ID NO: 257667 - DNA, 134 bp, Homo sapiens
  chr7:47370841-47370975
  hypo
gagggatactagaatgcctccgagggaccaggcactgcagactgagatcctcagctttattcgaatgtacttgtttgttcctgagaattacgtgctggccagcaccccagggcgagctctactctggggttctt

SEQ ID NO: 257668 - DNA, 44 bp, Homo sapiens
  chr7:47384308-47384352
  hypo
cgcctgagtgccgcgcgcctgtgacccgcgggtagatttcttac

SEQ ID NO: 257669 - DNA, 125 bp, Homo sapiens
  chr7:47394757-47394882
  hypo
cgcagggtcacctgagactccgccacgcccagcgggatctgggattcaccacagggtgcaaaaggacaccgagcctgcgaggcaggaggacgctcagtcattccggccccacaggaggagctggg

SEQ ID NO: 257670 - DNA, 255 bp, Homo sapiens
  chr7:47410354-47410609
  hypo
tggtgggaagcccacgctgcgtgggcacctggaatttgagagacgtgagccactacctaacagcagtcactgagcctggcccaggagccctctggagggacctgccctgagcatgtgcctcacagccccgggctccaggttgatgcaccaccatggtcagcagctgctggcctttttgaaaacactgggacaacgtgttgggacagagtcccaaggggtcctggggtgtggtgctgaaaacgcgcccacgccagg

SEQ ID NO: 257671 - DNA, 148 bp, Homo sapiens
  chr7:47420376-47420524
  hypo
acacacacaaatgctctctgcttaccttccttcaaaacagcccagcggctctctcagtctgcacctctgagcccagttttccttgacacaggctttcacagcaggacagtggcatgccagaggagggcgggggcgtgccacctccctc

SEQ ID NO: 257672 - DNA, 428 bp, Homo sapiens; identical to SEQ ID NO: 211530
  chr7:47440318-47440746
  hypo

SEQ ID NO: 257673 - DNA, 87 bp, Homo sapiens
  chr7:47446856-47446943
  hypo
aagccactccttctctgacacgctggaaatcatctctcccacctaacctttagctcttgccgccgcgcaccttctgccatgctcagt

SEQ ID NO: 257674 - DNA, 47 bp, Homo sapiens
  chr7:47449177-47449224
  hypo
gcaggtagaacactacgcaaacaagatgagggcgggtgcaaatccta

SEQ ID NO: 257675 - DNA, 306 bp, Homo sapiens
  chr7:47515267-47515573
  hypo
ctggtatgaatcaatcgcttgcagagtgtatgaaggtaaacacaggatggaaaaaaacaaggacactctgcccttgaacttcaatcaaaagctgtggggccaccattcggaccactgttaggccgcagcatcatgaaaagatcctgcaaacctgcaactaccaaggacagactcgcatgcgcccttgttctgaccgtggtgcctccaagtctgcaaatgcgggatcacaggaatcatctactgtgtctgtcatcggtgccctcaccctcaggaagcaggggacacgctctggaactcatcagactg

SEQ ID NO: 257676 - DNA, 149 bp, Homo sapiens
  chr7:47544599-47544748
  hypo
ccttaagcagccggcgacaggcttcatttaagaaatggaaggaacaacagcaggctcatctctgcggctgtggctcagaggtggctgggcccacaacagagtcaggacaagcagcccaccccctcctcctactccgcagccgacccaag

SEQ ID NO: 257677 - DNA, 71 bp, Homo sapiens; identical to SEQ ID NO: 211533
  chr7:47581607-47581678
  hypo

SEQ ID NO: 257678 - DNA, 35 bp, Homo sapiens
  chr7:47591522-47591557
  hypo
aaccgtgtgtccaccgggagcgatccttggcctct

SEQ ID NO: 257679 - DNA, 451 bp, Homo sapiens; identical to SEQ ID NO: 211534
  chr7:47605260-47605711
  hypo

SEQ ID NO: 257680 - DNA, 69 bp, Homo sapiens
  chr7:47612934-47613003
  hypo
ccaccctggggacaccctgccgccctccacgctgcctcccaccagcccgctaggtcgctggggcattgg

SEQ ID NO: 257681 - DNA, 38 bp, Homo sapiens; identical to SEQ ID NO: 211535
  chr7:47615110-47615148
  hypo

SEQ ID NO: 257682 - DNA, 31 bp, Homo sapiens
  chr7:47628646-47628677
  hypo
gtgccatcaaaagaaactagcggctgggtgc

SEQ ID NO: 257683 - DNA, 86 bp, Homo sapiens
  chr7:47639913-47639999
  hypo
gaagaagacacaagcggctgatcgtcgagagcacgcaggcagaagagcacattgacaggcaccggcatgcccgcaggccatcaact

SEQ ID NO: 257684 - DNA, 151 bp, Homo sapiens; identical to SEQ ID NO: 211537
  chr7:47679854-47680005
  hypo

SEQ ID NO: 257685 - DNA, 62 bp, Homo sapiens
  chr7:47711089-47711151
  hypo
gaacacataggcatacgtggaaggttgagccatggcatttgggaacccgcctaaccccccgg

SEQ ID NO: 257686 - DNA, 33 bp, Homo sapiens
  chr7:48093728-48093761
  hypo
tggctgagcatggtggctcacgcctgtaatccc

SEQ ID NO: 257687 - DNA, 115 bp, Homo sapiens
  chr7:48147030-48147145
  hypo
tgcagccggcgtccgcaatatcgagatggagtcctcggtgtttgccgccatgtgcagcgcctgcggcctccaaggtaagcggcacttgatgggcctcggcgtcccctcctccctt

SEQ ID NO: 257688 - DNA, 31 bp, Homo sapiens
  chr7:48212093-48212124
  hypo
tacaaaagttttaagttggccgggcgcggtg

SEQ ID NO: 257689 - DNA, 49 bp, Homo sapiens; identical to SEQ ID NO: 211539
  chr7:48964017-48964066
  hypo

SEQ ID NO: 257690 - DNA, 53 bp, Homo sapiens
  chr7:49740607-49740660
  hypo
gctaaggaaggagctggcagcgctgcggcgacgcatccccagaggagcagcag

SEQ ID NO: 257691 - DNA, 51 bp, Homo sapiens
  chr7:49842430-49842481
  hypo
aaaatggtatgtgagatccccgttggtgacggggtgcacctcccaccctga

SEQ ID NO: 257692 - DNA, 95 bp, Homo sapiens
  chr7:50221917-50222012
  hypo
tcacaaacatttgctgccaccggccacttacagaggctatgctaggcactgagggtgctagcgccattaggaatgccagataaaaataattgtca

SEQ ID NO: 257693 - DNA, 112 bp, Homo sapiens
  chr7:50231278-50231390
  hypo
tcagtaatgtgagaaggaggcgatcctggcttctcgtctcattgattctcgcacgtcttttcaacgtgagcggccgagctgagtgaatggcgatagtattttgtttagattt

SEQ ID NO: 257694 - DNA, 220 bp, Homo sapiens
  chr7:50251517-50251737
  hypo
cctcacactggcatcgggaggaggtacctacatgcttgaatagggaggaggtgctcacacgctggcatcgggaggcaggtgtccacacgctggtatcgggaggcaggtgtcagcatgctggcattgggaagaggcaccctcacactggcatcgggaggaggtgtccatatgttggcatcaggaggaggtgtccacacgctggtatcgggaagcaggtgtc

SEQ ID NO: 257695 - DNA, 104 bp, Homo sapiens
  chr7:50294027-50294131
  hypo
aggagctaacacagccatagcggaagctgccataggattttgtttattttcttttccttctgttttgtatttgtgaattttctttataagatcaagaaaggatt

SEQ ID NO: 257696 - DNA, 727 bp, Homo sapiens
  chr7:50341935-50342662
  hypo
gagagacgtaccagcggctaaaggtacttctgcatccaagaactagaggtgtcccgtgtcccctttacaacattgttggcctccctctgggccttgtaccttatgtttattgcctcatttaatccaggtaaggagtctttaggattggtggcatgtattctttttatagacaaggaagatgatgctcaggagtttggataacctgcccaaggtcacgcagtggaggagaggactagaaggtaaatcaatggacctttcactaccttccccttctctgggctgtagcagtgagttaactggctcagacttgcccagcggaatgcccttcaggacacactgagtactgtagtaagagctgcatatgcgctcagggagaatgtggatagacgctgtttgtgattcacgggtaaagggccttctcccagaggcagcagaggcagatcctgtctctggtgtgccctggcccccgacttggaggcctcctgggccaggccaagaccttccccggcagcgatggtctccagccacactcaactgccctgaagggacatttcctgcttattcccttgcccggctgtgtcctccacccggaaggcctgtgccttcttcgcctgcatgtcctaccctgaggaggctcccttggtctttcatcgctctccctatgggtcttcacgccttcccgaaccaccgcgcccaagcaggagcacgttctcggccctcttcacag

SEQ ID NO: 257697 - DNA, 85 bp, Homo sapiens
  chr7:50365027-50365112
  hypo
tgaaagaggtgaaaacgctaagatatttagcaattattactttaaacattttctatttataggccgggcgcagtggctcatgcct

SEQ ID NO: 257698 - DNA, 153 bp, Homo sapiens
  chr7:50415431-50415584
  hypo
ttacatgtttgacgcgtgtcacatgattccacaagtcactcaagggcaggaggattaccatcgatacggaaagatttcttagaaagcttaagtgaaagggaaaccagggagaaagtgtgcttcgtgagaataggtatgcggacggctctttgt

SEQ ID NO: 257699 - DNA, 146 bp, Homo sapiens
  chr7:50441146-50441292
  hypo
ttatgaagtcaagccgcgtaggggaacatgccaagaggattatcccaatgcctgttctgcgtggtgtcctttttctagcctcggaagcactaggcctacaccttcgctatagccctcgtcttagcgcctgtatttgaaaaacttgc

SEQ ID NO: 257700 - DNA, 180 bp, Homo sapiens
  chr7:50443887-50444067
  hypo
agaccactcctgacgtgaacctgcttaaagtgagggcccaattctaaagtgggaactatgtaaatacctttctagtgcattttcagataatcgccactgggcctatggatggagagggctggcagatctccctgtaaccccaggtgcatcccgaggcctgccaccgaagcccactcaagg

SEQ ID NO: 257701 - DNA, 56 bp, Homo sapiens; identical to SEQ ID NO: 211543
  chr7:50447754-50447810
  hypo

SEQ ID NO: 257702 - DNA, 167 bp, Homo sapiens
  chr7:50450251-50450418
  hypo
cagtgcaatcagtgcggggcctcattcacccagaagggcaacctgctccggcacatcaagctgcattccggggagaagcccttcaaatgccacctctgcaactacgcctgccgccggagggacgccctcactggccacctgaggacgcactccggtaggtcccctgg

SEQ ID NO: 257703 - DNA, 108 bp, Homo sapiens
  chr7:50460166-50460274
  hypo
accatccagccagacgctgcagggacagtgagccagggtccgagtggaaaggcgctaggcttgggaaccagctcagagtcaatacagagccaccgccactcaccaact

SEQ ID NO: 257704 - DNA, 103 bp, Homo sapiens; identical to SEQ ID NO: 211544
  chr7:50514846-50514949
  hypo

SEQ ID NO: 257705 - DNA, 43 bp, Homo sapiens
  chr7:50537914-50537957
  hypo
agctggcttccttttcggctcaccggctcgcctatttctcttg

SEQ ID NO: 257706 - DNA, 423 bp, Homo sapiens
  chr7:50560481-50560904
  hypo
ctggtggctgaactgaaccccgagcgccggggaagagttgtccgggagagatgagcgcacagccgccaacttgctggcatcagctctgcagcgtctgcggcagcctcggggcatcagctctgcggcaggcactccacgtcccgaaaggctcaactccttctcaccaccgcactgactaagcaggttttcttcagccttaacatacgcactggttgtctggacctgagggcaggacgccgcattcattacactccttcttatcgtgtgtcaatatttgcctccaagattagggacccaaaatatttctggtccctgaccgcttcagtttcctcatctgtaaagagagcgtggcaatgtctgtgtccctcaacacagggctgtcgtgggggtccagagagctacgagaggttagggacttagaag

SEQ ID NO: 257707 - DNA, 250 bp, Homo sapiens
  chr7:50611649-50611899
  hypo
gcggcagggatcagcggccgcaggtacccgggctccacgtcagggtagacctggcgtccctcaatgccttccatgtagttggccatgtaatccaccatctccttccctctccttcggaattcacttgcgttcatggtgtctgggctctgtcagaggtgaaaactgcagaaagaaaatgattcagtgagcaaattttgcaacctctgaactggaaggcggggataccaagcaagccgtgggtagggacacc

SEQ ID NO: 257708 - DNA, 355 bp, Homo sapiens
  chr7:50654699-50655054
  hypo
gcagagtggatctgcgtccacgtgtgagtacacagccacggcagagtggatctgcgcccacgtgtgagtacacagctacggcagagtggatctgtgtccacgtgtgagtatacagctatggcagagtggatccgcttgcccacgtgtgagtacacagccacggcagagtggatctgcgtccacgtgtgagtatacagctacggcagagtggatccatttgcccacatgtgaatatacagctatggcagagtggatccgtttgcccacgtgtgagtatacagctacagcagagtggatctgtgtacccaggtgtgagtatacagttacggcataatggatccgtgtgcccaggtgt

SEQ ID NO: 257709 - DNA, 112 bp, Homo sapiens; identical to SEQ ID NO: 211549
  chr7:50658396-50658508
  hypo

SEQ ID NO: 257710 - DNA, 103 bp, Homo sapiens; identical to SEQ ID NO: 211550
  chr7:50659743-50659846
  hypo

SEQ ID NO: 257711 - DNA, 624 bp, Homo sapiens
  chr7:50660382-50661006
  hypo
ccagtttattttcaactttccgctggatcttccatgccctccccaatttggccgatgcagagggaggcgaccctgctgggttcacagcagcaaatcgtcgtttaagtccaacaaactagtcaatcttggtcggctggcaccgaacaaacccatctcgctctgggtccccaggtgcagaatcgatgtgtgttcttcaccaacgcacagaccgcttcttcactccagtgttcacttcctccagtcttcagccgagaggacatctgcggtcataaggccactcggatgcagtggtgcttgagtttgcaaggcaggactcctttgttcagctggtaaaagtcaaccagctggatcaggtcagagaatttggtgttcccgtcatctaggctgaagaacgtctgcccgtcgtcctcgcactggagagacacaagaacacttgccaggttagaggctgccacctcagggaacagaacggggcccacggccagcagcagctacatctgcccatgatttgattccagagggacacacagggcaaggtaggctagaaaacaccaggggcgggaaagacgggagcagaggatgtgtgctgggggctgccatgtccctgagcgagggacagacttt

SEQ ID NO: 257712 - DNA, 89 bp, Homo sapiens
  chr7:50667300-50667389
  hypo
ggctccagggaggacggagaggaacacctgctgaagaataagacgggcggcaccagccgggctgatttggggaacggaaggtaacagag

SEQ ID NO: 257713 - DNA, 202 bp, Homo sapiens
  chr7:50687516-50687718
  hypo
cactgaagcccgcacgcacatcatggaatagttcttgtcaaccgaattacacgtgaaggcagggaagaaaacacactccatcctccagcacccgctgtggacacgtacacacacacacatgcacgtacgcacacgcctccttcacagcatcttacatagcagcactgtcccccagaaagggaaaagtcgcttccctcactgt

SEQ ID NO: 257714 - DNA, 166 bp, Homo sapiens
  chr7:50695454-50695620
  hypo
ttacctcgacagcccggaaaaagcagtcagaggagcaagatggcattttaaattgcgactgcctcttgcaagggagcgtgtttccgtctctccccactgtcccaggctggctgtgtggagcctgcgtgtgccctggggggcaggctgtctccgggcagcagggagg

SEQ ID NO: 257715 - DNA, 203 bp, Homo sapiens
  chr7:50709530-50709733
  hypo
tcagtggcctgaggatttaccgtgagcgagcccagagtgtgtctgcagactggcgccgaggaggcaagggcgtgggaaggctcaacctggccagcggcagagtaccaggaagtctgcacgaactcactgctgctcacctgaggaacacggggtggggagaaggtgaggagttccgcggcagcgacagaggctctacatagagg

SEQ ID NO: 257716 - DNA, 190 bp, Homo sapiens; identical to SEQ ID NO: 211552
  chr7:50715838-50716028
  hypo

SEQ ID NO: 257717 - DNA, 108 bp, Homo sapiens; identical to SEQ ID NO: 211553
  chr7:50720336-50720444
  hypo

SEQ ID NO: 257718 - DNA, 46 bp, Homo sapiens
  chr7:50734033-50734079
  hypo
agctcagagggaggcggcattggaggaatcgcgtgctgttgaatag

SEQ ID NO: 257719 - DNA, 37 bp, Homo sapiens
  chr7:50740987-50741024
  hypo
cccacggagccccacgccatcccgactgcgacagggc

SEQ ID NO: 257720 - DNA, 82 bp, Homo sapiens
  chr7:50769974-50770056
  hypo
ctctcggctggatacggtgggcctggctctggccctgcttccccagtcactgccggagaagggaaagcgcagccctttgtat

SEQ ID NO: 257721 - DNA, 257 bp, Homo sapiens
  chr7:50801206-50801463
  hypo
aatcaccaaagaacgccccagaacactttgctggggctgaaaggaagcagtcaatagcagtggaagtactggcacaatgaagggagcaggtccatgacctggctcagacgtccccaacctactcagtgagaactgtgcccgcatccacccttcacctctgccatgatcagcagccccaaggcctcagccttctccggctcacagtcagcctgtcctcggggtagctggtgttacacgtcaacagtccaggctctaat

SEQ ID NO: 257722 - DNA, 210 bp, Homo sapiens
  chr7:50816099-50816309
  hypo
gtgagagctgagctcgggaaagtgttggaaattaggagtggagaaaggaggtaggagaaacagcataacaaaaccagaggcaaaggcacacacaacaggctgggagaatgcggagaaaatcagggtaccagggatggggtcgggtaaaaacaagcctttgtggaacatttataatgggccaggttctcagctaagcgctgacttccattt

SEQ ID NO: 257723 - DNA, 81 bp, Homo sapiens
  chr7:50821773-50821854
  hypo
ggcgactgcctgcccgtgagcacggcactccctgattcagcttcgcagggctgccttcctgaagctcgcacacctgcctga

SEQ ID NO: 257724 - DNA, 179 bp, Homo sapiens
  chr7:50823230-50823409
  hypo
gtgacccaggaggcaggcagcatcacccccaccatatggaagggcacaaggagaccagtgaggcccagaggcatgtccgcgaggagagtgtgcgcagcccggctctgctgcagcccaggtcctcccatccctacccgactcagcccggtgttcccaggcagagccgagccaaggaggag

SEQ ID NO: 257725 - DNA, 172 bp, Homo sapiens
  chr7:50853192-50853364
  hypo
cctggcccatggtgacgggcactgacaggagatacatcctccaccccaaccccttcccagcactgtctggaggactgggagctcgtgacacaagccagccccacatgtggaaccattggcttcactcaattctaggcactgcccaccgcgggcaccccgcctcaccctgcac

SEQ ID NO: 257726 - DNA, 204 bp, Homo sapiens
  chr7:50876168-50876372
  hypo
agagtgagcccattcgtcgaagaagggggattgggctgggtggcctggcatccgcatgccaccccggtcacatctccttccttgcacccttgcagtaggggtgttaccatgaaagagccacgcaaccacagggaagcacagctgcccgagcagcaggtctgcgggcacagcagcttcccctggaaggagcgtggccctggcagg

SEQ ID NO: 257727 - DNA, 42 bp, Homo sapiens
  chr7:50905759-50905801
  hypo
tctgaatggagtatgtgcagcggatgtgagtgagtgcgtgtg

SEQ ID NO: 257728 - DNA, 191 bp, Homo sapiens; identical to SEQ ID NO: 211554
  chr7:50935531-50935722
  hypo

SEQ ID NO: 257729 - DNA, 159 bp, Homo sapiens; identical to SEQ ID NO: 211555
  chr7:51083468-51083627
  hypo

SEQ ID NO: 257730 - DNA, 361 bp, Homo sapiens
  chr7:51092657-51093018
  hypo
tgagagacacagtgacgccggctctctctcaacccactcccatgtgaccgcctcgcagctcctgcccacaggcaagcgtgtccctggatctacgctgcacctccaaccctctggccccattgaaatgcgcacacacagtcgccatcacctttctcagtctcgcagcccctgtgccggagcggatggcgtccatcaaggcttgccttgcgtctgcggtgttgctgagggtgcccgtgctgaacctggaggccgtccttggtgcagagagagcctgggagggtggagggggtggtgggggaatggctggtggggacagaagaccaaggtcttctagcagaggactttccgagccctgagcaga

SEQ ID NO: 257731 - DNA, 184 bp, Homo sapiens; identical to SEQ ID NO: 211557
  chr7:51098965-51099149
  hypo

SEQ ID NO: 257732 - DNA, 40 bp, Homo sapiens
  chr7:51111296-51111336
  hypo
agctgccaactgacacggtctcctccgcctctgacagcac

SEQ ID NO: 257733 - DNA, 125 bp, Homo sapiens
  chr7:51113097-51113222
  hypo
agcttctgaagggacagacacgtacgcaaagaatgacagtgctgtatggtcacaccaactctcggtgtgctcccataggcagagtgtggcaggctggactgagcgaggtggtggcacacagtagg

SEQ ID NO: 257734 - DNA, 167 bp, Homo sapiens
  chr7:51126558-51126725
  hypo
acgactttcgttcagcgtcatcttattatcccaggccggggctactgtctgtgcagattacaccttctcggcaggtctgcatgggttttctctggctgcgctcatgtcctcccatgtccccagactgcacatgttagggtcactggggtgtccgaattgtccccatg

SEQ ID NO: 257735 - DNA, 173 bp, Homo sapiens
  chr7:51130438-51130611
  hypo
cagcctgccatcccaggagtcgtgcctgccagcaccagggactgcgtctgcagggggtggcatgagcaaggctgctggtcccggctcagctgtcctggaagaggctgtgagacacccgtggagagcgctggggcacacacaggagcaaccacggtgaagtcctgagtccttga

SEQ ID NO: 257736 - DNA, 69 bp, Homo sapiens
  chr7:51323448-51323517
  hypo
ggtgtcacctcaggaggttccgatgacctcacatcaaggtggtgtgccgatgcaggagcaatgcaggcc

SEQ ID NO: 257737 - DNA, 42 bp, Homo sapiens
  chr7:51374681-51374723
  hypo
ggccaacgatgaggacgtggacactgacgagagacgtcagag

SEQ ID NO: 257738 - DNA, 42 bp, Homo sapiens
  chr7:51873291-51873333
  hypo
gcctaatctacttttattaccgtcaacaatcttctgtaattt

SEQ ID NO: 257739 - DNA, 241 bp, Homo sapiens
  chr7:52736845-52737086
  hypo
ccattccatgcctgaggagtcgggcaggcggcccgcccaggccacgctttccgtgtcctctggcccgcgaggctttgcatggacagaaccaacggcgagccgcgccctggggactccaggctgccgggatccagtcccgcctccagcgcaggctccaccctggggagctcccgagaggcctgcgcgctcctgccactctccaagcctgcaaggaagaaccgaaagacctttattacattcc

SEQ ID NO: 257740 - DNA, 94 bp, Homo sapiens
  chr7:53071290-53071384
  hypo
ccagagcccccatttgtaaacgaacctgtgtcatatttgataaacacgattctgggcacagccctaggccaccgctgagtgacaccaaagccct

SEQ ID NO: 257741 - DNA, 750 bp, Homo sapiens
  chr7:53103561-53104311
  hypo
ccagtgggggcgcccggtgcccagcacccacctcatcgaggtgcggcccacccaggaccccgccaagccgcagcgggtggtctccgagggctggaggcgccctgcccttcccggggagaccgctctggggcgagacctctcctgtgcctgggagggttgcatgaaaggggggctgtgtcgtgcctggaacccaggacggacctggagcccggtgaccatcgggatcgcgccccctgagcgtcaggagagcccctggagatcccctggacagagagcccgccccgcaggccgccccgccgcccaggagctcctggacccctgcacccgggagactctgctgggggcgctcagccagtgccccaagggaagcgctaggttcgacgggccgttgtggttcgaggtctcagacagcaagggtggcaggcggaacctgcagccccggccctctgccttcaagcccctgagcaaaaatggagcggttgcttccttcgtgcccaggccagggcctctgaagccgagcctcggcccctggagcctcagtttttgtgatgatgcttggccttccgtgctggtccagcccgccccatccgccatctgggacttctgggaggcgacaacgccttcctgcggcagctgcagtagggtctccttcgccctcgaggtcacccagtctgctggcccctttggctcctaagaatctgggctctgctacccacctccggagacacaagcccacgtatctactttcac

SEQ ID NO: 257742 - DNA, 149 bp, Homo sapiens
  chr7:53155253-53155402
  hypo
aaactgcctggcagccttgtcgctgcccatgtgcgcacatgacgcctccctgggcccttggaatgatcgagctcatgtaaagcttgaatcgcatatttgacatcatgctcaagcccgtggggctgggcggccagtgtggatgtacttac

SEQ ID NO: 257743 - DNA, 41 bp, Homo sapiens
  chr7:53364397-53364438
  hypo
ccatgctccaggccatggaccgatactgttaggaactgggc

SEQ ID NO: 257744 - DNA, 42 bp, Homo sapiens
  chr7:54332183-54332225
  hypo
tccatgaaatgtgttttttacgtaaatattattctttctaat

SEQ ID NO: 257745 - DNA, 80 bp, Homo sapiens
  chr7:54842471-54842551
  hypo
ctgtctttaaaaaaaaaaaaaaaaaaaaattatttcttggtaattacaaagttgtgtccatcagacgaactctagaactc

SEQ ID NO: 257746 - DNA, 788 bp, Homo sapiens
  chr7:55145813-55146601
  hypo
cctgtccaccgtgccgtgttcctgtcctggggtatttgggtgtgtggcgtgtggggaggggagaaggagcaaggcggcagggaggggatgaggaccaccctgtccatgggacaggccctgggccccgcacacaccccaagccccgcgtcccgcgtcctcactgtcctgggacaccccccaccccaccccaccgccacagcccagagcggtgccaggaagccgcctcgacgcagccgtatcttgaggctccagccccatccccagggtaccacgccacgtagagacactatttttcacttcgtgtttgtcactcctaaagcatgtgtgctagctgcaccaaccctgggatgcctcggtgcatagggtttatgtgcgtcctcctccttccctctgagctggtcccccgtggggaactgctgcccagactgacctgcgtccttccgcacgtgcaggaaaatgtccacgtgcacttgtcagggtgggggccacacgggcaccaccactgatcatctgtgggatcgagttactgcccatgcagatcccacgtgcagggcccagtcgctttggtgagagagtggacgctgtggtgactccacggtctgtggctgtgctcaggaggacagagaggggacatcctgagatggtttgggcagcccgcggatcctgtgcatgtccccagagcgtccactttctccatggagcagtggagtggcgttgctgagacagaaagttcaggttctccactccccatgcagcccccactcccctgtctccggccaggcacgcgt

SEQ ID NO: 257747 - DNA, 32 bp, Homo sapiens
  chr7:55147017-55147049
  hypo
gaagaggggcgggtcggcgtgctgctgaagat

SEQ ID NO: 257748 - DNA, 50 bp, Homo sapiens; identical to SEQ ID NO: 211560
  chr7:55212336-55212386
  hypo

SEQ ID NO: 257749 - DNA, 124 bp, Homo sapiens
  chr7:55223543-55223667
  hypo
acggctcgtgcgtccgagcctgtggggccgacagctatgagatggaggaagacggcgtccgcaagtgtaagaagtgcgaagggccttgccgcaaaggtaggaagcccgccggtgtgcggacgag

SEQ ID NO: 257750 - DNA, 60 bp, Homo sapiens
  chr7:55312949-55313009
  hypo
gaagtctcctcagtcatcaacgcaggctcttgacctctcgtgcactatatgaccaaagtc

SEQ ID NO: 257751 - DNA, 172 bp, Homo sapiens
  chr7:55323877-55324049
  hypo
actcacgcctgctgcgccctgtgctgcaggttgtacgcgatataaaacatgacactgactgcccgtgaggatcttgacaagttgttttgaagatggcattttgctaagtccctgagggtcactggtcctcaaagcggcatggcggcatggcgtggctggttctgccacatgc

SEQ ID NO: 257752 - DNA, 226 bp, Homo sapiens
  chr7:55464081-55464307
  hypo
tgcaaagggtttatcgcagccccgcctacccggagcaagggagatgcctagctccagctggttctagctttcagcattggggaagggagatgatcagctgcagcttctgctggccatcctggccaactgagggcgtggggatgggaggcactggtgcagttcacagtccaaaggcacaggctggccagaaggttgagcctgctcacaggcgcgtgctccccagcac

SEQ ID NO: 257753 - DNA, 61 bp, Homo sapiens
  chr7:55468907-55468968
  hypo
ggaagaaagaaaaacggagcgctgcccgctgttgtaccagtggcaccggaagcagtacgtt

SEQ ID NO: 257754 - DNA, 216 bp, Homo sapiens
  chr7:55473623-55473839
  hypo
cctgctgcacggttcgtggctgttgtcagtgcagaactacgattcagaaatgtggaaaggagggctttgtttctcatacagggttacagcctgcagctaatcatacgtagccttgggctagaagccagaaatattctgagggagtggaaagggagcaggaacgtatgccaagccaggtggccgaatgtatgtgtcggtgagctgcaggaggagtgg

SEQ ID NO: 257755 - DNA, 97 bp, Homo sapiens
  chr7:55495726-55495823
  hypo
caggatagagcaggcgtttcgagttgcttctggaatcatcagctgaagcggcaggaggaaggtgccagggagaacagagtgtcgttgagccgttcgg

SEQ ID NO: 257756 - DNA, 174 bp, Homo sapiens
  chr7:55506181-55506355
  hypo
ggaggctctttgaaatagaacggtaaccatgacaccaaagtcaacactcggagaaagtgaagaggctggcaggtgaataagtgtggacagggcgcctcacagagcaggacaggcaaaggccccggggaagcacttctcactcgctgcagaatcgcaggccttggagaaggcaca

SEQ ID NO: 257757 - DNA, 176 bp, Homo sapiens
  chr7:55540710-55540886
  hypo
taatagggcggccccggctgctgggctcctgaaagacagacaaacataggtgagcacagaagggaaagccccatcacaccgcaagtatgtgcaggctgcagggccagcagaccacgccccgtcattcactcagcgacagtgtatgaaggacccaacatgcccggtgagggggcacc

SEQ ID NO: 257758 - DNA, 116 bp, Homo sapiens
  chr7:55541146-55541262
  hypo
tccattctccctgccgggctagtgtgccctcagggcaggagttactcacaggcagggaggccgtgcacctgggcacacatagccaggctgcagctgattgacgctccatgggtcag

SEQ ID NO: 257759 - DNA, 206 bp, Homo sapiens
  chr7:55541705-55541911
  hypo
agtcagaccatgggaatctgcgcatgtgcggaaggagagcatgtagaacagaagcacaggccaggcctgcactgtctctcactgagcgctctcaactgccaggagggcactcagcacagatgccaccctgtgtgagaggctgcctcgccctgcatctgtgccgtcccacagacaccacctgagtgagatgccgtgtggtcccacag

SEQ ID NO: 257760 - DNA, 205 bp, Homo sapiens
  chr7:55542790-55542995
  hypo
gcagctggaaggcacgcagggcaagagaaggtgcctttgtaaggatggaaacgcttgcgcatatgggcaggggtagggacagacacaggacagagagaactttcggggagaacacagctcggtgagggtaatggcctctggtaaagcacttggagcctactagctgggagctggtgcacaggaaggcacccgagacagtgggccg

SEQ ID NO: 257761 - DNA, 229 bp, Homo sapiens; identical to SEQ ID NO: 211562
  chr7:55552439-55552668
  hypo

SEQ ID NO: 257762 - DNA, 614 bp, Homo sapiens; identical to SEQ ID NO: 211563
  chr7:55553220-55553834
  hypo

SEQ ID NO: 257763 - DNA, 68 bp, Homo sapiens
  chr7:55554250-55554318
  hypo
ctggtgaggaggcccgccatattgggaggccatctcaattcctgggcgtcaccaagtaagacagttcc

SEQ ID NO: 257764 - DNA, 223 bp, Homo sapiens; identical to SEQ ID NO: 211564
  chr7:55557173-55557396
  hypo

SEQ ID NO: 257765 - DNA, 51 bp, Homo sapiens
  chr7:55570141-55570192
  hypo
tctccgcattcttgcggctcatctgcggcgctggcccggctcccattgtgg

SEQ ID NO: 257766 - DNA, 199 bp, Homo sapiens
  chr7:55571328-55571527
  hypo
ggggcttttggaaggtgatccggttaccaaggtgaagccctcgtgacagggttgggggtctctgtaagaagagccatgaagagggcttgctgcttgctccactccccaccacgtgaggatggaacaagacagtgcctacgaaccacggacagagccctcaacagacaccagagctgacggaaccttggtcttggacttc

SEQ ID NO: 257767 - DNA, 42 bp, Homo sapiens; identical to SEQ ID NO: 211565
  chr7:55585937-55585979
  hypo

SEQ ID NO: 257768 - DNA, 137 bp, Homo sapiens
  chr7:55588552-55588689
  hypo
gaatttcaggctgtcctcaacgtaactggtctgagtgggccagacaccacggtgaggtcacctgctcatcccccagtgaggcaagcctggcaccgcagcagaggctgggccacgccgggctttccccatcccacacc

SEQ ID NO: 257769 - DNA, 42 bp, Homo sapiens
  chr7:55589957-55589999
  hypo
aacgtcacgccagtgacattcgatgggttatgaaaatgacat

SEQ ID NO: 257770 - DNA, 65 bp, Homo sapiens; identical to SEQ ID NO: 211567
  chr7:55619129-55619194
  hypo

SEQ ID NO: 257771 - DNA, 34 bp, Homo sapiens
  chr7:55638346-55638380
  hypo
attgcagggccgggcgcggtggctcaccttgtaa

SEQ ID NO: 257772 - DNA, 145 bp, Homo sapiens
  chr7:55923002-55923147
  hypo
atcacaactttttaaaaactcatcctagtactgacgtttcaggtcgaccaattgttccagaatcgaaggagagacagaaacccacaggaaaagacaagatgggagcatcaacttttctaggcaagaaagacgcagacatcagtga

SEQ ID NO: 257773 - DNA, 82 bp, Homo sapiens
  chr7:55960568-55960650
  hypo
aaaaaaaaaaaaaggcggagtaataggagacaaggcatacaaatttacccaggctggagtgcagtggtgtgatctctgctca

SEQ ID NO: 257774 - DNA, 80 bp, Homo sapiens
  chr7:56018495-56018575
  hypo
aagaaagaaacccactgctgtttaaaggtaggtgtgtgtgtgcgtgtgtgtatgtttcaatgtatcgatagctacatctg

SEQ ID NO: 257775 - DNA, 388 bp, Homo sapiens
  chr7:56030889-56031277
  hypo
gagccaccgtgcctggctcatttgtggctttttaaaaaatcttcctggaggacacatttttccctctatagcgccagccacccagatccacgcctttgcttaagttatttcctcaagacagggatgccctcccttcttcccctgggactgatatgtcctgccagctccttggagaactttctccccatctatcctctaattcacagccacccccggttacatgctctctttccgtgcctctttcgtgtctcatgaacctgtccattttgacacttaacacactcggtccaatcatcattgtacattctgtccccactagacccagacggccttgagggtaaggtaccaaggactccccatggccagtgcccaccggtgctgaaatgaa

SEQ ID NO: 257776 - DNA, 76 bp, Homo sapiens; identical to SEQ ID NO: 211568
  chr7:56031537-56031613
  hypo

SEQ ID NO: 257777 - DNA, 46 bp, Homo sapiens
  chr7:56031793-56031839
  hypo
caaagtgctgggatgacaggcgtgagctattgcgtccggccccaga

SEQ ID NO: 257778 - DNA, 151 bp, Homo sapiens
  chr7:56037252-56037403
  hypo
ttgtctgtttgagttgtgatcgtgtttgtctgtctgccctcaccagcaaactgagctcccgtgaagtcagggccaggttcatctgtgcatcgtcagtggctgacaggtgtagtgcacagtctgtaaataacagtgatcatattgccgggcg

SEQ ID NO: 257779 - DNA, 84 bp, Homo sapiens
  chr7:56075635-56075719
  hypo
agaatgaacaatggcgtcacacggacaatcagccatgcctttctgagtccatcctagtgtaggcatgtgcgtaactcctgggag

SEQ ID NO: 257780 - DNA, 90 bp, Homo sapiens
  chr7:56078752-56078842
  hypo
tccgttctgacatacggataaacttttattgacataccaaagagaaaccaatattcactgaaggctgccgaatccgtatttctaagagta

SEQ ID NO: 257781 - DNA, 165 bp, Homo sapiens
  chr7:56144506-56144671
  hypo
cctccttgctctcctcgcaggtcaagtttacccatgggggaactggttccagccaaaccgcaccaacctgtggcaggtaagacctacgttcctcctttcaccaagcattgacagagacctgctggaggctgggcactgtgttgttaggccgcggcatccagaagg

SEQ ID NO: 257782 - DNA, 120 bp, Homo sapiens
  chr7:56332924-56333044
  hypo
tgaatttcccccgataagtggctgcttcctccaaagggttactcaggactttcctggcaagggcggatgattaggcctgccacaaaacttattaacttgtgaatcctttttttttttttt

SEQ ID NO: 257783 - DNA, 32 bp, Homo sapiens
  chr7:56362765-56362797
  hypo
ctttttttttttttttgagacggagtctagct

SEQ ID NO: 257784 - DNA, 120 bp, Homo sapiens
  chr7:56363037-56363157
  hypo
ccaccgcgccaggccacacagctctagtttaaaactgtggcaaagtgacagctcattccctaggaggcagacagtcctgtgactataccagtgtaatgattagcaagttcttcttaggtc

SEQ ID NO: 257785 - DNA, 104 bp, Homo sapiens; identical to SEQ ID NO: 211570
  chr7:56636909-56637013
  hypo

SEQ ID NO: 257786 - DNA, 155 bp, Homo sapiens
  chr7:56665470-56665625
  hypo
agccatgactcctacctacccgcagtttgagcaatcagaaacggagactgttcatctgtttatccaggctctatcagtcggtgtcatcatcggcaagcagggccaagcacatcaagcagctttctcgctttgccggagcttcaattaacattgct

SEQ ID NO: 257787 - DNA, 468 bp, Homo sapiens
  chr7:57247598-57248066
  hypo
acttctccttaaagccctggcgtcggttgtccaaatcggcagggaagctccagaggccacccagctccttgggctcccgcgacggactctccttggggtacagcatcccgccttgcagtgccagcacacagcaacagcggcccaaacgccgtgcaggccacacctgtccactaggtcacgctttccactccactgcttggccaccgtctgcagggctaagagcagtgcaggaggaggctgcggacaggtcgcatcaggtacctgagacgatccgcgccatctttgctgagggcgagtgccaggcctagaggggcgggatgggcctggcgctgcccagtggggcctgtggctggaaccccgggctaggcctttggggaagcgggaccctcactctcagccccagccaagaagggcaaggtcggttccccaccccagcacagtctggacgatccagggctgcaggccagg

SEQ ID NO: 257788 - DNA, 335 bp, Homo sapiens
  chr7:57324292-57324627
  hypo
gctcctcccacccaggaatgcggcacctcgagttgggattctcccctgaagattccccagaggtcccgcacaacttggggaaatgcggggctgtgggcgtggagctgtcccgggagggctggagcgagccaaagtcaccgaccagggaccaggcgatactggacgcccgggctcccggcggccgccttgctaccatcttgcaccttagcagactgagggcggagctgcgccgaagaggactcgaatcctggtccctgcaccgaccgcgaggaggcccgggttccccccacagccggttccgaccaggcgcctccggcacactcaccagtggttgt

SEQ ID NO: 257789 - DNA, 218 bp, Homo sapiens; identical to SEQ ID NO: 211573
  chr7:57706364-57706582
  hypo

SEQ ID NO: 257790 - DNA, 277 bp, Homo sapiens; identical to SEQ ID NO: 211574
  chr7:57706642-57706919
  hypo

SEQ ID NO: 257791 - DNA, 141 bp, Homo sapiens
  chr7:57711530-57711671
  hypo
tgtgtttcacaggaggcatacggggcgacggcgaaacacacggtgttgtccaggtatgtgccggtggaaggggggaacgagtgacctgtccatcaatgtccaggaaaatcgaagaacaccggggacctggtgggttggggg

SEQ ID NO: 257792 - DNA, 39 bp, Homo sapiens
  chr7:57712631-57712670
  hypo
ggccaggccttcacacacccaaagcggatccgcggcagt

SEQ ID NO: 257793 - DNA, 68 bp, Homo sapiens; identical to SEQ ID NO: 211575
  chr7:57878613-57878681
  hypo

SEQ ID NO: 257794 - DNA, 149 bp, Homo sapiens
  chr7:63027890-63028039
  hypo
acatgcatgcacacacgtgcatgcacacacgtgcatgcacacgggcacacacatgcacaaacatgctcacccgggcgtccacgtgcacacctggccccatgctcacgcctgcaggagcgctcgcatgcacacaacgcacatggtctcca

SEQ ID NO: 257795 - DNA, 149 bp, Homo sapiens
  chr7:63392780-63392929
  hypo
ccacagctgcctccaggcctcggcctggtttcaccgcattctcgggattacacccctgacccccaaatcccgccccccaccagcgcttctcccactattggcttaactggcccgctggccctccctacgcccaggagagggtgacaccc

SEQ ID NO: 257796 - DNA, 35 bp, Homo sapiens; identical to SEQ ID NO: 211576
  chr7:63423514-63423549
  hypo

SEQ ID NO: 257797 - DNA, 34 bp, Homo sapiens; identical to SEQ ID NO: 211577
  chr7:63423789-63423823
  hypo

SEQ ID NO: 257798 - DNA, 159 bp, Homo sapiens; identical to SEQ ID NO: 211578
  chr7:63569123-63569282
  hypo

SEQ ID NO: 257799 - DNA, 372 bp, Homo sapiens
  chr7:63652610-63652982
  hypo
agaagctaaggtcccctccccgccttgggcacctcggcctgcgtcattgcgctctgcctggctgcggccgctgtggccaacacctccccggagctcctggagagcgaggcgaagaaagactcagccggcacaaggcaaaggttcagcgggttgagggttcaaggacacggaacgggtgcctgggtggaaagcggtcaccaggtgtgagtgtcaccgtggggccagtgcccagttttgctgcccccgcttcctgaagatcgcagctggagccacctgggcgcagcgtttgatgtggcacctgcagtggccaaagtgacacccaaccgtgaggacgctgcagggagtcggcacggagacatctgtcccctctgt

SEQ ID NO: 257800 - DNA, 44 bp, Homo sapiens
  chr7:63666706-63666750
  hypo
acctcttacacagtccctaccgtgacacatgggaattacaattt

SEQ ID NO: 257801 - DNA, 44 bp, Homo sapiens; identical to SEQ ID NO: 211581
  chr7:63667110-63667154
  hypo

SEQ ID NO: 257802 - DNA, 169 bp, Homo sapiens
  chr7:63757331-63757500
  hypo
ctgtgtgaacatatacgccacaatcacacctgcgggaaggaccaggaataaatttcacaattctacatatttcccagctttaggtctgagagtcaacacctcttgtgagttgcatccaaatacacgagacacagtcttaacatcggacaggatccgtgcatgagagctc

SEQ ID NO: 257803 - DNA, 103 bp, Homo sapiens; identical to SEQ ID NO: 211582
  chr7:63864996-63865099
  hypo

SEQ ID NO: 257804 - DNA, 42 bp, Homo sapiens
  chr7:63867873-63867915
  hypo
agaaattttccttgcttagccgatttgtcctccctctctgct

SEQ ID NO: 257805 - DNA, 437 bp, Homo sapiens; identical to SEQ ID NO: 211583
  chr7:64146484-64146921
  hypo

SEQ ID NO: 257806 - DNA, 683 bp, Homo sapiens
  chr7:64330354-64331037
  hypo
tctttagatcagaccggctatgcccgtactattttcccctgcttaggcaggctgacatccctgacagctgggcgcccgagccggcctcgcgaatgcacatacgccagttgcggggcaccaggcacgagtggtgagctgcggctgtcgtcacagtgaacgccaccgttgcctggccacgggtccctgcggcttggcaaaccagtagacttctgtggacgtgcatcgccgctggactctcacccgtcttctctgagagatccacgggatagtcccctgatcctagaattgggcagggccgacccagggtgaagaaacctcaagcggactcccagggctgcagatcgaaatccctaaggatcccaggggacccgcaggatgtgtcaggcatgcctaggcggtgtgggggtgagtctatttgatagttgccccccggtgatttctaggtaaaccctgcctgtgtttcccggggctgctctctccccggagggacttcctggtggagcagaaccgggttgcctcagaatgtgctgggttgtgtatttctgtgggagtgttgcaagtgtttgatgtctgtgtgtgtatgtctgtgtgtgtgtttctgtgtgtgcctggaagtggggttggttaaaggatctggcttgcgcactggagcgcttgttctttcgagtcggtcaatcttcttg

SEQ ID NO: 257807 - DNA, 535 bp, Homo sapiens
  chr7:64332670-64333205
  hypo
ctcctgcacacagcctctttcgggaattgaatcagaagagcagtttccagcgcccacctcacagtctcaaagcgcctcctactccagcagggtcgaccaccgagacgccccaaagaggctgtacggtcaagactttaagggtccctcggtgtttgtcataggcagccttttccccgagaccaggccggctctgcttgtaccattttcctctgcttaggcaggctgacagccctgacagccaggtgccccagcctacctcgcgaatgcccatgctccagtcgcaggacacctggcggaagcggggagccctggctcgcatcacagtgaaggccacctttgcctggtgacgagtccctgcggcttggcggagcaggagacctctgtgaacatgcgtcggtgttggactcacacctgtcttcactggggaatccaccggatagtcccgcgttcctagaagtggtcagtgccgacccagcctgaagaaacgtcaagcggagccccggggatgcagcacgaaatcactaaggatttcaaa

SEQ ID NO: 257808 - DNA, 42 bp, Homo sapiens
  chr7:64336401-64336443
  hypo
gatgaggtgtggatagggtccggaaacttccccttcaggaga

SEQ ID NO: 257809 - DNA, 381 bp, Homo sapiens
  chr7:64345085-64345466
  hypo
tattcccttctccctgggaccggattcttgcacacagactctttcgggaatggagtccaaagagaagttcccagcgcccacctcacattctcgaatcgccttttcctccagcgggacccgactaatgagacggcccgaggatgccctatggtagttacttttaggcttccacagtgattgtcgcaggcagcattttccctagactaggccggctctgccttcccattttcctctgctcaggcaggctgacagccctgacagccctgacagcctggccccagcacctgcctcgcggattcgcatgcgccagtcgcgggacacctgtcgcgagcggtgagccttggctcgcgtgtcagtgtatgccaccgttgcctggtgaca

SEQ ID NO: 257810 - DNA, 35 bp, Homo sapiens
  chr7:64358373-64358408
  hypo
gtattacaggcgtgagccaccgcacccggcctcat

SEQ ID NO: 257811 - DNA, 44 bp, Homo sapiens
  chr7:64358740-64358784
  hypo
gtttgagtgttcttcgtttgagtagtactcgcgtgccaaacgct

SEQ ID NO: 257812 - DNA, 127 bp, Homo sapiens
  chr7:64450762-64450889
  hypo
ggccactggcccagcggattaacatccaaaggctgagccctgaacaaagacagggcttgacttttatacatgcatcaggcaggggcaagtcgggtttttggcgcaaaacctgcgaggtgagaaagca

SEQ ID NO: 257813 - DNA, 143 bp, Homo sapiens
  chr7:64458253-64458396
  hypo
aaaggctggtaaataaaagtcggttgcccccccttgaacctgcccctgttcatcataatagataggtccccgtgtttcacggaggggcatctgccacactctggtgtggccaggtcgaaggcggcctgcttgatcatcctgac

SEQ ID NO: 257814 - DNA, 210 bp, Homo sapiens
  chr7:64459456-64459666
  hypo
ccatccttatgggacgggtcctgccttgggcccaaaccttactgcagtcctgtagcgtgaagtcctggaatcgtcctgtagccccttaggttccaatgcactgtcagggaggggcgccgggtcatgggagagccaatctcccctccgggttgaaggtctcccaatggtgccttgggtcacgggtctcccccagcccggggctccagtccc

SEQ ID NO: 257815 - DNA, 138 bp, Homo sapiens
  chr7:64478038-64478176
  hypo
gtgatagagcgagactccgtctcagaaaaaagcaaaacaagttagagaagggttttttttttaacttcattttgaaattgtgaagacaggcagtgagagtgagtgagttgtccaaattcaggccgcaagctggagagc

SEQ ID NO: 257816 - DNA, 38 bp, Homo sapiens
  chr7:64824060-64824098
  hypo
cgtgagtcaccgcacccggcaataaacactttttttta

SEQ ID NO: 257817 - DNA, 42 bp, Homo sapiens; identical to SEQ ID NO: 211590
  chr7:64851808-64851850
  hypo

SEQ ID NO: 257818 - DNA, 411 bp, Homo sapiens
  chr7:64895203-64895614
  hypo
tgatggacatgtgtgtgacacgtgtttgactcgaccaaattttttcacacctggctgacactgtgcgaaacctgacggacatgaatgagacatgtgtgtgacatatgactgacacgtgtgtgacatgtgaccaacacgtgggtcacaagtaattgacgtggtggacacgtgtataacgtgacatgtgactgacaggtttgtgatgtgaccaacacgtgactgacatgtgtgacatgtgattgatgtgacacgtggctgacatgtgtgacacgtgactgacacatgactgacgcgtcttttaaaagtaactgacgtaatagacatatgacttacacatgtgacacgtgaaaaattaacacgactgacacgtttgcgacatgtgactgaaacgtgatggatacatgtgtgacc

SEQ ID NO: 257819 - DNA, 104 bp, Homo sapiens
  chr7:65441721-65441825
  hypo
cagcctgggtaacatagggaaaccacttcttccctaaaaatacaaacaatcagccggtcgtggtggtgcgtgcttgcagccccggcagccccagctacttggga

SEQ ID NO: 257820 - DNA, 99 bp, Homo sapiens
  chr7:65442036-65442135
  hypo
agctccttaggaattcatcacggaagactcccagaaagggagtttccccagtaataatcggtgctgtctcatccttacgagcagcctgtcctgaattct

SEQ ID NO: 257821 - DNA, 144 bp, Homo sapiens
  chr7:65474282-65474426
  hypo
ggtgaaatgcttcccgttaccctcaggtaaagtcaacaggacctgtgtagattgtgtcgggggaggaggagtgaaggaacagatagttaaggttaggttgtttagaaaaaaatacattatttaggccgggcacggtggcttaca

SEQ ID NO: 257822 - DNA, 470 bp, Homo sapiens
  chr7:65553870-65554340
  hypo
aaggaattcagcttcgtgcagctctcagatgcctacaggtaagccctgaactgccacctccatctgccgctgccggcctctgtatcccccgccgcccgcggacgtggctgccttcctccccgtcccacccctccgccagacctggccattgcggcgctggaccagccaagggtccagccccttcagcgccagcacctctgtccccagcacgggaagcagcctgatgccccagaagaaaaaccccgacagtttggagctgatccggagcaaggctgggcgtgtgtttgggcgggtgagcaaggcagggggaggggcggggcctctgggctgatggtgggtggccaggggggcaggatcccgggtccagcccctgtgcctccctcttcccgcagtgtgccgggctcctgatgaccctcaagggacttcccagcacctacaacaaagacttacaggtgcgaggccgggggagg

SEQ ID NO: 257823 - DNA, 120 bp, Homo sapiens
  chr7:65562569-65562689
  hypo
ggattacaggcatgagcctccgcgcccagctgtgccattactttcaatggcaaaaccggcaattacttttggacggatacaatagtaacatcaaggatcactggtcatagatcagcatga

SEQ ID NO: 257824 - DNA, 264 bp, Homo sapiens
  chr7:65611005-65611269
  hypo
agttctgttgcttctgtcttcgttcttgcttctctcccccgtgtactgcgttgatttctgccattatttcttcacgcggctcttgcggttatcctctccccattctccctggctccccaagtccatctcccacatcaccgtcagagatcacatctaaaaccatgaatgtgatcccatttccctgcataaaccgtttatttagtacagcctcatcacttgtgaagtccgctttgtactgagagcgtaggctttggaataggagga

SEQ ID NO: 257825 - DNA, 159 bp, Homo sapiens
  chr7:65647879-65648038
  hypo
gtgagccaccgcgccaggcctctcatggcatttttgcagctctaaagagcggcaagagaacgtgccccaaagtgcaagcccttttcaagcctctcctggcttcacaattgctaagtttccattgaccaatgcaagaccgaatgaccaagcccagagtcc

SEQ ID NO: 257826 - DNA, 183 bp, Homo sapiens
  chr7:65841299-65841482
  hypo
ggcagaagatgggcgtgaagagacaatcctgagacaggggctggtgtaagagagggcccaaaagaggccagtatggggcaggggccgcgcccctcagggcctacgccgggcaggaggtgggcctggcgaggcctactttgggacgctttgggccactttgggccacatcgaggaaggcagctt

SEQ ID NO: 257827 - DNA, 272 bp, Homo sapiens
  chr7:65877891-65878163
  hypo
ggggggaaaaaaatacaccaagcgtgcaccacgcctggctaatttttgaaacttttctacagacggggttgcgtcacgttgcccagggcagtctcgaactccttagaccaagccatcctccccctcggcctcccaaagtgctgggattatagagtccagccagcctcatgttttctttaagcagtccctccctgttgcacagttggatagtttatttttttatttttttagacatggtttacctcagtctcgcaggacggagtgctgtgatg

SEQ ID NO: 257828 - DNA, 120 bp, Homo sapiens
  chr7:65879509-65879629
  hypo
gggtgacaggacagagtgagatcatgtctttaaaaaaatatatatgcaagtgacagcttttcttccagtgctaatgctcaaactgagtaaagtaattgggccggccccgtggctcagggg

SEQ ID NO: 257829 - DNA, 61 bp, Homo sapiens
  chr7:65938576-65938637
  hypo
taaaggataaggttcggatggctgcaccgaatgttcctcctttcaacgaggctgggccgag

SEQ ID NO: 257830 - DNA, 204 bp, Homo sapiens; identical to SEQ ID NO: 211596
  chr7:65939523-65939727
  hypo

SEQ ID NO: 257831 - DNA, 94 bp, Homo sapiens
  chr7:65969578-65969672
  hypo
tgtgaagaggagaggcgcactgggcgtcaataactttaaaaaggggggaaaatatcagttcccgagtctccatgcgtttcgtgttgaagaagaa

SEQ ID NO: 257832 - DNA, 36 bp, Homo sapiens
  chr7:66064299-66064335
  hypo
gctgggactacaggcgtgagccactgcacccagcca

SEQ ID NO: 257833 - DNA, 40 bp, Homo sapiens
  chr7:66076556-66076596
  hypo
aataattactgaaaattggccgggcgcggtggctcacgcc

SEQ ID NO: 257834 - DNA, 190 bp, Homo sapiens
  chr7:66105968-66106158
  hypo
ctccgtggggctggacggcagtgatctcctgttccctatgtgtaaacaaagattccagggcgtggttttgcactcctgttgtactcttttagaggtggaaaagaggtggatactgagatctaagaggaaaggatagtcattcacgttctgagatatgcgctctctctattgttctcgtacacaaagggat

SEQ ID NO: 257835 - DNA, 38 bp, Homo sapiens
  chr7:66150978-66151016
  hypo
ttataggccaggtgcggtggctcacgcctgtaatccca

SEQ ID NO: 257836 - DNA, 120 bp, Homo sapiens
  chr7:66204245-66204365
  hypo
ttttatactctgttgtaccctcagcgtagcacacattaggcacttaggaagaatctgagaaacgaatcagttaatccctactttaccaataatgaataaagactgagaaactcgggccgg

SEQ ID NO: 257837 - DNA, 188 bp, Homo sapiens; identical to SEQ ID NO: 211598
  chr7:66265794-66265982
  hypo

SEQ ID NO: 257838 - DNA, 140 bp, Homo sapiens
  chr7:66293249-66293389
  hypo
ggtgtgagccaccgcgcctggcttccacggtgttttctaacgccgcagcgaaacccatccgtgtgccacgtcaattccttagccgccatgccatgctgtcatctcagcctgagcttggcgtcaaccaaactctctggata

SEQ ID NO: 257839 - DNA, 129 bp, Homo sapiens; identical to SEQ ID NO: 211600
  chr7:66369062-66369191
  hypo

SEQ ID NO: 257840 - DNA, 210 bp, Homo sapiens
  chr7:66423291-66423501
  hypo
taagtgtttcttgtcgtgaggcacctgccatgtctgttgcgttttcctcggcagcgtgtagggcttcagcttcctgggttttcacccttcctgcaggcactgtggggtcctgagggccagtgggtccatttcacctcttgctgcatgatggtcagtagctgatctgttatggcattcacttccagattaattttccgtgtttgaagtatg

SEQ ID NO: 257841 - DNA, 696 bp, Homo sapiens
  chr7:66423830-66424526
  hypo
gagttccaagacacccctctcggtgacataaaccctcagcatgcactaagcctgtatgcccagccgcaggtgcccagcccgctctgcggtctcctgttgcagagctctggcccgctctagacctcctttgccaagacagtgcatcctctgcagtttccatagctaaagggagatcgtattcactaatgtgaatccttcccctttccagcagccagaggctctgtgtcccttcccttccctccccagcaggtgctggggtcgcaaggtcagtctcatggttgaggaaggtgctactcaatgagctctttgttccttctgcctccacctctccctgcctcctgcctggaacaggcaaactctgcgtggagcgcagtgttatttcctgctctctccttggactcaagtatttgtgtaggtggtgattcccctccatcccagtacagaatacgccttggaggagaagaactcatgtctctctgctgtcttagcctggtaaaacctgatacgtgccaggttctcaagtcaggtcagaggttttgctttaaaatcatttcattttcccggtgggccccctgtgcttccagttccctcacactcacggatctgtaaggattcccccaaaagtggaatgaacgcacagactatagcactccggagtctactcaaggtcattgtgaacttagttgctgtctcaaa

SEQ ID NO: 257842 - DNA, 36 bp, Homo sapiens; identical to SEQ ID NO: 211601
  chr7:66626984-66627020
  hypo

SEQ ID NO: 257843 - DNA, 31 bp, Homo sapiens
  chr7:66694225-66694256
  hypo
taagaatttagaatataggccgggtgcggtg

SEQ ID NO: 257844 - DNA, 88 bp, Homo sapiens; identical to SEQ ID NO: 211602
  chr7:66766508-66766596
  hypo

SEQ ID NO: 257845 - DNA, 180 bp, Homo sapiens
  chr7:66847453-66847633
  hypo
actccatctcaaaaaaaaaaaaaaattgtttcaatcctactttccatatcatgtctgttgtatgagtctttggaagattaaataaggtgctgcatgagatgggctcagttcagtgtctcctcgtggtaaaagactcagtgagtgctattattattagctatgatttatttatttattatt

SEQ ID NO: 257846 - DNA, 141 bp, Homo sapiens
  chr7:66880056-66880197
  hypo
atttagcatctgatgagggacgggtttccggttcatagacagcaaattcttgctgtgtcctcacataatgaaaaaggcaagggttctctctcaggtctcttttataaaggccgtaatcccattcatgaagcctccaccccc

SEQ ID NO: 257847 - DNA, 140 bp, Homo sapiens
  chr7:66960265-66960405
  hypo
cagagcgagactccatctcaagaaaaccaaaacccaaaaaactctgtttaatgtaatttgtcaaaacttttttttttttcgtaagtgtctctacccagacgaggcaaaatgtctcctccgtgccaggcatgaagctgcat

SEQ ID NO: 257848 - DNA, 241 bp, Homo sapiens; identical to SEQ ID NO: 211603
  chr7:67006548-67006789
  hypo

SEQ ID NO: 257849 - DNA, 32 bp, Homo sapiens; identical to SEQ ID NO: 211604
  chr7:67027848-67027880
  hypo

SEQ ID NO: 257850 - DNA, 170 bp, Homo sapiens
  chr7:67067246-67067416
  hypo
tgctaactctcctatgttcccgcaagactatgcagaagttgttttactcactcttattgagtacggctgcaatttttgtgagcatatctatctctaaactctggggacaacgtggctgaccattgcgattccagacccaaggttgtcgcggacctaagggaagaaaggag

SEQ ID NO: 257851 - DNA, 50 bp, Homo sapiens
  chr7:67093767-67093817
  hypo
atgggtggtgcctgggtgtgcgacatcccggataaaattccatggacagc

SEQ ID NO: 257852 - DNA, 80 bp, Homo sapiens; identical to SEQ ID NO: 211605
  chr7:67103482-67103562
  hypo

SEQ ID NO: 257853 - DNA, 133 bp, Homo sapiens
  chr7:67113980-67114113
  hypo
gtttgtcttctgaaaggtaacgggttggaaagatgcgttggatgaggatatcatgttggcagagtctcgtatgaaggaaccatttgagaaatggcgccagaggtggataagcgttgggatatggaacttcagc

SEQ ID NO: 257854 - DNA, 36 bp, Homo sapiens
  chr7:67180647-67180683
  hypo
tttgtttttgttttttttttcgctgttgttgttgta

SEQ ID NO: 257855 - DNA, 110 bp, Homo sapiens
  chr7:67202219-67202329
  hypo
ttactgaacttgatgccttccgccatatgggatacctggggtgctgtcagagagaggggctgtcaacatgattgaagtgaagactgggcgtgaatcataagagaaatcag

SEQ ID NO: 257856 - DNA, 32 bp, Homo sapiens
  chr7:67252810-67252842
  hypo
ctcaataacagatggagtctcgctttgttgcc

SEQ ID NO: 257857 - DNA, 42 bp, Homo sapiens
  chr7:67274834-67274876
  hypo
atagagtataaattagatcacgtcacttctctgcttaatact

SEQ ID NO: 257858 - DNA, 98 bp, Homo sapiens
  chr7:67318539-67318637
  hypo
atgggcccagcatcaaaatgcgggaggaacagaaacaaaattcagactccacgctgacatcagctgggaagttccatcagacaaaatccaaagtctga

SEQ ID NO: 257859 - DNA, 42 bp, Homo sapiens
  chr7:67322985-67323027
  hypo
attaaaacaaaagaagaagacggatggtgtgcaccacttgca

SEQ ID NO: 257860 - DNA, 109 bp, Homo sapiens
  chr7:67323057-67323166
  hypo
tgaagagtccgcgttccattttgtagcttacctttattgagtagatagaggctgcctttgaaaagaagcagaagtacataaaacccccggaaccagtgggaaagaagaa

SEQ ID NO: 257861 - DNA, 120 bp, Homo sapiens
  chr7:67353383-67353503
  hypo
ctgcccggtaggccaactgactgggaagtgaggagcacctcttcccggccgccaactgtctgggaaacgtggagaacttctgcacggctgccaattgtcagggaagtgaggagagcctct

SEQ ID NO: 257862 - DNA, 91 bp, Homo sapiens
  chr7:67355827-67355918
  hypo
accatcctggaagtgaagagcgcctctgcccatctgtccacagtccgggaagtgaggagcctctctccccggctgccaactgtctgggaag

SEQ ID NO: 257863 - DNA, 98 bp, Homo sapiens; identical to SEQ ID NO: 211606
  chr7:67375596-67375694
  hypo

SEQ ID NO: 257864 - DNA, 33 bp, Homo sapiens
  chr7:67388760-67388793
  hypo
aaaatacttgtggccaggtgcggtggctcacgc

SEQ ID NO: 257865 - DNA, 420 bp, Homo sapiens
  chr7:67405588-67406008
  hypo
gtgagccaccgcgcccggccaccacgtactctttgtgtcagttcatttcatttcaaatcatttcagttatttcctcaaaattcatttgttgagtctataagtgcaaatcaagctttcaaataatacaacgcaaaggacattagaacaaccattaggtgaattatacttacattattaaatatttttctttttggtgactaagggaaaaggctgagaatgctggactcttcatggtgccaggtctgtgcaggcaagatgagctgccgataaacgacaacagtgacagaaactttaaccacaaaaaccatcgctctcacatgtgctggctctgtgctactaagcacgcatgtgcattatatgctttgatcctcaataagacacattaaagctggtttttgtttgtttgtttgttttgagatg

SEQ ID NO: 257866 - DNA, 90 bp, Homo sapiens
  chr7:67417184-67417274
  hypo
cctccttcagggaagacattcgttttaggaaatcttgaatggttattcatgcgaacaccttcttccttttttttttgagttggagtcttg

SEQ ID NO: 257867 - DNA, 50 bp, Homo sapiens
  chr7:67424155-67424205
  hypo
ctgggtaacaagagcgacactttgtctcaaaaaaataaaataaaataaaa

SEQ ID NO: 257868 - DNA, 42 bp, Homo sapiens
  chr7:67451827-67451869
  hypo
tctgtggctttattttggaacgtacagatcatagtaagcagg

SEQ ID NO: 257869 - DNA, 162 bp, Homo sapiens
  chr7:67482477-67482639
  hypo
ccgctccaggcccacatgtacttttaaagtggtacgattgtatagagctgaattgtcatgttgtaggttatacgacgccaaaggagcccaagatcagaatgcagggtgagattcttgaagagaaacatccaaagctttcccgcctctaagttctgctttgct

SEQ ID NO: 257870 - DNA, 39 bp, Homo sapiens
  chr7:67534656-67534695
  hypo
tttttgtgtggacagagtctcgctctgtcaccaggatgg

SEQ ID NO: 257871 - DNA, 115 bp, Homo sapiens
  chr7:67540136-67540251
  hypo
gaaaatggtcattgtgtagtcgctagggatgcagacaggcctcacccgcaaggctgggcggagtggctgcatcaccctgaggttctcattcttcgcttagaaggaggtatctacc

SEQ ID NO: 257872 - DNA, 140 bp, Homo sapiens
  chr7:67563070-67563210
  hypo
gatccgcccgcctcggcctcccaaagtgactaatactttttataatctgagaagcctttgcttcaaaacgaaaagttctaacaattgaacaaacatctactaatttagagtgactttacggctgtccacctccttaccac

SEQ ID NO: 257873 - DNA, 34 bp, Homo sapiens
  chr7:67579760-67579794
  hypo
gtggctcacacctgtaatcccggcgctttaggag

SEQ ID NO: 257874 - DNA, 35 bp, Homo sapiens
  chr7:67637855-67637890
  hypo
gcaggccttagtacgaagcatctaacattgccagg

SEQ ID NO: 257875 - DNA, 42 bp, Homo sapiens
  chr7:67642884-67642926
  hypo
tccagaggcaaagaacagctcggtgtgggcacttaggccagc

SEQ ID NO: 257876 - DNA, 108 bp, Homo sapiens
  chr7:67648538-67648646
  hypo
acagccacttgtgcactgatcgcaccgcttgggggaggtggtaggacgggagggctctcttgggtttccagagcctgagctggtatcgccaccattccagcttcaagg

SEQ ID NO: 257877 - DNA, 31 bp, Homo sapiens
  chr7:67659057-67659088
  hypo
tatttatctatttttttagacggagtctcac

SEQ ID NO: 257878 - DNA, 91 bp, Homo sapiens
  chr7:67659328-67659419
  hypo
acaggcgtgagccaccgcgtcaggcccatagttcatcctttaaaattaatctatttttgtgttttataacgtatacaacatattagtactt

SEQ ID NO: 257879 - DNA, 42 bp, Homo sapiens
  chr7:67665221-67665263
  hypo
ctcctttcagtcatccatcacgcaggcccttccatgctaaca

SEQ ID NO: 257880 - DNA, 200 bp, Homo sapiens
  chr7:67737923-67738123
  hypo
aaaagcagtgcagcaatgggcgcatgctcgtgggattcagtggtttgatcaggttccccagtattcataagaagctggcttggtaaaacagtggaatagcgctttgaagactcagttacacaaccaactaggtgatgataccttacaagactggtacaaggttctccggaaatctgcacgtgctctgaatcatcatccaa

SEQ ID NO: 257881 - DNA, 44 bp, Homo sapiens; identical to SEQ ID NO: 211608
  chr7:67812980-67813024
  hypo

SEQ ID NO: 257882 - DNA, 176 bp, Homo sapiens
  chr7:67858437-67858613
  hypo
gaaaaatgattagaaaaggacgcgctgatgctccagtttagaaaagacatgttctctcctgatgctctgagacatgctagttcctctgtctgctgtcgttggccccacttttctagctgatgaaaatctgttctgcgtgggcccttcaggtgctcgtgcattcagtcaatgaacac

SEQ ID NO: 257883 - DNA, 120 bp, Homo sapiens
  chr7:68000299-68000419
  hypo
ccggcgcaccctctgcagctgctggcggaggtgctaagcccctccctgccagggctggcggggctggctggtggctccgactgtggggccctctgagcccacgcccacccgaaacttgtg

SEQ ID NO: 257884 - DNA, 283 bp, Homo sapiens
  chr7:68003149-68003432
  hypo
gagcttcttgatccctaacccgatactgggagaagagaaaacgctgcaaaactggtgcaaactggaataggtgaccgttagttgccttccaattattaacatatcattatgatgctaaaactctctcccctgaaaaaagatctccactgttttgtgtacatgtgatgcaggaagacgtgtttatgaattatgcctgtgtgtctggagtcccaccggacacaggctcacattcttctcttgccctgaacctagtccttaaaaatcccatgcttttggccaggcg

SEQ ID NO: 257885 - DNA, 81 bp, Homo sapiens
  chr7:68008895-68008976
  hypo
cagcagtattactggggcatcggttttacctacaatttaaatacgcacttgctagtattcattctaaagtaataagcaaag

SEQ ID NO: 257886 - DNA, 90 bp, Homo sapiens
  chr7:68058866-68058956
  hypo
tgctatgttcagggctgctacgttcaggtctgttctaggagctttctttttctctcttttttgtttttgtttttgagacggagtctcgca

SEQ ID NO: 257887 - DNA, 130 bp, Homo sapiens
  chr7:68111546-68111676
  hypo
aatacagctgattgaagacacggtagacgcagaagacaaccagtggcagacaagtaaggtagagcagagttgaatgtcttgtcacttgcacggtgtatttgtaactaacgccttgatggaatcaattaga

SEQ ID NO: 257888 - DNA, 42 bp, Homo sapiens
  chr7:68135058-68135100
  hypo
aagaccattgcaggcaaaggcgctagccattgcaaagagcac

SEQ ID NO: 257889 - DNA, 55 bp, Homo sapiens; identical to SEQ ID NO: 211609
  chr7:68185672-68185727
  hypo

SEQ ID NO: 257890 - DNA, 42 bp, Homo sapiens
  chr7:68263365-68263407
  hypo
attgaccagggagagcagtccggtgcctcaaggtgaggcaca

SEQ ID NO: 257891 - DNA, 44 bp, Homo sapiens
  chr7:68303945-68303989
  hypo
ttttattttgcaccaggttccgcgcattatgtagccagaagaag

SEQ ID NO: 257892 - DNA, 41 bp, Homo sapiens; identical to SEQ ID NO: 211610
  chr7:68418436-68418477
  hypo

SEQ ID NO: 257893 - DNA, 100 bp, Homo sapiens; identical to SEQ ID NO: 211611
  chr7:68418717-68418817
  hypo

SEQ ID NO: 257894 - DNA, 80 bp, Homo sapiens
  chr7:68564601-68564681
  hypo
ttctcctaataaggtggatgcggtgacttcatgagagaaacgcatcaatcaaatccactggacttgagggccgggtgcgg

SEQ ID NO: 257895 - DNA, 85 bp, Homo sapiens
  chr7:68912781-68912866
  hypo
tttcctcagtgtaaatacgatcggaggccactactggcttccgcttgcattctggggctgatgcgccaggccctccagacccagt

SEQ ID NO: 257896 - DNA, 95 bp, Homo sapiens
  chr7:68960050-68960145
  hypo
agctgagtgtcaacctaggacgaagagtcggaagccctgctgagaacagagccagcttggaacaaaccgagctgagacatggaggagggaggaag

SEQ ID NO: 257897 - DNA, 112 bp, Homo sapiens
  chr7:69056912-69057024
  hypo
tgcagccacgggtgcggcggctgcagctgcacccgggaaggcagatcctgccccttcccggctcccccaagagctgcagtttgggtggctatagccccgccgccaggtacag

SEQ ID NO: 257898 - DNA, 80 bp, Homo sapiens; identical to SEQ ID NO: 211616
  chr7:69478666-69478746
  hypo

SEQ ID NO: 257899 - DNA, 152 bp, Homo sapiens
  chr7:69501075-69501227
  hypo
agcaggctgccaaaaggtagcggcgccggccagaggtggtttgagaggcaaagcagcaccacagacaggggtccaaggcaagaaaacgctgagctgctctcaggtgctggaaagccagtgtggcttgaagcgtgctaagagtgagactggaa

SEQ ID NO: 257900 - DNA, 68 bp, Homo sapiens
  chr7:69736941-69737009
  hypo
gagacaaggcccaacgccctaatctttcatcaccttgaacctggagactaggacgcgtctcagcacca

SEQ ID NO: 257901 - DNA, 140 bp, Homo sapiens; identical to SEQ ID NO: 211617
  chr7:70255442-70255582
  hypo

SEQ ID NO: 257902 - DNA, 227 bp, Homo sapiens
  chr7:70255790-70256017
  hypo
atcagccccaccgcgggcaaccagaacggactcctcaacaagacccctccgacagcagcgctgagcgcacctcccccgctcatctccacgctggggggccgcccggtctctcccagaaggacgactcctctgtccgcagagataagggagaggcccccttcccacacgctgaaggatatcgaggcccgataagccgagaacaggagcaagaacgaggaagaagaaac

SEQ ID NO: 257903 - DNA, 120 bp, Homo sapiens
  chr7:70311101-70311221
  hypo
caaaaaaaaaaacaaaacggctgtacctccctaaaatcttaccttcattttactaaaggaactacacctgttattcctatagctaatgctaaaatcaaggtgtccgttataaaagatcta

SEQ ID NO: 257904 - DNA, 202 bp, Homo sapiens
  chr7:70340709-70340911
  hypo
gtgagcactggacctaacagcgcatcaaggtatcagcgcatcaagacgtaggtttcttcctataatacgtgaggacattagctgacattcctacaagagcaggtccaccatactcctgtctggtgttcaccacgttcccaaaaggctttctctctctctctgtatttttttttttttttgacacggagtctcgctctgtcgc

SEQ ID NO: 257905 - DNA, 187 bp, Homo sapiens
  chr7:70378264-70378451
  hypo
tggtcacctagacaggtaaccgtgttacctgatatctattactcggcacactcagaacaattgtttaacgtctgtcttctccagtagagcgtccatacaagctagcaccattgactccctttcccctcactgcttgtgaaagtccagtcattagacatctacatgcgccatgcttcatgctaagttc

SEQ ID NO: 257906 - DNA, 36 bp, Homo sapiens
  chr7:70482807-70482843
  hypo
taacgtagcagttacgtcagactaggacacttcttg

SEQ ID NO: 257907 - DNA, 120 bp, Homo sapiens
  chr7:70542996-70543116
  hypo
cagggctgcgcggcggcactcgcaagccagtgcagttccgggtgggcatgggcttggccgccccacactgggagcagcaggccggcgtcaccagccccgggcagtgaggggcttagcacc

SEQ ID NO: 257908 - DNA, 56 bp, Homo sapiens
  chr7:70921261-70921317
  hypo
tgagatgccagtgacctgaccgccaagtatattgcgagagtcagtgaattgttagt

SEQ ID NO: 257909 - DNA, 31 bp, Homo sapiens
  chr7:71048822-71048853
  hypo
ctcctggctgggcgcggtggctcacgcctgt

SEQ ID NO: 257910 - DNA, 37 bp, Homo sapiens; identical to SEQ ID NO: 211618
  chr7:71119293-71119330
  hypo

SEQ ID NO: 257911 - DNA, 162 bp, Homo sapiens
  chr7:71251956-71252118
  hypo
ctatgttatagagatgcccacgattatgcttctttttttctctaatggcagcacaggcggcaaagctgggagaaaggctctctgcaggttccaaaatgctggtgcgggatgggctctaggaacagaaagccaagtgccgacggaaactgagagcaccccagc

SEQ ID NO: 257912 - DNA, 85 bp, Homo sapiens
  chr7:71276627-71276712
  hypo
tatattaggtttgatagtgtcgctttcttttttctttttttttttttttttccgaaatggagtcttgcttccatctcgcaggctg

SEQ ID NO: 257913 - DNA, 38 bp, Homo sapiens; identical to SEQ ID NO: 211619
  chr7:71287516-71287554
  hypo

SEQ ID NO: 257914 - DNA, 43 bp, Homo sapiens
  chr7:71335072-71335115
  hypo
aagaaacaaagagtggctggcgcagtggctcacgcctgtaatc

SEQ ID NO: 257915 - DNA, 42 bp, Homo sapiens
  chr7:71396557-71396599
  hypo
catggttttcttgggccctacgaaaacaggtagtgagttaga

SEQ ID NO: 257916 - DNA, 35 bp, Homo sapiens; identical to SEQ ID NO: 211620
  chr7:71397499-71397534
  hypo

SEQ ID NO: 257917 - DNA, 34 bp, Homo sapiens
  chr7:71403494-71403528
  hypo
cacagggccgggcacggtggctcatgcctgtaat

SEQ ID NO: 257918 - DNA, 98 bp, Homo sapiens
  chr7:71598019-71598117
  hypo
gatctgaggtggaacagtttcatcctgaaaccatccacccacaactatccatggaaaagatggtcttccatgacaccagaccccggtgccaaaaaggg

SEQ ID NO: 257919 - DNA, 238 bp, Homo sapiens
  chr7:71656030-71656268
  hypo
aaaaatggccaagacgtagttactgcttttgtgcaagtcatggtctagtgtgagagacagatgcgccaacgaataattacaacccgctgtaatgaaggatagaataaagtcatgcgagcaggctgggaagacaagaagaatgcgactgacagcctagaggaattggcaacttcaaagcctttggatcctacaagatgaacagagaacaacgtagcaatttaggcggaagctacagact

SEQ ID NO: 257920 - DNA, 219 bp, Homo sapiens
  chr7:71870980-71871199
  hypo
gctcaacaggcgcacggcactgaaggtggcagctccccgtaaggaacaatcgctcctgctgctcagctggctctggtgccctcactgcggcactcgcgatgtgccagagaaacacaaagccaggggacccaaaatggagctggctcccatagccagaagccgtctctccagaattcccctctcccagtcacagctgcctgctggcgtaacgagggaagc

SEQ ID NO: 257921 - DNA, 93 bp, Homo sapiens
  chr7:71913527-71913620
  hypo
ggcatcccacactatggagtcggtttttccgagatctttctttagtcaatatggtggcaccttgcgtgatcttttttttttttgacggagtct

SEQ ID NO: 257922 - DNA, 43 bp, Homo sapiens
  chr7:75935606-75935649
  hypo
tcctactgtcatacaggctggcgtgcagtagtgggatcttggt

SEQ ID NO: 257923 - DNA, 192 bp, Homo sapiens
  chr7:75958854-75959046
  hypo
gtagtagcatccgcgtgcgctgccagttcccctggggccttaattgttgccttcgccgccatcgtcgtcctgctggtcgctcgtccagagcgtgaggttgtcgcggaggagctgcatgatgagcgtggagtccttgtaggagtcctcgttgagggtgtcaagctcggcgatggcgtcgtcgaacgcggtctt

SEQ ID NO: 257924 - DNA, 45 bp, Homo sapiens
  chr7:76033251-76033296
  hypo
ttgcaggtgtgagtcaccgagcccggccttcttcttatgtttgga

SEQ ID NO: 257925 - DNA, 292 bp, Homo sapiens
  chr7:76106204-76106496
  hypo
aggctgcgtgccttcgtggaaagttttagctgatgtcctcgcctgtatttcccaggctgtttttgcagagttgtgagagttggttcatccgggccatgaggacatgttgggacataccccgtgtgccgatgatggaggcggccgtggctgcccgagagatgcgtgacacccaggagtaattggcttggaaggcagtcctctgatttgtacctcattgtggttacagaaacttccaattgaagacactgagctgaaccattccgcccgcccgcccgcccgagggcactccagg

SEQ ID NO: 257926 - DNA, 294 bp, Homo sapiens
  chr7:76604303-76604597
  hypo
aggctgcgtgccttcgtggaaagttttagctgaagtcctcgcctatatttcccaggctgttttgcagagttgtgagagttggttcatcgggccatgaggacatgttgggacataccccgtgtgccgatgatggaggcggccgtggctgcccgagagatgcgtgacacccaggagtaattggcttggaaggcagtcctctgatttgtacctcattgtggttacagaaacttccaattgaagacactgagctgaaccattccgcccgcccgcccgcctgcccgcccgcccgagggc

SEQ ID NO: 257927 - DNA, 200 bp, Homo sapiens
  chr7:76631493-76631693
  hypo
catggagaagctgtccgcagcgtctggatacagcgatgtgactgacagcaaggcaatcgggcccctggctgtgggctgcctcaccaagtgcagccacgccttccacctgctgtgcctcctggccatgtactgcaacggcaataaggtgcccccactggcccggggcggaggcgggtggcctgccccggaagtcctgagct

SEQ ID NO: 257928 - DNA, 159 bp, Homo sapiens; identical to SEQ ID NO: 211621
  chr7:76632095-76632254
  hypo

SEQ ID NO: 257929 - DNA, 90 bp, Homo sapiens
  chr7:77036055-77036145
  hypo
tatggagctctcttcactatcgagggaccctcccaaaaaggttcctgcaggatcacggatacaggagccgagggtagggagagggagaag

SEQ ID NO: 257930 - DNA, 42 bp, Homo sapiens
  chr7:77129872-77129914
  hypo
attacaggcgtgagccaccgcggctggccccagaatgcaatt

SEQ ID NO: 257931 - DNA, 39 bp, Homo sapiens; identical to SEQ ID NO: 211622
  chr7:77184920-77184959
  hypo

SEQ ID NO: 257932 - DNA, 111 bp, Homo sapiens
  chr7:77296782-77296893
  hypo
tggagttagtccaccggaggatatattcacataagggacaaaatagccttttgggagtcagagcgcgtgcatttggtttaaggcaatgtgaaaaaccgtaaacaatctcag

SEQ ID NO: 257933 - DNA, 120 bp, Homo sapiens
  chr7:77305019-77305139
  hypo
gttacaggcgtgagccaccaggcacagcctggtacattttttaatcgggtgttttcttattgatgagttttaagattctttgtcagccgggggcgttggctcacgcctgtaatcccagca

SEQ ID NO: 257934 - DNA, 141 bp, Homo sapiens
  chr7:77309570-77309711
  hypo
tgctgggattacaggcgtgagccatcgtgcccggccagacgatagatggattctttttttttttttttttttttgagcaaattgagctacttgagcctcggcctcccaaagtgctgggattactggcgtcagccactgcac

SEQ ID NO: 257935 - DNA, 90 bp, Homo sapiens
  chr7:77315384-77315474
  hypo
ctgactaaacacttaatatacgtgaaaaataagaaaaagtagacttattgggttagctttaaaagttaaataaaagagtggttaggcccg

SEQ ID NO: 257936 - DNA, 120 bp, Homo sapiens; identical to SEQ ID NO: 211624
  chr7:77323833-77323953
  hypo

SEQ ID NO: 257937 - DNA, 240 bp, Homo sapiens
  chr7:77324193-77324433
  hypo
agccaccgcgcccggccacattccttatcttttaagctaaaacccatctccccaaattgcttattttcgaagcaaaaatcaaagcacatgcttacaaaacatcgaacacgcagtgtgcttactaaacgctaaaatacagaaacctaaaaaaacaattcttgcttttcaaacatccataaataatcgccaacgaatttttcctggcaagtctacgttataataataataatattattatta

SEQ ID NO: 257938 - DNA, 101 bp, Homo sapiens
  chr7:77413233-77413334
  hypo
gaacatgtgagaactcgatccttctgtacattttgaaattcagaacttacgcatctatgttgttagaatgttaaatctacacttttctgtaaagttcattg

SEQ ID NO: 257939 - DNA, 88 bp, Homo sapiens
  chr7:77459676-77459764
  hypo
gtccccaaccagttggtctgcggcctggtaggaaccgtgggctgcactacgggaggtgagccagtgggcaagtgagcgaagcttcatc

SEQ ID NO: 257940 - DNA, 31 bp, Homo sapiens
  chr7:79851712-79851743
  hypo
tttttcctgagacagagtttcgttcttgttt

SEQ ID NO: 257941 - DNA, 153 bp, Homo sapiens; identical to SEQ ID NO: 211628
  chr7:80168619-80168772
  hypo

SEQ ID NO: 257942 - DNA, 34 bp, Homo sapiens; identical to SEQ ID NO: 211629
  chr7:80541273-80541307
  hypo

SEQ ID NO: 257943 - DNA, 36 bp, Homo sapiens
  chr7:80544781-80544817
  hypo
atttgaaatttgaggccaggcgtggtggctcacctc

SEQ ID NO: 257944 - DNA, 97 bp, Homo sapiens
  chr7:80572493-80572590
  hypo
aaattagccagagcgagactctgtctcaaaaaaaaaaaaaagtaacagacggtagaggcagtcaaatgtagagaacgcagaagcaactcttctttta

SEQ ID NO: 257945 - DNA, 240 bp, Homo sapiens
  chr7:80790077-80790317
  hypo
caaagtgatgggattacaggtgagccactgcgcccagccgcttttctcactcttaagaaaagtcacaaacacatttcaactttgctgactttggagatgcgtggaaatcgtttttaggactaggagaagatctgccagagagaaaaaattaacatgctaacaatggtaaaaaaaaaaaaaaaaaaaaaagaaagttggaaggaaactattttttttcgcttaagaatgaggagagccagc

SEQ ID NO: 257946 - DNA, 117 bp, Homo sapiens
  chr7:80896252-80896369
  hypo
ggggtccctgagcccgccctttgggccccaatgtctgttcatgatctaccttctgacggaccactgcacgagcccgcaatgggggttctttctcctcggtatcggactgagtggggg

SEQ ID NO: 257947 - DNA, 36 bp, Homo sapiens; identical to SEQ ID NO: 211630
  chr7:80917900-80917936
  hypo

SEQ ID NO: 257948 - DNA, 36 bp, Homo sapiens; identical to SEQ ID NO: 211631
  chr7:80918176-80918212
  hypo

SEQ ID NO: 257949 - DNA, 31 bp, Homo sapiens
  chr7:80965882-80965913
  hypo
taaaataaaggtaaatggcacgcctggctag

SEQ ID NO: 257950 - DNA, 140 bp, Homo sapiens
  chr7:81066982-81067122
  hypo
tagatttctccttccaggattactatgatgtgctcctgatagaactccctgctttaacccttcaccctcaaagtcgattctcaacacaacagccagacggaacgtttaaatcataagtgagataacgtcattactttaca

SEQ ID NO: 257951 - DNA, 83 bp, Homo sapiens
  chr7:82176346-82176429
  hypo
aaaaaaaaagaaagtgacagaaaccccaattcaaaatgacttacggaaaaaagaaaaattggcttacacgactgaaatgttca

SEQ ID NO: 257952 - DNA, 612 bp, Homo sapiens
  chr7:86415571-86416183
  hypo
cctaggtggcaaacctgctgcggctcttccagatccctcagatcagctacgcatccaccagcgccaaactcagtgataagtcgcgctatgattactttgccaggaccgtgccccccgacttctaccaggccaaagccatggctgagatcttgcgcttcttcaactggacctacgtgtccacagtagcctccgagggtgattacggggagacagggatcgaggccttcgagcaggaagcccgcctgcgcaacatctgcatcgctacggcggagaaggtgggccgctccaacatccgcaagtcctacgacagcgtgatccgagaactgttgcagaagcccaacgcgcgcgtcgtggtcctcttcatgcgcagcgacgactcgcgggagctcattgcagccgccagccgcgccaatgcctccttcacctgggtggccagcgacggctggggcgcgcaggagagcatcatcaagggcagcgagcatgtggcctacggcgccatcaccctggagctggcctcccagcctgtccgccagttcgaccgctacttccagagcctcaacccctacaacaaccaccgcaacccctggttccgggacttctgggagcaaaagt

SEQ ID NO: 257953 - DNA, 41 bp, Homo sapiens
  chr7:88858571-88858612
  hypo
gctgtgaggactgccagcacgctgtcacctctcaatagttc

SEQ ID NO: 257954 - DNA, 184 bp, Homo sapiens; identical to SEQ ID NO: 211639
  chr7:90635233-90635417
  hypo

SEQ ID NO: 257955 - DNA, 145 bp, Homo sapiens
  chr7:91531327-91531472
  hypo
cctttgagtaattcctattacgccaacagctacctttccttgatattaaggtactagactgaatttttagaatggcaagccattgcgacatcacgttaaagtgcaaacatgggccgggcacggtggctcacgcctgtaatcccag

SEQ ID NO: 257956 - DNA, 80 bp, Homo sapiens
  chr7:91655605-91655685
  hypo
ttaaagaatgaagtcgctctccctctccctctccctctccctctcttctctcttctctctctttccacggtctccctctg

SEQ ID NO: 257957 - DNA, 40 bp, Homo sapiens; identical to SEQ ID NO: 211641
  chr7:92075854-92075894
  hypo

SEQ ID NO: 257958 - DNA, 119 bp, Homo sapiens; identical to SEQ ID NO: 211643
  chr7:92370087-92370206
  hypo

SEQ ID NO: 257959 - DNA, 55 bp, Homo sapiens
  chr7:92465542-92465597
  hypo
tgggatctccccctctcatcagataaggagaatcctctagctccccaaaactggc

SEQ ID NO: 257960 - DNA, 88 bp, Homo sapiens
  chr7:92745365-92745453
  hypo
tattgtgctgctagcgtgcgctggctcctgaggcctcatacctatggctctcatcccccatctcgccgcttcccaccagtaccctttt

SEQ ID NO: 257961 - DNA, 129 bp, Homo sapiens; identical to SEQ ID NO: 211647
  chr7:92939972-92940101
  hypo

SEQ ID NO: 257962 - DNA, 94 bp, Homo sapiens; identical to SEQ ID NO: 211648
  chr7:94138372-94138466
  hypo

SEQ ID NO: 257963 - DNA, 63 bp, Homo sapiens; identical to SEQ ID NO: 211649
  chr7:94293684-94293747
  hypo

SEQ ID NO: 257964 - DNA, 89 bp, Homo sapiens
  chr7:94732597-94732686
  hypo
cttccttgtgttgccgtttgaactagcatgctctctacctcccattatatagagtatgtttggttttttttcacttctttttttttttt

SEQ ID NO: 257965 - DNA, 43 bp, Homo sapiens
  chr7:97137338-97137381
  hypo
agtggaagaaaaaagaccttcgtaaagatgtgtgctaggttgg

SEQ ID NO: 257966 - DNA, 92 bp, Homo sapiens
  chr7:97591811-97591903
  hypo
actgtgataatattcgtaatatcctaaatggatgttaatgctagtgacacgacgcgtgtacatcctctgtatttgttcgttatatcctcggg

SEQ ID NO: 257967 - DNA, 180 bp, Homo sapiens
  chr7:97600009-97600189
  hypo
atttggatgataaaataaaatcttattttcctcctgaaacatgaggaaacagaagcacatcatgaatagaaacatttcatcttagctattgaaaacgctaagttcagtgtcgacctcttgtgtcgcacatgctaatgacaaaaccaaagaaaaaccggttttagaaaaacaggaattgta

SEQ ID NO: 257968 - DNA, 38 bp, Homo sapiens
  chr7:97600249-97600287
  hypo
gcctgggcaacaccgtgagacctcgtctctatttaaaa

SEQ ID NO: 257969 - DNA, 96 bp, Homo sapiens
  chr7:97627565-97627661
  hypo
ggcacaagtcccctaattaccgctggccccgtaatctgtgggctccggtgcacggtgaaaatgcaagtcctgccgggcgcggtggctggtgtctgt

SEQ ID NO: 257970 - DNA, 186 bp, Homo sapiens
  chr7:97670351-97670537
  hypo
gggccctcccagttccggcgctccctatggagtccgctgaggccttcatcgagactgcactgcagctcagctttccccgctgttcaatcctgcttccttcccagcctgccttcctcactctcttcccctgatcactgctctgcagacttatccccatctgccacgcatcctcgactggaacaatct

SEQ ID NO: 257971 - DNA, 33 bp, Homo sapiens
  chr7:97706016-97706049
  hypo
gattacaggtgcgttccattgtgcttggccaga

SEQ ID NO: 257972 - DNA, 225 bp, Homo sapiens
  chr7:97748929-97749154
  hypo
cgacaatcagatgctggtaccgtgagctgagaatcttggtgccagtcctggaccaccaggcctcagctcactgcagctagagtcagggtggcaggtgactcgtagggaaattttgagagcaggtataaaaccgtgacattcttaattcccttggtgataaatgggtgtgctgtaacgtgagaacccctgattcgtaatctatacggtaacttgcagggtgttttg

SEQ ID NO: 257973 - DNA, 223 bp, Homo sapiens
  chr7:97804194-97804417
  hypo
gcacacctgttgctcactaccgccccagcaggagagtggaaacgcatgttctcatttggcagggtgtttgccgtgttccatgcatttgcagaacgttctgtgagtagtgatttgatcgtcagggccaccccacgtgccacgaggcaggtgccattattcatcccagttacagaggagaatactgaggcttggggtgctgagcggttggtctgtctcagccact

SEQ ID NO: 257974 - DNA, 151 bp, Homo sapiens; identical to SEQ ID NO: 211652
  chr7:97806161-97806312
  hypo

SEQ ID NO: 257975 - DNA, 159 bp, Homo sapiens
  chr7:97807169-97807328
  hypo
gttgcctctgtgtgctttatcggaatcctcttgttttaatcctctcctggtacgtctccatcccatcttagagtgttaagtgcagagtcccttcggaagcttaagtctttgtggctgccagagtcagaatgacgtgacgagcagagggaggctttggaa

SEQ ID NO: 257976 - DNA, 265 bp, Homo sapiens
  chr7:97807596-97807861
  hypo
gaaaatgcctcctgcgtgttgagtttgcattggagaaccccgaagacgcgcaaactagtcctagcgtgagtgagcagcaagcagtggtacttccttgtgaatcggggtgggaacccttcagaaccgcgagctcccactttctgtcgatcgctctgctcatgcggccctgagtctcatggttactgtggtctcagtcacagcaagtgctgccaagctcaggcgacgctgccagagccttctgagagccgggcggggctggtgccac

SEQ ID NO: 257977 - DNA, 48 bp, Homo sapiens
  chr7:97808578-97808626
  hypo
atccaggaaatgcctgagctcgacatcgcccaagctagcctcaggctg

SEQ ID NO: 257978 - DNA, 122 bp, Homo sapiens; identical to SEQ ID NO: 211653
  chr7:97832525-97832647
  hypo

SEQ ID NO: 257979 - DNA, 301 bp, Homo sapiens; identical to SEQ ID NO: 211654
  chr7:97833194-97833495
  hypo

SEQ ID NO: 257980 - DNA, 244 bp, Homo sapiens
  chr7:97833960-97834204
  hypo
cagcatcctgagtgtgctctcggggccatgccccctgcctgttgtggtcactctcaggctcgttaccggccaccctgtggggccaggctgaggcagaggggctctgggtcccaggaacgcccaggctgcgcgccatctcctctttttctcctgtggctgcatagtccctcctccgcactctgtctcctcctttcccagagagaacctgctcttcagcaggctcgtaagagcacttgacccctgg

SEQ ID NO: 257981 - DNA, 499 bp, Homo sapiens
  chr7:97841577-97842076
  hypo
ctcaccttcctgccgccacctcctaggacagccagtccagggccatgaagaccaagaaccggcccccacggcgccgggccccggtgcaggacacagaggccacccccggggaggggacgcccgacgggtccctgccgaacccggggccagagccggccaagggtctgcggagccggccggcccgggccgcagcaagggctccgggcgagggcaggcgcaggcggccaggaccctccgggcccggtggccgtcgtgacagcagcatccagcggcggctggagagcaacgagagggagcggcagcggatgcacaagctaaataacgccttccaggccctgcgtgaagtcatcccccacgtgcgcgcggacaagaagctctccaagatcgagacgctcacgctggccaagaactacatcaaatcgctgacggccaccatcctgaccatgtccagcagccgcctcccaggcctggaggggccgggccccaagctctaccagca

SEQ ID NO: 257982 - DNA, 111 bp, Homo sapiens
  chr7:97844377-97844488
  hypo
ggagcccctgcctcggccatcgggatgaggtccctcaagtccctgcacaagcaggtcagagacccacccacatgccgttcctgggctacgccacgcgccatcccccggggc

SEQ ID NO: 257983 - DNA, 165 bp, Homo sapiens
  chr7:97846967-97847132
  hypo
gtgataacacagcccaaggccgcgggccccgctcaccccgatgccgtagtcccagccgtggcccttgggctcgtgaggctgcacgccggtgcgatgacacactgtcccccggctcaggctgtggctgccctgcactttgttggcgatcacccagacctggagcac

SEQ ID NO: 257984 - DNA, 184 bp, Homo sapiens
  chr7:97855417-97855601
  hypo
gacagatgtgggtgcgcagccctgccctgccctgccctgtcctccgtcggaactgaggaggacgtgaggagggagtggagatccaagtgtgctgccaggctgtgtggacactgcccacagctgaggcggaggttttcaggatggaaatattttggcgatgtgtgccaaccgccttagaaaatct

SEQ ID NO: 257985 - DNA, 165 bp, Homo sapiens; identical to SEQ ID NO: 211657
  chr7:97857342-97857507
  hypo

SEQ ID NO: 257986 - DNA, 256 bp, Homo sapiens
  chr7:97869428-97869684
  hypo
caaacaaaagaaaaaccctgtgagtaatcggaaatcggctggttttattggacttgccgctgataagatgcaaaagacaagcagtgactagaggatggggaggcgcttggttaatcaagggcttcaggaaattcgcttccgattcttcgaaatgttgcagcctattaggtgatacttgcagttgctgcatttgggtaccagcgtgtgggtggaagaggattttacggcacaaaacgtcctggagattggcaacaat

SEQ ID NO: 257987 - DNA, 105 bp, Homo sapiens
  chr7:97882281-97882386
  hypo
aactgggatttgaaaacactgtatcccgcctggcagaaaactggcaaggttaggatggagaaaggagaaaaaagaaagatgtcggccaggtgcggcggttcatac

SEQ ID NO: 257988 - DNA, 429 bp, Homo sapiens
  chr7:97925142-97925571
  hypo
atcctcacaaagaacgcagcaagaagcaccgactcctgccaggaggactgaggaggaaaaagaacgcttaagatgacagctggaagccactcagtgttgggccaaccccgtgcacgcatgcctggggcccaacaatcctgctccctgtaggaacaagcagggcacacacccatgggcaccgagacactcgggcagccctggagaaacagcccagaccagaaacaccagacgcccgtcaatgggagagtcagaaccagcttctgtgcagacagcaggtcaccacacagcactgagcgactgtccctacggggccaccccagacagccatctctgtgccagggcttggggagtctggtgttggagaagggatggtcacggaggtgggccatgctgggtgatcgtgggggccgggaacgtcctgctgggtat

SEQ ID NO: 257989 - DNA, 132 bp, Homo sapiens
  chr7:97968886-97969018
  hypo
cgggaatgcggctggcgtggccaggcctcactcgcttcatgattctagccgcatccatctttgagtatccctctcttcagcctgtcacgggagctacgccctttgctgctacctgtgcgtgtgaccgcagca

SEQ ID NO: 257990 - DNA, 224 bp, Homo sapiens
  chr7:97984208-97984432
  hypo
caatttccacagaccgcggtgaagtagaaccacagcatgctggcccagatctctcctctgttctggactgggccatcccacgcgtttctcttggggttcacaggatgacaagtggggtttatgtataaagggacagatcgctcacccagttcagttgacacgggggacccagtggcaatctcaccgatcttggccactccatcgtagtaggcttttcctgccag

SEQ ID NO: 257991 - DNA, 42 bp, Homo sapiens; identical to SEQ ID NO: 211658
  chr7:97989649-97989691
  hypo

SEQ ID NO: 257992 - DNA, 35 bp, Homo sapiens; identical to SEQ ID NO: 211659
  chr7:98012255-98012290
  hypo

SEQ ID NO: 257993 - DNA, 167 bp, Homo sapiens
  chr7:98088535-98088702
  hypo
acctgtggagtgcccgctatgtgtgtccgcacctgccagggaagctgagaggcctggctggctgcttcgggtttgagcgaggacagcagcttggttctgagttaagcagactgcatcagaggtagccaagtattgaggcttctgctgggccccgcaccgtgttcccc

SEQ ID NO: 257994 - DNA, 343 bp, Homo sapiens; identical to SEQ ID NO: 211661
  chr7:98115911-98116254
  hypo

SEQ ID NO: 257995 - DNA, 139 bp, Homo sapiens
  chr7:98147931-98148070
  hypo
agtttcttattcaccgggtaagaactttctcccctttcctgtctgcctcctccccgggaaaaccatatcagccttttgaataggtctccaggcaccacgtggaggcccgagctccacggccggacggccctggacagac

SEQ ID NO: 257996 - DNA, 116 bp, Homo sapiens
  chr7:98254320-98254436
  hypo
tgcctgagctgtacgccttcaccatctgcctgtggctgcggtccagcgcctcaccaggcattggcacccccttctcctatgcggtgccagggcaggccaacgagatcgtgctgatc

SEQ ID NO: 257997 - DNA, 530 bp, Homo sapiens
  chr7:98586157-98586687
  hypo
ttatatgaaatgtacagaaccggtcaatccacagagacagaaggcagactgcaggttcccaggggctggaggtgggaggggttcagagcgactgcttatggggcggttgcacaacattgtgaatggaccaaatgccccgcagtgttcattttataatggttaatttcagattacgtgaagctcgcttcaattgaaaaccatacacgttttggttttctgtctcctcacaggtccgaggaggcaaacaaagccttctctgcagctgtgcagatgcacgatgtgctggtgaaagcctgggccatgtggggcgactacctggagaacatctttgtgaaggagcggcagctgcacctgggcgtgtctgccatcacctgctacctgcacgcctgccggcatcagaacgagagcaaatcgaggaaatacttagccaaggtgagaccgaaaaaacgagctttgaccagaggccatctgtcaccttcagatttggacagaaatttagctatagtttactcatccgtgccgggtgtgag

SEQ ID NO: 257998 - DNA, 357 bp, Homo sapiens
  chr7:98598594-98598951
  hypo
ctgatgggttaaatcgtagactaagtggttcacatgtgtggtattcaaagaatctcctaaagactcattgtgtcctagatgacacagttaatattaagtcacataaaagaaaatcttcatctccttaatcggaaaggacactcaacagccatagctgtgaccagggttgcatcgaggttgcatccagctgaagtgtggcgtgtgccctgcagttgctccaggcagtctgggggcgcagctccctgttcgtgatgtgtgggttgggcttgccttaggtgaacccacagctgagggaggtgctctttgaaaagtgaagggcaagcccggtcctccccgtctatacgtgaagcgctttca

SEQ ID NO: 257999 - DNA, 204 bp, Homo sapiens
  chr7:98599226-98599430
  hypo
agtgcagtgggtctcagacacgcacagccagagctcatccaccttccgctctcctgtacacaggggaggctgtttctgtctctttgtctgtgttccgttcgtggaatgcagtccgattctctagcagagctgcatgtgtgggctgccaaccacatgtctgtaaagaggtggaagaaagctcagaaatggcgcactccatttatc

SEQ ID NO: 258000 - DNA, 497 bp, Homo sapiens
  chr7:98599730-98600227
  hypo
atgcaggggagaggcgggggggtggggtggtgggggtgggtggtagctgtgaagggcagccaagggcatcccgtgctgatggtgcagctcagcaactgattgtgctggtggctctgcgaggccacacagtgacatgaccagaggtgtgcgcatgcatacacacatgtgcgcacacacacgtgcacacataactggtgaagtctgaatcagctcttcagctctttggactgtgccaatgtcactttttggtgttggcatcgcactgggttgcataggatgctggtgtgggaggaagagggttaggagtacatgggactttctgtatattttgtttgcatcctgttgtgaatctctaggaatttcagaataaaagttaaaaagagatcaggcatgagcttggcagcacgttcttggtccagcgtggagagggaacaatgaggtggcctgcgtccttggtggtggcctctgtctctcgcggctctgctgggggatctcac

SEQ ID NO: 258001 - DNA, 81 bp, Homo sapiens
  chr7:98601684-98601765
  hypo
aaacttcatctcaaaacaaacaaacaaaacatgtaattcgtagctggtaggggcttgagcgttttttgcagtgtgttagaa

SEQ ID NO: 258002 - DNA, 397 bp, Homo sapiens
  chr7:98602532-98602929
  hypo
tctccctcctccttgacttccgtccgtggctgctgaattgaaaatattgtgactcatttacaccgcatcagggtgaggcagggtacaaataaattgataaacgaccgctggcctacacagtccgttttcccgtgacagttcggacattcctagcttcttctcaagacaaggactggtagcagagatgcagggcatgtcctcatggcttctcgctctggcaggttcatgccccgggtagagattgtgcagaagcacaacaccgcagcccggcggctgtacatccggggacacaatggcaagatctacccatacctcgtcatgaacgacgcctgcctcacagagtcacggcgagaggagcgtgtgttgcagctgctgcgtctgctgaacccctgtttgg

SEQ ID NO: 258003 - DNA, 183 bp, Homo sapiens
  chr7:98605991-98606174
  hypo
ctccccagtgccccgggttgtggcagtttccccacagatgcgcctcgtggaggacaacccctcttcactttcccttgtggagatctacaagcagcgctgcgccaagaagggcatcgagcatgacaaccccatctcccgttactatgaccggctggctacggtgcaggcgcggggaacccaagc

SEQ ID NO: 258004 - DNA, 232 bp, Homo sapiens
  chr7:98636065-98636297
  hypo
tcagttcatgctgcaggatccgcccgaaggcgttgtgttccacgcagaaggtgtggtccagtacaggcgtgatgtcgttctctctgttgaaataagacagaaggatgtaggttagaactctgccaccacgcggggccattgggtagacagaaaacatttacgactgccaaacccggggctgcaagacaggacagcctcgggcagacacagaacctgcgtgggggtggcacag

SEQ ID NO: 258005 - DNA, 221 bp, Homo sapiens
  chr7:98639038-98639259
  hypo
aaccattctagaaccagagccgttctggtcttaactcaggaaccacacgtctctactttcaggtttgaattatgttcacctcaaaaaatgaatcaaaactctgcttccatgttggtaaaaggttcttccacatttgaatgcacaagcggagcctgtcccgacttcgcctcagtggcctgtgcaggacgctggtgaaggccgtggtgccacaggaggagtcc

SEQ ID NO: 258006 - DNA, 216 bp, Homo sapiens; identical to SEQ ID NO: 211663
  chr7:98639724-98639940
  hypo

SEQ ID NO: 258007 - DNA, 43 bp, Homo sapiens; identical to SEQ ID NO: 211664
  chr7:98704238-98704281
  hypo

SEQ ID NO: 258008 - DNA, 162 bp, Homo sapiens; identical to SEQ ID NO: 211665
  chr7:98704341-98704503
  hypo

SEQ ID NO: 258009 - DNA, 41 bp, Homo sapiens
  chr7:98705848-98705889
  hypo
attttgttttgatacggagtctcgctctgtcgcccaggctg

SEQ ID NO: 258010 - DNA, 102 bp, Homo sapiens
  chr7:98735269-98735371
  hypo
ataaacgatgttgccgacattcctcagccaattagaattcctttcagctgcagtggaggtgaacacagctggaattacagagtggggcgcgtcaccagacgc

SEQ ID NO: 258011 - DNA, 44 bp, Homo sapiens
  chr7:98738342-98738386
  hypo
tcactatctttgcactgaatttcgctctgtgtctattcattgac

SEQ ID NO: 258012 - DNA, 129 bp, Homo sapiens
  chr7:98775355-98775484
  hypo
tactcaaagatgacccgatacagcagggataggcgagacacattaacttcagaggatgtggcaggagtgaagaccacctgcccagtcacctgccacacgcaacagcccaggccccggcagggtgaccct

SEQ ID NO: 258013 - DNA, 41 bp, Homo sapiens
  chr7:98814530-98814571
  hypo
tccaggtcttattaacggtattgagtcgcttcctctggttg

SEQ ID NO: 258014 - DNA, 235 bp, Homo sapiens
  chr7:98845139-98845374
  hypo
gcctgaagggaactccgctgggggaagagggtaccaggaggaaaaatcagctgaccatcttccctccctcccaccagacctactcgggcttgttctgcgtgacggtcaacccctacaagtggctgcccatctacggggcccgtgtggctaacatgtacaagggcaagaagcgcacagagatgccgcctcacctcttctccatctctgacaacgcctaccacgacatgcttatggg

SEQ ID NO: 258015 - DNA, 72 bp, Homo sapiens; identical to SEQ ID NO: 211667
  chr7:98870778-98870850
  hypo

SEQ ID NO: 258016 - DNA, 186 bp, Homo sapiens
  chr7:98876193-98876379
  hypo
gccctgtaagacactcgattttcacgtgcatcgtacagggtagaaaactcagtttggcagacatttagagatttgatcaaagtcccaggcccattggtagaaaacccagccctggaaggggcccaattccatctccagtcctccctgctctgccacggccatctctgtagccgtgagcatgtgtgg

SEQ ID NO: 258017 - DNA, 195 bp, Homo sapiens; identical to SEQ ID NO: 211668
  chr7:98879380-98879575
  hypo

SEQ ID NO: 258018 - DNA, 118 bp, Homo sapiens
  chr7:98885541-98885659
  hypo
gagctgctgaagctgcggcgggagctggaagaggccgccctgcagagcgaggcgacggcctccacactgcgcaagaagcacgtggactccatggccgagctgacggagcatgtggaga

SEQ ID NO: 258019 - DNA, 34 bp, Homo sapiens
  chr7:98889891-98889925
  hypo
tgtggaaagcccccacgggcgcctgacaggctgg

SEQ ID NO: 258020 - DNA, 37 bp, Homo sapiens
  chr7:98901753-98901790
  hypo
gcacaggcccatgtccggcccacggtagaccctcatg

SEQ ID NO: 258021 - DNA, 216 bp, Homo sapiens
  chr7:98904287-98904503
  hypo
tgacgctgaggaccgggctggcatggcagagactgccctaaacaagctgcgcaccagacaccgcgtggccggcaagggcatcacctctgtggagatcatccaggtgtccaagacaggcacctcgaaaaccctttctgaggagtgaggccctccgtgtcctaggccacaactggtaggtgtggactccgctctggacggtctcgctcagagcgctcc

SEQ ID NO: 258022 - DNA, 244 bp, Homo sapiens; identical to SEQ ID NO: 211669
  chr7:98955430-98955674
  hypo

SEQ ID NO: 258023 - DNA, 44 bp, Homo sapiens
  chr7:98960332-98960376
  hypo
ccatccccttcccagcgtcggggaagaggcgggtaagttctaga

SEQ ID NO: 258024 - DNA, 146 bp, Homo sapiens
  chr7:98966332-98966478
  hypo
ttattttgccattttttaacacaggccatttctcatgtggggaggaaggcccactccagtcaccgcagccagaagccctcagtgctttatttcaacgctggggccttttgagtttgtgacgctccgtccttctctcactctacctt

SEQ ID NO: 258025 - DNA, 95 bp, Homo sapiens
  chr7:98966739-98966834
  hypo
agcatgtgctccccactgggcgagggaaataccttagtggcagccccttttcagctcacccacgctcaggggcagggccctgtcactggaactga

SEQ ID NO: 258026 - DNA, 116 bp, Homo sapiens
  chr7:98970798-98970914
  hypo
agtggaaaagagagcggcggctaagggcacctccaatggggagggtgtcggggcaaagcgacctgagacccccagccacatactgcaggacaaaccaatgtcggcaggtgaggaca

SEQ ID NO: 258027 - DNA, 86 bp, Homo sapiens; identical to SEQ ID NO: 211675
  chr7:98985728-98985814
  hypo

SEQ ID NO: 258028 - DNA, 164 bp, Homo sapiens
  chr7:98991540-98991704
  hypo
ttctcactaaagcccgctccccaagaagtctgggagcgcctggtggacagggtgggcctgagcccagcgccagcacaggttgaattcataagctcctcttcctctttgcagccagatctcggtgctcagcggcggcaaggccaagtgctcgcagttctgcacca

SEQ ID NO: 258029 - DNA, 222 bp, Homo sapiens
  chr7:98994224-98994446
  hypo
agggcacagggtgggcgagacacagcagaggtcctggcagcgcggcccaggtccccggcatctcctcccacgggtcgcagttacttattcagggagagtgactgcattcgttttcctgacaatgtggcatcgtcttttgctgaggggtgggagaagggcaggggttaaaacaaagcaaccccccaccccctcccaacacacgtgccagaaccctagaacttt

SEQ ID NO: 258030 - DNA, 180 bp, Homo sapiens
  chr7:98997417-98997597
  hypo
acatgatcttgatcctcatacgactcttgaggaagatatttacagcttcattttcacacaggacttgcagaggcctgggacagctggctgagctgcgctgggctggactgccttctggccggcacaggctcgcagcccccttccagtccccatggccacgacattacagatggatgcagg

SEQ ID NO: 258031 - DNA, 32 bp, Homo sapiens
  chr7:99019874-99019906
  hypo
gcgtgacacctgcacggcgttcctgaccccgc

SEQ ID NO: 258032 - DNA, 76 bp, Homo sapiens; identical to SEQ ID NO: 211677
  chr7:99020629-99020705
  hypo

SEQ ID NO: 258033 - DNA, 73 bp, Homo sapiens
  chr7:99021093-99021166
  hypo
gccacctgaggcagcgggaacaccaatcccgaagcaggcaagaggttggtggcctctgcgaactgacagaagg

SEQ ID NO: 258034 - DNA, 120 bp, Homo sapiens
  chr7:99032514-99032634
  hypo
ccgttccccaaaccgcaggttatggaactgggctgcggatttgcggaatagtctccgggaggagtatttgtcagagagggtcccaaaactctcctcctcctcctcgtcttcttcctgcgt

SEQ ID NO: 258035 - DNA, 70 bp, Homo sapiens
  chr7:99065118-99065188
  hypo
ccaggcagtgaaaatcgcatatacaattataggtgtgtgaaagcacggccagcatcgccagtgggaatta

SEQ ID NO: 258036 - DNA, 36 bp, Homo sapiens
  chr7:99073693-99073729
  hypo
gggattataggcgtgagccaccgtgcctggccagag

SEQ ID NO: 258037 - DNA, 235 bp, Homo sapiens
  chr7:99084625-99084860
  hypo
tgttttcggcagctcgcgtatcttgttgaacataagaggattcacaccaaagaaaaaccttataaatgtagcaaatgtgaaaaaacgtttagtcagaattcaacccttattcgacatcaggtgatccatagtggagaaaaacgccataaatgccttgagtgtggaaaagcctttggccggcattcaacccttctatgtcatcaacagattcacagtaaaccgaacacccataaat

SEQ ID NO: 258038 - DNA, 32 bp, Homo sapiens
  chr7:99101319-99101351
  hypo
aaaggagagcactgggaggtcgatgcgggcgc

SEQ ID NO: 258039 - DNA, 244 bp, Homo sapiens
  chr7:99103806-99104050
  hypo
agactttttaccagcgcttcaggcacttccagtaccatgaggcttcaggaccccgggaggctctcagccaactccgggtgctctgctgtgagtggctgaggcccgagctgcacacgaaggagcagatcctggagctgctggtgctggagcagttcctgaccatcctgcctgaagagttccagccctgggtgagggaacatcaccctgaaagtggagaagaggcggtggccgtgatagaaaatat

SEQ ID NO: 258040 - DNA, 259 bp, Homo sapiens
  chr7:99135320-99135579
  hypo
gtagctggtattgaagagccagccgcacagctgtgtgtgggagccacctgactaagcagccgagacaaggcggacagtataagagaactagtgtaagtgagctgctgatgagagctgctaaataaaactacatttcacctgcctacggccccctgagtgttttcagctatctgctcatccactcactccctttggacctcagcatgagttggaacctgaccctgggcatgacagttggcgtagtcgtgaacctgacacc

SEQ ID NO: 258041 - DNA, 450 bp, Homo sapiens
  chr7:99140777-99141227
  hypo
ccaggtgcctcaccgtcccttttgcttgtgtcccacgctccagactccgcgcgcgcctgggcgaggctgttgggtagggcgtgcgcacgaggcacccaggatgggggacggaggtgttcactgcaggcgccaaccgcatgctcacaatgctcacctgcaggccttgccacccagggtgggtatggagcactggagtcttctgtataactacagttctggctctggattttccgagatcgcgactgtggccgaggcaggggcaccagcaaccagtggcgctcagtgaagggcaggctgggtctgttccgccatttgccggaccggggtggccgagccgaggacctggaggagaagcgccctgcgccctcggtccgcccactcccaaagcctttcttcgctatcccaggaagcagccctgagttgtggtttgcgcccgggtgtgggttctgt

SEQ ID NO: 258042 - DNA, 189 bp, Homo sapiens
  chr7:99161482-99161671
  hypo
taggcatacttctccgccttcccaccacccggattcatagtgtgaattcctgcccggccctgagtcatacccaggcaagtgctttctctggagaaacacttgccgtccttacagcaggaatctccaagagatggcccaagtatcggcttcccatcgatattgctcgtccctgctcggaaactccttttc

SEQ ID NO: 258043 - DNA, 74 bp, Homo sapiens
  chr7:99191695-99191769
  hypo
tttcattaatatcacggtgtgtaaactctgtaatatgataaatatcagaagcgatataccgttaatatcacagt

SEQ ID NO: 258044 - DNA, 238 bp, Homo sapiens; identical to SEQ ID NO: 211680
  chr7:99227292-99227530
  hypo

SEQ ID NO: 258045 - DNA, 38 bp, Homo sapiens
  chr7:99391324-99391362
  hypo
catccattttttttgcggttcatccattctgtagcatg

SEQ ID NO: 258046 - DNA, 98 bp, Homo sapiens
  chr7:99391422-99391520
  hypo
ttatttatccatccatcgatggacatgtgggctattagcaccttttggcccttgtgaattggactgttagaaatatgtgagtccgtgtattttagtaa

SEQ ID NO: 258047 - DNA, 144 bp, Homo sapiens
  chr7:99552784-99552928
  hypo
caggcgtgagccacagcgcccggcctgaaaactcttttacacaaacccaagcgtcttctgtgcctcagtttccccacactccttggcttcctgggagacccggcccttcactccagccgctccgcatctccacaccatgttggt

SEQ ID NO: 258048 - DNA, 93 bp, Homo sapiens
  chr7:99602415-99602508
  hypo
ccacccaaggacaccaccagcggggcgttcccagtacgccactcaaagccttacgtggagaggccaggcgcagtggcgcagacctgtaatccc

SEQ ID NO: 258049 - DNA, 313 bp, Homo sapiens
  chr7:99691590-99691903
  hypo
ttccctccacggacgctgtgcgtgccctgctggagcagcaagtacccacagtgcggtagcacggagaggaccactatctgcactgtcagcactttagccccggcagggctggagcgggaggtggggaggcggcaatgagagcacggtaaggagctacccctttaagggtcaaaacagatggccctccagcaatttgggcacttaccagagcagtggaaaggcgcaggatagccagcagggtccgggcagaagtataggtggcatccttactagcccaagcctctcgcctcatctccacgtatgctgctgtgat

SEQ ID NO: 258050 - DNA, 254 bp, Homo sapiens
  chr7:99696722-99696976
  hypo
gagtgacgattccacgcacagttaccaacttccccacagagtcagcccgcacttcccggatcacacgaggcttgttgctgctagggccttgaaaatacagctcactaaggggagaaaacagtcacaaacaagatcctggagaaccaatccctacatctttcccgacagagaccactcacaatctgcgcatgagttcagcagggtactggttctgggggcttcggaccatcccagggtcccgactccgctgctcc

SEQ ID NO: 258051 - DNA, 165 bp, Homo sapiens
  chr7:99723169-99723334
  hypo
catagctagctggtcgatgaggcagcacccagaatggccgctgtcttgttaagctcaagctccagcctgagcaacatagtgaaaccccaattctacacacacacacacacacaaagaagactgcagggctggtggtgcagcgcctgtagtcccagttactgcaga

SEQ ID NO: 258052 - DNA, 120 bp, Homo sapiens
  chr7:99734871-99734991
  hypo
acaggtgagccactgcacccggccacagcaatatgtttagacttacgttttctagcagcaaggccaacactaaaggttataagatgttttcttgctttttaaaatttgttctttcttttt

SEQ ID NO: 258053 - DNA, 78 bp, Homo sapiens
  chr7:99751552-99751630
  hypo
ggcagaaccgaggtcgggagcccattgatgtctgagcctgccggagggcgagggtcggagaagcggattgggtcctgg

SEQ ID NO: 258054 - DNA, 37 bp, Homo sapiens
  chr7:99782063-99782100
  hypo
tatgcagttgtacagcgtgttagtttttttttttttt

SEQ ID NO: 258055 - DNA, 87 bp, Homo sapiens
  chr7:99796109-99796196
  hypo
ggtgctgacggacgcggattgtgagagcgtctacccagttgtgtatgcctctcatcgaggcctggcctctgccgcaggcgaatttct

SEQ ID NO: 258056 - DNA, 288 bp, Homo sapiens
  chr7:99819894-99820182
  hypo
catcagactagctccggggcgggtctgtgtctcccacctcagactagctccagggcaggtccatgtctcccacctcagactagttctggggcgggtctttgtctccccgctcagactagctctggaacgggtccttgccttcccactcagattagttccggggtgggtccatgtctccccgctcagactagctccagggaaggtctgtgtctcttccctcagatgagctcctggcaaagcctcccccgtcagactaagactcctaggcagagccgtgcctccccctgg

SEQ ID NO: 258057 - DNA, 265 bp, Homo sapiens
  chr7:99839732-99839997
  hypo
tcccagaggaaaatcggggggagggtgaatgcccggctttgttctgctaaccagctgcagctttttcatctgtttctcctgggttttcaatgggtctctcgtgttatttacatttcatttctcctgtctttagcaactagaagctgccctttcaagttttacttagaaaaaagcccttaattggttctgcaactggaagggcgatcctgaacaggagttattttgccttaagatagaaaataaggccgggtgcggtggctcatgc

SEQ ID NO: 258058 - DNA, 92 bp, Homo sapiens
  chr7:99849463-99849555
  hypo
caggatcaataagtatgtcacgaaccaaaaattctgagtcatcaaattctgcacgcctgaggtccatttaaaaaaaggagcctgggccgggt

SEQ ID NO: 258059 - DNA, 141 bp, Homo sapiens
  chr7:99964960-99965101
  hypo
ccctcctgcaggtagcagggcgccaagcagtgacttctgaccaacagagtgtggggagaagggatgtgtattagccccggaggacgtgatgtgagacccgcttgtgagtcctccacactcgttccccattggcaagataca

SEQ ID NO: 258060 - DNA, 76 bp, Homo sapiens; identical to SEQ ID NO: 211685
  chr7:100024904-100024980
  hypo

SEQ ID NO: 258061 - DNA, 115 bp, Homo sapiens; identical to SEQ ID NO: 211686
  chr7:100025340-100025455
  hypo

SEQ ID NO: 258062 - DNA, 128 bp, Homo sapiens; identical to SEQ ID NO: 211687
  chr7:100030628-100030756
  hypo

SEQ ID NO: 258063 - DNA, 448 bp, Homo sapiens
  chr7:100034728-100035176
  hypo
gctgggattacaggcatgagccaccgcacctggccataaatggggcagctttaaggtaacggtccagtgtgccctgacctcccactcagacctgcacagcatttccggtgttccgttgcctccaaactcggaccggagttggcctgtatgagtgcgggcgagggtcgccgaccccatcccggactcccttctgggacacagcaactcttgcagctttttgtgactacttttaccttcgagagttccctgaaatattaatttgtataaaaagtagatatctggcacgggtgcggtagcgcatacctgcaattccaactctgggaggccaaggcgggaagatgtcttgaaaccctgagctggagacaagcatgggcaacataccgagactccacaccaccattcccaatctctaccaaaagaatttaattttagccgggcgtggtggtgg

SEQ ID NO: 258064 - DNA, 277 bp, Homo sapiens; identical to SEQ ID NO: 211688
  chr7:100064566-100064843
  hypo

SEQ ID NO: 258065 - DNA, 37 bp, Homo sapiens
  chr7:100065387-100065424
  hypo
ggcctcccaggccccggtggggcgggggcccagatgt

SEQ ID NO: 258066 - DNA, 228 bp, Homo sapiens
  chr7:100086232-100086460
  hypo
ccccatgcccaccgccgcccagcttcagccctcccgagccggagggacgggacgcccaccaagaccactccttgtgaaatccccccgcccttccccaacctccttcagcaccggcctccactcctggccttcccccaagccaagtctgcttcccgaacccctggcgatggggtctcaaggctacctgtcctctgccactccaaggagccagccggctccaccccagct

SEQ ID NO: 258067 - DNA, 157 bp, Homo sapiens
  chr7:100088162-100088319
  hypo
tggaatggcagtgccgagggtccaggcaaggtggagcgtgaggacaggggccctgggacatcggggatcccagtgagaagccagggggcagagggactgctggccaggatccaccatggagaccgaggagggagccgcaccgcgctgcccattccct

SEQ ID NO: 258068 - DNA, 180 bp, Homo sapiens
  chr7:100098054-100098234
  hypo
atcatagctcattgcagcctcaccgtcctggcttctagcgatcctcctgacttggcctaatagttgtttcttaaagaattaactactcagaagggggagggtgggaagctgcatctctatttcatttattatgccaaaggacttcagtgtaaaaacaaacattaaaaggaaaatgtgggc

SEQ ID NO: 258069 - DNA, 111 bp, Homo sapiens
  chr7:100100530-100100641
  hypo
cggtttccaggtaccgtgtgttggagtgtctcagtgctagctgttcagatccaggtgtccctcatgcatgtccctgtagagtagtggtccactctgcgggggtccagcttc

SEQ ID NO: 258070 - DNA, 33 bp, Homo sapiens; identical to SEQ ID NO: 211689
  chr7:100170149-100170182
  hypo

SEQ ID NO: 258071 - DNA, 186 bp, Homo sapiens
  chr7:100179298-100179484
  hypo
catgtataagctacccggtctgcagtgttttcgttaccgcagcctgagccaactgggacgcacatacaaacacctcctctccagttcttcattcttctcaccttcgggcagcgtactgagctggttcctccggacattgaggtcccgcagggaagagaggccacacagttccgagggcagggattg

SEQ ID NO: 258072 - DNA, 413 bp, Homo sapiens
  chr7:100179714-100180127
  hypo
cttgttgttgctgacgatgaggaccctcaggggcagctggcagatgtagggtggcagcagcgacagctggtttcggctgtggaagggagaaaggcagcggactggctccccaggcatggcatcccagcactgccatcctctcggggtcactgggtgggtcactcagtagtacttgagactgagaagcacacgctcccacgtggccctggctcggcctccctacctgaggttgaggtaggtgagggctgtgagattccccaaggctgggttcaggcatctcaggcaattgtggtagaggctcaggccctccagggacaccagctggcacgccgcctcgggcacctcgggaaaccggttccgggacaggtctggggaaaaggaggtgtcggggagagttgcggaaaggcccagcc

SEQ ID NO: 258073 - DNA, 36 bp, Homo sapiens
  chr7:100189309-100189345
  hypo
caggcatttggaggccgccgccgatgtctcagcaag

SEQ ID NO: 258074 - DNA, 86 bp, Homo sapiens; identical to SEQ ID NO: 211690
  chr7:100198415-100198501
  hypo

SEQ ID NO: 258075 - DNA, 291 bp, Homo sapiens
  chr7:100218441-100218732
  hypo
cttgactgggggacggggatgtgaggatccccagggcctcagaagttgttatcaatgttccagacatccccgctaagcgcattggctgccccttgcagcgtccaggtgagcagggctagctgacgccggaaacggctctcctggaagccagtggaggaggtggccccgggggtcccggagctgttggagcgcagcagccgcaggtggtccagcagggcgcccagcgtgtggtctccacggcccatgaagatgtggcggaacggggagtcggctggcgacacgtactgggaa

SEQ ID NO: 258076 - DNA, 95 bp, Homo sapiens
  chr7:100246355-100246450
  hypo
ctgcagaacgtagccgtcatgtactggaatggccgtggtgtgggtggctccactgtccagcacgaggccagtggaccgcccgtttgcaaagctgg

SEQ ID NO: 258077 - DNA, 32 bp, Homo sapiens
  chr7:100258217-100258249
  hypo
tgcagtggggagctcagatacgcacagaagag

SEQ ID NO: 258078 - DNA, 253 bp, Homo sapiens
  chr7:100275849-100276102
  hypo
gctgtgggacgtgcgggattccatgtgccgacagaccttcatcggccatgaatccgacatcaatgcagtggctgtgagttttggggcgagctaggccaggccctccccaccaggctcccggccctgctcctcaccctcaccctcaccccatctgggtcccgtgtcctgcagttcttccccaacggctacgccttcaccaccggctctgacgacgccacgtgccgcctcttcgacctgcgggccgatcaggagc

SEQ ID NO: 258079 - DNA, 196 bp, Homo sapiens
  chr7:100279781-100279977
  hypo
ccccaggcaggaacggatataatcgtggacatcatagggggattccacctccttgaggatcgctacagccatgggcactgcaggatgagcgaaggctgtcagggccccctggccgggtctggagacccaggtcccgcccacctcctgggagccgctcgcccaccgtccaggctgcccgtggcgctcagcgtgtgca

SEQ ID NO: 258080 - DNA, 282 bp, Homo sapiens
  chr7:100281492-100281774
  hypo
caccgacaaggaccggctcatcgtcgggagcaggttctggtccccgcctctgaggagcaaattgtggattcttaggaccccaaatccatctctggtctgcccccatcccccccccaccctgtatcctgagggctcgcacgcaccacgcacctggggggtttgagcgcctggagctgctgcaggaatgccgtgagctgctgctgctgctgctgtggcggcggcggtggtggcggtgtcaggtcccccagagctgccttttctcggagcgcgcactgtgggagc

SEQ ID NO: 258081 - DNA, 113 bp, Homo sapiens
  chr7:100284949-100285062
  hypo
ttcccgggggcttcgtccaaaggccccatcgccttcttcgatgcttctttggtaaaagcagctgtcaccacggccgcggcctagagaagaggccagacgcacaatgaaacctg

SEQ ID NO: 258082 - DNA, 681 bp, Homo sapiens
  chr7:100285461-100286142
  hypo
ctgcagcaccgcggcgaactccttgtcctgcagctcttccgggacctggcagtgggttgggacagccaagacaccacatgctgccagatcccctccacaggcagaggccaccaccgccaacccccctcgcccacgcacccaccttgttctccttgacgtagagagccagcatttcctctcgcccataacggtagtcagccagcttgtatttgggcatggcaggggacgggggtggggaggccacgctgccgcccccggacagggccctgagcctggacacaacacagagagaagaagacagaggtcagggcagcctgactgtgctttctcgaatctccacggcagccgaggcacaagtgactcaccactcaggcccaaagttgagtgtctctgctgccatcgtggggctgggcgtgtttgagaggccgggggtggggaggaggggacctggcgttcactgtccaaacacctgtgggggaacaggggccatgaagaacagcacacgaaggagaactttaaagcgcagggaggacaccatgggggacatcctagtgggcacaacaatgggccccggactagctggtgggtcacctggggtctaaaaggactcacctgagccagccacgtggccactcacaccatgagttacccagagatgagtccagacggtgaaagacctgg

SEQ ID NO: 258083 - DNA, 49 bp, Homo sapiens; identical to SEQ ID NO: 211694
  chr7:100388725-100388774
  hypo

SEQ ID NO: 258084 - DNA, 244 bp, Homo sapiens
  chr7:100400266-100400510
  hypo
caagcaccggcgtccgtttctgggttccaccaccaactaccgcccttttcactacctcaccccacaccccttcataggacacagcttgggggtcccaggcggggtccggggatgtgggatgaccaaggcactgttctggaaacagacatgatgatgggcccctgtttcaacttgggcaaaggaggccatagtgaaacaggttccctccaacacaaagttatgacaaggacggtagaaaaacaaa

SEQ ID NO: 258085 - DNA, 859 bp, Homo sapiens
  chr7:100402443-100403302
  hypo
ggaaaaagagaacccgagttgacacattgttaccgtgagagccgggcctggaatgcagatagatgcacaaagatagctagaagtgagaggcggaagcgcgatggcccagggctgtgatggcaggaggaggtgaggcgggcaggctggccccaaagagtccttgggtcctcagctccatggggctgtgactgctcctctggggcccttctaggcatggcatgagcgcagtgcaagaagacagcattggcacccgaagctgaccccaaaagcccctggagaccccgtgggcctgactccagctgccccgctctcccagccccactccagctcctgccactgcttactcagcagagatctggctgaccagctcgaaggagccaaagccagcggctgcgaaactttcttcgtatcttcccattttgatggcccgaagccactcgcccacagagccaaaagctgagtagtgaggctgccgctggtccaggagagggtgtgaggccctagggggcaaggatggggaggaatgctgagtaccaggcccaggtccgggggaggaggtggaacccagccttgcagaggcggacagaggccctcccacccaacaccaatgaacggacacttctgggcaaggagtgggggcagagagcgggaaggagggcccattctctgcagtcctcacccgccattctcccgggccacgattttgaggctggcggggttccggatcatcttgtccagggcgctgaccacctgggggaagcggggccgggcattccggtctttctgccaacagtccagcatgagctggtggagggaggtgggacagtctgggggcgggggcagccggtagtcctgttca

SEQ ID NO: 258086 - DNA, 269 bp, Homo sapiens; identical to SEQ ID NO: 211695
  chr7:100405018-100405287
  hypo

SEQ ID NO: 258087 - DNA, 80 bp, Homo sapiens; identical to SEQ ID NO: 211696
  chr7:100407982-100408062
  hypo

SEQ ID NO: 258088 - DNA, 514 bp, Homo sapiens
  chr7:100410407-100410921
  hypo
tgtgagaatcatgacgggcatgctgttggtgaccacgccctccaggcggatgatattggggtgctcgaactggcccatgatggaggcctcgctcagaaactcacgccgctgccgctccgtgtagccacccttcagggtcttgattgccacacagctctccttcttccctggggccttgagccgcccccggcacacctcgccaaactcaccttcaaacaaggacgcagaggtcatcagctctcccgctccagtgtggccctgcccacccccgcttcgttcccaggtgcccgggcagccttcggctctcacctgcaccaatcacctcttcaatcttgacgtaggagacatcgatctcttttgcaaattccctcacagcctcattagggtcttcataagtgaaggggtcgatgtagaccttagtacctgagaaatcaggcagggccccgtcagctgggaattaactcccactggactcggaggctcggctcatagcttttagccccaaacccctgtc

SEQ ID NO: 258089 - DNA, 44 bp, Homo sapiens; identical to SEQ ID NO: 211698
  chr7:100417052-100417096
  hypo

SEQ ID NO: 258090 - DNA, 98 bp, Homo sapiens
  chr7:100420026-100420124
  hypo
accacgcagctaccggccacgggcacaaccagctcccgaggcacagtctccgggaatcgagtcaggttcacagtcagctgggcgcactttttgtagaa

SEQ ID NO: 258091 - DNA, 413 bp, Homo sapiens; identical to SEQ ID NO: 211699
  chr7:100421146-100421559
  hypo

SEQ ID NO: 258092 - DNA, 122 bp, Homo sapiens; identical to SEQ ID NO: 211701
  chr7:100480482-100480604
  hypo

SEQ ID NO: 258093 - DNA, 297 bp, Homo sapiens
  chr7:100489968-100490265
  hypo
gttggcccagtatcgcatcagtcgctgggcgaagattttctcctctgccgtgtagtttcgagaggggtccagggggatcccaaagatgaactcgatctcgtagccgtggggcacccccatccacaggggccaggagagcgtggaagcacggtgttcaaagacgtaggcgtagacccgggcaccctgggcagccagtcgcccagccagctgggccacggggcacacgacattgtggtcgcccaccacatcgctcagggcctccctcaggcgtgccgggtcctcgggatgcagccagtc

SEQ ID NO: 258094 - DNA, 43 bp, Homo sapiens
  chr7:100490911-100490954
  hypo
gttcaccaggacctgcgctggtcgtgtccgaaggcaggctacc

SEQ ID NO: 258095 - DNA, 143 bp, Homo sapiens
  chr7:100512579-100512722
  hypo
ttgccctgttgcccaggcctcgaactcctgacctcaagtctcaaactcttctcttcaagtgatccacccgtctcggcctcttggcctcccaaattgctgggattatgggcatgaaccaccgcgcccagcccccaccactttct

SEQ ID NO: 258096 - DNA, 91 bp, Homo sapiens
  chr7:100514709-100514800
  hypo
gcccttccaaattctttcttgcacaagatccaagaaccctctcttgcggactgaattaggacctgtttccggtaaaagtgctttcctgaat

SEQ ID NO: 258097 - DNA, 38 bp, Homo sapiens
  chr7:100650571-100650609
  hypo
attattgactatagtcactctgtcgtgttaaatactag

SEQ ID NO: 258098 - DNA, 58 bp, Homo sapiens
  chr7:100731011-100731069
  hypo
agacccacacccaccgcgtggtggacctggtgggctacagggccgggtggtatgatga

SEQ ID NO: 258099 - DNA, 343 bp, Homo sapiens
  chr7:100732095-100732438
  hypo
gcctggagacaagcggtccccccggatcaccgggctctgtcccttcggtccccgggagatcctggtggcggatgagcagaaccgggcactgaaacgcttctccctcaacggcgactacaagggcaccgtgccggtccctgagggctgctccccttgcagcgtggccgccctgcagagcgcggtggccttctccgctagcgcacggctctatctcatcaaccccaacggcgaagtgcagtggcgcagggccctgagcctctcccaggccagccacgcggtggcggcactgcctagcggggaccgcgtggctgtcagcgtggcgggccacgtggaggtgtacaat

SEQ ID NO: 258100 - DNA, 36 bp, Homo sapiens
  chr7:100834973-100835009
  hypo
atatatatatatttttgagacggagtttcgctcttg

SEQ ID NO: 258101 - DNA, 95 bp, Homo sapiens; identical to SEQ ID NO: 211703
  chr7:100838061-100838156
  hypo

SEQ ID NO: 258102 - DNA, 84 bp, Homo sapiens
  chr7:100840809-100840893
  hypo
ctcatagtcattttctcattcggtctttgcaataacaacatcgtggcaaggtaggtatcagccctcttcgcaagtaaagaaaca

SEQ ID NO: 258103 - DNA, 234 bp, Homo sapiens; identical to SEQ ID NO: 211704
  chr7:100849418-100849652
  hypo

SEQ ID NO: 258104 - DNA, 69 bp, Homo sapiens
  chr7:100860161-100860230
  hypo
tcttccttcccattcttaaactcttctcacccaggaacactctgaccccaaggagggcagggtgggagt

SEQ ID NO: 258105 - DNA, 94 bp, Homo sapiens; identical to SEQ ID NO: 211705
  chr7:100865918-100866012
  hypo

SEQ ID NO: 258106 - DNA, 157 bp, Homo sapiens
  chr7:100866248-100866405
  hypo
ggataagctctgacacgaagccttaggcttgggggcatggaggtgactgtcagctgggattggagaattggggtggagggcagaggctggtagcgaggggccgacttagagccaggagggcagggccaggtgtggtggctcacgcctgtaatcccag

SEQ ID NO: 258107 - DNA, 103 bp, Homo sapiens
  chr7:100870052-100870155
  hypo
ctccaaaaagaaaagaaaagactatttcggggctgaacaacaccatctgtgcttctccgtggcatcctaggctgggattcccgtccagcttgcactgtcagca

SEQ ID NO: 258108 - DNA, 91 bp, Homo sapiens
  chr7:100961430-100961521
  hypo
ctcgaattcacagcccgtgcctttgttgttgctggtaacatgcgggttctcaaattctaggatcctaaaaggaaaaagaagagcagtaggc

SEQ ID NO: 258109 - DNA, 157 bp, Homo sapiens
  chr7:101086134-101086291
  hypo
tgtggaagtgtgcacgagtgtgtttgtgcgagtgtgcaagcacgagtgtgcacacgagtgtgagagagcaaatgagtgtgtgactgtgtgagggtgtgcgtatgtgttagtttgtgagagcttgcaagtaagtttgtgcaagcgtgtgaaggtgtga

SEQ ID NO: 258110 - DNA, 34 bp, Homo sapiens
  chr7:101086746-101086780
  hypo
agtgcgtctccaaacgtcgcgcctgctgctacca

SEQ ID NO: 258111 - DNA, 202 bp, Homo sapiens
  chr7:101131926-101132128
  hypo
gattacaggcgtaagccaccgcgcccgaactttaaccagttttaagcgttcaattcagccgtgttaggtaccgtcacactgtcgtccagccatctccactgtccatcttcagaactttttcattgtcccaattaaattgcagacttttaaaggaggaaaaaaagtttattgtgtgtgtcctgtctagcgcactcttccaggt

SEQ ID NO: 258112 - DNA, 77 bp, Homo sapiens; identical to SEQ ID NO: 211707
  chr7:101195310-101195387
  hypo

SEQ ID NO: 258113 - DNA, 59 bp, Homo sapiens
  chr7:101210706-101210765
  hypo
ccccgttgccatggcgattaccatgtctcagcttactgaggtggcgttgcaaacctgta

SEQ ID NO: 258114 - DNA, 423 bp, Homo sapiens
  chr7:101241666-101242089
  hypo
tctgagctgcctcccaccctcgcctagcctctggcagggcctctggccaggcaggaacggccaacagagtcacctcctgctgacaagcctggcgctgacagccaggatctgggagaacaagaagtccattcaaggcgcagggccgggcgggcccactttcaggtgtatgatctcacctctcggaaactggcaagccgccggagggcctcgtcaaggctttgatgaccctgtgctgaggacgcaaatcctaggcctggccgacaccctgctccaaggaccaatgactgaggccagagagggtcccagatggagcctgggtaggggtgaaactgcacaggcggacgggcagagcgtccaccctggagaagagacccaggcccaaccaggccccagagcctgcacgagcacctggagtggcaggga

SEQ ID NO: 258115 - DNA, 57 bp, Homo sapiens
  chr7:101279964-101280021
  hypo
ctcgtcctgctggacggctgaggaaactgaggcctggagcagcgaggggcctgctca

SEQ ID NO: 258116 - DNA, 146 bp, Homo sapiens
  chr7:101465441-101465587
  hypo
cttaaatattaatggcagggccctctggattgactgtgttatttgacccattccagttttcaaggcgtggtcttgaaaagctgtcgatcaccctggttttgggatgtgtttcagaaccaagtttcgatggtgtgtcagtgttggat

SEQ ID NO: 258117 - DNA, 454 bp, Homo sapiens
  chr7:101475654-101476108
  hypo
tggtcatcagtgtcccccaccgacatggcacatccagcgagcccactgtgtccccagcacctgcggtgcagggggctggcaccttcaggggcgggcttcgtgcagacgtccacccagtcagtccccacaggtttatcaaacacaagtggggcgacaggacccacacttcggcgttggacgtgactcacgcggggagttggcttggagttcctttattcatccctatttgctttctgtctgtaatcctttgtaattccctggtttcatgatgtaattctaatggaaataaacccgaacctttcaaaattatgtaattaattgcattcagcttcaatgacaatgactaattatagtgatacctggtggcaaggcaggtacctactgctggggggctcctgtctgcttggtactaggactgccacttctgggcgcgtcggagcggctgcacaggggg

SEQ ID NO: 258118 - DNA, 37 bp, Homo sapiens; identical to SEQ ID NO: 211715
  chr7:101476346-101476383
  hypo

SEQ ID NO: 258119 - DNA, 139 bp, Homo sapiens
  chr7:101497175-101497314
  hypo
caggagggacctgaccgcagtggcattttgcacacctgcccggcctccaagtcctgcagctcgaatgagcttgcttgctgcaggcggcctgctccatcttgaggcttgtctggaaaggcggcttcggctttccagtgct

SEQ ID NO: 258120 - DNA, 152 bp, Homo sapiens; identical to SEQ ID NO: 211716
  chr7:101504316-101504468
  hypo

SEQ ID NO: 258121 - DNA, 42 bp, Homo sapiens
  chr7:101521621-101521663
  hypo
gtccttttagagaccaacctcgcagttagccagcaacaggct

SEQ ID NO: 258122 - DNA, 56 bp, Homo sapiens
  chr7:101533919-101533975
  hypo
atagagaggttggtgcgaaaatagcagcttgtttctgcttgcgtatttctactcac

SEQ ID NO: 258123 - DNA, 173 bp, Homo sapiens; identical to SEQ ID NO: 211717
  chr7:101536663-101536836
  hypo

SEQ ID NO: 258124 - DNA, 274 bp, Homo sapiens
  chr7:101543484-101543758
  hypo
actgaggattgacgcggcccctttaaaatcgcatctccgctcttggcaccaggagctgtcatgtagtgtaacctgttggtgcccagaacccaggtttcctggtggcagccagcggtaccggtgccaggaggcagcgaaggaatcacttgcgacgcccgctctctctgccatacgagtgtcgttctgcggggccatctggctggcagcagctctcagccaatggcaggatgttgtaaacctcactcgctgaatgcggcaccgaaaatcttgaaaa

SEQ ID NO: 258125 - DNA, 50 bp, Homo sapiens
  chr7:101556168-101556218
  hypo
tacgccttctcacacgtgacccgtgactcatgggccgaggcctctgcatt

SEQ ID NO: 258126 - DNA, 350 bp, Homo sapiens; identical to SEQ ID NO: 211719
  chr7:101566716-101567066
  hypo

SEQ ID NO: 258127 - DNA, 283 bp, Homo sapiens; identical to SEQ ID NO: 211720
  chr7:101583547-101583830
  hypo

SEQ ID NO: 258128 - DNA, 158 bp, Homo sapiens
  chr7:101586046-101586204
  hypo
cagactctgggtcagagggcagcttgagctcctccaccgactgctccaagcctttgccccagctcttggtgcctggggtggtgggagcagcatgggcttcgctgcacacggacctgggcccagatcttggttccatcggctgctgggagatcagttcc

SEQ ID NO: 258129 - DNA, 200 bp, Homo sapiens; identical to SEQ ID NO: 211721
  chr7:101595976-101596176
  hypo

SEQ ID NO: 258130 - DNA, 499 bp, Homo sapiens
  chr7:101603072-101603571
  hypo
gcggaggatttcaccgcgtacatattctctgtttggacatggtacaacctgtggacccttttaaacatagttacatgtttgactctttatagggtaataactcgattaattttgcaaggctttttagaataccattgttctcttgaaaagaacaggtttgctgttttaacaagactttaatgccatcgagatgcctcacattggcacggttgcgtaagaatcgcacggtcccatgaaatgaaattgagagagctttttccggcgcctggttggttggggcggcctccgttcggtgcttttttcatcctcgacccagtgaccaactgtgtttgccctgatgtttctttcaattccaccattccgaaatgtctccggaatctgtcgttttagcttttgcagcaaggttcgttgtgtttgtcttgcccgcttcaggtttctctaatgagattcacgtgtaaaggaggattggcaattaatcggatgactgattaattgtgag

SEQ ID NO: 258131 - DNA, 213 bp, Homo sapiens
  chr7:101610608-101610821
  hypo
atttgccacacttgtgacttagccaagtgtctttttcaaagactaataaagccttcacagcttccgaaacaccgcgctagatctggtagccgcggacaatttggattccttctccagtgggaaagattcaaaactgcaggtttcagaagcctttaaaagcttcttgtctgtgtgatgttcattgaatgcaaattctttcgcaaataatggcct

SEQ ID NO: 258132 - DNA, 234 bp, Homo sapiens
  chr7:101615800-101616034
  hypo
gagggccaggagcacggaggacctggggagggccctgaccactggacacatctgccctttgctcctcctttttgtctctgctggtggccctttctgctgtattcacgcgccctcaccacctcctgtgtattcgtgtgctggagttcagccgccaaggtggagagagactccctgtcggggaaggactccggccccaatgcctcctcctccaggccaggccgccatggtgggtgg

SEQ ID NO: 258133 - DNA, 323 bp, Homo sapiens; identical to SEQ ID NO: 211724
  chr7:101616396-101616719
  hypo

SEQ ID NO: 258134 - DNA, 45 bp, Homo sapiens; identical to SEQ ID NO: 211725
  chr7:101624113-101624158
  hypo

SEQ ID NO: 258135 - DNA, 502 bp, Homo sapiens
  chr7:101627640-101628142
  hypo
tacccaccctgtaagattgtcgtgggacaatgtagataaaaacctcgatatacagcctagtacacaaaggacggtgtaaatattctcttccgtgcttcgtagatttcatttttgaacgctcagattgttctccggcaaaaaaaaaaaaaaaaaaaagtgcttgcagtgagaacctgccctgcactctcaggcgagctgttgggtgcaagtcctgcaggactgagctctgaaggccacccacaccctgggttgtgcttggatgatggcatccctcctggcacaagcgcagatgggcagtcgggagggaacatcagcctgggaaaactagatgtcagtgaaaaatgctggaggtggctggcgttcgcaaaactcagtcgtaaaaaacagcacgttctcagtacaaaatgagcactgttaaaaataaaccgcgcaagaagaaatatatgaatacgagggcatggcaaacagttttgcaaggtattaagatcgcattaatcttaat

SEQ ID NO: 258136 - DNA, 163 bp, Homo sapiens
  chr7:101629392-101629555
  hypo
cctcacagacaattcaggaacgcttacagatagaaaccggtcctggttttaaggtgtaattttgcacaagtgttaacaacaagagatggaattggtaacgaggcactggggtcggatcttcatatttttgtcacatttcatcggtgagatcagtaggtctgtc

SEQ ID NO: 258137 - DNA, 146 bp, Homo sapiens
  chr7:101630532-101630678
  hypo
cgtgcgtgagccacgacggtaaacagaggcgctcctcttgtcctaatgtggaactccccaagctacgggaaaggggtgcatatggaccgctgctcactcacggctcagatacttccacggtaatgggttggcgacagtgactcagc

SEQ ID NO: 258138 - DNA, 455 bp, Homo sapiens; identical to SEQ ID NO: 211729
  chr7:101649203-101649658
  hypo

SEQ ID NO: 258139 - DNA, 441 bp, Homo sapiens
  chr7:101652271-101652712
  hypo
ggaaccctcggccccgcgtgctccagcaggtctgcatgattaacctgaattgcagtgttcagaggctcggcctgccagccacagcggttccagatgaaatgcagcttagaaggcagcatggtgtagtagctttggcgccagccgcacccagagtttggattgtagccagatggcctcaggtgcaatgtataacctctgggaattccagatttcctatttacacgacagggatgattccatacctgaagggctgtttggaagcatctagaagcaagcacagtggagtggctgtcatgacgctgaccgcacaaatgatggtgttaggatccctccacggatgtggccaggtgacacccctcacctaggccgcacagcaccctaatgtacacactgaagaaaggctgcgtggggctgcagagcggctcatttctaagaaggcca

SEQ ID NO: 258140 - DNA, 215 bp, Homo sapiens
  chr7:101653175-101653390
  hypo
gccttcgtgactggcgtgcctcacttagcttaatccctggttggtacatgttaaaacctataaagacagcctctccagcacacatggggagcttgaaaatgaaagaaaggttgctctgacctctcagaactgcggacttcttaaaaaagaaagagtgaggtgggcggcctcccttgctgccggtgctagattccatgatatgaaacagcaagggt

SEQ ID NO: 258141 - DNA, 235 bp, Homo sapiens
  chr7:101656270-101656505
  hypo
caggttaaattcttgcggtaatccttacggccctgtggtgttcgctaagatgtagcaagaatgtaaatagctaggtactttgatctacctcaaatacttactagtttaaacattctgccattctgccgtcataccaaaaaaaaaaaaaaagcaccatcccagggttatgaatgacgttactgtctttggacatgctgtcttgtgtggctgagacgtagatcaagagaaatttgta

SEQ ID NO: 258142 - DNA, 31 bp, Homo sapiens; identical to SEQ ID NO: 211732
  chr7:101694628-101694659
  hypo

SEQ ID NO: 258143 - DNA, 152 bp, Homo sapiens
  chr7:101706969-101707121
  hypo
gtcaagaaccctttacatattgagcattttcataaatatttaaacctggattcctgaacccttgggtcacatctgcagaccatgcagttggccattgcggaagatattaaaagcatattaaacacccactgcgtgcccgtggtcgggaggaa

SEQ ID NO: 258144 - DNA, 36 bp, Homo sapiens
  chr7:101707602-101707638
  hypo
tacaggcatgagcaacggtgccggctctaaatggtt

SEQ ID NO: 258145 - DNA, 586 bp, Homo sapiens
  chr7:102087175-102087761
  hypo
ctggcctggggcttctccaccgtgcttggcatcctactcttcctggccgaggtggtgctgctctgctggatcaagttcctccccgtggatgcccggcgccagcctggccccccacctggccctgggagtcacacgggctggcaggccgccctggtgtccaccatcatcatggtgcccgtgggcctcatcttcgtggtcttcaccatccacttctaccgctccctggtgcgccacaaaacggagcgccacaaccgcgagatcgaggagctccacaagctcaaggtccagctggacgggcatgagcgcagcctgcaggtcttgtgaggggccgagggccggggctgggagcggccctgtgcccgggagtccgcagaggcggggatttgtcagatgcagacattttgcaaggctgccgggtagttcaagaccaaagttttcctcttgtcttaataccataaggactggatgacttctcctgagatagaaccgtttggttcaatgagggactgtgttgctaagagcgttgggggcaaagccaggctggttccttggcctcggggtttcctgggtcggggacacggtgaag

SEQ ID NO: 258146 - DNA, 66 bp, Homo sapiens; identical to SEQ ID NO: 211764
  chr7:102088066-102088132
  hypo

SEQ ID NO: 258147 - DNA, 38 bp, Homo sapiens
  chr7:102094841-102094879
  hypo
caacccctttcacagcccgtctgcggcccacccaccca

SEQ ID NO: 258148 - DNA, 39 bp, Homo sapiens
  chr7:102097000-102097039
  hypo
ttcctacttgttaacagcgttatggggctggaaggaggc

SEQ ID NO: 258149 - DNA, 38 bp, Homo sapiens
  chr7:102756773-102756811
  hypo
ctgggatcacagacgtgagccaccgcgcccagctgcca

SEQ ID NO: 258150 - DNA, 141 bp, Homo sapiens
  chr7:102782154-102782295
  hypo
tgcccatatgcctgcccttccggcaggccaaggtgtttttccggcatcaagcgggggaatggaccatcacaggcttgcggatgatcagcccatctttgatcagcttccggatctgctgacgggagttggcattggtgattt

SEQ ID NO: 258151 - DNA, 93 bp, Homo sapiens
  chr7:103778100-103778193
  hypo
cgagagcaacataccggcagacaccagcagatgccagcaggccacctacggtgggacaacacagagtttggccaagagcggctagacttcagg

SEQ ID NO: 258152 - DNA, 44 bp, Homo sapiens
  chr7:103778513-103778557
  hypo
ctgcatgctcccattagaggtttgagcagcgggacactgaagaa

SEQ ID NO: 258153 - DNA, 151 bp, Homo sapiens
  chr7:104464163-104464314
  hypo
gcctttcaatttctcgctccgcttcaaagagtacacaaagtacaaactgtaaatcaacctccacatttgctgatatggccactaagctggaaaaaaagagaaagagatatggctaataaactattcaaaaaagatttaggagcctggggcc

SEQ ID NO: 258154 - DNA, 31 bp, Homo sapiens
  chr7:104564547-104564578
  hypo
gtgctatgattacaggcgtgagccaccacgc

SEQ ID NO: 258155 - DNA, 84 bp, Homo sapiens
  chr7:104566592-104566676
  hypo
agaaggcaggagttcgagaccagctgggccaaataatcaagggtgcctgtctctacaaaaaaaaatagaaaaattagctgggcg

SEQ ID NO: 258156 - DNA, 44 bp, Homo sapiens; identical to SEQ ID NO: 211767
  chr7:104629827-104629871
  hypo

SEQ ID NO: 258157 - DNA, 95 bp, Homo sapiens
  chr7:104764717-104764812
  hypo
gtccctctttccttccttcccgctgtgcacagtatggagtcctcgatcccctcaacagacagacgattaacaaagacaaataaatgcacagccag

SEQ ID NO: 258158 - DNA, 141 bp, Homo sapiens
  chr7:104845020-104845161
  hypo
actaccactgaatgcgtgcgctgaagatgacggctgctgtggaaaggttgctctgagggtcagttgcccgacatgtgagtgccattccttggggcatttctgcaacggcagccctcaggcctgctgcgtctagaagaacaa

SEQ ID NO: 258159 - DNA, 95 bp, Homo sapiens
  chr7:104860662-104860757
  hypo
ctaattcttagatccacttacgattttaacagtctagcttgtgccgggtgtggtggctcacacctgtaaccgggaggcggaggcgggcagatcac

SEQ ID NO: 258160 - DNA, 309 bp, Homo sapiens
  chr7:104869027-104869336
  hypo
tgctaacacaccaccgtccgcagacagcggaactaagagagcagtgtaacaccctctctcaggcctcggggtcacgggcaccctcacctaggcagcgccacaagcggcaagatgagctgctaacacactgctgtctgcagacagcagaactaagagaataccgtaacactcactctggggcttcagagtcccaggcaccctcacctgggcgctgcgagagcttgttcccgtgttggcgcctggagcagccagccggatcccgcactcgctcgctcacatgctccctcctgcaagcgctggagaatggca

SEQ ID NO: 258161 - DNA, 141 bp, Homo sapiens
  chr7:104869939-104870080
  hypo
aacataaaaaatccagacatctaaatatgtcatttttattatatcaaatacgtagctttgatcttagctatggaggaggtatctctccctctccttccgcagtgcccacaacagatgaagggggagcgcaggaataaaatt

SEQ ID NO: 258162 - DNA, 84 bp, Homo sapiens; identical to SEQ ID NO: 211768
  chr7:104917805-104917889
  hypo

SEQ ID NO: 258163 - DNA, 120 bp, Homo sapiens
  chr7:104988783-104988903
  hypo
ctgggattacaggtgtgagtcaccgcgcacagcagtcaaacttaataagccactatttggtataaaatgcctttgaacttttttctttctttttttttttttttttgagatgcagtctcg

SEQ ID NO: 258164 - DNA, 37 bp, Homo sapiens; identical to SEQ ID NO: 211769
  chr7:105016768-105016805
  hypo

SEQ ID NO: 258165 - DNA, 40 bp, Homo sapiens
  chr7:105137529-105137569
  hypo
acttctacagcacccggtagttatgcggtgggttaacagc

SEQ ID NO: 258166 - DNA, 500 bp, Homo sapiens
  chr7:105254043-105254543
  hypo
cactcactgcactggggtgtcgtgaggactcagtgaggtaataaccgtaaagtgccgagaacagtgtctagcacatagtgagcgtggtatcaagtacttgttcagtaaagtgctctcaaagcagagggtgaaaactgccttcggggaaaacgagaacaggaatcaagcttgtgttacctgtcggagccgcccggctaagcaggggcgctgcccagctccccctgccccccagagccggtgaaggcggtgccaggaggtcccttacctgccgagaggaggtgctgttaacgggatcgggcaccggtgcgagaaggctgggcgggttctttttgtgaacgctattcataccaggcattttagtgattttacaggctttgctactagaactcgagttcttacgcttttttccttctgatttgtcaaaagagaggggcagagaagacacagcattgtgtgaggccagagagaggtcccctgcgtggagcgcaagggagggcaca

SEQ ID NO: 258167 - DNA, 130 bp, Homo sapiens; identical to SEQ ID NO: 211770
  chr7:105278333-105278463
  hypo

SEQ ID NO: 258168 - DNA, 120 bp, Homo sapiens
  chr7:105278913-105279033
  hypo
ggaagtatttccctcgtggaagtcaggagatgctctttatctttaacttctttttcccgggactttgctttgtgttctgccaggaggaggtcaaattgctttttccggcctgggactgcc

SEQ ID NO: 258169 - DNA, 348 bp, Homo sapiens
  chr7:105279330-105279678
  hypo
atgaaaggcaactgcgagggaatgctagagttaatccaggtgcaggtgggaggctcgattcggcccagacaaacagagccaccaagcagagagggccatcgccttgatcccaagaagcactagcagttcagcatgaaatacagggctttgggcgacccaatggcggccgccttgggtcagctgttcccctggccaccccggtgtggctggatcaggggcgcggcatatcatcctcccctccagggctgcctttcagggcgctgccgccgccgccgccgccgctgccgctgctcctgcatacattaaaacgtagcaggctttagaaccgcctgtgagtgcctataaata

SEQ ID NO: 258170 - DNA, 94 bp, Homo sapiens
  chr7:105280243-105280337
  hypo
agcttcggcagcaccgccgaacgcagcacaaggctcggggaatagggcgggagcaggcaccgaagggaaggagaggagccgtgctgctcttaat

SEQ ID NO: 258171 - DNA, 189 bp, Homo sapiens
  chr7:105399236-105399425
  hypo
ttccttcttagcaaacgaagtgtatcagttcataggaaaccactctgctgatgacactcaacatctgaacacaggacagtaaaaaaggcccttgatttgggaggtacggggaagagaatggagacaggcacgattctgtctttacatcttgagccatccctgcggaagggggtccgtggggtggccggg

SEQ ID NO: 258172 - DNA, 434 bp, Homo sapiens
  chr7:105432454-105432888
  hypo
gctgggtgacctgtcgaggcctgtcaggctgccactgacgccccattcttctgtattcctccagagacctgcagagcccatcccgtctcccccacccccacagtcacacacatctgttatgtcagtgagcggaaggtaaaggttcggctccttagagactgtggccacctggaggtgtgttcccctccaggcctttcccgttgagacttttcctagtttccctagagggaagtgtcaaccttgtacgtgtctgatctgagcatgtctcctgtggaaagtgagaggacctgggaatctgcttgattattcctcagtgagtcaaccttaggatctcctctacaggctgcccaggtcctgagggccctgccgatggcgagcaaagacaggcagctggctcccaggaagaccaccacttcacacggctgggtgttcac

SEQ ID NO: 258173 - DNA, 156 bp, Homo sapiens
  chr7:105445968-105446124
  hypo
ggggtacagagaaatgaatgcgatgatttatgccctcaaggagctcacagatcatgaaaagagacagggcgagactcacaagcccacagtacacttggcaagtgataaataggacgtgtgcgtggctcatgctgcggcagagggcagggagagctt

SEQ ID NO: 258174 - DNA, 161 bp, Homo sapiens
  chr7:105586619-105586780
  hypo
cctatgtggggaaggcgcagttcaccgtcaggactgcaggaagcctgggaggacgccatggagacctgcaggtctctgaggcagggtgatggtgtgtcagaagcagcaggccagcagagcaccaagaagggggtgccctctccccacgccctcacgcagcc

SEQ ID NO: 258175 - DNA, 38 bp, Homo sapiens; identical to SEQ ID NO: 211774
  chr7:105722825-105722863
  hypo

SEQ ID NO: 258176 - DNA, 256 bp, Homo sapiens
  chr7:105753778-105754034
  hypo
cactgaggttattccgtcagggttgacaactgttattgaacgtccttgtagtaagcgaaccctttctctttcgagacctatctccttgtttgctgtccagagagtgcaaaaaatacatttcattttctatgcagacagagacaatctttatgtttatcttggctcccgttcctcagtccccagcacagtcagtgctcaatgagcacctaatggcatatctcattttgaaataacattaagaactgggcgcggtggc

SEQ ID NO: 258177 - DNA, 85 bp, Homo sapiens
  chr7:106574561-106574646
  hypo
ttagaaggaatcttcgatataatcttcacgacattggattaggcaatgggttttttggatatgataccaaaagaacaagcaacag

SEQ ID NO: 258178 - DNA, 265 bp, Homo sapiens
  chr7:106622690-106622955
  hypo
accggaacaatgtgcggcacatattagacactcaatacatgtttgccaaatgaatacgtgaatgattgtagtcttggacaagtcaaatggcccttagggactatttgttcattgattattttcccacctgcgtcacagcatggctgctgtcttggaaagcgtaaactgctcatgagtggcaggtgtgaagaagagaggctgacggagtgaacggtggtgaggcacaggaggaaagttgcaaggtgtgaggcgtggacggggaagt

SEQ ID NO: 258179 - DNA, 37 bp, Homo sapiens; identical to SEQ ID NO: 211777
  chr7:106675696-106675733
  hypo

SEQ ID NO: 258180 - DNA, 86 bp, Homo sapiens; identical to SEQ ID NO: 211778
  chr7:106683489-106683575
  hypo

SEQ ID NO: 258181 - DNA, 46 bp, Homo sapiens
  chr7:106797712-106797758
  hypo
taactaacaaacctcgagcagcttctgcccacgccattgggactgt

SEQ ID NO: 258182 - DNA, 81 bp, Homo sapiens
  chr7:106802886-106802967
  hypo
gactccgtccataaaacaaacaagcttaaaaattcttcaagtgaaacggcatgaagcaagagacttcggattttattgaaa

SEQ ID NO: 258183 - DNA, 37 bp, Homo sapiens; identical to SEQ ID NO: 211781
  chr7:106836715-106836752
  hypo

SEQ ID NO: 258184 - DNA, 37 bp, Homo sapiens; identical to SEQ ID NO: 211782
  chr7:106836992-106837029
  hypo

SEQ ID NO: 258185 - DNA, 41 bp, Homo sapiens; identical to SEQ ID NO: 211783
  chr7:106837817-106837858
  hypo

SEQ ID NO: 258186 - DNA, 42 bp, Homo sapiens
  chr7:107060907-107060949
  hypo
tttgtttgtttgttttgagacggagtcttgctctgtcgctca

SEQ ID NO: 258187 - DNA, 95 bp, Homo sapiens
  chr7:107148303-107148398
  hypo
ataatgcttctatgacgtatttggttttaagaatattctctcatggggtgggtggagctaagatggctgaacaggaacagctcccagcgtgagcg

SEQ ID NO: 258188 - DNA, 90 bp, Homo sapiens
  chr7:107202440-107202530
  hypo
gaaagaaaggagcagaggctccacttccgttgcaattgaaaaggcaagggaaaaaaggtgcaacagatggttatacgttgaggttaaatt

SEQ ID NO: 258189 - DNA, 115 bp, Homo sapiens
  chr7:107430184-107430299
  hypo
caaactcaaggatccgcaactgaaataatattacacaaaacgtaaaggctcaacctgtatgtacatgccttgaagaagcaaatgtccctgcctcctgggacgcctcccacccagg

SEQ ID NO: 258190 - DNA, 400 bp, Homo sapiens
  chr7:107483556-107483956
  hypo
caggtctatcaatgaacacacgagaaaaagctgaagaccgtgatcagtgaagcacacaaacggggcatggtgatagagaaaaacagtgggcacgcaatctagcttgggaaaatgaggtagcacccctttcaggaggtgatttcagcagagacccgcaggtacaaggacaccacccaggcgaggagccagaaagagcagccgcagcaggtggagcgcatgggcagaggggcggtggtgggacacgcgactgtttgggattgagcgaggccacctaagcagattgcggtgagtgagcgcggaatgacgtcactgacctccaatcaactgtcacatgaaaataccaaaagcggcagtgttcctttagtcatgtggatcacgcggatccaaaatggtttttaca

SEQ ID NO: 258191 - DNA, 201 bp, Homo sapiens
  chr7:107524448-107524649
  hypo
agcctatactcatgccactgcgctccagcctggacttgccccacgcccaacactgtatcagacattccattttcagctcctgttcatgctccctcataacgtttttttaaaaacatgctatccttattgaattcatctattcccatatgtgtcgacatgccagcaaatttccgagtccacgtctggagcttgtaagctcta

SEQ ID NO: 258192 - DNA, 44 bp, Homo sapiens; identical to SEQ ID NO: 211787
  chr7:107633907-107633951
  hypo

SEQ ID NO: 258193 - DNA, 57 bp, Homo sapiens
  chr7:107773016-107773073
  hypo
ggtgagccttctctcgctgtggccttgcccgtcattcccgcgcggtggcccacctaa

SEQ ID NO: 258194 - DNA, 160 bp, Homo sapiens
  chr7:108168536-108168696
  hypo
agaatttcttgaatcgttcctctgctccacattcgcatttccactgctctagttcaggctttcatccttgctcttcagtttcatctaaactggttttccagcctgtaactaacctctgacccagtcagtctcttctgtgcaaccacggtaatcttttgaa

SEQ ID NO: 258195 - DNA, 37 bp, Homo sapiens
  chr7:108298193-108298230
  hypo
tgaggactgccagcacgctgtcacctctcagtgggag

SEQ ID NO: 258196 - DNA, 89 bp, Homo sapiens
  chr7:110163602-110163691
  hypo
aacctgagaaagtaacaatacgtatagaatgagctggcttactgttttgttgttgttgttgttgtttgtgttttttttttttgagacag

SEQ ID NO: 258197 - DNA, 81 bp, Homo sapiens
  chr7:110471985-110472066
  hypo
gttttttttaaaactgcttccgaactgatttgactttaaaaccactctgtagggctgggcgcggtggctcacgcctgtaat

SEQ ID NO: 258198 - DNA, 34 bp, Homo sapiens
  chr7:112187148-112187182
  hypo
cctagggagatcagcgttctgtccgtaaacatct

SEQ ID NO: 258199 - DNA, 214 bp, Homo sapiens
  chr7:112187242-112187456
  hypo
gtctcacctaacgaagcagtctggccgtggtctgccacagccgtaccgtggggaattcctcccagtgcaaatcatccggtctccctggcaccggcaggggagaacggccgactggagctgcagggatggcggctgtccccaccccctacccaaccaacttgggtgtgtcttaggcagtctccagtgtgctgccactggccgcaacctgagcggc

SEQ ID NO: 258200 - DNA, 199 bp, Homo sapiens
  chr7:112431880-112432079
  hypo
accgcccttttctgcgtggcagacggaaaattgaaagtacctcggattggttgctttccataactaattaaatgtttgcatagggtgtaacctttgtaacttcgcttcaggctctgattggttgctttccgctatcagactgattgtgggccactatatttgcgtggggtgtacaccaagtggccaatgggaaacctct

SEQ ID NO: 258201 - DNA, 57 bp, Homo sapiens
  chr7:114410865-114410922
  hypo
cattgacatactctactttgcgagctcctctaggtcgaaatcatgctttatttattt

SEQ ID NO: 258202 - DNA, 43 bp, Homo sapiens
  chr7:115430130-115430173
  hypo
gccaccagaagccccggctcccgcaggcgcctctcgctccaca

SEQ ID NO: 258203 - DNA, 42 bp, Homo sapiens
  chr7:116492601-116492643
  hypo
gcctctccgagtagctggaactacaggcgcccgcaaccactc

SEQ ID NO: 258204 - DNA, 102 bp, Homo sapiens
  chr7:116914129-116914231
  hypo
cgagacaacagccccgggccagcttttaataacccagaagtaataacaataacccgcctgaacaagccggccaggaaagcgcatgcacggtcatgttgtccg

SEQ ID NO: 258205 - DNA, 120 bp, Homo sapiens
  chr7:120521915-120522035
  hypo
ttaatcttgatgatatgttgtatttttaaatattcagttattaaaaagataatgtattttaatgaggcaataaacaagttatattaatttttttgtttttgagacagagtttcgctcttg

SEQ ID NO: 258206 - DNA, 93 bp, Homo sapiens
  chr7:123175850-123175943
  hypo
caggctgatctggaactcctagcctcaagcaatccgccttcaaaagtgttggggattacaggagtgagccaccgcgcccggcctatcaatgaa

SEQ ID NO: 258207 - DNA, 180 bp, Homo sapiens
  chr7:124940679-124940859
  hypo
cacggatacggtatgggtcatcccttactcctttacccagactactttgttgtgcctcatatcaatgcgcacatcaggagttcccatctccttcatggcaaattgcggaatctctgagttcccgaggggcacgcttcttgaatcccactccatggacacacttgggaatattgatggtgt

SEQ ID NO: 258208 - DNA, 38 bp, Homo sapiens
  chr7:125532056-125532094
  hypo
gggcgacagcgagaatcggtctcaaaaaagcaaaacaa

SEQ ID NO: 258209 - DNA, 32 bp, Homo sapiens
  chr7:126013969-126014001
  hypo
gggcacggtggctcacgcctgtaatcccagca

SEQ ID NO: 258210 - DNA, 134 bp, Homo sapiens
  chr7:126173534-126173668
  hypo
gaataacagagaaaaatccccgttaggagcacgtaactaagttcgcgtcctgaagccctcacgataggtgtgtcattatagcggacaaaggtcacgatcacaaaggtggtggcgatgattcccaatattgcaac

SEQ ID NO: 258211 - DNA, 36 bp, Homo sapiens
  chr7:127231013-127231049
  hypo
cagctgcaggaggacgagctgcgggatgcagtgctg

SEQ ID NO: 258212 - DNA, 245 bp, Homo sapiens
  chr7:127235457-127235702
  hypo
ccgtgtgttatggccgcccaaggaccagccaccatgggtgctttctactgcgtttccaccggaacagcaagtggaccctccagtgcctaatctctggtcgttatttggagtccaatggcaaggacgtgttttgcacttcccacgtcctctcagcttaccacatgtggaccccccgaccagccctccatgtccacgtgatcctctacagccccatccaccgctgctatgcccgggctgaccccact

SEQ ID NO: 258213 - DNA, 100 bp, Homo sapiens
  chr7:127240011-127240111
  hypo
aaggaaaaacaggacctctgttgttttcacacttcaaagccccagggtgggttggcagaacagaaaacagtggaatccctattggcgctcctgcatttcc

SEQ ID NO: 258214 - DNA, 487 bp, Homo sapiens
  chr7:127371028-127371515
  hypo
gccacattcatattcgtatggagctgcctttagcagcatctgcttctccagctggagaggcttgttttagaacgactggcatgcggaagcggtaggtggaggtctgggaggagctgcgtagccagggctccccttccagcctcccgtctcccttaggctctttctggcctgaggcatggtcgccatgggtgggggcactgcccgcccgattctggttggaccccctttcctctacttcataccgcagctgctgtgagcgagtgcactgtgctctgcacaggagaattggcagacagttccatatgctggttttggccattgggacattcaggattattaggccagtttgtactttaagaggagggagacttgacatcgctcaaagcagcttattttatttatttctatttcttataaaggggaaagaagctagcccagcccttagctgttcctttcaacgtagccggctcaacgttttcctcaggaa

SEQ ID NO: 258215 - DNA, 163 bp, Homo sapiens
  chr7:127452506-127452669
  hypo
caatgtgaagtcctcgataacattgctaagccaattttgaagcttgatttctctttctcttcattcgcttggcataggtgtgacttctgggagcatcagggagaaaggaaggacaggtgttgcttttttttatcttggcacagggtcacggagaagttgaggg

SEQ ID NO: 258216 - DNA, 32 bp, Homo sapiens
  chr7:127497484-127497516
  hypo
tgacctcgtgatccgcccgcctcgccctccca

SEQ ID NO: 258217 - DNA, 54 bp, Homo sapiens
  chr7:127502788-127502842
  hypo
gattgagagtgttgcggatggatgggtgctctcccaggccgtgcactgctgctg

SEQ ID NO: 258218 - DNA, 125 bp, Homo sapiens; identical to SEQ ID NO: 211796
  chr7:127544866-127544991
  hypo

SEQ ID NO: 258219 - DNA, 172 bp, Homo sapiens
  chr7:127583867-127584039
  hypo
gaaagcagttttgacgaacaactcaataaagagccatggaatcccacagaatatgtttcattttttcattacatttgttaacccgttggagggctgattgctgccagtcactcctcatcctgctgagctggtgcctcagaggagggcggatgtggctcgactgcgttccctc

SEQ ID NO: 258220 - DNA, 113 bp, Homo sapiens
  chr7:127615838-127615951
  hypo
gtgcgctgtagcgccgagcacgctaccccgttcttctctctgctccactccactctgacacccccacagaggtgctcatggctgttagtaggcaggtccggctccattcagca

SEQ ID NO: 258221 - DNA, 215 bp, Homo sapiens; identical to SEQ ID NO: 211797
  chr7:127670440-127670655
  hypo

SEQ ID NO: 258222 - DNA, 108 bp, Homo sapiens; identical to SEQ ID NO: 211798
  chr7:127673455-127673563
  hypo

SEQ ID NO: 258223 - DNA, 105 bp, Homo sapiens
  chr7:127679931-127680036
  hypo
gcgccccattacctcgctttatggagagctgggtaaatttaaaggcagctataaatatcccactgagtgccagagctatagcacagtcggcgggtacctgctggg

SEQ ID NO: 258224 - DNA, 287 bp, Homo sapiens; identical to SEQ ID NO: 211799
  chr7:127693923-127694210
  hypo

SEQ ID NO: 258225 - DNA, 46 bp, Homo sapiens
  chr7:127721780-127721826
  hypo
atggaggtgctgccggacaggtcctctggacgcaggtgagataacc

SEQ ID NO: 258226 - DNA, 42 bp, Homo sapiens
  chr7:127984395-127984437
  hypo
gcataaaacacaaccggaacactaacacgtagacatagatat

SEQ ID NO: 258227 - DNA, 87 bp, Homo sapiens
  chr7:128097002-128097089
  hypo
accgcgcctggcctaagaaagtaaaagttttaagaagtgttcttgaattagtccaagaagcaacactggctccgcagccatgaagtt

SEQ ID NO: 258228 - DNA, 105 bp, Homo sapiens; identical to SEQ ID NO: 211800
  chr7:128097963-128098068
  hypo

SEQ ID NO: 258229 - DNA, 215 bp, Homo sapiens
  chr7:128441280-128441495
  hypo
catgagaaagaaagcgaacttaaggaaatagaacaggaattgcatttggcccaggctgagatccagagtctgcggcaagcagcagaggattccgcaactgaacatgagagtgacatagcatccctgcaggaggatctctgccggatgcagaatgaacttgaagacatggaacgcattcggggagattatgagatggagatcgcctccctccgtgc

SEQ ID NO: 258230 - DNA, 257 bp, Homo sapiens; identical to SEQ ID NO: 211801
  chr7:128484037-128484294
  hypo

SEQ ID NO: 258231 - DNA, 350 bp, Homo sapiens
  chr7:128484885-128485235
  hypo
cccacggagcctggcgagtacaccatcaacatcctgtttgctgaggcccacatccctggctcgcccttcaaagccaccattcggcctgtgtttgacccgagcaaggtgcgggccagtggaccgggcctggagcgcggcaaggtcggtgaggcagccaccttcactgtggactgctcagaggcaggcgaggcggagctgaccattgagatcctgtcggatgccggggtcaaggccgaggtgctgatccacaacaacgcggatggcacctaccacatcacctacagccctgccttccctggcacctacaccattaccatcaagtatggcgggcatcccgtgcccaaattccc

SEQ ID NO: 258232 - DNA, 341 bp, Homo sapiens
  chr7:128488723-128489064
  hypo
atcgacgcacgggacgcgggcgaggggttgctcactgtccagatcttggtgagtctctgtgcatcccaccccgcaggtcatgctccaggcacaggcgggccttgacctctgcttctccctcaggaccccgagggtaagcccaagaaggccaacatccgggacaatggggatggcacgtacactgtgtcctacctgccggacatgagtggccggtacaccatcaccatcaagtatggcggtgatgagatcccctactcgcccttccgcatccatgctctgcccactggggatgccagcaagtgcctcgtcacaggtgggtgcccacccgctgcccgtgccct

SEQ ID NO: 258233 - DNA, 222 bp, Homo sapiens
  chr7:128489418-128489640
  hypo
ggagacggtgatcacggtggatgccaaggcagccggtgaggggaaggtgacatgcacggtgtccacgccggatggggcagagctcgatgtggatgtggttgagaaccatgacggtacctttgacatctactacacagcgcccgagccgggcaagtacgtcatcaccatccgcttcgggggtgagcacatccccaacagccccttccacgtgctggtaagttc

SEQ ID NO: 258234 - DNA, 438 bp, Homo sapiens
  chr7:128492721-128493159
  hypo
ctgagccagctgaccgccagcatccgtgccccctcgggcaacgaggagccctgcctgctgaagcgcctgcccaaccggcacattggtgagcgtggggcctcacggggacctcaggggtgggggcccacaggatgctctgcctaacacccactttccacagggatctccttcacccccaaggaggtcggggagcacgtggtgagcgtgcgcaagagtggcaagcatgtcaccaacagccccttcaagatcctggtggggccatctgagatcggggacgccagcaaggtgcgggtctggggcaaggggctttccgagggacacacattccaggtggcagagttcatcgtggacactcgcaatgcaggtacctcctgccccagagagcccccattccagcgggtgcctcccacaggcacttgtcctcgtcctgcccagcac

SEQ ID NO: 258235 - DNA, 105 bp, Homo sapiens
  chr7:128494167-128494272
  hypo
gagtccacccaggtcggcggggaccccttccctgctgtgtttggggacttcctgggccgggagcgcctgggatccttcggcagcatcacccggcagcaggagggt

SEQ ID NO: 258236 - DNA, 275 bp, Homo sapiens
  chr7:128494588-128494863
  hypo
gggccccatacggtcgctgtcaagtaccgtggccagcacgtgcccggcagcccctttcagttcactgtggggccgctgggtgaaggtggtgcccacaaggtgcgggccggaggcacagggctggagcgaggtgtggccggcgtgccaggtaaggggcaggtggccaggagtggggatgaagtcagggcagccagtgtgaggggcgatgatgctgaagtccactaccttgcctgtccccagccgagttcagcatctggacccgggaggctggcgct

SEQ ID NO: 258237 - DNA, 265 bp, Homo sapiens
  chr7:128528750-128529015
  hypo
cacacagccgtgcccgggacctctatcaaaggtgagggagtcggagagtgagagaaaagtatggtggagcggcaggcagtgggagggctgggaggaaagtggaatcggtgagaaaggcaccccgggagccccagcagggggaatggaagggcaggtgtggctctaccctggcaggtcgggcagcagtgcccagaggggatgagtgggtggctgcagcccggaggctcacagggccggcggccgcaggtcacgaagcctccaagac

SEQ ID NO: 258238 - DNA, 108 bp, Homo sapiens
  chr7:128532126-128532234
  hypo
gtgtacctgtgtttgacacacgccctcacacagactctctatgcgggcagggacgtgtcccatgcatcccagcacccggcctcctacgtggcaggctcaagtgcctgc

SEQ ID NO: 258239 - DNA, 42 bp, Homo sapiens
  chr7:128533896-128533938
  hypo
gggtgtctgcagggcactggcgggcagggcagaggctcacac

SEQ ID NO: 258240 - DNA, 42 bp, Homo sapiens
  chr7:128534159-128534201
  hypo
tcctggccttcatgggcccccgagcagggccacccatcaatt

SEQ ID NO: 258241 - DNA, 74 bp, Homo sapiens; identical to SEQ ID NO: 211803
  chr7:128587332-128587406
  hypo

SEQ ID NO: 258242 - DNA, 205 bp, Homo sapiens
  chr7:128597298-128597503
  hypo
ggagtgtgagctatcgaaacaacctggtgaagtctcgcaaggcccagcaaacttgtttacattcctcagcactagaaaagaaaaggtaggttggtccttgactgaggagaaagacagaatatgctgaaaaacaactgcaacattggggcacactgagaaccgtcccaactctgctaggagctctctccatcgtctcctgagcgat

SEQ ID NO: 258243 - DNA, 93 bp, Homo sapiens; identical to SEQ ID NO: 211804
  chr7:128602076-128602169
  hypo

SEQ ID NO: 258244 - DNA, 32 bp, Homo sapiens; identical to SEQ ID NO: 97204
  chr7:128602409-128602441
  hypo

SEQ ID NO: 258245 - DNA, 84 bp, Homo sapiens
  chr7:128767406-128767490
  hypo
gccagcccgtggtcgacagggaagaaggagagcctcacagcatctcctcttggccagggtcccccgggcgccccaacagcggtt

SEQ ID NO: 258246 - DNA, 36 bp, Homo sapiens
  chr7:128853698-128853734
  hypo
gattacaggcgtgagccaccgcgcccagctagtgcg

SEQ ID NO: 258247 - DNA, 128 bp, Homo sapiens
  chr7:129050168-129050296
  hypo
catcaagctttagctctaggcgtgttggtttccgtctcagcatactgaagtcaacactaagggccaaacccagtgaactattagcaattcacaggattatcctcagcgtccaaacagatcttaaatgt

SEQ ID NO: 258248 - DNA, 94 bp, Homo sapiens; identical to SEQ ID NO: 211806
  chr7:129096502-129096596
  hypo

SEQ ID NO: 258249 - DNA, 81 bp, Homo sapiens
  chr7:129172367-129172448
  hypo
gtgtgcatgcatgtgcgtgtgcccgtgtgcatgcgtacactctgtgtatgtccatatgcatgtgtgcgtgtgtctgtgtgc

SEQ ID NO: 258250 - DNA, 129 bp, Homo sapiens
  chr7:129245415-129245544
  hypo
ggatccctggtgcctctccccgaatctcacacacagcccacgtgtatttgttacagctctttaggttaggactgtctgctcacctgaaaccatgctcaaaggactttcgtaaaaaagacaaaggcaatc

SEQ ID NO: 258251 - DNA, 44 bp, Homo sapiens
  chr7:129287558-129287602
  hypo
tataaaagcatcattgttaactggattatcgtgttattagtatt

SEQ ID NO: 258252 - DNA, 146 bp, Homo sapiens
  chr7:129297203-129297349
  hypo
ggagtgacccaaaccgaacatatggctaccatagaagcacatgcagtggcccagcaagtgcagcaggtccatgtggctacttacaccgagcatagtatgctgagtgctgatgaagactcgccttcttctcccgaggacacctctta

SEQ ID NO: 258253 - DNA, 233 bp, Homo sapiens
  chr7:129330228-129330461
  hypo
cccttaattccctgcaggtgcgtaagtacaagagcatgatcctggaagacctggagtctgctctggcagaacacgcccctgcgccacaggaggttaactcagaactgccgcctctcaccatcgacggaattccagtctctgtggacaaaatgacccaggtgaggggtgggaggtgaggaggagactcaaagacaagtggcacaggtgtgggcgggcctctgatcacttttctg

SEQ ID NO: 258254 - DNA, 184 bp, Homo sapiens
  chr7:129392673-129392857
  hypo
gccaaggcctggcccttctgcgtgcttcccccatgcccacgtgcacttggaggctggcctctctcctcctcctttcaggcctgcattgcaagtgtgggggcgactggccacgtcttccatttcggtgagggcacaccagaggagccagggtttctagtgatgcgtcaccataacagcaagtctc

SEQ ID NO: 258255 - DNA, 75 bp, Homo sapiens
  chr7:129410252-129410327
  hypo
caagtctagaaccaccggatcctgttacctcaccagtgtgagttctaccattgccaaaaacggggggaggcaagc

SEQ ID NO: 258256 - DNA, 330 bp, Homo sapiens
  chr7:129414553-129414883
  hypo
tgattgctcagagcggagagacacaagcaaaaatgtgctagtgccaaaatcggccaagcagatggcactggtgcgggctctctggggacacactggacgaggggccttgcatccctgcacccttggaagcagcctgtttccgacgtctaggagcactcaaggcagaagtgggtaaggtgctccggaggccctcgtggatctgtctctgctctgtttatggcccttcggtaattcactgactgagactgttcacagtgaattctaccagtgccatacacagaacaggagtcacactctgcggcctgccgaccctgcggagagaccagcggc

SEQ ID NO: 258257 - DNA, 112 bp, Homo sapiens; identical to SEQ ID NO: 211810
  chr7:129435134-129435246
  hypo

SEQ ID NO: 258258 - DNA, 235 bp, Homo sapiens; identical to SEQ ID NO: 211811
  chr7:129470903-129471138
  hypo

SEQ ID NO: 258259 - DNA, 39 bp, Homo sapiens
  chr7:129483110-129483149
  hypo
ttacaggagtgagccactgcgcccggcccattaacagta

SEQ ID NO: 258260 - DNA, 296 bp, Homo sapiens
  chr7:129483351-129483647
  hypo
atggataaaacacacactgccgctgccgcaaatttcacgaaggcacaagctccccatgtctctgggtcaaaatcgcataccatcgctggcagggaagctaaatccatggatcagagatgatcaccctcctccccaaagaatccctcacaagtgcaaagaagcatgctaagcaaaggacgttcagatgtttctgtggctattcacagagacggtgtgcttgttttcatgcagctccaccgcaggaggtaacccgcagacacctgcacacagcgaacggaaggctcctcctgccatat

SEQ ID NO: 258261 - DNA, 33 bp, Homo sapiens
  chr7:129501458-129501491
  hypo
cagtggctctcgcccgtaatcccaacactttgg

SEQ ID NO: 258262 - DNA, 143 bp, Homo sapiens
  chr7:129504689-129504832
  hypo
ccactaccagacattttctaacaacatatttcagtgatttgaccagattaaaatcagaactccttaagttttttggacagttattctctggcgtagttctagcactcgttaaaggggatggggaggatcgtacaacaggaata

SEQ ID NO: 258263 - DNA, 154 bp, Homo sapiens
  chr7:129518100-129518254
  hypo
tttaccattcacaacgctgaaacttagaggcccctatagcaagaaagaaatttctgattcaactggttaggagtgggggtgtagtggggagtggtctagactccaggatatcgggcattacttcttaagacagcccacagcagccaggcgcaat

SEQ ID NO: 258264 - DNA, 176 bp, Homo sapiens
  chr7:129565205-129565381
  hypo
taaacaaaaattcacggtgttctccaggtggaaaaaaaacaagaaaaaaataaaatccacaatgtgggacagttcatgggagctaggcctatacaataatgctcccaaatatgtaaatgaaagaaaaaagcgaaacaacattcactgtgaaagacactgtacgtgatccaacccag

SEQ ID NO: 258265 - DNA, 31 bp, Homo sapiens
  chr7:129665425-129665456
  hypo
cagcctggtgtggtggctcacgcctgtaatc

SEQ ID NO: 258266 - DNA, 45 bp, Homo sapiens; identical to SEQ ID NO: 211813
  chr7:129689365-129689410
  hypo

SEQ ID NO: 258267 - DNA, 240 bp, Homo sapiens; identical to SEQ ID NO: 211814
  chr7:129689710-129689950
  hypo

SEQ ID NO: 258268 - DNA, 147 bp, Homo sapiens; identical to SEQ ID NO: 211815
  chr7:129778855-129779002
  hypo

SEQ ID NO: 258269 - DNA, 74 bp, Homo sapiens
  chr7:129780114-129780188
  hypo
gcatactagggcatccaggacgagaactccagctttacactggatctaaccccggaccccaaacacacacacta

SEQ ID NO: 258270 - DNA, 325 bp, Homo sapiens
  chr7:129780407-129780732
  hypo
tcctgggacccggcggcaggcacatgggcctggatagttactgagaaaattctttcagaagggctttcggggacgtgaagtcacccctggcttcccgggattctgggttgggagcagccgcgcaggggcggtgaagccaggggccagggcggtccgtgctgcgggcggctccccaaggcccggtgcgctgggctacccgcccgctggccatggacttgccgcctgcagcgcacatggctggggaggaagagccgtggatttcagtctgtacacccagacgactaagaagctgccgcccgctagcggggaggggactcggccggga

SEQ ID NO: 258271 - DNA, 695 bp, Homo sapiens
  chr7:129782252-129782947
  hypo
ggtcccagaggggtggcctccgcccctcctgggggccgaggactgtcaccatgtcactacggcactctccagctgctgaccaaagccctcgctaaccgcagccctgccatactctgggtctttcctctggagcaaggtgaagagactgcagcgaggcgtggaattgggaagctcttctggttttattaaaaactcgttccaccacaggagtcagcctggccactcaggtgtggggcgggtctctcctcatttagctttcacctgcgtgcccagggataggagaaaaacggcacagagggaggttgtagggagtaagcatcctgccctggcaaagctgagtgaacgtgggtagcttcagcccagtgaagcagcagcagggacgcctgtggaaacctgggtggaggtgccttctgaccttggtttgtctgggccagggggcgaatgcttctggcagtggagcttccaggcccggaaaacccaggcctcttctcctcacgtgggccctcaggtgcttgtggactgcccggagacagaacagaactgagggtgggagggcctgcttttgcctgcagaacaccctgaaatgtcccatttacccagctctctccagggcccgcacagtccaaacttctctggcctcaactcctaccactgtgcctttgctcactctcgaccagccacggtggcttccttgc

SEQ ID NO: 258272 - DNA, 245 bp, Homo sapiens
  chr7:129794494-129794739
  hypo
ctggggaccacatgcgtgactggctggccccctgctcatcccgcctctctcctccgcctggcttcgcgccgcctgcctgccctcggggacaagcgtgcccatctgacacctcagcgcctgcccattccccgggaccaggccatctggcctcgctgctgcctctgctctgtgcaacccccatgccgcagcccgtcgcctcctgctccagcctccgccaggactgtcctgtgcgcccatcagggtgt

SEQ ID NO: 258273 - DNA, 203 bp, Homo sapiens
  chr7:129800276-129800479
  hypo
aagcagagtgtcatacggaatttaattttgagatggaagccacgtaacaccttctcaaaccgccaggtttgcggcctggcagcttaggttcagatttccgtctgccaagtctttcccgagtcaggggactcctcaggctgtaccgtggatgacactcctccccactaggaacacaaggggcctttcttcggaggtggagctca

SEQ ID NO: 258274 - DNA, 180 bp, Homo sapiens
  chr7:129833437-129833617
  hypo
tgcatattgttaagtgaaagaagccaatccgaaaagctacacgggtatgattctaagtacatgacgttctagaaaaggcaaaactatggcggcaattaaaaaaaaacactggttaacaggaatttggaggaaaagatgaatgaataaatggtgcagtttcattctgtatgatactataat

SEQ ID NO: 258275 - DNA, 38 bp, Homo sapiens
  chr7:129844185-129844223
  hypo
tctatttatttgttttgagacggagtcttgctgtctcc

SEQ ID NO: 258276 - DNA, 167 bp, Homo sapiens
  chr7:129846026-129846193
  hypo
ctgagccaggcgcacggatatagaaaataagaccttcctggttattacccagaggagctcaaccccagcggaggcccacagatgcatttcggtggcaggtgaggtggatgcagtgctccccaaggaggcgcatccagcccagccccagctctcgcgagcttcctgga

SEQ ID NO: 258277 - DNA, 78 bp, Homo sapiens
  chr7:129851262-129851340
  hypo
tgctgggattacaggcatgagccaccgtgtctggccagaaagtggtatcttaaaagtgaactccgctttcaagatttt

SEQ ID NO: 258278 - DNA, 274 bp, Homo sapiens; identical to SEQ ID NO: 211819
  chr7:129948129-129948403
  hypo

SEQ ID NO: 258279 - DNA, 44 bp, Homo sapiens
  chr7:130982739-130982783
  hypo
aagttaagatatacacatgacggccgggcgcggtggctcacgcc

SEQ ID NO: 258280 - DNA, 126 bp, Homo sapiens
  chr7:131041470-131041596
  hypo
acagtattcttcatcgaggattacctggagcttaatggccactagggaatgtatccaaatcgtgtgcgccaaatatgttgccggtggcagatacccaagttaccccgattccgtatgggtctgcca

SEQ ID NO: 258281 - DNA, 83 bp, Homo sapiens
  chr7:131231114-131231197
  hypo
tggaagactgcatttaaccacgttatgggctaaccacctagggggctgccaggatcggggtgcaggtggcttcagaaagcctg

SEQ ID NO: 258282 - DNA, 281 bp, Homo sapiens
  chr7:131422550-131422831
  hypo
atgttgttattcagcgggaagaaagaagaggaagaaaagcaaagggagaaggtattgtttgggtacaatctgtgtttgcaattttccacatcggttctttttatgaacgctccaaaaacaagacaacagcagcggctgattcaatatgcgccatgcaggaaaacaataaggaaaaaaataagggtttttaataagcacttggaaaggctgtaattaaatctccggctctgtttggaaaacaagaatctcatttagtgcctttgccccggcgctccctaata

SEQ ID NO: 258283 - DNA, 249 bp, Homo sapiens; identical to SEQ ID NO: 211821
  chr7:131864448-131864697
  hypo

SEQ ID NO: 258284 - DNA, 271 bp, Homo sapiens
  chr7:132418868-132419139
  hypo
aagaccaccctggcttgccacgcccccacctgagcctataaaaaccggataccctagcaaggcagagacagaagctgttggacggtgagaggaacacgttggcggaagaagacaagcagctggatatcgaggggacatcgaggggagcatgctggcagaagaacacaccaacagagggacacccgcactctggctggtctcacaacccgcaggacaaggcagagtttggctggggcaatcggaggaactccagggaaaaaccatctccctt

SEQ ID NO: 258285 - DNA, 105 bp, Homo sapiens; identical to SEQ ID NO: 211822
  chr7:132527723-132527828
  hypo

SEQ ID NO: 258286 - DNA, 45 bp, Homo sapiens; identical to SEQ ID NO: 211823
  chr7:132527948-132527993
  hypo

SEQ ID NO: 258287 - DNA, 173 bp, Homo sapiens
  chr7:132610412-132610585
  hypo
cagcaagcactcaccgcacacgtatataccccagctataacacaagtatatatcccagctagaaaaagagaggaataccacatcgtacttgtcctctaagagcttactgaccactagagaagtggagcacaaacacagagcaacaacaaacttcataacgaaaacgtttccaa

SEQ ID NO: 258288 - DNA, 203 bp, Homo sapiens; identical to SEQ ID NO: 211824
  chr7:132637910-132638113
  hypo

SEQ ID NO: 258289 - DNA, 92 bp, Homo sapiens; identical to SEQ ID NO: 211825
  chr7:133234086-133234178
  hypo

SEQ ID NO: 258290 - DNA, 157 bp, Homo sapiens
  chr7:133630765-133630922
  hypo
attagaactctatgcgtggtaattcctctctcgcttcagtatttacaagtttcaaatatttgttgactgttatcagacagttcctcctcagcctaccttacatgtttagtttctctaatcacctttctatggttagactttccgtgcccttcatcgt

SEQ ID NO: 258291 - DNA, 102 bp, Homo sapiens
  chr7:133828852-133828954
  hypo
gacaagttggagtgcagttgcgcattcttgtctcaccacaacttcagcctcctgggctcaagtgatcctgtcgcccaggctggagtgcagtggcgcaatctt

SEQ ID NO: 258292 - DNA, 42 bp, Homo sapiens
  chr7:134135183-134135225
  hypo
aggggagggccagggctgaccgtgcctcatggctgtgtgcac

SEQ ID NO: 258293 - DNA, 59 bp, Homo sapiens; identical to SEQ ID NO: 211826
  chr7:134377919-134377978
  hypo

SEQ ID NO: 258294 - DNA, 50 bp, Homo sapiens; identical to SEQ ID NO: 211827
  chr7:134378383-134378433
  hypo

SEQ ID NO: 258295 - DNA, 177 bp, Homo sapiens; identical to SEQ ID NO: 211828
  chr7:134613459-134613636
  hypo

SEQ ID NO: 258296 - DNA, 144 bp, Homo sapiens; identical to SEQ ID NO: 211829
  chr7:134673287-134673431
  hypo

SEQ ID NO: 258297 - DNA, 184 bp, Homo sapiens; identical to SEQ ID NO: 211830
  chr7:134853337-134853521
  hypo

SEQ ID NO: 258298 - DNA, 242 bp, Homo sapiens
  chr7:134860914-134861156
  hypo
caaatgatgttaagcggtaggcacagaagaggttcccagaagcagatccaaattgggatccaaaccaggcaggagaattgcaaaacctgcataggtatcgggaggcaccccttaatggaataaaggccagaaggaaaaaggcagcgaatttgggagaggtctcagaggtatgccaaaaggttgattagagtcccagtgaattttatgaaacactctgtgaagcataccggctttatacatcg

SEQ ID NO: 258299 - DNA, 156 bp, Homo sapiens
  chr7:134862668-134862824
  hypo
tagcccaagggcagcgtgaactcggcagtgggcagaaggaagccatatgtgcgctccccactcctgtcacccggcgacaagtaagggagtttttaggggcagcaggcttttgctgtacttcaatgccaaacctttcactcacggcaaagccattgt

SEQ ID NO: 258300 - DNA, 444 bp, Homo sapiens
  chr7:134880722-134881166
  hypo
gacaggctgaccagtccactggcagctccaaccgactcccatgactctactgccatgactgtggccctcgtccaagcccccattctccgccatctcctgctggccacacctccacgtgtactgcctgaaaatctgagcttcccagggtttccttggccccaggcccaacccacctgcagtgcatgatggatgagtggtgttccccgtactcctcctgtcccagcacaataaagggctgctcggggcggactcctccaccctcagggcctgccgaggatgcccgagtcagtggctccactggctccgtgtggagctctgggcagggctcagcctctgggccactggcttctggtttcttctctgcacactgtcacaagcagggtggggacaagtcagccaggaaagggtcccccacaccagggtgtacaccgcagggggtctagg

SEQ ID NO: 258301 - DNA, 238 bp, Homo sapiens; identical to SEQ ID NO: 211833
  chr7:134890670-134890908
  hypo

SEQ ID NO: 258302 - DNA, 199 bp, Homo sapiens
  chr7:134898276-134898475
  hypo
agcctggtcgacagagcgagactccgtctcaaaaaaaaaaaaatggtgacaataacacccaccttgcacagtagtaatgaagatttaataagacagtgtatgtaaaacgcttagcacagtgaatggcctattggtaaaatgcatggagtgttcccttctccttccctcgaatggtatgacttttcgtgtttgtcaaaat

SEQ ID NO: 258303 - DNA, 577 bp, Homo sapiens
  chr7:134918299-134918876
  hypo
tgaaggctgtgtggagcccccgagctgattactgacgcgagggtcccctccctgacccctcgcgaccctgcgaggtgagtcagccccgcccctccctcttctctctcctcccttttctgtcgccttcggacaacttgtaacactgtttcttccactgcccacacgcccattggcccgtcaccacgcatccccattggctgtggcggccagggacagggccgcgattggtccccacccctgtaacgaggtgccaggtctgttttctgacccagacaggaaccgcgatccccactccggcgcacgaagccgggtgactgctgtcccgggagtggggacgtcgcgtgcaccgttggcgagtaagtatcctttgaacgctcctctccagaaaggtgcccttgggcatatgagtgtttgtgtagacttgaaagaattcagtgcagcggagcctaacaggtgaacttttagcgcggggttcacaggagccttttgtatccgtcactgtggctacctacatttttgagagtgattctggatgatgatgatgatgatgatgatgattattattattatcattttg

SEQ ID NO: 258304 - DNA, 36 bp, Homo sapiens
  chr7:134922346-134922382
  hypo
ataaaaagagctctgtccaccgggcgtggtggctca

SEQ ID NO: 258305 - DNA, 43 bp, Homo sapiens
  chr7:135125370-135125413
  hypo
aagagtagaaaactgcaggccgggtgcagtggctcacgcctat

SEQ ID NO: 258306 - DNA, 97 bp, Homo sapiens; identical to SEQ ID NO: 211837
  chr7:135360968-135361065
  hypo

SEQ ID NO: 258307 - DNA, 197 bp, Homo sapiens
  chr7:135390900-135391097
  hypo
ggagttgcccgccacgagctgctcgtcctcagcactgaccagctcctgcagcacggcctccacgatgggcatcaccatggcggtggtggaggtgttggacagccacatggacagcaacgtggtacagcacatgaagcagagcagcagcctggaaggcagggagggttggggcagagcgtccacggaacacacatccc

SEQ ID NO: 258308 - DNA, 120 bp, Homo sapiens
  chr7:135401689-135401809
  hypo
ccaagggtctttttcgcatgaactgctggcatttatccttattagacttcattttgtcagtttcagtccattgtctcttcctgtccgcatgtctcattctgccaccgtacattagcaccg

SEQ ID NO: 258309 - DNA, 236 bp, Homo sapiens
  chr7:135412148-135412384
  hypo
gctggggtggaggacgggcagaggcagcagcaggagcgggacgcagacgaccagcagcagcttccggactcggagcaggccctgcagcaggcccatcgcgcctctgtcctctccagctcgtccttggaccccgctctgccggcgaaaggcttcctgcctgggcactgctctctatccagaaagacttcttaaacctttcttggcttccgagagtcctccttcgtcttgggggcaga

SEQ ID NO: 258310 - DNA, 128 bp, Homo sapiens
  chr7:135440301-135440429
  hypo
cctcaagggttgccagcatacgactcggtgatacgtgcgcgcctctgccaggccgggccagaacatccacctgcaacgtggagtccactgtgtatagcatgttctgcgccagatcaaataatcattgg

SEQ ID NO: 258311 - DNA, 194 bp, Homo sapiens; identical to SEQ ID NO: 211838
  chr7:135611088-135611282
  hypo

SEQ ID NO: 258312 - DNA, 85 bp, Homo sapiens
  chr7:135751659-135751744
  hypo
gatccctcgcatgcacattctcgctcctatgagaatcgaatgccaccgctaatctgacgggagggagccccggcggtaatgtttg

SEQ ID NO: 258313 - DNA, 96 bp, Homo sapiens; identical to SEQ ID NO: 211839
  chr7:136437909-136438005
  hypo

SEQ ID NO: 258314 - DNA, 73 bp, Homo sapiens
  chr7:136849129-136849202
  hypo
gcatcctcggggccgggggcaagatcctcacttttgaccagctggcccctgatgccccgaaaggctgtggcac

SEQ ID NO: 258315 - DNA, 31 bp, Homo sapiens
  chr7:137107612-137107643
  hypo
gtgctgggattacaggcgtgagccaccgcgc

SEQ ID NO: 258316 - DNA, 67 bp, Homo sapiens
  chr7:137499014-137499081
  hypo
ctggaatggaacaccgtcatgtgttcttataaagtaaagaaatgccaaaaaacgattcaaattccat

SEQ ID NO: 258317 - DNA, 192 bp, Homo sapiens; identical to SEQ ID NO: 211840
  chr7:137564612-137564804
  hypo

SEQ ID NO: 258318 - DNA, 185 bp, Homo sapiens
  chr7:137593862-137594047
  hypo
gctttgaaaaaagccggtttgtttctggagcaatgtgcgtggtcatgcccgcaggcaagacgccaggcattcttcattcagaaaacatgaaatccatcttcagatacgggagtgagcacaggaaaaataagtgagagtgcagtggggggactttctcctctaaagtctcccgcgtctttcctcaa

SEQ ID NO: 258319 - DNA, 37 bp, Homo sapiens; identical to SEQ ID NO: 211841
  chr7:137637556-137637593
  hypo

SEQ ID NO: 258320 - DNA, 37 bp, Homo sapiens; identical to SEQ ID NO: 211842
  chr7:137637833-137637870
  hypo

SEQ ID NO: 258321 - DNA, 40 bp, Homo sapiens
  chr7:137658137-137658177
  hypo
agtttcccagacagcggcccaccggcgcctattctctttg

SEQ ID NO: 258322 - DNA, 83 bp, Homo sapiens
  chr7:137664095-137664178
  hypo
aaagcacagcaagggcgggtcatcaggccaagacatcaaaaagcacaggctgcaactggtcctaccagtccttagtttaatat

SEQ ID NO: 258323 - DNA, 204 bp, Homo sapiens; identical to SEQ ID NO: 211843
  chr7:137670025-137670229
  hypo

SEQ ID NO: 258324 - DNA, 194 bp, Homo sapiens; identical to SEQ ID NO: 211844
  chr7:137706784-137706978
  hypo

SEQ ID NO: 258325 - DNA, 37 bp, Homo sapiens
  chr7:137742304-137742341
  hypo
gcaggcaaatcacacgaggccaggagttcgagaccag

SEQ ID NO: 258326 - DNA, 119 bp, Homo sapiens
  chr7:138010002-138010121
  hypo
tgtcagagtaaacccgggtgtcatgtgtcagcaatgcggccatggacagccttggtacacgcacaggatagctttatgtacataaagtcatgcactgtaacgaccgcctatacaacagt

SEQ ID NO: 258327 - DNA, 300 bp, Homo sapiens
  chr7:138042028-138042328
  hypo
gggtgcccggccaggtttttttttttaacaaaagaatcaaccgatgcctcacaagaaacaaacgcagcgcctgcttcagtaccagtccaaggagtggtcctgtttacctttttgcccctccctgcctccctgcctgtgtctgctttttttgcaaggaaaaaaaaaatcaagacaaatgaaggtgggagatccgccagctctgtacaaacgcaggcattagaggctggccagagcaggcgggagggcgagaaacaccctactttgcatctcattcatgatatgggttttttttttctttga

SEQ ID NO: 258328 - DNA, 39 bp, Homo sapiens; identical to SEQ ID NO: 211846
  chr7:138042568-138042607
  hypo

SEQ ID NO: 258329 - DNA, 83 bp, Homo sapiens
  chr7:138044359-138044442
  hypo
ttatttcgtttctgttttgatttttgttttaatttttgctctatggatttgcctcaaacgctttcttgcgtgtgacccaagaa

SEQ ID NO: 258330 - DNA, 120 bp, Homo sapiens
  chr7:138044851-138044971
  hypo
ggcattttatggctacttggcgtctgtcagtctggagcccacataccaagtggcttcaagaggtacttacttagcctaagcggggagtgagacgtgaccgctgttgcatttcaatgcctc

SEQ ID NO: 258331 - DNA, 152 bp, Homo sapiens
  chr7:138125641-138125793
  hypo
ctcctcccccatggacgctgtgacagaagctgacatggccatcgcaatggctctgatgggaggtattggtttcattcaccaccactgcaccccagagttccaggccaatgaggtgcggaaggtcaagaagtttgaacggggctttatcatgg

SEQ ID NO: 258332 - DNA, 34 bp, Homo sapiens; identical to SEQ ID NO: 211847
  chr7:138247007-138247041
  hypo

SEQ ID NO: 258333 - DNA, 293 bp, Homo sapiens
  chr7:138554218-138554511
  hypo
ctcctgtgccccccgcagcacctctgcgcgcccgccccaccgcctagcgcagagccccagcccacctcttcctgggctctatgaacacggagggcacgctggccgtggggtccaggatcttgtcgatctgcatctgtgccctgcggtacacccggtgtcgctccttagtgtcgcccgaggacaggtcgtctaccaccgggaactcgtagtgcccgcggcgcttggcgcgcaggcggatcttgttgcgatggtgctcgatctcagacttgtgccgcagcgcggtctgaatctga

SEQ ID NO: 258334 - DNA, 37 bp, Homo sapiens
  chr7:138588489-138588526
  hypo
taaatgaaaacatacgtggcacccaaaacaagtcagc

SEQ ID NO: 258335 - DNA, 36 bp, Homo sapiens
  chr7:138588586-138588622
  hypo
gtgtgtgtgtgtgcgcgcgcgcgcgcgcgcacatat

SEQ ID NO: 258336 - DNA, 38 bp, Homo sapiens
  chr7:138636038-138636076
  hypo
acacttccctccacccgtgtcttcgcctctcccacttc

SEQ ID NO: 258337 - DNA, 40 bp, Homo sapiens
  chr7:138647454-138647494
  hypo
cagaattatccatccgagacctgtccgaattcctgacccg

SEQ ID NO: 258338 - DNA, 84 bp, Homo sapiens; identical to SEQ ID NO: 211850
  chr7:138721475-138721559
  hypo

SEQ ID NO: 258339 - DNA, 33 bp, Homo sapiens; identical to SEQ ID NO: 211851
  chr7:138778536-138778569
  hypo

SEQ ID NO: 258340 - DNA, 32 bp, Homo sapiens
  chr7:138845466-138845498
  hypo
ccactgcgcccggcccaagtcacttaactttt

SEQ ID NO: 258341 - DNA, 93 bp, Homo sapiens
  chr7:138912954-138913047
  hypo
agttcccttggcctccatcacggcaagtagtagcggcattggggcagcagcagtgatcaaaatgcggtgagggagattgtggacattctgctt

SEQ ID NO: 258342 - DNA, 41 bp, Homo sapiens
  chr7:138913397-138913438
  hypo
tttgaagactgcgtcgtaatcaagaacgtacggtgaaatta

SEQ ID NO: 258343 - DNA, 120 bp, Homo sapiens; identical to SEQ ID NO: 211852
  chr7:138974788-138974908
  hypo

SEQ ID NO: 258344 - DNA, 89 bp, Homo sapiens
  chr7:138993452-138993541
  hypo
tgatggtgctactacggtcaggacttgaaatgtagatgtgggaatcatacaaaaataattcaaccttagaaattcaggtaagaggccgg

SEQ ID NO: 258345 - DNA, 215 bp, Homo sapiens
  chr7:139112527-139112742
  hypo
tacatagacgatgcccgatgaatgtggaatgaatgaatgaagtgcctcatgttttccaacataaattaactcacacgatctcatttgatttgtatagcaatcctgtggttactcgaagggaccatattctatcaccatcatgcccgtttttcggagtaggaagctgaggcatgctgagtgactaataggacagagtcagccgacacctttttgat

SEQ ID NO: 258346 - DNA, 42 bp, Homo sapiens
  chr7:139123708-139123750
  hypo
ggattacaggcgtgagccaccatgccccgcgtggcaatttct

SEQ ID NO: 258347 - DNA, 215 bp, Homo sapiens
  chr7:139245494-139245709
  hypo
ccagtcccagcaggatgtggcgtttcttaggcttgctgaggtggagctgctgcaggcacagcgcctggacggggctgtggcgcacgtagctcaagtgcgcagtggcaagggccctggcaatgggccagcaagccacgaggctccgggtgctgatggtgtctggtgagacggcagggcctgggtgcggaggatccgggatgcatattggaaagctt

SEQ ID NO: 258348 - DNA, 45 bp, Homo sapiens
  chr7:139256590-139256635
  hypo
gcgccgagggccacgcggggagggcggcgcgtgcacacccacacg

SEQ ID NO: 258349 - DNA, 270 bp, Homo sapiens; identical to SEQ ID NO: 211853
  chr7:139257804-139258074
  hypo

SEQ ID NO: 258350 - DNA, 180 bp, Homo sapiens; identical to SEQ ID NO: 211854
  chr7:139298887-139299067
  hypo

SEQ ID NO: 258351 - DNA, 256 bp, Homo sapiens; identical to SEQ ID NO: 211855
  chr7:139690719-139690975
  hypo

SEQ ID NO: 258352 - DNA, 40 bp, Homo sapiens
  chr7:139709787-139709827
  hypo
acccgctccacacccgcttcacacccgctccacacccgcc

SEQ ID NO: 258353 - DNA, 58 bp, Homo sapiens
  chr7:139710188-139710246
  hypo
cagccctgtctgagcgccactgaggtgactcccggatgctgtgcggtgcagttctgaa

SEQ ID NO: 258354 - DNA, 217 bp, Homo sapiens
  chr7:139717411-139717628
  hypo
gggctgcagaggggagggagcgggtgttctgggccagccctgaccacacggacctgcaggttcacggctgaggcccggcagcagcaccggcccttcacgtacctgcccttcggggccggcccacggagctgcctcggggtgcgtctagggctgcttgaggtcaagttgacactgctccacgtgctgcacaagttccggttccaagcctgccctgaga

SEQ ID NO: 258355 - DNA, 213 bp, Homo sapiens
  chr7:139727808-139728021
  hypo
cccaggacagggaccgtcacgttttaaagctgagttagacagtgctcggcagccggccagctggcagacatcagcccaggtgcagacgggcagcctcagatgttagtctgcgtactctcctgcactcagcacagctcccactggtcagagcccctcaacaagctgccaaattgactgtccattctcctgtctgctagtcgtgaatgccttccc

SEQ ID NO: 258356 - DNA, 346 bp, Homo sapiens; identical to SEQ ID NO: 211856
  chr7:139733611-139733957
  hypo

SEQ ID NO: 258357 - DNA, 142 bp, Homo sapiens
  chr7:139763645-139763787
  hypo
ggaggtagggttacgtgggaacagtgtggttgatctttaaagactattacgaaggctgtttaacaagcatgcgttagagctccgtgtgcggatgtagaggggcagacagccatgatgtggtggtaaacgagaaaagatggct

SEQ ID NO: 258358 - DNA, 42 bp, Homo sapiens
  chr7:139842731-139842773
  hypo
aatctacaagttaatcaaggcgggcggatcacgaggtcagga

SEQ ID NO: 258359 - DNA, 44 bp, Homo sapiens
  chr7:139866424-139866468
  hypo
actgcacctggaggaatactgtcttaatacgacaaattagtact

SEQ ID NO: 258360 - DNA, 65 bp, Homo sapiens
  chr7:139897108-139897173
  hypo
actcccccatccagagagggcgttaatctattcctgagggatccgccccagtaacctaaacccct

SEQ ID NO: 258361 - DNA, 160 bp, Homo sapiens; identical to SEQ ID NO: 211857
  chr7:139992308-139992468
  hypo

SEQ ID NO: 258362 - DNA, 226 bp, Homo sapiens
  chr7:140006659-140006885
  hypo
acagagtttccatacgctgaaaggtgagtctcttttccatctccaccgagagcacaacttcaaaggaacagactcaaattgtcggaagggctaaaaagaacaactttgacttgttagggatatcagactctgatccaaactaacaaaggaaataatgtgctcgccttggaaaatctttttttttaaatggatagcttaaaaaaaaaaagtgcgcctggctgtattg

SEQ ID NO: 258363 - DNA, 274 bp, Homo sapiens
  chr7:140026928-140027202
  hypo
gcgagattctgtctcaaaaaaaaaaaaaatctgttaaggaggattatgaggctctacactctctccaagagcttgttcacagaataatctcttttcggaacctgagtagaaccaataaaagtaaaacccactggggcgtgtggggaaggagcgctctctgccaccagtactttggtcacgactgttgcccctcgcagccccgccttcctggctccagaatggttgctctttattttataaccctattaacatcttcattcgtcattctaggaca

SEQ ID NO: 258364 - DNA, 160 bp, Homo sapiens; identical to SEQ ID NO: 211860
  chr7:140027767-140027927
  hypo

SEQ ID NO: 258365 - DNA, 346 bp, Homo sapiens
  chr7:140029901-140030247
  hypo
actagcagggttaccgggaaaagcttcatggaggtgggcaatgaagggggactatgacggatgaagagagtttgaatgcttggaagggacaggccaagtaaaaacacgcagcaggaataaagctagcagcttgagtaacatagagatttgtactggagcaaaagagctcactgttcgctgccgctgagccctcagggagagctggcgaggctgccaagagccagaggagaggagaatgcactcaaaacccacgtagtccgagaacctgggcagcgccgacagtctgcggccattaattgcaggcgtgcagcgtcctgagtaaagcaggtggcggggcagtgtgcag

SEQ ID NO: 258366 - DNA, 31 bp, Homo sapiens
  chr7:140045118-140045149
  hypo
ctctgccaaccgtacgcgaagatctgaatct

SEQ ID NO: 258367 - DNA, 137 bp, Homo sapiens
  chr7:140045706-140045843
  hypo
ctcagggcaagaaccggcgctctcttctgtagtacatcagagatgaagccttgcaaagttccaccttcaagcagagtgtcgagcaatcaaaatcacttctaatttagctcgctcacctgaggcgtgctccccatttg

SEQ ID NO: 258368 - DNA, 169 bp, Homo sapiens
  chr7:140048397-140048566
  hypo
ttatggaaaagatgtatcaccggcatacctatgatccctccaacgtcgtaccaaatggacagcttgtcggcttccgcctccttccagccgaagttgttactcagataaaaggggagccagaagaagaaggagtaattcactaacttcaagcaggcgtaggccagtgagt

SEQ ID NO: 258369 - DNA, 190 bp, Homo sapiens
  chr7:140050012-140050202
  hypo
ggaaggggaactgagacacacggacgggttgcgtgactcaccccaggtgtcacagaaagttagtgggtaagctggaaacataacctaggcctcttaacttccactccagtgctagagtgcccgaaacatcaagacagaaaaactgcagcagaagggatttagtgtagacgttagaaggctttcctgactg

SEQ ID NO: 258370 - DNA, 92 bp, Homo sapiens; identical to SEQ ID NO: 211861
  chr7:140063543-140063635
  hypo

SEQ ID NO: 258371 - DNA, 54 bp, Homo sapiens
  chr7:140105280-140105334
  hypo
caaattgcttggattacaggtgtgagccactgcccctggcctatttcttattat

SEQ ID NO: 258372 - DNA, 36 bp, Homo sapiens
  chr7:140105364-140105400
  hypo
cagggctctcattatattgcctagactactttcaac

SEQ ID NO: 258373 - DNA, 42 bp, Homo sapiens
  chr7:140130676-140130718
  hypo
tgggggcaggtacttggcagcgtgtgtgcatgtgcccagccc

SEQ ID NO: 258374 - DNA, 212 bp, Homo sapiens
  chr7:140156473-140156685
  hypo
gcttagcactcctccacttgcgaatgcacttgagacagtaggtgtggttgcagttggagaggatcccgaagcggcgctcactggggttggctttctcatagaccacctccatgcagatcccacacaccatgtccttgctgcgctgcacggcaaatgagagctccatgtccttctcatgggcctcaatgcacgactagagaaggtggagagag

SEQ ID NO: 258375 - DNA, 116 bp, Homo sapiens; identical to SEQ ID NO: 211865
  chr7:140156954-140157070
  hypo

SEQ ID NO: 258376 - DNA, 120 bp, Homo sapiens
  chr7:140180184-140180304
  hypo
caaaataataataatagtaatagataatagtacctacttcagagatggctgtgaaagttaaatgagaatctgtttaaaaacctttgtactggccgggcgcggtggctcacgcctgtaatc

SEQ ID NO: 258377 - DNA, 117 bp, Homo sapiens
  chr7:140205262-140205379
  hypo
ggcaagttggaaggccgtcagagctaggaaagggtagcggtgacattggctcctcgagaaagcagcaggggcctgtgggaagaggtgtctgtccagaggtcccgggaatccaggagt

SEQ ID NO: 258378 - DNA, 77 bp, Homo sapiens
  chr7:140217363-140217440
  hypo
tgcctcagctgtgttcggggcttttcctgcctccccgctgtccctgctgtccccactgtccccgctgcaggacagct

SEQ ID NO: 258379 - DNA, 37 bp, Homo sapiens
  chr7:140219801-140219838
  hypo
ttttaaagatgaaccggagtggccagtcatggtggtt

SEQ ID NO: 258380 - DNA, 280 bp, Homo sapiens; identical to SEQ ID NO: 211866
  chr7:140221611-140221891
  hypo

SEQ ID NO: 258381 - DNA, 227 bp, Homo sapiens
  chr7:140227049-140227276
  hypo
cagagccagcgccccgctctgttctccgcaccctgcagggagggggacagggctgagtgggagctcacctcttccagcggcagctccctgagcagtggcagcgagctggagagcagcccgatgaggaagggcgtcggcgagcacacgatgtcgaccatggcgggtggcagcaccgggatgtaggtgtgctgccaggcgaaggggtagatcagcgccaccatcgcgtg

SEQ ID NO: 258382 - DNA, 205 bp, Homo sapiens
  chr7:140402597-140402802
  hypo
aggagttttggatgacttaacgctttgagaatgtagcacgctgtctgccatgttgttttgtcttgcagtgccggtggtggtgtgcacattgagccccggtatagacagttcccccagctgaccagatcccaggtgttccagagcgagttcttcagcggactcatgtggttctggattctctggcgcttttggcatgactcagaag

SEQ ID NO: 258383 - DNA, 32 bp, Homo sapiens; identical to SEQ ID NO: 211867
  chr7:140427687-140427719
  hypo

SEQ ID NO: 258384 - DNA, 42 bp, Homo sapiens
  chr7:140643306-140643348
  hypo
ttgttttgttttgcttgagacggcatttcgctctgtcactca

SEQ ID NO: 258385 - DNA, 175 bp, Homo sapiens; identical to SEQ ID NO: 211868
  chr7:140710244-140710419
  hypo

SEQ ID NO: 258386 - DNA, 37 bp, Homo sapiens
  chr7:140988502-140988539
  hypo
ccagtgcggttgtccgaagagccgttcccacacaggc

SEQ ID NO: 258387 - DNA, 188 bp, Homo sapiens
  chr7:141096128-141096316
  hypo
ataccctaccactttcccatcgcccatgcctactcccacctgccactcgcctgcctttttcccaaaggcgccccatacttactctgctgtgccgcaggggtccctggttctgcggcatttgccgccttgaaggtctttgagagccagaatgaccttcagggctcaacgggtctgggcctctcatactg

SEQ ID NO: 258388 - DNA, 62 bp, Homo sapiens
  chr7:141273455-141273517
  hypo
gtccagatctgtcacgtattctggaacccaaagtaaatatcatttcacgcacgctatttata

SEQ ID NO: 258389 - DNA, 180 bp, Homo sapiens
  chr7:142906905-142907085
  hypo
cccagcggacagactctcctccgactgcccccaaccgaatgccacgtcgtcctgccctagatggcgtgccggtgtctgctggtgtctgtcagtgtgctcttgtgcccctctgctcctctcaacgtccagccacttgtgtctgtgtccgcttaaggtcttgggcttacacgggtacaggat

SEQ ID NO: 258390 - DNA, 161 bp, Homo sapiens; identical to SEQ ID NO: 211871
  chr7:143000867-143001028
  hypo

SEQ ID NO: 258391 - DNA, 144 bp, Homo sapiens
  chr7:143013314-143013458
  hypo
tcccggtcacagcagcgtgggggtgaacaaagctggtggggtagtgacccccagtaccagtatatgccctttgaacactgcaccagctacggactgccctctgagaatgggggcctccagcacaggctccggaaggatgcaggc

SEQ ID NO: 258392 - DNA, 57 bp, Homo sapiens; identical to SEQ ID NO: 211872
  chr7:143096713-143096770
  hypo

SEQ ID NO: 258393 - DNA, 79 bp, Homo sapiens; identical to SEQ ID NO: 211873
  chr7:143097073-143097152
  hypo

SEQ ID NO: 258394 - DNA, 76 bp, Homo sapiens
  chr7:145021289-145021365
  hypo
tgcagacgcacacacgtacacatgcacatgcacacacacgggcacagacacacacatgcgcatgcacacacacatg

SEQ ID NO: 258395 - DNA, 75 bp, Homo sapiens
  chr7:145021425-145021500
  hypo
cacgcacacgtgcacgcacaagcacacacacgctcacatgcatgtgcacacgcacacaagcgcacgcacacaagc

SEQ ID NO: 258396 - DNA, 128 bp, Homo sapiens
  chr7:145280166-145280294
  hypo
aggtatgtttgcggcggcggccgggagcggacccggagaggctgaggggttcggagattcagagggagggagactcctgcctcgatgcagctggaggtatgtcctggcctccgcggagaccagggcag

SEQ ID NO: 258397 - DNA, 35 bp, Homo sapiens
  chr7:146228910-146228945
  hypo
agaggcatgagccaccatgccggccctatagcttg

SEQ ID NO: 258398 - DNA, 132 bp, Homo sapiens; identical to SEQ ID NO: 211875
  chr7:146425093-146425225
  hypo

SEQ ID NO: 258399 - DNA, 42 bp, Homo sapiens
  chr7:146656356-146656398
  hypo
gcctcggcctcccaaagtgagccaccgcgccaggcctaggat

SEQ ID NO: 258400 - DNA, 38 bp, Homo sapiens
  chr7:147179513-147179551
  hypo
ttcaaaataagaatcaggcccgtgtggtggctcacgcc

SEQ ID NO: 258401 - DNA, 31 bp, Homo sapiens
  chr7:147216090-147216121
  hypo
ccagcctggcgacagactctgtctcaaaaaa

SEQ ID NO: 258402 - DNA, 160 bp, Homo sapiens
  chr7:147354932-147355092
  hypo
tgaaatatttgcctgagtatcgggtttagaagtttcactgaaaggaaaagaaacttgacttgctgcctcaaattctagtagctgaaattatatgaggtgaagtttccaacgctgtctcttaagatagccgacctggccgggcgcggtggctcacgcctgt

SEQ ID NO: 258403 - DNA, 67 bp, Homo sapiens
  chr7:147954381-147954448
  hypo
gtaaaggcatccgccgtgaaacacaccaggcacctccaggaccggcatgcatcgctaacccagtgac

SEQ ID NO: 258404 - DNA, 33 bp, Homo sapiens
  chr7:147975333-147975366
  hypo
ggagaactctgtgacctcctcgatgtactaaaa

SEQ ID NO: 258405 - DNA, 115 bp, Homo sapiens
  chr7:148077004-148077119
  hypo
aactgaacaaggagcgggaaagcatgctaatgcatcgcaaatggagttgctgcatttccttaaaaggactgtcatgagcatttcattttaacgtattacccggaattgtgtcagt

SEQ ID NO: 258406 - DNA, 336 bp, Homo sapiens
  chr7:148079389-148079725
  hypo
ctcccttgaggccacctcagaaggagataccaaggggaagacagctctttaagaagtgtagactccatgttaaattgagaccccgcagacagatacggctttgaaacaattgattttctgtggtgtcatagggaaacctgccctcctcaaagttgcgaaaactgtcagggaccctatgaaatggagcgggagtcacaagttttctacccagctctaaaagaggagacaaaactaacactggttcacaatagataacagaacggcttcagcaaagggcaagcaagcgtagagagatgctggagaagaacaaggcactttatccatgtcccccacagc

SEQ ID NO: 258407 - DNA, 157 bp, Homo sapiens; identical to SEQ ID NO: 211878
  chr7:148079755-148079912
  hypo

SEQ ID NO: 258408 - DNA, 261 bp, Homo sapiens
  chr7:148162146-148162407
  hypo
acagactctcagtccgtccctctcgtaatcccttccccatggtgttgtctgtcactcatggctctttgtgtgggtgtgcgcattgccgtgtgatgcaattccctcatcttctcatgaaaacacacgcacagccaagttgactctatcatccatgcttgtcagaagcagggaggcctttgcgtgactctcctctgggttacaggaaagacataaacatgaaaaatgtgcttttaattgtatttgcttgcactcctactcaag

SEQ ID NO: 258409 - DNA, 128 bp, Homo sapiens
  chr7:148296995-148297123
  hypo
gtttacagacacacagcttacgcgtccaaactccatctacacgcccataaacagccaccccttggccactttgggaggacaggctgcgtgtaggaaagagcctcctcgatccctggaaatgaacttag

SEQ ID NO: 258410 - DNA, 151 bp, Homo sapiens; identical to SEQ ID NO: 211880
  chr7:148448804-148448955
  hypo

SEQ ID NO: 258411 - DNA, 531 bp, Homo sapiens; identical to SEQ ID NO: 211881
  chr7:148480934-148481465
  hypo

SEQ ID NO: 258412 - DNA, 196 bp, Homo sapiens
  chr7:148500530-148500726
  hypo
gctggtctcttcagttcctccgggatcaagcaggcacttgggtaagtaccttggtcccatggaaattcctcacggtaagcgaaggtgagctgagtgatgggtgagtcgggagttcgccccacaccttcagattcctggcctttacctgctccccttcgcactgggtaagtgtaccgtcttgactggtgtgaaagaa

SEQ ID NO: 258413 - DNA, 42 bp, Homo sapiens
  chr7:148625816-148625858
  hypo
gtctcctggctaggcgcggtggctcacgcctgtaatcccagc

SEQ ID NO: 258414 - DNA, 42 bp, Homo sapiens
  chr7:148626098-148626140
  hypo
ccgtctcaaaaaaaaaaaaaaaaaagtcgcagtcgccttctg

SEQ ID NO: 258415 - DNA, 143 bp, Homo sapiens
  chr7:148692793-148692936
  hypo
gccgcgcccggcctcagttgggaaagttttctaaacagcctttctgaagatccaggagttctttacctgaactgttatgggacaagtgtgtgctgcaaacagcccctctggagagcagcacaggcccccgctttagctggttt

SEQ ID NO: 258416 - DNA, 225 bp, Homo sapiens; identical to SEQ ID NO: 211892
  chr7:148703454-148703679
  hypo

SEQ ID NO: 258417 - DNA, 135 bp, Homo sapiens
  chr7:148717800-148717935
  hypo
tgaccatcagaggacgtattcatctttaacccactggactgagacaagaagacatcgccttccatgagggctggctcactggccgttcaacgcacagtggtagaacgagtgagctcccagcgttcttaaagctag

SEQ ID NO: 258418 - DNA, 33 bp, Homo sapiens
  chr7:148819752-148819785
  hypo
agctgtgttttacattgagacgtgggttttttg

SEQ ID NO: 258419 - DNA, 200 bp, Homo sapiens
  chr7:148846151-148846351
  hypo
gccgggggctgaggcggaagaatcacttgagtccaggagttcgaggcagtccacaccgcgtctctaaaataaaaaaaatttttgagaagttaaaaaataaatagatgaaattaattttaattatatatctaactcaatatatgcaaaatattatttcaacatgtcatcaatttatttatttatttattttttgaggtgga

SEQ ID NO: 258420 - DNA, 237 bp, Homo sapiens
  chr7:148851181-148851418
  hypo
tggagatccacagccggcgactcctacacctggaaggtcggacagggacagcagagaagaaactagccagctgtgaaaagacagttaccgagcttgggaaccagctggagggcaagtgggccgtgctgggaaccctgctgcaggagtacgggctgctgcagaggcggctggagaacttggagaacctgctgcgcaacaggaacttctggatcctgcggctccctccaggtattaagg

SEQ ID NO: 258421 - DNA, 180 bp, Homo sapiens
  chr7:148884015-148884195
  hypo
gcatttttaatgtttttgtaagaataaggattattgtcatgaaaaaggtcctggaaaacaagtcaggaggccagagttttaaccttgctttcagttttctcattcataatgtgaggataatacctagtttacgaaggtgttgtgaagatcaaatgaggaaagtttttttttttttttgag

SEQ ID NO: 258422 - DNA, 84 bp, Homo sapiens; identical to SEQ ID NO: 211895
  chr7:148901648-148901732
  hypo

SEQ ID NO: 258423 - DNA, 117 bp, Homo sapiens
  chr7:148907692-148907809
  hypo
gcctgcgcaggatgcgtcctcccaggtgaagcgtgaggacaccctgtgtgtccggggtcagcggggcctggaggaaagagccatccctacggaatccattaccggtgagtgagccaa

SEQ ID NO: 258424 - DNA, 246 bp, Homo sapiens
  chr7:148921396-148921642
  hypo
ctcgggcctcatccgccaccagatgacgcaccgcggcgagcggccctacaagtgctcggagtgcgagaagacctacagccgtaaggagcacctgcagaaccaccagcggctgcacacgggcgagcggcctttccaatgtgcactgtgcggcaagagcttcatccgcaagcagaacctgctcaagcaccagcgcatccacacgggcgagcgcccctacacgtgcggcgagtgcggcaagagcttccg

SEQ ID NO: 258425 - DNA, 45 bp, Homo sapiens; identical to SEQ ID NO: 211897
  chr7:148930559-148930604
  hypo

SEQ ID NO: 258426 - DNA, 186 bp, Homo sapiens
  chr7:148979096-148979282
  hypo
tgtaccactgcagcgagtgcctgcgcttcttccagcagcgcaagagcctgctgctgcaccagcgcctgcacaccggcaatggccagggctggcccgcctgcccctactgcggcaaggccttccgccggccctcggacctcttccggcaccagcgcatccacaccggtgagcggccctaccagtgcc

SEQ ID NO: 258427 - DNA, 394 bp, Homo sapiens
  chr7:148984552-148984946
  hypo
acgtctcccccattccggagaatcctgaccttcctgtatttgggaatggctctgggctgctctccttctggtggctgacttgcgaacttgtgtctggttgcaggactggcattgcggactgacctccagggagaggcccagatctgatctgcagagatctcccttccggctatcgtggctgctgttcaggtggtggagaagaagatggaaccccaggctgcctggctacagagcctggagggatgcatgtggacagccaagaagaagctggctgactgcgagaaggtggctgtggagttcgggaaccagctggaggcaagtgggccgtgctggggaccctgctgcaggagtacgggctgctgcagaggtggctggggaacgtggagaacctgct

SEQ ID NO: 258428 - DNA, 319 bp, Homo sapiens
  chr7:148992084-148992403
  hypo
cccttccagtgtgcgcagtgcgacaagcgtttcacgcgtctggccaacctgaccgtgcaccagagagtgcacttgggcgagcgctccttccagtgcgcccagtacagcaggagattcatgcagaagcccggcttcctgcgtcatctgtgtggccactcgcaggagaagcactatccttgcagcccttgtggtgagagcttcacctgtccctcctggcttgtgcgtcaccaggacagccatgctagccaggcctctccatcttgcctggtttgtgagagggactcctcgaccgatgagccgcccacgggcctcaggggtg

SEQ ID NO: 258429 - DNA, 178 bp, Homo sapiens
  chr7:149005005-149005183
  hypo
cggagcagccctttccgccccgctcccagagcactgcggcctcctcctcacttgcttcctgcaggtgagaggtggtggacaggacctgtgagggtctgggccagcctcctggcttcataggtaaggaatggggttttgtgtggtgtgtgcgtctcagccttcacggagcattcctaac

SEQ ID NO: 258430 - DNA, 105 bp, Homo sapiens
  chr7:149084384-149084489
  hypo
cagcccctaactttcaatgttactgttgagaattccaatgcgattttaattccctatgcttcgaccctgtcctacccctgccacgccccacctccacaggaagcc

SEQ ID NO: 258431 - DNA, 32 bp, Homo sapiens; identical to SEQ ID NO: 211900
  chr7:149114320-149114352
  hypo

SEQ ID NO: 258432 - DNA, 96 bp, Homo sapiens
  chr7:149159384-149159480
  hypo
gcactgctaaagtgcgtctctagagacgcctagacatgggactctggatggcaagagcaccttcatctttccccggcttcccgaactgctcactga

SEQ ID NO: 258433 - DNA, 430 bp, Homo sapiens
  chr7:149171587-149172017
  hypo
gaggtgcgggcggcgtcgggagtggctggcctcgggccggggtcttggcgcccgctgcatggttgcgctggtgcttgcggaggtggtccttgcggatgaagcttttgccgcagacggtgcaggtgaagggccgcacgcccgtgtgcgttcggtagtggtcgatgagcttggagcgttcggtgaagcgcttctcacactcggtgcaggggaagggccgctcgccggtgtgcagcatgcgatggcggatgaggtgcgcggggcgcgtgaagcaacggccgcactccccacaccgaagggcgctgccatcccgtgcgctgcccccaccgctgccgccaccgccgccgccactgccgctgccgccaccgcctgtgcccgggcccgacccgtcgggcgccccacagctgcgctggtgcgcgctcaggctgacttg

SEQ ID NO: 258434 - DNA, 77 bp, Homo sapiens
  chr7:149257399-149257476
  hypo
gtgtggactacagccgggatacctccgggtgtggacttagtgacagctctgcagacagtgagcgtcagtggggtctt

SEQ ID NO: 258435 - DNA, 101 bp, Homo sapiens
  chr7:149257709-149257810
  hypo
taaggcttggaagcgggtgactagactcaagactctgcatgtatgagatgttttggaattccaaccgttctttttttgagatggagtctcactctgtcacc

SEQ ID NO: 258436 - DNA, 328 bp, Homo sapiens
  chr7:149416660-149416988
  hypo
gccgtgcggttctcggaggaggagtggcggctcctggaggaggggcagagggagttctaccgagacgtgatgcgggagaactacgagacgctggtctctgtgggtaaggacgggagggagcagcacgtgtggcaggagcctggtgggcggtggaagggaggccggagtccctggacccggcagccttagtctttccacctgagaaatgaacacggggatcgttcacgctgctgctattctatgtcccgggaccgggttctaggtacaattcggtgggggtatgcggcggcctctgaggttccgaccactctgcggttctttgagttta

SEQ ID NO: 258437 - DNA, 133 bp, Homo sapiens
  chr7:149418014-149418147
  hypo
gctatggacagccccgagagcgagagccggggagccagcctggatggagagagagcgagccccgagggtaagtcagacagtggggcagtgcacgcagcctcctctgcactccgcatgatgaagcacaagtcca

SEQ ID NO: 258438 - DNA, 432 bp, Homo sapiens; identical to SEQ ID NO: 211902
  chr7:149420320-149420752
  hypo

SEQ ID NO: 258439 - DNA, 96 bp, Homo sapiens
  chr7:149427377-149427473
  hypo
ctgaaggagaagacccgaggccagagcctgatctctggaagccgctcccccagggtgagcctgtgcggagagggaggatagcgggatgtgtgccag

SEQ ID NO: 258440 - DNA, 969 bp, Homo sapiens
  chr7:149462308-149463277
  hypo
cgcccgagggggcgcgctggggcaccacgggatcggatcctgggccgcagcccggtccgccaggcgcgctggccaggggcttggcggcgggggcatccacggtggcgcccagtgcgcactcatcgcacccaaaggggcgaccctcgctgcggtgcagacactggtgcgtggcgaggttctttttccagccgaagctcaagccgcagtcggagcacgcgaaaggctttggcccgggaaaggatggggtcggggacggggcagtggaatgaggagaagcggacgagtcgggagagggcctggccgggccggccgtctggtgcaccctttggtgccgcaccaagtgctgcttgtgcgtgaagctgcgtgcgcactgtgcgcactggtagggcctctcgcccgtatggatgcgctggtgccgaatcaagtgcgtcttcttgcgaaagcgcttctcgcattccgtgcaggggaagggccgctcgccggtgtgggtcttttggtgcgagcccaggtggatcttctggctgaagcgcttgccgcactccgcgcacgggtagggccgctcgcccgtgtgcgtgcgcaggtggcgggtcagatgggccttcttgctgaagcgcttgtcgcactcggagcacgggaaaggccgctcgccgcggtggctgcgctgatgcagtagcatgtgggcgcgctgcgtgaagctgcggccgcagtccgggcaggcgcaggggccctcgccccggtgcagccgctggtgcagtcgcaacgtcagctggtcccggaagcgccgctcacactccccgcagccgtagggcttctccggcatcggaccccacccagacagcgcgagcccactcagtgcccccggggcccctggctccagtttgtacgcggcagccagatgccccaggtcaggcgcgggaaaggggctgggaagtaacgatagatgctggggccattcgacctcctcttctg

SEQ ID NO: 258441 - DNA, 98 bp, Homo sapiens
  chr7:149489458-149489556
  hypo
tggtggacggtgcccgctactggcctgggcaacgcatcaaggccgactgccagctctgcatctgccaagacggacggccccgacgctgccgactcaac

SEQ ID NO: 258442 - DNA, 131 bp, Homo sapiens
  chr7:149516460-149516591
  hypo
gggaaccttgctcccgcagctgcggagtgggccagcagcgccgcctgcgggcataccgtccccctgggcccggcgggcactggtgccccaacatccttactgcctaccaagagcgccgcttctgcaacctg

SEQ ID NO: 258443 - DNA, 136 bp, Homo sapiens; identical to SEQ ID NO: 211904
  chr7:150006590-150006726
  hypo

SEQ ID NO: 258444 - DNA, 120 bp, Homo sapiens; identical to SEQ ID NO: 211905
  chr7:150006786-150006906
  hypo

SEQ ID NO: 258445 - DNA, 43 bp, Homo sapiens; identical to SEQ ID NO: 211906
  chr7:150039378-150039421
  hypo

SEQ ID NO: 258446 - DNA, 89 bp, Homo sapiens
  chr7:150049533-150049622
  hypo
accagaatgtcttatcgttgaaattattttttacttccttttgaaatgcttgagtttttttgtttgttttggtttggtttttgagacgg

SEQ ID NO: 258447 - DNA, 1534 bp, Homo sapiens
  chr7:150068715-150070249
  hypo
tggccctggttctgcatctgcgggcccattcagctgcaaagcggcccatcgcttgtcccaaatgcgagagacgcttctggcgacgaaagcagcttcgagctcatctgcggcggtgccaccctcccgccccggaggcccggcccttcatatgcggcaactgtggccggagctttgcccagtgggaccagctagttgcccacaagcgggtgcacgtagctgaggccctggaggaggccgcagccaaggctctggggccccggcccaggggccgccccgcggtgaccgccccccggcccggtggagatgccgtcgaccgccccttccagtgtgcctgttgtggcaagcgcttccggcacaagcccaacttgatcgctcaccgccgcgtgcacacgggcgagcggccccaccagtgccccgagtgcgggaagcgctttaccaataagccctatctgacttcgcaccggcgcatccacaccggcgagaagccctacccgtgcaaagagtgcggccgccgcttccggcacaaacccaacctgctgtctcacagcaagattcacaagcgatccgaggggtcggcccaggccgcccccggcccggggagcccccagctgccagccggcccccaggagtccgcggccgagcccaccccggcggtacctctgaaaccggcccaggagccgccgccaggggccccgccagagcacccgcaggacccgatcgaagcccccccctccctctacagctgcgacgactgcggcaggagcttccggctggagcgcttcctgcgggcccaccagcggcagcacaccggggagcggcccttcacctgcgccgagtgcgggaagaacttcggcaagaagacgcacctggtggcgcactcgcgcgtgcactccggcgagcggcccttcgcctgcgaggagtgcggccgccgcttctcccagggcagccatctggcggcgcatcggcgcgaccacgcccccgatcggcccttcgtgtgtcccgactgcggcaaggccttccgccacaaaccctacctggcggcgcaccggcgcatccacaccggcgagaagccctacgtctgccccgactgcggcaaagccttcagccagaagtccaacctggtgtcgcaccggcgcatccacacgggcgagcggccctacgcctgtcccgactgcgaccgcagcttcagccagaagtccaacctcatcacccaccgcaagagccacatccgggacggcgccttctgctgtgccatctgtggccagaccttcgacgacgaggagagactcctggcccaccagaagaagcacgatgtctgagacggtgggcggggccgtgttggctgagagagggctggggtccttcgtggtgggagtcgcagtgggctgggggtgcctgcctagtgctggagtaggggacaatgggaatcctagaggggatggaagacgcggggagtgagctgggtgggccctgctagcgagagaggtcaaccccggtggccagggaacccacttccaagcgcagggacgccggc

SEQ ID NO: 258448 - DNA, 261 bp, Homo sapiens
  chr7:150079258-150079519
  hypo
aggctcctgtgtggcgctgggggcctctgagattcccaactggctggaaggagtgatggcttaggaggagtgagtggcagcggggacgctggcagagaggcttgtacagatactgcccgatgcatccggctcaggcttgccgccctgtggtgctcctcccaaactcagggagcaggtatttccgttcacctgcgccttcaagaacctgagctcaaagcgctgcaatgactggccagggactagcagcggctcagtggtggg

SEQ ID NO: 258449 - DNA, 43 bp, Homo sapiens
  chr7:150079846-150079889
  hypo
ttatcccaccccagcgcaggtcatccaacggtgacttatggcc

SEQ ID NO: 258450 - DNA, 242 bp, Homo sapiens
  chr7:150081214-150081456
  hypo
cctgacccggtgcgcggagggccgggccagggccaggcgtgggaagggggcccctgtgtgtcctgctcccctcagagcccgaggggcagcagagaggaaaggtggtccggtaggggcccgggggcccttgtgcgatagacaaagcggccttccaagacttggtgtgggcactggtgggagatggcgcatctggcccttgatgcctgtcttccagccggggcgctttgctgggcagcctgctc

SEQ ID NO: 258451 - DNA, 57 bp, Homo sapiens
  chr7:150097104-150097161
  hypo
tgtgactcaggtgccggaggatgcagtgtcagcagatgctgacgagatcagtcctgc

SEQ ID NO: 258452 - DNA, 232 bp, Homo sapiens; identical to SEQ ID NO: 211909
  chr7:150098291-150098523
  hypo

SEQ ID NO: 258453 - DNA, 89 bp, Homo sapiens
  chr7:150099969-150100058
  hypo
cagggttcacctgagctacacgtttacccatggtctacaggagccacgagcaacacatctacccacacgggagccatggtctgctgttc

SEQ ID NO: 258454 - DNA, 181 bp, Homo sapiens; identical to SEQ ID NO: 211910
  chr7:150100654-150100835
  hypo

SEQ ID NO: 258455 - DNA, 154 bp, Homo sapiens; identical to SEQ ID NO: 211911
  chr7:150104947-150105101
  hypo

SEQ ID NO: 258456 - DNA, 53 bp, Homo sapiens; identical to SEQ ID NO: 211912
  chr7:150105548-150105601
  hypo

SEQ ID NO: 258457 - DNA, 152 bp, Homo sapiens
  chr7:150269706-150269858
  hypo
tgaccgctactgtgcgttaaacaacaaggcaacaggcgctgagcaggaggcccagagggcacagttgctgggcctgatccagcgcgtggtgagggagaacaaggaaggctgctacactaataggatgtaccaaagggcggaggaggagatcc

SEQ ID NO: 258458 - DNA, 359 bp, Homo sapiens
  chr7:150325090-150325449
  hypo
agccgcaatggcgccgtgcaagggtcacatccagccaggcaagggcctggttgttggtctctcgcacatagtcttccagggagccgccagccaggtcttccttccgggtgaacaccaggatggtgtgacccagaacccccactccaaagacctcctgcaggcgcctgaccacctgctgatcctcatccgtgaaccggcccagttgtgtcaccaggagcacggcgtggggccctggggcggataagacgatggcttggcagatagcgtctgccacctctggcgagacctggggggacagaatgttgggtgtgtcaatcacctcaagctccttcccagcccactctcggctccgtctctgg

SEQ ID NO: 258459 - DNA, 188 bp, Homo sapiens
  chr7:150720588-150720776
  hypo
ctgtagatgtggctgcgtgtcaaggaacaagcctgaggcacggggggcctctcctgaggacacctcccctcagccccaacaagtctcccacccatgacgccctcacggagtctccctgccaagaacagtgccagctccaagaggaccttcccatgccacctctgcaggcctagcgcaaaggatatctt

SEQ ID NO: 258460 - DNA, 50 bp, Homo sapiens
  chr7:150745459-150745509
  hypo
cctaggattactgcggtttcctcctggcgcctctcgtcttggacagccat

SEQ ID NO: 258461 - DNA, 158 bp, Homo sapiens
  chr7:150753896-150754054
  hypo
agggctcagccaggcaggtccgcctgacagacgtccagtgtcagcccccgcctcccccaagcggccacaccggcaaggagcacccgcctcccgcacacctgacgatgttcttgtgcttcagctccttgagtaggcagatctcccggagggcggaactc

SEQ ID NO: 258462 - DNA, 620 bp, Homo sapiens
  chr7:150758620-150759240
  hypo
accctgcgaggctccgttgtctgcctgggccttcactcccctctttccccagctcattatcactccctccctcatctttgttgctttctctccgggcctgggccttgactcctttctccctcatttttcttgcggcctttcccacctcctctctcctcctccctctactcagcctctcggcccttttcggcccccctcgcctcagtcctctcctgtctccttgttcttctcttttcttcctataaataactctcctctgtgctgtggctgccgctaagggccactctgaggcccttcatactccaggaggatccccagcagcgcagcctgcgcgtggtggctcctgccctcccagggctctcgatggtgatcaggcctctcccccatccaggttatgcctccgcctcgttgccctgaaagccgcagcgacagcgaaaagggctaagattcggccatgagcagcgcccctcggcgccccgccaagggcgcagattctttctgtacggtgagtgtggcccccaggtcgccagcccaaccttccctccctgggcagccttgggtgctccggccaagggtcctcgccaaccaggggtgtgagcgtgtgtgagtgtggagactgg

SEQ ID NO: 258463 - DNA, 54 bp, Homo sapiens; identical to SEQ ID NO: 211918
  chr7:150773442-150773496
  hypo

SEQ ID NO: 258464 - DNA, 377 bp, Homo sapiens
  chr7:150773889-150774266
  hypo
tctctgggactccagttcctcgaagggtagctgtggggagaggagagggcggcaggttacccgcaggctgggagtgaggatgcgccacgggccaggccagggccactcaccggcaggagctggtagcccatcaggcctaggtgccgctccctcagggccctcgagcccagcagcacccggccgtcccggcagaaatgccagcgttcccgcaacaccagcaccaccctgcagggggagggacgtggctcagggcatggcgggcaaggtggccagggctcccccaccctgcctcctttacctctgggcagggtctcgagtagtggcgctagaggcagcctggccctgtgggcaggaccttggtgggtatggcaggaagg

SEQ ID NO: 258465 - DNA, 604 bp, Homo sapiens
  chr7:150774296-150774900
  hypo
cagagctgctggcgcacagcaggaagtctggaggggagcagggccggcggccttagccagggctccgtctccccgggcctgccgcctgccccttgctcacctgtgcagtagcctggaggcacagtcaggtcctggcggtatttctcctcccccagcagctggcgcaacccctcagctactatgtccttgtgactgaggagaaaggacaccagtagcaggaagggcccggcacctcatcctaatctgtcccagtctagtgccaccaccctgggcaaagccctctgctgcttcagggcccagttttatggtggccgagagctccttagctttggcgcttcatggtccctctggcttttccactctgctggtcccaggctggcccctccccttgccccaggctgccccatccacctgtacttgcagcgggcacggtcggtgatgagaggctggggaaagatgggcacttgctgccttcggggaaggcggggaccccggtatcctgggagctccagctccacggccgtgtccagcagggagaggtagcgacgcacaatcagagcatgaggggtgcctgtggggaggcggggactggggctctgggctg

SEQ ID NO: 258466 - DNA, 61 bp, Homo sapiens; identical to SEQ ID NO: 211921
  chr7:150776689-150776750
  hypo

SEQ ID NO: 258467 - DNA, 550 bp, Homo sapiens
  chr7:150811101-150811651
  hypo
acccagaactgcagcggaggttatctttgacttctctgctgcccttaggcaggacgcttaactcagtccagacagatgagtatcttctggattttataatctccaaagaagacagcctcagtcatcaacagaaaccgactgtagcagccagcaactctcgacctcagaatgtcagagccgaaactaagacaggaccacctcgttgaagctcgcgtgctgcagacgaggacacgcgcgcagacccggcatggctgcctctgacgtctcactcaggcttgtcatacttctgggcctcatgttcttggctcttctggctcttcctttgaagaatgagaaatggcccgcttttctccaaaatggggcccagtgtgtggtggactgaggactgttatttagttggcctgctcgtaatgacagctcctcacctacctgccggatcctaggaggcgccctgggctggaatttcctgttttcgagggctcccaggggctgccccagcaggccggctcccccgcgccgcgccgccgttcccgggcgttccaggccagac

SEQ ID NO: 258468 - DNA, 472 bp, Homo sapiens
  chr7:150812866-150813338
  hypo
ggcgtctggggtcttcggcagtggccgaggaggacaggccggagggggagctctcgggtgcggcccaggaaaggaagaggagactcaccagagtcagagggctctgggctaggccagacacctttcctagttccctgtcggggcagcgcgctcgcctccggttgcccctgtgcatgaggttagggactgctgtggacctggtcgtcataactgctctttgacacaaacttgggacagtgcctctgggagccagggagggaagcagtgctgcccagctagagaggggttcccagagctagcccgagcacccatgtggaacctggaggtgacggagatgggggcctggctgtcggagggctctgggtaaagggacttgccagtcaggttctgaggacagactgaagggaagggagcccaggaggcggcctccctgctaaggaggagcttagagaggaggcgggtggggtagatg

SEQ ID NO: 258469 - DNA, 623 bp, Homo sapiens; identical to SEQ ID NO: 211926
  chr7:150813836-150814459
  hypo

SEQ ID NO: 258470 - DNA, 591 bp, Homo sapiens
  chr7:150816820-150817411
  hypo
gaagcactcctgccggggccccaggacgagggtttgctgccctagtggggcagccctggcaaggtgacagtagatcctgctggcctccaggccaggtgaatgttccccccatatcatctgtaggggctagtggcccctctgctgcccatgagccccggccaggcccccattagcacagggattcccggcacccgcctggtgcccgtcccgcccctgacccggagctgccctcagcagccctctttgtccttaggccacgaatggcggcggcagcgccttcagcgactactcgtcctcagtcccctccacccccagcatcagccagcgggagctgcgcatcgagaccatcgctgcctcctccacccccacacccatccgaaagcagtccaagcggcgctccaacatcttcacggtacgtgactgccctcctcccccgcccagctgcctttgctgcacaggcagggctgagcgccgagctcccagccaggaggggcgtgggcagccccaagtcaggaagacggtacctgcagtctctccctcagatacacacggctcccgagggtccttgccggtgccctcagagtcttccag

SEQ ID NO: 258471 - DNA, 209 bp, Homo sapiens
  chr7:150817629-150817838
  hypo
ctgtttgcccaaggcgacacagagggttagctggcccagctagagtcagagcccaggcctccccgtcgccttccggctctttttccgttaccccactgccgaggggaaaattcatgctttccacccaccgctgtgattggtttaacaaaggcttagccatcttttcctgggcttcaccacgctgcctcgttcctccctctcaggtttgt

SEQ ID NO: 258472 - DNA, 197 bp, Homo sapiens
  chr7:150828089-150828286
  hypo
gaggaaggagctccggcaactccagaggctccgacagaactctgggctgagcctggctctcctctccagcaagggtctcgcctgagccccaagggcatcgggactggtgactcacctatggatgggggccggggagacaggacacacagaagatgagttcgtgggccagccctgagccccgcgcccgattctcgccg

SEQ ID NO: 258473 - DNA, 35 bp, Homo sapiens; identical to SEQ ID NO: 211928
  chr7:150828563-150828598
  hypo

SEQ ID NO: 258474 - DNA, 109 bp, Homo sapiens
  chr7:150878305-150878414
  hypo
tgcaggcagcgggcggtggtggcctcggcatcggtgatggactggcagcggacgtcacaggcagccagcagtggggtccagccttcggcattgcgggcatcaggacatg

SEQ ID NO: 258475 - DNA, 389 bp, Homo sapiens
  chr7:150889159-150889548
  hypo
aggaattagagcctcggaggacatagaccacctgctcgcgtccacagagccaaagccaggacccaggccactgggctgcttgtccagcagcccttccagaagaccgggctgtgggggtgagggctcgcagcagcaatggggtatggggcgggaggtgggcaggctttggtaggcgcagccgtccccacatccccaggcctcaccatagcgggatgcgtagtcaggccggggcatgaagaggatccgctcgtagacccggcacagaccccgcatctcggccagctgtggccgggaggttgtcccaatcagcatcacacggtctccgggagtcagcagccgcaaggccttggtgaggtccttctttatccgctttgggtccatctgctcca

SEQ ID NO: 258476 - DNA, 202 bp, Homo sapiens
  chr7:150934636-150934838
  hypo
ggggctagcagggcggacgtgggtgatgcgttggagactgccctggagcagctcaatcggcgctatcagccccgcctgcgcttccagaagcagcgactgctcaacggctatcggcgcttcgacccagcacggggcatggagtacaccctggacctgctgttggaatgtgtgacacagcgtgggcaccggcgggccctggctc

SEQ ID NO: 258477 - DNA, 235 bp, Homo sapiens
  chr7:150936103-150936338
  hypo
agaggagtgatgctggagcccggggcaaaatgctggggcccgggacacggctgaaagttccgtcgtgctgcttatttttgggctcctaggtgttgcgcacaaccagcgactgctccagctcctgcctgcgctgctggatctttagaggaagtgagaacaggagcaggtgtcagtgttctggtgagtgatcaggacaatcccacctactgacaccgcctgccctgaaagagcatct

SEQ ID NO: 258478 - DNA, 217 bp, Homo sapiens
  chr7:151073504-151073721
  hypo
ggctgctccctgacgcacccgacttgagtcttccaagcccccttccaggttgctctacgctcacattgcacagaagcatgacttgtgcacaaagggccatggtgcacacgccgggagctcttaaacatgagagtcggctgtccactcgtatggctgacgggggtggcagaagaggcgccaggggctgatgctgtgacccctgcgctctcccctagtt

SEQ ID NO: 258479 - DNA, 51 bp, Homo sapiens
  chr7:151074139-151074190
  hypo
tagtgcctcaacagacgaagacatggagacagaggccgtcaatgagatact

SEQ ID NO: 258480 - DNA, 34 bp, Homo sapiens; identical to SEQ ID NO: 211931
  chr7:151074643-151074677
  hypo

SEQ ID NO: 258481 - DNA, 237 bp, Homo sapiens
  chr7:151124256-151124493
  hypo
ctgggcacactgtgcgggggacatgccgccctgctccctgtgcctggcacctagaaatgaacactttacgggaatggaacccagggcacgaccatctcagcccgcggaacgatccagcccaactggtgagaactcccgctcttggtgttgggggccaggcagggttcgtggagagggtccttataacctgctcagccccctagccagagcaatcctacacatcgctgagccctcttc

SEQ ID NO: 258482 - DNA, 244 bp, Homo sapiens
  chr7:151129034-151129278
  hypo
gggtccctgggagtccgggaaagcgccctggatcatccagctcctcccagggctgggatgcccactgccgagagagcactcagaagccgcccgttggctttgaggacttttatcgcccaaggtcccgaggtctgggtgggaccgcaaggggttgcccctgtccccagagctgcgcccggccatcccggtgggagggctcggctggaagaagttgaccaccttgtggagcgactgcactcgtgcg

SEQ ID NO: 258483 - DNA, 173 bp, Homo sapiens
  chr7:151133222-151133395
  hypo
gcctagccgggcctcggggtgcggccacgtggcctgtactcacgctccgtccccgtacaccttgatggtgttcacacagttcttgacccagcccctgctctggaggaaggggctgtcctccaggaactccaggcactggcccgtgaagttgcaaccctcgaagatttctaggc

SEQ ID NO: 258484 - DNA, 33 bp, Homo sapiens; identical to SEQ ID NO: 211932
  chr7:151134320-151134353
  hypo

SEQ ID NO: 258485 - DNA, 312 bp, Homo sapiens; identical to SEQ ID NO: 211933
  chr7:151165388-151165700
  hypo

SEQ ID NO: 258486 - DNA, 36 bp, Homo sapiens; identical to SEQ ID NO: 211934
  chr7:151214439-151214475
  hypo

SEQ ID NO: 258487 - DNA, 97 bp, Homo sapiens
  chr7:151266427-151266524
  hypo
ggagtttttttaaagagtgtatttagtgattttatttgaaagacgatgaaacctaaatccttagaaaagcaaacagatacatcgtattggcaagaga

SEQ ID NO: 258488 - DNA, 61 bp, Homo sapiens
  chr7:151298839-151298900
  hypo
tctggtgaggcacccgcagcatccactgtgcgagaggcggggatgccgcagggaagacaac

SEQ ID NO: 258489 - DNA, 270 bp, Homo sapiens
  chr7:151326270-151326540
  hypo
gagaccataacacccgcaaaggctaaaatatttactatctgaccctttacagaaaaagttggccggcccatgtcctgttattccaagaggggtctgtgaaccggcagcaggagcggcccctgtgctaggcaagtcccaccccagacctagagaactggaatctgcctttcaaaaagatctgtggctattcttatgcacagagagggaggggcactgagcctgcggagtaagagaagtctgcacctgtcggatatacggacagaggaacgt

SEQ ID NO: 258490 - DNA, 304 bp, Homo sapiens; identical to SEQ ID NO: 211935
  chr7:151358568-151358872
  hypo

SEQ ID NO: 258491 - DNA, 230 bp, Homo sapiens; identical to SEQ ID NO: 211936
  chr7:151411311-151411541
  hypo

SEQ ID NO: 258492 - DNA, 207 bp, Homo sapiens
  chr7:151412757-151412964
  hypo
aaaattccaatttgagttgtgatctagaaagggaggatggagtggaagaagagaaagatagggggaaggctgaagaattaaagatcatgccagggaggcagcgaacaggaaagccaagaccacagaaaacaggtgctcaaggcgaaaggcaaaggcaggagagagggcggggcggggcaaggagccttggtgcgggactccactctc

SEQ ID NO: 258493 - DNA, 48 bp, Homo sapiens
  chr7:151421902-151421950
  hypo
cagagggtggcaccggcaccagaaagcaccccccgagcctagatttct

SEQ ID NO: 258494 - DNA, 94 bp, Homo sapiens
  chr7:151423343-151423437
  hypo
cgtgtgcgcagagccggatggtggcagaagagagctggcatgcagggcgccaggttaggaagcctggggaagtgaagacacagcacctgcttac

SEQ ID NO: 258495 - DNA, 214 bp, Homo sapiens
  chr7:151423497-151423711
  hypo
acagagctgatgccacattatttactatggctgcgtgcgtaccctactaccagtaatcttagtacgagtccaacagaaaggcacaccaacgcacaagagtgcccatgagagcactctgtcacagccccgactggaaaccacggtgtccattaacaactggacggacgcaggagtcgttgtctgggcagacagcggagggttctgcagcaatgaa

SEQ ID NO: 258496 - DNA, 107 bp, Homo sapiens
  chr7:151436199-151436306
  hypo
ccaagaagcctgctcggccccggcatggctccggtgtagctggagctggttctagcatttcagatcccatcgactggtagagcaactgctcacgtgattggacctga

SEQ ID NO: 258497 - DNA, 147 bp, Homo sapiens
  chr7:151476539-151476686
  hypo
tgatgtagagggaggcggagggtgatggttcctgccagagcttcaagaccttcccatgggagccagctcacagctcctacactcctttgggcacccttccgatcatcaggttccctgtgctgctctccgccccgctcagaaagcctg

SEQ ID NO: 258498 - DNA, 35 bp, Homo sapiens
  chr7:151496736-151496771
  hypo
tgtcctccagactgacgggcgcggacactctgcat

SEQ ID NO: 258499 - DNA, 248 bp, Homo sapiens
  chr7:151505823-151506071
  hypo
cccaagtctctcctcacaggcgaaccacgacagatggctgcgcggcctgagggccggcctccaggcagccagggaggagcagctgcaagtcctgcagtctgtgagacccccgaagggtctgggccagcatccaaggctaaagccttggctatcctaacgccgcagtggggcacttaaagctcctcacgcccaagcccaggcctggtgggagcacggttctctcccgcgctccccctcctccccactcc

SEQ ID NO: 258500 - DNA, 156 bp, Homo sapiens; identical to SEQ ID NO: 211937
  chr7:151506370-151506526
  hypo

SEQ ID NO: 258501 - DNA, 117 bp, Homo sapiens
  chr7:151554550-151554667
  hypo
caacagcccactcctctccacgcattttctcgggttgcatgctgccttccggcaccatctgtctgttcagcacagcggttgtgtgtgggctcaggcgccagacggctccggcttgat

SEQ ID NO: 258502 - DNA, 206 bp, Homo sapiens
  chr7:151556275-151556481
  hypo
cagggaatgggcttcgagggtgctgcacagctgtggcaccagagaacactccgcggggaacggcgtcagacggggcggggcgaggtgaggcccgcaagccagtccctgctgcacacggtagcgaaggcggaaagctgcggcaacaccttcccaccatctctgtgaggtctgtgggtggagagggtgggatgcgactgccagccccg

SEQ ID NO: 258503 - DNA, 105 bp, Homo sapiens
  chr7:151591668-151591773
  hypo
ccctccgccctctccgatcctccgtcctccccactcctccgccctctccgatccgtcgtcctccccgctcctccgccctcccagttcctccgccctcctggcttc

SEQ ID NO: 258504 - DNA, 276 bp, Homo sapiens
  chr7:151592134-151592410
  hypo
cctccccgctcgttcgccctccctgctcctgcgtcctcctcactcctccaccttccctgctcctccgtcctccctgcttgttcgccctccccgctcctccgccctccccgctcctctgccttgctgtgtgcccaacactttcacgggctgtgccacacccttcaggttacgcttaattatacactgacttgccccatttattttcctctctcgccttgctccataagaggcttttaggcaacgactcctccttttctttgccgagaggtttgtttc

SEQ ID NO: 258505 - DNA, 214 bp, Homo sapiens; identical to SEQ ID NO: 211939
  chr7:151624665-151624879
  hypo

SEQ ID NO: 258506 - DNA, 84 bp, Homo sapiens
  chr7:151648967-151649051
  hypo
ttagtagaaggtctgaccacttcttaaaagactaaacactcctgggtgtttactcaagagaaccgaaagcgtcagtccataaaa

SEQ ID NO: 258507 - DNA, 86 bp, Homo sapiens; identical to SEQ ID NO: 211940
  chr7:151712356-151712442
  hypo

SEQ ID NO: 258508 - DNA, 107 bp, Homo sapiens; identical to SEQ ID NO: 211941
  chr7:151720362-151720469
  hypo

SEQ ID NO: 258509 - DNA, 131 bp, Homo sapiens
  chr7:151781606-151781737
  hypo
cgtacttttgttggcgtgttgagtattttgtttcataatgaaaccgtctaatgaaactgtttaaactggttagccgtctttcttgcctctccttcttcacaataagcattcatttccgaggatgtggtctg

SEQ ID NO: 258510 - DNA, 236 bp, Homo sapiens; identical to SEQ ID NO: 211944
  chr7:151791344-151791580
  hypo

SEQ ID NO: 258511 - DNA, 183 bp, Homo sapiens; identical to SEQ ID NO: 211945
  chr7:151802391-151802574
  hypo

SEQ ID NO: 258512 - DNA, 335 bp, Homo sapiens
  chr7:151812521-151812856
  hypo
tagtatcctgtgtgagtatgcgtgctcatacaaaaagcacttctgctgtgtactgaagtacggtgcttggttcaaggaaaaacacttgtgcagttgtttgagttatgggcggagctagcggctgctctccagaacactctttttatatgttaagactgactcacaaaccatagttactcgtatttgggtaaaacgaactaaataatgaaaatgaaaacaactgacagtatttgttgcaaatgacaaaattcaagccctcaagtgaaaattagaattttgaaaaacttacatttaccgccaggagcttgacagcttcctagtacttaaaaatttta

SEQ ID NO: 258513 - DNA, 205 bp, Homo sapiens
  chr7:151826350-151826555
  hypo
agggatgagacagcgctgccgcgggccaggcccaccacgcgggccccaccgcagagtcccactttcctccatggaggccgcagttctccagcctccggggcggccgggagcagcgatgcgggggtgacagcgcggggagcggggacaccagcggggcagcgagtgtaccggggacgcagaccacgattccgcaggacccacctca

SEQ ID NO: 258514 - DNA, 114 bp, Homo sapiens; identical to SEQ ID NO: 211947
  chr7:151874697-151874811
  hypo

SEQ ID NO: 258515 - DNA, 41 bp, Homo sapiens
  chr7:151876085-151876126
  hypo
tttaaattgagacagagtctcgttctgtctcccaggctgga

SEQ ID NO: 258516 - DNA, 148 bp, Homo sapiens
  chr7:152152774-152152922
  hypo
ttcggtttattgttcgaacaatttgaacatttattaagtgccaacccttgtaaagaattacccagcaaccagaattcaacttggtcagcaggcaaggagtctcgatcagacaaactcgccattttgaaatatgaaaaattatgccggg

SEQ ID NO: 258517 - DNA, 80 bp, Homo sapiens
  chr7:152159225-152159305
  hypo
ttcaaaaaaaaaaaaaggagaaagaaacaaagaaagaaagaaaaatgcctccccaaggtgacagacgagctaagccaggc

SEQ ID NO: 258518 - DNA, 143 bp, Homo sapiens
  chr7:152159657-152159800
  hypo
ccaaatgccttgtgcggggattggctccaaacctcagcctcatcagtcaatttatccttacgttcaagagcagccatttacaaaacgagctcagaaaattaaaaaaaaaatacaaactttaaatcgccagaatactgcataaa

SEQ ID NO: 258519 - DNA, 212 bp, Homo sapiens
  chr7:152221107-152221319
  hypo
aagcggatcattgccggctccttcgagtcccggagtgccaagtcctgcgcccagcacaatggtcctttatacctcgctgtgtgctctctttcctggccccagctgcccccatgccctgtttttccttactcttttctgcagtattttctttccagttgacttagttattacagtacatggaccggggaggaaagctccggaacctgggcctg

SEQ ID NO: 258520 - DNA, 44 bp, Homo sapiens
  chr7:152243973-152244017
  hypo
cgtgacccaccgcacctggctatttcttacgattaatgagccca

SEQ ID NO: 258521 - DNA, 360 bp, Homo sapiens; identical to SEQ ID NO: 211948
  chr7:152273143-152273503
  hypo

SEQ ID NO: 258522 - DNA, 85 bp, Homo sapiens
  chr7:152371352-152371437
  hypo
gttctgattgcaaaaatcatcggaccttaacctgggtttcaaataatcatttaaatataaggttttggccgggcgcagtggctca

SEQ ID NO: 258523 - DNA, 141 bp, Homo sapiens
  chr7:152374303-152374444
  hypo
ggcctcttctctacgtagggctgcgggcccgtatctgaaacattaacaaccatcaggaatgaggttggtctggttagcttaggcctgaatcgtgtgccccacttacttttctttttttctttttttttttttttttggaga

SEQ ID NO: 258524 - DNA, 42 bp, Homo sapiens; identical to SEQ ID NO: 211951
  chr7:152455925-152455967
  hypo

SEQ ID NO: 258525 - DNA, 78 bp, Homo sapiens; identical to SEQ ID NO: 211952
  chr7:152543573-152543651
  hypo

SEQ ID NO: 258526 - DNA, 135 bp, Homo sapiens
  chr7:152549237-152549372
  hypo
atgttcagggatttcggacgccgactgcagagggatttgaagagagtggtggatgctaggctgaggctcagcgaggagctcagcggcgggaggatcaaggtaggagccagaggcctccacgcagtgcctggggct

SEQ ID NO: 258527 - DNA, 180 bp, Homo sapiens; identical to SEQ ID NO: 211953
  chr7:152551646-152551826
  hypo

SEQ ID NO: 258528 - DNA, 173 bp, Homo sapiens; identical to SEQ ID NO: 211954
  chr7:152555646-152555819
  hypo

SEQ ID NO: 258529 - DNA, 214 bp, Homo sapiens
  chr7:152562697-152562911
  hypo
accagatcgcagagtcggggccaccgcacctccagaccagaccgcagggttggggccaccgcacctccagaccagatcacagagtcggggccactgcacctccagaccagaccgcagggtcggggccaccgcacctccagaccagaactcagagtcggtgctaccgcagagtcagggccactgcatctccagaccagatcgcagagtcagggag

SEQ ID NO: 258530 - DNA, 162 bp, Homo sapiens
  chr7:152564284-152564446
  hypo
tgaacgccggccccgtgagcgcaggcagaggctgttccctccaagcccgctctgcaagggcctgggcgccgtcctgcccgcgtggcgaaggctcctgggggcacgggagcaggaggcatcatggagaagagggaagctccggggtgccgagggggtgctgta

SEQ ID NO: 258531 - DNA, 309 bp, Homo sapiens
  chr7:152569304-152569613
  hypo
tccccagaatgcagcgcatgaggcggtgactgaagtgcagggctttgctgtggatgtggtcacagggaatggagtgggcggggaggagggcagtgctgagaggccacgcaggaggggcagtctggtgaccacgcaagaggggacgtctggtggccatgcaggaagggtggtccagtggccgggcaggaggggtggtcaggtggccatgcaggaggggcggtctggtggccacgcaggaggggcggtcaggtggctatgtaggaggggcggtctggtggggccatctggtggccacgcaagaggggacgt

SEQ ID NO: 258532 - DNA, 226 bp, Homo sapiens
  chr7:152569934-152570160
  hypo
tggtccggtggctgcgcaggagggttggtcgagcggccgcgcaggagggatggtggagtggccgcgcaggatgcctgctctgacctgcctgactatctgtctatgctgtgacctgtctgggtctgtgctgtgaccgcctggaagccgtgtggactgtgtctcagagtcacccctttgctggggagagaggagggagtgttatccactccttcggcccccccgccgc

SEQ ID NO: 258533 - DNA, 39 bp, Homo sapiens; identical to SEQ ID NO: 211955
  chr7:152647711-152647750
  hypo

SEQ ID NO: 258534 - DNA, 235 bp, Homo sapiens
  chr7:152716533-152716768
  hypo
ccagcagtgagctgagatctcgccccacctcataaggcactgaatcttgctctcggccctgtgagctcagaggcgaagcctcagtcgagacctcagatgagactccagccctggccgatgccttgagtgcaacccgatgagatacgttggtgcggcagaggagcccgctgagtcgtgcctggattcctgatagacaaactgggtcataatatacgtgcattgttttaaactacca

SEQ ID NO: 258535 - DNA, 42 bp, Homo sapiens
  chr7:152738787-152738829
  hypo
ttgagtagaagttgtgattgcgtccccagctttcattccacc

SEQ ID NO: 258536 - DNA, 31 bp, Homo sapiens
  chr7:152789902-152789933
  hypo
ctctgaaagatggaaacctgcgtttagcttt

SEQ ID NO: 258537 - DNA, 59 bp, Homo sapiens
  chr7:152796593-152796652
  hypo
tacacacaggtgtcagccaccgtgcaggtgtgccccacgcatagacctcagccaccatg

SEQ ID NO: 258538 - DNA, 253 bp, Homo sapiens
  chr7:153109299-153109552
  hypo
atgtggagccacagcggccgctccgaggctggggcagtctgacctccagtgctccatttgttggcagttagggcacgggtgtgttggcggcttggggtttgggcactgttttgcccaatgacctggattgccacacttgaaacagttgcaaggcgggcaggacggttgctgttggctagggcaccggctggcccagtgtcctgagttgcctcacttgaagcagacgccagacggggcccgggagattgtacct

SEQ ID NO: 258539 - DNA, 447 bp, Homo sapiens
  chr7:153110538-153110985
  hypo
tgagtcgtcagtgccgatttggacttcccctggggaagtaaacttgggtcacctggtgacccggactggccttcccttgaagaaggaaactctccctgggtgtgcgcatgactctcggccagggaggaacggacaaaaggaaaaaggaggggtactcacctagcgtcggccgaattggactggagtagctgcagcaactgcgacctggcagcaagtaaccggacgaaatggacagatggccgtggaggagaagcctgacctgactgagggagaggactgatccgaccaggaggggagtccccctgagcctctgggggggcttaggaggtgtcccctcccgggtttcggcaccaatgaaaggcaatggaagggcaccatggatcaataaggctgagaggtgagaaaaagagggcaaaaatcttctttattgagccctcgggcgaggtt

SEQ ID NO: 258540 - DNA, 86 bp, Homo sapiens
  chr7:153111045-153111131
  hypo
tatggatgctgggtgaggagtgggtggggtaggggcggggtcggttgagtttcgcgcttctgagtgtgacacgccctagtgggcat

SEQ ID NO: 258541 - DNA, 36 bp, Homo sapiens
  chr7:154018578-154018614
  hypo
tgatggcggccaggcgcggtcgctcacgtctgtaat

SEQ ID NO: 258542 - DNA, 91 bp, Homo sapiens
  chr7:154062697-154062788
  hypo
aattaccatgcctggtcttgcggttcacattcaccgtccttcttaaaagtggggaagggggccaggcgcggtggctcatgcctgtaatccc

SEQ ID NO: 258543 - DNA, 205 bp, Homo sapiens
  chr7:154072003-154072208
  hypo
tagttttaattaattctttcaacaaatatctctaagtactcattatgtgacagacactttgaaggcgctgtattgaagcataggaacttggtcctgagcaaatgagggacttaatgagagcacatgggcttgcaaaccgtgaacccatctcagggactggaaggctctgacaaaagaggagcgtgagtcccggggaagagagggc

SEQ ID NO: 258544 - DNA, 410 bp, Homo sapiens
  chr7:154087908-154088318
  hypo
ctgagagaccctcccgactactcctgtgcccgttgccatgccatttgttggatcacttgcaggccccgagtctcaaacacatgatttatcatcagatcgtacagtcgtcagaagggtcccaccgtttctaaccatgtgacctgggcggttgctttacttctccgcacctcaatgtccttgtctgtaaaatggggcggatcagcccacctactgtttgggattaaatgaggtgatgtgcataaagctgtcagtgccatccctgggctgcagcgggcgttctggaaatatcacagattaccatcactgtccgccgcgcggcatccgtatgcccttgattcatacacagtgccacgcgtgggggcggttctcagtcagaaaataccaagagcagccgccgcatcttagaattt

SEQ ID NO: 258545 - DNA, 69 bp, Homo sapiens
  chr7:154128040-154128109
  hypo
gtcactaggctccacggtgctagagaggtggatcctgatgatgtcctgtgctcacggcgcttactttga

SEQ ID NO: 258546 - DNA, 68 bp, Homo sapiens
  chr7:154150170-154150238
  hypo
tctgatggaaacaccgtgaccttctccggtgccacaatcgctgacgtgggggtcggaaactccagcag

SEQ ID NO: 258547 - DNA, 35 bp, Homo sapiens
  chr7:154382567-154382602
  hypo
aaaatatattctgcgagtaagtgatccactgtatc

SEQ ID NO: 258548 - DNA, 329 bp, Homo sapiens
  chr7:154540198-154540527
  hypo
tttgccaacacccgcggcactagacaacgccaagagaatggcttagtaataatgagataataacttaatgaaaaacccctgcgagccctgcggggcggggagggagacctggtgtgtggtgctggacgcttcctgagcacctccctgcacagcctgcctctggagtttctcgcgcatggcggtaagcagggccaggcctcactctttccccttcacagtggagggtgtgagcagggcttcgatgccttttgctcacggtgtccagcagtggatgcgctggttggaacggacgtgcctataaccatgactcccaccgaggccttgtcctg

SEQ ID NO: 258549 - DNA, 498 bp, Homo sapiens
  chr7:154541924-154542422
  hypo
tgcagcaggcagaacctatccgtagatgaacaccctcgctctccagaagacaagaagcgggagtcgcagcctattgaagtgtagacatgatgtctacacagccaccctgtgtcctgcaagagcccaggctcagagcgtgtgcaccgtgagggccgcctgtgccggagcaggccgcttctccgtagcaaccacatcccacagtgtggaggttcccagcggcgggtagtgcggaaaacagggaaggcaggaaagaaacttagccaggcactgagtgcgtgggaaggcaaaacactcttttctcctcccacggcgggggcgctccctgggcgatgctcacggagagtgggagggcgtcccgcaccgggcagagctgaagggtggcgggggtcggcttcctcctctctgcctcttcccttccgccacgcttcctacccacaccagccagtctccagtaacagatatagaatgccttcatttggaacacggagagacaagcgt

SEQ ID NO: 258550 - DNA, 233 bp, Homo sapiens
  chr7:154646528-154646761
  hypo
aagcaaagagaactcgccctcggtccctccctttccagccctccctctgtctaacccaaagcagcctgtgtcctccttcccccgaatccttcccactcccttccacattcaggaaccccttccctggcaggagggcaaacttcatggcccgggtccgcagttcccctaggtctggggacagaggtgactccgtgtctccagtgaccatcgagcatcagcggctccctgattcc

SEQ ID NO: 258551 - DNA, 276 bp, Homo sapiens
  chr7:154673974-154674250
  hypo
acccccacaccctgtacccccgcactcagctccgccgaggacatctgtctgagctccgtgctggggatctttcctttgccattctgcccagtggatcccgggcgtctttccagagcataagcatctctgttttgttttaacaagccttagatagaggtccgtagaccccacaatggtatttctcctctgaagaataaagcgtcaatccttttagtggcttggcatgttgcggcctgtccattctgtttcctcctcgcatgtgccccagtgatctgg

SEQ ID NO: 258552 - DNA, 211 bp, Homo sapiens
  chr7:154875881-154876092
  hypo
acagccccagatggtgttcacggtccgccacgccaccgtcaccttccagccagaaggggacacgtggcgggagcagaaggagcagcgggccgccctcatggtgggcatcctcattggcgtgttcgtgctctgctggatccccttctttctcaccgagctcatcagtcccctctgctcctgtgacatccccgccatctggaaaagcatcttc

SEQ ID NO: 258553 - DNA, 68 bp, Homo sapiens
  chr7:154922371-154922439
  hypo
agcactcacatacacatgcacgcacacatgtacccatgcatgagcacgcacacatgcacacacacata

SEQ ID NO: 258554 - DNA, 94 bp, Homo sapiens
  chr7:154926247-154926341
  hypo
gcatcttgtttttctttttacgtaatagattgtgacactctttccgcatcagtacataagaatttcatctttggccgggcgcggtggctcacgc

SEQ ID NO: 258555 - DNA, 95 bp, Homo sapiens
  chr7:155016945-155017040
  hypo
agacaggcggggaccgcgctcttgcccaggcctacagctggtgggcaccagaccctgggctcggacccctggttcgatgccgtgtgatgttgcac

SEQ ID NO: 258556 - DNA, 251 bp, Homo sapiens
  chr7:155017976-155018227
  hypo
cccttctcccatcacgggccatctccactgagccatgtgctaagcatcagctcctgggagccacggtgtcccctcacacctgcagtgaggactgagaaagctgcagatgggaggcgaggcagcgacacagccggctggcactaggcatggggtgacaaggtgcatggcgcggccaggacagccttgtgcaggggacagcggaagctcaggagacaaggtcagaggtggtggggccccgccacggagggcac

SEQ ID NO: 258557 - DNA, 204 bp, Homo sapiens
  chr7:155077346-155077550
  hypo
cctcttcatcgctttcgcactccaaccccagggacttatggaacataggtcccggcaggacctaatgtcaaggaagaaccaggccgatgtcatttctgcctccttccgtattttttttactgtggtaagtcatatataacataaaacttaccctttaatcatgttcaagtgcacagttctgtggcattacgcacactcgcatcg

SEQ ID NO: 258558 - DNA, 186 bp, Homo sapiens
  chr7:155079940-155080126
  hypo
tactactcagcagacggggggaccgtggcacccccggcctcagccagaccgtccgctgcacacctgcatggcactgactgaacatgacgtgtccgatcaacacggggccatgcctccgagaacgcgactgcagctctccctgcacctctgtcccatcttcagctacagaaccggagctccatacgc

SEQ ID NO: 258559 - DNA, 604 bp, Homo sapiens
  chr7:155130273-155130877
  hypo
cagagctgcaaaccaaggaacgccaagcaatgtggcaaggccagcagccgggagagaggcgcgtgcagggaggccagcggccgggacagaggcacatgtaggagggccggtggccaggacagagactcatttacggaggccagaggcgggcacagaggagcgtgcagggaggccagcggctgggacagaggcacatttacggaggccagaggcaggcacagaggcacgtgcagggaggccagcggccaagacagaggcgcatgcaggaaggccagcggccgggacagaggcacatttacggaggccagaggcaggcactaaggcgcgtacagggaggccagcggccgggacagaggcacgtgcagggaggccagcggccgggacagaggcacgtataccgcggtcagtggccgggacagaggcacatgcagggggaccagtggccaggacagagactcatttacggaggccagaggcaggcacagaggcgcgtgcagggaggccagcggctgggacagaggcacatttacggaggccagaggcaggcacagaggcgtgtgcagggaggccaacagccaccacagaggcgcgtgcaggaaggcca

SEQ ID NO: 258560 - DNA, 94 bp, Homo sapiens
  chr7:155274563-155274657
  hypo
aagttcctcacctgcgctagaggacctgtgtttctctgctcctcgtagcctggcagcagagacccggagtggcctagggcgaggctgtgactgc

SEQ ID NO: 258561 - DNA, 156 bp, Homo sapiens
  chr7:155343623-155343779
  hypo
ctagacatcccaaagtgtggcgggccccactctgtgctacgaggaggccatgagaagaggctgaaacccaatgacgagctgcgcctgtgcagaggccggggtgagctggatgttgctgtgcacggcctcctgggcgccccaggcctggctaactca

SEQ ID NO: 258562 - DNA, 79 bp, Homo sapiens; identical to SEQ ID NO: 211962
  chr7:155352613-155352692
  hypo

SEQ ID NO: 258563 - DNA, 209 bp, Homo sapiens; identical to SEQ ID NO: 211963
  chr7:155385399-155385608
  hypo

SEQ ID NO: 258564 - DNA, 35 bp, Homo sapiens
  chr7:155436112-155436147
  hypo
gattacaggcgtgagccaccgcgcccggccagcat

SEQ ID NO: 258565 - DNA, 168 bp, Homo sapiens; identical to SEQ ID NO: 211964
  chr7:155502689-155502857
  hypo

SEQ ID NO: 258566 - DNA, 155 bp, Homo sapiens
  chr7:155503998-155504153
  hypo
caccacccatccccgcctcagggaatgcacatgcctccccagctagagaccccaaggatgatgatgaccccgccacccgtgactccacagcagcccaagaacatacacatcaacccgcacttcaaagggacggtggtcacgcctgttcaaggtct

SEQ ID NO: 258567 - DNA, 177 bp, Homo sapiens; identical to SEQ ID NO: 211965
  chr7:155530782-155530959
  hypo

SEQ ID NO: 258568 - DNA, 195 bp, Homo sapiens; identical to SEQ ID NO: 211966
  chr7:155532479-155532674
  hypo

SEQ ID NO: 258569 - DNA, 111 bp, Homo sapiens
  chr7:155559197-155559308
  hypo
ccatgggccgggggcgcctgatgccaaacaagcagaacctgcgggtggtggagtgcaagccccagccctgcgtggtgtctgtggaggggctgtcctcgtccaccacggatg

SEQ ID NO: 258570 - DNA, 126 bp, Homo sapiens; identical to SEQ ID NO: 211967
  chr7:155559943-155560069
  hypo

SEQ ID NO: 258571 - DNA, 213 bp, Homo sapiens
  chr7:155573670-155573883
  hypo
gcccctctgctttcgcaggagctcttgtgcttgagttcagtgttagtggtagcgtggctcactccacttggaggtggcggccgtctgaccgtgtgttactgctttgccgacggggcctcccggccctgatgcgtgtacactctgcgggctgcaccgggtggctctggttgggggcgaagctgtgttgactgggagagcgttggaaattgagac

SEQ ID NO: 258572 - DNA, 62 bp, Homo sapiens
  chr7:155574316-155574378
  hypo
gggttgcagcccgcggctttcacgcagctctctcattagtgggccacgaaggtcaagggcag

SEQ ID NO: 258573 - DNA, 1140 bp, Homo sapiens
  chr7:155581211-155582351
  hypo
aaaaaaaaaatccaaccaaaaccacacccagcgaagtaacaaagcgacaatcggccttggtcctgcgagggcagggagggcagggagggcagggagggcagggagggcagggagggcagggtccactgcccagccggggatgcaaggacggccatggggctccagcacagggaccgggccccgcgggctttgagtgacgcggtaggccaggacgagccccatccacacttggacaatgagcaaccgcagccggccgcgcagcctgggggccgtctccctctccagcccccgtgtcctctggtccacgactggctcttgccctcattccgttggggctgagtcacagccagggaaagggctgaggcagagcaacgctgggtgaaccccgtcttcctgaggccacgtttgcaccgggaagagaacacagtgaaccccctgagcaccaacacgctcccacaccccccacgagcagcccagccctggggaggagcccgtccttctccctgcttgccacaccggccacgtccgtaaccctgcccagcatcccacccaggttgtgtgggtccccacgtggtcaccagcgtcctttcaggacaagagaaaactgagcaggaccagggcttccgcctgccgcattcatctgccccccttcggctgtgccaggtgccttcccatgtggcctcttgctcctcggcatccctgggggagggaaaggcaagtgtctccctgtttcatgcagccgcgcaggcctaaacgcagcctctcctgttccaacaggcctttctggggcctgtcctgcttgccttgcggcagccaagggatataatgggtgccggccagcctcccctcccatgaccccgaggaagtccctccagcccctccctgagtctgctcctggcagaatccctctgtaagtggatgcggggtccagagatgccaccggctgggccagaccccatgaggagaagctgtgccggagcctgcaggactgggtccaggtcagggctctcacacccgctgggcggcctttgcttcccggtgctggctgtgcccagacgcctgggcttgtgcgtgtttaacccgcccagagactggtgctgccgcatttgttcatcggtttgttttgttttgttttgtttt

SEQ ID NO: 258574 - DNA, 256 bp, Homo sapiens
  chr7:155582651-155582907
  hypo
catcggtttcttattcactcattcatgagcttgatatttactgaatgccactgtgtggcgtttctacggtgatggacacagggggtcttctgcggtgatggacacagtgctgcgcggcagcggacggcacagtccagccttgtctgcgtgaagcatgcagttctggtggcaaagagctggctccatggcagggctaaaaaacgccaaggacaccagcacctggcctttgtgtgtcccgagccggcagagctgccct

SEQ ID NO: 258575 - DNA, 766 bp, Homo sapiens
  chr7:155623719-155624485
  hypo
agaaatcttgtttccgaagcgcctctgcgttccgggcaccaagggagagtgagttctgaccgggttgtcggggggtcagggactctgccctcagccactttggctgctggttctgccgagccactgcccgaacagcaccccggatgcacccgaggaggtgaggctctgcggaccgggtgccctgtgagtgacaggggagaggcccctgaggtttgcacagtgcctgtcacttctcaaagcacctccttcgttctggcaatttagtgagggaggctgggcagccggggctgtccattttatagaggaggacaccaagcctcagggagggagagggaagccggtggagccgggcagaagcctgtggagctgggtagaggccggcgggtttcccagcagcggtcttctgcatcttctggctgagtcctccgctgtcaggagaccccggcctgggccaggaggtccgattctgggatgcgaacgtggtggggctgttgccatagataccgatgtggtcaccagcctgaaacccttgagccacggagagatcagacggtggtccccactcctcagcctggagcctggcagagacgctcaaggaagagggtgggctgaccgcgcacgcctctcctttcttcatatcctgcgcggctcgggcgctgtgcaggaggcctgtgctcagcgaggagagagacagagagtgcagtgggaggagcgcggggtcggggggctctgcttcccacggtgcgcctgggagcctctttgcctc

SEQ ID NO: 258576 - DNA, 266 bp, Homo sapiens
  chr7:155637256-155637522
  hypo
cagaacatgcaccaagagttcgggcaaacctccagacgtgcttccatggaagatcccgggcagctgggacttcagcgcccccgagctccacgagggcatggaacctgcttgggccttttcctatctctccgtaggcactggggatgtttccccgctgaggtcgccattctgctcttcctagcggcccgtcctccccatgccccagcccgagcacatcactccccgtcccctccttgcccctctccgcccatggcctgggacagctc

SEQ ID NO: 258577 - DNA, 119 bp, Homo sapiens
  chr7:155638079-155638198
  hypo
aggatgatggcgcccgacgggtcctgcagcatctcttatcgggtctggcagcccggtcccctggggatgaaggctcctgactctcacctaggggcacagctccccggcacccctgattt

SEQ ID NO: 258578 - DNA, 627 bp, Homo sapiens; identical to SEQ ID NO: 211972
  chr7:155679095-155679722
  hypo

SEQ ID NO: 258579 - DNA, 169 bp, Homo sapiens
  chr7:155706980-155707149
  hypo
ttgccccctctccccggcatactgctgggtcatacggagctggtcactcatggattgacccctctccccggcatactgctgggccacatggagttggttactcacacatggacccctctccccagcacactgctggattacacggagctggtcactcacggattgaccc

SEQ ID NO: 258580 - DNA, 158 bp, Homo sapiens
  chr7:155793926-155794084
  hypo
cgggcgttctctgtcgccccctgttcccctgcacgctgggtgttctgggatgcgctcatttatgcttggggtcctcaccgtctcccatggtgctgggagagaatctctctccatggggatgatttgtggagggaaaaacctggcgaagtttgacatgt

SEQ ID NO: 258581 - DNA, 583 bp, Homo sapiens
  chr7:155797745-155798328
  hypo
ttcagctctggtggcggcatctggtccaggaaaatctagtggaacagtgtggttgcacagggcagaggtgcacccctacctcaccggcacccacttgcagggcagaagacatgggccccgtcttctgtgccagctcggacagtggcatccatgccctgggccctatgacttatcctaagacagctcctgtctgtccccactggtttctggaacaggcctccccagtggcggacggaggctatttctgagggagccccaggtggaggggtcacagctatcagagccaccccacaatggctgcatgtgccaagaagcctccagcagtgggagagccgcaccacggagcagacagattcctggagcatccaggactgtcggtctcctgggcccagcggtgccagcaagcccgctgcacatccctgcccaagtcccttctgttcctcaagtgtcccctgtcctcatcctgaagaggccctgcttcatttccctcgcaggccccccacagcagggagaaggtgcagcttcccgcagggctcctcagtgtcccactgccccacttgtgcgtccccgaagtcacgtcctc

SEQ ID NO: 258582 - DNA, 278 bp, Homo sapiens; identical to SEQ ID NO: 211973
  chr7:155828028-155828306
  hypo

SEQ ID NO: 258583 - DNA, 97 bp, Homo sapiens; identical to SEQ ID NO: 211974
  chr7:155828366-155828463
  hypo

SEQ ID NO: 258584 - DNA, 318 bp, Homo sapiens
  chr7:155855975-155856293
  hypo
ttgttctcaggtaggcattccgtcttaatagtaggaaataatggccaggcttagacggtccgaaccgagagtggtctcaagggggaaagagagagagcgcctctcaccgagtcaagcatattcgtccccggaaatgactccaagcaccgcctcttggccagcccctctgcgccgggccgtgagctctcctggctgggccctaccagatgatgagaacttggggagaggctgttgccacgtgggagagattgcggacagggaagcttctgctcagaccgtgacctctgcttccctttccaccgcgctgctccgagggcc

SEQ ID NO: 258585 - DNA, 73 bp, Homo sapiens
  chr7:155859954-155860027
  hypo
ggcaactggacatatgcctgcggggctttgaaaaggatgacactggagatccgaaatgggggctgtggctggc

SEQ ID NO: 258586 - DNA, 311 bp, Homo sapiens
  chr7:155868045-155868356
  hypo
cagaatggccagccccaggccggtcgcacgggtgctcgtgggacttggctcttggtacctgcctggctgggaacatgcgtgcttctctccgccacctcatcaggatcctcccttgacacctgatcccgtgtccccttgttctgtggggcactagcccggctcacagtcgctcatgcattcccgaacctgttcccggcatgcagaccctcagaaagatctgtgcgttcatggcatgtgccctccctggtcctggcagcacccggccttctccacacctctgatctgcaaacgaaagcagcttcctttgtgtc

SEQ ID NO: 258587 - DNA, 204 bp, Homo sapiens
  chr7:155871903-155872107
  hypo
gtttccctctggcccgcagcgttgcccatggtgaagacctggttgaaccaagaagccgtggaatcattaggatatcagagtgcagacctgcctgctcccccacactcaggcttcccacaggctccctggatgggcagcccctgctggaattcctccagagcctgaaacgttggccacattacaaagccgcgttctccatcgctg

SEQ ID NO: 258588 - DNA, 166 bp, Homo sapiens
  chr7:155897787-155897953
  hypo
ccacccaaagtggcagagcccgtgtcagcggtgggacagggccctgccgaaccaccccgggagcacagcgtgggaagaaatgcgcgcttgacaagcgaagccccgtgtgttcgcccgtctgatggcaacagctgcgcgtccttccgtcttccactctagtggggga

SEQ ID NO: 258589 - DNA, 186 bp, Homo sapiens
  chr7:155898220-155898406
  hypo
ggaaacctgaataagacctgcggggccacatggaggcgaggggaagtcagaagcagtgagggtggagccccgcggagcctgtaagtccctgtgagggctccggactttgtgccgttctccgcacccctcaggcccggtggagtgcgtgacccctacgccgggcccgcatcattttggctccacagc

SEQ ID NO: 258590 - DNA, 206 bp, Homo sapiens; identical to SEQ ID NO: 211976
  chr7:155900805-155901011
  hypo

SEQ ID NO: 258591 - DNA, 288 bp, Homo sapiens; identical to SEQ ID NO: 211977
  chr7:155913343-155913631
  hypo

SEQ ID NO: 258592 - DNA, 329 bp, Homo sapiens; identical to SEQ ID NO: 211978
  chr7:155916055-155916384
  hypo

SEQ ID NO: 258593 - DNA, 322 bp, Homo sapiens
  chr7:155920258-155920580
  hypo
cgaattcctggcaccgggaacttggcctcgccccttattcatcaagtccaggcacgagtcactttctgctcaggtttggcctttaagattacgcactccgtgcaccctggggtagccaaccccccgaaggaaaacacgatggaagtcttcatccttagaacaggaggacaacgggctcgggttgaagcagctgacccggtgctgggaatgagtgagaggaggcgcggcacctgccccggcccgcatggacgcaggcacattagatgccaagtagtagggagccctggttcacttcttacctggctcgctgcaaagagaacac

SEQ ID NO: 258594 - DNA, 286 bp, Homo sapiens; identical to SEQ ID NO: 211980
  chr7:155935866-155936152
  hypo

SEQ ID NO: 258595 - DNA, 148 bp, Homo sapiens; identical to SEQ ID NO: 211981
  chr7:155948645-155948793
  hypo

SEQ ID NO: 258596 - DNA, 254 bp, Homo sapiens
  chr7:155985233-155985487
  hypo
tacatttctttgaaaatatacgtgtttctctaaaaccgctctctgtagttcaggccctgagctacccctccaaacgggccgctagtaacaaaaatgcctgagtgctgccgtttggcttctgtcgcttctggttgcgtcgttgctatcagcatgtctagctccgtgatgggcttctttccgccagggcagacctactgagaacggtcaccaaggagcttctcggagattcctacgtccaatccccaatacattcc

SEQ ID NO: 258597 - DNA, 42 bp, Homo sapiens
  chr7:156000101-156000143
  hypo
acagccctcttgaggaagaacggccaagacccagcccctgta

SEQ ID NO: 258598 - DNA, 150 bp, Homo sapiens
  chr7:156012928-156013078
  hypo
agtgtgtgaacatggtgagccgcaggctgtgtgctgtctccagagcatgtgaatgcggtgagccgcaggctgtgtgctgtgtgtgtctccagagcgtgtgaacacagtgagcaggcattcggggtgagcgctctggggtgttgtgaagcc

SEQ ID NO: 258599 - DNA, 52 bp, Homo sapiens
  chr7:156154858-156154910
  hypo
caccgcggtcaccacgcactgatgccctgtctgcacacgctttccacagccg

SEQ ID NO: 258600 - DNA, 63 bp, Homo sapiens
  chr7:156255036-156255099
  hypo
tctccctcacagggcgagagaccaggcctttgcacacctgcttctctctgtcactgaatgtgg

SEQ ID NO: 258601 - DNA, 168 bp, Homo sapiens
  chr7:156255129-156255297
  hypo
gtctgtccactcacctgaagcggttcccagggaatgccgacggtgagtgctgtctgctggcagcattcccgggagctggaggaattcatcctttttcctgaagggagatccgggtgctgcattgcagtggctctgcgtggcctgagatggaggcgcacacccggtgct

SEQ ID NO: 258602 - DNA, 71 bp, Homo sapiens
  chr7:156290627-156290698
  hypo
aggtgagctgaactcgcttgaaaaaggcgcccgcggagcaggtggatgcttgctgccgatggctgcggtgt

SEQ ID NO: 258603 - DNA, 104 bp, Homo sapiens
  chr7:156336564-156336668
  hypo
ccgctgggaggctgcgccatggcccgctccggagagctgcgaggtggctctgcgaggtttggctggagctgggcagcgaggcctgcccacgggtgggagagccg

SEQ ID NO: 258604 - DNA, 290 bp, Homo sapiens
  chr7:156347363-156347653
  hypo
acaggatcccaccacacagccgcgggacgggtaaatggaaagacccttcagcgccaaacactgctgaggaggtagagcaggtggaacacgcatatgccacaggcgggaaagaacaatgacaaacactttgcaaaatggatgggcaggtttgtttggtttttcatttgtttgttttaacgtgcccttactatgcagcctagcaattctactcttgggtatttacctaaaacaagaaaaaatatccacacaaatacttgtcgcccaagtgttcataacgcttcattcgtatc

SEQ ID NO: 258605 - DNA, 306 bp, Homo sapiens
  chr7:156371322-156371628
  hypo
atccgccaccaccacgcacgccaagcagccctgggtgtcctcggggggcagtgctgcatgctggccagcagggcggacgctggctgccatcccggctgacccacggccacccgagtgaccttggagtcactcgccctctctgtgcctcaggctctccacctgcaagctgggtacacatctcatccatggtgactacacggtatgacacacacaaagtgcctaaaacagcgctggacccttcgcttctgtgctgaaggggcacggagcgctgagggggccgaggacatacccgcgctggccgccacg

SEQ ID NO: 258606 - DNA, 87 bp, Homo sapiens
  chr7:156393241-156393328
  hypo
ttcacaatagcaaagacgtggagtgaacctaagtatccatcaacagaggagaggattagacaatgcggtgtatatatatggaggtca

SEQ ID NO: 258607 - DNA, 222 bp, Homo sapiens
  chr7:156397739-156397961
  hypo
cagcctccatcacccgcacccacactggcagaggctgcccacgagcaggcccctggggcttccaagactaggactgtgagggatcattttactcataaacaggacaggataatacttgtatttttaaaagtgttttacgcactgcgtgaagaaaggctgggcaagcgtgggtggtgggcaggctgccatttccatgagaccagagctcgaggcttcgtcgtt

SEQ ID NO: 258608 - DNA, 132 bp, Homo sapiens; identical to SEQ ID NO: 211985
  chr7:156435906-156436038
  hypo

SEQ ID NO: 258609 - DNA, 405 bp, Homo sapiens
  chr7:156507228-156507633
  hypo
ggtcaggtatagatcgtatgtgttaccttaaggaaactgtacagtatttgaatggcaaacgtctttgcagcatttggagcagggaaatgacaagatcacacttccactgtgcatgtgtgtgtgtggtggggattgaactagcccttaaataacaagtagactctgaatggaaagaagggacaaaggaggtgccccaggttaggactctatacaccagaaaggcgactttcaaaagtccttccacctgcctccccttatcaagtgcctggcactaagaaggcaaatgcaaacacataaagactgacttactaaaaacaattaggccctggcattagactgccacgccaaggaaacggagaagaggacaaatatttactgagtatctactgagtaaaagacttataa

SEQ ID NO: 258610 - DNA, 187 bp, Homo sapiens
  chr7:156613330-156613517
  hypo
aattgttgaatctggcgcctcctgcatcaaaaaagaggcataacatctagcaggcctctctggacttcgaagacaacacatttctcatttgcgtgtgttgctccagctggtttactgagcggcctgaaaagctgctggttttgagtacagcccagaaggagggaaggctctgcggcagctccaggct

SEQ ID NO: 258611 - DNA, 163 bp, Homo sapiens
  chr7:156733207-156733370
  hypo
ctcaccctcacccacgccccacccaaaacatggccatgcttcctgctgctcccagaacaaacacaaaacactcccggatcggcagagctttcacgcccggccctggccacctcgccagccgcatgtctcacgcaggtctcctcatgcccggcactcttgctgc

SEQ ID NO: 258612 - DNA, 120 bp, Homo sapiens; identical to SEQ ID NO: 211986
  chr7:156733810-156733930
  hypo

SEQ ID NO: 258613 - DNA, 37 bp, Homo sapiens; identical to SEQ ID NO: 211987
  chr7:156733990-156734027
  hypo

SEQ ID NO: 258614 - DNA, 32 bp, Homo sapiens; identical to SEQ ID NO: 211988
  chr7:156734692-156734724
  hypo

SEQ ID NO: 258615 - DNA, 153 bp, Homo sapiens
  chr7:156744700-156744853
  hypo
gttttgatttttatcatataaacttagatattacttttaaacaagtttgaaattgtttttaggacactttccctccaaaattagcggtttgtttaatttaggttcttgtatgctactgtgcctgcagtaagttaaggccgagcaaaagcgcag

SEQ ID NO: 258616 - DNA, 123 bp, Homo sapiens; identical to SEQ ID NO: 211989
  chr7:156760916-156761039
  hypo

SEQ ID NO: 258617 - DNA, 187 bp, Homo sapiens
  chr7:156782595-156782782
  hypo
ctctcgagggctcctcgtccactgtggcgagtgcagaggacgcggcctgggcagtgcctgcggggagaccgtgctggcctgggcttcccagtgagcggggctcctcaggcttcctgggccctcgtcctcccggactggtggcactgtgtgcctgttggggggtggcaggcagcgggaaggcccaggt

SEQ ID NO: 258618 - DNA, 33 bp, Homo sapiens
  chr7:156832247-156832280
  hypo
tgctcagatggccccgaccgagtaccaagacac

SEQ ID NO: 258619 - DNA, 723 bp, Homo sapiens
  chr7:156832487-156833210
  hypo
catgtctctgtgtccgcgggaccatcttataaggacacagtcacatcgaattgggggcccatcctactcctgcacagctaatcactaaccacatcttgttccgcagtaaagtcccattccgagacactggggctaggacttccacctgtctcttggacacatttcaacccgcagcaccaccactgaggaaacgcaagtgtgctgaagacgcaaacctaacacgcaggaggcaggaaccgtctgaggcagcccccggcaaacgtcaggctgtgtggctcagacccggcacagcctccgcgatgggagctccggggggggctggctggggacaaggacaagcggacttgggagcgacggggtttgggcatctgggagacgggaactccttcccgggaggaagaccgtgagggaggcgtggaagtggatgtgagccggtgtgcactgggctgcagtgcgcgctgctgggccggtccgggagcccacactgttgggtgctggctgctagaagcccacagcaggggcccgaggcccaccccctagcctcagggcacagcttcccctgtccagccaaggctgccttacccaagccctggtcctgcctgttccgtgccttctcccgcaaggcttcttcaacagcacaccgcgaaaacgtgcaggcatcgcccccagcacaagggtcgctgctagggaagctgcccttcgacagggcgggctgatccacct

SEQ ID NO: 258620 - DNA, 437 bp, Homo sapiens
  chr7:156880358-156880795
  hypo
agttgaattgttttcagaagcgtaaggttctacgtagcaagaggcttttctcatatgcacctcactttctcggttggagtggcagaaatacctaaacgcagaagaatgtgcatgcaagggctcgcgctggcatacagtagggcttgctattgacgatgagcgcacccacggctccggcaactacaaggcggtgctcacggacagcacggccctcggcgtggatatccggaaggcagccaccaccttcttctgcgttcttgttttgcattttccttcatttctatcaaccgactttgctgctatagccgctgcttagcaaagccggtaaacatgaggttgtaatcgttgaatacggcactctggcaaccgagacgctgaaaggctgccttttccgggatgaagaaggactgtgtggcgttgagatatctaattacata

SEQ ID NO: 258621 - DNA, 260 bp, Homo sapiens
  chr7:156883428-156883688
  hypo
ggggcaagaccagccaactgcgttttggggacacggtggccctgagaacagcatctcaggggacgcaggctgagacaggacaggagctgtgcagggtgggacaccgcaggtaagggcagggactgccaggatgagctgccttgcggctgacaccgtgactttcgggtggcacagaagctgtaggcatcagcggagagcagcgcaaagtggacagcagagatttgcacagctggacagggcagctccgtcacccgtgacca

SEQ ID NO: 258622 - DNA, 197 bp, Homo sapiens
  chr7:156918515-156918712
  hypo
gacagctgctgacgcgtggcccgacctctcctggggaagttcaactcaaggtgcagaacaagtcaggtcagggcagagagcctggtggggggtgtgggcagggggaggctcccggtgaccccacgggaaaccccgcagaggctctggggcaggagtcactgtgaggtgaggagagaaccatccggagtcgccatcca

SEQ ID NO: 258623 - DNA, 86 bp, Homo sapiens; identical to SEQ ID NO: 211992
  chr7:156937634-156937720
  hypo

SEQ ID NO: 258624 - DNA, 156 bp, Homo sapiens; identical to SEQ ID NO: 211993
  chr7:156974867-156975023
  hypo

SEQ ID NO: 258625 - DNA, 481 bp, Homo sapiens; identical to SEQ ID NO: 211994
  chr7:157052686-157053167
  hypo

SEQ ID NO: 258626 - DNA, 337 bp, Homo sapiens
  chr7:157057954-157058291
  hypo
atctgcacaggctgcgacagtgagcagactgagggcgatctgtgccttattgtcttcctgttggaagagaacacataaatcacgtatctcaaatgtgaggcaaatagctaatggtgtttgtgtatacgaggaaggtggagtcaccggttcttcgtggccatcagaggaccgacacgcccataggtctcatgcattaagtctgcgttgagcaatccctaacacggtttttgcctacagatacatttgcacaactgtgaaaaccaggtacgtattcattgcatcattttttgtaaaaagctgagagaagtgcccagcaacacgtcgtgccgcgcgtgtg

SEQ ID NO: 258627 - DNA, 179 bp, Homo sapiens
  chr7:157062218-157062397
  hypo
catcaggggtgggccgagcgtggctcccaggccggcggccggtgtgctcctatccgaccagccacgggtgttggcttcccgagtctcccattgggtctggcattagttcttgaaaaatttctggaggaagattctttgttctttgttttgtttgcccttttctacgttctgtcctactt

SEQ ID NO: 258628 - DNA, 222 bp, Homo sapiens
  chr7:157072934-157073156
  hypo
cccttccagaaagggggagccgcccgggaaggtgttccggcgtgctcagtccttcagtgacagcactgtgaccactccaggtgcctggcacaggcagaggtggtggccgccagagctgggggacgctcccagggtgtaaggccaaggccttggtcaggaggacgtgatgcttggtgtcactggggcgaagctccggaccccggagggaggagctgctccccc

SEQ ID NO: 258629 - DNA, 73 bp, Homo sapiens
  chr7:157073389-157073462
  hypo
gaggagccctgcccgtggacccgggatttgtggggggcacttctgccgggcggggggtcggtgtccaggtgct

SEQ ID NO: 258630 - DNA, 417 bp, Homo sapiens
  chr7:157074072-157074489
  hypo
gatggttcagaggtgcaggccggggttggctcacctgccagcggctccgggccccaacctccttggcagcctctgcctcacctgctcacgcggccctcgggcagcccaggctgtgggcaccaaggggtcctgccggcttctcaggcagcagagtcctccgggtcctgagtgtggtgtgccttgggaacatgcgggaggcagagaagaacaggaagggattgaaaccgctccctccacccactcctgcccgaggcaccagaggcagcctcaaaaaaagcaaaaggtccagccttctgtggatctcagggatgcaggaggggaggccagggtggggacaaaggcggggaccaaaaagccgtgtgggttctagaacattcctagctgggccttgatccgtggcaccgtcgaggggtgtgg

SEQ ID NO: 258631 - DNA, 318 bp, Homo sapiens
  chr7:157075019-157075337
  hypo
cggtgctgcctggacgcggcccacagggaggtggcctggccacacggaggctgtttgtgaaccgatgccaggcacaccctcccccaggcacgagtctcccctctggcctcatccctgccccaccccacactcagggaaccccctccctgtctttaaggctgatttcctcggtgcgttccccgggctgcgtgggccatggcggataacccgcctgaccccttccactcggctgtcggtacccacctgtcagccccacctgcgtgtccccctggaaggcagggcccgagtctcacccactctgcacgtcagggcctcacc

SEQ ID NO: 258632 - DNA, 925 bp, Homo sapiens
  chr7:157084099-157085024
  hypo
gggggtgaggccagtggagggcaggggaggaggagggcaatttcgctttggaaatccactccggggggccttggccggaagctggactgccgcggaggacactgcgcccctgctctgcagaggaggaatcccagccgggggacgggccgcccgaggtcacagaggggcctgccagcaggggtgtggcaggagggcggtggggaggaggccagggcagtgtctgaggctgcgtgtgggggccgtgtgttcacctgggcgccagggtgcagaggggggtcgcagggcagatgggggaggatgggggctccagccaggccttcagagaccgcgcgcctggaggagcgtttggcatcactcaacactaaagtgcaaacgtgggctccaagagcaagtcaagggtgttaccagctgggctctgggagcaaagacaaaggccagtggcctcccacccgccgtggcaggacaagcagagtgtggtctccacgcaagaggctggagcctgcagacccgggagggccccgggctggcgtcacatagcacagcaatgccagcagcagcgcagtctcaggctctccccgccccgatgattctccactcccaacataagggtcatgtggtctggagggacctttggcccagctacaggggaccaactcagggagacccctccttggctccgtgtgggtcaagaaggaaaggatggattcctcgtgtccatgtagaggcagagagcgcttccaaaaagacagatgagtgaccattgcctcggctgcctgggccctgaagggctcccctgtcctgctgactgttctgttctcaaggacctcggagaaatcgtgtcgcagtttaaggtcccttccttgctgccacccagacttctccttcccaaacctttagtgaacaacagcaccgggagagctcactg

SEQ ID NO: 258633 - DNA, 186 bp, Homo sapiens
  chr7:157085384-157085570
  hypo
ggcccgtgtgtccgcgtggagctggacatgcttctgtgggccaggcaccctgaccctgatcctctccagtgaagaggccgggggcaggcggaactgggtcaggctccaggacacagcctcaccctatcagggcagcgagggctggggcggacaggggagccgtagacagcccgtccctgggtgggc

SEQ ID NO: 258634 - DNA, 371 bp, Homo sapiens
  chr7:157085947-157086318
  hypo
agcctctgctcccacggtctcaggccctccccgccctgatgagtctccgctcccaacacaagggccacgtggtctggagggaccttttgcccagctgcaggggccatctcagggagaccccgccttggaggacttgttctccggatctccagacgtttaggctgaaagtgcagagatttagaagtcggacagggagttggggagcagcgctgtgcacgttccactcacctgaacggcatcgtctgagtcgcgtttgataaaattcgtaggaggccactggtctggcctgagctcctgcaggaggcctggcagaacagaccaaaacgcagccactcgtgctagagctccacgtcatcaagccaaaactaact

SEQ ID NO: 258635 - DNA, 172 bp, Homo sapiens
  chr7:157100021-157100193
  hypo
atgtactttctgaccgggcgcggcggctcatgcctgtaatcccagcactttgggaggccccgccactctaactaggtgaactctccctcgcccgaggctccaaccagcttccacctcctggtttgtccactccgcttcacggccacacctctgactgcgctttgagggctgc

SEQ ID NO: 258636 - DNA, 57 bp, Homo sapiens
  chr7:157102726-157102783
  hypo
gatggctctcagatcgtccagccattctggggaggccagccccgccatcccccaaag

SEQ ID NO: 258637 - DNA, 136 bp, Homo sapiens; identical to SEQ ID NO: 211998
  chr7:157106437-157106573
  hypo

SEQ ID NO: 258638 - DNA, 140 bp, Homo sapiens
  chr7:157110638-157110778
  hypo
ttacaggcatgagccaccgcacccagcccacttgattattttttcaaattttctgtaggtttgaaaaatgaaatcagaaacggggacagtgttttgtgttttgtgttaaagggacggtcagctggcgcatgggacctctg

SEQ ID NO: 258639 - DNA, 149 bp, Homo sapiens
  chr7:157122530-157122679
  hypo
cccggaggtggagacgcagcaccaggtgcttctgtctcgccctttctactccacatttcctcttggtctatttattctatatgtgaatacattcccatgccacgaggttcaaacaagaagtataaaggacagtgtgtgaaaattcctat

SEQ ID NO: 258640 - DNA, 75 bp, Homo sapiens
  chr7:157128228-157128303
  hypo
ggcttaaacgatcacgaattcataagcgttgttagttcagaaggtggctgagcaggcccccggaattcagtgtca

SEQ ID NO: 258641 - DNA, 42 bp, Homo sapiens
  chr7:157139858-157139900
  hypo
attttgttgtttctgtaatgcgtatttgtatttaatttatat

SEQ ID NO: 258642 - DNA, 175 bp, Homo sapiens
  chr7:157151170-157151345
  hypo
gacccatcccaccaccgtgatttgcccatccccagcagcctcatcactgaccacctgtttttacttgcaggacccattccaacaatctcgtaaaacatggtggattactatgaagttctaggcgtgcagagacatgcctcacccgaggatattaaaaaggcgtaagtagttttat

SEQ ID NO: 258643 - DNA, 670 bp, Homo sapiens
  chr7:157202475-157203145
  hypo
gctgtgcctgcaggtgtggccgacgacgatgccctcgctgaggagcgcatgcggagaggccagaacgccctgccagcccagcctgccggcctccgcccgccgaagccgccccggcctgcctcgctgctgagacacgcgcctcactgtctctctgaggaggagggcgagcaggaccgacctcgggcacccgggccctgggaccccctcgcgtccgcagcaggtgtgcaaagggaggcagccgtggagcaggcgcagagtgagacttctctgggtgccagaggacagcgaggacacaaaccgcgcctgggctgctgtgttctgacctgagcgggcgtgggcggtcgggcggggcgggaggaggtagcctcgctctgctcctctcccgctcgcggcgccccacgccacggtggctccgggccccccaccgttaaaacggggtccgcgtgtcctgtacgcagcgtgttgctccgcaaaggatgacagagctgccacggcagtgcgaggtgctgcttttaccgtagacgtgccttttcgtagctttcagcgtagagcttgaggcctgtggcttaggccgggtggtctcgtgctggtggggtctgcgtttgcccctgcccctccgtcagcttcaccttctcgtgccttcttctgcgctgggtgcagaacaaaagac

SEQ ID NO: 258644 - DNA, 134 bp, Homo sapiens
  chr7:157218579-157218713
  hypo
ggatgtgctccctgcgcagtggggctgcgttcagccctccagaggacgggctctgatgtgctgcccgtggacccgccctgtggacacggtgagacccgccctgtggacacggtgagacccgacagtcaggaaag

SEQ ID NO: 258645 - DNA, 253 bp, Homo sapiens
  chr7:157219101-157219354
  hypo
gggagcctggtgcccgtctggctgcccacggcccgcccctccatgctgctcccctgggcaggacctccgccgcctctgggttccttcacctctgggttctcctgaccgagaacgttgaggaccaggcagcggtcaaggttggcccgagaggaggcggtgggtggtggggacgaacctctctgtagggaaggggcccaggagctgtcttgagactcggcagccccctcccagctggtggcgagcagggacaggg

SEQ ID NO: 258646 - DNA, 90 bp, Homo sapiens
  chr7:157220412-157220502
  hypo
cacaccttcaaaaaactgagtcatcctttccctccagagaagctaccatgtgtggtgcagtttgctttggggacccgcctgggtggacct

SEQ ID NO: 258647 - DNA, 96 bp, Homo sapiens
  chr7:157233128-157233224
  hypo
gcagcgtcagctgcgcgcccgcctgtcctccactgcgggctctggaggtaatggaagggtctgccgccagtgctggcgaccgtcttccccagccag

SEQ ID NO: 258648 - DNA, 335 bp, Homo sapiens
  chr7:157255061-157255396
  hypo
catgacagtgggacacggggtctggggcgaggctggacgctgccatccagcacccagctcgtttcggcctgggctgccctcagcactgcgcagacccgcgagctcctcatttccccggaagatgaacgagaaggttcgcgcgagattctctgcaaagccctggcacaggccccgtccctgcagctgtttattgacgctgtggcggccgagacggcatgtttggaaatctgcttggcatggagactgcggtgccctgaccactgcagacaagaactcgtcttaacacctgcaggctaaaggaggaaagagtggggtgtctgcgttagaggttcaga

SEQ ID NO: 258649 - DNA, 521 bp, Homo sapiens
  chr7:157262478-157262999
  hypo
caaggggccggcggcgcctaattccaccttgtgtgccagtgcagttcatagcccagcagtcacccggggtggggtcaactctggaaggcccctgtgtgttgactccagggtgaacccgggactcctgagtgggcgcccaggcccctctagtgctggccgcctctgcttccctctccaggcccacctgccggccaccacagtggcccccagcgcccagcccaggtcccccacgccggcttctctcggcccaggtcactctcttcacactgtcatctgccagtcacttgcacactctgattcccaaggcgactctgctgcaggcacacgccctcagcaagacctggctgagtgccgtctgtgcccgtggatgcacgcgcagctctcctggggacactggccctggctccactccctggacagatctgtgcccggcactgggtctgctccctgcacagacccacacctggtgctggcgccactccccggacacacctgcccctggcgctggcctgggttgggtg

SEQ ID NO: 258650 - DNA, 671 bp, Homo sapiens
  chr7:157263029-157263700
  hypo
ggtgtgtccgtgtgtccggcactggcctgcgttgggtgtgtccgtgtgtccggcgctggcctgggttgggtgtgtccgtgtgtccggcgctggcctgggttgggtgtgtccatgtgtccggcgctggcctgggttgggtgtgtccgtgtgtccggcgctggcctgggttgggtgtgtccgtgtgtccggcgctggcctgggttgggtgtgtccgtgtgtccggcgctggcctgggttgggtgtgtccgtgtgtccggcgctggcctgggttgggtgtgtccgtgtgtccggtgttggcctgtgttgggtgtgtccggcgctggcctgcattgggtgtgtctgtgtgtccggcgctggcctgggttgggtgtgtccgtgtgcccggtgctggcctgcgttgggtgtgtctgtgtgtctggcgctccagcggggagtctgtggggggcatgttgctgaggtgctgggagctgggcctgacacttctgtgttttattgaatctcccaacatccaacatcccatttccatttaacagatgaggaaatgaaaacacagagaggagaaggcactcgcctgaggtaccctgccagacgctggggacgggctcacacgcagcggcccaaagcctgctgcctctcggagcagcgggggtctgggacggatattgaggcac

SEQ ID NO: 258651 - DNA, 50 bp, Homo sapiens
  chr7:157280684-157280734
  hypo
ccggggagagcacacgggagagccggggcggcacacgggagagcagatga

SEQ ID NO: 258652 - DNA, 164 bp, Homo sapiens
  chr7:157281182-157281346
  hypo
tgcactgggcacgccgaagcccctccggcggcggctctttgttccccgcgtcacctcactgcacgccccgtcaccagcgtcgtgctccagcagcggcgctcctccagccaaagagggaggcactgacgaaacccgtgcagtcaaattctcgcggcctgtggtgg

SEQ ID NO: 258653 - DNA, 319 bp, Homo sapiens
  chr7:157294092-157294411
  hypo
gggcagatgctctgcgtgcgggaggctgcgctttcagtcattatttggatttcgttttccacatgaaaatatttagagatccagctcttggaagccaaggagaaactggcttttaaggtaaaggaaggcaagtttgccgaggtgatgggaagacaccttgcaactgcgaaacctccaaatttaccggtagaacctggcacacagcttttgccgtcgtttggagaattactgcgtgcactgccgttcgctcagagccattgtgcacgtttgtttctctgatcactaacagcctgcacgtttccagcgtttccagtttcca

SEQ ID NO: 258654 - DNA, 154 bp, Homo sapiens
  chr7:157332354-157332508
  hypo
ccttccaggctctacgcagtgcgtgcaggtcgccctgatctcctctcccgggagggaaatgctcgcagccctctccgagttgccctgatctccttctctcccaggagggaaatgtcccctctctggggccccacaggtccgggacgtgcctgga

SEQ ID NO: 258655 - DNA, 268 bp, Homo sapiens
  chr7:157332825-157333093
  hypo
tccatggtacccggcgcagtgttgatggagacgcagcgaggagctgtgattgtctcacttgccccgaagctgcaggacgttcagttctgtccctgcggcttctcccaatgataaactctctcaaagagaaatgccaaacgtgccttgtgtgccgggcggcctcactgagtgctgccagcttccccggccactcctgcacagtggatccaccctcccgaaagtggcagatgacaagcacactcttcctggaaaccgcctcgaacgtgct

SEQ ID NO: 258656 - DNA, 237 bp, Homo sapiens; identical to SEQ ID NO: 212001
  chr7:157334627-157334864
  hypo

SEQ ID NO: 258657 - DNA, 215 bp, Homo sapiens
  chr7:157335452-157335667
  hypo
aggagaagctccaccgggcgtgtgggctggtgtgtgccgtgcaccttactcagagcccactgggccctgtgggcgtcggctggcaggaggagggggtgcttcccggaggggtgctgtgagcctcagagctggcgtttgaggggacaggggcttgtggatcatcttgtcctttatcgtgaagtgtcagctgcatgcggcgccgggatgtagcaccc

SEQ ID NO: 258658 - DNA, 350 bp, Homo sapiens; identical to SEQ ID NO: 212002
  chr7:157336680-157337030
  hypo

SEQ ID NO: 258659 - DNA, 489 bp, Homo sapiens
  chr7:157340247-157340736
  hypo
gtcacctcctctctcgacagcctcgcaacacatgccgaatgctgttgtgaacaagcagaaggaaagacagacatgtgcacagtcccagcttctccccgcgggacactgagtaaccacacagggaaaaatcatcacgcagccacgcagaagcctccagacacacacgcctcagtgggtgtagatgtgccgctccctcgtgagggacagtcctgccccctgccctgaccatgggggacgtgggacacgcctagacaagagacgttccacaaagagcaaggccgctggcgctctagaagacctcacagccgtgaagcgtcccggacagcagaggaaccatgatgcccctcgcgtggccgccctgggcgtgtcctgctccaggggaagctccctgggggggcgcgtagggcatcgctgggcctgttggtcagtggtttgcatcggtgctgacttcctgggtttggtcactgcgctgtggttatgtgaggtgtt

SEQ ID NO: 258660 - DNA, 547 bp, Homo sapiens
  chr7:157341258-157341805
  hypo
ggccccggagaggccgggcagcgctcagagagctcagaacatcctcctgagggttctgggatttatcgtcaacctctttctacaaaaatgcagcgttctccccccacccccaaatctagtgaatggaaagagccagtggatcgagttcctaggacttgagatgtggctgcatctggaggtgttgcaggaaacgccagtggacctttgggggcccagaagtgaccccgcccatgcaaggccggcatggacgaggccggtcagagcagagcaatcggtgtgcggctcacattaaaccaggccctccccgtgctcctctcaggaacacggccgcagagaggcaccttgaatgggtctgcgtcccggaggagagactgacagtaccttcgtctggaccatgccgggtctctggtccctcaagtgctccagggtcgctgcgatatcaatctctttagcacctgcaacaaaccacaaattgggctgagttcagagcacaagataatccatgccacatctgtcaatctcctgctagccacgttccctctgggct

SEQ ID NO: 258661 - DNA, 520 bp, Homo sapiens
  chr7:157344958-157345478
  hypo
actaaatagcttcccgataaaaataattctatgtatttttacatatttctatgtacagggaaacctgccctctcatttagaagggaagtcatcgtgcaaagcggctggccgtgtgaataatagctcagaaacggggaaatgtacaggctccatctaacactgggtctcgtaactcctcacacaccccaactgctgacctcagcgagatgctgacctggaccacgtggggaggggatgggccgaggtgcaggatgagggaggctccatgtgctggggcctcacacccacgtttagagcacgctatttgtctttggccatacgctgctgggtttggaaaccgggttctaatacacaaaatgtattacaaccagtcttgtgtaattaaaaacgtaagatgtctattggcttttaagaaattttcccaaaaccaaaaaaggtgagttaaaggcaggagtgctggggttgccgacagacgtcgagttgtgtcacatgacgtggggaagctcgggctacagtgctg

SEQ ID NO: 258662 - DNA, 161 bp, Homo sapiens; identical to SEQ ID NO: 212005
  chr7:157346267-157346428
  hypo

SEQ ID NO: 258663 - DNA, 572 bp, Homo sapiens
  chr7:157347302-157347874
  hypo
caaggtgaaggagcagctaacgaaagttaaattccagggaaacagaaaggcccagtggtgtgacgctgacatcgaaaagcctgcaaacagtcgaggagtcagcgcacacacaaagaaaatccagatggaaggaaagaaaggaaccttaacgatgtctaccggggacagagcgtggggtccacggagaagtcccaggcgttttccacctaagaagcatcatggtgattcaaacaccagggaaatgaatggactcagtggagccactttctgctacttgaccaggtttaattcgagttgtccatgtcgggaatctacagggaagtgacgcaggctgccatcttgctcagcaccccagtgtggcgggcgccccagtgtggcgggcgtcccagtgtggtgagcaccggccaagtcagtttgggttgggctgcaccctcgtgcctgggacacccaggaagacccacctctctcgtgttagtggaccagggaggcagccacagacaccaggctctgcgtgctccgctggcacccgaatggccactgggtaccatcccgtgccaagctcagcaaatgta

SEQ ID NO: 258664 - DNA, 109 bp, Homo sapiens
  chr7:157364282-157364391
  hypo
aatcattttgcaatcgcttgttttgacggagaaaataaaaatcatacgcataatatcaaacatttattcttcttctcaacatgacgttattaatcggagctttaaaacc

SEQ ID NO: 258665 - DNA, 174 bp, Homo sapiens
  chr7:157367335-157367509
  hypo
cggtgcctggcgaacgcgccaggccagagtgagaacgcgtcgtctattgttcaaagataagaaacgctgcagcatgaagatggccggtgtcttcagaaggggtctcacctttcctgtcgctgaaatcggggtggctattttatacagaaaaccagccaccggcaatgcttgtct

SEQ ID NO: 258666 - DNA, 627 bp, Homo sapiens
  chr7:157370299-157370926
  hypo
ggttttcttaaaaacggaccccacttaaaggcttgttatatgggaccgggaccacgctgtgaggcgaatgttttttctactctgttatcatttggatttagaaaaatctaaaagataaaaaccacaccacactcccagggtctggttcatgagcacacagccgtgtgaaccatccacacgggcatgcggccctcgggggtgactcagcctccgtcccctgaacatggggtgcgctgagcctccctgcatgcggccctcgggggtggctcagcctccatcccctgaacatggggtgcgctgagcctccctgcatgcggccctggggggccctaacgaatcccattcggaggaggagcagggcccgtcctcgtccggctggtgggtcctgccctgggtggctctggtcggagtacctcatagatgtggtagagattggagccttcatccggccagtagtggtagcactgccggacgccgttctccgcgaggggtgtcagcatgacgatcaccacgcagccgctctcccacaccatctgcggacaaagaaggcccgtggccgcggtgtgactgtctcatcaccgcgtgacatgtgtaattactgcactcggaagcacagtccaaatttat

SEQ ID NO: 258667 - DNA, 99 bp, Homo sapiens
  chr7:157372247-157372346
  hypo
aatcatccggcactcggctccgtgccacccaagtgtgacattacagagccccgtcgactggggggacccggacggcctggaagccgcactcattggctc

SEQ ID NO: 258668 - DNA, 134 bp, Homo sapiens
  chr7:157372651-157372785
  hypo
agccttcaacagcgcgcctgaccagataacctcagaatacatcgcaaaaagttaatttggattttggtatgaatgcagaatcagtaaaaatcccagtcgagtaaggttcaatttctaatcggggagaagtttca

SEQ ID NO: 258669 - DNA, 155 bp, Homo sapiens
  chr7:157386352-157386507
  hypo
cattctaagggcagcgctgggacggatgggtccatgtttcaggaaggcaggtgtgtgccatgcaaagaccttcctaccacgaaactcctgagacgatgggccccagggtgccatcttctctgggaaaggcatgttctcaccgggctgggcgactc

SEQ ID NO: 258670 - DNA, 239 bp, Homo sapiens; identical to SEQ ID NO: 212009
  chr7:157387164-157387403
  hypo

SEQ ID NO: 258671 - DNA, 332 bp, Homo sapiens
  chr7:157396444-157396776
  hypo
gctggatgttctacaagtcacggaacccaccgcccagcgtgagccgggacccacacggctcataaacagccccgctggtgaaggaacaggggagtggcgggagcccaatgggcagagtcggccctgtccaccgcagagacgctgagctgggtggggacgtgatttcccccgagaaccttcccacgtgatttgccgcgtccgtgccacccaagggaaagcctggggcccctgtcccggcagtgcacttacgatggggctagcgttgatgtagtctgagtggctgtggctgttctccgccttcagcaggacccgggagtggtcatctgcaagga

SEQ ID NO: 258672 - DNA, 496 bp, Homo sapiens
  chr7:157402241-157402737
  hypo
tcataaggatggaacgattcacgtggccacggcctcgtggtccacaggggagcacagggtttgactcccagccccactgcttgccagcgggcgatcctgggtaaactgttcagtgttcggagaatgcaggatgataacatacaactcacagcactgttgtggtaaatggcacgcagcaagcaatgaggagcaaggctgagatgacggtggacacgcacccaactgcgcaggtcagccaagctggcaaagcgtgttcttgctgccccgtggtggcagaacatatggagcgatttttcatagatgccaacagaagagacacatcccacaatttcttgttgattattactatggcaaagagccttgggagatggcccagctaagcatgctagaggacgcggcggtatagtcattaatcatgatctagaacctcccgtgcccaccccactgcatctgaggaaagcgtgtggaagactcctctgcccggaacatcgtcttg

SEQ ID NO: 258673 - DNA, 287 bp, Homo sapiens
  chr7:157403100-157403387
  hypo
ggagaggtggagccggtgtcttgctcctagagggagtcctgactccagcagagaacatgttccgggatgtgctccacagttggcaccagcacccacaagctcctgctccgagtttatggtgtccatcgaggtctgagggctgcaaaggcacatcccggggctgctggccgtcagcaagggccgtcagtgctgcttagggatcccagcggctcacacacagaaaggcctttgaacttgtcatagttgaggcaaaggaataaatgatcggaccacgtttgtttcaatac

SEQ ID NO: 258674 - DNA, 31 bp, Homo sapiens
  chr7:157403793-157403824
  hypo
gcttccacactggacgcgtcaaaagcaggtc

SEQ ID NO: 258675 - DNA, 415 bp, Homo sapiens
  chr7:157404196-157404611
  hypo
ccagggttgagctgcgtaccctcccccaaaaagacacactggagtcccagccctgggaacatgaccttatttggaaatagggtctttacagaggtaagcgagcggagggcatttgggcggccctaatgcaatatgactggcgtgctgttaggaagaaggactctgcacacccacacgggagggagagcgcccgtgtgaagacgaagacagccgcggtcatgctggggacacgcggagggagcgcgcccgtgtgaagacgaagacagccgcagtcatgctggggacacgcggagggagagcgcccgtgtgaagacgaagacagccgcagtcatgctggggacacgcggagggagagcgcccgtgtgaagacgaagacagccgcagtcatgctggggacacgcggagggagagcgcc

SEQ ID NO: 258676 - DNA, 1107 bp, Homo sapiens
  chr7:157407768-157408875
  hypo
tacttacttgaagtcgtccagccagaaaataaatgaagtgctcgcaggtcacgctaatacggccaacactgggcggctggccagcgtgggtggtgggtgtgcaggcgatgccacgctaccccttccacttgagtgtttaaaactcttgtaataaaaagtgggggaggaagtcatgctaagccagccacacttctgctccagagagggccctgcaagagcggtgtgcgtgggttgcggctgggtctgcgctggggtagtgtaggctgcactctccggggagccgctgaccttgggctccctaacctccttcagccccagctctgtccctgtgtgaatctcagggctgtttcgaggatgaaaaggaggtgtttagccccgagcctcacgtggaaacatctgatgagcctttgccaatatgctcgggacctggggacggctggggtgaccccatcgcaaggccgggccgtggaaacaatctcagccctggaaccagcgcctgggaagtcccgcggtggatccgcgtcacgggggaggattggctcagcactggtcctgcggaatgtgtttttatcaatgacttgacgacgtgaaaaacatgtttataaaacgagcagatggtgccgagctgagagggaggtgacgcagtgactcaggaaccacaagctctggaggctgaacgagaatcggttacaggagatgaacacaaggctcgattctcctgttaaacttgactgtcaccaacggggggtggggggtgcgcgaggccctgggctccaccgaagaccttaaggaaaagactctggatgttagtgggttcggcctcagaatcagccggcgctgagatgtgcacctggcaggatgaacgtaacttctggtggataaagtgggaggcctgatccaggaagaagcacaccgtggcctggggcccctctggagggtaggtcttccaagtcacgggaaacagggcgcccaggagacggtgagcccggctgctgccaccccgaaggccaggctcgccccacactgtgagaccctccccacacgaagattctgtaagcggaatcggaaggaggatgtgagaaggacgggtagccatgccacaccagg

SEQ ID NO: 258677 - DNA, 339 bp, Homo sapiens
  chr7:157410943-157411282
  hypo
gacctgggagttcccggtgagcacgcggaaaggacgcggtgggagcggcaggtgcagagggaggacttgaaggttccatccctaacagaggacagcgtggccgagtactcatgcttccaaccctgcacagaggatagtgcatgcccagcatgcagactcgcttccatcgcgacacagaggacagcatggagcccagctcgagtgccgtccccccaccatgacagcgcagcatgggccttccaagccacagagccacagggaagccagtcctcctggaccgtgtgtggctgttttggagccagttgtgtcctgtgaagagcgcagcggccgcaggtgagg

SEQ ID NO: 258678 - DNA, 249 bp, Homo sapiens
  chr7:157413023-157413272
  hypo
gtgggaacacgaggcggtgtctcttccagtccacgagagtcactcggagaactgctggcttatatttccattttctggcagtgatccctagctaggtagtaggtgctcagtttgtggaaataattgtaaagttaaagatgctgtaaaagcaaccactgttgattgtgtgcctgcgacgtaccggtgctatgctaatgacctcgtctaacccttacagcagtaatacttcaaggacgacagcgtgacccc

SEQ ID NO: 258679 - DNA, 193 bp, Homo sapiens; identical to SEQ ID NO: 212015
  chr7:157414207-157414400
  hypo

SEQ ID NO: 258680 - DNA, 42 bp, Homo sapiens
  chr7:157434605-157434647
  hypo
tcatcttctgctccttccaccgtgaactccaattctgtgaac

SEQ ID NO: 258681 - DNA, 488 bp, Homo sapiens
  chr7:157436258-157436746
  hypo
gcacacccacggcccgggcatcccagggaaatccagaaccagtggctgtgactgctcccccgacggagcccctgttccttgcacagccgctgctgcctccagcctctgtctgcgcccttcccaaggaccccctgcagacacccgcacccacagtaaaggaggtgggagcaggcggccaggctccagccaggaagtgtgagctgagctctagaaagtggtggtgtctaaagtggctcaccagcctctccgtcaggcctcgaaggttcgtcaccaactcgtgcagcagatagacggcagtccgggctgtggcaggtgacagcccagggcccagacaccggccagcctcatagtgctcgccgcacgctcagctcaccagtgcggggagactggagcttcccccgtgggactgtggctggaagaccaggggcctctcatgcgctacaagctaccagaaaacactggtgtgcatcaggcgtcggtccctgtta

SEQ ID NO: 258682 - DNA, 352 bp, Homo sapiens
  chr7:157445766-157446118
  hypo
tcacagaaagtctccgctcttggtgctgagcctgccccccagacggtgcagccggcctctcccacctgctggggctcctcacatctagcttggcctccagacatcaccaacctctgctgtttatttcatcggatcgtggggttcagatgccacgttttgtccaacgtgccccaggagtggctgcatgtcaggaacatgtcgctgggaatctctgtggcttatctgaccatcctgccatcctcaggtgaggggcactgaggtggccggttgggtgtctggcggaaacgaggctttgcgcacagagggctgggctgctggatcaccacggaattggctgccttgtagctgtgat

SEQ ID NO: 258683 - DNA, 83 bp, Homo sapiens
  chr7:157446148-157446231
  hypo
cctgcggcaccaacctgcatgtgctttctacagcctgtgtgtgccagggagggtggcggtcagtgccccgagattggctgtag

SEQ ID NO: 258684 - DNA, 288 bp, Homo sapiens
  chr7:157446436-157446724
  hypo
gggtccaaggcccacgtctggcccacttggttgctggactccacacgatgcccgctgctccccacacccaccccaactgcacacgacgcccgccactccccacacccaccccgactccacacgatgcccgctgatccccacacccaccccaactccacatgacgcccgtctctccccacacccaccccaactgcacacgatgcccgctgctccccacacccaccccgactccacaccatgcccgccgctccccacacccaccccgactccacacgacgcccgcctctc

SEQ ID NO: 258685 - DNA, 54 bp, Homo sapiens
  chr7:157447781-157447835
  hypo
gggtgtgaacacctcgggtttgatttctggcgggtggtccggcttcgtgggctc

SEQ ID NO: 258686 - DNA, 255 bp, Homo sapiens
  chr7:157448325-157448580
  hypo
ctccgtctccagtgcgggaaacagcacagccaggcacggtcacccaccaggacgacgcctacggcctggagatccaggaggcagccagcaggacgtgctgcgctattgacagctgtcctaataacacccggacattcattatgtatggagtggcaatgcacggccacacacgcgtgatcactccagcgaggaccctggaaaaggccgctgaagccgcgtcgccgtgagcctctggccggcgccaccaggaaggct

SEQ ID NO: 258687 - DNA, 525 bp, Homo sapiens
  chr7:157448930-157449455
  hypo
gtgcagccatcatcgcccagtccccgagggtcagcgggcgcagatgctgggtgttgcaggggccgaggaaggagggccctggtgtttgtgtggcagggagtgcaaagactgggcttaccaggatcatgtggccggtggagatgtccatgttggactgcacaggctcctcggaccaggatgaggcgctgctgcgtgcggaggggctggggatcggcccgtcgctgaactgggatgagacgctgctgatgcgtgacgtgtgcgggccctcaggtcggtctggtggccgcgtggccatacgctggcggcacagctcctgcaggacagggggaggaagagcagggggttagtggcattggggacacccagcaggacgagggccacggcacccacgtggcacaaccccttctcctgctaagatccaaggttcaggcaggcgagagtttaccccagggcaggccagcgcaacatgacggtcaacgcaccccaaagcacgcgcccagcacggtgacccgagaagacttcagg

SEQ ID NO: 258688 - DNA, 44 bp, Homo sapiens
  chr7:157453761-157453805
  hypo
gagctggacaagccgacatcgcctcctccggcgggtggctcagt

SEQ ID NO: 258689 - DNA, 222 bp, Homo sapiens
  chr7:157464610-157464832
  hypo
tttctaaaagtctacgctgtaccccaagaaggggacgggtggggcagcagccctggaggaaaacccgtgagcgagtcgtggagggagtgtgagggtttttggggagtgaactttgcagagggtgctgggagcagccggcccgaggacaccgctgactggggtacaggggccacgggtcgcacgtggggtgtcagctctgccgcctcacttggggttgatttg

SEQ ID NO: 258690 - DNA, 452 bp, Homo sapiens
  chr7:157467102-157467554
  hypo
cctcctcggtttgacgtgcaattgcttttcccgaagctttctcctcttgtaacacccagctcctgcatgccgtggcggctccagccatcattcctcatcccaccaccccgcgcagcgtcttgcctccttttatgccggtgtacgtgttgtgttaagagctgggctttgccatttttgacaggctaatgcatttcaccacagataatgccattcaccacagaggcgcattctctctcgtgcccatcaaggcagaggctgagaagaaggtctgctttacagcaacggcctgaggaccctcggccccaaggtgaggccccgcgcaggtacctctgtacacgcctgtggagtcccaccctgtcgtgtgcacgaggctgtcacctggagattccggccctgccgggcgtctcctcccacgccgagctcctcctgccgggggggtctgcacagttctg

SEQ ID NO: 258691 - DNA, 193 bp, Homo sapiens
  chr7:157502240-157502433
  hypo
tgagaaattccctgcgagccccccagctctgtcttctatggggacttcgacctcgctccacgttgtgcagccacatggcccacaggaatgggcggtcctgctacatgggaaggagcttagggtttaacacgcctgctccaggagctgcgccacacacccgccttcagattcagcccggcgtgcctgggcttct

SEQ ID NO: 258692 - DNA, 273 bp, Homo sapiens
  chr7:157507358-157507631
  hypo
agtcagggatccctggggaacgatgcccagtccgacgtgcttctcctgagccgattttgggtttcccgttttctaaagccagctccccagggaacggcgcccagtccgacatgcttctgaaaggattctaggtctcccgctttctgaagccaactccctggggaacggcactgagcttgaggcgcttctcctgagcagattctaggtctcccgctttctgaggccatttccccagggaatggctccaagcccgatcacttctcctgaatgtat

SEQ ID NO: 258693 - DNA, 325 bp, Homo sapiens; identical to SEQ ID NO: 212022
  chr7:157510158-157510483
  hypo

SEQ ID NO: 258694 - DNA, 203 bp, Homo sapiens
  chr7:157511428-157511631
  hypo
tgcagccactctccatggccccggggtgagtctcagcacgtccaggcgtccgcggtgacactgcagccactcttggtttctcagctgccgcaatcggtccttccagtgtccgacctctggggccctcagacccccaaacccaccttgtcgctgtggcctctccgcctcctgcaggtggcagcgctactgtagcctgccatgcc

SEQ ID NO: 258695 - DNA, 436 bp, Homo sapiens; identical to SEQ ID NO: 212024
  chr7:157513000-157513436
  hypo

SEQ ID NO: 258696 - DNA, 64 bp, Homo sapiens
  chr7:157527707-157527771
  hypo
tgatgccaactgcagcaggacggttagtggtgccgctggcaccgagagcacctggcctggtgga

SEQ ID NO: 258697 - DNA, 333 bp, Homo sapiens
  chr7:157528457-157528790
  hypo
ggggagcaggtgggcgcctttggtccccgtcctcctggcaggcagtggctgagtaccttctcgggaaaggaggcccccgtgaggctgggtgggctctgaattcccggtgtgttgatagcgatcggcacatgcctcaagccacctggaagagaagctgccccaagattctccaggccctttctgagctgaaggtgacgtgacagacaggcttcaaagaagggtcagagacggccggtgggtgggccccgttcccaaacacccaccttggatctcatgccctggagcagagcatgtgtcctggtcctgcctgggcgaggccggcacccgctgccc

SEQ ID NO: 258698 - DNA, 572 bp, Homo sapiens
  chr7:157544023-157544595
  hypo
gaaaaaaatccatgcggcgaacgccctggctgtggcagcgggtttatttttgaatgaaggcaccatgcatttaaattaaatgtcagatgtaatttagcacccaggcatcaagaggctgagcgtgtgcagggaaagccggcagctcgcaggagtggctgagtgcctgctctccagcgcccacggagtgcgctcgctcgggaggtgtctctgtcctcggcgtgggagggtctttgagaaggtgaagcttggctgttgctaagacacacgagatcattgtttggaaggcgttttcccttctctctccctcaaatgactgtttaattgaggttactctgcaccgctgacacgcggtggaaagcccgacatcacttggagaacttaatcaaggctgatggagccgcgcgcacagaatcccaactgcccgcaccctttgtttcatgttcaccaagaccgaggggaccattcctacgggatgaggaaacacatctaacacaggccttctaaagagagaggagggagggagggagggatggaaagggggaaggacagagaccaccgtgaacacatctccg

SEQ ID NO: 258699 - DNA, 342 bp, Homo sapiens; identical to SEQ ID NO: 212026
  chr7:157549923-157550265
  hypo

SEQ ID NO: 258700 - DNA, 439 bp, Homo sapiens
  chr7:157550872-157551311
  hypo
aaaagggccggtgtcgtaattgactggacaggtactaatgccgaccacatccaaatatggatgatgacgagcgtggtgttgcccacagtccaggcctgtccaggcgccattccccgtggcctgcacgctcctgggtcatgctccgctcaggcggctccttcagtgaagttgcacagcagtcagggtaacctccatgtccccaaagggcaagaccggctcagaggcgaggtaggtggcacgaggccacacagctggtcagctcagccgggctgggacgcgggccccagaccgtggcccccgtgcagctctgggtccagctggccaaggtggactttgcacaaggtttgggaggctaaagggagccgaggcaggtggcagctgctgtgctgggaaggctgcgtgcgcggggcatcctctcttggcccgggtgggcggacgc

SEQ ID NO: 258701 - DNA, 171 bp, Homo sapiens
  chr7:157565439-157565610
  hypo
aacatctttttgaacaaacacgtaaacacattgagtctttggtcgcttttgcatcttctttcttctctggcctctgcgccccagctcctttgtgcgaggtcccatgtgctgctaggccacgggtggctgtccagggtgtggcttggagccgtggagctggaggcctgggtg

SEQ ID NO: 258702 - DNA, 155 bp, Homo sapiens; identical to SEQ ID NO: 212027
  chr7:157567209-157567364
  hypo

SEQ ID NO: 258703 - DNA, 124 bp, Homo sapiens
  chr7:157568244-157568368
  hypo
tggggacacagcagcgctgggaaggcttcgtcctcgggagccggcgctcacatgcagggagtcgcccaggacagcaagcctgggtgtggggctgaggcgggcgcagcctcggggcagtccccac

SEQ ID NO: 258704 - DNA, 138 bp, Homo sapiens
  chr7:157570973-157571111
  hypo
gtgtcgaatgcccacgtaaacatgtacatgtgaatacaggcatcaaatgcccacgtacatgtgattacagttgttgaatgcccacgtaaacatgtccacgtgaatacaggtgttgaatgcccacgtacatgtgaatac

SEQ ID NO: 258705 - DNA, 110 bp, Homo sapiens
  chr7:157571413-157571523
  hypo
ctgaatacaggtgccgaatgcccacgtaaacatgtccacgtgaatacgggtgccgaatgcccacataaacatgtccacgtgaatacaggtgccgccgaatgcccacataa

SEQ ID NO: 258706 - DNA, 297 bp, Homo sapiens
  chr7:157583901-157584198
  hypo
agaagaatgagatacgtccatttgctgtgataagaaaagatattccacagtttcgtatttgttaagtattttcagcaaatcatggaacacgatgcaacacccgattccatgtttgaaaacagaacagaacaaaattcaacaagaaataagcgcccgcgtccacatattctcgtgcctggcgtgttttacgtgcttgggaagcggagcggccgctgggcttggctctgaggtcgggactggtgcaggcggatgcatgtatgtgcccgggtcccgcctccacacgcctgcctggcgcca

SEQ ID NO: 258707 - DNA, 304 bp, Homo sapiens
  chr7:157588648-157588952
  hypo
aggggggcaggcgccgaggcgaacttgggagaggccctatggtgcacacccctacccttcctggctggagaaaaatggcccgccccgtgaaacagcaaataaacacacgcgttccaggacgtgagatacggcctccacatcaatcagagggacctgcccagtcctgtcaattttccatctaaattacataactgtcctccttagagacgcggggatgcccaggcacaggcatgaaagatcggccttgaggttattttgtctctgcaagtattgatgcgaggacttgtggcgcttttctttcccg

SEQ ID NO: 258708 - DNA, 291 bp, Homo sapiens; identical to SEQ ID NO: 212029
  chr7:157589660-157589951
  hypo

SEQ ID NO: 258709 - DNA, 180 bp, Homo sapiens
  chr7:157602212-157602392
  hypo
agcacagtgaatgccgccttctggacatagggtctctgtggatggagttagtaaagatgaggcccttatccagtacggccggcatccttctaagaagagacagcacagacacgccccgaggacggagacggaacggagtgaggcgtctacctgccaaggagcccccggcattgccaggag

SEQ ID NO: 258710 - DNA, 498 bp, Homo sapiens
  chr7:157602964-157603462
  hypo
tgatcccaaagcagcgatctagacgtgtggggtccacaggcgggcgccctggcactgggggctctgcaacttgacgaggctatgccaggctgggctagaggtgccgtgctgggcacaggctctccacgggatggcgggactgctgggcacaggctctccacggggacggcggggctgctgggcacaggctctccacggggacagcggggctgctgggcacagggtctccatggggacggcgggactgctgggagctgggttctccacggggacggggacggcgggactgctgggggctgggctctccatggggacagggacggggacggcgggactgctgggggctgggctctccatggggacggggacgggaacggcgggactgctgggggctgggctcttcacggggacggcgggacttctgggggctggctctccacggggacggcgggactgctggaggctggctctccacggggacggcgggactgctgggca

SEQ ID NO: 258711 - DNA, 44 bp, Homo sapiens
  chr7:157605781-157605825
  hypo
gcaaagacctgtgccgtgctaaaaccacacgcatggcagcctcc

SEQ ID NO: 258712 - DNA, 748 bp, Homo sapiens
  chr7:157606033-157606781
  hypo
aagaccaaggacagcggggaacggtggggagggaagagggtgggagaccagagtcagaggcggacaggggttcgatacgccattcaggtccccaaaacagcatgtgcagctctcgttaaatggaaaaggccctaatgtcatgggaaagtctaacaatttgttaaactttgttagtgtacaaaatgtggtgatcctactcgtataaaaaagaaagttcaaatgcgcagaagaaagatcagaggacaagatgcccacgaatgataagcgcctttgctgcctctgggcgggtccgggggagtcgcatttcttcctcactgcatcgctgtattttccagatgtccactgaggaatgagcattgctttttaattagcagctgccccgagtgctccagctgccctgcgtgtggctgtctacacagcacgcattccttaccccggtggttttcatctggaccctgagtcagaatggcctggagcgcgggtaaaacagctcggggccagccagagcttctgagccagggctgggcccaagaacgtgcatttgcgttgttccccaggtgatgctgctggtgaccccggggaccccgccgtgagagccccgacacaagtcgcggtttgtggtgctttggaggagtttgctccttagagtgagggggattgttctgccccaatggcctcttcagagctgcgagactgtgcccacgcgaggcagtggtcgccacacccacactgccgtgctgcgcaggtg

SEQ ID NO: 258713 - DNA, 329 bp, Homo sapiens
  chr7:157607748-157608077
  hypo
agtctttattctgggagcagcgcgggaggcagtggagacgtggaagcaggctccggctgctgggcctgcatgaccggtttccctgcagaagattctgcgcccttcagcctcaccgtcctcacctggcctgggtgctgctgtgggcaggcgctgggcacgctgggaagagcagggccagccgtttgcaggacgggaggctgaggctgtgtgcacctcctgagggctgggccacaggtgggctcaggcctgcgccctcccatggccgtggcctcttcctcggtcctttgccctccagggtgccaggcctaggcctccgcgcatcagtgtgg

SEQ ID NO: 258714 - DNA, 123 bp, Homo sapiens
  chr7:157620461-157620584
  hypo
ggcccctgagctgccggccccgccctcgccggctgtgatgctttgactcagggacggccaccgtgtcacgggctgttcccagagtctcagtgccttcctcgggctgcacgttctgattttgtt

SEQ ID NO: 258715 - DNA, 366 bp, Homo sapiens; identical to SEQ ID NO: 212033
  chr7:157621929-157622295
  hypo

SEQ ID NO: 258716 - DNA, 496 bp, Homo sapiens
  chr7:157625834-157626330
  hypo
tatgatcgtaaactcgttcaggaagtatgcgacgtggccagcgcccatccatcctgtatgatggtgaacttatccaggagcgagatgtggccggtgcccatctatcccatatgattgtaaactcgtccaggaagtgtgtgatgtggccggtgcccatccatcctgtatgacggtgaactcgtccaggagcgagatgtggctggtgcccatccatcccatatgatggtaaactcgtccaggaagtgtgtgacgtggggggcgcccatccatcctgtatgatggtgaacttgtccaggagcgagatgtggccggtgcccatccatcccatatgatggtaaactcgtccaggaagtatgcgacgtggccggcgcccatccatcctgtatgacggtgaatttgtccaggagcgagatgtggccggtgcccatctatcccatatgattgtaaactcgttcaggaagtgtgtgacgtggccggagcccatccatcctgtatg

SEQ ID NO: 258717 - DNA, 153 bp, Homo sapiens
  chr7:157630455-157630608
  hypo
cccttccttgttgccgccacacgtctgttgcacctgttagacacggagccttggactcaggggtgggtcccgtggatctcacagccctgctgcccagcataggacacacaagtgactcagtggagtccgacacttgctgagtggatggcaagg

SEQ ID NO: 258718 - DNA, 165 bp, Homo sapiens
  chr7:157638211-157638376
  hypo
tcccggccacatcccggtgaaccatgcagcctaactcaccacgttcccggccacacagggccaagaacagcccaggcaatgttaaggagcattgcatggaggagccacttgcagatgcggtaacccactgtgcggcacagaacctccccgcggggcaggtgggtg

SEQ ID NO: 258719 - DNA, 512 bp, Homo sapiens
  chr7:157641413-157641925
  hypo
gtggggcccctgtccgcaggctgccacctctggcaggtcgtccacaggaacgcttgtcctgaatggtggcccgcaccctgcagtgagcccacggctatagtggtgcagccagcagccccgacgcctctgcagtcccagacccagggaagccccgtgtgcaccacggtgtgccctggaccactcacttggccgctgccaccctgggaggatcacaggggctgccttctggacatatgtcaggctctcactgccccagtgagaggactggctctggtcctgatccacaagctctgaaccaatagcgggtcttgggatgacgtctgcggagcccctcggtcccagcgtggctggcgtccaggaccccagcacctctacacccaggtccttctcagttcccaccggccgggctgacgctggtctccagggtgatggagctgattcttcgggtttccctcagctcagatcaaatttaacacagcaagaggacacccactgttcccaccgaagaggca

SEQ ID NO: 258720 - DNA, 244 bp, Homo sapiens; identical to SEQ ID NO: 212035
  chr7:157642943-157643187
  hypo

SEQ ID NO: 258721 - DNA, 84 bp, Homo sapiens
  chr7:157643707-157643791
  hypo
cgaacaaaaggcggcgagggaggtaccgtgcagagcctgctgggccttctgtcccatggccccgcacaccggactcacccagcc

SEQ ID NO: 258722 - DNA, 459 bp, Homo sapiens
  chr7:157645533-157645992
  hypo
tcggcaacacagcaagtctctcaaaaaaaaaaaaaaaaaaaatactagcacagtggaccctgaagcgccagcagcaaaccctctgagatgtgcgtccggagtggccatgccaccagctttttctgcccactgttttggaaaagtgttgattttggaatgtggtttcccatcactgtgtggaccatgggtgaatggggagggtggatggtctctggggccgtcctctctccgcctccagatcagcaggcagtggatgggtatttgggtctttcttgtactcacacggatgcgatgtgtgattcctggtaggaaacaagaagcagctcactggcaacaccacactgccccttgcattccgaggagtcatgtagtcatgaggggcatgagcaagatggagacccagaggctcacgctcacatgatgacggccgagccgggcctgcaacggaaaggcctgtgg

SEQ ID NO: 258723 - DNA, 94 bp, Homo sapiens; identical to SEQ ID NO: 212037
  chr7:157646590-157646684
  hypo

SEQ ID NO: 258724 - DNA, 258 bp, Homo sapiens
  chr7:157653861-157654119
  hypo
ggaggcaccctgtgcgtgctccatggtgacactgccccacggggtccaaatgctgaattcctgtaccttttacatacgtgaagtctatacaataatggaaccgaagccctctgtggggaatccgtgggaggatgagaggcctggattgcaccggaagcacctccggctggagctcggccaaggagcccgggtcccttcagtctgcgctccctgcggtgggcagtggcttctgtgttttgccgtcgaggtgcaacatgc

SEQ ID NO: 258725 - DNA, 374 bp, Homo sapiens
  chr7:157656414-157656788
  hypo
acaagctcttatggcgaccctgacccagcaggaccggtatccttatcagaaagggatatctggacacagagacagacgtgcacgtgtggagacacctgaagatgaagatggcatctaccaggcgggggagtggcctcaggagaaacgggctctgcccacgcctcgacctcggacttccagcctccagagccgtgtgaaaagaaacttccatcatttaagctgccctgtctgtgggactttgcctcggcagcctgagcagacagtacaggctccaaaaacgctctctgcatgtgtgattctggccaggaccaccctgcccgaagccacggctatgtcgaagctaattgtgcgatttctgccggccacgtggtttt

SEQ ID NO: 258726 - DNA, 143 bp, Homo sapiens
  chr7:157657815-157657958
  hypo
ctgggtctggcccacgcaggctccttcccaagtgctgctgccgggaaatggaggtccctaggtgagacgggagccgggcactgtgggggtggcccctgaggggctgcaggttggcactgcccagctgacgcattccgcagtcc

SEQ ID NO: 258727 - DNA, 58 bp, Homo sapiens
  chr7:157658189-157658247
  hypo
ccgtggggccacgacggaccctgcaaagctggtctgactgtgccgagcctgtcggggg

SEQ ID NO: 258728 - DNA, 115 bp, Homo sapiens
  chr7:157658676-157658791
  hypo
tccttccccgctgccgcgcaacctctgacagccacgtgtactctcctgctttagaacaaggacctttcccttttgtgcatgaatacgctctcagcagatgcgagaaaatgggagt

SEQ ID NO: 258729 - DNA, 310 bp, Homo sapiens
  chr7:157659199-157659509
  hypo
gctcatgacctactaaacagcgcatgtgcctctcagcccttgccatgacaaccatgaggtctgcaggaaacacgtccatagaggtggagctgaggctggtgtgcattctcccaggcacccagcatgagtgcccagctcagggtctgcaccgaggctgtctggcccgagtcccaggctcgccccagtgcttgccacacacaccctggggtctcctcagaagcagtgcctgtgccccgagatgcacggccaccaccccgcccctgaggccctggatacacggccactaccccgcccccgacgccctggatac

SEQ ID NO: 258730 - DNA, 78 bp, Homo sapiens
  chr7:157660120-157660198
  hypo
cacggccaccaccccgcccctgacgctctggatacagggccaccaccctgtccctgacgccctggatacacggccacc

SEQ ID NO: 258731 - DNA, 259 bp, Homo sapiens
  chr7:157660637-157660896
  hypo
gggcaccgtgcctgcgccagcccaagctgcccagacttcctctggacagcaggcctcctgagccctggagattaactcactgccgcaggtaggatcacctgagtcctctaggaacccagcccgcatcctgggcaagaggcccacatgcaccttagaaagggcccgaaacagttcacgagtggggtgtgggctgtgggtccagacacagttatcctaaggccaggcacaggaagggttcctttcccgatggctccgacag

SEQ ID NO: 258732 - DNA, 164 bp, Homo sapiens; identical to SEQ ID NO: 212039
  chr7:157666019-157666183
  hypo

SEQ ID NO: 258733 - DNA, 107 bp, Homo sapiens
  chr7:157666383-157666490
  hypo
ggccgggaggagaacgtactgtcctcaagcagaatttcctgcgctggtctctgggatgggcagagggccctgctttcaggtactgaggagagcgcagcactcggcat

SEQ ID NO: 258734 - DNA, 282 bp, Homo sapiens
  chr7:157703229-157703511
  hypo
ccgtaggaacgggcgcagaatcacacacgtacaccgttctgcacagctggcggacgcttcctctttcccacatggtgtggtgtaacctgatcgtttgtatgcaaagcaaacccatgcacagctgactgtgtcaaaacacagccagaaagatgccatgcggcagggcacgtgtgtgtgtgtgtgtgtgcgagcgcgcgtgcgcccctgcgatcagcccagcagacagagcacgttcctgtaacgtgttgtgatccactgcgcggcaacaacacaaaacacaag

SEQ ID NO: 258735 - DNA, 368 bp, Homo sapiens
  chr7:157711203-157711571
  hypo
caggtgccttcactcgcatcaaactactcattatctacaagcaacatatcgaaaacaacgccgtccagaaagattacaaactgacgcggccgggaaaatctatcagacatacgaatggaaggagagaaggcgtcatggcgtcgacaccaagaaaatgtgcaatttgtttaaaagttattgattaaagtggaataaatagactaatgttagattagattataaaattccagacaacgatatagggttaatgaactggtgtgtgccaagaaataaacatcgaaattaataaggaagaagtgatcacagtacaaagagatgccactcgcagcctgagggacggaagggcctgacggcggccatcctccacc

SEQ ID NO: 258736 - DNA, 280 bp, Homo sapiens; identical to SEQ ID NO: 212040
  chr7:157730033-157730313
  hypo

SEQ ID NO: 258737 - DNA, 65 bp, Homo sapiens
  chr7:157731890-157731955
  hypo
agttaagtaaagcacgcaggtccccacctcaatagcgaggtttccagtatccaaattctgaatta

SEQ ID NO: 258738 - DNA, 324 bp, Homo sapiens
  chr7:157734698-157735022
  hypo
ccttagcacaccttcgcacacgggggtcctcggcccaccctccacacatgggggtctgcagtgcaccttcactcatgggagtccttggcctaccctccacacacgagggtcctcagcatgccttccacacgcacaggggtcctcggcccaccctccacacacaggggtcctcggcccaccctccacacacaggggtcctcggcccaccctccacacacgggagtcctcggcacgcctttccagaggaggtgatcttgaggcaccacaaaagcagcacctggcccctggccgctcccagctcagagcccacggtggggtcctcag

SEQ ID NO: 258739 - DNA, 268 bp, Homo sapiens; identical to SEQ ID NO: 212042
  chr7:157736786-157737054
  hypo

SEQ ID NO: 258740 - DNA, 314 bp, Homo sapiens; identical to SEQ ID NO: 212043
  chr7:157738093-157738407
  hypo

SEQ ID NO: 258741 - DNA, 186 bp, Homo sapiens; identical to SEQ ID NO: 212044
  chr7:157744267-157744453
  hypo

SEQ ID NO: 258742 - DNA, 362 bp, Homo sapiens
  chr7:157776641-157777003
  hypo
tggaatccctgaggaggagccggctcacccagcgccgcgagcatctcttcctgactcgcagggggcccgtgagatggagaatctgcctgacagggtgcacttgcacagccaagcaccaagaaggaaaatggcatttcattagccatggagacagccgggaacccagcagccttctttattctggctcatattttctcatcattctcagggagttgtccaggtaacaatgaccttgtgtaaaccagcgtccctgcctgagtcctcttcacctgaaaccaccgccccacgccaggctccacctccccacgccaggctccaccccccacgccaggctccaccccatcccacgccaggctccaccc

SEQ ID NO: 258743 - DNA, 130 bp, Homo sapiens
  chr7:157778516-157778646
  hypo
tggctgacgagacccggcctcgctcagaaagctcctccaagatgccaccgcgtgtgaaatgcttggggttgaatctcgagagcagggagaccagccagacagcccacctggctgacgagacccggcctcg

SEQ ID NO: 258744 - DNA, 70 bp, Homo sapiens
  chr7:157793837-157793907
  hypo
aggtggggctggggtttggccgcaggtctggtgcaacgtggggctggggtcgggccgcaggcggggtgaa

SEQ ID NO: 258745 - DNA, 840 bp, Homo sapiens
  chr7:157794264-157795104
  hypo
gcacttcagcctcacgggcgctcccaccatgcagacagacgcaggcagtgtagtagatggtaaaacggccgaaaaccatcagcagcctcaggaccgccctgtcatgatgccaactcccaatccgtgctgagagcccggcactgcctcagggagattagcaaacacttttcatctgtttatacacaaacagcaggcatgggcccgctggccttccaggaacatgagtctgcgtgactggctgttgtgccctcacccggaaccgtgccaggcaccgaggaggtgctcagtaaactatggggttgcatcgtatttgaggtcatccggaggcacccgctgctgcactgggactcctggagatcctcctccagccggaagctggccaagctgtctccaggtcctgggatcacgttgtttcagtggagacgatggccgccagcttcagattcagaaatggcacttagtgcctcttcccttggagtcacctcgggtgacatggggtggcccccatggccagcactgaccagctctgccccccaccgaggcgggagccacatctcaccaccaaatgcccttttatgggaactgaggtgcaaagcgggggcttgaggcaagcagcccccgcgggaaacacggcgtggtcatcaggcgagtgctgccttagagacccgccccctgcagaggctgtgctctggatggtcactcactcacccctttattaagagttggttctacggaggatgagagaggcagggacgtgttttgggagaaggtcatatgaaaaattagtgccacagagtttcggcccctaaaaagcttccagtttcacggtgaggggaaatg

SEQ ID NO: 258746 - DNA, 233 bp, Homo sapiens
  chr7:157795358-157795591
  hypo
atgtccaggaatcctggggccggggcctgctccctggaagcagatctgaggacgtttcgggcaggtcagctgcagcgagagaaatggacttgccggggaggaactcccggctgcctcaaagctcagcaggtccacggagcaggagccacacaaggctcttcaacaagccccgtgaggtggggagctggcctggaccaccctggcgtggacacggctgggctggatctcatctg

SEQ ID NO: 258747 - DNA, 182 bp, Homo sapiens; identical to SEQ ID NO: 212049
  chr7:157847115-157847297
  hypo

SEQ ID NO: 258748 - DNA, 110 bp, Homo sapiens; identical to SEQ ID NO: 212050
  chr7:157849576-157849686
  hypo

SEQ ID NO: 258749 - DNA, 435 bp, Homo sapiens
  chr7:157853828-157854263
  hypo
gaagagcaggccgccgtcgggcggtgactgattacaatcatttgttgtgatgcatcgcaaattaaagggacaagcccagccaagctgctccgctcagagagtgcgcgtcccgcctctgcaattactgatgtgcacaaaggacccagggaccacttaaaacaaggggaggactgagtccacgcagggatgaagccacaggcacagtccccacgtgcttgacagtggccccgcaacccacctgctccagacacctgttccgagggaatctctcccatccacctgccgctgtggctcagaccccaggcacaacacaagcgctcggcagagaaatggaccgtgccgccaatgcactcggcgctgaaccatcattgaggagagaccagctgctgctgtggcccctggggctgcagcataaacagtcgtggtggcaaagtg

SEQ ID NO: 258750 - DNA, 360 bp, Homo sapiens; identical to SEQ ID NO: 212051
  chr7:157860323-157860683
  hypo

SEQ ID NO: 258751 - DNA, 193 bp, Homo sapiens
  chr7:157861007-157861200
  hypo
ggcagccgagggtacggtgcagtgcacaggaggcccaggccacagctcccacgccaggaccattagggacccagtgcagtggctggactgcagctggggcaggagctgctgaggaggtgggtgcccagcaccacctttgcactcggcaccacctttgcactcagcagaacggaggccgcgtcctcagggaagc

SEQ ID NO: 258752 - DNA, 257 bp, Homo sapiens
  chr7:157877355-157877612
  hypo
cccatccacacccacgacgcccatccacacccaccacgcccatccacacccacgacactcatccacacccacgatgcccatccacacagatgcccatacactccgacactcatccacacccacgatgcccatccacacggatgcccatacactcctacaatgcccatccacacccacgatgcccatccacatccttgatgcccatccacacccatgatgcccatccacatcctcgatgcccatccacacccaccacg

SEQ ID NO: 258753 - DNA, 808 bp, Homo sapiens
  chr7:157890830-157891638
  hypo
tgagcacacacgcacgcaggcaccagaactcaagacccagcgtggggcagcctctgcctggccaggactggggacctcggagaagcgctggacgcagcaagaatcaggcttcagctccgcaatgtgggcaggggacccgcaaaggatcctgcgggtgaggccaccgggggggctccctggggaggaggtggagaggtccagattcccgaaggctccgagggacgggcggcgggactcaggtttgactctgtaggaaagagggggccgccagtgtcctaaggcgggagatgcccgagggtgacgcttacccaggactgagcctggcaaagcccagccctgctcccggaatgcggagaagccgtccgtgctcagaatccgtcttccgacagcgaaggcggtggccaggagggccaggggcagggagcaggcacgggcgaggcccagctgctctgtgaaaccagaggctccccgaggcacacgcctccctcgcccgccccggcctggcatctgccagtcccaccattttgctgagactctgtgaaggtgaatggggttgcttgggctcggggactggaagaagaaggacgtttatctcgtgaacgcgggacgctccttatgggagaggagtgggagacatgaagcaaagcgtgaccaccgaggagctggggagaaagcgagaaagcaaggaagcagtgggggacggggaacggggccgcggggagggccggagaagatggtagaaggtgacagtgcggggtgcagcgttcctgggtccttgaggggagccgggcttctcagccttgaagac

SEQ ID NO: 258754 - DNA, 50 bp, Homo sapiens
  chr7:157903545-157903595
  hypo
gcacctgcaggaggcgggcgacgtcctccaccagccgccttccttcctcg

SEQ ID NO: 258755 - DNA, 104 bp, Homo sapiens
  chr7:157903815-157903919
  hypo
cgcaagtggcccaccgtgtggagactggctcctctcagccttcagtgaaaatacaataaaggggagaagggagaagggacaggcaggtgcggcggatgctggga

SEQ ID NO: 258756 - DNA, 210 bp, Homo sapiens; identical to SEQ ID NO: 212055
  chr7:157916055-157916265
  hypo

SEQ ID NO: 258757 - DNA, 245 bp, Homo sapiens; identical to SEQ ID NO: 212056
  chr7:157916514-157916759
  hypo

SEQ ID NO: 258758 - DNA, 282 bp, Homo sapiens; identical to SEQ ID NO: 212057
  chr7:157919944-157920226
  hypo

SEQ ID NO: 258759 - DNA, 256 bp, Homo sapiens
  chr7:157929559-157929815
  hypo
ttctgtaaacttcgcgagagcggaggggactgaggagctaaatggtagacgtgaaggcagccacaatgacctcacccagctctgggggtctcacgtgatcgacaaagttaactcacggcaaaaaaaaaccccatcgtaccgagcagttcacgtcatgaaaaagcaaagtgaagccttcgccaaaaccacctcacaattaagatggcttcagaatccactgacttaggttatttcactgtggtcagcgtttctctct

SEQ ID NO: 258760 - DNA, 142 bp, Homo sapiens
  chr7:157931998-157932140
  hypo
agtgaagagcacggcgtctgaaatttaaaatttatgtccattacgggtggacataacggaagaaacggtttgtgaatctgaagacagatcatagaagcgatcatcgttggaagaacagaatgggagacgttctgcagaacct

SEQ ID NO: 258761 - DNA, 114 bp, Homo sapiens
  chr7:157934029-157934143
  hypo
cccgttcactcagccgcacgtcccgtcctctctccacagcgcaggctgtgtctagtccatgccgaggcagcggggccggcacccggtccccacgtgccccgttcactgcatacg

SEQ ID NO: 258762 - DNA, 237 bp, Homo sapiens
  chr7:157934535-157934772
  hypo
tagtttagcatgggatgaagcggacagagtcctttaaagtcaatctgtacacgaaatgtgtgacggacacgggcgttctgatcggagcgtgctgggcgttcactgccaccgatgtcccctgctggggtggccgagtgccccgctctggccgacgttgaggcctctgaattgttcggcagacagtggcggcttctttaccttcgggttgaagtgtccgtattaaccccacatttctga

SEQ ID NO: 258763 - DNA, 117 bp, Homo sapiens
  chr7:157935699-157935816
  hypo
cgcaaccgagccaccgagccacgagcccagagcaaccttttcattctcattcactgcagtctcctcccaccacagatctttttctttcccagcgattatcatcgcgacagtcttatc

SEQ ID NO: 258764 - DNA, 282 bp, Homo sapiens
  chr7:157936031-157936313
  hypo
cctgcggcaggaaccggcacagctgcagggagacctgaagggccctcggcattgggcatggctgtccccagcagtcggcgtcctccgtgcttaggaggcgagggatgtctccacacatgcctgcactagccaagatgtgtgtcagagtcggcccggccatagctcacggtggacaccagtccccgtgatggaatttcatcggagggaaagaaacagggaggtgaggaatgagtggtggttgctaaggaaaggtccttcctgtggacacgaaccaatgaacac

SEQ ID NO: 258765 - DNA, 296 bp, Homo sapiens; identical to SEQ ID NO: 212060
  chr7:157949122-157949418
  hypo

SEQ ID NO: 258766 - DNA, 70 bp, Homo sapiens
  chr7:157957666-157957736
  hypo
agaccccctgatagcgtccaggacctacgagagtgcaggaggcagtgaagacccccgatggtgtctagta

SEQ ID NO: 258767 - DNA, 252 bp, Homo sapiens
  chr7:157958023-157958275
  hypo
gtggccactccaggcgggcagctcccgtagcaaacagcaccatcaatgctccagcagcactcactcaagtgcagcatcggcctcctccgccgtccttctcctccaagagaggaacaaggagaaagcatcggtaatggtcacacgtccttccctctaattgcaatttcacattccttctatttaaaaactgccataacggctgcatgaacaaagaaagagcgagggcaggagagctcccggctgcagacagca

SEQ ID NO: 258768 - DNA, 150 bp, Homo sapiens
  chr7:157958518-157958668
  hypo
cccctgggcccgccctgacgtggcttaactcaggtagcgacaccggaagccacggtcttggcagagcagtcacctcgaggccgacactgttcagctagtgcatggtgagcagcatgaaatccagacagggggcttcggaggatgtggcaa

SEQ ID NO: 258769 - DNA, 134 bp, Homo sapiens
  chr7:157959397-157959531
  hypo
ctgcgttcccaggacgtgaaatgaccacatactccttcccagcacagagagggtatgagggccgaagggacccttccctacatggtgccccattcctgccacgcgtcctcgggggagtgcggtgtgcagacccc

SEQ ID NO: 258770 - DNA, 146 bp, Homo sapiens; identical to SEQ ID NO: 212061
  chr7:157959848-157959994
  hypo

SEQ ID NO: 258771 - DNA, 129 bp, Homo sapiens
  chr7:157967881-157968010
  hypo
gtctcactgcccgccggcagcactgacaggcaccttgatcacggcgtgcttgctgccagcctgacaaagcacacagcctcagtgctattcacaggcttcctaatgagccggcaccggatgcggccaggt

SEQ ID NO: 258772 - DNA, 55 bp, Homo sapiens
  chr7:157980855-157980910
  hypo
gaaggccgccacgctcgccccgcgatggggaaggccgccacgctcgccgcctgat

SEQ ID NO: 258773 - DNA, 151 bp, Homo sapiens; identical to SEQ ID NO: 212062
  chr7:157981292-157981443
  hypo

SEQ ID NO: 258774 - DNA, 157 bp, Homo sapiens
  chr7:157987113-157987270
  hypo
agggccctctgtgaacctgccgccctcagcaatgctcccaaatccccttcccgctgagagccatgctcagcgatgaccaatcacttcaggtccgacttgtgctgcagtggacggtccagacgccacaggccccggcgtcatgccccactgccagcac

SEQ ID NO: 258775 - DNA, 476 bp, Homo sapiens
  chr7:158037654-158038130
  hypo
cgaggccagcagttcgaagcccctgctccctggctgtgtcatgtggacaagtgacgtcgtcttgaggatggcctcgtgaggcggcggtgggcatgaaatgagatgaggcgtccagccctgcatctgcagcgtggtcagcacagaggctgacatccatggtcatgccggaatccgtggtcatgccagaatccgtggccatgccggaatccatggccatgccggaatccgtggtcatgctggaatccacggtcatgccggaacccatggccatgccggaatccgtggtcatgctggaatccacggtcatgccggaacccatggccatgccagaatccgtggtcatgccagaatccgtggtcatgccggaatccactgatggtgcacgtgacccacgatgggaaaagtcacaagacagcttcagagctggtcaaacgggactgagaggggctgcaccaggaatgcgcggcctgttgagt

SEQ ID NO: 258776 - DNA, 124 bp, Homo sapiens
  chr7:158039728-158039852
  hypo
tgtgtgaggacgcacgatggggttaggcagcctgagaaaccatccctggcacgggctgcctcaaggaatgaggaggtgtgggcttcccggctgcccatccccatatctgcacatagcccctgca

SEQ ID NO: 258777 - DNA, 468 bp, Homo sapiens
  chr7:158039882-158040350
  hypo
gcaccccccagcatggccaggagcaccgaggcgcacgctgggctctgagacgccccctggccaagaggggtggaggaagggggcaggcgccaggatctggaaggagatttccaacccacgtggggtctcacaggagaaggccgtgatgggaggtggggaagtggggaggagggcgctcttgaccgtgtctgcgtgtctaagcaaaggatacaggggcgcaaagggaaggagtggccaggggtgcccgtcccaggtgtgctcttcttcacggcgcccctgcttccccaccacgcccatgtccacggctcgtgggcagctgggcactgggccactcagacaccgtcctaaacactccacacaggtaacttgctccctctccagccacacagcaaacacagcaaaggggacttgggtgtctgcggtttttttgtttgtttgtttttaagatggagtttcattcttgtggcc

SEQ ID NO: 258778 - DNA, 290 bp, Homo sapiens
  chr7:158044818-158045108
  hypo
ggcaactctgctctggttgccgcacagcctcaagcctcagctgcttggagtgggtgggaacgcgagagcacttgagcaccagtggcctgacaactctgcctcgtccccatcacctctgcggcgagaatcagagcagtcgcagaagctcctgccacaccactcccataatctctcagtgccaattacttggaggaaaaatggaatcatccccgtgcccagggtggtgagtggtgtcaccgttcggatggctcagatgaaggcggccaactgggcagcgggaatggagcctt

SEQ ID NO: 258779 - DNA, 227 bp, Homo sapiens
  chr7:158059763-158059990
  hypo
gacagccccacacccgcggcaggtcccgcctggcactcgggaagctcttgcatttaagagatctagaaatgttgacactttgcgtggaattttaaaagctgcttaatcaggaaggagccagtcaggaaaagggacctgccaacctgcttgttagccgagcagcgaggcactgtgagcacacgggatgatgggtgctgggtgctggagttgaccggctggcccggcag

SEQ ID NO: 258780 - DNA, 127 bp, Homo sapiens
  chr7:158060880-158061007
  hypo
aaaagcatcagagccgcggccgcacgcacacagagcggggtgtgagatatcccagccgcacacacacagagcggggtgtgaaatatcccagcccagacgcgtgcacacggggcgggtgtgaaatatc

SEQ ID NO: 258781 - DNA, 499 bp, Homo sapiens
  chr7:158061260-158061759
  hypo
gcacgcacacagggcgggtgtgaaatatcccagccgcaggcacacagggcgggtgtgaaatatcccagccgcacacacacagggcgggtgtgaaatatcccagccgtgtgcacacagagagggtgtgaaatatcccagcccagccgcacacagagagggtgtgaaatatcccagcccagccgcacacagggcgggtgtgaaatatcccagccgcacacacacagggcgggtgtgaaatatcccagccgcacgcacacagggtgggtgtgaaatatcccagccgcacacacacagggcgggtgtgaaatatcccagccgcacgcacacagagtggggtgtgaaatatcccagccgcgtgcacacagggcgggtgtgaaatatcgcagccacattgttgttgaaagccgttgccgggcctgaaaatcgcagctttttgaacgcacacactgaacctccccggctttgttttctaggaaggacgtggcggctgctgcccaac

SEQ ID NO: 258782 - DNA, 1136 bp, Homo sapiens
  chr7:158066166-158067302
  hypo
ggcacagggggagccgcaggcacagggggagccgcagacagacatgggaggagccgcagacacggggagccgcagacacagggggagccgcaggcacagggggagccgcagacagacatgggaggagccgcagacacggggagccgcaggcatgggggagccgcagacagacatgggaggagccgcagacacgggaggagccgcagacacagggagccgcagacacagggggagctgcagacacaggaggagacacacaaggagccgcagacacagggggagccacagacagacatgggaggagccgcagacacggggagccgcagacacagggggagccgcaggcatgggggagccgcagacacagggggagccgcagacacaggaggagacacacgaggagccgcagacgcaggaggagccgcagacagacgcgggaggagccgcagacacagggggagccgcagacacagggggagctgcagacagacatgggaggagccgcagacacagggagccgcagacacagggagccgcagacacagggggagccgcagacacaggaggagacacacgaggagccgcaggcacagggggagccgcagacacagggggagctgcagacagacatgggaggagccgcagacacggggagccgcagacacagggagccgcagacacagggggagccgcagacacaggaggagacacacgaggagccgcagacacagggggagccgcagacagacatgggaggagccacagacacgggagccgcagacacggggagccgcagacacagggggagacgcagacacaggaggagacacacaaggagccgcagccacagggggagccgcagacgcgggagagccacagacacagggggagccgcagacacagggggagccgcaggcacagggggagccacaggcacagggggagccgcagacagacatgggaggagccgcagacacggggagccgcagacacaggaggagacacacgaggagccgcaggcacagggggagccacaggcacgggggagccgcaggcacagggggagccacagacaccctcacactccgggatctagcgtgtgtggacgagcccgaggcgctcggcccagcttgtca

SEQ ID NO: 258783 - DNA, 305 bp, Homo sapiens; identical to SEQ ID NO: 212069
  chr7:158072900-158073205
  hypo

SEQ ID NO: 258784 - DNA, 654 bp, Homo sapiens
  chr7:158075396-158076050
  hypo
ggctgatccctcctcgtgctcccacatgcagcagccagacacagacggctcatccctcctcgtgctcccacacacagcagccggacagacagctgatccctcctcgtgctcccacacacacagcagccggacacagatggcttgtccctccctgtgctcccacacacagcagcgggacacagagggctcatccctcctcatgctcccacacagcagcgggatatagacggtggtccctcctcgtgctcccacgcagcagcaggacatagacggctcgtccctcctcatgctcccacacgcacagcagccggacacagatggctgatccctcctcgtgctcccacatgcaggggcctcagctctcaggaggaaaacactcttgagagaagagaactgaggaaaggtagcgctgatgtcaggggaagacgcattcgacaacacgcatgaaaaaaaacacttcttgttacgttcatgccatgcttttgtattcgccacaataagaaaaccaagcaagtacttcagtcaggcggcagccgtcacaggtaaacaaactcctatgtgggaaatgaaccgaggctgtgagcctcaggcagctccccagacccccaagaggagagggagcagtgaccgagcaggccccgtctgcagttcaca

SEQ ID NO: 258785 - DNA, 175 bp, Homo sapiens
  chr7:158087289-158087464
  hypo
gacacaggaggatgcgagaggcagggctgagccaggccaggcaggagcaagcggggagggaggagtgttcccgggggagagtgagaggcaggaaagacatccagccacaaggagacctgggagcacgggtcgcccagaattcagtgtgcttctatttccacgctcatggttcacc

SEQ ID NO: 258786 - DNA, 153 bp, Homo sapiens
  chr7:158087693-158087846
  hypo
caccaccttccacgcgcatggttcacccacctttctgagggtccaagcccatggcgcccgctgaccctgcctgtctgcccagacattgcaccacatcatggttcacccgcctttccgagggtcagagcccatggcacccgctgaccctgcctg

SEQ ID NO: 258787 - DNA, 196 bp, Homo sapiens; identical to SEQ ID NO: 212070
  chr7:158103401-158103597
  hypo

SEQ ID NO: 258788 - DNA, 104 bp, Homo sapiens
  chr7:158107194-158107298
  hypo
ctggcactggcctgcgcacagcaccccatcgccaaacgacagtggcacatatggagcaggagctgggcccaagccgccctggaggctcccgtggggaaagggct

SEQ ID NO: 258789 - DNA, 96 bp, Homo sapiens; identical to SEQ ID NO: 212071
  chr7:158109478-158109574
  hypo

SEQ ID NO: 258790 - DNA, 89 bp, Homo sapiens; identical to SEQ ID NO: 212072
  chr7:158113046-158113135
  hypo

SEQ ID NO: 258791 - DNA, 200 bp, Homo sapiens
  chr7:158113165-158113365
  hypo
tccgagcagctgtgatggcgcccccatcgcccgcatcctcagcagcgccaggtggcgtccgtgttcccgcgtcctcggcagcgccgggtggcgtccgtgttcccacgtcctcggcagcgctgggtgacacttggaggcgtccatgttccagcgtttggctgctgtcataggtgtgtatcggtatctcatgattttttatc

SEQ ID NO: 258792 - DNA, 355 bp, Homo sapiens
  chr7:158136091-158136446
  hypo
aaccgaaaataacgcgtgtgggtgagaacatggagaaaatagggccctgtgctccgcgggcaggaacgtaacctgatgcagtcgccgtggaaagcacacgggaaaagttcaatgtggaagtagcagatgatccgacagccccatttgattttacacccaatacctgcaagcagggctcgcgcagaggctcaggcagccatgctggtggcacatgggctgtcgcgactgctcccggtggaatcagccccatttctgattttacacccaacacctgcaagcagagctcgcgcagaggctcaggcagccatgctcgtggcacgtgggctgtcgcggctgctcccggtggaatcagccc

SEQ ID NO: 258793 - DNA, 151 bp, Homo sapiens
  chr7:158185087-158185238
  hypo
tgcgtcagctcacacgaggagagggcggcggggatctgctgcacacccagcgttgtctggggaaccatcctggcatggagcagggcctcacaggacagctgcttctcttggccagcaagagctccacgtgggggcacggccccagcagcca

SEQ ID NO: 258794 - DNA, 140 bp, Homo sapiens
  chr7:158188491-158188631
  hypo
gcgaggggcgaggggcgagggctcccggcctgcgccgccttggatcccaccagccccgaattcgggcagagcgccatggagggcccagcctggagggggagctcggagcctgcagcaggtgaggtcgggctacagacttc

SEQ ID NO: 258795 - DNA, 140 bp, Homo sapiens
  chr7:158198531-158198671
  hypo
acacactgagatcccgcagtggctcatccgtgagacacgtgtccgcacactgagatcccgcagtggctcatccgtgagacacgtggccgcacactgagatcccgcagtggctcatccgtgagacacgtgtccgcacactg

SEQ ID NO: 258796 - DNA, 143 bp, Homo sapiens
  chr7:158198933-158199076
  hypo
cccggtggctcatccgtgagacatttggctgcacactgagatcccggtggctcatccgtgagacatttggctgcacactgagatcccggtggctcatccgtgagacatttggctgcacactgagatcccgcagtggctcatcc

SEQ ID NO: 258797 - DNA, 331 bp, Homo sapiens; identical to SEQ ID NO: 212074
  chr7:158216892-158217223
  hypo

SEQ ID NO: 258798 - DNA, 167 bp, Homo sapiens; identical to SEQ ID NO: 212075
  chr7:158235876-158236043
  hypo

SEQ ID NO: 258799 - DNA, 482 bp, Homo sapiens
  chr7:158240243-158240725
  hypo
cgataaggccgacccgcccagcttgctcccgctgccagagcctcttccccacctctccaggaaacaaagccacctgcacgggtacccggcctgccttgcgtcctgccaggcccctggaaagcaaacatccctccaaggcctgggccagtggtgggctgcgtcaagctgttagccaagcgggcagtgaagacgaaggctgccccgtagccagggagctgacctctctgcgcaggtgccggggtacgagcaccagcagagccgagagcgggggcagtgctgaagcccctgctgccatccacaaaggggcctcagagggttggaaatgacaagccacggtcttgccccaccccggctcctggccatgctacccagccacacggcacagggcaaatgccagcaggacacaggccctcagcccggcatcatcgtcagcccgaggatgctgggccaggccaggtgccgactcagcagggcagcaagag

SEQ ID NO: 258800 - DNA, 409 bp, Homo sapiens
  chr7:158267276-158267685
  hypo
ccaccagagtcaaccgcccagcagaatgtgggcacccctcctccgagagggaccctcttcccaaggtcagctaagaggcgggtgcccgtctgagagggacccttttcccaaggtcagctaagaggcgggtgcccatctgagagggaccctcttcccaaggtcggctaagaggcgggtgaccgtctgaccactgagggagtcgggagtggggctgcccatggctttggggaagcactcgctgttcagcgggagagaagtcaaagagagaggccgggtgatgccacggggtgccctgtgggactgtgcacactgcgttctgcagacatgggcatcctggacagctgaaaacagggcaatgatgcaaactggcatttgcgcctcctggtgccccacggagacaggccctgag

SEQ ID NO: 258801 - DNA, 130 bp, Homo sapiens
  chr7:158267715-158267845
  hypo
cagatgctggcgagggaggaaggtgatcataagaaccccggctgcagcacagtctccaaccttctcatgcagaagagctgggggtgcttgggaggcaccagtttccctgacgccacggtggcaggcggga

SEQ ID NO: 258802 - DNA, 498 bp, Homo sapiens
  chr7:158270797-158271295
  hypo
tgggacaggcacggcggcaaagagagtgggctgagtgggtcatcacacagcacgggagccgcggccccaggtgctgcttgaatgaagaaggctcagcccatgactgctacgtctggtccccaggacccaaactgtccagaaatcagccagcactcctgcaggtgcactgcagtggacggctagaggagggaaagcagcgccgtacagacactcggaaaactgcagactggaaggggcgtgaaagcacaaggtcttgatcattctcctggcattcggtgctgtgcgtagggtgagcaatggacgccactggggaagagtgggaaaggaaggctcagcacgtcggtaacgaatgaggaggcagaggcccgctctgcgtctcaaagaacgggtgggatgcggagccgtgacaagggcatgggaaagaaagtggagtgggaataacgccaaaattaacctgataaggaagctgctttcaacgcatccctgagctggacccac

SEQ ID NO: 258803 - DNA, 642 bp, Homo sapiens
  chr7:158277360-158278002
  hypo
attttgtataaatgaaatcatgtcccccgtgacttttgtgactcggtttcttcctctgagcacggcgattcccaggttcctccgcgtcagtgtgccggtgcttcctgcctccctttccacggccggacagcactccaccatcacagacgtcctcggttcctggtggttttctgccctcttcagtggagaaagggcttggaatagaagaagctgcagttggagacgtgaaggctgtggctgtgacgccgccacggggagtcggctgcaggaggagcctccccaccatcagcgtggccggcggagtgagccacgagcgcaagggcacccctcccagccgctgttgctgtggccccggccgccagcgtcccgggagggcacctgcggagggaaggcagacaccctgcaacggcccgcaggcccgtgtcacctgggccaccgagcgcagggcttgtgggtcgtcacagcataattcagccttgagccacgagacacggagccgacaggtgtgtagctgagccatcctcccccacctgtcagtcaccattcttccacctccctccaaacggagagcgcgacttgctcctcttgccctcctggacgtccgggatttccgcccctgggctccagcgctatggtgtggtc

SEQ ID NO: 258804 - DNA, 756 bp, Homo sapiens
  chr7:158281108-158281864
  hypo
cttggcgcctccaccgtggcttcccttcccgaccccagaagctgcctaggcacagacacagaggtgcccccagccccaaaattccatccggaacccagggctggtcccacctcagggcgcacgagctcctcggtttcgcttctcagaccctcagaggcattcacctcggctccccctggatgcaccagtgcaggggaggcctgtcctgaaaggccccaggagggcggcaccccaggccagcgccctgccctgcacctcagtcccccgccggcacccacgtctgtgcagagattagtgggtgcgaggggcctctgggcaggccccgccatcctcgctaggattaaatccgctcctgcccacagtctgaggacagatgcgcagggagctggggaaagagaaggcctcgctcagtgcgccccgggcccacacgcagcccctgacttggagaaaggcggctccgcccagcgcttttctgaggatactggagtttaaccctcccctgcgcgttcagagcgcacagcgcccagttcaccagcatgacaggcccgggtggcgtctgccctgggagatgccctctgcctgaccgcgctggagggaaggggctctgcaggacccgctgctcgccgtatttcataataactgccgtcctcatgggctttcagcccaacctgaaaacacagcgtttgcactgttttcttatccgcctgataagagaggaaaatcagtggcttaaaggacgaaaaacctggccgggcg

SEQ ID NO: 258805 - DNA, 1296 bp, Homo sapiens
  chr7:158282164-158283460
  hypo
aaacttgccgaaggacagagcaaaacaaaatcagaaagcaagggttggtgcgagcgatgggcgcccagaacccgggcaacctcttctccccacccaccgaggccgcagcccatggctccggggttccatccgcctcctctcggcagcgcgccccgggcggccccagctccaggccagcggcggggctcaccaggctgggcgctgcgcacggcgggcaggagaggggcagaccagggcgcagcagccaggaccccacactcaccgttcacacaggcctcggacgctccgcagaggccctcctcgagcaggcagcctgcggggaaacagagaagagacgcggtcagctggaggggaggaggggggtgcccccgaggctgccttcctggccccctggtgaatttcagagaaaccgccggtcaagcaggctcctccgacccggcttttccgagatggggccgattattctgaagccagaacgctgcgcccctgacccggccacgtgcgaggcctcctggcctagtcccggagcccagctctcacctggaccaggcccacagctctgggctgagggtcaagccggcgtcatcacaggagactctctggccgcgggagcagcagcggggccggggcctccccttgaggcctcccctgggcccggcgcctcccctggaccgggtgctcaccgcacgcaccgcgtccctggaagcaaggctgccgggcgccggggagcggaggcttccagggaggtaacgagctccgcggggagcccggctgcgtgggaagcaaaccgtggcgtccgtggccacagacaagagacgcaggagagggtcgggagaggaaaggaggcagcggaggcagcagagacgaagacgggcaggaaaggccagcgcggctgggccaggccctggaggagacgcggggcagaggcagcgcctcagtccccacccaggaaggggctccagaagctccgcggtgcctgggtggccaggcgaccccaagccacgcatcccccgcggccgagcaggctggcaaaggttggcgttcggctccacgtccacgcctgtcttaaacacagagagatgggtccagaaagcaccaccccgctagggagcggctcccgcgagggcgtgagcaccctggacaccagaaccgggagggccccagggccactaggcgggagtcgcaccgccagcaaaggccaggtgtggtgtgaacgcgcagtgtctttcactcattcctgcaaagcacagtgccttcaatgctgcttcaccagccgacaaacgcctgttcatccgc

SEQ ID NO: 258806 - DNA, 48 bp, Homo sapiens
  chr7:158301564-158301612
  hypo
gctcctgtgggtgtcggggcaacgtgggacgctcggagcaggtgcgga

SEQ ID NO: 258807 - DNA, 117 bp, Homo sapiens
  chr7:158307739-158307856
  hypo
caaagacgatgatccgaaaacagcaggcagaacaaggttgcactatggcgaggagaactgggatgcggagagaaaggggcagccccgggcacacaaagcggccgcgtgcaccagctg

SEQ ID NO: 258808 - DNA, 141 bp, Homo sapiens
  chr7:158315944-158316085
  hypo
cagccagagtggtgcagacacgtcccacggtgagggctggtgcggacaagagattagccaaaggagcagccaccatgctgccgacagcgagtctgccctgaagtggagtctgccctggagtggagtcgtctgccctggagc

SEQ ID NO: 258809 - DNA, 109 bp, Homo sapiens
  chr7:158330971-158331080
  hypo
gagacctgctcgtccggtgactggcgcacgctgcgctccctcacaaacactaaccccagtggttctcctcccagcactgcccctcacccctgcgcggcgtgtccctctg

SEQ ID NO: 258810 - DNA, 231 bp, Homo sapiens; identical to SEQ ID NO: 212084
  chr7:158331366-158331597
  hypo

SEQ ID NO: 258811 - DNA, 762 bp, Homo sapiens
  chr7:158349367-158350129
  hypo
tcagagaacactgcagctcccgcgcaggtcagacggctcccgggcaggtcaggcggctcccgggcaggtcaggcggctcccgagcaggttgctcccacgcaggtcgctcccacgcaggtcaggcggctcccgcgcaggtcgctcccacgcaggtcaggcagctcccgcgcaggtcagacagctcccgggcaggtcaggcggctcccgtgaaggtcagggggctcccgtgcaggtcgctcccacgcaggtcaggcggctcccgcgcaggtcactcccacgcaggtcaggtggctcccgcacaggtcaggcggctcccacgcaggtcgctcccacgcaggtcgctcccacgcaggtcagagggctcccgcgcaggtcactcccaggcaggtggctcccgcgcaggtcaggcggctcctgtgcaggtcgctcctgggcaggtcgctcccgcgcagggcaggcggctcccgggcagggcaggcggctcccacgcaggtcaggcggctcccgcgcaggtcaggcggctcccacgcaggtcgctcccacgcaggtcagagggctcccgtgcaggtcactcccaggcaggtggctcccgcgcaggtcaggcggctcctgtgcaggtcgctcctgggcaggtcgctcccgcgcagggcaggcggctcccgcgcaggtcagacggctcccacgcaggtcaggcggctcccacgcagtttaggcagctcccgcgcaggtcaggcagctcccgtgcaggttagacatcttttc

SEQ ID NO: 258812 - DNA, 37 bp, Homo sapiens
  chr7:158414042-158414079
  hypo
tggccaggcacagtggctcacgtctgtaatcccggca

SEQ ID NO: 258813 - DNA, 205 bp, Homo sapiens; identical to SEQ ID NO: 212087
  chr7:158451038-158451243
  hypo

SEQ ID NO: 258814 - DNA, 110 bp, Homo sapiens
  chr7:158516191-158516301
  hypo
ccactggtgaactgcggagcccaagtgttcatgctgggtgcaggtgaggcctctgctgtgagcctagaagtccttcctgcctacaggcctgggctcgcaggccgaagaca

SEQ ID NO: 258815 - DNA, 316 bp, Homo sapiens
  chr7:158550059-158550375
  hypo
aacactagtcccgacgctcgcctctcttttaagtagccacacccaaagtttccctcgtagatgcccttagggcagtggagccaggggagaaagcagagaacggtggattgtggtcaatgagagcaccaggagcaccacagacagtgagaggcagagccaaaggatcccagagctcgcgggacgccccttaatccagcgccaaaggatcccagagctcgcgggacgccccttaatccagagccaaaggatcctagagcccgcgggacgccccttaatcccgcgccaggcaccccgcggctctgcaaagatcctttgc

SEQ ID NO: 258816 - DNA, 381 bp, Homo sapiens
  chr7:158552733-158553114
  hypo
atgcttcaacagcaccttgtcgaggtttgacgcatttggcattaacgtgagccactccagtctcaagtgtagcttccccttgggaacctcgtccagagtgaaccactgaagagaaaaaatgtttacgttcagcaaaagttcttctgaatcaaaaatccaaattaaacccagtctctacaaatgttccatgctgctcactaaccacgaggcatcaacagttctcagtaacgcgaaggctgagcctcaccatatccagctctacgctatgtggatgccagtgacctcacgtttggaggcgatggcagcaacaggtgtgagcgaccattctaagtgctttacacacaccaaccccgtgaccccgacagaaaccctaagcaagta

SEQ ID NO: 258817 - DNA, 163 bp, Homo sapiens; identical to SEQ ID NO: 212090
  chr7:158556265-158556428
  hypo

SEQ ID NO: 258818 - DNA, 379 bp, Homo sapiens
  chr7:158564138-158564517
  hypo
tgagattgaaacctgatcatcggagtcgcaggaatctgtccaagggtggcccttgcacacacaagttgggcggggacctagcgggaaaggcgactaagtccgcagactaaatgcttgtagctgcaggcacagcaagagactgcctgaaaacaagcccacgagggacacgcccaccctgcatgggtggggagctggcgagagagcccttatggtgcccaacaccggctccatctgaagtccctcagaagacacgccagctttccagctgccgagcaggaaacaagcacagctgtgtcccatgcacgagcggctgcagctagctcagagcaggcagtgggcgcccattgttggaagagtgaataaactgctttttgaaaat

SEQ ID NO: 258819 - DNA, 218 bp, Homo sapiens; identical to SEQ ID NO: 212093
  chr7:158570554-158570772
  hypo

SEQ ID NO: 258820 - DNA, 258 bp, Homo sapiens
  chr7:158583817-158584075
  hypo
ggcaaccaccattccgcttctgtctatgagtttgactcccccagaaacctcacacaagtgcaattatgcagacgctgtccctttgtgtctggcttgtttccttcagcataaggtcctcaaggtccagcatgtggcggcctggagcaggagtcccgtgtttctaaggtgtacaggccacattctgcttatccattcatcggcccacgcatccttgggctgcttccgccttgtagctattgtaaaaaatgctgctaagaa

SEQ ID NO: 258821 - DNA, 35 bp, Homo sapiens
  chr7:158594953-158594988
  hypo
taaattccatgtcctatgcacgatataagcatttt

SEQ ID NO: 258822 - DNA, 83 bp, Homo sapiens
  chr7:158598728-158598811
  hypo
gaggacactagcagcagagccggcgccggggcacaccgcgtgggaggcgccggggcacaccgcgtgggaggcgccggggcaca

SEQ ID NO: 258823 - DNA, 43 bp, Homo sapiens
  chr7:158598841-158598884
  hypo
aggaggcgctggcgcacaatgcgtaggaggcactggccttgag

SEQ ID NO: 258824 - DNA, 34 bp, Homo sapiens; identical to SEQ ID NO: 212094
  chr7:158623834-158623868
  hypo

SEQ ID NO: 258825 - DNA, 33 bp, Homo sapiens; identical to SEQ ID NO: 212095
  chr7:158624108-158624141
  hypo

SEQ ID NO: 258826 - DNA, 49 bp, Homo sapiens
  chr7:158659174-158659223
  hypo
cccgagtatcctgggcgtcccctctctggtcactcgtgtcctgggttcc

SEQ ID NO: 258827 - DNA, 223 bp, Homo sapiens
  chr7:158741230-158741453
  hypo
cagtcatcgcccccgggtgcttcggacacgggaggtgctcagtgaaggtggcgcgggggatggctgagtggcagttgtgtctgcagggcagagtcatatcggaatgtacaagcgcaactggatatgcagacttttattcctggaggctacagtctggtccctcaatgaccccacaccccccacaattatttacaaaattccatttgacgtaaactggagtcaa

SEQ ID NO: 258828 - DNA, 528 bp, Homo sapiens
  chr7:158766776-158767304
  hypo
accccgcgctgtccccggcggtctggcctggcgtctggagctccgggagcgcctgtcctcccagggccgatgccagcgcccgccctccgcgttcccggcattgacagaatgtccaggcgcgcagggcccgtgggtggggcctgggcacccggccctgccctcgcgcaccctccagacccgccacttcttagatagagagcggccgcctccccgccctcctttcagccactcgctccgcgcagtcagctctgctgactcttccggaggattctggaaggttccagagggtgtgccgccgaggccctgcgagagggcgttccctggggagaacattccagagcaaggtaacatccataaacggaggctgaaacggcctgagacgtcccgggagtaacgaagaccccaaggcggccccaacttgaggggggcgaggtagccaggaatgggggggtggtgggagggacgggaaggcaaacgcgctgcctgctggggacggacgcgccttggggcagccggggaggccccgaa

SEQ ID NO: 258829 - DNA, 196 bp, Homo sapiens; identical to SEQ ID NO: 212098
  chr7:158792183-158792379
  hypo

SEQ ID NO: 258830 - DNA, 257 bp, Homo sapiens
  chr7:158817162-158817419
  hypo
taaagcactgctgcgtcctccgacgcgagatggctgtgtgccaccgactgtccaaatgccctgccaatgccatcgtgaagcatccgtgtgaaggaaaaagtccaccttaccgtgcgctgtggcatcgatcaggcgtgtggacagtcgcaggcacgcagcggtctcccaacatcagggcacaccgcgatcaggtgtgtggacagtcgcaggcacgcagcggtcctgcagcagcagggcgcaccgcgatcaggtgtgtg

SEQ ID NO: 258831 - DNA, 186 bp, Homo sapiens
  chr7:158820419-158820605
  hypo
catatgtgtgcacacgccccacgcacacacccacacacgcatgtgcatcacatgaacgcgcgtgcacacacacactcctgcactcagtcctgctctattaacaggttcttgggctctgcagagctgacagaggccgtgttgggtgcggcaggacaaggctgggcgtgcaggcgcctcctccacagg

SEQ ID NO: 258832 - DNA, 222 bp, Homo sapiens
  chr7:158856804-158857026
  hypo
tggatggggaagccgcgcccggcgtgggtgggcgcggagggagcagaaaggaggcgatgcggctgctggggtgggagaggggcggccccacgcgccgggccaggagggctccttcttcccgcatttcacgggagccccggtcccctgccccggagccactggggcctggctgaggcgaccctgcacctgggccccgtgggctcgagcgggtccacagaggac

SEQ ID NO: 258833 - DNA, 158 bp, Homo sapiens
  chr7:158881371-158881529
  hypo
ctggagagggaatcacacagcggtggcagcacggcctgcaccacggagtgaaagcagtgagctccggagtccattcagctactctggtcacagcctggaaacgctgctgggagaacaatcccagtgcctcaggcctcggttcctcatctggggaatgg

SEQ ID NO: 258834 - DNA, 42 bp, Homo sapiens
  chr7:158890572-158890614
  hypo
ggccaaggcttctggcctctcgtgtaaggattccaggctctg

SEQ ID NO: 258835 - DNA, 179 bp, Homo sapiens
  chr7:158933386-158933565
  hypo
cctgcatatgaacccgctcaagctggcgtggggctgagtgactgcctgggacctgcggcccctagcgcccgatatgactcacacacggactgcccactgagggggagcccctgtgaatagtgtaaatgtgctgacctgcctttgggtgagggtgttccaggaggcgtcgccaatctcag

SEQ ID NO: 258836 - DNA, 114 bp, Homo sapiens
  chr7:158940025-158940139
  hypo
acctgggccttaggcgggctgcttggcttgtgaagaaagctcgtggcgctgggtgccttcgacaaacgcatctttttctcccggttccacctgggtgagcgatgaactttgagc

SEQ ID NO: 258837 - DNA, 42 bp, Homo sapiens
  chr7:158945568-158945610
  hypo
aagtcctggggtccaaaagccgaggagcctggagctccaaag

SEQ ID NO: 258838 - DNA, 187 bp, Homo sapiens
  chr7:158951178-158951365
  hypo
gacttgccccagcccgtctggtccagcagccgcactctcagctggacccttagacgggaaatcttagcgacttttctagggtgaagcttgatggcgttgtgatggggcgttctcgatgctgctttcttagcctagaaaagcacagagtgggcgccctccctgctccgtggtgcgcgtgttgattgtc

SEQ ID NO: 258839 - DNA, 1417 bp, Homo sapiens
  chr7:158962524-158963941
  hypo
ttgtcagtgggtgcagtgatcgagggcataaccgggctccatcccaatgctgcctcatccctgcagtcaccccgcacaggtgacgcaggcttcagagggccccggacctcgcctgagggtgaagaaaatcacggcatcactgacaaggccgccatgaggatcgcgtgagcagaaacacgatgatcatggctcactgatggggcagctctgaggatcgcgtgagcagaaacacacagataatcacagaatcactgacggggcagctctgaggatcacgtgagcagaaacacacagataatcacagaatcactgacggggctgctgtgaggatcccgtgagcagaaacatggatgatcacggctcactgacggggcagctctgaggatcgcgtgagcagaaacacacagataatcacagaatcactgacggggccgctgtgaggatcccgtgagcagaaacatggatgatcacggctcactgacggggcagctctgaggatcacgtgagcagaaacacacagataatcacagaatcactgacgaggcctctgtgaggatcccgtgagcagaaacatggatgatcgcggcctgactggcggggctgctgtgaggatcatatgaccagaaacacgtggaagatcatggctcactgacggggctgctgtgactattgcgtgagcagaaacacgatgatcatggctcactgaatgggcagctctgaggatcgcgtgagcagaaacatggatgatcatggctcactgacagggaggtctgaggattgcgtgagcagaaacacagataatcacagaatcactgagggggccactgtgaggatcgcatgagcagaaacacacagatgatcacggctcactaatggggccgctgcgagaatcgcgtgagcagaaacacggatgatcatggctcactgacggggcaactctgaggatcacgtgagcagaaacacacaaataatcacagaatcactgacggggccactgtgaggatcgcgtgagcagaaacacacagataaccaaggcctgaccaacggggctgctgggaggatcccgtgagcagaaacacggacgatcacagcatcactatcgagacggctctgaggatcctgtgagcaggacactggtgtgttatgctttaaagcttttccttgatcttggtgatttcacgtcttaggaaacctccctcactaatcagccggccccgtgggcaatgcagcttctcctgaaaagcaaacacttcaactttcaggcttcgtggccactgacccgcttctggccaggggcagcctcctccctacccctcgtgtaacggactacgggactggacatctgtcacgatgccatttgagacggaaagggcactgggccagtgtctggaactggcccgcacgcctcaggtcatct

SEQ ID NO: 258840 - DNA, 106 bp, Homo sapiens
  chr8:287940-288046
  hypo
catcttactctgtgggattgcggtggtcccgatgtctgtgtccccaagatgcctacgttgaaatcctaacccccagggtgatggcgtgaggaggtggggcttttgg

SEQ ID NO: 258841 - DNA, 101 bp, Homo sapiens
  chr8:566300-566401
  hypo
caagcatggggcaagagggacgcgttaactgaaagttgctgaagacaggctcctgtcggccaggtgtgggcggccgccgtccagagagaaactcctgccac

SEQ ID NO: 258842 - DNA, 76 bp, Homo sapiens
  chr8:566431-566507
  hypo
ccatgctctcctggctaagcggattcagcgctggccaacaaacccagacaggtacggccagagcactgctcccagg

SEQ ID NO: 258843 - DNA, 452 bp, Homo sapiens
  chr8:591505-591957
  hypo
gttaatagcctgtatcgtaatgtatttcctcaaaggtgtctctcattccacatcgaaagaccttttcacacagattattcaaattatagcttaatatttcttgattaattgtactgggaggaggtagtgtgtctgagcgtgatctaatcagtggagaacgcagcggccgtcacgcctgggtacgctggcagcggagctcctcccggaggacccctccccctccccgccgattcctctcctgtctgcgttttccaggctcatctcagatgccgccttgtctatgaagctctctttggttcctgcccagacctcatcagaatcaacgccccggctctgtgctggccaaaaccccacggtgcctctggccgtatgcagtcctttcttctgaccccatctcgtcctccagtctccactggtctcaggtcaatagctttttccgaggaggcatctat

SEQ ID NO: 258844 - DNA, 143 bp, Homo sapiens
  chr8:592172-592315
  hypo
cccagcacttaacgcgactggcccaggtggcagaggcactggtgtccatcagggcccacaggtcgggaatgcacactgctaactgcaatttgctttgctctcattcattttagcaggggaactgctgcaaagaacatccctaa

SEQ ID NO: 258845 - DNA, 157 bp, Homo sapiens
  chr8:593180-593337
  hypo
acattctgcctctcgttaaacattgcatgcgattcctgcgagttctctggcatgagacgatgacctagtaatggggtcgcagcagggacgggaagctggccaggcgcaggctgtgctcgcagggacgggaagctggccaggcgcaggctgcggtgtg

SEQ ID NO: 258846 - DNA, 284 bp, Homo sapiens; identical to SEQ ID NO: 212102
  chr8:636732-637016
  hypo

SEQ ID NO: 258847 - DNA, 571 bp, Homo sapiens
  chr8:644618-645189
  hypo
cagtcacaggcaccacgcagacaggagcaccacgaggggcctcacggcttgctcgtctgtgaatcacggtgaccatgtaacccataataccttctggttctaactttttatattcttttgggtaatgtatggtttactgtgaggacacttacgccttgcacaagttgaacgttacatgtcttgatcaggtgcaaggaagagaccggttacactttatggggtgggcggcagcgagagttccccgtcccatcatctcctccgccggacgcacagagaatgcagcgtctgtgagcacagctgccctggacctggcatctaagagtcagggtcagagaggggcagtcagaaacccacctccctgctggacaagtcacaagcaccagcatccctcgggaaaggcagaggggcgtggtggctcggagccctagggtgataggcggttggctgccctgtgggtttcaccagtgtcacctcttcgcaggtgtcattgacctggctcctttctccccgtcaggttcccctcagctcctctgggctgctcctggcagccgacagctatggaggggctcac

SEQ ID NO: 258848 - DNA, 285 bp, Homo sapiens
  chr8:651179-651464
  hypo
gacgggagcacaccgtacccacgggtctaccctgctggacgggagcacgccgtacccacgggtctaccctgctggacgggagcacgccgtacccacgggtctgccccgccggacgggagcacgccatacctacgggtctgccctgctggacgggagcacgccgtacccacgggtctaccctgctggacgggagcacgccatacctacgggtctgccccgccggacgggagcacgccttacccacgggtgtgccctgctggatgggaacacgccgtaggatgggag

SEQ ID NO: 258849 - DNA, 451 bp, Homo sapiens
  chr8:667715-668166
  hypo
tggggcagccaacgcggacatgtggctgaagtcgcctccccaggcacagctgcctgcgagtgtctggagccaggaaaatgctatggagaaatcccaggccatggtcagagccaggcaatgctgcagaacgcctgaggctgggcaggcacaagacagtcccagggacgggggcaggccagggcaggccctgactaaacagccaccgccaggagacgctgggcccaagcaagcatcagatgacagagttttctgaaacaaggcagctgatcccaaagaaaatggcagaacacgccagggtaaggatcggagcgcactgagaaacggcacaacacatcagcgtttggatcagagcgcactgagaaaccgcacaacacaccagggtacagattggagtgcactgacaaactgcacaacacaccagggtacagatcggagcgcacggagaaaccgc

SEQ ID NO: 258850 - DNA, 150 bp, Homo sapiens
  chr8:716398-716548
  hypo
tatgtgagctgcagcgttctttgaaattcgtcacataaatctttctaatgtcctccggaattgaactctggggtgacccaaattagtgcagcaaatatattgtgatatagatgaattacagctggtgcctctgcctttatcaatgtgtcc

SEQ ID NO: 258851 - DNA, 85 bp, Homo sapiens; identical to SEQ ID NO: 212104
  chr8:833589-833674
  hypo

SEQ ID NO: 258852 - DNA, 324 bp, Homo sapiens; identical to SEQ ID NO: 212105
  chr8:893356-893680
  hypo

SEQ ID NO: 258853 - DNA, 53 bp, Homo sapiens; identical to SEQ ID NO: 212106
  chr8:923935-923988
  hypo

SEQ ID NO: 258854 - DNA, 420 bp, Homo sapiens
  chr8:972315-972735
  hypo
tccctgggagtggacggtcccgtgccgaggtagacactctaaacaccacccaccctccctgggagtggacagtcccgtgccaaggtagacgctccaaacagcacccaccctccctgggagtggacggtcccgtgccaaggtagacactccagccgccatccatcctccctgggattggacggtcccatgccgaggtagacactccagccgccacccatcctccctgggagtggacggtcacgtgccgaggtagacactccagccgccacccatcctccctgggagtggacactcccgtgcttaggtagatgctccaaacagcacccaccctccctgggagtggacggtcccgtgccgaggtagacgctccaaacagcacccaccctccctgggggtggacagtaccgtgccgaggtagat

SEQ ID NO: 258855 - DNA, 297 bp, Homo sapiens
  chr8:976028-976325
  hypo
cggcccgtccaggccgcctccagcaccaccatgcacttcgtcccggcttccaggagccctggcagaaacggagctcagctgccagtctggcgtcctcgaacatgctgcgagtggcgttggtgcccatggctgtgaaaatggaatcgttgtcacctcatccaggacgtgcctcacgatcgtgctgtctcgttggtggagacgtttgccgtcttccgaagcttctctgcaccagaccctctgagatggcgcgcttgccccatgaccccaacgctttgctcttcacgtctcctttgacaa

SEQ ID NO: 258856 - DNA, 96 bp, Homo sapiens
  chr8:977339-977435
  hypo
caggtgtggtaccaggtgcccgttattctccaggtggggtgcttggtgcccgttattctccaggtggggtgctcggtgcctgttattctccaggtg

SEQ ID NO: 258857 - DNA, 76 bp, Homo sapiens
  chr8:978468-978544
  hypo
cctttattctccaggtggggtgccaggcgcccgttattctccacatgcggtgccaggcacccgttattctccaggt

SEQ ID NO: 258858 - DNA, 316 bp, Homo sapiens
  chr8:1026277-1026593
  hypo
gcatgagcccccgccggctgtccgcagctcacacggcactgacacagacactgagctgcaagtcccagctcactacgtggcagtgagtcgcagctccccgtctccgagcctcagtttccatgcaggagacgtacggtattttgcggaaagtcggatgggttagagggcaggatgctttcgaagttcttgtggaacaggaggcagatctgccgctcatggcccacacctgggttggtctcggaagatggcctctgggctgtgatgctccggccagggccacggctcagcccctctcttgagccgccttccgttttca

SEQ ID NO: 258859 - DNA, 96 bp, Homo sapiens
  chr8:1043967-1044063
  hypo
tccatgcaggcgctcgtggatggagggcagctccccggtggagggagggcagcttcgcggtgggtggagggagggcagctccgcggtggagggagg

SEQ ID NO: 258860 - DNA, 268 bp, Homo sapiens; identical to SEQ ID NO: 212107
  chr8:1047978-1048246
  hypo

SEQ ID NO: 258861 - DNA, 279 bp, Homo sapiens
  chr8:1048567-1048846
  hypo
acccacagacgccgcgacccacaccaggctcccggccgcccacgggcgccgccacccacgccaggctcccggccgcccacggacgccgccacccacgccaggctcccggccgcccacgggcgccgccacccacgccaggctcccggccgcccacgggcgccgccacccacgccaggctcccggccgcccacgggcgccgccacccacgccaggctcccggccgcccacggacgccgccacccactccaggctcccggccgcgcacggacgctgcgacgc

SEQ ID NO: 258862 - DNA, 231 bp, Homo sapiens
  chr8:1078116-1078347
  hypo
gaggacctgctccccgtgttgtgttcggtgaggacctgctcccggtgttgtgttccgtgaggacctgctccccgtgttgtgttcggtgaggacctgctccccatgttgtgttcggtgaggacctgctcccggtgttgtgttcggtgaggacctgctcccggtgttgtgttccatgaggacctgctcctggtgttgtgttcggtgaggacctgcccccggtgttgtgttccg

SEQ ID NO: 258863 - DNA, 147 bp, Homo sapiens
  chr8:1104691-1104838
  hypo
ccgcagtcgaggaccgagctgccttttctcccggagtcggtcaggatttccagtccttactgtggccgggcaccctctatagtcctgccgtccatcccgccctaaaataagactgtgggcctgacaaaggcccggggtgccttggag

SEQ ID NO: 258864 - DNA, 69 bp, Homo sapiens
  chr8:1105155-1105224
  hypo
tcccgtgtcccctgcgtctctcctctgcccagcacacaccagggtttctaggaacgcttgctggatgag

SEQ ID NO: 258865 - DNA, 43 bp, Homo sapiens
  chr8:1108701-1108744
  hypo
acctttgtgggctgcgcacccagagccacgcgggtcctggtgg

SEQ ID NO: 258866 - DNA, 508 bp, Homo sapiens
  chr8:1132631-1133139
  hypo
ctgtccttctgtgacctctgcgtggtgagttgggcattgagctgccgtaggtcactgagtctgccctgccatcacgtctgcgctgccctgagacacggagctccagcacattctgcagagctcacactatcgagtccagcgcgcatgtgagaggcaggaagggagagtccacgggtcggcaactctgggcagtggcgcgtgggggacggactccgcagcctgtgggatcggcagcatccagtgaggtggagcggggctcaggggcactcaggatgcagtgagcgcacagccctgcggtggcatgggtgggagacgcgcaccatggagccggtggaaggtagacattcgagcgagctggggccagttcctggaagtgtgtcactgccagtgcggggaacgtgagatttactcacccagcagcgggacctactggagtgctttcggtaagagctgggatgacacaaatgcattcacgttcgattccctcgagatgccttgtgggtggggc

SEQ ID NO: 258867 - DNA, 608 bp, Homo sapiens
  chr8:1150805-1151413
  hypo
gaatggagagtggcagctttcgctttgttttccgttcccacatatcggtttggcatcgaacgatgcgtccgctgctggctcccgtgctcggtttctccacgccgcctccgggcggtgcgcgattcagctccaggagcgtgttgtgcacggcggggcgctgcgctcggccttagggaaagaaggcgcggctgtctccccggaccccaccgttagggacccacacctagaggtgagtgtggcgtgagcggccaggcgggtgccgagatgcccagagaccagcactggggaggctgctccccgtccccgaggcctggagccgtgggaggaagaggaggatgccacggagccctgtggaggctgaagccgctgcgtagggagccccttgtccatcagggttctcgagagacgcagaaccaggggtgcatgcacgcgtgtgattgtggaggctggcaggtcccaaccacagagccgaagtccccagcatccccgcgcaggtgtgaggccctcagcgaccctggaaccagcaggagctctgctcccgctcaggggccgtggggcagggggctcccccttcctcgggaagggacggccttctgttccctgcaggg

SEQ ID NO: 258868 - DNA, 150 bp, Homo sapiens
  chr8:1207574-1207724
  hypo
atggcattacgtggcgtctcctctgtgggccccgggctgtcacgctggatggcagagtgtgtgcctctgtagctgacgtggaagagccagtgtctttctgagggcccgtgcaggccagtgctggcgtggaagagccggtgtcctcccgag

SEQ ID NO: 258869 - DNA, 239 bp, Homo sapiens
  chr8:1246593-1246832
  hypo
agcctacagaggccgcgtccttccacatgatggccccgcacctggcactgtcgccgtccctcagtggagacaccaggaagccctggatcacagtgtgacacgttctgtactggggtataaatacggtttcatggggacacacaggagggagctgagtgtgctcctctggccccggagagtgctgagaggcagcgtaccctgcagaagagtggcagtcgctgagcgtgggggacggctca

SEQ ID NO: 258870 - DNA, 226 bp, Homo sapiens
  chr8:1251026-1251252
  hypo
ctcttaggtactttccaaaacgtctggctgtaactcgcctccttctgccgtgcttttggtagattcagtaaaacatgcacgtccttggagattccatcgccgcaggagtcattccttagctgtcggctgcaggctgtgaggatgggccttcgtaaggacacagatggttggatgttcctggactccacctcgcaggggagcgagcgtccttggaagaggaaaaagc

SEQ ID NO: 258871 - DNA, 253 bp, Homo sapiens
  chr8:1269311-1269564
  hypo
catgcatccgtgcccgtatgtgtctgcgtccatgtgtctctacgtgtgcacgtgcatccatgtgcctctgcatgtgtgtgtgcatctgtgtctctgcatgtgcacgtgcatctgtgccatgtgcgtgtgcgtgcatctgtgtgtctctgtgtgcatctgtgtgtctctgcgtgtgcgtgtgtgtctgtgtgtctctgcatgtgcttatgcatccgtaccatgtgcgtgcatgtgtatccgtgtgtctctgcat

SEQ ID NO: 258872 - DNA, 260 bp, Homo sapiens
  chr8:1303163-1303423
  hypo
cggatgagggtggaaagtcacggatgatgctgtggatgagggtggaaagtcacggatgatgctgtggatgagggtggaaagtcacggatgattctgtggatgaaggtggaaagtcacggaaatgtgcgttgtatgttttaagtggcaaagccgagcagaaagcaccgtgaaagcggtgacactgcatgcccgtgacagtggtggcacccgcgtgctggcgtgacagcggtgacacctgcgtgccagtgtgcacagcacag

SEQ ID NO: 258873 - DNA, 95 bp, Homo sapiens
  chr8:1307777-1307872
  hypo
gctgatgctgtcggcggctgtccctgtgggtgatgcggtggcgctggcagatagccatcccctcccaatcccacggtagacgctggcctcagctc

SEQ ID NO: 258874 - DNA, 310 bp, Homo sapiens
  chr8:1308186-1308496
  hypo
aagaacaggaccatcgcgagccactttccgcctcttcatccccgtccactgaggaaatccaccgaagccctttgtgtggggttcggaggagagcgggttgcagggacttgccttctgggtgtgaccttggtgcaggtgcataagggttagcgactcctgctgcttcccgggtgtgctcaggggcggggcttttccggggcggggcttctccggggcggggcttctccggggcggggcttctccggggcggggcttctctggggcggggcttctccggggcggggcttctccggggcggggcttctccagg

SEQ ID NO: 258875 - DNA, 185 bp, Homo sapiens
  chr8:1324842-1325027
  hypo
tcatcggcggatggcggggacagggctaccgagaccctcaacctgagcccggtgggatgtgtggtcatcggcggatggcggggacagggctaccgagaccctcaacctgagcccggtgggatgtgtggtccgcaggtggggttcttcttgctactgcaagcgtatttggccgtgaaagcgaaatg

SEQ ID NO: 258876 - DNA, 244 bp, Homo sapiens
  chr8:1326031-1326275
  hypo
ctgtgtctcttctgcgaagctgcacccacctcgtctgtctgggggtggcagccccaaatcagctgatggagttcacgcacccctgtgcagacgcagcctcccccagggcctttggctgccgtacaccctcaggcttggtccctctcagcagccactgaatcagacagctgccccaagacctgacttgcactgtactcctgctgaagtgacccgtctcaagatatctggacgcaggtgcacacct

SEQ ID NO: 258877 - DNA, 130 bp, Homo sapiens
  chr8:1326603-1326733
  hypo
acctgtccatcctgcgcacacctgacttcgcctgtccatcctgcacacacctggcctcacctgtctttcctgcgcacacctgacctcacctgtccctgacacacacagctgacttcgcctgtctgtcctg

SEQ ID NO: 258878 - DNA, 301 bp, Homo sapiens
  chr8:1379943-1380244
  hypo
gtaaaatgaagacactgatgcgtgcatgacagggactcttctgatgcctccgtgtcgatggccaccaagccctgagaaccctgccggcacccagcaccccatgccagccagcaccgctacggctgccatccatcagggctgaaccctgccggcacccagcaccccatgccagccagcaccgctacggctgccatccatcggggctgaatcctgccggcacccagcaccccatgccagccagcaccgctacggctgccatccatcggggctgaaccctgccggcacccagcaccccatgcca

SEQ ID NO: 258879 - DNA, 150 bp, Homo sapiens
  chr8:1411609-1411759
  hypo
tgctccccaggaactcccttcgaacccaccgtccaaagccagggtcaggcagcctcgggtatggttggctcagggtcctgttcccaggacgctcctgccccgggtggccccgagctggtccggcctcgcgttgaggggtccagtggttta

SEQ ID NO: 258880 - DNA, 678 bp, Homo sapiens
  chr8:1443511-1444189
  hypo
gaggcagccgaggacgtttactgtcccgtgttacccggccacacaccccagggccctttctcttccccttctgctgtgctgctctgagccggagactgagccggccagggcagccgaggccaagagtggcgctgctgaggggccgccatcatgaggggtcagaatgtggtgggtgagccaggactgcgctggcccggcgaggtcggtgtgctgagaccacagtgtgctcgggtcacagtggtgattgaaacgtttgcctctgcacctactgggaagcctcttcctggaggaccctggctttgatctgtggttgtgctgacgtggacatctttgcctcgcaggatgcagattgcagacgctcatcgtctcgcaggcagctccagctcgagtggtggccgtgctgggtctgtgcccggggccttcccccgtatgctttcgctttctagtgtctgcgatgacgtgcgattcactaatcacccggactcagcgcatctctatgttaaatagcgcgtgtccatctgcaaagcacacgacagcccctgcggccactgggtgccggcgcccagcctgtcccgagagcctctgacagccaaggattggcccaggtgtggctgatggatgaaacaagactgtgagtattcccaggcagtgacgtggggcccccggcacggttctcct

SEQ ID NO: 258881 - DNA, 398 bp, Homo sapiens
  chr8:1471336-1471734
  hypo
cccctctggtggtccgggcccatggtcctgccaggggcccacagcatgaagatgtagctccctcacacacacgttgaatttggatttgcttgtctggcttctgctggggcgcaggatgtggggatggaaggaccaagacacacgacagagaacagcgtcacggggtcaccgtcccacttcccaccccgcgcctcacagcacagacgggggatttgccggcctcacgccggccgagccactgctgacttcacgcagccccagccatgcccccacgcagacacacggagccccaaggcgggccagatctcagggccggatggggctgtggagctgtgccttagacgggggggaaggactccctgccccaggccggcaccgcacagtccctgggtagaaaa

SEQ ID NO: 258882 - DNA, 298 bp, Homo sapiens
  chr8:1475085-1475383
  hypo
cagggcaagagcaaaggaaacgtggtgtggcctcgagttaggctgcaagcagcgggtgccgtcacaagcccacccgttaccacgacttcgcatcgtctacattgcaggctcacgttcacatgccctatccaaccctctcctgcgagcagcgggtgccatcacaagcccacccgttaccacagcttcacatcgtctacaccgcgggctcacgttcacacgccctatccaaccctctcctgtgagttcacaaatccgtgactgacatggtgtgcacctcgtcctcttgtccaggcttctc

SEQ ID NO: 258883 - DNA, 304 bp, Homo sapiens
  chr8:1501387-1501691
  hypo
gcagcctcccagtctcccaccgcgtcctgcgctcctggttttctcctcttctagtgtcttccccacctggcgtcgcccggccgcaaccctggccctcctggggaagaggttcggaccctactctttatttgacatgaagaggttcggactcccagttttattcggcatgttcacgggcagcagccccattttgtttggcgtgttcacgggcagcagccctgttttattcggcgtgttcacggtcagcagccccgttgtgcttggcgtgttcacgggcagccccgttagactttgggttttacct

SEQ ID NO: 258884 - DNA, 381 bp, Homo sapiens
  chr8:1578880-1579261
  hypo
aagtttgcccttcatgtttaacattcaattttttctcaagcacaggaagggaattaaaaatctaactgaagtcttgtgagaggtgcttatgtccatgccgtttcctccttggaacctcagtagctgcactctgcttgggtttcctgcagctcatgtcccgagggtctcggcgggaggtccgggtgtcccgagggtctgggcgggaggtccgggtgtcccgagggtctcggcgggaggtcccagtgtcccgagggtctcggcgggaggtccgggtgtcccgagggtctcggcgggaggtccgggtgtcccgagggtctgggcgggaggtccgggtgccccaagggtctgggcgggaggtccgggtgaacagatcattttaat

SEQ ID NO: 258885 - DNA, 209 bp, Homo sapiens
  chr8:1581635-1581844
  hypo
acatgactcaccgccgctaagcaggtccatcattaatgcagatgcactaactatcttagagctccgaagactcagtctcgcaatttcctttagttctcatggaaaaccatacccacccctttgaaaatttaccgcccaacctaaatatcactgcctaatattttactgcctaatatgttattatttctataacacgatgaatacacatg

SEQ ID NO: 258886 - DNA, 273 bp, Homo sapiens
  chr8:1615950-1616223
  hypo
gatgacatgacctgcgtagaaatgacgccatgcctgtgcgctgtcctgcggggacacaccttgcctagctgtgtctctgctgctgggtttgctggtatttttaaatgatgccatgcctgtgcgctgtcctgcggggacacaccttgcctaggtgtgtctccgctgctggatttgttggtatttttaaatgacgccacacctgcgcactgtcctgaggggacgcacgttgcctagctgtgtctctgctgctggatttgtcggtatttttaaatg

SEQ ID NO: 258887 - DNA, 121 bp, Homo sapiens
  chr8:1616694-1616815
  hypo
aaggccatgaacctcgcgctggaaacggccgctgcccagcgccacctgccagagagccagagcagctctgtgcggaccagcgacaaggccatcctggtgtccaaggcggaggagctcctca

SEQ ID NO: 258888 - DNA, 284 bp, Homo sapiens
  chr8:1721745-1722029
  hypo
atcagcatcctgtacgcagcttgcagttttccagttttctctttgtgggcgttatttccataagagtgcagacttctgggatgcaggtcagggctgtgacttccctgggtttctctggagtgagatcagtgtggagtggagaggtgtgtgctggaggaagaggccttggcctgtgctccgcattgcctactcctctcacctggaaacaccggacttcaggagtcactcggctgtggcagaaaataaagttcttgaaaggaaagcagaggcgctcactcacatcg

SEQ ID NO: 258889 - DNA, 106 bp, Homo sapiens
  chr8:1723929-1724035
  hypo
gatgttcagaacatcgactcttcagtgttttgtcttcagacacacactcttttcactcctgttgatactgtacgctctcttgaggagcaatgagcactcttgcagg

SEQ ID NO: 258890 - DNA, 119 bp, Homo sapiens
  chr8:1724065-1724184
  hypo
acgattctcagtcttccgtaagtgggaatctgtgggaggcacatatgcatgtggtgcggcacacacgacagaagattctggaagctgaatctgtgaggggcacacgtgtgtggtggtgc

SEQ ID NO: 258891 - DNA, 226 bp, Homo sapiens
  chr8:1725081-1725307
  hypo
ctggatggtttacacagacacggtgagagacgttacccggacgcaaaagagtacacagcgtgtgataccgttccatgtacagtcatacgttgcttaacgacgggctgtgttctgagaaatgtgtccttaggctattttgtcatcgagtggccgtcatagagtacctttctacatgtctaagccaactccacactcggctctatgcgacaaagcccattgttcccag

SEQ ID NO: 258892 - DNA, 44 bp, Homo sapiens
  chr8:1759476-1759520
  hypo
gtaacttagcggaggcgtgcagggcccaccgtttgtaccggctg

SEQ ID NO: 258893 - DNA, 235 bp, Homo sapiens; identical to SEQ ID NO: 212119
  chr8:1777141-1777376
  hypo

SEQ ID NO: 258894 - DNA, 33 bp, Homo sapiens
  chr8:1777967-1778000
  hypo
ctgcggaggaagaacgcgcggcgaggcccgggg

SEQ ID NO: 258895 - DNA, 88 bp, Homo sapiens
  chr8:1783965-1784053
  hypo
cggcctgacgcacacggcatgaaacggtccttcagcctcggtgtctctgggctccctctctgactgaatgcatcatctttttgtttaa

SEQ ID NO: 258896 - DNA, 382 bp, Homo sapiens
  chr8:1791891-1792273
  hypo
aatcggagatggagcgggagggttgttacagaatggcgccttccagtgttgaaggcctcgctcaggcttaaagctcagctcgcccatggcgggtgctcgcccagtttccttttctgcctccctcctctgagcggccgctcagggacaagcacgccctctctatccatatgctccaataagggagggcctgctgatgaaagatttatcttcattgtcacctcacctgagttaaattgttgccaaaaagactatgccagggttgccagctcgcgctccggccagtggagaaggtggacactgaccgacgtttccatggcaggtcgtctgcagggcctggagacctggcctaggtcctcccggggcctgccggaccacatgttgc

SEQ ID NO: 258897 - DNA, 307 bp, Homo sapiens; identical to SEQ ID NO: 212120
  chr8:1796262-1796569
  hypo

SEQ ID NO: 258898 - DNA, 162 bp, Homo sapiens; identical to SEQ ID NO: 212121
  chr8:1797380-1797542
  hypo

SEQ ID NO: 258899 - DNA, 522 bp, Homo sapiens
  chr8:1797602-1798124
  hypo
aggagggcgtggggcggccacatggacacagacagcaaatgctgaggggggcgtggggcagccacgtggacacagggcaaatgctgaggagggcgtggggcggccacgtgggcatggacagcaaatgctgaggagggcgtggggccagctgcgtggacacagacggcaaatgctgaggagggcgtggggcagtcgtgtggacacagacggcaaatgctgaggagggcgtggggtggccacgtgggcatggatggcaaatgctgaggagggcatggggtggccacgtggtcacagacagcaaatgctgaggagggcgtggggcggccacgtggacatagagggcaaatgctgaggagggcgtgggccggctgcgtggacacagggcaaatgctgaggagggcttgggcggccacgtggacacagacagcaaatgctgaggagggcgtggggcgaccatgtggacacagagggcaaatgctgaggagggcgtgggccggctgcgtggacacagagggcaaatgc

SEQ ID NO: 258900 - DNA, 42 bp, Homo sapiens
  chr8:1798701-1798743
  hypo
ggcgtggggcagctgcgtggacacagacggcaaatgctgagg

SEQ ID NO: 258901 - DNA, 201 bp, Homo sapiens
  chr8:1801273-1801474
  hypo
ggatgcctgtgggtcggcacgggctgcactgccgtctgtgtttcctcctccgtgtcatggccttcatgggtgactctcagaacctgccgtcctgagtgggcaggaggggcacagagcctctccctaggtgcagccctgcccaggccgcccttccctgcttccctgccagctgcctacccagagcgccgggcccttcccgcc

SEQ ID NO: 258902 - DNA, 50 bp, Homo sapiens
  chr8:1805144-1805194
  hypo
cagtcctagcacgccgtctctgcaaatgatgcacacggcaggctgcgcca

SEQ ID NO: 258903 - DNA, 281 bp, Homo sapiens
  chr8:1807458-1807739
  hypo
ttgtgtgcagcacgcgcctctctgcttacacggtgtttctttgtgcatagcaccagcctctcggttgtttgcccggtgtttctttggccatagcacctgcctctcggttgtttgcacggtgtttctttgtgcgcagcacccgcctctctgcttacatggtgtttctttgtgcatagcaccagcctctcggttgtttgcacagtgtttctttggccatagcatcagcctctcggttgtttgcatggcgtttctttgtgcacagcacccgcctctcagcttgc

SEQ ID NO: 258904 - DNA, 75 bp, Homo sapiens
  chr8:1814165-1814240
  hypo
tgcaaaggatgacaccgcagtccctgtgtgtgtgggactctggtggcccatgtgaccacccgctgggggcagagc

SEQ ID NO: 258905 - DNA, 189 bp, Homo sapiens
  chr8:1821224-1821413
  hypo
cgtcggccccctgccgtgtggcgaggcccagtgtgtcccctttgtaaggacagcacaagcaggagttaatggaccggccatccatagcggtggtggggcagggagccagtttccgaaagaaactcacgccgccgcaggagggccctgtgggatgctctgtgcagagctgttgtgcggaccgggagacgg

SEQ ID NO: 258906 - DNA, 54 bp, Homo sapiens; identical to SEQ ID NO: 212123
  chr8:1826001-1826055
  hypo

SEQ ID NO: 258907 - DNA, 175 bp, Homo sapiens
  chr8:1830207-1830382
  hypo
ggccagggggacatggcttccgagtctgacatccgcagcgtgctgcaccccgaccctccctcaggtgtgtcccgtgcgtgtctgcagcatttgccagggtcttgcattcagccccgtggctggagctgggtccgtgtaaccatgcgtgtgaggcggccctgtcaacagctggcca

SEQ ID NO: 258908 - DNA, 300 bp, Homo sapiens; identical to SEQ ID NO: 212124
  chr8:1830728-1831028
  hypo

SEQ ID NO: 258909 - DNA, 46 bp, Homo sapiens
  chr8:1850870-1850916
  hypo
ttgtgctgtgcattcggtgggttcggatgaacgtttagtgacatgg

SEQ ID NO: 258910 - DNA, 727 bp, Homo sapiens
  chr8:1877722-1878449
  hypo
tccgcccctgcgctcgtcacccttgcccaaggcccgggtgccttgcttcttccccaaaaggtgtttgttgaatatacagacatctttcagaagtcagtctgcccgtctcctcccaccctcccacttctctcggcctgcctgtttctccccctcggatgggggcaccgggccatgcagagcctccttcagcatgtcctgcgctgaccagctgagcagcctgcccgcccggcggggcctcctgtacctgggccagccctctttgccccggtgctgtgccctcggtcccgtgccctcggtccctgctgttctcttggccacagggctaaggactccattgtgttctgctgggtgccttagacgaggccctccctggcccatcccgcctggtccccgcagccgctgggggtgggcagctgctgtgtgtctgttctctctccagcccctgccgcgttggtggcagctgtgctttgcaggctcttcctgtggatctggccgccgctgcttgtgggagctctgggtacggggctttccttccagcttccttggtgctggctgaggctgctctcctggcccctcactcagctctgagcgcaggggtgccgagccccagctggatcccagccagtctcggtgctgccatcctggagtggaacacgcagggcttccctcaccgaaagttgccctgcaccaccctccccacggccgggagcgacgccttggcgggtcc

SEQ ID NO: 258911 - DNA, 109 bp, Homo sapiens
  chr8:1879662-1879771
  hypo
atctgctgaacgtgtctcttcgcatctttctcaccaagagctgtccggcgtaccgtgtgggagcgtgcgaggcagcctgcgcagaagcgcatagcctgccacttcgttc

SEQ ID NO: 258912 - DNA, 346 bp, Homo sapiens
  chr8:1885043-1885389
  hypo
atgcgggctaatgccgtcttcagccaggaaagggctctccggctggcccctggagacgtgggtttggttaggaatgcgaggtccacactggggcaaggtgcagatgggacctgggtcctgagcctcctggaggccgacgctctgccgtggatcatgaatagcattcccgcgtgagtctttttttgacacagcctccccgacgtccttcgagacctggtctgctagacaggaacagaaaatagctggacagggaggttggggtacatgttagatgatttttggcagtattgttcctgttacttttcatatccatctgacacttcttatttcacgtgccctgagaatg

SEQ ID NO: 258913 - DNA, 151 bp, Homo sapiens
  chr8:1902126-1902277
  hypo
tggcaggtccacccacaaggattaaggaattctagttttgccattcatttcctaatttatgtttttattatgatatatgggattgtacatgttgaggaccccaaatccaaaaacaaaatgcgaaatgctccaattttttttttttcttttt

SEQ ID NO: 258914 - DNA, 33 bp, Homo sapiens; identical to SEQ ID NO: 212126
  chr8:1926963-1926996
  hypo

SEQ ID NO: 258915 - DNA, 283 bp, Homo sapiens
  chr8:1942393-1942676
  hypo
gtgggggacagctggtggagcgaggccgggcctgccccaggatcccagtgctgccccatctcctgctgcgtcaatgctcagaactgcgcagagcaccctgacttgcttggattctgtctacaggatgcaggggcaaccggcgacccgcctgaacattccagaggctttgctcagccccgtgcatggctgtgacaggcgtcagctcagacagggccgggagtctgaatgactcaagaggtgtcatggcacggtggctgatggcgtgggcagtggagccagttgc

SEQ ID NO: 258916 - DNA, 91 bp, Homo sapiens
  chr8:2522805-2522896
  hypo
gactaaggctagaacgttcagagatggaacagcccgagccaagtgatcgtgtgaacggttccatgaccctgaagaacgaagtgggtgcggc

SEQ ID NO: 258917 - DNA, 32 bp, Homo sapiens
  chr8:2536389-2536421
  hypo
tgagccaccgcgccccccctggttttctgttg

SEQ ID NO: 258918 - DNA, 38 bp, Homo sapiens
  chr8:2609653-2609691
  hypo
ccagcctcgacatccggaagtcacgcaggcaccagaac

SEQ ID NO: 258919 - DNA, 187 bp, Homo sapiens
  chr8:3509584-3509771
  hypo
tacccccatcagagcgcttaccaccatcagagcacctaccaccatcagcacgcttaccatcagagcgcttaccaccatcagagcgcttaccaccatcagagcgcttaccaccatcagaacacctaccaccttcagcgggcctaccaccatcagagcgccatcaccaccagagcgcctaccaacgtca

SEQ ID NO: 258920 - DNA, 48 bp, Homo sapiens
  chr8:4110697-4110745
  hypo
tggtctattctcctcttctacgatcccgccccattcctagttatcatt

SEQ ID NO: 258921 - DNA, 42 bp, Homo sapiens
  chr8:4123574-4123616
  hypo
gatactgatcacctgcccaccgcacatagactcaccaggcat

SEQ ID NO: 258922 - DNA, 31 bp, Homo sapiens
  chr8:4218294-4218325
  hypo
tgtgagccactgcacccggcccctcggggtt

SEQ ID NO: 258923 - DNA, 42 bp, Homo sapiens
  chr8:4880493-4880535
  hypo
gcaaaacaatgaaccagcaacgcatggtggctcacacctgta

SEQ ID NO: 258924 - DNA, 253 bp, Homo sapiens
  chr8:5829440-5829693
  hypo
ggcttcattctccccgacctgtgttatattttacaaaaacacctcgagactggctcacccaattgcctctgtgagcgcccctaggaacttgttttgaggctgaatacactccatctatgaccgctctgtttcccggcccttggccaatatagacccaatgtcctcaggttctttcccttctgcgagctgggtgacatcacttcagaccaatgccctattgtatgttagaaccaaaaagcgtttacatttccat

SEQ ID NO: 258925 - DNA, 134 bp, Homo sapiens
  chr8:5909951-5910085
  hypo
caggcacaacgcctcgcagtccccgaaatccactctctacgtccatcatgggtctgtttgtccggcccccaggtatcatcgcagctgggctggcttctgagacgacttgcggagtcatccgtgaccccatgagt

SEQ ID NO: 258926 - DNA, 42 bp, Homo sapiens
  chr8:6302322-6302364
  hypo
acatggctcccattcacctccgaaggaaaaatgcaagagaaa

SEQ ID NO: 258927 - DNA, 376 bp, Homo sapiens
  chr8:6313799-6314175
  hypo
ctgctctacaatggcgttgcgcactgtgactccactgcagcctgcgggacctgctcagcgcgctgcctcccaggggtggggcccttcctagaacgctcgcaacactgtggctgagtttgtgttttgcgtcccagtttctcagtcttcttcctactgctacatggccgcttgacctagttcatttggaaagaaataaagaaccagtttcctttgcatctactaccgttcccgtgcctctcctgctgatgcgtcgcatggcaccacagctctgttctgtgccctcccgctttactgaccctttaccctctgccagtgtctgcccagggaagccgtggtacctctcatctctattggtactctacgttgtaccatgtct

SEQ ID NO: 258928 - DNA, 270 bp, Homo sapiens
  chr8:6322707-6322977
  hypo
tctgtttgagatattcggaaactcaatagcttgctgaagtagcaaacttgaatccttatttttattttaaaagggagtaaagggactgtagataagtaaaagatgctctgcactgcgcctctctggtaccagtccctctcgtttaggcagcggccacttcccgcggagctgttcacgccaagtgaccctgccactgcgctgctcccaccaccccatgtccaccccgtcctcggacgcctggtctcagcacatcaccggtattctcttcct

SEQ ID NO: 258929 - DNA, 272 bp, Homo sapiens
  chr8:6323187-6323459
  hypo
ggaagggcggagggcgggggaggcctgcaaaccttacggcttatttccactgacatcagagactcatgttaataagtaacaagcggctttgtttgttatgctcctcagacacgcggtaaggtagacacacagaaatgcacagctgtacgtatttgtcttgaaggctagaatttactttaaatgtgagtggttttcccaggaaaaatttatgtctgttctcttgaggaataattatttcctactcaattttatctatcgatccatccatccat

SEQ ID NO: 258930 - DNA, 70 bp, Homo sapiens
  chr8:6345659-6345729
  hypo
gctcctgcaggctgcggcagcgtggcctctggccgctgggagcatgggaagcaggcgctgcggtctaggt

SEQ ID NO: 258931 - DNA, 38 bp, Homo sapiens; identical to SEQ ID NO: 212127
  chr8:6361545-6361583
  hypo

SEQ ID NO: 258932 - DNA, 169 bp, Homo sapiens
  chr8:6400935-6401104
  hypo
tggatgcaaacacacatttccgtgctctgcagcaacttgagactcctgtgagcaaaacgcactgacgggcaatgtgcgtgggtcgtggggagcatccagctcccatctgcggaataaacccgcccaaaccatagggaaaagcgctgtcgtataaggccaggggattttc

SEQ ID NO: 258933 - DNA, 341 bp, Homo sapiens; identical to SEQ ID NO: 212128
  chr8:6414547-6414888
  hypo

SEQ ID NO: 258934 - DNA, 262 bp, Homo sapiens
  chr8:6434438-6434700
  hypo
agataaaagcaatggcgcctcctttgaaatctgagagacgcagggccctgcccattctgcggaattccttctccctgctgcctgctgtgaggaggccccctttgccacggaacctgaaattcctgccactggaattacgctctggacaagcggcaagatactcctttcagtcccagccactgggttcctgctgcacaggaggccagggtgctgtgaacctgctctcagccccgggcaaagggaatctcgttaatccaggtgg

SEQ ID NO: 258935 - DNA, 102 bp, Homo sapiens; identical to SEQ ID NO: 212129
  chr8:6456168-6456270
  hypo

SEQ ID NO: 258936 - DNA, 159 bp, Homo sapiens; identical to SEQ ID NO: 212130
  chr8:6465692-6465851
  hypo

SEQ ID NO: 258937 - DNA, 84 bp, Homo sapiens
  chr8:6535110-6535194
  hypo
tcctgctgttaaatcgctttgaaatgaggtgcagtgaacgatgggattccttcgaggattctgccatagcggccccgggataga

SEQ ID NO: 258938 - DNA, 43 bp, Homo sapiens
  chr8:6559148-6559191
  hypo
cttgatctgtctattcccagcggtgtttttgtttttgttttga

SEQ ID NO: 258939 - DNA, 90 bp, Homo sapiens
  chr8:6590044-6590134
  hypo
aaagtaaatgctctttctcccgatttgattgtggcagcatggaggaatctatgtaaagcgcagtgccaaatttaacgagaaagagatgcg

SEQ ID NO: 258940 - DNA, 473 bp, Homo sapiens; identical to SEQ ID NO: 212131
  chr8:6630575-6631048
  hypo

SEQ ID NO: 258941 - DNA, 110 bp, Homo sapiens; identical to SEQ ID NO: 212132
  chr8:6633001-6633111
  hypo

SEQ ID NO: 258942 - DNA, 229 bp, Homo sapiens; identical to SEQ ID NO: 212133
  chr8:6636292-6636521
  hypo

SEQ ID NO: 258943 - DNA, 102 bp, Homo sapiens
  chr8:6637651-6637753
  hypo
gcagcaacaactacagacaccgcacgcatgtgcgtcctgctcacgggaacgggtccgtggttttgtcctgtacaggttctcgggaggacagtgtcactgccc

SEQ ID NO: 258944 - DNA, 69 bp, Homo sapiens
  chr8:6664120-6664189
  hypo
ctcacgcactggacgtggcacagcctgggcagcgccggcccctgtccttcctgcggacctgtgaggagc

SEQ ID NO: 258945 - DNA, 93 bp, Homo sapiens; identical to SEQ ID NO: 212134
  chr8:6707719-6707812
  hypo

SEQ ID NO: 258946 - DNA, 209 bp, Homo sapiens; identical to SEQ ID NO: 212135
  chr8:6756662-6756871
  hypo

SEQ ID NO: 258947 - DNA, 77 bp, Homo sapiens
  chr8:8102810-8102887
  hypo
tgtgtgatgacctcttgatacggaaggcagaaagaaattatttgggcggatagtgatggtaaaagagtcctcgacaa

SEQ ID NO: 258948 - DNA, 36 bp, Homo sapiens
  chr8:8122017-8122053
  hypo
tgagccactgcgcccggcccctctctcctaatttca

SEQ ID NO: 258949 - DNA, 547 bp, Homo sapiens
  chr8:8176211-8176758
  hypo
ttggggtgccgcccggcttctgcttggccttcaaaaagttgctgatgatgagccggggcagctgcttctcccggggcccttccggggaggcggggccggctgcggggctgagagtgccaccagcaggcggggcggcagaggagcagggaggcgcggcggcggcgggggcgggagccggggcgggggcgggcccggggccggcctggagggtgcagtgcaccagcagcaggttctccaggcacaggtcccggtggatgatcccgtgctccttcaggtgctccagcccgttgcagagttgcagaagcaggaagcacacgcgccgctcgtacgcctcgggctccgcctggtggctggccgccgagtcccgcacgaagtcggaggcggtctgatgtggcacctctcgggtgatgaccaccacgcagtcctgctcctgggcaggggggtgtgtgggcagggcaggcacagggtccttgggcgcgtcgggggagctgagcatgctggacggcaccgaggcgacgaagtggccgcagtcctgctggatgttaaa

SEQ ID NO: 258950 - DNA, 157 bp, Homo sapiens
  chr8:8456541-8456698
  hypo
ccaaatatactactacgactacgaccgttactactgctaataataataataacgactgctaatattcatatagaactacgccagatatttaacatatattatttcactcttataaaaggggaaagattggctgggcgtggtggctcatgtctgcagt

SEQ ID NO: 258951 - DNA, 328 bp, Homo sapiens
  chr8:8471121-8471449
  hypo
ctgggattacaggcatgaaccaccgcgcccgaactgtttctttcatagtgtagaggatgtttcatagagacgggtgttgccttatgggaggtggacaaaaagacacagaggaagggaacgaagcccaaagtctgcccgaggattctaggggaggagacaggaggagacacaaagggaaagcaaggagagcagaagccggaacgttcatccccactccactttttacacctgaccttgtcggaaaggggattatttagaaacaaccaagaataaaagggactttttctgcttcccccgccttacccgcgggcacctccacaatggcacc

SEQ ID NO: 258952 - DNA, 235 bp, Homo sapiens
  chr8:8522696-8522931
  hypo
cgccgcccgccaggcgcccacgtgacctcgttgtctttgcggcatgtgcaaacttgttcacagctgtggctgttgtcatcacttcagcgggattatgtgcactgttggcacttcatgtgccgggtttaattgccatgtaaaatgccttcagaaagattatactatgattcagcattgaaaggaaaacttacggtgtattcagaaaggtgaggagacagagcgggtggggcggggg

SEQ ID NO: 258953 - DNA, 415 bp, Homo sapiens
  chr8:8560673-8561088
  hypo
gcctacaccaactcggtggacgtcctcgacggggaggggtgggagtcccaggacgctccctcgtgcagcacccacccctgcgacagctcgctgccctgcgactccgacctctagacgcttgtagagcctggggggcgccgggtggcaaaggactcacccccgcacaggcccgcctggcttcgagttggaacccggacacttgcccctcactggtgtggatggaaatctgcctttcgtgggaccaaacaggactccttggacgattagttcaggttgggtttggttttcttcttaaagagtttagttttcctctccagagggatcagggtcctcttagggagtgacgggcttttcatatatttttgctgaagaatatatggaaagggtggcatttgcgtcacgtggaccagggaca

SEQ ID NO: 258954 - DNA, 39 bp, Homo sapiens; identical to SEQ ID NO: 212138
  chr8:8634037-8634076
  hypo

SEQ ID NO: 258955 - DNA, 39 bp, Homo sapiens; identical to SEQ ID NO: 212139
  chr8:8634316-8634355
  hypo

SEQ ID NO: 258956 - DNA, 360 bp, Homo sapiens
  chr8:8639465-8639825
  hypo
cgggatgcagccgtagggccagccacacctctcccacgtgggacgcacctcttgtgacacttcttttggaaattctagttgcctcctgctttcctctgttctgttggcaaaagtggctttgaattctgcacaccccacggttctacctgccttgtcaggagtcttgcagtgaggccctcctggtctgaagcgatcccttcttccctgtattgcgctgtcttcagggcagggctcctcttgttacagtaggtagtcaggcacacataagcagggcagaagaacgccccccagcaaccatcaggtgagatggtcaggtggttgttacactgtctctctaaaataattggtgacagccggtgc

SEQ ID NO: 258957 - DNA, 171 bp, Homo sapiens; identical to SEQ ID NO: 226540
  chr8:8639885-8640056
  hypo

SEQ ID NO: 258958 - DNA, 155 bp, Homo sapiens
  chr8:8642145-8642300
  hypo
caaaagaagtaaaagagtagcgagtaccagcaactcactcttcttgtctgaggctggcgagaagcagtcagttttatacattttcgatcaacccacggaggaggcaaatgtaaacagagttttttacactctccgaaaaacatgttactactgta

SEQ ID NO: 258959 - DNA, 200 bp, Homo sapiens
  chr8:8643103-8643303
  hypo
agttatggaacagcaatgaacgtcagtcgatccctctttcacatttaacagaactgaaatctgagtgctctaaatactgccacctgtactgtaactatggcttatatgtgcacggaaaacaaaatccctgagaagccattcgactttttttttttttttttcttttcttcaagtagcgcgctccttggaggatcacagtt

SEQ ID NO: 258960 - DNA, 195 bp, Homo sapiens; identical to SEQ ID NO: 212141
  chr8:8651864-8652059
  hypo

SEQ ID NO: 258961 - DNA, 76 bp, Homo sapiens
  chr8:8669105-8669181
  hypo
ctttgggtaactaacgtccacctgacgcatactagctgatgctgcgtctcctctgcagggacgtaagctccacaag

SEQ ID NO: 258962 - DNA, 129 bp, Homo sapiens; identical to SEQ ID NO: 212142
  chr8:8673405-8673534
  hypo

SEQ ID NO: 258963 - DNA, 139 bp, Homo sapiens; identical to SEQ ID NO: 212143
  chr8:8680437-8680576
  hypo

SEQ ID NO: 258964 - DNA, 77 bp, Homo sapiens; identical to SEQ ID NO: 212144
  chr8:8680890-8680967
  hypo

SEQ ID NO: 258965 - DNA, 200 bp, Homo sapiens
  chr8:8681182-8681382
  hypo
cttccctaattctcccgtcttcagtctttgacacaggtaatgaacccacaggtcaccgagaagagcatcacctgcgaaatttcaagacccacggtggctgtgctccatctctgatgtagcacagaagatagtgggggctgagaaaagaaagaatctcgcctctcagagatgtgcctgtctccatgcgcttcaaagatctt

SEQ ID NO: 258966 - DNA, 159 bp, Homo sapiens; identical to SEQ ID NO: 212146
  chr8:8690237-8690396
  hypo

SEQ ID NO: 258967 - DNA, 174 bp, Homo sapiens; identical to SEQ ID NO: 212147
  chr8:8692863-8693037
  hypo

SEQ ID NO: 258968 - DNA, 105 bp, Homo sapiens; identical to SEQ ID NO: 212148
  chr8:8698610-8698715
  hypo

SEQ ID NO: 258969 - DNA, 141 bp, Homo sapiens
  chr8:8699972-8700113
  hypo
ataggcgtgagccaccatgcccgaccccacgtctgattttgaatgctaacatttcctcggtacacagtaactcacaacatcaaagtgacacaggacgcacgtgtaaatcgcactagaagcctcatccgtacagccttgcta

SEQ ID NO: 258970 - DNA, 283 bp, Homo sapiens
  chr8:8709481-8709764
  hypo
taataaggacagagcgctccctcaggaacagcgatgccaagcccagttttggatacatagggagtgggtggtggaatgccggcttccattcgaaggagacccctctccagcaccatgggagtcgcacccttagcagatattctgtcctccagagagctgaggtttcaggagtgccaagcaaggtataaatgtcattagcgtgagtacttaaaacataccacaatgtccaggtgcggtgactcacacctgtaatcacatttgggaagccgaggcgggcagatca

SEQ ID NO: 258971 - DNA, 120 bp, Homo sapiens; identical to SEQ ID NO: 212150
  chr8:8712566-8712686
  hypo

SEQ ID NO: 258972 - DNA, 78 bp, Homo sapiens; identical to SEQ ID NO: 212151
  chr8:8712746-8712824
  hypo

SEQ ID NO: 258973 - DNA, 159 bp, Homo sapiens; identical to SEQ ID NO: 212152
  chr8:8725341-8725500
  hypo

SEQ ID NO: 258974 - DNA, 491 bp, Homo sapiens
  chr8:8731249-8731740
  hypo
gtttagaaaacagatgggacagaaaggcagatgcaatgttttgagtcaatgagatacagttcgttcttaattatatttcattgatttcttacatggacagaacatcattcttgctgccactgttttattttgatcagcggtatatctatctgtaaacatgtacaatttgtaattattgctatgtctaaacactgcatcacgtgtaatggctgaattaagctgtgaaatgcgtaattatgctgaaaacaatggtgttccaatacacatcaccaaagccaatttaaaaaaattaccttgtttcaaatcacaaagcgaagccttcataaccctcgaggctttttttaggtcccaccactttgatttagagatttgtctttttctaattgcatctcaagagtgttccgagcacagagagggattattaaccctgaaggaaataaaactgagtatttcttacacctctggaaggtggagaacgtacttagtttaac

SEQ ID NO: 258975 - DNA, 1418 bp, Homo sapiens
  chr8:8748206-8749624
  hypo
actgatggagctgggtggcccggagcagttcctggctgggggtggaccgcgccatgggcggggagctttccccctccgccttgccctctccactggtccctaggagcagcttatgcagcagcaaagagggatccctctggaagaagacattgaggatgtcgatgaggcgggtgaggttgtggaagacgtgctccttgagagccggactgtcctcaaagtagagtagcttgccgctctcatgcaggtaggagagggcactctgcagtcggtcctcggtcagacccgcctgcaggcccaagcgcgccgagtcccaccagcttagccacagtcgctgggcctgaggtggctggaaatgcagttcctccagcacctgccaggatcgaggcagtactctgtgtaagttggggaagatctctcggtgctcagcaactgacagcaacttgtcccgaaggcgtcgtaagtggcgcgggtccctgcagctaacaggcaacacgggggagaggatctgcagccggtggttgagcaggtattgaaaatgggccttgcgccgtcgaaggttcttgtccgaaacgccatagtaggctgcgtgggggctggcagagcgcagctcgaagtcccgggccagtgcctcgtccaccaccttggccaagcggctcagtccctccgcgtcgtgcttctcctgcagggcgatctggcggtgaatgtccagacatttctcctccagctcacgctctccgcacaggtctgcgtgggtgcccacgatgcacaccaccgcgtggggcactctcgccccgacccgatgcaagaaggagcccacggtggtaggaaagtggcgaggctcataggtggccaagttgaccaccagcacgtatagggcccctggggacaggaagaagggctggatcacctcataactttcatccccagctaagtcatacacgatgaaccgcaggccccgggaggcatcggccgtccagctggtcacctcgatgcccttgctcacagggggaggtgacggtgggtagcacttctccttgtcccctcctcctgggcatccctccactctctcctcggtgaggcagtggcgcagcaaagtctttcctgcagccttatgccccatcaggagcagcttgagccggggctgcaccgccggctgggaatgagccagttccttctggtaggctgcgatgtaggggatccccttcatgcagacctcgtaggggggctggatcagtgggttgtctttgatcttccacaaacccacccgggagagctggccaaagtggtcgggcagcaccgcgatctggttcccctgcagcacgagctcctccaggccggtcagctccacgatggagtccggcaggtagcggatgcggttattatccagccacaaggtgagaagccggcccaggcccgag

SEQ ID NO: 258976 - DNA, 157 bp, Homo sapiens; identical to SEQ ID NO: 212156
  chr8:8780059-8780216
  hypo

SEQ ID NO: 258977 - DNA, 39 bp, Homo sapiens
  chr8:8803669-8803708
  hypo
aaaaaatagtatactccaactgtccgtgataacccaggt

SEQ ID NO: 258978 - DNA, 31 bp, Homo sapiens
  chr8:8850535-8850566
  hypo
cgacagagcaagactccgtctcaaaaaacaa

SEQ ID NO: 258979 - DNA, 116 bp, Homo sapiens; identical to SEQ ID NO: 212158
  chr8:8898498-8898614
  hypo

SEQ ID NO: 258980 - DNA, 36 bp, Homo sapiens; identical to SEQ ID NO: 212159
  chr8:8922915-8922951
  hypo

SEQ ID NO: 258981 - DNA, 119 bp, Homo sapiens
  chr8:9637606-9637725
  hypo
tatatgccggagaacggcattagaatgcaataagttgtctaggtttttctgtttcagtgtctctcccaatggcacgaagggttattgggcattgtccccacccccgcctttttaacatg

SEQ ID NO: 258982 - DNA, 155 bp, Homo sapiens
  chr8:10192943-10193098
  hypo
gagcctgaatgtttcgaaaattatcttcgtcttgctgggttcgctgctgaactggggaggcgattggaattaccatctggcctcagagctgcgggtgactcttgtcctgaccccgtggcctagtgaacagatgaccccggcgcctgatcttgtac

SEQ ID NO: 258983 - DNA, 512 bp, Homo sapiens
  chr8:10261662-10262174
  hypo
cggcccctggtccacgtggagaggtcacctcatttccccacaatgccgggaaagtgagacggtgctgctcctcctccacaaatagcaaggcagggaccttccccaggggcatctgggctcccacctccagagaagcgtccccctggaatctttcttttcctgacaacactagatgcctttctccccagccccgtgacaaacgacagtcaagcttgctgccagggaggcagggaagtgacgatcccgtcaccaccccccaaccctccgtggggaggggcaggcgggtgtgggatccatcacgcccgcccacgtggatggcttcaaagtgaacagttggcattcctgcggggtggccctcgctcctgcaataggccatcccgggcggccgctccctccctcacctacgatctgccgtcagcagctgcttctgacaggtgcgcgggctctccatggcagatggtgaccaaaatgggcttgctggcaggctgtgctgccgcgccgccctccctcgc

SEQ ID NO: 258984 - DNA, 141 bp, Homo sapiens
  chr8:10283196-10283337
  hypo
cccgtctcagcaggcggtgtcagccgcggagtgggtaggtcctctgaggacgatcacacctgtgggcaagagcacacccgggctctgggccaagtaagcctgtgaatcccactggcgttgtgaacccggagcccttgggat

SEQ ID NO: 258985 - DNA, 232 bp, Homo sapiens
  chr8:10466917-10467149
  hypo
cgtcctgctgcagctcggccgccatctggtccagcagatcattgtcctgcaggccccagcgtgctcggagctcagccaccgcactggcaaggtgggccaggaaggccttctccgtcttcttcagtaacacggacacccagatggggtcgcagtccagagccgcgctgcaggccaccgaagagctcctctctgcagccccctgggtgggttgggcctgcgtgtgctcttggcc

SEQ ID NO: 258986 - DNA, 202 bp, Homo sapiens; identical to SEQ ID NO: 212164
  chr8:10683500-10683702
  hypo

SEQ ID NO: 258987 - DNA, 136 bp, Homo sapiens
  chr8:10694853-10694989
  hypo
ggagggctctggaagcttgacgcctggcttagcctggactttgccccgtgcatcttttccttttgccggctttgctctacatccttttgctgtaataaatcttagcagtgagtgcgactatatgctgagtcctgtg

SEQ ID NO: 258988 - DNA, 42 bp, Homo sapiens
  chr8:10798364-10798406
  hypo
tgattctttccaccagatatcgatcagaagggcagccccttc

SEQ ID NO: 258989 - DNA, 180 bp, Homo sapiens
  chr8:11143735-11143915
  hypo
caggcgtgagccactgcgcctggcctaaaataaaaatttctaatggtagaattgcaggcagtttgggtgaagccatggtagattgattgattgatatgagcagggggctcttattagtctcctcaagccaccttttgctgtataaagtcttcagtgggcccggcacggtggctcacgcct

SEQ ID NO: 258990 - DNA, 88 bp, Homo sapiens
  chr8:11144656-11144744
  hypo
atttttatctccttcgaaacgtctaactgtggcttgggcatatagacgcgtaggaaacaaaagaaggattgaccgctgaatggtcaga

SEQ ID NO: 258991 - DNA, 87 bp, Homo sapiens
  chr8:11163743-11163830
  hypo
aggtgcaaggaggacgagaagctgataaatgctaccctcagggctggaaagcgtggctacatcattgacacccgatccctgaacgtg

SEQ ID NO: 258992 - DNA, 136 bp, Homo sapiens
  chr8:11182858-11182994
  hypo
ctgagaagacactcgttaaacattgcatcggagagctgcctttgataaatgtgctgttaaacacttgaatgaagagaatggtggcagaatgagtgagcaagcagattgccccagaggggccggtaataatcacgtg

SEQ ID NO: 258993 - DNA, 332 bp, Homo sapiens
  chr8:11218929-11219261
  hypo
aatcttcgggagatcgtggtaaacaaccgcatcacctggctgtttcattacagcgctttgctcagcgcctttggagaagcaaatgtttccctggcgagagcagtgaatataactggtaagcatctggctctggctggatgtgatttatttgccagtttttctagttctttaagaagagatgttttcagattctgatagtgtctgttcatttcaggcctgcataacatcctggatgtcgctgcggaacacaatctgcaattgtttgtgcctagcacgattggggcttttggacccacctctccccggaacccaacccccgatctctgtattca

SEQ ID NO: 258994 - DNA, 60 bp, Homo sapiens
  chr8:11366265-11366325
  hypo
atctctccttctgacccaaacgcaactgtgatgggggccggtcctgccctttggggccat

SEQ ID NO: 258995 - DNA, 149 bp, Homo sapiens
  chr8:11483117-11483266
  hypo
ggagtgggagagagcggccccccagggcaggctggggaggtgaggcagggggtagggttttgctgaagacggtgagggaggctggggaaggccagatgaggtggggctggccgaagtgaggtgggggttgattccgagacgtcgctggg

SEQ ID NO: 258996 - DNA, 66 bp, Homo sapiens; identical to SEQ ID NO: 212167
  chr8:11612347-11612413
  hypo

SEQ ID NO: 258997 - DNA, 179 bp, Homo sapiens
  chr8:11645475-11645654
  hypo
cttgtactgaaggctcctcccgcacggggtgctctccctgtgtcgagggctgtgtctcccccacccagttctcaccacttcgcttacttcttgcacatgatctacaaaacaacacatgaagacaggtcctcaaccttgttgtccttaagttatagatgagaaaacggaagagtctagag

SEQ ID NO: 258998 - DNA, 75 bp, Homo sapiens
  chr8:11646750-11646825
  hypo
ggcgcgggccacggcggcactgggctctgttggtgtcagctggccaacagtgtgggcaccggggcaaggagggaa

SEQ ID NO: 258999 - DNA, 286 bp, Homo sapiens
  chr8:11647194-11647480
  hypo
aatgtaagtggagaaaggaacgtccaaggagaagcgggctgtcgctatggtgaatcatgcagagatgaaggcgggacgatggagcagtggccccttgggcttggcaggtgatcaaattcgaggtcatgatgaccttcaggagagcactgtgtgcagagtgccagcagtgggaagggaccgggtgggagggaggacgtggaatgtgagggtggtctcccctgcaggaagtttggccttggaggggatgaaaatgaagggcagggaggagtcgcgagcgaacaagcag

SEQ ID NO: 259000 - DNA, 41 bp, Homo sapiens
  chr8:11657164-11657205
  hypo
agcacttgtaggctgggagccgtggctcacgcctgtaatcc

SEQ ID NO: 259001 - DNA, 68 bp, Homo sapiens
  chr8:11669212-11669280
  hypo
aagcacagttgccccgggaagagtaaaagggagcagaaggcgtaagccaggcacggctgttttcactg

SEQ ID NO: 259002 - DNA, 54 bp, Homo sapiens
  chr8:11704225-11704279
  hypo
aaggcgagggcaggcgtggccagccaccagggaggggggcgttcccacagagaa

SEQ ID NO: 259003 - DNA, 207 bp, Homo sapiens
  chr8:11704540-11704747
  hypo
catcagccatcagcacgcacctgacttgtagagcaggaagtccgaatacacagagaaagctccctccacggggccgtttttgtagatctcggccatgatgtccttctcgctattggagacgctgtaggaattgtatcctggaaaatgaaccgagctcggggttggggagggcagtgaccgtgcctcgtggcacgccacggtcagcca

SEQ ID NO: 259004 - DNA, 245 bp, Homo sapiens
  chr8:11705917-11706162
  hypo
taccagaccaggctacgagtgcccttccgggtagaacactgattctcaactgagcagacgctaaacttccctaaggtacttaaaaacaccaccagttctctgaaatgagaatcgccagtgattcccatttaactagttaggggagaagcccatgcatttttttaagccctcaggcatttcggatctgcagccgccagtgaacaccgctactgcggaaccaaggcgaggctgcaggcagctggagc

SEQ ID NO: 259005 - DNA, 225 bp, Homo sapiens
  chr8:11706508-11706733
  hypo
gggtctctcagcactaaacccgctgtggaagcacagcctgactcacccgtccccacacatgctgccacagcatgtgagcaggtcctccgccgacacctccacgctgacgtgcgcattggtgtggatgcagatccggtcagagatggcttccacagccccgaaggcctgcaggaacgagccccaccgggtgaggctgccatgtccgggctgggccctctgcagcag

SEQ ID NO: 259006 - DNA, 160 bp, Homo sapiens
  chr8:11708330-11708490
  hypo
ccactttctctccagcgcttccccgccagccagcagggccttacccagcaggagccacaggagccctggtctctgatctctttgatggtgggacactgtggccattgttcccgtgcatcgaagcttgcaggcagcttcaggtcctcggtaaacataactc

SEQ ID NO: 259007 - DNA, 151 bp, Homo sapiens
  chr8:11711013-11711164
  hypo
cacctctctgttatgtgggtcgagggctcacacacacaggggcaccgtctcgggcatcagtggggacccccatgctcgtcctggcccaggcggagaactcttaaggagctgaggtgtctatgggatccccgcccccctgcccgaagcacgc

SEQ ID NO: 259008 - DNA, 92 bp, Homo sapiens
  chr8:11712326-11712418
  hypo
ggcagcacatgtgtcgtaaaatgctgggtgatgctcatcagcacagcacccaacggaccactcagaagcacatcctccgtggaggaatcagc

SEQ ID NO: 259009 - DNA, 35 bp, Homo sapiens
  chr8:11883053-11883088
  hypo
gagtccccaggtccacaccccgggctaggcccagt

SEQ ID NO: 259010 - DNA, 225 bp, Homo sapiens; identical to SEQ ID NO: 212171
  chr8:12623675-12623900
  hypo

SEQ ID NO: 259011 - DNA, 91 bp, Homo sapiens; identical to SEQ ID NO: 212172
  chr8:12869539-12869630
  hypo

SEQ ID NO: 259012 - DNA, 211 bp, Homo sapiens
  chr8:12950150-12950361
  hypo
ttgagatggaagagggaaggcgctaagcacacggccaggttggttggggtcatctggttttcttttacggctgctgtgacatcgctcaggaaataaagcagggtctgcagaacctcccggttctcgtcaggcagcagcatgatggcagccttgatggcctgcaggcgctggtccttgggcacatctgcacgacaccagcactttctccatc

SEQ ID NO: 259013 - DNA, 346 bp, Homo sapiens
  chr8:12957816-12958162
  hypo
tgagcttcaggctctccatccgtttcagcagactgcgcgtcttggacttggcagttttttcgtggcctttcatgctgaagctgaagctggacagttccttgggagagggcaggctgccgaaagagtcgtcattgcctgccaagttgctggaggagcaaacgctgatgacggagttagtccggggggtggcagcatcctcgctggggggcgcgtggctggggaggctgccagtgctgctgaggctgcggacggaagacacctcctggcgctcgctgaggtccatcagcgtgcctccggggctggggccgtccttcgggtgggagtcgtctggggacccagggaccag

SEQ ID NO: 259014 - DNA, 158 bp, Homo sapiens
  chr8:12959265-12959423
  hypo
cagccctgacagctcgcggcattcataaacactaaggaacgtctttgctgattatgcccgatttatgtacaggactcagggataagctgtcacacggactattgcatcttggccttttcggcaggatatcaaagggcacaattcggtatgatacatgt

SEQ ID NO: 259015 - DNA, 33 bp, Homo sapiens
  chr8:13189949-13189982
  hypo
ttttttttaagatggggtctcgctgttttgccc

SEQ ID NO: 259016 - DNA, 34 bp, Homo sapiens
  chr8:16459748-16459782
  hypo
cccctcctggctcccgatccgtctgctgagagcc

SEQ ID NO: 259017 - DNA, 153 bp, Homo sapiens
  chr8:16459902-16460055
  hypo
agaaggtctaattgagctaattaacacaagccacctgtgttaaggctaagctgaaagagcgcactgtaatacgagcccactggggctttgagagctgtaaacactcaaccctaaacgctgcagtggggttgaagcccgcgctccccacgacct

SEQ ID NO: 259018 - DNA, 101 bp, Homo sapiens
  chr8:17360874-17360975
  hypo
aaaaaaattttatgcttcagaagggtggctttttctttagatcgcgagttttttccttcctgaaattcactttatattcactcccgcggtgttccttatct

SEQ ID NO: 259019 - DNA, 122 bp, Homo sapiens
  chr8:17478545-17478667
  hypo
tcttttattcctagcgtcaagcagaatgagcgctacggccagttgactctggtcaactccacctcggcagacacaggtgaattcagctgctgggtgcagctctgcagcggctacatctgcag

SEQ ID NO: 259020 - DNA, 34 bp, Homo sapiens
  chr8:17574339-17574373
  hypo
ggcgtgagccaccgcacctagcctgtttgtttcc

SEQ ID NO: 259021 - DNA, 100 bp, Homo sapiens
  chr8:17648492-17648592
  hypo
gggggcggggagaagttttatcccatttcagcaccaatgtatagaaaatcctggcaacagaaacttattacttccactcgcattaaaactagtcaaataa

SEQ ID NO: 259022 - DNA, 210 bp, Homo sapiens
  chr8:17767556-17767766
  hypo
gagacgctcagcttcgtcatctttctcagctcccgaaaggacaggtcggagggaccagtcttcttcctctttggattcttccctttcttctgtccggtcggtgtagggttcattgcagaatttcaaatgtctattgggtatctaaatgggtgtttgattgtctcctggtgaaacacaagcaaaagcccttccccgcgtcataatttttct

SEQ ID NO: 259023 - DNA, 99 bp, Homo sapiens; identical to SEQ ID NO: 212175
  chr8:17910135-17910234
  hypo

SEQ ID NO: 259024 - DNA, 36 bp, Homo sapiens; identical to SEQ ID NO: 212176
  chr8:18381897-18381933
  hypo

SEQ ID NO: 259025 - DNA, 37 bp, Homo sapiens
  chr8:18474405-18474442
  hypo
tacaggcgtgagccaccgcgcccggccatcttcctct

SEQ ID NO: 259026 - DNA, 87 bp, Homo sapiens
  chr8:18541367-18541454
  hypo
ccgggagtatttcacggaacctgaggtcctcacccgtaccttgctggcactctggacactattcacgccaatcattttcgaaggtca

SEQ ID NO: 259027 - DNA, 77 bp, Homo sapiens; identical to SEQ ID NO: 212178
  chr8:19068613-19068690
  hypo

SEQ ID NO: 259028 - DNA, 335 bp, Homo sapiens
  chr8:19094994-19095329
  hypo
cggctcgtccttccccggcccggctgctgaggtggcggtgactgtggggcagccgggccgtgcacgtctggagaccgcccgggcgctggccgcggctggaccccgggagccgaaccgcgggagggcgctgtgcggagccggtggtggcctgctcgacggaggtggccgccgtcaccctactggtcctgtgatacgtgcccaaggactgcccgggagccagacctgccagcgggtgcaggacaccaaggtcaagactggagcagggagaaatagtgctgcggcctggagaagcgcatcagccaggaccagaggacatctgcgagctgccgggcggc

SEQ ID NO: 259029 - DNA, 35 bp, Homo sapiens
  chr8:19192506-19192541
  hypo
cctccagggcaggcacggtggctcatgcctgtaat

SEQ ID NO: 259030 - DNA, 38 bp, Homo sapiens
  chr8:19335638-19335676
  hypo
gtctgggccgggtgcggtggctcacgcctgtaatctca

SEQ ID NO: 259031 - DNA, 60 bp, Homo sapiens
  chr8:19460933-19460993
  hypo
tcggtcctctactgcggtgcctgcgcggctcccaccacccacttccgcctctgcctggcc

SEQ ID NO: 259032 - DNA, 291 bp, Homo sapiens; identical to SEQ ID NO: 212180
  chr8:19690583-19690874
  hypo

SEQ ID NO: 259033 - DNA, 62 bp, Homo sapiens; identical to SEQ ID NO: 212181
  chr8:19706754-19706816
  hypo

SEQ ID NO: 259034 - DNA, 64 bp, Homo sapiens
  chr8:19715650-19715714
  hypo
tctgcaagcttcggcgaatcaggtcatgtcccagcttgtttggtcctgccgccctgcccaggcc

SEQ ID NO: 259035 - DNA, 358 bp, Homo sapiens
  chr8:20107412-20107770
  hypo
ctccttctcctccttccacacgagccgctcatgctggaagcccgaggacatctggtcatggccttgccgctcctcccgcagctcggcccgcagccgctccagctcccgctgcagggcagggacgtcctcggggaaggtgggcggccccatgtcgcgggccagggcggcctgggcccgcagctcctgcagctcctgctccagcaggttcaccttctcccgcagcagctccgcctcgttcttcttgcgctgcagctcattctcacagacctccagctccaggcccttggtgcgcagggcgccctccaggtcctgggtcctcagctccaggccctccagcttgccccgcgtgtccttcagc

SEQ ID NO: 259036 - DNA, 246 bp, Homo sapiens
  chr8:20110391-20110637
  hypo
ctcgagctcctgccggagctgccgcttctcctgctgaagctgcagtacctgcaggtgcaggacctgctgcgcgcgctggctcttctgcgaggcctgcttgagcttgttgccgcctttgggctccgggccctccagctcgtccctgcagcgccgcggccgctcctcgtaggccaggctggaggcaagctccttctcctcaaagctgcgctgcagcttctggagggcgccctccctctccaacagctt

SEQ ID NO: 259037 - DNA, 158 bp, Homo sapiens
  chr8:20793601-20793759
  hypo
tcaaattccatgtgtcgcaaactattatatcaccttgccttctgtcctcacctccctttctgctttgtgtgtagcacaattgcattttgaattaagttgttttttgtagtcctttctgtttgcctgtatcaaatgttaccggaaataaaatgctcaag

SEQ ID NO: 259038 - DNA, 195 bp, Homo sapiens
  chr8:21590921-21591116
  hypo
attcttccccagcatcggcttagaatgaaaggtagaaacccatagtcccaccacggaggtgtcatcctgcaccccaagcctgatgatctgcccattccattctttgaggagagagagggcgaagggagagaaagccccagcccttcccgcattttaaacacctggcaggttatcccaggccgaataggacccgtg

SEQ ID NO: 259039 - DNA, 185 bp, Homo sapiens
  chr8:21608110-21608295
  hypo
gtcagtccggcacacgccacgcaggtccaggcagttgggcttctccttgtcctcataggagcagctgggcaggatggtttgccggcggcgctcagcgcacgcctggtcttggcaggagcagaagagcatgcggtaggtgtactcgctgggcacccggtcgaagaactggcgcagggccttgtggc

SEQ ID NO: 259040 - DNA, 86 bp, Homo sapiens
  chr8:21624003-21624089
  hypo
ccctctgagcctaagctccccgagttagcgcggaagcctccagtcgcaggacgccccaaacacacgaaccaagtgcagtccacaca

SEQ ID NO: 259041 - DNA, 87 bp, Homo sapiens
  chr8:21718693-21718780
  hypo
tacgcagcattccccgtggtgcggctcccgggtggctgtcagctggatccagggcccgtcaagaatcatcgagcatggctgggcgtg

SEQ ID NO: 259042 - DNA, 232 bp, Homo sapiens
  chr8:21769765-21769997
  hypo
gcacccagtcgccgcgctccgctgcaggggccgccaggaggtacaggcgctccttggtctccaggaagaaggcactggtgtcccgggggctgctggcctctccgccggcctcggccacccgcaggcagtcactgaggcggatgaccttccgggcagcctcacaccgacgaggcttctccgggccctcctgcagctccagccgggccaaggcgcagtccgaccctccatacag

SEQ ID NO: 259043 - DNA, 37 bp, Homo sapiens; identical to SEQ ID NO: 226541
  chr8:21868744-21868781
  hypo

SEQ ID NO: 259044 - DNA, 202 bp, Homo sapiens; identical to SEQ ID NO: 212188
  chr8:21910414-21910616
  hypo

SEQ ID NO: 259045 - DNA, 97 bp, Homo sapiens
  chr8:21959272-21959369
  hypo
cctttggacccccatgagcccgagcgacctttcttcgagggccacttcctccgagtgctgtttgaccgcatgtcccggattctggatcaggtagcta

SEQ ID NO: 259046 - DNA, 272 bp, Homo sapiens
  chr8:21959581-21959853
  hypo
cccacccccacacacgttcacagtggccaggcaccttgctgggggagtgcaaaaatactcaccagccctgccagccctcggctctgtccaccatgttcctacagccatacagcctgaacctgcaggtgacctcggtcctgtcccggcttgccctcttcccccacccccatattcatgagtacctgctggatccgtacatcagcctggcccccggctgcaggagcctattctccgtgttggtgagggtgaggacgcctcggcccaagggagtg

SEQ ID NO: 259047 - DNA, 166 bp, Homo sapiens; identical to SEQ ID NO: 212189
  chr8:21960397-21960563
  hypo

SEQ ID NO: 259048 - DNA, 894 bp, Homo sapiens; identical to SEQ ID NO: 212190
  chr8:21961297-21962191
  hypo

SEQ ID NO: 259049 - DNA, 87 bp, Homo sapiens
  chr8:21977140-21977227
  hypo
aaaagaaagaaagaaatggaatcagagaagcgcttcaggccccagggccttggcacagacgctcgtgtgccccgagatgacaggcag

SEQ ID NO: 259050 - DNA, 379 bp, Homo sapiens
  chr8:21977566-21977945
  hypo
ggggcctgcggtggcggggaggtagggctggcccttggtgacatacacacctgctggtgtcctcatcccccaaagctcggtgcagcaggaggacagagccctcgtctgactttgggcgaactacaggaggagacagaacggccattggcctcctcagccctgaagcccctgccccggcggcagcaacacctgcttccagcccctcggggtcaccctgggactcctctgccacccgatccctagggcttgggctcccagctccctctcccctgtgttggggacacttacgctcaggccaggagaagccctcccagaatgttgtgctgcccaggctgctgggctggggaggtccgagggggctcagcgcctgcacctggcc

SEQ ID NO: 259051 - DNA, 225 bp, Homo sapiens
  chr8:21978253-21978478
  hypo
aagaggtggaagccacgccgagggcaaggctggggctcctgcagccacagcaaagcccctgggggaggcagccggggccgcactggagagaggggcaggcccaggcccttgcgcagacccgggccagctcgaagccccggccccagggctttctcctggatcttccgttccaccacctgtgcgataatgctgtccaggatgttggtgatgcggtcatcctgcaga

SEQ ID NO: 259052 - DNA, 70 bp, Homo sapiens; identical to SEQ ID NO: 212192
  chr8:21981256-21981326
  hypo

SEQ ID NO: 259053 - DNA, 95 bp, Homo sapiens
  chr8:22005942-22006037
  hypo
cacctccgagaagcgggtaccctcccagcgcaggatcttggagtcgccaatgtagcggctgaggcacaggtagctgtcgcggccggcacgaaagt

SEQ ID NO: 259054 - DNA, 81 bp, Homo sapiens
  chr8:22006313-22006394
  hypo
ggaaggcttctaggtcgttaggcttgcgcacgcgctgcgggtcaatgtcttgcagcctggtgaagcgcgtggtgttgggat

SEQ ID NO: 259055 - DNA, 40 bp, Homo sapiens; identical to SEQ ID NO: 212193
  chr8:22052966-22053006
  hypo

SEQ ID NO: 259056 - DNA, 40 bp, Homo sapiens
  chr8:22073146-22073186
  hypo
ttcctttcctctgctcgctcccagacgactccactcctgt

SEQ ID NO: 259057 - DNA, 405 bp, Homo sapiens; identical to SEQ ID NO: 212194
  chr8:22078961-22079366
  hypo

SEQ ID NO: 259058 - DNA, 44 bp, Homo sapiens
  chr8:22132540-22132584
  hypo
ggggcaagtcaatttcaacacgcgagtcttaggctaaatctgtt

SEQ ID NO: 259059 - DNA, 187 bp, Homo sapiens
  chr8:22133209-22133396
  hypo
ttggggaaaggtgcttttctcggggtggaaaggggatgggactcgccttcgggggccttgcttctggttaggcccgagtcgcgaggcctcagcgcggagcacgcacccagggatgcgagggaggcaggcccagcccgtcctgggttcgctccccattgaacctttcggacagccaagtatctgctac

SEQ ID NO: 259060 - DNA, 39 bp, Homo sapiens
  chr8:22231505-22231544
  hypo
agtgatccaccggtcttggcctcccgaagtgctgggact

SEQ ID NO: 259061 - DNA, 297 bp, Homo sapiens
  chr8:22255560-22255857
  hypo
gacagctgcggggacgtcttaggatgattcactgaggccagtcagtggtggaaccaagagctctggggaacataatttctatcagcctggcgtctacttggccgccccctccactccctcacccacccctgcaaccctgtggtctttctttgtgtagaccatcagccttctcataattttaagtaaaatgcttaataaaaccccggtttagactgtcttcaaaccgaccgccaccccagagcctgcagctgactctgaccccgcgtaagagccccaccctggcgaagtcctgtgcac

SEQ ID NO: 259062 - DNA, 70 bp, Homo sapiens
  chr8:22256253-22256323
  hypo
caggacagaagtgccgcttctaggcagagctacttctggaccaagtgaagggtgacggtaggtggaattc

SEQ ID NO: 259063 - DNA, 315 bp, Homo sapiens
  chr8:22256722-22257037
  hypo
cagctggggccatgcgcgcggacccctgcccggcctccccgtcccagcggcgtcaacagctgtgtgtgtttccctcttctttctttcctctctaataccttttacaaaccttttccccgctaagaataacttgtagttaaaaagaagacaagactccactggagcagaaaactcccctttcatgcctgccaaaaggccggggtcacttggacttaagtgtcactcgcagctcctagatcctccccaacccttgcgggtgagtgcatgtctcaagcgctggccaggcaggggggctgtgctcgctgaatctgcaca

SEQ ID NO: 259064 - DNA, 92 bp, Homo sapiens
  chr8:22440003-22440095
  hypo
gagggaccagggctcgggggaggtaggcctgggctgtaagtcaggcctctggttctgcaccaggcaagcccagactccagtctcttaatttt

SEQ ID NO: 259065 - DNA, 31 bp, Homo sapiens
  chr8:22440395-22440426
  hypo
tccttacttttgctgacgtgatgcccacccc

SEQ ID NO: 259066 - DNA, 75 bp, Homo sapiens
  chr8:22477223-22477298
  hypo
agggcagcggtggcgcccggcaaagttggagcccttgcggtaccagaaagcagcgagagcgagacctgggagcca

SEQ ID NO: 259067 - DNA, 83 bp, Homo sapiens
  chr8:22479976-22480059
  hypo
ctctgggctggcggcggcccaccctgcccccactccctgcccaagccactgtgcgctgagtcactgggaatactcacttctcc

SEQ ID NO: 259068 - DNA, 115 bp, Homo sapiens
  chr8:22480089-22480204
  hypo
gaggctggggcccaagaggcagtcaacagcccccagcaatgctgcctggttaaagggcatccctggcctcccatctgctccaacctggacacgcgggagcctggcaccctgtggc

SEQ ID NO: 259069 - DNA, 145 bp, Homo sapiens; identical to SEQ ID NO: 212196
  chr8:22485267-22485412
  hypo

SEQ ID NO: 259070 - DNA, 229 bp, Homo sapiens
  chr8:22494911-22495140
  hypo
cctcccctcctacgcggccctccactcagggccacctgcccctgctgggctcagggtgggtcaggaacaatcgtgcacctgtgctttgtgattgggatgcatcaaacacagacactgtgactactgactcaggtcaggctctctccattcccgaccgggtatcaactctcttgagagccagcaacactgaaaccaaatgggtgagtcctgaacccggggctgcacttgt

SEQ ID NO: 259071 - DNA, 69 bp, Homo sapiens
  chr8:22499362-22499431
  hypo
ggttatggaggaaggtgtggcggcttcttcctacgctacgatgctcccgccactttatgggacctgggg

SEQ ID NO: 259072 - DNA, 54 bp, Homo sapiens
  chr8:22773287-22773341
  hypo
gctgtgggtgttgggagccccgtgtccttcctcggctaatcattttgtgactgc

SEQ ID NO: 259073 - DNA, 166 bp, Homo sapiens
  chr8:22851898-22852064
  hypo
cccaggctggggtctcaccccgcgctggacccggacatcaggggccgctctcttgtcctgagtagggccctctatctgggctgagcgaccttggagtaattcgcggtgtgctcattccctttctcccctctgtctcccctgccccgccccatccactcctgttcct

SEQ ID NO: 259074 - DNA, 196 bp, Homo sapiens
  chr8:22864845-22865041
  hypo
gtgcttccaccagcgacgggatcttacggggcaacggaacagggtacctaccgggcaggggtcgtgtgctgtcttcctggagccgagcttttgtgagcatccaggaagagatggcagaagatcctctcacctacaaatcccggctgatggtggtggtgaagatggacagttccatccagccggggcccttccgggc

SEQ ID NO: 259075 - DNA, 458 bp, Homo sapiens; identical to SEQ ID NO: 212197
  chr8:22874765-22875223
  hypo

SEQ ID NO: 259076 - DNA, 53 bp, Homo sapiens
  chr8:22984120-22984173
  hypo
tttatattctttaaacgaggctgtacaaaacataagctcgtattcctggccct

SEQ ID NO: 259077 - DNA, 88 bp, Homo sapiens
  chr8:23201678-23201766
  hypo
agggagcttgctctcgttcctgcgatgatgcgggacagtttcctccgctgaatagggctggtggggagagccccgggggctccacgat

SEQ ID NO: 259078 - DNA, 156 bp, Homo sapiens
  chr8:23298419-23298575
  hypo
gaaccgtcccccgccggccacgctatgctgccgcccacctttgaggggaaaatccagaaagctaggctttggtgttaatctacagctgaacacaaatggagtaataaagacgtgtagcaattcagaaatacatctggaaaccgtgccggggttctc

SEQ ID NO: 259079 - DNA, 150 bp, Homo sapiens
  chr8:23380693-23380843
  hypo
ccacatttctgttgttttaagtcacctagtttgtgtcattttgttagagcactcccaggacacaaatattttacgctttctgagctttaggtgcagcagaatattcaggtagagctgccgggaggcacatgaatacgtgggtgggactgg

SEQ ID NO: 259080 - DNA, 281 bp, Homo sapiens
  chr8:23399594-23399875
  hypo
gtcagcaccacataacgatgtttcggtcaactatggactccatatgtgatgagacagtgatcccatagattatagtggagctgaaaaattcctattacctaggggcatcacaacgcattgcatttcgcccgtgtttgggatgatgctggtgtaaacctactatgctgccagtcatgtaaaagtatagcacacacaattagtaggtaatgcttgcaaataataatgaaagactctgctactggtttatgtatttactatgctatactttttgtcattacttt

SEQ ID NO: 259081 - DNA, 350 bp, Homo sapiens; identical to SEQ ID NO: 212202
  chr8:23409903-23410253
  hypo

SEQ ID NO: 259082 - DNA, 364 bp, Homo sapiens
  chr8:23423713-23424077
  hypo
aggcccttgcgaggcgtcaacgtcatgatcatgggtgcagggccggcccatgccatgtattttgcctgctatgaaaacatgaaaaggactttaaatgacgttttccaccaccaaggaaacagccacctagccaacggtattttgaaagcgtttgtctggagttagaaagttctcttcttcaacacgtccctccccagggtgttcctccctgtgacccagccgcctcgacttcggcccgcttgctcacgaataaagaactcagagttgtgtgtgcaatgcacacccagacacacgcacgcacacacacgcgcgcgcacacacatgcttttttctgttcccctccgctttctgaagcctggggaga

SEQ ID NO: 259083 - DNA, 36 bp, Homo sapiens; identical to SEQ ID NO: 212204
  chr8:23424342-23424378
  hypo

SEQ ID NO: 259084 - DNA, 125 bp, Homo sapiens; identical to SEQ ID NO: 212205
  chr8:23429103-23429228
  hypo

SEQ ID NO: 259085 - DNA, 342 bp, Homo sapiens
  chr8:23430698-23431040
  hypo
cctcatgcccgagtcggaagacccctctccagaagccattctgcatccttgtctgctctgcgtcacccgagaacacaggcttcgcagcctcgctttctgaaatggtgtgtgccgagtcagattgccgctcagagaaaatacaagcccgttttccctagctgtgccatttggtgctctgccaggctgccgtgcaagggaataccgacgagacgagctgcactgtctctgatttggagccctcaccggagcttgtctttaaaaatgagcaggaagctcatgtatgtttgcatttcagtgagccgggtcctgacctgccgccacccatcacggtcagcgtggtgc

SEQ ID NO: 259086 - DNA, 102 bp, Homo sapiens
  chr8:25084011-25084113
  hypo
tcaggtgatctgcccgtctaggcctgggattacaggcgcaagccaccatgcctgacgttacccatgttttatttttttatttttttaattttaagttttttt

SEQ ID NO: 259087 - DNA, 216 bp, Homo sapiens; identical to SEQ ID NO: 212206
  chr8:25105393-25105609
  hypo

SEQ ID NO: 259088 - DNA, 202 bp, Homo sapiens
  chr8:25107887-25108089
  hypo
aaggactgaagcgagcgttcttgcctttcttcatctttggcactggcttgcccacagtcatttttgtgtctttgcttcttttactgtggaatgtatttggcagcgaggtagctgtttattactgtgaacgttcctttccaccccagatccatggcagaaagtgcactgacttctggagatgcccggccgtgaggtcatttat

SEQ ID NO: 259089 - DNA, 179 bp, Homo sapiens
  chr8:25174516-25174695
  hypo
ttgcaggagatgttcggaatgacatttatgtcaccctgatccacggtgagtttgacaaagggaagaagaagacgccaaagaatgtggaggtgacgatgtctgtgcacgatgaggagggcaagctcttggaggtgcgcggcatggcccagaaatcctgctaccatcgcatccgtctttac

SEQ ID NO: 259090 - DNA, 84 bp, Homo sapiens; identical to SEQ ID NO: 212207
  chr8:25249436-25249520
  hypo

SEQ ID NO: 259091 - DNA, 89 bp, Homo sapiens
  chr8:25252803-25252892
  hypo
ataaatacagatgaagcttccctcacttacctgtcgctcacctctggctgtgtggcctgtttcctaataggccacggactgatactggc

SEQ ID NO: 259092 - DNA, 169 bp, Homo sapiens
  chr8:25265513-25265682
  hypo
acttttggagcgcagggcctcgtcaggtgccagagttgaagatctgtcccttagagaggagaacagcgagaaccggatcagcaagtttaagagaaaagactggagtctgagcaagtcccaggtcattgcagagaaagcaccagaacccgatttgatggtaaaaaacaga

SEQ ID NO: 259093 - DNA, 257 bp, Homo sapiens
  chr8:25336999-25337256
  hypo
attcctgccaccctcggatgttgaaatgcctgtgactctagcggtaaaattgcttattagtcaatgcttggctcagattagtttttatggtccaagtagtgggtgtcatgagtagaggcacgctaatagcttatagctgattcatgataccttctttcaacctctgactcagagatttcctggggagccaaatccccatacccactttacccttcgtagtccgatttgaggtaaaaactgaccgatgctgcttcttt

SEQ ID NO: 259094 - DNA, 38 bp, Homo sapiens; identical to SEQ ID NO: 212208
  chr8:25338912-25338950
  hypo

SEQ ID NO: 259095 - DNA, 147 bp, Homo sapiens
  chr8:25376165-25376312
  hypo
gacgaacctttcatcgctaaatgcccatctagtgactggcagcttgccggtgtccagcgcctggctaacagattgaagggccggggggcgagttggctgtctcctttggcaggatcgttgaattggtagggccgatttccttcgtgg

SEQ ID NO: 259096 - DNA, 170 bp, Homo sapiens
  chr8:25397040-25397210
  hypo
caggtgggagaggagatggccggcccagttcaacagactgtgagcccggctggctgctgggcgtgtagcgatcactgaggacaggtcagcctggggatttggagcgcagctacctgcagtacctgttctaactccgtctgtgtcggagcgcccttctgttatcctcagtg

SEQ ID NO: 259097 - DNA, 52 bp, Homo sapiens; identical to SEQ ID NO: 212209
  chr8:26053988-26054040
  hypo

SEQ ID NO: 259098 - DNA, 119 bp, Homo sapiens
  chr8:26148091-26148210
  hypo
ttagctggagagacgccgggtcacttcttgggccataccctctcatcacaaactcaggtttctcttagaaatcactcttagtgtccgcagtgcctaggactcccgccttggatcctggg

SEQ ID NO: 259099 - DNA, 179 bp, Homo sapiens
  chr8:26193947-26194126
  hypo
aaataataaattggcgtggaatgtgccttcccaccccacccctcagtctcaaatctcaattgttttactgtaatgctgtccttactgacttaatcatctctaggttttacgtgttcagttcacttaaggaatattaaggtttcttccttattagaaattgagcccggctgggtatggta

SEQ ID NO: 259100 - DNA, 41 bp, Homo sapiens; identical to SEQ ID NO: 212210
  chr8:26230451-26230492
  hypo

SEQ ID NO: 259101 - DNA, 40 bp, Homo sapiens; identical to SEQ ID NO: 212211
  chr8:26230732-26230772
  hypo

SEQ ID NO: 259102 - DNA, 135 bp, Homo sapiens; identical to SEQ ID NO: 212212
  chr8:26267634-26267769
  hypo

SEQ ID NO: 259103 - DNA, 211 bp, Homo sapiens
  chr8:26444972-26445183
  hypo
ccctgctggctctgcgtttcccaggtcacaggccctggagactcctttctgtctgaaatggcgccgcatgtagaggaaaacacagccaaatattctcggtttaaaaaaggagatggcatgtcagcagcagaagataatattattgccattaaacagagcctgctattgagaatcacacaatgagatctttatgaggcggactcagtgtgga

SEQ ID NO: 259104 - DNA, 174 bp, Homo sapiens
  chr8:26481170-26481344
  hypo
tgcagaaatgtgagcggtaatgagagagcaggtaatgcccgggaacttttgaaaggcccggtccgtgtggctctgctccagcaccttcaagttccctgccgtctggcggggggcgtctcataagctgctttcaacacaaagaagggtttggctgctccccggccatttgacact

SEQ ID NO: 259105 - DNA, 148 bp, Homo sapiens
  chr8:26515708-26515856
  hypo
agatgttcgggaggcggctgcttgacttgggcctccaaccagacttcccctccacaagcattcacggagccctcggcttcagtttggtgaatataccaattcaagagttttcactccatgtcacaggctgctacgtccaggccacggg

SEQ ID NO: 259106 - DNA, 135 bp, Homo sapiens
  chr8:27145421-27145556
  hypo
cgcacacgtaccacgcccaccctccagctctgcagccccccaagggccacctcccaggcgtgcgagccctgtgagaagacacgggagcccagcaggcagggcgccgaggagaagcgttccgggttctccacctgc

SEQ ID NO: 259107 - DNA, 54 bp, Homo sapiens
  chr8:27279918-27279972
  hypo
tctgctgggagggcgctgtgctgagctctgggcaggcccgacctttccccatgt

SEQ ID NO: 259108 - DNA, 202 bp, Homo sapiens
  chr8:27315870-27316072
  hypo
ctggcacagcagaacgccgtgacctccctaagtgaggagtgcaagaggcagatgctgacggcttcacacaccctggctgtggacgccaagaacctgctcgacgctgtggaccaggccaaggttctggccaatctggcccacccacctgcagagtgacggagggtgggggccacctgcctgcgtcttccgcccctgcctgcca

SEQ ID NO: 259109 - DNA, 33 bp, Homo sapiens
  chr8:27327202-27327235
  hypo
aggaaggagcagggggaaagcggtgggtggtct

SEQ ID NO: 259110 - DNA, 226 bp, Homo sapiens; identical to SEQ ID NO: 212216
  chr8:27337092-27337318
  hypo

SEQ ID NO: 259111 - DNA, 127 bp, Homo sapiens; identical to SEQ ID NO: 212217
  chr8:27516398-27516525
  hypo

SEQ ID NO: 259112 - DNA, 168 bp, Homo sapiens; identical to SEQ ID NO: 212218
  chr8:27516773-27516941
  hypo

SEQ ID NO: 259113 - DNA, 66 bp, Homo sapiens
  chr8:27530312-27530378
  hypo
ccccctccaccgcccgcaaggttagggcatagagttgtctccttcccaacacggacccagagagca

SEQ ID NO: 259114 - DNA, 408 bp, Homo sapiens
  chr8:27779440-27779848
  hypo
agctggtagagctccagctgcgccgtgtcgctctgctggcccgtgcggtcccgcagcagggccaccgcctgctcggtctgcaccgcctgcgcctgcagcccccacagcgcgccctccagccgctgcactgcgcccgccagcgccagcaacgagtctgactggttctgcagcgcgtcctgcaccttccacacctgctccgtcaggtccgcttgcagcggagcctgcagcagccgcagctgcaagtcccggaagctctcattcagccggttcacattgcgagtcagggccttcaggtcgtcaggggagctgcgcggcctggacactgcggaggaggaagaggggagacttgagcaccgctggggaggaaggccccgggtgacaagaggcgaacccagtcagagcctggca

SEQ ID NO: 259115 - DNA, 124 bp, Homo sapiens; identical to SEQ ID NO: 212220
  chr8:27845168-27845292
  hypo

SEQ ID NO: 259116 - DNA, 234 bp, Homo sapiens
  chr8:27931039-27931273
  hypo
aaaacacaaaggatatgatacgccactgttttctgcaactgggggttatatccctgtcatcgtcctatagggaagcctcccttattggctccaggggcgcaataccagccttctgagggagggaagccacccgcactgactccaatgtgagtcacccttccaggagccgctccaaggcacctacatctctccttctacggaaagccgcctaacgtcattccaggggtcttgtaa

SEQ ID NO: 259117 - DNA, 353 bp, Homo sapiens
  chr8:28206805-28207158
  hypo
ctaaaagacaggcagccacccgtccccagctcctggtgcagaaggcctcgcaccttctcagggagaacactccagccgaggggagctcttggcaggagagtgaggaaggagcaggccttcatgccacactcaggacccagccaaggacaaggacaggggagccactggacctggccccctctgaggctctcctgcaggggacttagacggagccgctatgcctggaagcctcacactgcctcagtggcatcactggcaatctgatttacagtgtgacaccgccctgcaggagataactcaagaccagcgcctgctaggtagagttcaaaatgacttcccgcttacttgagttg

SEQ ID NO: 259118 - DNA, 156 bp, Homo sapiens; identical to SEQ ID NO: 212223
  chr8:28207459-28207615
  hypo

SEQ ID NO: 259119 - DNA, 107 bp, Homo sapiens
  chr8:28207904-28208011
  hypo
tcagcgctggtctacgtgctagcctcatgacttaatcaccgcagaagatttaacttctcaactggatcacctaccaagaacatgccatggcacgtgccaaaagaggc

SEQ ID NO: 259120 - DNA, 612 bp, Homo sapiens
  chr8:28208626-28209238
  hypo
gtattcaaaacatgcgtgctggactgtctgtccacagaacacaattctaggacctagacgtcacgtgggaagcccaactacacgactccatcctctcttataagcagaggtgtgacaattcccccacccaaatccatcgcccagttacttagggatttagctagattcctagtaaccactcatgacagctgccaatgtagataactccaggaattcccacatttattgagcagtgaattcggtttccttttgtttccttgtagaagagattagcaatttggccaaagggctcagccttccatcagggtggtcggtagcctgtaatcaagctggcccgtgatgagtcagctatgagcctgagcctccagcgagccccgccccatacctggtatgcatgatctgcctgaatgtgccagaaggacccaggagctgacttgctgagagcccctgagggcagggaggactccgggccaggatgttctgggccggaggactgggctttgtgcagaggtggtggaagagcagacagaggcaggccagtcatgctgggggtgggagctggctcggaggtgggagtcccagggactggggtgcctgcggcagcagcagcag

SEQ ID NO: 259121 - DNA, 133 bp, Homo sapiens
  chr8:28237868-28238001
  hypo
tttgcactcctaattctagacgactgaaccttgatttgtctgcaaaaccagcaattcctctcacttctgcgccactaacaaatctgatgagcgcgccttctctgtcttcaccgccaacactgggaaaatgttg

SEQ ID NO: 259122 - DNA, 43 bp, Homo sapiens
  chr8:28265545-28265588
  hypo
gggattacaggcatgagccaccgccccctgcctattttattct

SEQ ID NO: 259123 - DNA, 38 bp, Homo sapiens
  chr8:28266309-28266347
  hypo
agcatgggccaggcacggtggctcacacctataatccc

SEQ ID NO: 259124 - DNA, 61 bp, Homo sapiens
  chr8:28269021-28269082
  hypo
ggggggggctaattatttacacttttctgatttgccatagtgtatacactaagcacatatt

SEQ ID NO: 259125 - DNA, 144 bp, Homo sapiens
  chr8:28573489-28573633
  hypo
gtgaaacagagatcgttttgtggaatagcaacccatggttatggcgagtgacccgacgtgatctggggggcaggctgcagaggactcatgacaggctataccatgctgcggaatgggggcgcggggaacggaggtcagacctgc

SEQ ID NO: 259126 - DNA, 208 bp, Homo sapiens
  chr8:28610787-28610995
  hypo
gcgccacagaccccgggtctccttggctgtctgtgggccgcccctggccaccttgtcctggctcgcagggtgcaggagcgcctcgttctctgggtggccggcttgctgctccggtttgggctgtcttaccataacaccgtcccagggctctgcaggccactgtgagcgctggctccctgggcagtgctcctccgtgtggactgtgcct

SEQ ID NO: 259127 - DNA, 76 bp, Homo sapiens
  chr8:28737393-28737469
  hypo
agactcgtggttgccgaggcctggaggtagtaacggagatctttttggagtaatggaaatgcgctaaatctggatc

SEQ ID NO: 259128 - DNA, 320 bp, Homo sapiens
  chr8:28918856-28919176
  hypo
cccctcagttttgccggagcactcggaagggcctcctcttttcctagtagttgcctcatggtgactctagaaagcaagtgtgtgcagcctgtgcctccccgacccatggcgggcgtctagatcaggccctaggagcctccccatccctgcctcttctagccacttcccggggggctgtagagcacggtcacaggaaggcctctgctgggccgagtctgcggtccctgagccatcacagcactggcgtcttcagacacaccctggctgcaaggcaggacactccccctgccgagagacaccatgtgcgtcatcattgcctc

SEQ ID NO: 259129 - DNA, 168 bp, Homo sapiens
  chr8:28928119-28928287
  hypo
gagggtggcgctccggcgggcctcgggggcacccagccggagtcctgtgctgcgccgccgcacagggcccgtggccctgcggacccggctgggcctgaccagcagcccgtagccagggttacacctgaagtactgcttcccgccgatggaaccgtcattcttacctgc

SEQ ID NO: 259130 - DNA, 305 bp, Homo sapiens
  chr8:28938418-28938723
  hypo
ccgcactcgaatagcgtcttctaactccattctcttcaaatccactttccaaactacagctggagggagctttccgaaaaacaaaagtgaccatgtcccatgtcgctcgccaccttgcagctgccagggtttcccactgcagcagacagggaaacgctggcaggtcctgcatggtgtatttctgcggctcgatccgtccctcctgcaaacgctctactgattgattcattccacaaatacaatgacttggttactcttaatcactgtcagtgaaatctcttacagtcacacgtgagcatttaacc

SEQ ID NO: 259131 - DNA, 213 bp, Homo sapiens; identical to SEQ ID NO: 212230
  chr8:28950156-28950369
  hypo

SEQ ID NO: 259132 - DNA, 175 bp, Homo sapiens
  chr8:28960025-28960200
  hypo
ggacaaagtaagaacgccggaggctccggggagggcctgacttggtccccagggacccatgcagtttttcccactcctgctcctctgccagatacggattctttgggttttctgggaatgagtctggttttgatcaggaaagtgacaaaaaggtaaataacgagaagtgccagtg

SEQ ID NO: 259133 - DNA, 125 bp, Homo sapiens
  chr8:29053240-29053365
  hypo
gaatgcacccccagctgtctcgggagtggggaggatgagtcggttttgaccgcagtttggaactaccagtctagagccaatctatggaggcggcttgaggccgcgcaggtttctgttggctggga

SEQ ID NO: 259134 - DNA, 142 bp, Homo sapiens
  chr8:29127380-29127522
  hypo
ctcatccaacctgactcactcgcctactcccaagtatccagacatcgctcttaagcctccaatgcctcaacttaccccctttgtcacaccgaggcttctccgggattcattttatatgttcgtgcaaaagtaattgtggttt

SEQ ID NO: 259135 - DNA, 98 bp, Homo sapiens
  chr8:29160770-29160868
  hypo
cctcccttgatattcggtacaatatcacaggccgggtgtacaccttctgtgatattgggagtaatatccttctcccttcctgcatattagaaacaata

SEQ ID NO: 259136 - DNA, 149 bp, Homo sapiens
  chr8:29212822-29212971
  hypo
ttagtcacgtgctaacgtcccaagcattttgataaaacgtcttcaaaatttcagaaacaaattttggaaagaaacacttctccaaacgggataaaaatgaactcggaggctgggcatggatggtggctcatgcctgtaatcccccagca

SEQ ID NO: 259137 - DNA, 331 bp, Homo sapiens
  chr8:29926952-29927283
  hypo
gccaatcaggcattaacatagcaaccacaatataccttgggagagagccaaacagaagaggtaaaagaagttgaaagtaaaaaacaaaatgagaagacaaacctcctttggtttcccaatgcaacgattttctatttcagaaccaagcacaggatgcactaacctcacacccgctctatttatggccactgcgagggaaacatacctgtgaactcagacttaaagcctgggggaggaggtcctgctgagttggtgaatctctggtaacggtgggaaaatggaggatactcagagtacggtggaggagaatactgcccgtcactcaggaaca

SEQ ID NO: 259138 - DNA, 210 bp, Homo sapiens; identical to SEQ ID NO: 212232
  chr8:29949204-29949414
  hypo

SEQ ID NO: 259139 - DNA, 41 bp, Homo sapiens; identical to SEQ ID NO: 212233
  chr8:29951802-29951843
  hypo

SEQ ID NO: 259140 - DNA, 99 bp, Homo sapiens; identical to SEQ ID NO: 212234
  chr8:29958255-29958354
  hypo

SEQ ID NO: 259141 - DNA, 43 bp, Homo sapiens; identical to SEQ ID NO: 212235
  chr8:29962165-29962208
  hypo

SEQ ID NO: 259142 - DNA, 160 bp, Homo sapiens
  chr8:30419851-30420011
  hypo
aaaaaaaaaagagtatgtaatgtctcccgtggatgaatcatttgttctgagctaagcttgggccatgggccagactccttcctcggagcctgtggggagcaggtgaggaaggagtatggataatggtgcccgttactcctgcacgcgggggagtctagtc

SEQ ID NO: 259143 - DNA, 89 bp, Homo sapiens
  chr8:30420243-30420332
  hypo
cacatggctctctccgttcggcggggagggctttcttccccatcttgctttcccagcacggaaagaacagaagacgagcaggagtgatg

SEQ ID NO: 259144 - DNA, 49 bp, Homo sapiens
  chr8:30432995-30433044
  hypo
agaggggggccaaccgtacagcgccagccagggccgtctagctctttga

SEQ ID NO: 259145 - DNA, 400 bp, Homo sapiens; identical to SEQ ID NO: 212239
  chr8:30561836-30562236
  hypo

SEQ ID NO: 259146 - DNA, 43 bp, Homo sapiens
  chr8:30599240-30599283
  hypo
acaggcgtgagtcaccgcgcccggccacaatgttcttttctaa

SEQ ID NO: 259147 - DNA, 38 bp, Homo sapiens
  chr8:30889695-30889733
  hypo
ggtttgtctaatccgtaggaagcgaccccgctgatttt

SEQ ID NO: 259148 - DNA, 319 bp, Homo sapiens
  chr8:33580344-33580663
  hypo
cttcttacccaacccagccacggccctctccggcgcaggcagatttgaggaccgagccttcttgatgctgacggcctgagggggctcccgggtgccggatgtctggcccgggccagggtggctccccggggagacgtcggcaggcctgggggtgtgggtcggccctgagcagctgttctgggagagccagtccacggagccaaagctggagggctgctgccggccacgaggtggggaggaggacggacgcatggcggtcaggtgggccagagggaaggccgggcagggctggccaggcgcaggatccaccacctgcttc

SEQ ID NO: 259149 - DNA, 142 bp, Homo sapiens
  chr8:36179410-36179552
  hypo
agtgaattgcccattttgagcgagttgtgtgcggaagaaactgagggtcagaggcggagaggttactccatagtcacccacttctctgtggcctgcgcgcactgggcacctgggacatcacggtggggctggtgatagagcc

SEQ ID NO: 259150 - DNA, 32 bp, Homo sapiens
  chr8:36636712-36636744
  hypo
cactaggagaaatgcgcactggggtggagaca

SEQ ID NO: 259151 - DNA, 120 bp, Homo sapiens
  chr8:36636804-36636924
  hypo
ccgggattcaagctgcaggcgggaagcgctctagcaggggctcgccttgcgagagtccctgattcgagcctcttttcttcctcttcaatcaatactactctctcctactcaccattcaaa

SEQ ID NO: 259152 - DNA, 120 bp, Homo sapiens
  chr8:36636984-36637104
  hypo
actaaggaaaagtcctgcaacacctttatacacgcccagccttcttttgggtcactgtgttccatctggccgatgattaatgcacttcagcactttgggaggccgaggcgggcggatcac

SEQ ID NO: 259153 - DNA, 33 bp, Homo sapiens
  chr8:37673307-37673340
  hypo
ctaagtcacctgctccgtcggtacaatccaggg

SEQ ID NO: 259154 - DNA, 266 bp, Homo sapiens
  chr8:37688849-37689115
  hypo
ctgcagctagtgttgtaggacggtgctgagggagggcaacgtggctgggcccaagggtgactcacgagccagctccacctgccacccgcagtgagctgacgctgtctcacatcggcgtgtgggcctcaggcgagtgggagtgcaccgtgtccatggcccaaggcaacgccagcaagaaggtggagatcgtggtgctggagacctctgcctcctactgccccgccgagcgtgttgccaacaaccgcggggacttcaggtttggccca

SEQ ID NO: 259155 - DNA, 443 bp, Homo sapiens
  chr8:37702266-37702709
  hypo
ccttgcccctgtccccaccccggtggctccttctctcgggtctccacttctgctgtcccatcccgaaaggcagagcggaccagtgactggcggtgctggagaaggtcaccgatgtgcttcaccacagaccgtttgtcaagtctcagaactcgtaaccaggccagctgctcagccatccgcagcagcacagccagcagctcctgcaggcgggaggacgccgggtagggcaggtccacatttgccaatttacaaaatcgggcaagggaacatgaaagccgatctgcaggctgcagcgactgccaagccaggaaagtcgcagcagtgatgacgggcaagggatgcctcccggtcaccagccacgtctcatttgccagctccaccaactgcattgttcgagacagcatcttctctttgtcttccacgtatttggctggcacagaagg

SEQ ID NO: 259156 - DNA, 47 bp, Homo sapiens
  chr8:37708576-37708623
  hypo
tcgtgggtgggatccggcagtccaagcccccccgccttttctagacc

SEQ ID NO: 259157 - DNA, 121 bp, Homo sapiens
  chr8:37720438-37720559
  hypo
cctgagtcgggatgcggaggatattgggggtttcttccatgaccctgacaagcaggttgtcaatgtagtcttccagctcgcggacctggaactccttcttgcttatcgtttccttctgttt

SEQ ID NO: 259158 - DNA, 80 bp, Homo sapiens
  chr8:37721474-37721554
  hypo
ttctttccagggcagcaggtcgaggtccagcccagactgtctgctcctgccaaagctgcgctcagaaggactcaatgagc

SEQ ID NO: 259159 - DNA, 182 bp, Homo sapiens
  chr8:37946122-37946304
  hypo
gcagtcttttgataacgacccaattgtttgagtcacaaccgagtgttcagcacctgtgtctaccataaagtctgtttttcagccccctactaccattgagaccatgggctcctcagggcctaatgagatggagcccggtctgtctcagtcttcaaggtagccgttggcgcctgccagcccaa

SEQ ID NO: 259160 - DNA, 58 bp, Homo sapiens
  chr8:37961844-37961902
  hypo
actctgtctcaaacaaacaacaacaagaaaacacaaaattctgcgaccatatgttaaa

SEQ ID NO: 259161 - DNA, 88 bp, Homo sapiens
  chr8:38020243-38020331
  hypo
agcaaccatgatgtcgtttctcaaacatgagtcttctgcagtaaccagtaactgggaaacagctgaaagctccctcctcacgcctgag

SEQ ID NO: 259162 - DNA, 32 bp, Homo sapiens; identical to SEQ ID NO: 212243
  chr8:38032247-38032279
  hypo

SEQ ID NO: 259163 - DNA, 275 bp, Homo sapiens
  chr8:38146029-38146304
  hypo
aggccccagcctctccgctccgttttgatgatctctgcatcagggtatagtctctttgtaaagcactggttctgacaacgatctccagctgggcacacctgcgggtggcattcatactgcaacattctgttcaggcactccgattccaagccacaagggttttcatcagctggcttgcagttacagcggggaatctctgacaggtcagcaacctggatctgcacctttcctattactttgttagcctagaaaacaaaatcgcaagcgagagagag

SEQ ID NO: 259164 - DNA, 32 bp, Homo sapiens
  chr8:38223006-38223038
  hypo
tgaagacggagtctcgctctgtcacccaagct

SEQ ID NO: 259165 - DNA, 240 bp, Homo sapiens; identical to SEQ ID NO: 212245
  chr8:38223278-38223518
  hypo

SEQ ID NO: 259166 - DNA, 72 bp, Homo sapiens
  chr8:38260116-38260188
  hypo
atcactgggtctcacggaggaacaactgcgacaacagctcacggaggcaagtagcagcgcccctctggggtc

SEQ ID NO: 259167 - DNA, 104 bp, Homo sapiens
  chr8:38274857-38274961
  hypo
attcttatgcttcccgatcatcttcatcatctccatttctgagatcaggtctgacaagtctttctctgttgcgtccgctttaaagaacacgttgagactcattt

SEQ ID NO: 259168 - DNA, 34 bp, Homo sapiens
  chr8:38279097-38279131
  hypo
cgggtgggaggcctccgtgcgcctgcaaaactag

SEQ ID NO: 259169 - DNA, 70 bp, Homo sapiens
  chr8:38280652-38280722
  hypo
agggtcagcacctccgcatccgagctattaatccccgaatgctggaacaaaccaacgacacaccagtcag

SEQ ID NO: 259170 - DNA, 135 bp, Homo sapiens
  chr8:38282093-38282228
  hypo
agccactggatgtgcggctgcgggtcactgtacaccttacacatgaactccacgttgctacccagggccactgttttgttggcgggcaaccctgcttgcaggatgggccggtgaggggaccgctctgtggaagat

SEQ ID NO: 259171 - DNA, 42 bp, Homo sapiens
  chr8:38361680-38361722
  hypo
agaggctgacctgccgggcgcagcgcccgactgtaggatgtg

SEQ ID NO: 259172 - DNA, 143 bp, Homo sapiens; identical to SEQ ID NO: 212247
  chr8:38643832-38643975
  hypo

SEQ ID NO: 259173 - DNA, 113 bp, Homo sapiens; identical to SEQ ID NO: 212248
  chr8:38644035-38644148
  hypo

SEQ ID NO: 259174 - DNA, 44 bp, Homo sapiens; identical to SEQ ID NO: 212249
  chr8:38692767-38692811
  hypo

SEQ ID NO: 259175 - DNA, 105 bp, Homo sapiens; identical to SEQ ID NO: 212250
  chr8:38697062-38697167
  hypo

SEQ ID NO: 259176 - DNA, 42 bp, Homo sapiens
  chr8:38735772-38735814
  hypo
atgagacaaagtcaacaaggcgagttttaggtatattaggtt

SEQ ID NO: 259177 - DNA, 288 bp, Homo sapiens; identical to SEQ ID NO: 212251
  chr8:38786180-38786468
  hypo

SEQ ID NO: 259178 - DNA, 33 bp, Homo sapiens
  chr8:38857790-38857823
  hypo
atgagccaccgcgccccagcctctctcacagtc

SEQ ID NO: 259179 - DNA, 104 bp, Homo sapiens
  chr8:38859453-38859557
  hypo
tgggattacaggcatgagccaccacgcccagcccaaaggtagttattaatatacggtatgtatttatctggaattgacctggcgaatactagaatgattaaaaa

SEQ ID NO: 259180 - DNA, 394 bp, Homo sapiens
  chr8:39380183-39380577
  hypo
ccccttcccagcctggcctgcgcttctaggccttgccaaaggcgaaagcggaaaggcggcctcctctcctgcagggctctttacttacgtgggcccgcggaggtcagccggcccaggcctgagaggatcagcaagagagacagcattgcgtagccggcggcccagccacagggatggccgttgtccttggaacggctgcagctcgaggccagggtggtggaggccgagcggagcggaagggccgtggggtccgcggggcgcggcggggacccagctccgtggatcccgaggcgggtggatcctacagccccgcgcgcccacccacagtgggctgcaccggaggaggcacgtgggagcctgcatttctgggtacgtgggctcttttttctaaaga

SEQ ID NO: 259181 - DNA, 86 bp, Homo sapiens
  chr8:39978288-39978374
  hypo
ttcaagtgatcctcccacctcagtctccgcaatagctgggccttcaggcggggggaggggggtgcgatgagtaccttttaaaaagc

SEQ ID NO: 259182 - DNA, 393 bp, Homo sapiens
  chr8:40790349-40790742
  hypo
acccccaccctcgccgcccgccgcccccgcaagaggaaaagcaggcgctcagaggagtctgggcttcccacagcccttccgcagcacctcctgtgggcctgctcgccatgcacgctgttcaggcttctgtattaattatgagacgtggaaaagagcaggaaatccatctccctaatgcaactcagcttacgacgttttccacctcagcgattccatccctgcactgccagctcggcggtcccatgagattccccatgccttccgtgagagcagagcgccctgggcatggcctgtgcccagaggtgcaggccgcagcaggaacgcccctgattgagagctgcaccaggcccaccccagcagcccccacgtggctgcccccgaggctggggctgg

SEQ ID NO: 259183 - DNA, 86 bp, Homo sapiens; identical to SEQ ID NO: 212252
  chr8:41290578-41290664
  hypo

SEQ ID NO: 259184 - DNA, 63 bp, Homo sapiens; identical to SEQ ID NO: 212253
  chr8:41325383-41325446
  hypo

SEQ ID NO: 259185 - DNA, 98 bp, Homo sapiens
  chr8:41478655-41478753
  hypo
gctttcgccgagccgcagcgggatccctgtgcacccggcgcagcctacccttggtggtctaaacggatgctgctgggtgttgcgacccaggacgagat

SEQ ID NO: 259186 - DNA, 92 bp, Homo sapiens
  chr8:41486828-41486920
  hypo
ttctcccaggcaggcgctgttttctcttggttcaggaggccccttcgacacctgctttatttttcttcctgcgctgacgtgacgggagacag

SEQ ID NO: 259187 - DNA, 37 bp, Homo sapiens
  chr8:41488146-41488183
  hypo
ggagggcgtgggcctcgggggccggcacagccagccc

SEQ ID NO: 259188 - DNA, 122 bp, Homo sapiens
  chr8:41488513-41488635
  hypo
tactcttgacctcccgagctggggctgatccttcctggagtgaatgtgtgtgtgtctgcgatgatcactggggaacgctggctttgggtggggcctgggttcatacccgcttcctccatgta

SEQ ID NO: 259189 - DNA, 487 bp, Homo sapiens
  chr8:41553927-41554414
  hypo
caggccctcctcctcggccagtgggggcggcgtgctgagcttctggggcttgaccaggcggcaggtgatgcgggtgggcgctgcgcacgtccgtggcgggatcaccactcgcaggccgttgtggcgacttcctctcatggaaccaccccgggcgtcaaccatgaagctcaccagaaacctaggagtggggcagatgcacgttgggcttctgcatcccctctcggagatggagacaggagtccccgagccctgcgcccgccactcaccctgtatgcaccgggctggccaccgggctgatgttgtctgaggtctcggtggccgggctgctggggatgagggagtcctcatcatactctttagatgcctgaggagagagaaagggtcctcctgtcccacctcctcccgggccagctggatgccgtgccagggcgtggaggcttggaagaaccttgccgctagaaaccaggtgccacgtggagaaagtgct

SEQ ID NO: 259190 - DNA, 68 bp, Homo sapiens
  chr8:41566352-41566420
  hypo
gtggccctcctgggcggccaggtgaaggggcgtcacaccttgcaccgactcggcgtttgctgagcccc

SEQ ID NO: 259191 - DNA, 88 bp, Homo sapiens
  chr8:41582824-41582912
  hypo
cagcagatcagcagtgcctccgaacaccggagagcgtgcccaggtgcacgcaggcgtgcaaggtcccggaccccctttctccacaccc

SEQ ID NO: 259192 - DNA, 275 bp, Homo sapiens
  chr8:41590545-41590820
  hypo
gcgcccagtctgtttcattttatttttaattgctggctgcatcttgtttgataaataagatgcatgtcaggtaaaaaatgaaacttattttgcaatctatagatgtatcaatttcatgactctgggattttgaagttgagtcactggtatttataatctactgaaatggagtgaaatacgttactgtggatgcctggcgtcgccccatgccaaacgcctcctcatgaaacagaatgctgttccagatcgttagcgaggagaggaaatcagtttgg

SEQ ID NO: 259193 - DNA, 34 bp, Homo sapiens; identical to SEQ ID NO: 212254
  chr8:41602335-41602369
  hypo

SEQ ID NO: 259194 - DNA, 181 bp, Homo sapiens
  chr8:41643317-41643498
  hypo
cgtccattgctcctcggtgctttccagaccctttaaacaccctggcggagccttgctcggcccttctgggtccacttggtagccgagggtccgagctgacctcatgctttccgcactgtcgggcagcgttgtcatcagcggtactctccgcctgggaaccctcccgcgtctcttctccctg

SEQ ID NO: 259195 - DNA, 188 bp, Homo sapiens; identical to SEQ ID NO: 75981
  chr8:41668173-41668361
  hypo

SEQ ID NO: 259196 - DNA, 192 bp, Homo sapiens
  chr8:41688593-41688785
  hypo
agacgaaagcacagcggcctgggagacaggagacgaggctccgcctggaccttgacgacgaccttccttaaaactatggactcgtcatctgacctctcaaggcctccatttccccatctgtaaaaccgaaagcccctcagcaatctggggctatcatctgaaaagtgtgggcagctgcgggcgctcatacct

SEQ ID NO: 259197 - DNA, 59 bp, Homo sapiens
  chr8:41910398-41910457
  hypo
gtccatacttagggcgttggaaccacgagcaggcggttcttcatggcctgcctgtccac

SEQ ID NO: 259198 - DNA, 69 bp, Homo sapiens
  chr8:41910487-41910556
  hypo
cctttcatctactttaaactctttgatgcagagactgagtcatacttttttttttttttttgagacagt

SEQ ID NO: 259199 - DNA, 36 bp, Homo sapiens
  chr8:41960685-41960721
  hypo
cttgtcaaatgaagcgggtaacgtgggaatgttaat

SEQ ID NO: 259200 - DNA, 205 bp, Homo sapiens
  chr8:42011673-42011878
  hypo
acctttcaagtgctcgctggtcccatagtggctatcgtattaagctgcgcatttcttgtgtatgtgtgagctgttgccaaaacatgacatcaaattcagtgttcttggaagccctcttcaaagaacactgattgtgttgcagtcaggcaacgcaaaacatgaggcacggcccttttcttcaaggagtttgcggttcggttgagaa

SEQ ID NO: 259201 - DNA, 275 bp, Homo sapiens
  chr8:42053906-42054181
  hypo
gcgatagctctgtccgcatcacacagaggcgattcgagcagctgaaaaggccaagtggggtaagagatgacaaagaaatgagtcatccggccagcagaaaaacagtgcagtctgaaaacaagaaagagcgaagagagggaggaaaaatgagtccttgtttcgccttcgctgaagaggtgggcgtcgaggtctggggccagtgacgggatgcagagcagagtgaaagccagaacaatggactcagactcgggaccgcagggcgtggctgggatgga

SEQ ID NO: 259202 - DNA, 89 bp, Homo sapiens
  chr8:42082696-42082785
  hypo
aagagttgggcgtatagttccggttaattttttatgctaacgatgtaactttttgtctttgctaacttttattattactttgttatttt

SEQ ID NO: 259203 - DNA, 85 bp, Homo sapiens; identical to SEQ ID NO: 212258
  chr8:42134201-42134286
  hypo

SEQ ID NO: 259204 - DNA, 265 bp, Homo sapiens
  chr8:42144494-42144759
  hypo
ttgtttagcagtggcaggatcggctctcaggctggggctccgggagctgctgccttgggcagctgctgccccgcagttgtcttggagacccccccatagccaaaagaggtgacagtggtgcagtggtgactcccttgtggcagctggagtgcccgaggccagagccgctttccctgctgcccgtgccacagcctcagggcctgcccgtctccagtgtccccactcatgcaccagggagaagaggggaggccgccaggagccagtg

SEQ ID NO: 259205 - DNA, 142 bp, Homo sapiens
  chr8:42145510-42145652
  hypo
gggaaacctctctgcgcaggaatggtcagtagaggtttcatggcggagctgggaatggagcagggccttgaaggctctgtagactctggatggatagaaatgaggtgggagaggctgggtgcggtggctcacgtctgtaatc

SEQ ID NO: 259206 - DNA, 185 bp, Homo sapiens
  chr8:42146044-42146229
  hypo
gtgattgcaggtaacgcttggggcctggagacccctcccatgcagcagacagggtgggatttggcctgcagctcgctctgctggtccccactgtgctgtttctgtaggaaacaggtgagcagattgccatcaagcagtgccggcaggagctcagcccccggaaccgagagcggtggtgcctggag

SEQ ID NO: 259207 - DNA, 173 bp, Homo sapiens
  chr8:42147387-42147560
  hypo
gtaggagcagtttggcagcacgatgaggacttgggatgtggcacgcacaaaaaactgaagttacacgcagttgtgccctcagggtctgagttctggtgctgtgagtggggctgggtgagcgccactgacccaggcattgcggttggccacccgtcctgggctctgtcttcctc

SEQ ID NO: 259208 - DNA, 85 bp, Homo sapiens; identical to SEQ ID NO: 212260
  chr8:42148195-42148280
  hypo

SEQ ID NO: 259209 - DNA, 43 bp, Homo sapiens; identical to SEQ ID NO: 212261
  chr8:42255793-42255836
  hypo

SEQ ID NO: 259210 - DNA, 42 bp, Homo sapiens; identical to SEQ ID NO: 212262
  chr8:42256016-42256058
  hypo

SEQ ID NO: 259211 - DNA, 462 bp, Homo sapiens
  chr8:42268280-42268742
  hypo
cgtcgtcctgtgccgagggtctgctcaagggacagaggaggacggtgctgtcctggggtttcgtctggcttcctgtgcctgtcctcggaggctcgctgttacctttctgagcctcagcttctagcgcaggggctgggaagggagctcagaaggggccggagccgcgcggccccctgagcgttctcggtaaacgctcggggtccccactccaagcccggccttccgcatgccgcttcctcggctacccttgagaagcaaagcccccttttcccttgcccaccacgccagtgctggcgctcaggtgctgcctcccctgtaacccacagcccggttctgggtgcaggcgtgtgtgttagcgcgaggggcgttttcacatcccgcgcgcccttaatcgtgggctcctctgcgccccagcggcctctcaggtaagggtggtcggatactagcgccaccggccttgcc

SEQ ID NO: 259212 - DNA, 297 bp, Homo sapiens
  chr8:42293859-42294156
  hypo
tgcatccagggcctccgtcatccctaacagacagcagctccactcttgcctttgccaaggccacggctccgatcttggcagctgcctctttccttcttctctcacatccgcatccaggccgtcgtccaaagccagtgcccctgtcaaacgtgccctgtgtggcccctgtcaaatgtgccctgtgtggcccctgctcacagctccacggctcccctctcgaggcgaggccttccttcctgtgtccatcggccacgtgctctgcatccacgacctgcagaccggcgacctcctagcttg

SEQ ID NO: 259213 - DNA, 63 bp, Homo sapiens
  chr8:42306697-42306760
  hypo
tcatttccccctgcggatggacatactggggcacagcctcagtggctcgtgttcactcagcca

SEQ ID NO: 259214 - DNA, 42 bp, Homo sapiens
  chr8:42315266-42315308
  hypo
tgttgggattacaggcatgagccactgcgcccggctgagtat

SEQ ID NO: 259215 - DNA, 216 bp, Homo sapiens
  chr8:42316750-42316966
  hypo
ctcaaaaaaaaaaaaaaaaaaaaaaaacataaaaaataacaacaaaatccatgagaatgacaaggaaaggagtaattcagcaaagaaaatcatcattggcttcggtatctaaaaaaacaaagcatggcttctagtctctggataaactggtctgatatttccaggggtctgtactctgtgctgtgaacggctttagagctccgctgggcattgctg

SEQ ID NO: 259216 - DNA, 41 bp, Homo sapiens
  chr8:42318196-42318237
  hypo
tagtaagttcaacacgaatggtactgcgcatgttttcagtt

SEQ ID NO: 259217 - DNA, 383 bp, Homo sapiens
  chr8:42333236-42333619
  hypo
tccttctggctgcagtgtggcgaccacattggatacaaggcaagcagaaacatggaggatgagtcaggagcccgctgcatggcttaggcatgagatgaggcatccgggaccaggctgtggacggtggtgggtgggagggaatacgatgatttaagagaactgcagcggcaaaatccaacaggaccagatggtggattaaacatgggggtggagagaggatacatggtttatggaaccgaagtgaaaaataaccgagtgggtttttcttctcttttgcattgtttttagttttgctttttggggctaggatggggtctgaccacaggtgcgcttttgattgggtgaagtagccgggtttactgtgtcttttttttttttttttt

SEQ ID NO: 259218 - DNA, 34 bp, Homo sapiens
  chr8:42350487-42350521
  hypo
cacgcccagccttggttttcgattaagtttaagg

SEQ ID NO: 259219 - DNA, 40 bp, Homo sapiens
  chr8:42399256-42399296
  hypo
caatatgtcaaataccggccgggcgcggtggctcacgctt

SEQ ID NO: 259220 - DNA, 120 bp, Homo sapiens
  chr8:42544829-42544949
  hypo
gctgggcagggctcgggaggtgcagcccaccatacctgagcctcccctgcctccccccacccagcctcccccccaccccgcctcccccccaccccgcctcccccccaccccgcctccgtg

SEQ ID NO: 259221 - DNA, 224 bp, Homo sapiens
  chr8:42600787-42601011
  hypo
cctttttcctctccagatgttcaccttctcttatgtaaaatgcaccattcgcagccggcctgtccctctccctactcgccccacccccacctctaaggacgtatataaatgttaaacctcctgaaatcctcttatgaaaaacagccacaggtgtgtcccacaggtgcggtgtttttcccagacccgccctcaagtggcttaataaacctcgatgatcaagacac

SEQ ID NO: 259222 - DNA, 82 bp, Homo sapiens
  chr8:42651995-42652077
  hypo
ccagacctgcagccagccatgcccaagcctccccacccccctacccccgccgtgggcttctgcatggcgcagcctccccaac

SEQ ID NO: 259223 - DNA, 240 bp, Homo sapiens
  chr8:42749968-42750208
  hypo
ttacaggcgcgagacaccgcgcctggccacgtatgtgtaatttctaaaggtttctctgcccttggtgtagggaagaatgtttgaaaaaaagaccattgagaatacttcaggtaagtttttttttttttacacttacaaaatgctaaatgatcaggggtcaactatcaagtggtactctgtaaggcaaccttaaaaactcactgctgacccaggctcggtggctcacacttttgatcccag

SEQ ID NO: 259224 - DNA, 38 bp, Homo sapiens
  chr8:42917136-42917174
  hypo
caagcgtgagctaccgcgcctggtctgtttataatgtt

SEQ ID NO: 259225 - DNA, 233 bp, Homo sapiens; identical to SEQ ID NO: 212267
  chr8:43059742-43059975
  hypo

SEQ ID NO: 259226 - DNA, 131 bp, Homo sapiens
  chr8:48044651-48044782
  hypo
aacaccaagccaagcgacgaacgccaagccaagccgttacatacgcatgcgcagaacaccaagccaagctgctgcggcgtgcgcgtgcggcgtacctcagatggcaagttactgcacgtggcagtgtccga

SEQ ID NO: 259227 - DNA, 263 bp, Homo sapiens
  chr8:48091762-48092025
  hypo
gagctgtttcttccccagggcgcagccacaagtcgtcccgaacctgctgcagtgccggagagtcctcagggaactggagcgctacttctccacagtacagacgccacgctgcacatcacaccactgacaccatgcacaccacgcacaccacacataccacgctgcatctgcgcagagaacacgcatgcataccacatggggggcagaaaaggcggtttggcgatccctgccggtcacattgcgcagtgcaggctgattccacc

SEQ ID NO: 259228 - DNA, 297 bp, Homo sapiens
  chr8:48172269-48172566
  hypo
agacagcaaggcccggcggaggtggcaatggcagacctggtttctcggcggagtcccagtgggaggcccggtgtccaaaatcctcaactagattgggcatgccgtttatcttgttccaactgttgacagtaatggcactagcaataatgtccttcccaggcaaagatggtttttcttccgtgttttcagccactgcagagtggacatctactatgaaccaagtatctgcggctttaggtaccagattcaaacacagaatggtggcagaacagggactaggacggagagaaaacctga

SEQ ID NO: 259229 - DNA, 36 bp, Homo sapiens
  chr8:48255177-48255213
  hypo
acaggtatgatcaagtgcacccggcctgaaatgtct

SEQ ID NO: 259230 - DNA, 438 bp, Homo sapiens
  chr8:48292752-48293190
  hypo
ctgcaccacagcaacgcgtgctgcccctgcctgggcctggcagaaggctcccttgcagcagctcaggactcacactcactgagcaggttttaaaacacacagaatggccagacaggtcgtatcacagtttgtgtcagaattccacaggtgtacactatttttttttggagaagggggtacttttcatctgtgatcactgcagacaaggtgcgtcaggacctcggaggaccgtgttgctgggcggggcctgctgtttgctgtggagccccctggccctggtcactgccgccttctccaccctccactcctgcttggtgaactttgacccggcaggtgcctttcttgagcctcgtgattcccctcccctcttgccccgctgtctgtcatttctccttgggctcctcagagcaggtgccaggctgacgataggtggagggg

SEQ ID NO: 259231 - DNA, 196 bp, Homo sapiens
  chr8:48294168-48294364
  hypo
tcagaagatcctattcgggcaggtctgggcctggtcagtaattgggtgggaggcctcagagagcagaaaccagcgattggcaggaagtggcatgggcagctcacctggcctgcgagtctgggctcagctggacctgccccacgtggcaccaggcgcacaaggtgtcctcacagagccgccccgtggcacgcctttg

SEQ ID NO: 259232 - DNA, 203 bp, Homo sapiens; identical to SEQ ID NO: 212269
  chr8:48348567-48348770
  hypo

SEQ ID NO: 259233 - DNA, 239 bp, Homo sapiens; identical to SEQ ID NO: 212270
  chr8:48396519-48396758
  hypo

SEQ ID NO: 259234 - DNA, 41 bp, Homo sapiens
  chr8:48523967-48524008
  hypo
aagaaaatagaggctgggcccggtgtctcacgcctgtaatc

SEQ ID NO: 259235 - DNA, 230 bp, Homo sapiens; identical to SEQ ID NO: 212271
  chr8:48585773-48586003
  hypo

SEQ ID NO: 259236 - DNA, 40 bp, Homo sapiens; identical to SEQ ID NO: 212272
  chr8:48593635-48593675
  hypo

SEQ ID NO: 259237 - DNA, 97 bp, Homo sapiens
  chr8:48675251-48675348
  hypo
taaatggaagcatttttctttctccgtggcacataaagtctgggtgcatcttagattcaggcacatctcaagtgagctgaaacgcagtactcaattg

SEQ ID NO: 259238 - DNA, 120 bp, Homo sapiens; identical to SEQ ID NO: 212276
  chr8:48683807-48683927
  hypo

SEQ ID NO: 259239 - DNA, 116 bp, Homo sapiens
  chr8:48694944-48695060
  hypo
gtcatgggcacaacgctataggtcctcagctgcagggccctctggctgcaggcggagtcttgggccaggatcccattcatgacctggaagagctgctccacgcgctggtcctgccg

SEQ ID NO: 259240 - DNA, 180 bp, Homo sapiens; identical to SEQ ID NO: 212277
  chr8:48711778-48711958
  hypo

SEQ ID NO: 259241 - DNA, 566 bp, Homo sapiens; identical to SEQ ID NO: 212278
  chr8:48744129-48744695
  hypo

SEQ ID NO: 259242 - DNA, 179 bp, Homo sapiens
  chr8:48793718-48793897
  hypo
tacaggtcagataacacacccggcctgcttggccttccttgcctgctgacgggtgggttgaccgcacaggtgaaacaaacacacccacacaggatggttatcgagactggctaataagtacgggggattactgtgctagtctccctacatttgaacacgtttgaaattttccataataa

SEQ ID NO: 259243 - DNA, 194 bp, Homo sapiens
  chr8:48801154-48801348
  hypo
ctcctgtccacttgcgcgtcagggccatacaagttgacggcacaaagctcctcaatgctggccatgtgacaaaacagtaaattaggtgagctctgatctcgttaaattatcaagatacactgaaaaaaatgtttgcactgttatgaagcaaacagaggcaacatctaacaggatccacacgcactaagctagca

SEQ ID NO: 259244 - DNA, 161 bp, Homo sapiens
  chr8:48854509-48854670
  hypo
ttaaagacaaccagcgcagtggagggagggctggccggcttccctgcaggcccacgccccacccagccctgtgctaggaaaggcaggcatcgctagggaacaaggcccccagggtgccaccagggatgatccctctgcacacattccggacactcctcctt

SEQ ID NO: 259245 - DNA, 75 bp, Homo sapiens; identical to SEQ ID NO: 212279
  chr8:48854908-48854983
  hypo

SEQ ID NO: 259246 - DNA, 83 bp, Homo sapiens
  chr8:48985104-48985187
  hypo
tgtgagggtcagggcgggtagaaacaagctgtggggtgaggtagaaacgccagtgtatagcggaagagcgcggcctcttactc

SEQ ID NO: 259247 - DNA, 169 bp, Homo sapiens; identical to SEQ ID NO: 212280
  chr8:49055453-49055622
  hypo

SEQ ID NO: 259248 - DNA, 701 bp, Homo sapiens
  chr8:49172622-49173323
  hypo
ggtggaggggcctttttatgcgttggaaacgcttttttagtgaaactaaactgaagtacttacggagtagctgagctgggcggactgcgcaggagcccaggcaccaattggcgtgaactctccagttctggacccacatccagaggtgtgtgaagccaccccccagagcccagccaacggtaaataggactgtgacctgggaatcagaccgttcccgagcgccccctgtgtgtggtgttccttgggtggtggggaccgctgtgttcagcccgtccttggaagaggcgaggggtgctgccgtgggaggtagagagaagggcaggggtgtggtgctctttttttccattcctacttcagctaaaccattgccacttttatccgttttgtgccgcgagctcttacctactcttgttggttggcggctttcgggcagggaaacgggcaaacgtggacgcgcgcagctaaggcaggcgcggtgggcagggggctgggccgggcagggactgtgccgcccccgcttctgggtgggagcggcctgtctcctctccgagggtctgagagcacccgcacccaccttccttccccagggcattccggcctaggggaagggcgtctggaatgggagcgggcgctccaccgcctgcaggcatacggtaggcctggcccagtactgggcgtccgagctgcacccaaggggcagc

SEQ ID NO: 259249 - DNA, 42 bp, Homo sapiens
  chr8:49187833-49187875
  hypo
acagggaggagcctttcccacggagcagactggccagccagg

SEQ ID NO: 259250 - DNA, 248 bp, Homo sapiens; identical to SEQ ID NO: 212281
  chr8:49241526-49241774
  hypo

SEQ ID NO: 259251 - DNA, 355 bp, Homo sapiens
  chr8:49334894-49335249
  hypo
gagggacctgccctgctggtcggagtctgctctgagacccagggaccgtgcgttctgcagggaagctggcgcatgcccttaggttctgcagctgtgtgggctgcgctgccttcgggggcacgtgacgccacgtgggaagtgctgtgaggctggtgcggagagcaaacctcctgcaactcttagcgagtaaatgggcacatccacactggagttgaacacaggggcgccggccacgggttcaggctagcccgggcgtctggcttccctgccaggatggctgcctcgttactgagatggaacacacaacacagccgcgtgggcagtgggaggctgcgaggttagcctggcaaagctg

SEQ ID NO: 259252 - DNA, 236 bp, Homo sapiens
  chr8:49339718-49339954
  hypo
ggctcctctgtgtttgcacacgtgcctctgtgcgggtggcacctgccctatttgtgctcttcgttgtttgctactgggatcagtggcttacgacgaacagcccatggccctggggcctcctgcactgccgtctcctgggagaaaggccgctctcacagccagccatgtgcacatcatcccattggtacccacagatggcactggccccttccttcaaacccgggccaagctccaaa

SEQ ID NO: 259253 - DNA, 601 bp, Homo sapiens
  chr8:49382242-49382843
  hypo
tttatctcagctgaaatgtacgggaaaagtagacgtcaatcaggtggaaaagggcagagagagcaccgtccaggcagaagggagagcgtgagcaaggggcccgtgggactgagtgctgcgtgtcgccgcagaggggcatgaggacagtgctgggcacggcggctgtgggcagtgtgggccgacagaatccccaggccaggtcaggtgtcccggccatccatggagaacaaggagtcattacagaggctcggtggcacacggtgaaaatgaggttcttctgggaaattttaggctgcaggatgtgagtggcccacagcagggaaggtctggcaggcagcgagagcttccggactggaccccaagaaggaggtcaggctgggaacacagactcggaggttcccatccacagatggtaccgaggctactgtgtcgggtcagatcttccaggagaccggaggagggacgtggctgcgggaagcaagcccagagccgccagcccgggaccagcgggaggccagggagcaaggccacagcagaggcagccaggaccccaaatatcagaggctcaaatgaagttgacgttagctgttttatctgttaa

SEQ ID NO: 259254 - DNA, 500 bp, Homo sapiens
  chr8:49390183-49390683
  hypo
agcccagcatcccacaaggacggacactcactacagcccggtgcctgcggagtattccgaacgcgagatccaaggaaaccacgaaggctcctctgcgggctcccttgcccctctgcggttcagtcgggagacgctcaggcgctgacaacagcctccaggtgccgttccctgcgcatggccccatctttgcgggcagtgtccagtgggcttgtgctcacacctgcgctgggggctccacactagacggccctggactactgaaatagtggacagaagggtctcccgagaatgtccagggtgggcaggcagtgctggggagccagcgggaagggaagggagcctgaggcggagaaacgcccacgcgggagctgctagtgcagccgcaagagcaaggcctgggctgcagtaggggggctgggcagtggcccgcagtgtgcagcaggccctggagaccaggccaagggaagccttggagtgaacctggtcgcaggtgcgcaggt

SEQ ID NO: 259255 - DNA, 390 bp, Homo sapiens
  chr8:49493797-49494187
  hypo
ctggatgggcgagccgggggaggagtccagtgcccaggctgtaacggctctgttagttcggataaatcgcacagccctggtcccggatccccagtcttcaaagccagagtgtccggttacattttataagtagaaactcagattcaaaggactcacagagataatctagccttaactggaaggcccttcatacatacttttgatatttatatgctttattttcacaggcactatcttctgcccgtctttttgtaggtcagtggtttgaaggacggtgccatggtcatccttcccagcgcagggccggcgtggccctgggcggctgcatcatccccatggaggctgccctgcccgggctgtgcatgatctcacaggcgcgctgccaggggc

SEQ ID NO: 259256 - DNA, 193 bp, Homo sapiens
  chr8:49496391-49496584
  hypo
gacactcgtcctcccgcccttccctgcccagtcctcgcctgactggcctcttccctacatgctgttctccacgttgccttcccgtgagctttcctttttgcctaaacacatttttcagctccatgtttctgacagactggttactaaaatccaacccaacaacgtgtaggacggccaagtgtataatatgcat

SEQ ID NO: 259257 - DNA, 44 bp, Homo sapiens
  chr8:49520279-49520323
  hypo
tttgtgtatttatttttttgcggcagagtctcgctctgtcaccc

SEQ ID NO: 259258 - DNA, 442 bp, Homo sapiens
  chr8:49546882-49547324
  hypo
gcctgcatccgcatttttcacaggctcagtgcccgaatgagctgcagtgtagtctggctggctccccaacctgtcgcacaggccttgctcaccactcctgacttttcaaggcagttgatttcactgttgaatacttccctattcaaataaagctctttactccaatgttattcgttgctccgggttccgtttgtaaagagcaaggctgcacagacctgtctgctccgttgagacagtgaaggccgtctcacaaccgcaccttgggactcgcttccacataacacctcttctgttcctctcacggttcctcacagcgccagggccaagattctctcggggctggttccctgcctcgcagtcctgcctgacatcttggggctttcgaaatgggcaagtcctacggctgagttttgatcctcccggagttcagtgggtctcaccc

SEQ ID NO: 259259 - DNA, 412 bp, Homo sapiens
  chr8:49571717-49572129
  hypo
ttgggaggctgcgtcgtcctatcacagttaagaaagaattatttcgtgagttttacctagcagtttacataaatcagtttacagcagatttggagaaaaagaacattaaaagcagaccaggtgaacgagtttgaaacggcacacggaattggaagggagaaaaggttgtgatcactgctcaaacaagttcttccttccctccaagaaatgaggcgtgggctgtggaacccattgcggctaatcgtaaacaggtgcatcttaaacataggatgccaacctgctccaacatgctgggcaccgggcttagctgcagctaattacgcgtgcgctctgaccgggcggcccacagcggctctgcaggctcagcggggcgagcgcaggaggcgcgggcccgacacgcgtgtttagacct

SEQ ID NO: 259260 - DNA, 43 bp, Homo sapiens; identical to SEQ ID NO: 212290
  chr8:49572364-49572407
  hypo

SEQ ID NO: 259261 - DNA, 80 bp, Homo sapiens
  chr8:49588260-49588340
  hypo
cttgttctccagatggtacacggatggctgtgactctacagaaactgtctggaccttgcgggaagtggaggctggaggca

SEQ ID NO: 259262 - DNA, 260 bp, Homo sapiens
  chr8:49608990-49609250
  hypo
tgtctccccagcttctccaccgcaccatgtgtctgggtctgtgattaccggaggcgactcgcaacaggcccagactcgcctgtgtgcatagcactaagggtaatgacaactcctctgtgtgtgcaggtgcctgttggagacgcagagctctgcagcagcaggtgagctgatgctgcaacctgctaaacgccgctcctgcggagcgccagggcccagagtgcacatggctctcaggctccgtgaaaagcttgcagtgagct

SEQ ID NO: 259263 - DNA, 143 bp, Homo sapiens
  chr8:49747115-49747258
  hypo
acggtgtgcaagtgcgtctggaacagggcttgggaagaagccgcactgcagggcacaataaccatgtgtagtgcttcctggctgaaatctgcactcaacaggaggtcgctcttagagtattaggctgctgctttgatatgagg

SEQ ID NO: 259264 - DNA, 323 bp, Homo sapiens; identical to SEQ ID NO: 212292
  chr8:49747318-49747641
  hypo

SEQ ID NO: 259265 - DNA, 38 bp, Homo sapiens
  chr8:49747863-49747901
  hypo
gggaagctgctctgcggccccctcgagcatgctgaccc

SEQ ID NO: 259266 - DNA, 35 bp, Homo sapiens; identical to SEQ ID NO: 212293
  chr8:49797125-49797160
  hypo

SEQ ID NO: 259267 - DNA, 160 bp, Homo sapiens
  chr8:49803111-49803271
  hypo
ccttatctgtaaaaatatgacgtaaataacggtgcccagctcggagggctgacatgaagattaagtgggctaatacttgtaactcgcttagaagggtgccaggcacgtagcattttatacagcgactttgagtaaaaacgatcttggtgatgtgtgccag

SEQ ID NO: 259268 - DNA, 521 bp, Homo sapiens
  chr8:49808459-49808980
  hypo
attaaatatgaacgaagcactatatgagactataaatggaattaatttttgtgaaaacaagaaaaggagtccccgaattaattactgctgtaagattgagcttgagaatttgtcttacaaaatcttttaataatgtattattctactcacaaaacagatattggttttgtgcctagtatgttccctgaggtgtacagggaacctcaaggagctcccagactatgggagtgacccctgcggagctgacaagccaatgctggagaagtgcacgggcaggctcaggcgcagccactcaatgggcctgtctgtgtcgggggcaggggcacagagaggggcaggtgagtcgaagctgattgggtgaagaaaagacagtgaaaagacggtgagaccaaaggcacagagcgggtttcccgccccagctaccacgctggtctgcagagcggtaagtctaaactggggagaggtcagaggcagcacaggggcctgtggggcaaccgcaggatccgcgaccctctctgagc

SEQ ID NO: 259269 - DNA, 104 bp, Homo sapiens
  chr8:49809397-49809501
  hypo
ggattacaggcgtgagccactgagccctgactctggatggctttttgattcggggagaccactctgagggctctgctctgggcgatctccattcaggcagaact

SEQ ID NO: 259270 - DNA, 470 bp, Homo sapiens
  chr8:49890418-49890888
  hypo
ctcgccttgaccacggtttccctggcgaccccaggggcacttgggacggttctcactgcccgcgcagggccgggccaggaggtggccgcgcggccggggaggggctcggtgctccagaaggcaccgcgctctccttgggtgggaaggcactgggccagcggggctggggcgggcagcccccaggcaaggccgccagcacttcgccagcactgcgacctggccctgcacctagccttgcacccagcccccggcaactcctgggcggcctgcgtcagctgcatcgcgcagccctcgcggatgggacgcccagggctcgaacccgaggcggggtgggccgctgctgcctacccttcttgaactggaagcccgccgtaccacccgggcgtcgcaggtggcgtggaaggccaggctgcgctggctctgggagtggcggcgaggacgggactggaagggccgggcctctggggcct

SEQ ID NO: 259271 - DNA, 249 bp, Homo sapiens
  chr8:49959159-49959408
  hypo
agcccctccccagacgccagcgactctccggccaggcaggaacctttcatcagatacactgggtagggctgattatggaggaggaacgggaagttctaccaggagtcgctgtactgtattcacggctcttgttatatgatttatgctggcattatctaaactgagaagcggacaatcctttattcaaaggcgagctccctctattttgtgttgccgctcatggagtcctaaggtcggagccccatagga

SEQ ID NO: 259272 - DNA, 87 bp, Homo sapiens
  chr8:49983880-49983967
  hypo
aagggagccacaatttgatgcgtaagtcaactgagtctgtgaaagggcaaagcaggccgggcgcagtggcttacgcctgtaatccca

SEQ ID NO: 259273 - DNA, 37 bp, Homo sapiens; identical to SEQ ID NO: 212295
  chr8:50014663-50014700
  hypo

SEQ ID NO: 259274 - DNA, 97 bp, Homo sapiens
  chr8:50015581-50015678
  hypo
tctatgggaccgggcgtcttggagcagggggctttgctcctcggggaggctcaggctgtgcaagagcccatggcctgggtggggcgcgggaaggctc

SEQ ID NO: 259275 - DNA, 31 bp, Homo sapiens
  chr8:50053019-50053050
  hypo
aaaacaaaatttgggccagtcgcggtggctc

SEQ ID NO: 259276 - DNA, 40 bp, Homo sapiens; identical to SEQ ID NO: 212296
  chr8:50071091-50071131
  hypo

SEQ ID NO: 259277 - DNA, 42 bp, Homo sapiens
  chr8:50115376-50115418
  hypo
tggctgggtccacttaaatgcggctgaaatgaacacacagta

SEQ ID NO: 259278 - DNA, 319 bp, Homo sapiens
  chr8:50313931-50314250
  hypo
ctcaaaaaaaaaaaaaaaaaaaaaaaaccaacagaatgggacatcacaggagcagacgccaagacagttatggtaaccgcaggcaggcagcaggagtgagcaaaccaaagcgagagcggactccggtgctggaggacagagcctcggaatccagctcaccagagcactatggaggaacaggaagtaacgcaccgccccccactccccggcaaagcttgtctgcatagtgagaccaccacagtcgctcacacacgaagaggtatggaaagctttgctgcttacataatgaggaccctggggagagcgggacacgcccctc

SEQ ID NO: 259279 - DNA, 38 bp, Homo sapiens
  chr8:50377959-50377997
  hypo
agtaggaggaaagccagggccgctgagcggccagactc

SEQ ID NO: 259280 - DNA, 120 bp, Homo sapiens
  chr8:50568929-50569049
  hypo
aaaaataggacagaatagcaagtgaaaggggtccgtccgatggtgctcaccatttggcgatagtcgattgtcccttcatggttgccaaaatgtgtccagaattcgtgagttcttggactc

SEQ ID NO: 259281 - DNA, 82 bp, Homo sapiens
  chr8:50740531-50740613
  hypo
caggcgtgagccactgtgcccggccgcagatatttttcttgaatgagtacattgtttttccgcccagagaaaatgtagtaat

SEQ ID NO: 259282 - DNA, 360 bp, Homo sapiens
  chr8:50891735-50892095
  hypo
agcagggcagttcacaatggcgagacgcagacgcctttggggcggtgcagccagagcggagtgcgcctgggactgagtgtcctcctcggggactgcatgggccccgcaccgccgcctgccccgcgccacgacagcccagagcacggatgggcccagactgtcctacagccgtttcagcaggcgagggtctgtccagcagcacctaaacagcttttgtatgtcctgtctccaaagtgtgtggctttaagtcaggttctgtgcttttgatgacaatattttctttgggtcgggatcattttcatctgttgccccttctgcccaacctttgcacttccccccgatcctcctcaccccttccct

SEQ ID NO: 259283 - DNA, 32 bp, Homo sapiens
  chr8:50945964-50945996
  hypo
tgagccactgcgcccagccaatttattattct

SEQ ID NO: 259284 - DNA, 143 bp, Homo sapiens
  chr8:50987383-50987526
  hypo
gagccaactccctctgcttgcgagggagtggggaaggacaggtacctgagggaaccggggctgtgccccggccgcactcgcggcgcacgcgagttcggggtgggcatcctctccacagaccccacacttggagcggcctgccg

SEQ ID NO: 259285 - DNA, 100 bp, Homo sapiens
  chr8:52143253-52143353
  hypo
ccctccctcaccagcgcgacttccgggtgcgcgtgggctgggctggcccgcacttggagcggccagcagccccgggcagtgaggggcttagcacctgggc

SEQ ID NO: 259286 - DNA, 120 bp, Homo sapiens
  chr8:52184041-52184161
  hypo
cagggctcgggacctgcagcccatcatacccgagcctcccgcgacgctgtcggctcctgcgcagcccgagcctgccagatgagtgccgccccctgctccacagcacctggtcccatcgac

SEQ ID NO: 259287 - DNA, 51 bp, Homo sapiens
  chr8:52191721-52191772
  hypo
gtttgcacattgtggatggccgctttctccgacagacacagctgcctccct

SEQ ID NO: 259288 - DNA, 38 bp, Homo sapiens
  chr8:52384515-52384553
  hypo
ctgggattacaggcatgagccaccgcgcccggccggaa

SEQ ID NO: 259289 - DNA, 122 bp, Homo sapiens
  chr8:52432589-52432711
  hypo
ccaagtgtggactgcggttgtgggtatctgccggcttttcctccaggaaggagttcactgagacccacagaaagaatgccggggaatctgtgggagcttccctcccacgcggcagggaaagg

SEQ ID NO: 259290 - DNA, 281 bp, Homo sapiens
  chr8:52432927-52433208
  hypo
ctggaacctggctgcggggaagggactggggcagggaagtgactggggccaatcactccacgccgcaccaggaggagggacggaaacgcgggagagccacaccctggagacataggcccgccatgcacccagaggacccaaatctcctcggaagatccgaggacggccacccaccatgtcctcccacctatgctaataaagctccaggaacaggaactatgggtcagagtgagaaaagctctaaggagcatcacaaaggccaaacccgaaaggggaggcga

SEQ ID NO: 259291 - DNA, 227 bp, Homo sapiens
  chr8:53322354-53322581
  hypo
tgttatttaccaaccgcacaaagaaaatgctgtctattcagaactcatttcaaaactcttttcactgagagtgagcgaacaagcgggctcatgtcccgagcccagtcacatctccagcggtccggtgatggccgtggggctggcgccgagtggcacggcctccacagtggcccacaagggtctgttgtccacgccgcgtggaccgcgcaggccggtgggagtcaaga

SEQ ID NO: 259292 - DNA, 41 bp, Homo sapiens
  chr8:53459774-53459815
  hypo
aggccgggcatggtggctcacgcccataattccaacacttt

SEQ ID NO: 259293 - DNA, 32 bp, Homo sapiens
  chr8:53487090-53487122
  hypo
agagggagaccgaagaaagaaagaaagagggg

SEQ ID NO: 259294 - DNA, 34 bp, Homo sapiens; identical to SEQ ID NO: 212297
  chr8:53657305-53657339
  hypo

SEQ ID NO: 259295 - DNA, 147 bp, Homo sapiens
  chr8:53805566-53805713
  hypo
acccagcaggaagacggagttgcccagcgggaagaacgggttgcccagcaggaagacggagtgacccagcgggaagatggagtggcccagccggaagatggagtggcccagtgagaagatggtgtggcccagcgagaagatggggtt

SEQ ID NO: 259296 - DNA, 265 bp, Homo sapiens; identical to SEQ ID NO: 212299
  chr8:54154411-54154676
  hypo

SEQ ID NO: 259297 - DNA, 250 bp, Homo sapiens
  chr8:54507104-54507354
  hypo
tcccggccgggggcgccagctcccgccttgccctgcagctcagcatcccaagggcggcatggctcagacgccccggtccgatgggctaggctcatcttagagaagttgcccagcgagccccaccccatgcggccgggaaatcaggcactgcggggggcgccgtgtggctggtggatgccgtggacgtgaaggcgacgaggcatgggtgacgggttccctggtgtcgggaagccacgccccgtggctgtgc

SEQ ID NO: 259298 - DNA, 121 bp, Homo sapiens; identical to SEQ ID NO: 212301
  chr8:54640632-54640753
  hypo

SEQ ID NO: 259299 - DNA, 257 bp, Homo sapiens
  chr8:54645359-54645616
  hypo
tcccagcctacccccgctttacagaggccagcagccccccaggaaccaggttcaggagctaacatgctccaggtctcacctcaaaggggaggatcagagccgcgagaggccagggaaggaagtcaagatagtcaagcaggcagtctcaaatctggccgtgctcgagctatgcaaatgcccctgacggagcagtgatatactggggtagacaaggacgggcatatggtagaaaggtgtgcctttgtgtatcaaccctt

SEQ ID NO: 259300 - DNA, 120 bp, Homo sapiens
  chr8:54645736-54645856
  hypo
ccagctgctcatgtactgaggacagctggttcacccgcctggacttgaaggacgctttctttagcatcagactagctcctgagagccagaaattgtctgctttccagtgggaagatccgg

SEQ ID NO: 259301 - DNA, 98 bp, Homo sapiens
  chr8:54647243-54647341
  hypo
gcagggaacaccagcgagctcccactacagttgctttagggaactcctgggctgactcagaggctcggaaagctgcatccacccgctaccgggcgtca

SEQ ID NO: 259302 - DNA, 32 bp, Homo sapiens; identical to SEQ ID NO: 212302
  chr8:54647893-54647925
  hypo

SEQ ID NO: 259303 - DNA, 159 bp, Homo sapiens
  chr8:54658318-54658477
  hypo
gaccacgtaaaggacgcttgtttctagcgtaagagacaacatgggatggcagaacgctgccttgttcccccacagctggggatgtgtccattagcgactccaattattcaccactctacacatgtccatggataactacaaaagcgcctctagtattga

SEQ ID NO: 259304 - DNA, 108 bp, Homo sapiens
  chr8:54667967-54668075
  hypo
atccattaagtttccgtctttagtgtgcgtgagtcactacacagagacttggcaagcactaaccaagcagccctttcccttatgattaggttacggggggtgggggtg

SEQ ID NO: 259305 - DNA, 191 bp, Homo sapiens; identical to SEQ ID NO: 212303
  chr8:54750268-54750459
  hypo

SEQ ID NO: 259306 - DNA, 102 bp, Homo sapiens
  chr8:54925425-54925527
  hypo
tgagattacatgaaccatgatcgtgccacggcagtctagcctgtgtggacagagtgagactccatttctaaaataaaaattaaaaaacgacgacgacaaaaa

SEQ ID NO: 259307 - DNA, 85 bp, Homo sapiens
  chr8:54945254-54945339
  hypo
tttgatgtgtagatttatgtcgttcatcaaagtcagggattttttttcaaaagtctgggtctcggccgggcatggtggctcacgc

SEQ ID NO: 259308 - DNA, 38 bp, Homo sapiens; identical to SEQ ID NO: 212304
  chr8:54956722-54956760
  hypo

SEQ ID NO: 259309 - DNA, 165 bp, Homo sapiens
  chr8:55212684-55212849
  hypo
tcactctgccaggtctgcctcgaccttccccgaactccaggagcccacccaggggtacgccggaataaagctccggtgcagtaacctccatctcgaggctgcttcgtggggagcctgacctgtggcagtgactgcgagccacgcggagagttactcactgtaatc

SEQ ID NO: 259310 - DNA, 31 bp, Homo sapiens
  chr8:55229407-55229438
  hypo
tgtgagccaccgcgcccggcctaaataataa

SEQ ID NO: 259311 - DNA, 69 bp, Homo sapiens
  chr8:55765265-55765334
  hypo
aaatcaagtttcagcgtggacaggtaatagaaacaggtcttcatcagtttttaccgactatcgttcctt

SEQ ID NO: 259312 - DNA, 86 bp, Homo sapiens
  chr8:55826294-55826380
  hypo
catcactaaacgaccttccgcctggggatgggtaaaacaacccttatgcgggttcaacacctgcacatgagcgtcactgccctcac

SEQ ID NO: 259313 - DNA, 527 bp, Homo sapiens
  chr8:56361773-56362300
  hypo
ctctggttctagaaacaattcgcctgcagccagctggctggactatttacaggcccattgcgggctgtactttggccacctcccggcacggtgctcagctgtgacgccgaaataagttagggctggccgggcggtgcggggcagggactagggctgtacacacaagtgctgggggctcggggcctcactactgccgagggccgggccggggctgtaaacatggccagggctgccctgcccacccctagtggtcggtaacgactggaagcagagcagccaggcaaggtcgggaggctcaggcgtccgacagtcagctctggatccggtccacccactgctgggctgagggcacgtcctgggcacaaaagtcgtaaacgcgaggagttgtcttcacgtcaaagaaggccttctcatccacgctcttaggggcacccatggtggccatgccaggtgccacagcctccacctccacctccaccaggtcgatgacacccttgcactcagtgtccacacggtggtcgtagtag

SEQ ID NO: 259314 - DNA, 310 bp, Homo sapiens; identical to SEQ ID NO: 212307
  chr8:56362505-56362815
  hypo

SEQ ID NO: 259315 - DNA, 501 bp, Homo sapiens
  chr8:56364012-56364513
  hypo
ttctcctgctccaggctactcgagtctgcctggaactggcctggagaaggtgcgttctgggccttaaagagtccgactacacctatgccgtacaggcccccagaatgcagcagtactgccttggaccgccggatgcgccagcagacaacggtgaagcggttctggcggtagcagtaggacacgcgctgcagggcgttgtcctggacactctggggcacgatcagcagccccgggtacctgcggtagatggcatgcatgcggttgaccagagaaatgcggaaggattcagacttggcccggctcaggcggctgctcagggggcccaggccaaggcactgatagtcgcggcagcaagccctttccaccaggaggctgctcatggtcatgccgtccgagggcttcaaggctgaggacggggtcagtgtgctgggctccagctcttccgacactgagatctcctcctcctggtcctcagagggcggctggctccagtgctcctag

SEQ ID NO: 259316 - DNA, 160 bp, Homo sapiens
  chr8:56364908-56365068
  hypo
agggggtctgtgagcatccccgtgaagatgacccggtacgtagtgaggaagagggcgccctcagctgggagcagtgctggccaccccgcactgcccgccctcgcaccctcctcacgcccatccggtggcaggtagatgcgcaggccatccagcacacact

SEQ ID NO: 259317 - DNA, 865 bp, Homo sapiens
  chr8:56366964-56367829
  hypo
caggaggctcctgcaggcatcggtgagctgctggtagctccgggacaggaagagaacctcgtgctccatgagggtggcacagaccaaagacagtacgttggtgatgcccagctggcggaagagcaggccacgctgcagctgctgatgggcagggagtcggccagtggagtctggatgacctgccggtcaccagcccccaaataaatcgtcctctactagcccccagccaggggcacggtgcacgtcagcaggttcccaattacgttccctgggaacacattcaggccctccacgtggacggcatagatgaggccgaggctgttcctgaacacctccgcatggtcaagtcgcgacacaggtaccagcgtctttggggcaaacatctgggcagatgggcaggctctgtgggcgacaggtgcgtaaggcctccctcatcctcctcttcctcccactcagtggcatccttagcgcgtgtcgtttcctgctcccagaaggtcaagcagcacagtagtggcgcccggagttgatgtcggtgaggacagcaacaaagaaggtcggtggattcctctcgggacacatctgccacccgctggactggcaaaacagctgggggaatgggttggcctcccagtccttctccgggaagaactgcagaatatggccctggcctttcccactcccgcgcgggtgcggcctgaatgccaccagcaggaagtagtctgtgatccgcgccatggggagggacgctgggcgggctccgcggctcggggactcgagggctgcgcgctcatggcccgggcctggccctggaccgcacacccgggacaccccgggttcgctccgcggcggccgcagcggctgcggc

SEQ ID NO: 259318 - DNA, 317 bp, Homo sapiens
  chr8:56602042-56602359
  hypo
gacaaacttctccaagagcccgcccttcccggactccatccggctgcgcggggcagagttctgcattgcagaggccgggctgtggggacccaggccagcaccactcagggagcagcttggtgggccccgttcccgggtgtgagggcaggaaaactggctgaggagtcggcactagaagccttgacagggggcgggctccaggtccagccttgtcggagttgaccgagggcttaggccagagatgaggaagaaggacccagaaggtcccgggcgggcacagaggcagcgcccagggaggtacgcgctggccgatgaag

SEQ ID NO: 259319 - DNA, 37 bp, Homo sapiens
  chr8:56613554-56613591
  hypo
tttaaaagagcctaacaggccggccgcggtggcttca

SEQ ID NO: 259320 - DNA, 37 bp, Homo sapiens
  chr8:56979945-56979982
  hypo
aaaagaagaaaaatcatggccgggcgcggtggctcac

SEQ ID NO: 259321 - DNA, 398 bp, Homo sapiens
  chr8:57079620-57080018
  hypo
caggtgatcctttcgcccaaatctctgtgcacaatactgacagaggaagtcctttcttccagtgtgcaccaccatgtgtctccggacatcctttcgggtgtagaaccggcgatcacaatgttcgcactggtgctttttttctttaaccccaccagacgacttgcctgcatgagatttaaggtgctccagaagcactcccgtgctttcaaaagtttgcaaacataccttacaggtgaggtcaccacttgttgcggcatgcaaggccaagtgacgtttaaatccaagcttggtattgtagttcttgccacattcttcgcacttaaacgtctctttgttagggtcgtgtgtatggaggtgattcttcagatgatctttccggtgaaacattttctcacaat

SEQ ID NO: 259322 - DNA, 65 bp, Homo sapiens; identical to SEQ ID NO: 212311
  chr8:57390711-57390776
  hypo

SEQ ID NO: 259323 - DNA, 80 bp, Homo sapiens; identical to SEQ ID NO: 212312
  chr8:58044529-58044609
  hypo

SEQ ID NO: 259324 - DNA, 124 bp, Homo sapiens
  chr8:58106024-58106148
  hypo
atctgcggcaggcacgtggtgccgcgagaacttggctcagggacggtttttccgccatgcgcagattctcgcctctcgcgggggcgccagggggcagctggttgaggtgcgcatgcgcactggc

SEQ ID NO: 259325 - DNA, 150 bp, Homo sapiens
  chr8:58116977-58117127
  hypo
agtggggaggaaaacgtaggaagcatggaagtgcatggcttgcgaaagaagcatctgaagccatggcatgtctgagagaggacacatcgggcaagattccacgtttggcagtgggcccatgagcggaggcagatgcgtatgggcctgcga

SEQ ID NO: 259326 - DNA, 250 bp, Homo sapiens
  chr8:58117447-58117697
  hypo
ggcagcgcaggcgccgtgtgctcactggagttgttcgcatggtcgcttgaggcgttcctcctgtaagcagacgaatgtgcccgaggtaaaggtcgtaaagcagtgaacctcccaccagtttgcctctcagggtgcgtacgagagcccactcacctgacactcgaggtctgccggagaggcttccgacgttcctgatagctgtggggggtggcggggctgcctttccctggcgccgcgtgcgaccagtgat

SEQ ID NO: 259327 - DNA, 222 bp, Homo sapiens; identical to SEQ ID NO: 212313
  chr8:58122848-58123070
  hypo

SEQ ID NO: 259328 - DNA, 89 bp, Homo sapiens
  chr8:58130492-58130581
  hypo
gagtagattgcctgttttcccgaaggaacggcaagttccaaaggtcagaggctcatgtgaactctgtcgggttcaggagcagctcagtg

SEQ ID NO: 259329 - DNA, 297 bp, Homo sapiens
  chr8:58191334-58191631
  hypo
accagggcttctaattcaggcggttggcaggacagctgcaagaagggaacccgcagctgcaggaagagaacctggcggccacacagttcccagcgcccacgacccggggctcagggcgcgggagaaagaggagctgaccgtagggtgggagggaggtgcactcggcgaccctcaggctttctgggaccaggcctcccagcctccgcctgggctcagctgcagctgccacctgcacatggcgcgcggcagcacagatggcaatccaataccctgcccgcaccaccagccctggacccc

SEQ ID NO: 259330 - DNA, 425 bp, Homo sapiens
  chr8:58982675-58983100
  hypo
catgtgctggattccgcatgtgccttttcctcattggttggtggcgttgctgctcgcccgtgtgataggtttccacagtaatctttatgctgcattagagacatagatacagaggtgctgtactgtgttcttgcaacggtggaggtgctcggctggtaacgttaaagaaggaataaggcgcccgacagaaggcgtttgtctttgttgtggagcatcagcgttaaggacagccggctgctgtgggaggtcagtgaaggaggctcagttcatggtaattacttaagtctgtctctcacgaaaaacacggccatgcgtgaaatgaagtatgttcatcgtgtcatctgtttaatctgatcttgctttgttaataccatgggtactccagcattccatatgaaaatacattctcccgcaggcttgcctgg

SEQ ID NO: 259331 - DNA, 87 bp, Homo sapiens; identical to SEQ ID NO: 212314
  chr8:58991411-58991498
  hypo

SEQ ID NO: 259332 - DNA, 289 bp, Homo sapiens
  chr8:59059045-59059334
  hypo
gcccggctgccaagcgcgcactgggcagccccacgctcaaagtgttcggcaaccacgccaagaccgagagcggcgtgcagagggagaacctgaagctggagatcctgaagaacatcatcaatagctccgagggctctagctcgggctcggggcacaagcacagctcccgcaactggccgccccaccggtcggaagccactgacctgcaccgtcactccttcgcggagtccctgaaggtctaccccacgcagggccgcaggagcccgcaggagggcggctcccacgtggg

SEQ ID NO: 259333 - DNA, 154 bp, Homo sapiens
  chr8:59686610-59686764
  hypo
gattacagacgtgagccactgcgcctggccaatatgcaactttcaatcaattccgtaccccactttcaatcaattcctacagagatgaactcatacagagcggggtggtttctaactgaagaatcagactttgcagagacgttgacgcagggtc

SEQ ID NO: 259334 - DNA, 236 bp, Homo sapiens
  chr8:60506003-60506239
  hypo
acatcagtgtggtacggtagtcaccctttatccacagtttcagtttccatggtttgttacctgccatcaaccctgtgccgaaaatactaaacggaaaattccagaaataaacaatgcgtaagttttaacttgcctgcagttctgagtagtgtgatgaaatcttgggccgtcaggttccgtccctctcaggacatgaatcttccctttgtccagcagatccacgctgtaacagcttt

SEQ ID NO: 259335 - DNA, 42 bp, Homo sapiens
  chr8:60733751-60733793
  hypo
ggggccttgctgtgacctcacgttgtgtggtttggagaaaac

SEQ ID NO: 259336 - DNA, 93 bp, Homo sapiens; identical to SEQ ID NO: 212319
  chr8:61034762-61034855
  hypo

SEQ ID NO: 259337 - DNA, 155 bp, Homo sapiens
  chr8:61156140-61156295
  hypo
agtttagtgaaactgctcaccgtctacggccataccaccctgaacgcgcccgatctcgtctgaaacttctcaccatgttccccactaaatcacgttttcgcctgggagaccagatcacctgctctgcagcagccggtagccttgcctgtctttct

SEQ ID NO: 259338 - DNA, 81 bp, Homo sapiens
  chr8:61189328-61189409
  hypo
atttaagtatacagcgataatacgagagtgaaatcataagaaagagggcaataagaaaactggcctcgtccaggtgctgtg

SEQ ID NO: 259339 - DNA, 70 bp, Homo sapiens
  chr8:61282991-61283061
  hypo
gttacataggatatcgcaaaggatacagatgaacagatacataaggcaaggtatgcgagaaggagcacga

SEQ ID NO: 259340 - DNA, 32 bp, Homo sapiens
  chr8:61557774-61557806
  hypo
gatggagctccgtgaggtgcatactccttctc

SEQ ID NO: 259341 - DNA, 59 bp, Homo sapiens
  chr8:61590513-61590572
  hypo
atacatcctatttctttgtttcataatcattgagctctctgccttctctctcttttttg

SEQ ID NO: 259342 - DNA, 85 bp, Homo sapiens
  chr8:61627786-61627871
  hypo
gctagatgaaccatcgctggctttccagttgtatgtatccctcatagaatcagacaccaactcagggaggggcctttccagcaca

SEQ ID NO: 259343 - DNA, 154 bp, Homo sapiens
  chr8:61779845-61779999
  hypo
atgggtagaaaaacacaatgcggtagtgtcagcaagggacacaaaggcactctggtgtcctgcagaccagcgctcgatgccagaaaccagtgtgtggaaaaacccatgtggaattgaaacagacccacttaagcacgcacgcgcgcacgcacgg

SEQ ID NO: 259344 - DNA, 210 bp, Homo sapiens
  chr8:61789712-61789922
  hypo
agtgaaagcagttccgtgtgatgcggccgctcactcagagctatgctgtgatccaccagatgggctcgcgctgatgggagtccggttgagtcctgctcagccaatggcaggttgtgtgccacgggcgagctacttcatttctctggacctgtttccccagatggctggtcgcaataatgacgacgaggcggatggcggcggggaggctag

SEQ ID NO: 259345 - DNA, 105 bp, Homo sapiens
  chr8:62221611-62221716
  hypo
ctcaatgtaaacaacgcagccattccgtgtgtattcgaatgggactcaggcagtgatgcgtgtgcattagaagttgggtccaccagaagtcgagatgattctgaa

SEQ ID NO: 259346 - DNA, 82 bp, Homo sapiens
  chr8:62745086-62745168
  hypo
gagagtcgtgcgccgtcactggtttctcatggcagccactccaacctgcgtgcgccttccctgatgcgccctgctagtcgct

SEQ ID NO: 259347 - DNA, 99 bp, Homo sapiens
  chr8:64037106-64037205
  hypo
cttttgtgtcggttcgaacctgagagcaagccaacaaacaacacaaggcagtgtggagcaacacgctgtttttttttttgtttggttggttggtttttt

SEQ ID NO: 259348 - DNA, 33 bp, Homo sapiens
  chr8:64642939-64642972
  hypo
gaaagtagttagaattaagacgactaagaaact

SEQ ID NO: 259349 - DNA, 124 bp, Homo sapiens
  chr8:65483619-65483743
  hypo
ctggtatactttcgcggtgggatttcggctgctggaggcaccttctctctgcgctctggtttgccttccctgaccctggccatcggcgtggttcccccgccagcagtgccgggaggtcggctca

SEQ ID NO: 259350 - DNA, 183 bp, Homo sapiens
  chr8:65519231-65519414
  hypo
aaagtgtggcttagcggtcagatagtaagtgacaaatctgttttaccttccagtaccagttatgtgtgcgagatgaggttggctctcgctctgagccatcatgccgataatcaatagacgacaaaagtaatgagttgcgttattatcaacaatggagagtagagcttacgtggctctgcagaa

SEQ ID NO: 259351 - DNA, 178 bp, Homo sapiens
  chr8:65732649-65732827
  hypo
ccggttctaactgccgatggcaaacctgtcctgccttgcagtcccaggggcatctgctcagtcctcagtttcagctgctctagaagctgcctgcctgtccgttggggccagccacttctcacaccgtgcatgggtctcagttgtccctgactaacatgcctctcgtcactgtcctcaa

SEQ ID NO: 259352 - DNA, 38 bp, Homo sapiens; identical to SEQ ID NO: 212325
  chr8:65757970-65758008
  hypo

SEQ ID NO: 259353 - DNA, 38 bp, Homo sapiens; identical to SEQ ID NO: 212326
  chr8:65758248-65758286
  hypo

SEQ ID NO: 259354 - DNA, 36 bp, Homo sapiens
  chr8:66157671-66157707
  hypo
taacggtcactattcggtggtctgctgccagtctga

SEQ ID NO: 259355 - DNA, 240 bp, Homo sapiens
  chr8:66548504-66548744
  hypo
aaataaataaataaatactaaatataatcatgcttctgccattattgagaaaagtaattcttcctgcacactgccattacagaatagatgactgctattaagaagcagggggtgtgttcacaaaaaaataattaccagtttcctaagcacctatggattataagccttagggaggtatttaaagattttaataatctgtattcccatattaaaatgtctaaacttggccgggcgtggtgg

SEQ ID NO: 259356 - DNA, 32 bp, Homo sapiens
  chr8:66678462-66678494
  hypo
gagccaccatgcccagccgagatgaatttttg

SEQ ID NO: 259357 - DNA, 33 bp, Homo sapiens
  chr8:66776021-66776054
  hypo
gtccaaaaatccaacgttggtccaagaagactc

SEQ ID NO: 259358 - DNA, 84 bp, Homo sapiens
  chr8:66877730-66877814
  hypo
aaacgagccatcaacgtcacccccatggccgctagagatcatatcaaaggaaagcgcagagtgatccactgcgcaatgttccac

SEQ ID NO: 259359 - DNA, 53 bp, Homo sapiens
  chr8:66940483-66940536
  hypo
cttctcttactcaccggcgctcatgtccactctacctgcgctttgacaactca

SEQ ID NO: 259360 - DNA, 103 bp, Homo sapiens
  chr8:67299564-67299667
  hypo
ttccttgtgcagggagcaatcgtgtcccatggaacaatcttaatcttgcagtgtcaccaggcacttacgtgagatgcatggagaggctgttaacacacttcct

SEQ ID NO: 259361 - DNA, 42 bp, Homo sapiens
  chr8:67384648-67384690
  hypo
aggcagtctccaggaccaagcgcactttgaatggacagaaat

SEQ ID NO: 259362 - DNA, 128 bp, Homo sapiens
  chr8:67405469-67405597
  hypo
ggtaccaaaattcacgtttcctttttggtggaaattctccagccaagcttggcgctaacagagtaggcgatttcacttcgtcgtcacctcacaaaaggcttccaaattcactgcggcagacaccgcaa

SEQ ID NO: 259363 - DNA, 31 bp, Homo sapiens
  chr8:67405805-67405836
  hypo
ggattaggatgcctcgcgactaggggtccag

SEQ ID NO: 259364 - DNA, 61 bp, Homo sapiens
  chr8:67417963-67418024
  hypo
cagcatcttctacctataaaacagtcactcctaggtttgcgtaatgagcaaagatgctctt

SEQ ID NO: 259365 - DNA, 34 bp, Homo sapiens
  chr8:67867314-67867348
  hypo
taccggagctgttcctattcggccatcttggctc

SEQ ID NO: 259366 - DNA, 370 bp, Homo sapiens
  chr8:68115288-68115658
  hypo
acattaaatgtgaggcgtgtgcagcttacctgctttccacagggcagtcctctgttcgttgttggaattaaacgcttttgcaaatctatgtgactctaataagcagtccagtagcttaaaaagttgttgtgatgttaaaaagcggtacattccttggtcttgagtatcaacgcgaacatcaaagtccaccgcatctctctttggaaaacaaaccaccccagcatatacacacagtcacaataattttacttgatttacaactcaatgctccccaaagaccagttttacaagaaagccacagatactcagcttgatctaacctaacagaaagtaagggaaggtccaccttccagtacgcatcctcgtcccc

SEQ ID NO: 259367 - DNA, 154 bp, Homo sapiens
  chr8:68236303-68236457
  hypo
gggattacaggcgtgagccaccgcagccagccacaacctacttttcaatatgccaatcagagtagaatgatttctctgaaatgcaacaacaatttcactcctttgcttggcattctactgtctacaatagaaggtggggcgcttgaacatggga

SEQ ID NO: 259368 - DNA, 142 bp, Homo sapiens
  chr8:69169577-69169719
  hypo
tgaccgcagccaaacgcaaaacctagagtgaacacattctacctgtttctcctctctccttagaacagcaatctgaagaggctggtggtgagtcgctaaaggggagagccatgtcctgaatagatgaagacatgtatttcct

SEQ ID NO: 259369 - DNA, 131 bp, Homo sapiens
  chr8:70246377-70246508
  hypo
tgttcctgcctccgcgccaggtcctggggtgagcacacatggctgcccgtcccgccgtgtctctcctccgcactgggtcccggggtgcgtgtgcaggtgtgtctgtccctcctccgcgccacgtcctcact

SEQ ID NO: 259370 - DNA, 87 bp, Homo sapiens
  chr8:71017206-71017293
  hypo
ggcgtgagccaccgcgcccagatgatttggcttcttaatcacgcatccagaggtgctggctggctcctgagccgggagacatctgtg

SEQ ID NO: 259371 - DNA, 166 bp, Homo sapiens
  chr8:71185496-71185662
  hypo
gagctgccatcttgcatccccgtgtgtgtgcacctaatctcagctggttcccccgagaccccctgagcaccaaccctagtcccccgcgcagccccttatccgctgcgacaagatgaaagaaacaatcatgaaccaggaaaaactcgccaaactgcaggcaaaagtg

SEQ ID NO: 259372 - DNA, 205 bp, Homo sapiens
  chr8:71368456-71368661
  hypo
actaacattctacacgtctaaacttcgaggaacttttctaaagcaagaaaaagaataagggctaaatttaattcgtcagagtggaaagagaacaaagagagaggactgggagtgggagattaaaaggctgtggaaagtggtcttgagatagatgttattggggaccaaccttctcaatgcactggtcaagcgccggacgttgttg

SEQ ID NO: 259373 - DNA, 269 bp, Homo sapiens; identical to SEQ ID NO: 212336
  chr8:71447612-71447881
  hypo

SEQ ID NO: 259374 - DNA, 240 bp, Homo sapiens
  chr8:71447941-71448181
  hypo
gcgtggtacaagagcttgggaactgccgaacgcgggtacaagagcttgggaaccgccgaacgtgggtacaagagcttgggaaccgccgaacgcggatagaagctataacacaggcgagctggggcatgccagcgtggctgagcagggcgcgggtggggcatcgctggccggaggtcccggtttgcaaagtgaccgagaagaaaaatcctgcatcaaaagttacagttgctgccgggagct

SEQ ID NO: 259375 - DNA, 141 bp, Homo sapiens
  chr8:71522527-71522668
  hypo
acctgagcatgggtggatttcggtatccgcgggggccctggaaccagtcccctgtgaagactgagggacgactgtacatgccatgacatgctctcttcccatgctctcccctgcctttgcgtgtactgctgtctctgtctg

SEQ ID NO: 259376 - DNA, 37 bp, Homo sapiens
  chr8:73922264-73922301
  hypo
agattacaggtatgagccaccgcgcctggcctagtgt

SEQ ID NO: 259377 - DNA, 186 bp, Homo sapiens
  chr8:73979604-73979790
  hypo
gacaagaacactggtctactcgccgaacttttttccaagttccttgacaccgaggattaccaattgcttgccaatggagagtctgatttctgaaacgatatttcgaaagtgttagttacactaaaagcataccgaagaaaggtctaatttacagaattaaaactcggagttaaaaaaaactgatca

SEQ ID NO: 259378 - DNA, 131 bp, Homo sapiens
  chr8:73989477-73989608
  hypo
tctgtagcagcagccgtagaaaatgaatacactccttcacggggttgctatgaaggctgaaccaatgatgcctgtaagatctctctgctatgcaaacatgagggattcgtgtgccgcgcctcaaaggcgcc

SEQ ID NO: 259379 - DNA, 235 bp, Homo sapiens; identical to SEQ ID NO: 212342
  chr8:73999532-73999767
  hypo

SEQ ID NO: 259380 - DNA, 235 bp, Homo sapiens; identical to SEQ ID NO: 212343
  chr8:74004014-74004249
  hypo

SEQ ID NO: 259381 - DNA, 37 bp, Homo sapiens
  chr8:74086201-74086238
  hypo
cattgctggccgggcgcggtggctcccgcctgtaatc

SEQ ID NO: 259382 - DNA, 98 bp, Homo sapiens
  chr8:74097718-74097816
  hypo
atcattccgtgggccggcagagaactgcagcgtgatgcttaggcataaccggcactgtgcctggtctcggtgatgtgcagtgtcgtttggcaatggga

SEQ ID NO: 259383 - DNA, 454 bp, Homo sapiens
  chr8:74197777-74198231
  hypo
ggcaagtcccctgagcctcccgctccttggccagggctcgtcctgagacgggccagccaccagcactcactgtgcccgcagctgcaccgaggggagggatttctttgcgatcctggccgttgcggcccaggtaggaggctccggcagcaggggtggctggggcagcgggcacagcgggcagtgtgggagccagcggcagcccggtgcccacctcagccccccgcccagtccagccttgtcgcagggctggccacggcgtcggggcgggacaggtgatgcaggtggccgcgagctcccacattcaccactcctggggtgagcatgccccgcagccagcagccctgcgacgctgggcccggcccggccggcgtctcccgaggctgcagcgctgcctgccgtacgcacaccagttgctaggcgcccggggcctcgcgcctcagttccatagggcaag

SEQ ID NO: 259384 - DNA, 45 bp, Homo sapiens
  chr8:74203780-74203825
  hypo
acctaccaagagatcgagcaatcaaagcgttatctgtcaaagcaa

SEQ ID NO: 259385 - DNA, 493 bp, Homo sapiens; identical to SEQ ID NO: 212344
  chr8:74360978-74361471
  hypo

SEQ ID NO: 259386 - DNA, 396 bp, Homo sapiens
  chr8:74371800-74372196
  hypo
gtgaagtcgcctctcgttaaggtgatcccctccgcgaagacctcaaccagcagccctaccatgtgcagagctcccactgaaatcaaaacccaacctcaagctcacgcagctccgcctccacatatcgtcacatcccacacatgctgctgtcatcacacccacgctgttgtcacaacacccaacgggctgttactaagggccctggtatgctgctgaatatatgcattcaataggaattttcaaaacatatttcaggaatacttgtccttggttccgcatcatctgctcaatgcagccactgtctctggaaggagcaactcctatcgggcacggctcctttgactcttggggcctcctgcgtccccagccccagccgtgaatacacaatggagatca

SEQ ID NO: 259387 - DNA, 59 bp, Homo sapiens
  chr8:74673152-74673211
  hypo
taaagcagaggtcagcgaatcaaatctggtctgctgcctgttttcgtaaataaagggct

SEQ ID NO: 259388 - DNA, 131 bp, Homo sapiens
  chr8:74674334-74674465
  hypo
aggcagagagccggcggcaaaggtaaaaggccgacgacaacggacttggtccaggtgaacccacctgacaggcgcacgaaaacttcccttgccctccccggctactcgttgtccaccgaaattcattctcc

SEQ ID NO: 259389 - DNA, 90 bp, Homo sapiens
  chr8:74759373-74759463
  hypo
agcctgggcgacagagtgagactctgtctcaaaaaacaactaaccaaacagaaaaataagcaaaagtctagaattcgtaattcacaaaaa

SEQ ID NO: 259390 - DNA, 39 bp, Homo sapiens
  chr8:74759828-74759867
  hypo
catcaacggtaaaacgggtatattgcggccgggtgctgt

SEQ ID NO: 259391 - DNA, 355 bp, Homo sapiens
  chr8:75227593-75227948
  hypo
ctccggaagaggccgcccttcttcttgcccgctagctcagcgtctgcgtggaagttgagcacgaaaccgccgcgggtgccggccgggctgtcggcggcggctgcggcgtcgtggagcacgctgccattgctctgctcgctgcgcagcgaggccagcgaggtacgcagcggtgagcggatcaccgtggccatgccgtagggcacgctctggcgcacgccgtagccatgccgcatgcctccggcccactggccctggtaggtaccttggagagaccgcaagaaagcaccgtgagtcgggggcagagctgcaccgtcacctgcaccatccagcgcacactggcgcaggcctgcccaag

SEQ ID NO: 259392 - DNA, 141 bp, Homo sapiens; identical to SEQ ID NO: 212346
  chr8:75737615-75737756
  hypo

SEQ ID NO: 259393 - DNA, 42 bp, Homo sapiens
  chr8:80272279-80272321
  hypo
gctctttcagctttgccatccgcagatggcctgagtgttaat

SEQ ID NO: 259394 - DNA, 81 bp, Homo sapiens
  chr8:80844671-80844752
  hypo
cggtagggtaaagtcggtacgttcaaaaccaaaaggccagtgtgactggaaagtactggcaggactcgcaggtcagacagg

SEQ ID NO: 259395 - DNA, 37 bp, Homo sapiens; identical to SEQ ID NO: 212350
  chr8:80998635-80998672
  hypo

SEQ ID NO: 259396 - DNA, 246 bp, Homo sapiens
  chr8:81084473-81084719
  hypo
aatgcgtgttgaggcgtcatgtccgttgatcaaaggacagtttgaggttcccgtaacaatccagttcttttcattagtagcgttaacaatctgttttcacagggttttgcagttactcgtcttccatgaagtcactttgattgtatgggtcatggtcttcaggtggtgtctcaatttcgtaagctatctgaggctgcaaatgaagtggggcttcttttctgtgttgcttgacgtttaggccgaagc

SEQ ID NO: 259397 - DNA, 44 bp, Homo sapiens
  chr8:81113805-81113849
  hypo
ccattacggccgggcgcggtggctcaagcctgtaatcccaccac

SEQ ID NO: 259398 - DNA, 540 bp, Homo sapiens
  chr8:81213157-81213697
  hypo
ctctttgggaagtggagctccgatgatgtgcagatctggcacttgcttgcaggattacactgcagtgaaggagaagtatgccaagtacctgcctcacagtgcagagcggtatgccgccaaacgcttccgcaaagctcagtgccccatcgtggagtgcctcacttactccatgatgacgcacggccgcaacaaccgcaagaagctcatgatcatgcgcatcgtcaagcacgccttcgagatcatccagctgctcacaggcgacaaccctctgcaggtcctggtgaacgccatcatcaacagtggtccccgggaggactccacactcactgggcgagccaggatcgtgagacgacaggctgtggccgtgtccccattaagccgtgtgaatcaggccatctggccgcagtgcacaggagctcttgaggctgccttccggaacatcaagaccattgctgagttcctggcagatgagctcatcagtgctgtcaagggctcctccaactcctatgctagcaagaagaaggacgagcttgagtgtgt

SEQ ID NO: 259399 - DNA, 33 bp, Homo sapiens
  chr8:81310006-81310039
  hypo
atgaacccaggaagcggagcttgcagtgagccg

SEQ ID NO: 259400 - DNA, 36 bp, Homo sapiens
  chr8:81338705-81338741
  hypo
ttagaagtcagaagtttggccgggcgcggtggctca

SEQ ID NO: 259401 - DNA, 85 bp, Homo sapiens
  chr8:81785030-81785115
  hypo
cagaaactcacatccaatttaaatgctaccccccacccccttttcctggtttcctctttttttctcatttgcaattttgaggagg

SEQ ID NO: 259402 - DNA, 38 bp, Homo sapiens
  chr8:81820451-81820489
  hypo
accgatatgaaattatcgatctacatgttcttatgtag

SEQ ID NO: 259403 - DNA, 31 bp, Homo sapiens
  chr8:81964066-81964097
  hypo
aaagactataaactattggccgggcgcggtg

SEQ ID NO: 259404 - DNA, 34 bp, Homo sapiens; identical to SEQ ID NO: 212360
  chr8:82680449-82680483
  hypo

SEQ ID NO: 259405 - DNA, 163 bp, Homo sapiens
  chr8:82902992-82903155
  hypo
cagttccagcttcctagccgctttacgtattcaagcctcagcaatggcagacgctcctccctcagccaggcttgcagcctcaccgttggatctcagactagcagtgagcaaggctcactgggcgtgcgacccacgggcatgcgccccactgagccaggcatgg

SEQ ID NO: 259406 - DNA, 40 bp, Homo sapiens; identical to SEQ ID NO: 212361
  chr8:83135626-83135666
  hypo

SEQ ID NO: 259407 - DNA, 40 bp, Homo sapiens; identical to SEQ ID NO: 212362
  chr8:83135906-83135946
  hypo

SEQ ID NO: 259408 - DNA, 35 bp, Homo sapiens
  chr8:86431840-86431875
  hypo
ctcacagccaggcgcggtggctcacgcctgtaatt

SEQ ID NO: 259409 - DNA, 56 bp, Homo sapiens
  chr8:86508969-86509025
  hypo
ctctcatccatgtccatcaacgctgctgccctcccgtctaccactaccacctcaat

SEQ ID NO: 259410 - DNA, 120 bp, Homo sapiens
  chr8:86544663-86544783
  hypo
gtgaaactacttccaaaaaaaaaaaaaaaaaacaacaaaaaaaactcccacgggcacctccatgttaattagcaatagaagttagaaaaattcacaagaatttatggccgggtgcggtga

SEQ ID NO: 259411 - DNA, 85 bp, Homo sapiens
  chr8:86840940-86841025
  hypo
gtgtcgcggtggtcgcgcatcgcctttatataggcatgggtcagagtgggtggggcttcttcttgattacgttggtactttattc

SEQ ID NO: 259412 - DNA, 116 bp, Homo sapiens
  chr8:86952963-86953079
  hypo
gtaaccggggtaaccgagtgggcagtagtttaggcagcctgataaatttatggtgagaactgctaggacggattcatctgtacacttcagcctcctctttccgcaatatcacctga

SEQ ID NO: 259413 - DNA, 86 bp, Homo sapiens
  chr8:87257024-87257110
  hypo
ggattatgggtgtgagccaccgcgcctggccggggatttttaggatagtgaaagtgttcatatacgatactgtaatggtgtacaca

SEQ ID NO: 259414 - DNA, 161 bp, Homo sapiens
  chr8:87425719-87425880
  hypo
ggaatgggaggagttacctgcgccgttgacgtcaaagaatactttcgaaagctatgacacgtcagtggattctgaaagaagaggaggagttagcaaatagtggaggcacgagtggtgaaaatttcattttcagtagagccgactgcacattcagattccta

SEQ ID NO: 259415 - DNA, 545 bp, Homo sapiens
  chr8:88885821-88886366
  hypo
cttccgattagggacgtagagggttttgtgcgggtatacccggagctcaggggtcgtcaggcctcgcatggtgatgatgccgtacttggagcctccagcttcgacttggttcactgtgaagagctggtcagtgttggtattcgccagtatgcggttaaatcggtcgcttgccaaagaggagggatcccagctatgaatctggacctttttcctctgcatgcagcttacacgcagctcgcgagctatacggcaatagttggcgaatctgaggaaacctagctggttctttcgtagcatggaaggtgcattgagtcccactctgactgtctttttctgcttgtctgcttcctcgagcagtcgcggtcttttgctctccatttcgttcggcggatgttctccctcctgaggggaagttctgtcccgggagtaagaggaagtaccgcttctttacaagcacgacttggcacggaagaacttcccgctgcgcctgcgcctgtgcgtatgaggtcgacccggacgagattcttcgtcgccttggcccaaat

SEQ ID NO: 259416 - DNA, 36 bp, Homo sapiens
  chr8:90650867-90650903
  hypo
ggaattacaggcgtgagctaccgcacccagccgagg

SEQ ID NO: 259417 - DNA, 95 bp, Homo sapiens
  chr8:90768482-90768577
  hypo
tcttcacactgacgcgcgttaacagaatgaatggatagaaaagtcttctgagtactttttaagaaaaaagcttattggccgggcgcggtggctca

SEQ ID NO: 259418 - DNA, 149 bp, Homo sapiens
  chr8:90913504-90913653
  hypo
ctcaggtgatccgtccgcctcggccttccaaaaggaatttaggtactttaaaatgctgttatgtatgttaacggaaaagtaactacatgcttcattttcagaaccaacattcaaatgaaatgaacgtgtcaaatcgacaaaagctcaaa

SEQ ID NO: 259419 - DNA, 43 bp, Homo sapiens
  chr8:91374999-91375042
  hypo
tgattttttttttttttagacggagtctcgctctcacccaggc

SEQ ID NO: 259420 - DNA, 112 bp, Homo sapiens
  chr8:92120802-92120914
  hypo
agagaaggtgattgtgaaaacgtgcaactgagttaagatctaaagcaagcttgtctaacccgtggcccgcgggccacatgcggcccaggacggctttgaatgtggcccaact

SEQ ID NO: 259421 - DNA, 32 bp, Homo sapiens; identical to SEQ ID NO: 212365
  chr8:92433536-92433568
  hypo

SEQ ID NO: 259422 - DNA, 68 bp, Homo sapiens
  chr8:92570800-92570868
  hypo
aacccaagctattatagttacgtaatatgagtctcttctctggaggcggtcttcatggattgtttgcc

SEQ ID NO: 259423 - DNA, 121 bp, Homo sapiens
  chr8:93875196-93875317
  hypo
atgctagccactagtatagacggttataaaaatcataaattgctttggcattgccacggtattgtcgatacttatttttacagcagggctatttctaggcgtaacatctcaggcaatgaaa

SEQ ID NO: 259424 - DNA, 106 bp, Homo sapiens
  chr8:94129116-94129222
  hypo
aaaatgtagttcttcgactacctgcatctgcctctcttggagtgcgtttaaaaagtgcaaattcctgggccccacccaggacaccggaatctctgagtgtcaggct

SEQ ID NO: 259425 - DNA, 129 bp, Homo sapiens
  chr8:94658932-94659061
  hypo
agatacacacacaagagagacgttaacgactgcgccacctgcaggaaagtcttcagtgattatttatcccggcggaggcacacgagcattcaccttgtaaagaaacgcgttgagagtaggcagtgtgac

SEQ ID NO: 259426 - DNA, 104 bp, Homo sapiens
  chr8:94683868-94683972
  hypo
tcagagcgatatgtcgtgaatatcacagtgtgttaacaatgcacgcaattacaaatatcatagcgacatgtcaacaatatcacagcctgtaaacactgtgtgta

SEQ ID NO: 259427 - DNA, 120 bp, Homo sapiens; identical to SEQ ID NO: 212366
  chr8:94684092-94684212
  hypo

SEQ ID NO: 259428 - DNA, 120 bp, Homo sapiens
  chr8:94684332-94684452
  hypo
gtatcacagtgtgtaaacactgcacataattacaaatatcagcgatatgttgtcaatatcacagcgcgtaaacactgtgcgtaattacaaatatcagagtgatatattgtcaatatcaca

SEQ ID NO: 259429 - DNA, 157 bp, Homo sapiens; identical to SEQ ID NO: 212367
  chr8:94685462-94685619
  hypo

SEQ ID NO: 259430 - DNA, 159 bp, Homo sapiens
  chr8:94706936-94707095
  hypo
gttaaattcagcacctagtacgtggcaagttctccgcaagtaatgctgaatacttaaataaagctaatgcaactctccgcctccactaggccccccttaaaacatgctaaataaattggagttcattcaacgttacacgaaataatattgtgctgtttt

SEQ ID NO: 259431 - DNA, 89 bp, Homo sapiens; identical to SEQ ID NO: 212369
  chr8:94747734-94747823
  hypo

SEQ ID NO: 259432 - DNA, 44 bp, Homo sapiens
  chr8:94941365-94941409
  hypo
ccctgcttttctaaaatatacccggttcactgactttctgcctg

SEQ ID NO: 259433 - DNA, 35 bp, Homo sapiens
  chr8:94967750-94967785
  hypo
ggctgtactttcctcgccaacgccccctcatgctg

SEQ ID NO: 259434 - DNA, 41 bp, Homo sapiens
  chr8:95488066-95488107
  hypo
gagtaatttgaggctgagagcggtggcttgtgcctgtaatc

SEQ ID NO: 259435 - DNA, 77 bp, Homo sapiens; identical to SEQ ID NO: 212371
  chr8:95556567-95556644
  hypo

SEQ ID NO: 259436 - DNA, 31 bp, Homo sapiens
  chr8:95625860-95625891
  hypo
gttaaaatgaaatgcgcaagaaaaatggaat

SEQ ID NO: 259437 - DNA, 37 bp, Homo sapiens
  chr8:95650755-95650792
  hypo
tacaggcgtgagccaccgcgcccggcccagaaagatt

SEQ ID NO: 259438 - DNA, 99 bp, Homo sapiens
  chr8:95816350-95816449
  hypo
aaataataaaagtatacttccgttttcatttatagccactgttagtaatgaggaaagacagcagaaaagaaagctcagtcaaaaaattaaatgcgggcc

SEQ ID NO: 259439 - DNA, 97 bp, Homo sapiens
  chr8:95848306-95848403
  hypo
ggtagcggcaacagcgacagtaaaatctagtttccggggacagcacttgcaggagtgtagctgctgctttcagggtctggtccgggtggctatgggt

SEQ ID NO: 259440 - DNA, 157 bp, Homo sapiens; identical to SEQ ID NO: 212374
  chr8:95865517-95865674
  hypo

SEQ ID NO: 259441 - DNA, 120 bp, Homo sapiens; identical to SEQ ID NO: 212375
  chr8:95942702-95942822
  hypo

SEQ ID NO: 259442 - DNA, 40 bp, Homo sapiens; identical to SEQ ID NO: 212376
  chr8:96099108-96099148
  hypo

SEQ ID NO: 259443 - DNA, 187 bp, Homo sapiens; identical to SEQ ID NO: 212377
  chr8:96145224-96145411
  hypo

SEQ ID NO: 259444 - DNA, 162 bp, Homo sapiens
  chr8:96208673-96208835
  hypo
gtggccgagttaagcgcttggattctgccactgaacttgttttcttggagatctgactcgttgccatcagcaacatgggcggggtggagctggctttctctgcatctgttctcctctacacctgatgttaacagaatgcctggattccggggacttccaggt

SEQ ID NO: 259445 - DNA, 38 bp, Homo sapiens; identical to SEQ ID NO: 212379
  chr8:96229505-96229543
  hypo

SEQ ID NO: 259446 - DNA, 88 bp, Homo sapiens
  chr8:96285364-96285452
  hypo
agtgtcaggtatttcgtaaagaataggcaagtgcctccaggtgatacaattattaacatggtaaaggagaccgggtgccgtggctcat

SEQ ID NO: 259447 - DNA, 45 bp, Homo sapiens; identical to SEQ ID NO: 212380
  chr8:96465482-96465527
  hypo

SEQ ID NO: 259448 - DNA, 120 bp, Homo sapiens
  chr8:97128826-97128946
  hypo
gggacaaccaccattttacattctgtgtctaagaatttgactactctagatacctcataaaagtcgaattgtcgatgttgagccaagatggccgaataggaacagctccggtctacagct

SEQ ID NO: 259449 - DNA, 159 bp, Homo sapiens
  chr8:97265370-97265529
  hypo
agcaggctatacaacgtgccctggaaagtacaaatgacaaggactttaatgaagggactctatacagcggtgtgagcagccttaagagaacaaacaagagccttcccaacaataaagagacaaggaggcaaaatgttaccacggcgcagagggactaga

SEQ ID NO: 259450 - DNA, 258 bp, Homo sapiens
  chr8:97333717-97333975
  hypo
aaccctctttccctcgtaatttatcggttgaagaaagcagcccttttgtcctatagattttcccacagtctggattttactgattttatcgtatcttgtaatttaacatatttctttgtcctctgtattttctgtaagtcggtaattggatctagaggcttaatcacatttgggtctagtttttttcttttcttttctcttttttggcaagactaacctttgtatttttaacgtgtcttttatcgcctttaacgggat

SEQ ID NO: 259451 - DNA, 264 bp, Homo sapiens
  chr8:97339835-97340099
  hypo
cccctggcctggtaagagagcgcacacggagcttgagattaatgcagaagcaaagatcccgggtgctggttaataagcttttccaggagcgtggttgtctgctcggccgtcattaatttgaatgctcattaccataatgtagaagccaagctggggtcctgcgccctccttgccgccagccccgtggtcctggacagcctggctctcatcccacgtagtttcttctcgcccccccgccctttctttaaacgaagtgtgcaattg

SEQ ID NO: 259452 - DNA, 154 bp, Homo sapiens
  chr8:97414934-97415088
  hypo
attttcaaaggtacctacaggcgctcactaaaatgtatttgtaactccaaaatcaacactcacagagagcttcatggacacgcatagagaggtgaaaaatgtgagtagcccgaggcacacattcccaggtgaggtcaaacgaggcaacactgcc

SEQ ID NO: 259453 - DNA, 198 bp, Homo sapiens
  chr8:98289305-98289503
  hypo
aatgcttgcccccagaagcccgggatattttggatgaggtggttcctgcgctccaagtgctgcagtcgcaactgcccaaacttcctggagagccgaaggtaggccctgtccgcctgggcgttcatgttctccagcttcagctgcacgttctccagcgtatccatgctgccttccgtcgctgggggccccgaccctgca

SEQ ID NO: 259454 - DNA, 76 bp, Homo sapiens
  chr8:98307768-98307844
  hypo
ggcttccaggaatgtttcaccgatggctggcacttgcaagaaatcagggagatggggtcggaggaggagccaagat

SEQ ID NO: 259455 - DNA, 36 bp, Homo sapiens; identical to SEQ ID NO: 212382
  chr8:98798632-98798668
  hypo

SEQ ID NO: 259456 - DNA, 35 bp, Homo sapiens; identical to SEQ ID NO: 212383
  chr8:98798908-98798943
  hypo

SEQ ID NO: 259457 - DNA, 215 bp, Homo sapiens
  chr8:98933981-98934196
  hypo
ctgtgtcgcacggtcgtctttgctctcagtccatctgtctctctgtctctctttgacaagcccatgtagttcaagtctcataaataaaatgcgtacagccggggttcccaaaccccatgctgtggaccgatctcagtccgtggcctgttaggaaccaggccgcacagcaggaaatgaatggcaggtgagcattaccacctgagctccacctcctg

SEQ ID NO: 259458 - DNA, 132 bp, Homo sapiens
  chr8:99166496-99166628
  hypo
tggagagttggctgcgcccaggtcagctttccagtggagggagtgggggtgtttgtaggggagggacggtggtgtgagccatctaggctgatgaagagcgaggcagctgctgcgagccgcagggaggtgcta

SEQ ID NO: 259459 - DNA, 65 bp, Homo sapiens
  chr8:99376415-99376480
  hypo
gagggtcgtcttggcgttaggatccggcagatgctgggtctcacatacagcgcctctcactccca

SEQ ID NO: 259460 - DNA, 56 bp, Homo sapiens
  chr8:99411607-99411663
  hypo
ctgctgatccataacgtatttcaagaaagaagacacattcccggttgacgctcttt

SEQ ID NO: 259461 - DNA, 101 bp, Homo sapiens
  chr8:99626612-99626713
  hypo
cacttgaaaactaaagaacacgctttcaaataatctatgtgtcaaagaagatgtctcgatcgggggaggagccaagatggccgaataggaacagctccggt

SEQ ID NO: 259462 - DNA, 36 bp, Homo sapiens
  chr8:100026626-100026662
  hypo
tgagccaccgcgcccggcctgcataatttttaaaaa

SEQ ID NO: 259463 - DNA, 196 bp, Homo sapiens
  chr8:100245122-100245318
  hypo
gcctctgcagagtccctggccgcctccgcagacttctcattcctcagatggtctttggtttgcttccgatctggctggctgtgtttggtctcattttgtcaggtgttggaagggctccattcatctgttgttttgctgatgcctgtgggaggcctcacttgctgcgctgtgaggcgactccctgagggtatttcta

SEQ ID NO: 259464 - DNA, 174 bp, Homo sapiens; identical to SEQ ID NO: 212389
  chr8:100353992-100354166
  hypo

SEQ ID NO: 259465 - DNA, 392 bp, Homo sapiens
  chr8:100708318-100708710
  hypo
gaagtgcccacgcacggtggcgagagtgccatggacctctgccacagtggattttatggttgcgggacctcggtgccttcctgtgcacagctggcactcttcacgccgtgtctctgatgacttggtagtagagaagtccctcaagtccttcaaggacaagaacaagaagcttgaggaaggcggccaagtgtacacccccaccccacagaggtggtggtgaataagtcgctcgggcagagggagctggatgagctgaagcgctactgccttggcttctgcctgctgtggatccatgccaagatcgtggtgctcatgctgtggcacatccttgacagccacaccctgaccaggcaaagcgcaggcagtttctccggatccgcgccgacctcctc

SEQ ID NO: 259466 - DNA, 466 bp, Homo sapiens; identical to SEQ ID NO: 212390
  chr8:100796509-100796975
  hypo

SEQ ID NO: 259467 - DNA, 104 bp, Homo sapiens; identical to SEQ ID NO: 212391
  chr8:100851150-100851254
  hypo

SEQ ID NO: 259468 - DNA, 114 bp, Homo sapiens
  chr8:100881200-100881314
  hypo
aggcagacagctgggaagtgcgtggcgcatggcagtacctgcacttggatggggcgtgccggggcctctccccgtgcagccgcatgcacacacgagtaatgggtgcctgtgaaa

SEQ ID NO: 259469 - DNA, 230 bp, Homo sapiens; identical to SEQ ID NO: 212392
  chr8:100882016-100882246
  hypo

SEQ ID NO: 259470 - DNA, 79 bp, Homo sapiens; identical to SEQ ID NO: 212393
  chr8:100900796-100900875
  hypo

SEQ ID NO: 259471 - DNA, 122 bp, Homo sapiens
  chr8:100904089-100904211
  hypo
aacacatactttatgaccttcggcacaaagtaaaaaacatacataccttatacaaagctgcaacccccagggatagcacgaatgctacagccatatgatttcgcagacgcctggccagaagg

SEQ ID NO: 259472 - DNA, 39 bp, Homo sapiens
  chr8:101297999-101298038
  hypo
acaggaatgagccaccacgcccagttgtagatttttttt

SEQ ID NO: 259473 - DNA, 119 bp, Homo sapiens
  chr8:101300173-101300292
  hypo
tatcttttttcctccgaaacagggagcctattgaaattcttctttttttgggtgcctttttgactgaaggcaagctcacagatgaagcagaggactgaagatctcgatctgaacccatt

SEQ ID NO: 259474 - DNA, 124 bp, Homo sapiens
  chr8:101717051-101717175
  hypo
gcttatatataacacgatgtaagtgttctgtacaattaagtccccataaaaagccacgtaataactgtgtaagaggcaacttggtaaataaatttaaatcaccttagaacggagtgactctgga

SEQ ID NO: 259475 - DNA, 38 bp, Homo sapiens
  chr8:101726914-101726952
  hypo
tgactgcactccagcccgggtgacagagcaagagtcaa

SEQ ID NO: 259476 - DNA, 379 bp, Homo sapiens
  chr8:101730421-101730800
  hypo
gaagtgatggatcacgctgagaccacatgatgcgtactggcttgccctttataacatcaaaattcatggtgtccaaagcacgctccgctgcaggaaggacattttcagagtcaatattacttcaaaatttttgctggctacttaagattatataaactatggtgactggagtgggaggacacatggtctcacagttgaacgcttcctctttaagcttcaagatggctagacctttcaagtatcacacactagtgtgggacctaagttgtataaagcaaagacaaataccagaagcccccgaaatttctcacatataaaagaattccatattgctaataattaataaattcttgacgcaatctctcgccttaattgccat

SEQ ID NO: 259477 - DNA, 39 bp, Homo sapiens; identical to SEQ ID NO: 212395
  chr8:101735883-101735922
  hypo

SEQ ID NO: 259478 - DNA, 109 bp, Homo sapiens; identical to SEQ ID NO: 212396
  chr8:101744186-101744295
  hypo

SEQ ID NO: 259479 - DNA, 39 bp, Homo sapiens
  chr8:101787705-101787744
  hypo
attggcttgagccactgcgcccagcctatcttggttgtt

SEQ ID NO: 259480 - DNA, 150 bp, Homo sapiens
  chr8:101872197-101872347
  hypo
ccttattctaactacaaccacgctccagggcctccctggctttccgtcctacctcgcacccgtttcacgaggcagttgggcggatggatccccatcctaggctgtgtcctcctctccccttctccggccgtgtggtgggaaagccttgaa

SEQ ID NO: 259481 - DNA, 33 bp, Homo sapiens; identical to SEQ ID NO: 212397
  chr8:101891231-101891264
  hypo

SEQ ID NO: 259482 - DNA, 245 bp, Homo sapiens
  chr8:102039315-102039560
  hypo
tcttcatgtcaccaacgcttgctacatgcacagatctccttgaccctgcagccaatgcctcggtcagccagtgcacctgtactgtctctcctcttgggatagggtccctctccatcaggtacaatatatgggaaatcgaggggtggcctttgtcccagctgtcttagtcaccgcattcttcaggtcactaaccgccccattggagagggttcacgcagctcacgtgtaaacggacccctctttcc

SEQ ID NO: 259483 - DNA, 145 bp, Homo sapiens
  chr8:102145022-102145167
  hypo
ccggccgcattggaacttttaacctgctaggttcattattcgtaaagctaactgacaatactgaattactttcaggagagtcttagctaaggctgtgacaattgccagtagtggaaactaatacgaatctttaaaagtttcataa

SEQ ID NO: 259484 - DNA, 201 bp, Homo sapiens; identical to SEQ ID NO: 212399
  chr8:102190370-102190571
  hypo

SEQ ID NO: 259485 - DNA, 36 bp, Homo sapiens
  chr8:102197224-102197260
  hypo
ttaaccatgaagcacgtattactttttttttttttt

SEQ ID NO: 259486 - DNA, 53 bp, Homo sapiens
  chr8:102381068-102381121
  hypo
acagacgtgggtcacgctctctctggctctctttctgccgccatcttgattcc

SEQ ID NO: 259487 - DNA, 344 bp, Homo sapiens
  chr8:102450882-102451226
  hypo
gaaacttcctcgaggcgctggggtggggaggctgtaggctgcaggcctgcttagcgcccttctcaacaactgctgtcatcagggagagcgagcagagtgcgtgcactccgggcggcgaagccccagcagaggcctgcctggctgtgctctgggtgccactcattcatgagggctgcgctgcgctgcgggcaccacgattcccacggaggggctgtaggtacttaaggggccctcagacgtcaggacaaacggacacttctctttgtgaagttgtccaagcacaagaggccacaatgtggttactactttttttttttttttttttttttgagatgaagtcttgt

SEQ ID NO: 259488 - DNA, 39 bp, Homo sapiens
  chr8:102524933-102524972
  hypo
atctttctcttttattacgctggtcgggattggcagagg

SEQ ID NO: 259489 - DNA, 94 bp, Homo sapiens; identical to SEQ ID NO: 212401
  chr8:102690214-102690308
  hypo

SEQ ID NO: 259490 - DNA, 213 bp, Homo sapiens
  chr8:102998569-102998782
  hypo
gatattctttatccatcttttatggtactatggcttcgccttgaactggttctgaacatgccttggctattcccacctataagctctgattcacgtcaagccatagactcttacctgtgtcttttgttcagtcagccatcttgcaaagtcatgttcaaacctgatctcaattttaaaaaggagaaaatccctgcccaccgcagctgccagcaa

SEQ ID NO: 259491 - DNA, 117 bp, Homo sapiens
  chr8:103315024-103315141
  hypo
gacttcctactgcccggcgtggataataagactcctgtgctttcatctgttcaaccggcagccctgagtttgaactggttaagagcactgcagtgaaatcttcggcaaattcctcaa

SEQ ID NO: 259492 - DNA, 105 bp, Homo sapiens
  chr8:103403085-103403190
  hypo
agaaattcaacaaaacgtacatacacgtcagtgagaaacaaagaaacatatacacagaccaattaaaagacaatgaatatcgaggctgggtgtggtggctcaccc

SEQ ID NO: 259493 - DNA, 81 bp, Homo sapiens
  chr8:103463270-103463351
  hypo
taggtttttgaacatatacacgaaattattgttaaccagccatgcgtggtggtgcgtgccatagttccagctactcgggaa

SEQ ID NO: 259494 - DNA, 138 bp, Homo sapiens; identical to SEQ ID NO: 212402
  chr8:103572768-103572906
  hypo

SEQ ID NO: 259495 - DNA, 38 bp, Homo sapiens
  chr8:103588277-103588315
  hypo
gaacatatcgcaaacccgtggggtacccatagctgggg

SEQ ID NO: 259496 - DNA, 33 bp, Homo sapiens; identical to SEQ ID NO: 212403
  chr8:103629516-103629549
  hypo

SEQ ID NO: 259497 - DNA, 33 bp, Homo sapiens
  chr8:103629849-103629882
  hypo
aaaggctttgctggatcacgtagacctaacaaa

SEQ ID NO: 259498 - DNA, 156 bp, Homo sapiens
  chr8:103728517-103728673
  hypo
tctctactcaactgtcactccgtgaggctcatctctgcagcaccggtgtctagcacatcatgaacactctggaaccagcaccagttctacttcctcagccgggcagctctcctgttggtcaggtcccagacgcccgtagcactgggcaggttcagc

SEQ ID NO: 259499 - DNA, 362 bp, Homo sapiens
  chr8:103728893-103729255
  hypo
cttaccggagcgatcgccgtggggtgtcccaaagccagcaaggtgagtttcaaagactagtggtgaagcaaaacaggttctgagaagtgtttattcaatttagcagtgatgacttcactagtgatcttggcaggggaagggtggggttcagaggcacgatgagggaggccagattgcagtggctaggattgagtggctaagacatggaggcagagggttgggggctctttagccatgtgagagtagaaggaaagagagggcttaaggggcagcgaggtggagagaattttgtcgctggttttaggccagaatcttgagcaccctagcggatgctgtccttactctcccggatccccttatgg

SEQ ID NO: 259500 - DNA, 68 bp, Homo sapiens
  chr8:103768913-103768981
  hypo
agaacatgctccctgacccccgccttgtcccgacaccttggcaaggcgagttctgtcctgctggaaga

SEQ ID NO: 259501 - DNA, 171 bp, Homo sapiens
  chr8:103769321-103769492
  hypo
gcacagttgacctgtaatgccgctcacggtgcagctgaggggcaagacaaatgtgcagggacagtggccagtggtgcaccgcccagccacagcctctgggagatccagcatagtgaggagtgagtgcatcgcagctggaagggtgagggcgggctccaggctgcccctgcc

SEQ ID NO: 259502 - DNA, 37 bp, Homo sapiens
  chr8:103833090-103833127
  hypo
aaaaatgatgtctgtcgggcgcggtggctcacgcctg

SEQ ID NO: 259503 - DNA, 33 bp, Homo sapiens; identical to SEQ ID NO: 212404
  chr8:103878119-103878152
  hypo

SEQ ID NO: 259504 - DNA, 37 bp, Homo sapiens; identical to SEQ ID NO: 212405
  chr8:103916556-103916593
  hypo

SEQ ID NO: 259505 - DNA, 37 bp, Homo sapiens
  chr8:103916713-103916750
  hypo
catgcctgtagtctcagctactcgggaggccgtggtg

SEQ ID NO: 259506 - DNA, 45 bp, Homo sapiens; identical to SEQ ID NO: 212406
  chr8:103932060-103932105
  hypo

SEQ ID NO: 259507 - DNA, 142 bp, Homo sapiens; identical to SEQ ID NO: 212407
  chr8:103943076-103943218
  hypo

SEQ ID NO: 259508 - DNA, 36 bp, Homo sapiens
  chr8:103984301-103984337
  hypo
tgagccactacgcccggctatattgtcacaaattac

SEQ ID NO: 259509 - DNA, 154 bp, Homo sapiens
  chr8:104054117-104054271
  hypo
tgcaataaaatgaccgatttttaatatttttggagttacggatacctttgagacaagatgtttcctccaaaacgtactcacttatgcacagttttgcatgcaaatttaattacagaccctctagcgcacatccgtggacctcctacttaagagc

SEQ ID NO: 259510 - DNA, 120 bp, Homo sapiens; identical to SEQ ID NO: 212408
  chr8:104055449-104055569
  hypo

SEQ ID NO: 259511 - DNA, 199 bp, Homo sapiens; identical to SEQ ID NO: 212409
  chr8:104086527-104086726
  hypo

SEQ ID NO: 259512 - DNA, 148 bp, Homo sapiens
  chr8:104431399-104431547
  hypo
ccacgcccggccctaagcgtgattattaaccaagacaatgtgtttagcagcgtatcaggacagttaaaacatagattctggagccatactgccttggtttgaatcctggctccaccgtgtcgtattcgagttacttaacctctttatg

SEQ ID NO: 259513 - DNA, 79 bp, Homo sapiens
  chr8:105645133-105645212
  hypo
ggtggtcatccactgggctccgcagagcaggtgtggcgcctactggggaggctcaggccgcgcaggagcccatggggtg

SEQ ID NO: 259514 - DNA, 90 bp, Homo sapiens; identical to SEQ ID NO: 212411
  chr8:106453048-106453138
  hypo

SEQ ID NO: 259515 - DNA, 32 bp, Homo sapiens
  chr8:106458435-106458467
  hypo
ccgtgcccggcgatagttccttattcatagaa

SEQ ID NO: 259516 - DNA, 38 bp, Homo sapiens
  chr8:106485010-106485048
  hypo
caggcgtgagccaccgcgcctggcctcactccttgtgt

SEQ ID NO: 259517 - DNA, 42 bp, Homo sapiens; identical to SEQ ID NO: 212413
  chr8:108454321-108454363
  hypo

SEQ ID NO: 259518 - DNA, 155 bp, Homo sapiens
  chr8:108581068-108581223
  hypo
gatgatattactcccaatatcgcagggggttatttcccctgcaatattattcgtaatatccgggagggaggaaatgatatttctcccgatatcgctggttgtgtaaatcccccccgtgatattgtgttaacatccaaagcgggagaagatgatgt

SEQ ID NO: 259519 - DNA, 44 bp, Homo sapiens
  chr8:109255556-109255600
  hypo
agatgaaggtttaaggatgtcgccaggcgcagtggctcacgcct

SEQ ID NO: 259520 - DNA, 70 bp, Homo sapiens; identical to SEQ ID NO: 212416
  chr8:109800324-109800394
  hypo

SEQ ID NO: 259521 - DNA, 120 bp, Homo sapiens
  chr8:110083307-110083427
  hypo
cagggcgcgctgagtgtggggcccaccgagcccgcgcccaccgggaacctgcaccggcccgccgggaacctgcaccggcccgcgagcgctgggtgctcagcccgggctcccgcccacgcc

SEQ ID NO: 259522 - DNA, 94 bp, Homo sapiens
  chr8:110274931-110275025
  hypo
aattcattcatttgcataaacggatctgcttgggaacctgggcaggaactgttgctataaaacctgaatgtggccgggtgtggtagctcacgcc

SEQ ID NO: 259523 - DNA, 161 bp, Homo sapiens
  chr8:110643645-110643806
  hypo
tctgagctattttggagcttcgagtgctcccataaaagtcactctggcgaagccctgggcagtaaaggaggatgcagggccaggtgaggtaagctccatttctgcagaagactccgtgctctctctctggaacacgggccgagtacttggtttctaccaag

SEQ ID NO: 259524 - DNA, 42 bp, Homo sapiens; identical to SEQ ID NO: 212419
  chr8:110767246-110767288
  hypo

SEQ ID NO: 259525 - DNA, 149 bp, Homo sapiens
  chr8:112347385-112347534
  hypo
tggttttcccctgcagtcaggctgcttggaagcctggactgtcctccaactgccccagccaaactccgcgtcgttccacctatcaatggcccgccagcctgtaggtgtctgttggtgtgccctccacgagcagccgcttgtgtcttctt

SEQ ID NO: 259526 - DNA, 242 bp, Homo sapiens
  chr8:112482647-112482889
  hypo
cccgtctggagccgcggttgggaagacgtcgtctgcagcaagggaggcgtggtggggctgtgcctctgtggagctggtgaggccgggaacaggcaggccccccgcccctatcaagtcgcggggcaagagcccctccctccagatgcaactgcaagggtgactccagacctatacgccctatggcactgtaggctcggaagggcctgctcccactccctggcctgttccggctcgggcaccca

SEQ ID NO: 259527 - DNA, 79 bp, Homo sapiens; identical to SEQ ID NO: 212420
  chr8:114691130-114691209
  hypo

SEQ ID NO: 259528 - DNA, 34 bp, Homo sapiens; identical to SEQ ID NO: 212421
  chr8:114888155-114888189
  hypo

SEQ ID NO: 259529 - DNA, 31 bp, Homo sapiens
  chr8:115222084-115222115
  hypo
gagccaccgcgccaggccaaatatagaggtc

SEQ ID NO: 259530 - DNA, 92 bp, Homo sapiens
  chr8:116342861-116342953
  hypo
agactccagccaagcgggagtccacgggaggggtgggggagaactcaagcatgacaggctcaggtcccaagccctgcctcgcagggaggtgg

SEQ ID NO: 259531 - DNA, 34 bp, Homo sapiens; identical to SEQ ID NO: 212422
  chr8:116345686-116345720
  hypo

SEQ ID NO: 259532 - DNA, 176 bp, Homo sapiens; identical to SEQ ID NO: 212423
  chr8:117336911-117337087
  hypo

SEQ ID NO: 259533 - DNA, 42 bp, Homo sapiens
  chr8:117572511-117572553
  hypo
gaatctccaaaccacccagccgccccatcggctctcagggac

SEQ ID NO: 259534 - DNA, 142 bp, Homo sapiens
  chr8:117631322-117631464
  hypo
aatgtaagcgggcgcgtcgtccatctcacggaagcaagaagctttaatgtgctcttggatgatgtggctctgcccctcgtgcttctgacctccatcatgagaagagtaggtcccaacgtgagaccaccgtgagcctgcactc

SEQ ID NO: 259535 - DNA, 119 bp, Homo sapiens; identical to SEQ ID NO: 212424
  chr8:117667019-117667138
  hypo

SEQ ID NO: 259536 - DNA, 104 bp, Homo sapiens
  chr8:117824014-117824118
  hypo
aacattgtgcactcacgttttgccaggctctgtgacaggtgttgggatacagaaacaaaagagactgtctttgactcgtaagagctcacattcctgactgggcg

SEQ ID NO: 259537 - DNA, 250 bp, Homo sapiens; identical to SEQ ID NO: 212440
  chr8:118531587-118531837
  hypo

SEQ ID NO: 259538 - DNA, 44 bp, Homo sapiens
  chr8:118532123-118532167
  hypo
taaaatatcagacagtaggccgggcgcggtggcttatgcctgta

SEQ ID NO: 259539 - DNA, 202 bp, Homo sapiens
  chr8:118849363-118849565
  hypo
atctgaaggacccaagcctgcgaccacgaggaaccagacagaaagtggcattgtgcagcatttcccgataatcatacctagaaagagaagaggagtaaacagcaaatgaagactcattgcgaatgtggggatattgaccataggtgggcgcccatgtgcatgaatttacgcaaagcaactcgggaaagccaccagcaggcag

SEQ ID NO: 259540 - DNA, 212 bp, Homo sapiens
  chr8:118958836-118959048
  hypo
aaaacagacaaaagcgtcatccacaaatggagccaatcctatacacgaggaccagtcgtgggctcctagcttgtttcagcaaacagcaggcattgatccagggcagggtgggagggcccacggcctctgaattattaacttctcctgttcccacgtgaacttcaccatcagtgcttacaccaccacctggcaccgttcggagggattttcca

SEQ ID NO: 259541 - DNA, 88 bp, Homo sapiens
  chr8:119024390-119024478
  hypo
ccttcaaaagctctcgccaaaagtagggaaccctcaatgaagcgcaggccagatgccagttttcggtgcaaagcgatcctgtgatcat

SEQ ID NO: 259542 - DNA, 120 bp, Homo sapiens; identical to SEQ ID NO: 212441
  chr8:119057047-119057167
  hypo

SEQ ID NO: 259543 - DNA, 92 bp, Homo sapiens
  chr8:119057227-119057319
  hypo
ctctagtcgatactatataagcaaagataagacgtaagtctcagcaaccttctaaaaggctcaaccatatcgtacacaaagtacagtgcttt

SEQ ID NO: 259544 - DNA, 62 bp, Homo sapiens
  chr8:119146975-119147037
  hypo
gctgctaacttgtccgctgtttaatcttcattagtcttccaaggaatcgagtgtgcagcgaa

SEQ ID NO: 259545 - DNA, 170 bp, Homo sapiens
  chr8:119611614-119611784
  hypo
ttaacattctctcacgtgctccgagaaccaagtgacaaccatgtgcacatgagaacgcagtcaacaagaccatggcatgcagccccaaatattcactgctggcctgcccaggtgcggagcgctgctggtaccgcttctgtcaaaaggctcccgctcgtggggtgctcagt

SEQ ID NO: 259546 - DNA, 208 bp, Homo sapiens; identical to SEQ ID NO: 212443
  chr8:120846159-120846367
  hypo

SEQ ID NO: 259547 - DNA, 190 bp, Homo sapiens
  chr8:121292126-121292316
  hypo
tttgtacaatttaaagtaatcggaaatctgttctctgtctgccacaggctatagcatttttgcaattggtgtggccgatgcagattactcggagttggttagcattggcagtaagcccagcgcacgccatgtcttctttgtggatgactttgacgcctttaagaaaatcgaagatgagttaattactttt

SEQ ID NO: 259548 - DNA, 67 bp, Homo sapiens
  chr8:121624349-121624416
  hypo
gaacagtgagccttcgagaaagccatcgtgtttaactgatatttccactttgcgtagtggtccttat

SEQ ID NO: 259549 - DNA, 184 bp, Homo sapiens
  chr8:121982486-121982670
  hypo
ttgacctcaagtgacttttccggatcctcagtaccggtgccaggtcacctacactaccttacgttccagcccctggggccttttggcctgttctctattaaacaaacatgtcacaccaccgtatttttcttctccggtttcccaaagatatactttgtcccacggtatacctatcaaagtgtct

SEQ ID NO: 259550 - DNA, 38 bp, Homo sapiens
  chr8:122245400-122245438
  hypo
attgggaggcagaggcgagttgattacctgaggtcagg

SEQ ID NO: 259551 - DNA, 180 bp, Homo sapiens
  chr8:122454961-122455141
  hypo
ccgactgccccgccaaactgcgccttgccccgccagttgatggcctgcccgggctccggtgtctgtctgtctgtctgtgtgctcttccaccggcgtgttccctccgtgtcctctcgccatccagctgcttgtgtcttctcttgctgatgtgctcctctcgccgtccagcagcttctgtcc

SEQ ID NO: 259552 - DNA, 259 bp, Homo sapiens
  chr8:122731385-122731644
  hypo
ccactcagcctggcaggctgcgctcggctcacgctactggcctggatcccatgcgtgccaagggcgagccaggtgtgaagcaacgagaagtatgtgagcgactgagtgtggggtcggcccactgcacagtcagtgctggctccaggtgccagcccaggcaccaagtctctgtgatgctgcagctagaccacgtatactgccagcagcttccccgactgtcaccaggaaatggagtggcgcctggaaacttggagatgcc

SEQ ID NO: 259553 - DNA, 76 bp, Homo sapiens; identical to SEQ ID NO: 212446
  chr8:123508181-123508257
  hypo

SEQ ID NO: 259554 - DNA, 226 bp, Homo sapiens
  chr8:123695434-123695660
  hypo
gcagcatgttccctggatcacgggagactccatcgattgatgtctggctcaccctgagaaatttaaagggcgagagatggcggcaggccagttgcgccgaaggtggagtgagacgaggtgatcgcgttgagggagacttgcttttcccgagtctgtcagggcaaagcatgtgtgagtttcccatggagcagaactggcctgggaggtgcggcgccagatgctaggg

SEQ ID NO: 259555 - DNA, 261 bp, Homo sapiens; identical to SEQ ID NO: 212448
  chr8:123830692-123830953
  hypo

SEQ ID NO: 259556 - DNA, 86 bp, Homo sapiens
  chr8:123842813-123842899
  hypo
ggtattcaccatgtcgttgtagcaggagcatcgcctgcattgtctggaaatatgtctgtgcctgcaagacagttatgttgagagga

SEQ ID NO: 259557 - DNA, 153 bp, Homo sapiens
  chr8:123865811-123865964
  hypo
cctcgtctcagccacgctcagccaggctgctcctttcagccgtgcccttgctctggacctcacccctccgctcccctccttggaattcatactctcccacccttctctggctggcaatttccacccattcttcatggacgaggacaaacaccg

SEQ ID NO: 259558 - DNA, 35 bp, Homo sapiens
  chr8:123872985-123873020
  hypo
cagagagggtcgggcgtggtggctcacacctgtaa

SEQ ID NO: 259559 - DNA, 134 bp, Homo sapiens
  chr8:123874080-123874214
  hypo
ttggagagtattgttcttctcgcaggtcagtgcctggaatgctcaggttagcttgtctcctggggcgcctcctcccgccggatggttagttctaaagggcagtggacaaaagcgctcaacttactggaatcaaa

SEQ ID NO: 259560 - DNA, 331 bp, Homo sapiens
  chr8:123874762-123875093
  hypo
gtgtgcagcaagctcccagccggtacgattgcacccttgaatagtaataccccaggtcaggtgtgcgaggggcctggcgcgtggtaagtactcagtcaacagatctgccacctgaaagttttctttcccccagccaaaaggttctcctttgaaaacaggaatggatgaaaagagaaagctctgcccacctcagaattctcagggaaacaagaaaaaacaagtttggctttcaaggcgggctgggcgtggggagtgagaacggtgtgccctccgcggcagctccctggctcggtggctgctccgtgcacatgtgcgccgcaggtggcctctg

SEQ ID NO: 259561 - DNA, 50 bp, Homo sapiens
  chr8:123875756-123875806
  hypo
ggatgtgagcaacacgggaccggtgagtaccgtcgcgtttggcagtgtgg

SEQ ID NO: 259562 - DNA, 86 bp, Homo sapiens
  chr8:123943476-123943562
  hypo
gcctccaggagccacgagtattatgcagggctcgtacactgctgcctgcgtgagaagggccagagtttgtgcggtaggcctcatgt

SEQ ID NO: 259563 - DNA, 352 bp, Homo sapiens
  chr8:123966040-123966392
  hypo
cctcagaggccacctcagaccggtcagagggcagcagccgggacggccagggtagcgacgagaacgaggagtcgagcgttgtggattacgtggaggtgacggtcggggaggaggatgcgatctcagatagatcagatagctggagtcaggctgcggcagaaggtgtgtcggaactggctgaatcagactccgactgcgtccctgcagaggctggccaggcctagacaggtaattccacctgctcacccaggcagcaggggagaacgcagcttgctttcttttcgttgccagggttaatatagattgtagggtacagagatgttgacacagatggtggcgtctttttcttgta

SEQ ID NO: 259564 - DNA, 318 bp, Homo sapiens
  chr8:124001258-124001576
  hypo
aatgttagagcccacgtggtccaatatcctgtctccaagaagccagaaagaaaaaaaaacatgaagaatggaaggatttagaagccactccgcctagggatagggaaggagatggcccggagatgctgcacagggttagacagcgcgatggggtaatacaaacacaaactttgcaggcaggtgattcaaatcctgtaatttggagcaagtgacttcacctctttcagccttggttttctcgagtgtaaaatgggaagataatgcctacatcatagagttttgaattggataacaagtcccgtggctgggcgcagtggc

SEQ ID NO: 259565 - DNA, 438 bp, Homo sapiens
  chr8:124014019-124014457
  hypo
gcgcacaaacacaggcaaacatgcatgcacacacacacatgcacacacaggcgcacaggcgcacacaggcacacacacgcatgcacacacaggcatacaggcgtacaaaaacacacgcatgcacacacacgcatgcacgcacacatatacatacacacatgtgcacccagcacagcaagcttccctcccaactccccaccacctgctatcaagaaagccattgtcaaatactcgaaatgctaaaagactgcgtttttatttttcaagggcccattcctaatcacaagaggccacttagtctgagtggggcccagtaatgttgattaatgattatgtatttctcatgagagttgggaactcaacttgtctctcgcctcagcaccctcccagggtgcaccattaatcaggatcggccacgggtggagttagagcagtgac

SEQ ID NO: 259566 - DNA, 89 bp, Homo sapiens
  chr8:124055130-124055219
  hypo
tgcacagagaaaagccgctctaactaggttggaatgttggaggaactaaaagccaaaatgatccatcttgtctaattcaacttgtataa

SEQ ID NO: 259567 - DNA, 78 bp, Homo sapiens
  chr8:124161306-124161384
  hypo
tcttagtaaaatagttcaatctgctttttcttttctgtttttctttttccgctgagttctgtccgcagaaaccgttct

SEQ ID NO: 259568 - DNA, 176 bp, Homo sapiens
  chr8:124163979-124164155
  hypo
taaatgctgtatcaccgctaacatcagaaaactcagcttttctaaattttaaatttcgttttcaagtttctttaaatagaagagcagtagaatgggacaccacgggacagaatcttattaagaaagtgagaaatcttcgccagagactcactgcccgggctcgtcacagatgtcaa

SEQ ID NO: 259569 - DNA, 306 bp, Homo sapiens
  chr8:124178878-124179184
  hypo
gcctcggaagctcccgctgaccatgacatcgaagccagggtgcccacgtgcccttgcgggctcacctcccagcccatctcttcccactcctcccccaccccataccccacggaatccccattccctccaccccacccacccggctgatgactgtcctgctgctctcctctgtggccacagagaggcctcctgagctggctccctgctgctcaccctcccagccctgtactccccagaccttagcctcatcaccgtgcggtgccatgatttctcagttactgccgttcccaccggatcacaagcacc

SEQ ID NO: 259570 - DNA, 384 bp, Homo sapiens
  chr8:124186903-124187287
  hypo
tattcacctaagtgctcattcggtgccttcgacgtgccagccccaaactgggataggcacttggagttccaagaagctaagtcatgcctgaccccacccccaccccaaattgctcacagcctaaaggaggagattcccgcttaaaccagcagttacagacaaacgcaatccaggctctgtcatggggcccttaaggaatttacttaacctccctgtgcctcagtttcctcatctagaaaaacattaccgggctgcgccaggatgcagagtatatgcaacaggactatccgtccctgctgctgccctttctacccgccctgcccgttgtcttgtagattgtcccatgttctggatttttctgattgtttccttctcatgggatga

SEQ ID NO: 259571 - DNA, 225 bp, Homo sapiens
  chr8:124195483-124195708
  hypo
aaggaaaaatccagcgccactgtgtacttccagaccgtcaagcacaacaacatcagagacctcgtccgccgctgcatcacccggactagccaggtaccgatggcaaagcccctgtctccgtggccaagtagcagggaggatcgggggctgatagagcagggaggggggtgcattttgctcccagggcgagagtccagataattggggcttcggatggaggggctt

SEQ ID NO: 259572 - DNA, 166 bp, Homo sapiens
  chr8:124197372-124197538
  hypo
gccaggagtgcccacgctgcctttgtggcccggcgctggctgtatcccctcaggcaagtccctggactccttagggctcagctcctatgccggactaaagtccctccaggctccaaaggcctgttcctgagtgtgccagttctggtctttccgcatgaagttcagt

SEQ ID NO: 259573 - DNA, 283 bp, Homo sapiens
  chr8:124238537-124238820
  hypo
agcccctgcggtcccgcacgctgcaggggaatgccgatcaagaggccgccttggtgattgctgagtgatcaaaaggcacacagaggagggagacaagtccttcagtagattaaatttggccctgctttataaaaaatgctatcagagccagggaaaatatctatgatgcttcgtttcacataaacccgagggatacactcacctcagctatcaacagcaaagtgtcttctttgaagctgaaccctttcattttatcttcaatttcctgctgagtccttaagtt

SEQ ID NO: 259574 - DNA, 100 bp, Homo sapiens
  chr8:124238850-124238950
  hypo
ttgggtaaactgaagcagaagcctgaaaaaccgaaaagtctcaatgcgtggcgaaaagtcccaacgcttccagataaaggaaagccgcgaggaaatgttc

SEQ ID NO: 259575 - DNA, 141 bp, Homo sapiens
  chr8:124247665-124247806
  hypo
gctagtaacaaaaggcgagggtcctcaggtagagaagaaattttaaaaaacaaaacaaaacacagcttaccaggaaatgagaatgccgtgcagacacgcaaggtccgctgagatcatgtgtgaagccgacagaaaggggcg

SEQ ID NO: 259576 - DNA, 32 bp, Homo sapiens
  chr8:124248729-124248761
  hypo
tttttaaagaaaaagaaggccgggtgcagtgg

SEQ ID NO: 259577 - DNA, 331 bp, Homo sapiens
  chr8:124249061-124249392
  hypo
cagcgaggctgccgagctccagatgcagagatgcagatctttgtgaagaccctcacaggcaagaccatcacccttgagatcgagcccagcaacgccaaaattcaggacaaggagggcatcccacctgaccagcagcgtctgatacttgcgggcaaacagctggaggatggccgcactctctcagactacaacatccagaaggagtccaccctgcacctggtgctgcgcctgcgaggtggcattactgagccttccctccgccagctcgcccagaaatacaactacaacaagatgatctgccgcaagtgctgtgcccgcctgcaccaccccg

SEQ ID NO: 259578 - DNA, 82 bp, Homo sapiens; identical to SEQ ID NO: 212453
  chr8:124254706-124254788
  hypo

SEQ ID NO: 259579 - DNA, 79 bp, Homo sapiens
  chr8:124255229-124255308
  hypo
ccacacactgctacttttttgtattttcagtagagaggggttctttcatgttgaccaggttcagcgttctttcttcaac

SEQ ID NO: 259580 - DNA, 38 bp, Homo sapiens
  chr8:124288874-124288912
  hypo
agccaccacacccggccgatgactaggttttgtgtgtg

SEQ ID NO: 259581 - DNA, 41 bp, Homo sapiens
  chr8:124374923-124374964
  hypo
gggattaaggtgtgagtcatcacgcccggccaaaaatatca

SEQ ID NO: 259582 - DNA, 42 bp, Homo sapiens; identical to SEQ ID NO: 212455
  chr8:124412835-124412877
  hypo

SEQ ID NO: 259583 - DNA, 60 bp, Homo sapiens
  chr8:124453586-124453646
  hypo
aaggtaggatggggcgccgtctacacactatccgaatttacacatcggtttggcagtaaa

SEQ ID NO: 259584 - DNA, 35 bp, Homo sapiens
  chr8:124455528-124455563
  hypo
ggattacaggcatgagccaccgcacccggccaaat

SEQ ID NO: 259585 - DNA, 41 bp, Homo sapiens; identical to SEQ ID NO: 212456
  chr8:124533004-124533045
  hypo

SEQ ID NO: 259586 - DNA, 194 bp, Homo sapiens
  chr8:124552151-124552345
  hypo
tcgcccccgctcaccgggctaaatgctgagagtctctgaaagtcaactgtcgaggtcaggggctgagaaattccaggctaccttgcgtactagccggcgctggcatcgttagccaagctgagcagggagcgcagcggacctcaggtttcccgccagaccacagagctcaggtgaggcctcgaatccagaggctc

SEQ ID NO: 259587 - DNA, 115 bp, Homo sapiens
  chr8:124728889-124729004
  hypo
gctgtattcatcagcgatgctcagtgctgatggaacgggtgtcctatggcttgttcccaggagctgggtaccgaacttcttctcgggaatgtagatggagcggacattccacgtc

SEQ ID NO: 259588 - DNA, 343 bp, Homo sapiens
  chr8:124729996-124730339
  hypo
agtagggagtaggccgaggcgactttctgacggggcgtgtctcagcaggtttggagtgcagatgcacaagtccacaccttacgtaaccacgccacgtgaggcgcattaagtaaccactcagatgcgctcgtgcttggcttggagccactgttgtctgtaaaaggtacaattacgctgctaacgctgtacctctggcttggggctcacgcccagactcgcacccaggctcgcttgcgcccagagaaagagtaaagccatgttgaaactccctgcgattcctcgagtgtttttccagctgcccgccaccccaccgacttttttcggatctcacttagaaactaac

SEQ ID NO: 259589 - DNA, 41 bp, Homo sapiens; identical to SEQ ID NO: 212457
  chr8:124804120-124804161
  hypo

SEQ ID NO: 259590 - DNA, 366 bp, Homo sapiens
  chr8:124965500-124965866
  hypo
atcagcccacccaagagggccgcgctggttgtaaatccttcgggcattcctggaagtttatttggcttactcttcagcaggcctgagctgcgcctagaccactgcttctcaacactgggtctgccgtagagtaattaaagatctctgaaggtggttcgagatatcagtatttttataaacttccttaggcgactccaatgggcagcagggtccagagctcttggcttcagaagggcaggggtgcctgtctctacaaggtggggcatctcgtcctcttccccagcccatgacagcgtcttcagccatgccccaatgcatcaggcgctggcttccctacaggagaactcagaacgctgaggctaccca

SEQ ID NO: 259591 - DNA, 196 bp, Homo sapiens
  chr8:125230732-125230928
  hypo
actccaaatatccgcgtgtatgcgtgcatattgggacttttgtcttgggaaatgacacctcagtttcttaggtgtactcaaaattctgagtcaaaattacttttagtttatgaagacccaattttaataatgcataaaaactcactcaatagataactctatctattagaatggataaaagcgctaagaaaaatta

SEQ ID NO: 259592 - DNA, 37 bp, Homo sapiens
  chr8:125411827-125411864
  hypo
acaagagcgaaacttcgtttcaaaaatcaaaaacaga

SEQ ID NO: 259593 - DNA, 90 bp, Homo sapiens
  chr8:125452302-125452392
  hypo
tgccaaacacactcacgcacctgactatcctgtcagtaagggattgttttttggtgtttgtttgttttttgtttttgttcgtttgttttg

SEQ ID NO: 259594 - DNA, 41 bp, Homo sapiens
  chr8:125455719-125455760
  hypo
tctgacagtaatatagccctcgagaaaaaccaccaagtagg

SEQ ID NO: 259595 - DNA, 89 bp, Homo sapiens; identical to SEQ ID NO: 212458
  chr8:125498208-125498297
  hypo

SEQ ID NO: 259596 - DNA, 69 bp, Homo sapiens; identical to SEQ ID NO: 212459
  chr8:125498532-125498601
  hypo

SEQ ID NO: 259597 - DNA, 36 bp, Homo sapiens
  chr8:125507236-125507272
  hypo
acaggcgtgagccaccgcgcccggcctcaccttgtt

SEQ ID NO: 259598 - DNA, 87 bp, Homo sapiens; identical to SEQ ID NO: 212460
  chr8:125553022-125553109
  hypo

SEQ ID NO: 259599 - DNA, 264 bp, Homo sapiens
  chr8:125573951-125574215
  hypo
tccagccctcctcccgaccctttgccctctctgcttgtgagcagcacatatggtttagtgaagcacacagcggggaagaggagctccttacagaccaagccaagcaccccaggtgggacacgcactctcaagcactctcaaactatagccgtggctcttggctctgagtgcgtttaaaattgagtgtgtatccaaggaaggcagacagaggccacagtccccaggatggctgaaaaatgctaatgggagcgctgagctgtgagg

SEQ ID NO: 259600 - DNA, 71 bp, Homo sapiens
  chr8:125575144-125575215
  hypo
tggagctgcggtagcggtaatgtgagctgggggaatgcgagtgggagccgctggaccgggagtcactgctg

SEQ ID NO: 259601 - DNA, 168 bp, Homo sapiens
  chr8:125580648-125580816
  hypo
tacagaatcggccacgttcttcaatcaaagccttccggacagcctgcttttctgtttcttccaataagagatacttatcattgacatcttggagagcactgtccaactgaggctggatatcacctctccctgcaaaaaacagagacccaagcacggcttgctgaaata

SEQ ID NO: 259602 - DNA, 119 bp, Homo sapiens; identical to SEQ ID NO: 212464
  chr8:125673727-125673846
  hypo

SEQ ID NO: 259603 - DNA, 101 bp, Homo sapiens; identical to SEQ ID NO: 212465
  chr8:125680350-125680451
  hypo

SEQ ID NO: 259604 - DNA, 106 bp, Homo sapiens
  chr8:125682590-125682696
  hypo
caaaggagattacactcaggcgggcggcaccccacacagcctggcggcaccccacacagcctggcggcaccccacacagcctggcggcaccccacacagcctggca

SEQ ID NO: 259605 - DNA, 59 bp, Homo sapiens
  chr8:125739079-125739138
  hypo
tgaggcaaactggggctgggccagagccaaagagaagctccctaaatacacattaaaaa

SEQ ID NO: 259606 - DNA, 149 bp, Homo sapiens
  chr8:125792768-125792917
  hypo
agaaggaggtgaagcggcagagggagagcttgatcttgtgagatttattcattcggcaaatatttattcatcctttaccatatgcccaggactatgccaggtgctgaggttgagtgggtattttttttttttttcctggagagcaagtc

SEQ ID NO: 259607 - DNA, 38 bp, Homo sapiens
  chr8:125992005-125992043
  hypo
cgtgagccactgcgcccggcccttattaattgtttaag

SEQ ID NO: 259608 - DNA, 78 bp, Homo sapiens
  chr8:126007980-126008058
  hypo
agtgttgtcaggaagccaaaacgagctaatatatgaaaagtatttagaatgctacccgtactatatgtgtgagctctt

SEQ ID NO: 259609 - DNA, 173 bp, Homo sapiens
  chr8:126042714-126042887
  hypo
gctggcctgactgcagctcacgggaaataacgacattggggtttagaaagaatgcaaaatcagtaggagccactggtatgcactggatgtcaagaaacccatcactgcaaagccgagatcacgccactgcactccaacctgggcgacagagcgactctttctcataaaaaaaa

SEQ ID NO: 259610 - DNA, 376 bp, Homo sapiens
  chr8:126044384-126044760
  hypo
ccatctctattagggcgataagaggaatttggtaatgtgaggtttaagttaggttttgtgacaagaagtcccacgtagtcctggttggtcttctgtaccttgtacactgctccaccgtggagcagataaactggccaatcagcgccaggaactgctcggtgtaccgggaatggaactgcttcagcagagtgagcagtcccaggacaagtggtggccaatcaaccgggtcggtcggttttcggcagaccattcctgcaagggaacaagttgcaacaccatatgaagtacttgccttcagcaacattcattaaataccaacgctgtgaaggtcaaaatgtttggggcccatattctcgctggcagatgatattttgga

SEQ ID NO: 259611 - DNA, 228 bp, Homo sapiens
  chr8:126061268-126061496
  hypo
acactcttgctccacgttgtaatttatgatacgagatacttcttcctgccaaatcttcagaccataaatgttgacatagtcctgtatgtattcaaaagaacgatggaatccatccatggtcgctcccaactctttcagcttgggcatcaattcacttggctgtggaaaaggggaaacataaagctcttacactggagtagattgtcaactattcgttctaatatctaa

SEQ ID NO: 259612 - DNA, 204 bp, Homo sapiens; identical to SEQ ID NO: 212467
  chr8:126238678-126238882
  hypo

SEQ ID NO: 259613 - DNA, 34 bp, Homo sapiens
  chr8:126288087-126288121
  hypo
attcaaacccagaacgctccgcctgcaaaaccca

SEQ ID NO: 259614 - DNA, 40 bp, Homo sapiens
  chr8:126321193-126321233
  hypo
ttgtgttatgaggccgggcacggtggcttacgcctgtaat

SEQ ID NO: 259615 - DNA, 171 bp, Homo sapiens
  chr8:126374237-126374408
  hypo
ggaccccaagacccggttccctttgctcagcagtcacctttgtgtttgccctgtgctgcagcgaaatgctctgcccgggtagtgcctggaggtggggacccagccgctcctgcgaggcctgaagggctgactcctgcacagcgatgatgcggcagctgaagatcgggtatt

SEQ ID NO: 259616 - DNA, 141 bp, Homo sapiens
  chr8:126562037-126562178
  hypo
tgttctttcattgtcggttggctcatcacatattattgactaagctgaggaaacactgatctcattctttacgccttgaaacatttcattcttcattgttcatttaaagatttcatttttttttttttttttttttttttt

SEQ ID NO: 259617 - DNA, 100 bp, Homo sapiens
  chr8:126628078-126628178
  hypo
taaacaaagaaatgcacaatcgtaatagatcaggtggtggtgcgtgcctagatgaaaaatgaaacaggtggctgggcacggtatcacatgcctgtgaacc

SEQ ID NO: 259618 - DNA, 37 bp, Homo sapiens
  chr8:127412850-127412887
  hypo
tctagtgtttctcacgtatttttcatcgtgtttactg

SEQ ID NO: 259619 - DNA, 37 bp, Homo sapiens
  chr8:127413007-127413044
  hypo
atatgtaccataaattgaggtccgcagctgcagttgc

SEQ ID NO: 259620 - DNA, 104 bp, Homo sapiens; identical to SEQ ID NO: 212468
  chr8:127464658-127464762
  hypo

SEQ ID NO: 259621 - DNA, 44 bp, Homo sapiens; identical to SEQ ID NO: 212469
  chr8:127465002-127465046
  hypo

SEQ ID NO: 259622 - DNA, 37 bp, Homo sapiens
  chr8:127887550-127887587
  hypo
cagaagatatagaactgggccgggggcggtggctcac

SEQ ID NO: 259623 - DNA, 54 bp, Homo sapiens
  chr8:128235796-128235850
  hypo
aagcatgcacagaacgtggaacttggcctcctgaaaaggcgtgtcttcagctta

SEQ ID NO: 259624 - DNA, 159 bp, Homo sapiens
  chr8:128699512-128699671
  hypo
ttgacctcgtgtgccggaaggggagactggagctcagacaggctacaacgcgtccaaggtcacacacctagttagtgagtgaatctggattgaaacttacatttcccaggctccaaagcctatggcatttcctctcctttgtgccgcttcccgccacag

SEQ ID NO: 259625 - DNA, 125 bp, Homo sapiens
  chr8:128735792-128735917
  hypo
taaatacatttggacggaggtgcacagaaaggagtccgctttattttgcagactgggaatccagatgcaatgaccacaggcagaaagcatggagcagaacctcccagcctcggctgtacccccag

SEQ ID NO: 259626 - DNA, 103 bp, Homo sapiens
  chr8:128745537-128745640
  hypo
taataagccaaggccaggagcgatgactcgcacttgtattcccagcagtttcagaggcaaaggccgaaggatcgctttaaccgaggagtttgagaccagcctg

SEQ ID NO: 259627 - DNA, 276 bp, Homo sapiens
  chr8:128831868-128832144
  hypo
atgcggaagagcctcgggataagtcggctaatgacaccctcaggctacccagccctcgggagctcacagcagagcagttggggatgccttgcaaggttacctgtgccagagttcctggggtacatattaaataggtaggacccaatactactttgcattttcctggaatcctagactcttaacattggaaaggatttctttgccaagtaattcgccctcatcattaacctctaagaaatgcagaggtggaattagaaggtgcgtgtctctttcttt

SEQ ID NO: 259628 - DNA, 93 bp, Homo sapiens
  chr8:128836045-128836138
  hypo
tgtcaatggccttcactgcccgtcgaagcagtcggctttgatcacatgtcctttgtgttcagctctctctttgccctcagctttctaatcgcc

SEQ ID NO: 259629 - DNA, 138 bp, Homo sapiens
  chr8:128861840-128861978
  hypo
aaaagagaaagactgcgtgcatgtgcatgggtgcacagcctgtacatatgtgtgtgtgtgcccctgcgtgcacgtgcatgggtgcacagcctgtacatatgtgtgtgtgtgcccctgcgtgcacgtgcgtgggtgcac

SEQ ID NO: 259630 - DNA, 45 bp, Homo sapiens
  chr8:128867594-128867639
  hypo
tgggtcccggtgtgcggaaattggatggctcgctgaccccaaggg

SEQ ID NO: 259631 - DNA, 395 bp, Homo sapiens
  chr8:128867872-128868267
  hypo
agactggagagcacctttcccggtgaactcccgtcatgtcaggcctcagcagactgagcgggaacccccaccagcgaggttgctcaggacagcgtttctcttgggcctgtgtttggaacaagtatcctttgaactaatcactaacctgtgaaaatggatagacctcgtgtgaaaatgaaaatgtctggcttcccttctgaggagcggaggcatgaaaggtgtggccggtaggggtgggggccccacacctgtgcagccgccctggccagagcccacaagcagcgtcccctggtcatgccccactcccttctccataatctcgcccctccctgaccaggccacctgacgttgccatttatattcaagttcattccgttgttattcttttagaaaag

SEQ ID NO: 259632 - DNA, 1107 bp, Homo sapiens
  chr8:128871642-128872749
  hypo
ttctcatattacgccgtggctgactccaaacttgaactctggtctctgtttttggagcttgcttccttcctacgaccctagactgctcctcctaaataattaagtggcaaacatggcacagacagtaacctcacataagaagctatgaggttaggacagaaatatccactgctggcctgcgaactattcacacaggtctgactccccgccagagtcctggctgccctggtcctgtggaatcccgtcatggcttctgtctaaacggagcaggctcagggccatgctgaacttggagaaatctgtgcaggagtcagatttgggctttagagtcacctggggttgaatctcgggcctgctatttattgaacctgtcctagcctcaatcgccttatctgtaccatggggatgataccatctaggtcgaaggtagttgcaggagattctcatgcacggaggcccttggccgtcatttgtttctttgtctctacaagcagagaggctgagtcatacagatcctgaggggagatcactttctcttccctcctttcgtgtgtcatctccacctgggtgtggtgagccccaggaataatgctgtgacatcaagccccgtgaacacctcctttcacacggaccccgtgactggctgcggctgccagcggtgatgagaactgatgacactccagggctaccaggaacggtgtgtgtgcctctgggcagggccacttcctagaaccatggggctgctctgtgaagagaaccggctcccagtgagctccaggagacgaggagcaggtcctggtggcggaggtgctggcgcaggaggccggctcctggcagaatcggcttccagctctgggcactggggtgcggtgtgggaccagcaacaggctgctcctctgccaggaaccgccagaaccaaagtcttctcgaaggcatcttcagaaggcaagcacagggctgagcactccggagaggagcctttgggggaaaactttttctcggagcttcggagctcagggagtactatgggggagattcactaggttgatgctttgctgataggcagccctgtagagaagacaaggcagctgggcatggtggctcagg

SEQ ID NO: 259633 - DNA, 652 bp, Homo sapiens
  chr8:128888834-128889486
  hypo
atattagcattacccgtacactcttcccatctcctggcccctccagttctgaagggatggggactaagtgggatctgtcctctaagcaggcggaggagggaaccatgtcagctcctaggtgcccccagagcacctgctgccagttttccacaactcctgtcctccgtggcgcttgggtgacagcagagcagagccgatgtgcctgctcctggtcatgggctgttcgtgctgtcatcgctttcatttgccccatccccccaatttggacttacccagaatccttgggcaagctagatggctgccaaagtttacttagcgagatgtgcctgcgtgacttgagtagagacctgcttctgagaaagtcagaagtgcattccaaagtcaggagcgtgacctccccggaagcccagctaatccaggttttaaagaggagttggaacaaaggtggtgcttatgggatgtatggagctgtgggatgtgggagaggacaggtttagcagagtggcgtggtggaaagtttcctctcgccgaggaggacaactccccagcgcctgagacagcgggagctcagagcgcctagaatgtgcccagattctaaagtgaagcaggctgtggtgtgatgatggcccccgaggggacttgcagtcttatg

SEQ ID NO: 259634 - DNA, 456 bp, Homo sapiens; identical to SEQ ID NO: 212476
  chr8:128893133-128893589
  hypo

SEQ ID NO: 259635 - DNA, 41 bp, Homo sapiens; identical to SEQ ID NO: 212477
  chr8:128896287-128896328
  hypo

SEQ ID NO: 259636 - DNA, 396 bp, Homo sapiens
  chr8:128931028-128931424
  hypo
caaatgcacaagccttgagtcgctgcattcttttctaaccacccaagagataagttgaacccccactcgtagcaacctggccacttgtctgtttagtcagccctggaatacctccactgacggggcactcactaccactgaaagatggtgtgcagaattctaatgttcttcctctcgcggggtcgtgggggctttcttccagttctctgggttctgatcgttggggctgtcctgacacccttcttcagatgaccgctgtcaggttggtgaaggcagtgcgcgttgggccttccctccctagagatgtgattgcacgtcgggtaccaggagcctggccagccctcagcttctgctaaccagggagcagtgaagcccggtttacttttgttggcttgt

SEQ ID NO: 259637 - DNA, 148 bp, Homo sapiens; identical to SEQ ID NO: 212480
  chr8:128957472-128957620
  hypo

SEQ ID NO: 259638 - DNA, 75 bp, Homo sapiens; identical to SEQ ID NO: 212481
  chr8:128958209-128958284
  hypo

SEQ ID NO: 259639 - DNA, 244 bp, Homo sapiens
  chr8:129069803-129070047
  hypo
cctggcactggctgacgtgggaggtacagaatgaggtgtccgtccctccaaggcacggtgacctagaatcccactgctcactgcctgtctctgttcagcctttcagttcataaacatgctttcctccctgcattttgacatccatcatcgtttaaattccaggtcgtcatccttgtagaacgaggttcggatctcggcattaaatctcccccacggtgtgtgcggggccttgccatttgcagaa

SEQ ID NO: 259640 - DNA, 90 bp, Homo sapiens
  chr8:129131614-129131704
  hypo
tgggaggccaaggcaggctgattctggtacaagctccttttctcatcgcagacctgcagtttgagtagcgttgcttaagttacactgtat

SEQ ID NO: 259641 - DNA, 77 bp, Homo sapiens
  chr8:129338077-129338154
  hypo
gaagatgaatggaccggggccgttttgtcacggtctacaaagagcacattctccctgcgcctcgatcaatcaggcct

SEQ ID NO: 259642 - DNA, 42 bp, Homo sapiens
  chr8:129533966-129534008
  hypo
aggctgccaacagccatgtgcgtgagcttcaaaacaaattct

SEQ ID NO: 259643 - DNA, 34 bp, Homo sapiens
  chr8:129893541-129893575
  hypo
gaataattgcataagatattcgcttgaaaatatt

SEQ ID NO: 259644 - DNA, 85 bp, Homo sapiens
  chr8:129909748-129909833
  hypo
gccatcttggctcctcctctctacttctattttttaaaagccttttataggactttaaacacacgtgggaaagttatgaattctc

SEQ ID NO: 259645 - DNA, 34 bp, Homo sapiens
  chr8:129996835-129996869
  hypo
agccacggtgcccggccccattgtgtgttttttt

SEQ ID NO: 259646 - DNA, 146 bp, Homo sapiens
  chr8:130368693-130368839
  hypo
cttgcccgcgctgccgcaaaggagcccccacaatgtgaattcctgatggcaacagggaggggaaggagggaggatagggccccataaaatgaacaaacaataaagagatgattataggtgtctcacttcagcgcccgggttggtaa

SEQ ID NO: 259647 - DNA, 187 bp, Homo sapiens; identical to SEQ ID NO: 212483
  chr8:131064016-131064203
  hypo

SEQ ID NO: 259648 - DNA, 319 bp, Homo sapiens
  chr8:131070005-131070324
  hypo
gtttttctagcatgtaatagtgtgtgacatagaaaagacaccaaatgcaatggctgttgggtgagtgatgcagctgacagggtccttgtgctcaagagccctcttttactgcactgtctgtaggctccaatgtggtgcctgcccaggcatgctgtatgaatgtacggatgaagtggatggatattcgtacgtacccaccactcctggtcctcttcccctgtgacgataatcacttctccctcgatgaatgtgagctcgtcatcgttgtctgcctggcagtcataaatggtcttcactcgcctcactttatttttcccct

SEQ ID NO: 259649 - DNA, 39 bp, Homo sapiens
  chr8:131082547-131082586
  hypo
gctgggattacaggcgtgagccaccgtgcccggccgact

SEQ ID NO: 259650 - DNA, 338 bp, Homo sapiens; identical to SEQ ID NO: 212484
  chr8:131085738-131086076
  hypo

SEQ ID NO: 259651 - DNA, 211 bp, Homo sapiens
  chr8:131098481-131098692
  hypo
aatcctggcccccacgtactagctgtgagaaacagtgtaaatcacttaacctttctgcgccccgaagttgagataatagcattttctctctgtgtaaccatggttaagaatgaggtacgttaacacatgcgaagtgctcaacacaatgcccagcactctgtgaggcacttacaagtgatggccttataaaatattacgtacgtagtttttt

SEQ ID NO: 259652 - DNA, 133 bp, Homo sapiens
  chr8:131124331-131124464
  hypo
gcccatacctttcccggcgttcctaggaggcagagggggagcctccgtggttggtgatgtgggcgagtctgtgcttgtggaaacgaagatctggttggtgaaggctccataggagagccgctgtttgtccctt

SEQ ID NO: 259653 - DNA, 43 bp, Homo sapiens
  chr8:132966090-132966133
  hypo
ttcaaggtgtggttcgcaaaacagtcaacgatgaacttcgggc

SEQ ID NO: 259654 - DNA, 94 bp, Homo sapiens
  chr8:133686740-133686834
  hypo
ccatatggggagctcaaaaacgttgtcgatatcaaaatggttcatacaatataaataacttacccgcatcaccttgcagtttgttagtatattc

SEQ ID NO: 259655 - DNA, 77 bp, Homo sapiens
  chr8:133906404-133906481
  hypo
cagatggcacctgccgctcccacaaagccaatattcttgttaaaatgcgagggacccaagcccgtgaatgctcaaac

SEQ ID NO: 259656 - DNA, 369 bp, Homo sapiens
  chr8:134224536-134224905
  hypo
ctgccgctgcaccacgccagccctttccggatgctcagaggggaaaaaaataataataggtcagcgggccgaaaccggtattaagtaggagtcctctgactcagagaggccttaagaactctcggtgagtgaaggaactggccctgcaggtcgtcacagaagagccatgggatccgagccccgcgcagccacatgactcacagccagcttccacctgctcagggcctcggctttctccctgtaaagtgaggccacctcccttacctcggggctgcagcgacaatcactcaagaaaggaaaggagcagggtctgaggtggaatttgggccccaccgctgaccagcggaaggattcgggcaattggtttaa

SEQ ID NO: 259657 - DNA, 45 bp, Homo sapiens
  chr8:134232709-134232754
  hypo
gctgggagccatccccgggattggggcatggtccacatggagccc

SEQ ID NO: 259658 - DNA, 175 bp, Homo sapiens; identical to SEQ ID NO: 212491
  chr8:134251104-134251279
  hypo

SEQ ID NO: 259659 - DNA, 142 bp, Homo sapiens; identical to SEQ ID NO: 212492
  chr8:134254200-134254342
  hypo

SEQ ID NO: 259660 - DNA, 134 bp, Homo sapiens
  chr8:134268417-134268551
  hypo
ccttacctctgaaacggtgataaaaattctcacctcctagagttactatgaagattaactgagatcatgcacacacagcaacgtagaatgaaactagcacatggtaaactctcaatctacgttagctaattatt

SEQ ID NO: 259661 - DNA, 483 bp, Homo sapiens
  chr8:134278414-134278897
  hypo
tcccccagacaatcagcctccgcggggccccaggcttctcagcacttgacccgcccgcaagcggcgcacactcaggcctcacgaggccacctcagctcagcacgctgcattgattttccaaagattaaatgaggcagtgaagtggaacacagaacactctaaatgctgttgaacctgcttctagaagctggcagaaatgcgacccatacagatcactgccgtgtggcagcagagaggaaggtcagcgttcacaaactcacgcttgagaagaagggatgggacagatcaccacttaggcaccctgtgggggcaagtcacctcctccccagcttgaatctttaaaacaggaacagcctggcccttcctacctcctagaggtgctgaaggcccagagaatgtaggctgctccatctgtgagtgaccccccgtgaagtggtacgaggcagccacccccacgccatccacacccgctggtgatcggat

SEQ ID NO: 259662 - DNA, 155 bp, Homo sapiens
  chr8:134297710-134297865
  hypo
tgcccaaggcccctcggatgcaatggtcgagagaatgcaagcctctgaaattcctgcctagggctcctctgaagacccaggaactcccaagaacctggtgaaacacctcttagaggtcagccggcaagtgcgggccaccccgaatccaccccggg

SEQ ID NO: 259663 - DNA, 205 bp, Homo sapiens; identical to SEQ ID NO: 212495
  chr8:134335639-134335844
  hypo

SEQ ID NO: 259664 - DNA, 213 bp, Homo sapiens
  chr8:134462495-134462708
  hypo
gaggcagacacccccggaatcactgttcccggtttgcagagagggtctatccgtggaccccggtctttgactgctggggcctgtgactgtccatgggtgtccatgacccagtcatggcgccctctaacgcatcctctctaacttcaacccggccctccaccctagccaccagctgcctgtactcacagtcattttctccgacggttcacagtc

SEQ ID NO: 259665 - DNA, 255 bp, Homo sapiens; identical to SEQ ID NO: 212496
  chr8:134466989-134467244
  hypo

SEQ ID NO: 259666 - DNA, 102 bp, Homo sapiens
  chr8:134470075-134470177
  hypo
ctcccccgagcctgggagcacaggccccatgcctccgtcacactccaccaggaaaaagtcacgcctcctcaaagcagcagcgaccttttcagggatattttc

SEQ ID NO: 259667 - DNA, 162 bp, Homo sapiens; identical to SEQ ID NO: 212498
  chr8:134478325-134478487
  hypo

SEQ ID NO: 259668 - DNA, 43 bp, Homo sapiens; identical to SEQ ID NO: 212499
  chr8:134482029-134482072
  hypo

SEQ ID NO: 259669 - DNA, 31 bp, Homo sapiens; identical to SEQ ID NO: 212500
  chr8:134482375-134482406
  hypo

SEQ ID NO: 259670 - DNA, 100 bp, Homo sapiens
  chr8:134545309-134545409
  hypo
gttctctgaatttccgctggatgctggaattcctggaatccctggatttccatggaatgtgggccttctagtcccccagcgcccccgcagtccaatggca

SEQ ID NO: 259671 - DNA, 43 bp, Homo sapiens
  chr8:134602079-134602122
  hypo
ttactttaccagattttcaccgggcgcacgcatgcctgtaatc

SEQ ID NO: 259672 - DNA, 283 bp, Homo sapiens
  chr8:134686551-134686834
  hypo
ctttggcacatcagcgccttttgatttctgtagcctcttcagaagtatttttgacacaaacaatagtcccggcttttgcttttccaagaggcatcagcacaatcggagcagacactggtgactcattttgatcatcgcctttaagcaattcactctgtgagcctggacttgacaggcctcactgtgccgtgaaatctaatactatttttatgccttttaatctatcttttaacagcctccttgtttagaactctgcgccctggattcacggaaagcacgtttt

SEQ ID NO: 259673 - DNA, 39 bp, Homo sapiens
  chr8:135003999-135004038
  hypo
gacttccaaatacagccaggcgcagtggctcacgcctgt

SEQ ID NO: 259674 - DNA, 31 bp, Homo sapiens
  chr8:135301261-135301292
  hypo
gccagatcccgcaatagagtattatctccat

SEQ ID NO: 259675 - DNA, 161 bp, Homo sapiens
  chr8:135348405-135348566
  hypo
gttccaatcactgtggtcaccgctaaacaataaaacatcctccggtcactttgtcataggaatggtcctggtttttaacaatttaaacgcacccagtgtcataatcaaaaccatgtcttgtcctatgtcacgcttcccccgacactgcaaaccccaggcct

SEQ ID NO: 259676 - DNA, 178 bp, Homo sapiens
  chr8:135563400-135563578
  hypo
ttcacttgaaaatgagaaagcgtggactaacgcgcagagagtagttttcactacagagacatggatcaaaatcccaactctagctcatagaaattgtgttactcctgagcacattactaaaatagactgtgggcctcagtgtcctaatccgtaaaacggggatgttaattacctacct

SEQ ID NO: 259677 - DNA, 85 bp, Homo sapiens
  chr8:135805714-135805799
  hypo
caggtttcctgagacggttttgggaagaaactgttccacctcaactcatcgggcattaattagattcttgtaaggagcacgaaac

SEQ ID NO: 259678 - DNA, 116 bp, Homo sapiens; identical to SEQ ID NO: 212502
  chr8:135871437-135871553
  hypo

SEQ ID NO: 259679 - DNA, 104 bp, Homo sapiens
  chr8:135950261-135950365
  hypo
cacctacctggattcggtgggcatctgagtttgcagccttcttccccatctaggatgttggatttaaactctctgaattctttttttttttgagacggagtctc

SEQ ID NO: 259680 - DNA, 83 bp, Homo sapiens
  chr8:136440095-136440178
  hypo
ccctgccacccacactgccacgtctctgcccgattccttcatgaagggcgacaatgcctcccggacacacaccccatatttcc

SEQ ID NO: 259681 - DNA, 98 bp, Homo sapiens
  chr8:136577245-136577343
  hypo
tggtgtgggagacacgtgggagtgctgcagagcgtaggggctgcgagtcttgttccattggctgtcgtggataatcgcctacccggaggcctggctgg

SEQ ID NO: 259682 - DNA, 81 bp, Homo sapiens
  chr8:138498657-138498738
  hypo
agacacatcttacacggcaggagaaggggcaggagaaggagcaggagagagcgaggtgggaggtgctacacacttttaaat

SEQ ID NO: 259683 - DNA, 153 bp, Homo sapiens
  chr8:138910220-138910373
  hypo
gcccggcaacatgcacctttaaatgaatatttcgttttattaatttatttcaataagttgagttccatctcccaactttatttgaacagaattaaccaaactggttaaaacttaagagagttaacaaagcacgaatgattttcttccgcactg

SEQ ID NO: 259684 - DNA, 42 bp, Homo sapiens
  chr8:139096093-139096135
  hypo
gagaaagtgggataatacatcggcagtagttaaagcccactt

SEQ ID NO: 259685 - DNA, 96 bp, Homo sapiens
  chr8:139356749-139356845
  hypo
tacgtcctcaaagacgcttttccgaaccctcagtctaaattaggagtctcttgctacactttctttctttcttttttttttttttttgttaaggag

SEQ ID NO: 259686 - DNA, 36 bp, Homo sapiens
  chr8:139357085-139357121
  hypo
gggattacaggcgtgagccaccgcgcctggcttctt

SEQ ID NO: 259687 - DNA, 251 bp, Homo sapiens
  chr8:139833381-139833632
  hypo
aatgggcacactgtcgtagaggcgcttgccaatcacagtcttgccctggatgtcaatgttctcccgttcctcgatgggtagtgtctgcaccagcgcacagtcaatgtgcagggagacgttctgggcctggatgctcagggccatcttgtgccagtcccggtcaaagaggtcattgacccgagaacctcggaagaccaccctgacagcatctttcatggcacccacagcgttgtactcgactgccttgtttt

SEQ ID NO: 259688 - DNA, 141 bp, Homo sapiens; identical to SEQ ID NO: 212504
  chr8:139889990-139890131
  hypo

SEQ ID NO: 259689 - DNA, 87 bp, Homo sapiens
  chr8:140383823-140383910
  hypo
tccaccctcgagtgcggtgagctgttgacgtgcggcctcagaaggcgcaaaacaataaggccctccatgaggcgttcctaattggag

SEQ ID NO: 259690 - DNA, 35 bp, Homo sapiens
  chr8:140616736-140616771
  hypo
tggagagcacaagccgggcacgcagataggagcaa

SEQ ID NO: 259691 - DNA, 682 bp, Homo sapiens
  chr8:140630602-140631284
  hypo
tgtgcttggtgagatctcctcgatcttgtaagagatggagtggaagtagtggggggcaagcttggcgctgaaggagttctgcggtgccaccgagcggccgccatagtcctgcgagcggtagcaggtgcaggagcacacagactgcaggtccgggacgtccgccttgtacctgggccggctgggccgcggctcctcagggatgtgaatgaccatgctgttgcggtttccggcgagggatgccctctcttcagcatcccgccgctcatcctcactgttcatggtcaagaacctgaggacgaccaggttgaggaaggccccgatgaccgtcagccccaccaggatatacataaagctaaaggccacgtagagcggcttcttctgcagggcacccttggtctgcagggccacgtagtccccgaacccaatggtagtcaacgtgatgaagcagtagtagtaggcgtggaagaagctccactcctcacactgggagaaggcggccgccccgatgcacagcgtccccatgcaggagaagaagcccacagtcaccatgttctccatagacacgtcagtgttgcgcatgccacagcacttcttaatgcgcttcagcaggtagcgcacgaaggtgttcatgcgctcgcccaggctctggaacatgaccagtgtcagcgggatgcccagcacg

SEQ ID NO: 259692 - DNA, 143 bp, Homo sapiens
  chr8:140691465-140691608
  hypo
gggttcccggagagcgcctgtgtccctgacgcacaggtgcaggcccagctggcacctgcctctgctctcccctcctcttgccgagaaggcaggatgcggaatggcaggtgaaaggcactccctgagcacgggggtgtgggaac

SEQ ID NO: 259693 - DNA, 84 bp, Homo sapiens
  chr8:140719205-140719289
  hypo
cagttggtcccaagcctgtccggtgctcctggtgcccatgcgctgtgtttacagcctgtctgcgccctccagcagccccaacat

SEQ ID NO: 259694 - DNA, 167 bp, Homo sapiens
  chr8:140744186-140744353
  hypo
gaggctcccagaccgccttgcacaccaccacgcaccgcgtcgaggtagaaggtgctggagcccacgaaggagacggtgtcgtgcaggtcgtagttgtgcacgccgttctggtggtcctggaaggggaccacagtgagggcgaagggccctacgctgcgcgggctccg

SEQ ID NO: 259695 - DNA, 146 bp, Homo sapiens
  chr8:140751424-140751570
  hypo
agtggctccaccaccggcagcagctcaagctgggtcctctcctcccggacacccagccccagcctgggaaacgtccggtgcccatgcagttgggcctctgctcagcctccacccgccccgccctggctggccgctccctctccttt

SEQ ID NO: 259696 - DNA, 73 bp, Homo sapiens
  chr8:140755513-140755586
  hypo
caaactcccagcgacgcctccccgacctggccccacaactctactctccaaccttttgcgctggcgagaaaca

SEQ ID NO: 259697 - DNA, 284 bp, Homo sapiens
  chr8:140756690-140756974
  hypo
cagaggctgggtgacagagacggaagaaggacttgctccgtctccgtgtcccagagcactgctctcctaggagccgaggcaggcccagctctgcacactccagctggctacactcccgctgaccccatggacacagaacacaggctctttccccccatcagcgactgtcagggcacgcacttcatgaagctggagcttcgctctcaatccaccaaatggcatgcgtttttaacagttactgagggagctaattagttcataaaccaggacgcctcttccctggc

SEQ ID NO: 259698 - DNA, 84 bp, Homo sapiens
  chr8:140757362-140757446
  hypo
acggggtgaaacaccgtcaccaacacaacacactgaggccagggtctcccagcccatggacaccctccacggataccaggccag

SEQ ID NO: 259699 - DNA, 44 bp, Homo sapiens
  chr8:140757750-140757794
  hypo
cagcacgctcaaagcgattggtaggacagcgggtgagtcggggt

SEQ ID NO: 259700 - DNA, 315 bp, Homo sapiens; identical to SEQ ID NO: 212508
  chr8:140758126-140758441
  hypo

SEQ ID NO: 259701 - DNA, 240 bp, Homo sapiens
  chr8:140770346-140770586
  hypo
ttccacttggaagggaatcccgtgacagcggggaggccaagcgctcgggcctgggaagccagtgtcacccctcagggccgggatggctggaggtgcccatcgctggacttgctggctggggctggagcaaatgccaggcttatgtggggtggggacatgtgcctgtggaggagaccgccctgtgtggaatgggactcacactgagcatgcccacgtcgcgtgctttacatttcttacttg

SEQ ID NO: 259702 - DNA, 265 bp, Homo sapiens
  chr8:140774448-140774713
  hypo
taacgcaagcagagcggcccactgcaaaagtgtcctgaagtgctgcttctgagaacccaaagaatgatgtgtaattagcatattaagaactagtatgcaaatcacggtgctttaaaacagtctgttctcttaaatacagtcacgcacagcttaacactgcggataggttctgagaaatgcgtcattaggcgatttgtcctagtgtgaacatcacagagggcactcacacgagcctggaggtcaagcctctacacaccgaggccgt

SEQ ID NO: 259703 - DNA, 356 bp, Homo sapiens
  chr8:140775903-140776259
  hypo
cacatgcacgcacgcgtgcacacacacgtcgatcattcaggtgctggtaagcggggacaggataaagggagctggaggctgccacgtgggtcaggggagacgaggagtggctcagaccaggtcgaagctgtacaagctaagaagtggtcaggtcaggccatgttccagcaggccagtgatggagcaggcatagtgtggaaggggtcaggtgttgggcctcagcagccagaagaactgcccgttgacaactggggacaccgaggaggactaggactcgggaggttagcagtatcgagcatttgatcttggccttgtgaaggtggaagtgctcattagatacacggtaggtctgccga

SEQ ID NO: 259704 - DNA, 374 bp, Homo sapiens
  chr8:140785340-140785714
  hypo
ccgtggcaggaccacgcctctgaaggagcactggctgcctcgggagtcacgtggctgcacctacccagcaggtagggctgtgtggggttagtcacccagcaggacgcctggcgcgcccaggtctctgcctctgtccctcctcgtgccgatggctctaacaggtttcaacgaaaatccaaagtgaatgctagagagtatttagcaccagtgggatcactaaaatgaacacaaatgaagacaaagttcccaacggctgccagaggccccggctacattcctggagtttgtcctgaaagcctccctgggagcaggcagtgcagcagacggcactgggtgggggaatcagcagcctgaacaggcgactgccccgaagg

SEQ ID NO: 259705 - DNA, 350 bp, Homo sapiens
  chr8:140799716-140800066
  hypo
gggaaggtgggaaccgggcctgcctggctctgtcctcccttctgccccgaccctgcagacgctttcaaagcctaatatggaaaaaggcctcaccgaaagcttaaatgtaaatgaaccaagctaaggacgctgatatacacagaatttctttctacatggttattaggttaatagttaaaaactggcgactattaactttcactttaaatttattgttcaagctaacaccactgtttttcaacgtccctgtccggggtcggtgctacctgccaatgagcacctgggtgtgtttctgtctagagaccactgggtgctcaccagaccccacaggaagacggctcccaggggtg

SEQ ID NO: 259706 - DNA, 122 bp, Homo sapiens; identical to SEQ ID NO: 212509
  chr8:140802163-140802285
  hypo

SEQ ID NO: 259707 - DNA, 132 bp, Homo sapiens
  chr8:140802500-140802632
  hypo
agtgctctgctgccgctgacgcagagagctcagctccactaatcacattcagaagttccgagcccaccacctagagtttcagaaactgtgcgctgagaatgaaagagaccggggagcgctttgttcttcagc

SEQ ID NO: 259708 - DNA, 249 bp, Homo sapiens
  chr8:140807902-140808151
  hypo
tctgaaagataatccgcaaactaacctgaaacccagagtacgcaattaaagtgttgggaaacaatctgatgtcatgatgctctcctgggccagtgagcgtgaggggtgggaggcggacctctgggacagaaaatcagctgcgcacaagccaattaccacctggagatggatcctcaaaatggcacacggagggaactggatcccagtgcgtgaatgcacagggtcattagcccacggtgaacgttcact

SEQ ID NO: 259709 - DNA, 120 bp, Homo sapiens
  chr8:140809392-140809512
  hypo
cccttatcagatatatggtttgcaaatattttaatccatccggtgtgttgtcttttcactttcttggtggtgttcttagaaacacacatgtttttaattttgatgaagtccaatttattt

SEQ ID NO: 259710 - DNA, 500 bp, Homo sapiens
  chr8:140815075-140815575
  hypo
gtcacgtgtgcatccgtatctgaaggtgcgtgtgtgtgtgctgttgtatgagtgctctgtgtgcatgttgtgtatgtcggtgtgtgttgtgtgcctccatgtgtgaatgtgtatgtgaagatgtgtgctgttgtgtgagtgcattgtgtgcgtgttatgtatgtcagtgtatgttgtgtgtgcatccgtagatgaacgtgtgtgtatgtgaaggtgtctgtgtgccgtcgtgtgactgtgctgcgtgcttgttgtgtatgtcattgtgtgtgcatccatgcgtgaatgtgtatgtgaaggtgtgtctgtgtgccgtcgtgtgagtgtgctgtgtgcgcgttgtgtatgtcattgtgtgtgcatccatgtgtgaatgtgtatgtgaaggtgtatgtctgtgtgctgttgagtgtgtgtgtgtcacaggctctcatcaggctcacagcctctcaggaaggcaacgtccgttggaaactctagagcggcgagtcctgcagcct

SEQ ID NO: 259711 - DNA, 201 bp, Homo sapiens
  chr8:140818669-140818870
  hypo
gccacctggatgtttccactcggggctcagcggcagtgacaccaaggacccgtgaaaacaatatgtagcagcagcaacaggattaagagtggagcagaagtagcctcaggtcccagagcagctccccaagggtgtacctgaaccgggaggcatccaggtgtgacctcagctgggtccggcagtagccgagcctcctgaacc

SEQ ID NO: 259712 - DNA, 162 bp, Homo sapiens
  chr8:140834002-140834164
  hypo
gccaccactgcgcacgggacccgtgagcttgttaaggcttctgagtagagaccaacagattcgtgtgccataatagcctggtaaataggaatcaaaaaggtagcagctggagttctccccatggagctcgacggagagaaaatgaatcgtagtgccatgctc

SEQ ID NO: 259713 - DNA, 132 bp, Homo sapiens
  chr8:140834749-140834881
  hypo
gacaccctattgtgcggttgaaaagagcacacccaggggccagacctcaagcaggtgctagagatggcctccctcaaggagaggagtctgacctgagagccaagagccgtaggatggcgggggggggctgcc

SEQ ID NO: 259714 - DNA, 212 bp, Homo sapiens
  chr8:140844033-140844245
  hypo
tggaggcccagggggatggacgtgctcggagtgtctcggcctgcagtagggagagcggaaggctgcccaggcctctgcctccgtgctctttccacagtgcttccgcccactccgtcacgttgccttgagtagccccattgtcctggctacgtttcagagtgcctattactcaattatcccttctcctctccgtgaagtgtccattaaccttg

SEQ ID NO: 259715 - DNA, 85 bp, Homo sapiens
  chr8:140844598-140844683
  hypo
gcagacagaatgcgcggggtgttcgcgtggagcagctagtgagacctgccgctcctgccagaagcccagccgctggttggtctgg

SEQ ID NO: 259716 - DNA, 140 bp, Homo sapiens; identical to SEQ ID NO: 212511
  chr8:140847596-140847736
  hypo

SEQ ID NO: 259717 - DNA, 310 bp, Homo sapiens
  chr8:140859761-140860071
  hypo
cctccctggaggcccggcctggggatgggcacgagcacctgtcccctggcggcgtggcctgcagatgggcacgagcacctgcctcccaggcgacccagcctgcggatgggcacgagcacctgccttcccgatggcctggcctggggatgggcatgagcacctgccttcccgacggcccggcctgtggatgggcatgagcacctgcccccctggtggcccagcctgcagatgggcacgagcacctgcctctccggcggcccagcctgcggatgggcacaagcacctgccttcctgacggcccggcctgggg

SEQ ID NO: 259718 - DNA, 164 bp, Homo sapiens
  chr8:140871034-140871198
  hypo
caagtagccactgcgaccgggactgtgaatccggggggggcacagtctgcacaccctccccacccgctctaaacctgtccctttaaacacgcctcgcataagtcccatctctcagtcttggctcctcctacggtctccatctagaagccgtctcctctgcttct

SEQ ID NO: 259719 - DNA, 167 bp, Homo sapiens
  chr8:140920092-140920259
  hypo
gcagcatgtgctgggcggggactgcaggctggcagacaagctacggggtgcaggaactggccacgccactttctctttgtgaagtggagtcacagttttcatctgcaagacgggaagacaggataatgaaaccgccccaggagtcaggttgccgacaagggtgacgt

SEQ ID NO: 259720 - DNA, 219 bp, Homo sapiens
  chr8:140932073-140932292
  hypo
ggcccaaggcagcacggtctccatgctccctggttttacccttcatgacccgctcagactccaggcgcggcatggcactgcccggacccttccgcctagtgctggaaccatttcaacactcttccagatttgttctgtctgtaacggtgggtttttgggttttctccaatgttcctcactgaaaattctgaagatgtttgtattaagattaaaatatct

SEQ ID NO: 259721 - DNA, 680 bp, Homo sapiens
  chr8:140937003-140937683
  hypo
ttggatacctatttcgtccacctccttcgctcctggaccgtgaattctacagagtgagggaattacatcttactcatcttttacaggcctagaactcaagggctcattacatgtttgctgaatgagttactggaaacggccttagatcacctgaatgactttcatgagcaggggggtcagcggtgttcagtgtggccccagagggtagagccagagcagacggcctgcagcggccaccagcttcgtgttctccagcacgaggggccaccccactacaactcacgcctcccactgcctacaggggaaagctcccgaaaagcacacaaaaacagctccctgaggaatccgggagtaaaacaaaagcagcagaatgtggaggagtcgacacatggaatgagctcgcccacggggtggcggcgcctcccacttttccctcgacctttcctccacagtgtggaaaaaaatgccctgttacagagcatcaggcaacagcactggaggccgaaactctaacagaaatatcgcctttctgcccaggaaaaggggtggagtctttgtaggctgcagagttgcatatggaggtgggggaatcttagaggcgagagagctagagaagtggaccctttcattctgcatagaaacctgcagaaatctcggattgatccctgagcaaaacagac

SEQ ID NO: 259722 - DNA, 130 bp, Homo sapiens
  chr8:140950012-140950142
  hypo
gtgaagcggaaatgcggacgcaaatgtcacgtattattaccgctgccgccacggtttctaatcgcgttaaacatgggtaatgaagccttctctggccagcgcttgacaaagccatcgctgagcagctgcc

SEQ ID NO: 259723 - DNA, 58 bp, Homo sapiens; identical to SEQ ID NO: 212513
  chr8:140962580-140962638
  hypo

SEQ ID NO: 259724 - DNA, 427 bp, Homo sapiens
  chr8:140963130-140963557
  hypo
gtgaacaccggctccgaaggcctctttggtatgcaccaaaacacatggcatgcggcaagaggaggcgcggcagggagggagccgcacccgccttacagccaaacaaatgaactataaaagggtgaggtgagtcaaccgaggacaatgccctgccaaacagagtgcctcacctgctcacggcttggagtcagccagacccaggcgcgcacatccccaccgccacctccccacctgtgacacaggcctggttacgccacctctctgagctccatttcttcctcctaagaagttggagaatcaccctgacacctcacagaattggtatgggaaggaacaaagcctctgccaacgctcctcacacaaagccctactcctataggggcttgatgcctgcaggccccaccgttctcttcgaagtggtcacagc

SEQ ID NO: 259725 - DNA, 69 bp, Homo sapiens
  chr8:140968327-140968396
  hypo
cgcggagacctgacgagagtgtggctgtgcctagaaccagctccgatgctcctcgttcgaaacacccac

SEQ ID NO: 259726 - DNA, 526 bp, Homo sapiens
  chr8:140971011-140971537
  hypo
cttatttacagacacgccccgaggcaggacagggtgtgcagtcagcttccttagacatgtaaggagtgccttttcctttccacaaggaaaaggggagttgtgtagacaccatgagatgtgaccactgccctcgggaacacatgccagagatgacagcctgacacagagcactgcattccgagtcacacagaggagcactgcattccgagtcacacaggggagccctgcattccgagtcacacaggggagcactgcattccgagtcacacgggggagcactgcattccgagtcacacgggggagcactgcattccgagtcacacgggggaggcctgcattccgagtcacacgggggagccctgcattccgagtcacacgggggagccctgcattccgagtcacacgggggagccctgcattccgagtcacacgggggagccctgcattccgagtcacacgggggagccctgcattccgagtcacacgggggagccctgcattccgagtcacacgggggagccctgca

SEQ ID NO: 259727 - DNA, 114 bp, Homo sapiens
  chr8:140992412-140992526
  hypo
acatccactgtttccggttgtgcatggaaaatggacgaggagggaaggccgattctgggaacgcagcctagggaaccatgggcaactcccacagaaaggcgggcggtggagaac

SEQ ID NO: 259728 - DNA, 379 bp, Homo sapiens
  chr8:141052508-141052887
  hypo
aggcagccaccttgcggaacacacgcatgctccaaggatggttccggctgctttttatagaagagtcctgatcttcctgagaaagaccaaggcatggatattagttccccactttttcagctgagataactgggacttggccaaggtcccagagtttaccccaggacacctggtctttagggagcctagctgacctccttcacctacgcttgctctccacggccctgtggagtgtccgggaccgcctgggcccacgccctctgcagatgccagagcaaagcaaaggtggcagagcccccacctaacacatctctgccttcccagcaccgggctgctcctgagtcaatttccttctgctgatcttcgcagttattcaacg

SEQ ID NO: 259729 - DNA, 247 bp, Homo sapiens
  chr8:141054769-141055016
  hypo
cttcggcactgatacgcagggctttcagaagattacagcttctcgcctcggggagaataagtccctattataaatggaaaccttatagtcccgcagatgctctttatttttcctaatgcacagctgcaaaagagaaaattttcccttgtgtgctaaatacgcatttctaattaccctcacctaagatgcattcactctaaagactaagaatagctaactgatataacttacacgcagtaatatagtc

SEQ ID NO: 259730 - DNA, 186 bp, Homo sapiens; identical to SEQ ID NO: 212515
  chr8:141071378-141071564
  hypo

SEQ ID NO: 259731 - DNA, 194 bp, Homo sapiens
  chr8:141106960-141107154
  hypo
ggactaggacagggacgtggactggacgtgagacattcctatgctgagaagtcaagaagaatgtgtcctcgcagctcctcctgcagcacctcacagtgcacaaccggctgggccagcccatccagcatagagatgtgaaaacctgtccaggtcgctggtgtatagccagaacaatggcacggggcagggcaaag

SEQ ID NO: 259732 - DNA, 621 bp, Homo sapiens
  chr8:141107409-141108030
  hypo
ggctcacccgagtccgccatgcgcagccctgccactgtctgcagggtaaggacgcccacctgggttcttgtgccagccacagttgtgccacagtccgtagggtaaggactcccccagagtaaggactcccgcctgagtcctggctgcgcagcctgtgttgccagtcgcagggtaatacactcgcctgcatcgtgggtgccccgccaccgccctgccacagtctacaaggcaagaacgcccgtctgggtccgtagtgtgcagccgcagctgtgctgctgtccacaccataaaaactcctggccacagacgtgccacagtcggcaggataagaatgcccagctggatcttggggtgcacagccccagctgtgccgctgtccacagggtaagaacgcctgtctgggtgggtccttggtgcacaaccacaggcgcgctgcagtcggcagagtgaggagcctgcctgggtcctccatacgcagtcgcagctgtgccgctgctcccagggtcatgacgcctacccaggtccttagtgcgtggctacagacgtgccgcagtcctaccgggaaagatgccagctcatgtcctcaatgagcagctgcagaattgccgccgtctgaaggat

SEQ ID NO: 259733 - DNA, 427 bp, Homo sapiens; identical to SEQ ID NO: 212517
  chr8:141147340-141147767
  hypo

SEQ ID NO: 259734 - DNA, 93 bp, Homo sapiens
  chr8:141159266-141159359
  hypo
tgatctcgttccattgctctggtctacctgcagacaaggactaatgagtcccaacagcagcatggtcagcacgggcctagaagacaagccact

SEQ ID NO: 259735 - DNA, 132 bp, Homo sapiens
  chr8:141159884-141160016
  hypo
atctccttgaaaggtctgctcgccttgacgcagcacatgaagtacgagtgcgagcagtggagcctacatgaggtggctctctgtatatcatgcatacatacatgcatgtacgtatgtctaggtgttatgtaa

SEQ ID NO: 259736 - DNA, 38 bp, Homo sapiens
  chr8:141185739-141185777
  hypo
acaacgaaatctgacgacatccacgggtttaatcctga

SEQ ID NO: 259737 - DNA, 146 bp, Homo sapiens
  chr8:141202563-141202709
  hypo
tcctggcacagtgcctggggcgtgttttctagcagtaaaaacaggcagcatggtgcaggggaggagcaagctgcccgcccacagccctcgcaccagctgtgcagtcagggcagccccattatgcagagcctcgcttcaatacctgc

SEQ ID NO: 259738 - DNA, 160 bp, Homo sapiens
  chr8:141213695-141213855
  hypo
aggaagtaagatgtgaaaatcggtgcttgcgggaaggttgagctaacagacaagcacaaggtaaattccgcagaagagacagaagagaccagctggaagagatcaaacgaattctgctggaagtgagaaggactcagccgaggcagtggctctgtgtggc

SEQ ID NO: 259739 - DNA, 221 bp, Homo sapiens
  chr8:141219190-141219411
  hypo
cataggccctgaaggggccccgtggacacactctgcctcttccgtggcatctctgtggtgaggcctctgcagacgatccgcctaaaacaacgagcaggagtcactcccgtgtctttccttgtttgtccacgtggtatttgtttgctgcttgtctcttctgctggatgtcagctcaggaacgtcgccttgttcactgttacgcccccagcattcagaactgg

SEQ ID NO: 259740 - DNA, 119 bp, Homo sapiens; identical to SEQ ID NO: 212520
  chr8:141231524-141231643
  hypo

SEQ ID NO: 259741 - DNA, 159 bp, Homo sapiens
  chr8:141233423-141233582
  hypo
tttaaagaacagcaataaacaacctgctcgcagtcatactggcagtcattgatcctaggcatcgtaccacacatgaatggatgtttagtaaacttgattggatggatggatgggtagacgggtggcaagtctgaaactcacactcggtgcttttgattc

SEQ ID NO: 259742 - DNA, 213 bp, Homo sapiens
  chr8:141249553-141249766
  hypo
tgcagccaccaggcgctaggaacaaaaaacaagtaagactccggccctgcccgcgagatgagggtggtggagtgagaaggaccaaagtgcaggtgtgcttccctttgctcgggactcactggcacggaggccgcatccacctcctcacggccgtggaggggatgcgtgggaggcgcctggacacctacaccaacacaccgtgcactccgccag

SEQ ID NO: 259743 - DNA, 285 bp, Homo sapiens
  chr8:141265017-141265302
  hypo
cacaggagctcaggggaagacggagagcttgaccaaaatccccatgaaagaaaaaagatacgtggtgtgctaactccagaacacgaggacaaactgagctgcaaaataagcagacatattcctggccggaggtgtgctcgaccatggcacggtcctgcagaactggccaagctccctctggagcacgtctgacagacggcgtttatgtctccatgtttccttaaagaaggatactaacacagagagacagatccaggggacagcgtccttgaaaagtgtttagaa

SEQ ID NO: 259744 - DNA, 135 bp, Homo sapiens
  chr8:141267397-141267532
  hypo
ctggcagctcagaacgcagttgctgcctcttctccacgcagcagtgctggcactggcctgggcctcttctgcgctgagccaacctgtccaccttccttctacttctcctccaatggcactcggaggtgccatcct

SEQ ID NO: 259745 - DNA, 347 bp, Homo sapiens; identical to SEQ ID NO: 212522
  chr8:141268122-141268469
  hypo

SEQ ID NO: 259746 - DNA, 205 bp, Homo sapiens
  chr8:141273172-141273377
  hypo
gtgtccccagtgcccgatacgatggccaccatgtaggaagtgctcagtacgggctgctgaggagtccagcaaaggcaagagcagctggcagccatgaagacagacaggtgagcaccagagggagcaaccactccaaaaaagagcagagaggacgatccctctgctgcccccgccctgcccactgctatcacgggacaccttgcac

SEQ ID NO: 259747 - DNA, 100 bp, Homo sapiens
  chr8:141290061-141290161
  hypo
ctggagcgctggccggagcttgctaagctggagatggagccacgatctcctttatgagctctctcagtgcccacctccagctttcgttgggcggctggtg

SEQ ID NO: 259748 - DNA, 36 bp, Homo sapiens; identical to SEQ ID NO: 212523
  chr8:141343757-141343793
  hypo

SEQ ID NO: 259749 - DNA, 155 bp, Homo sapiens
  chr8:141347684-141347839
  hypo
gactcatccagatgcgcctccctccggctctgccatgcagcacgtgggtgcgggtaccggatccacctgccctgaacctgctgcctcccccaccaaaatgggctgcctaggtgtcagatgggcacgtgatcagcggtgctgtgagagtggctgtg

SEQ ID NO: 259750 - DNA, 77 bp, Homo sapiens
  chr8:141436007-141436084
  hypo
aatgttaaaaccaacgcctgcaaacctggggcaacttcatttcagagccaagatgcacgaggcgatgaaagcgaatg

SEQ ID NO: 259751 - DNA, 198 bp, Homo sapiens
  chr8:141455583-141455781
  hypo
agcacctgggttgtgaactccgagactcggctgccaggagagcaggggaggagggagcccgggccaggctgtccccatggatcctgggagccagtggcggcagaaaaggcccacaacccagggttaaaccagccaccactggatccctgccctgcattttccaagctggacagctacgacttcctgtacttaatacat

SEQ ID NO: 259752 - DNA, 295 bp, Homo sapiens; identical to SEQ ID NO: 212524
  chr8:141458751-141459046
  hypo

SEQ ID NO: 259753 - DNA, 31 bp, Homo sapiens; identical to SEQ ID NO: 67308
  chr8:141466495-141466526
  hypo

SEQ ID NO: 259754 - DNA, 34 bp, Homo sapiens
  chr8:141523825-141523859
  hypo
ctgagccacagctcccggccgcttctttctttta

SEQ ID NO: 259755 - DNA, 76 bp, Homo sapiens
  chr8:141525507-141525583
  hypo
acctcatgtacctacgccacagacagccagagggaaagcgacccagacagcagcccctcctcgacaggcccaccct

SEQ ID NO: 259756 - DNA, 118 bp, Homo sapiens
  chr8:141534528-141534646
  hypo
aatgagaccgagtgcgtcccccgcggctccagactgcatggcatcacagtttacaagtcaggggctgaggagcggaaagaaagcttccaaggctggaggtccacgcctgccttgtgga

SEQ ID NO: 259757 - DNA, 80 bp, Homo sapiens
  chr8:141539851-141539931
  hypo
catccctgaagtaccgcacgcaggaggtggcagcaggcccacaaatctgcatgttaaacaagaaccgccatcccccagac

SEQ ID NO: 259758 - DNA, 501 bp, Homo sapiens
  chr8:141543887-141544388
  hypo
agagtgagactccgtctaaaaaaaaaaaacaacaacaaaaaattacacattagcagtaacattgtagaagtgagagtgtgaacgtgagtaccattttacacacctcctgcggttggagatcctttgaaatgaaagcagcaccagctgctgactgcaggcctctctgccacctctgcctgcctgcccgcctcactgcctgctccacctgccagcctcgcaggcccttctgacaacaacctgtccagcacagtccctgccacctgctctgtgtctagccctgtgccgaggcccctggtgctggtgggcagcggaacgttcgtccctgatgctccaccgcacatgctccggcacccctttcctggcgtgtgactggtggctgtcacaggggcccaggggagtgagggcatctgtctccatgggactgctaaggacacagcagcagtggcagccttgggccataaatagctcaccagagaagcatcccccgttagaaagattttg

SEQ ID NO: 259759 - DNA, 94 bp, Homo sapiens
  chr8:141545610-141545704
  hypo
ggtgggtgattttcgtgtccacagtcgtgcctgctggaatgtttccacttttcccaaccttcggcaacacaggcatctcgttagacacggccag

SEQ ID NO: 259760 - DNA, 110 bp, Homo sapiens
  chr8:141559646-141559756
  hypo
ggctaacttgccaccgtaacacagcagcctttaaaccgcgctcacgctgcctcgcggctgtggcggccccagggcagtgatgcgatgctgtccccgtaaagctgctgagc

SEQ ID NO: 259761 - DNA, 411 bp, Homo sapiens
  chr8:141565895-141566306
  hypo
aacacagtctacaccgcgggcgatagctcagaacctgagaggggtcgcagggcagagacatgccccgcagccacacgttccccgccgccccacacgtaccctgcccccgtagaggatggagggcggctgcagcacccgcccagtcacgtctgtcatctcatctttgaccatgattccaaattcacggacgtatggatctgtgttgaaacttgcacttcgcatctggcaaagggaaacaagaaaacgcacggagtgggtggaggcctcccatctctctagcagctgcgtccgttccaagcatcagaggtttctgtgccagggcaaccggactggattccacagggcagccctgcccgggactgacactcaccaatttgctaatctcttcttgccgatcgggcgccgacctag

SEQ ID NO: 259762 - DNA, 61 bp, Homo sapiens
  chr8:141566686-141566747
  hypo
gtcttcggtggctgcgggcgtgaaagcagctgcaggtgcgaaagacgtctacctgtgggac

SEQ ID NO: 259763 - DNA, 149 bp, Homo sapiens; identical to SEQ ID NO: 212528
  chr8:141568114-141568263
  hypo

SEQ ID NO: 259764 - DNA, 267 bp, Homo sapiens
  chr8:141587942-141588209
  hypo
cggcatgatcactccgctcactgacggtcctgcaggcccctggaggcggggtcaggtccagctcatcctgcacacccagcacggcgtgcggcttgggctgggcggatctctcaagagaaggaggctgttcggtcatgccagtgaggcagtgccctgaggggctacaatgcacacccgtggagtcggctggcagacaatcctggccaccactcaggcctccgccgcccagagagagcatccctggccaccggctcgcagcccccatgc

SEQ ID NO: 259765 - DNA, 404 bp, Homo sapiens
  chr8:141588239-141588643
  hypo
gccgatcttgtgtaaagcagagaaactggacctcgtggctgtggcagcaggatggcaccttgctgcctaattctaacacggggggtcccttccctcctcaaacacacatgaccacgtatttggcagttaattttctttctttgtaaaactgtgataaaatacagataacataaaattgaccatttcaactaagtgttcagttcagcggcattgagtgtgtccatgctgttgtgcgaccatcaccaccctctgtccacaaatgattttcacttccccaaagtgaaactgtacctgtgaggcactaacttcccagccagcccacggagccacctggggaccctgctcgcggagtccctgaatctggtccttcgtttcgagccggcgcaggcactggaaagtgagca

SEQ ID NO: 259766 - DNA, 161 bp, Homo sapiens; identical to SEQ ID NO: 212531
  chr8:141589815-141589976
  hypo

SEQ ID NO: 259767 - DNA, 207 bp, Homo sapiens
  chr8:141594755-141594962
  hypo
aatacacacaacggcgcaggtgggtctcataaattctgctgagtaaaagcagtcgggattgagggtgtgtcactatacagacctggaaactaatctatgtgacacacatcagaatgccgtgactttaggggctgggggtaaccggaagagggtatgaggcaactttctagggtgatcagtatatacatttgtcgaaattcttccagt

SEQ ID NO: 259768 - DNA, 442 bp, Homo sapiens
  chr8:141596788-141597230
  hypo
acagccactcccctgaggaccgactgagcttctctctacgccacaccggagtagaacaaagcacttgccaacacgtggccctgttctcaggtggctccaaccacccagtgagacggctcccaggaaacgtctaggacagagcccgggaatctggccctgtggccaatctcgatttcagggtcgggcacgctcctctcggggaggagagtcactgtccttcggtgactcccagcttacaaggtgctcatgcagttacttaaccgagcctcacaaccataccacaaaggggcacaccgctggctgcaagaaggttttgggctggaacacgagctacttgcaggtgaagcaaagctgctgggccggctccaaaccaggcccctccaccgggcccccaagcagagtccaggcacagacgcagctcgagcccagggctcaggctgac

SEQ ID NO: 259769 - DNA, 343 bp, Homo sapiens
  chr8:141599859-141600202
  hypo
ggcaatggcacagcagccaccgagatccgtgccatcagcacgagccgcagaacaggacggagtgatggctcagtgagtacagaccagagagtagatgctatcaagctgtactctcctgctaaaatcaggacacgagggtgacaactcacctgttgtctacacaagcaagcctcccttatggccacccaagttgacgctaaacacagtcatggcagcttttttggtgaaatggacagagacggtctcagaatgtgtgctgggaatgcagtcggaacatctgctcctgtcagccggagtgcagacaactgtatgctgtctcccatgccaggcccgggccaccaat

SEQ ID NO: 259770 - DNA, 99 bp, Homo sapiens
  chr8:141600232-141600331
  hypo
acccagcccacgttcacagagacgcgtctggcccaggcgtcacagctgtgcagggatggctggagctgggtccccagctgatgcgttctaccccctccc

SEQ ID NO: 259771 - DNA, 218 bp, Homo sapiens
  chr8:141603917-141604135
  hypo
ggattcacacacagcactcacggctaccagagcacacaagccttgccaccaagccacgctgccttgaatcgataacaactatgcttaaatcaaacaaaaggagctggaggaaccaaatgcgtgacaatccatcctcaccaggttcactcagttccatctgcgagcacaggaatacctgcccaccagtgaggtctgccggtgccaagccctgcactaag

SEQ ID NO: 259772 - DNA, 177 bp, Homo sapiens; identical to SEQ ID NO: 212538
  chr8:141613218-141613395
  hypo

SEQ ID NO: 259773 - DNA, 86 bp, Homo sapiens
  chr8:141623740-141623826
  hypo
aatactggcagaatcggcgacaaatggaactctatccacaagaccactgcagaaattcgggtctggtttctatcacactataaaga

SEQ ID NO: 259774 - DNA, 123 bp, Homo sapiens
  chr8:141624846-141624969
  hypo
cagtctcctcacttccaaaacgggaggatggcaggacccacagagtcatgaccgcctaaagccctttgcaagcacctggcactcagcattcgccgtgccctcggtaactgctgctgctgctgt

SEQ ID NO: 259775 - DNA, 49 bp, Homo sapiens
  chr8:141633674-141633723
  hypo
agggctggtgggagcggagggtgccgtcttgctgcgtgccccctgatgt

SEQ ID NO: 259776 - DNA, 133 bp, Homo sapiens
  chr8:141634057-141634190
  hypo
gaaccaagatgatcccggggcaaggaggtcacagtgggtgatggagacaggacaggagagcccaccatagggcgagatgcacggggagccaggaaggtgcagggcgagcgcgatggaccgtcccctcctgggt

SEQ ID NO: 259777 - DNA, 223 bp, Homo sapiens
  chr8:141634459-141634682
  hypo
gggcacagagccggcgtgcgtggcagtgaccacctcaccctggacagggatggacagtggcagaacaaacccaaacttggagagcctgcatccaaacacccctccagctccggccaccaatctgcaagaaagacactcggaacagagggcacgccgggctacacccaggagatgcagctgcgggagacggcagcactgagcagccagcgtccccaactaacag

SEQ ID NO: 259778 - DNA, 152 bp, Homo sapiens; identical to SEQ ID NO: 212539
  chr8:141636160-141636312
  hypo

SEQ ID NO: 259779 - DNA, 219 bp, Homo sapiens
  chr8:141704910-141705129
  hypo
aaggaccataaagcacgtgtgctcataaccagagacctagctgccaccatcaccacttgacagtgtcacgagagcttctacaaccgacacacactaccttccaactgacagagggtcagggtggccctcacactacaccgcaccaggcgttattcccagtgcaccaagctttccatgcggctgtctaaaaatctgcatctccagcgcagaccacctcct

SEQ ID NO: 259780 - DNA, 42 bp, Homo sapiens; identical to SEQ ID NO: 212542
  chr8:141738005-141738047
  hypo

SEQ ID NO: 259781 - DNA, 91 bp, Homo sapiens; identical to SEQ ID NO: 212543
  chr8:141741358-141741449
  hypo

SEQ ID NO: 259782 - DNA, 176 bp, Homo sapiens
  chr8:141745321-141745497
  hypo
ccaggccctctctcccgccaactcctacctgagctgagctttaagttcagtaaacctgggccgcctgctggggtcataggcccagcatttcgtcataaggctgtagagggtaggaggacaatttggaggcattggtaatctttccccattttcaattcgaccgattacatcattgt

SEQ ID NO: 259783 - DNA, 54 bp, Homo sapiens
  chr8:142112482-142112536
  hypo
gatggaacactcacggccgtgatactctgatgacccatccgtgtccctgtgaac

SEQ ID NO: 259784 - DNA, 42 bp, Homo sapiens; identical to SEQ ID NO: 226542
  chr8:142141062-142141104
  hypo

SEQ ID NO: 259785 - DNA, 50 bp, Homo sapiens
  chr8:142149852-142149902
  hypo
tgccactgttcccagtgtgccggcctggcgtgggcatgcctggtcctgct

SEQ ID NO: 259786 - DNA, 210 bp, Homo sapiens; identical to SEQ ID NO: 212548
  chr8:142157057-142157267
  hypo

SEQ ID NO: 259787 - DNA, 151 bp, Homo sapiens
  chr8:142165998-142166149
  hypo
tccaagtccacggacgataacgtggacattcctgatgtccccctcctggcagcccagacgtttattcagaggtaacgggaaacattaatggtatgaatttcagaccgtctttgttcagattctgtatttgccacttcgagtatcttttcca

SEQ ID NO: 259788 - DNA, 148 bp, Homo sapiens
  chr8:142176329-142176477
  hypo
agaaaagagcctcccggaagtcctcgcacctgcatgtcacccacaggcgcatggtggtcagcatgcccaacctgcaggacattgccatgcctgagctggcacccaggaactcctcgctccggctgacggacaccgcaggctgtagggg

SEQ ID NO: 259789 - DNA, 53 bp, Homo sapiens; identical to SEQ ID NO: 212549
  chr8:142178200-142178253
  hypo

SEQ ID NO: 259790 - DNA, 234 bp, Homo sapiens
  chr8:142186981-142187215
  hypo
agagtaagtttgtcggacaccatcttgacagaagcattgaagatgtggtctgtgtgacccagcgagaggcctcacggtgctacggaagagcatgatgagaaaacgcagggcggtctgggcaggtgtgggtgccccactgcccgctccagactggcgacatcccagagagtggggcctcccgggggcggacggtgctggtgctgtccacacccgcaggccggagttgggtgtttt

SEQ ID NO: 259791 - DNA, 76 bp, Homo sapiens
  chr8:142188438-142188514
  hypo
tcgcacaccttatccggcatctttccttccttcactgcacagtgcaccttggagccccttgcgcatccaattgagg

SEQ ID NO: 259792 - DNA, 235 bp, Homo sapiens
  chr8:142190007-142190242
  hypo
cgcaggaggtcgaggcgcccgcaggggctggcaggagggaccgcagaacaggctggtcccaggggcctccgggcagcaatgaggagccgtgtcagagcaggctgtgcccgggggcctccaggcaggaggccgctttaggttttgcctggaaacatgggttggattggatagcaagaggagcattaggatatcctgaggagcagtggttttgaacggggggcgatgttgcaccccc

SEQ ID NO: 259793 - DNA, 600 bp, Homo sapiens
  chr8:142190625-142191225
  hypo
cctggccactcactcgcacaccaggtgacaaccaggaaaggaggccgagggtgcatggctttctttcagtgccccgggtccaagagaccttcgtcttcacaaattaggaagttttacctgcaagctgatattctgcagaaatcagagtgcgtgaggccgttgcatcgcgtctgtttccttgaggctgcaacagtaacactccaagtgtcttgtctttcagtgcccatgacgcttccggagacaaccctggaaacactgaagcataaaatcaacccctcggcgggggaggcgttcccacaagcggtggacgtgctgctctacactccaggtaaggcccctctgcccgcgcctcgctgccagttttcagccaatctgatgcgcttaggtttgggttcagggtcagccctgaagtgaaaggggagccagtgtcacgggataagtggggacaaggtgcctgttgctttctgaggtgaagtgctgagtgacaggtgtgcagctggcacgaccgctccacggactcagcctcacggtgactggagccagagagcccacgggagatggaattggggccagcacttgagctcccgccccagggctgcc

SEQ ID NO: 259794 - DNA, 514 bp, Homo sapiens
  chr8:142202626-142203140
  hypo
ggagcagctgtgggcggcctgtgcaggacgcagcgaggtttacatctggagcctgaaggacctggcccagcccccgcagagggtgcccctcgaggactgctctgagatcaactgcatgatccgggtgaagaagcaggtagggtggagggcccgccatccccagcatccccggcaggtctcgcttgccctggccgcatccccatgctcccgagagccagccgcacgccctcgtgccctcctgccttcgcctctcagggttcccctcctaacaggcacgtgcagggttggtgccaacgggcccacaggtcaccatgtgctggtttcatggtgtggtccaagcactccacagcgcattcccccaaactggatggcttcaaatgacagaacttaattttctcacagttctcgacgctggaggtccaaaaccaaggtgtcggcagagccgcttccctcgggggctcggggggagcgtgcactccaggcccttctctcccccacccgctcatgtggccgc

SEQ ID NO: 259795 - DNA, 241 bp, Homo sapiens; identical to SEQ ID NO: 212552
  chr8:142203890-142204131
  hypo

SEQ ID NO: 259796 - DNA, 318 bp, Homo sapiens
  chr8:142221150-142221468
  hypo
aggcatggagttccgacaggttccagcacgcatgtccccttcgcaagcgggggaggccctcgcacatccacacacccgaggtagccttgcggcgggacttgggaggcagggcccgctgggagctctgctctcaggaatccccagcaaatggtttagagacgaatcaaagtgcagtgaaagtcaacgtttccttccccctgacgttgggagcggtctggaggggcaacctggcctcctaggagagtccttcagacgggacgagcggggtcacatggctgggcgcagacacactcacacgcgcacgcaggagctcgtctg

SEQ ID NO: 259797 - DNA, 86 bp, Homo sapiens; identical to SEQ ID NO: 212554
  chr8:142226699-142226785
  hypo

SEQ ID NO: 259798 - DNA, 328 bp, Homo sapiens
  chr8:142227281-142227609
  hypo
agggggcctgttccggaaatgagacgggggctgacgagggcatctgctgggccctccaggccaggagcgtatttcccatgggaactgctggccggctgctcattctaagagcggtgacaggaaagtcccatccaggaggagagcccagcccaagtcggttgctatctgtaaagcatttccatgcctcccagaccacgaatgttctgtgacgtgactctgccaccgcggcaagaggcggagggttctgtgtgtctcccggtccccagtctgggctggtctggacttgcagaagtgacgctcccgcagcctctgccgtggccctctcgga

SEQ ID NO: 259799 - DNA, 511 bp, Homo sapiens; identical to SEQ ID NO: 212555
  chr8:142228300-142228811
  hypo

SEQ ID NO: 259800 - DNA, 969 bp, Homo sapiens; identical to SEQ ID NO: 212556
  chr8:142235170-142236139
  hypo

SEQ ID NO: 259801 - DNA, 127 bp, Homo sapiens; identical to SEQ ID NO: 212557
  chr8:142236375-142236502
  hypo

SEQ ID NO: 259802 - DNA, 71 bp, Homo sapiens
  chr8:142236532-142236603
  hypo
ccaagcatctacacccaacgacagctgtcgctgctgaacctctcggtgggcctggcgccaccccaggtgct

SEQ ID NO: 259803 - DNA, 1235 bp, Homo sapiens
  chr8:142240166-142241401
  hypo
agtctacttactctcggtaaatgaattacatgtcagaggccgcattagactattttccacaacacagccggcccggtgagtagactcttggaagtaggtttcccagaagctgaagaagcacaggcctctgtttctgcatcaccgactcaaataagacccactgtggctgtcagggctgggccctggaggtctttaaagttaaaggtgctgtcagagcaccccatctcaacaagggagggccgctcctgaagtccccgcccttccatcagaaagcctctcaggacagaaggcagagagggaagcggccgcaaagacccatgggtgccgagggttcccagcacggccaacagggccctgcacactcacaggacagtccttgtattggagacaaacagctgtgccggagaggggtcctgagacagcagctccggtggccacgtgaaggtctgaagccccaagcgtgcccagctccaggatggggtaagcagcgggggaggtagggccctggtggctggggggccgccaggagcagcgcccaggccagtgctgcctctgccgcccggccttgctgcccgagcgcacgctgtgtctggggacagtccggccgctgccccggcacctatacctgacactatcttcctgtggaattagccacctgaaaagtctcctgcccagggaagtgcaatgctgacactgtccattttctgaagaaatgaaaagaagagaaatgctgccagagagcatgtggcacaggcgtggtgagtgcattctgccagccaaattgggaacgtggcactgatgacggccccaacgacgcggaaccaggcctgccccacccggggatccaggaatgcggatgctggggcagagcacctcctgctccggggacgctgtgctggcggcggcaacagcgtgtgacacccagtgaggcatttcccccaccccgcccggcctctctcttctcccctgtaaaatggagggaaagaccagcacctgacaggccctctctgcaaagaacactagtgtgggagaagccacattcggtcacgtttctagggcttaaggtcaccccggaagagaaaggacctggcaggtcccaggatgggtgcggagggtgggatgaagggcacagtgtgggaaggagcgccggagacagggcagggacagccaggccgggaaggccttggctctgggctgagagtgtggcccctcgcgccagaggcagcagggacccc

SEQ ID NO: 259804 - DNA, 337 bp, Homo sapiens
  chr8:142242734-142243071
  hypo
ctcacaagctgcaacgggaacacagacattcagtggctcccaggtgagcgctcaccagctgcaacgggaacacagacattcagtggctcaacacagacattcagtggctcccaggtgagcactcacaagctgcaacgggaacacacacactcagtggctcccaggtgagcgctcgcgagctgcaacgggaacacacgcactcaatggctcccgggtgaacgctcacgaccagcttgggctggactggcgtctcctttcagtggttgccactttccatggtgtagatgctaccaccccgcccaatctcaagctgctgaggtgacgtcgctgaacagga

SEQ ID NO: 259805 - DNA, 145 bp, Homo sapiens
  chr8:142243840-142243985
  hypo
tatgacacttctgcccaagacggcaggcccctgggaaacggctatggagcgtggcacccgttttgctgtgcttttcccgttttgctggtgcagggccttggctaggcaggtccagcaggtctgcggctggacctgactctgggct

SEQ ID NO: 259806 - DNA, 116 bp, Homo sapiens
  chr8:142244185-142244301
  hypo
atcgtcgccaacatcggggcctgcatcgctcacctgagggagtggggactgttcttctctatgtccactgaggcctaattcacatctcgtccctcggaaacctcagccctagcctg

SEQ ID NO: 259807 - DNA, 77 bp, Homo sapiens
  chr8:142247722-142247799
  hypo
accctcaccccaaagccacacggtgtccctcaccgccgccctccatgccttccccgaagtggcgctccacgatccct

SEQ ID NO: 259808 - DNA, 239 bp, Homo sapiens
  chr8:142248306-142248545
  hypo
caagcctggacctgcgtcaccatcaagctataagtctccagtcagcagggaatccaatttttagctttgtaaagtcgcccctttttttttcacatttttattgtgatcaaatatacacaacatcgaattgacctttttaatccctgtgagcgcacagctcaggggcggtgagcgcacttagactgccgtgcaaccatcaccactcaccccagagcgacgccatcttcccagactgaaac

SEQ ID NO: 259809 - DNA, 191 bp, Homo sapiens
  chr8:142252917-142253108
  hypo
tcctgggtttatacaaacaccgcgggaagctgaatgtggacctgaatgtgtatcccaggccacgcaatgtggtaggaggctatagaatctctcacaagaggcgacgggattttcaaacctaagccagcccgtgtgcagcggggagccggcagggcgaggacccatctaccgggtggtgacagagagctcca

SEQ ID NO: 259810 - DNA, 72 bp, Homo sapiens
  chr8:142260822-142260894
  hypo
tatgacgtgcggtgcggtaggtgtgttaaatccattttcgactcaaggtattttcaacgatgggtttactgg

SEQ ID NO: 259811 - DNA, 142 bp, Homo sapiens; identical to SEQ ID NO: 212561
  chr8:142262365-142262507
  hypo

SEQ ID NO: 259812 - DNA, 600 bp, Homo sapiens; identical to SEQ ID NO: 212562
  chr8:142262687-142263287
  hypo

SEQ ID NO: 259813 - DNA, 141 bp, Homo sapiens; identical to SEQ ID NO: 212563
  chr8:142263347-142263488
  hypo

SEQ ID NO: 259814 - DNA, 367 bp, Homo sapiens; identical to SEQ ID NO: 212564
  chr8:142264058-142264425
  hypo

SEQ ID NO: 259815 - DNA, 309 bp, Homo sapiens; identical to SEQ ID NO: 212565
  chr8:142277203-142277512
  hypo

SEQ ID NO: 259816 - DNA, 320 bp, Homo sapiens
  chr8:142277817-142278137
  hypo
aagatactccacactcgaggtcctcaaggggttgtagctgtggtgccaccacacacctatgagaatggccaaagcttagggcacggacaacaccaaaagcaggtgaggatgtggggcagcaggaacgctcgttcacggttggcagaaatgtaaaatgcagcaaccacttcgaaagacggtttgcccattttcacaaaaccagacatactttcaaccatgccacccagcaaccaagttccttggtatttaccaaacagagctgagaacttatgtccacacaaaaacctgtgctcagatgtgagagccgctttattcgtcat

SEQ ID NO: 259817 - DNA, 117 bp, Homo sapiens
  chr8:142278840-142278957
  hypo
ggggcatccatgctgactgccgcgtacttggggaagctttctgtgccacctgcttacacctgaacaaagtgtcctatcgtggaggcgcccatctccgggtgtgctatgcatcacctg

SEQ ID NO: 259818 - DNA, 267 bp, Homo sapiens
  chr8:142279182-142279449
  hypo
gcagccactcctgagtcatacgctgtatagggagcgccacgagctccacctcacccgacagctccaggctgcgctgtcaccctggcggggcagctactacgtccccgctttcaccctcaagagtgtcccagttagaacaccccagcacttcagagatgaatgatctaaagcttaattgtgccttaagtcttctgataaccgtctttgtgcattttgtgccacaagtcagggcacttcagaaaccgaaaaggacgcacagcagaccac

SEQ ID NO: 259819 - DNA, 155 bp, Homo sapiens; identical to SEQ ID NO: 212567
  chr8:142280196-142280351
  hypo

SEQ ID NO: 259820 - DNA, 200 bp, Homo sapiens
  chr8:142283871-142284071
  hypo
tgaacgtcgtgctacgaaagtgaaaaatggaaatggctaactgtccaatgatacggagctctttcagttatggtgtgcactcaggacacacgatgtccgtgtgtttgaagggaagtatgacggatatttcagcaatgttaatgtcaaagcttgtctttaaaaaacgtaaagtttgggccaggcgtggtggctcacgcctg

SEQ ID NO: 259821 - DNA, 336 bp, Homo sapiens
  chr8:142290791-142291127
  hypo
atgggggtttttgttcgtgtaatgcgacagcgtgcagctccacacacacaggaagcaagctgtcaggacagagcctgactcgcacaggtaactggaatcctccccaacaggtgggtgtgcagagagcaggtccctgtccgggcacctcccgaaggactgtcttagcacgaccttgcttctcccaggggagggaaaggaaaagggcctcgtgaggtctccgcaagaccgggctgtgcgtcctacaccaggctgccttctcctgcacattttcctactcaaagacaacggagtccaggcatcctctcagcatcgcacgagttcccctggtgcagaaaa

SEQ ID NO: 259822 - DNA, 193 bp, Homo sapiens
  chr8:142292547-142292740
  hypo
ttctgagcctctgtctccatcgctgccctccctccaggccgccgctcagggcacgccgcctccatcgctgccctctctccaggccaccactcagggcgcgctgcgctcagctcacaccaccccgtgcacagctcgtggatgcggtcctcccttttccatgaactctgcactcgcctcccctttgcacttcaca

SEQ ID NO: 259823 - DNA, 481 bp, Homo sapiens
  chr8:142294981-142295462
  hypo
ccctgtccctgccacggctgacatttaggagctctgtcccaagcgtccaccgtggcatgcagagccgccccacaccccgactccctggggcctcggccccccagcaaggccggcttgacaggaaccagtagccagcagaggcctgagcagaacagggtccggagctggcagtggggctcggggccactggttcccaagcagacttcccccacctcacaggcagcttctcctctccagcggcccagcgggatccagcacggactgagggcgggtgaaacgccagctcctgccttcagcacgtggtcactgccctgccctgcctgcaacagcagccaccagagagcgtccgctgggaaccacaacgcgcccgcaccccagcggccatcctcgggtcacgcagcctcatggcttccttcactgccgtggctgagattcctcggcctgcgccatgacggggcctcgcctacgttggaagataggt

SEQ ID NO: 259824 - DNA, 111 bp, Homo sapiens; identical to SEQ ID NO: 212569
  chr8:142295926-142296037
  hypo

SEQ ID NO: 259825 - DNA, 184 bp, Homo sapiens
  chr8:142296404-142296588
  hypo
cctccaccctcaccaccctgcgtgagacatgggatctgtgccctcaggaaactcagtccgagaggtggcctcacatgcgcggttgttacaagcagagccaggtaagcgcagaagcctgccaatgtatcttcctggtccctttcggggcaccctttacccacacgccctacttaaaccacttgaa

SEQ ID NO: 259826 - DNA, 83 bp, Homo sapiens
  chr8:142297569-142297652
  hypo
tcgttaacccttcacggcaagtctggagtttcccatttccatggccaggacgctgggcttctggcctccttggctgactggac

SEQ ID NO: 259827 - DNA, 31 bp, Homo sapiens; identical to SEQ ID NO: 212570
  chr8:142304055-142304086
  hypo

SEQ ID NO: 259828 - DNA, 144 bp, Homo sapiens; identical to SEQ ID NO: 212571
  chr8:142305925-142306069
  hypo

SEQ ID NO: 259829 - DNA, 83 bp, Homo sapiens
  chr8:142310045-142310128
  hypo
ctggcctgtcttcctggtcccgttcttcactgtttaaaccgcaggattcctagaacacgaccgtggaactgctcttctcctca

SEQ ID NO: 259830 - DNA, 222 bp, Homo sapiens; identical to SEQ ID NO: 212572
  chr8:142312689-142312911
  hypo

SEQ ID NO: 259831 - DNA, 226 bp, Homo sapiens
  chr8:142332802-142333028
  hypo
agcagggacttctgcggtcgcagctgggctgggggcccctagccgtggggggtctgggcctttgggataccctccttagtctccagagaacatgggtttgaggacctgggcttgaccctcctgggtctccaggcaaagcctcagccccaccagcttcgagggtgagggcaggtgcacagccaccgtgggaggcaggcatgtccagggagcccggtctgtgactggg

SEQ ID NO: 259832 - DNA, 389 bp, Homo sapiens; identical to SEQ ID NO: 212575
  chr8:142349759-142350148
  hypo

SEQ ID NO: 259833 - DNA, 184 bp, Homo sapiens
  chr8:142359675-142359859
  hypo
acacatgaatgcctgcgtacatgtagacacacagacacgcaggcatgcataacatgtgcctacacacagatccacacacactcacttaattctcgcaaccttgccttaaggcagagggtgtccgcaatctccccttgacagaggaggaaactgaggcttaggaaagacacgtaacttgctgagg

SEQ ID NO: 259834 - DNA, 992 bp, Homo sapiens
  chr8:142367163-142368155
  hypo
ctgctgagggtcacggccacgtggtagaccacgaggctcgtgtggtgtggcatgtcgggccacagcgccacggccacttggcgggcgtggaagggcgtgaagcagacgagaaagatgatgagcaccgtgagcaggagctgcatggcccgcacgcggcgctggcgaccctggtggagcagacccggccgcgacagtgcacacatgatgcggccggtaaacacgctgatgaccagcaggggcagcaggaactccaggacagtcagcgcaaagacacggcagcagggccggctgcctgtcacgcccagcaccgacagggtgacggcaccggcggccagccacacgaaggcgcacacggccctggcacaggcaggctggcggcagcggcgggagccttcgggccgcacgatggccaggtagcggtccacgcagatgcaggtgaggaagaggatggagcagtgcatgttgaggaagtaaccgaggacgtgcgggaaggcacagcgcaggcagcccctggcgccgtagtacacagcgaagcgcgtgggcagggacagccctaccagtagatcggtcaccaccaggttgatggtgtagatgactgagggtgtcttggcccgggtgcggcagcagaagacgtacagcgccagcccgttgagcaccagccctgccaggaagatggctccgtgcaccgccatcagcgccagccacaggcctgggaaggtgccatgcagctcctcgtccagccgggcaaacaggtggaacaggggcacctccagcccgctggcattggtccgcactgttgtcactgcggtggcattggggactgccccggccgagggccccgctggagacacagagggcatgacggcagccagcacaccccaggcctggaagcaaggagaccaggtcaccccaggcgccagcctggccttaagccctgccctgaggcccagaactcagctggcccgtctgcccctgcacgcccagcatccccc

SEQ ID NO: 259835 - DNA, 188 bp, Homo sapiens; identical to SEQ ID NO: 212578
  chr8:142374615-142374803
  hypo

SEQ ID NO: 259836 - DNA, 174 bp, Homo sapiens
  chr8:142383101-142383275
  hypo
aaggaccccacagcccgggaaccccaggggagagagtgtgaggtctaagatccctcctgggcccaggcgcctgcccggggtggcccaggccagccaccacaaactggccaggctgggctgagctgcaactccctctagagttggcccagtccacccaggtcaagaacaggccac

SEQ ID NO: 259837 - DNA, 298 bp, Homo sapiens
  chr8:142435197-142435495
  hypo
ctatgacaaaacgccgctggagaaggatggcatcaccgttgtggtgaggcgcgcgccacggggaccctagtcactgctgccaccgggggagggtggggcggggggctccgggcctgcgcagagggtttggtgcccctcctgtggcagccctgggcatgtctgtgcctgggccacgtgtgtgtctgggtacatcaagggaaggccagggtgttgggccgtgtgacctcaagaaagtcacccttgcgcacccgtctttctgtctctagggtgggccagcacggttcgccaggcaggggtg

SEQ ID NO: 259838 - DNA, 479 bp, Homo sapiens
  chr8:142435699-142436178
  hypo
gggcggttctgctgcgatatccttgggggggtgggccacagcagctgcaggcccagagccagccccaggggggtccacccccggcccggtggacgactgcccccctggtgcaggcctgcccagctgcgcctgggcctcagtctcctcagtgcggagcacccctcagtcactgcttttcatcccaggactctgcttttggctggggttgcagttttgtgacctcagcttggcggtttggaatggtggcagcgctggcggtttggggtcagacaggccttgggctgcgtcccgcctctgccctccccagccttgcgaccctgcaggtcactccgagccttgggttcctcacctcaaagcgaggctgcttggaagaatgggaggcaaaggcatgtccccgcttctcgcacggggtgcgcccacaccctccctccccttccacagcagcgggagggattggggtcagacgtaagtagccgtga

SEQ ID NO: 259839 - DNA, 38 bp, Homo sapiens; identical to SEQ ID NO: 212581
  chr8:142437114-142437152
  hypo

SEQ ID NO: 259840 - DNA, 273 bp, Homo sapiens
  chr8:142439113-142439386
  hypo
gctgtgtggctccccgcacctgaggctgcgctggtcaggacaggttgggccatgctgcggaaacagccaggcctgaaccccaacgactcagaacagcacgggcgtttcttgcccctgttgcgtgtctgttggtgggggccctacccggaggcgtggctgagggctgcgccttccccagtgtgccggctgctgggcgaggaaacgagcacggtggagccacacggggcacctgcagctttgctgggcagagactcctcgcgctactgctgctcc

SEQ ID NO: 259841 - DNA, 80 bp, Homo sapiens
  chr8:142440392-142440472
  hypo
cgctgtaaggacccggtggcggggacagggtgagcacacagtccaggtccccgctgtaaggacccggtggcggggacagg

SEQ ID NO: 259842 - DNA, 151 bp, Homo sapiens
  chr8:142452335-142452486
  hypo
gacatggagaaacccgcggcactggccctcgcttgtgagtgacggagaaacccgcggcactggccctcgcttgtgagtgacggagaaacccgcggcactggcccttgcttgtgagtgacggagaaacccacggcaccggccctcgcttgtg

SEQ ID NO: 259843 - DNA, 31 bp, Homo sapiens
  chr8:142493073-142493104
  hypo
cgttctgctggctccgcgtccttgccaatgt

SEQ ID NO: 259844 - DNA, 239 bp, Homo sapiens; identical to SEQ ID NO: 212584
  chr8:142537302-142537541
  hypo

SEQ ID NO: 259845 - DNA, 38 bp, Homo sapiens; identical to SEQ ID NO: 212585
  chr8:142541546-142541584
  hypo

SEQ ID NO: 259846 - DNA, 148 bp, Homo sapiens
  chr8:142544218-142544366
  hypo
gtgtctcttgctgttttccccgatggtgcaaaagcaatgaccagtattgctgcggatctgcaagcaccgatctccgcagtggtcccaatgctgcttgaaggcgggcgtgggttctgccgtgccacacgcttgcaaaactcccaagccc

SEQ ID NO: 259847 - DNA, 96 bp, Homo sapiens
  chr8:142559813-142559909
  hypo
gggtcgctgggcggcgggcctcttgtctccgcaggcagctcagcccagcccagcagtcagggtcccagcacccgtgtaccccgcagctgccactga

SEQ ID NO: 259848 - DNA, 173 bp, Homo sapiens
  chr8:142560198-142560371
  hypo
ccagggctccacgtcgtctctcctgcatgtgctcagtgctgggtgggccactcccagctggaacccatgtcctgagccacccttcacagtcaggcccgtcagctccccacgggcccagagctgggcctgtatctgccaagcacggtgatccagtgggtcggggtggacatcag

SEQ ID NO: 259849 - DNA, 206 bp, Homo sapiens
  chr8:142590894-142591100
  hypo
tgcctgggggagccaccagccgggagcgcccctcggctgacaacactgtgatgggactgagatggggcggaacctcgagagtcaggagtcagggtccccagggcagagctgttgcgactaacagcgaaaagaccgaaggaccctccacccaaagccccgcggaggagccagagacacagagccgcggtggggctgggagcctcagg

SEQ ID NO: 259850 - DNA, 83 bp, Homo sapiens
  chr8:142593602-142593685
  hypo
ggtgaagcatcacccggtaccagccgcctcgctagctcttgccatagcagcagcgtgaacaagcgtcccgccatttagtggct

SEQ ID NO: 259851 - DNA, 452 bp, Homo sapiens
  chr8:142630170-142630622
  hypo
ccgagggtggtgggcgccccggagcgctggtggggattgggcaaagacgtcaacaccagggctgtggaaggaggcgaggggccttcaggtgccgagggtggtgcgcaccccgggatgctggtggggattgggcaaagacgtcaacaccagggctgtggaaggaggcgagggccttcaggtgccgagggtggtgggcgccccggagcgctggtggggattgggcaaagacgtcaacaccagggctgtggaaggaggcgaggggccttcaggtgccgagggtggtgggcgccccggagcgctggtggggattgggcaaagacgtcaacaccagggctgtggaaggaggcgaggggccttcaggtgccgagggtggtgcgcacccagggatgctggtggggattgggcaaagacgtcaactccagggctgtggaaggaggcgagggccttcaggt

SEQ ID NO: 259852 - DNA, 119 bp, Homo sapiens
  chr8:142734866-142734985
  hypo
ctgggatcccggtacgggatcctccctgtcaccctgctcctttgcacccactgatcatcaatggtacctctgttcatctcggggctccgtgctgtaagctcctccgccaccggcagcca

SEQ ID NO: 259853 - DNA, 66 bp, Homo sapiens
  chr8:142744451-142744517
  hypo
taagctgtggatctgtgttccgagagtgacagctcaagctgccacggggcctcatgggtatctgga

SEQ ID NO: 259854 - DNA, 184 bp, Homo sapiens
  chr8:142863058-142863242
  hypo
atgagcaaacattaggggagcgctgctgtgtaccggccatgagctgagcctggcacggcatggtgaggaagccggcatggctcctgccctggcagggtggaagtccagcggggacagtggtaaagcaggtgagcgaggatgtggttgtgcagttgctcatggcgatagcagcatcaaaagagat

SEQ ID NO: 259855 - DNA, 368 bp, Homo sapiens
  chr8:142880971-142881339
  hypo
cagaggaggacctgcggccacccctccttgcctggccatcctccttgccatgtcacccctcaacgccaacccgtgcatgtgggggtgcatgaccagctgacatgggagtgtgggtcagccccagggccaagggggaagtgggtgagccaagatcccggagcatgacaagggccctggcagctgattggcaggggagtgcgctgggcaggccgtggttctcactcttcactgcggctggagggtctgggtgggaaggtgggtacagggagcaggcatgtcggactatgaatgcggagtgggaaacacagaacgactcgttgtggggagactagggatggacggggtccgctggtggagggctggaccag

SEQ ID NO: 259856 - DNA, 207 bp, Homo sapiens
  chr8:142898503-142898710
  hypo
atcaatatttatcaattcttcggcggctcagaatgcgtgctggggattcaatcaatttagcggcaatctgagcgcggcattgcattttgagcaacttcaatatgtctgccggtgtttgggggcttgcttccattaccaattcatgaagcgtctgctggaattagtaaatccctttcatttacttacgtaggagaaaatgtttaatag

SEQ ID NO: 259857 - DNA, 194 bp, Homo sapiens
  chr8:142984445-142984639
  hypo
caggtccgctctatcgcaggccgggcacgctttgctcagaggcccacactgcagaagtccagtctcagcagactgtcaccaccgcccatcgccaccctgggagagtgaaggccgtcgtaggcaggagacaaactgctggatgagctgagtgccagagaaccttgatgcgcaaacaaaggcgcggctgggtctgg

SEQ ID NO: 259858 - DNA, 263 bp, Homo sapiens
  chr8:143022236-143022499
  hypo
aaccctggaatagacgtcgaagcagatggcaggagagagcccggagcagccagcgagagcctggcttggcccgaatccatctgtcctgcttcaagcatcttgcccgctggccacacattcatagtttcagccacatcagcattttgcaaaatgccagctccaagcaggggaccctcgagggctgtcgtggctgccaactgttggattttgacacatttcgtccagtgtgggcacaccggagcttcgtccgcacgcagaggatg

SEQ ID NO: 259859 - DNA, 261 bp, Homo sapiens
  chr8:143026585-143026846
  hypo
tttgctgcgtggcccgtggcacgtcctgcgtacaatctctgggcctacagatttcccgcaagtacagtaagggcgttgaacccaatgacctccaaaggcccttcccaaatctgtgacatttcatgagtctataatttatgagtgcctctgaggaggagtcctagcacggcaagggtgagaaaacctgccgtggtgagcagaggtgagcagcgactgggggcttggatacagattcagggaagggcacgtgcatgtgtgttc

SEQ ID NO: 259860 - DNA, 326 bp, Homo sapiens
  chr8:143054764-143055090
  hypo
aagagactgtacttgcctcacgtgtgcctgggctcacggtgcctgcgctcacgggtgcctgccctcacggtgcctgcgttcacgggtgcctgccctcacgggtgcctgccctcacggtgcctgcgctcacgggtgcctgcgctcacggtgcctgggctcacggtgcctgcgctcacgggtgcctgcgctcacggtgcctgcgctcacgggtgcctgcgctcacggtgcctgggctcacggtgcctgcgctcacgggtgcctgccctcacgagcctgcgctcacgggtgcctgtgcttacaggtgcgcaccaccccccacaccctct

SEQ ID NO: 259861 - DNA, 409 bp, Homo sapiens
  chr8:143088311-143088720
  hypo
tggcgagctgtctccgtgcagtaatgaggacggtgaaaccactcatgaacagggatgctatcacaacagaatctgtcatgacaggcccttggagacagtgtgccgattaacaggaggggagtggggaagaagtcaggccatccacagaggactgtaagctactgaatgagaaaggccgctgcccaccgcagcgtgtacgccgttttctacatttacggagagactcaggtgtgtgcacactgtgtgtccagaagggctgagggctacagagcagcctggaagaagcacatcgaaatgagcagagcccacacccatcctcccggggaccatggactgccaccacctccctgcggacagccctgggatgcagaccccagccaccaggccggctgcacggaccgcagggtgc

SEQ ID NO: 259862 - DNA, 329 bp, Homo sapiens
  chr8:143089004-143089333
  hypo
aaagtcccctcgagcgcctcagggtcggcttcccaggccttcgcagcccgtgtgaagctagagcgtctgggtgccctggaccgccacccatgccatcctcagtgaaggagctgggctcagacaggatgcccaagagaagaatgacctgaaatgacatctccgctgatgcccagctcagtgtgcagaggctattgtctccccgtccacccacccctgaggaagccagcctgtagctatcccctcaggcccttccctgacctgctgggctctgctgttagcccctgagcagccaccactcgcacctggacacaccgcgcccactgcacaga

SEQ ID NO: 259863 - DNA, 125 bp, Homo sapiens
  chr8:143090352-143090477
  hypo
ttcactccacgagcgtccagggagccgcgctctgtgccagcctcgaggggcatccgggtgctgcctcccgatgtttgcatctctcagaattcacaagtggaaatgccaacgcgagtgatgggatg

SEQ ID NO: 259864 - DNA, 563 bp, Homo sapiens; identical to SEQ ID NO: 212591
  chr8:143152592-143153155
  hypo

SEQ ID NO: 259865 - DNA, 441 bp, Homo sapiens
  chr8:143171102-143171543
  hypo
aggcccacaagcacaggcctcgggccagatcacacgacacccactcggaaactggagtcaacagagagccgcagctgctcgtaccgggcaagtctctgcggggtgggaccctgtcccaggacgcaggattggcgctgagctcgggatctctgtgtgcacctgcatcgctggtaggaggacgcccaggaaccaaggagtgaggcaggagcagcccccggcatcatcactcccagtgacccaggaagggatttgtgcttttttccctgcggctctgggcactgcagagttagaggtcctggtccccggggatggagggagggggtatatcagcgggcacagagcatgtccagtgacgcacaaaccacggctgccctctggtgcgtcgggttccttgtggggggatcaccaggcaggagagagcaccaccgtcctggcaggtac

SEQ ID NO: 259866 - DNA, 265 bp, Homo sapiens
  chr8:143204858-143205123
  hypo
ggcctccccacacatcagttcgtgcagagcgcatggtccagggatgctggttagcccccataaccccgccggcctcacccccaggggctcccagggtccccggtccccagctgctggagagggaccggggtcgtgctgcctcccttgcagctgcgttgacagaggacccggccggcactctgtaaatgttggtggacgatgacaccggctccctcagcctgctgatttttctgtgtccagcgccggggcctggatgggagctgtc

SEQ ID NO: 259867 - DNA, 151 bp, Homo sapiens
  chr8:143209714-143209865
  hypo
cagcaaacagtgtgcgctgagaccctgggctgtccccgctgtggagcccacgtgcaatcgatttgagcagggccacgaggcaggcagagagggctggacatgcagaggccacagaagctgggtggcgtctatggctcgaggcggtgctgcc

SEQ ID NO: 259868 - DNA, 282 bp, Homo sapiens; identical to SEQ ID NO: 212593
  chr8:143234555-143234837
  hypo

SEQ ID NO: 259869 - DNA, 124 bp, Homo sapiens; identical to SEQ ID NO: 212594
  chr8:143269916-143270040
  hypo

SEQ ID NO: 259870 - DNA, 59 bp, Homo sapiens; identical to SEQ ID NO: 212595
  chr8:143270070-143270129
  hypo

SEQ ID NO: 259871 - DNA, 243 bp, Homo sapiens
  chr8:143319108-143319351
  hypo
gccccgggtggatgcggagggagggcccatgagctggatctctcctggacctctctctcccgaaccatgcttgcagtggctgctcgtgagtcctgtccaccagccccgcagggtggcttacagctttttaatgcgtctgacttagagaagcgtcgggttgggggaaggcaagtctaccagagacaaggatctcctgtacctcccgtttccctgctggcccacgccacccgcctgcccacgcca

SEQ ID NO: 259872 - DNA, 270 bp, Homo sapiens
  chr8:143333258-143333528
  hypo
tgtacctgccgcccgcgttctctgtctgcagggcccgggcaccatgtacccgccgcccatgttctctgtcttcagggcccgggcaccatgtacccgccactcgcgttctctatctgcagggcccgggcaccatgtacccgccgcccacgttctctatctgcagggcccgggcaccatgtacccaccgctcgcgttctctatctgcagggcccgggcaccatgtacccgccgcccgcgttctctgtctgcagggcacgcacgttgagagag

SEQ ID NO: 259873 - DNA, 202 bp, Homo sapiens
  chr8:143334488-143334690
  hypo
actgggctctgccacgggtgagagtgcggaggtggacaggctggcgacagcccaggctggcactacgggtacgggaggagggccggtagccgtggagtcacagcagtggtgacggcggtgcctgcagaagcagggccgctgggccacctcccgagcacaagcaacaagcgaggcacaggccagcgtgcgtgccgcgtctgca

SEQ ID NO: 259874 - DNA, 131 bp, Homo sapiens
  chr8:143368385-143368516
  hypo
aaaatgctggaatccgcatccaacccacatttagacagactccaacccaggtcactaccaccatcaacgcggggtggcacccaaggccaccctccaggatgtggaacccaggaccccggccagatctcagg

SEQ ID NO: 259875 - DNA, 334 bp, Homo sapiens
  chr8:143368919-143369253
  hypo
ggaacccaggaccccggccagatctcagggacagtgggccgccctccaggtcgtggaacccaggaccccggccagatctcagggacagtgggctgccctccaggtcgtggaacccaggaccccggccagatctcagggacagtggaacccaggaccccagccagatctcagggacagtgggccgccctccaggtcgtgaaacccaggaccccggccagatctcagggacagtgggccaccctccaggatgtggaacccaggaccccagccagatctcagggacagtgggccgccctccaggtcgtggaacccaggacctcggccagatctcagg

SEQ ID NO: 259876 - DNA, 242 bp, Homo sapiens
  chr8:143372385-143372627
  hypo
tggactgaagggcacgcgcctgttccctccaacctctcctgcccagggagatgaattgctgctcgccacccgctgctcaggactggtgtcctcagctggggattaagtcactggctcctggggcgctggctctttccatgcctggctctggacctgcgggtggccttggagacaaatcccaccaccctcatctcagaaaggccaagcaaaagtcggctctccagcatcgcggtgaggatggc

SEQ ID NO: 259877 - DNA, 159 bp, Homo sapiens
  chr8:143373004-143373163
  hypo
cgccgttgcctccgcgggcttacgctcgagtggcgagagatgaatcctaacgagaacccaacagtgtgtggggggcgagcgtgggagcggcaggggttagaggacacccctggagtcagggcctgccagtgaaagggagccagcggctcaggcgtcagg

SEQ ID NO: 259878 - DNA, 189 bp, Homo sapiens
  chr8:143374348-143374537
  hypo
gtcagaccacggctcgcctttcctgccccagaaagctccaggaccccacatgaagaaatcccaggactccggaacctcctaggcttgagtgctttccttcctcaggagtccccaagaaaacgcaaacccctccctcgagcagccgcaccgcaggccatcagcagcatctgctgccgttctcagtggcac

SEQ ID NO: 259879 - DNA, 168 bp, Homo sapiens
  chr8:143379124-143379292
  hypo
acctgctgcagaccgtggggagggcttcctaaaggctaatgacaatttgcgttttgtttttcccgttttcagagaccaaagggagggagtgatgcagtgaggtgtacagacgccttccaagaacgactcccaccccgccgccctccgtcccgcgcctgctgttgctgg

SEQ ID NO: 259880 - DNA, 1204 bp, Homo sapiens
  chr8:143386138-143387342
  hypo
ttgagctgtgcttttcccaacgctgtgagctacggggtagagacgttcctcccaggggggacatggccatacacgcccctggagagcggcatgacggttgagcacagcctcctcctgccagcggtgacaggccctacaacagccccactgactggggtcccgtggcctgggtaaagtcaaagcccccaggtaaacataacaaacttttgaggtaagaggtccccggggcagcccggctggtgtgcccgaggacggagatgtaggagcctgccctcggccctgacagcaaacagccacaggcgagggggctggaggaaatgtgctccctcccacgatgaaatcctccagggcagctaatgcgggcgagtgagatggccaggtggagaaggcaccacaggacgttctgtgcgatgttccctggacttgggggtttcagtgacagctccccaggagctgtgggcagagggtgccaggcacccatggagacctgcctcggatctgtgccttgggattgatgccacctcctgcatgtggagaaggggaagctcaggaggataggggagggcgcaggggtgggaggggggtgcaaacggggttccgtgtggacgcccaggaaagcggccaggctggggtgcgggctgtgtggacacccaggaaggcagtcacactgggatgcgagccgtgtggacacccaggaaggcggcagggctggggtgcgggccagaggagaccccgcaggtgctcggtctccctcacctccacagcgggaggatcgggggcctggtgccgctctccccagcagtgcaggacaaaagccaggggaggaagagatggcttagacgcccgggtccctccgcggcctcctcctgaaaggctcacaaagcgctcctttattctccccacaaaggcccaatttgggtcttgagctccgaggctgggattagggatttgctggcaaggtgctggggcaagcgcagaggggacggccctgtgatagttttccagctcaagaggcagacagacaaaggcggctttctcctccccacagggctcagggcctgggtccctgttccgacacgtagggaagagacatgctctaacgtgagtgctggagacagggcacacacggtttcccgtgggaagagactccgctctgccaggcattcagaaagcagggacccgaggccggcgctcagggctctcc

SEQ ID NO: 259881 - DNA, 162 bp, Homo sapiens; identical to SEQ ID NO: 212599
  chr8:143397307-143397469
  hypo

SEQ ID NO: 259882 - DNA, 42 bp, Homo sapiens; identical to SEQ ID NO: 212600
  chr8:143398749-143398791
  hypo

SEQ ID NO: 259883 - DNA, 206 bp, Homo sapiens
  chr8:143404247-143404453
  hypo
aaggccagcctggacgtgtccatgggctggatgatattgttatgaaaggccggccttaccgtgtccgtgggttggacaacgatactattatgaaaggccggtctggccgtgtctgtgggctggatgatattgttatgaaaggccggcctggacatgtctgtgggctggatgacaatactgttatgaaaggccggcctggctgcatc

SEQ ID NO: 259884 - DNA, 321 bp, Homo sapiens
  chr8:143405649-143405970
  hypo
aaggccaggcaggcggctacagggtccaggaaacctgacccaagcatccctctcccagcactcctgtgcgaggtctgcacagctgccagctcggcggctcctgtactaccagccaggtggtgccgttgctgccagcagtcaggtgactgaggagtctgcgaggcctgcctggggggtgtgtcacctgaggcccatttgccctagcgccctgccctagtctgccggggccagaaccgacctgagtacggaggctctcgcatttgcttgtcattacttaagatgccgtttagaagcacctcatgtcccgcgtatctcatacct

SEQ ID NO: 259885 - DNA, 315 bp, Homo sapiens
  chr8:143406189-143406504
  hypo
ctcgagtggttaatcggcgctcccgcccctctgtccgtgttcctagtgactgcgacgcccctgccggtccctcggctgagggggctgtgggaagagcctgtggctgggctggtttgatttcctggttcctgccctttcccagtaggtacactgccccgtcctagacctggcaacaccccaggagtgactccatgtagaccacggcccagtttcatgagcaggtgatgcccaagtcaacacaacgcagtggtgttggtgcacagacccagggaccgcccacggtggaggaggtggccagggcgagtgggccggcaa

SEQ ID NO: 259886 - DNA, 307 bp, Homo sapiens
  chr8:143410616-143410923
  hypo
cctaagagctaaggccggcccaggggagagccaaggtgccgggatactcggtcctcagaccaggacagtctcctactccacgctggggtcccctctcctctccgaggcccacagcgggtggtgtcggtcttcagctaaccaggccgggcggcccaggatgcgcacatgagggccagggtccggacgtgcccatcccacctggccctcgtgacctaacccaggagtgggccagtggcactaagatctaagcacagcagcttcactgggaacctgcccaccacactgaagagacgggagagccacagac

SEQ ID NO: 259887 - DNA, 322 bp, Homo sapiens; identical to SEQ ID NO: 212601
  chr8:143413397-143413719
  hypo

SEQ ID NO: 259888 - DNA, 42 bp, Homo sapiens
  chr8:143414784-143414826
  hypo
aaaatttttaaataaaagaacgtggtttgaggtctacaaaca

SEQ ID NO: 259889 - DNA, 35 bp, Homo sapiens; identical to SEQ ID NO: 212602
  chr8:143415311-143415346
  hypo

SEQ ID NO: 259890 - DNA, 45 bp, Homo sapiens
  chr8:143421174-143421219
  hypo
ccagcggagagcagcggccctgccgtacagcgccctcctcctctg

SEQ ID NO: 259891 - DNA, 221 bp, Homo sapiens; identical to SEQ ID NO: 212603
  chr8:143424645-143424866
  hypo

SEQ ID NO: 259892 - DNA, 464 bp, Homo sapiens
  chr8:143436826-143437290
  hypo
cttggggcaccggccgtccctggaatggggagctgggcatcccgcccaaacctctcctcccgtgggctgcagctccagggactcagagcaaatgaccagaggataacgggagctctcctgcccagacactgccagagcgtcctccctgtgtgcaggggtccctgtgcgggcagcttctgactggcctacaccctaatgctatcactacggaacctgctggccaggccacaccttaagttctaaacacctcagggcaagggctccacccgcccacacaaacacctgaagtgcgaaggcaggtttcagagcaaagtgagcctcacgccagctgagtacagacccaagtccctagggccggggaaggcggtgtgaccccacgttccctctgagcaagacacccgcctgtgccatccagccctgcccagagcagggcagcaccaggacaccatcgacccagtgggccc

SEQ ID NO: 259893 - DNA, 120 bp, Homo sapiens
  chr8:143455672-143455792
  hypo
caaaagaaaaagaaaaaaaaaaagacttcagttcactcactggggacttggcttccaggcaaatcactttagaagtgggaaatgcggctgggtgcggtggctcacgcctgtaatcccagc

SEQ ID NO: 259894 - DNA, 32 bp, Homo sapiens
  chr8:143462129-143462161
  hypo
ccagggacggcccacggcggatgccaccgaca

SEQ ID NO: 259895 - DNA, 913 bp, Homo sapiens
  chr8:143463002-143463915
  hypo
aggggagccacacacctaaacgaggaggagccacgtggggcaaaccacagagtcttccagtttccttcagtgggagtgtcagccccaggctgtaagcaagtccccaaccccagatgacctgggcaagcatcgtcacctccccgcagctcggcgtcctgggccagcccctaatggagcagaagacaagccctgcctgccttggcattgggaacaggcagcgcccgcgggtgccgcagctcatcctgcgtgtgggagacactgagtcacagccacggctcatgcccgcacccactctcagacgctgcccagtcctcccctcggtgagcaggccgccacctcctcctctgacgggtacctgacaccccccctacacacaggccagatgctcggtggaggaggcctggccgttcccaggcccacgcgcccctgccagcatcagccctgtgcagcctccgtgtggaatggggcccctgcgcatgggcatccgagtggcatgtgtgagcgtgtgtgctcatgtgtgcgacagagagccagaggaggaggagggcccagctggggagctgcagttacatgaatcagtgttgttatagcaacttcaactccacgtcaagcagaatgccagccgggcacccccaggcacctcgtagaccacgcccagaatcagcggtggagaagcaccgatcgctaacggcacaaatgggcggtcagaacaccagcaacacacatcctctttctccctcccaacctccatcattccccgggaggccggcctctgcccactgaccagctgccggcactgcccgccagtcccttctgctcgggatggcagcaacaaacagcaagatgccagcgcctgagtcatgcgggcagggggcagggagcacccctgcacgcagctgcacacagcccaaga

SEQ ID NO: 259896 - DNA, 180 bp, Homo sapiens; identical to SEQ ID NO: 212607
  chr8:143505868-143506048
  hypo

SEQ ID NO: 259897 - DNA, 608 bp, Homo sapiens
  chr8:143509042-143509650
  hypo
ctcggttcttcccacgtgggatattctggctgtacgcgcgtgaccgtgactgtggggactggcccagggcttgactgtggggactggcccagggcttttcagggttggagctgggattggagcccgccctgcctcggggaagatcctcgctccctttctccacggcacctctgtgattctcgtcacctgccaacaccagcaccagggctgcccctcctgacggccccctcgccgtctttctgggcacactccatcggcacagcgtcttcactgtcctcctgacaaacctcgtgccacccccatcagcttcagcaccacctccacagcagccgtggccagcaccgacgtccttttccgtcaccgtcaagcctcaaaactgggaccgtgggtaatggcgtcaccccatccgccgtctctctctagctgccaacggcgccttcaccagacacgcccggcaccaccttccaggtcagcagtcccagccctgcgtatcggaggcctgctctcccacagcgtccacagtcactgggccaggctcgcacctgtgaggggccaggacccataccggagcccggcgaggctccctcggccaccctctgggtcctcct

SEQ ID NO: 259898 - DNA, 278 bp, Homo sapiens
  chr8:143535499-143535777
  hypo
caggtcatagggcgcgtcaggaggctgagtgcacagcctgttgagtgccgctgccacgcccacagctgcactgcacaagacgcaggccacattcatcacagtgggcgggcggcagccagccccgacgccacccaaaaccaacacacaccccggtgtgaggtgcaggcagacacccagagcaggcacgcgtgtccccacaaaggcaagaaacacggaacaccagggtgccacggcccgaaaacctgtgtcccattgtgggctcacgaggacatgggtca

SEQ ID NO: 259899 - DNA, 43 bp, Homo sapiens
  chr8:143550866-143550909
  hypo
tgtgtgtgtatgcacgtgcatgtgtgaatgtgagtgtatgcac

SEQ ID NO: 259900 - DNA, 102 bp, Homo sapiens
  chr8:143550969-143551071
  hypo
gtgtgtgtatgcacgtgcatgtgtgtatgtgcacgtgcgtgtgaacgcaagtgcgtgtgtgtgcacgtgaatgtgtgtgaatgtgtgcgtgcctgtgtgtga

SEQ ID NO: 259901 - DNA, 243 bp, Homo sapiens
  chr8:143557844-143558087
  hypo
gccaggtggcccagtgctgccgaactcagagcactgtggccacagagagagaggacgggggcaaagaaccgctcctgtgctgacctaagcccgtcctgcagccgctgggcgcaccagctcccggagccagtccctgcggtccacagatgcccggcggcgcgaggagctgggggacgagctgcagcagtttgggttcccagccccccagaccggtgagctggcgggaggggggtgggtgggact

SEQ ID NO: 259902 - DNA, 322 bp, Homo sapiens
  chr8:143558403-143558725
  hypo
gcggggtctggccccggtctgactgcagccccatgggcggcaggcctgtgacgctgtagtggggcctgcaggtgacccagcagccgaggagtggtccccgtggagcgtgtgctccagcacctgcggcgagggctggcagacccgcacgcgcttctgcgtgtcctcctcctacagcacgcagtgcagcggacccctgcgcgagcagcggctgtgcaacaactctgccgtgtgcccaggtgggtgggaccttgggctggggcagcggacagccagggcagcggggggccagggcagcgggggcggtggccgcagtgggcagcag

SEQ ID NO: 259903 - DNA, 334 bp, Homo sapiens
  chr8:143570691-143571025
  hypo
tgcaggaacacgaccgtcctgaattctaaggtgatctccgtgactgtgaaacccccgcctcgctccctgcgcacacccttggagatcgagtttgcccacatgtataatgtgagtgccgtccacgtgcacactctgatgccagcagaaacgcgtgtgcgcgaattctgtcccactcctcagccactaagcctttggggcctcctcacaacagctttaaccttcgagagctacttttatccctggattacaggtggggaaacaggctcagagaggtgcggtgacttgcccggggtcacacagcaagtgaggtgccgaaaccccatctgtgcctgac

SEQ ID NO: 259904 - DNA, 255 bp, Homo sapiens; identical to SEQ ID NO: 212612
  chr8:143582343-143582598
  hypo

SEQ ID NO: 259905 - DNA, 160 bp, Homo sapiens
  chr8:143595638-143595798
  hypo
gcagggtggtagagcgaggggaggtgagacccacgagtcctcctctagagctggcctggagccagggtgtcggcgcagatgcgggctgcgcagatgccggctctgcggctgcagcaggcctacgacggccggaaggttgagtaaccgctctgagtcacac

SEQ ID NO: 259906 - DNA, 178 bp, Homo sapiens
  chr8:143599430-143599608
  hypo
gtcttcgggtctgccgagtgggcgagtggggtgcctcactccctgcggtctcttcccggtccccacagaacatggagaaggcgactctgccgtcggtgacgctcatcgtgggctgtggcgtgtcctctctcaccctgctcatgctggtcatcatctacgtgtccgtgtggaggtgggt

SEQ ID NO: 259907 - DNA, 190 bp, Homo sapiens
  chr8:143609365-143609555
  hypo
cacagcccaggagcgcacccagactcgcctgtgtggccgtgtaggtctcgccgcccacgtagacgggatggaggttggggtggaggggcacccagtacaccggtctatgtgtgcacgcacacccacacgcatgggcacacacacgtgggcatacacatgccacgaggacctgcacgaggtccctgcccag

SEQ ID NO: 259908 - DNA, 313 bp, Homo sapiens
  chr8:143614682-143614995
  hypo
gctgccgctgctggcgctgacctggatgtcggctgtgctcgccgtcaccgaccgccgctccgccctcttccagatcctcttcgctgtcttcgactcgctggagggcttcgtcatcgtcatggtgcactgtatcctccgtagagaggtgggtgaggcagcctctgtcgggccgggctcctgcggggtcctggggctgccgagtggcctcctccttccccgaggacctcggcagggagattgtgggtaggcgcagcatccatgaccctgacacatctgcaggcctcggtggtccacagagcggggcctgcaggtg

SEQ ID NO: 259909 - DNA, 178 bp, Homo sapiens
  chr8:143623481-143623659
  hypo
gcgggcccctgcccgacttccccaaccactcactgaccctcaagagggacaaggcgcccaagtcctccttcgtcggtgacggggacatcttcaagaagctggactcggagctgagccgggcccaggagaaggctctggacacgagctacgtgatcctgcccacggccacggccacgct

SEQ ID NO: 259910 - DNA, 312 bp, Homo sapiens
  chr8:143660376-143660688
  hypo
tggaaatagggatgacgtcagagagagcctcaaaccgtcagcgttggccaccgccttgcactgcgcccatgcttggagccccgagccccaggccaggccctgcccgcccgctcagccctgctcgccatgctcccgcccttgctgctggggcggccggcagggagcccacctgaggcgcagagggaggccattgccgggcgctgccaccatgaggagtcccgagtcctggggagacaggtcctgtgcagggaacagagggacgtgtcactcacgcctgccggggccagagctcgactccgagggacccccagt

SEQ ID NO: 259911 - DNA, 279 bp, Homo sapiens; identical to SEQ ID NO: 212615
  chr8:143662796-143663075
  hypo

SEQ ID NO: 259912 - DNA, 174 bp, Homo sapiens
  chr8:143667142-143667316
  hypo
caccttcccgagcccgaggtggccaagccttgcgtgtgactgtgaaccagtgcctgccgcaggccccgccctcaacctcgtcctccatcgcgtgctgtggggcctggggagatgactgaatggctaggtgcctcagtttccccacctgtaaaccagtgtcggctgcacgtggtt

SEQ ID NO: 259913 - DNA, 130 bp, Homo sapiens
  chr8:143699028-143699158
  hypo
agtcagctctctccccgcagccccagactgtctcagccctggctgacccactccggcagggcctttctgggttgccaggagcgttcacagggcagctgctgacctggggcatcctgctgctcccccaggc

SEQ ID NO: 259914 - DNA, 266 bp, Homo sapiens
  chr8:143843320-143843586
  hypo
tgcgtccacaccttcgtcacagcctgtgtcataaatgggtaaacgcggctcagtgtgtccctgagttctatgagccgctccagcaagtcatcaaacccgaggagggggttgtgggaaccctgattcatggcaggttggtcagaagcacgggccacacctggggcttgcgactggcattggaagtggggctcactgcgtggcactgagccctccacctgcgggatctgacgtgaccgccacaggaatggtgtcggaattgaattgag

SEQ ID NO: 259915 - DNA, 688 bp, Homo sapiens
  chr8:143868761-143869449
  hypo
ccagccctgcctcccgccctccagggccccagaagccctccccgtgggattccttcccccactctccaggcccctcctgctacgttgggggcagcgccatcccggccactttgtaactattgctctaggtgtcccggctccagtctccccaaaatcgtgaactctttggggctgggccccagcacccagggcctcaaagcaggttcttggtctgctgcccgttgagtggaggccagtccccgccttcaccctctttatactcacaggagggactttctttccctggagacggggtctctgagcacccaccgcctcgcgcaggagcccacctcttggggcccccatccacctgctcagcccagcacgctctgccgctcgcctgtgctgggcagcacccacctgagtggtgtggaggggcccacagacttgctttgcccctgccctggctaggctgaaggtgagtgggagccggggcacagatggaggtcagccctgggcccagcctcctgccgccgctgccacgtggctgatgaacagacaacaacaggcccagggcagggcagggccggttccgaggagggtggtcctgggctgggctgaggcttttgggagcaccgtgggtactggggccagtcaggcctgggcttgagacagaccctctggcccttcctcccggcatctctccctt

SEQ ID NO: 259916 - DNA, 71 bp, Homo sapiens
  chr8:143879112-143879183
  hypo
ctgcggctgcactgcggttgcactggctaccctggcagcaggacacagagagggcgcggctgtcggaggac

SEQ ID NO: 259917 - DNA, 96 bp, Homo sapiens
  chr8:143916192-143916288
  hypo
aagttccagaaagcgggtggggaggtcggcgcgggaggctcagatggctggaggcggcgggcacgcacactgcggggctccgaggggcacaggtca

SEQ ID NO: 259918 - DNA, 35 bp, Homo sapiens
  chr8:143983233-143983268
  hypo
tctgcaagagatgtcgttatcgtcccaaaacagac

SEQ ID NO: 259919 - DNA, 118 bp, Homo sapiens
  chr8:143993975-143994093
  hypo
tgccaggcgccgcccgaggcactggcgcatgccaaagccaaagggcacgtggtggaagttcctgccggagcccctgatgtctagccagcgctggggattataccgctcaggcctcggg

SEQ ID NO: 259920 - DNA, 37 bp, Homo sapiens
  chr8:143994804-143994841
  hypo
gatctgctgcacgtcggggttccgagccagctcaaag

SEQ ID NO: 259921 - DNA, 304 bp, Homo sapiens
  chr8:143998175-143998479
  hypo
gagaaagcagccgccgaggttggtgcagagcgggttctcactacacagaagggctcattgctctgcgtcttctctgcagaggtgcccgtgcccatttctccaccaccgccctgcttccccaacccacagtgcagacgcgaccccacaggatggccgtcctctgggccgggtgctcaccctcactgcccaccacaggggcccagggcagatgtgcttttgggtcctacctctctcgcctcccccctacacccaggctgcccaccctgctcccagctctcagctcccaactcgccgcttacaacaa

SEQ ID NO: 259922 - DNA, 43 bp, Homo sapiens
  chr8:144057229-144057272
  hypo
catgtcaaaatgcatgaagccggactggcacagtggcttacgc

SEQ ID NO: 259923 - DNA, 42 bp, Homo sapiens
  chr8:144057392-144057434
  hypo
agagcgagccagcagggctgcgcccactgtctctgaaagatg

SEQ ID NO: 259924 - DNA, 197 bp, Homo sapiens
  chr8:144069364-144069561
  hypo
aatccaaggcctcccgccaaagggcagcatctgcctgccggcagcacagtgcaccatctaggagatgggtcctccagccctagccgagccttcggaccacttcaccccagacaacatctagcctcacgcagccggaaccacctgtggcgaaggctaaaatgactccatcttggatgctgacccgccatgtggacttc

SEQ ID NO: 259925 - DNA, 271 bp, Homo sapiens
  chr8:144070435-144070706
  hypo
gtctccagaatctccgcttgagttgccccagaaacacctagagcccagtctccacgcctgcgggggagccacactccccgggctgctgcggcccccagggtgccacctccctctgcaacagcctttaacagctctgcaagttctgtggggctgtcccacggagaggtgaggtctgagaagggagtggaggcacagggctcctgcggccacgtcagaaacgccctgcagctcccacctgacatcttcggaggctccacgagaggagaccagc

SEQ ID NO: 259926 - DNA, 425 bp, Homo sapiens; identical to SEQ ID NO: 212617
  chr8:144070963-144071388
  hypo

SEQ ID NO: 259927 - DNA, 137 bp, Homo sapiens
  chr8:144090396-144090533
  hypo
taatctcctcctgccgggattccagaggcccgtaatgacagtgggctcctccttgccagttcaactcacccattctccctgagtcttggggaccagtaacgagtcccagtgcgcagtggccccgtgcagggttccca

SEQ ID NO: 259928 - DNA, 211 bp, Homo sapiens
  chr8:144093516-144093727
  hypo
ttccatcccagctgtcgcaaaatacaaggaaacagacacaggtcacctcgctcagcagccaacattgaccgcacaaggctcagacttgccccctgtggtccctggtgtctttgatgcactcaaggtggggagggatgacctctcactgggaattcaatgggtggtatttgggccagatggacgagcggacggacacccccagtcaggcctg

SEQ ID NO: 259929 - DNA, 141 bp, Homo sapiens
  chr8:144163832-144163973
  hypo
tttctgcagaatggagtgtacgcgtcctgctcagcaaacgctgtgctcccagatgtcccaacgacaacatgaagttcgaatggtcgccggcccccatggtgcaaggcgtgatcaccaggcgctgctgttcctgggctctct

SEQ ID NO: 259930 - DNA, 362 bp, Homo sapiens; identical to SEQ ID NO: 212619
  chr8:144178363-144178725
  hypo

SEQ ID NO: 259931 - DNA, 263 bp, Homo sapiens
  chr8:144187580-144187843
  hypo
accaccatggcacacatgtacctatgtaaccaaccagcgaaccaccatggcacacacgtacctaagtaaccaaccagcgaaccaccatggcacacgcgtacctatgtaaccaaccagcaaaccaccatggcacacgcgtacctatgtaacaaaccagcaaaccaccacggcacgcatgtacctaggtaaccaaccagcaaaccaccatggcacgcatgtacctatgtaaccaaccagcaaacgaccatggcacatgtgtacct

SEQ ID NO: 259932 - DNA, 193 bp, Homo sapiens
  chr8:144190246-144190439
  hypo
cacaaggaacaacagatgaacgggaactctcagaggcattcccggaactgaggttaatcagaagccaacacgacaaactagcgtccaagatggagcggcttcggcctccatgatccgcccgcgccgccccactaatccagctctgaccgtctcacctgccctcctcttccgcgatggtccctgagccttaggg

SEQ ID NO: 259933 - DNA, 76 bp, Homo sapiens
  chr8:144203023-144203099
  hypo
tttcttactgtttgactgggggtggcgattacagtgtggtcatgtgataaacgtggcatttcggaggaatctgggc

SEQ ID NO: 259934 - DNA, 971 bp, Homo sapiens
  chr8:144203468-144204439
  hypo
cctggctgtgtcatcgcacagctgaaaggagtctggaccagacagctctgtccgcagtcagaactgagggtaagcgcggtcctgtgcacaagtcagcaaaccggagagccagggtgccaggcactgaccccattctatagccatagaatcaaggctcacggagcccaatcaacaaacgctccaagagtccaggaaaaggtcgagggaaagaaataaaggtgtgaccgggagaagagtggggaaggagccgactcaaggctgagtcccgcagccccgtgagggcggagtggaggttacggggcgggagcgggacgggaatctgagctcccagcagccgagccgagaggaaacccctgctcctgcccatgagcccagcagagcacatgccctggatgtcgagacgcggtccacagagagatgggctcctgtgactgtcctcggataggcctctggacgccacgccctagtgcagctcagtgaaaggagctccatggcgttttctcacacgattctattgcagctgacggtagtgaggtcacggcacgcaccttgctgatgaccggggttcagccagacgtaactctgggaaaacagactgagctcagccctttcagccagcggccattcagcttttctgaccatggcccatatcaacaaacacaatatggtatgtgagcgtatacatgtgcacaaacacgcaaatgcaccctcacacaggtacacatgcacgccctcacacgtgtacacacaccctcacacgtgtatacacccatacacgtatacaccccacacacccacatatatgtatacacaccttcacacatgtaacacaccttcacacaccccacacgtgcacacacccacacatacacaccctcacacgtaacacaccctcacacacgtaacacaccctcacacacgtaacacacaccctcacacatgaacacccccacacacgtgcacacccccac

SEQ ID NO: 259935 - DNA, 429 bp, Homo sapiens
  chr8:144205317-144205746
  hypo
cacatgcatgccctcgtgtgtacacgtgcgcacacacacccttgaacacatatacatcttcacacatgtacacacaccctcacatgtacacacatgcaccctcaaacgtacagatcctcacacatgtacacacaccctcacacatgtacacacaccctcacacatgtacacaccctcacacatgtatacgtacgcacaccccctcaaacgtacacaccctcacacatgtacatgcacacacatgcacacatgcatgccctcgcatgtacaggcacaccctaatacatcctcacacatgtacgcacacaaaccctcacacgtacacacaccctcacatttacacactcaaacgtacacacatcctcacacatgtacacacaccctcgcacatgtatacatatgcacaccctcacacgtacgcacaccccc

SEQ ID NO: 259936 - DNA, 138 bp, Homo sapiens
  chr8:144208604-144208742
  hypo
ttctgcttttaaagggctggcgtgattcgaccaggcccacctgcatccacggaccctaaggtcggctgacctgggacacacggcacatctgcaacgccccttcccggcagcacccacgggtattggaggagtggtagg

SEQ ID NO: 259937 - DNA, 155 bp, Homo sapiens
  chr8:144222940-144223095
  hypo
tgcgccccgcctccattttgcatccgacaacgttcacgcgaccaaagaaatgaactcgagccccaccttctgcagccacagggacctcgaatgctgcggagcttcccacggacacttcgcttctcccagtggccgcctgtccacttgggttccaa

SEQ ID NO: 259938 - DNA, 200 bp, Homo sapiens
  chr8:144236385-144236585
  hypo
cgaaatgctaacagcgttagcattttctgcaaccggaaaaatggatcccaaaacccatctgtaagaataaattgtgagaagtagcagtatgtgtttaaaaagaataacgtggggcccttgccttaacgagtgtaaaacacgccgcccggctgccatcgttgaaacagcatcacatgtagatgacccgtgacgaaccgacc

SEQ ID NO: 259939 - DNA, 145 bp, Homo sapiens
  chr8:144238764-144238909
  hypo
ccgtgtgcactgcacgctgagtgtacaagggtgggtgtgcacagacatgggcatgcacgtgtgggtgtgggcacgtgcactgggacacgccagtttgtgccagttatgtgcatgccccagcacgtgtgcgcggggcacctggggt

SEQ ID NO: 259940 - DNA, 201 bp, Homo sapiens
  chr8:144254779-144254980
  hypo
gcgtgagcgttccacgcatgagcgttacaacgtttgcttatccacttccttgttggccgaccctgggctgtgtgccgtgtttggctcgggtacattcctgagtcccgcattctcttgggtaaatattggggtacagagttgccgtgtccagagttgctgtgtccaaaggtcaagtaaatcgttctctaagaaattgccagg

SEQ ID NO: 259941 - DNA, 105 bp, Homo sapiens
  chr8:144262820-144262925
  hypo
tgcactgggacagccgtgcagtgatgggcagtcgggaggctcccaacccctgctatttcaaatagcgccccatcgagaagctccacactgcggcattttgtgtgt

SEQ ID NO: 259942 - DNA, 432 bp, Homo sapiens
  chr8:144292290-144292722
  hypo
ccctttcacacctgcgcaccatcccaggtggcaccttctgtaggggctggaccagacccactagcctttccggggcgggacagagggaacagcctctcagtggcgagcactaaatttaattcaatctgcgaatcaaatgtgctctgattgtccctaggtgattctcgcaataagcacttgcctgggctgggcagtttgcacctgggctgaagaggagctgggcccagagggaggcaacgtgcaagggcctgggcccctgtggaggggaggcggcaggtggaggccccttgagaatcccagtagcgcccttcctaggagcagctcctgcagcactagattcaagggcctgtagcggtagccggggcggggcgcgggggaggtagggcagcaggaaagcggggcaccagggaagcggggcgacagggaggcggg

SEQ ID NO: 259943 - DNA, 520 bp, Homo sapiens
  chr8:144293590-144294110
  hypo
ccgagggcgagagggcgcagggaggcgggtgggggtggggccacgcgcggaggggcagggaagggcggggcggggcggggcgggacggggctgggggggacaggcatcaggtatgaagagtttggggctggcggggcgtgtccggctgtggcgtgggcaccactatgggagaccctggcttggcaagtgaccttgcagccttggctggggaagggctagatgctgggtgggtgccggtagagtggaaagaatgacaggttcaggtgaattaaggaaggatggttgactcggtggctgggacattagagacaggtattcccagcctcaggcgctgtcctaagcccagcaggtactgacccttgatggtcacctcaccctatgagggagctgaggcctggggaacccaaggggctagtccagaacccacagccgggggaaggaggaaccgggtcttaaacccaggtagctcactccagaaccaactcaacctctgttacaggtggccggccagaaaatgccc

SEQ ID NO: 259944 - DNA, 196 bp, Homo sapiens
  chr8:144311087-144311283
  hypo
gggtctctcgtccacgacactgggaaaaaccaagcccatctcacgggactggtgtggagattttctgaccttcggccgccacaccctggcatgtgctgggcgacccctgccctgcctcattgcagtctgtttcccaagccgggttctggttccttgcttgtccccaccccccacagtgtttcggaccctcctccgg

SEQ ID NO: 259945 - DNA, 132 bp, Homo sapiens
  chr8:144326798-144326930
  hypo
tggacagctacccacgcagccttggcctaaggctggcaggggcgaggccggggctggcacagaggagctcgaacaggtggagtcttaaaaagcaggaaagggtctgtcaggcggaggcggagcgggggtgtt

SEQ ID NO: 259946 - DNA, 205 bp, Homo sapiens
  chr8:144330280-144330485
  hypo
cccggccagtccactctgcttttaagaaatattttatttctcagggtgggcagcgtgtagagaagtgagtcattccagtctctgccggttagcacctgccagcctaagttgagtcgacagagccgttatggagaatgttccctgaccacagtatgtgactaggatttggagataaaaaagatacgatcctcgccttcaggagacc

SEQ ID NO: 259947 - DNA, 62 bp, Homo sapiens
  chr8:144334638-144334700
  hypo
ggggggttctgctctcgggaccacacacactggaggggcctccccagcgcaggtgagcaggt

SEQ ID NO: 259948 - DNA, 42 bp, Homo sapiens
  chr8:144335407-144335449
  hypo
actgaggctcttggccgcagagcgtggcgtctgcagttcatg

SEQ ID NO: 259949 - DNA, 1408 bp, Homo sapiens
  chr8:144343416-144344824
  hypo
cgctgagatgtgatcgtttctttcctgagaatgagctgaggtaaaaacatgctggggaggaagatgggccctgggggcagcgagctgcgcctctgcaccgggagaaaggccgtgtccccagagctgaggcggtggtgggcagggctcctgagaagccggggcagggcagggtgtctctgaggtcaatgaggaacagctgaggtccagggacgcaggaaggatggggtgaactccgggatggggccggcagggagcctcacgcttacagagcctggtgttggcactctcctggcttcctccgcaaacctagccacgtggtcagggagcccgggcctagcagacggcccccaccttgacagaatccccagggtcgtgcgtggcggtgggggcgacttcacagccgagaccgggcctaacgctgctgtctcgcagtcacccctgcaggccgctcagggcagggctctggcctgacgggggttcctggacacgcctctgagccggcagcccctacccgcacccgtgcaccttccacgcccgtctccagcagcccctgcccccacccgcacccctgcacctgccacgcctgtctccggcagcccctgcccgcacccgcacccctgcacctgccacgcccgtctccggcagcacctgccacgcccgtctccggcagcacctgccacgcccgtctccggcagcacctgccacgcccgtctccggcagcccctgcccgcacccgcacccctgcacctgccacgcccgtctccggcagcccctgcctgcacccgcacccctcacggctgtctccggcagcccctgcccgcgcccgcacctctgcacctcccacgcccctctccggcagcccctgcccacacccgcacccctgcacctcccacgcccgtcttgccctggggcccaggtgcaggtctgtgaggagggcagccccgtgctcccgtggccaccgctcagccaaatggattcagcgagggtttttagtgtttgtgcctgtgtccccgtgtgcctgtttcctggtgaggctggatgcctggcatgtctgaacactcacattccccaggcatgcatgtgcagccgccgccgccacccatgtactgtggcgctgacccctcctgtaacagctgtggtcttggcctctcgtgttggtggcagatgtcccatttcccagttactttctgttgtccaaaagtttaactgtcctgccagccaaagctgctgagcattactctgatagaccatcagtccttggtaagtgtcctgtgcatctgggataagcatccgtttgttttcagctgcgctttctgtgacttgctctgcgtgagtcctcggtccacgtgggccgttgcgctggttcccagcctgcccgacacactcactgcgacgcctcccttgccta

SEQ ID NO: 259950 - DNA, 105 bp, Homo sapiens; identical to SEQ ID NO: 212627
  chr8:144347176-144347281
  hypo

SEQ ID NO: 259951 - DNA, 105 bp, Homo sapiens
  chr8:144347701-144347806
  hypo
gcactccagcctgggcaacaagagcggcaactccatctcaaaagtaaataaagaacaaaaggggtttgcttggctcacagttcagatcagcgttcagagggtgct

SEQ ID NO: 259952 - DNA, 266 bp, Homo sapiens
  chr8:144351690-144351956
  hypo
gtactcacccagcccgctgtgcgccctccaccctgcatcccctgccctcacgtcccctgccctgtctcctcctgacctgccacgctggctgacttgagaggcgcctccagacacctgtatgcagctccttcagcagctggggttcccacaccctcaggccaggggctcggcgcgggttgggttggggcagcggtggttgaggctggggccaagcctgagctctcgctccctagggacagctccccgcattgtttctttcctgagtt

SEQ ID NO: 259953 - DNA, 971 bp, Homo sapiens
  chr8:144359679-144360650
  hypo
ggggagtctgggccacgaagctctgggagagctcagctgggggtggctccaagtgctgagtgccagtgattctgccagtgccttctccctgccctgcctgtgccctccgggacagctggcagaccccggaccccagcctggctcctccgaggctgtccctctccaggtctcacctcccctcctactgtgactcatccagaaccccgggcctggcccccagatgtgcctgtggcgggcctctgaggtcactgtcctggtgaagacgaaggctaccgtccccgctttctggcagtgtctgcgagggcctgcgcagcgcgcatctgatgtcatcagcccccagcaagcccgttttccagaagagaacccggaggctccgaggtgacgtgtggcttgctcgagatcacacgatcagtgacggcaccagatgaatccctgagctccctgaccagccatccacccaggcccctgctgagacagcgggacctcgtttccaactcagaagcccccggaacgcggctgcccggcttgggagcctgcggcacagggccctgtgcagccccttggggaagacggccccaggctctgccagcccccgccaccctctccagaccatgctctgggggccctatggccaccagcgctctggacgccccactctgccaggtgagaacgagtttaggggtgcgggctggaggtcagtgtgtctgtccgaagtcagctgggaggcaggcgcctacttgaggcgtccttgctggtgtgcggtgggcctggggttcagactgtctgcctgaaaggtaagggtgaggacgcctgcattctccttgttcagtaacacgcgtgggcagccaggccgaggtgctggctctactaggggattcatctggtgccgtcactgatcgtgtgacctcgagcaagccacgagtcacctcggagcctccgggttcttctctggaaaacgggcttgctggggg

SEQ ID NO: 259954 - DNA, 186 bp, Homo sapiens
  chr8:144361758-144361944
  hypo
acttatccttcctcacggagcctgtttctgcctctgacaatggtggttagcgcagcccgctccgcaccgcacatggcggctgcaaggacggcatgggtggggttctttgcacagtgccaggtacatagcaaatccccacaaaaagagctcctggaagggctctgtcaacagcgtgagtggacagtc

SEQ ID NO: 259955 - DNA, 213 bp, Homo sapiens
  chr8:144372044-144372257
  hypo
ctcctgcgcagactcgcgtgcttggagtaccggagcctgcagggcaagagagggtcttcagaagacccacgacgttccactgggatgcagagggaaacggttacttgtacttctacatcatctcttttagatgtgtgtgtgtgtggtgtgtgttgttgttgttgtttttgttttgcgacagaatctctgtcacccaggctggagtgcagtgcc

SEQ ID NO: 259956 - DNA, 564 bp, Homo sapiens
  chr8:144380307-144380871
  hypo
gcggttgcaggattcgcccatcctggtctgggtgtggcttgtgaccacctcctgcagttctctgcccaggtaaggactaattgggaagaattctgggtcctgagctggctgccgcttccaagacagtcgctttgagggctcttggcaccgattttgttaaaatgcatgagcttagggttgtgcagcctgtaggggcaggggtggtctcagaatggatttggtggccccaccgttaattaagctcctgacccctgggccggtggtgaggtgggaagatgagcctgtgtctcccatgctgagccaagatcctcaggtaccagtagcggtcaaagcacctgctccctgaaggaagcttacctggcttagcctcattcctgctcgtaagtcaggcattcagcttgcaaagatccccaagcacacaaggagagtcagctgactgagggccaacagaaacagcaggcagccgctgtcagccacaaagaaacgcagatcctgaaactgtcatcatacaggtgagaggatagttatgtgtgaggtgttcaaagaagtcgcgcagtcagtgat

SEQ ID NO: 259957 - DNA, 172 bp, Homo sapiens
  chr8:144383378-144383550
  hypo
aaagatggaaggaacgacctacatccaggcatgacgtgaaacatcagacagtccaggacatagagacgatctgaaagcgcagatcacacacacaggctgaggaataaatcccttcccaagggcagactggaagttagaaaatgacagaacaatgcttcgaaaattacaagtg

SEQ ID NO: 259958 - DNA, 112 bp, Homo sapiens
  chr8:144386309-144386421
  hypo
ccccagactgcactcgcagtcagtgcactgcgtcttaggtgttgcttctgccaacagctgtcttagacgaggtggctctgccaacacctgtcttagacgaggtggctctgcc

SEQ ID NO: 259959 - DNA, 46 bp, Homo sapiens
  chr8:144386880-144386926
  hypo
cggtgcttctgtggccgcaggcgtgaggacccgggtcctggcctcc

SEQ ID NO: 259960 - DNA, 79 bp, Homo sapiens
  chr8:144387632-144387711
  hypo
ggtgtcgggaaggcgtcagggctcccggttgctgtcagtcgcccgtgagacccgagcagcagtcgctctgttcttgtga

SEQ ID NO: 259961 - DNA, 95 bp, Homo sapiens
  chr8:144390545-144390640
  hypo
cgcgtggcagagaagagggcggcagagggtcccgcgtggcagagagggcggcagaggatcccgcgtggcagagggcagccgacaggcagctctga

SEQ ID NO: 259962 - DNA, 154 bp, Homo sapiens
  chr8:144396023-144396177
  hypo
ccaaaggaaaaaaaaaaaaaagaaagaacaaagacaacccaagagtgggcgaaacatcgacgagctcttacaagtcaataataaaacaacaacccgactggaaaatggacagaggacctgagcagtcattctccagagacgatacagaagtggg

SEQ ID NO: 259963 - DNA, 54 bp, Homo sapiens
  chr8:144398063-144398117
  hypo
accctacgtgcccaccgcagctggctcccaggcctgtgccgaggctctggggag

SEQ ID NO: 259964 - DNA, 202 bp, Homo sapiens
  chr8:144400199-144400401
  hypo
gaagaggtcgtcccgggggtccttgttctccataaagagctgtaagttcttgtacacctgaaggagaaagaaggaatttcagaggacagaaaaaacccgaatccagtgaggacctgaagggcgtctacgcagagcctgggagcccacgggaggcttccctgaggaaggtggcccgagcagcatcaccgtcacctgtcggcat

SEQ ID NO: 259965 - DNA, 527 bp, Homo sapiens
  chr8:144413513-144414040
  hypo
agacggagacaggacgtgtcactctcctgggccaggccctgcatgagcctcttccccgctcccacagtggctcctccctgtggctcctagcaggtgagcagtgtggcctccacctcacgggggaggaaaacaaggcctgcagagggaggcaaccctacctgacctcagaccccatgcccgtgtacccgcccatgccccccacctgcagaggcccgtgtgctgctgagtcacggatcccaccaagcccagctaagcgggaaagggcaagcccagctaagtgggaaaggcaacgtgcctctcccaggctctagggcctctccccagatgggtcccttcagagccggtctagaatcttcgggaacctctccatgggaccatttcatttgctaaataaaggacctggctgcttatgagagagccctgcctccgaggagctgggtggaagggggtccagcagtgcagccagtggagaggcaccacagcagggcgcaggaccgccgcccacagaggatcgggcagggtggaag

SEQ ID NO: 259966 - DNA, 241 bp, Homo sapiens
  chr8:144414248-144414489
  hypo
gggggacacagccagcgtggcggctacagcccatcctaactctccaggccagtcatcatctatccattgaggcaagcccaagcctgccctgaaccagcactgcgctgggtcctgcggatgcagatcaccaaaacccatacgaagggctcaactgaacctagattctgagatgggcctgggagaagaggagcgagatggggcgtggctggcaggcagtgggcaggctcggtcagcagggctg

SEQ ID NO: 259967 - DNA, 139 bp, Homo sapiens
  chr8:144452481-144452620
  hypo
cagggtactggggaggggcccgtgggaggtggcagtggggcggaggcaggccctgtgtcacacgcgcaccactcaggctgtcctgccatctggaaagtcttccccgatgcctgctgccgggctagagtgaggcctgttc

SEQ ID NO: 259968 - DNA, 231 bp, Homo sapiens
  chr8:144457689-144457920
  hypo
gtcgggctgtgatcgcctgtggcctccctgcagggctgtgactccctgacgcagatccagtgcggccagctgcagagccgcagggcccagattcaccagcagattgacaaggagctgcagatgcggacgggcgctgagaacctctacaggtcagtgcttgagactgcccggccccgggagcagggcccacctgggtgaggggggcaggacagccacgcaggcagatgtctg

SEQ ID NO: 259969 - DNA, 551 bp, Homo sapiens
  chr8:144460987-144461538
  hypo
ctggtaggggctctgcgggcggaggcaccctggggaggggaggcccagctgcgggaaccgtgggaactccacccagcctgacccaacactgcaggtacgactcgcttactggggtcccggcccagcagcgtgccctggccttcgagaagggcagcgttctcttcaacatcggtgccctccacacgcagattggggcgcgccaggaccgctcctgcaccgagggtgcccgccgcgctatggaggccttccagagggccgctggtgagggcggcccgggccgcggtggggcacggcgcggtgccagggtgttgcagagccccttttgcagggcaggagctggggagtggttaggacatcagtccctcaggtagggggagtgagcacatcaggtccatatgtgtcccaggagcatccctagctggccgccctgagtgctgcatggggcagagatgggcaggtacagggccctgcctgtgtgagcacccctccctccgcaggggccttcagcctcctgagggagaacttctcccatgcgccgagcccagacatga

SEQ ID NO: 259970 - DNA, 378 bp, Homo sapiens; identical to SEQ ID NO: 212638
  chr8:144462488-144462866
  hypo

SEQ ID NO: 259971 - DNA, 477 bp, Homo sapiens
  chr8:144471548-144472025
  hypo
atagctgggctgcacgcccgggcataactcagtgtttacctggtggggggtattggcggcccccgcggctccagctccccccacacccccttcggcccctagaccgtgcgccagacatgcattaaggcaggagtgacttatcgagctgtcagggggagcgttttaagacagaattataggggagaggaaaaagatttttaccaaattaatgaaaaatcaatgtggcctcaaaaatccattagccttcataatgcgctggttccaggctgagccgcataatccgatgccggctgttaaactcgtggcggtgcccccgcccaccattcatcaccgcacggtgcttactcctgagagtgacacctgcccggtgcccagagcccctgggggcccctgccctggctccctgaccacacacagaggctgcagggagccctggggtgaagcatgtagacggggcagtggcgtggatgggataga

SEQ ID NO: 259972 - DNA, 126 bp, Homo sapiens
  chr8:144519592-144519718
  hypo
aaccgggagctggccgagctgccccacccaccatggctctagcctgttgcatccgggtccccagagtgccccctaggccttccccaccccagatggtgctgctcaggtccagggagaagcgccttc

SEQ ID NO: 259973 - DNA, 99 bp, Homo sapiens; identical to SEQ ID NO: 212640
  chr8:144519748-144519847
  hypo

SEQ ID NO: 259974 - DNA, 232 bp, Homo sapiens; identical to SEQ ID NO: 212641
  chr8:144521390-144521622
  hypo

SEQ ID NO: 259975 - DNA, 160 bp, Homo sapiens; identical to SEQ ID NO: 212642
  chr8:144521831-144521991
  hypo

SEQ ID NO: 259976 - DNA, 145 bp, Homo sapiens
  chr8:144543710-144543855
  hypo
caaaggctggagcgcggacattcgaggcagtattattcacgacagcccccaactggcaaccacccgaacggacaaagaaagtgtggagagcctctgcagcggcttgactctgtaataaaaacgggtgcagcgctgaggtgctgca

SEQ ID NO: 259977 - DNA, 135 bp, Homo sapiens
  chr8:144545694-144545829
  hypo
caaggacgccggccgcggatcagaatttgacagcagacagacacagctggctattaagactaaggggagaaggtggagttttctagtctcagagtctccccccagcaagacgtatcagccggggagatccctttg

SEQ ID NO: 259978 - DNA, 99 bp, Homo sapiens; identical to SEQ ID NO: 212643
  chr8:144546273-144546372
  hypo

SEQ ID NO: 259979 - DNA, 91 bp, Homo sapiens; identical to SEQ ID NO: 212644
  chr8:144550587-144550678
  hypo

SEQ ID NO: 259980 - DNA, 212 bp, Homo sapiens
  chr8:144557020-144557232
  hypo
caaggtggcggcgccggctgcctccagacacagttgtcgaggcgtcgccaatgcgattacgggcgccgcggccccaggtgtgcgctcgcccgggcgtgtttgccgtacctggcatcatcctttttccaaaagcgaaacatggtgcttgtgagcaactctcccccaccccacagaaaatcaggggccgctcagccacgcgaggtgggcgccac

SEQ ID NO: 259981 - DNA, 198 bp, Homo sapiens; identical to SEQ ID NO: 212645
  chr8:144559235-144559433
  hypo

SEQ ID NO: 259982 - DNA, 37 bp, Homo sapiens
  chr8:144567459-144567496
  hypo
tccttggtgaggccgagaacccggtccagtgtttcta

SEQ ID NO: 259983 - DNA, 259 bp, Homo sapiens
  chr8:144575937-144576196
  hypo
ccttaatgagcagccgaagggatcggtaagcataatttcagaggccagtaatattttatataatcgccgagtggtttaaattgaaaacccccaactgaatcaatatttactgcattgaaacgaaatgaatagtaataagtcactaagctccctgtcctgtttcataaaataaaaaattataaaaatgagcacaggcacagggaggccatcacattaacttttacagcacttggggagccgtaaccgcctgttcccataa

SEQ ID NO: 259984 - DNA, 147 bp, Homo sapiens
  chr8:144577123-144577270
  hypo
cacgtgagaatgcagattagaaaggcggtaacaccacgtctgaggggaacagaaagggtcgcggcacgctggaaagcagtttggtgatgtcacatcaagtcagcagatgtcttacgtcccagcgatcccacgcgcgacagtcatgga

SEQ ID NO: 259985 - DNA, 33 bp, Homo sapiens; identical to SEQ ID NO: 212646
  chr8:144589672-144589705
  hypo

SEQ ID NO: 259986 - DNA, 397 bp, Homo sapiens
  chr8:144589919-144590316
  hypo
atagtgagagccgccgggcccgccaggagggcagagacagggggaagggcggggcgctgagaggcgaggccggcgtcttcttgacaatgcggtagcgggtcttgatcaccttgctggtgggtgcagtccgcacggcatgcaggctggacgctgtagagaaaacccagggcacagacatgggtcagggaaggccggcaagggtagggtcagagaggccacccacagtgccagctctgcccaccgcctccgccggagcttgaagaccctccatcgccccgtggataaaaccctcaacccatgtggcacacacatccccagggcgcctggcagccgacgcttcaggagctagccagtgcagcctctgagaggcgggcaccagccccgcacaccctccagc

SEQ ID NO: 259987 - DNA, 265 bp, Homo sapiens
  chr8:144610876-144611141
  hypo
tctgccaggccctcacccctcggttgcccgctaagcatggtgactgccccaccttcccgcccatggcctgcccatggggcctcctgagggagcgaggccctcccttctgcccaggtccagtcctctgggagggggggcgcctcaccctcaccaggagctgccgcagcctgaggctcacgtgcacgcagggcggccagggtgctccccacagcaccttcttaacaggcaggacggacaataagccggcaattcctgcaatacaaaa

SEQ ID NO: 259988 - DNA, 83 bp, Homo sapiens
  chr8:144617126-144617209
  hypo
cggcagcccccacacggctcttgggtctgcccaggcccagctccttccagagccgtctgaagcctccctagatgacggtacgc

SEQ ID NO: 259989 - DNA, 189 bp, Homo sapiens
  chr8:144621156-144621345
  hypo
actttgatgaccacgttctgaccctgactgagctggacctgtctctcaaggacatgctgctgcgggacaggaggctggcccccccgggccccgtgcaacggccgcacagcatggtcggcaggagggtctgagggtcccgggggccgattcacgagggagtatttcttgcgccacgaaggcccatggtgg

SEQ ID NO: 259990 - DNA, 285 bp, Homo sapiens
  chr8:144656841-144657126
  hypo
tgcaaatcttcctgctacctcgagctcagattcccgactccagcccagccgcagcccgggaggcgcagcccgtgggctgggtgaacaaacgacacaaacaacacaggacaagctgtggggaaaagtgagtgattcgtgttgtttccagtcagccccgctccgagtctcagggggactgccccgcacacagactgttcaccagggcctgcagcctctcggacagcaccacctgcagggagcagaggacaggagcggtgggcagggtgagggcgggggcgcacaggg

SEQ ID NO: 259991 - DNA, 286 bp, Homo sapiens
  chr8:144658240-144658526
  hypo
accccacctcctgggccagtcgggccagcgcctcctcgtcaatgttgttgctgactacgatgaggactgactccagccagggcacctggaacctgccgcgtgggtggagaaagggtgggggccacccctcgggtcttcctgattcaccctggtgtccccctgctccccgccccgcctcagtcaaggacacctgtgctcaccttctgcttgggagctcctagggagccccaccacttacttccctgccacggcctgcagtatcaccgctgaaacttcagcagagtac

SEQ ID NO: 259992 - DNA, 227 bp, Homo sapiens
  chr8:144661845-144662072
  hypo
ggagggagacaggccaggtacgagcaggaaatgaccaggacggagccagagggccggtctcagtctttaatcgtggcagggcctcacgcacgcgcgcacgtacacacactcaggcttcagatcttgttgaaagctgcgatatcgacactctgcacctgaggagaggcggagggtgacggtcagggctgttcccctacagcccactcggagccaggagcctcctctga

SEQ ID NO: 259993 - DNA, 325 bp, Homo sapiens
  chr8:144668626-144668951
  hypo
acgacaggcaaaggcgcccatgtctgcgggggaaggagtgccaggcctggccccacaccaagtgcacaggcgccggcaggagggccctgagcagacccggcccgggggcccggccaaggccgcctgccccgagaccccactcccagcacccacagcagagccactgggccagggtgcctctgccttcctggcctggctgaatccgctttgtgtgccccggccactcctgtcgggcagcagagccgcccagccgccccacgtgcagctctcacctggcgggaggcacctgccacaggcccgttcatctgctcgtagaatctccttt

SEQ ID NO: 259994 - DNA, 259 bp, Homo sapiens
  chr8:144675968-144676227
  hypo
agccagcacagccccccacacgtccgagcccacctcctcatttccccgcttcccgcattcccaagcatgggaggacctgccggacgcagcgcaccatctctcctaacagagaccaagtctgagcttcaaagcttgcgcagacgacaggcacgtgcaagcctctcctctccagcaggagagcccggagcaggacacagcgactctttcaactgcgtcccgacaaacggtcagccccttcgctcctgcagtttatccaagc

SEQ ID NO: 259995 - DNA, 88 bp, Homo sapiens; identical to SEQ ID NO: 212653
  chr8:144676812-144676900
  hypo

SEQ ID NO: 259996 - DNA, 217 bp, Homo sapiens
  chr8:144681634-144681851
  hypo
acaagtgcctggctccggaggaggttgcggagtggctgcacctggacgatgatgggggtccgcccgagggctgcagggaggaggtgggcccagccctgccccctgcagcgcctccggccccagccagtctgccctctgccatggggggcggagaggacgaggaggaggccaccgactatggagggacctcagtgccgactgccggggaggccgtgcg

SEQ ID NO: 259997 - DNA, 216 bp, Homo sapiens
  chr8:144683683-144683899
  hypo
gctgacttcacggccgcggtgccagtgagggctgcatagccaggccttgtctgtagtctgggcggcccgtggcgctgcccttcagcccaactactcattgccgctgcgtctttggcgaggctttcatttccaacctttcttcccatctcagcccttttgttggcccgggtcccaggaggctggtgtcggtgagggcaggcccgctcctctcatcgg

SEQ ID NO: 259998 - DNA, 35 bp, Homo sapiens
  chr8:144717163-144717198
  hypo
ggaacagcggttcacgcctgtaatcccagcacttt

SEQ ID NO: 259999 - DNA, 198 bp, Homo sapiens
  chr8:145155548-145155746
  hypo
aggataagcagggccttccacgcacccagcgctgttcctggccccggccccggccccggcccccactgaacctcaaggatcacttatacatgctcacctcagggtttgtttgctgcttccttggtcacatggttcatgccatgaccttcaaatttcactccagtgtcacctcaatgaggccttccctgccaccacttt

SEQ ID NO: 260000 - DNA, 231 bp, Homo sapiens; identical to SEQ ID NO: 212655
  chr8:145161408-145161639
  hypo

SEQ ID NO: 260001 - DNA, 60 bp, Homo sapiens
  chr8:145163871-145163931
  hypo
gccaggcatgtaggggcacacggccctcacacacaaggcgatgttaagtccattgggatt

SEQ ID NO: 260002 - DNA, 83 bp, Homo sapiens
  chr8:145214941-145215024
  hypo
gattacaggcgtgagccaccgcgcccggcccacgcctggtaatttttgattggatgccaggcgttgcttttgcttggtgttgc

SEQ ID NO: 260003 - DNA, 67 bp, Homo sapiens; identical to SEQ ID NO: 212656
  chr8:145223205-145223272
  hypo

SEQ ID NO: 260004 - DNA, 100 bp, Homo sapiens
  chr8:145223919-145224019
  hypo
aaccctaggacagacgtggcccggctggctctcacctcccaggatttcggcctcgcctgatcttggttcagtggttctctgtcaccgctgacagcgttag

SEQ ID NO: 260005 - DNA, 292 bp, Homo sapiens
  chr8:145226071-145226363
  hypo
cttctgatgccagtcgcaagccccaggtgtggcctgtgcttctgaccgacctgccatgaatcagggttttcacgaccccctcctcaggcttgatgaattgcagcagtggctcacagaatgcagggacagagtggcctgcgtttacccatttatgacacaggctgtgacgaagggtgcgggtgcccagcaggtggaggagacgcttgggcaggaatggggaggggcgcggagctcccgggccctcctgggaaccacctccaggcacctgcgtgggttccgctaccggaagctc

SEQ ID NO: 260006 - DNA, 236 bp, Homo sapiens; identical to SEQ ID NO: 212657
  chr8:145235189-145235425
  hypo

SEQ ID NO: 260007 - DNA, 82 bp, Homo sapiens
  chr8:145273270-145273352
  hypo
atgaggttttgcaccggactcctgcacctattccagtcaggccgtcatcctgtgtctctctggccagcggggaagcccagtg

SEQ ID NO: 260008 - DNA, 153 bp, Homo sapiens
  chr8:145278744-145278897
  hypo
gctcagaacagacacgccgccctccttgtgttctcgtgaccatcactgtggtgcccactgtgcctcaagtgggatacgtgaatttaactggaaacatctgagctcagtgactgcatgctgtgatgttgcctctaagtgcgtggtcgtcagtga

SEQ ID NO: 260009 - DNA, 175 bp, Homo sapiens; identical to SEQ ID NO: 212658
  chr8:145661367-145661542
  hypo

SEQ ID NO: 260010 - DNA, 148 bp, Homo sapiens; identical to SEQ ID NO: 212659
  chr8:145679540-145679688
  hypo

SEQ ID NO: 260011 - DNA, 64 bp, Homo sapiens; identical to SEQ ID NO: 212660
  chr8:145680955-145681019
  hypo

SEQ ID NO: 260012 - DNA, 38 bp, Homo sapiens
  chr8:145719389-145719427
  hypo
gagaaacaagacaggcgttccgtcgggagtgtggctgc

SEQ ID NO: 260013 - DNA, 129 bp, Homo sapiens; identical to SEQ ID NO: 212661
  chr8:145721882-145722011
  hypo

SEQ ID NO: 260014 - DNA, 211 bp, Homo sapiens
  chr8:145736700-145736911
  hypo
attttggagcctcctcgttcccacaccctgtggcaggttttgcccaggtcctcagtcactgccctagcctctgacaaccccagctctacccgacatcccccaatgcagtgcagtcagcgggccacctgcaggagctcttccgtggccaggcccaccagggcatggaagctcaggtgcaggtattttctccagaagcgtcggtcctgcccgt

SEQ ID NO: 260015 - DNA, 151 bp, Homo sapiens
  chr8:145737564-145737715
  hypo
ggcctggcgctcccgggcctgcacacggccatagaggaagtcacatatctggtccttctcctcagcggtcaagtcccccgggctgcgaaggtggaaggccagctcactgaactccacaagcacccctgtcccacgccgcacacctgccgga

SEQ ID NO: 260016 - DNA, 818 bp, Homo sapiens; identical to SEQ ID NO: 212664
  chr8:145738000-145738818
  hypo

SEQ ID NO: 260017 - DNA, 136 bp, Homo sapiens
  chr8:145739824-145739960
  hypo
ccttctgcaggacagattcccgttgcttcctggtcatgcccgagtgtatgcaggccgccttgagacacggtggcaggccagacacctgcaaatgcaggagcgacagccgtcatacgccagcccagccctggccctt

SEQ ID NO: 260018 - DNA, 240 bp, Homo sapiens; identical to SEQ ID NO: 212665
  chr8:145740331-145740571
  hypo

SEQ ID NO: 260019 - DNA, 191 bp, Homo sapiens
  chr8:145745102-145745293
  hypo
cagcaccatgcacacgcttgtgttcttgagcacacggcaggtgctgcagtgccagccagctgcctgccaggccctgcccttgctgccacgcgaactcttccccctgctgttcaaggtggccttcatggacaagaagacagtggtactgcgcgagttggtacacacgtggcccttcccgctgctcagtttcc

SEQ ID NO: 260020 - DNA, 295 bp, Homo sapiens
  chr8:145745870-145746165
  hypo
gcggctctgctgccgggacctgcgagctgaggacctgcccatgcgcaacactgtggccctgctgcagcttctggatgcaggctgcctgcgccgcgtggacctgcgcttcaacaatctgggcctgcgcggcctgtctgtgatcatcccacacgtggcccgcttccagcacctggccagcctgcggctccactatgtgcatggggattcaaggcagccctccgtggatggcgaggacaacttccgctacttccttgcccagatgggccgcttcacctgtctgcgtgagctcagcatg

SEQ ID NO: 260021 - DNA, 405 bp, Homo sapiens
  chr8:145753290-145753695
  hypo
cctgagcgcaggacgcccactccttggtgcgctgggcccgtcggcagagtcggggagcccatcaggggctgcccggaagggagaaagaaggggctggagagggaggcacagcattacctttgaagcaggtgatgaaattcttcattttggaatcatccaggaaaagctgcagatagagggccaggccgtgataagtcccagcgtgcaggtgggggcggggaagctcaggaggtcctgaagctcgggaggtcctgaaccggcccgagcccacttttcctgcttgtctgtgcacaccgcatgcagggaggcgcgtgaaaggtaaacctgggggccccgccgacttatccgcgtctatgcgcacctctgctccctggtcagccaattctttcccgcaccttttccctc

SEQ ID NO: 260022 - DNA, 264 bp, Homo sapiens
  chr8:145758478-145758742
  hypo
ccacacccggcgcccggggttgccgtggcacctgaagatgccctctgtctggtcaccgttgagcgccagcacctcctcagagagccgtgtctgcacccagggcagctggcgctcggggtagcgctctctctgcatgcccatgacctcctgcagtgcgctgccgaacatggacgggctgaacacggcgttcttggcatgccggatctcctccacgttgggcttcttcagcccctgtgaagacagaggctccgtcctggtctggcc

SEQ ID NO: 260023 - DNA, 57 bp, Homo sapiens; identical to SEQ ID NO: 212669
  chr8:145763001-145763058
  hypo

SEQ ID NO: 260024 - DNA, 402 bp, Homo sapiens
  chr8:145770758-145771160
  hypo
ccaggcggaagttctcggtggtctgccggcacagctggatgtagagctcgtcccgcaggccctgcacgctccagcccttggtggccacctccagggccacgtgcagtgggtcggccttggcccgccggtcacccatgtacatctggatcagcttgaagagctcgcaggcctccttcttcacgtgccggtcgcttgtcacgatcatgggcttcttgatggactcgctgctccaggccagcatgttggcgatggacaccttccgccggaagaggccctgcgtgtgcttgttgaagtgcttggaggcccagttctcgatgtccgtctccgaggagggcttgcgcagcgtgaaagtggggaagacgcagctggagctgggaacgccgctgcggctctgccggctgc

SEQ ID NO: 260025 - DNA, 566 bp, Homo sapiens
  chr8:145772641-145773207
  hypo
ccagcgcctcgtcctcgctgaaggcccgcaccaccggcccgggcatgggcagtggcagggcgccgtcgctctcgtagccagagccgtcctgctgggagtcccagctgctcctctgcttcatgtggaagtgggcctgctgcgcctcccaggccagccgagcctgcgccaggaagggctcggccgcgccccgcgccccttcggcctcaccttccgctcgcttcacgggggcgaggctggtcccgcacgggggctgttcctcggccaggggctgctccacaagcaggtccccggggccctcagtgggggtggcgctggtggcttggcacaaagagggctttctgctcttccgcttgcgcgtgcccggggagtagcctgtggaggacagggtgtcctgctggctggaccaggacatggcatcctcctgggcctgtggcagcggcgtgggcggctggctgtgccgcagctcaggtccctccatggtgctgtagtctccggacttgacgcccaggcgctggtccctcagcaggcaggggctgggctgcaaggagtacgaaccaccgccgggg

SEQ ID NO: 260026 - DNA, 35 bp, Homo sapiens
  chr8:145779199-145779234
  hypo
ggctgggccgcccaacgcagcggcaaggcctcttc

SEQ ID NO: 260027 - DNA, 121 bp, Homo sapiens
  chr8:145780880-145781001
  hypo
gcctggctcactgaggaagccgccctccatcacaaacggccacgcctgagagatgggttctacctgtagtgaagaagctggccgtccgcactgtaatcccggtaaatctcatagtccttct

SEQ ID NO: 260028 - DNA, 188 bp, Homo sapiens
  chr8:145804872-145805060
  hypo
accgacaccaacaccgtcttcccggtgtgctccagtggctcctccacacctgatttgccccacctcctgcccactctgcagcaggccccatccctggcctccctttcatcctgccagaccgggtccacgggatgaacctgctgcccgcctccctctgtgcctgcacctcggcacggtgggacggaagc

SEQ ID NO: 260029 - DNA, 139 bp, Homo sapiens
  chr8:145805453-145805592
  hypo
gtcctctctggactcgcttcccacggtgcactcacctcgaggcccttgcgctctaccctgacctctccctgtttctgagggcaggggtctcctgggctcccaccaacacaggctgtgctccttcggagccactgtgact

SEQ ID NO: 260030 - DNA, 170 bp, Homo sapiens; identical to SEQ ID NO: 212670
  chr8:145811091-145811261
  hypo

SEQ ID NO: 260031 - DNA, 571 bp, Homo sapiens
  chr8:145813606-145814177
  hypo
aagacagagcagggccgccccgagggctcctgagcacgcatcctgcgtgagggaaccaggcaggggcctgcaggctgtgcgctgcattgaggctcatggaggcacaaaaccaacggtgatgccagaggctgactgcccggtggggcacatcatgagcctgcacctcctcgaacacttctctgcacacacgtatgttagctaacatgttttcagaggaagagaaatgtgcctcaccctatggggaggtggccctaagcctccctcagcagccaggaagagcagccgtatgcagcagggacagaactgtggggaccgcggagagcggcagactgggtgcgggaggcggggctctcgccaagccatctggagaaactcggcccagggcccgaaggggaaggtaagacccagtagggctggggacccagctggccacctgaagcccacggcctgtctccgtcaaacccagcgagggtcagactcacagccggaggcagcacggcggcacgggggaacacagcaaagcctcagcagcctcagctgggccaccatggccaacgtgggcaggactctt

SEQ ID NO: 260032 - DNA, 281 bp, Homo sapiens
  chr8:145814544-145814825
  hypo
gacacagaggctctgcgctgcctgtgccatttccacgtaaatctaagattgttctaaaataaaaagtttgcttaaaaaaagtaagtagtctccatattttaaaatgttaattttatactctataaattatataagtagcacagtcggcctcatttcggagccagcagctgctcctccatgcaggcgtgtcccggcagggcctaccctggggcagggagtcatggcccagaggggctcaggggacaggagcgcccagagcagggcagcgggaagcccctcct

SEQ ID NO: 260033 - DNA, 175 bp, Homo sapiens
  chr8:145815417-145815592
  hypo
ccaacaagggtctctcgcctgtcatcctgcagaacacaaggccagcttggtgggctcaccagggacaccacatggcacgtgggacagaggccagagaagccttcccgacagggcctgacagaagatgccatcgacactgcggttggggcagggccatctccggaagatgccattg

SEQ ID NO: 260034 - DNA, 290 bp, Homo sapiens
  chr8:145823326-145823616
  hypo
aatggaagaaaaggccggaggagattcccagaggtggaaacctgagggctaagaacacacggagatgctcaaacccaccaggtaggaagccacgcagacccacccgccagcagggaaggagagtccggccagagtaggagctccgtggtggggaaggagcagcccggggaagtccagagggcgcccggcatggcctcgaaggctggacacctgcggggccctttccgcattgcgtgtaaaggggaaattcggaacccagccgtgggcctttccgcgttgagtgtaaaggg

SEQ ID NO: 260035 - DNA, 96 bp, Homo sapiens; identical to SEQ ID NO: 212672
  chr8:145826423-145826519
  hypo

SEQ ID NO: 260036 - DNA, 36 bp, Homo sapiens; identical to SEQ ID NO: 212673
  chr8:145826579-145826615
  hypo

SEQ ID NO: 260037 - DNA, 306 bp, Homo sapiens; identical to SEQ ID NO: 212674
  chr8:145828364-145828670
  hypo

SEQ ID NO: 260038 - DNA, 261 bp, Homo sapiens
  chr8:145831271-145831532
  hypo
ggccagccccacacgcagcagggaggctgtgcccaccagccaggatcccccccatgccagtctgagacaccagccccactccacgatgggccggggcaggcacaagccaagcatggggggaccgtgggaccgtaggactggaggactgggaggagggcgaacaggaggacacaggacctgctccgccctcactctcagccccacatctgagactcagtgtccccagctgtccacacaggcgacactcgccggcagtcactg

SEQ ID NO: 260039 - DNA, 78 bp, Homo sapiens
  chr8:145843552-145843630
  hypo
ctttcaagaacccctcgcctgcctgcatggcaaagcccacccgagcccagtgccccttgtccccgccctctcccagac

SEQ ID NO: 260040 - DNA, 64 bp, Homo sapiens; identical to SEQ ID NO: 212675
  chr8:145844223-145844287
  hypo

SEQ ID NO: 260041 - DNA, 472 bp, Homo sapiens
  chr8:145844496-145844968
  hypo
cccacctcacattgccggaaagttccagtcatgagtgggcaacaggcgcttgcttccaacgtcccacgccgaatctggaacagaggatgctctgtgccagctccagacagggtctgctgggaaagcaagcgcggaaacagcatctgcctgggctggcgacgcccgccatagaccagggtgccagaggcccctcgctccgagaagcgcgggtccccatccccgctccagggccggcacgcagcatgcatgtgggcctgtgtgtcccagagggagagtgtgtgcccatgtgcgtgtgcgcccgtgtgcgtgagcccgtgtgtccctgagacagcaggtatgctcgtgtgcgcgtgagctcgtgtgtccctgagagaccgtttgtgtgagcctctgtgtccctgagaaagcgtgtgtgcctgtgtgcacgtgagcctgtgtccgagacagcgtgagtacccgtgtgtgtgtgaga

SEQ ID NO: 260042 - DNA, 666 bp, Homo sapiens
  chr8:145845209-145845875
  hypo
agagtgtgtgtgcccatgtgcgagcttgtgtgtccgagagagcgtgagcccgtgtgagtgagcctgtacatccctgagagagcgtgtgtgcccgtgtgcgtgtgagcctgtgtccctgagagcatgtgtgcctgtgtgcgtgtgagcctgtgcatctgagagcgtgtgtgcccatgtgtgagcctgtgcgtccctgacagtgtgtgccggtgtttgtgtgcctgtgcgtccctgagagcgtgtctgtgtgtgcccgagtgtgcgttgagcctgtgtgtccctgagcatgtgtgcccgtgtgcgtgtgagcctgtgtgtccctgagagcgtgtgcccatgtgagcttgtgtgtccctgagagagcgtgtgtgcccgtgtgtgagcctgtgtccctgagaaagtgtgtgtgcccgtgtctgttagcctgtgtgtccaagggagcgtgtgtgcccgtgtctgttagcctgtgtgtccaagggagcgtgtgtgcccgtgtctgttagcctgtgtgtccaagggagcgtgtgtgcccgtgtctgttagcctgtgtgtccaagggagcgtgtgtgcccgtgtctgttagcctgtgtgtccaagggagcgtgtgtgcccgtgtctgttagcctgtgtgtccaagggagcgtgtgtgcccgtgtctgttagcct

SEQ ID NO: 260043 - DNA, 167 bp, Homo sapiens; identical to SEQ ID NO: 212678
  chr8:145849042-145849209
  hypo

SEQ ID NO: 260044 - DNA, 42 bp, Homo sapiens
  chr8:145849872-145849914
  hypo
gctgcctctaacccgcacatctgcaccgacacggctgcacga

SEQ ID NO: 260045 - DNA, 152 bp, Homo sapiens
  chr8:145852008-145852160
  hypo
tgcactgcagcaggcccagcaaaagccctgccaacaccaccagcatctcttcctgagtcctgacctccccacgtacaaggtggacccccacggcccgtctccaagaccaaggtctgccctcctaccggggacacgcccgcggctctgctggg

SEQ ID NO: 260046 - DNA, 69 bp, Homo sapiens
  chr8:145854282-145854351
  hypo
accgaaatccagcttcgcattgccgcaccccatcacttttgcgcccgggaggacgcgtgcgattcttgt

SEQ ID NO: 260047 - DNA, 113 bp, Homo sapiens; identical to SEQ ID NO: 212679
  chr8:145854689-145854802
  hypo

SEQ ID NO: 260048 - DNA, 99 bp, Homo sapiens; identical to SEQ ID NO: 212681
  chr8:145978673-145978772
  hypo

SEQ ID NO: 260049 - DNA, 192 bp, Homo sapiens
  chr8:145979452-145979644
  hypo
gatcagactgatacccggggacaaggggcaggaccctcttctttgggatccaaagagccaaagcagcctcccaagctcctcagaggcccccactgcgaaccaggccaagtgcagagagcctcacccagagaggccacgttcccatagttctccagcatcacatcccggtagagcgcccgctgctgggggccc

SEQ ID NO: 260050 - DNA, 253 bp, Homo sapiens
  chr8:146033024-146033277
  hypo
ttccggcagagcacgcagctggctgcccaccaccgcgtccacacccgcgagcggccctacgcatgcggcgagtgcggcaaggccttcagccgcagctcccggctgctgcagcaccagaagttccacaccggggagaagcccttcgcgtgcacagagtgcggcaaggcgttctgccgcaggttcaccctcaacgagcacggccgcatccacagcggggagcggccctaccggtgcctgcggtgtgggcagcgct

SEQ ID NO: 260051 - DNA, 335 bp, Homo sapiens
  chr8:146036126-146036461
  hypo
tcacacccacagcacggacagcgggaataacacttcctttggggatccagggtttctggtgtctccagatttttcaggcgccaccatgttcctctcatccagacgtcagcacccaaggtggaagcaggtcatggcatgcccggcccagctgcagtccgagtgcagatcccatggcgagcgtgggatccagcccaaagcacaagccacgcacagcccgccaggttgagtgggcaggtacctccaacagccagcccaggttgagtgggcaggtacctccaacagcctggagccgtgaggccttgcgcaggggcgttgccggccgtggaggtctctgg

SEQ ID NO: 260052 - DNA, 203 bp, Homo sapiens; identical to SEQ ID NO: 212683
  chr8:146046147-146046350
  hypo

SEQ ID NO: 260053 - DNA, 138 bp, Homo sapiens
  chr8:146079241-146079379
  hypo
gctattagagaaatgcgaatggaagccacggggaggtgccatttcataccattagaagggttataataaaaatgacaggttgggtgcggtggctcacgcctgtaatcccagcactttgggaggcggaggtggacaacc

SEQ ID NO: 260054 - DNA, 84 bp, Homo sapiens; identical to SEQ ID NO: 212685
  chr8:146105089-146105173
  hypo

SEQ ID NO: 260055 - DNA, 160 bp, Homo sapiens; identical to SEQ ID NO: 212686
  chr8:146176579-146176739
  hypo

SEQ ID NO: 260056 - DNA, 82 bp, Homo sapiens
  chr8:146301130-146301212
  hypo
gccagcgagcactccgccgagactctacacagctctttgcttcagacccaaggccatggctgagctcaccaggggacctcct

SEQ ID NO: 260057 - DNA, 82 bp, Homo sapiens; identical to SEQ ID NO: 212687
  chr9:173863-173945
  hypo

SEQ ID NO: 260058 - DNA, 34 bp, Homo sapiens
  chr9:413857-413891
  hypo
ggctgggcgctcggcggctcacgcctataatctc

SEQ ID NO: 260059 - DNA, 99 bp, Homo sapiens
  chr9:573570-573669
  hypo
aggattttttttttaaagccagaagtaatataagtcggtatcagtgagaaaaggtggtgaggatagcagggattaagtaagtcgcgggcattttatttt

SEQ ID NO: 260060 - DNA, 35 bp, Homo sapiens
  chr9:671596-671631
  hypo
cagagcgaaactccgtctcaaaaaaaaaaaagagt

SEQ ID NO: 260061 - DNA, 282 bp, Homo sapiens
  chr9:738242-738524
  hypo
tctataaatagaagaactaacgaccacttggtgttttggcagaggttctgtctgaacaccctccagcacgagtggttccgcgtgtccagtcagaagtcagccattccagccatggtgggggactacatagctgcttttgaggccatttccccagatgtcctccgctatgtcatcaacttggcagacggcaacggcaacacagccctccattacagcgtgtcccactccaacttcgagattgtgaagctgctgttagatgccggtatgttggctgcccttcca

SEQ ID NO: 260062 - DNA, 456 bp, Homo sapiens
  chr9:2047359-2047815
  hypo
ccgcagccggccccggggcagccctcgcccgtcctccagctgcagcagaagcagagccgcatcagccccatccagaaaccgcaaggcctggaccccgtggaaattctgcaagagcgggaatacaggtaacgcaccccgccagcaaggggccccctgcggtgtgctagcacctgccgcccaagccgaggggggtgaggcgcctgcctccttggttggccaaactgtgattttcacccgtgcggtcggaaaactttcatccactcctggggccttcccggtgctgaggggaggcaccggggttttgaagatcaaaagccgacggggacttcctgtggacccgagagagtgatcatctcacactgcgactgtggaatacactgtccgtgtttgtgcttgtgcggttcggtgatgacggaggggctgggacgctgagtgtgttgcgctggcctgattttc

SEQ ID NO: 260063 - DNA, 149 bp, Homo sapiens
  chr9:2086730-2086879
  hypo
ggatgggttctttggttttccgcaccaccacttgcttgttggaaatagttgtattttcccttgcttactacacgtccgtccttcctcttgtgttatagattcggtggaaatacatgatagtggacgaaggccaccgaatgaagaatcac

SEQ ID NO: 260064 - DNA, 147 bp, Homo sapiens
  chr9:2115834-2115981
  hypo
aagaccgagctcaccgcatcgggcagcagaacgaggtccgggtactgaggctctgtaccgtgaacagcgtggaggaaaagatcctcgcggccgcaaaatacaagctgaacgtggatcagaaagtgatccaggcgggcatgtttgacc

SEQ ID NO: 260065 - DNA, 231 bp, Homo sapiens
  chr9:2170356-2170587
  hypo
gagccgggcggggacgagaacccaggtcttctgactctagtgttctttctactctaccgcaggtgtaacgtggagaaggtgcccagtaattctcagttggaaatagaaggaaacaggtcaggatctgtcttgtattcccctatctctaaatacaggtatccctcgttacgtgaaacagattgaatcatataatcggcctttggaagcaaatttcttcggtcacctcctgat

SEQ ID NO: 260066 - DNA, 98 bp, Homo sapiens
  chr9:2170837-2170935
  hypo
cttggtttagaagcttaatgcgaagcacctgtagtgacttgatctcctgcgagacatgaagaagcgtgcatgttcacgctgtgtctgcattccagagt

SEQ ID NO: 260067 - DNA, 400 bp, Homo sapiens
  chr9:2177850-2178250
  hypo
cagaggtagatttcttaactagcatatcagccttcagcatgtctctaagcttaaaatataatcaaagctaaagctgacatttatgtaaagtttataatgtatgcagtcaccagtttagagtcatagtatagatgtggaattatacttttggtttgtggaggtaatgaggaaaaaaaaaaacggttcccagatgaagcataacaaattaaatctcagtagtgtgtgtatataagccatgcatacaaggagttcaaactaccacttgcacagtggtatgtggctcttttccatctcgtactctatggtctcatggccacgtcgcggtgtctgttcacttccatgaagaggagaggttcttgtccaccaacacctgtgaaccgtaagaccagtgagtgccttt

SEQ ID NO: 260068 - DNA, 93 bp, Homo sapiens
  chr9:2272286-2272379
  hypo
gcaagaaacaaacacttgagaactaagttacactgctggaggaacgatgaacgtctccttactgccaattacgttaaccttcccaatgacttg

SEQ ID NO: 260069 - DNA, 312 bp, Homo sapiens
  chr9:2717324-2717636
  hypo
cgcttcctaagagcgaggttgaccgacatttttattagcaataatctctgccttcttctgattacctagagatttaagaccacataatcatcctctacctcacagggtcaagggagtgggggaggaaatgggctaagaggttctaaatccctcctaacacttgcttcttccaaatcagcaagattagagcagtcaacagctgactgcgttcagaccctgcaggctgggctggcctgcccaggacctgagaaggggcagctccggtggcaatgtctgagcccctagctgtgctggtccgggctggcctctcta

SEQ ID NO: 260070 - DNA, 133 bp, Homo sapiens; identical to SEQ ID NO: 212693
  chr9:2718724-2718857
  hypo

SEQ ID NO: 260071 - DNA, 196 bp, Homo sapiens
  chr9:2876420-2876616
  hypo
gggcatggtgctgccgtgggcgctcgggccttgggcgtctggctctgtctctgactccagacctcaaacagggaccgccttctctgtgctttctccgtgtctcctgtgcgccctggcctctgcgtcacagcccgcggctgggccgaatccttccagagtcccacaatgctattataacagccgggaatcatttgaa

SEQ ID NO: 260072 - DNA, 866 bp, Homo sapiens
  chr9:2933126-2933992
  hypo
agccgctgccatgacgccggctgcagtggggtacaggagtaggtcgcgggtcctcaggtacagactctgaggtgtgcagcccctggagcctgcacctaggagcgcccccggaacctgctgccctgagaactcacccctgggagccccgggaatagggctgggcccagccaccccctggagggagagtagggaggtgaggcacagaaaatgggcagagagggtccccaagacagaactgggcccagggcggtgccgcgcttgcacgcggagcatgggggccgggcccgagacatggaactggggccccgcttcaggggcccagggcaagaagtgggagcggcacccacttcgaggacctgcccagtggcatgaccactgcgcccaacccgccgatggcgccaagttcctgcgcctcaggaagaggctccgtatggggccgcctgaggccgtatccccaggacctgccccacattaaggtgaccgctaagccagacaatcctgatggtgaggccccgtgcctgccatctgctcctggagacgccccccaaccccaggcatggccgtcagccggcgaggcggtactgaggcagggggcgcgtcctggtcattggagagtttcagcccagtgggtgaaccagacacactgttcaagggggcagcggttagtaagcaggacgagggggagccccaggccgcagggagaactcgtgacaacgtcacccctgccccagtcgtaggcccgggcccagtgaggacatgaagcccccgcctcaggctgcaaggaggcgccaccagggctgcaagctccacggagctggtgggacctggagacaggcgagaaccccgccccttccaatttggagcaa

SEQ ID NO: 260073 - DNA, 68 bp, Homo sapiens
  chr9:3262996-3263064
  hypo
tctgaagcactgcacgagctgcctgggccaggtgattaagcgacgtgtatcttcgcagagtctgggca

SEQ ID NO: 260074 - DNA, 31 bp, Homo sapiens
  chr9:3469785-3469816
  hypo
cagtgagctgagatcgcgccactgcactcca

SEQ ID NO: 260075 - DNA, 40 bp, Homo sapiens
  chr9:4622943-4622983
  hypo
cattcctctctggtccgagtatctacatttttgaaaaaag

SEQ ID NO: 260076 - DNA, 78 bp, Homo sapiens; identical to SEQ ID NO: 212696
  chr9:4714888-4714966
  hypo

SEQ ID NO: 260077 - DNA, 160 bp, Homo sapiens
  chr9:4804634-4804794
  hypo
cgccggtgttgcccggtccaacgccccgatgcccctggcctgcatggctagtcaaagcggccggtggccggtgcgctggtggggaggacgatcggctgacgccagcgaggacacggtggcggccactgactcctgccggagcagcgaattggaagggatg

SEQ ID NO: 260078 - DNA, 208 bp, Homo sapiens
  chr9:4864401-4864609
  hypo
aagaggccatttgagtggaacgctttatcagtgtttggcatctaacaaaggccgagccacgtcactcctttactccagcaaatgaaagctgtccggttgtcagggtttgcccgggtgtggggctgccctccttcctggtcgcatttggcccgtacctgtcaggtaccctgagcacgggcctgggatcggcacctgttttaaaacatcc

SEQ ID NO: 260079 - DNA, 43 bp, Homo sapiens; identical to SEQ ID NO: 212697
  chr9:4987437-4987480
  hypo

SEQ ID NO: 260080 - DNA, 41 bp, Homo sapiens
  chr9:5418576-5418617
  hypo
tggtcaccacagtgacggacttctgccggttcctgggcagc

SEQ ID NO: 260081 - DNA, 34 bp, Homo sapiens; identical to SEQ ID NO: 250599
  chr9:6183187-6183221
  hypo

SEQ ID NO: 260082 - DNA, 80 bp, Homo sapiens
  chr9:6756348-6756428
  hypo
aaggatggttgggatcctgacgttacatgcacacatttggaaaattcccagttgagtatacgttagccaagttcagaatt

SEQ ID NO: 260083 - DNA, 219 bp, Homo sapiens; identical to SEQ ID NO: 212704
  chr9:6868325-6868544
  hypo

SEQ ID NO: 260084 - DNA, 98 bp, Homo sapiens; identical to SEQ ID NO: 212705
  chr9:6868604-6868702
  hypo

SEQ ID NO: 260085 - DNA, 142 bp, Homo sapiens
  chr9:6883915-6884057
  hypo
gcagtaaaaaaaaccccatgcgtgtaatgacacacacaccagttaaactgggtggaaattttaaatctcggttttctgctaattatcttgaaatggaaaaaacttgcccattacacaacgcgcaccatgtctaggagattaa

SEQ ID NO: 260086 - DNA, 224 bp, Homo sapiens
  chr9:6997067-6997291
  hypo
tgcctcggtgcctgcgtttacaaagtagtgatggtagcagcacctgccgcatggaggaattgttttgagggttaaaaaagtgtttggcacataatgactgtttgttgttgctgttgtaaggagagggggaaagtgacagctgattggtaagggggagccaagttgtggccgttgaggagaaattttccaggaccagaatgggcgcagagcgatcagaactagga

SEQ ID NO: 260087 - DNA, 100 bp, Homo sapiens; identical to SEQ ID NO: 212706
  chr9:7028538-7028638
  hypo

SEQ ID NO: 260088 - DNA, 240 bp, Homo sapiens; identical to SEQ ID NO: 212707
  chr9:7028698-7028938
  hypo

SEQ ID NO: 260089 - DNA, 113 bp, Homo sapiens
  chr9:7032961-7033074
  hypo
ccagaactggataacgtcttgaattcaatttcccaactgacaacagcattggcatttttctttttcgaagagctctgaagcggctttgtagatcagagcgattgattttgaga

SEQ ID NO: 260090 - DNA, 37 bp, Homo sapiens; identical to SEQ ID NO: 212708
  chr9:7164555-7164592
  hypo

SEQ ID NO: 260091 - DNA, 66 bp, Homo sapiens; identical to SEQ ID NO: 212709
  chr9:7164622-7164688
  hypo

SEQ ID NO: 260092 - DNA, 232 bp, Homo sapiens; identical to SEQ ID NO: 212710
  chr9:7172202-7172434
  hypo

SEQ ID NO: 260093 - DNA, 44 bp, Homo sapiens
  chr9:7392965-7393009
  hypo
ggattacaggtgtgagccaccacgcctggccagaaatcttggtt

SEQ ID NO: 260094 - DNA, 138 bp, Homo sapiens; identical to SEQ ID NO: 212711
  chr9:7785325-7785463
  hypo

SEQ ID NO: 260095 - DNA, 189 bp, Homo sapiens
  chr9:13323279-13323468
  hypo
tggctgctgcccaaggagctcggcgagaccgcccatctgtccggtcctgctctccaccagctccttcgtcggactcagtctggatcttctcaacgcccagctcctggctccgagtcagggctctctggatgcacggtaacaccctcctcttctgggtaccctccctccgtctcatgttattatgagaga

SEQ ID NO: 260096 - DNA, 192 bp, Homo sapiens
  chr9:13753041-13753233
  hypo
tccaactctgggacacgatgccagggcttccagcctcagacagttcacaaccacatctgtccatccgtgtctctccagcccaacctccctgggccgtgattttctagctactttcaccgagcacctggttgtaaagtgggtttttgtgccttgtgattttggactttttaaagcattcggtcttaagccagg

SEQ ID NO: 260097 - DNA, 211 bp, Homo sapiens
  chr9:14232123-14232334
  hypo
tagcgagggaaggagcgacaccatggctaggtaagaatgaaatgggttcatggatgttaggaagaaaaaaacgtatgccatggtgggcaagtcaatagtgtttgtgccttttctgcatggctgctttttctcatacaagagccacttctggacaataatgagaccccgtaaagcatctgcttagggattacgaccccgtcacactgggaat

SEQ ID NO: 260098 - DNA, 96 bp, Homo sapiens
  chr9:14355600-14355696
  hypo
gtgtgtcctttgcagtcacacgggatcccatacttagaagtgccccacgttggcttaaataccctgcttgcctggccggctgcagtggctcacgcc

SEQ ID NO: 260099 - DNA, 42 bp, Homo sapiens
  chr9:14462634-14462676
  hypo
taagagaaacacaggactatcgaattcttatctctgggtttt

SEQ ID NO: 260100 - DNA, 206 bp, Homo sapiens; identical to SEQ ID NO: 212719
  chr9:14607839-14608045
  hypo

SEQ ID NO: 260101 - DNA, 180 bp, Homo sapiens
  chr9:14796912-14797092
  hypo
agtttacaattgaataatatcgctcagaattttagaaaatgatgatttcgatgtgaggcgggagggggtgttgacccatatggaacacagtagagaactggtggacaaaaaagtaccaagataatgaaagaagtgggttgatttatttccctccgccacgcttagttacaagtttcagca

SEQ ID NO: 260102 - DNA, 97 bp, Homo sapiens
  chr9:14974094-14974191
  hypo
acccactgcggtatggggagtaacatcatcccccggatattacaaacaatatcgcaggggtgtgtatattccttgcgatataaagagtaacatcatc

SEQ ID NO: 260103 - DNA, 34 bp, Homo sapiens
  chr9:14979217-14979251
  hypo
tacacatacaagaggctaaccgttttcttttttc

SEQ ID NO: 260104 - DNA, 63 bp, Homo sapiens; identical to SEQ ID NO: 212722
  chr9:15527748-15527811
  hypo

SEQ ID NO: 260105 - DNA, 36 bp, Homo sapiens
  chr9:15533122-15533158
  hypo
cccggccagaaagacgtgtttactacaaacacagcc

SEQ ID NO: 260106 - DNA, 92 bp, Homo sapiens
  chr9:15618919-15619011
  hypo
gggagctgcagactgccgctgtttctatttggccatcgtggcccctccccgccctgtccagtggtctttacgttactgctattgtaattgtt

SEQ ID NO: 260107 - DNA, 91 bp, Homo sapiens
  chr9:16144535-16144626
  hypo
cacttgggcagaatcgcacactaaataagtagtgaatttcgaatgttttgagagtatctctgatgagtcagaagtgcgctagtgaaacagt

SEQ ID NO: 260108 - DNA, 206 bp, Homo sapiens; identical to SEQ ID NO: 212723
  chr9:16268704-16268910
  hypo

SEQ ID NO: 260109 - DNA, 36 bp, Homo sapiens; identical to SEQ ID NO: 212724
  chr9:16886662-16886698
  hypo

SEQ ID NO: 260110 - DNA, 42 bp, Homo sapiens
  chr9:17018077-17018119
  hypo
ctgttcagtccagctcatagcgtgtggctgccagctcaccaa

SEQ ID NO: 260111 - DNA, 87 bp, Homo sapiens
  chr9:17223003-17223090
  hypo
tccaagcctcccaacgggtacttgaaaccatggatagcactgaaccctatgtacactacgttttttcctacacggtaataggcaggt

SEQ ID NO: 260112 - DNA, 1125 bp, Homo sapiens
  chr9:18776738-18777863
  hypo
cacctctttctctgtcccttcgggttcgctctccttccagggcccgggcggccatccacgaagcacagcccgcacatcgcggccgccaggaaggtctacatacagactcgcaggcagaggaagctgcacttcgtggtggggggcttcgcctacctgctccccaagacggcggtggtgctgcgctgcccggcgcgcagggtccgcaagcccctcatcacctgggagaaggacggccagcacctcatcagctcgacgcacgtcacggtggcccccttcggctatctcaagatccaccgcctcaagccctcggatgcaggcgtctacacctgctcagcgggcccggcccgggagcactttgtgattaagctcatcggaggcaaccgcaagctcgtggcccggcccttgagcccgagaagtgaggaagaggtgcttgcggggaggaagggcggcccgaaggaggccctgcagacccacaaacaccagaacgggatcttctccaacggcagcaaggcggagaagcggggcctggccgccaacccggggagccgctacgacgacctcgtctcccggctgctggagcagggcggctggcccggagagctgctggcctcgtgggaggcgcaggactctgcggaaaggaacacgacctcggaggaggacccgggtgcagagcaagtgctcctgcacctgcccttcaccatggtgaccgagcagcggcgcctggacgacatcctggggaacctctcccagcagcccgaggagctgcgcgacctctacagcaagcacctggtggcccagctggcccaggagatcttccgcagccacctggagcaccaggacacgctcctgaagccctcggagcgcaggacttccccagtgactctctcgcctcataaacacgtgtctggcttcagcagctccctgcggacctcctccaccggggacgccgggggaggctctcgaaggccacaccgcaagcccaccatcctgcgcaagatctcagcggcccagcagctctcagcctcggaggtggtcacccacctggggcagacggtggccctggccagcgggacactgagtgttcttctgcactgtgaggccatcggccacccaaggcctaccatc

SEQ ID NO: 260113 - DNA, 180 bp, Homo sapiens
  chr9:19103984-19104164
  hypo
ttataggcgtgagccaccgcacccggcccgtcgtcttaattgacagctgttgcctaccacaaaccccactgacaacagggcctggaagtggattgggtaacctgcttttaagtctcattgctacctctggcaatgattgtctcctgcctcactaaaatcaccttaataaaagagagagag

SEQ ID NO: 260114 - DNA, 94 bp, Homo sapiens
  chr9:19374749-19374843
  hypo
gcacaaaaactagccgcagtgcacacctgtagttcccaggcggtcaaggctgcagtgagccataccactgctcgccatccggggcgtaggagtg

SEQ ID NO: 260115 - DNA, 32 bp, Homo sapiens
  chr9:19414878-19414910
  hypo
ctattctacaatttcagcgaccaatacaattt

SEQ ID NO: 260116 - DNA, 44 bp, Homo sapiens; identical to SEQ ID NO: 212726
  chr9:19431391-19431435
  hypo

SEQ ID NO: 260117 - DNA, 44 bp, Homo sapiens
  chr9:20778484-20778528
  hypo
ttggcgttacaggcgtgagctgccacgcccggccgaccaattct

SEQ ID NO: 260118 - DNA, 84 bp, Homo sapiens
  chr9:26936774-26936858
  hypo
ttgttgcacctcccccggttgatgcaagcctctaccacttgagctgaagtgacttccaagaggatttaaaaggctgatgcccgg

SEQ ID NO: 260119 - DNA, 225 bp, Homo sapiens; identical to SEQ ID NO: 212728
  chr9:27212709-27212934
  hypo

SEQ ID NO: 260120 - DNA, 167 bp, Homo sapiens; identical to SEQ ID NO: 212729
  chr9:27340153-27340320
  hypo

SEQ ID NO: 260121 - DNA, 42 bp, Homo sapiens
  chr9:27380602-27380644
  hypo
attcaactaactctcattaacgatgactctgggccaaatggt

SEQ ID NO: 260122 - DNA, 80 bp, Homo sapiens
  chr9:27610812-27610892
  hypo
tcagtctggaacccgaatccgcacgtggcaaacggagcggaccattgtggagccggctgcggggcgagctgcggacacgg

SEQ ID NO: 260123 - DNA, 44 bp, Homo sapiens; identical to SEQ ID NO: 212735
  chr9:32481580-32481624
  hypo

SEQ ID NO: 260124 - DNA, 42 bp, Homo sapiens
  chr9:32516784-32516826
  hypo
tgggtaccagacagtgggatcggcttctctcaatttggaaaa

SEQ ID NO: 260125 - DNA, 109 bp, Homo sapiens
  chr9:32632958-32633067
  hypo
gcgtttgaagtcagcgcagagctttagcctcttccggatgctgctttctgaatgggaaggaaaggctttttttatatcttccattcgtatcctccgtggccgatcttta

SEQ ID NO: 260126 - DNA, 43 bp, Homo sapiens; identical to SEQ ID NO: 212736
  chr9:32999674-32999717
  hypo

SEQ ID NO: 260127 - DNA, 102 bp, Homo sapiens
  chr9:32999957-33000059
  hypo
aaatataaaaataaaaataaaaggtaacaaagagtaggtgtctgggagcttaatggacagtcgaagaaaaacaatatagaacagtggcgaagatcaaggtct

SEQ ID NO: 260128 - DNA, 173 bp, Homo sapiens
  chr9:33019798-33019971
  hypo
ttcagctttccagcggacggccaggatcctgccgctcactgtgagatccttcccaaccaccctttggtggggttcggcatctggagccagggacccatgggcaatttccacctctaagggggtcgggaaaggcacgctgagggtgaatatgtgcggccgcattcctggccctt

SEQ ID NO: 260129 - DNA, 84 bp, Homo sapiens
  chr9:33023517-33023601
  hypo
gcctgacttacgtgatttttgtattacaaagccctagtacactgcctggtaatattagacgtttattaacggttggtttaaaca

SEQ ID NO: 260130 - DNA, 89 bp, Homo sapiens
  chr9:33077216-33077305
  hypo
aatgtactgaaaaagaaaagcgctggggcggagcgcggtggctcgcgcctgtactcccagcgcgcgagttcgagaccagcctgggcaac

SEQ ID NO: 260131 - DNA, 120 bp, Homo sapiens
  chr9:33077545-33077665
  hypo
agaaagaagaaaagaaagaaaagaaaagaaagaaaagaaagagcactggtttggaaagattgctttttttttgagacggaatctcgcactgtcgcccgggctgaagagcacaatggcgcg

SEQ ID NO: 260132 - DNA, 209 bp, Homo sapiens
  chr9:33136435-33136644
  hypo
atactctctgcagaccagaccgcctcaaaatgggttccagaaaacatcagacccagcaagatgcttaatggaaaaacatgtctcgtggtcaaataagaacgggaatgctgcgtattaaatcctgcttctgcaaagtcacgacacacaccaaaggctctgagaagttgtgcagtcgaaaaacccccttcgttatatttaacccaccattt

SEQ ID NO: 260133 - DNA, 78 bp, Homo sapiens
  chr9:33299616-33299694
  hypo
ttgaagatgcagtgagccacgatcatgccactgcactcgagcctaaactttggtgacgcctgtaactttcacagaaag

SEQ ID NO: 260134 - DNA, 120 bp, Homo sapiens
  chr9:33411413-33411533
  hypo
cgcaggccaagccccactttggggctcacctctcctgcatcaccctcactcattctccattttacagccatttttttcccctttttgagacggagtctcgctctgttgcccaggctggag

SEQ ID NO: 260135 - DNA, 34 bp, Homo sapiens
  chr9:33418332-33418366
  hypo
tccatcctgcgggccgacacgcccaacccagcca

SEQ ID NO: 260136 - DNA, 31 bp, Homo sapiens
  chr9:33438855-33438886
  hypo
agccaccgtgcccggccgggagaagacacct

SEQ ID NO: 260137 - DNA, 809 bp, Homo sapiens
  chr9:33442163-33442972
  hypo
caggagtggggacacgatgggcacccaccaccaatgctggccggtcctggggggacagacactcatagtcagggacatggggggcagggcagaggagaggcaggctggggtgagctgggtgggggctgtactcacgtgaagactgcagagccccagcccgcaagggctgtaaaaaggcgggggccaaagtcccgggcagggttgacggcatagccggagttgaagcccatggaggtgccaatgaccaggaccaccaggcccacggtgaaggcctccaggcctcgggggacggggttgttgtaggggtcaacaatggccagcacacacacgataagggaggctgtgcctatgaactggggagtggggagaacagggtgagctgcagctccctccctttctctgacccctccttccatcccccgtcttccctctagctcttaaactcttgtcagcgcccgcccatgctcttctcctgaaagcaatggtgctagaatgtctgcgtgacaagaacccgctggagagccgcatgttttgtaagtacttgccaccatgttctgatgcgggttaccccacagattggagaaaccctgctacagtcgaggagtcctgtcccccaaccagcccatgagctaccaaggcaactcggtcccctccctgcgttcccctcacacgtccccagcccatacctggtcaaagaagccattgatcatatccaagtgtccagaggggtaggtagcaaagatgccggctgtgccattggggcccgaaacaaaaagctggttgtcggcgaagtgccagattgcatctgg

SEQ ID NO: 260138 - DNA, 517 bp, Homo sapiens
  chr9:33464102-33464619
  hypo
cggggagctgtgcccgagctgccaggaagccactgcggatctccacctgctcctccactagagacaagaatgggtcctgggtcagcctgctcctccctgtaagacaccctctactcccccaggtcctcctacggtgcccccaacggctgctcatcacaggtatttttcaacactcccccccaccaagtggcaaaggtgacgaaagggacatcgcatttgcctcaactgggtggggcattaatcgcccaacctcagcccagaggcaaaattttccactgcttggcacccccagtctggtttccgggcctgcacaagctgagtcttgcccctggccccctcccaccatgggcttccacacacctggggaattaggaacctgacaccctgctctctgcagagaccgagtgcctcacgttacaaccagaaatcaccactcccacccccaccaagaggtctgagtatctgtgctacacttcctagctccgtgccctaatacttcttacgtggtattcaggat

SEQ ID NO: 260139 - DNA, 32 bp, Homo sapiens; identical to SEQ ID NO: 212742
  chr9:33834158-33834190
  hypo

SEQ ID NO: 260140 - DNA, 33 bp, Homo sapiens
  chr9:33862121-33862154
  hypo
attacaggcatgagccaccgtgcccggcctgtt

SEQ ID NO: 260141 - DNA, 38 bp, Homo sapiens
  chr9:34046348-34046386
  hypo
tagaagtaaaggcttcatgccgggcggggtggctcacg

SEQ ID NO: 260142 - DNA, 39 bp, Homo sapiens; identical to SEQ ID NO: 212743
  chr9:34050561-34050600
  hypo

SEQ ID NO: 260143 - DNA, 33 bp, Homo sapiens
  chr9:34062510-34062543
  hypo
aaaagagtaataacatgggccgggcgcggtggc

SEQ ID NO: 260144 - DNA, 180 bp, Homo sapiens
  chr9:34062783-34062963
  hypo
cctaggcaacaagagcgaaactgggtctcaaaaaaaaaaaaaatagtaacatgggctgtgtttagaaaatggcaatttagataacattttcacttctctgtaatttcaaattgcttttaatactcaggtcttacacccagcgaggtggctcacgcctctaatcccagcactttgggaagc

SEQ ID NO: 260145 - DNA, 92 bp, Homo sapiens
  chr9:34063203-34063295
  hypo
acaaaaccaaacctcaggtgttacttttatgatctaaataatgtttaagcaaatatttagggctattgaaggttgtacgctttcagagagaa

SEQ ID NO: 260146 - DNA, 43 bp, Homo sapiens
  chr9:34148342-34148385
  hypo
gaaaaaaaggcaggccgggcgtggtggctcacacctgtaatcc

SEQ ID NO: 260147 - DNA, 166 bp, Homo sapiens
  chr9:34224348-34224514
  hypo
tgttatggaccagctcgttattaaacgcattgtagacaacatcgatgatccttgttttgcaaatacaacgctgagccccaggagaaattccctacatgcagccttagggcacggtatttcttgttacctcctcaaacatggactgtgtggacgtggcaggggccaa

SEQ ID NO: 260148 - DNA, 40 bp, Homo sapiens
  chr9:34230332-34230372
  hypo
attacaggcgtgagctgccgcacctggccaaatatagtta

SEQ ID NO: 260149 - DNA, 35 bp, Homo sapiens; identical to SEQ ID NO: 212746
  chr9:34276112-34276147
  hypo

SEQ ID NO: 260150 - DNA, 81 bp, Homo sapiens; identical to SEQ ID NO: 212747
  chr9:34316317-34316398
  hypo

SEQ ID NO: 260151 - DNA, 706 bp, Homo sapiens
  chr9:34318262-34318968
  hypo
aggctatagaagagtagaatcgtgtcgcggctcgagagcgagactcccgtcttggagccagcccagcccaacccagcccaacccagcttgacctagccctgacaggtccatcgtggtgcacgcaaaccacctcccagccacgcgctccctcctgctcctcagcgccttctgcctcctggcggtggccttggcgaccgaggtgaagaaacctgcagccacagcagctcctggcaccgcagagaagctgagccccaaggcagccacgctggccgaacacagcgccggcctggccttcagcctgtaccaggccatggccaaggaccaggcggtggagaacatcctggtgtcgcccgtggtggtggcctcgtcgttggggctcgtgtcgctgggcggcaaggcgaccacggcgtcggaggccaaggcagtgctgagtgccaagcagctgagcgacgaggaggtgcacgccggcgtgggcgagccgctgcgttcactcagcaactccaccgcgcgcaacgtgacctggaagctgtgcagtcgcctgtagggacccagctcagtgagtttcgctgatgacttcgtgcgcagcagcaagcagcactacaactgcgagcactccaagatcaatttccatgacaagcgcagtgcgctgcagtccatccacgagtgggccgtgcagaccaccgacggcaagctgcccaaggtcacc

SEQ ID NO: 260152 - DNA, 908 bp, Homo sapiens
  chr9:34372075-34372983
  hypo
acgtctgagcccacgcacactcggtagctcagctctggcgctgcggcgcggccggcgggtggcttgtagggcgtgtcgtggtagcgcgcctgaagccgcagcgagcgctccgtgctgttccagcccaggtggaagggcactgagtcattgactttgatggcggccgcgcgcgaagatagccagtagcgctcgaggatgcccccaaacgcggcgtcggaggagtagacatcgctggtgacgaacggctggggctcctgctggccatccaggcggatgggccagtgttgcgtcctcatctcggcgccaccataccagtgggccgccgcgtcgcccaagaacatggcgtgctccacggcccggcccggcgctgcctcctcccagcgcacgcggtagcacatgaccgtgtccttgggccgcacagtctggatgaagaagtgcagcggcagcccgtcggccgtgagcgagcagcccagcagggcgccatcgcggctgcaggagtcaaggtccagcgcgccggagcggaaggccaggcggaagacctgctctcccttctgattgcggatggagaagccgccagctttcaggtccagcagctccgcgcgaagtcgctccgccttgcgtagggagacgctgtagtagcaccaggccaccaccgcggccagcacaagcagcagccccagaaccgcggagcccagcagcggcttcaggtctttggaaggcttgggcttggcaggtgagaagttgtcgggcaggaaggtgtacatagctgcggctgcgatggcctcggggttctgacgctatgcgtagcagccaggccggcggcggcgggggtaggcctggctcttctcctgagggttctggagcattagtgggctgctaagaaaggagcgggccgtggggccatctga

SEQ ID NO: 260153 - DNA, 192 bp, Homo sapiens
  chr9:34401060-34401252
  hypo
gatctcatctaaccggtagccgtccttcagcagctggatgttcaaatcttggttgatctgctgtaggcaaaggggagggaggtcaggcccgagcggcagggaggcaccacccacagctctgcggccactccaggccgtctgcgccccagtccagccagtgccctggatatcagccccgccctgtcccgggtc

SEQ ID NO: 260154 - DNA, 162 bp, Homo sapiens
  chr9:34574690-34574852
  hypo
gtgacctccacagccggagatggggtcctggaggggacaagattccgatggattttggcagcggcctggactcagtgctcaaaacccccattcccagcctcttgcaccgtggggaccctgagatcagcatgtgcgtgccctgctgcacgtgtgtgcgggcgt

SEQ ID NO: 260155 - DNA, 231 bp, Homo sapiens
  chr9:34971410-34971641
  hypo
agctgccagggtcccgccgtggcactgtagagggctccgtccaggaggtacaggaggagaaggaagcagaagcaggaacctcggtggtccaggaagagagtagtgccggccgcgcagcctgggagcggctccgagatgggcgcggcgtggagcctgaggagtttgacaggacaagtcgattcacaccccctgcgttcatccgccccacccggaagctggatgatgacaaac

SEQ ID NO: 260156 - DNA, 73 bp, Homo sapiens; identical to SEQ ID NO: 212754
  chr9:35608230-35608303
  hypo

SEQ ID NO: 260157 - DNA, 284 bp, Homo sapiens
  chr9:35609216-35609500
  hypo
aggtcctggccctcccgctgtgggcccctcggctgaagagaagatggagtgcgagggcagcagccctgagccggaacctccagggccagcgccccagctgcctctggctgtggccacagacaacttcatcagcacctgttcctcggcctcccaaccctggtcccctagatcaggacccgtcctcaataacaatcccccagctgtggtggtgaactccccacaaggctgggctggggagccctggaaccgggcccagcatagcctgccccgggcggcagccctgg

SEQ ID NO: 260158 - DNA, 145 bp, Homo sapiens
  chr9:35649869-35650014
  hypo
gcataggcctgatccgggaaggaggcccgggccctgcgggtctgggcacatactgaggcatagagctccggctcggggcccgaggcctgggactttggctcagagtccagcaccacctccgagtacttgacgggggttccaggac

SEQ ID NO: 260159 - DNA, 192 bp, Homo sapiens
  chr9:35689364-35689556
  hypo
tactgggatggaagcggaataacataaaagggacagtacagtcaagggtactggtgggacccgttgagggtacagagaaaacttcaggccccaaggagcaggaccaaccgcgctctgcaaaggcagagtggaaaccaggggcctggggcttccccaggctattgtaggggagagaagcggctctggcgaagg

SEQ ID NO: 260160 - DNA, 351 bp, Homo sapiens
  chr9:35711911-35712262
  hypo
agtcagggtcaaaggacaaccgagagggaggaaggagaggcctggcattctttgactcctacgttcccccaccccctaccgtcctcctaccgagtcactcaggagtcgcttgctggcatctccaactgccctcagggcattatccacatcgcgctggccaggtaggcagctgacacagcggttcagagcctgggtcactgctttagccacctggggtgagaaaggagacagggttgcccaagtgaaaagaatttgagagatcgcctccattcacgcgacatgggagatgactagctctactgcctctgaaagtgaaaaaagaaagggggcgttgtaggtgaacaggctgag

SEQ ID NO: 260161 - DNA, 70 bp, Homo sapiens
  chr9:35712951-35713021
  hypo
cactgcaggatctgacgtcagtgcagcgactcccctagcggcctgggccagtgaccgcagcccacctgcc

SEQ ID NO: 260162 - DNA, 317 bp, Homo sapiens
  chr9:35869775-35870092
  hypo
ggcagcagcaggatggagcccgccagcaggaagtcttcgctgaccgacgtgttgccgcatgccagcttcagcactgccaggatcttgcaggtgaagtgactgaccacgtggtggccacagaagggcagcctcatggagatgaccatctcagtcaccgacttgaggaggcagaggacccaggcagctcccatcagcagcacgcagagccggtggctcatgagcacgtggtacctgagtggctggcagatggccaggtagcggtcataggccgtgatggccagtagcaggcactccgtggagcccgtggacaggctcag

SEQ ID NO: 260163 - DNA, 112 bp, Homo sapiens
  chr9:36118828-36118940
  hypo
gatcgcgtggcagtcgattactatggggactgccaggccgtcggagtcctctcagagcacagctccgtcgccgagtgtgcttctgtcaagtgtccttcgctcttggcagctg

SEQ ID NO: 260164 - DNA, 35 bp, Homo sapiens
  chr9:36165535-36165570
  hypo
ggtgcggtggctaacgcctgtaatcccatacatta

SEQ ID NO: 260165 - DNA, 76 bp, Homo sapiens
  chr9:36303861-36303937
  hypo
tcttcttgcctcccttagctggtccataatccttcatttcccgatcatagcacacttcatccgcctttgccatttc

SEQ ID NO: 260166 - DNA, 45 bp, Homo sapiens
  chr9:36318335-36318380
  hypo
cactgaagagcaaatatatacgttgttggatgaggaagaaaaagt

SEQ ID NO: 260167 - DNA, 81 bp, Homo sapiens
  chr9:36320468-36320549
  hypo
gtttatctgcatcttgatatggggccacgagaataagcagctcgtccctcggtgtggtccgggagcactggcactaagcac

SEQ ID NO: 260168 - DNA, 120 bp, Homo sapiens
  chr9:36478391-36478511
  hypo
ctccgtctcaaaaaaaaaaaaaaaaaaaagagagcgtttattaagcatacatccccagataaactgattttttttctggtagcaatagggagaaatcacttcgcaaaaatgtaagtattt

SEQ ID NO: 260169 - DNA, 120 bp, Homo sapiens; identical to SEQ ID NO: 212760
  chr9:37118379-37118499
  hypo

SEQ ID NO: 260170 - DNA, 81 bp, Homo sapiens; identical to SEQ ID NO: 212761
  chr9:37118799-37118880
  hypo

SEQ ID NO: 260171 - DNA, 36 bp, Homo sapiens; identical to SEQ ID NO: 212762
  chr9:37119169-37119205
  hypo

SEQ ID NO: 260172 - DNA, 155 bp, Homo sapiens
  chr9:37119445-37119600
  hypo
aaactccgtctcaggaaaaaaaaaaaaaaaaaaaaaaaaaaaaccataaagaaagaaaaaaattcactcgtagctgctacaagaagtgtaatggctcatgcctgtgatcccagtgctttgggagacagaggtgggaggatcgatacctttaagcc

SEQ ID NO: 260173 - DNA, 37 bp, Homo sapiens
  chr9:37122905-37122942
  hypo
cctgggggacagaacgagactccgtctcaagggggaa

SEQ ID NO: 260174 - DNA, 42 bp, Homo sapiens
  chr9:37380693-37380735
  hypo
aaaagaaaacttaatcattacgtcaccctaacaaatccccta

SEQ ID NO: 260175 - DNA, 142 bp, Homo sapiens
  chr9:37409148-37409290
  hypo
attgccaagcggcccgcccatgcgtgctgtggttacacggtcttcatgctggctggggagccccgagaactcgggtttggttcgtcctccaaacacgtgaacacgtgttgagcactgactgtgaattcggcagctgtgatgg

SEQ ID NO: 260176 - DNA, 490 bp, Homo sapiens; identical to SEQ ID NO: 212764
  chr9:37414524-37415014
  hypo

SEQ ID NO: 260177 - DNA, 99 bp, Homo sapiens; identical to SEQ ID NO: 212765
  chr9:37432303-37432402
  hypo

SEQ ID NO: 260178 - DNA, 43 bp, Homo sapiens
  chr9:37467934-37467977
  hypo
aaaaaaaaaaaaaaaaaagagcgggtctccttaatttttattt

SEQ ID NO: 260179 - DNA, 84 bp, Homo sapiens; identical to SEQ ID NO: 212766
  chr9:37468277-37468361
  hypo

SEQ ID NO: 260180 - DNA, 137 bp, Homo sapiens
  chr9:37515931-37516068
  hypo
gcatgatgcattctcggttgtttgagatctgctgaaagatggtcttactggttttgccctggaagatgatgttttcctgcaccagggccttggcacggccccgcacggcgatgccgtaggcccggaacgagtggatc

SEQ ID NO: 260181 - DNA, 98 bp, Homo sapiens; identical to SEQ ID NO: 212767
  chr9:37778484-37778582
  hypo

SEQ ID NO: 260182 - DNA, 82 bp, Homo sapiens; identical to SEQ ID NO: 212768
  chr9:37871179-37871261
  hypo

SEQ ID NO: 260183 - DNA, 223 bp, Homo sapiens
  chr9:37928527-37928750
  hypo
tgctaaataccctacgacgcacagcacagcccccacaacaaagaataatgtagcccagcttcccacagtgcctaggctaaagccacaccactcgctagacggccagtgcctcaaattctgcatccacaacatgggaataaccagagtccacccttgctgctgtggtgaggggcagatgagaacctccacatgaagtgtgaacgtctgacgaatcccggctcgc

SEQ ID NO: 260184 - DNA, 437 bp, Homo sapiens
  chr9:37935344-37935781
  hypo
tgcgaggttgtgttcggcctcggtggggcatacgcctttagtgccaggaggaaatgacgggcacacggcttgctctctggcagactgggaagtggtggggagttgttgaagggatggagggctgggatgtagagcactgctatggccacaggtgagcccctcatctctctgagcccgtctccttcagcgtaaagtgagttgctgtggggagtcagagagagctgactagggcttcagagtgtacaaaatcgtggtcctggaccacgattgcatttatgcctcacaacgatcctgagatgtaggaactattactctccccattgtacagatgcagaaatggaggccatacagctagtaagacgcagaatcgagatctgaaccagggagggattctggctccaggtggtctaccttcttagccacgatactctatgctt

SEQ ID NO: 260185 - DNA, 52 bp, Homo sapiens
  chr9:37948329-37948381
  hypo
atgaggcatgctaggaacttcgtaccaccccggctcacagcagatgtgaaag

SEQ ID NO: 260186 - DNA, 88 bp, Homo sapiens; identical to SEQ ID NO: 212770
  chr9:37948878-37948966
  hypo

SEQ ID NO: 260187 - DNA, 376 bp, Homo sapiens
  chr9:37950440-37950816
  hypo
actggaagagctgacggtaaaactgcagggaaagaataaagatcctcactgcccatgagtggacacactcaaaatacattcctgtttacatgatggtctctgcgcggtagtggagggggtgagactcagccaggagaggcagaggcacggggcggtactgtggttggagtgtgctttgtccacagagacatggatgctgctccgaatggtggctctgctgcctgctggccaggcaagccactgaccaggcggcttctattaagcgaggatcatgccaacctctcttgggttgtgggaatgtaacaagtggccccgcaggaagggccaatgtagagcctgatgtggggcgagtcttaaccgacggcagctgcagcgt

SEQ ID NO: 260188 - DNA, 158 bp, Homo sapiens
  chr9:37955883-37956041
  hypo
gcttctccagggggacggcaggatccaccctttctcctaggatcccgcagaactcagggctcccatgtttgataggcttaaagccccctccaggggcacgaagctggcgccgccggtcccgcgaaggtgagggggatgactgccgcttctcgttgcca

SEQ ID NO: 260189 - DNA, 45 bp, Homo sapiens
  chr9:37965536-37965581
  hypo
gggttggttttcctgagacccgatttactcaaatatctttttttt

SEQ ID NO: 260190 - DNA, 301 bp, Homo sapiens
  chr9:37974530-37974831
  hypo
ggagtttgtcctgagcgcaggtggggaccaaggtgagtgctgagcgcagctcagcagctgcctcctgagcagggtcagggctccttacctgccagggctgggatggtgacccggttccactcccaaggctggtcgtactcatcggcgggcctgtcgtcatcctggggcagcttgctctcccgcagtcgggggctgactgtgctctccgagtctgagtcaacactttggccttcaggttcgtaaggggtgtcatataactggatacctttatgctgggaccggacactttcctgcctctgaa

SEQ ID NO: 260191 - DNA, 34 bp, Homo sapiens; identical to SEQ ID NO: 212771
  chr9:37985465-37985499
  hypo

SEQ ID NO: 260192 - DNA, 85 bp, Homo sapiens
  chr9:38005202-38005287
  hypo
tgaggcttgggcttgggagacggcccctctttcggtgctttaaggtggccaggtacaattacacgcctataccctgaaagggaga

SEQ ID NO: 260193 - DNA, 184 bp, Homo sapiens
  chr9:38012923-38013107
  hypo
ccaccatctccccttcgaaaagcttcacgtcagctctgcaagcctcctggagcatctacgcactgatggctcatcctacccatatgcagccctgccatcaatcactggggtgacgccacaaagaattacacacaaataattttgagtcaaagggagcttcagcaaggatcgttacaaacagaaa

SEQ ID NO: 260194 - DNA, 258 bp, Homo sapiens
  chr9:38022309-38022567
  hypo
aggcagcaggtgcacagatgcgacgcgtcgactgcatcgtaattcaacactcattattcacctggctaaaaatgcggtttggtgtgtgacacaggcctgtcattgactgtgagagggtcactctgagagaatgatggcctggggctctttgtcttggcttgccgggagccctggccctctccccagctctgagggtcaggagggctccttgaaggtgagcaaatagcatttggggacgtgaggcggcagcagcagcac

SEQ ID NO: 260195 - DNA, 80 bp, Homo sapiens
  chr9:38033536-38033616
  hypo
taatccaatgccctagttgaccaatcatttcggaagggcttggagagggtccacctgagtggtctcgttacactccccct

SEQ ID NO: 260196 - DNA, 88 bp, Homo sapiens
  chr9:38033980-38034068
  hypo
ttgatgaatgagctcgggtaataacggggctcacccttcgccattaaaaatattaacctcattcctggcccagcgatgtcataaaccc

SEQ ID NO: 260197 - DNA, 207 bp, Homo sapiens
  chr9:38042761-38042968
  hypo
gacctggcccagcctcgaagtcgaattcctgttaattctcactatccccaccaaatgtccgccccaggccaggccaggctctgggctttcccagactccctgcagtcacagagactcctcagacccatgactacccagctaagtctctggccatgctctaggagctgctcaaactcccccggtctgccagaccgcccacaaccccac

SEQ ID NO: 260198 - DNA, 151 bp, Homo sapiens
  chr9:38045591-38045742
  hypo
agtgagaccctgtctccaaaaaaaacaaagccacaacaataaacaatttgacaacatatcaatttcctaccactttgtaatgaacctgactatacaacgtgagatcctacacagcacaacacaggtacaataaaaacggtgcattttaaaa

SEQ ID NO: 260199 - DNA, 92 bp, Homo sapiens
  chr9:38075105-38075197
  hypo
acatagtgaaataatttttacggtcaaattaagcaagttaacctatcatctcacatagtgacctttttgtgtgtgtggtaatgagaggtgac

SEQ ID NO: 260200 - DNA, 33 bp, Homo sapiens; identical to SEQ ID NO: 212774
  chr9:38131932-38131965
  hypo

SEQ ID NO: 260201 - DNA, 178 bp, Homo sapiens
  chr9:38290209-38290387
  hypo
cccaagccagaggcccgcaagtagtccaagccttctcctctctttcacaccccatatccaatcatcccaggtcctgagtaccacacttcctgcctccgataattctgtccctgccaattaattacttagttcaggcttcatcctcttatcgggacctccatagcggccttcttattgg

SEQ ID NO: 260202 - DNA, 154 bp, Homo sapiens
  chr9:38397125-38397279
  hypo
caggcactccaggccgggaccgtgtgggtaaacacctacaacatcgtcacctgccacacgccatttggagggtttaaggaatctggaaacgggagggagctgggtgaggatgggcttaaggcctacacagaggtaaagacggtcaccatcaagg

SEQ ID NO: 260203 - DNA, 36 bp, Homo sapiens
  chr9:38695225-38695261
  hypo
cccaatgctgctaggcatggcggctcacgcatgtaa

SEQ ID NO: 260204 - DNA, 36 bp, Homo sapiens
  chr9:38695501-38695537
  hypo
acagagcaagactccgtctcaaaaacaacaacaaca

SEQ ID NO: 260205 - DNA, 33 bp, Homo sapiens
  chr9:39020901-39020934
  hypo
accgcggtcggcgtaaaatggggtttctaacca

SEQ ID NO: 260206 - DNA, 44 bp, Homo sapiens
  chr9:43617175-43617219
  hypo
agtgatgtcacccacgtttctttctttttcttcttttttttttg

SEQ ID NO: 260207 - DNA, 40 bp, Homo sapiens
  chr9:71200385-71200425
  hypo
gaccggtatgggtccgtggccttttaggaacagagctaca

SEQ ID NO: 260208 - DNA, 77 bp, Homo sapiens
  chr9:71230118-71230195
  hypo
cgaagaacaaatcacgcctgaggggcctgagtggagaaagtaaggttaaatcactggaaccacgtatccatctgcaa

SEQ ID NO: 260209 - DNA, 42 bp, Homo sapiens; identical to SEQ ID NO: 212775
  chr9:71455000-71455042
  hypo

SEQ ID NO: 260210 - DNA, 63 bp, Homo sapiens
  chr9:71482150-71482213
  hypo
tggctctacaccctcggactccggctcccacgccaccctggcaggtgccggcctcaacatttg

SEQ ID NO: 260211 - DNA, 43 bp, Homo sapiens
  chr9:71495144-71495187
  hypo
ttcgcttttatgtacgtaaatataacttaaaaggtagagagag

SEQ ID NO: 260212 - DNA, 33 bp, Homo sapiens
  chr9:71583985-71584018
  hypo
gttaaaactgtaaatgaggccgggcgcggtggc

SEQ ID NO: 260213 - DNA, 82 bp, Homo sapiens
  chr9:71615753-71615835
  hypo
aaggaaaatgccgccgaggaaagtgctgagatggaaaaggcttgatgggagcacaactttttttttttttttctttttttga

SEQ ID NO: 260214 - DNA, 35 bp, Homo sapiens; identical to SEQ ID NO: 212776
  chr9:71620576-71620611
  hypo

SEQ ID NO: 260215 - DNA, 35 bp, Homo sapiens
  chr9:71655284-71655319
  hypo
atgtaaatatttatacgctgccgggcgcggtggct

SEQ ID NO: 260216 - DNA, 102 bp, Homo sapiens
  chr9:71664072-71664174
  hypo
gggcccaactctgccggcaggtagcaccttccaacctcttcactttggactttataactgtcaggtataaagtcggttgtgtccttacgtttctcaaattct

SEQ ID NO: 260217 - DNA, 157 bp, Homo sapiens
  chr9:71669729-71669886
  hypo
gatgttaatcctcttgatggcaattgactaataccagaaaatgtcacgaagcgtgcattttggattcaatcatggaattgttgaggacaatcagccatcagactaaagcgatagaaatagtattggaaattgcagcgggagcactgaatggagaagg

SEQ ID NO: 260218 - DNA, 120 bp, Homo sapiens
  chr9:71734804-71734924
  hypo
gtaacctggcccaaccagttctgccatcgcagataggaacagaagacatatgaaaacctaacttcgacccccgcctgattccatctccaacctgaccaatcagcactccccacttctcaa

SEQ ID NO: 260219 - DNA, 103 bp, Homo sapiens; identical to SEQ ID NO: 212777
  chr9:71760275-71760378
  hypo

SEQ ID NO: 260220 - DNA, 35 bp, Homo sapiens
  chr9:71800810-71800845
  hypo
ttctttttttggagacggagtctcggttgcgcctg

SEQ ID NO: 260221 - DNA, 35 bp, Homo sapiens
  chr9:71800965-71801000
  hypo
gagccgccgcgcccggccaatgtagtggttttaag

SEQ ID NO: 260222 - DNA, 33 bp, Homo sapiens
  chr9:72333375-72333408
  hypo
gagtctggaactggcgtccgcttcaggcgtttg

SEQ ID NO: 260223 - DNA, 111 bp, Homo sapiens
  chr9:72832133-72832244
  hypo
tagtgggtacaagatctacccgggacaggggaggcactacgccaggaccgacgggaaggttttcgagtttcttaatgcgaaatgcgagtcggcattcctttccaagaggaa

SEQ ID NO: 260224 - DNA, 34 bp, Homo sapiens
  chr9:73119015-73119049
  hypo
tctcctgccaggtgcggtggctcacgcctgtaat

SEQ ID NO: 260225 - DNA, 60 bp, Homo sapiens
  chr9:73152153-73152213
  hypo
ttgttggactcggcccgctccagacctgtcaggcgctccagggccgtggccatgcgcccg

SEQ ID NO: 260226 - DNA, 35 bp, Homo sapiens
  chr9:73984598-73984633
  hypo
ggaacagtcaatttttcaatcggggttatggttga

SEQ ID NO: 260227 - DNA, 38 bp, Homo sapiens
  chr9:74418835-74418873
  hypo
agttggtcagtcaaccgggagtatgacttgaggatgct

SEQ ID NO: 260228 - DNA, 31 bp, Homo sapiens
  chr9:74640499-74640530
  hypo
tataggcgtgagccaccgcacccggccttgt

SEQ ID NO: 260229 - DNA, 154 bp, Homo sapiens
  chr9:74794876-74795030
  hypo
attctgaattactggcggggggggttaggactgtaacatattaaattggggtgggaggggaggttcaactcataccaggtcttcaaggcagatttcaagtttttttaaaaatggccatccgggcgcggtggctcacacctgtaatcccagcact

SEQ ID NO: 260230 - DNA, 213 bp, Homo sapiens; identical to SEQ ID NO: 212782
  chr9:74853849-74854062
  hypo

SEQ ID NO: 260231 - DNA, 162 bp, Homo sapiens
  chr9:75005076-75005238
  hypo
agttgccctgaagaacgctggagaaactttggactcagagctggagcctcagtcgaagatgtccaatagctaaatagcaggagttctaaaaagacaaaacactcatgatagagacgaaggaattgtcaaagaaagagtatttccatagctacagggagatct

SEQ ID NO: 260232 - DNA, 97 bp, Homo sapiens
  chr9:75049396-75049493
  hypo
ggagaaatccatagacgctcaagtggcttccaggcatattacatggtttccattttttgaaatattaagatatatttttctaattttttttttcgag

SEQ ID NO: 260233 - DNA, 206 bp, Homo sapiens
  chr9:75083052-75083258
  hypo
gcatatccatagtgccggagaacctaggccagcttatctcagctacacactgtgtccagaactctcctgggaattatttaggtaattgtggcgagaccagactactgactcattgacccctctcttacgatgggttggttcctccttcggaagcatatccttggggcccttccctgtccactgatctcagtcgagaccatttaaaa

SEQ ID NO: 260234 - DNA, 100 bp, Homo sapiens
  chr9:75136042-75136142
  hypo
tctcctcagaaggcccgcagtagcaccagcagcaccaaaggacttgttggaaacaccagttttctaggccgggcacagtggctcatgcctgtaatcccag

SEQ ID NO: 260235 - DNA, 134 bp, Homo sapiens
  chr9:75271061-75271195
  hypo
gccatcttcggctccgtgggtgtttttccggtatccttaaaagccatcactgctgcgcggcttcctgacctacttgttccggcaagagtgaacagtggtgagtcaggagcaggtgcgggcggatcagagctcca

SEQ ID NO: 260236 - DNA, 167 bp, Homo sapiens
  chr9:75429003-75429170
  hypo
aacaggcatttaaaacgttgagttttctccacgttcagtagtttggtgggccacctcatgataccattctaaggaggcgaaggcttaagatttgatttttaaacagagacagagaaaggctgttccaaggcaacagatgggtacgggccaaccgagtaagcattttt

SEQ ID NO: 260237 - DNA, 155 bp, Homo sapiens
  chr9:75545774-75545929
  hypo
ccagcttggataatactcaccgccagcagcagacgatctctttcgattaaatcagccaacttgtataatagtcgccccctctcggaagcatccatagtacgccacggggatccaatctgaaaagcctgtcttgcggccttcactgccttgtcaac

SEQ ID NO: 260238 - DNA, 124 bp, Homo sapiens
  chr9:75580431-75580555
  hypo
cacaagcacacctatactcacgcaggctgggaccacgtaggcatgcctgttcacctaacctaacatgcacagatttgagacgtgagaagaaaccagagcgcccggagaaagcccacaaggacat

SEQ ID NO: 260239 - DNA, 76 bp, Homo sapiens; identical to SEQ ID NO: 212783
  chr9:75715152-75715228
  hypo

SEQ ID NO: 260240 - DNA, 274 bp, Homo sapiens; identical to SEQ ID NO: 212784
  chr9:76089532-76089806
  hypo

SEQ ID NO: 260241 - DNA, 34 bp, Homo sapiens
  chr9:76744464-76744498
  hypo
taaaaaggaacaaactaggccgggcgcggtggct

SEQ ID NO: 260242 - DNA, 157 bp, Homo sapiens
  chr9:77257380-77257537
  hypo
aggtgcagaagcaccagcagcggctgcaggaacagcggcagcagcagagtggggaggcagaagcccttgccagggtgtacagcagcagcattagcaacggcctgagcaacctgaacaacgagaccagcggcacttatgccaacgggcacgtcattga

SEQ ID NO: 260243 - DNA, 32 bp, Homo sapiens
  chr9:77401360-77401392
  hypo
actcaatactgcaggctgggcgcggtggctca

SEQ ID NO: 260244 - DNA, 31 bp, Homo sapiens
  chr9:78017959-78017990
  hypo
ctttttcttttttttgggggcgcgggggacg

SEQ ID NO: 260245 - DNA, 41 bp, Homo sapiens
  chr9:78550279-78550320
  hypo
gccgatattcacatgtatacgtatgtaaggtatgcatatat

SEQ ID NO: 260246 - DNA, 166 bp, Homo sapiens
  chr9:78557002-78557168
  hypo
agggccaggcaggagctcaccgggcatgcgccaaagcgtagcgcactcgttgcctgcccggagcagctgctaccaactgaggccggctgtcctcaggctgcggagctggctcggtgttgccaatttaaaaggacatgcaagtctcgacttttacatatcattttcc

SEQ ID NO: 260247 - DNA, 155 bp, Homo sapiens
  chr9:78682860-78683015
  hypo
ctgcctgcaggcatgggactcgctgtgctggagaagtggcagccgctgcaaacaattcgcactgcacagtcggaattgctttcaacgccaagatcggaggtatgggaaaccaactcacgtggatgtagaaatgcgccagttagctctttggctga

SEQ ID NO: 260248 - DNA, 135 bp, Homo sapiens; identical to SEQ ID NO: 212785
  chr9:78686691-78686826
  hypo

SEQ ID NO: 260249 - DNA, 41 bp, Homo sapiens; identical to SEQ ID NO: 212786
  chr9:78775008-78775049
  hypo

SEQ ID NO: 260250 - DNA, 39 bp, Homo sapiens; identical to SEQ ID NO: 212787
  chr9:78866884-78866923
  hypo

SEQ ID NO: 260251 - DNA, 66 bp, Homo sapiens
  chr9:78989902-78989968
  hypo
ttcttggcccttttaggagacgcgcccacattctgaccctgggccgcactagtgttgtcactctac

SEQ ID NO: 260252 - DNA, 40 bp, Homo sapiens
  chr9:79012636-79012676
  hypo
atcattttccaccaccgctcaatagcgttcaatggctcct

SEQ ID NO: 260253 - DNA, 40 bp, Homo sapiens
  chr9:79073374-79073414
  hypo
ggcgtgagccaccgcgcccggccagaattttttttaaaca

SEQ ID NO: 260254 - DNA, 180 bp, Homo sapiens
  chr9:79197274-79197454
  hypo
ctcaaaagaaaatatcctgagatggctgcagtgaagggtgtgatggagaaagtgtccaggaatgaggctagagggaagcccaggacaccacaccaaagaggtagaatgattttctaaagaaacaaaggcatcgccgaaaggctcagggtgacatctctctgaagagagagccccttcaat

SEQ ID NO: 260255 - DNA, 78 bp, Homo sapiens
  chr9:79230962-79231040
  hypo
catgagccagcatgcccggcccctcagtgtttttttgaaatgagcaaatagctcttcgctttattaccctacttgcaa

SEQ ID NO: 260256 - DNA, 109 bp, Homo sapiens
  chr9:79398985-79399094
  hypo
cccgggctcacctccgtccctccatatttgtcctccactttcacagatccctgggagaaatgcccggccgccatcttgggtcatcgatgagcctcgccctgtgcctggt

SEQ ID NO: 260257 - DNA, 36 bp, Homo sapiens; identical to SEQ ID NO: 212789
  chr9:79448382-79448418
  hypo

SEQ ID NO: 260258 - DNA, 124 bp, Homo sapiens
  chr9:80007510-80007634
  hypo
ccaccagaataaagcgaatatggcaacaaagcaagtcacacgcatatatttgttctccagtgcatataaaaattatgtttataatgtagactattatgtacaatcacgtcgttaaaaaactata

SEQ ID NO: 260259 - DNA, 165 bp, Homo sapiens
  chr9:80064832-80064997
  hypo
acagtgactcagacccctaccgcctccctgctcagacaagaaccttagaaacaaagagaacatgaggaattggcggtagttcatggtaccggacagactggaagctggacctgggccgaaggacatttggaattctgggattccgtgggcttatgcatcctcagg

SEQ ID NO: 260260 - DNA, 208 bp, Homo sapiens
  chr9:80076052-80076260
  hypo
tctcaccaggcccccgcggagggctgcagggggtggcatccgcgctgtgagtgctgcaaaacttggctgtccaaagtgagctcctcagaccagccacagcacaccagcatgggagcaagagagtttgctaacaatgcagaatctcggctcccaccccagataatgactctgaagctgcgccttagcaagatcccgggtagttcatttg

SEQ ID NO: 260261 - DNA, 90 bp, Homo sapiens; identical to SEQ ID NO: 212793
  chr9:80116554-80116644
  hypo

SEQ ID NO: 260262 - DNA, 205 bp, Homo sapiens
  chr9:80137040-80137245
  hypo
tatgctatttttattataaacaaagcctacgctttcaacctgttattaatacaatctgcatctctgattgtcttatccatcagaaggaaattacgctttctatgtagcaacagtaggagaaggcaggcaagaaggcgccattgatgagaccttgagagaatgcgctgcagcttcttcctctgcccccatccgcatctcagagctg

SEQ ID NO: 260263 - DNA, 43 bp, Homo sapiens
  chr9:80269586-80269629
  hypo
tgggattacaggtgtgagctaccgctcccggccgcaagcacct

SEQ ID NO: 260264 - DNA, 89 bp, Homo sapiens; identical to SEQ ID NO: 212795
  chr9:80272830-80272919
  hypo

SEQ ID NO: 260265 - DNA, 37 bp, Homo sapiens; identical to SEQ ID NO: 212796
  chr9:80304150-80304187
  hypo

SEQ ID NO: 260266 - DNA, 34 bp, Homo sapiens; identical to SEQ ID NO: 212797
  chr9:80315386-80315420
  hypo

SEQ ID NO: 260267 - DNA, 41 bp, Homo sapiens; identical to SEQ ID NO: 212798
  chr9:80343172-80343213
  hypo

SEQ ID NO: 260268 - DNA, 180 bp, Homo sapiens; identical to SEQ ID NO: 212799
  chr9:80390584-80390764
  hypo

SEQ ID NO: 260269 - DNA, 41 bp, Homo sapiens
  chr9:80420642-80420683
  hypo
gtggcaggttcaaaacaaagatcactcggtagcaggtgggt

SEQ ID NO: 260270 - DNA, 149 bp, Homo sapiens; identical to SEQ ID NO: 212800
  chr9:80475567-80475716
  hypo

SEQ ID NO: 260271 - DNA, 37 bp, Homo sapiens
  chr9:80501726-80501763
  hypo
caaaaaaataaaatacgcagccgggcacggtggctca

SEQ ID NO: 260272 - DNA, 89 bp, Homo sapiens; identical to SEQ ID NO: 212801
  chr9:80533774-80533863
  hypo

SEQ ID NO: 260273 - DNA, 87 bp, Homo sapiens
  chr9:80544725-80544812
  hypo
acaaagcaagaccctgtcacacacacaaaaatttttttttaaaacctgcaacaatactttattgttatttttcgcttaacatactat

SEQ ID NO: 260274 - DNA, 158 bp, Homo sapiens; identical to SEQ ID NO: 212802
  chr9:80546076-80546234
  hypo

SEQ ID NO: 260275 - DNA, 203 bp, Homo sapiens
  chr9:80563224-80563427
  hypo
ccaaatcttgctcctcgcaggaacctcactggactgcaggctcactatcccaacacaggacacaaactgctagcactcatcagccagagatggccttttacccttttccagcaaagaaagggagactgaggcctgacacgggactactcagaaagcgggggacctagcggtagggatggaagaggacacggatgaaggaggac

SEQ ID NO: 260276 - DNA, 88 bp, Homo sapiens; identical to SEQ ID NO: 212803
  chr9:80570363-80570451
  hypo

SEQ ID NO: 260277 - DNA, 79 bp, Homo sapiens
  chr9:80591582-80591661
  hypo
ggcgtgagccaacacgcccggcccaggcttgttttttaattctagacaatagttttaagcttttcgattagttggcaac

SEQ ID NO: 260278 - DNA, 336 bp, Homo sapiens
  chr9:80833878-80834214
  hypo
tgattgcttcatctgctatgcgtctgtggggatccgcaaagatatgggatccagttagtctctggtgagtcgttaccttggccggatggggacatgttgcctgctgcacccccctcttcgcgctctctcatttcatttcctgcagtgtgccagcaggatggcccacaagccatctactactcggacaagtacttcgacgagcactacaagtaccggcatgttatgttacccagagaactttccaaacaagcacctgaaactcatctgatgtctgaagaggagtggaggagacttatgtccaatggcgtctaggccgggttcattacatgattcatg

SEQ ID NO: 260279 - DNA, 365 bp, Homo sapiens; identical to SEQ ID NO: 212808
  chr9:81892877-81893242
  hypo

SEQ ID NO: 260280 - DNA, 76 bp, Homo sapiens
  chr9:81897888-81897964
  hypo
tcatgaatagaatcagtgcccgtataaaagagaccccaggctgggcgcggtggcaggcgactgtaatcccagcagt

SEQ ID NO: 260281 - DNA, 37 bp, Homo sapiens
  chr9:82082370-82082407
  hypo
tctaatagtgacttgagggccgggcgtagtggctcac

SEQ ID NO: 260282 - DNA, 66 bp, Homo sapiens
  chr9:82275744-82275810
  hypo
tgatgtgagtgactcggggagacacgcttgttttgcagcaccctcctccgccgatcgctgaagcag

SEQ ID NO: 260283 - DNA, 49 bp, Homo sapiens
  chr9:82282622-82282671
  hypo
atagtgtggagcttcgaagtcaggattttctacacgaccccaccctcaa

SEQ ID NO: 260284 - DNA, 120 bp, Homo sapiens
  chr9:84130018-84130138
  hypo
gcgcccggccccttttaactcttaaaatcacaggaacacttcctcagtttagaaaattttaactcaacatttgcagtgatttaatcatacaaggcctgccgggcacggtggctcacgcct

SEQ ID NO: 260285 - DNA, 186 bp, Homo sapiens
  chr9:84220198-84220384
  hypo
agtgagatgagtgcagtcatcgagagtgagcgacagcaacctgaggacttagggctgttgactcttgtaacaacaaaaaatggacttggatttggtatcttttccctcctattcatttgtattgtatgttacaaatgtacctatctttgacttacggggcggggcggggaactggtctgtcaccat

SEQ ID NO: 260286 - DNA, 34 bp, Homo sapiens
  chr9:84281396-84281430
  hypo
aatatgcctgtgtagccaggcgcggtggctcaca

SEQ ID NO: 260287 - DNA, 201 bp, Homo sapiens
  chr9:84294948-84295149
  hypo
gaacatcttaagtcctctggcgaaggacgctcctcaatttgcacgcacgaggtgctgggttctgcgggtgtatgctgggatggctcccaccatgcgagggaacaaacagacttttgtctagtctaaccctcattatacagagaggggaactgaagccagggaacgtgttcatgacttgcccagtcccgaatggaaatcccc

SEQ ID NO: 260288 - DNA, 222 bp, Homo sapiens
  chr9:84441561-84441783
  hypo
aagaggctgtgttgcgcggtggaattcattttcttgtttacttcctccagaaacaagagcatcatcagcacgctcagtgcatcggatcagaccgcggagttgttgacagaagcttggcgaggcctgccagctttccgcatgaaacgctggctttcttctcatacaccccctaccgtttgtgtctctgccaattgtagcacatcagagcggccattgagataa

SEQ ID NO: 260289 - DNA, 169 bp, Homo sapiens; identical to SEQ ID NO: 212813
  chr9:84530343-84530512
  hypo

SEQ ID NO: 260290 - DNA, 99 bp, Homo sapiens
  chr9:85673370-85673469
  hypo
acaggcgtgagccaccgcgcccggccgtatttatgtctttctttgcctctgtctctcctctcccttttctatcttgtcaagcaccgtttcatgtaaatt

SEQ ID NO: 260291 - DNA, 149 bp, Homo sapiens; identical to SEQ ID NO: 212814
  chr9:85843823-85843972
  hypo

SEQ ID NO: 260292 - DNA, 188 bp, Homo sapiens
  chr9:86586839-86587027
  hypo
ctctgctaccaccccggccgcctcgtccgggaggagggggaggtggtcctcgacgagggctcatatcatcataatctcttctagatggaggcatgggacgcccaccccgaccaggaggcattctgtcaaaaccacctcttccccgcatgggaaatcccactgggcgtccgcgacggtcatcaaacatc

SEQ ID NO: 260293 - DNA, 409 bp, Homo sapiens
  chr9:86590177-86590586
  hypo
taaaattagtggatcgtttgggtgggcaactcacggtaaaagttcagtgacaaaaagacttaatggggaaaataagacagaaacttgaaaaacaatacaccgtctaaaggggatactatttaattatataaaaggcaggtaataaaatacatttctctctttctaatcaggcagtgaggcataaactgttgggacataccgctcggggccactgctgtctgggactgaaacactggcattgtactgcattggtcattggcgttcgtggatgttggcattgggcatgggcattcaatcagaagttgtcaagtatggtacccgtttggcaacgagcacatttttgggcatagccaaccagggttttcacatgggcgttcaggggcggatgggccaacgtcatggtgggcaa

SEQ ID NO: 260294 - DNA, 33 bp, Homo sapiens; identical to SEQ ID NO: 212817
  chr9:86600601-86600634
  hypo

SEQ ID NO: 260295 - DNA, 33 bp, Homo sapiens
  chr9:87655019-87655052
  hypo
tgaaatgagagaatcgaacgcctccacaaagaa

SEQ ID NO: 260296 - DNA, 120 bp, Homo sapiens
  chr9:87904207-87904327
  hypo
ctcgggacctgcagcccgccatgcctgagcctctcctccacccacccgtgggctcctgcatggccttagcctccgtgacaagcaccacccctgctccatggcacctggtcccaacgacct

SEQ ID NO: 260297 - DNA, 81 bp, Homo sapiens
  chr9:88490935-88491016
  hypo
attctttcttggttccgctccaatagctaaattaaattaataggaattttttttttttttttttgagacagagtctcgctc

SEQ ID NO: 260298 - DNA, 185 bp, Homo sapiens
  chr9:88651536-88651721
  hypo
aagaccccgagaaacgccacagtctactctggtcacgccctggtcatgtggcgtaaatcagaagacaagaggttgagtcaaggtctcccagaaagtactgtcaatacagaataaaactgggcagtgattctgctgagaggaagcatttacggaataataaaatacctaggcggaagatcaacaac

SEQ ID NO: 260299 - DNA, 116 bp, Homo sapiens
  chr9:88661264-88661380
  hypo
ctcagagtcccgcacggagcagaaggtgcatgctctatcggaggttacatctcagcttaatccccgcctcccaggtgccgtgcaccctgcactgtggcacgcgctctgaggtgtac

SEQ ID NO: 260300 - DNA, 41 bp, Homo sapiens
  chr9:88672701-88672742
  hypo
aacactggagactggcggctctgtcccgagagggccagggt

SEQ ID NO: 260301 - DNA, 449 bp, Homo sapiens
  chr9:88694097-88694546
  hypo
acaaaacacctggaggtccacgctccgggagctcgcaatccagtagttgaagcccaagacgatgatgcaggccaccagggcggccagcacgaggggcggcgacttcatgctgcgacgcccgtttcccaagcccatcatctcaaaatcagcgctgagaatctgccaagtaaaagcaaataaataaacatcaatactagttttatcatctccgaagcagaccgtatcatccttacaaccaagaggaaaggagtcttgccaagaagcgtgggctggtagcttctccttgacgtgcaaagctgtcaagggagaagagtatgtgaacggcacgcacagagcccatggtgctgtgaacccagggcagtgtggccagttcccaggacaggctcggaggagcaggcaccgccccgaaacctgccacagattagctcgagacctggggcaagacatga

SEQ ID NO: 260302 - DNA, 42 bp, Homo sapiens
  chr9:88712487-88712529
  hypo
cggctggacctcagggaccacgctgccttcaagctccctccc

SEQ ID NO: 260303 - DNA, 45 bp, Homo sapiens
  chr9:88977773-88977818
  hypo
gaccatggcccacgactctgggtgggggggcgggggtgcgggggg

SEQ ID NO: 260304 - DNA, 33 bp, Homo sapiens; identical to SEQ ID NO: 212820
  chr9:89301326-89301359
  hypo

SEQ ID NO: 260305 - DNA, 405 bp, Homo sapiens; identical to SEQ ID NO: 212824
  chr9:89699972-89700377
  hypo

SEQ ID NO: 260306 - DNA, 51 bp, Homo sapiens
  chr9:90112283-90112334
  hypo
ccaaaattaccttattaattagcttacatatttattatctatctgtcccac

SEQ ID NO: 260307 - DNA, 198 bp, Homo sapiens
  chr9:90287673-90287871
  hypo
cacctgggcacacccggtactggaatttggttattggaaatgactgagctgtcgcggcagcttccttggagaatgcatcgctgaggattgtggggagcccagaagcaggcaatgcctgtggaggacaccaggaaggggactgacctgcagttctaacttgggtcacctggaggaggagacaatcgggtacatgatcgg

SEQ ID NO: 260308 - DNA, 46 bp, Homo sapiens
  chr9:90290415-90290461
  hypo
cagagaacaatgcccgacatgacccgagaggcggcacagctctata

SEQ ID NO: 260309 - DNA, 149 bp, Homo sapiens; identical to SEQ ID NO: 212827
  chr9:90346011-90346160
  hypo

SEQ ID NO: 260310 - DNA, 204 bp, Homo sapiens
  chr9:90439088-90439292
  hypo
gccagctgtggaatcgcacagcccgggttcaaagcctggttgggccatgaacacctgaatgacctgcagaaaggtcttaggtacatttgtgaaaagaagtggagatcccgcctgccaggaagggatgtggtaaggggcagcatccagtcaggtcagggcaccgcgtcctctccttggaaaccttcgtagcggggctggtggccc

SEQ ID NO: 260311 - DNA, 209 bp, Homo sapiens
  chr9:90457941-90458150
  hypo
aggagtcagcccgccggaaggtcccgcccagccttaagaagtcaattagctgctttcgggcggccttaggcgacgggagactcctggactcggcacctgcccactgtgcctgtccacctgtggctactgcagctgagaccccagtgggctgagattggacaggggccaccagggacccagcaagtccttcagctcggtgagtgagggat

SEQ ID NO: 260312 - DNA, 137 bp, Homo sapiens
  chr9:90472237-90472374
  hypo
ggctcttctcacttcgcagaccttgcgggggcagggcagaggcgctcctcacttcccagacggtgggattgggcagaggcgctcctcaattcccagatggcgggattgccgggcagaggtgttcctcacttcccaga

SEQ ID NO: 260313 - DNA, 300 bp, Homo sapiens
  chr9:90472434-90472734
  hypo
ggcgcttctcatttaccagacagttgggttccgggcagaggcgctcctcacttcccagacagtgggcctgcccgacagaggtgctcctgacctcccagatgcggtggctgctgagctggggcctccttacttcccagacgctgcagtggccaggcagaggtgctcttcacttcccagactgtgaggcggccaggtagaggcgctcctcacttcccaggcggtgcctagccaggcagaggcactcctcacttctcaggcggtgggatggggggtgcggggggagtgctgggcagaggtgct

SEQ ID NO: 260314 - DNA, 533 bp, Homo sapiens
  chr9:90474024-90474557
  hypo
ggttgaagaggaatcggtaacagcccaaggttcccagggcaggcacaggtgcaggagccatggggtgagcccagccagctgggaaggcctcacggacaagacgagcaggttgctgatggtatggcggggacctgtggtggaaccaggaacaaaatacgcttagaagagcacgttgccaatcgcgtggccggaacctgcggcggaaccaggaacaaaatacgcttagaagagtaagtcgccgatggcatagccggcacctgcggcggaaccggggacgaaatacgcttagaagagaatgtcgccgatggtgtggccgggacctgctgcggaagcagggacaacatatgcttagacgagaacattgccggtggtgttgctgggtcatgcggtggaagcagtaacaacatacgcttagaagagcaggttgccgatggcgtggttgagacctgcggcggaaccaggaacaaaatatgcttagtgagttgcccatttcgagcgagttgtgcacagacgaaaccaagggtcagaagtgg

SEQ ID NO: 260315 - DNA, 34 bp, Homo sapiens; identical to SEQ ID NO: 212828
  chr9:90482724-90482758
  hypo

SEQ ID NO: 260316 - DNA, 34 bp, Homo sapiens; identical to SEQ ID NO: 212829
  chr9:90482818-90482852
  hypo

SEQ ID NO: 260317 - DNA, 224 bp, Homo sapiens
  chr9:90483167-90483391
  hypo
cgcttgtgagcagccgtttcctgcccatctccctcgctgttcccattgccccttgttgtggaatttctcagacctaagactcgccttccagggaagccttctcctgcctctatattaagccaactggagaccatgcccagggcttggctgtggagcctgtgggaaccccccgaatccagggcaagggtccgcatgccccctgggccctgcgtgtaaaatggagc

SEQ ID NO: 260318 - DNA, 36 bp, Homo sapiens
  chr9:90485107-90485143
  hypo
cacattctctttttttgaggcgtctggccgtgtcac

SEQ ID NO: 260319 - DNA, 216 bp, Homo sapiens
  chr9:90485383-90485599
  hypo
gtcaccgtgcctggcctaggaagcacattcctgctcctggacaaccactggttctgcaagcctcttcccagctctgagatgcacaaagctaagctgggggacagagcctctccctggctgccgctccagtgggagaagcggaccctgagcctgcagcccttgcaggcacctggagctggggagagaaccccagggctagggcggcggctgagggag

SEQ ID NO: 260320 - DNA, 203 bp, Homo sapiens
  chr9:90499879-90500082
  hypo
gaccccctgggggacgtgtgtaaaccagtgcctgctaaggcccaccagccgcatgggaaatgcatgcaagatccgtctcctgccagcttgtccccaccagctcccccagctcctctggcctccaccctgtcaccaggcccgatgaccttctcagagccttttggaccacactcaaccctgagtgcctccgggccaccagagcc

SEQ ID NO: 260321 - DNA, 169 bp, Homo sapiens
  chr9:90500553-90500722
  hypo
acgggccgaccacccgcacatgacatcactggggaaggagtgggacatcacgaccctaaatcccttctggaacgtgtcaacccagccacagcagctgccccgtcctcagcaagtctctgatgccacaaccgtggggaaccacttacagcagaaacgcagccagcttttc

SEQ ID NO: 260322 - DNA, 37 bp, Homo sapiens
  chr9:90583824-90583861
  hypo
agaaacctgcactcccggacacgcgctctcctgagag

SEQ ID NO: 260323 - DNA, 140 bp, Homo sapiens
  chr9:90670703-90670843
  hypo
taaagaaactgaggcgaaggtaacgtaacttatccaggcagcgtagttggccagcagcggccagcatatctgagacttattctaaagcccaagctcctccgctggacttcacaaagaagagtgggcgttggcgatctgtg

SEQ ID NO: 260324 - DNA, 153 bp, Homo sapiens
  chr9:90888548-90888701
  hypo
caagagggagatctttctgatacaccttcacgtagagtatttcttcctagcagttacgtctatttaaactcatcattttacaatgtattggctgatctgcgctccgtcccccaccatgacagaggctcccttttgcctcgtccttcttagtct

SEQ ID NO: 260325 - DNA, 291 bp, Homo sapiens; identical to SEQ ID NO: 212830
  chr9:91119034-91119325
  hypo

SEQ ID NO: 260326 - DNA, 102 bp, Homo sapiens
  chr9:91138737-91138839
  hypo
tccctaatgacctttcgtgtggcatggaggcatcttagccatggtaccctccaccccaggggctggcctttaagaattcatcaaacctctctctctttctct

SEQ ID NO: 260327 - DNA, 47 bp, Homo sapiens
  chr9:91140238-91140285
  hypo
ccacacacacacttacgtacagatgcatgctacgttaaagactgaat

SEQ ID NO: 260328 - DNA, 98 bp, Homo sapiens
  chr9:91161619-91161717
  hypo
acgcttggccgacacatactttaatattataacatcccaaacaatttttcttgacgtaaggcaaagtattccagccttctttccgagaactgtgtaat

SEQ ID NO: 260329 - DNA, 94 bp, Homo sapiens
  chr9:91187465-91187559
  hypo
gtgcccctaccaggcgacatgctcagcagcagaagctcctgccgaccccggcaaaacacagggcgatcggcctgtgctgcgacccaggtgttgg

SEQ ID NO: 260330 - DNA, 175 bp, Homo sapiens
  chr9:91312334-91312509
  hypo
ccatctgcagttatcgtttttagttacttgttcactgccctttcccactgagagggtcagcgtcatgagatcagaacttgtcaagtcggtgcttcgtcggcgaggtgaggagtgagctcctcgaggtcacctgcgggttggggatgtgacagtttctgagcggcagtgttaagtt

SEQ ID NO: 260331 - DNA, 86 bp, Homo sapiens; identical to SEQ ID NO: 212831
  chr9:91614962-91615048
  hypo

SEQ ID NO: 260332 - DNA, 367 bp, Homo sapiens
  chr9:91616951-91617318
  hypo
ggctcagtggttcatcgtgttggctgtgctcaactccgccatgaacccggtcatctacacgctggccagcaaggagatgcggcgggccttcttccgtctggtctgcaactgcctggtcaggggacggggggcccgcgcctcacccatccagcctgcgctcgacccaagcagaagtaaatcaagcagcagcaacaatagcagccactctccgaaggtcaaggaagacctgccccacacagccccctcatcctgcatcatggacaagaacgcagcacttcagaatgggatcttctgcaactgatcgtctccatgcgccctgctctgcggctgtgttcttatttattgcatgcgtcgcttccacaggggc

SEQ ID NO: 260333 - DNA, 219 bp, Homo sapiens
  chr9:91663695-91663914
  hypo
gctgcaccctgctggaggagcggagctgaaacggaaggcagggcaagctcaggagatccccgtcaccccgctctcggatagtaccctgcgggacaccaggagcctctgcaggataaggtgaggggggtgtcaggtcaccgacagtatgaagctacaggcagggccccttgtcactgctctgctttagaaatgatatgccggccgggcacggtgatttac

SEQ ID NO: 260334 - DNA, 96 bp, Homo sapiens
  chr9:91666527-91666623
  hypo
agcacagtgcctcacggaggggacctcttgtagcacgactttggctaatcgtaacgacaaggacaatgggacacacagaaccggtggtaacataga

SEQ ID NO: 260335 - DNA, 178 bp, Homo sapiens
  chr9:91993502-91993680
  hypo
tgcgggctaacctacgcagcactgcacgagactcggatactgaacaggagaaacacaaaactctccacgcctggacacgtcgcagccgaggcaccagcggggatgcacagccggcctcagtctccatctgcgtctgagtcagcgaacttcagctcacacttgacgtcaaagggcttgt

SEQ ID NO: 260336 - DNA, 349 bp, Homo sapiens
  chr9:91995937-91996286
  hypo
caaaggaaatgggacgtcgaggagtcactcacccgggcacacagaagcatcgccgctcatctcctgaatcaaacccctgcaaaacaaccggcacgtgttattcacccacacacatgggggacatccccaggcagcgcatcccgccccatacctgctggggctctcggtctggtgcagagccacgcaggtcgctgtgggcgggctccaggcgcagtaggggtcccgcgccagcacacagtcctcgcaggtgccgtgcttcccacagaaggccagcggggcctggaccacgcccgagttagagccagcatagacaaacctgttgccctgcgtgtatgagacagagaagaac

SEQ ID NO: 260337 - DNA, 134 bp, Homo sapiens; identical to SEQ ID NO: 212835
  chr9:91997068-91997202
  hypo

SEQ ID NO: 260338 - DNA, 249 bp, Homo sapiens; identical to SEQ ID NO: 212836
  chr9:91997531-91997780
  hypo

SEQ ID NO: 260339 - DNA, 247 bp, Homo sapiens
  chr9:92049177-92049424
  hypo
gagggaggggtctcggtctaggagccagccaggaccctagaaacctctagaagggaagacagaacaatggcgttgggcgccttctcaatctccactgagacctttgtcaaaacggtatgcaggccctcaaatctattgcttctttgggttttcactttctttcatgaagcttcatgtatgtaaaaatgttagtctgtcttttctcctgttactgtctttcgtcagtttaattcgcaggccctagaaa

SEQ ID NO: 260340 - DNA, 321 bp, Homo sapiens
  chr9:92053270-92053591
  hypo
gagcacctcccatggcagctcgtgatggctgcatcacagaatgcaacaagaaggtgagcaggacgacattcaccgcgggagcctggtgactgcaactcctgctcacgacagagctggggtcatgcaattagataaaatattaatccagtacatcacgggctgaaagctatgccagtcaaacccacattatgaagcactttattctgtcgttcctgagacaaacaacatttctagtgttagggatatttgaggcaaaaaatcgaagtattctttatgttctttgactagaatcaaatacaatgtatgttttttcttttcttt

SEQ ID NO: 260341 - DNA, 145 bp, Homo sapiens
  chr9:92056121-92056266
  hypo
aaccaaactcccagaccttacgaataccaacccttggcctccgcttccacacacgcgcaggactcggccgggcggcactgttcctcccagcagcgggcaatttccacagcttcgcgtggtggacgggccatcagggaggactctt

SEQ ID NO: 260342 - DNA, 253 bp, Homo sapiens
  chr9:92058330-92058583
  hypo
aagcgggtgtaccacggtcctgttgtccctgcagagtggagccttcagctgtctgacagaaaatgagccctcccagtaaagcacagcgtggactccacccgcccataatagccacccgggaagcaggtccggccagcagcagccgccagaggaggatctgcctggggtaggcgggtggcggacggccctggccctgcagcgctcagctgcaccccaccccatgcctgcctccgagctggtggccaggacctgg

SEQ ID NO: 260343 - DNA, 123 bp, Homo sapiens
  chr9:92075500-92075623
  hypo
ctcacatgtttaaccgaggttccaccggttcagacccactgctcatgagacggctcaagaatatgtcagagataccccagcctcacatgcacagctggtcctggaggccgcagagcaaggaaa

SEQ ID NO: 260344 - DNA, 51 bp, Homo sapiens; identical to SEQ ID NO: 212839
  chr9:92140641-92140692
  hypo

SEQ ID NO: 260345 - DNA, 207 bp, Homo sapiens
  chr9:92178183-92178390
  hypo
tatgcacgtgcacgcgcacacacacactccacacaagcttgaatgggccattcttatgacattgtcccacggcctgagagctgggaagagaatggcttttccaccatgaacaaaatgacttcacatcagtccactgcccatgcccctggggctgaagaacctgcacgaggtcagggacctgggttcgctgctttgtgttgtcaattg

SEQ ID NO: 260346 - DNA, 171 bp, Homo sapiens; identical to SEQ ID NO: 212841
  chr9:92227880-92228051
  hypo

SEQ ID NO: 260347 - DNA, 40 bp, Homo sapiens
  chr9:92231503-92231543
  hypo
ggggcctgtccacacggtcttgtcacggggtctctctcca

SEQ ID NO: 260348 - DNA, 372 bp, Homo sapiens
  chr9:92235736-92236108
  hypo
cagagatggccagacgcctctctgcttgtgaactgcggattaaagccaatgggctcttaaagtctctcccagttgtaggacaccaatttccccaggttccataatcacctgttctgttagctgcttcctcccacacatgcacacacacacacgcacacacacaggcacatgtgcccatagtgcatacctgtctattgtgaagcgcaatcgttcaatcttgttggactccccagctattacattaggtcagcagcgttggctttaccaacctcagatagtcaaggatgagtgaaaagtaaagagctactttgcccctgcagagagtggcgaaggtgctggtgaggagggccagcatgccgtgctcaatggcct

SEQ ID NO: 260349 - DNA, 167 bp, Homo sapiens; identical to SEQ ID NO: 212842
  chr9:92237959-92238126
  hypo

SEQ ID NO: 260350 - DNA, 212 bp, Homo sapiens
  chr9:92249014-92249226
  hypo
cacagaagggtcccacgcagagtctcagagggagtgtggccccgcagacccctgggtttctgactccaggcctccaggaccatgagacaatctgtttctgttgtttgagctgccccgtgtgtgatactttgttatggcagccctagcataccacacacaccccatggtatgacacgtccttgtgctctcctgggccacggttatacccgctg

SEQ ID NO: 260351 - DNA, 255 bp, Homo sapiens
  chr9:92277577-92277832
  hypo
ttgtggtggtggggcggggggtggtggtcagcatgcagtgattagcagccacctggggtactctaccgggcaggcgtctgtgctgtgtcctatagtttcagccgcacgttctctcattttacagatggtagagcagctgggtggctgccgattctcgccctgcccatggctgccctggcctgtggccgaggctgtgatgaagggcagcctgttctgtgcgacgcagttaagcaaggtgtccggtgggctgcattg

SEQ ID NO: 260352 - DNA, 200 bp, Homo sapiens
  chr9:92725474-92725674
  hypo
gtccacaccaagggccgatgatcatgtggcgctcattttcagcggtgagcacaggggtggcagtgccagggtccccaggcccagccacagggtaagtgctcgtttccaggcaccctccctttcctccctggtcactccctctgcctgggagcccctttccctggactgctggtaatcctactcttcgccctgaagccccc

SEQ ID NO: 260353 - DNA, 78 bp, Homo sapiens
  chr9:92776739-92776817
  hypo
ccatgtgtctacttcggccaatgcaatgtgggccaaaaaggcagcctgcccgtcctacactgacgcctgaagaggcat

SEQ ID NO: 260354 - DNA, 144 bp, Homo sapiens
  chr9:92897072-92897216
  hypo
caggcgtgagccaccgcgcccggccaccggggctccagtacttcagggagactggagcacacctgacgtgacccacccccgggacaaggaagcaggaagatcatcctccaactcccatcccgctggctgcgggctgctggcaag

SEQ ID NO: 260355 - DNA, 239 bp, Homo sapiens
  chr9:93156039-93156278
  hypo
aaatacagatactcatacatcgctaggtgaggaccaccctctctccctttaggtcctgacttggccttaaacttcccagcatagcctaagaaagtcactaccgaacacgaatcagactgggcgcaggtgacctaacctttccgtgtgagtattaaggtgtgctttcgctcctgggtagaaacacttcctggtgtcacatggagttcaatggagctgacgcaactttcttcctgctgcca

SEQ ID NO: 260356 - DNA, 104 bp, Homo sapiens
  chr9:93462725-93462829
  hypo
cagccttccggcgctccggagtgtttcaagcaggatatcacctgaattgtacttgaaaagaagctttcttgcagcttggtggcgcttggattgaagagtagcaa

SEQ ID NO: 260357 - DNA, 242 bp, Homo sapiens
  chr9:93676597-93676839
  hypo
ccggcgtggcaccacgtctcccgctccagtgccgtccctctggccaccagcccaggtcacaggcatccagcaacaactgcagcatggactctgggtctgttggatgtgggcatggctgctggctcactgctaagtcagggaagcaccacgtggcccacgctgtgggcccctccaaagccactgtgttccagcccagtgcccagccccaagtaccgtgttataatgagcggcgactgacgtga

SEQ ID NO: 260358 - DNA, 158 bp, Homo sapiens
  chr9:93727466-93727624
  hypo
ggaagtgatgcctccgttcttgtgaaaatgttttcacacgctgaaaagttggaagacaacaaacactgcgacatgtcacctggatccagcgcttcgtagcatgttgtgatttctctgcctccgcccgctttctctcgtggaaccggttggaagctagt

SEQ ID NO: 260359 - DNA, 315 bp, Homo sapiens
  chr9:93733024-93733339
  hypo
cacctgactcacttcgttggccctgctgatgtccacaggcagccacatgtgatggcctcagtgctgagtggagaaacgcctgcggctttgggaaggacttgctgcagcctgctcctaccccagccagcctccttccagccccattgttctcgacacataagaggcctggcaagtctcaacccgggtgtaaagcggcatcccttaccctagaaatacagaagtcatttttttctagtagctaagaaaggcctggcgctgcattacaagagttcattcacataaacagtgaacgctagaaatcgaattacacttgga

SEQ ID NO: 260360 - DNA, 42 bp, Homo sapiens
  chr9:93734262-93734304
  hypo
atacagcaagcagctgtcctcgcctttggctgtgctgcagtc

SEQ ID NO: 260361 - DNA, 120 bp, Homo sapiens
  chr9:94076014-94076134
  hypo
aaaatgaacaaactttatgagaagaactagtgaaaagagagccagaaagaaagatggaggcctctgtgcagtatctggtccataaacgctcttttttttttttttttgagaccgagtttc

SEQ ID NO: 260362 - DNA, 223 bp, Homo sapiens; identical to SEQ ID NO: 212845
  chr9:94124707-94124930
  hypo

SEQ ID NO: 260363 - DNA, 75 bp, Homo sapiens
  chr9:94475885-94475960
  hypo
gagagggagcccccacaacacgtgagtctcctcccaccccgtccatggacctccgtgccagcagagagcagctct

SEQ ID NO: 260364 - DNA, 393 bp, Homo sapiens
  chr9:94486727-94487120
  hypo
cacaggaccacaccgtaggaccagatgtctgagtcgatggagaacttgccgtacatgatggcctctggggccatccagcggataggcagcagcgagttccccagcagcttgtagtaatcggcggcatacacctctcggaagaggcccaagtctgagatcttcacgttcagcttgtcgtacactagcacattgcgggtggccaggtccttgtgaaccacgtggtggctggataggtactccatccccgccgcgatctgtgccacaaggtgcacgaagtcggggggctccagggcggacttcaccgtgcggtcatcatcggtgctgcccacgtccgagtgcggcgagcgcatgaccaggaattcgtggaggtcgccgtgcgaacagtagctgaag

SEQ ID NO: 260365 - DNA, 217 bp, Homo sapiens
  chr9:94572962-94573179
  hypo
aaggctgccacaaggacaaccgcaggcagcaccgggagccctgcggtctgtgtcaccaggtgtggccggaacaggagggacgacgctggcctctgcatcccagtggagtctacgtttgcgggtcacacacagggaatgcggccctaattaggaccccacttcgctgtgaggaagacagacccagaggggagacatcggcactctcatgctgcacaga

SEQ ID NO: 260366 - DNA, 39 bp, Homo sapiens; identical to SEQ ID NO: 212847
  chr9:94834642-94834681
  hypo

SEQ ID NO: 260367 - DNA, 210 bp, Homo sapiens
  chr9:94904617-94904827
  hypo
gagaaccatttttagcgtctgagttggggtgagatggcccgtgaaggggaccctattgggggcagctgtcctgtccgtctggctcacaggagcttcccctcagagctggagggctgggggctctcgctgcttaccacatgggcaggaggagggtgagagagcacattccaggccacctacccgcacccccagccccgctctggggaaagg

SEQ ID NO: 260368 - DNA, 100 bp, Homo sapiens; identical to SEQ ID NO: 212848
  chr9:95003570-95003670
  hypo

SEQ ID NO: 260369 - DNA, 38 bp, Homo sapiens; identical to SEQ ID NO: 212849
  chr9:95010672-95010710
  hypo

SEQ ID NO: 260370 - DNA, 104 bp, Homo sapiens; identical to SEQ ID NO: 212850
  chr9:95039646-95039750
  hypo

SEQ ID NO: 260371 - DNA, 226 bp, Homo sapiens
  chr9:95376169-95376395
  hypo
agatctgtgaacgcgtgttgtctcaaaccagtcagggccgtcatgactacgcagcagcagcagtttccaagacgggccagaaacgcatccacagcagtggcacccgcggctcaggggctcctcacagcccgggctggtgggagccaagaccagacagagtgggggtctccatctgttttctcttctccctcaaatacaggctgttttcatcgtgtctagtccagcc

SEQ ID NO: 260372 - DNA, 96 bp, Homo sapiens
  chr9:95380371-95380467
  hypo
ttactggaacttcacaggtgcggccactgcgcacaccttcctggaagcaggcccagccccacacgccatgttctcggaggagaagccttctctgag

SEQ ID NO: 260373 - DNA, 174 bp, Homo sapiens
  chr9:95381219-95381393
  hypo
tatcagtttcatcccgaattcccagaaacagaggggactggacaaaactagtgacattagggagaggggcggcacataggctggttattcagaagaggaagcagaatgaatgcgcgcctcacaggctttcaaatgactgtggtggtaaaaaggcaggtgcgccatgctgccact

SEQ ID NO: 260374 - DNA, 231 bp, Homo sapiens
  chr9:95403858-95404089
  hypo
ggcaccgccagactcgctgaagccatggagtgagcggtgttggtgccaccttctgaatgagcattcccaatgtttgtgaactttttaacttccaaagacaactccgcgttcgatctttgttcccggaagtttaaaagagcatctaaccaaaagcactgacatgatgaccaggcacgcactcagaggcagtgctgagcactgacaaaggcaggggcacgaaatgaatggctg

SEQ ID NO: 260375 - DNA, 279 bp, Homo sapiens
  chr9:95416105-95416384
  hypo
acagagcgagaatttgtctcaaaaacaaaaacaacaaaaaaagaaaattcgtaaattagatcatctcaagaagtccaagtactggctccactccaaagaaagcaaaagcacaaaaggcacgcatgccgactctggatgcctcgcgtgtgagaaccatcgcccaaaaccacacaaggccgtcactctgccttggcccccaccccacagcacatatggctgggagacacagcagctacgcaggtctcaggtccacatacagggcaacgaccctccacaccg

SEQ ID NO: 260376 - DNA, 45 bp, Homo sapiens
  chr9:95416854-95416899
  hypo
gcgagtgtggaccacgccaccatccaatcacgtgaggacgcacca

SEQ ID NO: 260377 - DNA, 65 bp, Homo sapiens; identical to SEQ ID NO: 212851
  chr9:95417140-95417205
  hypo

SEQ ID NO: 260378 - DNA, 404 bp, Homo sapiens
  chr9:95417482-95417886
  hypo
ctttgcctaactcaccgacacatctgttcttccctcacgtggccctgtgtggccctgcagatgcagcgaccctgaggggtgcatcgtcagcctggaatgggctctgcacctactttcccactgcgccagagcccagcggcgtcctactgggacacgctcacctgcagggcaagcaagctctgcttcactttgtcggtatcttaaggcagaggaaatgcgctcacaggcggccttgtgggttgagccctgtttgctgtgggttcattactgtgacccttcccactgaggacaaacctggagccagactgctcattgctggaaatgctcccctatcctgtcccctcagagcagtccctaacgctcaccccaccaggttgccaatgggacctcgagtctaatcccat

SEQ ID NO: 260379 - DNA, 605 bp, Homo sapiens; identical to SEQ ID NO: 212853
  chr9:95477240-95477845
  hypo

SEQ ID NO: 260380 - DNA, 361 bp, Homo sapiens
  chr9:95484977-95485338
  hypo
atgttctcctcctccagttccgagtagtcctgcagcagacgagcttcccggaatttgtactccttgatgtcatcccgcaggcggccacgctggatctccacattctggttgatctgttgggggagagggaaaggcaggtatgagcagcctccacagggcacgagaggggctcagtgcagccaggcacgccatggccagccatacagccagaactcaagagccctggcctgcaggtgccagtgtgactgcctggagaggagagggagcccagagcagtatgccagagtgcacagcggactgcagaggttccagagtaaattccctcagcccttctcacctgggaacccgtgactgcctgctc

SEQ ID NO: 260381 - DNA, 339 bp, Homo sapiens; identical to SEQ ID NO: 212855
  chr9:95492113-95492452
  hypo

SEQ ID NO: 260382 - DNA, 179 bp, Homo sapiens
  chr9:95501276-95501455
  hypo
ccagcctcctgggaacggcgggcctgggcatcccaggaatcccactagtcctagcctggctgcctcggttgggccctcccaccacctgctaaggtggagacactgctgggctccttgtcagggctggtccaagcagggggaaggtctgatcctcatccactcgacgggctgtgaatacc

SEQ ID NO: 260383 - DNA, 85 bp, Homo sapiens
  chr9:95676050-95676135
  hypo
actctaggctgcactgtggccgaggactctcaaggcctgttcaagaaacacagggaaggccgggcgcggtggctcacaactgtaa

SEQ ID NO: 260384 - DNA, 203 bp, Homo sapiens
  chr9:95687862-95688065
  hypo
agtttggtgtaaatacgtggagggtattcttggcggggaacccaaagtgagcagcgaggcttggaggtgggaatgggaacagggatgggaatagctgaagccagatactggtaaatgctgtttaagtcatactgtaggttgttcgtggatagtatattcagggaaacagaaaggtgtgtccttgtgcccgaggttaaagggaa

SEQ ID NO: 260385 - DNA, 91 bp, Homo sapiens
  chr9:95826254-95826345
  hypo
ttgacggcgcatcccggacttcttgtaggtcagtgttacctcgctggctggtcccctttctttggttgtgggtggtgacttcacctttttt

SEQ ID NO: 260386 - DNA, 248 bp, Homo sapiens
  chr9:95899553-95899801
  hypo
taagcgacccccaccgcgtactatggggagtacagttgtgtctctcagacctgggggaacatgcggtgaaagcaccaagctgttgaaaggtccatgggtcagatggaccatgttttcacctacagaaagccttcagaagcagccagtccctggcctcctccacctcggagaggcttgcaggcaggtatgccgtttccacatcaccaagggagaaagcgagtctggcaaggtggcgcagcatgcccgag

SEQ ID NO: 260387 - DNA, 254 bp, Homo sapiens
  chr9:95947889-95948143
  hypo
caggtgagggtgccccagcccgcagggggctttccgcagggtctgtccgcgagtgcgtccttgggcctgtccttgctcctgcgcctggccttaagaagccctgggggcggcggggctccatgtgtgtcaccctctgtgtggatggctggcaggatgcataccaggtgtgcggacggcatgtggggcctggctgtgtccgtgcgcaggttgcggtttgtgagtcagctggtggcgagggcaggcctctgttgtgc

SEQ ID NO: 260388 - DNA, 34 bp, Homo sapiens
  chr9:95952714-95952748
  hypo
ggccaccatgggactcgagcgtacctgtgctgct

SEQ ID NO: 260389 - DNA, 396 bp, Homo sapiens
  chr9:96054920-96055316
  hypo
ctttggggtcccctcggaaacgtccagagcagcaggatgtcagctcaccagccaagactgtgggccgtttctcggtggtcagcactcaggacgagtggaccctggcctccccccacagcctgagatactctgccccacccgacgtctacctggacgaggccccctccagccccgacgtgaagctggcagtgcggcgggcgcagacggcctcctccatcgaggtcggcgtgggcgagcccgtgtccagcgactctggggacgagggccctcgggcgagacccccggtgcagaagcaggcgtccctgcccgtgagtggcagcgtggctggcgacttcgtgaagaaggccaccgccttcctgcagaggccttctcgggccggctcgctgggccccgaga

SEQ ID NO: 260390 - DNA, 411 bp, Homo sapiens
  chr9:96069018-96069429
  hypo
ctaaccctgtggtcttgtgtcgtttctttttcccttgcagggtctgccctgaagcgtctctgcctaggcaaagaacacagcagtagtaattatccgggttttttcccctttgtcctctctcatcgcatgggctttctcgtggctagcgcacatcagggttcccgcggccgggcgggcgtgggcctgccctgtgcctgccccgcgcctgctccatgcctctcggccgggcactgcttcgcttctgcctggcgggatcgctgtcctcggctcccccgtgtgtctcgtggcgcctagagtttgtgcggtctcgccagttcacatctaacgggcttatccttccccggaacacccgcaaattgccgatcattaattggctccttttccaaaaccgtaggaatgagtatttccttg

SEQ ID NO: 260391 - DNA, 34 bp, Homo sapiens
  chr9:96070699-96070733
  hypo
agaagggtaccttcacggacgacctgcacaagct

SEQ ID NO: 260392 - DNA, 103 bp, Homo sapiens
  chr9:96084519-96084622
  hypo
ccactagacgcgtccgtgcttcaggcttcactgctgctgcacagcgtgccagctgggcccggatattcttttttttctttttcttttttttttttttttgaga

SEQ ID NO: 260393 - DNA, 96 bp, Homo sapiens
  chr9:96155805-96155901
  hypo
tgcctatgcccctgtaacctcggcagtggcccgacgtagtctatttgccatctagtcaagggaatctgccctaccgtcacttgttgtgtaacactg

SEQ ID NO: 260394 - DNA, 41 bp, Homo sapiens
  chr9:96218214-96218255
  hypo
ttacgggcgtgagccactgcgcctggccaggagaaatcttt

SEQ ID NO: 260395 - DNA, 37 bp, Homo sapiens
  chr9:96230169-96230206
  hypo
cttttttttttgagacggagtttcgctcttgtcgccc

SEQ ID NO: 260396 - DNA, 36 bp, Homo sapiens; identical to SEQ ID NO: 212859
  chr9:96230446-96230482
  hypo

SEQ ID NO: 260397 - DNA, 178 bp, Homo sapiens; identical to SEQ ID NO: 212860
  chr9:96256151-96256329
  hypo

SEQ ID NO: 260398 - DNA, 410 bp, Homo sapiens; identical to SEQ ID NO: 212861
  chr9:96275710-96276120
  hypo

SEQ ID NO: 260399 - DNA, 187 bp, Homo sapiens; identical to SEQ ID NO: 212862
  chr9:96294481-96294668
  hypo

SEQ ID NO: 260400 - DNA, 246 bp, Homo sapiens
  chr9:96308695-96308941
  hypo
ggctagggtcacatcgtttcagcttcgtgtttaagtttgtgctcagactcttaatgccgtcccatctggtgtatttactctgcccctcctgtggctggtgcctcgtggcctgctgtgtgtgagcactgagatgcacggacagggaagaggccatgcatgcagctggtcctggtggcattgtctcccagcccactcttttgtttgctcctctcgatgcctggggcctggcagcggagtgctggccct

SEQ ID NO: 260401 - DNA, 299 bp, Homo sapiens
  chr9:96348817-96349116
  hypo
gccaacgtacaggccggatgggaacagtctgtgaggcttttgtgccactcctggctgcgcttggcagctctgcatgtcacacatgaggaatcctgagtctcaaaatggcccaggaatccagcatgagctgtgctaggagtcaagaggtttgccacgactgggcttggttccttgttcatgagcgagcacgtccctcagtctgtccatctagctggtgacgtttcctgaacaccaggggagaccaggctctgttctaggcacgggcagcagtgaggaagactgcacggcccctgaagcta

SEQ ID NO: 260402 - DNA, 178 bp, Homo sapiens; identical to SEQ ID NO: 212863
  chr9:96357852-96358030
  hypo

SEQ ID NO: 260403 - DNA, 176 bp, Homo sapiens
  chr9:96361906-96362082
  hypo
tcagccgagatattcggtggttacctgtgagtttcacctttcctggacttcactaaaccataacatgccaccacgagggctgatgtggtccagcacctcatttcacatgtgagctgcttgcagcaagggggattcggagcacgaaagggatttagaggcgccggtggggccaggtg

SEQ ID NO: 260404 - DNA, 183 bp, Homo sapiens
  chr9:96435974-96436157
  hypo
ggccaaggggagctcgctggctgcccatggtgcccggaagaatgggggtggcagtggcaagagtgcaggcaaacgactgctgaagagggctgccaagaacagtgtcgacctggacgactacgaggaagagcaggaccacctggatgcctgcttcaaggactcagactacggtgagtgtcactc

SEQ ID NO: 260405 - DNA, 171 bp, Homo sapiens
  chr9:96446747-96446918
  hypo
cagcgatgccacctcggtagaaaaatgatgctgttccattaacatctgacacggatttgcaggccccaaacagacgagcgagctgtaaacacccggtgctggctgggccctcgcccggcctccaagtaggatccttgtcattaatcgtcctcccgccggccaggctgggcc

SEQ ID NO: 260406 - DNA, 327 bp, Homo sapiens
  chr9:96573410-96573737
  hypo
aaggcaatgcctatgggagacgtggtacagtcactccctgctttgtaaagcgctgctgggtctcctgggaaacagcagcgtgcctggcactacgcaaggcccgcacagctgcgccgttgttgtcaccagccgcagttcccaggttgcacatgcctagagaaggtgttggcgggacgcggttgcgcctctgacttcctttaattccgacttctacttgcgtcgttgtgtaggcgtctgagggccacctgacgtcgtctagtgtctccacgccttgacacttgtctattgaaatgcatcttttttttttttttgagacggagtctcgct

SEQ ID NO: 260407 - DNA, 319 bp, Homo sapiens
  chr9:96673540-96673859
  hypo
ggagatgcctgcccaggcctcggggcataccctccactccaaggagcagacgtcccactgagagcagtgcaccccaatatggtcacgggggacaggttgccagttatcgccagcagcacctggccctgggcagaccccgtgatgggaaacaagtctcaggagctgggacgttgatgtgtcccacacgtgccggatgacagtgatttacacgggcctcctaatcccccgccgggtaccctgactcacacggcctggcacccctgcccgcgcccacaggtggacgggcactcaccgagacggctgcaccactgttattttt

SEQ ID NO: 260408 - DNA, 36 bp, Homo sapiens
  chr9:96687053-96687089
  hypo
tggagaagggtcacacggggccgcttacctcatggt

SEQ ID NO: 260409 - DNA, 100 bp, Homo sapiens
  chr9:96910020-96910120
  hypo
gaatgaaactccgtctcaaaaaaaaaaaagagtctaaaaaatctaagaaccatcttggcacacgagctgcaaagaaaggagctgcagctggatttggccg

SEQ ID NO: 260410 - DNA, 132 bp, Homo sapiens
  chr9:96910150-96910282
  hypo
gaagcactcaaggagcttccttgcttcatcccctggaggaaagccgggcctggccatggcgctattgtgacgtggctcccagagcagtttcaggcctgttctagcatctggccggggcggcagcctgagagc

SEQ ID NO: 260411 - DNA, 37 bp, Homo sapiens; identical to SEQ ID NO: 212866
  chr9:96945351-96945388
  hypo

SEQ ID NO: 260412 - DNA, 120 bp, Homo sapiens; identical to SEQ ID NO: 212867
  chr9:96945448-96945568
  hypo

SEQ ID NO: 260413 - DNA, 36 bp, Homo sapiens
  chr9:97010560-97010596
  hypo
tttgagatggattacaggcacgcgccaccacgccca

SEQ ID NO: 260414 - DNA, 35 bp, Homo sapiens
  chr9:97010716-97010751
  hypo
gagccactgcgcccggctaatataacttttttttt

SEQ ID NO: 260415 - DNA, 266 bp, Homo sapiens
  chr9:97062633-97062899
  hypo
ctgagtgtgggcgtcggtttagccagaaggcctccctctccatacaccagaggaagcactcgggggagaagccgtatgtgtgcagggaatgtgggcgacacttcaggtatacatcctctctcactaatcacaagaggattcactccggggagaggccctttgtatgtcaggagtgtgggcgaggctttcgccagaagatagccctccttctacaccagaggacgcacttggaggagaagcccttcgtgtgtcctgagtgtgggaga

SEQ ID NO: 260416 - DNA, 41 bp, Homo sapiens
  chr9:97107980-97108021
  hypo
ttacagccgtgagccgccatgccagccggcctttttaacta

SEQ ID NO: 260417 - DNA, 103 bp, Homo sapiens; identical to SEQ ID NO: 212868
  chr9:97162000-97162103
  hypo

SEQ ID NO: 260418 - DNA, 108 bp, Homo sapiens
  chr9:97203264-97203372
  hypo
aggtggtattttgcgatgatttctgtgtctggagtcttctcggtcacgttttctgttatatttgcctatgtagctgatgtcactcaggagcacgagcgaagtacagct

SEQ ID NO: 260419 - DNA, 381 bp, Homo sapiens
  chr9:97317331-97317712
  hypo
atgcagtctaggaaccggcatgcgcataacctcaggatataaataatgctgaagcagagttacgttttttttgttgttgttttttttgtttttgtttttttaggtttccgtgtgtttctattgagctgctcagtgcccggcttagaagaccaggaaaaggagtcacaggtcgtatgctggaggcttgagccgcggcaccgtggcgcggctcgcctcgctgcggttggtggtggcggtggacattgcagcgcggctggaggggtaggaagaagaagatagttttgggatagatagaggtgggtaaagagtgtggttagtgccaaagggaaaaaaggatagcgaggaggagaaggcgttgcaaaaagacgatggggaaaagat

SEQ ID NO: 260420 - DNA, 107 bp, Homo sapiens
  chr9:97369213-97369320
  hypo
caaaatgaactccccgatggcctttttagacaaggaaggaaaggtggagagatgacgagcgcactgggtcccccaggcctggatgaggcgagcgatgggctgggcta

SEQ ID NO: 260421 - DNA, 313 bp, Homo sapiens
  chr9:97384560-97384873
  hypo
tgcacagagcaaggcgagagccttgatgtgggaaggggaaaagatgggtctttgaagacaccagcaagcctctgaaagtgggtggtaagggcacacccgcgcccttggccatgatggcgatgtgcgctcgcctgggaactgacggtccctgatccagtggccgtgactgcttcagctcctgcaagtgcatttgcccaaaacataactcgctgtgactggctgggcaaaactgagcccctcctagaaaccatccaaacccacatgcctggtccggcctgactatctcaggagctagctccggctgtcttctcgg

SEQ ID NO: 260422 - DNA, 37 bp, Homo sapiens
  chr9:97469746-97469783
  hypo
ctttttttttttttttgagacgttgtctcgctctgtc

SEQ ID NO: 260423 - DNA, 212 bp, Homo sapiens
  chr9:97474710-97474922
  hypo
ctggaggtgacctcccggggcctaggggaatatgggtggagccaggtgttaggatggagtgcttaagggcttgtgcagaagctgcatttccacaataggtgcactgctctttttgtctgggataagaatgtatgctcattcggggtggctgacaacgattatagggctgctaagcttcctccgagctatttccataacgctgctttgtatct

SEQ ID NO: 260424 - DNA, 42 bp, Homo sapiens
  chr9:97488328-97488370
  hypo
ccccatgagggaaggcacagcgtctgtcttgttcctggttgt

SEQ ID NO: 260425 - DNA, 37 bp, Homo sapiens
  chr9:97506389-97506426
  hypo
tatggggctgtgcgcggtggcttatgcctgtaatcca

SEQ ID NO: 260426 - DNA, 131 bp, Homo sapiens
  chr9:97563055-97563186
  hypo
gtcacatggaatacccctgccgcttccagaatgcttctgccaccacccaggagatcattcctcatcgggtctttgcccctgtgtgcctcacgggtgcctgccaagagacccttctgcggctgatccctcct

SEQ ID NO: 260427 - DNA, 37 bp, Homo sapiens; identical to SEQ ID NO: 212869
  chr9:97591478-97591515
  hypo

SEQ ID NO: 260428 - DNA, 96 bp, Homo sapiens
  chr9:97634477-97634573
  hypo
tgtttaaaatggatcgatggcagggcgaaccatcacgcactctggcagagatctaaacgggggcagtagtcattcttcagtcgtgtttttcttttg

SEQ ID NO: 260429 - DNA, 163 bp, Homo sapiens
  chr9:97671389-97671552
  hypo
gttcacagtgagtccgtgaatggaaatcacgccacacaggagctgtgactcaggcctgttctccgaaggggtgaggtgatggctattaatatttaatttcatatactgtagtgtttgcagaagcaaacatgctgtagttaaggttacgcgcattgagcgtcag

SEQ ID NO: 260430 - DNA, 115 bp, Homo sapiens
  chr9:97674944-97675059
  hypo
aaagagtaggaatctcggctatgggctccctgggaaaagttgctttcctgatgaaagggatcgttgttgctggcacagcgcgtttcttccatgttaaacacgaacatggtgcatg

SEQ ID NO: 260431 - DNA, 239 bp, Homo sapiens
  chr9:97678305-97678544
  hypo
tccacaccgccacacgggacagacttgtgctcgctgtgaaaaccaccaggatgagctattacggctctcagttgtgccattttattgctgttctggaaatggagcaaaacacattattttattaaataaagattttccctgtatcacagtggaggctaattttattagctctttttatgggaacaaacatcatcgccctgattggggaggacggaggtgggggccgtggggaggtgagg

SEQ ID NO: 260432 - DNA, 198 bp, Homo sapiens
  chr9:97679314-97679512
  hypo
tttgatgaccataaccggcagaacctgcccccaccccacccccaggctaaggcagagcagctgaggcaggtgaggccaactcctgagagtcagacagcagtgctgccctgttccgtatgcagggctgaggtctccacaacgttctctcgggatgtgttgccctggggtcagaagggatgtatccgctgctctgctggt

SEQ ID NO: 260433 - DNA, 39 bp, Homo sapiens
  chr9:97682280-97682319
  hypo
aacttgcggccaggcgcagtgactcatgcctgtgatcct

SEQ ID NO: 260434 - DNA, 218 bp, Homo sapiens
  chr9:97682619-97682837
  hypo
aaacttgctctccatgaggggaattggggtctgctcccgtaaaatgggaggggtggcctgggggctcttcttgtccttaagggcaatcaatttcccgtcctctgggttccttctacccctgcagcctgctggaacctgctgtggcagcagcatctagccagggccgccaagtgctgggtcgctccacccacagcaagatgggccgtgctggtcagggc

SEQ ID NO: 260435 - DNA, 337 bp, Homo sapiens; identical to SEQ ID NO: 212870
  chr9:97719171-97719508
  hypo

SEQ ID NO: 260436 - DNA, 172 bp, Homo sapiens; identical to SEQ ID NO: 212871
  chr9:97727389-97727561
  hypo

SEQ ID NO: 260437 - DNA, 158 bp, Homo sapiens
  chr9:97808126-97808284
  hypo
gtagatttcaggcagcatcacgctgccggcccctgcggaatggagagtggtgttcggggatttgctttggaaatgccttgggaaggcgccgccacctccactttgaacaacggtaggaacgcagggtaggtgctcaggtggcacgagcactgctggcc

SEQ ID NO: 260438 - DNA, 216 bp, Homo sapiens
  chr9:97847400-97847616
  hypo
tgctagcataacaggcgtgaaggcggcagtgtcgccggcgtccttccgcggaagcccagtgtgtgcagacagcacggggtggcgctgctctcaggtgctctggctgcttgggttcctggcatgctgatttgtgacttaagattaaaatcacattgccagggattaccacgcaaccacgaccttggctgctcctccagaaaccgtggtcgcgctcac

SEQ ID NO: 260439 - DNA, 1027 bp, Homo sapiens
  chr9:97847891-97848918
  hypo
agtcagcttgggtgcggagcgcgatcctggaggatgagagaccacttgaccccaaggatgcactgtctcctgctgggaatgctagccatgtactgagtccttaagtctgtccacagaaacatgcactaatcggacatctgtctgaaaggtcaaatgtattgaaagttgcaaaaattcttcttacaaaaaactaaaaccaaatgcatcacctaagtcgtgtgaaatcatgtggtagctcatggctgtgagcggggcggggcggggctttcggaggagctcctgttgttctgggcgcggtgaactctctcttgtatttgcagtccaggccttcgcgtctcctgcgccagcagacggtgcccacggagctcccagctgaggcgctgcttctccgggctgtcgattggacccgccctccggtgcctactgagctgatatcagttctcattttacacactggctcagttcagcaggaacaggagtcgagcccttgagcaaaaagccttcgtgtctgtaagtgcccgaggctcaggagagctggggctcccactcgcggcagacaggcccgcgtccaccctgcgtccaccccggcccggcggcagcacggtgccagtcatctgcatgtgctcctgcggcgtgggggtttgtagacttggaaaaccctgttggcagaaagttaagagctcccaggcctgaaggcaggacacagtgccagcagggggccgtttgcccccatgtgtaagggaggcagggcccagctctcccacggcgaggtgagctgagactttctgagaacagttagagtgggtgcgtgtctgaaatgggtactcctagcagctattgtgtacgcaaagcctgagtacagcctgctggtgtcatggccacgtgtgagcaggccagcgtcacacggctcgctgtgacccgtcccggagactgaaatgggcctgggtcttctccttgtcctgtgattaaagtcctctcttgaaagtggagagcaaaggcacacagaggtgcgcgctcacaagaattc

SEQ ID NO: 260440 - DNA, 223 bp, Homo sapiens; identical to SEQ ID NO: 212875
  chr9:97855923-97856146
  hypo

SEQ ID NO: 260441 - DNA, 352 bp, Homo sapiens
  chr9:97863724-97864076
  hypo
acggtctggccgggcgggcaccaggagtaccgaaggctcacttgagtcattagtgaacatgtctgactgagtctgggctgagggacctggctctgcattttgtaaaatagatactagcagattgtcccaagatgtgtacagctcattctcacagcccagcgagggcacttactccacaaatgcgtggccacaggtcatcacctgtcctgtggccctggcgagcctgatccctcacgccgggcacccacacggcctgcgtgccttctagacttgagttcgcagctctttaaggagctctcgggccagtttttctgatctagggctttcaatgccaagacgattccatctgtac

SEQ ID NO: 260442 - DNA, 61 bp, Homo sapiens
  chr9:97864638-97864699
  hypo
acacctgattcttgcgggagagcaggagacacagcctcaaggcattcgtacttgttggtgc

SEQ ID NO: 260443 - DNA, 308 bp, Homo sapiens
  chr9:97864982-97865290
  hypo
ttactgcctcaggtccgacagcccaggacacccttcagaactgggccttccacctcctgaccaccactaaagggagcctcttgtcgcatgcgcactgtgtgaatggcagcgtggggacgcagagctaagagtaaacgacgtggtgtggaccatgacgttcgctctcctcggccccccctggcagcacacagggcctgcagccggcctgcaacgagcccgccagggtcagtgcagccagcacgggggctccggctgtagcccaggcacgtgccagtgtgtccctgggcgtctgtattgctatcacttgg

SEQ ID NO: 260444 - DNA, 385 bp, Homo sapiens
  chr9:97867213-97867598
  hypo
gagagcatgcatttgtctctcgcgtctggcttatttcgctcagtgtaaagccctctaggttgggccgcattgttgcaggtgtgcattttataagagtacacaatagattctcgaaagcattctcgctgtgctggggccgggcccaaagaggtggcacctggcatgtggcagccagtcgtctttagccctgggccaccctcatgactcggattcgtcttagctgagacaccagcacctgggaggcacagcctgggcccactccacaggactgtcctaccaggatggagacaatctcctggccctggttcttggcaggtgggtcatgttacggggactttctgtacatggacattcacgtttcagtcaggcccggcctggacgggag

SEQ ID NO: 260445 - DNA, 168 bp, Homo sapiens
  chr9:97868960-97869128
  hypo
atagcattgtggttgctttgcgagcccattctcatcgtggccttacttctttccatgaggaggaggagagcagcacactgcgatggaaagaaatgtacgtagggggacaggagacctggcttctaccgcaggctttggcagcaagccgtgggcccaggagatggcatc

SEQ ID NO: 260446 - DNA, 77 bp, Homo sapiens
  chr9:97887433-97887510
  hypo
ttccagggccccatcggtttccaggagtgcacacctgaacaatgcaaagtcagatcagaacacgtttaacaagtaat

SEQ ID NO: 260447 - DNA, 157 bp, Homo sapiens
  chr9:97891726-97891883
  hypo
cttcatgagtgatgacgcaggcatctaacctctgatcctgttttatttgtaaggtggggcactccggtaacacaccagaggtcacgctgcaagccagggctctgaagccccatgactgcggccattatcttttctataaaagcggggaaataaaata

SEQ ID NO: 260448 - DNA, 206 bp, Homo sapiens; identical to SEQ ID NO: 212879
  chr9:97913297-97913503
  hypo

SEQ ID NO: 260449 - DNA, 81 bp, Homo sapiens
  chr9:98145032-98145113
  hypo
gaaaataaactgctggaagacgagttcgaggtcaaatacaaggagggccacctttaaatttttttttcctctgggacggag

SEQ ID NO: 260450 - DNA, 31 bp, Homo sapiens
  chr9:98196382-98196413
  hypo
caccgcgcccggcctatgggctccagatttt

SEQ ID NO: 260451 - DNA, 402 bp, Homo sapiens
  chr9:98240100-98240502
  hypo
acaaaactttacatcaagggcgtcacataaaatgacaggagtcaaaggtaggcaaacggcaaatgggaaaaatgctttacacgaccacttttaaaccactgtgaagccacgctctctctgtcctggatgcacatcgatgttaagagcagttaagaagcaggagcagtcatggaaaagtaaagactaaaacaaccaaaccaaactccagcccccaggagcatggcatcgagcgttaccatgagtaagtagccgctggccacgcggatgacactgacgtcagagaaggatttcaggatgtcgtccagggtcgtggtggtgaaggaaagcaccttttgagtggagttctgtgcgacactctgatgaaccacctgtggtcacaacagaatgcgaaatgcccaaatg

SEQ ID NO: 260452 - DNA, 45 bp, Homo sapiens; identical to SEQ ID NO: 212882
  chr9:98459835-98459880
  hypo

SEQ ID NO: 260453 - DNA, 207 bp, Homo sapiens
  chr9:98490544-98490751
  hypo
aagatgtggaactggtaagccgaaagcttttgaaaggcactcatgaggtttgcctgggaaaactgcaccactgtgcgtcagcagcggcagcctgcgacaggactctattaagataggcacagcacaggtgcttaaaactgtgattggcggtcagattgcctgagtttgagtcaaccctggaatatcgtttaatctctctgtctctga

SEQ ID NO: 260454 - DNA, 59 bp, Homo sapiens
  chr9:98842605-98842664
  hypo
agctctgtatctgcattttccgacatcccagaaagtacggtagttcctgttctaatcat

SEQ ID NO: 260455 - DNA, 231 bp, Homo sapiens
  chr9:98842927-98843158
  hypo
cttaaggagaatgtccagggcgcctcactgatcgtaaggaaatcaggagcagaagtggatctgctggcccttctgtgcctagtcaggccacgggacaggtctccctggaatggtagcatgaccaaaaggccagtcaggctctgggctcagaccacgtgggttcgaatccaagtgctgccactgcctagcaaggtgatccggaaagctaccgaaacaccctggactttcatt

SEQ ID NO: 260456 - DNA, 80 bp, Homo sapiens
  chr9:99102564-99102644
  hypo
tctcatatattttggcatctcgtcatacaatacttttaaaaactagtcaaacttggctgggcgcagtggctcacgtctgt

SEQ ID NO: 260457 - DNA, 329 bp, Homo sapiens; identical to SEQ ID NO: 212883
  chr9:99139192-99139521
  hypo

SEQ ID NO: 260458 - DNA, 37 bp, Homo sapiens
  chr9:99214210-99214247
  hypo
tttttaacaaatgaaaatgccgggtgtggtggctcac

SEQ ID NO: 260459 - DNA, 37 bp, Homo sapiens
  chr9:99214487-99214524
  hypo
gaaagagcgagactccgtcacaaaaaaaaaaaaaaaa

SEQ ID NO: 260460 - DNA, 122 bp, Homo sapiens
  chr9:99256191-99256313
  hypo
gcgctcccaggactcgcgctgcctccaggcgctcccctccacgccagtgctgccttttcaaagaagtctttcagactttaagtccgaaggatgcccctcctcctacccgctttccccctgca

SEQ ID NO: 260461 - DNA, 1051 bp, Homo sapiens
  chr9:99258626-99259677
  hypo
gacagccaaccatcgctggaaaagggaggagatggacagcgctgtacttaccaccaccaccaccaccacagggcctgtctcagggcttgagtttgtgtggacggcaaggactagcttcctgggccgctaactctcaaccgcaaggcaaacttgggttggggcccagaacggccgtcagccgttaccctccagcctggccagtgagtgctgagtggacactccgcggctacttaaggacacgccaaccgcggtcctgccggggcgctccgtgcgtctccctccggctgggtcccggctgaccccgcaatccaggcgcaggcaagggagaccccgctggctccaccgcccaggccaccctgaagtccccgctggaggaggtgcagcggacccgctcccggggagcccgtcccgcgccctccctccgagaagccccttcctccagctccttcctctgcccgccggcccgagagcaccgaggcggcttctctgtcctgtgtactgcccaggacaagcggcattggaagcgagtgagccgttcccagctgggggcagcaacagcccggggccagggaaacgcatgggggcctggaccgtccggtggcaccgagtaggcgggtgccaggacgccagacacgctgcattccccggagtcccacgccagggagaacggccccgcctgaaaagacgtcgtttaacacagagaaacacacccagggccaggagaaaccattgtcctccccgagtcccacaacgcacaaagcacacggtggccctcccacgcggagtcgtctacccctttagaaacagacttggcccattagagcctccgcggccaggccggggcctccttacctggggatttaggtgtggacccagcacgcgtcgtccagaagcgtgtcaaagccatgcagacttgctgccaaagagtcaggcggggttagaggcggggaggcaggggcggggaggcagaggcgggaggccccccactcccacacaggccagggacccccgaggcgctggggaggaatccggaaggctttgctcaggggga

SEQ ID NO: 260462 - DNA, 196 bp, Homo sapiens
  chr9:99267708-99267904
  hypo
acagcataagctaacaaacacgcaccagcggaagggctgcgtgaagacatgagtgaatgcgagcaaatgaggtggctgcaggctctcactcggggcatgatgaaatttccaagactgttctaagagagctcttcagagaggtcatgtgagaacactgaaaacaggccgattcaacggagccaattattcactggat

SEQ ID NO: 260463 - DNA, 79 bp, Homo sapiens
  chr9:99446887-99446966
  hypo
agatagaagaggcagggcctcgtaaccgtaagcagcttgactttttttttttttgagacggactcttggtctgtcgccc

SEQ ID NO: 260464 - DNA, 211 bp, Homo sapiens
  chr9:99450309-99450520
  hypo
aaaagagtgatgtgatgtgtattttagagagataagtgcagtggattaaaatggattagaaaaggcaggaaaaaacgataggctgttaacttcgttttggctctaaacttctcgtaaagaagtggagcaagcaagatggggaatggaaggcaagaagtatgaaatctgaggcggacctttgcaaaggatcgtttcagtatgacttcacagg

SEQ ID NO: 260465 - DNA, 45 bp, Homo sapiens
  chr9:99641471-99641516
  hypo
aaacaatgggatacttaggccgggcgcagtggctcacgcctataa

SEQ ID NO: 260466 - DNA, 40 bp, Homo sapiens
  chr9:99803883-99803923
  hypo
tcttgtacttgtactgcaaatttgccgtctcaaaaaaaaa

SEQ ID NO: 260467 - DNA, 40 bp, Homo sapiens
  chr9:99818324-99818364
  hypo
actgccgatggctccgggataggttcggtggtgggaaggc

SEQ ID NO: 260468 - DNA, 166 bp, Homo sapiens
  chr9:100267687-100267853
  hypo
gtgaccccagggccgtttctagcgatgattctggagggtgatgagttgtgaccactgcgttgttgctctccatgcccaaaggaatgaaggaaagcagaactgcctctgggcatccttcagcctccttcatagactcatcgctgctgcccatcgctttgctgttggt

SEQ ID NO: 260469 - DNA, 180 bp, Homo sapiens
  chr9:100297536-100297716
  hypo
cttctctgctggtcccggcaagactcacaagggctggaacgagggtgatgcccacagaaggagacatttcggaacactgcagcctcagaccctaatgcctcccctagcaggccatgccgccctcatctgctgggcctctgctgcactgtgctttctctctccctgcgatgcccctgcact

SEQ ID NO: 260470 - DNA, 142 bp, Homo sapiens
  chr9:100299578-100299720
  hypo
tgcacatgtgtgatcgtgcgtgcctgtgtgtgcgggtatatgtacgtgtgtgtgcatgtgtgttgcctctgtgtgcacatctgaacaagcccacaaggttctaggcaggatggcttctcacgtagccctatctatagcaatg

SEQ ID NO: 260471 - DNA, 76 bp, Homo sapiens
  chr9:100308892-100308968
  hypo
ctgattatttttttacgcaaacctaaacagttttgagagtaaaagaagaaactgttaataacgacatcaggacttt

SEQ ID NO: 260472 - DNA, 83 bp, Homo sapiens
  chr9:100349304-100349387
  hypo
ctcctccccaccacttggcataattctatggagattcatccaagttgttgcatgtaccaatcgtttgctctttttcactggtg

SEQ ID NO: 260473 - DNA, 38 bp, Homo sapiens
  chr9:100397701-100397739
  hypo
tttttttttctgagacggagtgtcattctttgtcaggc

SEQ ID NO: 260474 - DNA, 37 bp, Homo sapiens
  chr9:100397979-100398016
  hypo
agatgtgagctactgcgcccgccgataatacaatttt

SEQ ID NO: 260475 - DNA, 138 bp, Homo sapiens
  chr9:100690587-100690725
  hypo
gtgagccaccgcgcccggccgatcaagtgtattttttaacctagcagacagacaaggatttttaaaatgtcataatgtacagtgctgacaagggtgtggggaaaaggcacctgtctcgtgtgaattgctaccacattt

SEQ ID NO: 260476 - DNA, 35 bp, Homo sapiens
  chr9:100820491-100820526
  hypo
ctcggcccttgctgttccttcgggactggttttat

SEQ ID NO: 260477 - DNA, 32 bp, Homo sapiens
  chr9:100835845-100835877
  hypo
tgagccaccgcgcctggcctgggcttcttttt

SEQ ID NO: 260478 - DNA, 256 bp, Homo sapiens
  chr9:100843157-100843413
  hypo
gcgatatctgtggccgcagtggctctgggggccaaggtgttggaacgtcacataactttggacaagacctggaaggggagtgaccactcggcctcgctggagcctggagaactggccgagctggtgcggtcagtgcgtcttgtggagcgtgccctgggctccccaaccaagcagctgctgccctgtgagatggcctgcaatgagaaggtgtgtcctgccggactctactcggttctgctgccgtgtgtggaaaaag

SEQ ID NO: 260479 - DNA, 178 bp, Homo sapiens
  chr9:100849664-100849842
  hypo
aaggggaccagccacgctgatctaggtagattaggcgagactgggcagctgcggcgtacctggaggctgtcacgccggtcctggcccctagggcagccgggggatgctgatggccccctcccagagccgcagggccgggtagagcggctcctggaacgtggcgcggaaggtatgcagg

SEQ ID NO: 260480 - DNA, 128 bp, Homo sapiens; identical to SEQ ID NO: 212891
  chr9:100890703-100890831
  hypo

SEQ ID NO: 260481 - DNA, 210 bp, Homo sapiens
  chr9:100924970-100925180
  hypo
atgagcgcctgtgtcgttttgtgggtgtgcatgcacgtgtgcatccctttggatgtttaactgaggctgtgtatatacacatgcatgagcgcatgcgtgtatccgtgcatgcatgactttaatgactcagtaattcagagaacaggagttcattttccctacaagcaggcacttgcccacaagtgagtactgtagcgggcccttcgccta

SEQ ID NO: 260482 - DNA, 182 bp, Homo sapiens
  chr9:100933034-100933216
  hypo
attctgacaccaattcgctccgtcaccttgggcaaatctcgtcccctctcccgctttctgagtttctatccatataatagtaacagccctgccctgcccacctgttaggacggtctgtggagggtgctgcagcttgcacacaccagacacacacaggaccacaagggcgacagagctgtcca

SEQ ID NO: 260483 - DNA, 225 bp, Homo sapiens
  chr9:100935909-100936134
  hypo
tggtgctccacagccggaacaaaatccacctattgcgtctgctgtcccataacagcttcgcagcccagtacacgtgcttaagatacgggcttcagagtcagagaaacctggatccaaatccagactcacttcccttctctaagtcttgataccacatcgtcaggttgctgtgagatgagcaaggagcttaagagcgtgtagcctttggtctgggtgtggtggctc

SEQ ID NO: 260484 - DNA, 94 bp, Homo sapiens
  chr9:100981136-100981230
  hypo
tctgacccctgtgctgctctaccggggcttgcacagtggattccggcagtatgggtggagagaagaggaagccgcctggctgggggcaggcagg

SEQ ID NO: 260485 - DNA, 120 bp, Homo sapiens
  chr9:101009639-101009759
  hypo
caaacaaaaaaaaaaacaagaaggatactctctaccttgtctccttcagagttaatgtatacaaaaatgtttaaaaagccgtaaagctgggctgggcacgatggctcacgcctgtaatcc

SEQ ID NO: 260486 - DNA, 174 bp, Homo sapiens
  chr9:101014052-101014226
  hypo
agcccattgggtacctagctcgaggtgcaggacgggcccattcccagccagggcggcatcaggggtggcaggaggtgccggcgggctgttgtggaattcccagcgcttcatctgcagctgctgcagccagtacagcatcgcttgcttggtggcggcctgagaagcacaaggatt

SEQ ID NO: 260487 - DNA, 118 bp, Homo sapiens; identical to SEQ ID NO: 212892
  chr9:101052972-101053090
  hypo

SEQ ID NO: 260488 - DNA, 344 bp, Homo sapiens
  chr9:101216242-101216586
  hypo
cccagaggcatgggactgaccgtgaccccgaagaagttggtctcgttcatggcattgaggatgatcctgcccagcgtgtggtccgtgtagttgaagtcctggatccgctggtgccggctgctggcatgcagtgtctccatggccctctgcagtgtcttggcgatgacccagatgccatcgtaggcgtacccgtggaacttgctgggccccacgcctgaccgcttgttgttgtactctctctcatactgctgtggagtctggaaaaacaggggattgggggaatcccaagttatactcggcagggacatcaggtgcctgatgccgagaagagctgctattcttca

SEQ ID NO: 260489 - DNA, 156 bp, Homo sapiens; identical to SEQ ID NO: 212895
  chr9:101280572-101280728
  hypo

SEQ ID NO: 260490 - DNA, 98 bp, Homo sapiens
  chr9:101445882-101445980
  hypo
agaaactaatcatggagatgcgcatctattttgtttccgggctgaatgcggcacccttgtttagaagagaaaaaaaaaaccaacaactagaaacaacc

SEQ ID NO: 260491 - DNA, 224 bp, Homo sapiens
  chr9:101499001-101499225
  hypo
caaaaacccatgggcgtcttggggaaaataaattacctaactgaaagagtaccgagttcaataaaaacatactgagtcagaatctccccagtacccaccatcgcagcctgtcaatgctggagaggccctgggatgcaggaccccaaacccctggacagagtgggaggccgagtccggggcaggactgacttctcccgagtcgcacggcccggattcgaggtctc

SEQ ID NO: 260492 - DNA, 118 bp, Homo sapiens; identical to SEQ ID NO: 212896
  chr9:101553997-101554115
  hypo

SEQ ID NO: 260493 - DNA, 195 bp, Homo sapiens
  chr9:101557774-101557969
  hypo
tactcatacattctacgcatacctcattctaccagtcctaccagctcgtgcacccaagcctttgcatgggcctcccatcatgccttcccacagcccacttgtaatgtcctggctaattctcaggtatccgcaggtctccacgtggatataaacatcttttctaccagaaaccttcccccacgtctccaaaatggg

SEQ ID NO: 260494 - DNA, 144 bp, Homo sapiens
  chr9:101813050-101813194
  hypo
aatattctttgaggtgagttcgtaattgatccctgttggaggtgatgttaaggcttgggtcatagccttcaaaatgacgcagtttggccgcgtatttgcccagacatctggctaagtctaaacgttgaggcatccaagtctgca

SEQ ID NO: 260495 - DNA, 164 bp, Homo sapiens
  chr9:101904930-101905094
  hypo
ctgtccacggcgagcggtcttgcccatcttcacatggagattgttggtacccaaggtaattctataagcagttctattatttaagctttaaattttcatgaataatgtctatgaaaatagaaggtggaggctgggcctggtggctcatgcctataatcccagca

SEQ ID NO: 260496 - DNA, 39 bp, Homo sapiens
  chr9:101949974-101950013
  hypo
tcacttagctggtccgctattatgcgacatttgtttctc

SEQ ID NO: 260497 - DNA, 162 bp, Homo sapiens
  chr9:102068815-102068977
  hypo
agggccgtggttgtgaggaagatcgagacccatgatggcaagctggagtccgagtcctctgacgtcctgtccaagtgaacagctgcggcagccccaccccgcctgcccctcctggctgacccagagcgggggagggaggccgctgtgagggaagcacaggga

SEQ ID NO: 260498 - DNA, 144 bp, Homo sapiens; identical to SEQ ID NO: 212898
  chr9:103174497-103174641
  hypo

SEQ ID NO: 260499 - DNA, 84 bp, Homo sapiens
  chr9:103174701-103174785
  hypo
aacaaacaaaagcccgggggaaacaaatcaaatgtccccgtataaatgataaacaaaatgtggtatatacggaaccttattcag

SEQ ID NO: 260500 - DNA, 192 bp, Homo sapiens
  chr9:103493407-103493599
  hypo
aattttgtctgttaaaatatcgtatatttctggccaataccacatctgacccgcgagcacagaaccccgcccttgccgctctgccgcccagtccacacccgccgccagctcaccatggatgatgatatcgccccacttgtcattgacaacggctcaggcatgtgcaaggccggctttgcaggtgataatgtc

SEQ ID NO: 260501 - DNA, 96 bp, Homo sapiens
  chr9:104138073-104138169
  hypo
gagcgcactagctgcgattccggctttgccgaaagtaactgttcccccttttctcctttttgcccaataagttccatttttctcactccgcaaatt

SEQ ID NO: 260502 - DNA, 180 bp, Homo sapiens
  chr9:104238256-104238436
  hypo
ttggccctcaacagcgagtacagtgccatgtccttgccaaagcccttgtggcagtacacttgggacaggtaggtgagggtccggcgggccgcaggtgccgggaagagcatggctggggtgcaacactgagaggcaggaaccacactgtacagggaaggactcagccgccgcagttccagg

SEQ ID NO: 260503 - DNA, 84 bp, Homo sapiens
  chr9:104238668-104238752
  hypo
gtggctcagagaagcgagcccgcagaaggtgctccaagactgggaagatctgctcttctggtacagcatcgtcttctaccatca

SEQ ID NO: 260504 - DNA, 316 bp, Homo sapiens
  chr9:104305542-104305858
  hypo
tgtctaacctgccacggcagtactgtctaaccgtgccagggcggcactgtctaacccttccagggcggcactgtctaacccttccagggcggcactgtctaaccctgccagggcggcactgtctaacctgccagagcggcactgtctaacctgccagagcggcactgtctaactctgccagggcggcactgtctaacctgccaaggcagcactgtctaaccctgccagggtggcactgtctaaccctgccactgcagtactgtccaaccctgccagagcggaactgtctaacctgccagggcggcactgtctaacc

SEQ ID NO: 260505 - DNA, 187 bp, Homo sapiens
  chr9:104365592-104365779
  hypo
tatgtattttttctgcgtgcatggttctataatcagggaaggagagaacatttgtcaagccaggtgttcgccataaacgatctcattaaatatatttcacactttcagtcaggccctattattattcccgggtttggaggaagatctgaagttttggaagttgcacagcttgcgtagacacacagtg

SEQ ID NO: 260506 - DNA, 82 bp, Homo sapiens
  chr9:104473574-104473656
  hypo
tagtgcatacagcccggattcactgaccgaagggatgattcacacatcccgataggtcagggtgggacggtgggagatttca

SEQ ID NO: 260507 - DNA, 42 bp, Homo sapiens
  chr9:104605229-104605271
  hypo
cgctcgacttgtggaccgcaaagttgtcggagctgtcacaat

SEQ ID NO: 260508 - DNA, 39 bp, Homo sapiens; identical to SEQ ID NO: 212903
  chr9:107144258-107144297
  hypo

SEQ ID NO: 260509 - DNA, 35 bp, Homo sapiens
  chr9:107260232-107260267
  hypo
tcaagccacatttggccaggcgcagtggctcacgc

SEQ ID NO: 260510 - DNA, 34 bp, Homo sapiens
  chr9:107260507-107260541
  hypo
agggtgagactccgtctcaaaaaaaaaattaaaa

SEQ ID NO: 260511 - DNA, 266 bp, Homo sapiens
  chr9:107396338-107396604
  hypo
ttgcaggatcccttcagtgccgtttcgccaaccagaaatctctgtggccgccctgagctctgccgggggcctcactcgggtcctccggactcgctccgcccgctcggcccggaaggctgtgttcaactagtgccaccagcccggatcccacaccagccgtggctccacgctcagcctgcggctggactcagcgtgccacagcagcttccgtgttgggcactggcgtctagacgaggtggtggcacccgaaaacttggagatgccag

SEQ ID NO: 260512 - DNA, 51 bp, Homo sapiens
  chr9:107528626-107528677
  hypo
ggccctagacaatacgatggaacgttctatgaatttcgtacttattacctt

SEQ ID NO: 260513 - DNA, 86 bp, Homo sapiens
  chr9:107554120-107554206
  hypo
aatccacttttacctcttaacgagcatcgttgcttgattgggtagagatagtctgaactaatagggacaaacgcaatatagacaaa

SEQ ID NO: 260514 - DNA, 153 bp, Homo sapiens; identical to SEQ ID NO: 212906
  chr9:107729489-107729642
  hypo

SEQ ID NO: 260515 - DNA, 120 bp, Homo sapiens
  chr9:108257889-108258009
  hypo
tgtagaccggagctgttcctattcggccatcttggctccagctcgggttgtttcttttcttattgttgaatattaagagttctttgggccgggcgcggtggctcacgcctgtaaccccag

SEQ ID NO: 260516 - DNA, 256 bp, Homo sapiens
  chr9:109687597-109687853
  hypo
gtctacaaatgtgacgaatgtccgtttacttgcaagagctcgttgaaacttggggctcacaaacagtgtcacacgggtacaacgtcagattgggatgctgtgaattcccagagtgaaagcatttcttcctcactgaatgaaggtgtggtgtcttatgagagctcaagcatcaatggtagaaagtcaggagtcatgttggatcccttgcagcagcaacagccaccgcagccaccaccaccgccgccgccaccaccac

SEQ ID NO: 260517 - DNA, 178 bp, Homo sapiens
  chr9:109688896-109689074
  hypo
cagcagcattatggcgagcaccacccagaagccatgaatgtactcaactttgatcactcggacctgatctaccggtgtcggttttgttcatacacgagcccgaatgttagaagcctgatgccacattaccaaagaatgcatcccacggtgaagatcaacaacgcgatgatattttcaa

SEQ ID NO: 260518 - DNA, 222 bp, Homo sapiens; identical to SEQ ID NO: 212907
  chr9:109689779-109690001
  hypo

SEQ ID NO: 260519 - DNA, 291 bp, Homo sapiens; identical to SEQ ID NO: 212908
  chr9:109690711-109691002
  hypo

SEQ ID NO: 260520 - DNA, 185 bp, Homo sapiens
  chr9:109691303-109691488
  hypo
acaccaaccccatccgcaaaggtctggcagcccactaccagaagcgccacgacattgatgcgtattacactcactgcttggcagcctccaggaccatcagcgacaagcccaacaaagtgatcatcccatccccgcccaaggacgactcccctcagctgagcgaggaactccggcgggcagtggag

SEQ ID NO: 260521 - DNA, 44 bp, Homo sapiens
  chr9:109693210-109693254
  hypo
aggtccaggattctcggtctaggaggcttcgggtcgtccttcta

SEQ ID NO: 260522 - DNA, 37 bp, Homo sapiens; identical to SEQ ID NO: 212909
  chr9:109865317-109865354
  hypo

SEQ ID NO: 260523 - DNA, 41 bp, Homo sapiens; identical to SEQ ID NO: 212910
  chr9:109894935-109894976
  hypo

SEQ ID NO: 260524 - DNA, 40 bp, Homo sapiens
  chr9:109895276-109895316
  hypo
tgtagggcatcaaatatgtcatttccgtgattgcaagaca

SEQ ID NO: 260525 - DNA, 265 bp, Homo sapiens; identical to SEQ ID NO: 212911
  chr9:110096156-110096421
  hypo

SEQ ID NO: 260526 - DNA, 113 bp, Homo sapiens
  chr9:110121099-110121212
  hypo
ggtgagaaattccacgtagccggtgcctgcgcacaagtgcccaacaaaaggcggctattattcacttaatgacaagtaaccatgatcgctgctgttgccgttgttgttgttgt

SEQ ID NO: 260527 - DNA, 130 bp, Homo sapiens
  chr9:110126149-110126279
  hypo
aaatcagtgggagaggtgagcgcttgctctagtgaggcatttatgattggctgcctttcattgagccacacggcgagctcattcggtgagcagaaagcccggcagagcaggcctgcgatctggcagactg

SEQ ID NO: 260528 - DNA, 34 bp, Homo sapiens; identical to SEQ ID NO: 212912
  chr9:110160588-110160622
  hypo

SEQ ID NO: 260529 - DNA, 119 bp, Homo sapiens
  chr9:110185793-110185912
  hypo
aaaagactgttgcagtcaggcgtacgccacgtttacttttccattgccaggactggtaagccgaaaaggcaccacagaggatccatgagaacgggtacgtaaagcatacagattagaat

SEQ ID NO: 260530 - DNA, 139 bp, Homo sapiens
  chr9:110335015-110335154
  hypo
ataaaaagacaatgtcggccatagacatcatgcaccgtctaatggcaatttagtcaatgactgaccgcgtgcacgatggtggtcccatcaaattatcattgtatttttactacaccttttcttttcttttcttttgaga

SEQ ID NO: 260531 - DNA, 355 bp, Homo sapiens
  chr9:110390660-110391015
  hypo
gtacaaatacagatgagggacggcttcccggggtggtcctttgattccagtaagagttatcacggataaagggagggtgcgtatcaggcaaagaatgcatggagtgtttggaggcgcggtgtgcagagcttgcaggaggcagtgtgcggtgagttgtggggactcctacgttgtctgatccctccttttctgctggatcctccccatcaacgtttacccgcactcaggtctctcatcttacagcaaaccctcactccacctcacatcttactccagctcctgactcatcaatttccctcccagccaaatttttcaaataaatgttctgtgctatgcgcatcgtctccatttccct

SEQ ID NO: 260532 - DNA, 76 bp, Homo sapiens; identical to SEQ ID NO: 212914
  chr9:110478888-110478964
  hypo

SEQ ID NO: 260533 - DNA, 183 bp, Homo sapiens
  chr9:110531375-110531558
  hypo
acttgcctggggttacggaggtcataacttagaaaacaggggagcgggggactagaatccagagcctctcctcttacttgtcacgctagaggctggggccaaagtggggcccctttctcattctcaatccccctcccataccctcggtgtctctttcatctcacagtgcgacaggcagcaaag

SEQ ID NO: 260534 - DNA, 214 bp, Homo sapiens; identical to SEQ ID NO: 212915
  chr9:110779880-110780094
  hypo

SEQ ID NO: 260535 - DNA, 185 bp, Homo sapiens; identical to SEQ ID NO: 212916
  chr9:110842928-110843113
  hypo

SEQ ID NO: 260536 - DNA, 44 bp, Homo sapiens
  chr9:110861945-110861989
  hypo
gaaaaaccattcaatggggccgggtgcggtggctcatgcctgta

SEQ ID NO: 260537 - DNA, 32 bp, Homo sapiens
  chr9:111446306-111446338
  hypo
gggcaaggtggctcacgcctgtaatcccagca

SEQ ID NO: 260538 - DNA, 170 bp, Homo sapiens
  chr9:111465838-111466008
  hypo
tcctggcctttccctgagtacgcccaggcatgtcaaaaccctgatgtgagcgactggaaacataacctgctacttgtctgcaacgatgtaatagaagaaccaggaaacacgcttagtgtcataagagaggttcaacaactattacttacggcattgtctgtcaccagacc

SEQ ID NO: 260539 - DNA, 49 bp, Homo sapiens
  chr9:111617456-111617505
  hypo
tgatgtgcaggtggtcgtccgtgaatgcgtggcccgcctcattgagcag

SEQ ID NO: 260540 - DNA, 66 bp, Homo sapiens
  chr9:111617924-111617990
  hypo
tccacttgcgggtgtcgccagcgtcggccgcctcggggcagcgtttgcccacggtggaggagatga

SEQ ID NO: 260541 - DNA, 192 bp, Homo sapiens; identical to SEQ ID NO: 212917
  chr9:111835846-111836038
  hypo

SEQ ID NO: 260542 - DNA, 33 bp, Homo sapiens
  chr9:111876331-111876364
  hypo
ggcaacaagagcgtaaatccatccccaaaacaa

SEQ ID NO: 260543 - DNA, 187 bp, Homo sapiens; identical to SEQ ID NO: 212918
  chr9:111951147-111951334
  hypo

SEQ ID NO: 260544 - DNA, 58 bp, Homo sapiens
  chr9:111952371-111952429
  hypo
cgctcggctaggttacgctggttctgatagtgtcttggtggaacgttgctgaatgaag

SEQ ID NO: 260545 - DNA, 237 bp, Homo sapiens; identical to SEQ ID NO: 212919
  chr9:112040328-112040565
  hypo

SEQ ID NO: 260546 - DNA, 78 bp, Homo sapiens
  chr9:112295751-112295829
  hypo
tcggtaagttgcggcggtaccgacgttgaggtggctgctgaccttgggtctcacctcgttgattttctttatcctctt

SEQ ID NO: 260547 - DNA, 84 bp, Homo sapiens
  chr9:112847321-112847405
  hypo
gatgcaaccatactttaaaaaatatattttccatcgtggttggttgagtctacagtgtgtaaccacagacgcagagggccaatt

SEQ ID NO: 260548 - DNA, 36 bp, Homo sapiens
  chr9:113017663-113017699
  hypo
gtctacaaggttttaggcttgcaataactttcaaac

SEQ ID NO: 260549 - DNA, 203 bp, Homo sapiens; identical to SEQ ID NO: 212923
  chr9:113592870-113593073
  hypo

SEQ ID NO: 260550 - DNA, 45 bp, Homo sapiens
  chr9:113897404-113897449
  hypo
ctgcattttttgttcttaattttcgtaaaagacaactgacaattt

SEQ ID NO: 260551 - DNA, 91 bp, Homo sapiens
  chr9:114173538-114173629
  hypo
ataaagtgaacactcgaggtttcactggatgctaatgcatcgagcttagggaacaagagaaaccttgagtttctaacggaattttgagaag

SEQ ID NO: 260552 - DNA, 120 bp, Homo sapiens
  chr9:114319645-114319765
  hypo
tccatctccagtaaaaaaaaaaagatgacttgaacacatggaaaggtaccatgccgttgaacaggaaaactcattatcttttttttgctttttttttggagatggagtctcgctctgtct

SEQ ID NO: 260553 - DNA, 220 bp, Homo sapiens
  chr9:114556868-114557088
  hypo
agacaaaaaaacgtaacatggcagagaaggcgaggtgcacctattttcccttattgtttagcccatacaacttctagttgatgggctgaaatcccaccagcatctctgagaccttcacaccttctattctcaggttaagtggacagtgggtctggggttttgtctctacagagccacatcggccgggcctcacagatgcgttttccagagattcctgagc

SEQ ID NO: 260554 - DNA, 240 bp, Homo sapiens; identical to SEQ ID NO: 212924
  chr9:114619240-114619480
  hypo

SEQ ID NO: 260555 - DNA, 180 bp, Homo sapiens
  chr9:114656964-114657144
  hypo
attaactctaagatggcattgactgtgagatgcattcccatttcagagaaattaaaatttgttaaagtgtttttttgaagtgtgccttagaattaactacaatcgtaaatttttgtttggaacgttatttcgatgttagaattctattccacttttttttaagacagggactcactgtca

SEQ ID NO: 260556 - DNA, 37 bp, Homo sapiens; identical to SEQ ID NO: 212925
  chr9:114701511-114701548
  hypo

SEQ ID NO: 260557 - DNA, 157 bp, Homo sapiens; identical to SEQ ID NO: 212926
  chr9:114750309-114750466
  hypo

SEQ ID NO: 260558 - DNA, 32 bp, Homo sapiens
  chr9:114789967-114789999
  hypo
tgagccaccgcgccccaccctggagcatttta

SEQ ID NO: 260559 - DNA, 181 bp, Homo sapiens
  chr9:114823149-114823330
  hypo
gtggtggtcaagagcaaggtcgaggctcacctgtgcccatttggttccgtacattgctcactagaggcatcatcgacagagtatgaatcagctccccaattagcctgaccgtaatcacctgtgttgcttgattattatacaaattccccgacctcataccgacctactgaatcgaaatctc

SEQ ID NO: 260560 - DNA, 202 bp, Homo sapiens; identical to SEQ ID NO: 212927
  chr9:114830992-114831194
  hypo

SEQ ID NO: 260561 - DNA, 137 bp, Homo sapiens; identical to SEQ ID NO: 212928
  chr9:114832553-114832690
  hypo

SEQ ID NO: 260562 - DNA, 181 bp, Homo sapiens
  chr9:114860722-114860903
  hypo
acaaaaaagaaagacgtctacacccacctgctgggggagttgctattgttatttgcactgagtgccgcttaggagatctcagcagggtcacattcaccgtataatcagtcgtagggtacagatccaaacacactacaggcacttgttccctcgttgtgaagttaaacgatgttgcatgaga

SEQ ID NO: 260563 - DNA, 99 bp, Homo sapiens
  chr9:114931839-114931938
  hypo
agtgccattcatttacgccacaccctacggttcacgtcaggcagtcactcacttaacccctaccggttcttttcacacctgtctcatacctgattcatt

SEQ ID NO: 260564 - DNA, 198 bp, Homo sapiens
  chr9:115040853-115041051
  hypo
cccaagctcccattcgtgctgcactatcaaataaagacctaagatgacaaacttttaccaagaaatgtgcaattataaatcaccattttagggtgttaattgttccgtattataaaatacctgggctatgttaagagcgcagagctatgaaatcagatatcctgttctgagcaagttatttaacgttactaagcctca

SEQ ID NO: 260565 - DNA, 31 bp, Homo sapiens
  chr9:115067926-115067957
  hypo
ataagagctttcagccgggcacggtggctca

SEQ ID NO: 260566 - DNA, 77 bp, Homo sapiens
  chr9:115087416-115087493
  hypo
ataagagtcaagagacggcaaaatgcctaggcaaagagggaagggtccccggagaaccttcgacctgcccaggtcat

SEQ ID NO: 260567 - DNA, 120 bp, Homo sapiens
  chr9:115087613-115087733
  hypo
ggggaagggggtggagccaccaggaattcacgccttaggctagggagtgtggtggcctggtattcaacctgaggtggaagccagctggcgggacccctctctttgctgagagctcccctt

SEQ ID NO: 260568 - DNA, 82 bp, Homo sapiens
  chr9:115445176-115445258
  hypo
gggattacaggcgtgagccaccgcgcctggctgaatgttgctctctttcctggctgaaaccgtctcatcttgaaagccaagt

SEQ ID NO: 260569 - DNA, 35 bp, Homo sapiens
  chr9:115478927-115478962
  hypo
tcagaaagatacatttgtgccgggcgcggtggctc

SEQ ID NO: 260570 - DNA, 94 bp, Homo sapiens; identical to SEQ ID NO: 212929
  chr9:115479262-115479356
  hypo

SEQ ID NO: 260571 - DNA, 78 bp, Homo sapiens
  chr9:115519017-115519095
  hypo
ggcgtgagccactgcgctcggctccttcacctttttaacagttcatctgctctctcccacggccgcaccctgcgttgt

SEQ ID NO: 260572 - DNA, 199 bp, Homo sapiens
  chr9:115550632-115550831
  hypo
cagagtgcactccgcgtgtgtagtaccatgtcagatggtagcacagaaacatgtcaatgagaaccaggctttgtaagatgaacagatggtacagttaagaggaattgggcgaagggtaggaaaagaactattgtttatgaaggggtcgttctaggcaccttcttcctacctaaggaacgcctggattgtggtgtagcac

SEQ ID NO: 260573 - DNA, 209 bp, Homo sapiens
  chr9:115598523-115598732
  hypo
gcattgctgaccagaatgggcgagtcagtcaagcacgtcactggcggctacaagctgaggactcggccgcttgagtttgctgccataggtgactacttagatacatttgcactcaaactgggaaccattgatcgaatagcccagcggatcatcaaagaagaaataggtgagctgtctgttgaggtctcgattatgccctgcagccacat

SEQ ID NO: 260574 - DNA, 75 bp, Homo sapiens
  chr9:115599298-115599373
  hypo
acatatgcatggggcggacagacgtgagcagtgtaaatgatcgcactggcatgggaagcacgttgaggattcccc

SEQ ID NO: 260575 - DNA, 273 bp, Homo sapiens
  chr9:115630952-115631225
  hypo
caaaggtaacccagcaggatcgacaacgaaagggtaggtcagagcagaattgaagctgacccgaaatcggaaactcaaagctgatactgtgtgtgtatgttgtcgttccagtgcctcatggcgtgggagtcgattattccactactgcaggagaaacaagaggccaagtaaagttctttcttgggacggagactcttctacctacacagggcctggcaccctataccggaatgtccctgcagtgccagagacgcagtgctgggaaaacaacca

SEQ ID NO: 260576 - DNA, 144 bp, Homo sapiens
  chr9:115948533-115948677
  hypo
aaatggggaggctgagagagcggtgctgggtacaaaggccgaacgggctgcagctgggaggtgacggcagatgcctggggataagcgtaggcttgcatacctgcatagggctgagaaactgacgagttaccactggttgataaa

SEQ ID NO: 260577 - DNA, 101 bp, Homo sapiens; identical to SEQ ID NO: 212931
  chr9:116043449-116043550
  hypo

SEQ ID NO: 260578 - DNA, 64 bp, Homo sapiens
  chr9:116047380-116047444
  hypo
ttgatcgttcctgccgtacctgcttcacaggtctgttagaaagatcatccgagataatagatat

SEQ ID NO: 260579 - DNA, 97 bp, Homo sapiens
  chr9:116054117-116054214
  hypo
gtgatggggaacccctctcacggttgaaaatttattacctttttacgccctgccacgaactgtgtagacattgtttttattaatcttttgtttggcc

SEQ ID NO: 260580 - DNA, 962 bp, Homo sapiens
  chr9:116059811-116060773
  hypo
accaaatgaggctccgtagtcaccatacccagcagcaaccgaaaaaggtttggtttcttgtctgggaacagcactcaccccacaccccaaaggaactgcttggtccaaaagatggagaatatgagcaacagagtgacactgaggatgacggccatcaggtaggcaaagatgcggaactgagggttgcggaaacactccctcaaagagtggtggctggggatgaggatgggcgtagacacggtggcagaggccgtgtctgggggcggcccagtctggcccccaggctgggggccaaggtccagcgtgtagacttgaggctggcgcaggaagtagcggctcttgggctggtccttgaggcacagctgatggccttccaggatgacatggtggggctccaggcggagcagggcgagcatggcagtgtccgtgggcaagtcagtgacaggctgccctgaggccagcactgtgggctggcgacagagtgggcacagcaggcggcgccgggctggagtcacaaggctgaggtgggccagacattccacgcagaaggagtggcagcaatccagcattttgggggtatggaacgtgttgttgaaggggttccagcagacggggcactcagcctcaagctcccggccctgctgctcagccatcctcagccacacacggggaggcttcgcgggagacgtcctggcagaagggggaaaggagcaaaggaacagccatgaagtcccatccttgtgcttggcctggggcaaagtgttctgtgggtgttgaaaggtgtaatcaccacgttttacttaggttcaaaagcgttttgttcttgatcaccagttcctaacccatcgagttgagtcaaatgctcctacagcctcccctctgtcaaggtgaaggcctgggccacccctaccaagagcccccaagagagccggcattggagcagatgtcgccctgggctttgg

SEQ ID NO: 260581 - DNA, 233 bp, Homo sapiens; identical to SEQ ID NO: 212932
  chr9:116061763-116061996
  hypo

SEQ ID NO: 260582 - DNA, 127 bp, Homo sapiens
  chr9:116062911-116063038
  hypo
agcatgtgtggccccgaggtgagaaaagctcttccaatttgagaaagtgaaaggagcccagggtgatcaaggtgtggtgaccggagtaggcaaggtgggagggtatagtactcgggacctgtgaact

SEQ ID NO: 260583 - DNA, 620 bp, Homo sapiens
  chr9:116065580-116066200
  hypo
ttctctgaggggatcaagtgcgctcatccttgcaggcctctgttctgggtccgattgatctcctgccatcccctcggattccactgtcctctgtgcgctgacctgcctcgactcctggcttctgccgagatggatccttccctatgctgagtccctgtaaccaaaatacagatagctcttgcaaaatactgacaaaagcggccactaatacagcagaaaaatagtcgggagacggttgagcgtctgcctgaagagccagggttctcaagcaaggcacacttctaggtcagagttcagccctcactgagaatccaaactccgtttaactaccgatggagacttgagcaaattaattaacttctgccagcctcagtttcctcacctgaaaatggccataataacctacctacttgatctgtagattaaatgaggtaatacgtgtcgagatcgcgtaataacacagggcctggcagacagtaactcgctaaatgttaaccagaactattattgttataaccggtctgttcacgtggcccatcttttgttcccgctcaaattctttttgtacctatggtcctcttttctttctctctctctttctttctttttttttttctttc

SEQ ID NO: 260584 - DNA, 32 bp, Homo sapiens
  chr9:116076150-116076182
  hypo
taagaatggatgaaggaggccgggcgcagtgg

SEQ ID NO: 260585 - DNA, 37 bp, Homo sapiens
  chr9:116076765-116076802
  hypo
tacaggcatgagccaacgcgtccggcagaatggtaaa

SEQ ID NO: 260586 - DNA, 38 bp, Homo sapiens
  chr9:116222778-116222816
  hypo
tgacagagtgagactccgtctccaaaaaaaaaaaaatt

SEQ ID NO: 260587 - DNA, 65 bp, Homo sapiens
  chr9:116259621-116259686
  hypo
gggagcacctgggccggaccaagcacttgaaggtggccaggcggcgactgcggccgctgagaggt

SEQ ID NO: 260588 - DNA, 53 bp, Homo sapiens; identical to SEQ ID NO: 212934
  chr9:116269883-116269936
  hypo

SEQ ID NO: 260589 - DNA, 116 bp, Homo sapiens
  chr9:116299416-116299532
  hypo
agagccaaattaagcgtggcccatcagttctgcactctgttcttcggtttgcctatggcaaggtttaattcgggctggcctccctgatgctgcctggcatgcgttcacctctgcca

SEQ ID NO: 260590 - DNA, 169 bp, Homo sapiens
  chr9:116331272-116331441
  hypo
agtgggcctaagtcatcactcgagatgtgtggatagctgccaggtatgctccagatggcccagggcttctcccctctccctgccctccatgggccagcccgcttgcacctggtaccgtggctcaggctgctgccggagaactgtcagcggctcccaacttagaaagggg

SEQ ID NO: 260591 - DNA, 182 bp, Homo sapiens; identical to SEQ ID NO: 212935
  chr9:116344624-116344806
  hypo

SEQ ID NO: 260592 - DNA, 148 bp, Homo sapiens
  chr9:116634761-116634909
  hypo
aaactcaggcacgccgagttgaaccacagaccctcagaagatgggagagcctgtgggtgtccctcccggaccacgcttccaccgatgtgagcatctgttcttccacacccctgaccaacagtcatttttccaacgctgtatcacagag

SEQ ID NO: 260593 - DNA, 233 bp, Homo sapiens
  chr9:116663446-116663679
  hypo
gcactgtcctctcccgctgctgcgagagagcgtttgttgcacttgagggtctaaactttgtctccagttctcctcagggcagaatctctccttttcctcaagttctcctgcgtcgttgggcctcagcgtctccaacatttaaaacgggcatctccttgccccgtctcctgtctaggcagctgttgctctcgcccttctctgtgcggacttggccagcccggtgctttgccaga

SEQ ID NO: 260594 - DNA, 81 bp, Homo sapiens; identical to SEQ ID NO: 212936
  chr9:116671457-116671538
  hypo

SEQ ID NO: 260595 - DNA, 137 bp, Homo sapiens; identical to SEQ ID NO: 212937
  chr9:116671888-116672025
  hypo

SEQ ID NO: 260596 - DNA, 176 bp, Homo sapiens
  chr9:116681813-116681989
  hypo
tgttatgccaggagcgaacttggcgagtggtagccttttcatagtcaggagaggcctggcaggcccctgggccggctgctgctggtgtcctccaacggcggggccagccctctccgtgaggaggtggaactgtccccatgccaccttgattccacggtttggatttgcagagcaga

SEQ ID NO: 260597 - DNA, 128 bp, Homo sapiens
  chr9:116697028-116697156
  hypo
gattaaattaattccggaactctgtgtgactcgaggcagacgtgtggagtcagggaaggccttgggcgtgaggatgtgcctggccgtggcccgagcatggagaggctggggaccgccagagtatccta

SEQ ID NO: 260598 - DNA, 163 bp, Homo sapiens; identical to SEQ ID NO: 212938
  chr9:116708859-116709022
  hypo

SEQ ID NO: 260599 - DNA, 155 bp, Homo sapiens; identical to SEQ ID NO: 212939
  chr9:116728166-116728321
  hypo

SEQ ID NO: 260600 - DNA, 216 bp, Homo sapiens
  chr9:116749791-116750007
  hypo
gaattggagtttcccgtttgtaaagcaggagcggggaagagcctggacaagatcccaagccttcttgcctaggaacgaagggaacagcactggatatcgcgtacatcaaagcacgaaacccttaccgcccaaagcgtagtttgaggcccagcagccctggccccacctgagagagcttgttagaaatgcagaatctctgagtgaggcatggtggca

SEQ ID NO: 260601 - DNA, 35 bp, Homo sapiens
  chr9:116750067-116750102
  hypo
gtttgtttgtgttctgcctgcgcaacatagtgaga

SEQ ID NO: 260602 - DNA, 314 bp, Homo sapiens; identical to SEQ ID NO: 212940
  chr9:116750640-116750954
  hypo

SEQ ID NO: 260603 - DNA, 150 bp, Homo sapiens
  chr9:116760431-116760581
  hypo
tgtgatcttgtccacgcttctcaaagtgcagccaacttcgccccttccctaaccttccaggcattctccaactttaagggctctttctgatttcttacgtaattcagatggaaaagcgcccgaaggcagcccccacggtggatctgtgcg

SEQ ID NO: 260604 - DNA, 163 bp, Homo sapiens; identical to SEQ ID NO: 212941
  chr9:116761525-116761688
  hypo

SEQ ID NO: 260605 - DNA, 279 bp, Homo sapiens
  chr9:116762418-116762697
  hypo
gtgttaggatgacagcggcccttggagtgacccacagtagtaccagtggcaccggctcctgttcctcagtacctgtggtgtgccagccgactcacatgatgaacctcgttgatacagacctcagtcatgaattgtaggaatcagagtccggttttgcaggtggggaaacagaggctcggacaagtgaaaggttgtgtccgagatcaaaaaaaggatgtgtccgagatcaaacagataagacaaacttgtccagcccacggcccgtgaccgcatgtggac

SEQ ID NO: 260606 - DNA, 254 bp, Homo sapiens
  chr9:116770600-116770854
  hypo
tgccgcctcctgcccgggcgcagtgtttagtgtggaaggggcccctgagaaccgggcaggtaagtccttggtgtctgcttgtcacctcccctgtccccggctgggctcctgagacctgggggaccagggtgctaagggccgtgtgttctcccacagaccccttcgaccaaggtgtcgtggccacggacgaggtgaaggaggagcccccggagccattccagaaaatcgggccaagtatgcgggattccctctgg

SEQ ID NO: 260607 - DNA, 340 bp, Homo sapiens; identical to SEQ ID NO: 212943
  chr9:116790929-116791269
  hypo

SEQ ID NO: 260608 - DNA, 132 bp, Homo sapiens
  chr9:116796579-116796711
  hypo
ataagtagtagcgccgggctggaaccgaggtctccagatgtgccctgtgctcccagccaagccatgctgcacccccatgcgtcccctgcccccagagctaatattcacaatcgggaacgatagcgcaagcac

SEQ ID NO: 260609 - DNA, 323 bp, Homo sapiens; identical to SEQ ID NO: 212944
  chr9:116798287-116798610
  hypo

SEQ ID NO: 260610 - DNA, 675 bp, Homo sapiens
  chr9:116800627-116801302
  hypo
caagcatcttgacttgttttcggagtggagccgtgggctgctttgttctggttcagcgcagccagagaatgcctggccggccatccagcgcaaagccaggctgaatcccagccacactgaatcgggattaaaggcttggctccatagagagaaattaagcatcatgagctgcgcagttcacagcgccgacgataaggaggatcagccttgaataacaccaatctcattatggagctgctgaatggcacagggtaattcccgctaataaacttcctttctgtgctgtaggaaaacctggcgtgccttggtgacgttggagaagcatgctttggcagtaataataccaaagatagctacaattttgtgagtgctttctatgcgtcacttgtggcactgagagctttacgcaggttatttcatcagatcttcctgattaggtagttgacgttttcatccccattatgcagatgatgaaaccgaggctcagagaacataatcactggcccaaagttgcacagctcctaaaaaaagtatccaatagcatttgagcttttacgtggcgccaggccttgttctaagacttttacatatattcacttatttaattctcggaacaaccctcagagttaagtgcccataacagttccacttcatagctaacgaaacggaggcaca

SEQ ID NO: 260611 - DNA, 1451 bp, Homo sapiens; identical to SEQ ID NO: 212947
  chr9:116810952-116812403
  hypo

SEQ ID NO: 260612 - DNA, 98 bp, Homo sapiens; identical to SEQ ID NO: 212948
  chr9:116812706-116812804
  hypo

SEQ ID NO: 260613 - DNA, 419 bp, Homo sapiens
  chr9:116813598-116814017
  hypo
tgtgctatttggagaccaggcgttggggaggattcacgggttccacagctgcggggtttggtggccgtaggggaagcagtggtttgggagttctgaatgtaagcgccagagctgccctcctggtccgctgtgcgtggtacccagtgtgcatcacactactcaccccctcccggaccctggcagtccacagcgactccgaagtcagcccatagtcacatccaccacacctcagacctgccacagcctctcctcacttcccaggaccctgaggcttccaggagctctgctgcccacagccctcggggtcctcactcacacctccgacttccaggacggcagtgagcatggtgccttgtggccccaacagttgatgttccgagggtgggatggtgtttggccatgttcgactcgatgctgtg

SEQ ID NO: 260614 - DNA, 421 bp, Homo sapiens
  chr9:116817234-116817655
  hypo
cccaccacgggtgtcgctttaaagagtcaattcttgtacagagaaggatttgctaggtttgcatttgggtgttagcatcacgacccacgagggccctgcccaaccgtgcgtcccatggggcaccttgactcttcaaaccaaaattccttaaaggggcacagcccagccttgtccgcaacctcaggggcctgggattcctgtggcgcttcctgaattccaggttggcacagatgatgaggtctgagaccagccggaaggaggggctcctgccataacccaggtgccagccggtctccgcctaggaccttccctcccgcccagccagggtgggcggcatcctacgcggtgaaacgagctcatggactgacccggggctgggcctcgccagccaggagagagcgagggccgcacggcagggctg

SEQ ID NO: 260615 - DNA, 201 bp, Homo sapiens
  chr9:116823662-116823863
  hypo
ttgagggtgcagagcgcacaggggtggggacccgcactcacccacagttcggcaggtctgcagacactccttttctgtgacgaagttgttaccgttgcccatgcagccgccgtactggaaagtctcacaggccatggatgtaccattatagaaatacctgctggtcattcccatgcagggaccggccgagtagcccagctg

SEQ ID NO: 260616 - DNA, 43 bp, Homo sapiens
  chr9:116832918-116832961
  hypo
gggctgggcctggggcgtggagctggggcgtagccttgggacc

SEQ ID NO: 260617 - DNA, 200 bp, Homo sapiens; identical to SEQ ID NO: 212950
  chr9:116856485-116856685
  hypo

SEQ ID NO: 260618 - DNA, 245 bp, Homo sapiens; identical to SEQ ID NO: 212951
  chr9:116857252-116857497
  hypo

SEQ ID NO: 260619 - DNA, 432 bp, Homo sapiens
  chr9:116971563-116971995
  hypo
catggcaggagccacgggcacctaccagcatccctgggggtgggcagggcttggtgccgtgctagcatctaacccagccgcgagcttccttctgcaggtcctggagccctggcgtggggcgggcctcctgccggcgagcgcctgcgcccttccctggcgtgagggtatgtgcctttggactacatcgtggaagccagcaccatgcagtccatgggcatatacacttgcctcaaggcctatgtcatcgaggagccaccggagctgccactgccaccagggaggaagaggaggagccgggatgtgggatggcagtggtgggtgggctgcggcaggttgggccagccacacctcactgcttgaccgctctgaccccctttcttctctttcctagggctacattgggctcccagggctcttcggcctgccagggtc

SEQ ID NO: 260620 - DNA, 175 bp, Homo sapiens; identical to SEQ ID NO: 212953
  chr9:116973314-116973489
  hypo

SEQ ID NO: 260621 - DNA, 54 bp, Homo sapiens
  chr9:117038006-117038060
  hypo
gaggacgggccccccggcccccctggcgtcactggtgtccgggtgagtgtgcag

SEQ ID NO: 260622 - DNA, 152 bp, Homo sapiens
  chr9:117045885-117046037
  hypo
gccaggctgctgggcggagcggggctggagcctgcagggagactgctgtgtccccgctgtgagagccacactccataccaacgagggtctcctcctcttgtagggtgctccgggacgcatgggggcccaaggagaaccgggactggctggtt

SEQ ID NO: 260623 - DNA, 49 bp, Homo sapiens
  chr9:117179587-117179636
  hypo
ggccagtgtctggggcatctcggtcatcgatagccagccacctgatgtc

SEQ ID NO: 260624 - DNA, 45 bp, Homo sapiens
  chr9:117372622-117372667
  hypo
atgtttttaatggcaaaaaaacgcaataacttttgcgcaaaccta

SEQ ID NO: 260625 - DNA, 241 bp, Homo sapiens
  chr9:117372697-117372938
  hypo
taaaaggaaatgaggcagtgtggcgcgttctggccgatgagcgccaaggtactttgtcgaatgaaaaagcagagtgcccaacagaatagaaaaggccttcctttgtgtaaacgcacacacgcacaggtacatatgtgctctaaggaaaaatacaaggaaagcacaaggttagtgttttcctcaggggaaaggttacttacttttaaccgtagaccctttgaaattacgaaggatggcgatg

SEQ ID NO: 260626 - DNA, 129 bp, Homo sapiens
  chr9:119976901-119977030
  hypo
atgagtggcttctgtgcttgcgctcttctgggggatgcggcgacgcttctgccaacgtcgctgggcgtacagcgccacggtgaacaccagcagcagcagcagcagcgcgatgaggccaccctggagcag

SEQ ID NO: 260627 - DNA, 60 bp, Homo sapiens
  chr9:123139935-123139995
  hypo
tgctcttctcccctctctcccgtttcttacaaggacaccggccatactggaccaagggtc

SEQ ID NO: 260628 - DNA, 203 bp, Homo sapiens
  chr9:123140239-123140442
  hypo
aggcacgcagcttgcgtctctccagctccttttgaagaatcttctctcctcttctcactgcgccacctctgatctccagcgcagcagcgtggggacaggagctcagatgattcctaactctatcttcaccataaaacaaatattttgaaaagccttttgatgtcactttaatggagtgtggaaaacaccgttcaaccccccgc

SEQ ID NO: 260629 - DNA, 213 bp, Homo sapiens
  chr9:123146243-123146456
  hypo
gggcgaggccagggcgaccttgttctcttatttccctgtgtctgcccacaccgtcggccagtgtcacacacgagctgggaccacatgctgttctgtttggaacgagaaagtggcattaatacaaacagagggtcgttttagacctgaaaccatgtaattaagctctcccgtgaatgcctgttaacaaggaggtgctttcgcatttgagagaag

SEQ ID NO: 260630 - DNA, 484 bp, Homo sapiens; identical to SEQ ID NO: 212954
  chr9:123150759-123151243
  hypo

SEQ ID NO: 260631 - DNA, 55 bp, Homo sapiens
  chr9:123162810-123162865
  hypo
aagacacgctcagacgggtcatggctacaggagtgtgggacggatcaagtaagaa

SEQ ID NO: 260632 - DNA, 110 bp, Homo sapiens
  chr9:123163101-123163211
  hypo
agggtcagcttggccgtgctcacactgctcacaaacttgctcagtggtgctgggtgtggaccctacacgggggatatgaaggctgttacgtgcagtcttgaaaaagattt

SEQ ID NO: 260633 - DNA, 166 bp, Homo sapiens
  chr9:123165255-123165421
  hypo
aggcgggacacacacggagtgctagttgccgaactgccactgtcgcaggagagggagtccgtgtcattcccagagagtggaggagtctctgaaactgtaaaatgagaagtaggatgtaaaatctgtttcaggtaacactctgcgttcaagacgcttatgatgttga

SEQ ID NO: 260634 - DNA, 104 bp, Homo sapiens
  chr9:123171454-123171558
  hypo
gtgtctctccttctcgctgccttctttctgcagcctttcattttcttccttcacgctggcatactcccgctgaaggtgctccaggctcacggtcttcctggaga

SEQ ID NO: 260635 - DNA, 155 bp, Homo sapiens; identical to SEQ ID NO: 212955
  chr9:123176127-123176282
  hypo

SEQ ID NO: 260636 - DNA, 421 bp, Homo sapiens
  chr9:123210115-123210536
  hypo
cagttctatcgagccgtttgtctagctcacagggaatacatttttcttggtgcttaccattcagcaacgttttgtcgggcgttggcctcccctccatcactgcttcagccagaattaacttttggtgaagttgcttattacaagttttaaactccttcagctccccctgcagctccaagatctggctctgcagctgcgtcaccacctcctgggtggcagggagacgatacatatttcctaatgaccgggatggttttattaggattggcaagcgggacttcttagcctcctgaaaacacacatatgcaacaatgaatacactttgaacacacttcctttggttgcacagtcaacattctcatgccagccttataaaacggaattcgaactggctgcccagacttctcgttcccataatggc

SEQ ID NO: 260637 - DNA, 71 bp, Homo sapiens
  chr9:123295277-123295348
  hypo
ggctctgtacctttacgtgctgttctctctgctaggcaaagcgtcctcacccaactcgcaggactccttgt

SEQ ID NO: 260638 - DNA, 124 bp, Homo sapiens
  chr9:123367536-123367660
  hypo
atcttccaacaatcccgaaacatctgcattgggaatgctgtcatggtagctgctgaaactgatattgtcttctttcagctcgatggtccaaaagggggcattgagtttccggttttggtactcg

SEQ ID NO: 260639 - DNA, 42 bp, Homo sapiens
  chr9:123447413-123447455
  hypo
gaggcttcattttttaaatgcgattttggaagcatcaagatg

SEQ ID NO: 260640 - DNA, 77 bp, Homo sapiens
  chr9:123650230-123650307
  hypo
atgacacgcgtgcacgtctcttgattccttgtcctcttgcaagtccccacacgtctgtcgcccagactggagtgcag

SEQ ID NO: 260641 - DNA, 82 bp, Homo sapiens
  chr9:123664361-123664443
  hypo
acaaaccctcttccctgccacgtgcccccgaaaagcccatcagaaacctgaatggcttcccgttgccaactgaagcatcctc

SEQ ID NO: 260642 - DNA, 33 bp, Homo sapiens
  chr9:123690272-123690305
  hypo
cacggacatcaaaacgtgcgcaacctgctctaa

SEQ ID NO: 260643 - DNA, 104 bp, Homo sapiens; identical to SEQ ID NO: 212957
  chr9:123965022-123965126
  hypo

SEQ ID NO: 260644 - DNA, 64 bp, Homo sapiens
  chr9:124095120-124095184
  hypo
tactctagtgtggctcgtttccttgtgcccatctgacagtgagagccggcgtcttctctgcctg

SEQ ID NO: 260645 - DNA, 327 bp, Homo sapiens
  chr9:124289706-124290033
  hypo
catggagccagtgggggctgggggctgggggctgggagcagacaggagccccacccttccaggcgcagcggcagctgcccaatccgtggctgtggacccaggcatttctgtactctcgggggcctgggaagacacccccttcccccgcaggcttggaagttcctgctcccgttgcctggcctctccttgatcttggagtgaggttggggctgagcccaggcgctgtcacagcccggccgggtgtgggtacacttggtgcagtgctgacacacaagccgcctgccacctcagccccttccagactttgaacaccgatgagcaggggag

SEQ ID NO: 260646 - DNA, 222 bp, Homo sapiens
  chr9:124339602-124339824
  hypo
ggaagcctgtgctggatggccggatcgccagcaccccaggctcgaagcgttccagccggtgacctacattcccagggcgcctctgtgtgtgcgcacacgggcaggcgtgcgtgagtgcaggagctccacggtgtgtctgccagtgggcctctgtctcggcaggctgtctcctcaggagcccgtgagtgagcacgtgagggcgtggggggcccacactcctgc

SEQ ID NO: 260647 - DNA, 205 bp, Homo sapiens; identical to SEQ ID NO: 212959
  chr9:124422091-124422296
  hypo

SEQ ID NO: 260648 - DNA, 198 bp, Homo sapiens; identical to SEQ ID NO: 212960
  chr9:124443387-124443585
  hypo

SEQ ID NO: 260649 - DNA, 365 bp, Homo sapiens
  chr9:124479634-124479999
  hypo
tcattgtactagcagaagcacgtttctacacatgagaggaaacactgcatccttttcggtgcagttttacagaaaactatttaacgcgcttgctgtagctacccctggcatgtggatcctgagaatccgcccctgggcagattcactcgggtcacacacttgtttatcacacggtgtgtaattgaccttagtatgtgtgcatatggacagcataccacgtagcagtgccctgggcattctgacctgcccctcctggcgtgtttactcctctctacccatagttctggctgccgtgcctcaccctgccatgtggcaaccacatgccgggcactgagaggaggcccgggtgagagtctggtcagggt

SEQ ID NO: 260650 - DNA, 167 bp, Homo sapiens; identical to SEQ ID NO: 212961
  chr9:124499833-124500000
  hypo

SEQ ID NO: 260651 - DNA, 84 bp, Homo sapiens
  chr9:124512392-124512476
  hypo
aacccatgaggaaggtgtgtcgttatcctcactacggatggggaaactgagtcctagagagtcgaatgacttaaagtatccaag

SEQ ID NO: 260652 - DNA, 97 bp, Homo sapiens
  chr9:124513376-124513473
  hypo
tgtggacctttccccctgcccggctgctgtggacctttccctgctgcccggctgctgtggacctttccccctgcccggctgctatggacctttccct

SEQ ID NO: 260653 - DNA, 169 bp, Homo sapiens; identical to SEQ ID NO: 212962
  chr9:124545862-124546031
  hypo

SEQ ID NO: 260654 - DNA, 184 bp, Homo sapiens; identical to SEQ ID NO: 212963
  chr9:124548590-124548774
  hypo

SEQ ID NO: 260655 - DNA, 179 bp, Homo sapiens
  chr9:124549335-124549514
  hypo
cccctctcctcaggccgaccaccagcacagctaccccagctctcagcagcggcaggagaggaggcaacctgtttcttcccaaggcagcccctagccagttcctgcatccctgcctcttgctgcctccgtggcctctaaacctccagcctcccccgcccccaccccgctctttcctacag

SEQ ID NO: 260656 - DNA, 62 bp, Homo sapiens
  chr9:124581116-124581178
  hypo
tgcaggggtcaggtgcgggccttaggatggaaagaagggaagggtgccgataagggctgctt

SEQ ID NO: 260657 - DNA, 72 bp, Homo sapiens
  chr9:124639399-124639471
  hypo
cataaacaggtccccgtccctgctgttcggccaaggcgaagtcccctcagtcactagcggattccaaacgca

SEQ ID NO: 260658 - DNA, 386 bp, Homo sapiens
  chr9:124666054-124666440
  hypo
ccacgtctatacttcgtgaatctgtcagtaaaagcaaatcggatggtacaattaaaaggattaggtaaatgtaaagtattgaaagaaaatattgaggtgtatcttttcttctgtgctttgaatggagtgacatttatcttgttattttatagctgggagtttgcagggttttccagctcagctcagggataccaaatacaacgtgggttaaatatacaagccaactcagcttcatgcccgggctaagcctgtccatgaaacataaaccgcgttaattcccatattcatgacagagttctcttgggggaacagcatttggagaaaatactaacaactaaaactatttccacatttcataatgatcatccaagggacatctgcaactg

SEQ ID NO: 260659 - DNA, 166 bp, Homo sapiens
  chr9:124736303-124736469
  hypo
tcttaagtgggtccatgaggcgcagagtgtctctgatcacagccactttcacttcttcatcaacgaggctggggacattttcaaacacccctggagaaagcttgaacgggtaaggattctgtgtcacagtggagaccgtgattccgtgccaagtggctatccagct

SEQ ID NO: 260660 - DNA, 195 bp, Homo sapiens
  chr9:124751431-124751626
  hypo
ggtcaaggctggaaacgcaggctgggaactggcaatggttacctggaagcacgtggggcccggcctccccgtggggatgtctgactggtagaagactttgagctctggagtcagcgcgatgaccgtcttaatcaccacggagatgatgtcagaccagaccttcttgatgtcaacgcctttggaagacagtctaca

SEQ ID NO: 260661 - DNA, 112 bp, Homo sapiens
  chr9:124815997-124816109
  hypo
ggcagtcatggctccgcgtgcaaggactgctctgacagttcacacacttcacagtgcccttccctcctgcccgtgggctacattcctgtctcacctccgccaggttcctagt

SEQ ID NO: 260662 - DNA, 65 bp, Homo sapiens
  chr9:124967430-124967495
  hypo
caggctcaaagaggtggaagcgagtgagctcgtgggcacacagcgaggaggaggacctggcactg

SEQ ID NO: 260663 - DNA, 106 bp, Homo sapiens
  chr9:125126540-125126646
  hypo
aaaagggaagataacgtaagcaaaaatgtttctttatactgtatatggctgaatgacggtaagttattaatgaagtgttaaagcaggaacgcgcattccatgcaac

SEQ ID NO: 260664 - DNA, 42 bp, Homo sapiens
  chr9:125573936-125573978
  hypo
tgtttgtttgttttttgagacggagtctcgctctgtcgccca

SEQ ID NO: 260665 - DNA, 42 bp, Homo sapiens; identical to SEQ ID NO: 212966
  chr9:125574218-125574260
  hypo

SEQ ID NO: 260666 - DNA, 240 bp, Homo sapiens
  chr9:125591372-125591612
  hypo
agcgagactgtctcaaaaaaaaagaaagaaagaaaagaaaaatgtattcacttcccttcgaagtttccgaagccattcaaagtgtgttttttattggttcttcatcgcatcacgtctattagacggaaaagtgactcagagacgttcggtaatttgcccgagagcacaaatccctcaagtacagggcatagattaaaatatatatatatatttttttgacggagtttcgctcttcttgcc

SEQ ID NO: 260667 - DNA, 153 bp, Homo sapiens
  chr9:125622564-125622717
  hypo
caccttacacagctaattcacgtgatcatcgtaacagatgtcatattcctgtgtgggccacagggaataaaaacgattcccagatattaacgtgattcattagtcaccatttacccattcttttttttttttttttttttgagacagggtgtc

SEQ ID NO: 260668 - DNA, 57 bp, Homo sapiens; identical to SEQ ID NO: 212967
  chr9:125870568-125870625
  hypo

SEQ ID NO: 260669 - DNA, 42 bp, Homo sapiens
  chr9:125878079-125878121
  hypo
ctctctcaaggctgcgtctgtcatcgcgggaggtgtatttta

SEQ ID NO: 260670 - DNA, 44 bp, Homo sapiens
  chr9:125927262-125927306
  hypo
aaagtttgccctggattgaccgggcacggtggctcacacctgta

SEQ ID NO: 260671 - DNA, 101 bp, Homo sapiens; identical to SEQ ID NO: 212968
  chr9:125986776-125986877
  hypo

SEQ ID NO: 260672 - DNA, 213 bp, Homo sapiens
  chr9:126092335-126092548
  hypo
tttctggatacaatttctcacgagcacccaaacaaggacaacgttccagaaccttgtttctaacaaatgtcggtaaaacaaaaacacccgctacagacccataaaatgtgaagaccaactccagtgataaaatatgttcgtttctatgtatttttatagctttccggataataaaaggaaccgtgttctaatcggatgcgtttgttaaatcag

SEQ ID NO: 260673 - DNA, 195 bp, Homo sapiens; identical to SEQ ID NO: 212969
  chr9:126100875-126101070
  hypo

SEQ ID NO: 260674 - DNA, 170 bp, Homo sapiens
  chr9:126110130-126110300
  hypo
atgtatgtgtgtgacgtgtgggggtgtggacgggcatgacgtgtacagagagaggtccaagcatgaagatcaggagtctttgttccaactttggcatgtgacgtgggtcagcccctgcccctatcaagcctcggtttccctgtctgggcagtgagcgccatgttgttcaa

SEQ ID NO: 260675 - DNA, 179 bp, Homo sapiens
  chr9:126139069-126139248
  hypo
cctccccttctctgcggtcttaggcctcggtgtcgtgtctcttgcagaagggcctgcccctgccgctgccattcccactgctggaggtggccgtacctgcagcctgtgcctgcctcctcctcctcctcctgggcctcctttcagggatcctggcagcccgaaagcgccgccagtctgag

SEQ ID NO: 260676 - DNA, 270 bp, Homo sapiens
  chr9:126152957-126153227
  hypo
gaagaggtgaccacgtggccaagaagtggagaacagggactgcagcccggatggtccacccccaggggcctcaccctctcctgtgagcggggctcggagtagatgcacacgaggggacaccagccccggctcgggccaaatggagggaggctctccagtcgccctcacgtccaccttggttgcctttccgacacctatccaagcacgggcccccacctctggctctgacaagagagcacagatcacagcttgacacgttggtgcaacgcc

SEQ ID NO: 260677 - DNA, 435 bp, Homo sapiens
  chr9:126154147-126154582
  hypo
gtctgtgaaaaggcaggttgcggcaaacttggctgcccagcgagggctgccagagtcttggtgcagaagaaaggctggccgtccgtcatggatcagaccccatcatcccccacggctgctcccgcctctgcccaccttgtctccgcgtggagttcccatgcagatgacttcccgaaccccttctaatgtttggtttaacgtgtcgccggttagcgcgcgcgtgtgacagtggtgacaggcgaggctgttcctttttaaataccatgtcagagacacggcgtcaggaagcagggacgtgctccatgctctctgccgcgccgggatcgcaccggcttattttttaatgaggaagatctgcatctcgggagtttttttcatgtgtcacatcgcgtggacaaatcagcagcacgtcacgctggcccaaaatgaaatgct

SEQ ID NO: 260678 - DNA, 290 bp, Homo sapiens
  chr9:126158005-126158295
  hypo
gatgcactggcagcttcatacgcacgtcctaatcacacctggcacacagtaggtgctctttacctgtttgtggttgttaccggacgcccctaccccgcctcccaggtgcttgactgcaagccgcactctgccttcagattcctttgttcattcacccaggaaacatctcagagcagaggtctgggctcggatgtggtccaggagttggagagtcaaagctgaggaagagctcacagactactggtgtgcctggtgtgtgtgtgtgtgtgtgcacgcgtgtgagacaaaga

SEQ ID NO: 260679 - DNA, 156 bp, Homo sapiens
  chr9:126162177-126162333
  hypo
gcctgagctcccactcgggaagaaacgatgctagcccaagagggcctagaaatcaatgggtgctccaccgcgccccctgctgactggtgtctgacccacagcctctcatgcaggatccctcctaccccgatccctgccccacggaagcccctgggc

SEQ ID NO: 260680 - DNA, 280 bp, Homo sapiens
  chr9:126165455-126165735
  hypo
cagcccaagtgcccggctccctggcctctggggcctcccactggtgtgacaaccagaccgagtaaaagatcaagtcctgttccctgaatgacccctttgtgaaacacccgctgggagccccggggaagcctcacaaaggccggggctacacgcttgggcttcgcaaagtgctggctccgcagacacagggttcttacagacagaggggagaggcacaatactcactgctcagggctcggcacagacgtcctccggccttccactgcgatgttgctctttg

SEQ ID NO: 260681 - DNA, 34 bp, Homo sapiens
  chr9:126168860-126168894
  hypo
gaagtgcataatgacgctgcgagtatcatcgtga

SEQ ID NO: 260682 - DNA, 350 bp, Homo sapiens
  chr9:126169183-126169533
  hypo
ttgctacaataaaggcgggttaagaatgtgaacttgtggctgaaatggggggattaagtttgtggcaacttcaactgaacttgcaacgtggtgaaacatggggaaaaagaacaacagagctaattagacgagctgagctgtcagagtgccgctgaatggctcagcgccaacaaacaaaaggaatgggttggcaatcagcgggatcggtggaggagactgcttcattagggatgataaaacagacagagcagggggggaggggcgggggggtggggagcacggagctggagcctcggaggctggggagggagagaaagacacgccagacccagaggcggttggtcaccagc

SEQ ID NO: 260683 - DNA, 348 bp, Homo sapiens
  chr9:126169851-126170199
  hypo
tcacacccatgtttcgggggtgcttaggaagggtgggtactggtgatgaaggaagaaacccacaggcacacacaacagtgactggccccaccggtgtgaggatcccagccgcgtccggggagaaaatgctaaacagagatttccagctctgttcaagggggactggaggggaaacttgggaagccagccaattccccactggatttaaaacctgagaaatctaagtcggcagggttaaatgtgtattgaatacaaaagcactgagtacatttgattttaatggtgagcaagaaataataaatacagagcttataaagtgcttcacacgcaggccgacggcagcctgcc

SEQ ID NO: 260684 - DNA, 231 bp, Homo sapiens
  chr9:126180749-126180980
  hypo
tcaggaggggaaggcgcgttggaatagcaacttaattacctgggtggcatggatgagtgggcaccccgcacagggctgcagggtggaaaacgctcgacggccaggtggtgacttgggggcagagagcgcagtgtgtaggggaggagaggtggtgtccctgctgcctgggagccagcctgcctgtgctgtgggcagagccaaggcactttctgctgccggtgcttccagggc

SEQ ID NO: 260685 - DNA, 221 bp, Homo sapiens
  chr9:126187645-126187866
  hypo
ccccgctgtcacaccgctgaaggtggagccttgggggactcaggatcctgtctctcacaacctggcgccgcgtgcggggattctaaagcgcgtgcaggcgccgcagaacaagtcactgccttttgctggatttctcttgctctgctgaaccgactgactactcaagggcacaaggagtgagtggacctggcctcgcctcttccccacgtcactgcctttcc

SEQ ID NO: 260686 - DNA, 134 bp, Homo sapiens
  chr9:126198542-126198676
  hypo
ctggggagcagccagggcaacgccctcccgcagctcctccttgctaggagtctatgggcagctccaacctggagagacctgccattgtccacttatctcgagtggagaaacgcggtcttcacattctcaggtga

SEQ ID NO: 260687 - DNA, 266 bp, Homo sapiens
  chr9:126208445-126208711
  hypo
tctgactcatgctgcgggtgtgagaactcccgtctccatttacagactcgtgccgcacccttcttttcccaggccacctcacagcacagcaaatgcaaattaaaatatgaatattgatatcaaaatagtaaccaaagttggaatttctgtgattgaggctgcagcgtattttaatgtgtcgggagacagggagctgacagttgtgtgataaggtgtgaaaatgtctgttctacaagtctacctagctctcccggccccacgcatgc

SEQ ID NO: 260688 - DNA, 80 bp, Homo sapiens
  chr9:126243636-126243716
  hypo
tggaaacaaggaagcgggagcgggaggaagaaacagtgagggaagcccaggcaccaggaaggacgcgtgcatttacagac

SEQ ID NO: 260689 - DNA, 164 bp, Homo sapiens
  chr9:126314090-126314254
  hypo
ctccccaacaaacccgcagaaagcacagatggggaggagaagcctagctcctggcacagggctgggcctcagcaagcggtccccttccttcttccttctggatctggtaaagaaaacaaagctcaggagtcccccagccagctgcattctgaattttttcatta

SEQ ID NO: 260690 - DNA, 103 bp, Homo sapiens
  chr9:126314314-126314417
  hypo
agacagagagagagagagagagagagagagagaggccaaggtggtaaaaatctcaagggagctctgagccagggaaaagttcttcagacgtgactgcagagga

SEQ ID NO: 260691 - DNA, 137 bp, Homo sapiens
  chr9:126321030-126321167
  hypo
atctcaagatgccacgcttcagagcacacctttcacgctgcgttccccataagaggaattgtgcgacgtggtgacctcgagttatccattcactcagcaaatatttattatttcctatgtaccgaggactatgttag

SEQ ID NO: 260692 - DNA, 167 bp, Homo sapiens; identical to SEQ ID NO: 212975
  chr9:126323416-126323583
  hypo

SEQ ID NO: 260693 - DNA, 338 bp, Homo sapiens
  chr9:126348887-126349225
  hypo
tccaaaagggctggcgtggactcaagggccttcctgaagctcactgttcccaaggaaagaattggagcccagctcgctggacagtgcccggtcccccaaaggatcaaggcaactaggggaatgaagaaaggcaagaaaaactcaaactgggggtggggacaggaagcgcggatgagaagaaagccagaccgtcgccaggtgccggtgcctctcatcttaaccatgccatcagtcagggacactagcatctctgcatgggaaccaagtgggggcgcagagaggtcaaacaagctgcccaaagtcagagctaggaagcagcagtcaacttttgaacacag

SEQ ID NO: 260694 - DNA, 114 bp, Homo sapiens
  chr9:126368302-126368416
  hypo
gcaccttccgtaaacggctttcctttggccccaggtctgagctacaggttcctgcaagaaaccgcagaaggagtatccctttcacctgaagggtacaatcgaactagataagcc

SEQ ID NO: 260695 - DNA, 78 bp, Homo sapiens
  chr9:126403904-126403982
  hypo
ttttaagtgccagtcggtacgcataaacatcttctaaatgaacttgatcagtctctattatgtcgtctcaacatgaaa

SEQ ID NO: 260696 - DNA, 75 bp, Homo sapiens
  chr9:126406103-126406178
  hypo
agagtagtgtcaggcgcacagacagggcttgccgaatctgaagtaaaaagcttaggtgtgcgttcaaaggtgacg

SEQ ID NO: 260697 - DNA, 80 bp, Homo sapiens
  chr9:126440715-126440795
  hypo
aaggttgtaccaagcgcttgccggcctggtcatgtctgccctgctgtgctaacagagtccaataccgacagatatggaca

SEQ ID NO: 260698 - DNA, 87 bp, Homo sapiens; identical to SEQ ID NO: 212979
  chr9:126442151-126442238
  hypo

SEQ ID NO: 260699 - DNA, 260 bp, Homo sapiens
  chr9:126487964-126488224
  hypo
ccaaacagactgtacgggcctcactgctcggatgcttccagagaaagaaggagaatcgatgggttcctttgtaaacaacttcttgtgctttcgggctgtgaccgacttcaaaggtggcataacttaattctgtcacaaattatgccatggaaatcttgaggaagatatcttcctgaggaaatacctacgtggccccttataaactaaattctaacaggtaaacaacaaacaacaaaagaaaaacacgttcagcttttagt

SEQ ID NO: 260700 - DNA, 101 bp, Homo sapiens
  chr9:126707416-126707517
  hypo
atatctttccttcccattgccgagttcatggctgaggtatctataacaaaagacagattaactacagaaaagcacacaaatgtatttaatatgttttatgt

SEQ ID NO: 260701 - DNA, 337 bp, Homo sapiens
  chr9:126975847-126976184
  hypo
ggcagtgagacatgcgtgattgcaaaccaatgtaatgtgcgtgtgtgagcatgtctgcaaatatgcatgcatgtttgcatgtgcaagtgtagggaggcagcttgtggatgcccggatatgagccacacgtgtggatgcccaggagtatgaaaagatccctgactgtatggggcatgcacgtatgagcacatttacgtggatatatgtgcattagctaaacacgcatttttgtgtagacctgtgtgcaccgtacacatagcgtgcatggatttgtgcgtgtcagagcacactagtgtggacgtatgtgttcgggcacgtttttctaggctgatctgcc

SEQ ID NO: 260702 - DNA, 282 bp, Homo sapiens
  chr9:127019287-127019569
  hypo
gcctcaaagcccatctgtaaaatgggcacaagggtaacgttggcacacgtggtggacgctccgttggtgtcattattacagatcacggccagttgaagcacttccactcatttggcaaacagaagccagacgggcattcaccctgtgcccagtacagtgctgcgcccaagcaggcagtcagtgtccctggctccagccctcctggggtgcagcacagttttgaatgtggaggggaggcagcaggggtggaaacagcccagccaggagcggccgctctcggtg

SEQ ID NO: 260703 - DNA, 291 bp, Homo sapiens
  chr9:127071988-127072279
  hypo
tatttttatgagtacgtgcgattcttctaagtgctcagaaagccgccctggctgtttatgagggtatgtgattttggctgcattcctagaggtgacggcgtctgagtcacagagtcccactgtgcgccaggtcgtgtcaggcacattccatgtgtcattccacaaacatgctccaagcagttgctctggggtcagagcctcagtgcagaggacgtggaggggactagacaggggcccccttttgaagaggccggtggcgggtcctggggcggggcctggggcagggctcag

SEQ ID NO: 260704 - DNA, 118 bp, Homo sapiens
  chr9:127120326-127120444
  hypo
tctaacctgtgctacggcgccttcccagtccacgagggcgtgagagtacatacacatgcaagtgcactccagcgctcacccaagcaacacccttggagaaacacggactccaggccca

SEQ ID NO: 260705 - DNA, 200 bp, Homo sapiens
  chr9:127214765-127214965
  hypo
accgtctctcttatcgtttttagcccccgtggccgccggcgaggtggtgaagactgcaggtggggtgtgcaagttctctggacagcgactgagctggtggcaggcccaagagtcctgcgagcagcagtttggccacttggcactgcagccccctgatggggttcttgcttcacggctgcgcgatccggtctgggtgggcc

SEQ ID NO: 260706 - DNA, 80 bp, Homo sapiens
  chr9:127219756-127219836
  hypo
aggtgcggagcttacgcttgagggaggccagcacgaggggctgcttattcacaatgcctggtgggcgtccagaggggccc

SEQ ID NO: 260707 - DNA, 51 bp, Homo sapiens
  chr9:127230411-127230462
  hypo
ctccctggcctctgccgagggcttcctcatgaccagcgagtgggccaaggc

SEQ ID NO: 260708 - DNA, 171 bp, Homo sapiens
  chr9:127241721-127241892
  hypo
gctgaggatggctgcgtagcctcacgatgccccatccgtcttctgtcgaatgggggacatcatactcacccagcgggtcatgtgaggggtccgcgcagtcctgcacttggttcctggcacggccctcagcaagcactcagagtgtcagctgtggcccgagacagatgttcg

SEQ ID NO: 260709 - DNA, 602 bp, Homo sapiens
  chr9:127262376-127262978
  hypo
ccttgaagaccatgcacctgcgtgcccagtccacgatggagatgaaggtctggtcggccattctgcacaggaggccgaaggccgccggctggtcggggcggcttttggtgggctcctgcaggcagcccaagatgcgggcccgcacctggtcctcatccggctccagctgcagcagctgcaggatgagctcaggcacgttgggccctccagagaagggctctgggtagccgtacggcagcccaggctgtggggggctggcataaggctccgggtactcagacttgatggcacggccaggaaaggcagggtagaggtagccagccagtggcccgtgggcaccgggcacggccatgggcagtgctggggccccaaagtcgcccagtggcccagcaggtggaccggcggccaggcccttgggctcaggcccatgcaggctgggaggcagcacgtagtccggtgcgggagggggcggcgggggcacccccatcgggggccctgtctccagcttgaagccattggcccgaatctgtgccttcttctgctgtttcagggcccggtcccgcttgtacatcggcccaaacttgttccggccacccctcata

SEQ ID NO: 260710 - DNA, 271 bp, Homo sapiens
  chr9:127268260-127268531
  hypo
aggccaaaaagctgcgatcttcaagcaggaaaataccgcaattttgcattgacagcggcgcaacccaccaaaaggctccatctgggctcccgcccgcctggaggcctcgggcttcggttggagctgggcctggggcctgcaagttgtggccagagaaccccccgcgcagaccgcactcagctggctcacccacagaaggagcagaacccgcagactagctgtgcaagctcgggcaagtcacttctcctctctgaaacgagagcctcagttt

SEQ ID NO: 260711 - DNA, 93 bp, Homo sapiens; identical to SEQ ID NO: 212981
  chr9:127308364-127308457
  hypo

SEQ ID NO: 260712 - DNA, 222 bp, Homo sapiens
  chr9:127361668-127361890
  hypo
gcctgggcgacaaaagcgatacatggtctcaaaaaaaaaaaaaaaaagttcctcttcatcttcctccagcgttttaaaatttcttgctcaggaagagaaactactggcttaaactgagggtcatggttggactcgtcttcattctcaatggaagtatcgtggtcttcctgagtgtccgtggcagccgccatgagggcgcggcggcggcggccgctcggctga

SEQ ID NO: 260713 - DNA, 39 bp, Homo sapiens; identical to SEQ ID NO: 212982
  chr9:127420645-127420684
  hypo

SEQ ID NO: 260714 - DNA, 39 bp, Homo sapiens
  chr9:127457915-127457954
  hypo
tgggattataggcatgagtcaccgcgcccggcccgaggg

SEQ ID NO: 260715 - DNA, 98 bp, Homo sapiens
  chr9:127481335-127481433
  hypo
ggataaattcctagacgtatgaattgttcaatctaagttttcttttgtggcggggagggtggagacagggtctcactctgttgcccaggctggagtgc

SEQ ID NO: 260716 - DNA, 35 bp, Homo sapiens
  chr9:127482311-127482346
  hypo
tttgaaactcttgaacgtttttgggtttttttgaa

SEQ ID NO: 260717 - DNA, 31 bp, Homo sapiens; identical to SEQ ID NO: 212983
  chr9:127500846-127500877
  hypo

SEQ ID NO: 260718 - DNA, 85 bp, Homo sapiens
  chr9:127538088-127538173
  hypo
tatttttagtagaggcgagttttcaccatgttgcccaggctgggagagtttgcatttttaacaagttatccgatgatgcggaggc

SEQ ID NO: 260719 - DNA, 67 bp, Homo sapiens
  chr9:127570205-127570272
  hypo
agcctggtggagttccgcaacctggaaaacttcaagcaaggtcagggacccccggaggtggagaggg

SEQ ID NO: 260720 - DNA, 336 bp, Homo sapiens; identical to SEQ ID NO: 212985
  chr9:127572288-127572624
  hypo

SEQ ID NO: 260721 - DNA, 110 bp, Homo sapiens
  chr9:127573375-127573485
  hypo
cagaaaccgcaccccgagagaaaatcccatcctctgttccaaggcccctgtctgctctatgctcatttttattttctcttattcttcatcagtgccgtcatttgtttctg

SEQ ID NO: 260722 - DNA, 39 bp, Homo sapiens
  chr9:127577754-127577793
  hypo
atgggagattaagtacgctgttagctgaatgggaattgg

SEQ ID NO: 260723 - DNA, 39 bp, Homo sapiens
  chr9:127577913-127577952
  hypo
aaaaaataaacaaaagtagccaggcgttgtggcatgcaa

SEQ ID NO: 260724 - DNA, 117 bp, Homo sapiens
  chr9:127616531-127616648
  hypo
tcagaagatggctgcgtgtatggctgggagacccggagtgggcagctgctgtggaggctgggtggccacacaggtggggctcccacacctggccgggaagaccgaggcacaagggtc

SEQ ID NO: 260725 - DNA, 77 bp, Homo sapiens; identical to SEQ ID NO: 212986
  chr9:127657866-127657943
  hypo

SEQ ID NO: 260726 - DNA, 36 bp, Homo sapiens
  chr9:127861825-127861861
  hypo
gctaggattacagacggcagcttttcatccttcaaa

SEQ ID NO: 260727 - DNA, 33 bp, Homo sapiens; identical to SEQ ID NO: 212987
  chr9:127955075-127955108
  hypo

SEQ ID NO: 260728 - DNA, 33 bp, Homo sapiens
  chr9:128029579-128029612
  hypo
ttggagttcagttgcgctatcagggatcattgc

SEQ ID NO: 260729 - DNA, 37 bp, Homo sapiens
  chr9:128032923-128032960
  hypo
tataagtgaatggttgaggccgggcgcagtggctcac

SEQ ID NO: 260730 - DNA, 156 bp, Homo sapiens; identical to SEQ ID NO: 212988
  chr9:128103377-128103533
  hypo

SEQ ID NO: 260731 - DNA, 135 bp, Homo sapiens
  chr9:128118010-128118145
  hypo
catatggcaaaacgcgagtgaagaacagcttcaagatgcacagctggccattgagcgaagcgtgatgaaccggattttcaagctcgccttctaccctaatcaagatggggacatacttcgcgaccagtaagtact

SEQ ID NO: 260732 - DNA, 138 bp, Homo sapiens; identical to SEQ ID NO: 212989
  chr9:128135749-128135887
  hypo

SEQ ID NO: 260733 - DNA, 159 bp, Homo sapiens
  chr9:128168027-128168186
  hypo
tctgaaggaggccctcgcccttgccgggtgcgcactttctaaaacacaaatcaggtgggtcactccttagctccagccccttccatggctccccattgtcctcagaatgaagccagcttccttagcttggcactcagtgtcgctcgaggcccaactgac

SEQ ID NO: 260734 - DNA, 320 bp, Homo sapiens
  chr9:128189978-128190298
  hypo
aaagggtgactcagcctcagcgaggtgaagggacttgcccagggtcacacagttaacaggcggtggcgccagtttgtctgactggagaccgcgctgtcagccggccactgccacggctcccgaaacagcatcgcccataccgagtcccgagctaccccagctctagacatgcgtgcatgcacttcggtcacaagtgtgcctggggaagttgcgtgtcacccccttcttggaacacagtgcacagtggcccgttgaaggctctgagggaccccgcaggagcaaaaactgccatgttcagcgtggagttcccagacctctgt

SEQ ID NO: 260735 - DNA, 480 bp, Homo sapiens; identical to SEQ ID NO: 212990
  chr9:128200052-128200532
  hypo

SEQ ID NO: 260736 - DNA, 245 bp, Homo sapiens
  chr9:128263221-128263466
  hypo
cggggtaaaaattccgataagcaagtcacataggagtgtattggtgtaacttttcctttggctcactatggtatggtactagatatggtatgaaatttcaaatgtcacaaggattgttacactaagacattgtctcactatacgatctttatctatgtagacttgcccttatttcttgtttgcttttccttcttagaaagtcatgcatgctcaccttagaaactctggaacgaacaaatataaac

SEQ ID NO: 260737 - DNA, 168 bp, Homo sapiens
  chr9:128274068-128274236
  hypo
aaaaagtcacagctgcgcatgaagccgcataccctccatttcacagcagagaggaacacaaaaggaagattctgggaagcagttactctgcagcgacgggaaaacctgcttgggcattccaatgatgtatttattgcagtaataccatgtcaccgaatggcctaggaa

SEQ ID NO: 260738 - DNA, 87 bp, Homo sapiens
  chr9:128274769-128274856
  hypo
agctcctcctcctggggactcgtaaacttgtcgtttaatctttatgtttcttttcctctcacgtagtttattggttcgtatgtatac

SEQ ID NO: 260739 - DNA, 93 bp, Homo sapiens; identical to SEQ ID NO: 212991
  chr9:128399989-128400082
  hypo

SEQ ID NO: 260740 - DNA, 159 bp, Homo sapiens; identical to SEQ ID NO: 212992
  chr9:128407606-128407765
  hypo

SEQ ID NO: 260741 - DNA, 264 bp, Homo sapiens; identical to SEQ ID NO: 212993
  chr9:128409706-128409970
  hypo

SEQ ID NO: 260742 - DNA, 81 bp, Homo sapiens; identical to SEQ ID NO: 212994
  chr9:128479564-128479645
  hypo

SEQ ID NO: 260743 - DNA, 50 bp, Homo sapiens
  chr9:128672789-128672839
  hypo
gagaatgagtcaagcgaaagtgacaactaggttggcgtggaaatgtgcag

SEQ ID NO: 260744 - DNA, 57 bp, Homo sapiens
  chr9:128674628-128674685
  hypo
ggtatgcgtttattcggagaaagctttgtaataattttgacccgtaatttatttatt

SEQ ID NO: 260745 - DNA, 239 bp, Homo sapiens
  chr9:128677870-128678109
  hypo
tttgatcattttctcgaataaacaaaatactcacactatttgtcctctgtttctcgcttcttctctctctgtctctctctctctttccttgaaggtctcagcatcagaggagcccaggaggaggaccctcccgatccccagctaatgagactggacaatatgcttttggcagaaggggtttcaggtcctgagaaaggtgggggatcggcggcagcagctgcagccgcggcagcctctgg

SEQ ID NO: 260746 - DNA, 105 bp, Homo sapiens
  chr9:128718758-128718863
  hypo
gtgggggaaatacacggttgtagtgtatgcgagagaccagatccctttcaggctgctccttggccttgcagaaaagttccagaaaatcagcggactgcataatgt

SEQ ID NO: 260747 - DNA, 40 bp, Homo sapiens
  chr9:128752498-128752538
  hypo
ctgcccctcagggttcgtttcctaccgcctggcctaccct

SEQ ID NO: 260748 - DNA, 274 bp, Homo sapiens
  chr9:128759707-128759981
  hypo
cattgttgctgccactagctcgggctcagctgccttccctgccatgtgtcgtgtagttgttttcagcacataagctgtcaacgagcgttctttggagatacttgaactggagtggcccaggggcttttcgcctttccgtaagcctgctctgccagggaggcgctgccccaaaggtggcctggccaccgtccagaatggaggcccccggtgctggcctgcccagcagcacctgcggctcagtccctccaggatcggaaggaatcacacctgccac

SEQ ID NO: 260749 - DNA, 59 bp, Homo sapiens
  chr9:128777744-128777803
  hypo
acattttgccaggcgcaggcggtgataatggatcacgttttggcgaggaggataatgga

SEQ ID NO: 260750 - DNA, 175 bp, Homo sapiens
  chr9:128786731-128786906
  hypo
gctgggctggtgcccggagggtggggtcaggcctggcagttccaccccgtgccggtggtgacaacacagatcctcccgtctccaccagcatttactttaattgcccgaaaattgacgatagatgcaaggaaaataatgaggcctaattatgttaattaaacggctaattcattaa

SEQ ID NO: 260751 - DNA, 147 bp, Homo sapiens
  chr9:128819865-128820012
  hypo
tcgtatgtggcgcccggcccagaaaggtacaataactgtatattttaacttaatggttttttggggggcatgcaaatttcagtgagcagattgcaccgaggcccgggcttggagcggcctccctgggcccggcggccctttccccag

SEQ ID NO: 260752 - DNA, 233 bp, Homo sapiens
  chr9:128824393-128824626
  hypo
tcaccatcggcaaccggagcctgctggaattgtgaacaactggatgaatgaatgaattggaaaatataagaacaaatgattggataaagaagtcaatgaaagaatgaatttgagccacagggtctcatgcaggccacatggtcgttcaggctctgctgtgtgccaggcactagcactacgcggcacacaacggacccagtccctgccctcggggctctcgcctgcagacctgg

SEQ ID NO: 260753 - DNA, 59 bp, Homo sapiens
  chr9:128890927-128890986
  hypo
ggggccctcagagacgcaggtgcaggcagaaggctcccagcctgcgtaccactgtctca

SEQ ID NO: 260754 - DNA, 111 bp, Homo sapiens; identical to SEQ ID NO: 212996
  chr9:128925326-128925437
  hypo

SEQ ID NO: 260755 - DNA, 35 bp, Homo sapiens
  chr9:128926861-128926896
  hypo
gcctgtatgtgtctttcttgcgtaccctgatggct

SEQ ID NO: 260756 - DNA, 440 bp, Homo sapiens
  chr9:128997999-128998439
  hypo
gcagaaagcgtctgcggaggagacaacatcttgtaccatctatcttccttaaatcctcacgctgtgacaaagtggagggcgaaatcatgatgaatgatcggacacatttagccagtacctgtgctctgtaacgagcgtggcccgggaaaggggccctaatgaagatctgtgcccccgccccaaaccgggcctcgtcggaaacaagtctttattacgaaattggcgcctagttttcataccacgcaggatggaggcgcaaggtgtgacatgaattaacgccggcacctgcagggtcagcccagccctcgctggcggtacagagacaaacgggttcggctcccgccaccaccctgcgtctggttgacaaggcgccagtcgccttcggattgtgcgggaacacgcctcggttttgttcctacccggcccgccatcatttattc

SEQ ID NO: 260757 - DNA, 295 bp, Homo sapiens
  chr9:129038608-129038903
  hypo
gcccggtggccggccggaccgcctgctgtctcacacccttgtaaggttactatttatctagtgcaaccgaagttggcgcacacatctggggcctggtacttagtgcaattatttatgatttccaccaagatttaaaagctcatcgccggccttgtaatgcagtaactgattgcgctgctaatgtaattaagaaaagattatgatgtccacgtggcgtaccagatggtggcattcatagtaatcggcgtgcacaactggcagacaactgcacaagggcagccgagcggaggcagct

SEQ ID NO: 260758 - DNA, 140 bp, Homo sapiens
  chr9:129265881-129266021
  hypo
ccagtgacgcccaccggctccctccgctccctcctgtcacctaccagggcagaccccactaagccgttgagtctcttcctggaagaccctgagggccggcagctttgcctaggactctccagggtcgctgatcctccccg

SEQ ID NO: 260759 - DNA, 79 bp, Homo sapiens
  chr9:129316510-129316589
  hypo
aggaagaccttttccgcggggtgccctggaatactatagggctataaaaccagctgggttcattcggcttggcagtgag

SEQ ID NO: 260760 - DNA, 119 bp, Homo sapiens
  chr9:129454751-129454870
  hypo
cacatgcttccgcacgctgtgtgtgtctgtccagatgcatgcatgcctgtacgttcctgcccgtgagcatgggcccatgtgtgtgaatacgcctgtgagttgcacgcgtgagggccttt

SEQ ID NO: 260761 - DNA, 421 bp, Homo sapiens; identical to SEQ ID NO: 212997
  chr9:129455241-129455662
  hypo

SEQ ID NO: 260762 - DNA, 291 bp, Homo sapiens
  chr9:129458625-129458916
  hypo
agcgactgcttcctcggctcctcagacgtgggctccctgcaggcccgcgtggggaaccccatcgaccggctctactccatgcagagttcctacttcgcctcctgagagccagccaggcgcacggacgcttgggcaggggcctgggggggactgccagcctctgcggccagcctggccacccccgccctgctctccgcacagactacagacagccatacggtgccctcccctcggccagctgggcctgaccactgtgcccgttgggtacagccagaccggtagatgggcaca

SEQ ID NO: 260763 - DNA, 340 bp, Homo sapiens
  chr9:129517389-129517729
  hypo
tggggcgtgggtggcggccaatgcagtgccgggccctggcgggccgcagtgcgggcacagagcctcgtctttattgtacttataaaatatacatggccctttattgaattgcctgctgtcgaaatctgcaagaacgttattgccttttactgtcctggagagaagcagagcagcaacatctgtgtaatttcataagatgcaggagccataaatctgattgtgccggatataagatcgatcgtaaaaaatcacgcattgaacatgggggatgtcgggaagcagcaggggcaggagcagcttggggggcccgttccgaacctcgcaccgcaattccggtggg

SEQ ID NO: 260764 - DNA, 37 bp, Homo sapiens
  chr9:129560119-129560156
  hypo
gtgagccaccgcgcccggcccctgatctgtcagtttt

SEQ ID NO: 260765 - DNA, 97 bp, Homo sapiens
  chr9:129562214-129562311
  hypo
catgaatcatgcactcgctcttaaagtgcccacctggaaatgatgcatgttttataatacattagtgaggccgggagcagtggctcatgcctgtaat

SEQ ID NO: 260766 - DNA, 80 bp, Homo sapiens
  chr9:129627923-129628003
  hypo
cctcacagcttaacagaatacgtggtgcagaattttacttaaagatactagccaatggggccgggcgcagtagctcattc

SEQ ID NO: 260767 - DNA, 237 bp, Homo sapiens; identical to SEQ ID NO: 212999
  chr9:129628399-129628636
  hypo

SEQ ID NO: 260768 - DNA, 425 bp, Homo sapiens
  chr9:129630576-129631001
  hypo
cttaccaagcctgtcgtcatatggtctcgcatcagaccttaattttcttttcagcgcatccatgcctgcttatttccagagcccccgctttggctttggacttcaggtctgtgggaggagtgtcccaggatggctcgtgcggtcatttccaggcagtgccgctctccctgtggcttgtacccacagtgcctcactgtgtgagtgtcctcctgctctggttgcccagccggccatcactccacagcgtgtgttcatttctcccaaagctgctcgccttcagctgtgctcacctttgcagtgtggcttccatgtctgccgtcctctggtgctttcagacttggcttcgtcactgcttggtcagtcctggagggcccctcacagtttgctgttgctttcagggcgccggtctcaatgctgctttgaat

SEQ ID NO: 260769 - DNA, 76 bp, Homo sapiens; identical to SEQ ID NO: 213000
  chr9:129633597-129633673
  hypo

SEQ ID NO: 260770 - DNA, 135 bp, Homo sapiens
  chr9:129643034-129643169
  hypo
aaaaaccacccaggcgttgctgaagtcaggagtcgcattgagtcccccgagagaacagatgtgtacgtggaacagaaactagaaaatgacgcatcggcctcagagatgggcctagattcccggatggaaattcac

SEQ ID NO: 260771 - DNA, 148 bp, Homo sapiens
  chr9:129644774-129644922
  hypo
ttacaagattgcttcggtactgtaaactctggcagagagtaattttgtaggcagtttggtggtgagtttgtgctgcaggctgcctgtgggatgtcagcgttctggtatctgcctgagaacctgggctctgagacgcacaaccagtgca

SEQ ID NO: 260772 - DNA, 144 bp, Homo sapiens
  chr9:129645169-129645313
  hypo
acaggatctgttcacgtgtgaactgctgcgctacacatcagtgttaactccctacagattacactctaatcccgctgctcccgaggagcggctttgctaaatcgggtatatagtatatgcctttttcctcgtcaaactgcctaa

SEQ ID NO: 260773 - DNA, 38 bp, Homo sapiens
  chr9:129648781-129648819
  hypo
tgaatgagctaatgcgtgtctcccgaaggtcgcacgag

SEQ ID NO: 260774 - DNA, 40 bp, Homo sapiens
  chr9:129834459-129834499
  hypo
aatattccattgtaccgatgcaccacgtttaatttatcca

SEQ ID NO: 260775 - DNA, 36 bp, Homo sapiens
  chr9:130172835-130172871
  hypo
gattacaggcatgaaccaccgcgcccggcctcttgg

SEQ ID NO: 260776 - DNA, 192 bp, Homo sapiens
  chr9:130248341-130248533
  hypo
cttcctgtgtggcaggcactcggctaagcgatgaaccacattcgctgattgattctaggagggactgtattgttattagcccgatttcacaatcgcaactcaggttctgagaaactgtataacgcacccaaggaagcaagccagcaggtggcggagccaggatttgagcccggcagaggggaggggtgtgct

SEQ ID NO: 260777 - DNA, 190 bp, Homo sapiens
  chr9:130265601-130265791
  hypo
gccttcctgggaaggcgtgtggtgcaggcctgtgctcacagtggcaccagcaaccctgggtctccctctctgctgctccccagaaccccggggccctcctgctctccacaactgtccctccttaccccatgtagctcgatccgaagcaggagtgtcaataaacctgtcttcagtgcgcttctggcctgag

SEQ ID NO: 260778 - DNA, 167 bp, Homo sapiens; identical to SEQ ID NO: 213002
  chr9:130266739-130266906
  hypo

SEQ ID NO: 260779 - DNA, 273 bp, Homo sapiens
  chr9:130269317-130269590
  hypo
ggggactctccccagcgggggccccgttgagcagggggccggctggtggggggctctcaggccgcagaccttgggccagcaggcctcggatctcagtgacaccgtccggggacgcaggtggtggtgactcagggctagcctcaaagggcagccccacctcctcatcctggaccacagagaccacctgcttggcgcgccgtcgcttttccgagagggtggctgactccggggtgctggggctggggctgccgcccccgccgctgttgctgtact

SEQ ID NO: 260780 - DNA, 317 bp, Homo sapiens
  chr9:130270528-130270845
  hypo
gccctgagggtaggacgaggccagtggtctgacccaagcctccgagtcctcatccgcacaagaggaccatggcgcctccttgcagggacagcaatcctggtggtggccggggatgaggctcggggctcggcctcgcctaggacggtccggggcagggcgtggggccgctcaccttcagcacccgctccaggacccgctggatggacttgcacagctcctccttggtgggccccttccccagctcctggtgcaggagggtctcgaacgtatacacggcattgtccatttgctgcagggcataccgcggacatgtgaag

SEQ ID NO: 260781 - DNA, 198 bp, Homo sapiens; identical to SEQ ID NO: 213004
  chr9:130271243-130271441
  hypo

SEQ ID NO: 260782 - DNA, 163 bp, Homo sapiens; identical to SEQ ID NO: 213005
  chr9:130272563-130272726
  hypo

SEQ ID NO: 260783 - DNA, 71 bp, Homo sapiens
  chr9:130278830-130278901
  hypo
gctatacttgctgaacgtaaatgtactttaaaatgacacatggtaaaaatctgtgacgagtcagagatgaa

SEQ ID NO: 260784 - DNA, 69 bp, Homo sapiens; identical to SEQ ID NO: 213006
  chr9:130279231-130279300
  hypo

SEQ ID NO: 260785 - DNA, 326 bp, Homo sapiens
  chr9:130279874-130280200
  hypo
tgcaccccagtgcctcgtccagggtaggtgctcagatgcccagtaagtgatgaataagacagcgagtatctccacgtgcactggccctgcacttgtccaaatctaagcatgtcatctccttccaaaccggcagcgccccagagccccatctctgtaccccaccccctgccctcccctgctgggtccttgggtgacttctgaggtttcctcaccagcccgtctggcctcacctgcacctcgttcccacacagcatctcccaggtgccgtacagctccttggactgtcggtacatgcggatggcatctgtgaacgcagggccctctac

SEQ ID NO: 260786 - DNA, 37 bp, Homo sapiens
  chr9:130282274-130282311
  hypo
gtgaggcagagggccgggacagcgggagggaggccag

SEQ ID NO: 260787 - DNA, 34 bp, Homo sapiens
  chr9:130296359-130296393
  hypo
aagaagctgcagctcgcgtcccaactgggatttg

SEQ ID NO: 260788 - DNA, 203 bp, Homo sapiens
  chr9:130297782-130297985
  hypo
ggagtgcagggaccccgctgcctgtcagggtgggagctgaaggtcaaggctgaaggtcaggtccctggaccagcgcagtgctgcccacaggcctagggcctcgggctgaggggacccaggcaagggccaggggtccaggatgcagttccctctaggtttgtcacgttggccccaggtggggctggagtcgctcactatccagg

SEQ ID NO: 260789 - DNA, 41 bp, Homo sapiens
  chr9:130326064-130326105
  hypo
ttacaagcgtgagtcaccgcgcccagcagagaggtaagttt

SEQ ID NO: 260790 - DNA, 300 bp, Homo sapiens
  chr9:130327523-130327823
  hypo
agccaccacgcctggcctgtgcacacattacttttgcaattagacaaaatgttcagtggttgcctagatttaggagggactaggaggaaacaggagcgactactaaggagtagaggatttctttccgggctgatgaaaatgctccaacattgatggtggcaatggttgcgcaattctgtgaatatactaaaaaccgctgaagtgtacactttaggtggctgaattgtatggtaggtgaattacgcctcaataaagctattatttttggctgggcgtggtggctcacgcctataatcttgg

SEQ ID NO: 260791 - DNA, 180 bp, Homo sapiens
  chr9:130388085-130388265
  hypo
ctgggtgacagagcgagattctgtctcaaaaaaacaaaccaaccaaccaaaacaaacaaacaaaaaaatatacattctacaactgtagttgtgatcccctttctcattctatcctgtttgtgtattattttcatggaaatacttgctggaaacttacttattttactttcctttaaaaaa

SEQ ID NO: 260792 - DNA, 199 bp, Homo sapiens
  chr9:130438945-130439144
  hypo
aaactgatccagcacgcccagatacccccggaggatagtgagatcatcaccaacatggctcacctcggcgtgcccatcgtcaccgatgtaagaggccagctcagcttccgggggaggtgggaagggagctggcagatctgtctgcttctgctctgactgacatacagcatctctgatacacactcgtacgtcaagagag

SEQ ID NO: 260793 - DNA, 45 bp, Homo sapiens
  chr9:130440870-130440915
  hypo
gatgcttccagcttcacctgcggcgaggtgctgctgacttcacag

SEQ ID NO: 260794 - DNA, 191 bp, Homo sapiens
  chr9:130442501-130442692
  hypo
ttcagcaccaccgccgtcaggtaggtgaaaatcccttagcaaggacagaggggagccagctctggttggatgtcagctctgcggcagacccactgtacggctgtgtgatctaccagagccctctcgctgctgctccccacagctgcagcgtgggccaggtctgcacagtggtcccacggcccttccccctc

SEQ ID NO: 260795 - DNA, 162 bp, Homo sapiens; identical to SEQ ID NO: 213009
  chr9:130444669-130444831
  hypo

SEQ ID NO: 260796 - DNA, 191 bp, Homo sapiens; identical to SEQ ID NO: 213010
  chr9:130446345-130446536
  hypo

SEQ ID NO: 260797 - DNA, 33 bp, Homo sapiens; identical to SEQ ID NO: 213011
  chr9:130448210-130448243
  hypo

SEQ ID NO: 260798 - DNA, 201 bp, Homo sapiens
  chr9:130454485-130454686
  hypo
tcaaagtgctgtacgcgagctcggcgccacctccgcctccctttcagagcctgctccccgccctctctgctcgctgcattgtggtgttctcttctcaaggctttgaaatctccccttgcactgagattagtcgtcagatctctccccgtctccctcccaacttatacgacctgatttccttaggacggaaccgcaggcacc

SEQ ID NO: 260799 - DNA, 39 bp, Homo sapiens
  chr9:130494892-130494931
  hypo
aggaggatctcctcgcggtcccgccggctgcgccacgcc

SEQ ID NO: 260800 - DNA, 215 bp, Homo sapiens
  chr9:130496543-130496758
  hypo
gtgagaacagtggtcaaggacgcatccagcctaccttgtagcgctcgatgtggctggggtgggggaagtggaggacgggagaaaagtggtgcacgcgggggctgcggaggccgccctggaagaggtagtgcgccagcagggagctgacataggatttgccggtgccggtccagccgtgcagggagaggaccagcggcttggtgggggctgggtcc

SEQ ID NO: 260801 - DNA, 154 bp, Homo sapiens
  chr9:130536485-130536639
  hypo
cctcctgggcctgccgggcagcctgtgagttctgtgctttcttgatgctggggcgaggcatggtgcccatgtggctgtacatgtcactggagcgggcataggctgggggactcttgggcaccgtcaccatgtcatcctgcgtggcttcaaaggt

SEQ ID NO: 260802 - DNA, 345 bp, Homo sapiens; identical to SEQ ID NO: 213012
  chr9:130550821-130551166
  hypo

SEQ ID NO: 260803 - DNA, 36 bp, Homo sapiens
  chr9:130561820-130561856
  hypo
aaaagatgggggtctcgctatgtcacccaggctgga

SEQ ID NO: 260804 - DNA, 37 bp, Homo sapiens
  chr9:130563064-130563101
  hypo
ttgcgaagggctgggcgtggtggctcaagcatgtaat

SEQ ID NO: 260805 - DNA, 152 bp, Homo sapiens
  chr9:130587468-130587620
  hypo
ggagtttgggttttgtgtcccgggagctgcgcacaactcacccagatctgcatgttgtggttggcgtcgatgagccaggacacgtaggggggaccctgcaggatgaggacggcatcgagatccccgggtgcgcagctcagttccaccttcac

SEQ ID NO: 260806 - DNA, 40 bp, Homo sapiens; identical to SEQ ID NO: 213013
  chr9:130589225-130589265
  hypo

SEQ ID NO: 260807 - DNA, 93 bp, Homo sapiens; identical to SEQ ID NO: 213014
  chr9:130630679-130630772
  hypo

SEQ ID NO: 260808 - DNA, 215 bp, Homo sapiens
  chr9:130633162-130633377
  hypo
aggctccccctagcccttgccgacctctccctcctaggcccttgcagtcccgtttatttctcccatacagccttgtgacaccgaggtaaaagtgtatgtgtgtgcacagggccatgtgtgcgagcacgtgtgcattcctgcatatgtgtgctgcgtccgtgacatgcatgtgcaggagtgcagtatccactgccgtgtgtgtgcatgtgtgcaca

SEQ ID NO: 260809 - DNA, 185 bp, Homo sapiens; identical to SEQ ID NO: 213015
  chr9:130635124-130635309
  hypo

SEQ ID NO: 260810 - DNA, 262 bp, Homo sapiens
  chr9:130637217-130637479
  hypo
agtgaggatggcaccgagggacataaacagcggccacacaactgcagagctgctcccctcgaaactcccagaaaacagggcgcagggccagcgtctgcccagacaccttgacaacgctccccagggccagagggaagctgccaggaggtgggaggtggccaggaactatgtgtgtctgggatgaggtttggatggggatcctctaagggacagaggcctggggtgaaggaatctacaggagccgctcgcatgaacacagccc

SEQ ID NO: 260811 - DNA, 48 bp, Homo sapiens
  chr9:130674526-130674574
  hypo
caggcaggccccaggctcaccggttcttgcccgtctcgtcctggaaga

SEQ ID NO: 260812 - DNA, 79 bp, Homo sapiens
  chr9:130675504-130675583
  hypo
gtggcctgaagccaagtcaccggcctctgtgcgcctcaagtctctcatctataaaatggggaagaaaacaacatctggg

SEQ ID NO: 260813 - DNA, 165 bp, Homo sapiens
  chr9:130676088-130676253
  hypo
ggctagggcaggcacatggacggggtgctcggcggccacacctactgcacactgctgcagctcaccaggatgtaccccggcctgcaggtgtacaccttcaccgagcgcatgatggcctactgtgaccagatcttccaggacgagacaggcaagaaccggtggcgg

SEQ ID NO: 260814 - DNA, 154 bp, Homo sapiens
  chr9:130712703-130712857
  hypo
taaggatggagttgtcctggcgagtgttcttcgtgtcatatccctcgagcaggcagcagcgcaccgtggagcccgagcccgcaaactcggccaggttcaagtcagcgaagcccagctaggaggtgagaggagcgtgtgggagggctgagggagt

SEQ ID NO: 260815 - DNA, 107 bp, Homo sapiens
  chr9:130716085-130716192
  hypo
tgcgcacagacacacggaagacacaggggtccagcaggccggtggccgggttagcactcatcttacacacgaaggtgaacctctttcgccaccgcacacagttctcc

SEQ ID NO: 260816 - DNA, 104 bp, Homo sapiens; identical to SEQ ID NO: 213020
  chr9:130737468-130737572
  hypo

SEQ ID NO: 260817 - DNA, 31 bp, Homo sapiens
  chr9:130744755-130744786
  hypo
cgtgagccacgaggcaaggcccagatttgct

SEQ ID NO: 260818 - DNA, 124 bp, Homo sapiens; identical to SEQ ID NO: 213021
  chr9:130868765-130868889
  hypo

SEQ ID NO: 260819 - DNA, 48 bp, Homo sapiens
  chr9:130877183-130877231
  hypo
ggggagtgaagctgcggcgggctctgctggggccgcccaccaggaact

SEQ ID NO: 260820 - DNA, 104 bp, Homo sapiens
  chr9:130878928-130879032
  hypo
agcttcataaatagacccctcgaatattgactctgtgtatcgtcatccaaaacaccttcccagccctggccttacccgcccacggaggtttactaatgccattt

SEQ ID NO: 260821 - DNA, 142 bp, Homo sapiens
  chr9:130906607-130906749
  hypo
gtctctgggtgttctcggcatctcctgctgctctgccgctggcactgccctcccttcccctcacccaactctgcactggtccaagttgtcccctccttttgaaggtggacacgctttccctttggagcgagatctggtcctc

SEQ ID NO: 260822 - DNA, 262 bp, Homo sapiens; identical to SEQ ID NO: 213022
  chr9:130907016-130907278
  hypo

SEQ ID NO: 260823 - DNA, 317 bp, Homo sapiens
  chr9:130914350-130914667
  hypo
agtgggaggggaggccggtcccccatgaggaagggatctgaggcctcatctactcattcaacgatatttatgtggtgtctgccagccactcactggccatcttggtcacagggagaaccaaggagctgacttcggaactaaaggagaacttcatccgcttctccaaatctctgggcctccctgaaaaccacatcgtcttccctgtcccaatcggtaatggccagtctggatgaggggacggggacatggggactgttcaggcaggatgcttccctaccagggatcagggagaggagggactccgtcctcagcttcag

SEQ ID NO: 260824 - DNA, 121 bp, Homo sapiens
  chr9:130945587-130945708
  hypo
ggcgcaggaccaaccgcaccccaatctctaagcctgggtttttccatacgtaaaaaaatgagggcagggcgggttagacactagaccagatctgtgatgacaggcccgttggaaggctgga

SEQ ID NO: 260825 - DNA, 163 bp, Homo sapiens
  chr9:131048963-131049126
  hypo
catccaggattccacggcagggagggcttctctgtgtttcactggacgatgggccccagaggaggagaggaaaaaactggaggtgggaactatagatggatgaaaagagcggggtgatcagggcccaagaagatgggggtgtgaggggagtgtagcctagtgg

SEQ ID NO: 260826 - DNA, 41 bp, Homo sapiens
  chr9:131060966-131061007
  hypo
ggtgttcttgctacattgctctgtgcgcgtaccttgatggt

SEQ ID NO: 260827 - DNA, 85 bp, Homo sapiens
  chr9:131061249-131061334
  hypo
caccagcaaacctgcgcagctggtttgccagggaggagcaagacctgttttcccatcttagggctcttctcgcttctgatttcat

SEQ ID NO: 260828 - DNA, 83 bp, Homo sapiens; identical to SEQ ID NO: 226543
  chr9:131132510-131132593
  hypo

SEQ ID NO: 260829 - DNA, 82 bp, Homo sapiens
  chr9:131145992-131146074
  hypo
atgagggtctgttacgcctgcgagtcaatatcagatacgactttgaggttgttccgtttcagtcccacgaggctgaggctga

SEQ ID NO: 260830 - DNA, 167 bp, Homo sapiens
  chr9:131217228-131217395
  hypo
agtatactgtgaaagcgaggcggaaaagcaggttttgtttgcgagtctgactttaggattgcaggtgaaacacttgtgtgaccctggagctgtgtggctaaggtgctgcggggtcactggagaaaggtcaagggactgtggcccagttggcccggaggtggttcagg

SEQ ID NO: 260831 - DNA, 179 bp, Homo sapiens
  chr9:131396613-131396792
  hypo
ggagtacaggtggacatgcccgtcagtcccagcgctcaggaagagattcctagacgggatgcagggggccaggcaagggaatcagtgctggggtctgggtggtgctggcccccaacaccagacccctcctgggctgccaggctcgtgaagagcctcccgggtccctcagcctggagttg

SEQ ID NO: 260832 - DNA, 138 bp, Homo sapiens
  chr9:131399186-131399324
  hypo
tgccactcaccggccgtaggcacaggccaccacagagccagtggagttccaggagatgctggtcacatgcagaccctgcgcttgggctggcgggtagcccagggtatacagacaagacacctgcggagacgtccccaa

SEQ ID NO: 260833 - DNA, 147 bp, Homo sapiens; identical to SEQ ID NO: 213026
  chr9:131411426-131411573
  hypo

SEQ ID NO: 260834 - DNA, 146 bp, Homo sapiens
  chr9:131417339-131417485
  hypo
tcaagctgaaagtccgcacagaccccttgggagaggccttgagcacgcagcatctcatctcatcagagcatctcctttcgtgtgcgtttgattaaacacctggaaaactggcttatctagaatttacaatgcagtttggtcattta

SEQ ID NO: 260835 - DNA, 40 bp, Homo sapiens
  chr9:131461564-131461604
  hypo
cctctcaaagtgttgggattacaggcgagccgccgcgccc

SEQ ID NO: 260836 - DNA, 204 bp, Homo sapiens; identical to SEQ ID NO: 213027
  chr9:131483897-131484101
  hypo

SEQ ID NO: 260837 - DNA, 36 bp, Homo sapiens; identical to SEQ ID NO: 213028
  chr9:131574473-131574509
  hypo

SEQ ID NO: 260838 - DNA, 154 bp, Homo sapiens
  chr9:131579962-131580116
  hypo
cctttttaaggcttcgcttgtactgtactgtcaagctgttttttggaatattcgccccaggtttctgttccagccagcagccagcatcagccgtctgcatccttgtcctcaaactgctgttaattaaaatctttgccaatctgggccgggcgcg

SEQ ID NO: 260839 - DNA, 174 bp, Homo sapiens
  chr9:131600339-131600513
  hypo
gacacaaacacaggacgaccccctgccatcattgtcatgggctcgtagcagtcaaaaaagggttcgatgatgatgacctgatataagggtcaaatcagctggagtcagcatggccctgacctctcagtcccactcagcccaagtcttgcccactcacctcgtctccttcgtcca

SEQ ID NO: 260840 - DNA, 135 bp, Homo sapiens
  chr9:131607624-131607759
  hypo
ggctcaccaggggttgtagtcgatcccgtctagccttcgggcctgcagctgtttggccatggcgagctggagacgaacaagtggaaggtcagagatggaatctgtctgggtgcagcagtccgagcttgcacacag

SEQ ID NO: 260841 - DNA, 155 bp, Homo sapiens
  chr9:131647361-131647516
  hypo
tctcccagctcctggctccccgaaacccgtgtcgtagtgatcacagctttccctaccctgccactcccatgcacagttctgcacagtgtctggcgcatatggagtagatgctcaccagaggctggttgactgtcggagatgatgggtggatttgg

SEQ ID NO: 260842 - DNA, 580 bp, Homo sapiens
  chr9:131652561-131653141
  hypo
tctgttgcgtcttgcgtcttgcagcaagtttgtctacatctaaacgtctcttgagggcttaaaacctcaaaattaaattgcttgctgcaatctaagcctcacgcctagagcaatgttccagtggagtaaaagtggctgtaaaattccatagctttcacgtgccacctggacgccgtcagagtgccactgccaaacctgcgccctctgacgggcagcatgacaaacgcactgaccagcagcgggggcggtgggcgggaatcctggccctgaagggacacctcgcatctcccagctgactccatgagtcaggatccctgggggtagcccccttccatcccagagagtcgggtaccaggcagctcaccctctgtcagaccccccagtcctccccctggctcacctagggcttggccagtgcccactcccctgggatctcagcagaagatgtgtctgctgcctctctagggtactggtggccacatttcataacctgtctaagaaggcagcgctggtattcataacaggttaagacctgtaaaccgtgtgtggccgtgactccatgtgcaaatatgagccaaca

SEQ ID NO: 260843 - DNA, 108 bp, Homo sapiens; identical to SEQ ID NO: 213031
  chr9:131675067-131675175
  hypo

SEQ ID NO: 260844 - DNA, 98 bp, Homo sapiens
  chr9:131749119-131749217
  hypo
ctgaacctgtgccacgagacagacctgcacagcaggtaatgaagggttgattactagagcttggtgctcgccaaggcaagacacgggcttttgctgtg

SEQ ID NO: 260845 - DNA, 260 bp, Homo sapiens
  chr9:131770315-131770575
  hypo
ctcgcacacaaggacggtttattggctagagagcaaacgcaggcagaagtaaaaacaccagataaaaagtgagtgtggagaggtgaagactgcggccgctggacttggcttgagctgtgaggggtgggaggggaggatagcaccggaagatgctgctccgggcccaacaccagccctggccaggctctcccctcccaggggcagcgcccagtccccaggggctgccagagccctgtgtgccttgccgcattcccctgatg

SEQ ID NO: 260846 - DNA, 112 bp, Homo sapiens; identical to SEQ ID NO: 213033
  chr9:131776674-131776786
  hypo

SEQ ID NO: 260847 - DNA, 282 bp, Homo sapiens
  chr9:131821424-131821706
  hypo
tatggcagccagagtcacagcggaaggagtttgcagagaagctggagtccctgctgcaccgtgcctaccacctgcaggaggagttcggctccaccttccccgcagacagcatgctgctagacctcggtgagctgggcccagtgcaggtggggtgggcgtggagggtggcagggatggaggtgaggagaagttgcgagaaccgggtcgtggttctctcagtgcgtccaatgaatcagaatccccagggctctccgacctcgcgtgatccagcaccttatggca

SEQ ID NO: 260848 - DNA, 256 bp, Homo sapiens
  chr9:131822134-131822390
  hypo
tgccagtggagacacagaaccggagtgggtcggccgagccacgcaccctgccctggcttctccccacgtgctctgggtgtggtttctctgttggaggaatctgcctcctctggcctccctacatggcagaaagggctgggggacctttagggtggcccgccgcaggtctgtggcctttgcttatttgctcgacaatcctttcctgagcacccttggaggtccacacccctcagcccttgggcgagcacggagggga

SEQ ID NO: 260849 - DNA, 184 bp, Homo sapiens
  chr9:131854103-131854287
  hypo
tatctgcagggaacaggaaactataaggcgagccctggcctcgaatcatagctaaaaaacaaggatccgagaggtagatttaacagcagatgagagagagttaaaaaggaaaagcaaactggagggtgtgtcagaagacatcccggctgcagtgtggagtgggaaagctaccgggagcagcttc

SEQ ID NO: 260850 - DNA, 146 bp, Homo sapiens
  chr9:131854317-131854463
  hypo
ttcacttcatccacactcacctgcttaccctgaccccgctccaacctgcccaaggtgcggtgctgggcagaagcccaactcttcaagccctcagaagcctctttgaaatatccacttttcgcggctgggcgcggtggctcacgcct

SEQ ID NO: 260851 - DNA, 232 bp, Homo sapiens
  chr9:131870087-131870319
  hypo
ctcacccagttctccgtcttcctggcccgacgctccagccccttctgcaggcgctcccctacacctcctgaggcctgaaactcatccaccagctgcttggtgtgggcccactcctcctcactcacgatgggctgcagcgccttcaggtagtggtccagggactgctggagagggggcacgggcagccgtggcagtgcatcctggtgtgccttgaagcggctggaagccttca

SEQ ID NO: 260852 - DNA, 125 bp, Homo sapiens
  chr9:131870880-131871005
  hypo
gggcagtgctgtggcgagagagccgggtggcctggcatggagggtgagaggcggcagagagagaaagagaaagtccaggaggccctggagtgggcagagacaggagggcccgaggctgctcttgc

SEQ ID NO: 260853 - DNA, 36 bp, Homo sapiens
  chr9:131897374-131897410
  hypo
gaaagaattgtcacataggccgggcgcggtggctca

SEQ ID NO: 260854 - DNA, 157 bp, Homo sapiens
  chr9:131919404-131919561
  hypo
gcatggtggggtacccggagctgggcaagggaaagattggctatggccacgtggctccttgttctccccaaggcagtctgtctctgcggacagccatcaggccccaaatccaggcgtcatcctttttattttttgagacaggatcttgctctgtcac

SEQ ID NO: 260855 - DNA, 227 bp, Homo sapiens
  chr9:132004480-132004707
  hypo
acctggtcacaattacggaagacaaggtggggctgggggctggttattttacagatgaggagacccgagaccagagagggaccgtgactgcccaaggtcacatagatctttggcctaacttgacacagcattcattcacagcctgagcaccgctctacggagctcctggacagatctgcgtgtcccctcctgggagtcccatccactggagccgcagagtgggggca

SEQ ID NO: 260856 - DNA, 297 bp, Homo sapiens
  chr9:132071027-132071324
  hypo
actgtgcctgctcccgcaacgtccctgtagaaatgagcacatctgagtgtcctacccagtgccaggctggcttagcgtggatgcccccggcacacagctctcttccttttctcggcacctccgccgctctctaaatcccctgggaacatcgggaacactctccggtgttgctttacacctgtttttacttgcctcccgctctccagccaaggagtgggctggattcacgatgacgttcacctttgtcacttgaaggcaaaactggtatcaagtttgttgcctcgtgatgaccatgga

SEQ ID NO: 260857 - DNA, 196 bp, Homo sapiens; identical to SEQ ID NO: 213038
  chr9:132112539-132112735
  hypo

SEQ ID NO: 260858 - DNA, 240 bp, Homo sapiens
  chr9:132123266-132123506
  hypo
cccaaagtgctgggattacaggggtgagccatctcgccaggctgcctctagacttttaacgaatgtgtggcgctcgctcgctgtacttcgagcacaggaggggaccctagagcgcaggtcccccccatacatactttgttttgtaacctgattcttccattcaccagcagaacgtgaacttccatgtcaccccaaaccctcgaccctcttgttcctcagaatgctccacaaattggctgc

SEQ ID NO: 260859 - DNA, 502 bp, Homo sapiens
  chr9:132162536-132163038
  hypo
ccacccctagtttgcgggtgaggaaactgaggcccagagacctgagtcagtgcgtggcatacattgaagcaaatttgaagaggctcagcctcggtgggtggctgcgtgctggtgaattgtgactgagggggcacacagggacagggacggtgctcagggcaggcctctcggggggttttgagctggggcccaatggaccaagtgttggctctgggccgggcacggggctttttttggcaggcgtctcacttctgggtagcctgcccgtggctgcattctagagaccaggagactgaggcccacagagcttacgaggcagcctgcgttctcagggttggggagagtagccaggggctcggacctcgccgtgccacactcgcccgtccaccatgccgccctgttctcacaaggccatggcgctcccagcacacaggaggagcccagatgggaaagggctggagcatgaacgtgacgaggccttgccttcggaggggtgaaggtc

SEQ ID NO: 260860 - DNA, 218 bp, Homo sapiens; identical to SEQ ID NO: 213040
  chr9:132163279-132163497
  hypo

SEQ ID NO: 260861 - DNA, 271 bp, Homo sapiens
  chr9:132166918-132167189
  hypo
cctgggtttgaatctcgccccctttcacaagctgtgcaactttgaggggcgactgaccccctccccctccctaagggggtgatgcggccacctgccctcaggacccagtggggcctccatatagccagtcgggggggtggggacagcccagtgcttccaggtacggctgtagagtcagccctgggttcaagtcctgacactttcagtagaggaagggggcagggctgggggtgagcctcctcgccccgtgtgggcccgggccctcccctgc

SEQ ID NO: 260862 - DNA, 169 bp, Homo sapiens
  chr9:132189584-132189753
  hypo
gctctgaagcaggggcgtggtgagactggcgggcggcgggggggttagatgacacctctactgctgcatggggaactggagtaggaggaaaggctgggagctgagggagcatctgaacaagacatggtggctggggtcaggctggggggggtggcggtcatggggatct

SEQ ID NO: 260863 - DNA, 47 bp, Homo sapiens; identical to SEQ ID NO: 213041
  chr9:132211772-132211819
  hypo

SEQ ID NO: 260864 - DNA, 626 bp, Homo sapiens
  chr9:132230761-132231387
  hypo
tgtgcatgtgtgtctcgtgtaggtgtgtgcacagtgtacaactgtgtgcaagtgtgtacagtgtttctgcatgtgtgcagagtgtacctgtgtgtgtgcgtgtggacagtgtgcaccggcgtgacactgtgtcgaatgtgtgtgcacagtgtacctgtgtgtgtgcatgtggacagtgtgcaccggcgtgacactgtgtctagtgtgcaccgtgtacctgtgtgtgtgtgtgtggacagtgtgcaccgtgtacctgtgtgtgtgtgtggacagtgtgcaccggcgtgacactgtgtcgaatgtgtgtgcacagtgtacctgtgtgtgtgcatgtggacagtgtgcaccggcgtgacactgtgtctagtgtgcacagtgtacctgtgtgtgcatgtggacagtgtgcacagtgtacctgtgtgtgtgtgtgtggacagtgtgcaccagcgtgacactgtgtcaaatgtgtgtgcacagtgtacctgtgtgtgtgcatgtggacagtgtgcaccggcgtgacactgtgtctagtgtgcacagtgtacgtgtgtgtgtgtgtggacagtgtgcaccgtgtacctgtgtgtgtgtgtgtggacagtgtgcaccggcgtgacactgtgtcg

SEQ ID NO: 260865 - DNA, 36 bp, Homo sapiens
  chr9:132285635-132285671
  hypo
ccacagcatctaatccggagccggcagaggcccctt

SEQ ID NO: 260866 - DNA, 42 bp, Homo sapiens
  chr9:132356355-132356397
  hypo
gagtgtatagggattaggaacgactgggtgtgtagggatgac

SEQ ID NO: 260867 - DNA, 199 bp, Homo sapiens
  chr9:132370722-132370921
  hypo
ttataagggcaggaatcccacttgtgagggctccaccctcatgacctgatcacccctcaacggccccacctcctcaaaccatcacatcagacctggggttccagcatatgaattttggggggacacgttcagtccataacagagctgaatgagccgcctgcagaatggcaatcggcccgtggggcagctgccatccctg

SEQ ID NO: 260868 - DNA, 354 bp, Homo sapiens
  chr9:132393701-132394055
  hypo
cgcccaactgtcatcgctgtcctgaagggtgaggtgggcctgggctctgctgccaggacccagctgaggctttctagttctctctccttctaccgtggcaaccgtctcctcatccccctgccatctccaccgccgccagcagtcttcagaagcatcggtcttcccgggccactctctgttgggcctcagggtggttgactcattgctctgtaggatgcagtcgaaactgctagagttgactgtgagaccaggaactggcagccgcgagggctgtctgtccttccctccaggagcagtgccgtcgccctccacctactgcgcttattcttgcccatccatcggtttcagcttacg

SEQ ID NO: 260869 - DNA, 539 bp, Homo sapiens
  chr9:132402739-132403278
  hypo
gccaaggctggggacatgggcgcccacccagcgtcgggccgcgtttaagccacctgcccacccccggggctctcgctgaccttcaaagttgagattggccccatgccgcaagagaacgtcggccgcccgcgtcagccccagctcagccatcttgagcagggcgttgctcacgccttcctggtaaaagggagagtgggctttcctctccagcagctcagtgagaacaaggattcggctctcctcgctggcgacataactgggcctgggacaggagagaggctgagggtaggcacagctgtgggaccgggtgaccgcgcagcctgtgggttggtgggctttagtcctgctatcatcatcagcaagcagggccctggctctgtgggtcacaggggcttgggggaagctctgaagtagagagagggccacgctgcatctcttaatacgggagcagactgggatttgcggagaatgggctgggtctgtctgcgctctcctcccgcgttgcccagagtccggtcgcagacttaggtacaaagcct

SEQ ID NO: 260870 - DNA, 42 bp, Homo sapiens
  chr9:132408623-132408665
  hypo
gtgcaacttttccacgcttcctgcctccgagactcgagtgtc

SEQ ID NO: 260871 - DNA, 101 bp, Homo sapiens
  chr9:132409736-132409837
  hypo
tcctcccgagtggccgtgagtccacccgcccacccgcccaggctggctgtaggaatggccaatcggcagcaactgtggtctctgctcgagtgtgtcctact

SEQ ID NO: 260872 - DNA, 168 bp, Homo sapiens
  chr9:132411516-132411684
  hypo
cctgggacgggatgccgcaggacccctctttctctactgttcccccatgcccacatggaaggccctgcctggtccccgcctctcccaggtgaggtaagtcagcagcccagagcagggtgggaaggtgctgagcgccccgggggtctcgccctgcgtctggagggaggc

SEQ ID NO: 260873 - DNA, 137 bp, Homo sapiens
  chr9:132411887-132412024
  hypo
cgggggcagatcctcgcctactaaactcgggtcagcctgcccccgcttctcccaagcccggcgaggagatcccagctcgggctcgccttctctaaaccttgctcattctgcccagtggaggccggggagggcgccca

SEQ ID NO: 260874 - DNA, 37 bp, Homo sapiens
  chr9:132412333-132412370
  hypo
aggaagaatccggtcggccatccgtcagggagacgga

SEQ ID NO: 260875 - DNA, 42 bp, Homo sapiens
  chr9:132448117-132448159
  hypo
cacagccctgagggcgcagagggaacccggttcttggtgcag

SEQ ID NO: 260876 - DNA, 84 bp, Homo sapiens
  chr9:132451960-132452044
  hypo
gccaggcctcactccgaacctgtggagtccgactctccggggtgggggcgggggcttggcatcttattttgcttatttatttat

SEQ ID NO: 260877 - DNA, 136 bp, Homo sapiens
  chr9:132471798-132471934
  hypo
tggcccatgcctctcgctcttgtgtgctgtgccgaggccggggaagccatgggatggggccccctggggacctgtctgactcctcgggccccactgcggcttccatcatcaccttccttcccgggatgtgtttctc

SEQ ID NO: 260878 - DNA, 209 bp, Homo sapiens
  chr9:132495391-132495600
  hypo
agtcccagagcgcccggagcccggcctgggtcagcctccgcatggtgattcctggaggggttgatgtttctcttgtgagctcttgtgagctttcctgtagtttctaaacctgtgacatcgaccattacttgcaagtacatataattaacaagttcagaaacttaaacaagcctttctttaagacagagtctcgctctgtcacccaggct

SEQ ID NO: 260879 - DNA, 322 bp, Homo sapiens; identical to SEQ ID NO: 213045
  chr9:132501746-132502068
  hypo

SEQ ID NO: 260880 - DNA, 96 bp, Homo sapiens; identical to SEQ ID NO: 213046
  chr9:132509434-132509530
  hypo

SEQ ID NO: 260881 - DNA, 94 bp, Homo sapiens; identical to SEQ ID NO: 213047
  chr9:132604072-132604166
  hypo

SEQ ID NO: 260882 - DNA, 202 bp, Homo sapiens
  chr9:132631149-132631351
  hypo
atgatgctcacctacgcagctcctctcgcccctgcagccccgtccaccaccacgagggccatgccaagctgtctagcagcccccctcgtgcaagccccgtgaggatggcaccgtcgtacgtgctcaagaaaggttcggggggcacgggagggtgggtcagcttgaggctgggagtacagattacgcccgtagctgcctttct

SEQ ID NO: 260883 - DNA, 305 bp, Homo sapiens; identical to SEQ ID NO: 213048
  chr9:132633590-132633895
  hypo

SEQ ID NO: 260884 - DNA, 202 bp, Homo sapiens; identical to SEQ ID NO: 213049
  chr9:132636600-132636802
  hypo

SEQ ID NO: 260885 - DNA, 53 bp, Homo sapiens; identical to SEQ ID NO: 213050
  chr9:132638505-132638558
  hypo

SEQ ID NO: 260886 - DNA, 281 bp, Homo sapiens
  chr9:132643742-132644023
  hypo
aggatcaaagcagacggggcgtgggtggggaaggggctctgggaccagaccccccacactactgcgtctttgtttctatcagtctttgtagaagcaggtggtggtggaaattccagcaggtgggtcccgcagaggccctgaggcctcacttttcggatcttctgtcccagatcctgctccctccctgctgagcctggggttcccctggcattggccccagccttctgaaagccggcgctgcagccagaggccgcacgctgcactgtcgcgacgcagagagg

SEQ ID NO: 260887 - DNA, 120 bp, Homo sapiens
  chr9:132814992-132815112
  hypo
gcgaatcaccaccctgccaggcctcatttcgtttttagtacagtattatattcaaatttaaaaccagagattttcaaagatgccacttaactttaaaagataaaaagtactccaaagcag

SEQ ID NO: 260888 - DNA, 130 bp, Homo sapiens; identical to SEQ ID NO: 213054
  chr9:132821045-132821175
  hypo

SEQ ID NO: 260889 - DNA, 58 bp, Homo sapiens
  chr9:132850526-132850584
  hypo
gccttgctttttctcggacagatcaggctttaggctctgctctcgctgttcccacagg

SEQ ID NO: 260890 - DNA, 492 bp, Homo sapiens; identical to SEQ ID NO: 213055
  chr9:132874115-132874607
  hypo

SEQ ID NO: 260891 - DNA, 93 bp, Homo sapiens; identical to SEQ ID NO: 213056
  chr9:132874637-132874730
  hypo

SEQ ID NO: 260892 - DNA, 506 bp, Homo sapiens
  chr9:132881038-132881544
  hypo
acttaaagctcttccgatgattctgttgctcacccccattaagaaccattgctataaaggaattctcctccacatgaggaggtcgatgcctggagacagaggcagcaggccaagggcaggcacacccagctgagatggggcagggctggaaggcaggcctcctggatcctgcctggggccttgtctctctccccacactcattctttcaccgtatttgctgctcctcatggtgaggtcagaaatagcccgcccagccttggtgagccttcgctcccacaggagcccaacacccagcccgccacagtccggtgagcagcaggctgtcggtgttcctaagtcagggaaatctttggaagaacaatggagggagtcgtgggaccccaggctgcgacctgctgcctggctgctcactgcatcatgctggtttcaccctgctcagagcgggctccacccctgctcggcatcctgactcatcctatgcatatggcagcgctgcttgcaggag

SEQ ID NO: 260893 - DNA, 88 bp, Homo sapiens
  chr9:132881756-132881844
  hypo
ctaagggcgggcatcgttacttctgccttaacaggtgaagaaaccgaggctcagagagggttagctgacttatcggaggccacacagc

SEQ ID NO: 260894 - DNA, 63 bp, Homo sapiens; identical to SEQ ID NO: 213060
  chr9:133223968-133224031
  hypo

SEQ ID NO: 260895 - DNA, 329 bp, Homo sapiens
  chr9:133230037-133230366
  hypo
tgtttcacatggagtggggtcggtgaggggcttcagcgggcctgttgggctgagatgagagcaggctagcgtccagctgtggtccccaagccgccccctgcctcttttccagtcccacctaccatcgagggcgccggtggaagaccatacgtggtgaaggctgtggctgggaggcctgtggcgctggagtgcgtggccagaggccacccgtcccccaccctctcctggcaccacgaggggctgcccgtggcagagagcaacgagtcgcggctggagacagacgggagtgtgctgaggctggagagcccgggggaggcatccagtggcct

SEQ ID NO: 260896 - DNA, 198 bp, Homo sapiens
  chr9:133258530-133258728
  hypo
ggcgcgtgcagagccgtgcccagcactcagacatcaggcagccccctgagtcaccccatgtgcagacacagagctgcggggaccctgggagcccaacacacacagcacggccctccacaggggtgggggaggctcttgtcacatctggtttgctacagagaaccacccaacaccaacctcacacgcccgctcctgagc

SEQ ID NO: 260897 - DNA, 104 bp, Homo sapiens
  chr9:133264434-133264538
  hypo
tcacgcaggctccacgtggggcagaaaggtctgaaggtacagctcggagctggtcccttgtctggtggaaatccgtccacagcaggggccggcactgccagcca

SEQ ID NO: 260898 - DNA, 72 bp, Homo sapiens
  chr9:133265444-133265516
  hypo
tggacctgtgtcatcgcctctcgcgggtcaggtggctgcaggccccacctccctttgcgtccagctcttggc

SEQ ID NO: 260899 - DNA, 309 bp, Homo sapiens
  chr9:133266378-133266687
  hypo
acggtgtggtctcccgggggggccgcctccagctgagccgcctgcaaccggcccaggcgggcacctacacgtgcgtggctgagaacacccaggctgaggcccgcaaggacttcgtggtagcagtgctgggtaggtctgcgcctgcaccctcctgtcccactcccatggcagcccctgccatcacccagggcctcactgcacccctgcctcagtggccccccggatccggagctcgggcgtggcgcgggagcaccatgtcttggaagggcaggaggtgcggctggactgtgaggccgatgggcagccgcc

SEQ ID NO: 260900 - DNA, 149 bp, Homo sapiens
  chr9:133281384-133281533
  hypo
tgggccgggcccgccgccgcgtgcacctcaccatcctggtactgcctgtgttcaccaccctgcctggggaccgcagcctgcgccttggggacaggctgtggcttcgctgtgcagcccggggcagccccacccctcgcattggctggact

SEQ ID NO: 260901 - DNA, 154 bp, Homo sapiens
  chr9:133300387-133300541
  hypo
gtttgcaggggagctgctcacgatgacccaggtggcccggggtctggatcccgatggcctcctgctcctcgacgtggtggtcaatggcgttgtccccgagagcctggctgacgcagatcttcaagtgcaggtcgggggtcaagccctggggtgt

SEQ ID NO: 260902 - DNA, 376 bp, Homo sapiens
  chr9:133303487-133303863
  hypo
ggtgcccaaggggacgttgtctgcagccttgcattggaagctgcaggcccaaggactcgggtcccttggagtgggccctatgttttgggatagggagcaagacaatggaaagagctagcagaaggggtggggaccttcctgccagtggctcctgggcctgcggacgaagcctctgtggataggccgggccagggtcaggtggcgaggcacgcctggggatcatgttcacacagccgtctgccctgatctgcccccagatgtggacgagtgtgcgtgggatgctcacctctgccgagagggacagcgctgtgtgaacctgctcgggtcctaccgctgcctccccgactgtgggcctggcttccgggtggctgatggg

SEQ ID NO: 260903 - DNA, 104 bp, Homo sapiens; identical to SEQ ID NO: 213062
  chr9:133304439-133304543
  hypo

SEQ ID NO: 260904 - DNA, 159 bp, Homo sapiens; identical to SEQ ID NO: 213063
  chr9:133304981-133305140
  hypo

SEQ ID NO: 260905 - DNA, 235 bp, Homo sapiens
  chr9:133305757-133305992
  hypo
gccagaccctccttcgcgacggcaaggcctgcacctcactggagcggaatggacaaaatgtgaccaccgtcagccaccgaggccctctattgccctggctgcggccctgggcctcgatccccggtacctcctaccacgcctgggtctctctccgtccgggtcccatggccctgagcagtgtgggccgggcctggtgccctcctggtttcatcaggcagaacggagtctgcacagg

SEQ ID NO: 260906 - DNA, 251 bp, Homo sapiens
  chr9:133306770-133307021
  hypo
gtgaggaacctgtgtcagcacgcctgccgcaacactgagggcagctaccagtgcctgtgccccgccggctaccgtctgctccccagcgggaagaactgccagggtgagccgggctcaggccgccgcccaaacacccgtggggctagggcaggcagcgtgggatgggacatgtggcatcttacctactccgttcactccagccccttcacaactatcctgtgaggtggggcggggaggcaggctcagagggg

SEQ ID NO: 260907 - DNA, 111 bp, Homo sapiens
  chr9:133314399-133314510
  hypo
cttgggtggcagaggcgagaaacggaggcaggaggaagcccactccagggctctgtacacaggctgtatctatgcctttaggtggctgggggcattcgatgaggtcacatc

SEQ ID NO: 260908 - DNA, 43 bp, Homo sapiens
  chr9:133345459-133345502
  hypo
tcatcaagggtggtgcgggtccccagggcgacaagcctcatct

SEQ ID NO: 260909 - DNA, 259 bp, Homo sapiens
  chr9:133346156-133346415
  hypo
tgggacggacctcacgcgtccttccagccgccttacctccacctgtgctgtctctttcctgcagcaacacgggattcccatcccggtcactcccaagaacccgtggagcatggatgagaacctcatgcacatcaggtaaatcccaccctccacccatccttggtcctcccgggctcattccaaaggacggccacgcgctgccccaggacgtcctggtgacccccacaccagtggtccctgccctcggggagctgagagg

SEQ ID NO: 260910 - DNA, 395 bp, Homo sapiens
  chr9:133366613-133367008
  hypo
gctttccagcccggcgggattgcgaccccgaaaggaggattttagttacaaagtgagagagtcattaagacgtggcggaggagagagcacctggccgggctgctccggggcctccacggaggctgatcccaccgtggccgcggccacggctgccacttatcctgccatcttgctgctaggctctgagctgggcacctgatggggtattatctaatattagctgcgcagaggtgaggaaacggaggcccccaggtgaagacactcacccaggctctcctggctggtgatgggcagctttgagccggggacaggccagctgtagcggccaagttcccagttactccaacagattccaggatgctcgtgatcaaggggcacggcggcacagacagggg

SEQ ID NO: 260911 - DNA, 154 bp, Homo sapiens
  chr9:133408939-133409093
  hypo
caatgcttgtgactacgacttgcagaacagagacctctcttggtctcactcctgcgcccagcctcttgtggcctcactggccctggctgtggtccctcctgcccctcaggggtcccttcccacctcagaaccttccttttttttttttagacgg

SEQ ID NO: 260912 - DNA, 40 bp, Homo sapiens
  chr9:133421534-133421574
  hypo
agataaagtcttcgccgaggagtggtgccccagcttttca

SEQ ID NO: 260913 - DNA, 515 bp, Homo sapiens
  chr9:133426643-133427158
  hypo
caggcagatggcacaggtttctggctcacgctggtgccagctcagcgacagccctgtcagtgacccaaagccttcttggagacggtggttcctcagtgcccggtggccggctgtgggagtctgagacctattttgttcattatgaatgaaaagcagacgtgattttaaatgtcgtgctttggctgctagtgccgggtggagcagggccccagcgagcagtcacaccagataaaacatattatttaggagtgattggaaggcagacaagctgaaacattgtgcacggaagggctaccgcaattcgctcatgagcatcatagtcactttccccgggctcgtaggtggattcacatttagggcaatttccctcgcggtagctcagctccgtgagtgggctcgggcttgaggcttgaggacaagcgatttcccagccgagtgacttccagcctccacatagagcgcggggctcggtgaggcatggcttccctgaatcaaatccacgctgcccactgaga

SEQ ID NO: 260914 - DNA, 39 bp, Homo sapiens
  chr9:133433441-133433480
  hypo
gcggaggctgggcacggtggttcttgcctaaaatcccag

SEQ ID NO: 260915 - DNA, 80 bp, Homo sapiens
  chr9:133450277-133450357
  hypo
ggccaaaggtggaatcggggagatatacagtcactttcctgtcaacaatggacagcatatttgacggtggttccatgaaa

SEQ ID NO: 260916 - DNA, 124 bp, Homo sapiens
  chr9:133484750-133484874
  hypo
tgctctggtgggtccgtgacgaggcctgtggaggtaggaggctggatcctctccttcagatgcttatggtcttgggggtgggggggccggcgaggggggcaccagggggcgtctcctcccccgt

SEQ ID NO: 260917 - DNA, 172 bp, Homo sapiens
  chr9:133513743-133513915
  hypo
tggcctgtttgctttccattcgccggttcatccctctgcccctgcccgcggccgcccgagagggaaagaggattcctgcgggcctcgcccgtcatcttgcaccgcgtccacccgccttcgttggtgcacagtctagatgtctagctagttcgttaagctaattttatgttaa

SEQ ID NO: 260918 - DNA, 331 bp, Homo sapiens
  chr9:133527218-133527549
  hypo
tctagtgtcctccactgtggcgagaagaaggtctggttggacccgatgagaccaatgaaatccccaatgccaacttccgtcagcagatccggaagctgatcaaagatgggctgatcttgcgtcaccgcaagcctgtgacggtccattcccgggctcaatgctggaaaagcaccttggcccgccggaagggcaggcacttgggcataggtaagcggaggggtacagccaatgcctgaatgccagagaaggtcacgtggatgaggagactgaggattctgcgccggctgctcagaatcgaagaagattgatcgccacatgtatcacagcctgt

SEQ ID NO: 260919 - DNA, 33 bp, Homo sapiens
  chr9:133580976-133581009
  hypo
ttgtttttgagacagagtgtcgctgtgtcgcta

SEQ ID NO: 260920 - DNA, 88 bp, Homo sapiens
  chr9:133583814-133583902
  hypo
gacctcttgagactgtgcctcggtttttaaaaaaagtatcattctacagtattatacaggcatttttaaagtacagtgcattggccgg

SEQ ID NO: 260921 - DNA, 120 bp, Homo sapiens; identical to SEQ ID NO: 213065
  chr9:133585240-133585360
  hypo

SEQ ID NO: 260922 - DNA, 240 bp, Homo sapiens; identical to SEQ ID NO: 213066
  chr9:133592860-133593100
  hypo

SEQ ID NO: 260923 - DNA, 40 bp, Homo sapiens; identical to SEQ ID NO: 213067
  chr9:133606663-133606703
  hypo

SEQ ID NO: 260924 - DNA, 82 bp, Homo sapiens; identical to SEQ ID NO: 213068
  chr9:133609268-133609350
  hypo

SEQ ID NO: 260925 - DNA, 174 bp, Homo sapiens; identical to SEQ ID NO: 213069
  chr9:133641498-133641672
  hypo

SEQ ID NO: 260926 - DNA, 109 bp, Homo sapiens
  chr9:133738141-133738250
  hypo
tccttcagctctacgtctcctccgagagccgcttcaacaccctggccgagttggttcatcatcattcaacggtggccgacgggctcatcaccacgctccattatccagc

SEQ ID NO: 260927 - DNA, 34 bp, Homo sapiens
  chr9:133755899-133755933
  hypo
gctggggaaacaaggcgtccgtggggctgtgagt

SEQ ID NO: 260928 - DNA, 364 bp, Homo sapiens
  chr9:133759676-133760040
  hypo
gggtccccaatggagccctccgggagtccgggggctcaggcttccggtctccccacctgtggaagaagtccagcacgctgaccagcagccgcctagccaccggcgaggaggagggcggtggcagctccagcaagcgcttcctgcgctcttgctccgcctcctgcgttccccatggggccaaggacacggagtggaggtcagtcacgctgcctcgggacttgcagtccacgggaagacagtttgactcgtccacatttggagggcacaaaagtgagaagccggctctgcctcggaagagggcaggggagaacaggtctgaccaggtgacccgaggcacagtaacgcctccccccaggctggtgaa

SEQ ID NO: 260929 - DNA, 499 bp, Homo sapiens
  chr9:133760400-133760899
  hypo
gaaggctggaggaaagccctcgcagagcccgagccaggaggcggccggggaggcagtcctgggcgcaaagacaaaagccacgagtctggttgatgctgtgaacagtgacgctgccaagcccagccagccgggagagggcctcaaaaagcccgtgctcccggccactccaaagccacagtccgccaagccgtcggggacccccatcagcccagcccccgttccctccacgttgccatcagcatcctcggccctggcaggggaccagccgtcttccaccgccttcatccctctcatatcaacccgagtgtctcttcggaaaacccgccagcctccagagcggatcgccagcggcgccatcaccaagggcgtggtcctggacagcaccgaggcgctgtgcctcgccatctctaggaactccgagcagatggccagccacagcgcagtgctggaggccggcaaaaacctctacacgttctgcgtgagctatgtggattccatc

SEQ ID NO: 260930 - DNA, 523 bp, Homo sapiens
  chr9:133761107-133761630
  hypo
gcctgcagcacatgcgggctcgcccatacccgtgacagtggctgacaagggactagtgagtcagcaccttggcccaggagctctgcgccaggcagagctgagggccctgtggagtccagctctactacctacgtttgcaccgcctgccctcccgcaccttcctcctccccgctccgtctctgtcctcgaattttatctgtggagttcctgctccgtggactgcagtcggcatgccaggacccgccagccccgctcccacctagtgccccagactgagctctccaggccaggtgggaacggctgatgtggactgtctttttcatttttttctctctggagcccctcctcccccggctgggcctccttcttccacttctccaagaatggaagcctgaactgaggccttgtgtgtcaggccctctgcctgcactccctggccttgcccgtcgtgtgctgaagacatgtttcaagaaccgcatttcgggaagggcatgcacgggcatgcacacggctggtcactctg

SEQ ID NO: 260931 - DNA, 302 bp, Homo sapiens
  chr9:133767699-133768001
  hypo
gtaagttctcatctcagcagcggaagccagcccgggagtgagcagcatccgaccgccgcctctgacacgggatgggatgcaggagacaccaaaggcgcgtttgaaacagatgctttgcctggccccgggcctgcagccactcccggctgagcgtgggctctccccggggcagagaagttgttttccgaatgttccttgctcttaggaaacctgggaaggagcagccgagtggaagtgaaaagcacatgtgctgtgttcctccgcccctttgaccgactgccggttacagggatctagaggag

SEQ ID NO: 260932 - DNA, 351 bp, Homo sapiens
  chr9:133773572-133773923
  hypo
gccaggccccggcctcgcagacccctttaaccacatgtcactcccggactgggttccacagccggctcagccacagccagcctccacctcactgagcttcagatcctccgcctggctgggcatgacagcagtgcccgtgtggtggggtggggttgtcggggtggcatggtgcccgcttaggcagtgttcactgctgctgctagggagggcgcagggtggtggcccccatctaagcccgggtcccctgggctgttggcaactgccgctccggttctgctggccgaacccctcctgccctgggaagccgcttcccatgctgttgggcaccatttctcgcggaattgcatgagc

SEQ ID NO: 260933 - DNA, 548 bp, Homo sapiens
  chr9:133779434-133779982
  hypo
gacaaggtgcaccagtctagcggtcctcccggaccggccggatcttcatctcagagaacttgagtgagtactgccagccggtccaggaggaccactccacgccgtcggcataggaggcgtgcgcaccgcgcaggtactgcccattgaggttggacgtgtggcagttgcggtaccaccaggcaccgcggtagaaggcggcacagttgttctctgaatggtcgctgtcacggtccttggtggtgaacctcatgccgctgtgcttcaggagggagtcgcctgcgcaggggtgcacacaggtgtgggcacggggggcacgggtacacccactggtgttgcatgtgtgagcagacaccgagacactgcacgtgcacctggacgtgagtgcatacacgtacgcacgtgctctcacacatactgctgtgcacgcgtgcaagcgcacctgcccctccacacccgggtgtgtccatgcagctcacacgcacgcagtcccttctcgggcgtgcctggggctgcccctgggtctaggcggtctctatccctccccccag

SEQ ID NO: 260934 - DNA, 562 bp, Homo sapiens
  chr9:133799039-133799601
  hypo
gtaggaagctgctcggaatgcccgggttcaggtacacagcctcacggtccccggtgcctgccctgccgcccgcccagcctgggacactcaccgtccagccgccgccgtccgtgcgcatgtcacagtacacctggaagccggccgggtagtgggtgggaaagacagagtagacgccatcgtcctgctgtccgcttaggaggacgtccagacagtctcggggccgggagcctgagggaggcaaggctgtcagggtggctgcggccccagcacgttcctgcccagccccctggccaaactgtctgtccatcgataatgcatgtggggtcccatggggttgagagagcactggccttggagtccgaccttggctctgccactccctgctgtggctgggtgagagaatcaccctctctgggacttactctcctcatctggagaatggaccgagagggcttcagcgcaggccacatggaagtagggtcgggccctggagtctcatggctggggaaccctcaccccaacttccccgctccccagagctgggacccgaggcaccggagga

SEQ ID NO: 260935 - DNA, 211 bp, Homo sapiens
  chr9:133802158-133802369
  hypo
agattgaaccactgcactccagctgggtgacagagcgagacaaccgtgtctcaaaaaataaataaatgaattaaaataaaataaaatgggataacaaatgtactaacctcctggcgttatggggctgcaaagtgcctattaacgcggagcccagcacatggtataggcctatcactcctaccagaaaagggattttcggcccaacacagta

SEQ ID NO: 260936 - DNA, 257 bp, Homo sapiens
  chr9:133911551-133911808
  hypo
ggtgcaagtgcaacgggcatgccagcgagtgcggccccgacgtggcaggccagttggcctgccggtgccagcacaacaccaccggcacagactgtgagcgctgcctgcccttcttccaggaccgcccgtgggcccggggcaccgccgaggctgcccacgagtgtctgcgtgagtgtctgagtgtcacagggcatcagggacccgaggctggtgttgcaggcggggaaaggaactccccaaaacgtcgtggtgggggc

SEQ ID NO: 260937 - DNA, 113 bp, Homo sapiens
  chr9:133926312-133926425
  hypo
gggagcattgcgctcgtgctggtgattgattctggaggccgaatcggagtgcagccggggcatgtggccaccagctcccggggctccccgcttcaggccgcttctgcacaggt

SEQ ID NO: 260938 - DNA, 105 bp, Homo sapiens
  chr9:133927488-133927593
  hypo
gttccctaggaatttcgtgctcatgggcatcgtgaatgctacacatgagcagacggcagcctctctggtcacacgtgtgtgtatcccctccgttcaccctcggac

SEQ ID NO: 260939 - DNA, 107 bp, Homo sapiens
  chr9:133945093-133945200
  hypo
cagtgccacgagaacggcacatgcgtgtgcaggcctggcttcgagggctacaaatgtgaccgctgccacgacaacttcttcctcacggcagacggcacacactgcca

SEQ ID NO: 260940 - DNA, 54 bp, Homo sapiens
  chr9:133951050-133951104
  hypo
tcagtccttgaagtgcgtaacacagaaaggtggaaaaggcgtacctgtctttgt

SEQ ID NO: 260941 - DNA, 244 bp, Homo sapiens; identical to SEQ ID NO: 213078
  chr9:133967063-133967307
  hypo

SEQ ID NO: 260942 - DNA, 216 bp, Homo sapiens
  chr9:133967914-133968130
  hypo
gtcattgccttcaccggacgcttccctctcagggtcctgggactgcaccagatgccctgagggaatggcccaccctggcctgtacccacttcagcctgtgatctatccaaagagccaggcccaaaagcgcctaggtcagggtgctcaggctaccaggagcacgcctctgtgcccccggcaacccagttgacctttaattgacgctttccagaccag

SEQ ID NO: 260943 - DNA, 94 bp, Homo sapiens
  chr9:133982140-133982234
  hypo
taaatagggtcggccgcattgagaaggtgacattcggccgcattgagaaggtgacattgaggctgggtgtggtggctcacgcctgtgatgccag

SEQ ID NO: 260944 - DNA, 346 bp, Homo sapiens
  chr9:133987304-133987650
  hypo
cccctcactgcccacggggctcaggctggttcccgtccgccgctgcccaggccccgtcactcccgggccccgcacacaatcagctctttgtgagcaagccttgcctctccccctccccagcagagcgtctcaggagcccctgcggagaatggacgtttgtgtcaccgcagtggggcaggggggcagagtttctgcccattgaaacccggcagcacgggatgaaaagaaagcagggcctgggagccggcgcggggagaggggcagcataaaggtccctctgtttggggccctggcgcttggttcccagccagcacctcgaaaggagaggagccgggcacataggggg

SEQ ID NO: 260945 - DNA, 85 bp, Homo sapiens
  chr9:133987867-133987952
  hypo
catttgttggacgtcggcctgtgtgaagcacttctcgtgcggcgtggcgagctccccacatcaccccaatcggcctggaggaaga

SEQ ID NO: 260946 - DNA, 47 bp, Homo sapiens
  chr9:134110673-134110720
  hypo
aagctctgacaggagaggctcgtggcggagggcttagctttaaaggg

SEQ ID NO: 260947 - DNA, 145 bp, Homo sapiens
  chr9:134126663-134126808
  hypo
atgagtccaatgacagtgattgcggttaacacggatcaaaccttaggcactggctgcccacctcggtcaggctgcaaccaggaaggaggcagcccaccctccaagggacacgtggtccacatgagcagctcggccaggggccttt

SEQ ID NO: 260948 - DNA, 31 bp, Homo sapiens; identical to SEQ ID NO: 213080
  chr9:134132752-134132783
  hypo

SEQ ID NO: 260949 - DNA, 626 bp, Homo sapiens
  chr9:134135920-134136546
  hypo
tgttacaagtgagcgactgaaactgagaaaaaggagaggcaaggagaccagaggtcaccctgagggcgcacgtggggtctgtctgtcctgcttagatctcccctctccctgaaaggaagcaggtgccgagagccggggaggccttcccgggggcatcagcacagtgagatccgcccgctggagagggtagaatggttgtatcttgctgaatgactgaagagtgagtctgagttttgttttcagcggtattattatttgtgagtctaacctagcgggtggtcctggctgtcaccggtgcttgggcgggatcaccaccagcggctgcccgtacttgggccgccacatgaggacctgggcatcgttggcattgggcttgaccagggcgctgggcgggatgggctcattcttgctcaggattttgggctggtcctgggcgatgggctcccgcagccgggcgcgctggcccaggggccggttggggttcacctcgatgctgagctgcatgcgccagtgcagcgtctgcaggatgatcatgtcgttggtggaggtgttggtggccaccagccaggtggtgaagctctggtcccggtagatattggtgagcttggccacgttgctctcgctga

SEQ ID NO: 260950 - DNA, 225 bp, Homo sapiens
  chr9:134188222-134188447
  hypo
acgggcctggccatacgtcttccatatgtgtcattgtgatgaccttatccctattttacagatgaggaaactgaggctcagagagggaaacccatttccctaaggttgcccagcttggatgtggtggagccaggatcagaaaccaggcctgagtggccccagcgcagagaagccctccggaagacagaaacgcagggcacccgccaacctcggaatgaggctgaa

SEQ ID NO: 260951 - DNA, 152 bp, Homo sapiens
  chr9:134191189-134191341
  hypo
ctacagggcttcggcgctcttgggctcctggtcactgtggttcaactcctaagagagggagggaccccgggtttgtccccatccagctccaggaaagagacgttggctcgaggaatccgtctcaaggtcaaagagggcgaggtgagggcagg

SEQ ID NO: 260952 - DNA, 205 bp, Homo sapiens
  chr9:134191562-134191767
  hypo
gcgtcgatgctctgcgccagcgtatggagaggcagccgctgcagtctgtgccccccacagtctgtacattgaaatcccaaccaaaacacgagggtatgaagaggtgggcgtttggggtcattaggtcatgagggtgggcccacacgacgggattagtgcccttacaaaaaaggctccggatgccgggcgttgtggctcacgccgg

SEQ ID NO: 260953 - DNA, 154 bp, Homo sapiens
  chr9:134195896-134196050
  hypo
gctgagccctgggccggcagatgcgcgatgagtctcttaagggcctcacagggaacagggtgaatttcgttaagcaatcatctatttccctgattagtatgtgttttggttacacaagaatgcttttttatgatttaaaaaattaggggccggg

SEQ ID NO: 260954 - DNA, 112 bp, Homo sapiens
  chr9:134200644-134200756
  hypo
tttcttgggagagacgggccacgggactgcgtcctggttttcaggggcctggggcgcctgactctaccacccgcgctgtggaggccgaggcaaggctcgcctgcagatatgg

SEQ ID NO: 260955 - DNA, 91 bp, Homo sapiens
  chr9:134207874-134207965
  hypo
atatcagccaggcccagattcgaggcatagctccattacttagtggctttgacttaccgtgtaagactccatttcctcatctgtaaaatga

SEQ ID NO: 260956 - DNA, 32 bp, Homo sapiens
  chr9:134279022-134279054
  hypo
tgagccactgcgcctggcccatactttaaaaa

SEQ ID NO: 260957 - DNA, 258 bp, Homo sapiens
  chr9:134308039-134308297
  hypo
ttgctgcagcccggcgcatgccaccgcctgcaaacctgccaagcttgaagtctgaaaacaaaggaaacgaccccaacatcgtgatagtacccaaggacgggacgggatgggcaaacaagcaggatcagcaagacccaaagaggtaaacggaggaggcgggtggtgagtgggagctggcgctccaagggtggtcccggcatccttccctgtggcaaactaaccctaaccctttggctactgcagcgctagtcttgcagt

SEQ ID NO: 260958 - DNA, 120 bp, Homo sapiens
  chr9:134377410-134377530
  hypo
gcgtgagccaccgcccccggccctaggtccgttttaaatgcccttaccctcagccacttcaccgctagatgtatgtgcaagcaggatcgtggcatcgatgtttttcggcaaggaaactag

SEQ ID NO: 260959 - DNA, 184 bp, Homo sapiens; identical to SEQ ID NO: 213082
  chr9:134400291-134400475
  hypo

SEQ ID NO: 260960 - DNA, 31 bp, Homo sapiens
  chr9:134509059-134509090
  hypo
tccctacactagctcgcgtggcctaggcttg

SEQ ID NO: 260961 - DNA, 38 bp, Homo sapiens; identical to SEQ ID NO: 213083
  chr9:134688853-134688891
  hypo

SEQ ID NO: 260962 - DNA, 370 bp, Homo sapiens
  chr9:134731512-134731882
  hypo
ccacctttcatagacctcctcgctccattctgtcagttcctactgggcacccgggggattcaccgtaacccggccagcagacagtgtggggtaatggcgtcccggcctctggtggccacgggaagcattggcaagacggggtaacccggccagcagacagcgtggggtaacggcgtcccggcctctggtggccatgggaagcattgacaagacagaggggtcaagttctggctgagggttctggcttaggccacgttcgatgcggcacactcgggcacggcagggccagtcccttgctgctgaggagccccagagctcggccgtggccagcctggcagccagcccctccgtgtgctgctgtgtgaacccc

SEQ ID NO: 260963 - DNA, 186 bp, Homo sapiens; identical to SEQ ID NO: 213084
  chr9:134746467-134746653
  hypo

SEQ ID NO: 260964 - DNA, 337 bp, Homo sapiens
  chr9:134775011-134775348
  hypo
tcaatggctgttagcgtcctttctcttcggagtgtggtgcagcaggaagggtaacgtaacaggagccctcctggctctgccatcgagatggagcctggtgtgcgctctctagcagaccttccagccctcacatcgctctacaatgattccgattctcatgtgtctggcatgtgccagtttctaacgtatctgcatgcaccaggttgtagtgaccttgaactttttgatagactgataaagagatgcagcacatagaggccaatgggcatctttccacaaactagccaatgctggtcacagtcagaagcaaaacgcccaccgacgggggctacaggtc

SEQ ID NO: 260965 - DNA, 255 bp, Homo sapiens
  chr9:134818812-134819067
  hypo
gctgcctcccgagacggtgagcacggctagcgtctgcagcgggctctgcagtgcggcgccccactttgagagcagggctaaggacaggtaggaacagtgtgctcccctcctacacttccaccatatgttacactctgttctgtggcagaatcaaattactttaatttttacctttggaatataggcaaacaagcagtaacacagcagtggtgactagtttacacttgagcagacgcggcgcggaaagacattaat

SEQ ID NO: 260966 - DNA, 249 bp, Homo sapiens
  chr9:134836480-134836729
  hypo
tctgctgatctaaatgggtacgaaaacaaggaggctgagctcttgcttatcaacatttttaaccctccaaagtaagtgagggttttgcccactgggcaacagtcttgacactgaaacccatcacatgcccgtaaaaatggcccgcacgtggcatatgtcgcagcaggcaagaaggcaacacaatggctgcttgtttcagagacagaagcttgaagctgtctgggcggcggctctgggtaatcacatccc

SEQ ID NO: 260967 - DNA, 138 bp, Homo sapiens; identical to SEQ ID NO: 213086
  chr9:134902645-134902783
  hypo

SEQ ID NO: 260968 - DNA, 196 bp, Homo sapiens; identical to SEQ ID NO: 213087
  chr9:134903267-134903463
  hypo

SEQ ID NO: 260969 - DNA, 97 bp, Homo sapiens
  chr9:134929560-134929657
  hypo
aggtgtttgggtgagcggggcggatccctcatggcttggtgctgtcctggccatattgacgtctcctttaaaagtgtgcggcaccgccccgctcctc

SEQ ID NO: 260970 - DNA, 879 bp, Homo sapiens; identical to SEQ ID NO: 213089
  chr9:135048988-135049867
  hypo

SEQ ID NO: 260971 - DNA, 45 bp, Homo sapiens
  chr9:135084416-135084461
  hypo
gagtaggactgtgccgtgtgcactgcacaccgtggtctgtttacc

SEQ ID NO: 260972 - DNA, 162 bp, Homo sapiens
  chr9:135102284-135102446
  hypo
ctgcagtgcgagtgcgagcacaacaccaccggccccgactgcggcaagtgcaagaagaatttccgcacccggtcctggcgggccggctcctacctgccgctgccccatggctctcccaacgcctgtacgtgccatgccccggggccacgagcccacatggct

SEQ ID NO: 260973 - DNA, 100 bp, Homo sapiens; identical to SEQ ID NO: 213090
  chr9:135195997-135196097
  hypo

SEQ ID NO: 260974 - DNA, 144 bp, Homo sapiens; identical to SEQ ID NO: 213091
  chr9:135196474-135196618
  hypo

SEQ ID NO: 260975 - DNA, 39 bp, Homo sapiens
  chr9:135239755-135239794
  hypo
aagtatttgtcagtcgggcgcagtggctcatgcctgtaa

SEQ ID NO: 260976 - DNA, 344 bp, Homo sapiens; identical to SEQ ID NO: 213092
  chr9:135267104-135267448
  hypo

SEQ ID NO: 260977 - DNA, 246 bp, Homo sapiens; identical to SEQ ID NO: 213093
  chr9:135275314-135275560
  hypo

SEQ ID NO: 260978 - DNA, 343 bp, Homo sapiens
  chr9:135331489-135331832
  hypo
actatcctaggctccgttgaacgagacaggtgagctgcctctctcgtggttacatttgaatggagaaagacagacaataaatacacagccgaaaggtagcatcgcttatagtaagtggctgggtggggaaggcagctcagaatgggtgactgaggaggggctctgtccacagtagctgttgtcctgccccccatcttgacatctgctgcccctctcccagcctcatgtgccttgtcacgtgcctgtgcctgttcccatttgtaccccatcttcagccagcgcttgactcattcatcttcatattccctacggcgcctccttggtatggcgccaggcatgcggt

SEQ ID NO: 260979 - DNA, 209 bp, Homo sapiens
  chr9:135338502-135338711
  hypo
tgggcgggctgggaacggatggaaggtggccactctcaggtgctgtggatgacgtcgcaagtcagccaatctttgcgaaaggcacttttcagcaccaatgacattttaaaatgtgagtaccctttggcccagaaactccccagttaagatttaagctccagaattatgtgcacatatatacaaacatgttcttgcggtgtggttttaga

SEQ ID NO: 260980 - DNA, 157 bp, Homo sapiens
  chr9:135360968-135361125
  hypo
gccttccttgagcacgccccagctgtgagcagcgggagctggccggcaggtggctggaatgaaaccccacacagtggataacccaccaaacagacaagtgacacttgactgcaaagtacgacgccaagtgattgcactccatcgcggcggtgagctt

SEQ ID NO: 260981 - DNA, 234 bp, Homo sapiens; identical to SEQ ID NO: 213095
  chr9:135384263-135384497
  hypo

SEQ ID NO: 260982 - DNA, 34 bp, Homo sapiens
  chr9:135447836-135447870
  hypo
ccgggaagagtgtgccgtgcgccaggggaccctg

SEQ ID NO: 260983 - DNA, 83 bp, Homo sapiens
  chr9:135479250-135479333
  hypo
tcactgtgaaatcctctaatcgcctcattagcagggtggggaggagggtgcgtttgttccacgaggaagcagaaagctggtaa

SEQ ID NO: 260984 - DNA, 35 bp, Homo sapiens
  chr9:135507041-135507076
  hypo
tccctgcaggtcaacgtacacggacacggctctcg

SEQ ID NO: 260985 - DNA, 734 bp, Homo sapiens
  chr9:135512940-135513674
  hypo
ggacgcagcacactcgcctctgacgccttcccggcctgccaaaagtcattactgccgtgtgtggaaagccatcagcagggtccaggcccccgttgtccgggtgacagattgggctgcgtaatcagaggaggaaggagagagtgcagaagctgtcagaggcgagagatcttggctggagccgccaaaaaactggcaacatgagttagcgtaactgagtaaacagcaaacaatctccaaatgatctttccattaacgaaacaaaataaaacgaaaaagatacactttacctaaaaagcataccccagagaaaagcacgaaagtctacatttatttgggacacagaactgacattgtgactcttcacagccgtatctcctttgtctcctagcctcctggcacggtggaaattccccaggaggagaggaaattaagaactgcacagacagaacagtatgcttcaagcggaaaaaaatacggagaaggtggaggaaagcagcacaggtgatttaggtgcatcttctgaaaaagaaatgcacgcgccggacagccaaggaggatgccaagggacagttggcgcccagggcgggctgcaggtatctttcctttctgggaaaaaggtgactgcactccatccagggacaatcaaggacagccaccggagaccaacagaaaacctaatgtcagccttaaaatcaggtggcttagaaactccattttccggccattcggtggta

SEQ ID NO: 260986 - DNA, 320 bp, Homo sapiens
  chr9:135514394-135514714
  hypo
ttctccatctgtctcgtcctgaagtggccctcgttcctcattaacaccaaggaggctcctggagagtgttcggatagcctggcaagcaacaggctgcttaaaaggacgcagagtggcagcatctcccccgacccaggcatgatctattacagcgtgtgtgtcccactcgccccgcagctctcatatgctagaagcatcagctagagcaaacaagcatggcagaagagccaggaacaccgagaggaagcgaagaacttcccacgactgggaaccggccctcctgttctggcccagcaaccgagagaaatgaaccccaccca

SEQ ID NO: 260987 - DNA, 236 bp, Homo sapiens
  chr9:135520063-135520299
  hypo
gcttggatcgacgccgcagaatgcctctggtaaaaacggattcacaggattagtaaacaaagcttgaaacaaaaacaaaaccccaaaccattaacggtattaaataaataaaaccaacaactttgattgaatcagggatccaaaggtaaagaccaagagtttacctaatgcgcaagggctggaatattcagggatttctatataatcttgtggcaaataaccggtgtccttgagtg

SEQ ID NO: 260988 - DNA, 163 bp, Homo sapiens
  chr9:135523837-135524000
  hypo
ccaaccaccgcagccgactaaaatgaatgttctttgtggattttatatgatccaccaggcgtccaggagttgagataaggatatttattcctttgcggagtctgtttaaaattatatatcataaaagaaagtaaatcaaacagggccacgccagtagaaaaca

SEQ ID NO: 260989 - DNA, 112 bp, Homo sapiens
  chr9:135537995-135538107
  hypo
ggctgggagaaatgaagtttcgttcctccgtttcgctgggggagcctcactggacgcttggtattttcttttcgtagcctttgcttgctgcgttgttcccagaaggaaagat

SEQ ID NO: 260990 - DNA, 245 bp, Homo sapiens
  chr9:135538541-135538786
  hypo
acaggagagaggggcgagggggaatgcgcatctcagcccgtgcccaggaagcggaaacattcattaccattctaccctagcgcctggatctctctcattctctcctctcaagctgctcctccagattcagacggcctggagaaaattcctacgccctgttcccattccaaatgagaatgctgctccatccatcacctctaccacaattacttcctacctcccttgcctttcgagtctctgagtcc

SEQ ID NO: 260991 - DNA, 146 bp, Homo sapiens
  chr9:135548174-135548320
  hypo
ataaaagggggataatgaagcgttgtttaggttttttggaagattaaacacacataatcacttggcccagttcttggcacgctgtaaatgctcaaggtgaaaatataatgagttgggccgggcgcggtggctcacgcctgtaatcc

SEQ ID NO: 260992 - DNA, 78 bp, Homo sapiens
  chr9:135588873-135588951
  hypo
aagtggatacaactgaaatgcattcagctgatgaatgagtaaacaaaacggcgcattttcatacgatggggtattact

SEQ ID NO: 260993 - DNA, 334 bp, Homo sapiens
  chr9:135600616-135600950
  hypo
ctgcacccggccaaggtgggtgttttaaaagctgtgtttgttgagtgcttccagagcccggcactgcgctgagatcttcatcggcatcaccactctttatcccacagccaccctgcgaggcggctacggtttttagcctcaagttggttgtgagaagagaggctctgtgggttgggactccaaggacacaccatgcgttggtgctggagccaccatttgtcccaggtccgactccagagacccggcctgcactccactttatcatcactgtggtcttcacctgtcctgtgtccccagacccctacacgaggccaacttccggccacctcacctt

SEQ ID NO: 260994 - DNA, 153 bp, Homo sapiens; identical to SEQ ID NO: 213098
  chr9:135624734-135624887
  hypo

SEQ ID NO: 260995 - DNA, 347 bp, Homo sapiens
  chr9:135624917-135625264
  hypo
actgtcacccccatcttatggatgaggcagcttgccccgatatcggctggtgagtgacccagaagaactcgcgactcacagctgctggactctaacatccagggtgggagccactgggctgtgttgctgtttcccaaatgcaggaagtctcttaagtgcttcatttactctgttttttttttttcttgagacagatttgttcatcgataatttttattttttaaatcgatatgaaaatcctcttgcaggggtggactggagctgagggcacttgaaggggtgagtgggaaagcccacagccaggagccaccagaaccggcgcagagaacagacgctgctgcaggagg

SEQ ID NO: 260996 - DNA, 203 bp, Homo sapiens; identical to SEQ ID NO: 213100
  chr9:135626043-135626246
  hypo

SEQ ID NO: 260997 - DNA, 283 bp, Homo sapiens
  chr9:135632487-135632770
  hypo
ttgccgtgggcacccgacagatgacaacggaatgcgtgtgtccaggggcagccagagtgactgacatttcaatccagaagctgccacggggacctggtgattcccaccgttagcgggagagaagcttccacagctcaccgggatggtcagagggttccggagcaggacaaggctaggatgggctccccccgtcaccctcactgcaccaacgaggccgtgtccaacccgctggcctctggggaaggagggcccgccatctcacggcaggtgaagaagacaagga

SEQ ID NO: 260998 - DNA, 164 bp, Homo sapiens
  chr9:135671075-135671239
  hypo
actgccaaggcccccgggctcctgaagttcacgctgtctcggggagacaaacattacccaggtaacaaataaccatttctaagagtcatgggtactgtgaagaaaatcaaccaaatgatgggaggctgatggtttgaccgggcctaggacggctactaaggagg

SEQ ID NO: 260999 - DNA, 171 bp, Homo sapiens
  chr9:135701621-135701792
  hypo
gaggctgcacagctgggctgcgtcggggctgagatttgaacaggttgctcagctcagccatccccgcacctcgcacaggctgcccgcagtggctcccgagctgctgtgaacattggccattgctgtggacagcaacgcagtgccaggcgcggggccatgtatctccatcct

SEQ ID NO: 261000 - DNA, 387 bp, Homo sapiens
  chr9:135712695-135713082
  hypo
actccatctcgaaaaaaaaaaaaaaaaaaagaatgaaagaatgaggagttggcccccttctgctctgcccttctgctgtgggtgccctgctagctctcgggagcagacgtggcacctctgactctctgctcagcctgcgaagagaagagtgatgtggtcagtacttctgggtccagtcccgttcccatcatctccgtgcctctcaatactctctcctgctccaaggtctgcttgcgtctgctcaaacctcaggccctgtcctgcatttgatcatctctttttcctcttctactgcagtgagagggatgatctgaggcatcacacatccacagagcatatcggaacacgcgttcctgtccacatggagtgctacggctctgtatgcag

SEQ ID NO: 261001 - DNA, 45 bp, Homo sapiens
  chr9:135714354-135714399
  hypo
gagtctccaactgtcgcccagatggagagtgcagtggtgtgatct

SEQ ID NO: 261002 - DNA, 65 bp, Homo sapiens; identical to SEQ ID NO: 213101
  chr9:135735333-135735398
  hypo

SEQ ID NO: 261003 - DNA, 141 bp, Homo sapiens; identical to SEQ ID NO: 213102
  chr9:135745917-135746058
  hypo

SEQ ID NO: 261004 - DNA, 196 bp, Homo sapiens
  chr9:135767903-135768099
  hypo
aacaactctccaagagtatccgcaggaggtgggcggcaccccatctcaccaaggtcctggccgggtcttcgctctgcccaaaccctcctccagcctgtgcaggcctcctcccacctcttagtgctttcagcgagaaaaggtgagtctcattacgcagaacttttgtttgctcttcggttctttccttcttcaagtg

SEQ ID NO: 261005 - DNA, 231 bp, Homo sapiens
  chr9:135781249-135781480
  hypo
cattccctgtctcccgcagggctttcatcagcactgccgcagggcaggtctatgggagtaaaggcttgctttggtgtgtcaggcccaagcttgtccagggaggagtgtaaaggctcagggttcacgctggcgccctgagaactggaggctgccgagtgggtcttccgctgagaacctgggagactgtctcggtaaaagggagagtcaaagcctcctcgaggaaccacaggc

SEQ ID NO: 261006 - DNA, 122 bp, Homo sapiens
  chr9:135865156-135865278
  hypo
gcaaggccttcaagcgctcgtccacgctgtccacccacctgctcatccactcagacacgcggccctacccctgccagttctgcggcaagcgtttccaccagaagtccgacatgaagaagcac

SEQ ID NO: 261007 - DNA, 60 bp, Homo sapiens
  chr9:135898911-135898971
  hypo
cccactgcagggaaacggttaaaatgcgctgggcttcgtttttcccggaagccctcatta

SEQ ID NO: 261008 - DNA, 84 bp, Homo sapiens
  chr9:135904330-135904414
  hypo
gtgaggctctgtctcaaaacaaacaaacaacaaaaagaaatgactttaggcaacatagtgagaccccgtcgccacacacacaca

SEQ ID NO: 261009 - DNA, 135 bp, Homo sapiens
  chr9:135907665-135907800
  hypo
ccctgctggttggagttggaccacacaatctaagctaatctcaattggctattttaaatagaacaggggtgtgggttacagtgacgggacgagcgatttcggtgggaagactagtttcggcgggaagggcagtta

SEQ ID NO: 261010 - DNA, 166 bp, Homo sapiens
  chr9:135908016-135908182
  hypo
tttgtctgaataaggcggggggaaattggaggttagtgagagctgtctccgtaagtctttgtattaaccctcaggcacagggtatgatacaacatcctacgagaataaacacgtttattacaatggcaagggacataaggatcgaggacataagtcctttccacct

SEQ ID NO: 261011 - DNA, 142 bp, Homo sapiens
  chr9:135908536-135908678
  hypo
catagactcaaatcccgcagctatttgattacaagccttaaattcatcaggtacccctcggggaactccagtggcatctgtataaacacgagggtcaaaggaaccacggggggcatctcttactctacggtgtcttgttttt

SEQ ID NO: 261012 - DNA, 247 bp, Homo sapiens
  chr9:135920656-135920903
  hypo
cctgacacccccatcgtacacatgaggaagccgagacatggggtcagcgccacgtcccgccggcagcaccgccctggtctctcccactctgcaggctttgctcgtggcccagtgccaacggtgtcctgatttttgtatgctctactttctaaaatgacgcacaaaaagacaacatggaaaaaaactttgcattgtaatggatgctccccagaagtagcgacttggcctgcttcggtctctgtcatag

SEQ ID NO: 261013 - DNA, 138 bp, Homo sapiens
  chr9:135922416-135922554
  hypo
gtgcccatcaggagcgtccagtgagcaacattctgctcctctccacccccagtggcacagtgctgccttcagaaacaagcagtgcggatctctgacagggaagactcatgtttcagacagactcgcaataccagtctc

SEQ ID NO: 261014 - DNA, 36 bp, Homo sapiens
  chr9:135926317-135926353
  hypo
gtctgcactaaccccgtggaccggaaggtggaggag

SEQ ID NO: 261015 - DNA, 275 bp, Homo sapiens
  chr9:135926581-135926856
  hypo
ttaagaaaaatatgcgtgcgttgttcagatgtgacataaacgtggagctctgggatccactgagctcttattcttccattcactcattgcagccaagccagtggggcacctagtgtgccaggcccagcactttcttaccgttagaactggaaccgtgctgccaggcagccctccttccccgggcttgcgggtgccgtggagtcctgcgtccccactggcatgagcatcaggttcacaggccactgccacctggagcccggcgcttcccttacgca

SEQ ID NO: 261016 - DNA, 237 bp, Homo sapiens; identical to SEQ ID NO: 213107
  chr9:135945847-135946084
  hypo

SEQ ID NO: 261017 - DNA, 45 bp, Homo sapiens; identical to SEQ ID NO: 213108
  chr9:135962412-135962457
  hypo

SEQ ID NO: 261018 - DNA, 126 bp, Homo sapiens
  chr9:135979097-135979223
  hypo
cccgggccctactccagccccgcccggcacactcacatacagatagtccttcatggcagtgtccagcatcaccaggtcggtgaggaacgtgcccaggtagggaacggtgccctggatgatgccctg

SEQ ID NO: 261019 - DNA, 104 bp, Homo sapiens
  chr9:135991327-135991431
  hypo
agcccaggctcctgcgacagtgcggggcccacgctgctgtgcccttctccgtcctacagaggtggggacccatgcccgaggacaggagccggtggggcgtgtgc

SEQ ID NO: 261020 - DNA, 305 bp, Homo sapiens
  chr9:136044289-136044594
  hypo
cagccctccccggacgcccaccctttgggagcctctatgtgttcagccatccagaagctccctaaaccctgtcctcttgggccttttatggaggcttcactgggtaatcggataggcatgactgaagcatggacaactgtgtagaaacatggttggacaaaaagggcatggtctagcattagcgcacaatctagcattggcgcacggtctagcattggcgcacggtctagcactggcgcacggtctagcactggcgcacggtctagcattggcgcacggtctagcattggcgcacggtctagcat

SEQ ID NO: 261021 - DNA, 150 bp, Homo sapiens
  chr9:136369631-136369781
  hypo
ggactacacggggccgtcatggaagctgaccacatgctgggccatagagagagacagccgctgtgaaggcttgccgtctcagagactgtgttttctgaccgacctcagtaccagttagaacaataatgatgatggcgataaaatagtttg

SEQ ID NO: 261022 - DNA, 422 bp, Homo sapiens; identical to SEQ ID NO: 213109
  chr9:136372633-136373055
  hypo

SEQ ID NO: 261023 - DNA, 39 bp, Homo sapiens
  chr9:136375448-136375487
  hypo
tatttcatcggcaacgccacccatgtgactttttttttg

SEQ ID NO: 261024 - DNA, 38 bp, Homo sapiens
  chr9:136375607-136375645
  hypo
ctggccggacccatgtgactattcgaacttaaattatt

SEQ ID NO: 261025 - DNA, 1137 bp, Homo sapiens
  chr9:136376182-136377319
  hypo
cccgagctgtctgacgtccctggccctcggagtccttattggcaaagtgggctcaggactgtgtcctggggcccccgaggggtcgcctgtgaaggggaggggcctgcccctgtcgggagggtcgaggctgggcctggagcccgggatcctgcagtggtgggcagggactgagggctggagcgcgcctcctaattgtccgtgacttacagacttggccaggctctgggcggccttcgtaaatcgctgcagtgaggagcctgccagtgtggcccttcgcgcttggcagggccctcgtcgccgccctgctcggagtggcctgccgcctccaactttccatgtgctgctgctgcgaagcgggaaaggggggtgctggctgcttgctgtggtggggagggaggtggggcggccaccgtgcaggtgcctgcttctgcagggatgtccagggctctccagctacggggtccccagagcctgtcccctacaaagcctggtgtgaggcttatgtggtctccacacggggccagaggggaagacgctgattcaaggacaccccgtcttttcacagtgcatgtagcgtgtgtgggtgtgtggtgtatgaagtgtgtacatgtgtgcacgtgcgtgtgtgtatgtgtggtgtgtatgtgtagtttatggagggtgtatgtgtgtgcacatgcgtgtgtgtatgtgtggtgtatggagtgtgtatatatgtgcacgtgtgtatgtgtggtgtatggcatgtgtacatgtgtgcacgtgtatgtgtggtgtgtgtgtggtgtatggagtgtgcatatgtgtgcacatatgtgtgtgtatgtgtggtgtatggagtgtgtacatttgtgcacgtgtgtgtggtgtgtgtggtgtatggagtgtgtatatgtgtgcacatgtgtatgtgtggtctatggagcgtgtacgtgtgtgcatgtgcatgtgtgtatgtgtggtgtgtggtgtatggagtgtgtatatatgtgcacgtgtgtgtatgtgatgtatggagtgtgtacatgcatgcatgtgcatgtatgtgtggtgtatggagtgtgtatatgtgtgcacgtgcatgtgtgtatgtgtggtgtatggagtgtttatatgtgtgcacgtgcatgtgtgtat

SEQ ID NO: 261026 - DNA, 313 bp, Homo sapiens
  chr9:136377539-136377852
  hypo
cgtacatgtgtgcacgtgcatgtgtggtgtgtgtatgtatggagtgcatacatgggtgcacttgcgtgtatgtgtagtgtgtgtggtgtatgcagtgtgcacatgtgtgtacgtgtggtgtgtggagtgcgtgcatgtgtgcacatgcgtgtatgtgtggtgtatggagtgcgtacatgtgtgcacatgtgtgtatgtgtggtgtgtggtgtatggagtgtgtacatgtgtgcacgtgcatgtgtgtatgtgtggtgtgtgtgcaggcatgtgtgcacctcctcaggtggactggaagcgtacagaggcagtg

SEQ ID NO: 261027 - DNA, 366 bp, Homo sapiens
  chr9:136378203-136378569
  hypo
ggtgtcagagcgaccgtatgggggaggggcctagagggccaccctgtccccagcccaggagcggagccagctatctcccagccctggaggcaacagggggtgactctaggacaaataaccgccctctttccatgggcagtggacctgggcaaccactcccaagccggtggcaccgtctggaaacacaaacaggccccagacaggtgtaggtaacttcctgcctgacagatgggcctggaatcgctgggtgccgggggacgcaggttgtgaggtgatgtctgggacctgctgccaccacccccgcagtccttcacagacagcaccgcccatcacgcagcagggaggcccagccgagggagcccggca

SEQ ID NO: 261028 - DNA, 349 bp, Homo sapiens; identical to SEQ ID NO: 213111
  chr9:136380583-136380932
  hypo

SEQ ID NO: 261029 - DNA, 119 bp, Homo sapiens; identical to SEQ ID NO: 213112
  chr9:136381250-136381369
  hypo

SEQ ID NO: 261030 - DNA, 188 bp, Homo sapiens; identical to SEQ ID NO: 213113
  chr9:136382129-136382317
  hypo

SEQ ID NO: 261031 - DNA, 176 bp, Homo sapiens; identical to SEQ ID NO: 213114
  chr9:136382777-136382953
  hypo

SEQ ID NO: 261032 - DNA, 260 bp, Homo sapiens
  chr9:136383897-136384157
  hypo
gcaggaggtaaatgaagatccgaggcaggaggagtcagacaggggagaggtgacgggcctcctgggtccccgttcatcgaggctcgcgcagtacgcacccactttgccgcgatgatgaggatggctgtgccgatggggcccgagtacaccccgtagccccatcggtcatggtagatccgcacagcaatggtcaggacgccgaacatcacaaatgttgacctcttgggttcgtcgaagtcggccagtgctggaggggccag

SEQ ID NO: 261033 - DNA, 598 bp, Homo sapiens; identical to SEQ ID NO: 213117
  chr9:136385191-136385789
  hypo

SEQ ID NO: 261034 - DNA, 174 bp, Homo sapiens
  chr9:136393621-136393795
  hypo
tgaggcccagggagcggcagcagccctcctctgcccagcagatggcaggccccagtgggctccagcgggctggtcctgggccacgctggggagcagggccgccctgcactccccttccctcacccccacagccgcaggagcgcccctgctttatagaggcgctgaaatgcctgg

SEQ ID NO: 261035 - DNA, 76 bp, Homo sapiens
  chr9:136395958-136396034
  hypo
cagctggagagagacggagtcaggatttgaacccaaagagtccggttccaggcactcacgcgtgaggctgctgttg

SEQ ID NO: 261036 - DNA, 334 bp, Homo sapiens; identical to SEQ ID NO: 213118
  chr9:136397022-136397356
  hypo

SEQ ID NO: 261037 - DNA, 669 bp, Homo sapiens
  chr9:136402172-136402841
  hypo
tgaaggccccagcacggccagggtaggctgtgtcctgcagaacgcagttgggccctgagctgctccggggaaagtgaggacagttagatgcggccccaggagcttgccaagcccccaggccatcctggaccttaaggtcaaggaggacccgtggcccacggttccttgggagttccccccagcgccacccaggagatctgaacccaagctgccgagtgaccctgcaagggggcccagccagggggctgtgtcttctggtcccgctgacggtgataccctcgggcatggggtgggggcaggctggtcctcctgggcacttgagccctctaccatctgggggtccctctcacccaggacaacagcccaacatccaatagcctggaggggggcaccgacgccacggccttctggtggggggagtggaccaagtggacggcgtgttcccgcagttgcgggggtggggtgacatcccaggagcggcactgcctgcagcagaggtgcgaggttgggcacgtggccctgaggggatggcatgagggcagggtagcgggcaggagagggcggttggctcttcagcctggtggcttctccccctgggagggctctcgggttgggggcagcacaggctgagtccccccatcagcctctgctggacgcggctatggatgg

SEQ ID NO: 261038 - DNA, 112 bp, Homo sapiens
  chr9:136412218-136412330
  hypo
aagaacttcaacatcgcaggcacggtggtcaagtacaggcggcccatggatgtctatgagaccggaatcgagtacatcgtggcacaggggcccaccaaccagggcctgaatg

SEQ ID NO: 261039 - DNA, 74 bp, Homo sapiens
  chr9:136412360-136412434
  hypo
ccccaggggccctgggcactgtttccccagaatccagccacaggtgaggtcttccagcccgtgacgcccccagg

SEQ ID NO: 261040 - DNA, 41 bp, Homo sapiens; identical to SEQ ID NO: 213120
  chr9:136501758-136501799
  hypo

SEQ ID NO: 261041 - DNA, 147 bp, Homo sapiens
  chr9:136507436-136507583
  hypo
aagcccaatatccccgaaccggagttgccctcagacgcgtgcaccatggaggtccaagctcccaatatccagatccccagccaggagaccacgtactggtgctacattaaggagcttccaaagggcttctctcggcaccacattatc

SEQ ID NO: 261042 - DNA, 198 bp, Homo sapiens
  chr9:136508531-136508729
  hypo
cagtacgagcccatcgtcaccaagggcaatgaggcccttgtccaccacatggaagtcttccagtgcgcccccgagatggacagcgtcccccacttcagcgggccctgcgactccaagatgaaacccgaccgcctcaactactgccgccacgtgctggccgcctgggccctgggtgccaaggtgcgtgccctgcgaccc

SEQ ID NO: 261043 - DNA, 495 bp, Homo sapiens
  chr9:136537810-136538305
  hypo
ctgcccttcaggactcagctcggccgtgagcacaaccatgttctgggtgaggaaggggccggaaagcaagacccctgcctgggacgccagaccaggctagcaggcagaccaggagattgccgtcgcagacgggccttccaggtgaggtgcaaaggcccagcgttgggcagcggacatggtgggaggcaggagagaaaggcctgtggggctgtggatacctgactgtgaaagacacgatggctcaagccctgcagaagtgacagtgccgattatcgggtgctctgggctaagcttcatctcgtccctccacggcccttgcaacggtgggaacacggtcagtaatgtctgtgggctgaggcggacacagaggctcccagaggcactgagcagggcctaggcacaccctgctccgctgaggacagctggtgtctttgggagggtgtgtcccgcacgcctgcacaacaggctagcactcggctgcgtggaggccacaga

SEQ ID NO: 261044 - DNA, 510 bp, Homo sapiens
  chr9:136546765-136547275
  hypo
agtgagggagaggacgagaagcacagcactgggaacggatcgttaagtttagtaaaacactagtgcttgactgagagtcccagtggccctacgtgagctgacggtgctgggaggtacaccatggataactgccacggccggtgcgcggcgtgtttcccagcagctgggcctccttatgcgtgtagcacctccccgccgcctatttcctgtgtccccacgatcgcgcacgccagttgacgctcatgtcccacctcccctgtgtttcccctcccccccatcccacacgcagggaccccagcctagaaagcattgtgcttctctcccactccgcctgagacctagggtagcactgggcaagcgaggggcgcagaaatacggaaggacagagaagaacacaccacagagtgacccgggaccatgaaccgcacatacctccgacctggtgggcccagctctaccctctctcagaccaacagtcagcatctactgggaggacggtgttcaagggaa

SEQ ID NO: 261045 - DNA, 210 bp, Homo sapiens
  chr9:136549274-136549484
  hypo
gatcctgcccccagcggacccttggccatgtctgaacacacttgtggctgtcacgacggtgggtgccactggcacctagtgggcggcagccagggaggcggccacacacctgtgtcacacaggagggccctcacagcagagaggatctcctccaaacgtcagtagtgctgaggttgggagaccctgtaacagagccgcccgcactatggc

SEQ ID NO: 261046 - DNA, 164 bp, Homo sapiens
  chr9:136553360-136553524
  hypo
ctgcatgattccaccgcatcccagtccctttcccggcagctgcggccagcaccctccactcttcatcatgcacgcggaagctgtctctgtcccctaccctcccccgaccctctcagcacaccccatccactgtcgggtgctatgagcctcgcccagtccatggg

SEQ ID NO: 261047 - DNA, 358 bp, Homo sapiens
  chr9:136557802-136558160
  hypo
ccctgaagccccaccggcctccttcacctcctcccgaccctggctacctggtgcttccacacagtgcaggctcacgtgatgactgttgagggaacgagcgaaggaacgagctcatggatccatgaggcacgagcgctgtggctcagcccatggctccctcagcctccacgtcgccaacggcaggagggaaggggtgggcgagctctgcgcaccccataggacccctcactcacgctctcagcctcatctccgccaccagcctccagaccgcagggctcacctcactactccctgcttttggcagaaccgcagaggcccaggagcccctgccagcccccagccccgaagacccgctggg

SEQ ID NO: 261048 - DNA, 241 bp, Homo sapiens
  chr9:136569905-136570146
  hypo
aggtcggcagggctcggcttcccgtgtgcagaataactgatcacgacagtggaaccacctggggaggcggggcacacggaggggcaaggacggggcacgtggaggggcaagggggttgtcagggcagggcctcccagcagcacagcccagcaggcactactcaccggagctgggcctcggggatgaaaccatcccggtcgctcccagccatgccgctcctggaacacgcagccttgtccaa

SEQ ID NO: 261049 - DNA, 81 bp, Homo sapiens
  chr9:136575502-136575583
  hypo
agccccctggtgcccggtcagccctgggaccctcacgcgcagcccggagcccagacaggccccgcacccagggacggctca

SEQ ID NO: 261050 - DNA, 133 bp, Homo sapiens
  chr9:136575613-136575746
  hypo
ctgtgcgtgtctcccatgtgtatgatgaaggacgacccacgcgtgttctggctctggcctgaggggagcaaccaggagtctctgagcaggggagagctccgttctggcgccgacgctctctgttcactttctt

SEQ ID NO: 261051 - DNA, 155 bp, Homo sapiens
  chr9:136575776-136575931
  hypo
cctccttcctctcctcgctctgtctctctccttcagggtctgtgtcttgtctcagtccccgggcgcaggcccgaggtggcagaacattgcattagtgctacagcccttgggggccggtggctggtcctgctggtggcggccgtccactctggcac

SEQ ID NO: 261052 - DNA, 323 bp, Homo sapiens
  chr9:136593120-136593443
  hypo
agcgtgacccctggcggccacctaggggaggaggctctccccagggacccggagccagggaggaggcctcagcactcagctccgacacccaccgtgtgactactcttagtccctaacccggcacatggcaccagccacctgcagtgagaggctcattctatgaacaagaggtcttgtgtccagtggggcgtggcttgcccagcgcacaggagtcagaggcagcagcgcactgggacccaggttccggccccatttcgccacccgcttcactaccctggtctacgaagcagccaagcctggtacctccccggtgaccataggga

SEQ ID NO: 261053 - DNA, 105 bp, Homo sapiens
  chr9:136607053-136607158
  hypo
gtggatggaatccgcggtggaatccatggaaacatggtggatcccggcggctgagcctatgccaggcaggtgccaggagtgcttcaaaatcatctcggggccggg

SEQ ID NO: 261054 - DNA, 103 bp, Homo sapiens
  chr9:136621773-136621876
  hypo
ggaatgctcagatacacagacgaggctgcacaggcccattcaagaaccagagcgtccagaagcaattcacatgctgtaaaccggcttttcctttcttcccttt

SEQ ID NO: 261055 - DNA, 74 bp, Homo sapiens; identical to SEQ ID NO: 213121
  chr9:136641169-136641243
  hypo

SEQ ID NO: 261056 - DNA, 196 bp, Homo sapiens
  chr9:136645036-136645232
  hypo
cacctggtcccgctccggaggcgtcctgtgaggacaaggacagaacacagagatgagggaaggctgctctttgactgtggcccatgcatcaacgcaccccgccctccctgtccccactagttcctagatagaggggtcaaggcaggagcaggggaggagagggacactgttccctatgggacgcccccaccctggc

SEQ ID NO: 261057 - DNA, 172 bp, Homo sapiens; identical to SEQ ID NO: 213122
  chr9:136648156-136648328
  hypo

SEQ ID NO: 261058 - DNA, 135 bp, Homo sapiens
  chr9:136649606-136649741
  hypo
cctgggaaccagctgggctccggacccaggctgtgcagaatccgagagggcctggactccaagcctggctctgcccgcaacatggggcagactcagggcccagactccctgctcgtagaaggcaggtcagagaag

SEQ ID NO: 261059 - DNA, 208 bp, Homo sapiens; identical to SEQ ID NO: 213123
  chr9:136651136-136651344
  hypo

SEQ ID NO: 261060 - DNA, 288 bp, Homo sapiens; identical to SEQ ID NO: 213124
  chr9:136655639-136655927
  hypo

SEQ ID NO: 261061 - DNA, 163 bp, Homo sapiens; identical to SEQ ID NO: 213125
  chr9:136664524-136664687
  hypo

SEQ ID NO: 261062 - DNA, 111 bp, Homo sapiens
  chr9:136665006-136665117
  hypo
aagacactgactcccggcggccgcctgcacctgccccgctccggatcggtgttttctccaccctgagagaatggtcagagccatgcgcagaagacacgccacacacactgg

SEQ ID NO: 261063 - DNA, 225 bp, Homo sapiens
  chr9:136667521-136667746
  hypo
gcctccccctcccccgccccactccggctgactcctcccctggagaaagttgttcaggcgcaaatgatttctgtcctgatagaggacatggccccaaaggtctcagtgtggtcaccttgcaaggcacggcccgccgtgtccagcatcctgcccgacctcccctctctgctgacaaggtatgtggttcccttgctcgtgagttgacagacccgtggcccgagctcc

SEQ ID NO: 261064 - DNA, 72 bp, Homo sapiens
  chr9:136669074-136669146
  hypo
ggggacacgtcctccgctgtgcagccctcacgggtctcctgggctctccagcaacgccgcagctccccccgg

SEQ ID NO: 261065 - DNA, 344 bp, Homo sapiens
  chr9:136669406-136669750
  hypo
ccccaaacagaccccgactgacggatctcgccacacgcctcgctgccagggacggagctgcccgtccacagagctcttgggctgggcctgtgactggacgtgctgcccgcactgcagtggcgctccaaggcagagatgcccgctgttcctcagcgggaaccacccatgcaaggtcctgctggtgggacagggccaggggtgtcgccgggcagcctgactgtggagggaggctcctgggagaggacaggttatccaccctgtcactctaccacacagccagccattcctcctccagggcttcagcctttgacggacctcgaagcaaaccacgcctcatccgtggc

SEQ ID NO: 261066 - DNA, 153 bp, Homo sapiens
  chr9:136670534-136670687
  hypo
tgatggggctctctcgagacttccgtggctggaaacgccatctccccagcctctgacagcctgggcattgtctaacccccagaaacgccatctccccagcctccgacagcctgggcattgtctaacccccagaaacgccgcctccccaacctc

SEQ ID NO: 261067 - DNA, 496 bp, Homo sapiens
  chr9:136671074-136671570
  hypo
gggtccagagggggcggcccctgcctcgggacaccccaagagtcccacttacacaagagttccacttgtgtaaactctcccgcagacagggaggggccaaggagccccaggagccggcagccactcacctttccttgaaatcgaggaagaccttggccagcgtgctgccccccaccatcacggacacgtcgatggccctcaggaagctgtgatgcaccttgatcaggtcctgggttgaaaaccagccgtgagtgcctggccaggcccacccaaggctagacgggagcgccgcccttaaagtgcccttgttgttctgtagttccctcaaggaggggaggggcccgggtgctgggcctgcaccccacatctctgtgcatgccagggtgtgattcaggtagaaggttctatggcgatggtgcaacagaagagccagtacgtgtgggagggaagccgcccacagcccgcaccagcccatcagacacgcagcggccgactc

SEQ ID NO: 261068 - DNA, 471 bp, Homo sapiens
  chr9:136671901-136672372
  hypo
gagcagcatgtccccggaggaagcccacccatgcacggctgccggagcctggtgccagcgccctgctctgctaaccacgtctaggtgactctttgcatggggaactgcctttctatgactgagttcagacacccgcagggcaggcgagggggtccgctcaaaggggtggagggacacgtttctctctggccgctgacaaaaacttcatttacattctcagcgtcatccgtgcctccagccacgcacgtcagtgctgccctcacccgcagacaagcggagcccagaaacctgctaccctggctcctaaatccaaagaccctggagagagcggtgggggctcctccttccggccagcacgagccaccacggagccacaggggtgcagctctccaaggccctgaggacagcaggacatgtgtggccagtgccgagttagggccccgagcctggcatgagcgatgggggccggga

SEQ ID NO: 261069 - DNA, 179 bp, Homo sapiens
  chr9:136676092-136676271
  hypo
ctcgccggccgcctcgggacctctcaggccagctccggggaggcgaggggagcccccagcagcagggccatggctcagtcttccagccctaacagctacccagccaggctccccgggaaggcaaactggaggccctgctgcctccacaaagggccaccatccctcgggggagacccccc

SEQ ID NO: 261070 - DNA, 300 bp, Homo sapiens; identical to SEQ ID NO: 213127
  chr9:136677205-136677505
  hypo

SEQ ID NO: 261071 - DNA, 962 bp, Homo sapiens
  chr9:136680293-136681255
  hypo
gaaggcagagtcccccgcccgcctccctcttccctggccccatcttgaagacagaactgtcacgcccggatctaggtacaagtccacgtctgtgtagcacccgctgcgtctgaagcttggtgagaaatgccaagcatagggttctcataatatttttgctaagctttttaaggatcaaaatacgcccttagtggtacctttctgacaagtggctacacctgtgtcactcatgccctcccacaccatagagtattttcatctcaccggagctcctgcccttccccatcagtctccttcccgccccgagcaaccacccttctgactgttcttcaccacagacgagccttgtctgtagaatgtcaacggtgttgtgcgttagatttgtttttgtgcctggcttcttcccctcaacattggatcttgtttgagacacatccattctgacttgcccacatttgcagctcattcctgtttactgctgagtactaatccacggcatgaacaacaacgtgctacccatcttccttctttatggacatttgggttgcctccaagttgttgcttattgtgaataaaagctgctatatgagcattcaagttgtgtgtgtgcgtgtgtatgcacgcacgcctgtgtggtgggtggggggttacacaggctttcttttcctttggaaacaaaattccactaggactggaactcctggtcaaaggggaggtctagactcaacctcataagcagctgacaaatgcttttctaaagtgggtgcattctacacccccagccagcagcgctcaccagccccagctgcgccacatcctcatcagcttctgctgttgccggtctttttccattcagcccccagagtgcgtgtggagtgaaacagaactgtggttctatttggcactttcctgatggctaacgctgctgaggggtctcctgcgtccttactgtataccttcct

SEQ ID NO: 261072 - DNA, 385 bp, Homo sapiens
  chr9:136686196-136686581
  hypo
ggctctggaatctccgtggcacaattacatcactctcctgtggctctgtggcaggctgctgtgtcacacactgatccttttcacatcagtgtctcggctagaaagaagcgtgtggaggctccgtgtcatcagaggctatacttcgtggaaaaactccacacccatgccacaccagtgtctggtccacagagcaggccagtcctcatcacttcggaacaggcgggccgcagtgggtctcttgttggcaggaacttgactgtcgctcctgagcccctggaggggaggcagcgagggaaactagggttgtctttgtagcccttcctgtttctagctctgtaactgcaaccaggataacctaagcttcggtttcccatctgcaacagga

SEQ ID NO: 261073 - DNA, 510 bp, Homo sapiens
  chr9:136689993-136690503
  hypo
gagggctcagggcccggcctgcagcgctcagggagatgcaactggaagcgtcttgacagagggaccctccggggacgctggcttcattcactccattctgccagtccccacagaggcctggcctcacagagtcacaccgaggagcaagagacccttggcagcatttgagggagccacatgcggccaaggagaagcccaggtggggccgagcacgcagtcttaaagggtctgttgtgcaaatgaggcaccacggccagtggggaggcagctccaaggagacaatgccacggtccagccaggtgtccttgtcgatgaaggacctggggtgggggggcgggggacaaaggcctttctgtcccggccatcacccgccttaagaaacgccccgtcttccgtctctccagtctcccctccatccccacacgagcctcgggccaccagggagggacggggggatgcctgtcaacacctcctctggggaagggggcttcattccggcctccttcagac

SEQ ID NO: 261074 - DNA, 115 bp, Homo sapiens; identical to SEQ ID NO: 213130
  chr9:136691771-136691886
  hypo

SEQ ID NO: 261075 - DNA, 236 bp, Homo sapiens
  chr9:136693624-136693860
  hypo
gcatcgccggcatgcggccaccttcctggacacccagcagtgctgccccctgcagccagcacaggctgacccaaggtgtccttctaccgtgcggagaaacactgtcactgcagtgccaccaagttggggtcacagcaggcatttcgacgtgggccctgtgccttcctgagggagaggtgatcctccctgtgagtccccggggaacttccacaattctgattcgttacaaacaccaa

SEQ ID NO: 261076 - DNA, 75 bp, Homo sapiens; identical to SEQ ID NO: 213131
  chr9:136694904-136694979
  hypo

SEQ ID NO: 261077 - DNA, 119 bp, Homo sapiens; identical to SEQ ID NO: 213132
  chr9:136698781-136698900
  hypo

SEQ ID NO: 261078 - DNA, 174 bp, Homo sapiens; identical to SEQ ID NO: 213133
  chr9:136699684-136699858
  hypo

SEQ ID NO: 261079 - DNA, 308 bp, Homo sapiens
  chr9:136714185-136714493
  hypo
cagttgctgaagaggcggccttggtttgttttgcttgttacagagtaaaaccatcttcgctccctaaagggaaggacaggagttggaaagggcttcacctcatgccaatgagcaggcacgggacattcctcccgccccgaacgcaccatgctattatacttgggacagggcactgggaaggaggaggccactgaccccgaaggctcacccctcatccctgctacctggaggggtgtccttgaaccccaaacctcccccaccagctgcgggcctcctcctgggccgggagttctcgtggatgccagggc

SEQ ID NO: 261080 - DNA, 239 bp, Homo sapiens
  chr9:136718546-136718785
  hypo
ctggggaggccctgccccagcggcctctgctgacgcttgcttgtcccctctctgcaccatgagtcccacccaccagtggcaactcccacaggtgtggcaggttccatctgacaagcacccaaaaggctagagcggggcagggaacggccaagcggagtctgcatcaccctgcactacagccaacccacacatgccgcccccctttgctgcaccaaagcgcttccccacccagggccagc

SEQ ID NO: 261081 - DNA, 434 bp, Homo sapiens
  chr9:136722069-136722503
  hypo
aaggaccaggtgctgcgctgcacgatgcacagacacagagcaaccccgcgaggcagagtcatgctcccagcctacagaagagacaaaggttccaagagcatccctgcccaaggtcatttggctgacagaagcttccttcatgggacctgacctcccagcctgaggacacctttcggtttccttctcaggaagtcctacccttcaccatctcctccctcccagccgttcagagctgtgatgaccccaaattagggcacccccaatctggagggctagctctggccacagcaagacccacatccccacacgcctcgctgggtgccttccacaaacccctctcccactctacaaccacaatcctcccccttgccccgcttccccaacacgtttgatcccccagccggcaccagggcgggattcttagattaagtctc

SEQ ID NO: 261082 - DNA, 179 bp, Homo sapiens; identical to SEQ ID NO: 213137
  chr9:136723290-136723469
  hypo

SEQ ID NO: 261083 - DNA, 80 bp, Homo sapiens; identical to SEQ ID NO: 213138
  chr9:136725455-136725535
  hypo

SEQ ID NO: 261084 - DNA, 155 bp, Homo sapiens
  chr9:136728458-136728613
  hypo
gaggcaccagcattcggtcagcgctgacacacaagaacctgtttgtcaacctggagtcagcgcaaaggccccaggtcgggtcgtacagatggaaccgggtcgtacagatggaaccggagacagagaggaggcgtggcgggcgagccagccaaggc

SEQ ID NO: 261085 - DNA, 65 bp, Homo sapiens
  chr9:136729692-136729757
  hypo
acaaccttttaaaggcggcactttaaaagacagaccctaggtcctacccccgccaccccacaggc

SEQ ID NO: 261086 - DNA, 47 bp, Homo sapiens
  chr9:136729989-136730036
  hypo
acaggaaagggcatgcggtctgtgagctcctccggggtaggaacaaa

SEQ ID NO: 261087 - DNA, 35 bp, Homo sapiens; identical to SEQ ID NO: 213139
  chr9:136731601-136731636
  hypo

SEQ ID NO: 261088 - DNA, 172 bp, Homo sapiens
  chr9:136732402-136732574
  hypo
tctcgccaggtggtgcgtgcgcaactctagctttctctttctggcgccttggagagatggaagccaaaaaagtgacccaatcaccctgcacttgagccagtgaagccactgagtgcccccatggtggggccgcctggggccctagggaagggtgccacgtgctctgaaaagg

SEQ ID NO: 261089 - DNA, 455 bp, Homo sapiens
  chr9:136733334-136733789
  hypo
gagctacccggggctcgggtctgtgtggcaacacgaggggcaacctgcccacagcacagcaggcaccgcatccccatgaggtggggcgcggtggggagaaggaagagaaatgagtcttctggttctggccaggagatgctctgcgaatggggaagagcccagactgccctgggttcaaatccgcccttcccgggcaccgtgctgaggctccctgaggctcggttggctcatctgtgagatggggataacagtgtctacccgtgtggctgtaggtgaatgagacggagcctggcccaaagcagggactcgcgcacagcttgcggaaaggggactgtgcccgatcagaaggtccacggagggactcatggctgcactccatcctccacttgctcgaatgaagaaacaaaaacagagcaaagtactaggctcagggccagaagcgtgcatgtttgtta

SEQ ID NO: 261090 - DNA, 335 bp, Homo sapiens
  chr9:136737403-136737738
  hypo
tcctccctgcatgctcggctcccagcacccacgtcctccatgtttccatggctgtgctgggtgggtgactgcgagtctaacttccccctcttctctgccatggtgtggccaggctagaggaaaagggctgatggcgtcctcactccgcgcaccgtcttttccccactgcagtcagctacactggcccagctgccccaaccagcatgtgggggcacagcctctcctcggcttgaagggtcggggtcctaggcccagttcccgacacctccagaggaaacccaaagcctggagcagaggcaggaaggctggcagggaagccccgggggtcagagtcg

SEQ ID NO: 261091 - DNA, 114 bp, Homo sapiens
  chr9:136739160-136739274
  hypo
cctttctgaggaggagtcaccggggctggggcagacagctggtgcctctggcagcagagcccggctctccacgccgccctgccctggagggccggctatccatcctggatttga

SEQ ID NO: 261092 - DNA, 100 bp, Homo sapiens; identical to SEQ ID NO: 213142
  chr9:136743438-136743538
  hypo

SEQ ID NO: 261093 - DNA, 47 bp, Homo sapiens; identical to SEQ ID NO: 213143
  chr9:136743950-136743997
  hypo

SEQ ID NO: 261094 - DNA, 253 bp, Homo sapiens
  chr9:136746362-136746615
  hypo
agatgcggccttcccgcaggcatgatgctatctgcagatagcggagcgcagacgtgggacaaggccctctggaatgtgtctggacttgccccacaaggttcctcccagtgagacggggcttgtgaacaggactgagaaggaggagcgcccagctctcctgcatcccatcaggggcctgggtgacaggaggggaggccctgcatgaaggctgcaaaggagtctccaaggcaagctctgacggattcccaggcag

SEQ ID NO: 261095 - DNA, 171 bp, Homo sapiens; identical to SEQ ID NO: 213144
  chr9:136751547-136751718
  hypo

SEQ ID NO: 261096 - DNA, 75 bp, Homo sapiens
  chr9:136754061-136754136
  hypo
gcaaggagacgacacgaacagcatggaaatgaagcgcccctgccaggggggcagggacaccgcgtccccgtccct

SEQ ID NO: 261097 - DNA, 363 bp, Homo sapiens
  chr9:136758751-136759114
  hypo
tgcagaacaggggcgagcacccagcccagccaaggccaggaggagcccaagccttcctccgtcgccacacggcagctttcattgcctgaacctcggagggtggcgggacggtgattccacccacagccgcgatgaccgaggcccagcatcgcagcaagtggcagagaagccagagtccaactaccgcccctgaaacccaccgcacctgacccacacagcagcggcgagagtcgggcgcccacgtgtaccacacacacagttgaatgctttactggacctcacggatcctcacagacctctggaaagttctgtcgtaatctccaccttacatctgcagaaactgaggctcggggagaaggaaga

SEQ ID NO: 261098 - DNA, 77 bp, Homo sapiens; identical to SEQ ID NO: 213146
  chr9:136762226-136762303
  hypo

SEQ ID NO: 261099 - DNA, 59 bp, Homo sapiens
  chr9:136763773-136763832
  hypo
tcatcagttgaatggcgaggtagctggactttttatgtggtgcccggggaagcttccag

SEQ ID NO: 261100 - DNA, 303 bp, Homo sapiens; identical to SEQ ID NO: 213147
  chr9:136766707-136767010
  hypo

SEQ ID NO: 261101 - DNA, 368 bp, Homo sapiens
  chr9:136771809-136772177
  hypo
cccatgacctcacgccgcagaacctggcacagctcacaagtcagaaccacagacacaaaacccagtggcgcctggagagctgggggcagcggggtccctgcggagccaggctctgggtcctcagccctcccttctgacgtgcggagacccatggctctacaccgggggccactcaagtcactgcagctgagacactttggggaccctcgccccgtcccatcccttcacaacagacagacatagagacctgcaggagcagggaccctggcctgccactgggcccagcgagcccctccgtgagtgatggccgctatgctgctcggccccctcaggcctgcctcagcctggctggccggcggcggggggag

SEQ ID NO: 261102 - DNA, 126 bp, Homo sapiens
  chr9:136773825-136773951
  hypo
gaaccgctgggagggcgtccccacgcccttgccagcgctgcacccctctgaggcagacgcagctacaaaccaggtgccaggagcaggccccctcgggagcggacttccaaccgcttgcctggtttg

SEQ ID NO: 261103 - DNA, 57 bp, Homo sapiens; identical to SEQ ID NO: 213149
  chr9:136785103-136785160
  hypo

SEQ ID NO: 261104 - DNA, 39 bp, Homo sapiens
  chr9:136786010-136786049
  hypo
ctaactcatacccctcggcccacccgcttcctggctggc

SEQ ID NO: 261105 - DNA, 193 bp, Homo sapiens
  chr9:136795959-136796152
  hypo
cttcagaatctgtaagcagccatggagccacccccagacagtgctgagagccagttttaactgcctcagaagtctctgagcctcccaaaatgctttaatgaataataaataggagaattaagcccgtttattggaaggtgcgcgctgctctttaactcgagcaagagaagcggcctagcgatttcctctggga

SEQ ID NO: 261106 - DNA, 75 bp, Homo sapiens
  chr9:136801158-136801233
  hypo
cctgcacacatggcttgacccgctcaagggaactttgagggtgggagtgtcaccgccattttacaaatgggactt

SEQ ID NO: 261107 - DNA, 161 bp, Homo sapiens
  chr9:136802014-136802175
  hypo
gcagcccctcagagccgcagccgcctcactggaaaccatggacgatgacaagggctgcccatttgcaaactgcttggccacacagctggtaagttgaataatgagagtttaatccaaatttatgtacgtcttacatcactgcattccgccatagcaaatta

SEQ ID NO: 261108 - DNA, 138 bp, Homo sapiens
  chr9:136834267-136834405
  hypo
tccaccgtgcccgccgggcctgcgaggacgagagctggattccaccgtgcccgccgggcctgcgaggacgagcctctgcacctgcttccctcctgccggatgaactgcggcttctcacggctgcgctgctggcatggt

SEQ ID NO: 261109 - DNA, 303 bp, Homo sapiens; identical to SEQ ID NO: 213150
  chr9:136835362-136835665
  hypo

SEQ ID NO: 261110 - DNA, 281 bp, Homo sapiens
  chr9:136836266-136836547
  hypo
agtcaggcagagtccgtgtgccctctgaccctcagtctccaaagcttgcagatggaacagtcgtaactgctgctgtgaggcctgtcgggggcagggaaagccctctgggggtcagacccacttggcccctcggtgtttaactgatcctgatcgtcaccatctgggtcgccacggcagcccaggggcagccgcaagcaggcaccgtgggaccggtgactccactgtgccccaggaacccaggagggggccacatgttctacgccaatgactctctagcctag

SEQ ID NO: 261111 - DNA, 196 bp, Homo sapiens
  chr9:136852629-136852825
  hypo
ccatcgccaggctggcgtgtccgggaagaggcagggagcacagggagttgaggtggaggtgggggacagactctggcaggcccagggccaagcctttgcgtggtgtccagcaatggctgcctgatgtgttttacgaggaggaggccaccaggacgatgtgggcaagtcagaggctgggcggcgggtggtaccttaa

SEQ ID NO: 261112 - DNA, 191 bp, Homo sapiens; identical to SEQ ID NO: 213151
  chr9:136905412-136905603
  hypo

SEQ ID NO: 261113 - DNA, 34 bp, Homo sapiens
  chr9:136915611-136915645
  hypo
gggtggcagcgatgacgggcgtctgggagacggt

SEQ ID NO: 261114 - DNA, 230 bp, Homo sapiens
  chr9:136920306-136920536
  hypo
cagggctccctgctctgccccgcaaggaccgcctagcccgcaccgcagggtgatcctgttaaaaccaagtcggatcaagtcaccggtctgctcaaaacctcccaggggctccacgtgactcagagtgaaagcgagtcctgccccaccctggttggtggggcctggggtgaccgagtcctgagacctgtgtcctgtctcctgtgacttgcggccctccctcaaggcctgga

SEQ ID NO: 261115 - DNA, 84 bp, Homo sapiens
  chr9:136993426-136993510
  hypo
ctcttaacaacatgtcgctgccgttgctctgtggcaggactacccaagctaccttatccttttggcggccgtggactgttccag

SEQ ID NO: 261116 - DNA, 141 bp, Homo sapiens
  chr9:136999417-136999558
  hypo
cccggccggattttctcatttttactagaaggttctatctcctgggggtggggtgaggtggtgagaccaattcacctggaagtggaagctgggaacttggtttgagttctgagggttctggggtctcgccccttatcttgc

SEQ ID NO: 261117 - DNA, 438 bp, Homo sapiens
  chr9:137017038-137017476
  hypo
ctcccagcagcccgcgtgagatcataacttgtctgcttacgcttttttgttctctttgcttcgaagtcgcatctgggacaccgcctcaggccagtgcctgaagacgctcatcggtgagtgtggctctgtgtgggggctgggtctgtggggagggcctcccctgctgggttcactgcccctgttcttcaccagctcctcctccctcctctgccctgggtccgcccctgcaggaggaaccttcctccgtgtccgaccgttccgccagctccccctgaccgcccgctggctctgttgctccttctggtgcagttttcctgccatggcctttctcttgggccagcctggggctcctccacctgtgctgtcggcctcactccggctgctcactggagtcctctgggcagccccattgcctcctggcttcgggcccctgctgtc

SEQ ID NO: 261118 - DNA, 44 bp, Homo sapiens
  chr9:137280523-137280567
  hypo
gccgccattctgggcgcatcgggctctcccggcccctttccctg

SEQ ID NO: 261119 - DNA, 190 bp, Homo sapiens
  chr9:137280948-137281138
  hypo
atccgccacctggccggtcctgtcgtggacgccctcagctcgctcccgtcccctgcccctctggatggcacagactgcacgttgttgccatttcacggaacccgttttcccggatttgtcaggaggggagagaatggtggaaatgcagttttgctgggttccctgcacacgtgggcgctggctttggtca

SEQ ID NO: 261120 - DNA, 217 bp, Homo sapiens
  chr9:137281713-137281930
  hypo
gctagctgcagccccgtctcaggttcttggggctgggcaccgaggagcagagaagctgcctgccacctgttcaccctcgcatctgcaggccagcggctcgtcccctcctgctgccacagtaccctgatatgtgccgattggtgggattgggaggggacacagcgaggccttgggtcagagccttgatgaggatgggggtggccgtcctgggggcagc

SEQ ID NO: 261121 - DNA, 182 bp, Homo sapiens
  chr9:137282423-137282605
  hypo
cggggcaggagggacgtgctgaggctgagctcggaagaggcaactctgggtgcagttgagcctctgggctggtgtcgttgagctccgccgcagccctgggagtggcagaggcagggagggcgcccatgttggggttgtgatgggggaagtcctgctcagcgggctgacgtcccgttcttggt

SEQ ID NO: 261122 - DNA, 96 bp, Homo sapiens
  chr9:137282869-137282965
  hypo
ccaccgcgtggccccggtggccatgccctgcctattctaagcaccggtgcccccatctgcaaatggtgctgctcagcgggccgtgggaagactggg

SEQ ID NO: 261123 - DNA, 48 bp, Homo sapiens
  chr9:137293295-137293343
  hypo
ggcacacctggcccgtagtgagtgtgaatttgcgtcagagagctgtcg

SEQ ID NO: 261124 - DNA, 82 bp, Homo sapiens
  chr9:137314810-137314892
  hypo
gcacagaaatgcctgctccacgcgcatcacactccccgtgatgccatgcggcggccaggacggtggctgggagctcagcttt

SEQ ID NO: 261125 - DNA, 34 bp, Homo sapiens; identical to SEQ ID NO: 213152
  chr9:137330715-137330749
  hypo

SEQ ID NO: 261126 - DNA, 60 bp, Homo sapiens
  chr9:137352256-137352316
  hypo
tcccacgatacactcggtttccaacactccagtatgcgcttctgccgatggctctccttc

SEQ ID NO: 261127 - DNA, 250 bp, Homo sapiens
  chr9:137360364-137360614
  hypo
tagggccctgcaggcggaggctgggacctctgcacccacctcaaaggcctgtccatttgcagggcgggactgcccacgaggctgggcctgatccagctccagacaccaaccccatggaatcccagttccacctggggcagcctgtgatgagcaggtcacctcacctctccaagccttggttttatgtctgtaaagtagaggcaatgttatccctcgctgcacagggttgatgcaacggggcaagaaataa

SEQ ID NO: 261128 - DNA, 93 bp, Homo sapiens
  chr9:137387911-137388004
  hypo
atgcatccgagcttcgctcctttctgtggttgaatcacactccactgtgcggatgggccggttttgtttctccatcaccgttgctggaccttt

SEQ ID NO: 261129 - DNA, 153 bp, Homo sapiens
  chr9:137433016-137433169
  hypo
aggaaaaggcccctcgtctggaatccacggagcccctgggcaatcgtgtattaatgatccttttcgggatgctgggatctgcctgcggcatcctcctgggacagcgacggtctcaggacacagcagagtcatcagatccgcctggtggttaca

SEQ ID NO: 261130 - DNA, 156 bp, Homo sapiens
  chr9:137439057-137439213
  hypo
ggtgcagcacagggcggagggaggagttgagtggtgacgcggtcgtgaactcgggcgtcagcccgtcctgtggacggctctggagctgggattccctttggagttgtcctgcgttgaggtaagcgggctgagcctccggaccgactcccatgcggt

SEQ ID NO: 261131 - DNA, 140 bp, Homo sapiens
  chr9:137474607-137474747
  hypo
atcaagatcccgctcggcccacgaaggcctgagctcttaaccagcacgcgtccatgccggtcaaactgatcttcacaggctgttggtaattcaatactgtcaacgcatctttaagaattccttggccgggtgcggtggct

SEQ ID NO: 261132 - DNA, 99 bp, Homo sapiens
  chr9:137497208-137497307
  hypo
catctcaaaaataataataatgataatcattccaccttccgcacacactggggcagggactgggctgcaaggctcctccggcaccgcccctgagacatt

SEQ ID NO: 261133 - DNA, 264 bp, Homo sapiens
  chr9:137515857-137516121
  hypo
gtcccccaaggttccggacagatgccatccgacgtccaacagaactctgcaccaatggaaacatcctatatgtgggcggggtgattggtaaccactacgcacatgtggccattgacacttgaaatgcggctcgtgtgacagaaaaactgaatttaaatgttgcttaattgtaatgacttttaagtgaatatttaagtaaccacgtctggccaccggctatcacatcgcacagcgcagttgcataacggccgagctggcaaagcc

SEQ ID NO: 261134 - DNA, 165 bp, Homo sapiens
  chr9:137542648-137542813
  hypo
tctgagggtgctcccgtcagcacctgtgatcctcaaacccgcccttcgtgccaggtgggatcggcccattctgcagatgtgccagtctagctccttgagtccagctggcacaaggggatgaaaaccaccctccacgtcccagtggtcacacggcctgcatgttgg

SEQ ID NO: 261135 - DNA, 133 bp, Homo sapiens
  chr9:137575893-137576026
  hypo
gcggacttctgcagcgtttctgttgttggtggagaagcgttctttcatgaggggccccacttccaaggggaggggctgctgagcctgagagatgctctccagcagggcaggctgtgaccgggccgaagttgcc

SEQ ID NO: 261136 - DNA, 132 bp, Homo sapiens
  chr9:137580163-137580295
  hypo
ttgctcccctgccccggccgctgccagtgctggaattgagtcttagggatgacccagggctcggcactgtgtcatcttcagcaggtggaccggcagctggcgcatcctctctttccacgggctgcatccagg

SEQ ID NO: 261137 - DNA, 36 bp, Homo sapiens
  chr9:137583040-137583076
  hypo
cccctctcacgagcccggcttcgtttcactgtagtg

SEQ ID NO: 261138 - DNA, 106 bp, Homo sapiens
  chr9:137601996-137602102
  hypo
gggatgttaggcttgtggtgcggatgaaaggaggcaaagccggtgcggcccgccccgtgctcactcagcgtggtggcaggtgcgccgctgtgtgctggcaggctct

SEQ ID NO: 261139 - DNA, 80 bp, Homo sapiens
  chr9:137602132-137602212
  hypo
tgatgatgatggtagtcatagtgattgtgcagtattttcatagcatcgccgtcagtgccgttaaccctgtctcattgaaa

SEQ ID NO: 261140 - DNA, 199 bp, Homo sapiens
  chr9:137609684-137609883
  hypo
cctgtttcggttggacgaggagggggcctgggtgccaggcagtcatgggggggctggctcaacccagggatgggggatggggttgaaaggaggagtgcatgattaaatggcagaggaggcactgagcatgcgattagagggagcagcagcatgagaagcagcctgggctggggggccgcggccacgggagcctctaatt

SEQ ID NO: 261141 - DNA, 352 bp, Homo sapiens
  chr9:137620492-137620844
  hypo
acggggccgcaattcgctttcagtacacggaaggagacggcgagggtgagacctattactacgaatacccctactacgaagaccccgaagacctagggaaggagcccacccccagcaagaagcccgtggaagctgccaaagaaaccacagaggtccccgaggtctgggctgagcgggggactgggttgggctgggcccctcgaggccatggtgcaggggagggcgaggccaggagaggttgtgtcagggtagagggttgggggctgtctggtgaaggttgcgggggcagctcagtgagggagccggctgttgccatccgagctttgctgtcacggggcgtatcgggctttcc

SEQ ID NO: 261142 - DNA, 615 bp, Homo sapiens
  chr9:137621052-137621667
  hypo
tctgaggtcggcctcgggtcctccccgctctgggctgtcatcccctcacctctgaaattggggagggttgtgagggtgcgtgagcggcagtgagagccggagggtcacacctagcagggcccgggccccgtgcaggagtgtgtatgggtgggtgtcctcctggggaggaggctgtccagcctcagagccattgtcagaggtaaagagggtggggtgtgagcatgggcggtgtgtgtgtgtgcatgaacgagtgtgtgtgagcatgtggcatgcaggcacgggtgtgcttgagcctgcgtgtgtgtgagagtgtgtgtgagcgtgtgtgcatgcgggcacgggtgtgcatgagcctgtgtgtgtgagcgtgtgtgagcgtgtgtgcatgcgggcacgggtgtgcatgagcctgtgtgtgtgagcgtgtgtgagcgtgtgtgcatgcgggcacgggtgtgcatgagcctgtgtgtgtgagcgtgtgtgagcgtgtgtgcatgcgggcacgggtgtgcatgagcctgtgtgtgtgagcgtgtgtgagcgtgtgtgcatgcgggcacgggtgtgcatgagcctgtgtgtgtgagcgtgtgtgagcgtgtgtgcatgcgg

SEQ ID NO: 261143 - DNA, 159 bp, Homo sapiens
  chr9:137622086-137622245
  hypo
gaccccgacccccacggaagctgctcccatgcctgaaaccagtgaaggggctgggaaggaagaggacgtcggcatcggggactatgactacgtgcccagtgaggactactacacgccctcaccgtatgatgacctcacctatggcgagggggaggagaa

SEQ ID NO: 261144 - DNA, 253 bp, Homo sapiens
  chr9:137622810-137623063
  hypo
ggaaagttagtctgcgtctctggacctcgcggttctcctttccaacatggcactgacagttcctgtctctgggggctgtgaagttttcagattcaggaggagccttgcgtagtgtgtagcacatggccgatgcttaacatagccactgtgtgatgcagaatctccactgccagagaggacacctcgttccagcaggtccagacccctgcgtctgcagcaccgccctgggatgcattatcgcaagaccctgggg

SEQ ID NO: 261145 - DNA, 417 bp, Homo sapiens
  chr9:137623293-137623710
  hypo
gcctggtgcgtttgcgaggcaaccctgcgccttcctctccctctgcagccagctccgcctccaggggaaggtgcggatgacttggagggggagttcactgaggaaacgatccggaaccttgacgagaactactacgacccctactacgaccccaccagctccccgtcggagatcgggccgggaatgccggcgaaccaggataccatctatgaaggggtgagagggtgcaggcccccgttccgggtggggttggggggctggtggggcatcatgggggctcctgcccaagagcctcctcaggggtgggcctctacgggcagctcaagtgttacaccctattcccaaaactttatttttaaagagacctcggtgcctcgaatttgctctgaataacgtgtgtatcggagcatactctcc

SEQ ID NO: 261146 - DNA, 109 bp, Homo sapiens
  chr9:137632038-137632147
  hypo
caacagcgagtggccgctgctcttgcccagccagcaccggccaaaactccagacaggcaacagcgagtggccgctgctcttacccagccaggaccggcatggctggagc

SEQ ID NO: 261147 - DNA, 126 bp, Homo sapiens
  chr9:137632911-137633037
  hypo
ccatccctgctcaccgctcagcgccctcttgatgtccagatcttgctcgatgcccgctaatcagctgtgaaagatcactggctatggggtgaggccctgcagtgcagcctgcggtgggccgggctc

SEQ ID NO: 261148 - DNA, 478 bp, Homo sapiens
  chr9:137642192-137642670
  hypo
cctcagcccacagccgtgcccctcccttctccgggtgggggtttctgaaacattcctgccacggggtctcacagcttctgtgcgtgtccagtgcatttcccgggtgggccgcttctccgacgccctcattctcgctgcagcccagccctggcctggttgcactctgacttgtctctcttggccccttgtcttcagggcccccctggacgcccaggccttcctggggccgatggcctgcccggtcctccaggaaccatgctcatgctgcccgtgagtacccttatcagtcggaggtggggaggcagctggggcaggtgggatccaaaccagaccctctgaggctgcgctgtcactggagaggcctgtgggccccgtctcagtctgtggtcttgcctgggtgccacgtcactgctcccagagtgacccttgtcttacacttgcagttccggtttggaggtggcggcgatgcgggctccaa

SEQ ID NO: 261149 - DNA, 340 bp, Homo sapiens
  chr9:137645494-137645834
  hypo
acaactgcatttcccggctcctggaaagtcatcgttcttccccccggttctgttcgaggcagacaggtcgcgctttgtgtgctgagcaccgtggccgaagccctgtcccctccccctgcccctcccctgccacccccagcccttcctgtgttctcgagtccccacctcgagcagacattaacacacaccatgtctccctagggtccccctgggagcggaggtttgaagggcgagccgggagacgtggggcctcaggtatgtgggatccttgccttcgctgtctggtgggcgcctcccgttctccggcggcagcgacggcgagcatggagggaccccaact

SEQ ID NO: 261150 - DNA, 204 bp, Homo sapiens; identical to SEQ ID NO: 213154
  chr9:137646059-137646263
  hypo

SEQ ID NO: 261151 - DNA, 202 bp, Homo sapiens
  chr9:137648332-137648534
  hypo
cccaggggcagtggcgtgatccccctttgacagtctgggatgacgtggtccggaaagaccagccccgtgtgttccatccgttggtgtgaggcacagaacagccccgcccgggctcctggatctgggtcctcgcagcagcccggccactcgggctgtgaccttgggggtgggcgcggctctggtggaacgctcaacttggttt

SEQ ID NO: 261152 - DNA, 113 bp, Homo sapiens
  chr9:137650028-137650141
  hypo
aggcggggtgtccacgtgtgcagggtggcgtctgaggcagcctttctgtcctttttgcagggtgaccggggtttcgacggcctggctgggttgccaggcgagaagggccacag

SEQ ID NO: 261153 - DNA, 109 bp, Homo sapiens
  chr9:137650639-137650748
  hypo
ttgaaagtgtgtcccgtgagtcccgagctagtgcggtgacctgggggtcttcctggctgcgccgtttctatgtggttgttggagaacacagatgcggcagctttggata

SEQ ID NO: 261154 - DNA, 232 bp, Homo sapiens
  chr9:137656919-137657151
  hypo
ttctgcacgagcctcgccgaccggagagggcgtgccagctcttgcccagagtagcgtcctggaaaagatctgtaccccacgcctccttctgcacattcagtcttggggttcccaccagggactagtttcacctggtgctctcctgcccgcaccctctgaccctgtgatatcataaaaacaatcgtatgtcgctgcggaggggaattcaggagcgagccggtaatgaggatag

SEQ ID NO: 261155 - DNA, 81 bp, Homo sapiens
  chr9:137708698-137708779
  hypo
tcacagcccgggtgcgacactgtcttaggaccctctgtgctagccccaaaagaagagagaggcggccgcagggctggccga

SEQ ID NO: 261156 - DNA, 40 bp, Homo sapiens; identical to SEQ ID NO: 213155
  chr9:137709404-137709444
  hypo

SEQ ID NO: 261157 - DNA, 227 bp, Homo sapiens
  chr9:137709949-137710176
  hypo
tagttatgtcccccggagccctgcgacctcatgcctggtctttgagtcggccagacctgagccgcctacctctgaagtggaccgtgtccgatggtgaccgtgtctgctgcggggcccgtgcagaagatgggacgccgtcacccatgcagttggcttggggcctggcccagagcacacgggaggctattctgtcagtgaggtgatggcggcccggcctggcactgtct

SEQ ID NO: 261158 - DNA, 79 bp, Homo sapiens
  chr9:137710620-137710699
  hypo
gtgaggggcagaggggttgccgagtggagggacgggggaccagcaactcatgcagagcgtctctgtgtttcagggagaa

SEQ ID NO: 261159 - DNA, 90 bp, Homo sapiens
  chr9:137716485-137716575
  hypo
catccaggacgcggcggaacatcgacgccagccagctgctggacgacgggaatggcgagaactacgtggactacgcggacggcatggaag

SEQ ID NO: 261160 - DNA, 274 bp, Homo sapiens
  chr9:137718800-137719074
  hypo
gccttggcccaggcgaggactgagtctccctgttgctcctggaaggtgaccaagcctgcagctctcgtgcccctgcatcagcttgaacggcctctccttcatgagctcgcagttgtcgcgtggccccaggcaaaggccgcccatttctggggccgcagcggtttgctgtgcaggtccagacctgtgcgcccctgcagcctctgcttcctaacaacctcagtgccccagaagcagtttcctgccaggggaagagcagctacgttctccccaggga

SEQ ID NO: 261161 - DNA, 155 bp, Homo sapiens
  chr9:137719321-137719476
  hypo
ggccagaggccccgcgtggaattcccttagaaaagaggtttctcggccctccttcgcggcctgcctctgcaaatgggtggccttgccgctgtggaaatcacgggccagactcctccaaactcagaggtttcctgggaagccgcggctggtgttca

SEQ ID NO: 261162 - DNA, 33 bp, Homo sapiens
  chr9:137727555-137727588
  hypo
gaatggaggccggagcggcgggaggcttgctga

SEQ ID NO: 261163 - DNA, 552 bp, Homo sapiens
  chr9:137760000-137760552
  hypo
gaccaaggacccagcggagcagatccaggctccctggaacttcatggagaatgccctatttttccctctgagcaggtgattctgacacaccacaacaactaccccttctccaccgaagaccaagacaacgaccgagatgctgaaaactgtgccgtgcactatcagggagcctggtggtatgccagctgtcacctgtcacacctgaatggtgtctacctcgggggggcccgtgacagctttacaaacggcatcaactggaagtcggggaaagggaacaactacagctacaaggtgtcggagatgaaggtgcggcccacctagcccggcgctgaggtcagaggttctctccacacaccctggctggaggagcgcatccctcagccctcaccaagagggcaatgtggggatcatggcccccatcctcatgggaagagggagctcccaccagtcccttataggcatggcccgcagagctttgcacccagtgccagcatccagccccctgcctcccatctgcaaggctaggcgaagccccagcgtgcctccctcacc

SEQ ID NO: 261164 - DNA, 248 bp, Homo sapiens
  chr9:137774781-137775029
  hypo
ttcccacctcaacacggaggccatgacactcttctccacctgtctcagatgaggaaactgaggctcagagagtccagggatttcgctctgttctcacacttggaaggaaaagagccgagattctacccatggtctctggatttccagctcccggcccctgagtgaacaggagagccccgtgaggcctgggtcctggatctagaaccttctggtgcaggatgggcaagcctgggcggggccacagtcac

SEQ ID NO: 261165 - DNA, 82 bp, Homo sapiens
  chr9:137926909-137926991
  hypo
ggtgtggtggctcacgcctgtcatcctgctttcaatcatcttgggtatacgctcaaaagcaggattgccagccaggtgcggt

SEQ ID NO: 261166 - DNA, 1026 bp, Homo sapiens; identical to SEQ ID NO: 213157
  chr9:138011453-138012479
  hypo

SEQ ID NO: 261167 - DNA, 186 bp, Homo sapiens
  chr9:138060951-138061137
  hypo
caggagtggatcctcgccagacaccgtccgccggcaggttgaccctggatgcctggcctccagggcagtgggaaaggtgctgtttctgagccaccccagctgccgtgtgtggcaatggccgcgccacagactcaggcatgggcacagacaagaaacataaacccacatactcgcagggattgattt

SEQ ID NO: 261168 - DNA, 68 bp, Homo sapiens
  chr9:138068322-138068390
  hypo
agcaggccccagacaactcccgggagggggtcttgctgacagccagcggggcagggcccctggtctgg

SEQ ID NO: 261169 - DNA, 164 bp, Homo sapiens
  chr9:138077116-138077280
  hypo
ctccccaggacgaacgcaggcctggcactgggctgacggagtggccgctgcccgggtcacgccatagaggccagcacttgcagcggcttggcctggccccagagcagtttctatgtgcgtgaaaggaccgaagattcaggtcaccatagcgtaacgcagaccag

SEQ ID NO: 261170 - DNA, 37 bp, Homo sapiens; identical to SEQ ID NO: 213158
  chr9:138106859-138106896
  hypo

SEQ ID NO: 261171 - DNA, 376 bp, Homo sapiens; identical to SEQ ID NO: 213159
  chr9:138143894-138144270
  hypo

SEQ ID NO: 261172 - DNA, 209 bp, Homo sapiens
  chr9:138148459-138148668
  hypo
agggcgcgcctccccggctttaactgtctccttgacattcacgatgctgcgcaaatggctcctccttggagactcctgccctgacaatgcagccctgtgcgctcagcctcacgttggcagagttctctgcgtggcagtgattcaagttgagttttcccatttgcgtgttaattatcagctcccctcgccctgcacgcttgctagaacat

SEQ ID NO: 261173 - DNA, 43 bp, Homo sapiens
  chr9:138150429-138150472
  hypo
accgcatggggcgacggcggtgatgccaaccgtatggggtgac

SEQ ID NO: 261174 - DNA, 724 bp, Homo sapiens
  chr9:138150502-138151226
  hypo
aggtgatgccgactgcatggggtgactgaggtgatgccgactgcatggggtgaccgaggtgatgcccactctatggggcgacagcagtggtgctgactgcatagggtgatggtggtgatgcccactgtatggggtgacggtggtgatgccgactgcatggggtgatggcagtgatgccaactgcgtggggtgaccgaggtgatgctgactgcatggggcgaccaaggtgatgccaactgcatggggtgacttcggtgatgcccactgtatggggtgacggtggtgatgccgaccgcatggggtgacggcggtgatgccgaccgtatggggtgacggcggtgatgcccactgtatggggtgacggcggtgatgccgaccgtatggggtgacggcggtgatgccgaccgtatggggtgacggcggtgatgcccactgtatggggtgacggtggtgatgccgaccgtatggggtgacttcggtgatgccgactgcatggggtgaccaaggtgatgctgactgcatggggtgacggcggtgatgccaactgtatggggtgacttcggtgatgccgactgcatggggtgacggtggtgatgccaactgtatggggtgacttcggtgatgccgactgcatggggcgacggcggtgatgccaaccatatggggtgacggtggtgatgctgaccgtatggggtgacggtggtgatgccgaccgtatggggtg

SEQ ID NO: 261175 - DNA, 109 bp, Homo sapiens
  chr9:138163500-138163609
  hypo
tccagcgtcactggcgcgtttggctcaggcgggaaggttccattctcagacagcgaggaagacgtttgaagacatgccactctgttgaatggcacgcacgcccgggtgt

SEQ ID NO: 261176 - DNA, 43 bp, Homo sapiens
  chr9:138190748-138190791
  hypo
atggggcgaaagttcgggaggacttggccgggcagttcccaca

SEQ ID NO: 261177 - DNA, 175 bp, Homo sapiens
  chr9:138247969-138248144
  hypo
tctatcgggatggacgctcagacccttgcaaggcagcactgacgggagccacggcggagcaatggcctcgatagtgaccgggcactgacgggagccacggcggagcaacggcctcgatagtgacctggcactgacgggagccacggcggagcaacggcctcgatagtgaccgggc

SEQ ID NO: 261178 - DNA, 161 bp, Homo sapiens
  chr9:138265193-138265354
  hypo
tggaggcagccttgcgatgagctctgctgcaggcctgtggacgcgagccccactgcttcatggtcgcccactccctctgttagagtctgacctgagtccatttgtactggcagcttccacaacacccactgagacccacgccaacgcgccccgcccacgag

SEQ ID NO: 261179 - DNA, 162 bp, Homo sapiens
  chr9:138274930-138275092
  hypo
ccgtacccacttctcgatcagggctggcagcagaaggccccaagcccctcccactcttgtgtgccccccgctctccgacaactttaaaaaataggcaaccgacaccagatgtagagccccaggcagggtcctcgtggccacggctgccggcaattcgtggac

SEQ ID NO: 261180 - DNA, 913 bp, Homo sapiens
  chr9:138289054-138289967
  hypo
atttgtcttcctttcgggaggagagcagcccagcggggaagtgcagcgtggcctctcccagtgcgcccagtgccaaggcagtctgcaggaagtggcacactgctggcgcagggacagggcaggtacacagggcagaggccgtgcccatcccaagcctgtgccctgagccagagccctgctcccagcccctcccagagaggatcgtcctcactcggtccgctgcaatgatgcccctgcatgaaagaagctccctgctccctcagagtgcctcacctgggagcctcctctgggcctggtggagcccacaacccagcgaggacctggcacagttggcaatgtgagtggtggcccacgacgcaacttgtgattgtggttgtggtggagtaacaacacctcgtccacacctgcccgtggaatgctgcaggccaggcgctgggtcacactcttcacgcggattatctcgtgtgacacctggcccacacccgtccgtggaatgctgcaggccaggcgctcggttacactcttcacgcggattatctcgtgtgacacctggcccacacccgcctgtggaatgctccaagccaggcgctgggttacactcttcacatggatcatctcgtgtgacacctggcccccacccgcctgttgaatgctgcaggccatgcgctgggttacactcttcatgcggattatctcatgtgacacctggcccacacccgtccgtggaatgctgcaggccaggcgctgggtcacactcttcacacggattatctcgtgtgacacctggcccacacccgtccgtggaatgctgcaggccaggcgctgggttacactcttcacgcggattatctcgtgtgacacctggcccacacccatctgtggaatgctgcaggccaggcgctggattacactc

SEQ ID NO: 261181 - DNA, 42 bp, Homo sapiens; identical to SEQ ID NO: 213162
  chr9:138296701-138296743
  hypo

SEQ ID NO: 261182 - DNA, 89 bp, Homo sapiens; identical to SEQ ID NO: 213163
  chr9:138297097-138297186
  hypo

SEQ ID NO: 261183 - DNA, 42 bp, Homo sapiens
  chr9:138339188-138339230
  hypo
catcctccacctgtcggggaactgtgccgcccgggcctgtcc

SEQ ID NO: 261184 - DNA, 86 bp, Homo sapiens
  chr9:138353991-138354077
  hypo
gctctgggagggcacggctgagccctccctttttctgcattcccaaggctggctcctagacggctccaaaccgtttccagggttcg

SEQ ID NO: 261185 - DNA, 121 bp, Homo sapiens
  chr9:138393597-138393718
  hypo
cacttgggagcaggggtgggcgggaactgcgctctgcctgtctctgctgccaccggtgggagacgcagcgtcgctcctcctccctgccgtagatttcaacgacaagattttgaatgagccc

SEQ ID NO: 261186 - DNA, 84 bp, Homo sapiens; identical to SEQ ID NO: 213164
  chr9:138456651-138456735
  hypo

SEQ ID NO: 261187 - DNA, 44 bp, Homo sapiens
  chr9:138507285-138507329
  hypo
gctctccactccatccggaccagggacggcggggacgtggactt

SEQ ID NO: 261188 - DNA, 125 bp, Homo sapiens
  chr9:138562774-138562899
  hypo
ggtctctcgggcatcgaaaggacaagcttaagggtcgtgcaaatgcaccgcgtgtacaggacggctgtgtgcacacgtgcaccggggcgaggggctgtcgatgccacttcccttcgcagtgttct

SEQ ID NO: 261189 - DNA, 424 bp, Homo sapiens
  chr9:138562929-138563353
  hypo
ttaccagggaagccggagctaggagcagaggcaggcgaagccccaggaggggaggcatgtccactccccacagcccctcccataccagaggcccttgacaatgcgcctgcaggtcaggcgaccagctaggtgtggggtgagcccccgcctctgtttccccaaatgactggtatgttcctgggcacacatccgatggctgccagcctgcacgtcacgcccagctgccggagctactgcgggattccagaacaaggaacgtgacatgctcggcctggagcggaacaaggcacctggctcccgcaccctcgacggggccctgcccagtggacacgaccacgtggaagcctcttcctcctggcactgcagagcggatggcggatgcagatcccactttggggatggcgggcactgctggtaaattcta

SEQ ID NO: 261190 - DNA, 313 bp, Homo sapiens
  chr9:138569350-138569663
  hypo
agctgccttcctacaagcaacgcactgacggtgatccccacacatcggcatcaccatggacaaggtcctctccacgtggaaatccgcgctttcctgctcgcagcttcatgaacattttcttggctcctgtgtgcgccgtggtctttgtgcaccatggcctgtgtacaccatggtctgtgtgtgtcgtggtctgtgtgcaccgtggcctgtgtacaccgtggtctgtgtgcgccatggccgtctgcctgtcttcggcactggagcctccctttggctaacggagcacctgggcgcctgccttctgcttgtcaga

SEQ ID NO: 261191 - DNA, 42 bp, Homo sapiens
  chr9:138603672-138603714
  hypo
ctcagccaaactgctggccacgctacacctgctgtagctgaa

SEQ ID NO: 261192 - DNA, 135 bp, Homo sapiens
  chr9:138634104-138634239
  hypo
agcctcgcagacctcggcatgaggtggagctcaccgcgctcgcttctggatgctggggaccacacatggggcctgggctggcttcgtgctgagcagggccagggcgagtgcccaaagcatcgtcacctgcttgcg

SEQ ID NO: 261193 - DNA, 388 bp, Homo sapiens
  chr9:138637700-138638088
  hypo
ctctgaggagctagcggagccctccaggctaccagtgtccatgaacctctgccgcagcaaggaggcttgggccactctggcaggaaccaccaggcgggtctaccccagccgggtcggcctagagctgaccccagccaggcctctgcagccacaggctccctccccaggtgccgctgcgtgactcgtgaagacagatcgcaccagtcacctgaaatacactgcaggggaaaatggatcgttttcatctcctttttgtggtggtgctcggagaagtgggcggccacagttcattaaaaattaaaagcagaggaggcttcattaatgtctctggcatcgcaggctccagtttctcagggagtctgccaggccccagcgtttctctgcctcc

SEQ ID NO: 261194 - DNA, 44 bp, Homo sapiens
  chr9:138643904-138643948
  hypo
caaatgtctggtgccgtttatgcgtaagagtgctcaggcgctga

SEQ ID NO: 261195 - DNA, 32 bp, Homo sapiens
  chr9:138643978-138644010
  hypo
tgtcaccatccagccatcggggtgaaccctgc

SEQ ID NO: 261196 - DNA, 548 bp, Homo sapiens
  chr9:138649885-138650433
  hypo
ctacccaggtgcaggctgcccgtgggcctcagcggagacgcaggtgtggccaggcgtgggctgccccttgggcctcagccgagacacaggtgtggccgtgggctgccccgtgggcctcagccgagacacaggtgtggccaggtgcaggctgccccgtgggcctcagccgagacgcaggtgtggccaggtgcaggctgccccatgggcctcagccgagacacaggtgtggccaggtacaggctgccccgtgggcctcagccgagacgcaggtgtggccgggccgtctgctttccactgtccttctagtctctattcattggctcctggcggggtccacagtccctgcccgctgacagccaccactccttccacagaatgacttccaccgtgccatcctgcggacacagtcagccatgttcaaccaggtcctcatcctcttctgcaccctgctgtgcctcgttttcacggggtgagtgccggccgtcagtgtgagcaccccaggacgttgggagggcccgagaggcaagcagggccgggcgaggggatac

SEQ ID NO: 261197 - DNA, 553 bp, Homo sapiens
  chr9:138651296-138651849
  hypo
gcattgtcagccagcgtcaggcaggaggtggctccggcagagcttggggacagatgggcagggctgagggcctgatgccacccagctgtcaggagggcggggctcgcctggtgatgcacagctcagtctcctgggcagtgagggtcccgtgggcaggcaggatctctgaggggccacggccccccagctcctgggccccaggccgcccctcactgccaggggttgcaggacctgcggcatccagcacctggagcgggcgggcgagaacctgtccctcctgacctccttctacttctgcatcgtcaccttctccaccgtgggctacggtgacgtcacgcccaagatctggccatcgcagctgctggtggtcatcatgatctgcgtggccctcgtggtgctcccactgcaggtgggtcctctgggcaccagccctgggtggcaccagcaaagggacaggcgggtgccagtagagggagggtgccactgaggctgtggcacagtgcgggggccactcccaggaggggacagtgaggccaggcgggtggtgcctgct

SEQ ID NO: 261198 - DNA, 37 bp, Homo sapiens; identical to SEQ ID NO: 213168
  chr9:138654778-138654815
  hypo

SEQ ID NO: 261199 - DNA, 767 bp, Homo sapiens
  chr9:138660477-138661244
  hypo
ttcatcctcagcagcaggaacgaggtggaccgcacggctgcagtgagtgaggctgaggccctgcccaggcgggaggggcaccgtggggccggggagcgggggtccctgagggaagagacctgccccaggctgccggtgccgcccagcagcccacagaggccagcccgtctgcactgaccaaccacccaccccgccaggaccaccagaccatcctgcgcgcctgggccgtgaaggacttcgcccccaactgccccctctacgtccagatcctcaaacctgaaaacaagtttcacgtcaagtttgctggtgcgtctggggcacacgtgggtgatggtgtatctggggcagggcacgtgtgcacacgtgggtgatggtgcatctggggcagggcgcatgtgcacatgtgtgacggtgcgtctggggcaggacgcgtgtgcacacgtgggtgacggtgcgtctggggcaggatgcgtgtgcacacgtgggtgtcggtgcgtctggggcagggcgcatgtgcacacgtgggtgacggtgcgtctggggcagggcgcgtgtgcacacgtgggtgacagtgcatctggggcagggcacgtgtgcacgtgtgtgtcggtgtgtctggggcagggcgcgtgtgcatgctgttgggtgatggtgcgtctggggcagggcgcgtgtgcacacgtgggtgacggtgtgtctggggcagggcgcatgtgcacgcagttaggcgagctgtgtggggcagcgggaggggctggccctggagc

SEQ ID NO: 261200 - DNA, 502 bp, Homo sapiens
  chr9:138661532-138662034
  hypo
ccagggcctgccccgccctggaactcctcgctgagctgggagagaagcacaggagcgatggaaggtccaccgaggctcagaccaagtagggggttgaggtccacagactctcggggcagagatgctgaagccggacagcagacacgggggtgccaggcaagggtgcatctgcatagcaccttcaggaagtgagcaggtactgtgggggaggagagagccggcagagcggcaggtggaccggcctcccccactgcccgcagaccacgtggtgtgtgaggaggagtgcaagtacgccatgctggcgctgaactgcatctgcccggcgacctccaccctcatcaccctgctggtgcacacgtcccgcggccagtgagtgccccgtgccccgggggaccgacctccatggcggggccggcgcagggagacaacgcagggcctgcttgggggcggggatgggcttcccagaggaggggcacatggcgggcaaaagtcctgcataggg

SEQ ID NO: 261201 - DNA, 361 bp, Homo sapiens
  chr9:138662653-138663014
  hypo
acagggcgggtgagcggcggtacctgaagttgccggtgcctctgcccaggtatggcgtgtgcctcatcgggctgaagcgggaggacaacaagagcatcctgctgaacccggggccccggcacatcctggccgcctctgacacctgcttctacatcaacatcaccaaggaggagaactcggccttcatcttcaagcaggaggagaagcggaagaagagggccttctcggggcaggggctgcacgagggtccggcccgcctgcccgtgcacagcatcatcgcctccatgggtgagccgggacaggcgcgcgggactccctgggcctgctcctttggcgggagaccaggcgggacaccggcagg

SEQ ID NO: 261202 - DNA, 137 bp, Homo sapiens
  chr9:138663355-138663492
  hypo
gttggcagctcaaccggaggctcctggtggtcccatcagcccggagggtctgcttcacgtgtgtccctcaaacagtcgggagtcctgacgtccactggggccaggagttggcggaatgaggtcgcagtggccgaggg

SEQ ID NO: 261203 - DNA, 46 bp, Homo sapiens
  chr9:138666573-138666619
  hypo
tgttgtgtgtgtgtccgggtgtgtccatttccgtgtgcctgtatgg

SEQ ID NO: 261204 - DNA, 304 bp, Homo sapiens
  chr9:138670510-138670814
  hypo
cgggccctcggtcccgccaccagcctggacagcctgctgcagtgtggcatcatctatgcggacaacctggtggtggtggacaaggagagcaccatgagcgccgaggaggactacatggcggacgccaagaccatcgtcaacgtgcagaccatgttccggtgcgtccagtgtccggggctcggctctaaaccaccccacagccacgaccacgggccctcgccctgagacccccacagccacgaccacgggccctcgccctgagacccccacagccacgaccacgggccctcgccctgagaccgcc

SEQ ID NO: 261205 - DNA, 203 bp, Homo sapiens; identical to SEQ ID NO: 213171
  chr9:138718007-138718210
  hypo

SEQ ID NO: 261206 - DNA, 214 bp, Homo sapiens; identical to SEQ ID NO: 213172
  chr9:138719254-138719468
  hypo

SEQ ID NO: 261207 - DNA, 311 bp, Homo sapiens
  chr9:138743579-138743890
  hypo
caaacagatctatgttgatacggagagatttccgtcactcatcttgaccgctatatggtcctccacgatttctcacaattatgacaaatgctgccatcacaaagcttgcgtgtgctgtctatgcgtgtacagacgggtgttgcccaggcatactctgagaggggactcgctgggccacgagctaggcacgccctcctgtgtcacctggcaacgcccttctgcctggttgtgcctcgctccagtcccacccacagcactccacagcttgctccttcccacctgcaccgcagcatgaccgacctgtccatgtc

SEQ ID NO: 261208 - DNA, 246 bp, Homo sapiens
  chr9:138770462-138770708
  hypo
gaaagctttggggcacagctcgaagccagtgaagcatctgagaacccacaccggagagggcctaggaacacagcgcgggtgagagagtttgctcggggaactcgcacttcctacacacccgggcattcacactgcaaaaggtgctttggaagcattcagccggtatcgcatcctgcagtgaggactcgcacccgggagaaagtcacataaggagaaaccactaacgtaaggaacttaaattcatat

SEQ ID NO: 261209 - DNA, 183 bp, Homo sapiens
  chr9:138774057-138774240
  hypo
tacctgctacagctgcaccacgccttagtgcagcttcctcattcgacaggaatgacactctcttcaaccaccgcacggcacccgcagtctcaccgggaacgccatgggagcaaccaaacaaaggcagtgcaggaggcaccgagaatggccctgacccagaacgctctggaaaaggcacaccag

SEQ ID NO: 261210 - DNA, 117 bp, Homo sapiens; identical to SEQ ID NO: 213174
  chr9:138774512-138774629
  hypo

SEQ ID NO: 261211 - DNA, 491 bp, Homo sapiens
  chr9:138780559-138781050
  hypo
atataaggagtcaacggaaataattccaactcaaggtaaaagcgaccagtagtccacgccccagctccatcctggagaggccagacacaagggtaagaaaagctgatgtaatggtccccacagggccaagaccacctgacccccacccagggacaaccagtaacaaactgcaccttgacagcggagcgccaggtgcacagacaagcacacaccccacagggcgctggcccgggcatgccacaccaggctcaggtgcagacttggcttccagccagaaggccagcaagggagaccctcgggaaccctcagagaggggagaggatcccagagaagagggggctggatagggagaccctctaaatctgtgtcacatcctggccactcctgaagcaactacagtggcacagcagccactctgagggccacagcccacagcccagccagagcggcaggacgaagaccgaaaatgaaacctacgctcaactgtatgt

SEQ ID NO: 261212 - DNA, 77 bp, Homo sapiens
  chr9:138796491-138796568
  hypo
agaatgtaaaagccctctctcggcaaaaagaagtggaaaccagccaggcgtggtggctcacacctgtaatcccagca

SEQ ID NO: 261213 - DNA, 77 bp, Homo sapiens; identical to SEQ ID NO: 213175
  chr9:138796808-138796885
  hypo

SEQ ID NO: 261214 - DNA, 40 bp, Homo sapiens; identical to SEQ ID NO: 213176
  chr9:138824557-138824597
  hypo

SEQ ID NO: 261215 - DNA, 119 bp, Homo sapiens
  chr9:138831883-138832002
  hypo
ggtagaaacgcatcgcttatgtggacacgaggcagtcaggccaacttcagaccctttcaggtttgtcccgatgactgtgtggataagactgtctcggcagccaccgcaggtttacccca

SEQ ID NO: 261216 - DNA, 308 bp, Homo sapiens; identical to SEQ ID NO: 213177
  chr9:138836303-138836611
  hypo

SEQ ID NO: 261217 - DNA, 244 bp, Homo sapiens
  chr9:138841434-138841678
  hypo
ctccacagctgctgcgctggaatacgaggcctccagacagtttcccctcctggcacccgaggaagtcaggctccaccagaccaagggacagatcgagaagaacaagacacctggtcctgcggcaggcagaactcgaggacggccgcacgctccccgggcctggcagttgcccgtgcgtggctgcacagcatgagcaggacacagtccactctggggtcaggttacatcacgcggcacagccgac

SEQ ID NO: 261218 - DNA, 60 bp, Homo sapiens
  chr9:138867841-138867901
  hypo
acttcctggcccctggcacccggcattctactttctgtcgctaggggcttgatgacccta

SEQ ID NO: 261219 - DNA, 154 bp, Homo sapiens
  chr9:138871837-138871991
  hypo
tccatctccacggccggcccccgtgctgagttcacggccagcccccgtgctgaggccatgcaggtccctgtgctgagtccacagccgtcccccgtcctgaggccacccaggcctggcccaggagggtggacatttcctttgtgttttttttgag

SEQ ID NO: 261220 - DNA, 330 bp, Homo sapiens
  chr9:138873215-138873545
  hypo
tgaccctcccccaccctgctcgcaggttgtcgcaggacacgtgttcgtgtccaggtgcgctgggaagggtcctggcggtgctcctctcagcgcaggtcccgaggagctacaggcatgacgctgccttcagaactcccccgagcctgctccttcccagccttggctcgtgaggctcctccgaggaccacgggccttccacggcgtagccctgccacgaagcctccccatgtcttgcctccagcatcacctggccgagacggacctagggcgtccttctccagcatcatctggccgagacggacctagggcgtccttctccagcatcacctg

SEQ ID NO: 261221 - DNA, 177 bp, Homo sapiens
  chr9:138874536-138874713
  hypo
cagggccaccagcacggatggccatcagccgggaggagctggggatcctgggggtctgcactattgtgctgtcatctcagagccggagcagccagggaagggaacggaaagatatttgggggcacagctggctgccaccacctgctaaggtgggtctacggccggggcaggaaagag

SEQ ID NO: 261222 - DNA, 76 bp, Homo sapiens
  chr9:138875025-138875101
  hypo
aagagtggcgcccgcgtagtaattcctaattaaatagagcacaaaacaggggattgtctagcgattagccaaaccg

SEQ ID NO: 261223 - DNA, 51 bp, Homo sapiens
  chr9:138875479-138875530
  hypo
ctacaatcccgcgccgccctataaacataatctattcgcgtgcctctttca

SEQ ID NO: 261224 - DNA, 555 bp, Homo sapiens
  chr9:138877539-138878094
  hypo
aagcgctctgctcacgtgttggttgggactcgggtgaacacgaggcagcggaggcaatcagaaaggacgcgctgagggctgcgcttacccccatctctctttccctggggtaggccccttcctcctgctcctcctgaatgctggcacctgcgcagccctctgccatgactccagagccaacccatgctcacaacctccacgtgctgcccccagctggcctgggcactcggcctccccctctcctaggtccagagaacgggtctgaaagcctgtgggggccaacagcagcggcctgttccccaacctgcacctccagcccaggctgtcctcctcatcctgcgttcccgggcctggtgtggagctggacacgtcccgaatgtccctgtgtccctgcgcaggcatcaggtctgaaatgccatcggtgcttcaggctctcgtgtccgcgtggccggcaggatgcttcttctgaagtggaccgagagccgttcactcgtgccaaggggtgtttgagaacggagccaagtgcagggcctgcaggggcggtgctggagggtg

SEQ ID NO: 261225 - DNA, 298 bp, Homo sapiens
  chr9:138878431-138878729
  hypo
gcctggggggcacgcggtgggcggttggtgcacacacaggcccttggctctgacaggcctggagcagtgcaggggtgccgtgccgggtcctcagcaccggctcccaggcagccagggacttcccggagctccctggtcaccaacccaggcttgatggaggccccggctgcatctctgacccctgacccctgaccccagcctgcaccaagccccacacgtgactggaatttcgcctgcacgttcggcctggtactcacaggaggctccgagcagcccaccctttcggacaagctggtcg

SEQ ID NO: 261226 - DNA, 335 bp, Homo sapiens
  chr9:138880242-138880577
  hypo
ctggctctaccatcgttcagcagaacctcatgcgtaagaagtaggggaaggcatgggatcatcatcccctcctgatagagaagctgagccgcaagtgggactcctaagaggagacgcctggagacgcctttagtcttaatatgttcccgtgtgtgcatatgtgcacgtgtgtgtgtctgtgtgcacaggcgcgttggggtacaagagtgaacacagcacccgggagcattccgcatctgctcacagtctcagcctgaggcagccgggccaggcttgctggaaaacaagccccgggatcggaccaagcagctgcccctcctcgcactctgcctggc

SEQ ID NO: 261227 - DNA, 690 bp, Homo sapiens
  chr9:138887921-138888611
  hypo
atgctgggcggtcacgcctgtctcatcgttgcagcagctggtctgtcctgatgctccaggtggacgcttcgttcttggctcggcccgtggaaaccatgaaaagtggaggtcctgtgtggggcatctgcaacataccagccacggagctcggggctcacagtagcttctcagtaaatactgaatggacgcctggtttccagtttccgtgacacattggtaagatggcaatcgttaccctgttttacaaaatcttagacaagttaagtgactctgaaagtcccccggccaggacatggagctgggacctggtctcaggctcacctggctcccgactgctaggccgctgtgcacatgtgtgcaggttgctactgcacatgggcactcagctgaaggggagaaaggggcgaatctccagtccccatcctttctccctccccgccatcacgtgccaggcactgcctttgcccaggggctccttgtgattgtaacagaaggccgagtggcctggtgggtccgggacccattctgtgctgctggctcaccctccacacagcaacaccacgggcaccgtttccacgggcaccatttccacgggcaccatttgcttctgttgcatgacaagggtcgggccggagagaggcctgcgtccctgaccagagcccatgagggaggaagcggcacagaacagca

SEQ ID NO: 261228 - DNA, 209 bp, Homo sapiens
  chr9:138890407-138890616
  hypo
gctgccagccctgccgctccagggaggcacaggcgcctccaggccggctccagaatcctgccagcccctctgtgcttgggcctgggggcttctttctgccacagccactgttacgatggaggagagacactgtcatcagcttcctgccccctggccagcacctgggctaggttggcactggaggtgcgctcacacgccaggtgagatgc

SEQ ID NO: 261229 - DNA, 100 bp, Homo sapiens; identical to SEQ ID NO: 213180
  chr9:138901527-138901627
  hypo

SEQ ID NO: 261230 - DNA, 161 bp, Homo sapiens; identical to SEQ ID NO: 213181
  chr9:138902149-138902310
  hypo

SEQ ID NO: 261231 - DNA, 48 bp, Homo sapiens; identical to SEQ ID NO: 213182
  chr9:138906092-138906140
  hypo

SEQ ID NO: 261232 - DNA, 55 bp, Homo sapiens; identical to SEQ ID NO: 213183
  chr9:138907131-138907186
  hypo

SEQ ID NO: 261233 - DNA, 39 bp, Homo sapiens
  chr9:138909964-138910003
  hypo
tgcagagcccacctgcggccgcaccgcaccaggacgctc

SEQ ID NO: 261234 - DNA, 184 bp, Homo sapiens; identical to SEQ ID NO: 213184
  chr9:138910983-138911167
  hypo

SEQ ID NO: 261235 - DNA, 569 bp, Homo sapiens
  chr9:138911434-138912003
  hypo
tggaggtgaacaaccgcgcccccacacagggaaggtgcaccagggtcacgacgagagggcccggagcagcagcctcccgggcagcagggcccagctactgagggtaggcaggtgggcagcctccctggaccacacggggcgaagcaaacacaaggacaaatgctgcccggggcgcggggttggggccttcagggacccagaaggagcccccgccgtaccttccaggcccttctgctcccagccgggcgacaccaggggagcttgcgagagggcggctgagcctggaggacaccacactcaggaagctgccagacacagaaggacacatcccggggctccactcgcaggcggcccccagagtcgtcaggtccacagaggcgggaaacagagggtgggtgccggggctgggtgggggaacggggagggaccgtttcatggggatgagaggttcatctggggaagatgggaagttctggagccgatggcagtgatgctcacaaaacagtgggaatgcgcttagcatcaccgaaccacgcacgtaaaagtcactgcaacggcccctctcacgt

SEQ ID NO: 261236 - DNA, 31 bp, Homo sapiens
  chr9:138922161-138922192
  hypo
gagggtactggaggccgggcgcggtggctca

SEQ ID NO: 261237 - DNA, 239 bp, Homo sapiens
  chr9:138948881-138949120
  hypo
gcctccagcagccagtacctcgagggagggctgggaggacgctccatcctcggcagcagcaggctctgcgtccgatagggccttgtggggtgcccgtggcgttggctctgccgggggtctggtccaggggcctgtgtgactgagccgagccctgcgcttatggggaatgacccaagcagccacggctcacctgaggcatggcccctggccaccaacacgctcatctctaaccttcactt

SEQ ID NO: 261238 - DNA, 432 bp, Homo sapiens
  chr9:138950492-138950924
  hypo
gtgacgagctcgatcgcaacccacctcagcatcgcaccatgcacccaggtgacaaacctgtacacgtatctctgaatcgaaaataaaagttgaaaaaaggaaaagattcaactcacacagcaccagagattcggaatagcccccacctgcacacttcgggcaatgcctcacgctggggcatgggattggacaaaagtccttggcagagctcaagccatggaggggacgcaggggccggggcaggatggtctcctgaccgccaccccaccccagtggatagcgctgcccctggatgggtagcagaggcccaggtgtgggaggcgtgactctggcccctgggccccgccctcctgtctgcagggagaggcagtgtgggggctgtagagggaaggtgctgggtcaggggcaggggagaagcgtgatctggaaccc

SEQ ID NO: 261239 - DNA, 85 bp, Homo sapiens
  chr9:138954964-138955049
  hypo
gtgggccaggtctgtcgatctgtctctctcctgtcaaacgtgtggtttgagccgcattcccattacgtggcggggaccagggatg

SEQ ID NO: 261240 - DNA, 36 bp, Homo sapiens; identical to SEQ ID NO: 213187
  chr9:138970475-138970511
  hypo

SEQ ID NO: 261241 - DNA, 172 bp, Homo sapiens
  chr9:138974809-138974981
  hypo
gagggggaagacgccgtgttttacggctgtcataacttctgccccattagacatctacactcacatgaaagcgaccagattgatctcctgacgaccgagcacttcacacggcagaacctttctggcaccgcaacagaaacctgagggccctcttcctcgatgccagaaacgg

SEQ ID NO: 261242 - DNA, 192 bp, Homo sapiens
  chr9:138975400-138975592
  hypo
tgtcttctgagaagggaaaacgcggacacctgtgaagagcgccgtgcagaggccaggccgagactggcacgagacgggcatgagcccagggcaccacaggcggctggcaccacgctgcggaggcaggcgggggccccgagacactgtggcctggggcttttggcctccaccgctgtgcaagaagaaattcct

SEQ ID NO: 261243 - DNA, 258 bp, Homo sapiens
  chr9:138976374-138976632
  hypo
aactggcccagaccccggagtcagggtcacgaaggccatggaaaggccacagaatacaccaggctggaagagcccagagacacagcaagactcaaacagacgcgcacgccacgtccatagcggcagcaccagacagccaagaggcaagtggccccagggtccgccaatgggtgacagtcaaaggaaatggcggcgggcgcacacacacacatacatcacgcagcctggagaagggacgggctccgccactccctgcaa

SEQ ID NO: 261244 - DNA, 212 bp, Homo sapiens
  chr9:138979354-138979566
  hypo
acagagccagtcctcgcagggcccggctggggaagggccccgcagcttctggggccgcctgggagccctctctgggtctgccttgggctggccctagaccttcctggtgaccagaaagcaggatacggtaccccattcggagctcacagcgggaaaactgagacccagggaggccatggtgtttgcccagcttccaccgcagcacgggggga

SEQ ID NO: 261245 - DNA, 133 bp, Homo sapiens
  chr9:139000509-139000642
  hypo
ctccctgtgccatccgccagcccaggcttgattgagctccatatgaatattcatacagcattctgctgggaccgtcgttaatattctgaggaagcggcaagaatgcccgtccccatgtcgtgagccatggtca

SEQ ID NO: 261246 - DNA, 122 bp, Homo sapiens
  chr9:139006538-139006660
  hypo
caactccctgcagcgttgacaccgcacgagcggcaccaccagccccctcccgcctcccgtcccaccttcaccctcagccaagaggcttgggtgactctgagtaatacgttaacaaaaaacaa

SEQ ID NO: 261247 - DNA, 85 bp, Homo sapiens
  chr9:139012326-139012411
  hypo
cagatagagggtggcgtgtaaagcaggtggtcacccgtcactcgacttttcgcgtgctggtgagggtggtcgcatgtccatggat

SEQ ID NO: 261248 - DNA, 496 bp, Homo sapiens
  chr9:139028141-139028637
  hypo
cagcacttcggggttatttatgaattcatctatttcctgggacaagccattctgcatttggttaccatggtagctttaaacccggtatcttattaattctgcatgttatgaaataaatatagatcagacaattgcagtgatggttctatctttttattatgcatttggttcttggtgccggggatgggatgctcccaacacaccaccgtcaacacacatccatcagcctcgggggcctgggcgggctgcaggggcgcactcctgcgcctgagaatggagtggggctgaggaggggacacgaggctgtctcagggaaagggtgaagcttgaagaccccccagggcaccggcagctcctgaaggaattcctacagcccggcagggatggacgcaccggggaaggaggccggtgtcctggggtgcttcggctggaattgcagggccagtgggttggaatggctcccacctgcggactgggacctcgtggcgctgccgag

SEQ ID NO: 261249 - DNA, 184 bp, Homo sapiens
  chr9:139041469-139041653
  hypo
tggcatggaagcggcggaacccaggacgcactgggagaagccaccatgttcgcccacgaggcctgattctgccctgtggagggggacctgggcacaccacacactgccctgtagaacatggacaatgataggaacaaggctgcaggccatcgagagatttggggcgactcgtcagtagaattcc

SEQ ID NO: 261250 - DNA, 59 bp, Homo sapiens
  chr9:139043908-139043967
  hypo
ctcagcagctttgggcgagggggtctggtcagctgccctgtggccgaagccccaccttc

SEQ ID NO: 261251 - DNA, 66 bp, Homo sapiens; identical to SEQ ID NO: 213191
  chr9:139044756-139044822
  hypo

SEQ ID NO: 261252 - DNA, 72 bp, Homo sapiens
  chr9:139047581-139047653
  hypo
taaaaaggacgcagcgctgacacacgggaaaacacggcgagcctgggagcgtcaggccgagggcaagaagcc

SEQ ID NO: 261253 - DNA, 814 bp, Homo sapiens; identical to SEQ ID NO: 213192
  chr9:139051193-139052007
  hypo

SEQ ID NO: 261254 - DNA, 235 bp, Homo sapiens
  chr9:139061803-139062038
  hypo
agcccctgccacggcgtcagagcaatggcccttcatagagagacctcagagtgcccccacccctgtcactgggagaagggctgggtgagacggggaggacagggccatggggcctgatggagagggaaggggctttcagggatccggcactgtggccagagcattgaaaggttccaagggcgctgtgccccttccacccgccctccctcctgggcaagcccgggcccccgggtgg

SEQ ID NO: 261255 - DNA, 170 bp, Homo sapiens; identical to SEQ ID NO: 213193
  chr9:139069742-139069912
  hypo

SEQ ID NO: 261256 - DNA, 70 bp, Homo sapiens
  chr9:139071634-139071704
  hypo
aacgtggccatgtgcgtgtgtccccacactgggtgggcagccccctgcgtgagcgcgtgtgtgcacacac

SEQ ID NO: 261257 - DNA, 251 bp, Homo sapiens
  chr9:139075039-139075290
  hypo
cgggcagggggagccgaaagtaaaccccttggagacacattagtgtcctggggctgctatcataaagtgccgccagcttggcagtttacacaacggaaaggcatcctgccggtgtcggggggccacagtctgaaatcaaggtggcctgctggggtggctgcctccaagggctgggggagaatcatcgtcctgtcccacgcctctctccccgctcctggtggctgctggcgtttgcccgttggcttccgcca

SEQ ID NO: 261258 - DNA, 112 bp, Homo sapiens; identical to SEQ ID NO: 213194
  chr9:139079354-139079466
  hypo

SEQ ID NO: 261259 - DNA, 207 bp, Homo sapiens; identical to SEQ ID NO: 213195
  chr9:139079780-139079987
  hypo

SEQ ID NO: 261260 - DNA, 105 bp, Homo sapiens; identical to SEQ ID NO: 213196
  chr9:139101084-139101189
  hypo

SEQ ID NO: 261261 - DNA, 34 bp, Homo sapiens; identical to SEQ ID NO: 213197
  chr9:139103914-139103948
  hypo

SEQ ID NO: 261262 - DNA, 236 bp, Homo sapiens; identical to SEQ ID NO: 213198
  chr9:139106806-139107042
  hypo

SEQ ID NO: 261263 - DNA, 603 bp, Homo sapiens
  chr9:139110883-139111486
  hypo
ttctctccaaaccacgatttctgaattttcttctttgtgtggcttttcaggcaagggaagcgattttttcctcacatccggcaatgacttcaaataagacgaaaagaaggcccgcagaggcttcacgctgtgagagaggggagggcaaaggtgagaagagcctcctttataaaatcctaaagtaggagccgtggcattcaggacagctctgggccacccctttcatcctttgggcatttattggggcatgggagtcagtgggaacagctgacaccccgcctgggctccggctgcgcttccacctgggggataagaggagacacaccaaatccacagatttacaaccagttccagttgtaataagtactatgactcatttatgtttgtggggaccttaaggcgttttgtaaagctgggttgagcatctgccaagatgagctttattctgactgcgatttccaacacgcctaagagccttcaccgacgcgcccacaatctgccagccctgagtgaggcatctggaagtcggggcctggggtggacgtcagcccctccctgatgtcaggcccctgagctccctgcgtgcccaccctgtgtggacag

SEQ ID NO: 261264 - DNA, 930 bp, Homo sapiens
  chr9:139114399-139115329
  hypo
aggtgtgaactgggcgccccgcgtggccgtgcctctcctgagctgggtgtgtctgcgaagagctgatcgctactctggggccacactggtctctgctctgggccatgccgtgactctgtgctgaagagcactcctcctgcacgagtggagcctggctgccccgaacgcaccagcatgccaggcaggtaggggagcgtgcccggcaccaagacggtcccacacccgcctcttctcaggggaacacctgcctctggtctgcgtgtgtggaggccccgcccgagacagcaagggcacgaggggccttgggacaggggtgaggggtctgggagagccacacactgctagcggttcctcagccctccacagagaatcctggccaaccatctggaggcagcctggcgtcaccatcaaacctggagggggcggtgctggggtgccaggagggcagccagggcacaaagcgagacggtcacagtgcaggtgtctgcagctgccttcccaagtgcgtctccaaaagccctcgcaggggcaaagctgtttcctacattcaccgcaaggcccctcacagtggacagaaaaacagtcgcctatcaagttgcaaggaggaggaggagaagctcagggtgagtgctgggcgaacgcatgtgcagtgaggcctttctctcgtctccgggaagactgtcagcaataatgactctccgtgagctgcccctgcacctggtccctggaccttatttagacttggccagaagcaaggcttcagaactgtacgtgtgaaatcaaagtatgacgatagaaacgacgttttacagaatcttggatttggcaaaaatgttgagagttcagaatacggcaacgaaaaaaatcttagtaataatgcatacaaaatacagaatgacctcaaggtgagctgggcgtgtcataaaaatg

SEQ ID NO: 261265 - DNA, 235 bp, Homo sapiens; identical to SEQ ID NO: 213203
  chr9:139118753-139118988
  hypo

SEQ ID NO: 261266 - DNA, 138 bp, Homo sapiens
  chr9:139121427-139121565
  hypo
ctgcacacacaacagaatcacggccgtgtgacatcatcaagccggcctagaaacagcaaaaacaaaagacgggaagaagaaaacgttccaagatgtttgccaggatttggttttcacggtgggatctggtcccatctg

SEQ ID NO: 261267 - DNA, 244 bp, Homo sapiens; identical to SEQ ID NO: 213204
  chr9:139128188-139128432
  hypo

SEQ ID NO: 261268 - DNA, 89 bp, Homo sapiens; identical to SEQ ID NO: 213205
  chr9:139130639-139130728
  hypo

SEQ ID NO: 261269 - DNA, 1001 bp, Homo sapiens
  chr9:139132822-139133823
  hypo
tgacacagcggagacggctccctggacgtggctgtaaggccctcttagcaaaccatcccgtcttacttcaacaacaagtaagtggcctgggtctctcggtgtagtctcagacgcaccaaccacagccactggggaggccagcggggagcccggctgctccgatgcaccatcctttctgtaaaatactcatgtggtcgccacagcggggctacattaagccatttctgggcccgtaaggagacaggaggcctccactgcccaactcttcctccttccaccctctccatcctcccgagtccagtgagcacctggcagctctcacgggccgtcagccccgccaaatgcccgctgacacctgcatgtccccctccctctggcccttattgtttctttttccagtaaacggacaatgagcctgtggggaacaccaagttctaattcatctccaagaagcctgcagcctagtcgagtagacaagaaaccagaccaagtgggacagaggagctggcagcaatcacagaatgccctacccttccttcaagagatgtcggatgtgtccagctcccaacccccacctgtcctctacaaagacacaggaatgaactgccatggctccaggtcacccacacctggacacccatcccggcctgtcactcagctgcgtgaccgtgactatcccacgcaacctcacgtgctatcacctgcaacatgagcgcccccgcactcctgaggacaggtgtgggaggactcggcctgttccacgcaacctcatgtgctatcatctacaacataagcgttcccgccctcctgagggcaggtctaggaggactcagcctgttgtgggtggtggcctgccctgttttctcaggctgaccaagtgaaggagatgggagggaacaggcaccagggccacagagggcgcacggggacacaggccctgcctttagggtgcaccctcttgtccactcaagactgcagaggcatttcggagatctcaccgg

SEQ ID NO: 261270 - DNA, 55 bp, Homo sapiens
  chr9:139134454-139134509
  hypo
ccacgggcaatgggcgccctatccctgtgggacagctccacgcagggatgacaga

SEQ ID NO: 261271 - DNA, 168 bp, Homo sapiens
  chr9:139256371-139256539
  hypo
tattgatagaaaacaggccacgtccagagaggcccagggccaaaacctccttctggaaggccgaagtcccacagtgccggggagcgcaggagtcagctcggctccgtcttgccagggctggggggaccctcatcctcacccgcttccggagctgcagtggatgtgggg

SEQ ID NO: 261272 - DNA, 80 bp, Homo sapiens; identical to SEQ ID NO: 213208
  chr9:139264125-139264205
  hypo

SEQ ID NO: 261273 - DNA, 953 bp, Homo sapiens
  chr9:139268624-139269577
  hypo
acacgggggagaaacgtcccttccagaagtgtcgttatcctcgttatccccatcatgaggcatccctgctctccaccaggatgcatgtgaggactgaggccactctcggggtcccccaaaccagcttcagaagagccggtgacagcagggcacagctcggcccccatccagggacaacggacagcagagtctgccctgaactgtgcacttcagcgtgtgggctgccagagcctcatccctgcaggcttgggaacccccaggccccgcctcacccggtaaagctggttgaactgagttgccacccaacaggttcgagaaggggccgccaggctggaaggcaaggaagctggtgtggagcttgcctaaccgttctcagcctccagccctcaggcctctgtgcggacaacgtctgacatcacacattaaggagcggacagttaggggtcctcctgggctctcgggaatgccacattccagggggccgtgcccctgctggacccctcaccatcaacatgagcgagtgtgcaggccggggccatcctgggccctgccagggagcgaaccggagctggcaccaggccctcatgacccagtgtttccccagcgtttaaaacgcggaccttagtgacttccctgtggtgtgtgtccttaggagtgaacacacataccatgttctctaaccatatcggaagctaaaaatcggtaacagatatcggcaaaatctctaaatatttggaaattaaataatataccgctaaataacccacagatcagagtggcccccagactaggcaccagactagagaaccaggcacagcaacacatactcaggagtgaggtcggccatgggaccgtcccgtctgccaggtgcccagggctgaggccccacagtggctccagtgaaggatcgaagcccagatagccaagggcctgggggcgctgctgccacagag

SEQ ID NO: 261274 - DNA, 34 bp, Homo sapiens; identical to SEQ ID NO: 213210
  chr9:139272165-139272199
  hypo

SEQ ID NO: 261275 - DNA, 47 bp, Homo sapiens
  chr9:139292779-139292826
  hypo
tctgagatctccacgtgggagcccgaggagccgggatccaaaatcct

SEQ ID NO: 261276 - DNA, 148 bp, Homo sapiens; identical to SEQ ID NO: 213212
  chr9:139300480-139300628
  hypo

SEQ ID NO: 261277 - DNA, 289 bp, Homo sapiens
  chr9:139302051-139302340
  hypo
cttctgactcggagcgcatcttcctttctgtgttctgcctcgcaacaagaagaaaggcccaatctctctaccggaaggagcccagcagcttctgagcccagagctgctccccagcactgacgcctgcctgctctgccacactcatgcacgattcctccaaaggaggctgcagaggccggaacagaaacgtcccacagagccatcgcccacagtgccgtggatttacctttgcataaattctgctggccggatcctctttcgagaggccgaggttcttggtcttcagaaa

SEQ ID NO: 261278 - DNA, 750 bp, Homo sapiens
  chr9:139317510-139318260
  hypo
cgcgctcgtgtgacacgcgtttgccctctgcactaggcaacgtgaagccggaagatgtgaagagagtcgcttctaagatgctccgagggaagccggcagtggccgccctgggtgacctgactgacctgcccacgtatgagcacatccagaccgccctgtcgagtaaggacgggcgcctgcccaggacgtaccggctcttccggtagaaccgctccccggcctgacagacccagggagctgcagctggagcccgttcccgtgcgtgttagtttggacacgaatttagtctaaaaagctgtctggttgtataaacggtgcaaacaatgtcgccacagcacccacgcggtttgcattcttttggaactcaatgtgccgatcagtggagtcagtatcgagcctgaccaccgcaagccaggaagcaggtgaagtgcccagcgctggagtgcagcgtgccacgaggagggcggtcggtgcttccctcctcgggctgtgggcacatggggccccgcaggttccttggaggagccctgagctgggaggcagcaaaggctgacctatcaaagcctcccggaggccaccgtgctgggtaccaggactcacctctgacaagcaggagaaggtaagggcccggtcagctccaaggagcgcgctccacgcgcgtgcacacagcttccctggtaataaagagctggcatctttcttagcacggtgttttccttctcgcctggggaggggcggttcttaagggct

SEQ ID NO: 261279 - DNA, 54 bp, Homo sapiens
  chr9:139324913-139324967
  hypo
gtggggcgtggcccgctcacctccctgctgttctcaagcgccccccacaaggaa

SEQ ID NO: 261280 - DNA, 489 bp, Homo sapiens
  chr9:139330350-139330839
  hypo
ccatttggaaatgtaaaacccgttctcagctcgccgactatacagaaacgccgtgggctaggcttgccagccgtcctccccgctccctctctaagtaacacttgtgcggctccttctggatacgccgtcttctgacatggttcccttccgcaaggggacacgagagcatagtgccggattcctgtgacctcccgcgagaacttcttcaaccctggctgcggctcaccaagcttcactggacacgttaaatcatgtcagcagggaggaacctcgctacctcacccctaaaactgtcgacaatcccggtcgggacagctgtgttcacacagtggtcattcgggacagagagcgttcctgtgggcacccctgtcaagtgatcccgggcccagcaggggctcctcggtcaccaggctggaggcccacggcccctttgccggcagcgcccatcatgtccacaccagcagccacgtggtcagtctgcccagctct

SEQ ID NO: 261281 - DNA, 365 bp, Homo sapiens; identical to SEQ ID NO: 213217
  chr9:139345460-139345825
  hypo

SEQ ID NO: 261282 - DNA, 275 bp, Homo sapiens; identical to SEQ ID NO: 213218
  chr9:139347810-139348085
  hypo

SEQ ID NO: 261283 - DNA, 141 bp, Homo sapiens; identical to SEQ ID NO: 213219
  chr9:139349659-139349800
  hypo

SEQ ID NO: 261284 - DNA, 96 bp, Homo sapiens; identical to SEQ ID NO: 213220
  chr9:139351904-139352000
  hypo

SEQ ID NO: 261285 - DNA, 249 bp, Homo sapiens
  chr9:139360042-139360291
  hypo
acaactgcaggagcggagtctccaaggggaatgagcagctccctcctgcacgcctgctgagccacggggtctgcgatggggatgtgatcaggggctgcccagagcctggatatgagctgtcctcagagtcacactttaaaacgcatgtcggggcaggcagggcagctctcaggccttaaaccaaactgcaatcgaagagacagcatcggcccgtcctgacacaccctgcttctcggaaggacggattgg

SEQ ID NO: 261286 - DNA, 67 bp, Homo sapiens; identical to SEQ ID NO: 213222
  chr9:139361592-139361659
  hypo

SEQ ID NO: 261287 - DNA, 125 bp, Homo sapiens
  chr9:139367913-139368038
  hypo
gcacagaagaatcttctgcacgagcacagccggtccccgagccgctgcccgcaccaccacgtgctgacagcagcttgcgggactccgcctcgcttagctgatgcgtgtggctcatgctccaaaac

SEQ ID NO: 261288 - DNA, 262 bp, Homo sapiens
  chr9:139374824-139375086
  hypo
ttaaacacagagcacgggcctagaggtttattccttggctgctgctgtgagagcaaaactgagtgtccaggtgagtggctcgaggcagccactcctctttctgcaatgtatttttgtctataaaatgcgagaatcgatgtgattattttttcctaaaaaacccgggtttaatcttatgagattctactcacagtggattctgggatgtcctaatcccacctgctgtttaacaggggtggccgggcacggtggctcacacctg

SEQ ID NO: 261289 - DNA, 40 bp, Homo sapiens
  chr9:139375859-139375899
  hypo
gattacaggcatgagccaccgcgcccggcccagggaattt

SEQ ID NO: 261290 - DNA, 143 bp, Homo sapiens
  chr9:139381429-139381572
  hypo
ctggagtgctcgcccggtgtgctcgccaggggtgtgcagcgagacagcactgtccactttctaggccttcccagggctgacatgaggctgaaggtgcatccccgccctggcacatgtgcccttgctctcggctgctggggaat

SEQ ID NO: 261291 - DNA, 165 bp, Homo sapiens
  chr9:139382433-139382598
  hypo
gagcggccagtgggcgtaggctagtgtggactctgtaggcttgctaagagacccgcaggtggtgtctggaagtataggaagcttccagaggcttttcagccaggagcgatgcaaccagtttgggccccaaaggctctccaggttagggttcgagctaggggctag

SEQ ID NO: 261292 - DNA, 192 bp, Homo sapiens
  chr9:139384213-139384405
  hypo
gagaacaaagaatgcgattgaaaacctcctaacgataacaagagctgttccctttctgagccctcaccccatgcccagcgtgcaccagcagctcaccatcgcaggcccagggccagcacccaggtccccacttgacccacgaggacactgaggtacagcaacagccaggacagcagccgccaggtggaaagc

SEQ ID NO: 261293 - DNA, 89 bp, Homo sapiens; identical to SEQ ID NO: 213223
  chr9:139384888-139384977
  hypo

SEQ ID NO: 261294 - DNA, 76 bp, Homo sapiens
  chr9:139389075-139389151
  hypo
caccacgcggcccccgtagagccgggggaggctgccctgaggagtgcaggcggcacggcagcggagcgtccccagt

SEQ ID NO: 261295 - DNA, 103 bp, Homo sapiens
  chr9:139401501-139401604
  hypo
acgagcgctcaggtctggggctgcacggacactcgggagaggcaggtgtcaagggtgccgtggagacgcccttcccactgggacccccgctctgggccctttc

SEQ ID NO: 261296 - DNA, 774 bp, Homo sapiens
  chr9:139421470-139422244
  hypo
aggttccgtgagacgcgctagctggggggaaccgggccgagcctggagaaagttttgagccaggtgtgggggtctgtgtgtggggggcagctttgggcccagtctcccgctgctgctgtgggcagcctccagcctgtgcccgccccagtctgtacctctctcccacatggccacagagctggagcaccctacagacggcgaacacctgccctccgcacagcacccagacgtccctgagaaggtgggagggacctcaggcctgcagcatggccatggccaggaccaccagcctgtgagcaaatccttcacagctttggcgctggccacacccccggtacccgggccactctgtcttcaatgctgtcccggcggccaggtgggtgtgggccgcgaggtgggcgccagggcttggccgagtgaggtggcacccaacagctgccgcgcccacggggatcctcagggcttccatgagtgacccgcaccccaccttccaccgtccccgcatctcctcctatcaggggcggtggggagacccctctggggctaaaaagtgaggcttgagatagggaacgccagtctcccccgactggacgagagagctgccctgtccaccaagccacccagctctcgggctcccacggaggagacccaacccacgccaggtgtgcccccgtggactccccttccgtgcgtccctcttagggtcacccggcacctgcctgtcccatcccccacgctcagtggcctggcggcgctggggtaacctgtcctatc

SEQ ID NO: 261297 - DNA, 34 bp, Homo sapiens; identical to SEQ ID NO: 213227
  chr9:139456527-139456561
  hypo

SEQ ID NO: 261298 - DNA, 204 bp, Homo sapiens
  chr9:139480859-139481063
  hypo
tgtgagaacgtgtgcgtgtgcaccagtgcttgctcacctgagtccacacgcaggtgtgcaagtgtgtgcccgtgtgtgtagaggggtgcatgtgtgtgcctctacatgtgaggggtgcgtgtgtgtgcatgtgtgagagtgtgtacgtgtgtgtgcttgctcacgtgagtgtccacacacgggtgctcccgtgtgcatgcgcgt

SEQ ID NO: 261299 - DNA, 416 bp, Homo sapiens
  chr9:139484035-139484451
  hypo
cagcggctcaaagagcggaggaaatctgtggatgcccccaccgtgcgatgtcccccccgccatgtgacacacccaccatgcgatgccctctcatccactgtgatccccccacactgttcagtgctcccgccaccacgcgatgccctctcatccagtgtgatccccccacactgttcagtgctccccccaccacgcgatgcccccctccacagtgcggtgcccccctccacagtgcgatgccccctactgtgtccccttggacctctgccatctccatcaaggtgtcatctgctggtgatacctgtgccctcacccacttggttctcgggccagagttggcaccatctggggcagccaggggccctgcgaggctgctccaagttctgcaccatttcccaacccgggggacagagccc

SEQ ID NO: 261300 - DNA, 104 bp, Homo sapiens
  chr9:139490202-139490306
  hypo
agcactcggtaaaccatgggagagggcctcggagaagatccagcgtggcgatgaaacgtaagttaaaggaatgtgtttagtggtccgttcgcgatgtcttgtta

SEQ ID NO: 261301 - DNA, 158 bp, Homo sapiens
  chr9:139497760-139497918
  hypo
ggaggtggggcttgcgcccgggtgtgcctgcctctaacgtctgcgcttctagtcatggcttttattgtccccagtaaaagagccctggacttcgggctctgtcaggtacttggggctgcgagttgtgagttggggaaacaggccgccgggaaccaaat

SEQ ID NO: 261302 - DNA, 140 bp, Homo sapiens
  chr9:139501902-139502042
  hypo
aggtgtttggggaggcggagcagagggttcccaggccagggacccaagggggtgggcccagtggctaattccagatggagccaacatgcaccagggaggctgtgcggggagggcccggacagtgacgcccccacggctgt

SEQ ID NO: 261303 - DNA, 417 bp, Homo sapiens
  chr9:139506143-139506560
  hypo
cccctgcgcgtgcccggtccccactcacattgccacctgcctccggtgtggctgcgaagtcggagggaggagagagccagccaggggtgtgggcgccaagatcagagactcgcacgctgctggacggaatgtggaccggcccagctgctgggtcacctgccggcagctcccgaaacaaccagtcaccacgagacccagcaactccacccctaggtgtgcgcccaagataaacggaagctcctgtccgcacaaacacccgtgcggcttccttcactaagggtggaaacggcccgggtgcccatgggtgggtgacggatgaaccgggtagaccgtctgtacaatggaatatttatccttccgccacaaaaacagaagaaattcggacgcaggcttcagtacggacggggtttaaagttg

SEQ ID NO: 261304 - DNA, 173 bp, Homo sapiens; identical to SEQ ID NO: 213230
  chr9:139509481-139509654
  hypo

SEQ ID NO: 261305 - DNA, 200 bp, Homo sapiens
  chr9:139517134-139517334
  hypo
gcccccaggacctgcgccctgcctcttctgcctcatcacacagacacgtggggagcagcctggatcttctcttctgtgcaggggctttgcccgggcaccgctctccctagccacggtgccgcccctgctgtctctcaggcacatcggtcggtctgcagccgcctggggcatgaaacgcctcttcccgggagcctccccgg

SEQ ID NO: 261306 - DNA, 298 bp, Homo sapiens
  chr9:139517555-139517853
  hypo
ggaggctccagccagagccccgtgatgggggacccgcctctgatgctgctgggctctcagggcagccccggccggttcccaccaggcagctcctggtgtggagagcgggcacatgcccgggcagcatcctccacagctggctgctcagaggacggggcgcctgccccacacccaccgtgggctcatgcccctcagggtcagggttcagggaggccccgtgcactcctggctctgggcccctcctcctttctccttccttctctccagtggcccacgaaggacccggggccactcctgg

SEQ ID NO: 261307 - DNA, 94 bp, Homo sapiens
  chr9:139546509-139546603
  hypo
tcaatgcactcatccgtggatgcgcatccgggtctatccacctctcggctcctgtgagcacaacgctgtgtgtacattgcgcgtctgtttgaat

SEQ ID NO: 261308 - DNA, 92 bp, Homo sapiens
  chr9:139571844-139571936
  hypo
cccagaagccacccccgaggcccggcctacccatcatgtccaggatgctctggtggttggagacgatgacacagggacgggcctcctgcagc

SEQ ID NO: 261309 - DNA, 45 bp, Homo sapiens
  chr9:139580886-139580931
  hypo
agtctgacctctggcccccaaccccagcctggcaaaaccaagctc

SEQ ID NO: 261310 - DNA, 321 bp, Homo sapiens; identical to SEQ ID NO: 213233
  chr9:139585994-139586315
  hypo

SEQ ID NO: 261311 - DNA, 682 bp, Homo sapiens
  chr9:139586516-139587198
  hypo
cccaaccccagcaagcgggggcaggggggcctgggctgcagtcggctcctccttcacccttcccccaaatacctccagagcacctatttccccagtttccccaccggcagtggtgtccaggggcttggctcttgcagggtggccctggctctggccctgcgccctgcccatgatgtggtcggaagggcctttggcagcaccggtccaagccttagcaaacccaactgggggctcagagccgccccccaatttcgggagcgacttcacctttccacaggatcatcctcttggcaagatgaggctgaggccgggggttcggggctcagcatcgaaagccggggcctgggtgccacaggccgtgacctcttccaccaaatgagagaaacggcaagacctccaggaagggccgtcggagcccagacgaggctgcagcttcctttggtgaagcgtccgagggccggctctggcgcctacaggggcttccgacgctgggtccttctcaggctgagcgccgcactcccacggccacccgggtggtgcacacagtttccagggtgtccaggcagcccccagtggacctggtgtccacgtcctcctctgaaccatgccaggcctgggccgtgggcatccgtgctgccgtgtggggcaggggcctgtgtcctggggccgtgtcaggcctggg

SEQ ID NO: 261312 - DNA, 159 bp, Homo sapiens; identical to SEQ ID NO: 213235
  chr9:139598243-139598402
  hypo

SEQ ID NO: 261313 - DNA, 283 bp, Homo sapiens
  chr9:139611137-139611420
  hypo
caccatgcccggcccgcctgcgtctcttaaaggcttccaggatgtggctgcgttgggctcctagggccccgttctccaaacctggttctccttgtgggtctggtccggccggaacttcccaccaatctgcattacggtggacggtgggaaaaataggggcagtgtctctcgcggtgggcgcgctcacctggccttgtgcggaggtgacgatgttatgaaatgagatcaggataggaagggtttgtaaaaatatcttcattcggccaggcacagtggctcacac

SEQ ID NO: 261314 - DNA, 474 bp, Homo sapiens
  chr9:139617709-139618183
  hypo
ccagcagtggctggggcctgcgtggccttggcgggccaagatcgccatcggcctgctggagttcgtggaggagctcttccacggctcttacgggactttctacatgtgtgagaccacactggccaacgtgggctacacagccacctacgacttcaagatggccgacctgcagcaggtggcacccgaggccaccgtgcgccgcttcctgcagggccgccgctgcgagcacagcaccgactgcacctacgggcgcgactgcagggccccgtgtgacaggctcatgaggcagtgcaagggcgacctcatccagcccaacctggccaaggtgtgcgcactgctacggggctacctgctgcctggcgcgcccgccgacctccgcgaggagctgggcacacagctgcgcacctgtaccacgctgagcgggctggccagccaggtggaggcccatcactcgctggtgctcagccacctcaa

SEQ ID NO: 261315 - DNA, 347 bp, Homo sapiens
  chr9:139630437-139630784
  hypo
cccaccaggtggcacgctgcggagggaggtgcactggcacgggtggtgtgtacgcgtctaacccctcctgctgcccctccctccctgcccgtgggaccccaagtgctcccctctccccattctcccagctccttcccttcttccttcttctcctccccactgacaggattgagttgtggaaatggctgcttccctgggcccagggaaggggggcgcagagcccgagcccccgggacagagccaggcccagggaaggggggcgcagagcccgagcccccgggacagagccattgccctcaccctggtgaatgggtggttcagaggcccacactcggggttctcaaggc

SEQ ID NO: 261316 - DNA, 252 bp, Homo sapiens
  chr9:139638346-139638598
  hypo
ctgggttgggcacgcgtcttctttgcagctggctctatggttctgtggcttggcccttggtgacgacccccgccatcctccccgcaattccccggctggcccccagtcaaaagcatccttggtttgctgtggaatcgctttattctgagctggtgctgggccccgggagccgctgagcgaggtgggtggacactggccgaggtcacaggaccctgtgggcgccatccctactggggacgcagcactcactga

SEQ ID NO: 261317 - DNA, 31 bp, Homo sapiens
  chr9:139666885-139666916
  hypo
gaagtgatctacagtcgggtgcggtggctca

SEQ ID NO: 261318 - DNA, 86 bp, Homo sapiens
  chr9:139687831-139687917
  hypo
atgtacagggaagttcccagcgctgaaccccagaattagacgttcgcatcagccccgtaggccacgtgacaccaccacagcctctc

SEQ ID NO: 261319 - DNA, 857 bp, Homo sapiens
  chr9:139698438-139699295
  hypo
tcacctgggtatacccggggtggagaaggggtggccaggagcaacggagctgagaactcctcaagaggcaaccccactaagcgctggcaacgagagtggcgagggtgagagcagtgtctggggtgcgtgagcaggggttagcagatgacggttttagctgcccaagggcacgctggaagaggccaggttttggggaagaggatgaatctgtcttcaggcaggctgaatgcacttccgtgagttctaggtggacctggccaggaggcagctgggggccagcggctggagggcagcagagcgtctgggctggcacatgctctgaggcatgggcaaggagggccgtgagctgaggggccacgggcacaagtggtttaggaaaagggtgtggccattggccggggatgcagttccaaagtctagtaaggtgagcatggccaaccgcccgctggctttactgccattaggggccttgttgagacagctccccaaccctgtgcccacccgcatgtccccagaggaacatgaggcaaagggaggcgtccttcatcgaggagcgccgggcaagggagaaccggctcaaccagcagaagaagctgatcgacaagatccacacgaaggagaccagcgagaagtaccgccgggtaagccccaggccagggcctggctggctgcccatccccatgacagctgggtggacacaggctcagggccaccactcagggcccactccctgccaaggatgtctcatcccttccccgcccccacctcccatcagggccagatggacttggacttcccctcgaacctgatgagcacggagaccctgaaatgtaagcgctcagctccccacctgcccc

SEQ ID NO: 261320 - DNA, 41 bp, Homo sapiens
  chr9:139703929-139703970
  hypo
atgaaagttggtgtccgggccgggcacggtggctcatgcct

SEQ ID NO: 261321 - DNA, 340 bp, Homo sapiens
  chr9:139704090-139704430
  hypo
aaagttgatgtccgaaccaagggccgtattggcttttcttatactctagaacatacgacgacaaagaagattttgatgaagttcaaattagagtcagcgtgctcatcagaaagaaagcgcagccaacacgtttaggaacagaaacggattatgttgaagacaaacaatccattgcgtttgtgttcagtaacccaagcatcaaaggaacttgtggctggggagaaggcttgactatttgaaatctcaggactcctctgtccaggagctcccagactcccgtggagtggaagcctgggggctcgctgaagaagtcacgtgactggaacgtgcttaatgcttg

SEQ ID NO: 261322 - DNA, 251 bp, Homo sapiens
  chr9:139717805-139718056
  hypo
tggtacccacccatcgtcttcctcccctgcctgccggtcacctggtctgattctagcaagaaagatgaaacaggtggcagcagaaccggctctccttgtagttgctcttaaagctgcagcttgggttcggttcgtttaatttgccttttctttttctcttcccgtccccagtgaagatagtgatccggggagacaggaacacgggcaagacagcgctgtggcaccgcctgcagggccggccgttcgtggag

SEQ ID NO: 261323 - DNA, 272 bp, Homo sapiens
  chr9:139721706-139721978
  hypo
gcagccagggcggccggtggggagtgcattggagggggttgaggtctcttgggcacctggtgagttctcaagggtgagaggaagccgaggccatcaggcttagctgacgctgcatggggcaggctgccaagagggaggctgaatggagcagcctcaggtgagccgacaatcctcacctccgcctggtcagccaggacccggctcccctccagtcccgcctgctttccccaaagcagatccagccagtctcaatggctcgcccggggggtgct

SEQ ID NO: 261324 - DNA, 100 bp, Homo sapiens
  chr9:139724685-139724785
  hypo
acccccacaccagggttaagcgtaccgcctgtcacggggccgcacactcagcacgcatcagcagcccaggcctgagggcggcttgaagcacctgaccagc

SEQ ID NO: 261325 - DNA, 202 bp, Homo sapiens
  chr9:139729608-139729810
  hypo
ggatgctgaggcagctggatcacctgaggtcaggagttcgtgaggctccggcgtttgtatttcatttgaatctaaagtgagcagccacagggacccgcagctcatcagaccagcctggggttccaggccaggagggcagtggtttgctccagagccagctgcttgtgggtgtgggacggtggcgacgcgtgcaccggggatg

SEQ ID NO: 261326 - DNA, 196 bp, Homo sapiens
  chr9:139730161-139730357
  hypo
cctgctcaggcctgcgtgctccctttctgcagagggagacgctgttgcggcagctggagacgaaccagctggacatggacgccacgctggaggagctgtcggtgcagcaggagacggaggaccagaactacggcatgtatgtggccggacccgcccgtgcgggcggtgtgggggctgcgggcgtggccgtggtgca

SEQ ID NO: 261327 - DNA, 666 bp, Homo sapiens
  chr9:139734902-139735568
  hypo
ctggaggctttcctggggggcggggccccgggcggccgccaccctgggggtggcgactacgaggagctctaggccggcgtgggcagtggccgccctggggcggggggcgtgcctgtcactgcctggggaggcatttgcctctgtaccatcgcctttgccgctgccccgtggctgccgtgtgcgcttctgagctggaagaggccgggcattggtggtccccaggctgggccctgcaggtgctgggccttcaggcccagtgtgagcctgctctgcaagaagggaggggacagctggcttcagccaggctcggtggacaccctggccctctcggggcagagccgccagtgtttctcagggatgtgactgaggcccaggagggacctgtgagggtctgtttacagaggctgggcaggggccgcttggctgtggggtgtgcgctgccccggcacctgcttgccctccgcgctcatctggggccgcagcatgcctatggttccgcttccggccgggagccctgaacacgggtgtgcagactcaccctaaagggcggcccaggccccacgctagaaggctggcgagaccgaaggcagcatgtgaggcctctcctgggagtgggggttgtgtttcccacagtggcctcagctgcgcccccgctcaggtgagccc

SEQ ID NO: 261328 - DNA, 42 bp, Homo sapiens
  chr9:139754947-139754989
  hypo
ggttgacaagagcgaaactccgtctcaggaaagaaagaaaaa

SEQ ID NO: 261329 - DNA, 42 bp, Homo sapiens
  chr9:139782734-139782776
  hypo
ttagaatcaggtgccattgacgcctgtagtcccagctactcc

SEQ ID NO: 261330 - DNA, 41 bp, Homo sapiens
  chr9:139782896-139782937
  hypo
gccacccagtgaactcttacgtggagtccagtattgtatga

SEQ ID NO: 261331 - DNA, 277 bp, Homo sapiens; identical to SEQ ID NO: 213239
  chr9:139787443-139787720
  hypo

SEQ ID NO: 261332 - DNA, 263 bp, Homo sapiens
  chr9:139793001-139793264
  hypo
caaggctccctgaagctctgcgattctgcttctctgagtcttgaccgcaggtcagtggggacccggcccctcaccatcgcctgctactgatcaccattggtttggttttgtctcgaggactgttctggaattgaggtgtaacgtgctgtgtgttcttccttagggctttgttcgcgggggtcacagctctcatggctgcagctagcgtgaccccccctggctccctggagttgctacagcccggcttctccaagaccctcctg

SEQ ID NO: 261333 - DNA, 391 bp, Homo sapiens
  chr9:139794874-139795265
  hypo
ccttcccagataatgctgcccgcagggaggtggagagcctgccggccgtctgtcccagtgatggatgcacctggaaggggaccctgaaagaatacgaggtaaagatgcctgcgtgtggcatggtgacagaagctccagcagtcgggagtcgtccacgctccccaagcagttatgaccttgtcctgcacgttcctctcactggggctgaagcctgtctgatgtctgtggaggaagagacggagctgctccttagagtatgtccatttagaaactcaagtagtgcagagcacagacctgcaccatggagcttgggctgtgtgacctcgggcgaggtatttaccctctctgtgcctcaggtttcttgtctgtcgatgggggtgcaggatcccac

SEQ ID NO: 261334 - DNA, 150 bp, Homo sapiens
  chr9:139798424-139798574
  hypo
cgcccagccaagaaagattttatttttgacatttcgagcatgcagcgcatctgagcagtgaggctgagagtagaggtgtgccgctgccccacaggcctacatgctgccccgcagcacctgccagccttcgccagcctactttcagccctt

SEQ ID NO: 261335 - DNA, 139 bp, Homo sapiens
  chr9:139803483-139803622
  hypo
tgtctcaaaaaaaaaaaaaagaaaaaaaatttttaaaaaaagtttgtttttaggacaaaaaagcatttttgtcttagaaaagtctaaatgcatcaggtagagagtgcggtggtgggtgtgcgtccgtcctcgccaggcc

SEQ ID NO: 261336 - DNA, 337 bp, Homo sapiens
  chr9:139803920-139804257
  hypo
aaactgtcagatggacgggcctgaccatagcacatctggggtgccaagccctccgcagcagcatgtcagggtctgtcttggagacgtcccgcatgccgccagccctgcccatccgccaggccctcccaccggcctcgcctcccagcgggagcagcgtttccccatcttcaccggggccgttgtttcacgtggcttccaaatctcctctggtggcttgggtctccctcgcattgccctgagctggcagaacaaacaaagcgttaagatctccgaggctcctgggtggtgctggcaggatcctgcccgggaggagcactgtccttcgaggctggagggt

SEQ ID NO: 261337 - DNA, 354 bp, Homo sapiens; identical to SEQ ID NO: 213243
  chr9:139804287-139804641
  hypo

SEQ ID NO: 261338 - DNA, 349 bp, Homo sapiens; identical to SEQ ID NO: 213244
  chr9:139805157-139805506
  hypo

SEQ ID NO: 261339 - DNA, 442 bp, Homo sapiens
  chr9:139809649-139810091
  hypo
tttgtaaaatggttacatggcaccaaagcgaaaactacaaaaaaggtgcattctgagacgtcagagggaaatgtgtcaggctccccgtccgcagcgccgtgcggtcgttcagaaatttgcattcccataagcattgtgggagcaccgtctcccgagacttgccagcacagtgtggtgtgaaggttggacgtgccactgtgatgtgtgagaaacacatcagtcctctgtatcgggggtccacgccgtggatccagccaaccgtaggttggaaatgttcaggtaaaaatgcactgaacacgcgcggacattttttattgacacagcgttcacgttgtattggtcatgagtcaccgagagctgatttcaggtatgagggagggtgtgcttaggctctgtgcaaacactctgccatcttccatcagggactcgagcatccttgggt

SEQ ID NO: 261340 - DNA, 142 bp, Homo sapiens; identical to SEQ ID NO: 213245
  chr9:139814740-139814882
  hypo

SEQ ID NO: 261341 - DNA, 336 bp, Homo sapiens
  chr9:139818344-139818680
  hypo
atctacctgaacggcgacggcaccgggcgaggaacacacctgtccctcttctttgtggtgatgaagggcccgaatgacgccctgctgcggtggcccttcaaccagaaggtgaggccgtccctgcaggcttcgctagggccgcacctgggagtccctctgggcagtgcagcttctgtggtgcagggttgtgcgggacaaggtggcttgggctcgctggaccaggtgtctgcagcaggcacgtcaccctgtgatgctgtgtcacgcggtggagagctctggcagtttgttgtttccatgatttctgagcactggtccgtgacacaagcacctggcttc

SEQ ID NO: 261342 - DNA, 147 bp, Homo sapiens
  chr9:139821632-139821779
  hypo
cggagctgaccgacgggcattgtctgtgttccgtgagtgtgtactgggcctaaagagcaagcattgcagagccctgctgttccctttcccggcctcacctcagctccccaggccacgtggcgggaattgaggcgttccggttctctt

SEQ ID NO: 261343 - DNA, 69 bp, Homo sapiens
  chr9:139822247-139822316
  hypo
atcgctgtcacgtgcgtttctctgatgactcggcggagtcaggcgtctttaccacgcttacctctccct

SEQ ID NO: 261344 - DNA, 195 bp, Homo sapiens
  chr9:139833902-139834097
  hypo
agttggcagggcagaggctccgtccctctgggtggcgcagcctctctcggtggtgctgtccctgatcccgtcggtgctcgagctcagccccagggtctctacctgcggcccacgtggctcaggggaaccatcacctcgacactcactcgtctcctctgcgtcctttctctgtacggggttgcttgctgccatgtt

SEQ ID NO: 261345 - DNA, 2623 bp, Homo sapiens
  chr9:139834953-139837576
  hypo
cacagcagcgtgaccggccgctcccaagccccgggcgcacaaccacagccaggagcagcccctgccaccactgggccaccgtccagggccccacaggaccagccgaaggtgccccgggccgaggccagctgggtcaggtgtacccctagcctggggttgagtgaggagcggcacccccagtatcctgtgtaccccaagttgcccaggaggccgagggggccttgggctccatctgcactggccaccccgtgccaagcatcacagctgcgtgagcaggtttgtgtgtgagcgtgtggcggggcctggttgtccccttcctaaggcgtaactgctataagcatctccacctctcccgctcgggaaaaagccacagagcctggcgatgtcctcaaggggtcccggtggctccagtgcacccagcacacctcagcgcctctggctggcaagccaggagaagaaggtgcgaggccgtgggcgaggtgcctggaggacgcgcatggtgcgtggggagcgccaggctttgatggtggcgtcgtcgctggccgtgagcagcagctcctgctcctggggactgaagaccactgagttgaccacatcctcgtgccgcagcctggccagacagatgttgtagtggcggtcccagatgtagccgtgccggtcctccgccccgctgcagaacagcgcctgggtgagccggccgcccgcccgctgctgcccacacccgccctgcaccacgccgcgccctgcacctggccacgaagtccctgctgacgtccaggaagatgaagaagcactcgtcgttgggcgtgtaggcgcggtgcgcacgcagagcccgcctcacctcccgcatggtcttgaggtcgaacaccagcaggtcaatctcctccgcgattggtggcggctgcatggggtcggccaccaccgcaccgttgggccaggcgcggctgttcacgtacaggtacctgggcgaggggcactgtgctaggtgtgggccgcctgcgggcaccccgcctgggacactggcaagaggcccacctgttgtcgggcgacaggcccatgccgatgatgtgtccgtgtatgtctatgacgtggtccagcgcgtcgaagaaggcatcggagccccggccctcacccagcacgggccctgccgtggtcatctggtgtggcaggatctgcttgatgcctgcagggagggctacggtgagggtccctgtccaatgccccaaggacatcactccagggcagcttcctacctcagtggtgtctctggggctgtgagcaccacagaggtccgtgggcactgcctgctccgggggccccagacctgaatcaggcccgtcggttgcttgctggccagcggccctgcctgcgtttgttttcactgctcatcccacaggccccaggtctgggcttgtgaccccaggggcgagtgaacgatcccagctttgcctgtggacttgcttgctgtctgcccctcaggacccctgcccggcctcccccaagctcctaggaccgaggcgggcagcatggcggcaggggtgtaccgatctggtgtggggagtaggtgaggcagccagtggtgaagatgaggtacttgctcttggcgcctgtggcactgcgctcgggtggcttggtgtggccctgggccagcagctcggccaccttggtctctagcatgcgctccgacagctgtggctgcgcccgcccctccagcacgcggtccagaaagtgccgcaagccctccttggcgtgggcgggggccgggccagccaccacctcctcgttgtcgctgcccaggtcaaagatgcggcagggggacgtggccgggtcaccggcttccagcagcaggtcagggctgtcgaagcggctgcagtcggccaccatcaccgtgcggacggtgctggcattgaggttctggatcttgaacagccgcttcaccacgttgacgttctctgactccacatcctgggggcgggggcacgtgccaggtgggcgccgggcgccaggccccaggagggcagccccgcccctagccccgcacgcacctggaaggcattgttgagccacagcaccgagcaggaggtgatatctccgatgcggtgcaggttccccgagatgaggctggtctcggtgagccaacagccaaacacgtcatagggcttgttccgcacgcgggacagcagcgcgaaggagtctgtggggaggccggggctggacaggctgtcggcgtggggcgggggcagggtcaacccgccgcccgtgctcacctaggctgatgacagcaatctcgccggatgaggagttgtgcggccccaggaacacccccgaggccagcagtagcgagtcgtccttgttgaactgggagaactgggtgtagctccagttgtagggccgcatgtccgcgctgtgcagcagcgagatggtcaggtcgttgctccagatctgttcggcaggggcggctgtagtgatcgcctggccaggtcgcggggcgggggcctgctactacacagccatgaggccccagctctgccagccctactcagaggccaccagggagcagggaccccttccagccactgtcatccactcggggggcattggtatagagcggaggagcctgccc

SEQ ID NO: 261346 - DNA, 741 bp, Homo sapiens
  chr9:139846909-139847650
  hypo
ggaaggagaagcagccggctgggtctgagtgcagggagaggctggtggctgagcaggcctggggatgctgcccagagagccaggaccagccgtgcttccaggagcccccaggcgggcccctgacctccagcagaggagggcccagcgcagaccttcctggcacccattccctgccgtcagcccagcccatcgctccctctgtgcgtgaggggaaacaggctcgggaaggccgcacagccactggccagggtcaccatgtccctgccagacccagagtaggctctggttcttgccagtgtccctggcgccggcccagccaggagcactgctctgtgaggggtccagaagctgccagggagggcgggagggggctcctgaccctgcccactgccacccctgcccaccgccgcccctgcccaccaccgcctctgtagttccagggggaatggttcgtcctgggcctggcgggcaacagcttcaggccggagcacagggcgctgctgaacgctttcaccgcaacttttgagctaagtgatgatggccgctttgaggtgtggaatgcgatgactcggtgagtggctgtccctgccgttccaagcgggtgaggaggatcccgggcctgggtcccagccgccagtggctcaggtgcgccatgggccctgtcccagcacaggcagcttcatgactctgcctgccaatgaccaaacccagctggggagtatacaaaaaagtgtgggcagc

SEQ ID NO: 261347 - DNA, 247 bp, Homo sapiens
  chr9:139873673-139873920
  hypo
ggaaaaaccagtgtgagacccgaaccatgctgctgcagcccgcggggtccctcggctcctacagctaccggagtccccgtgagtggggcctccaccggccccctgggcccagcctgggggcgacacttgccgggacgactctgggccagccccctgccgcggagatccatggggtgggaggtgatggctgccccaccagcgtcagaggcaaaggccaggcctgggcgtgactacccatgcacaagtg

SEQ ID NO: 261348 - DNA, 101 bp, Homo sapiens
  chr9:139885962-139886063
  hypo
aggaataccatgcgcgggacagagagcgcagaagccttcttccctggagatcgctctgtactgtgacttctttttttgtttgtttgagacagagtctcgct

SEQ ID NO: 261349 - DNA, 349 bp, Homo sapiens
  chr9:139888786-139889135
  hypo
gggagcgcctgccccgggacaggattgaggaatgtgccagcccccatccacctggggcaccccgccccaccccggcctgactggtttgggagcccagtccggtcctggagatccctgaggccaccggttgcaggaggcctggagtctgcgccttcttagcgtggaggatgggaccggcccgacccccggcgctcctgcccctgtggttctgggctatcgggctgagcgtcccaccctggggtttggggatgggaagtgatcccgagacctctggcccttcagatgtcaggacaccctcactcccgacaaagatgcctttattgggcgacagacgcggggtggggcgcta

SEQ ID NO: 261350 - DNA, 227 bp, Homo sapiens
  chr9:139901957-139902184
  hypo
gactgacccagctccgcccacagcccgctctcggcatcagccttcatcgtaagagagaaaagctggttccgaggccgggcaggagaaaggccagcagtgcctggtccagccggcgtcgccttgggcggtgagcagtgccaggcaggggcgaggggccgggcagaccccgaggctttaaggcaaagcagggcaagggtgtacgcagcccgggccgggtcagcctttgg

SEQ ID NO: 261351 - DNA, 753 bp, Homo sapiens
  chr9:139902479-139903232
  hypo
acttgtgctggcccgccccggccctcctgcaggctgggcctggacgcagggtctccccacgagctccctctgtgtctgggctctcccgggcctccgtctgccgagtctgggggccactgagtctacatcggtcccctgttccccggctctggtcccctctgccccacccttgctctgtgcccctcaaagactctagcaagtctggaccatgcagttacgtctctccaggcctatctgcaagtgtccctcgcccactctgcccccttgacctctggacagcaagcatcctggggccagttctcccccgaccccacccgcggctggagccaccaggcagcctgggtccagtgggcagagccctggacagccatgagagcagcctgctcacccgctcctcctcgaagctgatgaggccctcgtcctccgtgtccaggtcctcgggctcgtctgccacaagtgcccggagctccgtgggggcagaccggggccggagcaggctgagcaagcagccgagaggggactgcagtgcggatggcggctccgtctcctgctgctccaggttgtcactctgcttcttggcaaagttcacgaacacctggtgggtggcgcaggcgtgtggggagggggctggtctggggtgaggaggggcagggcgggtgaggggaggggcaggtgtggtgcgcagtgcccttggggcgctcacattgtccagtgtggtctggctgaccgagtagtcctcgatgcccagcacgc

SEQ ID NO: 261352 - DNA, 54 bp, Homo sapiens; identical to SEQ ID NO: 213252
  chr9:139903847-139903901
  hypo

SEQ ID NO: 261353 - DNA, 444 bp, Homo sapiens
  chr9:139904258-139904702
  hypo
ccgtggagagcttccgcttgttgccgccgctgtaggtgccagccggcttgtctgcgtacttggtcagctccagcttctccagagcccacttcaccacctggccagggaacgcaggtgtcagtggaggcagggccacccagcgtgctgactccctgccccgccccacagatcctcacccgggcctcgtccttccaggagatcccacgcagccgcgtgtacagctgcaggtgctcccgggccgtgagctcgtcgaacagcgcgtcacactgcgggcagtagccgaggctctgctgcacctggagcagctccttcagcacgctggggacacggcagctgtcagcgcgtgaggacgcggcggccccgcccacccagggctcccgccccacctgtgtccattgacgaaggcctcgccccccgtcgtgctctcgtcgccggtcagcatct

SEQ ID NO: 261354 - DNA, 97 bp, Homo sapiens
  chr9:139906300-139906397
  hypo
cccacacgtagttcgccagccagtagatgatggggttgcagccgctgacaaactgcaggtgcttggccttggtggacttctcggccacgaggaagac

SEQ ID NO: 261355 - DNA, 148 bp, Homo sapiens
  chr9:139909028-139909176
  hypo
cttccacccaggaccagggtggcgcccccagacaccaggcaggagtgacagcgcaggcccgagctggggccttgtgggtggggtgggctgagcaagtggtccaggcccctcaccggcctcactgttctccagcgactgatcctcctcc

SEQ ID NO: 261356 - DNA, 43 bp, Homo sapiens
  chr9:139910704-139910747
  hypo
tcagcagatgcccaccgccctgcccctccgacactcacatggt

SEQ ID NO: 261357 - DNA, 409 bp, Homo sapiens
  chr9:139913333-139913742
  hypo
ctcggaggccccaccgctcaccttggacatgaactggatccagccgcaggccgcgttgtcaatggtatccagctgctgcaggagggccatgccactgggcagcgagaagttgtcctgtctcagggccggcggcagctcatccagtgacaggttcagtgcctcggggtgcagccgcagctctgctacatacttggggtggaggggcggctcagagggggacctgcgcctgccgagccgggcagagaggggctccccacaccacccacagccgcctccctcgcgggcacccttggcacctgctgcagccagcgcaggtgttgctgcagcctgccctgctccaggaagctgcggatctccgccgagatgttgagccagacctgggcatagtgagtcacgttgcccacaaaag

SEQ ID NO: 261358 - DNA, 140 bp, Homo sapiens
  chr9:139915974-139916114
  hypo
tctcaggcacagtgaggatccggcccagctcccccgagcccggcgtgcaggtgagctgctccaggagggcaggagccagcagcagctcctgggatgggcacaggggtccgtggagccacggcaaggactttgtccccaac

SEQ ID NO: 261359 - DNA, 712 bp, Homo sapiens; identical to SEQ ID NO: 213254
  chr9:139934675-139935387
  hypo

SEQ ID NO: 261360 - DNA, 265 bp, Homo sapiens
  chr9:139990642-139990907
  hypo
gctcgcagacaccccgtgatttcctgtgtgaccaatttctctacagaagacacaaagacacatccagcggggaccacctcacctgcagattagacccccaagccaagacctgaaggatgggacccaggaggaggccacaaaaaggcaagaagcccctgtggatccccgcccggaaggagatccgcagaggacagtcatcaggtacagagcgcagggcaggctgcacgccgccgctcagggcttgatgttccgaaaaacaagattg

SEQ ID NO: 261361 - DNA, 85 bp, Homo sapiens
  chr9:140001323-140001408
  hypo
agtcatgatgtcaaaaagaacgaaatcctggccatggcgcccacgtggaggccctgggtggaccgtggctgcctggccaggcctg

SEQ ID NO: 261362 - DNA, 376 bp, Homo sapiens
  chr9:140030220-140030596
  hypo
gcccggctgggaggtgttctttctagacctcacctgggagtcacgcaccattacctctaccacgttccatttgtaagtgcaggccatgtatgcctggagggaaatcaatcttctgccgaacagggtggtgttcaaagcaccaccggctccaccacactctgccttttattctgcattctgtttcttgagaccacgcgccgctacgtggaatggtctcaggagctcatgtgtttgtgctccatgaagtcagaaagtccagcctttgcactgccacatacccacccttagaacagcgtctggtacacggtaggtgctcagtgaatgtgcctagtggagtaaacgtgcggtgcggtgctgcctgcggtcggatctgtgg

SEQ ID NO: 261363 - DNA, 208 bp, Homo sapiens
  chr9:140041684-140041892
  hypo
ccatgcagctccagcgccacacacacacctggacacgtactcaggtgcgctcctcacacacacacctggacacgcacaggtgcgctcctcacacacacacctggacacacgctcaggtgcgctcctcatgtgcatgctcacccttacttgcgccagccagcacagacacacatgcacacacgcacacacgtgcacaggcacacacatg

SEQ ID NO: 261364 - DNA, 78 bp, Homo sapiens
  chr9:140071514-140071592
  hypo
acagggacaggtggggcctccgggaaagggctgcggacccgcctgtctgaaggcttcggcactggtgagctgcataag

SEQ ID NO: 261365 - DNA, 33 bp, Homo sapiens
  chr9:140078705-140078738
  hypo
gacacagagcagacacggcgaaggcacagggag

SEQ ID NO: 261366 - DNA, 87 bp, Homo sapiens
  chr9:140081900-140081987
  hypo
caagggcatggccatcgggacagactactcacaagacctggctgagctgatggaactgctccagagcctggcgacaccagcactgtt

SEQ ID NO: 261367 - DNA, 71 bp, Homo sapiens
  chr9:140089726-140089797
  hypo
aagtgtggccccagcgccaggcacggcctccacccatgagaaagctgagggaggagcgtccaggccgctcc

SEQ ID NO: 261368 - DNA, 150 bp, Homo sapiens
  chr9:140106339-140106489
  hypo
tgatcaagctgggaggacaccgtggaaggcacggtgtggaaccagaggatctggaccctgttggctcgaggtcctgcagccacggaaggagggggatgtgtctcagcgacactggaacctcagagggccgagtgtgagagcccttgggat

SEQ ID NO: 261369 - DNA, 1508 bp, Homo sapiens
  chr9:140107154-140108662
  hypo
cgcctcagggccctcgcagtggtactggcttctccacaacgctccctggtgggcaccccaggcttcacgctgcggggagggcacagaggggagcaggcagggtggcaaagggctgggctccagccacgctgacgtcacacaggcctacctggcgccggtccccacttttacaaaaaggcgtgctgtgaagtgttgacgactttgagcctggaggaggaccccgtatgctcctgccaccccagaggccacctctgccttttctcctgggcattttcacagtgctcctctgcaccctaagcaaggagtggcatgttcagtgtgcaaatggcatctttagaccccacaacggtgaaaaccccgactgtccacgtagggcccaggtccgctgagcaccgagcatcaaaagccgtttgcatagccaggtgtcagtcatttcagatgaaaaagaacgggaagatcggagacagctccccccggttctgccgggaggttttgttccgtgcgtgacgtaggtccgtgcatgacgttgtttcctgcgtgacgttgttctgtgtgggacacagtgttcgttcaagagagggagggaggccgctgccgacagcgttcccagggaggagcgtgacccagagccagtcatgcctcggaaccagagtgagaagagaaactgacccccgggaagatgcctggctctctccccagcacagagtttctcagctgaggagtgacccacatcttggctgggggcctggaggcctcagctgcctcaagtccctgcccagggatgagggcccatcagtgggacgaggccgcctgctcccacccacacaggctcattctctgcgagcagaggacctgctgcttggcaccctggcagctgccctggtctcggcagcccctggcgtgtggaggccctgccccctcctagggtgcggccagcgtggagtgtgttttccacccgagggaggccctccccaggctccactcttcgcccgggctccactctcccgggttccactctgcctgggcaccactctccgcccgggctccagcccaggaccagcctcactgtctccacaggttcaacttcgtggccaagaagctgcaccgacggctactgcagcttgggggcagcgccctcctgcccgtgtgcctgggcgatgaccagcatgagctggggtgagtctgcgggcgtggtacccgcctccacagtctggtctggccacacgcagggtccgctcaggccagcgcacgtgctccctcccaggcccgacgctgctgtggacccctggctgcgagacttgtgggacagggttctggggctgtacccgccgcctccgggcctcactgagatccctcccggagtcccgtgagtgtgggccccgggtcacccacaggcgcagcagacccaacctggcctggggacctcgccctgggtccctcccgtgtgggtgggcggcccctggggagtgggtcctggtctgaccagcgtgccctcccacagcctgccc

SEQ ID NO: 261370 - DNA, 629 bp, Homo sapiens
  chr9:140110574-140111203
  hypo
ccgggagctggggtcgcttgtgtgggaactgctggaccgccagggtgcatacttctacctggcagggtgagctggcctgcgtgcagcaggagtgggcccagcccctgagtgccaggcctcattgcgccttctgcgacctgcccctctagcaacgccaagtccatgccagcggacgtctcggaagccctgatgtccatcttccaggaggagggtggactctgcagcccggacgcagccgcgtatctagccaggctccagcagacacggcgcttccagacagagacgtgggcctgaggcccgcggctgcccgtgccccctctgacagccatcctcctgggagcccaggaaggcatccacgagggagctcctggccagcagccgtcatcctctcggaccagccagctggtcctctgggaacagccagctcccgagcacagccgcactcctgttgaccctggatcccaccctttgagcctgaccccactgcagcctctgcccagccagccctgcgctcccccaccctgacagtgagctgtgtcctcgtccccccacccccttcccagtcaaggtggtggcctgggccgctccacctcaccggtgcagtgacccaggacggcatcagcagccca

SEQ ID NO: 261371 - DNA, 120 bp, Homo sapiens
  chr9:140112978-140113098
  hypo
ggggctgctgctggtcttcacgccgctcctgctgctgggactgctcttcgtgctcctggaccgctctggccgctgagcagagcccaggacagccccgccgccaacaggccagggggccca

SEQ ID NO: 261372 - DNA, 347 bp, Homo sapiens
  chr9:140125871-140126218
  hypo
agctggagccccttcgagtctacccctgaaactggactgggctcgcctgacaactgcctgaggtcattgtagccatccccctgtggatggagaaagggggatggtcactgaggcctgcagggcgtagagagggagggtggcggccaagggctcaattcaggggacccaggggtgtgaatccagcttgtgaggacagggccggggcaggaggaaatgtctctgacacgcgcgtcccccccagcagatctagacctgggcctgggtctgtccctgcccgaaatccatgccgagttcccttcccggcagccaggtcccccaccccactctggacgcggttgacctagtgg

SEQ ID NO: 261373 - DNA, 277 bp, Homo sapiens
  chr9:140133507-140133784
  hypo
gcaaactggcaacagacccccgaggagtgagcacagctgcaggccctcgccccagaaggacaatgctgatccccgcgcatgctccggtgctgcgtgtcccgagttctggtatcgcgcattatgtggtgaagacagaggtgcagtccctccaggaagagagaaataaataagcagatgttgtttccaacagcctccaattgggagacagatgcccagtggccagagcacaggagactgtcagggccgacctgatggtgtaatttatttaaaatgctac

SEQ ID NO: 261374 - DNA, 180 bp, Homo sapiens
  chr9:140137588-140137768
  hypo
catggccgctacctgacggttgccgccgtgttcaggggccgcatgtccatgaaggaggtggatgagcaaatgcttaatgtccaaaacaaaaacagcagctattttgttgagtggatccccaacaatgtgaaaacggctgtctgtgacatcccacctcgggggctaaaaatgtccgccacc

SEQ ID NO: 261375 - DNA, 277 bp, Homo sapiens
  chr9:140137948-140138225
  hypo
gatgccacagccgaggaggagggcgagttcgaggaggaggctgaggaggaggtggcctagagccttcagtcactggggaaagcagggaagcagtgtgaactctttattcactcccagcctgtcctgtggcctgtcccactgtgtgcacttgctgttttccctgtccacatccatgctgtacagacaccaccattaaagcattttcatagtgtgtggtttcgctttgcccattccttccagtaggccctccgggtgctgttgccgaatgtcagggcgt

SEQ ID NO: 261376 - DNA, 72 bp, Homo sapiens
  chr9:140140640-140140712
  hypo
gtacaggcacaagacgtgtgggccaggacataggcgagggacggacccttggacacacgcagggcccaccag

SEQ ID NO: 261377 - DNA, 69 bp, Homo sapiens
  chr9:140147106-140147175
  hypo
ctcgcagtggccctcgccagcccactaccagctgctcagccggcccgccttccccgccttcagcttcag

SEQ ID NO: 261378 - DNA, 168 bp, Homo sapiens; identical to SEQ ID NO: 213259
  chr9:140157484-140157652
  hypo

SEQ ID NO: 261379 - DNA, 123 bp, Homo sapiens
  chr9:140166592-140166715
  hypo
ttgcgctgctggccgacgaatttgcccttgaggacttctgcagcagcctcttcgatggcttcttcctcaccgcctctccaaggtaggcctgctgggtaccatccggcccgctctgtcctctca

SEQ ID NO: 261380 - DNA, 80 bp, Homo sapiens; identical to SEQ ID NO: 213260
  chr9:140166925-140167005
  hypo

SEQ ID NO: 261381 - DNA, 714 bp, Homo sapiens
  chr9:140167035-140167749
  hypo
cgttgcagaaggccctggagcctacaggccaggtgggtgcccgggggggctgcatctgaaggcacctggtccctaccagcccgtgtgtgcttgccaagctgcccttgtggtgcttgtgtgtggtcggtgggcacccacccctgtgccccctgggcctgcccatgcgcctcgcctgccccatggtgtggttccccgcagagcggagaggcagtgaaggagctttactcccagctcggcgagaagctggaacagctggatcaccggaagcccagcccggcacaggctgcggagacgccggccctggagctgcccctccccagcgtgcccgcccctgccccgctctgagggccctccagacctgctcgggtgctggggccatgccgagtcgcggccctgctcagccggaagaggctcccggacctggatgtacagggcagtctctcttcccggggctatggctgggcctgtcctgccgtcatggccccctgcttcctgctccttggagctggctcccggaccttgcccaccatccatgcagtggctcccagggcagagcctctccttgtactttggcagccatagaaagcgtgctcattttctgttttcctgtgttaggaaaaaaccacctgttttccaaggggagagggcggggcctgagggtgggggcggggcctcttcattggcccagcttggcgaaagcgaggcacactgctt

SEQ ID NO: 261382 - DNA, 155 bp, Homo sapiens; identical to SEQ ID NO: 213265
  chr9:140198185-140198340
  hypo

SEQ ID NO: 261383 - DNA, 208 bp, Homo sapiens
  chr9:140206332-140206540
  hypo
ggtggcccagcgcacgtcttgcctttggacagcgatcgtccacctgagaccacctgcctgataccctgagacccgccccccagcactcgggggctgagagcccctgccctcccattttgaagaaaaggggcttctgagggcttgctgagtcacagggcactcggcgggccaggactccatgccagggttctcacgccgcctccttcca

SEQ ID NO: 261384 - DNA, 572 bp, Homo sapiens
  chr9:140208418-140208990
  hypo
atgctggcgggggtcgccagtgtgccgtcccaggatggacattgcacatttggtccctggcaagcccctgggtgggtcctgaggcccccaggctgccctgtgcactctgacctcccctagagccgcccaaccgatggtggggactggggtgtgggcctgacaccttgctggacagggcgagccagcggcccaggaagaagcaatcaggcaccaacctgcccgccgaggcctgggtctggcccacacctcaccttcccacgctgtccccagagtgccttgcagccctgggctgcccgccccaaaggtgacccgacactgtcccctgctgtggcactgtgagcctcttcagagagaagggagttgcgagtttgccaaaagaacctggccagtcccggcactgactttccactggagacagtgctggggtgggcggaaggccgagcccctggcccctggggaggtgtgtgcagctggggatagcggccgtcttttgggaagcttttaaaacccagtctatccccgtggagcaagctggtagccacccgctcagtgacccccgccctaaggccccg

SEQ ID NO: 261385 - DNA, 200 bp, Homo sapiens
  chr9:140216162-140216362
  hypo
tgggcttgttggagcagccccgacctgctgctccaggcggaatattgatgtggccctaactgcggaacgttctggaagcagcccgtaccctccaccgggaactgccgagagccagcacagcccacagtcccccttgctcccgtgtcgcccacggagaccctggcgccttgagtggaggcgcaaaaggcagcatcaactcc

SEQ ID NO: 261386 - DNA, 32 bp, Homo sapiens
  chr9:140216846-140216878
  hypo
aacatctcaccccagacccacgagggatgctc

SEQ ID NO: 261387 - DNA, 54 bp, Homo sapiens
  chr9:140218253-140218307
  hypo
ccttcagggagcagtcgaccgagaggcagcgcccagccccgacctgggcccgga

SEQ ID NO: 261388 - DNA, 185 bp, Homo sapiens
  chr9:140243517-140243702
  hypo
tccccaagaatgctgacaaacggaccctgcggggcttcacccacctgcctgggtgcggccggtgctgacgctttctgcaggccgggtggcttccgtgcccctggtctctctctgtgcctgggcctccggctcccagccaggtcctccgacaggtggaagcgggcgggctctctgcacagggcttg

SEQ ID NO: 261389 - DNA, 87 bp, Homo sapiens
  chr9:140263678-140263765
  hypo
tgggaggtgggcttacggctgtgagcatgggcgcaggggccaccacatggggaccaccccagcagtgacacccgcagcttcacacaa

SEQ ID NO: 261390 - DNA, 756 bp, Homo sapiens
  chr9:140265350-140266106
  hypo
ccagggccagccgctgccctcgacatgaaatatcgcagcacattgagtcgtgagtcccagctaatccgagcggacaggcctgaatgcggcctctttcggccgggcgcggcggtgagcagtggagcatgcatcgcctgccgggcggccccgctcggggacaatggctttcttcgcagaaggggcctgtgcgggacaagaccccctttgtgtggggattcctgcctcggagcgcgagggaggcgcattcagccggccccagacagtctttgaaaggctctgtaacagaagacggcccgaaacactagcctgccttctgcctccctgcactctccgcaggcacggccgccattcagcgtcgcgccacatgagggggaccctccatcctgcattgtcctgtgccgggacatggtggcttctcagcgccatgcacccgccgcgagacgacggccccgggcgtggcaggtgacagcgccaggggtggggcccgcgcggcccacacaggggacactcctgtgagggcccggccagggcagcccccgatgcccgtgcccaggttccaatgcacctcctcacggtgaggggtcttgctgggaagaggaacccagggtgccatcgggacggcgtctcagcagcagggtcccacgtgggcaggcagcggggtggtggccttcacgctcggccctgaagtaagggggccctaatggggcggggagtggaccagtgcccctgagtgccggcctcctcatacatgatcag

SEQ ID NO: 261391 - DNA, 425 bp, Homo sapiens; identical to SEQ ID NO: 213270
  chr9:140267957-140268382
  hypo

SEQ ID NO: 261392 - DNA, 120 bp, Homo sapiens
  chr9:140268625-140268745
  hypo
caagtgagtcaaccgctatagacttcaagccataacgactgcttgcaggtcattccgcaggtagaatcttaacagctaaaggggtggacgggttcacagctcagcgctcgggacagggcg

SEQ ID NO: 261393 - DNA, 647 bp, Homo sapiens
  chr9:140273999-140274646
  hypo
gtttgcttctgaagcgatgaaccattctgaaaccagaagaggtgcacaggttgtgaagatgtagaaagattcacgaagcacgactgggcgctccaggccattgagtcactcattgtgaaacggctggttttatatgtcgtgcatcttaccccaataaagcattcgatgaagccgacgctccgtggctctgatttggggtgcgctctcgcccaggctggtttctgtcacccccggagttctgcagcacccgttctaaccacagcccgccttccctcactcctgcttcagtcccgtaaaccttctgcaaaatcctggccctccagaccccagctgggtcctcccctccaggcccccagtggcagctgtgccccttgtgtgcccacgtcggccagcgcaagccacacatggacccagtgcccactgcacccctgccagcctcagggtcccagcccgttgttccgggagacttcagtcctggcccaggcatctccttccagctcctgtccttatcttggtggcctcaatgaacgtgccaagacccttgggacccatggctctgagactgggctccccttgcgctgcctgcctccctcccggggtccctgtgaaggaagccgtcccacccaccctgccggtccctcctccct

SEQ ID NO: 261394 - DNA, 151 bp, Homo sapiens
  chr9:140290859-140291010
  hypo
aaagctcagcatgtgaactccgaatcctaacacaggcgtgcaggagagagctgtgccgccctcccccaggcagccctcacggtggccattcccggggagacggacctgtgtgtgtttctcagccacacgcggcacagtcacttagaggcct

SEQ ID NO: 261395 - DNA, 315 bp, Homo sapiens
  chr9:140325566-140325881
  hypo
ctgggccctgcgagcgcgtgcctttcctgctgggcagaggccctccacatggggccacgcgggccgggcacaggagggcagtcagatgggcagggcctgagagcctccctcctctccctaggtccctaatcatggactccccaagagctggcacccaccagggccccctcgatgcagagacagaggtcggtgctgaccgctgcacgtcgactgcctaccaggagcaggtgcgtgggcctgggcctcttcccctgctgggggtcggtgcttctgctgcctccgcagactggggaccacaatgggaccaacatgagg

SEQ ID NO: 261396 - DNA, 41 bp, Homo sapiens
  chr9:140327520-140327561
  hypo
ccccaggtatgggcgtcctcagcggcggggtccccgggtga

SEQ ID NO: 261397 - DNA, 369 bp, Homo sapiens
  chr9:140328418-140328787
  hypo
agccgggggtcggccggtcctctaccaggtggtggcccagcacagctactccgcccaggggccagaggacctgggcttccgacagggggacacggtggacgtcctgtgtgaaggtagggtgggcatggcccttcccaggcagcaccgtggtgcccggggtgtggggggcttagagctcggcctgtgctgtgagcagacgtggcacccagaggccacgcctgggtaacgccctgcagagcccgatgtcccccttgcagtggaccaggcatggctggagggccactgtgacggccgcatcggcatcttccccaagtgcttcgtggtccccgccggccctcggatgtcaggagcccccggccgcctgccccg

SEQ ID NO: 261398 - DNA, 542 bp, Homo sapiens
  chr9:140332758-140333300
  hypo
tgtggggggacggccgtgggcacccaggctgcacttggtgtccccatcccgccctccagaggcagaggcttcgctccccgtctccctggagacgcacccctggacagccacttgccttagaggcatctccggggctcagacgcctcccgtggccatagaggcatccccggggctcagacggtctcccgtggccttagaggcatctccggggctcaggcggcctcccgtggccatagaggcatctccggggctcagacggcctcccgtggccatagaggcatccccggggctcagacggcctcccgtggccatagaggcatccccggggctcagacggtctcccgtggccatagaggcatccccggggctcagacgcctcccgtggccaaggaccactccccaggagccacgcctgccaggggtgccatgggcatcagagggccctgtgggaggggggcggggggcagcagaggcctcgtctggggacacagccccagcaggatccaagtagccccctcggaccccctcggatgggactcgcg

SEQ ID NO: 261399 - DNA, 487 bp, Homo sapiens
  chr9:140351846-140352333
  hypo
caaacccctcaccagacacacggtcaacgctgtacatcctctccagcttcttgcggcgaccggaggtctcaggcagaggtggctggtccagcccaaaggcccgaggggtggggccaggagccagctgggcacatccggggcactccttggagccctggcggctgcccgcccagctctggcagggcctgctgacgtcctcccggctgccaccagggctggcgcgcaggggctggctgtgatggtgagggtgccgctgccgccgccccttcaccaccgccagctcaatggcctccgcctcagggctgggcagcagggcaggctccccagagatggtgtacactcgaggctgagggccctcgcctgcgggcttcctaatgctgggctcctctgagaggctgccctcgtagcagccgttggagacgagggacaggcggcgcttgttctggggggccggctgcatctcgggggacccgtcgtggccagagta

SEQ ID NO: 261400 - DNA, 184 bp, Homo sapiens
  chr9:140355149-140355333
  hypo
agcagctcctcctcgtactccgtctggtagtcagattcgtctggcaccgagggtagggctgcgtcagtcccctcccaaggaagggaccgtacccagcatagccacactcagaggcagaaccggccacagatgcccacccccgcctccaaggtggcccggggccctacacgcagccacctggtcc

SEQ ID NO: 261401 - DNA, 625 bp, Homo sapiens
  chr9:140358867-140359492
  hypo
taggtgaggtccagcgcggccttcatcaaggacgtcatgccctggggccacatgtggaatttacagaaggcttccaccctccctgcgggctgccacagcagacacgtggcgtgctgagggcctctcatgaatggaacgggggtccagagtgtccttgggccccacccacggtcctgaggcttggcgccctggctggagcctcagagtgagcagaggctggtggtcgccccagggcctgaaagccaggacacagcccaccctcggtcccttcctgatccctaagccctcgctggccctaccctcgcaggctctgcagcgcccccatgcctggggcctcctcggctttgcctgctcagctctggggcaaggcctgcccatgcccgtggctggagggtcagcgaggaggagagctcggggcgggctgctgggcacatgaggttcctgggccagggggacacagtggattgctttcgggaaggtcagagccacccagccctggctcacatgccactgcggtactccatcaggggtcccggggaagccgggctctcttgggttccttctgggtgggcctggggcccatccttcctcagtgaggcaggcaggactcgagactgacctcaaa

SEQ ID NO: 261402 - DNA, 409 bp, Homo sapiens
  chr9:140379673-140380082
  hypo
ccaccaaagacagtgattcacggagcgactgaaaggaatgtgaggctcagagtaaaccagacaaacgctgcaggtgaggcctcatcggagtaaaccagacaaacgctgcaggtaaggcctcactggagtaaaccagacaaacgctgcaggtgaggcctcatcggagtaaaccagacaaacgctgcaggtgaggcctcatcggagtaaaccagacaaacgctgcaggtgaggcctcattggagtaaaccagacacactctccaggtgaggcctcatcggagtaaacaagacatactctccaggtgaggccttatcctctgaaccaatcgtcgcagggctttccaccactcactccaggaacagtaaacaacacacgggctagacatcaataggcccgtttctcttgtctg

SEQ ID NO: 261403 - DNA, 492 bp, Homo sapiens
  chr9:140382232-140382724
  hypo
ggcccccgagaggccgtcccatccagcctccacctgcctgtcaggggcatctcaggagcctgggccaccaccacaacctggcacgccctgcgaggtgtccccagcatcaccttcaccgcacgcacttcagcccctcactgcagctgagccttggccacacgggaggagcgggggactcaggcccagatgatgtgtctccgcctctaggcgctgagtggaaggcaggtggcttctataatcaggaggaaataactcccagatagcaaacaaacaatgcacacacacaccaaagtgctgctgagcacagaaagacggagaaccgcctcctcatcctgagcttcggcctgaacgctgctctcgtggtctgatgtctcgtcccgagcttcacttgcagtctgatgtctcgtcccgagcttcggcccgaacgcggctctcgcggtctgatgtctcgtcccgagcttcggcccgaacgtggctctctgatgtggattt

SEQ ID NO: 261404 - DNA, 676 bp, Homo sapiens
  chr9:140388966-140389642
  hypo
tggcctgtgccaccctcacccgcaccaccctcacccgcgccctcacctgctctgcgccctcacctgctccgcaccctcacctgcgccctgccctcacctgctccgtgacctcatccactccgcaccctcacctgctccgcgccctcacctgtgccctgccctcacctgctccatgacctcatccactctgtgccttcacctgctctgcgccctcaccagctccgcaccctcacctgcgccctgccctcacctgctccgtgacctcatccactccgcaccctcacctgcgccctgccctcacctgctccgtgacctcatccactctgcaccctcacctgcgccctgccctcacctgctccgtgacctcatccactccgcgccttcacctgctctgcgctctcacctgctccgcgccctcacctgctctgtgccctcacccgctccgccctcacctgttccatgccctcatccactccacaccctcatccgctccgcatcctcacccacgccatgctcacctgtgggtacctgcgcttgatggacgtgagggctcctgccggcagcttggccaattctgagtcccgaacggcatgcaccgtggtcgcccgggcctggtgggtcagtgtctccacctgaggacaggagccggctgctggggccgcgggcttgggagggc

SEQ ID NO: 261405 - DNA, 644 bp, Homo sapiens
  chr9:140392378-140393022
  hypo
aatccaggaggccacgaagtgtgtttccgagctaagctggggtggggctggggaaatccagccttccatgtgtggtttccacagtaacttccgtgtgtggtttccacggtaaccgtgctttgcccatccccagctcctgcatgccagggcagcatggatgcggagtgtgtggcacccacggcctcacctgtatattgctcgcccggcctccacctccacccagtccagggcaaagtcgatttgccgcacgaaggacgacatcctcttcaccacagtgtgcgccacacccaggacgacggtcggctgcttccgcatgattctgccgggcagcccagagtcaatcctgccccatccctccaaccctacccttcgcccagggccgcagtgctcgggaatggatgggacccacaacccccaccccacccggaaagtagagagaccactggcaggggctgggacggggcacgcaccagtcagctgcctgccccacggcacagcactgcccaccacgtgcccagtggccagcagctgttggggagcccagagagccccctcctggcaggcccgcgagtgccccttggacacgggccctgtgtcaggctgcggtcctggcaggggactgcacatgccgtcaggagctgcat

SEQ ID NO: 261406 - DNA, 821 bp, Homo sapiens
  chr9:140396597-140397418
  hypo
ctcccagaggtgacccgggagtgcccaacacactggaacccagaaggcagaggttgcagtggacccggagcctgtggagaggccctggggcaaaccaagggtgagggagcgtctgcgggcaccacacccacgaaggtttgaaacatcaggtgtgtaaacccccagtccacagtgatgatgaaataaaaataagaagccccacccagcatctttggaaaatgatcgaaaaacaaaccattaaacttcccaaaccctgacggtgaagggggtgaaggcagctcccccccaaaagagaaatgacatcacatgtcgccaaaagtttgtcaaacaggagggagaaagagatggaggaggatgagaagaatctgagcagccacatatccagctctcaggcagaggacggccgctgacggagaggccgcatcgccccagggcgcgttgtcagcccgaggaggagccgtgggaggttcttcaggagaagaaagcggcctccctgaggaaagcagctgcactaagaaagtcagagccttcgggagatgagggggacgggggggacgcgggggacgcgggggacgcgggggacgggggggacgagagggatgtgggagccggccacggtgacatggacgaggccgctggacaggggggcactgaacgcacggctgaagtcatttggccattttaaggattactgttaagtattcagaaatgataagagtattgtggttagagatgaatcctgaaatatccaccagtgacgtgctatgatgatgggatttgcttcaagggggggcacccgaacggtacggaaggggtgcaga

SEQ ID NO: 261407 - DNA, 1347 bp, Homo sapiens
  chr9:140400244-140401591
  hypo
gggatgtggttggggaacatcgcacaagggtgtggtcaggtctgaatcgcacagtgcggaaaggccggctgagcctcctgaagctgcaggtgccacatgacaccaaagccggcggcgcccccaatgcaccagcaagccacggagagggtggggccccaggcggagggtgagaatgacagccagggcctaccttgctggccacggagctcccggggtgctcgtccgagtgcaggaagaccctggcacggtcacatgccatccccagatcagaagtggcactgcctgggccccctacacacagaggggacactcaggacacggttcgctaggccactgacacaaacgtccgcggtgtgggctgagcacaccctgcagtctaaccacacagaccccggcagctccctcgagggagtcgggccctgagatccctccacaccctgctttctttcggcatctgcctcaatggctctgtgacccaccagctacaggttttctccgcagcttaaacccacacggtgccttcaacatttctgggcactgataaaggtagcccggtcggtacctaaaacacggaaggaaaccagccctggtcctgagccaaattcctcaaaccttgccatgcgtgccacaccctgacggctcgctgcggccaaccctgggtagagcaccctttctcttgctgtccatctcagggatgctgccgccctctgtatgtgagctcccctaacgggtgccctgggccgtcacgctggtgctttgggcttggctctttgcagtcccagccccatctcagaggttcgctcttcgcagtccagccccatcttggagggagggggttgaggcaccccctccaaagagctcccctgttgctgcttttgggcggcctcgggctgagcgggatgaagcagtgtgcacccttttacagcctgccctcagcattacacatcactacacacacagcgtatctgacctctggaccagctgctgtggattctgaggaagggtgcacgctttgcacgacggggtcacgcacttccaggcacagatccagcccttcgtgtgcagctgcgcatgcgagcgagtcatctgcactgcggtttcccatccatactggaattcgcaacacccatttctcagcggaatacagaggaaccgcgcagacactaaccgcagacacatgccacacagatgccgcagccacatggcgctgcgggaaggaaccaggcccaggagcacagccatgtgcccctccctgggaagccagacacagagagccaggagcgctgggccttggaaaggggcgcatgtctccgaggcttacgctgagggtgcgctggtcgggtttca

SEQ ID NO: 261408 - DNA, 37 bp, Homo sapiens
  chr9:140418788-140418825
  hypo
gtcgagattcccccacggtggcgcgtctgccagaggc

SEQ ID NO: 261409 - DNA, 81 bp, Homo sapiens; identical to SEQ ID NO: 213284
  chr9:140487908-140487989
  hypo

SEQ ID NO: 261410 - DNA, 146 bp, Homo sapiens; identical to SEQ ID NO: 213285
  chr9:140538082-140538228
  hypo

SEQ ID NO: 261411 - DNA, 42 bp, Homo sapiens; identical to SEQ ID NO: 213286
  chr9:140576167-140576209
  hypo

SEQ ID NO: 261412 - DNA, 174 bp, Homo sapiens; identical to SEQ ID NO: 213287
  chr9:140577314-140577488
  hypo

SEQ ID NO: 261413 - DNA, 269 bp, Homo sapiens
  chr9:140582120-140582389
  hypo
gtcacgcgaggacacggcaagaagatggcaggccatgagcccggaaatgagagcctggccacacgctgaatttgccagcaccttgatcttggatttccgagcctccagaacttaaacaaataaatttctgttgggtctgtgccacccacatgaaggcagtttgttataatagcctgaaaggataaagtcagagcacgtcatcgtgtcaccgtcttcacggtgtggtctctgatccttcaacatggggcgtctttctatttaattgaaac

SEQ ID NO: 261414 - DNA, 700 bp, Homo sapiens; identical to SEQ ID NO: 213288
  chr9:140587006-140587706
  hypo

SEQ ID NO: 261415 - DNA, 79 bp, Homo sapiens; identical to SEQ ID NO: 213289
  chr9:140588766-140588845
  hypo

SEQ ID NO: 261416 - DNA, 333 bp, Homo sapiens
  chr9:140592377-140592710
  hypo
tgttgtgagggcagcgtgtgagggcggcgtggctcgcggaggcctcactccccactgttgtgagggcagcgtgtgagggcggtgtggctcgcggaggcctcaatccccactgtcgtgagggcagcgtgtgagggcggcgtggctcgcggaggcctcactccctggctttcactccagcctcctggtagcatgcagagacacagtgtggaaacggaggccactgtcacaagcgctgaggaggatcattattactggtttgttgacaaaacgtggacgcattttgtcttatccagcatgttgtagaaaagcagggattgccgtggaaactccaca

SEQ ID NO: 261417 - DNA, 544 bp, Homo sapiens; identical to SEQ ID NO: 213291
  chr9:140606073-140606617
  hypo

SEQ ID NO: 261418 - DNA, 283 bp, Homo sapiens; identical to SEQ ID NO: 213292
  chr9:140611160-140611443
  hypo

SEQ ID NO: 261419 - DNA, 151 bp, Homo sapiens
  chr9:140612587-140612738
  hypo
cgcctgcccctcacacgcaccgtgctgattttcacacacagggcgcgcccgcccctcacgcgcaccgtgctgattttcacacacagggcacgcgtgcttctcacacatgctgtgctggactgatcaccagatcttacgtggtgcatacacg

SEQ ID NO: 261420 - DNA, 508 bp, Homo sapiens
  chr9:140615063-140615571
  hypo
ttttatataaatggaattataatgtatgtaaccttttgagagtagcttttgtcactcagcatagttctcttaagatcatccaagttacgtcattagcccgtcccgttctctgctgaggccttggtgttctgtggggtgtggacagccttgtacgtcggcactcacccgctgaaggacactgggcatttttactttagagctgctcggggcatttacgtacacgttttggatgtaagatttacttctgtgggtcaaacacacaggagcataatcactgggttctatggccttcgggtgtttcattgaacgaggaaattgctgaaccacactccagagtggctgcagcctttcacacgcccaccggcgatgttgcagtggccgcctttctcccctcctcgccggcgtcctcgccagcgttagctcttacccactttttatttagcgcttctgttgggtgcgctggtgtttcctcgaggcttcagcgtgcgtatccctgtgactgctgatg

SEQ ID NO: 261421 - DNA, 141 bp, Homo sapiens
  chr9:140617090-140617231
  hypo
ccacggaggtggtgcggcagagactgtgggtgggtgggtgcccccctgtgcccccggtatgctctgtgtgggccccacagaggtggtgcggcagagactgtggcggtagggtgcctgccctgcacccggagtgtgctctgt

SEQ ID NO: 261422 - DNA, 861 bp, Homo sapiens
  chr9:140620043-140620904
  hypo
gtagggagcccaggtcgttctatgtctgttctggacatcagtggggtgtctggcagtttagtgtgggctcactgagaagctttgcaaggaccacatggcagcaagatgcgctcgagagacagagaggcaaggagggagggaaacagacacagacagagtgcgcctgtgagacagagagaggtggagaccgtgaggccgtgagagccagccccaagagtactcgctcccctgtgccttccagctcgccctggcacacccctctcatctcccagccaagccaggtgctaccctgttctcctccgtgtgctcttgcctggaactctcgctctgcctccctgcctcacctgtaacctccacaagcacctcctgaatccctcagagctgtctctgcagccacatgttcacccatgtcatggacccaccgagcactttgagttacttatgaccttggttacttctccctggccttgactatagttgatgcaggtgccttgtcgtgtgtgtgtgtgtgtgtgtgcgtatgtgcgtggtaaaacacataatatcaaacttaaccatttttaagtaaacagctcagtggcattaagcacattcacgctgccgtgcagccatcgccaccctccgtctctggaacctcttcatcttcccacactgaagctctgtctcctttaaacactgacttcccattcctctctcccagtccctggcaataccattctactttctgtgtccatcagttggacgactctagggacctcctgtaagtggaatggtacaacgtttgttcttttgtggctgacttacttcattcggcacagtgtccccgaggctcatccacgctgcagcgcgggccccagcttc

SEQ ID NO: 261423 - DNA, 328 bp, Homo sapiens
  chr9:140622680-140623008
  hypo
tgtatctcatctttcggttgtggggaattatcggggagaagaactgtgattttggttgcatgttatttcagtgaccacctgcttatgcagttatagttattcactgtctttgttttgaagcatgcagccagtaaagatcccagagaagttcgagaagctagagatcataaggaaccaaaagaggagatcaacaaaaacatttctgactttggacgacagcagcttttaccccccttcccatcccttcatcagtcgctacctcagaaccagtgctacatggccaccacaaaatcacagacaggtaaagaggacccggcaactgtctctg

SEQ ID NO: 261424 - DNA, 257 bp, Homo sapiens; identical to SEQ ID NO: 213298
  chr9:140623353-140623610
  hypo

SEQ ID NO: 261425 - DNA, 40 bp, Homo sapiens; identical to SEQ ID NO: 213299
  chr9:140633524-140633564
  hypo

SEQ ID NO: 261426 - DNA, 208 bp, Homo sapiens
  chr9:140636513-140636721
  hypo
tgcatgttggctgtgtgctccgagcctgacccccatgaacatactgcagacgcctggtgtgatcgtttcccagcgtccgtggtcccaggcacctccttactccagagcggattgcccaggccccgcggcgtctgtgggtggtgctgtcaaaggacctacccgctttggatggttctcactcgttcacgtccctccaactgttgcttct

SEQ ID NO: 261427 - DNA, 248 bp, Homo sapiens; identical to SEQ ID NO: 213300
  chr9:140645187-140645435
  hypo

SEQ ID NO: 261428 - DNA, 180 bp, Homo sapiens; identical to SEQ ID NO: 213301
  chr9:140647980-140648160
  hypo

SEQ ID NO: 261429 - DNA, 674 bp, Homo sapiens; identical to SEQ ID NO: 213302
  chr9:140653937-140654611
  hypo

SEQ ID NO: 261430 - DNA, 1509 bp, Homo sapiens
  chr9:140657349-140658858
  hypo
ccctcgagtgagttgtgctgcgtgaccagggcgggagcctgagtggattctgcgcagaaccaatcgagcagatcccaacagtgaaatcacggcagatgatgaaacacaggtctagagcttgttaaaaaggaggactgtgtagacaaagtctttgaatgaaaatggcctgttgtatttcttttttatgatcatggttttgtcaaggtttttcctaccttgctataaacaaagtgagtagattgaggcaggatagtcacaccaaggtgagtccagaactgcccagaactgtggtttcctgcagggcaggccccgcaagggccgggcctcggccacctccctcctttcaccggggatcacagactcagagggttcagcacgtcccgtctctgctgcctctgggacaggaggggggatcaggcagagcacagacggaattaatgttttctgagaatttctccagttctttttaacacgatttctttcagccctcagagcctcgtgaccatggctggccatggtgagggtctgagcaggaggcttgttggcaccaggccgagaggcaccacatgcagtcacactgctcaggtgtctggctgccccgggcttgcatttgctgtggccgaagtcagcacgtggccattagtgtcgtctgcttcctgaggggtgtgtcaggctgttgcttccacgagtttcctggtcttattggccagcggatccatcttcagctcgattattgcgtcttagctgcacattgtggaagtaagtgagctgtgaacaggacaaccatccgtgtagcaatgctgggcattattccaagccttttgcgtagggcgctcctccaggtccacggcagcctgtgcagcatcggccgtcgcccaggtgatacaggtgaggcccgtgagaggggccaggtggcgcctccagactcactggcctgctgtgaggaaggcaggaatgggagccttgttccaaaggtcaggcccgaccgctgtgtcggggagcatgggcaacacccgggaggagcgggcagagccctggaacaggccagtcagtttcgcccatggccctcaccctggtgcctgttggcgtggccggggtttctgattcagcaggtctggcctggctgggattttgcttttctaaagtgttccccgtttctcctgatgcttctggtccagggaccacactttgagaaccactggttcgcctcctcttctccttctccgtaggtgttaaacaggatccagtggagtcagatccccgtgtgacacgtgcttccctgtgacttttctctctgtatctccacgtttccggtgcacatgcctttactcagactccgacactggcgttgcttttgtctcatcccagctaggcgacgtctgcgtcagcgcctctcatctgtggcacgtgtgcccagcgggctccctatgtgacggcttttcccacctctgagtgttcatgtcactcgctgcatgttctgccacactcggcccctctgcagagcctctc

SEQ ID NO: 261431 - DNA, 90 bp, Homo sapiens
  chr9:140659467-140659557
  hypo
tgtggaggttcgtgcgctgggagcggtgctgagaaggctctgggtttctgcggcggccgcctgtccgcccgaaggcggtattgtccttgg

SEQ ID NO: 261432 - DNA, 273 bp, Homo sapiens
  chr9:140664575-140664848
  hypo
actgtgcccggcccactttatttcttcagtcttgtgtttttttctttctttctgggattccttgtacacacgttagattgtttgacattgtcccacagctcttcaatgccctcctctttttttctccttccattttagttttagataatttatgttggcctttaaaattattcaccagttcttccttgttgagtatacttctgagccagtcaaaggcatttatctctggtactgtttgtttctagcgttttacgctgacgttcttgaaattcc

SEQ ID NO: 261433 - DNA, 310 bp, Homo sapiens
  chr9:140680232-140680542
  hypo
cccgtgagacacagcgttgctggctccctggacacctggtggacgcctgggtgccctccccgggaacagcagccgttttggtctcaccgccctgcaagtgcctcgcatagcagggttccgtttgtttgcttttaacctttatgctaactgagttgtccagcgtgagttcctttgtgtctgcttccgtcagtcaggaaaacaagggagtgtagaaaagggacatggctgtggggctgagtggcctggccctgccagggctccctgctgactgcctgtgctctgtgcttgtctgaaacgtcgtctttgggga

SEQ ID NO: 261434 - DNA, 118 bp, Homo sapiens
  chr9:140682707-140682825
  hypo
atgctgaagccattgctgggcggtggcagatgaccgagcggctggtaggactggcatgcagcactcagggggcccaggacgttggcgaaggctccacccgcaccgccttctgccagcg

SEQ ID NO: 261435 - DNA, 256 bp, Homo sapiens
  chr9:140682855-140683111
  hypo
aaggaggttgcaggtttagggatcttgtaggtgaaaggaggttgcaggcgtacggaggttgcaggtgtagggagattgcaggtgtagggaagttgcaggtgtaggggtccttgcaggtgcagggatcttgtaggtgaagggaggttgcaggtgtagggggccttgcgggcttagagggcctcacaggtgtaggggattgccgtgctgcaggtgtctcttgtcccctcggggactgggagagcgactgtgcctctgg

SEQ ID NO: 261436 - DNA, 106 bp, Homo sapiens
  chr9:140691709-140691815
  hypo
cttacctgcagccccgctctttgccaccttcacgtctattcccacggggttcctttggctgactctcaatcccctcaccccaccactctgccgctcccagccctgc

SEQ ID NO: 261437 - DNA, 323 bp, Homo sapiens
  chr9:140692092-140692415
  hypo
agccgtgtgggaaccgggtgtgctggctttccttgaggaaggtgagcatgctgatttagccccaggtaggggagcagtatgtgcagtgatgcctgcgaaactctatgactgctacacggactccaccgagataaggggagaaaggtaatgaaggaacatggttaagtggagacaggaacaggggagcaaagcaaagcaaacacctgaagggagacggtggtggagtgcgtctgcgggcctgtgtgaggagcacaggcaggaagaaccctgtgtaaggcgtgtggatggcacagcggtgtgggcggcaccggctcccctgcctc

SEQ ID NO: 261438 - DNA, 147 bp, Homo sapiens
  chr9:140693486-140693633
  hypo
ctcgggccctccagcgtcctcttccacacttagggccagctcggaccctccacagcgtcccatcccacacacagagccagctcgggccctccagcgtcctcttccacactcagggccagctcggaccctccacggcatcgccttcca

SEQ ID NO: 261439 - DNA, 257 bp, Homo sapiens
  chr9:140697268-140697525
  hypo
ctacctcattccaccggagttctttcccactgcgggttaggatgacggcaccatgaagagaggagccctgagccggcagaaggaagagaagagggaagcagaggagccctgagctggtggaaggctgtggcgggtaccttggaggaagagaggagggaagcaaaggcagagaacaaggcagaggccacccccaggtggggccacctcacccaccgcccccggagactgcgtggcggggaaggcggccctagtgtggc

SEQ ID NO: 261440 - DNA, 239 bp, Homo sapiens
  chr9:140703966-140704205
  hypo
ctcagccgccgcagcaaagcggtcagtcaggcggggcttggtttatggcatctgggaagatcgctgaccattcccgaggggaaggaggctgcagccggcgctcccagacaccagcagagcagaacacacttcaggaacgtgaaacgctcacgtgcttttaatccagcaatcctgcctctgaggatgcatccttgagaaataatgtagaaaatgaaaagcactaaaatatttgctggcat

SEQ ID NO: 261441 - DNA, 101 bp, Homo sapiens; identical to SEQ ID NO: 213311
  chr9:140704676-140704777
  hypo

SEQ ID NO: 261442 - DNA, 608 bp, Homo sapiens
  chr9:140707364-140707972
  hypo
ttgttagtgatgacggacattttataaatctcatctgtatcacattttcaagtcagctttaaatgttttgtggccttacattttcccttttagcctctttctttctcgggattcagatgtcaccttaaagaacaaggaaggagagacgcccctgcagtgtgcgagcctcaactctcaggtgtggagcgctctgcagatgagcaaggctctgcaggactcggcccccgacaggcccagccccgtggagaggatagtgagcaggtgagcccagccccaggacggctttgtggcaaatcagcggtcagcagggctttgggaacttgcggtgaaagctgctcctgaagccgaaacatccccaggctgcagtccaaattgtcagggccaggtgtttgccagccgccccactgcacgctgtgccaccccctgggcagagcacgtcagccaccaggtgacacctgtcctttccatggcagggacatcgctcgaggctacgagcgcatccccatcccctgtgtcaacgccgtggacagcgagccatgccccagcaactacaagtacgtctctcagaactgcgtgacgtcccccatgaacatcgacagaaatatcac

SEQ ID NO: 261443 - DNA, 981 bp, Homo sapiens
  chr9:140708200-140709181
  hypo
caaggcttcttaccgacccaaagcagtggcaggcatctttgtgccttttttgtaacctcacactcaggggccccggtgtggcttcgtgctgggggcacaggcgagaggagcccttgcgaggcctgcaggacgacctggatccctgcacctcccagcccccggagagatgggtccagcacatgccagctttcccagcctccgagtgcatgcagcctggtgccctcactgcttgcgccttctcgagcactttccttgtggctctgcttgtgggcagctccctcctcttcccaggccgggcactgcccaggcccccccccccccccgccccccgccccacaaggtgtgtcaggctctgtgttcttgcctttcccatcgagcatctggccacaaatgcagccgccgcccagcccttcacccaccccacgtcacccactgccgcgtcgctgccctgcctgccccctgtccctctgtcagggtcctcagccagagctccctcccacaggcactcgacatgtttctgcctgcacagccttctccctaagaggccacacactcacgtggtgcctttgagaagcacttaccagaatcagggttaacagaactggaagacgtagttgtgactgggaggggaaatggaaggcctgtgcctgcacgtctgaccccccggcgcctctcttctcagtactgcgtgtgcatcgacgactgctcctccagcaactgcatgtgcggccagctcagcatgcgctgctggtacgacaaggtgagggcggcctcgtgtgcgtgggctcaggtggtaagtgccgctggtccgggtctgcaaaaacagtgcaggcgtctgtgaccccagcgctgtcgtggcagcgtcgggaaggagttggaggtgagctgggtgtgacaggcaggggaggcacagcgggcaccagcacccgagtcagggtcgtgagccgaggacatggctgcggattccctggggctggggtc

SEQ ID NO: 261444 - DNA, 466 bp, Homo sapiens
  chr9:140709436-140709902
  hypo
tgctgaggaggagacgggagtggggagtagccctggctagcaggggtgcaattcaggggagggatgtctaagcagaggcggagagttcctggtctcccgagttcagaggtcacggtgggggcggaagccagcatggcctgggtaaagagacgcgagcagggagaggcaacaggcgtcccctctggaagcagactttggaggagagtggacatggagggtcaagtgtttacccatctgaattagaggctccaatgggaaaaggattcgtgccagtgagggctatggagatggtacgctcagaaagccaccaagctcatgtccgagtggtgtcttttcaggtggacagtgttgctgagggggcgcaggaaggaatgttctgaggagcgccctaattgttcagagcagcccctgaagccgtcaagccagagtgtgcctgggcagccctgggccccgcgcctcagctcac

SEQ ID NO: 261445 - DNA, 105 bp, Homo sapiens
  chr9:140723474-140723579
  hypo
gtctgtacagagcccgggtggggcatccaggcaccacggggaggcccccgccctggtctcacagacgttgccactggagctcgtgccgtgcgcccactgccacca

SEQ ID NO: 261446 - DNA, 527 bp, Homo sapiens
  chr9:140727426-140727953
  hypo
taaaccaggaggcagcttcccgcgcctttggctttgggggctgtggctggtcctgtcctgcggccgtgctcgcctggtttactgtcttgtcactgcccgcgccgtgaaggttgacggagagctgctctcgtccacgcctttacccgcttgttggtttgggttttaacctcttgacctctgagcgtccctggctctctggttaatgttcatgctggggcaggttgtggaccaggtgtctctgccggcaggccccgccctctcggaactcggtcctggaaagccccaggtgcctccttccccgtctgcctggctgtcgtctgtggtgttgcctcttcccgtcgctgggtaacaaaccacgccacccacccgcagctcgccatggcggccacccactcggcccagtgtgcgcagcaggggttgggcgtgccgggcctcgggctgcacaggcagggtgctgctgagcccaggtccctgtggttgcgtgggcagcgtctaggttccttgctagctgccggccgggaccacct

SEQ ID NO: 261447 - DNA, 136 bp, Homo sapiens; identical to SEQ ID NO: 213318
  chr9:140731431-140731567
  hypo

SEQ ID NO: 261448 - DNA, 804 bp, Homo sapiens
  chr9:140937910-140938714
  hypo
gcttctcagcgcatcgaggcccctcagcgcggcagaggggtccacagccacgggtgctgggctcggtgttgttgccaacgttggtgcagcaagaggtgaggaagggtccgttagcgtctctgcggcagatggtggtcctggctgtcgtgcgccacggtcatgtacgtgaagcactgttcttagctgcttgcccatccctggtgggcctgtgaggacctgacgcaagtgccgggggcatgggagctgggagggagccacgcaacgtgggcttcatgtgcactacaccccttactcgggggccctgtgtccttgtaggtggtaacgtggacctggaaagccaagcagaggggaagaaggaggtggaagcggatgacgtgatgaggagcggcccccggcctatcgtcccatacagctccatgttctgtttaagccccaccaacctgtgagtctccttgcctgctggtgtgtgtggccgcccactcacccatgcatcatgacccgtgggatctcagtagccagcgtgcactgattctgcgcacttatgtagagaaacggctctaaatcccatggcagaccccagaggcacgtgcccgtgtgacctcattctgcagaagaggacacgggcacaggaggcagcctcagcggagctggggtgagctccaggcctgggctcctcacctcctctgtggtgtgcgtgtgtctctgcacacagggacgccgtctgccctgtgtcgcaaacacacttccatccatctgccttcccatcacacctggcacctgtgttgcctgcgtgtgtgcactgtg

SEQ ID NO: 261449 - DNA, 169 bp, Homo sapiens
  chr9:140969119-140969288
  hypo
acaggtggatgcaccgtggtgttcttgagggctgcatgggctcccgcccagtgatggtagggtgtcggggcacaggtcagaatgggtgctggctgtgtggtggaggcgcgttggagcacagctgtgtttgccgagtggcttgcacagtggcggtcggttatcctgttag

SEQ ID NO: 261450 - DNA, 272 bp, Homo sapiens
  chr9:140970055-140970327
  hypo
ttcagagctggagccggcacatgtgtagctacggagagggcgtctatactgggaatgcacactggcctctcccgggtgggagttctctggtgtggggcagtcgcccatctcacgtggggtccttgtacggctcgcacgccctctctggctcggtccacctggcgcggctcctgcagacccagcagggtccgtgccattgctcttctccattgcaggtgtttgggaatattgccctggatgatgacaccagcatcaaccgccacaacaacttc

SEQ ID NO: 261451 - DNA, 222 bp, Homo sapiens
  chr9:140996899-140997121
  hypo
cgcccactgccccgcgtggggctggagtgaggaggtgaggctcgggggtggggggccaggagggggtcaagccaagcagagaaatccctcattttatttattttgattttgggctttgaatccgacactttgattaactggctctgttttcttgtctgcttcctccctgcccctaccccgctcccctccccgctcccctcctgctgccgctcctcctgtgga

SEQ ID NO: 261452 - DNA, 456 bp, Homo sapiens
  chr9:141015968-141016424
  hypo
agcacccccggccgcggtgggcggaggcagctcccccagacgcccctgactccccgccccagcatcacctacaagacggccaactcctcacccatccacttcgccggggctcagaccagcctccctgccttctccccaggccggctcagccgtgggctttccgaacacaacgccctgctgcagagagaccccctcagccagcccctggcccctggctctcgaattggctctgacccttacctggggcagcgtctggacagtgaggcctctgtccacgccctgcctgaggacactctcactttcgaggaggctgtggccaccaactcgggccgctcctccaggacttcctacgtgtcctccctgacctcccagtctcaccctctccgccgcgtgcccaacggttaccactgcaccctgggactcagctcgggtggccgagcacggcacagctaccac

SEQ ID NO: 261453 - DNA, 113 bp, Homo sapiens
  chr9:141022614-141022727
  hypo
catcagaacaggggtcgcagaactgacctggcccccagtccctgagcgctcccacctgctgccctctcccgcccagcccagcccagctgcctgcgttgcggcctccacctgca

SEQ ID NO: 261454 - DNA, 206 bp, Homo sapiens; identical to SEQ ID NO: 213319
  chr9:141069527-141069733
  hypo

SEQ ID NO: 261455 - DNA, 44 bp, Homo sapiens
  chr10:353591-353635
  hypo
aaaggtcaaagagagaacatcgcggagaaaaaaacagaaaggaa

SEQ ID NO: 261456 - DNA, 194 bp, Homo sapiens; identical to SEQ ID NO: 213320
  chr10:373930-374124
  hypo

SEQ ID NO: 261457 - DNA, 47 bp, Homo sapiens
  chr10:385014-385061
  hypo
ttaggagcacagcctgaggtcgaggcgtcctcaaatttacaccccca

SEQ ID NO: 261458 - DNA, 221 bp, Homo sapiens
  chr10:396923-397144
  hypo
gcatgagtgtagggatggagcgcgcggcgggcctggcaaggctgtcgggaccggacgctgtgattcagagattggggacagagtgcacagcgagcccgagatggctgtcggggaccagacactgcgattcagagtgaaggcgcagggagagaggcccagaggggcttgcgggtagccgagttagtgcaaccaaaaggacgccgcacggacgaacagtatct

SEQ ID NO: 261459 - DNA, 74 bp, Homo sapiens
  chr10:397174-397248
  hypo
cacgtcagcctcccagctcgaagggcccgtgtcagaaacacatggcggggcacggtgagtggaagataatgtct

SEQ ID NO: 261460 - DNA, 123 bp, Homo sapiens
  chr10:415397-415520
  hypo
actggttaatctgtgcagctcgcgacccacactcacctccaggcatcacgaggccgacatcctgcacggtgagcacggacagcttctcttccgagtccacacgaatgaccccataggtcagtc

SEQ ID NO: 261461 - DNA, 85 bp, Homo sapiens
  chr10:416218-416303
  hypo
gaccactgcgcacacgttcaccacgctggggcccaccccacctcctctgccggacaccccagcttgctcccgccttggggcttct

SEQ ID NO: 261462 - DNA, 172 bp, Homo sapiens; identical to SEQ ID NO: 213321
  chr10:422173-422345
  hypo

SEQ ID NO: 261463 - DNA, 520 bp, Homo sapiens
  chr10:425873-426393
  hypo
tgtccctggaagatggttaacgtgcagaagaggatgtccctagaagatggttaacacgcagaagaggctgtccctggatgatggttaacgcacagaagaggctgtccctggaagatggttaacacgcagaagaggctgtccctggaagacggttaaagcgcagaagaggctgtccctggaagatggttaacgtgcagaagaggctgtccctggatgatggttaacgcacagaagaggctgtccctggaaaatggttaacgtgcagaagaggctctccctggatgatggttaagacgaagaagaggctgtccctggaagatggttaacgtgcagaagaggctgtccctggatgatggttaacacgcagaagaggctgtccctggaagatggttaacgtgcagaagaggctgtccctggaagatggttaacgcgcagaagaggctgtccctggatgatggttaatgcgcagaagaggctgtccctggatgatgtttaacacgcagaagaggctgtccctgga

SEQ ID NO: 261464 - DNA, 44 bp, Homo sapiens
  chr10:463657-463701
  hypo
ctccctgtctgcctgcgcctgtcagggctcggataggcatccct

SEQ ID NO: 261465 - DNA, 457 bp, Homo sapiens
  chr10:482019-482476
  hypo
aactggtgtctttcacacagcgaattcagttcagaccgggcgcacttcatgtactcagccaccacgtgtggtgagtgacagagatcatcttgcatgtgtgtccacattttactgcctttttcttgaccacagattctacctccggtttctctgtgtatgcagtgattgtttgcttaatattgcacattgtgggtaacgtgttgagcacgctcaggatcccataagcttcttcggaagctttccagctcttgttttagcaggcagcgcaggcactgctgggtcatcgtgaccatgggcaggcttggattgatttgctgctggtgtggatgggtggagagctccagtcctgcacccactccgatctccgcctcctggacttggcagggtggcatgctccgcccacaccagagctctctccgagctccgcctcctggacgtagtagggtggccatgctcc

SEQ ID NO: 261466 - DNA, 141 bp, Homo sapiens; identical to SEQ ID NO: 213325
  chr10:482840-482981
  hypo

SEQ ID NO: 261467 - DNA, 159 bp, Homo sapiens
  chr10:483296-483455
  hypo
cacacctgagctctgagctccgcctcctgaatgtggtagggtgatatgctccgcccacacctgagctctctctgatctccgcctcctggacgtggtagggtggccatgctccactcacacctgagctctctgagccacggtctgcaggtgttctccagg

SEQ ID NO: 261468 - DNA, 219 bp, Homo sapiens
  chr10:518266-518485
  hypo
gtgctgcaggtccacgcccactgcacttctgcctcgcccagtggctgggcacaggcaccgtcctggcacaggtggcagatggacgtattgtatcaccccaccccgtgcttacctgaccgatagcgctcatctcgtgaccctgaagaccgtcggcggtggtagcgagaggcggaggaaggagtgacaggagcccggcgttcttgcggcaaagcttggtcc

SEQ ID NO: 261469 - DNA, 427 bp, Homo sapiens
  chr10:524387-524814
  hypo
tttctcactcatctcatgtccgggcatgccgggggtgcagatgcacccaaattcccatcttattctcactcatccagtgtccaggcatgctgggggtgtagacacatccaaattcctgtcttattcccactcatcccgtgtccgggcgtgctggggctgcagacacatccaaattcccatcttattctcaactcatcccgtgtctgggcatgctaggggtgtagacacatccaagttcccgtcttattctcactcatctcgtgtccgggcgtgctgggggtgtagacacatccaaattcccgtcttattctcactcatcgcgtgtccaggcgtgcagatacatccaaattcccatcttattctcactcatcgcgtgtccgggcgtgctgggggtgcagatagcaacgtctctatggctcaccttagc

SEQ ID NO: 261470 - DNA, 158 bp, Homo sapiens; identical to SEQ ID NO: 213328
  chr10:545443-545601
  hypo

SEQ ID NO: 261471 - DNA, 427 bp, Homo sapiens
  chr10:583336-583763
  hypo
taaggatcaccctggcgcagactccggttcctttcaattcgcctcttttcttcccacaagtagccctctaatgcccaaggaagctcagacaacacaagtaactacgacctggctccagcatctgccccccacacatttgtccccagggcacccagcatcctgccccccgtccccctcccccgcacacttgtgcccagggcacccaggacacgggtatcacccatgtttcagccaggcttgtgtttcccccattaacatgacaacaggagagggatgagggaagacacgagacacaggctggtaagtcaactctaggtggtgcaaacccattgctctggcaataagcaaagctcttggggtctccctaaatatcgagcagttatctttcgtctgcgaatttttttttttcccccgagaccgagtctcg

SEQ ID NO: 261472 - DNA, 180 bp, Homo sapiens
  chr10:603006-603186
  hypo
ggtcagtgtggcccacgggacacggccaggagaccggccaccttgacactgggcgtaagaccagcactcctatgtctctgcagaaaggagcagccctgggcagggatgtgcctggcagccccacagagggaccggtgtggaggaccaggcctccgccagcagacacgtcagcacagcatc

SEQ ID NO: 261473 - DNA, 335 bp, Homo sapiens
  chr10:606109-606444
  hypo
gtccactgatcatccctccacgcacagcagagagcagtcctcgggataaaacccacaggggtggagaagacacgcgatcaaggtggacaggatggaggagtcacaaagaggggaggttcggagaatgaggccatgtgaacacaaagctaaagtgctcagcggctggaagacaaaagctgcacaacacaagagacaagctaaacacaaccatttaaaaaaaaaaagaaaaaagtgtcactgttaagtaggagtccatcaggatttaagttctcgagtcacttaatgtatcagcacacagacttctcataatgcctgaaactcgcggcagtgaacac

SEQ ID NO: 261474 - DNA, 298 bp, Homo sapiens
  chr10:630294-630592
  hypo
acagattccaaatctcggagcccacgacctgacacccactcacgcgcatcacctctcaatctcggggcccacaacctgacccccactcacgcgcatcacctctcaatctcggggcccgcaacctggcccccactcacgcgcatcacctctcagataatctcggggcccgcgacctggcccccactcacgggcaccacctctctagtctcggggcccgcgacctgacccccactcacgcgcatcacctctcaatctcggggcccgcgacctgacccccactcacgcgcatcacctctca

SEQ ID NO: 261475 - DNA, 319 bp, Homo sapiens
  chr10:632981-633300
  hypo
tgctgacagcgtggcgaggggcaaacagtgcagggtctaaggccggaccacccggatccctgctgatagcgtggcgaggggcaaacagtgcagggtctaaggccggaccacccgggtccctgctgacagtgtggcgaggggcaaacagtgcagggtctaaggccagactacccgggtccctgctgacagcgtggcgaggggcaaacagtgcagggtctaaggctggaccacccagggtcccgctgataccatgacttcaggagtttcctaaaccctctgctctccaagttccgcgtcagtaaaacgcggtgataaccgt

SEQ ID NO: 261476 - DNA, 69 bp, Homo sapiens
  chr10:658726-658795
  hypo
agaaatgagacaaatattgacgctccacagaagcaagtattctcttccggaaagtcaagaagtgtcagg

SEQ ID NO: 261477 - DNA, 352 bp, Homo sapiens; identical to SEQ ID NO: 213330
  chr10:669050-669402
  hypo

SEQ ID NO: 261478 - DNA, 219 bp, Homo sapiens; identical to SEQ ID NO: 213331
  chr10:669947-670166
  hypo

SEQ ID NO: 261479 - DNA, 217 bp, Homo sapiens
  chr10:673213-673430
  hypo
gggctgctgtgggtcgggaaaccctcccgacacctccctctccaaaaccccccatcagcatcccagcatctggacctgtgtcaccagccgctctgccgtacaagagaactggattttcagctgggttcgctgcttccctaaacaaagtagggttttgttactgaggaaaaaggaaaaagcgggcatcttcttggcaacctcgcgacatccagccgcc

SEQ ID NO: 261480 - DNA, 122 bp, Homo sapiens
  chr10:673704-673826
  hypo
acaaacagaccgcacggctcagccacgtggacgcttacaggacttcacgagaggcaccaccgtggtacacgtgaagacgtgcacttcattcagcctcgaacagaccacgccctcattacggg

SEQ ID NO: 261481 - DNA, 363 bp, Homo sapiens
  chr10:676525-676888
  hypo
cagcggccaacgtccgtcacggtgccgagcagtgccagccgctctaccatggccgacggcctgattcccaagggctgcgtcccggggccgtgctagtgcagtgaatgttcaggaaacagaccaggtggcaggagggagtcttgtcctcaaggaacctcataagtcttgctagggggacaaacaacgagagaatgaaactggcagccatagaatccgggccttgatgcccaggcctcgccatgcatacctgctggccggcatctccctgagacccgtctggcacaggcaacggcagggcccggcccttggagcacagggatggcagagcagggtcatcgaagcaggtggcgtgcagacagtggc

SEQ ID NO: 261482 - DNA, 43 bp, Homo sapiens; identical to SEQ ID NO: 213332
  chr10:678906-678949
  hypo

SEQ ID NO: 261483 - DNA, 357 bp, Homo sapiens
  chr10:679150-679507
  hypo
tgtcaatcaaagcttaggcacgtgggttacttcactgttctctgtaccctttccaaataaaacccggggccgcctgtgtacccaagagcctgggcactgagcagagagagaaaacgtccagggcaacagcgttcacattccggcggtgccatagagcagacggggggagtccgaggcggtgccgcagagcggacgcggggagtccgaggcggtgctgcagagcggacgcggggagtccgaggtggtgccgtagagtggatggggagagttcgagccacaggtggccacgcctcccctgcctccggccggtgcccactgctcacgcattcctctctcggcccatcctgagccaggggg

SEQ ID NO: 261484 - DNA, 40 bp, Homo sapiens; identical to SEQ ID NO: 213335
  chr10:685212-685252
  hypo

SEQ ID NO: 261485 - DNA, 90 bp, Homo sapiens; identical to SEQ ID NO: 213336
  chr10:685282-685372
  hypo

SEQ ID NO: 261486 - DNA, 332 bp, Homo sapiens
  chr10:698147-698479
  hypo
aagtgggcgcactgcgtatcccctgcgggaaagaccacgctggctgctgaccaaactccactggcatcttcctccatcctgagggcatcttcctcggcatcttcctccatcgacagcagcctgggctcacctcccagcccgaggctgagaactgagttccagtcccggggtggggtggcgggggggcgcactgtgcaccctcccagctctcctccaccccttccctcaggctggcccaagaatagcctggacaatcacctgctggggacaccgggctgcccctcctccgcccacagcctcaggccacctgtctcatccgtgaccgagaaacg

SEQ ID NO: 261487 - DNA, 313 bp, Homo sapiens
  chr10:712144-712457
  hypo
attattccttcagcacctaccgggaaagcgagaagaaagcaaagggcatcactccctacccacgaaagactcacaacatccctggaaaagcaacgaggcgaacggctggtctgcgttcagagctggtgaggagcagggagaagaatccagagcgtccccgcctccctccctcaccgccctcccgcactgatgtgaacacgggagtaacaccgcgcgtggggaatccactggcacccagagcccggcccgcggcagcagaatcacccaagactgagatcctgtggcctgagtcggggccggggaaaccaagcct

SEQ ID NO: 261488 - DNA, 610 bp, Homo sapiens
  chr10:741529-742139
  hypo
cggcctgggccagccgggtgtgggcagagagcagcccacccatcggctcatcacactgggaacacgcgtggctgtgacccacccatggccacatgacagccgctggaggatggggcacccagcctacagcgcccgagcagcctcgctgagaaccaccacatgtcagctgggcagaaaccaggaacccgcaggctcacatccaccaagcagtgtgtccgggcagatggcgtctcagagggtgaggatcccccatgatctctggggacccacaggtgaggatcctgtgtgacctctggggacccacagctcctcatatccagcgagcagtgcgtccaggcggatggcatctcagagggtgagggtcctgcatgatgtctggggacccgcgggtgaggatcctgtgtgatctctggggacccgcaggtgaggatcctgtatgatctctggggacccacagctgctcacatccaccaagcagtgcgtccaggtggacggcatctcagagggtgagggtcctgtgtgatctctgaactcgcaggtgagggtcccttgtgatttctggggacccgcagctgctcacatccaacaggcagtgcgtccgggtgtacgg

SEQ ID NO: 261489 - DNA, 152 bp, Homo sapiens
  chr10:746638-746790
  hypo
tgtggtgtgtgtgcaggcatcggcgtgcacctgtgcgtggtgtgtgtgcacgcataagcatgcacctgtgtgtgtatgtaaagaaaggctaggaatgaacagagctccctccacacggaagaaaatatgacgcatgggaagatgtcttccct

SEQ ID NO: 261490 - DNA, 229 bp, Homo sapiens; identical to SEQ ID NO: 213339
  chr10:769017-769246
  hypo

SEQ ID NO: 261491 - DNA, 131 bp, Homo sapiens
  chr10:802983-803114
  hypo
cctgcccaatatctagagtgcggcggggacgtgcccaattctagagtgcggcggggacctgcccaatatctggagtgtggcggggacctgcccaatatctggagtgtggcggggacctgcccaatatctgg

SEQ ID NO: 261492 - DNA, 79 bp, Homo sapiens
  chr10:818533-818612
  hypo
ttgggggtagtagacgctgggaccagctcactgcacagattggggctgaaaagaggggctgggtcgacgccaggctgtc

SEQ ID NO: 261493 - DNA, 223 bp, Homo sapiens
  chr10:818868-819091
  hypo
ccgtggatttcaggcgggggtcactgggccccctgctccttgccattcatggaacggtgactcagcaggtggggcgaggtgaggacacccctcaaattagtgtaggcactcaaggtgggaccatcctgctgagggtgacgcagtctctgaaaagatcctaacaaggtggaaagactgactctgccaagatttttttttttttttttttttgagacggagtttc

SEQ ID NO: 261494 - DNA, 703 bp, Homo sapiens
  chr10:819331-820034
  hypo
attacaggcgtgaaccactgcgctcagcctggcgagatttcattttattgataaatgtaagtttttgcactgaactaaccccagacttcactaacgtgggtaggaagacatggctcctaggtgtagacgcaacccccagggctcttggacggagatcacgtggaatccagagtccagtgactttggcagtaactgaaatgggatatttaatattcacgcatttatttcacaaatgatcccagtgtgcctgtgtgtgcctgggccccggcagcggccagccttgccctggaacacaaatgactcacagagagggacgggtcacgcggagaataagccaggagctgatgcgggaggagacgggtcagaggtgctttccctggcaggaagagccaggccccccagaactcctagagcgccctgagatcttcgggttctgatggtggcaggttctgctggggcgggtggtgggccctgctagggagggtgacgggccctgctggggagggtggcgggccctgctggggagggcggcaggccctgcgggagcatgtgagcagggacatgatggggtcgcgcattttgcagggaaaccagcctctggctgctgcaggggtgcaggaggcgagagggtaggggctgggccaggcgggtggcggtgtgttgagaagctgggtacacgtgctccagacgatggccgtgtccc

SEQ ID NO: 261495 - DNA, 48 bp, Homo sapiens
  chr10:821446-821494
  hypo
ctgtggagacggatcgcacgctgggtttagaggcgccagccgctggca

SEQ ID NO: 261496 - DNA, 560 bp, Homo sapiens
  chr10:832976-833536
  hypo
agctgtcacaggtgcagccacgggcagcaccgcatcccccaaatccattcactgaagtctcagcttcgacgtgtggtatttggagacgcagccttttcagaggtagttagggtaactgagccgggagtgtggggtcctgatcccatgggccgtggcctccaggagaagaacagacaccacgtgctccctgcctgtgcagagggaaggcgcgaggtggctccaggaaccaggtcggccggcaccttggcccggaacttccagcctccagattgtcagaaacaaatccctggtgtctgcggtgttggggctgacacgcgctctgcctggctgccaggtcctctgcaggcggggacggtgccggccattgctagatccctggggcgcagcacagactgcgggaaacaggctcaccagcccggctgcacgcaccgaggcagcgtccagactcgagacatcctccagccacgggcgaaatcacagccattgctgcaaagttcttgcgtcctgtgaaaactggatgtgagcctctctctggtggcagcttctactagtgctttttt

SEQ ID NO: 261497 - DNA, 572 bp, Homo sapiens
  chr10:851105-851677
  hypo
gggcggctggaggtcgagggcgcgtggggggcctggagggtgcaggggacgccgagggcgcggggcccaacctccggccagccgcctggattctggtctctgctctgagcgaggtgcgtgggtgcctccctgcttttgagcggggatgcaaaggacccccgggctgctgcgcggaaaaaggcggacggggatccagggcgcaagcagggatggagggagaggccgacacagacggcggcaggtgtgcgtggtgaggccgccccacgcagggatgggaggggcgcgcaagccgggacttgaacctgcactggctgagctgtggacgcggcctggcggcctctgcggagcgccctctgcggagctgcctctggcacctgtccacagcgtctggacaccgggcgaggaatggacccggaagcgtcccctgcccagggggtgctgcaggtacccaggggaagagcattcacgggtgccaggcccaaggggctcacgccagaagtagaccaattagacgactacaaacggtgctcagtgctgcagaagcagccggggacaggcggctgtcggagagg

SEQ ID NO: 261498 - DNA, 290 bp, Homo sapiens
  chr10:851917-852207
  hypo
agggagactggcgacgagatggccgggctggactctcggaaggatctggggaagaaccaagactggcccaggatttgggcttgcctgtctgcgtcggggctgcccgtggagatggggttccggtgaggagcaggaggatccaggccggagggtgggtggtcccatctgaaatgtggactgactgcaggtggccacgccaaggacacagtgagacatgggctggaggctgagcaggctggggctgaggagctcgaatgtactgagtggacgtattagttaccccttctttc

SEQ ID NO: 261499 - DNA, 194 bp, Homo sapiens; identical to SEQ ID NO: 213343
  chr10:863715-863909
  hypo

SEQ ID NO: 261500 - DNA, 168 bp, Homo sapiens
  chr10:865348-865516
  hypo
tactgctcaggtcccatgggcgtggttaggcccgaggctcacacacttttacagaaaaagcgtctggacctttctgaggtcctgagagcacgtacataagacgatgggcgtatgctctgtaatcaatacaacactgggccacaagccgaagcttcaaagcaggtcaca

SEQ ID NO: 261501 - DNA, 186 bp, Homo sapiens; identical to SEQ ID NO: 213344
  chr10:868640-868826
  hypo

SEQ ID NO: 261502 - DNA, 285 bp, Homo sapiens
  chr10:894781-895066
  hypo
gagagcaccagaaaccgccatgacatggacaaacacgtatgctgttttgcttgttacagtttcaatctcttttaaaaataactgacttttaaataaaaataaaaacatatattgtcagtttatagcataagtaactgcaaaaggcatgatgaccaaagcatccgggccacgagagaaacggcggcagactgccctgatgctgtgctctatgtgaagcagcacgcagccacctcaaggtagactgtgttagccggaggaagtggagcaaaacgcaaagaaatcatt

SEQ ID NO: 261503 - DNA, 355 bp, Homo sapiens
  chr10:978657-979012
  hypo
ctgtcccgaactcccgccccacacctgagacgaaggtcccggccccgaagtcccaaccccacacccgggaccaaggccccggcactgccccgaacccccgccccacacccctaaccaaggcctcggctcagccccggaatccccaaccccacacctgggatcaaggccccggcccttccccaaacccccaacccacacccgggaccaaaaggccccggccccacgtttcctagaggcgctgggttcgggcccacgttgcaacgagtcagatgctcttggtagctcagggaggtgttcacactcctgccgtttccgtgaggatggtgacgactccgaactatagcagcatactcta

SEQ ID NO: 261504 - DNA, 108 bp, Homo sapiens; identical to SEQ ID NO: 213347
  chr10:986578-986686
  hypo

SEQ ID NO: 261505 - DNA, 52 bp, Homo sapiens
  chr10:1007455-1007507
  hypo
cttctggtgaggcctcgggaaggtccactcatggcggcgtggtgccagcatc

SEQ ID NO: 261506 - DNA, 240 bp, Homo sapiens
  chr10:1020587-1020827
  hypo
atgaggccaggccactggtccgagctccctcgcccattaggccagactgtaatcggttctgtgtttacagaagttcaacaagatgtagtttacctcaaccgtgaaacacctgctaatacagacctcaagggtgctgtgaagattaaacagcttcacgctcatcgaaagcttggagctccacaacattcaacaaatgtcggctgtcactgttgcacagacgctcaagcctcccactctgcc

SEQ ID NO: 261507 - DNA, 45 bp, Homo sapiens
  chr10:1031930-1031975
  hypo
tggggatccagggaagtggccgacgggcccaatggagcactcata

SEQ ID NO: 261508 - DNA, 43 bp, Homo sapiens
  chr10:1043354-1043397
  hypo
tgtattctgactgcgtgggattcaggacggccttggtaataat

SEQ ID NO: 261509 - DNA, 255 bp, Homo sapiens
  chr10:1053557-1053812
  hypo
ggcacacatcgttacgctgtgtcttcatgttttactgcaaatgtgtctgcacttcaccatgtggtgttgacaacgttcctgtcccacagacgccttcctggtgtgtgctgcactgacgctggaggctgtgtccttccctctgtctttccttgtgtcctcggcgtggtcgggcactgactgtcagtcttgtgtaaagatgattttattgttgtgtgtttatgtaatgctgggtgcggttgagcatgtttgtctgct

SEQ ID NO: 261510 - DNA, 36 bp, Homo sapiens
  chr10:1080387-1080423
  hypo
ctgggcgaaggagcgagactccgtctcaaaaaaaaa

SEQ ID NO: 261511 - DNA, 210 bp, Homo sapiens
  chr10:1106060-1106270
  hypo
gagccatcatgcctggcccaatattacagcatttctaaagatgaggaattcagcttgctaacacagtgtgtttatgggtttcattaattagtcgaatgtttggccagtgcctgctgtgtgtagagcactgtgctgcatcacagctgtgtgcctgttgttctgactgcttacaagcagtggggtgtattacgtacacggcaacatatacta

SEQ ID NO: 261512 - DNA, 290 bp, Homo sapiens
  chr10:1120709-1120999
  hypo
gatgagtctgagggagacatcgtgttaggtttaactttatacatctcagatttgccagtctgaagtagtttagaaagccaggttcgcgcaggcgcaggaggtctgtcgttgccgagaactgcgacgtccacgtgcacacagtgctggctgcggcctgaagagctggctgcttcccgcacgtgcgtgcaggtgctttcaggtgtgtgttggtgtcgatgtgatggaagaaattcatttaaaagctttgctgagtcacggcagtagtgtcttgagttttctcaagtggtacc

SEQ ID NO: 261513 - DNA, 56 bp, Homo sapiens
  chr10:1130124-1130180
  hypo
cgcgagagctgcacgcattctctgtgatatgagctgaacccgccaccctttccacg

SEQ ID NO: 261514 - DNA, 171 bp, Homo sapiens; identical to SEQ ID NO: 213350
  chr10:1147965-1148136
  hypo

SEQ ID NO: 261515 - DNA, 90 bp, Homo sapiens; identical to SEQ ID NO: 213351
  chr10:1148461-1148551
  hypo

SEQ ID NO: 261516 - DNA, 55 bp, Homo sapiens
  chr10:1163782-1163837
  hypo
cagcatctgcgctgcgtgcactcagccaccctcagccagctctgtttgaagtccc

SEQ ID NO: 261517 - DNA, 60 bp, Homo sapiens
  chr10:1163867-1163927
  hypo
accctcaaccagctctgtttgaagtccctgcacacatctgagccgcgtgcactcagccac

SEQ ID NO: 261518 - DNA, 72 bp, Homo sapiens
  chr10:1166966-1167038
  hypo
ataaatgagtttgccggagtttggcagcgtcggaaccatttccagtgcacggccgtgcgcgccagcctcccc

SEQ ID NO: 261519 - DNA, 374 bp, Homo sapiens; identical to SEQ ID NO: 213352
  chr10:1167465-1167839
  hypo

SEQ ID NO: 261520 - DNA, 164 bp, Homo sapiens; identical to SEQ ID NO: 213353
  chr10:1206577-1206741
  hypo

SEQ ID NO: 261521 - DNA, 308 bp, Homo sapiens
  chr10:1219203-1219511
  hypo
gcacgggagccgctcgcaggtggaacacgtgcttgctgcggtgctaactttgtgtccaggcacagaatcgagcccgttcccaacccgtgagtgggtccctgctgtgttcatctgaataagatgaaatgaagcactggtggaggtagcatcccgggtctcagcagtcataggtgcgcgtgaacacagggcatgcgctccacccgccgtcctcagcggcgcacacgcacaggtggtgttcagagtgtgacgacagctggggtttgtttgttcgtttgttttatggagacgcaaggtctcaaggtctcact

SEQ ID NO: 261522 - DNA, 43 bp, Homo sapiens; identical to SEQ ID NO: 213354
  chr10:1230858-1230901
  hypo

SEQ ID NO: 261523 - DNA, 137 bp, Homo sapiens
  chr10:1230982-1231119
  hypo
tcggggagatggggaaaggcgggcgttaatattcctggcctcacacggggctcccccaagggcagctgcggggaaatggagcctgtatgtgagtgggaatggtcctcccttttcatcctcaggactggccagttcac

SEQ ID NO: 261524 - DNA, 269 bp, Homo sapiens
  chr10:1233052-1233321
  hypo
acccaagcgaatcccgttcatgtcagctcttcctttttccttcaagtgattcacggtggcagctgccaccccgagagccgggagggacaatctggcccgttggccgctgtggctgtcctactaggcaggggccgcctgggcaggaggagccagccaccaaggccagggatgaccgggcactgggagaggcagtcactaccctgatctgcgtgcactgggcagcctcccctcctcctcccactcccgtcaccaggcggcctcccctcctc

SEQ ID NO: 261525 - DNA, 149 bp, Homo sapiens
  chr10:1233559-1233708
  hypo
ccttggccagctgccgtctgacggggtttcctcccaacgctcctggctgccaggcatgacgaggcccaaacaccaccgggaaggcagctgtgaggacgtgggtgtgaacccagcacgtgcactgctccacactccggggacagaaggaa

SEQ ID NO: 261526 - DNA, 113 bp, Homo sapiens
  chr10:1245937-1246050
  hypo
gcgggcagctggccgacaccctccatgcggtggctcatgacgcgtgcgaggtggcccgtgtggtgcaggctgcccaccacgatgctctgcaggtacacgggctccacgaagtg

SEQ ID NO: 261527 - DNA, 163 bp, Homo sapiens
  chr10:1250512-1250675
  hypo
cctgcaccttctgtcgcgtggacgctccgcccctcactggctcctgccggcctcacccgtcacattgtgtaggacgcttgtgactgctctaaaaccacagggctttcaagctgtcccctccaaggtcccctcctgtgtccagcaccatcgtgactgcctcctg

SEQ ID NO: 261528 - DNA, 163 bp, Homo sapiens; identical to SEQ ID NO: 213356
  chr10:1251714-1251877
  hypo

SEQ ID NO: 261529 - DNA, 651 bp, Homo sapiens
  chr10:1252097-1252748
  hypo
gccaagtctaccctgcaacacgctggtaaaatgtaaaattccttcgcacgagagtgaagaggatgatccccaggtgcgtctctccattcccgggtcctaacgattcctccttaagccggctacctgcgcgggggccacgctctcccactgggaggatggtttctgggacatgcggcgtctcctccttgtgcctgtgcgtctgagagaactggggcgtctccttgaactgggacgtctcctcctcgtgcctgtgtggtctgagagaactggggcgtctcctccaactggggcgtctcctcctcgtgcctgtgcgtctgagagaactgcggggtctcctcctcgtgcctgtgtggtctgagagaactgcggggtctcctcctcgtgcctgtgcggtctgagagaactgcggtggccccttgtgggcctcttggttctggggacagaggacacttttcactcagcccggggacctttggttctttctgtgaagatggcgcccatgagatgacgccttgtgactcaggtacctcagccctgcgcctccgtctctgcgtctctgtattgggttggtggcgtccacactgtctgcgtcgttgctgagcatcccaggtccccactcagcccggcctcgtgttttctcttgtcctcctg

SEQ ID NO: 261530 - DNA, 272 bp, Homo sapiens
  chr10:1256324-1256596
  hypo
agcaaatatgaccacgggttcccggcctcgtgtgggatgagactcgtgctgtctaggagagaaaatctgtaggtttcactggttttagcacatccctaaaatgtatgagcagcacacatacctctggagccctggccaaagttagtggctgagcagaagacacgtgcttcgcctccataaagtcgtctgcgtggcacgtcagaagcctgcagtcctttcaacttccagttcccagggcatcatcaatcacgtcgcagcgattcctatttcac

SEQ ID NO: 261531 - DNA, 607 bp, Homo sapiens
  chr10:1259926-1260533
  hypo
tgtgcccagacctggcattgcgtgggttcgcacctgtgtccagcgttgtgtagctttgcacctgtacccggacctgccggtgacacataggtttgcacctgtgtccagcatcgtgtaggtttgcacctgtgtccagcgtcatgtaggtttgcacctgtgtccagcgtagtgtaggtttgcacctgtgcccggacctgctggcgttgcatgggtttgcacctgtgtccagcatcgtgtaggtttgcacctgtgcctggacctgccagcgttgcatgggtttgcccctgtgcctggaccttctggcgttgtgtaggtttgcacctgtacccagcgtcacgtgggtttgcacctgtgcctggacctgccggcgtcgcatgggtttgcacctgtgcctggacctgccagcgttgcgtgggtttgcccctgtgcctggaccttctggcgttgtgtaggtttgcacctgtacccagcgttgcgtgggtttgcccctgtgcctggaccttctggcgttgtgtaggtttgcacctgtacccagcgtcgcgtgggtttgcacctgtgcctggacctgccggcgtcgcgtgggttcgcacctgtgtttagtccacca

SEQ ID NO: 261532 - DNA, 724 bp, Homo sapiens
  chr10:1283790-1284514
  hypo
gcaagaagacagcgcgtctccaagccaccccttgggcactgcactcacgttctctgagggcaacggcggaaaagggggcagtgcaggaatgtggggggcatggggaaccgaggccaggagagggtggccttgcccggaaggacgagggctgcaaaggtgttttctggagggaaacgtggagtaaggaggaagcctggaattttagcatcttcccagcgcacacggcggctttattggtgtgccagggatgtctctagtctgaataaaaagggatgctttctggctcaccctgtgccaggatagagggaagcgtgttctgagccaggcatggggccccatctgctccctggcagcccccagccgcggcgtccgccttccctggagcccgtccccagccgctcacctcaggtgcagctccagctgcgtgtagaggaagtgcaggaacgcccgccgggccacgacctccgcgtggcagtcattcaccaccagcccctggtcactgaggtgctcgccgctgatgcacttggtccccgaggacagggccacgacctgcgcctgccgagcatccaggcctggggacacagatagcatcagagcagcgtggcccacggcccccgtctccctcctcctcggtcttttcagggtctcacaacagcggtttccctgggttaggaaaccttggaaacactgcgttttgagagctgggaagcgaggcttctgtgtg

SEQ ID NO: 261533 - DNA, 211 bp, Homo sapiens
  chr10:1286699-1286910
  hypo
cgagggagatgacgcggtcagaaacggctgcagcatgagacgtcgtatgagaaatgtcgcggaagtgctgtacatggaatgtcaccagcatgacagtgagggaggaaaagggagagacggactcacacccagggagcttctgcacaggtggcaggaggaggcgtcctaggcagagtgggcatggtggtcagaggcacggataggaaagggc

SEQ ID NO: 261534 - DNA, 81 bp, Homo sapiens
  chr10:1357511-1357592
  hypo
gcttccaaggtttccgccttcattgattgctgctggggcacccagcacggctgagtgagcgcaaagcgtcctgagcgtggc

SEQ ID NO: 261535 - DNA, 203 bp, Homo sapiens
  chr10:1376282-1376485
  hypo
aggcaggggccatggcaagacgcagactcatgggcagaggccggaggctgttttgtgtttcctggagcagcggtacggcgggaaacatggaagaagcggcggggtggcctaggtgagtgtttagtaatctccagaaagtggaataattaatttgttaactaatgacattcgtatggaagagatcaggccgcggcttttggtcg

SEQ ID NO: 261536 - DNA, 120 bp, Homo sapiens
  chr10:1418033-1418153
  hypo
cgcacacatgcacacacatgcacatgacacacatgcatgtgaactcccacaccacacacgtgcacataccacacttgccacacatgcacacacgtgcacagacacacaccacacacatgc

SEQ ID NO: 261537 - DNA, 146 bp, Homo sapiens
  chr10:1418213-1418359
  hypo
cacacaccccacacacgtgcacgtaccacacaccacacataccacatgcatgaacacacatcacgacacacacacacacacgcacatctttttctaccttcccgtgcatctggattacaaatggataaggccgcgctggcaatgcc

SEQ ID NO: 261538 - DNA, 589 bp, Homo sapiens
  chr10:1443299-1443888
  hypo
atgcctcccattgtgtgtcccggcagccacaaacaccgtcaggcccagcgtcaccctccccacctcccggatgagaaggagcctccggagcagctgagggacccactgtggaggcagccgggtgggggacggcccggtgtgtgtggtctggtcgtgactttcccacaaggcatcacccatgggaaggaggcgtgatgatggtaagcagcacagagccctgcggggaccagggttttggaacaccccggccttcggtcatgctgcgggaagcctgggtcctctccctgtcagagaagacagctgggttctggggtttcacagcacacgggtacccccggttccaggactgaccatggagggcaggtgccagcgctgttcggggcctccggtgatggtcccagctcccttcccacaaaggccaggtgcagccttggaatcctctgacacttggatccccatggattcaatgggagctcgcatgctgtgaagaccgcggtgcattttaaacggcaccagcaaggaggctacactgtgtatcccgtgtccccatttctaccgaagagcggcggcttcacggcggtttgggagt

SEQ ID NO: 261539 - DNA, 103 bp, Homo sapiens
  chr10:1445193-1445296
  hypo
gggcggcggaagtccgtcttcctgctggggcaggtgcgctcgtgcgcctggagctctgctgggtcctgcaggcaccgtgtgcggctctcgtggaagcagccgg

SEQ ID NO: 261540 - DNA, 195 bp, Homo sapiens
  chr10:1476322-1476517
  hypo
gagaaggctgataacgagagatttaaaataacacgaagattcaggtgaagctattagattccgagaaggctgataacgagagatttaaaataacacgaagaggtgatgtacacagaggccggtatgagaaattccacattaactgtaatttgaaaatgttttgcctctcaccgctttctgcgttttaaatggagg

SEQ ID NO: 261541 - DNA, 152 bp, Homo sapiens
  chr10:1506143-1506295
  hypo
taggaaagcgcaaacgcaaacccccataagacgcctggacacacctgcgagagtggctgcaataaaacaaccacagagaagctgatgacagtgaatgctgacaaggatgtggaggggccaggaccgccacacacatgcgctgggggcagtca

SEQ ID NO: 261542 - DNA, 298 bp, Homo sapiens
  chr10:1506325-1506623
  hypo
acacacactcccccacacacgcgcggggggcagtcacagcgggcagtgcgccggagaagagggtggacacacactcccccacacacgcgctggggacagtcacagcgggcagtgcgccggagaagagggtggacacacactcccccacacacgcgctggggacagtcacagcaggcagcgcgccggagaagagggtggacacacactcccccacacacgcgcgggggccagtcacagcgggcagcgtgctggagaagagggtggacacacactcccccacacacgcgcgggggccagt

SEQ ID NO: 261543 - DNA, 143 bp, Homo sapiens
  chr10:1527766-1527909
  hypo
agcgtcccaggtctcgtcagcatagttgatgactctcctggtctgatccacaaggctgaaacactaacttgttcattgctgtcctgtcaccttgtcacaacacgtgccccggtgggatggaataataacgctccgtctatggc

SEQ ID NO: 261544 - DNA, 100 bp, Homo sapiens
  chr10:1547438-1547538
  hypo
atcagcctcactgtgtgcctcgcattgccccatttaacccgcatcctgcgttgttggaaagtgtgtatgtgatgatgacgctgaggaagatgacagcaca

SEQ ID NO: 261545 - DNA, 44 bp, Homo sapiens
  chr10:1555732-1555776
  hypo
aggagtctctcatgatggagcgcgctgggaagggctactctggg

SEQ ID NO: 261546 - DNA, 362 bp, Homo sapiens
  chr10:1558527-1558889
  hypo
gggtgcaacagaggcggctttccctgctccctttcccgaggtgcagctggattcagagcttcccacctgcttgtgaccagcgtgcattctcgacatacacgcttcagaccaaatgtctgcttgttcacctgtgcgggctttgtgtgggctgctctgtgctatgcgggctgctctgtgcgggctgctctgtgctgtgtgggctgctctgctctgtgcgggctgctgtgtgctgtgcgggctgctctgtgcttgggaaaatgaaggttggcatgatttcctgcggcaatgccctcccgttttatgccttaataagggctagaaagaaaacattttcctcgagctgcatgcgaatatcgcccaaa

SEQ ID NO: 261547 - DNA, 389 bp, Homo sapiens
  chr10:1574918-1575307
  hypo
accgctggctatggcgccgggactcttctcccagtgggtcaatcgcaccttcactctgggcaggtgagggcacaggcaggagcctgaatgtgcaggtgcccgcaggcgaggtggagaatgggcgcttctccaggaacttaaatcttgataatgaggcccatctgaacccctcaggctgccccaggagcctcgcctcacctgcgggcatccagcggtgtctgtaatgaccctgccctgaaatgaaggggaggaaccgcatcctgtgtgttactccaggggaaggacagggtaggggccggcctccaccctcctcgaagcaaactctcattagatgttcctactgggccctggagagtaacgagccagctgattactgtctctagtgtaaa

SEQ ID NO: 261548 - DNA, 384 bp, Homo sapiens
  chr10:1585131-1585515
  hypo
agaccccactcagacgcagttgggaccctggatcacagctgtccgtccgcccgagcagattcttgtccaggtgtttttccacttgcagctccgcgctgggcagcttcaggcctgttacagcgacggtgcggcttccctgcctgggttgttgggacggaagggattccaccctggggcggtgtggggtggcttccctgctctccctgctctctgcgttcccacggtgcaggatggcggcgttgagagccagaaacgaaaccctgagaagcagaagccgggcgtcctgcccgccctcctctaccaggcctcatctggagggctgcgccaggtccttccaacttcaaagagttgcctgtgaagggcgtcctccaggtgggtctgcag

SEQ ID NO: 261549 - DNA, 96 bp, Homo sapiens
  chr10:1607155-1607251
  hypo
ggcctggcctcggccgtagacctgcatcccacctggcctgggggccgacgtgcagcagcaccggtgccttcccctccctcccgtgcagggctctcc

SEQ ID NO: 261550 - DNA, 34 bp, Homo sapiens
  chr10:1649863-1649897
  hypo
ctagggaccctgcccgcagcgacatgcatagaat

SEQ ID NO: 261551 - DNA, 111 bp, Homo sapiens
  chr10:1668891-1669002
  hypo
agagggaaggtggctacacacgtcccggcttgtcgctcaccacctgttaacagccacgcacaaagcaacccgcacggtctgaagtggcccgattgttacatgttgtattat

SEQ ID NO: 261552 - DNA, 187 bp, Homo sapiens
  chr10:1701552-1701739
  hypo
agctgggggaaggccggagccaggcacagggacagaaaatgggggtccccacgcgacatctaaaaaacgaaaaaaccaaactgactaaaacgtgcacagaaacacgattcagacagtgggagcggggtgatccctcttccctggaaggagcctggagccccactgccggccccggtcactttagtct

SEQ ID NO: 261553 - DNA, 623 bp, Homo sapiens
  chr10:1708217-1708840
  hypo
ccaggtggaaggaccgggcatggaggctccaggctgagaccagcattggatagggtgggtgggcagggattacttaggtgccaataacccaggagtagaggagatggcaccgctataaaatgccacgagaggtgcgcacaagggttcagggctgcatagaaccgggagggagaggaagaccccgctggagcaagtgccagggtgacagagccagaggactttctgagatagcacagccccgagggtcggcagggcactgagggccacctgccctgcctgccccgccagggcgagcatctgaatccacattctcctgggccgcagctcatctgcgagtcggagcctccgaaggggggccagtagcacatgtcccagcctctctcgcccaggtgatcctcatgaccagacgcggctttgctacaagacagctcagactgtgttcccccaatcgtgttcccgcaggaaagctgcccgaggatttttgtcatgcacacgccgctgccagcccattagctctccctgcttcccatggtctgccgcatctggggtatccagcgtcctcctgcagccgagggggaattctgaatgttttgctagaaaccgtctcatcaacattcagtttc

SEQ ID NO: 261554 - DNA, 147 bp, Homo sapiens
  chr10:1767855-1768002
  hypo
acttccaggacagaaggccacgctgccgcactcgtatccgaagtttgaatgtcctcagccgcagatgcgttttttgttatgagtgacaagaacgctgacacaagacactaacctttctagaggtgcgggtgaagctatcctgggaaa

SEQ ID NO: 261555 - DNA, 233 bp, Homo sapiens
  chr10:1789173-1789406
  hypo
catgaatcgcgtgacgtgtatgcgagtgtcacatgaatcgcctgatgtgtacgtgtcacatggattgcgtgacatgaacgtgactgtcacatggatcgcctgatgtgtatgtgtcacatggattgcgtgacgtgtatgcgagtgtcacatggatcgcgtgatgtgtatgcgagtgtcacatggatcgcgtgatgtgtatgcgagtgtcacatggatcgcgtgatgtgtatgcg

SEQ ID NO: 261556 - DNA, 67 bp, Homo sapiens
  chr10:1814098-1814165
  hypo
cagtctgcggaggacggcagagccagtttgctctggcttggcctgaagaagacgctgagagtcgtcg

SEQ ID NO: 261557 - DNA, 169 bp, Homo sapiens
  chr10:1828704-1828873
  hypo
tttaatggaggagccaacttcggcgctaaacatagggagacgatgattgcgtggtcagtgcagatgcagaggaagctgggatagtcacgggcaggtgcccgggggctgtgtgtcgatgagtgtgaagacaggctctgtgtgagtgcacgtacatgcaggtgtgtgtatg

SEQ ID NO: 261558 - DNA, 33 bp, Homo sapiens
  chr10:1852466-1852499
  hypo
agagagagttctttatcacgcagactttctcta

SEQ ID NO: 261559 - DNA, 323 bp, Homo sapiens
  chr10:1986624-1986947
  hypo
cactgcacctggcccgtgattctgttcttatgcctgacgccttccgtcgggggagcactcccacactcagtgctccttgccttgccctgacgccttctgtctcgggagccctcccacacctggtgctccttgccttgccctgacaccttctgtcccaggagcattcccacacccggtgctccttgtcttgatgacttctgtctcaggagccctcccacactcagtgctccttgtcttgccctgatgccttctgtcgggggagcactcccacacccggtgctctttgtcttgtcctgacgccttctgtccggggagcactccca

SEQ ID NO: 261560 - DNA, 286 bp, Homo sapiens
  chr10:1994486-1994772
  hypo
cctggggtccaccgcggatggagccggcaggtaaggatcaggcccgctggcggccgcgctcctatccgcaccccttatccgcaccccttatccgcgccccttatccacacccgttatccgcaccccttatctgcactccttatccgcatcccctatccgcaccccctatccgcacccctggcccaacacctccactccgaggcctcttcagggggtcctttcccagcgcgtctcctctccctccctgggactcccagagccataaaatcaggccccgtccttaggg

SEQ ID NO: 261561 - DNA, 686 bp, Homo sapiens
  chr10:1994802-1995488
  hypo
gctctgtgctgacacccagcaccctccccggcctctgctccgaggggaaaataaaacaggggccttcaggcctcaccgctggctcactccatcgcagcaaatcgaccgagggtcctctgctgcgtccttgcggcctgttgtcttactcagcggccctgacacccggcatttatttaaagcctcgaggctggatgcggttgcgacagcagggcgtgttcagaggaaagaaggggctggagcccgggcactcgggttaggcaacgtcaaggggctcgggaggagagtgggctccgccaaggcggtggctgcaggggccacgtgtggcctcttggaacacggaggaaggaagcgctgaaggacgtaaggactgtctgtaaaatcctccctgacaagggaggtcagggtcgggatgtccccttggacgtggcgatgcggaggcctgagtgacctcaggagaggggctaggtggagatgacgctcacggagggtgactcgggagacaaaccgcagacagtaggtgcaggtggccctgagaggcgtcctgcacagcacagcaaaagccagggtcctagttagtgggcgaagtgagttccagactttgggaaaataatcgcgttttgtactgctgtaaatgagcggaagaaagggagaggccgggcgcggtggctgaggcctgtactcccagc

SEQ ID NO: 261562 - DNA, 207 bp, Homo sapiens; identical to SEQ ID NO: 213373
  chr10:2006676-2006883
  hypo

SEQ ID NO: 261563 - DNA, 63 bp, Homo sapiens
  chr10:2140551-2140614
  hypo
cttgaaataaaatgttcagacgtactcaccccagccttcatcgcttgggcatgaggatatcct

SEQ ID NO: 261564 - DNA, 51 bp, Homo sapiens
  chr10:2358814-2358865
  hypo
gtgcttggagcctacgtccatggaagaggaggactccgtcatggaattgtg

SEQ ID NO: 261565 - DNA, 79 bp, Homo sapiens
  chr10:2364622-2364701
  hypo
aaaaaaaaaaaggaaagagaaaagctctctctcctgcagagagagggctcctgagtgggtcttccggttctgtggtaaa

SEQ ID NO: 261566 - DNA, 172 bp, Homo sapiens; identical to SEQ ID NO: 213374
  chr10:2416382-2416554
  hypo

SEQ ID NO: 261567 - DNA, 185 bp, Homo sapiens; identical to SEQ ID NO: 213375
  chr10:2610008-2610193
  hypo

SEQ ID NO: 261568 - DNA, 221 bp, Homo sapiens; identical to SEQ ID NO: 213376
  chr10:2620065-2620286
  hypo

SEQ ID NO: 261569 - DNA, 101 bp, Homo sapiens
  chr10:2620526-2620627
  hypo
tgggcaaaatagcgagactccgcctcaaaaacaaaacaaaacaaaaaaacacgcaagtggaattccagaaaagtcaccacgtctgcacaatgagaagtcca

SEQ ID NO: 261570 - DNA, 42 bp, Homo sapiens
  chr10:2782246-2782288
  hypo
tggatgtgctggacacagaacgactgtctgaatagtcaagtg

SEQ ID NO: 261571 - DNA, 457 bp, Homo sapiens; identical to SEQ ID NO: 213378
  chr10:2932055-2932512
  hypo

SEQ ID NO: 261572 - DNA, 110 bp, Homo sapiens
  chr10:2936339-2936449
  hypo
gcgatgggcatccacggctcatctttaagtgaagagtgcgctggcgggactgtgaggcttgaatgaggtgtgacacgcagctctaagcacggcacgcagtagtctccgct

SEQ ID NO: 261573 - DNA, 556 bp, Homo sapiens
  chr10:3121874-3122430
  hypo
caggggtgaggggccgccattgggtcttagttgtgctcctgcatcacctgcttcctagtgttggcacgggctgtgtttgatgggtaattcatccattagagtgaccatagcgtaaggtcctggaaccagagctgtgcgtccacccttcgagttgaagagtccaggcactgctgagcccagccatgggagagatgagcgaggaccttccacaggtgtgaggccaagggggcgggaggctctgtcctgccaggaataaatggaatcaggtgggaggctctgtcctgccacgaataaatggaatcaggtgggaggcaagccaggcccttttcctgggaggtgccagagccgaggaggagttggaggaggaagagcgtccgagcaagagcactggtgggactgctaccaaggttcaggaacaggagcctccgagtgctgccagacaggtgggaggtccctggggcatggccgggagctcaggggaacttgggttttcttccagtagccctgggaacctggaggaacgcggtcatattcgtgctttagaagagaacattgc

SEQ ID NO: 261574 - DNA, 66 bp, Homo sapiens
  chr10:3141466-3141532
  hypo
ggctaccagggcatggtggacggaggctcaaacatcgcagaggccgactgggagagtgtctccagc

SEQ ID NO: 261575 - DNA, 54 bp, Homo sapiens
  chr10:3146043-3146097
  hypo
tgatttctgcggcaccgacatgaccatcggcacggactccgccctgcacaggat

SEQ ID NO: 261576 - DNA, 275 bp, Homo sapiens
  chr10:3150860-3151135
  hypo
gttccgcatcctaacgagatgtttccttgcagcttgtcgtcacgcagctgggctatgacacacgtgtgaccatcctcgggcacgtgcagagaggagggaccccttcggcattcgacaggatcttggtgagttgggaagggttgggcatcttcacaaggtctctaggaggaagcgtttctggagaggcacaggcaccagccggccacagaggctggcaaggtgctccccgagagatgcccgcggcccggccctcatcttaacgatccttgagacct

SEQ ID NO: 261577 - DNA, 442 bp, Homo sapiens
  chr10:3151597-3152039
  hypo
gacaccccagcttgcgtcgtgtcactgaacgggaaccacgccgtgcgcctgccgctgatggagtgcgtgcagatggtgagtgggcagcccatggccaagggcagggcggagacggctgggacagaagctgcttgtcaggccagcctgggcaccttgggtgtctcgtcggtgcacgatgcattacacggcctttctgagaaggaggtgagctgcccgtggggagggagaaggcttatgttctctcccacacctgcagagcctgcgccgtcttcgctctttggttttctaagttaccatccatctgtgtggcacatagtcgtaacctcccctgagtgggggtctagagcatcgggatcctcaacagtcgaggatccaggtggccccagtgcaccaggtgctgcagaaggacagagtgcagggaggcagccgagagagagagatc

SEQ ID NO: 261578 - DNA, 480 bp, Homo sapiens
  chr10:3155263-3155743
  hypo
gtgtccggtattctcgactccggtccaacgacacccttttcctttaggagctttgcgggcaacctgaacacctacaagcgacttgccatcaagctgccggatgatcagatcccaaaggtaggtggccggcctcccgcgatgccccgacctctcctgcgggcctcccctcatggcctctgcctcagtgaatgaggccacctgttttcaggcctggcacggcatgagccactgccaaagtgtgcagcaaatggagctcacgtgtgcccgtgacccagcactcacctgccttctgttttgcagaccaattgcaacgtagctgtcatcaacgtgggggcacccgcggctgggatgaacgcagccgtacgctcagctgtgcgcgtgggcattgccgacggccacaggatgctcgccatctatgatggctttgacggcttcgccaagggccaggtgagtcacccaggatgccgtaggcaggcagac

SEQ ID NO: 261579 - DNA, 291 bp, Homo sapiens
  chr10:3158926-3159217
  hypo
attgttcactttagctgtttcgttctgtgtttgcacattagatcaaagaaatcggctggacagatgtcgggggctggaccggccaaggaggctccattcttgggacaaaacggtaacttccaaatctcaactctatgacctgcttttaaggaagaaggaagagccgtgttctgggagagaatcgctgggtgccgacgccagttggattcctggaaaggcgtccctaagggaggggtgcaggcagttaccggtcctccctccagtggaactgcccgtgttccagggagctgg

SEQ ID NO: 261580 - DNA, 510 bp, Homo sapiens
  chr10:3160807-3161317
  hypo
ctgccatctgccagccacaacggcatgagtgaaaaggcagacgtttaccgctccttaattaaaaccacagactggggaaggcggccgggtggggaccggcgtggcgtcctgcggaccgcgtggagtttggggtgtctgacatcgttctccacgtggctattttcagcgttctcccggggaagtacttggaagagatcgccacacagatgcgcacgcacagcatcaacgcgctgctgatcatcggtggattcgaggtacgttaccgtttctctcttgccggtcttgcaggtgtgagccgcgccctgtgttggctaaacattaagctacttgttggctactggccacgatccgagatgataggttcccagacccagcggccactggagaattgtagaacagcaggatagcaggtggtaagacgtggcctacgagtggcccagttccagtaaagcaacttaaccgagaagcaaaagcttgactccttaacccgggcctcatctattcagtgag

SEQ ID NO: 261581 - DNA, 45 bp, Homo sapiens; identical to SEQ ID NO: 213387
  chr10:3168655-3168700
  hypo

SEQ ID NO: 261582 - DNA, 55 bp, Homo sapiens
  chr10:3171106-3171161
  hypo
caggacctggtgccgggagcaggcggggccggggattcccgacaaaggcttgatg

SEQ ID NO: 261583 - DNA, 232 bp, Homo sapiens
  chr10:3179620-3179852
  hypo
ctgtttgggaaatcagagtccgacagccaagaaagagctagcgcggaggctttcctttctggctctgtaacgatgaagcaagcgcttactcaccccaacccacttgcttctcaggacggtttccatgcagccgccgcggtgaactcccgtctggtggacactcccccagggcctcggtgtgatggagtttcctgaatcagcgcaggcagacgtgggacacccttgtgcacct

SEQ ID NO: 261584 - DNA, 197 bp, Homo sapiens
  chr10:3185690-3185887
  hypo
ttcctgagggacacggtatggtcagaggcggctgtgctgccatgcaccgcccacggcactgggactggacccactcaggggtcagaggcggctgtgctcccacgcactgcccacggcactgggactggagccatctcaggggtcccatctccgtgacactctgcagccaggtgctggggcgcgagagcaaggcactg

SEQ ID NO: 261585 - DNA, 96 bp, Homo sapiens; identical to SEQ ID NO: 213388
  chr10:3192559-3192655
  hypo

SEQ ID NO: 261586 - DNA, 39 bp, Homo sapiens; identical to SEQ ID NO: 213389
  chr10:3192934-3192973
  hypo

SEQ ID NO: 261587 - DNA, 234 bp, Homo sapiens
  chr10:3194433-3194667
  hypo
ccaggcgtgctccccgccctgatggccatcagtgaagcggcttcacagtgctacaccgagccaagcaagtatacaaatgcatgattccacgactcccggggagggctgtgcccagttcccactttaactcagtccccgcagacagcactcctggtgtctgctgggctgacctcccccatgttccatttccaccttctgaagttccccgagagcgtgccacgcacttagacacgg

SEQ ID NO: 261588 - DNA, 546 bp, Homo sapiens
  chr10:3196875-3197421
  hypo
cattactgaattgttcgtttttcgtatattctgaatacaggcctttatcagacaccatttttgcaaatgttttttcccagaggccaaactacctttgagaatccatttgggtccccttctctcccgtggcctcctcccttccttcgttccacccggctgctcccccagcggctgccaatccccgtctcacttttcttttcactcccaccatcctggcctaggtcgtcatgtcatgcttaggtgtctaattgcctctcagcagttttctccatccaatttctctatttttctgcaaaactatcctgaatgaggctgcagctacactgctcactgacccgacagttctcctgccttaatacatgaagcacccgtgtgctccccatcttccatacaggccctccccagagccacagggcacacctgtctcccccacacacgctgtcctccctccatgcccaccgctccaccatccctgtgtgcctcacgcctgtcccacagaatcctggtgctgctctgtggctggcacacacccggtatgcctgagac

SEQ ID NO: 261589 - DNA, 117 bp, Homo sapiens
  chr10:3197636-3197753
  hypo
tcaatgcatcgaacgtgagctctgttggcgcccagcggacacctgttggttgaaataatacctgcctccaactactaactcactaacaagtccactaggcccgagtgcaggttaggg

SEQ ID NO: 261590 - DNA, 96 bp, Homo sapiens
  chr10:3206003-3206099
  hypo
gagaccactgagtacgtgtggtcaggaagaagtctgttctgaaggtgctgggagaatatcctctcattgtctgtcttgaaacgtaaaataaataaa

SEQ ID NO: 261591 - DNA, 81 bp, Homo sapiens
  chr10:3206323-3206404
  hypo
tgtggtgcaacaaacgcatagctgagggctgtaaatcgggatggatcagtcggtctgcccaccagccgtgagggaagtggg

SEQ ID NO: 261592 - DNA, 111 bp, Homo sapiens
  chr10:3216516-3216627
  hypo
ttctgggctgcaggtaaacacgtacctccttattgaagagcccaaaggaaccagaacacaggcaataataggagcgacagacacaaacacgctctgcgcatcacccgtctt

SEQ ID NO: 261593 - DNA, 70 bp, Homo sapiens; identical to SEQ ID NO: 213392
  chr10:3243876-3243946
  hypo

SEQ ID NO: 261594 - DNA, 188 bp, Homo sapiens; identical to SEQ ID NO: 213393
  chr10:3277176-3277364
  hypo

SEQ ID NO: 261595 - DNA, 296 bp, Homo sapiens
  chr10:3283738-3284034
  hypo
agtgaatatccctgttgccacggtaacgatattatgtcatgggaggctgtctcgagtgctcctgggagcagccaggtctccgtgagctcctgtttactctaaagactccggcagcccacatgtgtgcacgctgaataaaatcgtgctgcgggaccacagtgcggggaggcaccgactctgtcattctgtcaacgcaccgcacagtcacgaacatcagcattgacatgaaatggacggttagggagctgcaaaggactcatgctcctctattgcacgaatttgtcttttcatattca

SEQ ID NO: 261596 - DNA, 69 bp, Homo sapiens
  chr10:3284260-3284329
  hypo
ctctgcaagccatgtctggccgtgtaggggaaagagacaaaacaacacgctggttaccttggaagagga

SEQ ID NO: 261597 - DNA, 46 bp, Homo sapiens
  chr10:3285012-3285058
  hypo
cggtgctgccagcacgatgctaggagtgacccgggcgtgtgggagg

SEQ ID NO: 261598 - DNA, 450 bp, Homo sapiens
  chr10:3329666-3330116
  hypo
tgtccaaccttcctcctgtgcgttgttctggtttcacatgttcgtgttgtaattgagtgcgtgcacactcagtaaatgcgaaatggtttcatcacaaccgcaccgatgcagttcctaaaagaaacacacgacagccgattttgcttctcaaaatcgctgcattcagggtttccgccgtcaccctgctggcagtgaactagaggacccgtcccaccggagctggtccatggagaggtgccacagcctgtgagccacggcagagcggagaagcctgggacccctgtcacctctcagagcagcgcctcacatggcagaaggagctgctttccgaagagctaaaggttgccataaatatttataagagacctggcattgctgcgctggagggcagtgtgttatgataaaagtcacaaatggagctgaaaaaacagtggcttctacatgacagct

SEQ ID NO: 261599 - DNA, 449 bp, Homo sapiens
  chr10:3330176-3330625
  hypo
gtgtggggatacgtatttgcacacatgtgtgttcaatctgtggatacggtacctacgtgcacttctgtacctggtttcttcctttttctacacatacattatttatctgttttttaaaattcaacttttattgctccttgtcctgccggtggccctggcaacatgccacgccggactccagcttagtttccttgttgccttgcagccaaacttacgcagtgtgcagacggagctgctcagaggggaggggcagcgagcaggtgccacgtccacaccgggtgaggcgtgaggtgagggctcccccgcgccgccctggcgtccaggtggtgagggctgcacggaaacgtggacttcggcagaacatgtgtgcgccacggagcggctgcgtgcagcccgcaggtgagaccgtctgcataactctgccaaccgtggagtatccaagtaatttt

SEQ ID NO: 261600 - DNA, 285 bp, Homo sapiens; identical to SEQ ID NO: 213396
  chr10:3342840-3343125
  hypo

SEQ ID NO: 261601 - DNA, 82 bp, Homo sapiens; identical to SEQ ID NO: 213397
  chr10:3343155-3343237
  hypo

SEQ ID NO: 261602 - DNA, 52 bp, Homo sapiens
  chr10:3365239-3365291
  hypo
ttctaccagtgcccggatgtgtttgttgggattctgcgccctttgagtgtct

SEQ ID NO: 261603 - DNA, 50 bp, Homo sapiens
  chr10:3438497-3438547
  hypo
tgcagacaggtgaccggagcgcgctgggagccacacggcggagcagcccc

SEQ ID NO: 261604 - DNA, 230 bp, Homo sapiens
  chr10:3512565-3512795
  hypo
gtttgttccatctgcggttggttgaatccactgatgtgggactccagtatatgggcagcgggctgtgtgtcactggccccgtgttaataggtacctgtgttttcctatttgctgttatgtcaacaaaaaccgagaacaatcccttctaagggtgactgcttttagcttcaaaatcaagaacactaaaactccagcatccataggaaagtatcgcacggacttaaccatat

SEQ ID NO: 261605 - DNA, 42 bp, Homo sapiens
  chr10:3518835-3518877
  hypo
aaataatttaacaggtacctcgcagatgggggagtagttggg

SEQ ID NO: 261606 - DNA, 246 bp, Homo sapiens
  chr10:3572532-3572778
  hypo
atcaagatgggcatgtgggccgggatgctgctgtaccccaggattcacactggcctcgcggccgtgcagaaaagcaagacagtggatctgagctccatccccgcagtctgcactggccccttcatggcacagcgacagctttgccatcagccggcaagcatgcggggtgtggacgacacagccggagagagcagaggccaggctcatgaatcggacaacgagctcgagttttcaaggtgtgactca

SEQ ID NO: 261607 - DNA, 32 bp, Homo sapiens
  chr10:3641388-3641420
  hypo
gagggcgaggcgggcggatcggatcatgaggt

SEQ ID NO: 261608 - DNA, 31 bp, Homo sapiens; identical to SEQ ID NO: 79322
  chr10:3641660-3641691
  hypo

SEQ ID NO: 261609 - DNA, 556 bp, Homo sapiens
  chr10:3678617-3679173
  hypo
gacaccgtgcctggtccaaagagatgtttttatgtggttcaccttcgaccttcatcagggtgactcaggaggcacattctgaagccactctccaacacttaagttttttgccaggtatttttcacaaagcaacgatttgaacaatgaaggagaaaatgtagcctcgcaacttcattcgtaaataatccagactaaccgcacggagtataatggatcaaagtgagcagaatcgctcactttggatgagatcagccctagaatgaaagcaaaaccgagatgatggacggcgcaggctccttggagatccgtgttcatgacacctgcaaggactgtgggcaagctgccaaccagacatgaaattagcaattagttgcatattcttccgagtgggtcatgtgctccttgcaatccaggcacatctctttccatctggcaggggtgtggcgtatttccagagggcttcaatgcgcaatccggcagcgcactgctgggagccccggcacaggacgcctgaccacactgacatacacatattcgcgtccgtctttccctctct

SEQ ID NO: 261610 - DNA, 122 bp, Homo sapiens
  chr10:3712903-3713025
  hypo
aggtcagggacctgccggccagtctcagtaagatgaaacgtagaaaattcactcactatccccagagagcacaaggcttagggtgtccatcggggagtggctgctcacggggtcaatggggc

SEQ ID NO: 261611 - DNA, 197 bp, Homo sapiens
  chr10:3862733-3862930
  hypo
gcgtcagcacctttctgtcggggagagagtgtgaccgtgatgagaacaacagtgcttccacacggtcttcccttgcagaaggagaacgtcagacagagttctagttatacctcgacatagcttttcagctgaaaaattccattttaccagctgagcatgtggcttggtctgggatatttggtcgcaaaacaaaacaa

SEQ ID NO: 261612 - DNA, 205 bp, Homo sapiens
  chr10:3954896-3955101
  hypo
caccgcacccggccaatattcattcattctttctcacctcttcctccgctctttaaggttgagcttgcctggcccaaggcacagagttctgggaaggatggaagagaggggaagggagagcaccaacatcacggaccgcctttcacatcagcggcagcagcagtaaaacccccagaaaacctggggtaggcgtgggggtctgttt

SEQ ID NO: 261613 - DNA, 68 bp, Homo sapiens
  chr10:4082781-4082849
  hypo
tgcctttgttacatcgtgtcccccgttaaaacccggaggctgacaaagtcatacggtttaggaactat

SEQ ID NO: 261614 - DNA, 138 bp, Homo sapiens
  chr10:4191045-4191183
  hypo
tatctttggtagttaccttgcgtgtgtgtctacgtagtgagagtgaaacgagaaaggttcccttgtgccctttgcagggcgtgtgcccggaggtgtgactcgcttcttcaggcccccgctgctcagacttctagggga

SEQ ID NO: 261615 - DNA, 69 bp, Homo sapiens
  chr10:4773957-4774026
  hypo
aaactcgctgctgacgtagtttcatgccgctgctcatatctgtgctcagccatccgtagttttctccac

SEQ ID NO: 261616 - DNA, 160 bp, Homo sapiens
  chr10:4867812-4867972
  hypo
agggcacagtggctccctgacggggaaccaaggccaggcacgcttctcccagactgggggcctcggggcacctgagaatggccatccttggtacaagagagcggggacccactcccgcgcaccctgtgccccaggggacgcaggactctgcaccctgacc

SEQ ID NO: 261617 - DNA, 37 bp, Homo sapiens
  chr10:4872906-4872943
  hypo
ttgacgcagggtaccggcacttcgactgtgcttactt

SEQ ID NO: 261618 - DNA, 223 bp, Homo sapiens
  chr10:4886024-4886247
  hypo
tctcctttctcaggcgtcctgctctttgaatggcccagagcagctctgggtgaccagccaaccttaagcctgaaaggtatggatttggctaaactgtaaactcagttctctccaatggctgctgacgggcctcttggaacgagactgcaggtctcttgtagtggttagaattgagcactgctgactgaccggcatctgctccacatggtgtgtccggaattgg

SEQ ID NO: 261619 - DNA, 69 bp, Homo sapiens
  chr10:5495770-5495839
  hypo
catgtgtgattatccgttgcattctgtcatgtatgtttaagcgcatgccaaatgcggggcactgtttga

SEQ ID NO: 261620 - DNA, 128 bp, Homo sapiens
  chr10:5509144-5509272
  hypo
ccatccatcaaatgcgcatagatgtgcattttatggggtggcagatggaaccgaaagctcaaagcagcctttaaactttccagccccagcaggcccgtgagtccctcgggttctttgcagcctctgct

SEQ ID NO: 261621 - DNA, 99 bp, Homo sapiens
  chr10:5523192-5523291
  hypo
gttgatccaggacacgggaggagacctgggcagcggcggactcattgcaggtcgctctgcggtgaggacgccacaggcaccagcgtgcttctcctcagg

SEQ ID NO: 261622 - DNA, 175 bp, Homo sapiens
  chr10:5527430-5527605
  hypo
tggtggggtgggaagcgtgggtggatggaaaaaaaggcaaaaatgcctaactgtgatggatgctctgcagagctaagaggggtctcgtagtaaagggggacaggctgatagcttttattagagatcgagtcagcgtctctgagggatgacgtttatgctgcgaactcggtgacaa

SEQ ID NO: 261623 - DNA, 500 bp, Homo sapiens
  chr10:5529520-5530020
  hypo
gcaaaccatcaggctgtctgcgacggcattcggacctctcccttacctcccaggcagcgcgggctccccaaaagacactgacgctcccacttccaaaccgtcactcatgcagtttcctcaccaagaacgccccacccctgttgaaatctgcccccgcctcagtgccacttcctggaagtctgtccccttctctgagcacctcctcgaatgggaatccactgacgagggacctgacccactgtctttgcatggccatttatgttacatctcctgggcccagaggccggcgcagcgtctccctccaagtccctgcagactcacagtaaggagaagcacccaaggaaacacttgtagaatagtgagtgagtgaatgaaagtcaccaacacctcctccatgaagccacgaccacaaggctcccggtgcaggaaaatactgttcatcaaaagcactgagatttgtttttgtttgttttgtttttgtttttgtttgagacggagtc

SEQ ID NO: 261624 - DNA, 859 bp, Homo sapiens
  chr10:5530260-5531119
  hypo
ttccagttgtgagtcaccgtgcccggtccaaaacactgagatttgacttcttcctaggccaaaggtcatctgggcagcaaggcaggagctcccggatcaggaaagtgcaggcacaccatgtctctgagtggtggggtggggacagaggctggcaggccaccaacagggcagcatctgctcccaaccaaggtgactcagacctcgccttgtccaacctgcaggcctcccaacagtggggctctataaggctggcgttcgcctccagggttctccccgacactggatgccaacctgcccaggggcagaagggaggttgggcgtggggagtgccgggtacagtcagagttgccaggacagtttggagcagtgcctcttaatcttggccgcacagcacctgggagctttaaatagacccccacgcctgggcgcccccaccgctgacccaccagggctcagtgcagggggatggctcacacggcacattctccagaagctcctggggtagcttccaggtgcagccggggttgggaatcgctggcttatgcaacccagcagagaggcgggaaaggcagagctgagatcgggtggggccacctgtggtggggaaagagatgagctcacacctggagatggtaaacagtgcaaaagcaagaagaagcttacagaaggagtcgttgggcctttgccccagctgcagccacgtgagagggaagccaggggaggagcaaggtgcaggcatctgtgggctgggcagggcctgactgcactgggcccaggctgggaaggcctcacctgcttctccagcgggaacggagggcgacctgcgcagcctaggcactgcggccgtggttcacatgca

SEQ ID NO: 261625 - DNA, 182 bp, Homo sapiens
  chr10:5535380-5535562
  hypo
tccaagaggcacagcgaattcctgctgtcaggcagaattcccagaaacagcaggtgagtggtctctactcaccttagaaacgcccaccgcacaggagactggcgaagctccctcttgaactttctccctgctcgatgacctctcatcttcaggagactggcgaagctccctctagaactttc

SEQ ID NO: 261626 - DNA, 138 bp, Homo sapiens
  chr10:5536521-5536659
  hypo
tcaaaaaaaaaaaaatagtcagaccaaggcttttggggccctgactcccatttccctcgaagtgtgtgagtttctggacaggtttttagccaccgggcaccattccctcatcctcatctgggtcgatcagctcagccc

SEQ ID NO: 261627 - DNA, 102 bp, Homo sapiens
  chr10:5537076-5537178
  hypo
ttggaccttggtccacggttgcaaggagagcccagatctaaccatcatcacaaatctggatgtatatgctgaccctagagttggtaacgctactgtagaaaa

SEQ ID NO: 261628 - DNA, 445 bp, Homo sapiens
  chr10:5538686-5539131
  hypo
actggccaggctctgagcaccgggcaagaaggaacaggtcgcaatgagtgaccgcaagagatcatggtgactcctgaaaacgcccaggccccgcctcagtgccccgggctacccctggccccccaggctttgtgctgaagccgagataaagtggacaggcgcacctcactcctccacaggtgtgccccacccccccacccgcaggtctgcccgagagcacggcaggtgggaaagagacgaatcctgactccaaggccagggccgccacctccccaaagcccgatttcacccaatgctaccataagttggcctgggctgctcctgtacccacctggggcttcagtttccacatctgccaagcaaggtgcctgggtccgaccatctgagacccaggacaaagggagccctgggaacgccaggctgtgatgagcgagcctgggtctcg

SEQ ID NO: 261629 - DNA, 1490 bp, Homo sapiens
  chr10:5540251-5541741
  hypo
gatgcacacatacagagacacgcatacagacacacagacacacacacagatgcacacacagacgtacacgtatattatttgcagccgaagagaggcaggctgcgtgcagaggctggcagctgggctccgtctgtccatgcgaggcgcccgctcctgtttgtgcgggacacgtgcccaggtcctcaccagcagctcaggcagaacctggagccacagacaccgcccagcaccatcctcacacatcctctgcccacctgccctctgctccgcgtcaggggaggcaggagctgcccctggggcctgctccaggcagttctgccaccgcaggtgagaggggtgggctggaaggaaccctggaagcaggtgggggccctcggaggcagccgccccacaaacaccaagcacacatggaactcggcagtcctttatttagatcaatgcggggctgaggggccctcattccactgcagggcaaagggggaccaggcccaaggaggcctccttctgcccaaggtctggaggcagagaggggctcgcaggcggcccgagggcgccgcatccaggccccggagcgcaaagccttcctcccagggggaggcagtttcccatccaccgaccaggtttccccggagagtcccagcacaaaagcagcagcgggcggtggccctgaaggctcagagcgcagccagggggacacaggcggggagcctcactcctgggcgagcatcctcgcgaactcctcgtagttcacccgcccgtcctggtccacgtcggcctcgcggatcatggcgtccagctcctcctgcggcagcggctgccccagccccgccatggcccgcctgagctcgtccacggtgatgtggccgtcgccatcctggtcgaaggcgcggaaggcgacctgcaggtcctccaggccggccctggccttcttcgccgccgtcaggaactcctggaagctgatttcgccgtcgccgtcgctgtcaacctcggagatgagtttccttagctgggcctccgagaggttcttgcccgtggccttcagcgccgcgcccagctcctgggcattgatggtgccgtttccatccgtgtcaaccgcggagaaagcctttttgtactgggcctcctcctcaggagtcagctcaccggccatgcctgcgtctcctgcacctcgcggagcctccgagctgctgcccaccggccctcaacctgctgctctcagagctcgtggtccagagtgcaggcagccgcagggatccgggcagcgtctgtcccagacagttctgccttggcatgggaaccccctccttttctgcaatcggaacaaagggaggagggaggctccccaccctccaaatgccctggggtgagagcctcctcccagggagggccagatcagctgcagacaggaaatgcaggaatgggagttgggagagctgtcaggtgccaggtgggaactgccatggggtcggggtatcggatggctagcctgc

SEQ ID NO: 261630 - DNA, 62 bp, Homo sapiens
  chr10:5548690-5548752
  hypo
ccacctcccaccaggagctgcgggtgcctggtcagtggcccgtccagtaagttggtggccac

SEQ ID NO: 261631 - DNA, 83 bp, Homo sapiens
  chr10:5551878-5551961
  hypo
cctgcggaggtggccgggagtgggaggaagagcactggccgtgccgggaagaggtggcaattcgggcccgctctgcctcccac

SEQ ID NO: 261632 - DNA, 761 bp, Homo sapiens
  chr10:5566908-5567669
  hypo
gtctcaagccagggcgagacagcccgccggccgcccggatctccacctgccaccccagagctgggacagcagccgggctgcggcactgggagggagaccccacagtggcctcttctgccacccacgcccccacccctggcatggccgaccagctgactgaggagcaggtcacagaattcaaggaggccttctccctgtttgacaaggatggggacggctgcatcaccacccgcgagctgggcacggtcatgcggtccctgggccagaaccccacggaggccgagctgcgggacatgatgagtgagatcgaccgggacggcaacggcaccgtggacttccccgagttcctgggcatgatggccaggaagatgaaggacacggacaacgaggaggagatccgcgaggccttccgcgtgttcgacaaggacggcaacggcttcgtcagcgccgccgagctgcgacacgtcatgacccggctgggggagaagctgagtgacgaggaggtggacgagatgatccgggccgcggacacggacggagacggacaggtgaactacgaggagtttgtccgtgtgctggtgtccaagtgaggccggcgcccaccatgctcctgggcgcccacgcggcccacagggcaagaacccggggcctcccgcctcctcccccatccccctgcctcccctgggcactgtggcttcctcctgcgcctggttgattcagcccacctctctgcatcccgcttcccgcgtctcttctctgca

SEQ ID NO: 261633 - DNA, 153 bp, Homo sapiens
  chr10:5572907-5573060
  hypo
agtttgaccctgggtttgaccgaccccaaagctcacactattcccactgtgccagagaggagttcttagagcaaggagcctgaaaccgagaggcgctgagctcacagaggcggtgagtgctggagagatctcggtaggaaaggcctggaagtg

SEQ ID NO: 261634 - DNA, 189 bp, Homo sapiens
  chr10:5574191-5574380
  hypo
aagtctggccctgccgaggagcagcggagcatcccaggaaagcccctgctctcccaaccccagttctgctgaggaagtgaaggatccttggaggcggcacagccatgcacagggtgtaaccgcctgggatgcaacctgggcatgaagacagcacagacgtggtaccgcagggcccgaggctgggtgaga

SEQ ID NO: 261635 - DNA, 226 bp, Homo sapiens
  chr10:5576085-5576311
  hypo
cgctccctcgcaggcgcacaggccctttctcaggaaagccccacacttggcttaaggctctgctgttgctgccttgaactcttaatgagttttgaacaaggcgccccgcattttcattttgcattaagccccccaaattatgtgcctgccctgctcaccacgtcccactgcgctcccagggcagggcccgccccacccagacgcagactgtcgcggcttcatcaga

SEQ ID NO: 261636 - DNA, 289 bp, Homo sapiens
  chr10:5638904-5639193
  hypo
cagccctgccccatcggtttcagccacccggagcggccgccccacccgcctcctgcaaagaggtgagctgcccctgcccactgctgctccagctcacacccgtcatccgtgagccattactgactacctacagggtgcgcccgccgtggtctgcatgtcccacagaaattacccagggctggcccagcggctcccagcagacggccaggcatgtgctcccaggggcactggtcctagacagatgaggacacatagggactgacacccctgaaaacgcctggggcagcag

SEQ ID NO: 261637 - DNA, 215 bp, Homo sapiens
  chr10:5666828-5667043
  hypo
catctcgaaggctcgccacccgcgggaggcaccggaaacggaactgccaggacccttttctcaagatggcgcccaaggtaatgaaggaagcgcctgcccctcccaaagcccaagccacagtaggggctttgaggaccaaggaggcggtgctgaaaggtgtccacagccacaaaaagtagatccgccgtcagccaccctccggcggcccaagacgc

SEQ ID NO: 261638 - DNA, 40 bp, Homo sapiens
  chr10:5680699-5680739
  hypo
ccctggcaagcacagcgctgccaaacgacctgggacacag

SEQ ID NO: 261639 - DNA, 58 bp, Homo sapiens
  chr10:5681054-5681112
  hypo
cttctcagtttaggacgaagacccgccatgacaatggcgggaacgctggagtaaaacc

SEQ ID NO: 261640 - DNA, 101 bp, Homo sapiens; identical to SEQ ID NO: 213411
  chr10:5683749-5683850
  hypo

SEQ ID NO: 261641 - DNA, 36 bp, Homo sapiens; identical to SEQ ID NO: 213413
  chr10:5796177-5796213
  hypo

SEQ ID NO: 261642 - DNA, 114 bp, Homo sapiens; identical to SEQ ID NO: 213414
  chr10:5796243-5796357
  hypo

SEQ ID NO: 261643 - DNA, 82 bp, Homo sapiens; identical to SEQ ID NO: 213415
  chr10:5863290-5863372
  hypo

SEQ ID NO: 261644 - DNA, 317 bp, Homo sapiens
  chr10:5875005-5875322
  hypo
cctgtagaacaaggcgctgccactcaagccagttccctgagaaccagtcggaccaggacaggcccctgaccacacccggcaaactggagtcctggccaaaggtgctgtgagtccatgaggtgctggcagggaggtgctcagaggagggtgcgcagaggcggagggagccaggatggaggctgcagggagcaggggcaggcaggcacggcagggaccacgagctcctgggatgcagacaagacttgcgggggtgcacggagacagagcaatttccccagtactttgttgccacgtttttgtgctgatggcatcagatg

SEQ ID NO: 261645 - DNA, 147 bp, Homo sapiens
  chr10:5898120-5898267
  hypo
acgtgttgggtgcacgtgctgggccaagcatcatgcacgctgtaaggtatatagatgtgatttggtcaaggtagagaccgaggcggatatacaggcctgcacggctcagtgagtttggtgcgcaggcgcacacctccgcttgttaca

SEQ ID NO: 261646 - DNA, 90 bp, Homo sapiens; identical to SEQ ID NO: 213416
  chr10:5901982-5902072
  hypo

SEQ ID NO: 261647 - DNA, 78 bp, Homo sapiens
  chr10:5902471-5902549
  hypo
tctgcataccatcaggaccccgtaacaaatcttctgcataagctggctccaatgaacgctagtctctgctaactgaac

SEQ ID NO: 261648 - DNA, 33 bp, Homo sapiens
  chr10:5952451-5952484
  hypo
ttccccacagcctgcgtgcggccctctcctgtg

SEQ ID NO: 261649 - DNA, 631 bp, Homo sapiens; identical to SEQ ID NO: 213417
  chr10:5953029-5953660
  hypo

SEQ ID NO: 261650 - DNA, 462 bp, Homo sapiens; identical to SEQ ID NO: 213418
  chr10:5960338-5960800
  hypo

SEQ ID NO: 261651 - DNA, 168 bp, Homo sapiens; identical to SEQ ID NO: 213419
  chr10:5962672-5962840
  hypo

SEQ ID NO: 261652 - DNA, 138 bp, Homo sapiens
  chr10:5979160-5979298
  hypo
cggagcaggtgcgcgccatggagcgcactgtggagaacatcgtactgccccggcatgaggccctgctcttcctcgtcttctgaggacaaggcgcacgttctccgcagtgcagagcagcttgccgaggaccccgcgtga

SEQ ID NO: 261653 - DNA, 601 bp, Homo sapiens
  chr10:6003402-6004003
  hypo
gtcaaagatctgagtcgttcagcttgtttactagagaaggcaggcccaacgctggaggctcagctgagagcaggtgaagctgcgctggccgaggacgctcggagcggctgcgtgtgaaacacgggaagcctgggctctggcctgaactctccgggctgtgtgggaggaaagcgtcctgatgagcttgctctcaggaacagaggctgccttgtgttcagcgtcttccctgtcttccttgtccttccctggaaggtggctgcccctgcactgtaagggtgtggcgtaactgtgctgttccctctccatgaaaaatgtgtcttccattgtgacagccacggaatctaggaaacgtgaggccaagcgctgtggctctctggacgcactgttgttgccgcgttcccatggtctcccagccacacaggtcatgagaaggcctcacgccccttaatcctgtgtcaccacctttcatataacttgccctacgctcactgccaatgctccagggctccctgcacaggacgcaccaaggcatcctcagccaagtgcccacggtcgtgccagctcgggtcaaaggctgctgtcacatcggggcttctgactg

SEQ ID NO: 261654 - DNA, 158 bp, Homo sapiens
  chr10:6023434-6023592
  hypo
tggctccagttgttcgttcattgaccgatgatgaacaatggcaaaacggttctgaaccaaggtgcttgtgctaacagtgatgacgaacataatgctgttatcacagcagaacacgcacctgcaggcgccatgatgaaagcatgcgatgggctcattga

SEQ ID NO: 261655 - DNA, 147 bp, Homo sapiens
  chr10:6024478-6024625
  hypo
ataagtgtaagaaaacgattgtttgtaagggtagcccataaattcagagtcagagtcaggaatggtggtgatgccaatcatccgcagatgttcacgtgggtgactgcagtggcaacaacgttgctttctgggcgttcaatagacaca

SEQ ID NO: 261656 - DNA, 119 bp, Homo sapiens
  chr10:6042315-6042434
  hypo
tccttaaggcgtgccgttaaatattcgtaaaatgaacacatgaagagcctagagtccagaggtcctagcagatggtgttacatcctcatcgtgaggcacgtggacgggggtttccgacc

SEQ ID NO: 261657 - DNA, 62 bp, Homo sapiens
  chr10:6055609-6055671
  hypo
tgggaagagatgcgcggtagccaccgtcaaacggtatttccaccatgcggacacaatagatg

SEQ ID NO: 261658 - DNA, 150 bp, Homo sapiens
  chr10:6065692-6065842
  hypo
ctggccaggacacacgcatctggagcttttgagactcacaagtgtggcatgcacattttacaaccttgccctggaagaaatactgggaagcaagtaatttttttgcggtgcgttgtcttgtgcttaaggggaagacgcagagcgtttcct

SEQ ID NO: 261659 - DNA, 270 bp, Homo sapiens
  chr10:6078743-6079013
  hypo
gggacagtcattttagagagcggacaccactgctgaagaagaaggatatcccggttggctgctctagagccggcaggacggatgctgaggttgttcgcagcagcgtgtgtgcagagcccccgggatcttgcagactgggatttgtcagggcaggtgtggacattgaggctatttctaacaagctcctacatgatgctggggctgcagagccccaggccgcacttggagtatgagagtttccagggagtgaagccccggctgctctctctg

SEQ ID NO: 261660 - DNA, 46 bp, Homo sapiens
  chr10:6089449-6089495
  hypo
cacgtcagctgagacgcaacacactgcatgccgaacacacaggaga

SEQ ID NO: 261661 - DNA, 49 bp, Homo sapiens; identical to SEQ ID NO: 213421
  chr10:6135599-6135648
  hypo

SEQ ID NO: 261662 - DNA, 256 bp, Homo sapiens
  chr10:6151972-6152228
  hypo
aggactcaagacctcgatcacagtcttccaaagcagccattcctcccccagtgtacgaggaacaagacagaccgagatctccaaccggacctagcaactccttcctcgctaacatggggtaatgatttaatgttcttatctaaggacttgagagacagtgtgaagcgttgatagccctttcaatagatgcagcttgtttgaaactgaggacattcaggacccttggtgtgtgcaggtcacacggtacctgcctcaa

SEQ ID NO: 261663 - DNA, 158 bp, Homo sapiens
  chr10:6159773-6159931
  hypo
cgagcccagcctgaaacgcctttttctgtgtggggaacttccttgtttccctcctccccgcaagagactagaaacttgctttcccagcctgtcttgcaggttgagtagggttgtgcgcttgggatctctgatcagaccggcaccgcagtgtgggagag

SEQ ID NO: 261664 - DNA, 247 bp, Homo sapiens
  chr10:6161978-6162225
  hypo
agaatcccaacatcccgcctccacctccttgcttcttactgcctcttccactcagcccacacttgcagaatgaggactgcgtcgactacaaattagacctctgcttccaccaggcctccttgatagttcagctaagagccgtgcggtgagtctcctgacgttttatggcacttgacgctggtaaccactcccttcccgaggacggagaccgcggccctgccagtatcgctcacgctttacctcttcc

SEQ ID NO: 261665 - DNA, 153 bp, Homo sapiens
  chr10:6167800-6167953
  hypo
aattccaaagcgtgaacccttcactgaagccactgaacactctcatccacgccaaaacttcaaaagttaacactggcttgcacagtttgactgatcctggagcggcagagtgactcaccgtctgcagccaggcctggacggcactgctggtcc

SEQ ID NO: 261666 - DNA, 264 bp, Homo sapiens
  chr10:6211184-6211448
  hypo
gtgagccaccgcgcccagtcttcttatattttcttgtcacagtgcatctgcttgggtggcaggtgcacctacctgggggagagcacattttctgttcttttcttagtcttacgcagggaggattgtgattgggactctggcggctgtgagcagggtagggggtcttaattttagtgagcaaggggcacgaatgctcagacctgggccaccatggagttgtcggggtgtgggtaggagactggcgtcacccataaatgcagagta

SEQ ID NO: 261667 - DNA, 94 bp, Homo sapiens
  chr10:6372302-6372396
  hypo
gtgctggagggcagcgtgggcggcgggagcacgggtggagggagcagctgctcaggcgggagccctgcggaacgtgaccctctgtgcactggag

SEQ ID NO: 261668 - DNA, 34 bp, Homo sapiens
  chr10:6372696-6372730
  hypo
taacaggcgtgagccaccgcgcccggccgaggtg

SEQ ID NO: 261669 - DNA, 299 bp, Homo sapiens
  chr10:6531084-6531383
  hypo
tgctccaaattccacattgtcggcaaaactcgcataactcacattcgccctatttagaaggtgtcaggtttcaacttcggtagccccagctccattttcttatgcatcaccgtgacaccaagtgaggttgtcagctaggattgaacatagagggatggagttttactttgctccttaaaactgtagccacatctaggcttctctgtgacttgcatggccgcgaagaaaggccaccaccatctccacgagaaggtcctaagtctttgttactaacctatcaggccgtaactcagtttctt

SEQ ID NO: 261670 - DNA, 82 bp, Homo sapiens
  chr10:6547162-6547244
  hypo
ttcttaaaacatttcctaggcttatgtcattattgtttacggaatatcattgtttttgcccgattgaatttgctctctcatt

SEQ ID NO: 261671 - DNA, 218 bp, Homo sapiens
  chr10:6578876-6579094
  hypo
cagaaacaaaacaatacctacggtgcctttggaagaatacccttccccatcccagttctcgctctcccaagccaggggctcagagtagcatgagctctggtggggctgacgatggaacaatttgacaagcatcagggacagaaagatggggcgcagtgggggtgtcggagtgtggctggtggggatgcagaagaggcggtttgactcctcttgttggt

SEQ ID NO: 261672 - DNA, 44 bp, Homo sapiens; identical to SEQ ID NO: 213424
  chr10:6647894-6647938
  hypo

SEQ ID NO: 261673 - DNA, 143 bp, Homo sapiens
  chr10:6664620-6664763
  hypo
ataactactatgtctacttacgtgtccacgagtaacctcatcaccacgttgggagaagctacatacgatactttttgggagaaactgagctccggagctgcttggtcaatctccctgtaaccgaatcacaggttcacttgatc

SEQ ID NO: 261674 - DNA, 195 bp, Homo sapiens
  chr10:6852535-6852730
  hypo
tctccctttacatctgaatacgaagaaaccaggcaaagttctttccactctgagagctgtatctgctctcgatgtgactgtgggaaccaggatgaagtgatgaatactgttgcttcatctgccatcgtaggaactgctttattaattcaggaaattaatcgctcctctggcttcgactacagatttaatggtatg

SEQ ID NO: 261675 - DNA, 89 bp, Homo sapiens
  chr10:6864689-6864778
  hypo
aatcaggaaagccaatacaacggtattataggtgacccgcgagaacattgttagggtgagaatgacaagtttaggcattaaaaatgcca

SEQ ID NO: 261676 - DNA, 103 bp, Homo sapiens
  chr10:6956297-6956400
  hypo
ccacaaatactgaccgagctcctccagtggacacagtaccacatgggtgcaggcaagactatgtagcccacggggaataagacaaatacgaaaggagaacgtg

SEQ ID NO: 261677 - DNA, 70 bp, Homo sapiens
  chr10:6975463-6975533
  hypo
gtagtgttcagatcaaatcacgctttattaggtgaaactctattgaatcgtgaaactttcaagcccatat

SEQ ID NO: 261678 - DNA, 210 bp, Homo sapiens
  chr10:6984458-6984668
  hypo
gctgggttatgatagaataacggcactgaactaccttacctatttgaagtacgggaactcctaaacacacttaatttctaagtaggcatgttttcgaggagaactctcgaagcacctgtagtattaaccacttctctctcaggagagcagcgtggtttcttccaagcgcaacctttggcatcacacatcgccatggtgatttttccctga

SEQ ID NO: 261679 - DNA, 42 bp, Homo sapiens
  chr10:7083317-7083359
  hypo
ccttgagacacctacccttccgaatcccattctacaggtcca

SEQ ID NO: 261680 - DNA, 82 bp, Homo sapiens
  chr10:7138552-7138634
  hypo
agtttacctgagcccaaggccgcatgggtggagttggcgcctggttgccccggccaactccggggcttctcggaaaggggag

SEQ ID NO: 261681 - DNA, 183 bp, Homo sapiens
  chr10:7139933-7140116
  hypo
aggtctgctgccagtgcctccgggagcccagctcctccagcggggttctctccagatccttgcagaccccaaacagagagatgatggggcctgcagaccttgcctggctgtcagaaattttccacccgctgaagaggtggctggcagtggtctacgctctgcgtgtggccttcctaaattaac

SEQ ID NO: 261682 - DNA, 74 bp, Homo sapiens
  chr10:7156189-7156263
  hypo
tgacacatgctctgaatggccgctaggcgagcactgatcccaccagattctccgggagctctggttttgacatc

SEQ ID NO: 261683 - DNA, 145 bp, Homo sapiens
  chr10:7175436-7175581
  hypo
gataatggacaacgcgcccactaagggcaatgtgactcatacatttaatctaccaaggaggcttgccgcgtagcacagttccgtcctgttaaatgattttcttctcctccttcaaagccccactcagtgacggtgcttcctaggc

SEQ ID NO: 261684 - DNA, 287 bp, Homo sapiens
  chr10:7202879-7203166
  hypo
tctgggctctcctcaaggaccggagagatggcacagagacaactttcatggcgacgccaggctgcgccctcctgtgcagtggtcccagccatctcctccctggcacgtgcacagacagtgctcacccatggtgaccgcaactgcacagagaaacgctgaagttaaactgtcagggtgaaggatacggagagtcttgggcgcttggctccacgggaagcaaacactttcccctgcgacagtggctgtatccttcctgagctcctggcgggccacacactctagcttcc

SEQ ID NO: 261685 - DNA, 264 bp, Homo sapiens
  chr10:7204511-7204775
  hypo
gagggactcctgctcggtgacctgctgcagtgatccttctaagggggacgtagctggttgatgaaatgcttccctcacatctctttcccttcctcctctctgaaactaagcttttcctttgatatataatccaacatttgcctaaaagactcactccctgatccggctacgattaaacaacaacactggagatagttgagggtctagaaaagactgggtagagtttgtctctacagatgttctaggcttcaatcaaaaaccatc

SEQ ID NO: 261686 - DNA, 377 bp, Homo sapiens
  chr10:7205706-7206083
  hypo
aatgggccacctcccgagggcagactcagttggcgtactgggcgtagaaagccactttgactctctcgatctggtggcataacttgatggcaggccccagcttcagctccatgcactcctgcaccgtcggaagggtcagaagcaggagtgcttggccgtcaatatcctgcaggaaaagaaaggcaggttagagaaggggcagtgtgcactggggtacacagatgcgtcacagcaggctccagtccggggccaaacatgacaacaggatgctcttgtttcattcaattcaggggattgttggtagagataccagcccggcttgatgactgtctaatctttgtgttactaaaatctttttgtagccgggcacagtggct

SEQ ID NO: 261687 - DNA, 84 bp, Homo sapiens
  chr10:7209416-7209500
  hypo
ctctgcatttataacgttcagggcctgcgtgcacatagcgatgaccatgctgtgcactgtgatctcattcgcatgccagtgaag

SEQ ID NO: 261688 - DNA, 367 bp, Homo sapiens
  chr10:7212697-7213064
  hypo
gaggctctgtctctcgtccctgccaggcagctctcagcaggggccttggagggagaagggtctcgcacacctgccgagcagcgccgaagaaccccctcgcaggtgtcacgaggaagccggctaggacacgaggttcatttcagatgcagagtctcagcacatcaaacaatcgacacgcggcaaccaccgtacctgctcctgaaatatcttggccaagggggcacagtctgtcagcttaatgaacctcaccacgtcggtgaccgtccactccaacgggttgctctccagaaccagtctctcctcctcctcctgtttcgtgtcctgcagagaaagggcaggaggagctcagctgcggcacagtcagctg

SEQ ID NO: 261689 - DNA, 749 bp, Homo sapiens
  chr10:7213829-7214578
  hypo
ccctctgtccccacgcccgggcatcacctctgtcccctcgggcttggtcggcgggcacttctccccttcctctgctgaggaggcagccggcgccccgcggccccttcgtgtcctctctgggggtggccggcgcacgggctctgagccgctccgcagggtgacggccctccggggccgggccgagggcacctccgccgacgaggtgtccgtctggtcatcccggagctcggagccggtctcctcactggcggtgtcatcgtccatggcgtcagcgtcctcctcttcactttcctgggaaggaggaaaaggcatttaaggggctggtggcccgggggcctgtagcggtggccccgcggtcagaccctgggcccagtgcagaccacctagcaaaccctcggaaatggagccagtggtcccacccgtgggccctacgaggcccttcccagccaaagcagctggacacactacatttgttttcagcaagtaaggaggagggggctcttcttcagtgtttctgaccatcttgccacaatctccagggccacctctgctgtgaagcagccacacttgccggccagggccagatgacagagctacaggctggcaggtgccccgggcagaacatacctcccccgagcccgcggtgaagtccacggcagaagacctccgtttcttctgcacgaaaatggatttccgtcgcttcctccgcctggcgggtttggggtgtccgctgtcggggttgctttccc

SEQ ID NO: 261690 - DNA, 193 bp, Homo sapiens
  chr10:7216060-7216253
  hypo
aggcacacctgctccgggagccccggcctgttctcatcaatctctcaaaaggagcagctggcaggagagcttggaacaatgtcccgtgtccagttctataaggaccgtgttactcagtgagcaggaataaactgccgtgggcgagcattgctctgtggccatctccaggtacggggcaaatgagcaagcctct

SEQ ID NO: 261691 - DNA, 166 bp, Homo sapiens
  chr10:7216521-7216687
  hypo
ttattatatgagatccggagacatctctgagttcatttcggcaatgctgaatgggaggtgtgggaccctgctccttccctgccattcccagtgtcctggaagaacacagaagcccacctggcaggtaagcattcaccgtacacggcaaaggcgagccctcggttag

SEQ ID NO: 261692 - DNA, 95 bp, Homo sapiens
  chr10:7235749-7235844
  hypo
caaaaatttcctgaacacctcgtgcaatgcaaaggaacgcaacagccgacaagacccttttggtcataggaggcgagcaatctcctgatatgaca

SEQ ID NO: 261693 - DNA, 381 bp, Homo sapiens
  chr10:7236182-7236563
  hypo
cccctacctcccctcgctgcaccccctcgaattgaggccagacacgctcgtggtcctgccaaaccccactcaactctaacacccatcaagtgagtagagccatgcattaaagaccacttttgccagaaacttcgtcctctcttataaagcggcccactcagacagaacccagaactggactctgcagcctgcactgagccttgccaaagaccatgtctgcatccacaccccgagacgtctatttctggcagaacagatcagggtgaaccgctctcactgcacatctcctacacataaagtgttcaagttcctaataacaccgatggccaggaaaagcaatgcactctgtctttacttccattacctcgttctctttaacta

SEQ ID NO: 261694 - DNA, 138 bp, Homo sapiens
  chr10:7238964-7239102
  hypo
catgacacaaacctcgtcaaagtacctggagaccattgaaatacttaccattacctcccgtgtgcaggtaccaggtgctcggaagagatggatgaaacaaaaagatggcacagcaccatgacccggccaaggagcgcc

SEQ ID NO: 261695 - DNA, 39 bp, Homo sapiens
  chr10:7239512-7239551
  hypo
tttaagaaccagcacgcatttgcccggtcccaccgactg

SEQ ID NO: 261696 - DNA, 177 bp, Homo sapiens
  chr10:7239774-7239951
  hypo
tgatggggagtcaggcgtaataaaagcaatggaacccaaaatgaacacaataaccgtgacagccagtgtcgttagaactgtaattaggaggccacactctagttccaaatcgtgacaaagcagcagagaaaaacagatgattttcttcttttgagaaagaggcgctgtgtcctaata

SEQ ID NO: 261697 - DNA, 87 bp, Homo sapiens
  chr10:7246836-7246923
  hypo
aaaaaaaaaaaaattttttttttgcatgtatttaaatgtgcatgtgcgtgtgtgcacacatgtatgaatgggcgtttactgctgggt

SEQ ID NO: 261698 - DNA, 214 bp, Homo sapiens; identical to SEQ ID NO: 213429
  chr10:7252611-7252825
  hypo

SEQ ID NO: 261699 - DNA, 157 bp, Homo sapiens
  chr10:7256061-7256218
  hypo
caccaagggtggtagagaaacgtactaaaaagaaaacatcacgagtaaaaagcaagaaacaaccaaccaaagcaggagatggagaatatatgcgatccttcttaacaagaggttaagaaaacgtccagcatcttccggccaccactcttaagaacac

SEQ ID NO: 261700 - DNA, 195 bp, Homo sapiens
  chr10:7262331-7262526
  hypo
tacattccccccagcgactgctacccccagcgagtacgtaccttccaggtgaagccacattagccgccccttcacactcacaacggaggccacacacagttctcctggattcctggggttcacagcttcaagtttcatgttctttgtgaaacctcgactgaatgatgtctgcaagagaaacgagaccaacactga

SEQ ID NO: 261701 - DNA, 31 bp, Homo sapiens
  chr10:7288383-7288414
  hypo
cataagaatgtgagagaggccgggtgcagtg

SEQ ID NO: 261702 - DNA, 91 bp, Homo sapiens
  chr10:7288714-7288805
  hypo
acgctaccgctgacaggctatgcacatcaagtctgttgagtttaattgataaataccaggtgaagcgactctgtagcgtgatacatctgca

SEQ ID NO: 261703 - DNA, 224 bp, Homo sapiens
  chr10:7290464-7290688
  hypo
atccactctaggggctgggtcgaagagcgagggaggaaaacccaccttagtcaccgacgcaggagagatgtaaaagggctcgcacatattcactgtctcaagcttcatcccaactgtgaagaaatggcttcgcaaatctgcgtgatcctgcagggagaaagatgaaaatattgaaagccacggtattgtaaatgacctcagccactgtccggatgcgctcctgg

SEQ ID NO: 261704 - DNA, 105 bp, Homo sapiens
  chr10:7304466-7304571
  hypo
caccctccctgcaagttccccgggaactggcaagagccagaattatccgcggtaagcagaagccatttgggagtgagaactcccggagcagataactgaaagttg

SEQ ID NO: 261705 - DNA, 168 bp, Homo sapiens
  chr10:7317009-7317177
  hypo
gaagcatacacaggctggaacgccacaaagagaggcacaggcaggacccgcacagctgtgaggccccgggtgccctggtcccgcagggaggcagacctggggctgcagcgggggcttcactggcctggcagctccgaggcttagaccggagggtgggcatctgtaatt

SEQ ID NO: 261706 - DNA, 100 bp, Homo sapiens
  chr10:7330644-7330744
  hypo
tatgctaacaggtgcttcttcgtcattaactcttgaccaagttcacggaaaaaaattagaaacagcggccaggtgcggtggctcacacctgcaatcccag

SEQ ID NO: 261707 - DNA, 42 bp, Homo sapiens; identical to SEQ ID NO: 213431
  chr10:7352682-7352724
  hypo

SEQ ID NO: 261708 - DNA, 78 bp, Homo sapiens
  chr10:7367242-7367320
  hypo
ttcaaacacagccacactgcgggggcttcaacataggaatttggggagttcacaaacgttcaggccataaccaatatt

SEQ ID NO: 261709 - DNA, 133 bp, Homo sapiens
  chr10:7381915-7382048
  hypo
gaaagactctcattacgcaaatgagtgcttagggccttaacactaaccaattcacacaggtctgacggggcatgagtgtgcaagtgaaagccatgcaggttcctgagacagccacagtcggtggggatccatc

SEQ ID NO: 261710 - DNA, 267 bp, Homo sapiens
  chr10:7401000-7401267
  hypo
gacggtcagtggcacgaagaagagtgaacaggtggaggtggagggggaataaagggaggtcaacgaggcagggtcaagcctggagcagccagacatcctgcaggccgagctgtgcccgggggccttgtctgtgtaaagctgccacggggcttcccatacaagtgaaacccaaggatcattcaggacgttcaaaggtccacccagagcaggaacggggccagatgggagctgagccctccatgcacccgaggccgtgatcatctgagc

SEQ ID NO: 261711 - DNA, 301 bp, Homo sapiens
  chr10:7409503-7409804
  hypo
taagaccattagggattctacgcaaggttctctctgctccttgcaaaattacaggcgtcatgaaggatggcggctcgtaaatcgaagcctttgaaacaggggctcaccgtccggcggcatcaacaccttgttgttctgtgtgcaccaccccacggggtgcaaatccgcgatgactacgtcacaccagaagtcggccctgcggtcctccccgtaaccgcagtagcgcagaagcagcagctgcccgcacgtggtaatgatcgtggccacccagtacgtgtccgggttgttcttattagccact

SEQ ID NO: 261712 - DNA, 195 bp, Homo sapiens
  chr10:7412692-7412887
  hypo
gcgaaggaacccatcgtgcgctgagcaagggctgtgatgtaggctgtgatgtatacagagaacagcactaattgttataaagataaagcactgactctggcatcattttaaggggaaaaagagaaaatgaggccccaaagaattgctcgagtgtgtggggccacccagccagtcaacaacacaaaccgaccagct

SEQ ID NO: 261713 - DNA, 82 bp, Homo sapiens
  chr10:7415788-7415870
  hypo
aagagcacctgggaagaagacatcggcatgaaactcagtcctgggccgaaggaggcacaaggttctacgtaggactccgaga

SEQ ID NO: 261714 - DNA, 232 bp, Homo sapiens
  chr10:7424554-7424786
  hypo
taagacactccccccgccttgaagctatgtagcagcaacctccaccccccacacaacctcagcatcccacgcgcaggtactgcaacacgcagtgccctgcctcaggaagaagtcctcacgtgttacacatgatctgttaccaaaaccagttaaagtatcgatgtttgtcaataatgtgctttttcacaaagcagaaatggagacaagactttccctacgatagcactgctat

SEQ ID NO: 261715 - DNA, 138 bp, Homo sapiens
  chr10:7426168-7426306
  hypo
atctcaaaaaaaaaaaaaaaaaaaaaaaaaaacaaccacagaaaggacaaataagtaccatccctgaagagaaatggacatgacgtgctcactgtggcaccgtctggggcacctcggaggaagcgagtgagcacaatc

SEQ ID NO: 261716 - DNA, 154 bp, Homo sapiens
  chr10:7436186-7436340
  hypo
caccagcacgcccagtgagatgattttttatatcagagttacatctgcatataattttgaaagccaaatattctctataaggcctgtgcgtcgatgcccacccctaaaaatcaaacccagtcatctcctgcccttctcccgcgtccccatctcc

SEQ ID NO: 261717 - DNA, 36 bp, Homo sapiens
  chr10:7442791-7442827
  hypo
atctcaaaaagcatcccccccggccaggcgcggtgg

SEQ ID NO: 261718 - DNA, 38 bp, Homo sapiens
  chr10:7471887-7471925
  hypo
caccacggccacatggcgaattcttgatacagacaaga

SEQ ID NO: 261719 - DNA, 56 bp, Homo sapiens
  chr10:7498707-7498763
  hypo
gcacctggccttgttatatgcgtgtagcttcttacgctgccatgcatgttgtgtat

SEQ ID NO: 261720 - DNA, 51 bp, Homo sapiens; identical to SEQ ID NO: 213435
  chr10:7583452-7583503
  hypo

SEQ ID NO: 261721 - DNA, 197 bp, Homo sapiens
  chr10:7608057-7608254
  hypo
cgctggaagggcgccggctttttgtagaggtggatgaggatgacaaaggctatggagccctggatggtgacggtgacattggcgttggcagacacggacacctccagcccccagctccccaccaccacactctggttgcaggggagcaccagtctgtccccaccatccaagatgactctgctcggtgtgatctcgag

SEQ ID NO: 261722 - DNA, 331 bp, Homo sapiens; identical to SEQ ID NO: 213436
  chr10:7618357-7618688
  hypo

SEQ ID NO: 261723 - DNA, 41 bp, Homo sapiens; identical to SEQ ID NO: 213437
  chr10:7679269-7679310
  hypo

SEQ ID NO: 261724 - DNA, 171 bp, Homo sapiens; identical to SEQ ID NO: 213438
  chr10:7780611-7780782
  hypo

SEQ ID NO: 261725 - DNA, 91 bp, Homo sapiens
  chr10:7790290-7790381
  hypo
taactgaaactgagctgtcccgtgggctgggcacagtgatacttttaagtctcgttcacgcagtgtgaacgagatccttaacaaattgttg

SEQ ID NO: 261726 - DNA, 34 bp, Homo sapiens
  chr10:7852584-7852618
  hypo
tcgtcagcattgaccgctacgccccagtactcgc

SEQ ID NO: 261727 - DNA, 184 bp, Homo sapiens; identical to SEQ ID NO: 213439
  chr10:7871223-7871407
  hypo

SEQ ID NO: 261728 - DNA, 202 bp, Homo sapiens
  chr10:7945962-7946164
  hypo
gaagtttcacggtgcgtctgagttggagcagagtccagtgtacttggaaacaagggccgcagagggaagcagcagtgctagaagtaagaagaagccagtttagagaggccgtgaacttcacactgaacttgttctgaattcagcggcagcgagagcctgttcagtctcgcatagtggggttgggacacgctcttccgaggca

SEQ ID NO: 261729 - DNA, 273 bp, Homo sapiens
  chr10:7985034-7985307
  hypo
tccttacttagcagcggttgtgatcctgctcagatcaaaggagtccaatcctgtggttccggttccctgtagctccgtgagactctgagaactccactcggcctccagcgctgcctttgccgttgccttgaatgaaacaggcgctcgatgttggcctcaccttgcttggtttcttggcttctgtcttctgattctggctcctacgcatcacgttctgcttgctccttagcattgcaaactctgacattttagatgatacgtttgtttcctagt

SEQ ID NO: 261730 - DNA, 32 bp, Homo sapiens
  chr10:8024999-8025031
  hypo
ggtggatgtgacttcggcggggccacctgcag

SEQ ID NO: 261731 - DNA, 387 bp, Homo sapiens
  chr10:8055484-8055871
  hypo
cattgaacacttagcgtttttctgtttcttgattctaaaacagtgatgacgctgatcatggcattaatgaagtgctgatctactatattttttagtttaatatgcctgtttattcggttaacagtataaagtaatcattctgatctggcctctttttgttttttttcccattccctccatttttgccgcttccgctttgcaaacatcagatccgagatgagtggggcaatcagatctggatctgccctgggtgtaacaagcctgacgatgggagtcccatgattgggtgtgacgactgcgatgactggtaccactggtgagtgcccagggcgccctgccggccacactcattaggcagcatcagccgctcctgagatgaagcatcca

SEQ ID NO: 261732 - DNA, 42 bp, Homo sapiens
  chr10:8124885-8124927
  hypo
gaatgaaacttcaggctgggcgcggtggctcacgcctgtaat

SEQ ID NO: 261733 - DNA, 122 bp, Homo sapiens
  chr10:8192083-8192205
  hypo
agctttcctcttatggtttacgatcctccttcttcctacctggggccagcgagcaggctaaagaacgaaaatgagcggaatagtcagacgcacgttgatccggggtctgaagcaatctgcag

SEQ ID NO: 261734 - DNA, 174 bp, Homo sapiens
  chr10:8203924-8204098
  hypo
ggagtctgtctcccagaaggcggaatcgatctcccaaaagtagaagccccttctcccgccgagaaaggcatccgagcaagggtccaagacatcaccgcagcagatcccgagaccggcggcacagatcccgttccaagtccccagatcctcaccgtagtcacagacacaggagct

SEQ ID NO: 261735 - DNA, 85 bp, Homo sapiens
  chr10:8556148-8556233
  hypo
gggaccggctgatgttccggttcatctcggagatctcagtctttgtactccgcaggtgatcctcgtgcttcccaggcagggtctg

SEQ ID NO: 261736 - DNA, 93 bp, Homo sapiens
  chr10:9043112-9043205
  hypo
cttgaaacaaaccagaaagccggcggtggattatatgttatatgctccaggccgtcgtcagaagggtgataaaagaaaatgaacgggccgggc

SEQ ID NO: 261737 - DNA, 43 bp, Homo sapiens
  chr10:9141899-9141942
  hypo
gcgagccactgtgcccgaccacggctaatttttggctaatttt

SEQ ID NO: 261738 - DNA, 444 bp, Homo sapiens
  chr10:9919835-9920279
  hypo
acaggtagttaggcaatgagcggggcaggagagggctctctcccacccgctaggaatgtcaggtgacatcgttcagcaattatcgcattgcctctctaaaaatgataattgggcagccagggagagaaaatctcctcaaggtccacacctgctaacattacaaacgttcattgaatgcaggcgccagagagaggcaacttcctcagcccgcctgttaagagacaaaaaaaaaaaaaaaaaaaaaaaaaaaatggcgaagtatcagcttccggggacacattccatcggaataggggagaaaagcctcagatgggcgtctgggtaagtgccctaaaaacaatgcgcatgctcagttcccaagggtgaggtgggcacagcgcatgcggaaagcccatcttaaagggagagtcttgggaaagaggcgagcctataaagtctcaggag

SEQ ID NO: 261739 - DNA, 82 bp, Homo sapiens
  chr10:10661818-10661900
  hypo
agaagggggttttggcttgtcggtaatgacagggatgggatacagggttgaagagacgaacggaaggagagagaaagaaacc

SEQ ID NO: 261740 - DNA, 42 bp, Homo sapiens
  chr10:10964610-10964652
  hypo
aggtttggtgggtggtatttcggtaataagcctacttatttt

SEQ ID NO: 261741 - DNA, 234 bp, Homo sapiens
  chr10:10965159-10965393
  hypo
tagtcataaaggtgcgcttacgctgtgacgtctaggaaaaatggaaaaatgcaactcaggcaactgccaactagtgatatgtggctgggaaggaagacggtggcatttgagaacagttttatggtttggttttcattggctatgactgtcttgaaatgttccgaaagaccatttacacgggttgcataagggtggagtatttccaccgtaattaccttacgtggtactaattta

SEQ ID NO: 261742 - DNA, 42 bp, Homo sapiens
  chr10:10979086-10979128
  hypo
ttttttttttttttttttttcgtgacagagcctcggtctgtt

SEQ ID NO: 261743 - DNA, 32 bp, Homo sapiens; identical to SEQ ID NO: 213445
  chr10:11081058-11081090
  hypo

SEQ ID NO: 261744 - DNA, 41 bp, Homo sapiens; identical to SEQ ID NO: 213446
  chr10:11184680-11184721
  hypo

SEQ ID NO: 261745 - DNA, 311 bp, Homo sapiens; identical to SEQ ID NO: 213447
  chr10:11198992-11199303
  hypo

SEQ ID NO: 261746 - DNA, 176 bp, Homo sapiens
  chr10:11204046-11204222
  hypo
cagggcatgtgattcggcagtgccaggagagtggtcggtgggacaggaccacccataccacccatttcagcagtgccaggagagaggttggtgggaccggaccacctattgaggcagcgccaggagagtggtcgatgggacaggaccacccattttggcagcgccaggagagtggt

SEQ ID NO: 261747 - DNA, 395 bp, Homo sapiens
  chr10:11296956-11297351
  hypo
cccatgttagtgagcacaggcggtgtagacggcctgcagcaggtggtgtggacggcctgcaggtacactcgttgcccagggtatctggtgtctctctggcttagctgtcgcgcctgtgctgcccatgactgaccaggcttcaccagttcacagcggatccatgctactttgccttctctgaagggaggaaaaagaacttgaattagaagttttccgtcagcgtacaggaggtcaggtcctcagcagtctccctcccaggaattggagcccggggtgcctgttgcccatgtctcctccgagtctgaacacaagcagtggctcaggccagctgatgctttcctcactgagctccttctctgcacatgaagcggaagatggggcgtgccatcctgagg

SEQ ID NO: 261748 - DNA, 221 bp, Homo sapiens; identical to SEQ ID NO: 213449
  chr10:11317672-11317893
  hypo

SEQ ID NO: 261749 - DNA, 106 bp, Homo sapiens
  chr10:11338049-11338155
  hypo
gtgccctgagctctccttggcgggtgccttcatccccgggatggacagatcctcgcgtgcatcttagggctgccactcaccaagcgcattgttccttgttttgagt

SEQ ID NO: 261750 - DNA, 200 bp, Homo sapiens; identical to SEQ ID NO: 213450
  chr10:11344065-11344265
  hypo

SEQ ID NO: 261751 - DNA, 252 bp, Homo sapiens
  chr10:11360789-11361041
  hypo
atctggcactctggagaagccgagtcgtggaggctgcacatcgcaggaaggatcccccgtgggtctcacatgacagggcctgaaaactcccacccgcagcagacaaggcatcatggtggtgcgatgctgcccacccctccatgggaacttggaggcgtccactggagacgagctgctgtcttcagcccgtcctcgtctggcagcaaggccccacatggctctgcaggctgcgaggcacacccagaacctcat

SEQ ID NO: 261752 - DNA, 379 bp, Homo sapiens
  chr10:11381580-11381959
  hypo
tcccaaatggaagacttgcccgctatgaggtcaagccacctcagatgtcccgtcatctctttctgcacccgctcaggaacattttctatctcgacagaagtttaacatctgagatcagaacggacatagaactaagcgcacatgaacagaaactgtggagacaggcgcctgactcaggcattcctgagaagcggatccgctccctttcccccatctcccacggcagctcctgttgggcctggcaagttagtgcccagggcaggatggggccgacgccagccccccaccctgcacagcacaaccgagccattcaaacagactcggacaggcacaaggtccctgctactgcagggatgccatttggcggcaggcacgcagg

SEQ ID NO: 261753 - DNA, 81 bp, Homo sapiens
  chr10:11405331-11405412
  hypo
gcatagaggaagaacgacaatgccacaaacaatagctgagcacaggtagagcgtgaccagggagagcgcggatgctggcgc

SEQ ID NO: 261754 - DNA, 345 bp, Homo sapiens
  chr10:11472668-11473013
  hypo
tggtggcaccggagcgcacacacctgggccgtgccagagctctccgtggaagagggcgatctcacccttcatccatcatccaggcagaaggcaagcagaccatttccccaagcagcacttctctccaacaagcagtggtcataaaagcagaggctctgaaactttaagaggccataaaccctttggcaacgacacacggctccgagaacacacgcatgaataaataaaaccaatactctgctgctgagacatcgctacatccagaaggacccagagcaacagacgcagagaaaagcaacatggaccaccgcggcctgacagcaggtcccacgggcccaggggcgg

SEQ ID NO: 261755 - DNA, 144 bp, Homo sapiens
  chr10:11504537-11504681
  hypo
catcttctgcggccggtgaagctttatatctcacgggactatctacagaaactgcagggaggccatggtcctgaaagggtgcgagttgaaaggctgagtattttggtaaattgccacggctagcatctcgggtccatgattgtc

SEQ ID NO: 261756 - DNA, 199 bp, Homo sapiens
  chr10:11505266-11505465
  hypo
cgttgtcgtactgcgatgcagtggagccccgcttcccgtcctcagcatccagggccttcatctttggccgcacgtttgacacccgcacctcggcaggacctgggacggtaactgcgagcgcggggtgcgctgctcgacctttgccttccatggtgtatttggcagttctctctgtagctgagacgtctgacggtttatt

SEQ ID NO: 261757 - DNA, 81 bp, Homo sapiens
  chr10:11661767-11661848
  hypo
tgatgactcattcacgtaagattttgttgctgttattaaggtgaaattcacataaaataaaatcaaccgtttttcaagtga

SEQ ID NO: 261758 - DNA, 107 bp, Homo sapiens
  chr10:11700968-11701075
  hypo
ctggcttcatcacccgggcagtcatacctgctcgtccagtatttgaatgaatggagttcagcatggtatgtttctatccagcaccgtggaagcgtgtctggatctta

SEQ ID NO: 261759 - DNA, 454 bp, Homo sapiens
  chr10:11731795-11732249
  hypo
cggaccgattttcaacatttttaatgtgggcttgtacttgtttccatgtttggccgctgacagtgattttctttgctggacatgaccatgttttgctgaatgatttcggctttggggagagagagagctgtgctctggcgttatttactcttgagaaaatacaggcgcatggatacagcagccagcgttgcctggtagaatgtgggcagcagcaggctggggggttgcctcgtggttctggaggagcgagcggctcagccatccacacaactccttcaccagcctttcctcacccgcctggagatagccttggacttcgccctcagccagagccagaagatacaggcccaggtttcagtggaatttacactggagaataagaagtccctctatttcttctagaagcctccgccctgaccgctaatctctcgccgcacactcaacccacaggaat

SEQ ID NO: 261760 - DNA, 169 bp, Homo sapiens
  chr10:11761571-11761740
  hypo
gtttacttggcagaaccacacgatgttgagtagcaacaaggatgttgaccccttcagcctcaggtggccaggtagggcacagtggacgctcaccctgggcggtggcagggcgtgactcagtgtgcttgacgaacatggtgttgtcatcgccccttggctgggaagcttg

SEQ ID NO: 261761 - DNA, 78 bp, Homo sapiens
  chr10:11830180-11830258
  hypo
ggaatcggagaaggcgcagagcaaacagagcttccaggctggagagggtgagcaatggggacacggggtgtaagcgtg

SEQ ID NO: 261762 - DNA, 452 bp, Homo sapiens
  chr10:11846786-11847238
  hypo
ggtttcatcacctgcggtgcgcaccttcccgaaagggtggcgtgtggtcaggggtctgtgcggagacctcctggctctccccacacgcggtaggtattcatgcagccgcgtcacgcggaggccccactccgtgcggccaacacagggtcttccagcccctccttccctggctatgtgacttgtagcctcattctgggaaccttccccagctacgtgacttataccttgattctgggaaccacagagttcagaccttggtgctgaaatgggagacgtcccccctgccccccgcaacaccccaccccgttcctcacccaccaccctcgacactgggcttttctcagaatccagaaagcccagggtaccctctgcacgcgatcacctgccctcagtggccgcagcaagctgaagtgtcccttcccccttttcctgcccgacgcctgcagaaccag

SEQ ID NO: 261763 - DNA, 75 bp, Homo sapiens
  chr10:11847448-11847523
  hypo
tctcctccagccagcgctgtccgctgccccagtcagtcccccgctgagtggtctgagtggcgctggtcatctcaa

SEQ ID NO: 261764 - DNA, 193 bp, Homo sapiens; identical to SEQ ID NO: 213454
  chr10:11870932-11871125
  hypo

SEQ ID NO: 261765 - DNA, 35 bp, Homo sapiens
  chr10:11878794-11878829
  hypo
tctataaacctataccgaagtcctctcttatacac

SEQ ID NO: 261766 - DNA, 150 bp, Homo sapiens; identical to SEQ ID NO: 213455
  chr10:11894859-11895009
  hypo

SEQ ID NO: 261767 - DNA, 46 bp, Homo sapiens; identical to SEQ ID NO: 213456
  chr10:11898439-11898485
  hypo

SEQ ID NO: 261768 - DNA, 78 bp, Homo sapiens
  chr10:11911399-11911477
  hypo
tgaggctcttttcagttcagcgagagggaacttcatgcatttactttcacgtgggccggtggctcacaggctcctccc

SEQ ID NO: 261769 - DNA, 32 bp, Homo sapiens
  chr10:11914996-11915028
  hypo
agtactgggattacaggcgtaagccactgccc

SEQ ID NO: 261770 - DNA, 116 bp, Homo sapiens
  chr10:11920973-11921089
  hypo
atgtcaggtgcttggcgtgtgcctggcttacaccttcctcatccccatcatcaccgcagggaattcctacatggccctgggaactcgggagcaagaccagacgcaggagtgaaagc

SEQ ID NO: 261771 - DNA, 151 bp, Homo sapiens
  chr10:11923032-11923183
  hypo
tggcagagcatgcaccggggaatctgagaggcacacacatgatcagactcgcctcacgcctgatggatcagaaactctggggtgggctccaggaaggtgtgatctcaatgcactgggctggcaaacagaacccagcgcgctcccccgaggt

SEQ ID NO: 261772 - DNA, 50 bp, Homo sapiens
  chr10:11941266-11941316
  hypo
ctctgggactccagccgactccaccacgggatgggcgaagggggaggctc

SEQ ID NO: 261773 - DNA, 158 bp, Homo sapiens
  chr10:11952452-11952610
  hypo
cccttcctgctgtgcgtgcctggcaattttggctctgtcacctgtaacaacttaagaaaaagtaaattggtgtgagctggtcctgcgggtacacccgatcgctgccactgtaccggaaggatggcaaaggagcagtcggtggtcagtcctgtgttgaa

SEQ ID NO: 261774 - DNA, 181 bp, Homo sapiens
  chr10:11972974-11973155
  hypo
agtctccatggactcgatgtgtaaggttccaactaactgaaaaatgctgggtatgtatgcataaaatgagaatcctaatttgagtatttcctcaaatctgaaggaacacagcttcctcaagaccaggactccaagtagacaaaaggaggtaaatacagtcgtgtgccgcgtgaccatgttc

SEQ ID NO: 261775 - DNA, 151 bp, Homo sapiens
  chr10:12139550-12139701
  hypo
gtgtgagccactgcacctgtcgaatgcctttttagagtgctgacactccaccgcccttgacagtgactctccttgtctctattagattgttacaggtcagactgatttttgtttcttctctttcttgggcagagctcgaaagagcattcca

SEQ ID NO: 261776 - DNA, 61 bp, Homo sapiens
  chr10:12211464-12211525
  hypo
taattatggtccgcggagcctcaaaccgagtcgggcctgtgactccgagctgcgctgcctc

SEQ ID NO: 261777 - DNA, 44 bp, Homo sapiens
  chr10:12308422-12308466
  hypo
tcgtcttctggatattaattcccggagctgtcatttcctgagag

SEQ ID NO: 261778 - DNA, 40 bp, Homo sapiens
  chr10:12309043-12309083
  hypo
aatatatatatatagcctggcgcggtggtcacgcctgtaa

SEQ ID NO: 261779 - DNA, 42 bp, Homo sapiens
  chr10:12346516-12346558
  hypo
actaagagctttggaaaggtcgacatggaaccagctctttgc

SEQ ID NO: 261780 - DNA, 132 bp, Homo sapiens
  chr10:12460855-12460987
  hypo
ccgtccacccctgccgagggatgtcctgcagagtggccatagatggaaggcctcagccgagagtggccataggtggaaggcctcagtcgcgggcgtggtgtgtccgaagccgttgctcacagaacacttaag

SEQ ID NO: 261781 - DNA, 66 bp, Homo sapiens
  chr10:12485160-12485226
  hypo
gtagtgaaactgactcgaggaggaaagacgtttatgtgcggcagatcttctcggggtttgcctatt

SEQ ID NO: 261782 - DNA, 188 bp, Homo sapiens
  chr10:12531842-12532030
  hypo
agctggttctgcagggaccacgggctgatgtccctgcagctgccagacgccccgacacctccgagtctgcattccggcattcagcccgagaggaatgtgttgctggatgtgatgttccctggcttgagggagcgtggggcaggtgtgaacggggcaggcacactcacgggtctgggctctggatgtgt

SEQ ID NO: 261783 - DNA, 92 bp, Homo sapiens
  chr10:12543589-12543681
  hypo
aggaattcctggcttatctgcggagatacgcatattccagcagttctcgactgagagtgattttttttcccgccaggggacatttggtgaca

SEQ ID NO: 261784 - DNA, 245 bp, Homo sapiens
  chr10:12545239-12545484
  hypo
gtgtgcacttgtgccgctgggattttgggaggagcatttgctcctcgccccgcctgatgtggccaggtggctgcgtgtagtgtatttaaatgcgttcaacgacatgagtgaacgtaaaacaactcctgggtaccaggtttacagttgagaagcaggtcccctcttggcgtgtgtcacagctgtctggcagcctgggctacttttaacaagggaggagagagcaggtgaggcgaagaggccagaag

SEQ ID NO: 261785 - DNA, 147 bp, Homo sapiens
  chr10:12548783-12548930
  hypo
tgggattacaggcgtgagccaccgcgcccggcctgggctctttcatgcccacctagcccttggtgcccccgagcccgagggtaggacctgccaacctcgggtcacatcatgtccttagttcctagcgtgatgctccatgaatgtgtg

SEQ ID NO: 261786 - DNA, 59 bp, Homo sapiens
  chr10:12553847-12553906
  hypo
tctcgccaagccagcggcatctccagcagtggggagtatgtacccgtcctgtgagcttg

SEQ ID NO: 261787 - DNA, 117 bp, Homo sapiens
  chr10:12554254-12554371
  hypo
gtgcttacacaggacgtggacttttaggaattctgattcgttggggagaagttaaagcagtagaaaacactaccttacgttgtcactggtttcagacaaacccggagtctccatcac

SEQ ID NO: 261788 - DNA, 76 bp, Homo sapiens
  chr10:12589996-12590072
  hypo
atccctgtcacctgcggtgcttgccacgcacacgccctggtagccacctgtatcagcccagcgtgacacattgaga

SEQ ID NO: 261789 - DNA, 54 bp, Homo sapiens
  chr10:12595203-12595257
  hypo
ttttccttctttgttcacagcggggccttttccgaagtggttttagctgaagag

SEQ ID NO: 261790 - DNA, 37 bp, Homo sapiens; identical to SEQ ID NO: 213460
  chr10:12602247-12602284
  hypo

SEQ ID NO: 261791 - DNA, 57 bp, Homo sapiens
  chr10:12611335-12611392
  hypo
tacagaaaatcttgttatttcgaactctgtttactcggcatacaagtccaattgaaa

SEQ ID NO: 261792 - DNA, 42 bp, Homo sapiens; identical to SEQ ID NO: 213461
  chr10:12671580-12671622
  hypo

SEQ ID NO: 261793 - DNA, 177 bp, Homo sapiens; identical to SEQ ID NO: 213462
  chr10:12707812-12707989
  hypo

SEQ ID NO: 261794 - DNA, 181 bp, Homo sapiens
  chr10:12768863-12769044
  hypo
aaaaatgctttgcacgtgttcgtgcatccaggtgagaattcatttgaacccagccccctcaggcccctgtgctcccagctgcccagggccatggtgaggagcggctgtattcagtcaggcctacggcacgccatgcccgtggccccacacccaggctccccttccgcgttatcctcagcct

SEQ ID NO: 261795 - DNA, 398 bp, Homo sapiens
  chr10:12827568-12827966
  hypo
ccctcatcactttccgaggccccggagggactgtgctgggcacctcctgggtctggaaactcgttggtcttctgcaagtttggaagctggacgctgtgattttttggaattacagcagagtccttgccacgcgtcataaaactggtaacacaacactggccggttcggctggttctcaggcaggaaaactggcgtctgacaagatcagagtgagaagtggactctcccagggctatgtacctcaccacagctgaaacaagaaaatggatgggttgggggctatgctagaaaggccgggtgaattcagcaggttggtgaaacagtgcagctgactcccgatcacaggaggcgagcaggagagagaacatcctcgtggatctccacggtttggcccggtt

SEQ ID NO: 261796 - DNA, 284 bp, Homo sapiens
  chr10:12837375-12837659
  hypo
tcctgtgggtccaccgtgcctggtctcccattcccacctaaagacttatgcacaaggccactgagcggtccatgagcaacaggcagcatgccagggaggccacctccccacacggaagtcacggagcgcctcattcttcccagccactgtaatggaaaagaggtcagcccctgcagtgttttggagcatagcactcttattttttatttttgtttgataaacctgtcacgctgagatatcagactgcagccaaagtggccgtgacaagccgtggcaccgagttt

SEQ ID NO: 261797 - DNA, 42 bp, Homo sapiens
  chr10:12872606-12872648
  hypo
gtgtggcccagggaaagctgcgtttcatggaggcttccagga

SEQ ID NO: 261798 - DNA, 90 bp, Homo sapiens
  chr10:12875520-12875610
  hypo
gaattgagtcttcgcgttggggaggccacgctggaaccattgctctagggctgaaggtggaagtagggccactgccgcagcttcagccag

SEQ ID NO: 261799 - DNA, 95 bp, Homo sapiens
  chr10:12940456-12940551
  hypo
tgatgtgcggcagcgcgcccgccgccagcttctcactgagtttctggttcgccagctccaggtggcggcccttcttacgcgcctgccgcaaggac

SEQ ID NO: 261800 - DNA, 71 bp, Homo sapiens
  chr10:12965605-12965676
  hypo
tattttgtgatatgatacctcgatgggttttcctttgggatatgcgtcccggtcatttctatccttttttc

SEQ ID NO: 261801 - DNA, 34 bp, Homo sapiens; identical to SEQ ID NO: 213463
  chr10:13146884-13146918
  hypo

SEQ ID NO: 261802 - DNA, 37 bp, Homo sapiens; identical to SEQ ID NO: 213464
  chr10:13150491-13150528
  hypo

SEQ ID NO: 261803 - DNA, 201 bp, Homo sapiens; identical to SEQ ID NO: 213465
  chr10:13263527-13263728
  hypo

SEQ ID NO: 261804 - DNA, 45 bp, Homo sapiens
  chr10:13404823-13404868
  hypo
aaaagatctcaaaccggccgggcgcggtggctcacgcctgtaatc

SEQ ID NO: 261805 - DNA, 164 bp, Homo sapiens
  chr10:13405108-13405272
  hypo
gtctccgtctcaaaaaacaaaaaacaaaaagatctcacaccactgcgcggtggcagaacggaggcaggagacaggacttgaactcagtctagacagcaacgcaagggggcatctatgcgattgaccatggccggaagcacacctccatgcgatgcggtgagggg

SEQ ID NO: 261806 - DNA, 88 bp, Homo sapiens
  chr10:13451816-13451904
  hypo
attgtgctgttttatgctcccgtctctcaagccaggctcgtgcttgtgatatcggtagtcctagtgcgttagaggagaagggattggg

SEQ ID NO: 261807 - DNA, 172 bp, Homo sapiens
  chr10:13480544-13480716
  hypo
atatctgtatatattactttcggggggataatcaatttcacgcatttgaggttacaaaacataataggagttgatctgtgtaaattcaagttgctttgaatcgctagcgtttattaaattctcatggagtacaacctgcatctctttggtcgatctattgacacaatttctc

SEQ ID NO: 261808 - DNA, 35 bp, Homo sapiens
  chr10:13516622-13516657
  hypo
catcgctgttggactcgggtcgatacccgtcatcg

SEQ ID NO: 261809 - DNA, 97 bp, Homo sapiens
  chr10:13630041-13630138
  hypo
ttggcattctgcggacgtgccccagtgctcctgagagttcccttctgtcgccttacgaagggtttgtgcccaactgaaacatggaggaagggccgcc

SEQ ID NO: 261810 - DNA, 132 bp, Homo sapiens
  chr10:13688016-13688148
  hypo
cccctgcatggaccggggctaacagtaccctctacgactcccacaggtctctctttgtgtccagatggatggcgactgtgagtcagcaacgccagccaagacttcctcgcctttaccgtggcattggggcag

SEQ ID NO: 261811 - DNA, 170 bp, Homo sapiens; identical to SEQ ID NO: 213467
  chr10:13692405-13692575
  hypo

SEQ ID NO: 261812 - DNA, 93 bp, Homo sapiens; identical to SEQ ID NO: 213468
  chr10:13711293-13711386
  hypo

SEQ ID NO: 261813 - DNA, 37 bp, Homo sapiens
  chr10:13715561-13715598
  hypo
gcacacatgtgcatgcgtgcgcgcgcgcacacacaca

SEQ ID NO: 261814 - DNA, 78 bp, Homo sapiens
  chr10:13725168-13725246
  hypo
caacgcccgactaatagaagcctctggagccccttccacgtgcacggtggtgtgggagagacacgaacagcagacatg

SEQ ID NO: 261815 - DNA, 263 bp, Homo sapiens
  chr10:13735188-13735451
  hypo
aacatttccaaaccacggctgcctcccttcctctctgcttctttcaaacccactcctcctcctgccatttcagtaaatgacacccccctttttaagtcagtcagatccaggaccttggaactcctctgtccctcccaacatcaaaagacaaaatgacttggccaaggctggcggaagcggacgacggaaccagatctctgactcgcaatttcaaaaggcactgaatggagaaatcatgccctgcgacacgatggagagagtat

SEQ ID NO: 261816 - DNA, 85 bp, Homo sapiens
  chr10:13737448-13737533
  hypo
ggtttttataaggtatctgctccagtttctaccttcggtagtgacaatgtgtttgtttgcatttcccacacgtgtgtccaatgtt

SEQ ID NO: 261817 - DNA, 95 bp, Homo sapiens; identical to SEQ ID NO: 213470
  chr10:13739454-13739549
  hypo

SEQ ID NO: 261818 - DNA, 333 bp, Homo sapiens
  chr10:13769492-13769825
  hypo
ggtcatcctagcttccgagtttcgtctaggttgagggcgccatgttgggactgcatcagcttctctctctgcctggttctgcttcctttactttaccatttgttgttagtccagggcacaccccagtaaacttcctgcatgcgagttcatcttagactgcttcccagggaatcgtatgtacaacactcgggagtagagagtcactgaaacggccctagctctgagagacccctcctgaccagccatcacccctcccgctcttccttactctgatttattgtcttcgtagaatttaactctcaggtctatggccatactgccctgaatgcgcct

SEQ ID NO: 261819 - DNA, 32 bp, Homo sapiens
  chr10:13769885-13769917
  hypo
atttagtgctcgaacactattgctgtagcttt

SEQ ID NO: 261820 - DNA, 471 bp, Homo sapiens
  chr10:13771117-13771588
  hypo
gcctggtctctagacgcatggaaagcgttcaggtccactcagactgtgctgcgatctgaaagaatgataacatacgagaaggccctttggtcctacactgtgaatgagtaaggggcagctgcaaaatgctaagaatgctgagtgcattaagtgaagtgtttctcccaggtgtgcacagggtgtggcttccaaggggaatgtggatgctggaatgagggaggcagccacctaggccggtcaagtcagaggcccagcaaggagaaagcgagccaaggcaaacgccgacagaagagaacgataaatccgcggcgcactcggcagaacgtacaccgcaccgcataatttagcggggcaatgccgccgggagtccacgccaagttaatggaatatttcctgtaaatattattttcccttcctgtctcatcatctcatttcattcaaaaatctttactaatccgggggagtgaaagt

SEQ ID NO: 261821 - DNA, 56 bp, Homo sapiens
  chr10:13776212-13776268
  hypo
ccttctccatcctgaagccccgccaggtgttgcccgccctaccctcatcatgtcct

SEQ ID NO: 261822 - DNA, 138 bp, Homo sapiens
  chr10:14195996-14196134
  hypo
ctgctgtcacctcgccatcccctgcttggcctcttagctcttccagcgcctgagggacccattccctgtcttaaaccatctgtgtttgaaatacttgactggaaagtatctggcagtgacgcccgataggttaggcag

SEQ ID NO: 261823 - DNA, 353 bp, Homo sapiens
  chr10:14575212-14575565
  hypo
tgagagatgctttagactcacgcagcagcagcataggtaggcggagagcctgattcaagatgtattttaaaggtaaagtctctgggacttcctgaaggactggacacgaggcgtgaaaagcactgaggaatcaaggatgacttggaggtttccggcctgagcaaccagaaggctcaagttgccatgacgggaggctgaaagagcaagtggatctaggacgtgtcgagtctgagacgtctgatcgacatgaaagaggtgacattgagagggcaagtgcagccagcgctcaagcctgggtgactcgctctcctttacctgactgactcgctctcgtttacctgactgactggccc

SEQ ID NO: 261824 - DNA, 160 bp, Homo sapiens; identical to SEQ ID NO: 213474
  chr10:14626301-14626461
  hypo

SEQ ID NO: 261825 - DNA, 435 bp, Homo sapiens; identical to SEQ ID NO: 213475
  chr10:14816084-14816519
  hypo

SEQ ID NO: 261826 - DNA, 74 bp, Homo sapiens
  chr10:14818702-14818776
  hypo
actttctaggtctgcggaggccctgggcttgcatccgggctctgaggaccacctctcctcgctcagtgggtgtg

SEQ ID NO: 261827 - DNA, 36 bp, Homo sapiens; identical to SEQ ID NO: 213476
  chr10:14851282-14851318
  hypo

SEQ ID NO: 261828 - DNA, 34 bp, Homo sapiens
  chr10:14947696-14947730
  hypo
gtttcggctggacacggtagctgacgcctgtaat

SEQ ID NO: 261829 - DNA, 124 bp, Homo sapiens
  chr10:14966088-14966212
  hypo
gacacacatcaagtacgaagcagagaaagatgtttccacacaaggtactgagctgccgcaggctgtgtgctcacgctaacgggagtgcttgctctctctcactcgcgtgcgctctctctcaata

SEQ ID NO: 261830 - DNA, 36 bp, Homo sapiens; identical to SEQ ID NO: 213477
  chr10:14966552-14966588
  hypo

SEQ ID NO: 261831 - DNA, 167 bp, Homo sapiens
  chr10:14979023-14979190
  hypo
tcagtgaaagaagccggataagaaatgaacacatgttgtatgattccactcatatgaaatatccggaataggtgaacccatggagacagagagtccaatacagtagtggttgccgggggttggggaaggagagaatagggagggattgcgatcgctaaaggcttctt

SEQ ID NO: 261832 - DNA, 149 bp, Homo sapiens
  chr10:15000459-15000608
  hypo
gcttgtatttaacaacgagctcagaaaaattcctaaaaatttaattactgagtctccagagctctaatgagctggctccagcacacaattgctcctttctttcattcaacaatttgacaagtcctgatggctctacattcaaaacatgt

SEQ ID NO: 261833 - DNA, 81 bp, Homo sapiens
  chr10:15009625-15009706
  hypo
tttacaaattcagttcacccctgaacaacacagggactaggggcttcaatgcttcatgccgtcaaaaatttgtgtataact

SEQ ID NO: 261834 - DNA, 101 bp, Homo sapiens
  chr10:15022595-15022696
  hypo
atccgttctcttggcgcacccgactgacctggggtgtcccagcaaaagctcaacctactggagcaaagcgcagcctatgtctctggttggaaacctctgga

SEQ ID NO: 261835 - DNA, 120 bp, Homo sapiens
  chr10:15140512-15140632
  hypo
gccagccaacttatttcttttaatactgagatacctttctttactccatacttcctttggtaggcattgtttagatgtaggttaagaggtccggcccggcgcggtggctcacgcctgtag

SEQ ID NO: 261836 - DNA, 167 bp, Homo sapiens
  chr10:15154756-15154923
  hypo
ggagaaccaaacggcgtgaacaggaaggagtggcttaccgatttagccaggatgagcgcgtcgctcatgaggtccagcaggggcgtctctgtgtggatgttgtagaatgagtaggcggctttgaggctcttgtgagcagggtggtgcatcaccgtggaggggagcgt

SEQ ID NO: 261837 - DNA, 246 bp, Homo sapiens
  chr10:15174784-15175030
  hypo
aaaaaccgcatggacgagcttaaacatgtacctgtcataaatccgaatgtttgctgggatggcacttatgaacccgaccagttttttatttgaagacactctgaccccacagtgccactgcaggagccagcctggtggacgcagagccctgaggtcacggtagacaagaaaacaggcaccagttattgtccaagaacacaggaacagacgcaggagtccccaagtcagcagcgcctatccacgaca

SEQ ID NO: 261838 - DNA, 205 bp, Homo sapiens
  chr10:15254633-15254838
  hypo
atgtccctggtggcggatacgccgagtcctcggaaggacatctggacaccactttcagccacctccttgcaggggcgacatccgccaaagtcatcctttattccgagtaataactttaattcctttctaacatttacacggcaaacaggaatgcagtaaacgtccacgtccgtcccacggctgggctgccgttccgtttcctcca

SEQ ID NO: 261839 - DNA, 203 bp, Homo sapiens
  chr10:15255041-15255244
  hypo
tggctgctggctccgagggggcatccgcagtccgtctggtcgtctcctcctgcaggctgggcagctggccaccacttctccgactcgacccctccaacaagcatcgcagggcactgtcctcgggggtacagaccgtggtcccacattcgctaccactctgttccacgtcatccaggtacacgagctgcgtgtaggccgtgctg

SEQ ID NO: 261840 - DNA, 35 bp, Homo sapiens
  chr10:15261860-15261895
  hypo
gagccaccgcgcccggctaagggaaacacattact

SEQ ID NO: 261841 - DNA, 291 bp, Homo sapiens
  chr10:15264100-15264391
  hypo
ccgcgcacccactccgacctatcagcatggagatgtcccggcatacacaggcctcctgtgcagctcacctctctcctataatcatcctcacctgaaatggctacgtgggcgaccctgtggctctaaggcctaaatagaccagctgtgcaccaaatgcaggcatgcatcatttaacagggatacattctgaaaatgcattgttcatcgctgtgcaaacatcatagagcgtccttatgcaaacctagatggtactgcctcctacacacctgggccacacggtctaacccattg

SEQ ID NO: 261842 - DNA, 83 bp, Homo sapiens
  chr10:15273618-15273701
  hypo
tcaggcagagttgccacacccgcaaaatgccctaatgccatttcctaccatgtggctgtagcgggttcactaggtggccagtg

SEQ ID NO: 261843 - DNA, 60 bp, Homo sapiens; identical to SEQ ID NO: 213478
  chr10:15345843-15345903
  hypo

SEQ ID NO: 261844 - DNA, 40 bp, Homo sapiens
  chr10:15355003-15355043
  hypo
ttattctctacttttgagcgagatgttcttgatgaagcaa

SEQ ID NO: 261845 - DNA, 285 bp, Homo sapiens
  chr10:15356716-15357001
  hypo
tttcatcccaactccaaagacgccaaccacgaaatggcacaggttcctggcgtgcccaggtgggaagttggggagtatccgctgccacattcctgtcacttctcacgagcccaggaatgacttccaagccagcacccctgccacctcggcctggcctgcagccgcggggaggaggctggttggcgctgtctgggccctgtctctccggttcctccgggatgggtggctgagtttcagctgagcctagcctttcctcatatcagaatggtacgatctcagactcca

SEQ ID NO: 261846 - DNA, 335 bp, Homo sapiens
  chr10:15484068-15484403
  hypo
atcccgtctcaaaaataaaacgaaacaaaacaaaattctggcttgggaactttccagctcggcctctacttacctttctagcgtcatggctccacactgcgtttccttatctgggaatcccagccttactgaactttcagcttctgcagccagccacgctctttctggcctccggctttgctgtgtgctgtttctccagcctggcgatttgctctgtccccagcccctgcactcctttacctgatctgctccgattgatcctgcagtcctccgcggctgagtcacttccttctgcagggaagccgtcctgggttctcctccgaggactgtctcag

SEQ ID NO: 261847 - DNA, 171 bp, Homo sapiens
  chr10:15828305-15828476
  hypo
cgaactgttctctccgtatcattatgtgtatagactggtgtctgcgtcatcttctgctgccctccccatcaaggcactgcgttaccgtattcgaacacacattccctctgtctgggaaggtttccatgtaacggtgttttctcagtctcatatctgcgcattaggacattg

SEQ ID NO: 261848 - DNA, 196 bp, Homo sapiens
  chr10:16715603-16715799
  hypo
tcatgcctgactggcgctggatgtccctgtgttcaacaggtcaggctccatctcaaatgacgcaggtggaaggatgagcaacggcacagcctcctgcagcacacagatgcttctcaatggggctgatcaggagacctctggcacccaaagactgcgtgatgactgagggactctttatgctcgcttctgcctaggt

SEQ ID NO: 261849 - DNA, 342 bp, Homo sapiens
  chr10:16716463-16716805
  hypo
gaaacaacaacagctctcatcgaatattcagagagtccactaggtgccaggcaatgtctgaagctcctgaggacagagcagtgtacaaaactacgtctcccgctcttgcaggagactccattctaagcataagagagacgataaaattggaggcaggagtgggtggtgggcgatggggtccactttagatacagtgataatggaaaaaactttgctgagatggcatttgaactgaaacttgaatgagataagacagcaagcctaaggtcatttagaaactgaatataagtgtaaagccggccagaagctgtaatcccagcactgtgggaggccgaggtgggc

SEQ ID NO: 261850 - DNA, 322 bp, Homo sapiens; identical to SEQ ID NO: 213483
  chr10:16769206-16769528
  hypo

SEQ ID NO: 261851 - DNA, 108 bp, Homo sapiens
  chr10:16806477-16806585
  hypo
attcttcagttctgcgatgttcggtggcaccactatggaaacaaaaatgctgagtgtgaatctgggaatggaactcctagcaagggatggcagcggcacattttgttt

SEQ ID NO: 261852 - DNA, 47 bp, Homo sapiens
  chr10:16866978-16867025
  hypo
tgtcccaagttaatcggaatgcggatggacgccgtgcataatcagca

SEQ ID NO: 261853 - DNA, 32 bp, Homo sapiens
  chr10:16915427-16915459
  hypo
gtatcctttgaggctgggtgcggtggctcatg

SEQ ID NO: 261854 - DNA, 50 bp, Homo sapiens
  chr10:16916365-16916415
  hypo
tacgtacttgagctcgatcaccttgtcgtcactaacggtgatggtataca

SEQ ID NO: 261855 - DNA, 97 bp, Homo sapiens
  chr10:16955825-16955922
  hypo
ttgcaggacggatgcgtggccagcctcaggttgttaaacattagggtgatccgccttccctccggggcagtgattctccactcgcagatccggccat

SEQ ID NO: 261856 - DNA, 62 bp, Homo sapiens
  chr10:16990540-16990602
  hypo
tctcagcgtcagggcgctgctgaaggatgtgataggatggggcatgtcggtgccacagtaac

SEQ ID NO: 261857 - DNA, 149 bp, Homo sapiens; identical to SEQ ID NO: 213484
  chr10:17157465-17157614
  hypo

SEQ ID NO: 261858 - DNA, 125 bp, Homo sapiens
  chr10:17157644-17157769
  hypo
gtgcctgtctcttaatatcaatgagaaaaataattcaaattacaaatcaacgatgttaacttggaatcgtcagccagcaatgcaaatttactgactggagtctcgggagaaaatcactctgctgt

SEQ ID NO: 261859 - DNA, 32 bp, Homo sapiens
  chr10:17331810-17331842
  hypo
ataggcgtgaaccaccgcgcccagccggttta

SEQ ID NO: 261860 - DNA, 387 bp, Homo sapiens
  chr10:17347073-17347460
  hypo
cctatgatagcggtcgtaatattcagagggagatagggtgatagtacccctaatgtcgcaggggatgtgtacaccccccgtgataccggttgcagtatccaaggggggacagaatgatagtaccccccatatcacatgtggcgttttcactcccctgtgattccggatattatttccaggaagggacaggatgatagtgaccccaatgtcgcagagagtttgtactcccctttatgatactggtcaaaaaacccagcggggggaagattcatagtacccccgatatcgcagggcatgtatacacccccctatgatagcggtcgtaatatccaggaagagaaaggatgatagtacccctatgtcgcagggggtgtgtacactcccctg

SEQ ID NO: 261861 - DNA, 39 bp, Homo sapiens
  chr10:17378259-17378298
  hypo
tcttaaattatatattttaaatatcgtgtaaaatttcca

SEQ ID NO: 261862 - DNA, 84 bp, Homo sapiens
  chr10:17429166-17429250
  hypo
ggcccagtggaagacgcacagcaccgtggattccccttgcaagcttaaggcccgctagttggaatttaaggaaaagaaaacaat

SEQ ID NO: 261863 - DNA, 113 bp, Homo sapiens
  chr10:17507084-17507197
  hypo
ctcatctcattttgtactcccgccacattcgccctcccgcagatgagctagtgtgacatactctctcttgcttctggacttttgcacgtgccgtgttttctccaagaccctcc

SEQ ID NO: 261864 - DNA, 81 bp, Homo sapiens; identical to SEQ ID NO: 213489
  chr10:17509666-17509747
  hypo

SEQ ID NO: 261865 - DNA, 44 bp, Homo sapiens
  chr10:17512861-17512905
  hypo
cataaaactaagatcaaggccgggtgcggtggctcacgcctgta

SEQ ID NO: 261866 - DNA, 38 bp, Homo sapiens
  chr10:17608667-17608705
  hypo
ccgcacccggcccagtcgcactttcttgatgcattttt

SEQ ID NO: 261867 - DNA, 190 bp, Homo sapiens
  chr10:18579867-18580057
  hypo
cagccttgctcttccgtctggggcttctaatttggtcccctttggggcttctatttttcttaccttataaacaaatgtccctggttgttaggataccagcctttcatggagcggtttcatcaacaacaggtgcgcagtgagcttctggaactgcagggagagcgataacctacgtcgtgaggctgcgcag

SEQ ID NO: 261868 - DNA, 204 bp, Homo sapiens
  chr10:18914961-18915165
  hypo
aaagtaacgcagtacgtaagagtcacactttgggaaagggcagggggtgcgggagatctgctaagtgactgtactcaccaataaagacattaataaagataagaaatgagaaataaactgtgccataaggaccgaaagcaaacactgcatccatgtgaattatacttgggaaataacaatgttacaaagcttgacaatgtttaa

SEQ ID NO: 261869 - DNA, 146 bp, Homo sapiens
  chr10:20538375-20538521
  hypo
gcttcaggggataatcgtttccttgccattttcagcttccacatgccgcatgtgttccttggctcatggtttcttctcatatcattccaacttctgttcccaccgtcacatctcctaccactaacgttgaccctccagcctccttt

SEQ ID NO: 261870 - DNA, 34 bp, Homo sapiens
  chr10:21606054-21606088
  hypo
gagtgcattttcaggcgcccggcctctgttgtgt

SEQ ID NO: 261871 - DNA, 38 bp, Homo sapiens
  chr10:21623890-21623928
  hypo
ttacaggcgtgagccactgcacccggcctgcattttta

SEQ ID NO: 261872 - DNA, 465 bp, Homo sapiens; identical to SEQ ID NO: 213492
  chr10:21797635-21798100
  hypo

SEQ ID NO: 261873 - DNA, 168 bp, Homo sapiens; identical to SEQ ID NO: 213493
  chr10:21915224-21915392
  hypo

SEQ ID NO: 261874 - DNA, 82 bp, Homo sapiens
  chr10:21983925-21984007
  hypo
acttcgccttctgccgcatctctcactttctcttctgccgcatctttcactgactttctaccttcttttttttttttttttt

SEQ ID NO: 261875 - DNA, 60 bp, Homo sapiens
  chr10:22004067-22004127
  hypo
cataatttccattgcgtgtgttgttaggatatatatacgcttttccggcaagcacaatgt

SEQ ID NO: 261876 - DNA, 136 bp, Homo sapiens
  chr10:22032716-22032852
  hypo
tgtaaagcactgtgcggtacaaacccacctcgggctcagagatcttggatcatcctcagatgagacggagagagaagagggaaacagccttggtggagataaaaggaaaacaaagtccttttagatgagataatta

SEQ ID NO: 261877 - DNA, 238 bp, Homo sapiens
  chr10:22033212-22033450
  hypo
tctcttctcccaaggcgaaggattaccttccctctagaatgacaggtgactcatccatcaactcctgcgagtttaattcctcaacatgtgtcctttgccttagctgcatgtttgtaagtgtccgcttctgtagctctctggcttcctggaggctccgggacgtcgacctcgtcatcctgggttgctgccctgcagggccctggcagctgctggttcacatgtgcgccttgtgctctgg

SEQ ID NO: 261878 - DNA, 301 bp, Homo sapiens
  chr10:22039219-22039520
  hypo
tggctcccaccccacgtctcaaactcaggagtgaggttacaaagggagtcccccgactagagggaaacactatgcgtgtttcagcccaatatttggaagtcggatttgttttagaaaataccaacatctgtttttaccaaatgactaaccttgtctagttgcagtcacgcaagccgcacgccaaagtctcgcctctcctcagcctccacagccaactcctggtcttaaaggcctgagcccaggtgctggtccgtggctgggagcgggaggcctgcagcacaggtgccggtgcacgtagttg

SEQ ID NO: 261879 - DNA, 177 bp, Homo sapiens
  chr10:22040719-22040896
  hypo
aggcattctaaggccgtgcacggggagctcttgcacacctggggaagaacgtggcttggctgcacatcccaaacattcctgaccctctgtgggcgggggggggggggggggcgggggcagaacccccattaaggataagtaagacaacaggtgagtgtgcttcgaaaactggcgcta

SEQ ID NO: 261880 - DNA, 312 bp, Homo sapiens; identical to SEQ ID NO: 213494
  chr10:22042721-22043033
  hypo

SEQ ID NO: 261881 - DNA, 404 bp, Homo sapiens
  chr10:22047231-22047635
  hypo
tgttcctggttcctcgactaacaatctagctacagggaaagaagcctcaagagacactgtgttaggatcacaccctggggctctctgcagcgcctcatggccagatcacaggaaagaggccgcccaagcccggtgggtgggctctccacagggcactcccgccccctcctcccatctgaggaccatctcagaaatatctgagcaggcaccaagagctaccagcagggagaaaggccaactacaaacggccacggccgtggaaagtaagccgaaccctagctgtcgcctggcactgaccacatacggagatggcctcagggcctctggacagccaccaggtgtacctgctgagtccaaagttattcacatggcagaatcgaagatgatcacggtaataccatcta

SEQ ID NO: 261882 - DNA, 163 bp, Homo sapiens
  chr10:22048281-22048444
  hypo
aaagtccttctgccgcttggctctggacttctcctctggctccggcttcgctgtagcctccagcagcctggctggcttccgcctccgaggccgggcatcagtggccccggtctcctgctcaccggagtctccctcctgctcctcctccgctgccaccccctct

SEQ ID NO: 261883 - DNA, 131 bp, Homo sapiens
  chr10:22099945-22100076
  hypo
taacatacaatcttcgagggcaagattgaaactgcaccctactttccccaggaatgcaggtatgacatcacactgatgacctcctccgctgaggagattcctttgatacactcactcgggacatacaaatg

SEQ ID NO: 261884 - DNA, 36 bp, Homo sapiens
  chr10:22477766-22477802
  hypo
ttaaatggtacccccccccccgcaaaaaaaaagact

SEQ ID NO: 261885 - DNA, 36 bp, Homo sapiens
  chr10:22478102-22478138
  hypo
aaaaaaaagaaagacgtatgaacataggattcagga

SEQ ID NO: 261886 - DNA, 37 bp, Homo sapiens
  chr10:22567378-22567415
  hypo
tgttcgagcgggcagcgggagtgagcataggggcaca

SEQ ID NO: 261887 - DNA, 257 bp, Homo sapiens
  chr10:22833844-22834101
  hypo
agtctgggtgtttagggcaccgcacactcctccccagtgacacggggcctcgctgcacattcattttgttggagtatttgagcgacttctctctttcccaagcaaggcagccccaaacggggctctaaggttttggctttcactgcattcccgaatcccggcaggcagagggctcgggaaagtattcggcacttgttggacaagtgaatgggatgcttgttacttcttccctatccgtcccaactctccctaattct

SEQ ID NO: 261888 - DNA, 291 bp, Homo sapiens
  chr10:22849147-22849438
  hypo
aacccccctttaaccgatgatccgcccacagtggaaaaagaggcacttcttagctgagcggcaaataaagatttccagaaggatacgctgctgtgcttttgtgtcacgtttggggagcccgccgccctggccacctcacttcaatggcagcccagatgaccagataggggtagtaattaattataatttgttacaatttaaagaccacaaaagaaatgctgaaaactggtttcgaaaagcatttttagacgtaagggtattaatgattaatcctctcgaaccctcagttgg

SEQ ID NO: 261889 - DNA, 135 bp, Homo sapiens
  chr10:22849866-22850001
  hypo
cctgctgagtcgctcgctagcaggcagcatgctaagactgtcatttgtaaaaagcagcccgctcagctataattactaatttgatgtcacactggaattgcagcgcagctgtgaaaagatcgaccaccagggagg

SEQ ID NO: 261890 - DNA, 282 bp, Homo sapiens
  chr10:22869773-22870055
  hypo
gttgtccctttctgcgatggtaatgtctcgctttacagactcgacaggtgcagtgctctaatgcggcccgggaggctcctttgtagaatggatgagtctgccaactcctgtctgcagacactttgaagtcccaaggcagatgaggctgcaaatggaccaaacactgaacaatgctggccgtcccgtgtgtggctcagaaattaagagcacacaccagataagtgggcttattctcctgtgagagcacaggcagcatgaacacaataccgaagagtgttcctt

SEQ ID NO: 261891 - DNA, 103 bp, Homo sapiens
  chr10:22883124-22883227
  hypo
cacgtaaagtctagcgtattaagtacattataattacagacttaccggcactcatgcctttcccattatattctctacacctctagttcgattaaaatgggaa

SEQ ID NO: 261892 - DNA, 235 bp, Homo sapiens
  chr10:22922576-22922811
  hypo
gagtccttctcacccggaccgtcattccttctcgccacacccagagctgtctgcaatatgttccaaaaatgcttcacacaactggtcaccaaggaaacaataaatgctaaacactcgcatgtagttttgttttctcggatctttgccccagtatggaggcaactgggcataagcaagcgggaggccaagcaagcgaattcacaggtagaaaagtgagtgtcggcttctcaaggca

SEQ ID NO: 261893 - DNA, 161 bp, Homo sapiens
  chr10:23294127-23294288
  hypo
ctagactcgtctcaaaaaaaaaaaaaaaaaaaaaaccaaaccaaggggggaaaacaaacaagaaaactgacgggaaaagccgaaaaacgatcgcagaacacttaccaggaaaaccttgccatagatcagataaaattgtgacaaaacgtgtttggtcatga

SEQ ID NO: 261894 - DNA, 77 bp, Homo sapiens
  chr10:24839342-24839419
  hypo
atcattgggaggattaaatacgatgtatacaaaattctgaagacagagtcaaacatacggagcactcaaaagttaat

SEQ ID NO: 261895 - DNA, 223 bp, Homo sapiens
  chr10:24841855-24842078
  hypo
ttcacattcagagacgagtcgtaccggggactcgaacgctgtgaatggctggtaatgtgacttttcccaaatagcgaatgacttggttgaaagctttgaacaaagcagaatacgactctccctcactttacacgttcctgaaaaattttattgcacattttgaggctgcaaaagtgtttaaatataaaataaaattggcctctacactcggatcattataagc

SEQ ID NO: 261896 - DNA, 264 bp, Homo sapiens; identical to SEQ ID NO: 213499
  chr10:24863017-24863281
  hypo

SEQ ID NO: 261897 - DNA, 141 bp, Homo sapiens
  chr10:24908408-24908549
  hypo
tgggatggaagccaaagaatcgccaggcggactggtactcgaggcttttctttcctccattctttttatgtggacctctcgacgtgcatcattgggcagccagcaggtagtgtctgacccggtctcctggtcatttactgc

SEQ ID NO: 261898 - DNA, 37 bp, Homo sapiens
  chr10:24966120-24966157
  hypo
cctaagcgacagagcgagactccgactctaaataaat

SEQ ID NO: 261899 - DNA, 148 bp, Homo sapiens
  chr10:24988567-24988715
  hypo
ttaaaagctgatgactagaacactacattatatccttcggtaaagagaaggcatcaagcacccagactttggagtctcactccctgggcctgcgtgctgctctgcaccttcttagctatgtggccccgacaagagacttaagcccttg

SEQ ID NO: 261900 - DNA, 33 bp, Homo sapiens; identical to SEQ ID NO: 213503
  chr10:25097337-25097370
  hypo

SEQ ID NO: 261901 - DNA, 138 bp, Homo sapiens
  chr10:26638400-26638538
  hypo
aaatattgggggcaggttcccccaatactggcatctataggaaatgtatatgagggatggaagagacgagaggtggggagaccagaaataacaaacagttcaggagagggatggaaaaggctgcggtgagaacagcgg

SEQ ID NO: 261902 - DNA, 33 bp, Homo sapiens
  chr10:26819343-26819376
  hypo
ggtatggtggctcacgcatgtaatcgcagcact

SEQ ID NO: 261903 - DNA, 157 bp, Homo sapiens
  chr10:26822792-26822949
  hypo
tgctctctcaacattttagacgtggtaggaagtgtgagatttggagtcagggacccgttacaggaggcggctctgcctagcactcttcatgtgctcatgggacagtccccgcccccccgagaacctgacagattccgaattgtattgaattatcaca

SEQ ID NO: 261904 - DNA, 289 bp, Homo sapiens
  chr10:26868625-26868914
  hypo
ccccaggcagggcccgcacagggcttctgcggagccttcctgcggctctgacatctatgagtgggcagccagcaaaggcgaaggccctagcacagaggagaagaggcgcccggaacacgctgtcccccaatgccagccccaagcagggccagctgagggtgcggtgtttggagcctttctgagatccacgaggtggcggtgggagtagcgccagactccactgctttggagcctgcccagtctgattcaggagccttgactagcagcacattggcgacccgaagacgcc

SEQ ID NO: 261905 - DNA, 36 bp, Homo sapiens
  chr10:27020722-27020758
  hypo
ttatttatttgtttatttatcggagtctcactctgt

SEQ ID NO: 261906 - DNA, 275 bp, Homo sapiens; identical to SEQ ID NO: 213505
  chr10:27020878-27021153
  hypo

SEQ ID NO: 261907 - DNA, 89 bp, Homo sapiens; identical to SEQ ID NO: 213506
  chr10:27089296-27089385
  hypo

SEQ ID NO: 261908 - DNA, 36 bp, Homo sapiens; identical to SEQ ID NO: 213507
  chr10:27096989-27097025
  hypo

SEQ ID NO: 261909 - DNA, 77 bp, Homo sapiens; identical to SEQ ID NO: 213508
  chr10:27144551-27144628
  hypo

SEQ ID NO: 261910 - DNA, 42 bp, Homo sapiens
  chr10:27233078-27233120
  hypo
tgtgctggggcctgcgcctttgctggccgcccactcatagat

SEQ ID NO: 261911 - DNA, 281 bp, Homo sapiens
  chr10:27233410-27233691
  hypo
ttccccccacgcgccgcccttccatttgtgacgtgctgtgcgagtccaggcactggctcacaaggccccgcccccacagcagcccgccccacctttcatttattagtacccggtagcaactttcaggtttccttactgtgaattatgaatatgaattatgcggaaattactgtataccaatgtacctcgcgcactatctgacattcaaagacccaccttgccccatcgcctctgatttttttggaaactagaaaaaagacaaggttcggcagctgttttca

SEQ ID NO: 261912 - DNA, 102 bp, Homo sapiens; identical to SEQ ID NO: 213510
  chr10:27478219-27478321
  hypo

SEQ ID NO: 261913 - DNA, 82 bp, Homo sapiens
  chr10:27825968-27826050
  hypo
tccagtagagagagcgtttggtccttcggtgaatgagaagggatgggactccaggaacaaaagaaggcgatggcttggatag

SEQ ID NO: 261914 - DNA, 32 bp, Homo sapiens
  chr10:27846686-27846718
  hypo
gagagacggcggagcgtggtggctcacccctg

SEQ ID NO: 261915 - DNA, 31 bp, Homo sapiens; identical to SEQ ID NO: 213511
  chr10:27846958-27846989
  hypo

SEQ ID NO: 261916 - DNA, 60 bp, Homo sapiens; identical to SEQ ID NO: 213512
  chr10:27978843-27978903
  hypo

SEQ ID NO: 261917 - DNA, 74 bp, Homo sapiens
  chr10:27990194-27990268
  hypo
ttccctctaaagaactgaagcggtgcacatcacggcacgcagcgcattctcacgtgattttatctcattatgtt

SEQ ID NO: 261918 - DNA, 43 bp, Homo sapiens
  chr10:28551685-28551728
  hypo
tgctaaatctcacatttagccggacgcagtggctcacgcctgt

SEQ ID NO: 261919 - DNA, 42 bp, Homo sapiens
  chr10:28558917-28558959
  hypo
cttaaaaacagcaacatggccgcagccagtcccagaatcccc

SEQ ID NO: 261920 - DNA, 59 bp, Homo sapiens; identical to SEQ ID NO: 213513
  chr10:28824511-28824570
  hypo

SEQ ID NO: 261921 - DNA, 87 bp, Homo sapiens
  chr10:28833066-28833153
  hypo
ctcccaaagtgctgggattataggcatgagtcactgagcccacttctttccagattttttgtaaaattgtttcgcattgtgttccct

SEQ ID NO: 261922 - DNA, 172 bp, Homo sapiens
  chr10:29186603-29186775
  hypo
ttgctgtgtgcaggcctcagcgttccgtatcgttttgttcccttcattccactagagcggctccaagtcatgacaaccggtggggataattgacgtaaaagtgctcaaccccgagtggccgagcttcccccagacaattgctggattgttcggggacctgttgatgcaacaa

SEQ ID NO: 261923 - DNA, 79 bp, Homo sapiens
  chr10:29213404-29213483
  hypo
actgcgcccggccctattttctatgtaatttgaaaggcgctgtagaatttgatgagtcgggaagcagaagcaactgtgg

SEQ ID NO: 261924 - DNA, 76 bp, Homo sapiens
  chr10:29296565-29296641
  hypo
cagcgtgaactaaggcaagcgcgtacggtgcgaggattcaaggggcgaggagtgcggttaaataacctggctgcag

SEQ ID NO: 261925 - DNA, 151 bp, Homo sapiens
  chr10:29300090-29300241
  hypo
acaccgtgtagcctaggcgtggagtaggctgcgccatccaggtttacagacgtgcactttatgatgttcccacaatgacaaaatcacctaatgatgacgttctcagaatgtgtctgtcgttaagcaacacgtgtatatgtatttaaatttt

SEQ ID NO: 261926 - DNA, 228 bp, Homo sapiens; identical to SEQ ID NO: 213517
  chr10:29311385-29311613
  hypo

SEQ ID NO: 261927 - DNA, 367 bp, Homo sapiens
  chr10:29518368-29518735
  hypo
ggagaggaggctctcggagatcggctgacggcgtagggagaaggctctctggtcggctgaccgcctggagaggaggctgtgggaggttggctgatcccctggggaggaggctctggcaggtcggccgaccatgttgggaggaggctcttggaggtcagctgactgcatggggaggaggctgtgggaggtcggctgaccatgtggggaggaggctgtgggggttcggctgacggcttggggaggagactctgggaggtcagctaaccacaggcacctgctctgcgtctcagcgcatgtactgctgcctattgcggccgtggagctgttcccagttctctccggtactacgccacgtcttcccaagttt

SEQ ID NO: 261928 - DNA, 117 bp, Homo sapiens
  chr10:29581546-29581663
  hypo
tcgcgtggtgcagacgcggaaagctgaaggagaacaaccactgccatgtcgcctgctcaggtgaggctctgactttccagtgatgccatcctcaggactaggcgagaaagccgacaa

SEQ ID NO: 261929 - DNA, 80 bp, Homo sapiens
  chr10:29666997-29667077
  hypo
cggtaaacatacgcgtgtggtgtccttttcatataatgacttctaggaaacgcagtttcgatgaacactccaacctacat

SEQ ID NO: 261930 - DNA, 107 bp, Homo sapiens
  chr10:29769273-29769380
  hypo
ggttgttaggaattcggccttacttcttttcatctctgtagtttactaggtggctctcaaaggcgcatgactgcagtgccccactgcacggacgcagcagagggcat

SEQ ID NO: 261931 - DNA, 45 bp, Homo sapiens
  chr10:29777545-29777590
  hypo
catcagcctcttgtagggcacggcgctgttgttagagttctgttc

SEQ ID NO: 261932 - DNA, 171 bp, Homo sapiens
  chr10:29805522-29805693
  hypo
tcaaacaactgtcagcgcttctaacaactgccaagccaaagtgctgtttgcaggactgtgatgctgggagcctgggcagtggctaggcctgggctgtgtgaacccagagagaggcacgacactggcccgctcacccaacgcctggcccagggccaccgtgacaggtgcctg

SEQ ID NO: 261933 - DNA, 145 bp, Homo sapiens
  chr10:29815841-29815986
  hypo
tcggcacctttgcaccgggtgccgcatgcatctgtatctgtccagtacctggcaggctgcacagcgctcctagctacagtggggctaggaagtctcgccattacagggtgggtgcccccagaacacgaagcggggataggttcac

SEQ ID NO: 261934 - DNA, 158 bp, Homo sapiens
  chr10:29821666-29821824
  hypo
gaccttgcgctttttcgaggcttccctgttgtgaccagttggtttggcgtcttgggacacaggctcactttgaatgtagagaaccatctcgctcctgcctgtcctctcagtgggctggtgcggagcttgagggggttgtgccacgttttccagttcct

SEQ ID NO: 261935 - DNA, 39 bp, Homo sapiens
  chr10:29840087-29840126
  hypo
catagggtgagtcaccgtggacaccggaggtttctgtgc

SEQ ID NO: 261936 - DNA, 35 bp, Homo sapiens
  chr10:29857037-29857072
  hypo
ccattaaaaaagtgacgtttcgtgagtcagttaag

SEQ ID NO: 261937 - DNA, 207 bp, Homo sapiens
  chr10:29884472-29884679
  hypo
attcatttcactaatcgttttcttaatggagaaagaactaaaaatgtaaatatgaaacaaaatagcttttgggtaggcaaacccttacgactcctctttcaagacaaaaatacatatggcccaggggaaagtctctagcatcagtgcctctcttctgcagtgagccaggcccatatcgtccaagcaggcaacgcggtcttcggtgcc

SEQ ID NO: 261938 - DNA, 43 bp, Homo sapiens
  chr10:30270177-30270220
  hypo
aaaaaaggaattagtaattttatgctgtcgctgtcgaaggact

SEQ ID NO: 261939 - DNA, 47 bp, Homo sapiens
  chr10:30280769-30280816
  hypo
cctaaaattaaccatcgcactaacgctttatgcggtcaatattttaa

SEQ ID NO: 261940 - DNA, 119 bp, Homo sapiens
  chr10:30282371-30282490
  hypo
aagatgtggacccactggagcgagttcagagaagcgcagcagccccagggaggcgaggtcgcgggctgatttacgaggcaaggctggagggggatcacgagagcagaagacaccctggg

SEQ ID NO: 261941 - DNA, 240 bp, Homo sapiens
  chr10:30454426-30454666
  hypo
caaggttcaaacactggaagcgtccaaacatcaaaccgcactaagaggacatctgtatgattatccattcaagaaatcgggccattgtactcagcgaggaacaatccgcgatggtgtgtggtgcgtggcagtggtgcactctgcttctggccagtgaggtcatggtggctttgaccatgagatagggatggcgtgggggcagggggcatccatggatgcgtcacaaataactcagtcaga

SEQ ID NO: 261942 - DNA, 96 bp, Homo sapiens
  chr10:30496158-30496254
  hypo
aggtcgcccttaaacgagtattaattcaaggcgcaggtaagaaacatggagaagagcagcgcaaagcacgtgtgaggcaaacgctacggcagcacg

SEQ ID NO: 261943 - DNA, 34 bp, Homo sapiens
  chr10:30692599-30692633
  hypo
taggcgcagtgcacgcagcgctactccaagggga

SEQ ID NO: 261944 - DNA, 178 bp, Homo sapiens
  chr10:30736711-30736889
  hypo
tcatcactccccaaaatggacgttaccaaatagattccgatgttctcctgatcccctggaagctgacttacaggaatattggttctgattttattcctcggggcgcctttggaaaggtatacttggcacaagatataaagacgaagaaaagaatggcgtgtaaactggtatgtgtttt

SEQ ID NO: 261945 - DNA, 81 bp, Homo sapiens
  chr10:30798127-30798208
  hypo
attttctctagagcacggttcatcttctcagaccttaagtttattaccagagtatgaaacgctggaacagtcatccataca

SEQ ID NO: 261946 - DNA, 34 bp, Homo sapiens; identical to SEQ ID NO: 213520
  chr10:30981747-30981781
  hypo

SEQ ID NO: 261947 - DNA, 287 bp, Homo sapiens; identical to SEQ ID NO: 213521
  chr10:31108014-31108301
  hypo

SEQ ID NO: 261948 - DNA, 84 bp, Homo sapiens
  chr10:31121497-31121581
  hypo
caatcggcaactgtcgctgggccccatgcacggctcacctgcctagagaggcactctctgcgagaaatccgtcctgtgctaact

SEQ ID NO: 261949 - DNA, 106 bp, Homo sapiens
  chr10:31134747-31134853
  hypo
gcatctgtcccaggcgagctaactcgtctttggttaccacagggacaggagcaatcacgtggaagagtcacgtaagagcgcgtgaagggcacgggaacaccctcgg

SEQ ID NO: 261950 - DNA, 42 bp, Homo sapiens
  chr10:31389890-31389932
  hypo
attttgccaacaaccttgggcgagtcagtccacctatctggg

SEQ ID NO: 261951 - DNA, 106 bp, Homo sapiens
  chr10:31810654-31810760
  hypo
aaccccataaatatcgctatacctacagtcactgcccagttacccacaatcgtggccattgctgaccagaacagtgttccatgcttaagagcgctagctgccaata

SEQ ID NO: 261952 - DNA, 59 bp, Homo sapiens
  chr10:31892881-31892940
  hypo
catgctgcaaattcccgtggccagcacccgaggcctgctggctccgatctgggccacgt

SEQ ID NO: 261953 - DNA, 186 bp, Homo sapiens
  chr10:32038297-32038483
  hypo
aggcagcaggtgggcgggctgtggcctacagcccctctgctccccggggccgtgccaggccaggcctgaggatgccggctgtcaacagtcaccatggtgacctcatagccagcagctgctctccccactgcggtgaaggtgtctgaatggcttctgaggcgggtccaagggcggtgggcagtccca

SEQ ID NO: 261954 - DNA, 33 bp, Homo sapiens
  chr10:32080305-32080338
  hypo
caggccgggtgcggcggctgatgcctgtaatcc

SEQ ID NO: 261955 - DNA, 45 bp, Homo sapiens
  chr10:32171069-32171114
  hypo
ctgacctcgtgatccgcccgcctcggcctcccaaagtgctagatg

SEQ ID NO: 261956 - DNA, 155 bp, Homo sapiens; identical to SEQ ID NO: 213524
  chr10:32205149-32205304
  hypo

SEQ ID NO: 261957 - DNA, 36 bp, Homo sapiens; identical to SEQ ID NO: 213525
  chr10:32333609-32333645
  hypo

SEQ ID NO: 261958 - DNA, 61 bp, Homo sapiens
  chr10:32499020-32499081
  hypo
caatgcaaattctccagtcccgcctcagacctactgaagcggacacactgtgggtgctgcc

SEQ ID NO: 261959 - DNA, 33 bp, Homo sapiens
  chr10:32587053-32587086
  hypo
ctggtacaaaccgtggtatttaaagtctagtaa

SEQ ID NO: 261960 - DNA, 89 bp, Homo sapiens
  chr10:33233314-33233403
  hypo
ggtctgtaaaggggcgtctacgcggcagcagccgtgatcatgggggccctgggctaggcaacagcactagttgtcgcgcgtcaccaaac

SEQ ID NO: 261961 - DNA, 40 bp, Homo sapiens; identical to SEQ ID NO: 213526
  chr10:33293520-33293560
  hypo

SEQ ID NO: 261962 - DNA, 104 bp, Homo sapiens
  chr10:33432805-33432909
  hypo
ccctctggagtgaagcgcagagatccaggctgctgacttatgtttcttccttccctcttgtctttcatgagtgctgcccttgtcactgaggtgttgaggaggag

SEQ ID NO: 261963 - DNA, 43 bp, Homo sapiens; identical to SEQ ID NO: 213527
  chr10:34063092-34063135
  hypo

SEQ ID NO: 261964 - DNA, 47 bp, Homo sapiens
  chr10:34151694-34151741
  hypo
aacagcagttattcattctccgtcccgcaatctgccttggtggaacc

SEQ ID NO: 261965 - DNA, 182 bp, Homo sapiens; identical to SEQ ID NO: 213528
  chr10:34276837-34277019
  hypo

SEQ ID NO: 261966 - DNA, 171 bp, Homo sapiens
  chr10:34333800-34333971
  hypo
gtgaacttgggatatacaaccgagacacactcgggatccaggccaagctgtcaagcagaggagagccgtccatcaggcatcactgcaggatcacttttcccagcgacaactacctcattctgagcacagaagcatccgtgctaaacaaccgatcaggctctcagttctttc

SEQ ID NO: 261967 - DNA, 76 bp, Homo sapiens
  chr10:34345647-34345723
  hypo
gctgtaatcgtgccactgcactccagccttggtgacaagtataagatccgatctcgatcaaaattaacaataaaaa

SEQ ID NO: 261968 - DNA, 160 bp, Homo sapiens
  chr10:34472412-34472572
  hypo
ctttaatacacaaatgcaggcgagtagaaactgggtctacctaacacggccaacatggtgattcccgccctcttctcaccaggtgtaccaagtgtcatggccacctgcggataacaccatgtgttcaaaacatcatggcgtctgcatttgcatattaaaa

SEQ ID NO: 261969 - DNA, 40 bp, Homo sapiens
  chr10:34532753-34532793
  hypo
gtatatagtcatcaaatttgacctgcgccataattaaata

SEQ ID NO: 261970 - DNA, 167 bp, Homo sapiens
  chr10:34558597-34558764
  hypo
agggtttggaattccgcggcttcttgacttgggcatacaaagcatccatcatatgcccttctcgtgggctctgaggtctagcgttgagagccatggaaccttcataagaagaaactcccccatacattaactcatcatcacagccaaatgtccgatgaaaatcttga

SEQ ID NO: 261971 - DNA, 78 bp, Homo sapiens
  chr10:34845266-34845344
  hypo
aatagacacaactgcgctaccacccttccaattccttttcttctttctttttttttttttttgagacagagtcttgct

SEQ ID NO: 261972 - DNA, 77 bp, Homo sapiens
  chr10:34845584-34845661
  hypo
caagcgtgagtcaccatgcccagcccaattcctttgcttaaagaattcagatgagcgtagtgtttattattttttct

SEQ ID NO: 261973 - DNA, 93 bp, Homo sapiens; identical to SEQ ID NO: 213529
  chr10:35043969-35044062
  hypo

SEQ ID NO: 261974 - DNA, 142 bp, Homo sapiens
  chr10:35152217-35152359
  hypo
tagcaaaaagttttataagacgttatcaaataacaaatacttaatttcttttctttttttttttttgagacggagtcttgccaccatacctggcctatttacaggcatcctgtttaagagatgtttcaggccgggcgcggcg

SEQ ID NO: 261975 - DNA, 31 bp, Homo sapiens
  chr10:35243813-35243844
  hypo
gtccactgccgctctggcctaaagtggcttt

SEQ ID NO: 261976 - DNA, 81 bp, Homo sapiens; identical to SEQ ID NO: 213531
  chr10:35254596-35254677
  hypo

SEQ ID NO: 261977 - DNA, 35 bp, Homo sapiens
  chr10:35394058-35394093
  hypo
aaactaagtaattggctgggcgcggtggctcatgc

SEQ ID NO: 261978 - DNA, 122 bp, Homo sapiens; identical to SEQ ID NO: 213532
  chr10:35503793-35503915
  hypo

SEQ ID NO: 261979 - DNA, 34 bp, Homo sapiens; identical to SEQ ID NO: 213533
  chr10:35621534-35621568
  hypo

SEQ ID NO: 261980 - DNA, 33 bp, Homo sapiens
  chr10:35621808-35621841
  hypo
ggtgtgaaccaccgcgcccggcccacctgagtt

SEQ ID NO: 261981 - DNA, 198 bp, Homo sapiens; identical to SEQ ID NO: 213534
  chr10:36639323-36639521
  hypo

SEQ ID NO: 261982 - DNA, 42 bp, Homo sapiens; identical to SEQ ID NO: 213535
  chr10:36930096-36930138
  hypo

SEQ ID NO: 261983 - DNA, 34 bp, Homo sapiens; identical to SEQ ID NO: 213536
  chr10:43131976-43132010
  hypo

SEQ ID NO: 261984 - DNA, 300 bp, Homo sapiens
  chr10:43185746-43186046
  hypo
tccactgctgccaccgaggccgacggtacagcacccacagcttcctacccacgccaggccaggtggctccgcagtgctcctactcccacttcccaggacccccagacttgctgctgctgccaccactaaggccaatgccaatacaaccactgctgctgtcaccctcgatgcaccggcactccctacaaggcccctactagctggccacagccacagccctgccacaggtggccacagctggctgccctcctacctactgctccaaagtgccacccaccgcagtgacgccagccgccacgt

SEQ ID NO: 261985 - DNA, 285 bp, Homo sapiens
  chr10:43186655-43186940
  hypo
tgcagccccgattgcgcccctaacccgccgctgacagtgtagcccccgatagtgtcccaaacaccaccccccactcccagggagtgtaacccctgatagcgcccccaacccgtccccacctcgaacactgcagcacccaatagagaccccaacccgcccccacactgggagaaataacgcccgtaacagtgccccaagccccactccatccccgggcagtgcagccctggatagcaccccaacccgctcctggctgcaggcagtgatgcccggaatagcgccccc

SEQ ID NO: 261986 - DNA, 205 bp, Homo sapiens
  chr10:43265223-43265428
  hypo
gcctcctggcgcgggcgtggcagggcagcacagcctggctgaggaaagcacaaatcctgctctgcaactgctggctccgtggccttgggaagtcagcaccaactccccagggtttttgaggaggtggtgtgacttagtgactgcaaatgcaaggcgtgccttgccttccactgaacatgcgcagtgttggcgctgttttactgtt

SEQ ID NO: 261987 - DNA, 49 bp, Homo sapiens
  chr10:43584498-43584547
  hypo
ggtcaggcattttttcagaacgggcagcgtggggcagcccccttggccc

SEQ ID NO: 261988 - DNA, 168 bp, Homo sapiens
  chr10:43604494-43604662
  hypo
gaacctctccatctcggagaaccgcaccatgcagctggcggtgctggtcaatgactcagacttccagggcccaggagcgggcgtcctcttgctccacttcaacgtgtcggtgctgccggtcagcctgcacctgcccagtacctactccctctccgtgagcaggagggc

SEQ ID NO: 261989 - DNA, 78 bp, Homo sapiens; identical to SEQ ID NO: 213537
  chr10:43605297-43605375
  hypo

SEQ ID NO: 261990 - DNA, 77 bp, Homo sapiens; identical to SEQ ID NO: 213538
  chr10:43605405-43605482
  hypo

SEQ ID NO: 261991 - DNA, 53 bp, Homo sapiens
  chr10:43626346-43626399
  hypo
atcagtctcatctgcgattgcattgtgtcagatgccaacggcctgtgtcacac

SEQ ID NO: 261992 - DNA, 168 bp, Homo sapiens
  chr10:43626884-43627052
  hypo
aagaaagcctctcccgcaggcaggtggagcagttagcggtgcctctctctgcctcgggtgcgttcacgcatagtgtctggcacaccttgttttattgctctttgctttattgcgtttttcacaaattgaagttttgtggcaacgctgagtcgtcgagaaagtctatca

SEQ ID NO: 261993 - DNA, 239 bp, Homo sapiens
  chr10:43701717-43701956
  hypo
agggcagggcaggcgggctccttggtggtcccccagccgctgcacatctgatcactgtgtcttcagctccctgtgggccagacctcattccagggccctggacactcaaagccggcagagaagagaaactctgggaaaaatgtccaagaagggacagggagcctgcggtgggcagtcagggctgcctggggtgagagggctgtgaacaactgatggggctggccgcgcagctcccagga

SEQ ID NO: 261994 - DNA, 76 bp, Homo sapiens
  chr10:43858273-43858349
  hypo
gagacgggaagagcaggggacactcacagggcgggggtccaggcgggagtccagtagtcctcgtggagacagctgg

SEQ ID NO: 261995 - DNA, 326 bp, Homo sapiens
  chr10:43872976-43873302
  hypo
gactggaatgcaggcgataggatcactgaggaggcaaggcccagccctgcaggacgcagaggcaggggtgggagccacccagcagggctggtagaagggggctcctgagcacgcctcctcatccagggggtgcagtgcagagctctctcctcgttggcacgggaagacgctggtgtgagagactgcttttgagaacatgaaaagtgcggtaagaaagccaagtctggagtggcagacccaggggaagccacacaaaggtgaccggaagcagtgcatgctttctgactgaggaacccagggccacgcagtcacgactatcaggagct

SEQ ID NO: 261996 - DNA, 88 bp, Homo sapiens
  chr10:43906027-43906115
  hypo
gccatccgcccacctacgcctcccagagtgttgggattactggattgagccacgcatctggctgaacgttattttttaaatcaccaga

SEQ ID NO: 261997 - DNA, 272 bp, Homo sapiens; identical to SEQ ID NO: 213540
  chr10:44163388-44163660
  hypo

SEQ ID NO: 261998 - DNA, 91 bp, Homo sapiens; identical to SEQ ID NO: 213541
  chr10:44163720-44163811
  hypo

SEQ ID NO: 261999 - DNA, 159 bp, Homo sapiens
  chr10:44184096-44184255
  hypo
ctcctgggctacaggggctgcgagggaggcttgaggggctggggagcgaggggcaggctgagaccctcctgtgggaaagcattgcaagctgggaatgtttagcggtggccagtacctcagagtgcagcagggcgaggcggaaaagagactgaccatgtc

SEQ ID NO: 262000 - DNA, 284 bp, Homo sapiens
  chr10:44197651-44197935
  hypo
aagcaagataagaggtgttttctttctgtccctaccggtgccctctgtctggggcttcttcaacagggtgcatggcaggcggtgttagtgttgaactcatggagacgcctgtggccagcccgcgggggcagttcagaggggcaggaggcactacacaggtggctgggtacaggtgcattccccgagctgcccccccacgctgccaccggcgctgccacctgcccatatccccgccttccgcagaggcttcagcctcccctgtacagaggcggggcatggagccg

SEQ ID NO: 262001 - DNA, 422 bp, Homo sapiens
  chr10:44198150-44198572
  hypo
acagtcgcaccgggcgtggcccaaggccaggatcctgagagctggctgcctgcggcccgtggcatatttgctagcgccttccaggcatagaacggtggcagttttttctgtcaaggactcactttctagggaagaaggagggtggtgggcagcgcgaggccaggaggctggcgtgggcttgccggtaggcgcttctgagctgggtgggctcgccttctcgcccttcctcctctttccttccttgtttcccctaatgacccgggcacttattctagcccagctctggcctcgcgtcactacgctctgcaataggaggacggtagggtccttggccatgctggctcgcctggtcacggcgactcccacgcacgcccggactcctggtgctggtgctcgctcagcaggcgcggctgggggcggct

SEQ ID NO: 262002 - DNA, 594 bp, Homo sapiens
  chr10:44500792-44501386
  hypo
ggaagtccgctgttcggggtaaattggcagctgctgaaccctaaagtcgtggggcagggctccgacaggcctttgcgcctcctttccccatcagcgtttagagctaatgggaaaggaattgtttattttcttttgtttttatatttttgggttagctttaccgctacagaaaagtaaggtaaatgaccccgcattcacggagggtgactgtgcaaagcgtgaacatgcgccgagtttatgaagcgggtgtcggagccagcgctgcttctcgctgacccgcatgccccggccggccaggaacctgcgcctgagtgccctggtgtttctcttttttcccacgaaagcacgtgtgaagggcagagccacgtttatcaagaagtcatttttcccgttcgccggcattacaccattagcattacaggggccacctacacctcgtatttcgattccacagctccggagaacctgcggtgctgcggccactctgtgggtgtccccccacccccatctccactgcgagctctccggcctgggcacgcagctgctgacacacatcagcatggtgccctggccggcatctgctctgtggctggt

SEQ ID NO: 262003 - DNA, 303 bp, Homo sapiens; identical to SEQ ID NO: 213543
  chr10:44874108-44874411
  hypo

SEQ ID NO: 262004 - DNA, 272 bp, Homo sapiens
  chr10:45566820-45567092
  hypo
tgctcaggagccggcgaaatttcaaatgggggtactgttgaggcaccgttgcaggctgtgtttttcacttcttccctcagtccacgcccacactctggcacattgtgtgctgattggctcacaagcttccctaagctaccccgccactctcccttctccaccgcccaacccctacctcgatgaggtcctcacctatccaccaccccagaaggctctgggtgaggctccgggcgaggcacagcgcccccagtgccacccaacaggctcttgct

SEQ ID NO: 262005 - DNA, 34 bp, Homo sapiens
  chr10:45986735-45986769
  hypo
ttcactttgggaggctgaggcgggcagattgcct

SEQ ID NO: 262006 - DNA, 206 bp, Homo sapiens
  chr10:46009803-46010009
  hypo
aatgcattggtgtgcgctcagtgcagcgcttccccgcaacatggtccctgtgcttgatgccggggaacaggcgctgcctgcacagcagctgccaccctacagctgccagcagcagcacatggctggctgtcgcagctggacttgtgagggcttgctgaagccctcagcataccactcctgccatcaaactggactacttcctccag

SEQ ID NO: 262007 - DNA, 31 bp, Homo sapiens; identical to SEQ ID NO: 213545
  chr10:46195657-46195688
  hypo

SEQ ID NO: 262008 - DNA, 266 bp, Homo sapiens
  chr10:49541833-49542099
  hypo
cgttgggtcagcaacggccagaggaaatcctaaggccaaacagtatctgtggcctccctacctttgggcatcttctggtcgccaatttgctgcaagtcacagctcccaaatctggttgtgcaggctccaaagcagtggagcctggcgcttctgccatctccacctcctggatctcagagctgctggatggctccacccaccacccgctgagctggccccacttggggctggcattggtggacagcatgttccgggcgcctctgctc

SEQ ID NO: 262009 - DNA, 40 bp, Homo sapiens; identical to SEQ ID NO: 213549
  chr10:49592262-49592302
  hypo

SEQ ID NO: 262010 - DNA, 116 bp, Homo sapiens
  chr10:49652964-49653080
  hypo
cgcgtgtcagtggccgagcaaagacagacgccactctccccagcccctcctgagctccggcatccagaccttgatgctgctgagggccctgagcaggtgcccgcctcctggtggac

SEQ ID NO: 262011 - DNA, 283 bp, Homo sapiens
  chr10:49658306-49658589
  hypo
ttcacactcctctcgtactcagtccgctggcggcacagctcggccctgagctcagtgaccagcccctgtaaggcctcggagcggcgcgcgtgttcccgggtggggctgtccggctcgctgggctcgctgttgctggcacccgcgcccgcctcgtccatgctgtggtccaggtccagggacttggggtcctcgctgctgctggggagcggggagggctccagggcccagtcggtgtgcagggaactgcgggcagacgagtcgctggcgcggcaggccgtgcagc

SEQ ID NO: 262012 - DNA, 153 bp, Homo sapiens
  chr10:50099026-50099179
  hypo
ggatcagtccttcaattattcgcatggctgaattcagtcgccgtcaacttactcactcaacgacatgttagttgctcattctgcgtgagaaaacaggcaccgcccctctcttccgagggacttaatgcaatcggcagcatgcacaggttcttt

SEQ ID NO: 262013 - DNA, 42 bp, Homo sapiens
  chr10:50158397-50158439
  hypo
attgttgcggcatgtgtcagtttcctacggctgagtctgcgc

SEQ ID NO: 262014 - DNA, 118 bp, Homo sapiens
  chr10:50178208-50178326
  hypo
ggccgctgtctgtgcgccgtgtgcccatccccaacaacgattgtcacctctgggaccagcactgtggtgtgtgtgtgggagctcagcatgaccaaaggccgcccgaggggcttgcgcc

SEQ ID NO: 262015 - DNA, 155 bp, Homo sapiens
  chr10:50340033-50340188
  hypo
ttggaagccatttcgaaggaggagccgttccacctctgcctcttgatgaactgggcttcatggatgcggggcttcctggtgaccggctcgaagccggcctccgtctcccaggccacagccacaccccgcacagtctgcacgtgcgtgtagaaggc

SEQ ID NO: 262016 - DNA, 368 bp, Homo sapiens
  chr10:50530629-50530997
  hypo
gactcctccagcatcggcagcgtgttggatgatgcagacagggaggtgagcagcctaacagaccgggcattccggagtttgtgcatctccgaggacacatccttccatgactcctatctggctgtgtccccggatatcacccgacaggtgtttgggacttttcaccagagaacagtgggccacacccagaggaaaagtggcatttggagccagttaccgtcacagggcacggaacattcgggctgggcggccaccttccaacagctacccaagtacgttcagggagaggaaaagtaccccaaaaccagccccccaccaacgccagtccagaggagactggaggtgccagtttccggcctaaggagcag

SEQ ID NO: 262017 - DNA, 153 bp, Homo sapiens
  chr10:50680406-50680559
  hypo
actgtgtgcactgaccggtggtagatcttttcttcaatggtgcccgcagtcaggagcctgtacacagtcacttgcttcttctggcctattctccatgctcgctcccgggcctgcaacagagagagagagacctctcaacgagaatccttccca

SEQ ID NO: 262018 - DNA, 193 bp, Homo sapiens; identical to SEQ ID NO: 213553
  chr10:50724153-50724346
  hypo

SEQ ID NO: 262019 - DNA, 39 bp, Homo sapiens
  chr10:50748351-50748390
  hypo
tgggattacaggtgtgagccaccacgcccggcttgtaac

SEQ ID NO: 262020 - DNA, 313 bp, Homo sapiens
  chr10:50854541-50854854
  hypo
cccctgcagactccaccaaccgggactcgctggacatgattgagcgctgcatctgccttgtatgcctggacgcgccaggaggcgtggagctcagcgacacccacagggcactccagctccttcacggcggaggctacagcaagaacggggccaatcgctggtacgacaagtccctgcaggtaagccgtccaggtggccctgcaagagcacagccatgcccccagcgagagagtgagtaggcaagcgggcacagcctggtgcccaggcccgcacgtgcttgtgtctggcaggcgcactcactggtttctgctgc

SEQ ID NO: 262021 - DNA, 102 bp, Homo sapiens
  chr10:50948750-50948852
  hypo
cccacccaggactccgtactccgagagggagctgttgcacacggtgtacggggcctggtcaggccagagatgattcataggcacacacgtcctgcggtcaac

SEQ ID NO: 262022 - DNA, 209 bp, Homo sapiens; identical to SEQ ID NO: 213557
  chr10:52180040-52180249
  hypo

SEQ ID NO: 262023 - DNA, 126 bp, Homo sapiens; identical to SEQ ID NO: 213558
  chr10:52369822-52369948
  hypo

SEQ ID NO: 262024 - DNA, 289 bp, Homo sapiens; identical to SEQ ID NO: 213560
  chr10:59866613-59866902
  hypo

SEQ ID NO: 262025 - DNA, 146 bp, Homo sapiens; identical to SEQ ID NO: 213561
  chr10:61552612-61552758
  hypo

SEQ ID NO: 262026 - DNA, 52 bp, Homo sapiens
  chr10:61552788-61552840
  hypo
tggggtctgtgtgttgggagatggaggcggcgtgggccgtttgaatttgtca

SEQ ID NO: 262027 - DNA, 50 bp, Homo sapiens
  chr10:61652231-61652281
  hypo
ggctccccaacctgcggtgcacagggagcttggtgcggcctcaaccaccc

SEQ ID NO: 262028 - DNA, 179 bp, Homo sapiens
  chr10:62662663-62662842
  hypo
caccaggccacgtatcggggatagaaaatagaaagacaaaatctctgtcctaaatatactaggataataggataaggggaatgggagaaaattaaggagccaattttcccgcaatacagttattgctacgatagggatttgcaaagctgtcctatgggaacatacggagagacacctca

SEQ ID NO: 262029 - DNA, 43 bp, Homo sapiens; identical to SEQ ID NO: 213563
  chr10:63669383-63669426
  hypo

SEQ ID NO: 262030 - DNA, 41 bp, Homo sapiens; identical to SEQ ID NO: 213564
  chr10:63757869-63757910
  hypo

SEQ ID NO: 262031 - DNA, 111 bp, Homo sapiens
  chr10:64914130-64914241
  hypo
gaaacagtcactgtgaaatgcgctgcgtatctcattcactcacttcagctaatgattccgacttggcagacgctaaactcatggaggttcggtttctcctgatacaaacca

SEQ ID NO: 262032 - DNA, 103 bp, Homo sapiens; identical to SEQ ID NO: 213565
  chr10:64945157-64945260
  hypo

SEQ ID NO: 262033 - DNA, 82 bp, Homo sapiens
  chr10:64997098-64997180
  hypo
aacactcactaaaaatttttttttaatatacagtgcaatgaatgtaacttccaaattaataccacatcgaagttttttgggc

SEQ ID NO: 262034 - DNA, 114 bp, Homo sapiens
  chr10:65186891-65187005
  hypo
ggacaactcatggcggtggcggcagcagctgcttgggcatggtgcagtggtgactgagctacgagcctggcggcgggtgttcgccgagctccggtccccgcgtgtctcccagaa

SEQ ID NO: 262035 - DNA, 33 bp, Homo sapiens
  chr10:69253021-69253054
  hypo
ttaagagtttgattttaggccggacacggcggc

SEQ ID NO: 262036 - DNA, 41 bp, Homo sapiens
  chr10:69578804-69578845
  hypo
ccaggggtcgggagcggtggctcacgcctgtaatcccagga

SEQ ID NO: 262037 - DNA, 42 bp, Homo sapiens
  chr10:69606878-69606920
  hypo
gaaaattaagccaaaaatgccgggcttggtggctcacgcctg

SEQ ID NO: 262038 - DNA, 79 bp, Homo sapiens
  chr10:69646548-69646627
  hypo
tattacacgtttcacgaacgctattgtttgtgattgtatgatacattctagctagattattatcttttctttttttttt

SEQ ID NO: 262039 - DNA, 120 bp, Homo sapiens; identical to SEQ ID NO: 213566
  chr10:69853849-69853969
  hypo

SEQ ID NO: 262040 - DNA, 439 bp, Homo sapiens; identical to SEQ ID NO: 213567
  chr10:70184274-70184713
  hypo

SEQ ID NO: 262041 - DNA, 168 bp, Homo sapiens; identical to SEQ ID NO: 213568
  chr10:70218971-70219139
  hypo

SEQ ID NO: 262042 - DNA, 33 bp, Homo sapiens
  chr10:70232452-70232485
  hypo
ctgggtagagcgagactccgtctccaaaaaaaa

SEQ ID NO: 262043 - DNA, 34 bp, Homo sapiens; identical to SEQ ID NO: 213569
  chr10:70266166-70266200
  hypo

SEQ ID NO: 262044 - DNA, 240 bp, Homo sapiens
  chr10:70288835-70289075
  hypo
ctaacctgcggcttctcgctttttcaggcatgttttgacttgcttccatctcccaccaaatcagctctgccttgtcagagctcctcactgaacaccaatttctgccctccctaaatcccccactaagcttccattcctcccctaccacctctgcaaaaaaaaaaaaaaaaaaaaaaaaaaacacacacaaccaggcctggggcggtggctcatgcagtaatcccaggattttgggatgcc

SEQ ID NO: 262045 - DNA, 35 bp, Homo sapiens
  chr10:70472770-70472805
  hypo
ctcaagcctttttacaatgtcggtatattgccggg

SEQ ID NO: 262046 - DNA, 43 bp, Homo sapiens
  chr10:70478654-70478697
  hypo
ggaaaaaatattaaagaatgcgcaatgtggccgggcgcggtgg

SEQ ID NO: 262047 - DNA, 120 bp, Homo sapiens
  chr10:70483199-70483319
  hypo
taataccttagattaacttttaattgatttaattctgttagagtttagctactcattcattacaatatactgtatttggcatgttaagttgtcagtattaatgagttatgtttaaaagta

SEQ ID NO: 262048 - DNA, 139 bp, Homo sapiens
  chr10:70530864-70531003
  hypo
atcgttgtatgtggcaagtttttatttgctaaattactctgctagctttattatttctgttgaaatttggctaggttcatgttgatatctttttataggtttcattgtttgcggaacttttcaacgaaatgcttcaaag

SEQ ID NO: 262049 - DNA, 98 bp, Homo sapiens
  chr10:70992569-70992667
  hypo
ctgaaggtgcaagtcgctgaagaggggaagcgacacgtgcagatggagagtcagttctacccaacgcccaatgaaatcatccgcgggaacggcacaga

SEQ ID NO: 262050 - DNA, 51 bp, Homo sapiens
  chr10:70993020-70993071
  hypo
tgatgaggtggcagcgtgaggcagagaacttgttaacgcaatggccttgat

SEQ ID NO: 262051 - DNA, 159 bp, Homo sapiens
  chr10:71007178-71007337
  hypo
ggctgactgcattgccgtccagcatgtctgtaccatcgtctccttccgctcggccaatctctgtgcagcagctctggcggccatcctgacacgcctccgggagaacaagaaggtggaacggctccggaccacagtgggcatggacggcaccctctacaa

SEQ ID NO: 262052 - DNA, 196 bp, Homo sapiens
  chr10:71097944-71098140
  hypo
ggaaagtgtttgagcaagagcgcccgccctgtgcagccggtctggctaccctcataggaagggctcttcactctgggcagcggtggacagaggccctggaggctggatgcgggttctcaggcaagagtctgagggacccagctcggtgtctgatgtctggtgtctgggactgggcgccttcccatttccatcccag

SEQ ID NO: 262053 - DNA, 653 bp, Homo sapiens
  chr10:71133919-71134572
  hypo
tctctcggcagctccggtcctggtttgcttggccatgggcctctgtctcttttctttccttgggcttctacctgaagcagacccagggtgctgagggctcctctttggtgtgcaggtccttgcccatgacttctcgtggttgatgatgctcccctcccccatctcagcccttcctgggcccaccagcaggcagattggttggaacgctgccacgccgcctctcactgcctgtctgtggtcgtaggtgtctgactgccgagacacctgggcattacctgttcagttatcacaaggaaaagggcccgggcgttacccgttcagttatcacaggtggcatgccctgagaggcagatcatgacttgctcgatttcattaatttcacttgagcagatgggaagcacgctgttggaacaggagccggtctccatgagccttggtttgaacagagagaagctcgtgagaggtgctatttgcttgttctgctgctctaacagggcctttagggactgggaaaggacagaccctggccgtgggcctctatctggaaaagggggtatcactatccatgtgtgtaataggccatgtagaaaagggagcagattgttctgggcgtctttagaaggcagagtgaaaagcagcgggcagagggtgcc

SEQ ID NO: 262054 - DNA, 173 bp, Homo sapiens
  chr10:71136632-71136805
  hypo
cctcgtgtgtggggcgcagaggaaggctgacaagtgccggtgtgcctttctccacaggtttgagaagatggtcagtggcatgtacttgggagagctggttcgactgatcctagtcaagatggccaaggagggcctcttatttgaagggcggatcaccccggagctgctcaccc

SEQ ID NO: 262055 - DNA, 42 bp, Homo sapiens
  chr10:71144262-71144304
  hypo
gtgcactgcacacacggccagtggcaccggcagtcacgtgat

SEQ ID NO: 262056 - DNA, 72 bp, Homo sapiens; identical to SEQ ID NO: 213572
  chr10:71144613-71144685
  hypo

SEQ ID NO: 262057 - DNA, 48 bp, Homo sapiens
  chr10:71154729-71154777
  hypo
gtacctgggtgaaatcgtccgcaacatcttaatcgacttcaccaagaa

SEQ ID NO: 262058 - DNA, 224 bp, Homo sapiens
  chr10:71158355-71158579
  hypo
gattagcactgctccaggtccgggctatcctccagcagctaggtctgaatagcacctgcgatgacagtatcctcgtcaagacagtgtgcggggtggtgtccaggagggccgcacagctgtgtggcgcaggcatggctgcggttgtggataagatccgcgagaacagaggactggaccgtctgaatgtgactgtgggagtggacgggacactctacaagcttcat

SEQ ID NO: 262059 - DNA, 50 bp, Homo sapiens; identical to SEQ ID NO: 213573
  chr10:71174693-71174743
  hypo

SEQ ID NO: 262060 - DNA, 106 bp, Homo sapiens
  chr10:71218535-71218641
  hypo
aggccctgagaagtgtccttcgctcttaacctagactttgtacatggtctcgttccccgctttaatagaggaattgctttatgtcgtaggactggaccttgctgcc

SEQ ID NO: 262061 - DNA, 190 bp, Homo sapiens; identical to SEQ ID NO: 213574
  chr10:71245588-71245778
  hypo

SEQ ID NO: 262062 - DNA, 247 bp, Homo sapiens
  chr10:71405329-71405576
  hypo
gttttccccactcacggcgaacctgaagccttctccaaagggcttcacacccagggccactgaggcctggaaagcattttatttatacgaggtattcctggtaaccttctccgcctttcatagggtgcgtgagtggtcaccacagagaaacaggccaaagctgacccggtgcccaccttttctgcccacagtgtccttccaggcccctgacttgttccatgccgccaatgcacgccaaccctcagag

SEQ ID NO: 262063 - DNA, 70 bp, Homo sapiens
  chr10:71566071-71566141
  hypo
agggggcagagactgcgtgtatgaggcagaagggagagggagctgcagggagggccggccaaggggaccc

SEQ ID NO: 262064 - DNA, 166 bp, Homo sapiens; identical to SEQ ID NO: 213575
  chr10:71639773-71639939
  hypo

SEQ ID NO: 262065 - DNA, 183 bp, Homo sapiens
  chr10:71703276-71703459
  hypo
tgccaggccggtgtcggtgcagacattgaggcaccctaattcaccccccgatccagccagttccgcaggcctgtgagtggggcgagaaggccccggccagagactgaggccagggctgtgggtctgcggtgggccggtggggtgggtgttggctgaacaaccctctctcgtctgcccctgtgt

SEQ ID NO: 262066 - DNA, 93 bp, Homo sapiens
  chr10:71706826-71706919
  hypo
agccaccgtgcccagcctgaagtgtgttcttggctttgcccagaactcatcatttgcctctaggtcaggttttcttagcgatttgcttctctg

SEQ ID NO: 262067 - DNA, 53 bp, Homo sapiens; identical to SEQ ID NO: 213576
  chr10:71871350-71871403
  hypo

SEQ ID NO: 262068 - DNA, 185 bp, Homo sapiens; identical to SEQ ID NO: 213578
  chr10:72288400-72288585
  hypo

SEQ ID NO: 262069 - DNA, 160 bp, Homo sapiens
  chr10:72300744-72300904
  hypo
gacaatttctggcccgaggacagtggctggggctgccatgtggatggggaccctgttggggtttgtgcatccaagagacgcccgctgacccagaccttgcttttctcgtccaggactttgaccagctgctggaggccctgcgggccgccctctccaagga

SEQ ID NO: 262070 - DNA, 223 bp, Homo sapiens; identical to SEQ ID NO: 213579
  chr10:72442676-72442899
  hypo

SEQ ID NO: 262071 - DNA, 50 bp, Homo sapiens
  chr10:72489897-72489947
  hypo
tggagcaggtgtgtcgctgggcacactcccagcagcgccaggaccccagc

SEQ ID NO: 262072 - DNA, 165 bp, Homo sapiens
  chr10:72491962-72492127
  hypo
acctgccctccacctcgctctccaccttttctttctctcttcggcagggtatgcacccgtcactggcatgtgtcaccccctgaggagctgtgccctcaaccatgaggatggcttctcctcagccttcgtgatagctcatgagaccggccacgtgtaagtggcagc

SEQ ID NO: 262073 - DNA, 37 bp, Homo sapiens
  chr10:72503444-72503481
  hypo
cacccccagccaccccgactaccggcacagggagact

SEQ ID NO: 262074 - DNA, 56 bp, Homo sapiens
  chr10:72509555-72509611
  hypo
accctctccccccaccggtcagtggtgaagaaccaggtcaccggcagcttcatcct

SEQ ID NO: 262075 - DNA, 261 bp, Homo sapiens
  chr10:72695180-72695441
  hypo
agctgtacttctagcgtcgctcttcctcacatgtcccctgagccatctacagattccctcatggctgccgtgcccgagtacgcacacttgcacacacaccttccaacagcctacatcttcagactccccatcttcacacagcccctgcctccatcccccacatacataccttcatacaccccacacactttcgcacactcacacactcacacatcccccagccccagaactacctgggagggaaggcgatggagtgacagc

SEQ ID NO: 262076 - DNA, 251 bp, Homo sapiens; identical to SEQ ID NO: 213580
  chr10:72765320-72765571
  hypo

SEQ ID NO: 262077 - DNA, 139 bp, Homo sapiens
  chr10:72784966-72785105
  hypo
aggaccaggctactcgaactgcatgcagcaacttgtatgaatcgcaaaggcttatgctgagcagaagccactatcacaaggttaccttctgcatgattttatctatactaccttctcgaaaagccgagagtatagcgtt

SEQ ID NO: 262078 - DNA, 150 bp, Homo sapiens
  chr10:72793046-72793196
  hypo
cagccgggttcaagccaggttctgctttctactagctgcgtgactgcaagcaacctctctgggcctcagttttcttgttgatgaaagagagatgattataatgataaagctccttgcccacgaggtgctgagaggcgtggagggggtgat

SEQ ID NO: 262079 - DNA, 133 bp, Homo sapiens
  chr10:72820038-72820171
  hypo
gggctctgcataggcgcatagccatgaggcatccgcgactccagcctgcgttgtgcggtaaggagcctgccacccatattatccaatgcctcgcttggcacatggggaaactgaggttcgggcagaggcagtg

SEQ ID NO: 262080 - DNA, 212 bp, Homo sapiens
  chr10:72838755-72838967
  hypo
cccctgttagatgtccgtcctcatcttgtcacctctgtgaccacacccctagcgcgcgtcctcatcaccttcacttgaataaatgccttggcctccccctaacttaagccttgcccctgttcccattccctttcactctgtatgacacatcagagctgaaggtctttccaaaacatcaccttcttttgaaaacccttcgataatagactctt

SEQ ID NO: 262081 - DNA, 175 bp, Homo sapiens
  chr10:72847942-72848117
  hypo
ggagttgaagatgacgcagaggcctctagctaaggcaaccaagtggaaagaatctactccgcattttgccaaagaaaatgaatgaaatcagccatgcttccgacaggccaagcatacgctgcctcccccatccaggcctcagcatctctcccggtcacgccgatacctgaaaaca

SEQ ID NO: 262082 - DNA, 202 bp, Homo sapiens
  chr10:72887226-72887428
  hypo
ccctcattctgtttccgtgtgcgcacgtgtgtgcttacgtgcacacatgtgtatacacacatacgagtctcccaagctcagagagcttttaatgactctgttttctaacccccaactgaaatggaacaatcatgtccttaccaattctttgtggcccaagttttcccaagaaccagaaatggaacaccgttttctttcaaat

SEQ ID NO: 262083 - DNA, 99 bp, Homo sapiens
  chr10:73036106-73036205
  hypo
gcctggccataggtcgctctcatctagcccacctttcaagccttcctcagtcactggggcccaagccagggccaaggagaagtgagggctctcgttgtt

SEQ ID NO: 262084 - DNA, 192 bp, Homo sapiens; identical to SEQ ID NO: 213582
  chr10:73288226-73288418
  hypo

SEQ ID NO: 262085 - DNA, 34 bp, Homo sapiens
  chr10:73326700-73326734
  hypo
tccatgctggggccccggccgtcccagctgcctc

SEQ ID NO: 262086 - DNA, 36 bp, Homo sapiens
  chr10:73395989-73396025
  hypo
cagtgggccgggtgcggtagctcacacctgtaatcc

SEQ ID NO: 262087 - DNA, 138 bp, Homo sapiens
  chr10:73418336-73418474
  hypo
acaagaggatactgcgttcatcccaggcctggtgaagcagtggtgtgagcttagtgaatgccaggcattttacagggcgttccctgtctcttctgtacccattgtgtagaagaagctggggcccggagaggtgagcgg

SEQ ID NO: 262088 - DNA, 196 bp, Homo sapiens; identical to SEQ ID NO: 213583
  chr10:73445871-73446067
  hypo

SEQ ID NO: 262089 - DNA, 123 bp, Homo sapiens; identical to SEQ ID NO: 213584
  chr10:73455053-73455176
  hypo

SEQ ID NO: 262090 - DNA, 239 bp, Homo sapiens; identical to SEQ ID NO: 213585
  chr10:73514960-73515199
  hypo

SEQ ID NO: 262091 - DNA, 92 bp, Homo sapiens
  chr10:73553124-73553216
  hypo
ccgaccggggcaccgttcctctctcgggcacagccattgtcaccattctgatcgatgacatcaatgactcccgccccgagttcctcaacccc

SEQ ID NO: 262092 - DNA, 92 bp, Homo sapiens; identical to SEQ ID NO: 213587
  chr10:73574841-73574933
  hypo

SEQ ID NO: 262093 - DNA, 166 bp, Homo sapiens
  chr10:73576259-73576425
  hypo
cccttcggcatgccgccctctaccaggaagccagaggcctaggagctcgccatccatatttatttgaaaaggtcaaaaggagcatctatgagacaagggaggggtgcaggctgaagcagcgcctcaacagccagggacatgtaggcaacacgagcaggcacagcgc

SEQ ID NO: 262094 - DNA, 175 bp, Homo sapiens
  chr10:73591508-73591683
  hypo
accattcctctttagacacccggaatcacagctctcttaggaaccagtgcacgtgcccgtggctcaagcaccatccccactcaccgccgctcacctcagtggcattgtccttcagcatatcaccagctgcggtgacaacgtctttgcatatgtcgcagggaagggatttctaaga

SEQ ID NO: 262095 - DNA, 407 bp, Homo sapiens; identical to SEQ ID NO: 213588
  chr10:73767529-73767936
  hypo

SEQ ID NO: 262096 - DNA, 38 bp, Homo sapiens
  chr10:73929856-73929894
  hypo
gacaagagtgaaactccgtctcaaagaaaaaaaaaaaa

SEQ ID NO: 262097 - DNA, 92 bp, Homo sapiens
  chr10:73970690-73970782
  hypo
acacaggcataaagaacagccggacactgtacattccatgacactgctctgatactccttctgacccgatcgtataggaaataaaccttaaa

SEQ ID NO: 262098 - DNA, 151 bp, Homo sapiens
  chr10:74003510-74003661
  hypo
ggacttgggagtgggaatgccgaggagatgacaaggagcctttcctagagaaggcgagcctgctcttgaacatgatgatgagagacagcgcgccacacacaaagggaaagatgccaaagaagcgttccacgcacagggaacagcatgtgca

SEQ ID NO: 262099 - DNA, 102 bp, Homo sapiens
  chr10:74100515-74100617
  hypo
ccgcgctgtccctggcgccctcctcactcacatcaccctggttgtccctgcggtcctgcctttgctggtaggtatagcgcatgcggccgttgctgtagacgt

SEQ ID NO: 262100 - DNA, 155 bp, Homo sapiens
  chr10:74108259-74108414
  hypo
tgctggcctgaagacgccatgctgggtgccacacccaccagtgcgacccactgaggtctgacccaacaggctgagagccagtctcactgggaacagagtatggggctccagtggagcactgtgccctgggccactgctgccgcactccgagcttg

SEQ ID NO: 262101 - DNA, 42 bp, Homo sapiens
  chr10:74439298-74439340
  hypo
gcataatttttttgactgggcgcggtggctcatgcctgtaat

SEQ ID NO: 262102 - DNA, 40 bp, Homo sapiens
  chr10:74451110-74451150
  hypo
gattacaggcgtgagccaccgcgcccggccttacatgatt

SEQ ID NO: 262103 - DNA, 31 bp, Homo sapiens
  chr10:74467239-74467270
  hypo
gccactgcacctgactcgccttttgaaatgt

SEQ ID NO: 262104 - DNA, 84 bp, Homo sapiens; identical to SEQ ID NO: 213593
  chr10:74518790-74518874
  hypo

SEQ ID NO: 262105 - DNA, 252 bp, Homo sapiens
  chr10:74684078-74684330
  hypo
caagctgctgatcccggtgacctgcgagtttccacgcctgtacaccatttctgaaggatacgttcccaaccttcgaaactccccactggaaatcatgagccgaaatcatgggatcttcccattcactctggagatcttcaaggacaatgagtttgaagagccttaccgggaagctctgcccaccctcaagcttcgtgactccctctactttggcattgagcccgtggtgcacgtgagcggcttggaaagctt

SEQ ID NO: 262106 - DNA, 31 bp, Homo sapiens
  chr10:74880401-74880432
  hypo
agagttccatcatggccaggcgcggtggctc

SEQ ID NO: 262107 - DNA, 33 bp, Homo sapiens
  chr10:75128352-75128385
  hypo
attgattgtggtgacggtcgcacaaatttgtga

SEQ ID NO: 262108 - DNA, 222 bp, Homo sapiens
  chr10:75184111-75184333
  hypo
gcaacagagcaagactccatctcaaaaaaagaaagaaaccagttatgttatacagaaactctcattcagcttagaatttttacccaaacagtaaatgaggtttagaatataatgtttttcaaagtttgcaagaacctggcattagcagggtaatttcatcacaaactccccgttttccagatgtccagttatgatctatttaaatcccgccgtccactttct

SEQ ID NO: 262109 - DNA, 40 bp, Homo sapiens
  chr10:75384238-75384278
  hypo
tacaggcgtgagtcaccgcgcccagccaaaaagccattat

SEQ ID NO: 262110 - DNA, 135 bp, Homo sapiens
  chr10:75408310-75408445
  hypo
ttgagcccgccctggcaagctccatgtccagatagggactgtcccagtcagattgattggtgaggctgcgggcgtcagagaaggcttcttcgtccagctcggactcactcgtggggggaacgccgtcctcctcct

SEQ ID NO: 262111 - DNA, 226 bp, Homo sapiens
  chr10:75423485-75423711
  hypo
gtgggccaggccctcggcagccagctttcccaggcctcccaacatcgtgtggcagcagacagtggtgaactaggaggctgaggactggcccaacatgcttttatagctgcctctggtgcctatctaggctctggggcaacaagccctcgccccagcccagtaggaggctggacaggtgagtcagcgagggcggcagcaggaaggggctgggcggagccaccctggc

SEQ ID NO: 262112 - DNA, 143 bp, Homo sapiens
  chr10:75491399-75491542
  hypo
catggtcggcgcagccgagctggcgagggcagcgcgggtcccccggaacgccccccgaggcgagcgctaacgaggtccggcaccatgtgctaggtcactcccagtgcaaggccacacttgggccatccgagcaacccctcctc

SEQ ID NO: 262113 - DNA, 34 bp, Homo sapiens; identical to SEQ ID NO: 213594
  chr10:75493101-75493135
  hypo

SEQ ID NO: 262114 - DNA, 41 bp, Homo sapiens
  chr10:75501515-75501556
  hypo
gattacaggcatgagccaccatgcccggccctagtgggtgc

SEQ ID NO: 262115 - DNA, 67 bp, Homo sapiens
  chr10:75548868-75548935
  hypo
ggccaatggcagtgcggatgagtttcagcgaggggatcagctcttccgcatgcgggctgtgaaggac

SEQ ID NO: 262116 - DNA, 144 bp, Homo sapiens
  chr10:75574063-75574207
  hypo
tgtaaaaaacacctcggtacagcagagacagacacgaagggcgggcgggagggctgcatgcaggggcgtgcattggctgctgccgcttttgtaattgaattgttttaaacctcaaacaaacaggactgccgctgtcactcaggc

SEQ ID NO: 262117 - DNA, 60 bp, Homo sapiens
  chr10:75606977-75607037
  hypo
cttacacagacccacgggtgcttgagagcctggtcagccgtgatgcgctttgctgggttt

SEQ ID NO: 262118 - DNA, 180 bp, Homo sapiens
  chr10:75632895-75633075
  hypo
acacacttcaagtctggggacgatgatgctcccaccaccagacctctagtcacactcacgtacatgcacacacaccggcgctgtgaccaccaccatccaacatgaggcaaaaggacgcggccaccgcaggacactgaacagatgtgggtggcgtgccgcgctcccaccccctcatccagt

SEQ ID NO: 262119 - DNA, 266 bp, Homo sapiens
  chr10:75832423-75832689
  hypo
tgagaaagccagacccgggattgtttcactactcaccctgcacaatttcttctttgtgccccaggaatgactaagatggccaagatgattgacgagagacagcaggagctcactcaccaggagcaccgagtgatgttggtgaactcgatgaacaccgtgaaagagttgctgccagttctcatttcaggtacttcctgcctgtactttattttataggggggaaaaatgttagcatgttctaaactctgaggttcattttgttttct

SEQ ID NO: 262120 - DNA, 99 bp, Homo sapiens
  chr10:75874043-75874142
  hypo
tgtgccaaggacatcgccaaggcctcagatgaggtgactcggttggccaaggaggttgccaagcagtgcacagataaacggattagaaccaacctctta

SEQ ID NO: 262121 - DNA, 159 bp, Homo sapiens
  chr10:75893717-75893876
  hypo
cagttttctattcatctgtgtcagatgaattgtttttccccaaataagatgacatgcacacaattacctgatttatctataattgcgtctatttcttcaacaacatcaaaataggcttcattgtttgtgtactttacccctgcccgacgccatggtatg

SEQ ID NO: 262122 - DNA, 86 bp, Homo sapiens
  chr10:75966600-75966686
  hypo
ggatccttagggtgtcgcttttccagccagaagccactgtggttggtggagcctttgcctgaggtttgcttgtgcctgccaggctt

SEQ ID NO: 262123 - DNA, 31 bp, Homo sapiens; identical to SEQ ID NO: 213595
  chr10:76013804-76013835
  hypo

SEQ ID NO: 262124 - DNA, 31 bp, Homo sapiens; identical to SEQ ID NO: 213596
  chr10:76019176-76019207
  hypo

SEQ ID NO: 262125 - DNA, 130 bp, Homo sapiens
  chr10:76287770-76287900
  hypo
agggaatttgtattcggcaataaaacccagagtaaactcttaagataaaatgacgacgtccttctggaagaggtgaaactggtatgtccatgatccttatcagaagtgtcatgatcgaacaaacctgaaa

SEQ ID NO: 262126 - DNA, 196 bp, Homo sapiens
  chr10:76524048-76524244
  hypo
gtggcacattggcacgaggaaaagaaagatgaaagatcagagaggcgacaccagttgaaacaggctgctgaattattacagcgagtgaccatgggacgatggagccgggggcggccaccccctgctggctcagtaggtcaagtcagtgcggtgtcccagcagaggcggcttgaacttaaggcgaacttaacaatca

SEQ ID NO: 262127 - DNA, 34 bp, Homo sapiens; identical to SEQ ID NO: 213597
  chr10:76538433-76538467
  hypo

SEQ ID NO: 262128 - DNA, 146 bp, Homo sapiens
  chr10:76588593-76588739
  hypo
ggattacaggcgtgagccaccgcgcccggccattcataagttctttacacatttatcagaatgaatttggacagtattttatgtttttaagaaggaaaggataatgcacatgttttttcttttccgagaacttctactgagagtta

SEQ ID NO: 262129 - DNA, 44 bp, Homo sapiens
  chr10:76693644-76693688
  hypo
taaaaatgcctacaattggccgggtgcggtggcttatgcctgta

SEQ ID NO: 262130 - DNA, 366 bp, Homo sapiens
  chr10:76780147-76780513
  hypo
caaagattcaggagcgtaaacttcacggagatcaaatcactataactgggaagaggctacattcctaaagcgaatgcacttctctgttgtgatgtttttaccttgtcactactcatattatttctagtggctcctgttctaagctctgggaatgccacagtgaggaatgcccatttattttttctgccctaggctatttgctttctagaagagaaggccaagcagggtctcctgaaaagcctctctccgatctgggccgtctctcctacctggcatattggaagagcgtcatcttggagtatctctaccaccaccatgagaggcacatcagcatcaaggcaattagcagagcgacgggcatgtgcc

SEQ ID NO: 262131 - DNA, 124 bp, Homo sapiens
  chr10:76784642-76784766
  hypo
tgtctactgcatatcgactcaaccatttaatttctcatgagctcttatgtgttatgtttggaattaatttcagaggccttttgtactaaagaagaaaaggggtcgtaaacgcaggaggatcaac

SEQ ID NO: 262132 - DNA, 173 bp, Homo sapiens; identical to SEQ ID NO: 213599
  chr10:76796613-76796786
  hypo

SEQ ID NO: 262133 - DNA, 496 bp, Homo sapiens
  chr10:76797023-76797519
  hypo
agcacatctagagatggtggcgtgagcctaggggttccgctgaaaagacaagcggcgtgcaagggatgccacagaaacgcaggatgcccgggaaggagcctccacagctacgcaggcactcccgtgacactgctcacctggtacggttctgtggttggaaaagcaatttctattttaaaatactttttataagaagatgactttcctttcagacaaagccaaacgtttaatcacaacatactgcctacacattttaaaatcttttccctcttccttctcaccaaaaaaacaaaaccaaagcaggagacttggtgcagcgtggcatgctcctctgtgacccagagccggggagcccgtccctcccattttgctgagaggctgagcgctcagctctgcccgggggcagctctgggtcctccctgtccccagcacacatggggaagttgaacaagatggtttggaagagtcgagcttcggtttcaccatcccttctctg

SEQ ID NO: 262134 - DNA, 187 bp, Homo sapiens; identical to SEQ ID NO: 213601
  chr10:76818035-76818222
  hypo

SEQ ID NO: 262135 - DNA, 35 bp, Homo sapiens
  chr10:76845053-76845088
  hypo
cagtcctggatccatcgacccgccatcctcccaaa

SEQ ID NO: 262136 - DNA, 146 bp, Homo sapiens
  chr10:76857399-76857545
  hypo
tcatgcccccattcccgtgtgaacctcacacccttccgccatccccactcctaacgtgggtcttactcacgcatctcccaggaagaggctgggccagacctcatcgatatggttcagtgtggcagcctgacggacccacagcaagc

SEQ ID NO: 262137 - DNA, 33 bp, Homo sapiens; identical to SEQ ID NO: 213602
  chr10:76875399-76875432
  hypo

SEQ ID NO: 262138 - DNA, 108 bp, Homo sapiens
  chr10:76961624-76961732
  hypo
agactcccttccacaccccacgactggactggggctgggagggggccacttacttcgctcgtcacctcctataagatcacctgcttcgaggttcatgccatcagctct

SEQ ID NO: 262139 - DNA, 89 bp, Homo sapiens
  chr10:76966475-76966564
  hypo
tgtggcagtgtgggcgaaagagcgaaactctatctcctctgtctcaaaaaaaaaaaacaaaaagcaaaaaaaaaaaaacctggcgccgt

SEQ ID NO: 262140 - DNA, 88 bp, Homo sapiens; identical to SEQ ID NO: 213603
  chr10:76968431-76968519
  hypo

SEQ ID NO: 262141 - DNA, 44 bp, Homo sapiens
  chr10:76992470-76992514
  hypo
tgtcccaggagctgtgagctcgtgtggctttttttttttttttt

SEQ ID NO: 262142 - DNA, 432 bp, Homo sapiens
  chr10:76998412-76998844
  hypo
atgcatccaggatccgggggcggctgtgatcttgttcccattttccagagcaggaaagctcagagaccaccgcccagaccctgcagccaacagaggaaacgcgcgtacctctcccttgaaccctgggacccagagggaacaggccttcttggctcctctgctgggacgagggcccagctcgagctggcctgagggccctgcgctcaggtggtgccgctgaccgctctctcccttcagcccgggggtccaggttgcagcaggcccccagctcacactgaaactccctcctacagcctggctttaggccggagcggtggaggttgagggggagcgggtggggaggggaggcatgtcaccatctatccccgtcagattaaaaaactaatttgaaaagattaatgtattccattcttgttacgctggctctgatac

SEQ ID NO: 262143 - DNA, 31 bp, Homo sapiens
  chr10:77003406-77003437
  hypo
gcaagcaggtatgacgcggtgcaggtgcctg

SEQ ID NO: 262144 - DNA, 178 bp, Homo sapiens
  chr10:77242295-77242473
  hypo
agttctgtgaaggtacgcccaggtctgttactgtgcgcgtatttcctggcttcctgcacagggtctgacccatggtagatgtgcagcacataattgttaagtgactgagtagagtctgtgtcagctcaactatgtccctatcgtaggagtttactggttctggcgaaatcagcccact

SEQ ID NO: 262145 - DNA, 130 bp, Homo sapiens
  chr10:77499938-77500068
  hypo
acattcctctcccatgccatcgacatcaatttcccctgtagatgatggaggtgcgatgttcagacaaatgctgacgcagaccgacgggagctggaggctgaggggcagcggcctggcaggtgatgtctct

SEQ ID NO: 262146 - DNA, 221 bp, Homo sapiens
  chr10:77794551-77794772
  hypo
tttatagaatagcccggcatcccctacgtgtctccctcccgtccacatcgtagctcagctgtcagccggtgcaggctcagcacatctcctgggtctggcaggtgaacgagctgggagtctgtgtctctgtgtaagcccctctgccggccggcttgctttaattaatgtctgtgtgcgcccaggcaagcacttgtgcacaactacctcgtgtcacctccacc

SEQ ID NO: 262147 - DNA, 204 bp, Homo sapiens
  chr10:77892386-77892590
  hypo
ctgggaaagttttgtgggagcgtgtatgtttacatgtgtaggtgagcgcatgagtacgagtatcggagtacgagtatcggaggaacaatgagctggagtccactagagagtgaaacttacagagtcttgaccattcatcattctgattctcagatttcaccagctgacaagcaccttcttttttggcggggggggtcagagttt

SEQ ID NO: 262148 - DNA, 44 bp, Homo sapiens
  chr10:79540286-79540330
  hypo
gtcctggatggagcccgagacaccctgtgcgatcttcaccttat

SEQ ID NO: 262149 - DNA, 106 bp, Homo sapiens
  chr10:79581129-79581235
  hypo
gagtggcttctgactcggagctagtctccagcctgtgctggaacttaatggagtcgctccttctgggaggttttgggggtgtcagaggccccgccctcttggaggg

SEQ ID NO: 262150 - DNA, 506 bp, Homo sapiens
  chr10:79598456-79598962
  hypo
tgaagatggctctgcggtgagggagctagacctgccagaaggccccccacagctgacccctgacaggcagcagccagtggggtggcggggccaatccccagggtgcctcactgcccacccctcctggtctgctcttgccggtggagagtgctctcttatccatgaagccagaccaacttgagaaggagctgaggatttcagctctcagagctgatggggcagccgcgggggctctctcctgcctgctgactcggaacagggcctggaaaagatccctgcctcagctgacaggtgcacttgatgcccagtcaacaccccctgtggaggatggaggcgggctccaggctgaatggctcgcctgagtgctgggaatgcggtggttgccgcaaggacgtcaggcctggaggtctcattgctggacgccagcaccacagggaactcaggtgttctttgtgcatctctgtgctttctatatttctacaaacagtcttcacgattaacttcaa

SEQ ID NO: 262151 - DNA, 540 bp, Homo sapiens; identical to SEQ ID NO: 213606
  chr10:79601537-79602077
  hypo

SEQ ID NO: 262152 - DNA, 448 bp, Homo sapiens
  chr10:79610503-79610951
  hypo
gcgcctcatacacacgggcacgcggcgccagtgccttctacgcagtgtcttcatgacagccatacagaccaattctcctacactgagatgtgccaacctcgtgctttctagcaaggctgtggggcttcccttggaccgaggtggagccacatacacctctgaaatgatgattctctcaaggaagtatagaatccaaactaaaccccaaggcaaaaggttacctgagccaagcgtagaccaagaagaacaaactgccggcaggcaaaacagcaagaaaacaaagcacacagcagggtgtaggtaaaggccgggagaggccgcctgccctcaggtgggggaagttaccacgcaccccagggcagagaaggggctcaaacccttagagggccatcccctcgggcagcttcctgggagctttgttttgacacagcaccgccatccttacctg

SEQ ID NO: 262153 - DNA, 31 bp, Homo sapiens
  chr10:79670435-79670466
  hypo
ttaagaaatgtaggccgggcgtcgtggttca

SEQ ID NO: 262154 - DNA, 42 bp, Homo sapiens
  chr10:79713478-79713520
  hypo
gacttcaaggtaaagcgtattacccttcgtcacttgcaactt

SEQ ID NO: 262155 - DNA, 104 bp, Homo sapiens
  chr10:79770245-79770349
  hypo
atagcagcaatcagcggttccccattcctcggggttacaagatttgctttagtctgtaggaaaagtaagcgcagtcagttagctgttctcggatgcatgatgca

SEQ ID NO: 262156 - DNA, 101 bp, Homo sapiens
  chr10:80061832-80061933
  hypo
acccacccaggcactgtgctcgaaattcttcctgcaaacctgcaaggtaggttctaatgatgttcccatttacccctaagcttgcgcggtggcacgattta

SEQ ID NO: 262157 - DNA, 63 bp, Homo sapiens
  chr10:80232427-80232490
  hypo
ctgaacctgaaagccggtggaggcccgctctaatgagtgtgcagctttcgctgccctcagaaa

SEQ ID NO: 262158 - DNA, 212 bp, Homo sapiens
  chr10:80540448-80540660
  hypo
ctgagcactccatcccggaagtgccagagtgctacgcagggttgggccaccaaaggtttgtcctccaaggagggtccccaagacagaaataactcaggaagccctgtcctgagtgtccctgggtgctgctgcttgggcctgcactgccgcatggtgttggtgtcagccagcggcctgtgagagccctgccaggtcatcgggaggtgtgtgag

SEQ ID NO: 262159 - DNA, 180 bp, Homo sapiens
  chr10:80588139-80588319
  hypo
gcctcaagccagcagcggcccacactctgggcagcagaatgagctcctcggtccccagagggtatctgggcagtgcaccccagcatccactacaaaagcgatgtgaggaaaggctgaaggaacaaaggcctggaaaaggatgatcccacaatgcgatgccacactcggagatctgaagga

SEQ ID NO: 262160 - DNA, 99 bp, Homo sapiens
  chr10:80726030-80726129
  hypo
tccaccctagaccgcggtaccaccactgggctgtatcacaaaggaccccatatacgtcgcatccacatgagtgctgcccatccccgcctgagctgcacc

SEQ ID NO: 262161 - DNA, 63 bp, Homo sapiens; identical to SEQ ID NO: 213610
  chr10:80739956-80740019
  hypo

SEQ ID NO: 262162 - DNA, 77 bp, Homo sapiens
  chr10:80763042-80763119
  hypo
aaaaaaaaagcattggtggcagccgagagttgagtttgagctgcctcattccagtagtatctcgtgctgatgctggg

SEQ ID NO: 262163 - DNA, 194 bp, Homo sapiens
  chr10:80766188-80766382
  hypo
ttgttactccaggcacgtccctgacccctggggcctcagggtggaggtgatgagcagagcataaatccgctcagtgcgagcaagctctgctggaatcaccatgacaaatcatttatccagcctaaaatcagaagggacatggggtgggagaggcccctgggggccgagtgggcctgttgcgcctccttggatac

SEQ ID NO: 262164 - DNA, 379 bp, Homo sapiens
  chr10:80793778-80794157
  hypo
ggggttttggaacgtatgccccagggatgaggtgggactactgtaaatgtttgttgtccaaaggccctaggtttgaggccagaatgcccctctgtaccagctcttcccgtcagctcttagacatgcccaagtctctcgtctgaagttctgcttgatccccgtgttcctcagcagctccagccttcactcactcccccactggctccccttccgccactcctccaagagggtactctccaagatcaccagggcctggctgtacctgagtcctgtggttgatctgatttgcctgcttcctggggtccgctgcctctcctttcaatactttccccagtgctcctctcggtcctcacctctacttctccgtgccatttctctc

SEQ ID NO: 262165 - DNA, 75 bp, Homo sapiens; identical to SEQ ID NO: 213613
  chr10:80840369-80840444
  hypo

SEQ ID NO: 262166 - DNA, 142 bp, Homo sapiens
  chr10:80848858-80849000
  hypo
ctccgacaggacagcgctgagcaggtacctgggctggtgccacacttggggaggtggacacgtagcctcagagcccgaagcaactggtggggttcattcccatggaggagaggttctccgtggtccacggccggagcctccg

SEQ ID NO: 262167 - DNA, 243 bp, Homo sapiens
  chr10:80855251-80855494
  hypo
ctcacctggccatgcggcctttccgggtgtcaggcaggtctctccggttaggtaagggaggcctcatccttcttacctgactgctctgagtgcagatctatgctgcttcccatcttctccaggcgcctgatctattaccttgggcttggaacgcacctaacaaaggctaccgtgaggaggcccctcggtacctgttcatctggacacatcgtgcagacccccgcaccccgtgtggctcccggt

SEQ ID NO: 262168 - DNA, 38 bp, Homo sapiens; identical to SEQ ID NO: 213614
  chr10:80870193-80870231
  hypo

SEQ ID NO: 262169 - DNA, 451 bp, Homo sapiens
  chr10:80878241-80878692
  hypo
gagagagggctccacggaagcacttgagcagagtctcaaaggccaggggcccttgaaagacagagaagtggggagaagagctctgagcggggcacccagcgtgtgccaaggccggagccaggggctctgggaggccgggctgactggagcctagtggtgggcaggcaggtttggctgctgctgtggtctggctttcagggctgcggggctgctcggccggtgctggggcttcgaatgtgacgttcaggagctgcgacctttatttggcagtggcaggacggtatccagtgtctcgagtagctccacgttggtgggccagttccatcttccaggagatggcagccaggacctagaggtccatgacgtgggtgaggggctgcccgcagggtcagagcttggagctcactgccccctttcttgtctcccataggactcacggcagctgtgttct

SEQ ID NO: 262170 - DNA, 167 bp, Homo sapiens
  chr10:80879966-80880133
  hypo
gtgtacacagacgtcgcttctgcatgccacatgaatgcacacagataacacttgcgtgcacttgcatgctcacatacacatgcacaaactcgtgttggaactacacacatacacgggcacaaactctcacaagcacacagcattctgacacacggggctgcatatcc

SEQ ID NO: 262171 - DNA, 384 bp, Homo sapiens
  chr10:80900704-80901088
  hypo
gatttttaaatttttgtggagacggggtctcacttcgttgtccgggggtgggttttgaagacagagccaatttagccctgccctgagagggtgtggtgtgcaatggagtacgactcagatcccagagccagactgagttccataaggcagtgctcaaagcctgtgtggtgaccatgacgacacaggggacgagggagaggggacgtggctgattctgcaggcagacattcggggaggaggaggcggcattgctcatgcattcattccccaggtgttgaccgagaaagtctgtcaggaactctttaagttcagagatatagcagggaataaagcagacaaaactccctgcccttacggcgcttgtactctcgtgaggaggcatgg

SEQ ID NO: 262172 - DNA, 282 bp, Homo sapiens; identical to SEQ ID NO: 213616
  chr10:80921746-80922028
  hypo

SEQ ID NO: 262173 - DNA, 193 bp, Homo sapiens
  chr10:80928400-80928593
  hypo
tcggaggctgtgtgcggactccacgagaaataatgctgtgcatcgtgtggcgcatggtcacgctctcagccctgctccctgggtatcaggtctgcttgactgatgtctcagctctgggctgtggccagtgcaggaggagagaagaggcagggacctcagtgtgacccccacaggtgtccgtccaccctggctg

SEQ ID NO: 262174 - DNA, 425 bp, Homo sapiens
  chr10:80930708-80931133
  hypo
atctcaggacaggtccgaggggctgcctgctcctgaacactggtcccttcttggacccgcactgtcagcctaaatcaagaaccccctcccagcccatgggtcctcccaccccagccagggcagcccccatggaagctttccagaaatatccacgcacagtgcggtgagctccagaaatgaaaaggctctcacactccctgctccctcccgttttccactcactgctgctcaggggagttaataagcagaggtgaaaaagctggccctgtcctgatgagatctcgtttgaggcagctgggtctgggctaatgccagagaaggaattcttcactgccgggccttcactccaccggggatgaggccagggcctagaacttagggactggcctgggctgtcgctcagaggatgccgggggccagagctt

SEQ ID NO: 262175 - DNA, 316 bp, Homo sapiens
  chr10:80953306-80953622
  hypo
gtacctgctgagtacggagccctgggctagactaagggatctgtaactggaagacattccagctgatggagagacagttgcaaggagtcagccctcatctagtgctgctacgatgggggtgtgtgacagcgacatggaggggatagggatggaaaccaagaaagagcacgaaagagtgacagttgagccataccctgatggatgggaggtgtccaggcattgcgggcagagggacagtcagaggcaaagacatggaggtgcgatcttcagagcacagtccgggaggcagggagcagccccacgttggggacaaggg

SEQ ID NO: 262176 - DNA, 128 bp, Homo sapiens
  chr10:80954541-80954669
  hypo
ctatacataatagccgctaacttttcttgaactagtcttctgcaccaggcgccgctaagcatagacaccctcgctctgctgggtggtgagaagtgtaaatggaagcttggtcccgaaagacgtcccac

SEQ ID NO: 262177 - DNA, 336 bp, Homo sapiens
  chr10:80955982-80956318
  hypo
aacacaggacacagcgctgtccctgtggtctgcgatgtccctcctgccatccatctacccacccttgggtctcacaggtgttgcaagcccagacactcacccctcggttcctgtgagctgcagccctgcctgggagcaaagcccccctgggacctggacccagcccagtgccccttggccttgaacaaaacactgatgggccccaggctcctcagagtaaaaccagttgaggcagagcgggtagataggggacctgaaagcaccttcggcccttaatattccaggaatctttctgtccagaagccagttcagtccagccgccggcctccagacaag

SEQ ID NO: 262178 - DNA, 32 bp, Homo sapiens; identical to SEQ ID NO: 213619
  chr10:80958501-80958533
  hypo

SEQ ID NO: 262179 - DNA, 240 bp, Homo sapiens
  chr10:80958773-80959013
  hypo
agcgagactcagtctcaaaaaaaaaaaaattggaaaaagcttcagggtccctcgtttcaggctggagtgtgagcccccagagcagaggggccttgtctgagggctcaagccttagaacagcacctggcagggggcgatgggcagatgttagttggataatgcttcatcatacctaggaatactgtgcggccattaaaaaatgaaaaggtggccaggcgtggtggctcacacctgtaatct

SEQ ID NO: 262180 - DNA, 239 bp, Homo sapiens
  chr10:80961348-80961587
  hypo
acgttcatggctctcgggtagaacctagtgaaacggccagaatgaattctatggacaggcacatccagcagaccaatgaccgactgcagtgcatcaagcaggtgggtgtggggcaaggcacactccgagggcggggcagatggggcgggctgcagcagcagggcatctggtgggttctggctggagacgatggcagggcctcctgaccacctacctatcgaggccgttattggcatgct

SEQ ID NO: 262181 - DNA, 57 bp, Homo sapiens
  chr10:80962989-80963046
  hypo
ctgttcctcgagaacgagggttgtgtgtcttcttattagcatcgagcagaggaatct

SEQ ID NO: 262182 - DNA, 546 bp, Homo sapiens
  chr10:80966388-80966934
  hypo
gaaggagccagggctgagagcggccacatgcagctgtacttccaggagagcctttgggagacagagtcagggccaagggcagccccacatgggagcaccccacgcgccaggcactttgccaggggctgtataagcctcatcttgtttaagcctcactgcggccccgtgatggagggctttgttgctgcttgcctgccctctttctctcctacatctctttctctccctttacttccatggaaggaggacattctccttcatttcactttcctccacccatttttaaataccttgcctcgcatgaactacattgtagcaacagtcacggaaccttaagcgaaagaaataaaaccccaccaccaagtcatgttctgtcatatccccattttacagatgaggctactgaggctcagggagctgaggggaccatcctacgtcagtggttgaaagtgggtgaaggcagagtgtggattcccgtagctcccctgccaattctgggccctgcggctcctaggcccctccctgccctggcgctggggcaggctc

SEQ ID NO: 262183 - DNA, 184 bp, Homo sapiens
  chr10:80969929-80970113
  hypo
gggaaccttgtgtgacgtgtgtccagccaggctgccacagtctccagcacattgccccgagcctgaccctgtctatctaggatgtggggacttgagactgaatcagagagtggccctcaccggcctggatggaccaggaactggctctgcctcggtcctcttgtccatgcgttcattcatgaac

SEQ ID NO: 262184 - DNA, 171 bp, Homo sapiens; identical to SEQ ID NO: 213622
  chr10:80971586-80971757
  hypo

SEQ ID NO: 262185 - DNA, 498 bp, Homo sapiens; identical to SEQ ID NO: 213623
  chr10:80974593-80975091
  hypo

SEQ ID NO: 262186 - DNA, 423 bp, Homo sapiens
  chr10:80975646-80976069
  hypo
tgagcccttggaagcggcggggcctatggctttggtgttggacccatcgtcagcctgggaaacccctaaggacggggccaggatcccagggcctggcacggaagaggtgttcatcagtatttgctgagcaactgaagaaggcacagtggacttctggctctgcctaatgatggggcactgccttagcttgcccacctcacccacttcacctgcaaaatgggcatatccattggctctgggctccgtgactcacctgccctcctcccctcttgctttcaggtggtcagtcgggtggcagcccagcaaggctttgacctggacctcggctacagactgctggctgtgtgtgctgcaaaccgagacaagttcaccccgaagtctgccggtaggtgtccgtgggggactctgcgatgtcactgggag

SEQ ID NO: 262187 - DNA, 32 bp, Homo sapiens; identical to SEQ ID NO: 213625
  chr10:81017844-81017876
  hypo

SEQ ID NO: 262188 - DNA, 50 bp, Homo sapiens
  chr10:81020970-81021020
  hypo
aggcccatccagttcgtgcttgcccaactggtgcgcgctcagctcaggcc

SEQ ID NO: 262189 - DNA, 190 bp, Homo sapiens
  chr10:81023807-81023997
  hypo
ggaaaaattacatgcggaatggaaagcaggcgctcagggtggctcctgctggaatgagagctggagtgcaggctccgtggttcctgggcatgcgggtgtggctcagttctcaccttgcagatggagtgggactgttgacccaggccagcctggggactgcctcctcacctccctgcgcaggctgaccttg

SEQ ID NO: 262190 - DNA, 47 bp, Homo sapiens
  chr10:81029634-81029681
  hypo
gcgtacctgctccccgtgacacccgacccgatcgatgctaacaaagg

SEQ ID NO: 262191 - DNA, 269 bp, Homo sapiens
  chr10:81032443-81032712
  hypo
taggttagaatggatcgaggtgagggagtctggtcacaaggatgcagtttggagaggtgaggggagctcagtgggttcactttagacgagttgggtggtgcgtgcttttacgttttacgctgagacatttgaggagtgcttggaagtctggattaaggctcagcattggcagttcgagtctgggatgattccctgctgctgtcccagccccagctgtggtcaccatgaggtgagctggaaggccccaaggtcctcggcaccagcccctg

SEQ ID NO: 262192 - DNA, 226 bp, Homo sapiens
  chr10:81035988-81036214
  hypo
aagatggtgactgagcgcagccagttccccagccctcagcgtcctcatgtacttcaggaggacaggccagctgagacacgatggacagcccaggctgagacacgctggcctgggaggcgcttttggctcctgtggccacgtggggacagtgaacagtgaaagaaaatggaagttttccccagtccccagttcatgtggggctctcttatcccggatgtggatggct

SEQ ID NO: 262193 - DNA, 433 bp, Homo sapiens; identical to SEQ ID NO: 213630
  chr10:81036657-81037090
  hypo

SEQ ID NO: 262194 - DNA, 290 bp, Homo sapiens; identical to SEQ ID NO: 213631
  chr10:81050747-81051037
  hypo

SEQ ID NO: 262195 - DNA, 187 bp, Homo sapiens; identical to SEQ ID NO: 213632
  chr10:81058000-81058187
  hypo

SEQ ID NO: 262196 - DNA, 77 bp, Homo sapiens; identical to SEQ ID NO: 213633
  chr10:81059003-81059080
  hypo

SEQ ID NO: 262197 - DNA, 111 bp, Homo sapiens; identical to SEQ ID NO: 213634
  chr10:81060509-81060620
  hypo

SEQ ID NO: 262198 - DNA, 475 bp, Homo sapiens; identical to SEQ ID NO: 213635
  chr10:81063477-81063952
  hypo

SEQ ID NO: 262199 - DNA, 389 bp, Homo sapiens; identical to SEQ ID NO: 213636
  chr10:81065710-81066099
  hypo

SEQ ID NO: 262200 - DNA, 152 bp, Homo sapiens
  chr10:81070817-81070969
  hypo
gcagccgccacaggccgctcccagcagccatccacacagcgacctgacctttaacccctcctcagccttagagggtcaggccggagcgcagggagcgtccgacatgccggagccttcgctggatgtaagttggggtcgccactcgccttggc

SEQ ID NO: 262201 - DNA, 42 bp, Homo sapiens
  chr10:81072192-81072234
  hypo
ggggtgccccacactcggtgcagtggccggggtatgtgtggg

SEQ ID NO: 262202 - DNA, 181 bp, Homo sapiens; identical to SEQ ID NO: 213637
  chr10:81073340-81073521
  hypo

SEQ ID NO: 262203 - DNA, 165 bp, Homo sapiens; identical to SEQ ID NO: 213638
  chr10:81142185-81142350
  hypo

SEQ ID NO: 262204 - DNA, 263 bp, Homo sapiens; identical to SEQ ID NO: 213639
  chr10:81145945-81146208
  hypo

SEQ ID NO: 262205 - DNA, 162 bp, Homo sapiens
  chr10:81861006-81861168
  hypo
ggtagttcctccaccggtgcttccaaccaaatcgccaggattgtggattatcttactttctcctaagggtttaaaagtgaaaattccagccaaaggagcgactagtggattggtggtcgctggattctcaatccttacatcgctgggaccaacataggtgaa

SEQ ID NO: 262206 - DNA, 57 bp, Homo sapiens
  chr10:81915152-81915209
  hypo
ctttctctcctcagcgaggacacggtgcttcacccacccagtcgccctcaccagaaa

SEQ ID NO: 262207 - DNA, 107 bp, Homo sapiens
  chr10:81931376-81931483
  hypo
ctcagctgggtgcccgatgggcattcgacatcatcatggggcctctggcctgttagatgctttcctctacatggcagcttcggatcggctcttcatctccagggctc

SEQ ID NO: 262208 - DNA, 165 bp, Homo sapiens
  chr10:81966466-81966631
  hypo
ttcccatccactgcacactgcgcgccatcgtgcgcttcaccattcttcattacctagctccttactgaaggacatttaggttgttgcctatgtttggctgttacaaacaagctgctggttcgattttcctttttttttttttttttctgagacggagtctcgatc

SEQ ID NO: 262209 - DNA, 142 bp, Homo sapiens
  chr10:81968101-81968243
  hypo
cgggtgtgagttaccgcacccggcctcttttgttgttttctaataagtatatatgactatcatttccctcaaaagtctgctttagctgaatatcacaagttttaatatgctatgcttttgttatcacttagttatacatatt

SEQ ID NO: 262210 - DNA, 79 bp, Homo sapiens
  chr10:82363370-82363449
  hypo
gccgagcccagcgcgcccgggacgagtaccgacaccactcgctccgtgctatccagaagggcacggtcgctggcctcag

SEQ ID NO: 262211 - DNA, 80 bp, Homo sapiens
  chr10:82573973-82574053
  hypo
caccggtgggaaccggggccaacgggagttccgggtgggcatggtctcagtgggcccgcactcagcggctggccgtccca

SEQ ID NO: 262212 - DNA, 162 bp, Homo sapiens; identical to SEQ ID NO: 213643
  chr10:84618971-84619133
  hypo

SEQ ID NO: 262213 - DNA, 33 bp, Homo sapiens; identical to SEQ ID NO: 213644
  chr10:86016117-86016150
  hypo

SEQ ID NO: 262214 - DNA, 177 bp, Homo sapiens
  chr10:86175509-86175686
  hypo
gatcagctgagttgaccagacggcagagatggcggctgcccctcctcctggaaactcagtccttctcaggcagactccttgttactgctggctggctggaattccaagtcagtgggtcttaacgtgtaaggtgccgtgcaagtgggcctgcagatcgatgctgcttggatccttgga

SEQ ID NO: 262215 - DNA, 178 bp, Homo sapiens; identical to SEQ ID NO: 213646
  chr10:86306481-86306659
  hypo

SEQ ID NO: 262216 - DNA, 266 bp, Homo sapiens
  chr10:86361898-86362164
  hypo
cgccacaaatgcacactccataccacgtatacacacacggagtttctctgtccttccccccgtgttctccagggctgacctgtctccgtgtgcatttgtgacacgcaggcaaagctaagggagcaactgcaggtggcacctctccgcacctctctctgcacctctctctccgcacctctcctctctgcacttctctctctctccgcacctctcctctccgcacctctctctccgcacctctctccgcacctctcctctctgcactt

SEQ ID NO: 262217 - DNA, 147 bp, Homo sapiens
  chr10:87965994-87966141
  hypo
tcacctggaggcccactcagcacagaccacccctgaccggtccagggccccacccactctcaggtctcccagcatctggccatccctgtccccaagcagccccagctcgcctgccggacaactcaccatactcgctgtcgtagaaca

SEQ ID NO: 262218 - DNA, 203 bp, Homo sapiens
  chr10:88200328-88200531
  hypo
tacaggcgtgagccactgcgcccggccttttttcactgcttttgaggcctgcctcttcctcctttcctgtgtgtgatgggtttctgatttgctcttaaaatcttgtcattggaaataagaaaaagggatataaagatcttgcggggcctccagagccacgatgagaactttggtcttgatcctgaaatcggcggtacccagag

SEQ ID NO: 262219 - DNA, 38 bp, Homo sapiens; identical to SEQ ID NO: 226544
  chr10:88224575-88224613
  hypo

SEQ ID NO: 262220 - DNA, 35 bp, Homo sapiens
  chr10:88241398-88241433
  hypo
ggattacaggcgtgaaccaccgcgccgggctgaaa

SEQ ID NO: 262221 - DNA, 79 bp, Homo sapiens
  chr10:88280086-88280165
  hypo
gccaaaagaccacgtcttttacaaatacatagtgaaatactgatgaaataacgtcagcgattttccaacattaaggaat

SEQ ID NO: 262222 - DNA, 33 bp, Homo sapiens
  chr10:88286949-88286982
  hypo
aagctttaaattgtgttcagcggccaggcacgg

SEQ ID NO: 262223 - DNA, 107 bp, Homo sapiens
  chr10:88294597-88294704
  hypo
tctggcctttgtgtaactggctttattatgtatgaatgttggctcccttggttgaaaaatgatcactctattgggttctcccagcttgaggcgaaaccttttggaag

SEQ ID NO: 262224 - DNA, 164 bp, Homo sapiens
  chr10:88422751-88422915
  hypo
ggcttctcagatcaacgctgtccaggtgtgcccagggatgggtgtcaaccttcctcggggccaggtgtgcccagggatgggtgtcagccctcctcagggcctgcagctctgcttcccctagatgtccccaggaaagctccgtgcgccaccggctcctgttccca

SEQ ID NO: 262225 - DNA, 653 bp, Homo sapiens; identical to SEQ ID NO: 213648
  chr10:88441137-88441790
  hypo

SEQ ID NO: 262226 - DNA, 224 bp, Homo sapiens
  chr10:88470510-88470734
  hypo
gccttgcttcggggcgctggttcatgaagctcgctctgacagcagggctgagtgtgggcggtcgaagcggcttttgcccgagacagaggccggtgccacggcctgctctgctctcgaaggcaaagtgcctcatccatccaggctgcgctgttcatggacaccttgtgttctggggatggaatgaagcacccagcacagcgtctgtcacacgggaggtgcccttc

SEQ ID NO: 262227 - DNA, 35 bp, Homo sapiens
  chr10:88587611-88587646
  hypo
taaagaaaaaagttgcaggccgggcacggtggttt

SEQ ID NO: 262228 - DNA, 781 bp, Homo sapiens
  chr10:88702274-88703055
  hypo
caaagaggctgtggaagagccgctggtgctgctccaagctgcgctgagtggcgaagagtgcgttgtggaggccgtgaagggaggcgttgagggaggcggccccggccccggcctcggcctcgcagcaccgcccgacattcttgacgtcgttgctcaggctctggagctcccgcgccagcccggccagggcggtggtggcggcctcctcgcggcccgcgtcgtggctgggctccaggtgctctgccggccgcgggggctccgaggcctgctccagggccgtcactcgggcggccagctcgtcccagccgagcgcctgctcctgcagcccgctagcggcgtcctgcagggccacgcggatctgctcgtagctcaggggcagcggtcccggcgtctgctcagacatctcctccagcacctcctccccgaagagcgcggccagcaccgcctcgtgccgcagcgcgtcctccagcagggcggcgaaggcgctgtgcagctggcgcacctcgtggcgggcctcggccgcggccgccttcagcgcgcccacctcgtcatccagcgcctgcacttggctccggagccgcgacgtggccgcccgcgcccgctcgccctccgctttgtgcgcgtccacggccagcgacacggcgtccacggcgttctgcagggcctgcagggaggagccgtccagctgccgccgctcgtccaggctcacctgggtctcctccagggcacgcgtggcgtccctctggccctcccggatgacgtccaggtctaaatagagctt

SEQ ID NO: 262229 - DNA, 120 bp, Homo sapiens
  chr10:88857179-88857299
  hypo
tggtggggggcctacaaaaattagccaggcgtggtggcggggagggggttgggcagtgcttgtagttccagctacttgggagaaccacttgaaccagggagagaggttgcagtgagccga

SEQ ID NO: 262230 - DNA, 39 bp, Homo sapiens
  chr10:89362124-89362163
  hypo
aagtattagaagtgtcagctcgccgggcggggtggctca

SEQ ID NO: 262231 - DNA, 116 bp, Homo sapiens
  chr10:89892095-89892211
  hypo
acatatgagaggaacgacaggctcaaaatatgaagacttaatccagacacctctgtgtctctgaacttgcgttgtttcttctttggaggtgaagtacacatcgttttactccgggc

SEQ ID NO: 262232 - DNA, 277 bp, Homo sapiens; identical to SEQ ID NO: 213650
  chr10:90029772-90030049
  hypo

SEQ ID NO: 262233 - DNA, 31 bp, Homo sapiens
  chr10:91589220-91589251
  hypo
agccccgcgcttgcgcgccaatcacggccgt

SEQ ID NO: 262234 - DNA, 332 bp, Homo sapiens
  chr10:92913458-92913790
  hypo
cggttgctctctgcgtgggggcgcagtctccactgcagatcagcacccgcccgcggggaggtggccacgtttctctcctgaacaccagttgatggcccgccttcctaaaaggccgtgtggcgtctccagtggctacaacggggcgcgccaatggctcgtgcgtggaggtaacggtgccgcggggttgccaggggcgtaccacgaccgggccgcgcactctcgctgccgccctggcgttttggttgtaaattgagagattttgacctctggaaaagctcccaaatggaaagtgctggggttgaggacatcttcctaacgacaataaaattagc

SEQ ID NO: 262235 - DNA, 136 bp, Homo sapiens; identical to SEQ ID NO: 213652
  chr10:93567140-93567276
  hypo

SEQ ID NO: 262236 - DNA, 214 bp, Homo sapiens; identical to SEQ ID NO: 213653
  chr10:93572698-93572912
  hypo

SEQ ID NO: 262237 - DNA, 42 bp, Homo sapiens
  chr10:93744096-93744138
  hypo
tacatattgaagttggtaatcgagtaaacaacaatgttttaa

SEQ ID NO: 262238 - DNA, 319 bp, Homo sapiens; identical to SEQ ID NO: 213655
  chr10:93811840-93812159
  hypo

SEQ ID NO: 262239 - DNA, 37 bp, Homo sapiens; identical to SEQ ID NO: 213656
  chr10:93843638-93843675
  hypo

SEQ ID NO: 262240 - DNA, 85 bp, Homo sapiens
  chr10:94156009-94156094
  hypo
gacagcaccgcactaagaataaaaagctgaacagagggtgtcaggtttctggtctggcacgcaaggagctcggcagtcgccactc

SEQ ID NO: 262241 - DNA, 77 bp, Homo sapiens
  chr10:94156300-94156377
  hypo
taagtaatgagctgcgggatggtcagtgtgcaggagcctgaaagtcaaaacctccagggggccgggcacggtcgttc

SEQ ID NO: 262242 - DNA, 37 bp, Homo sapiens
  chr10:94219877-94219914
  hypo
gccaccacgcccagccggtgtgaatctcttaaagctt

SEQ ID NO: 262243 - DNA, 37 bp, Homo sapiens; identical to SEQ ID NO: 213657
  chr10:94310596-94310633
  hypo

SEQ ID NO: 262244 - DNA, 31 bp, Homo sapiens
  chr10:94342632-94342663
  hypo
gtgctgggattccaggcgtgagccagcgtgc

SEQ ID NO: 262245 - DNA, 102 bp, Homo sapiens
  chr10:94770433-94770535
  hypo
tgacaaagcaagactccatctcttaaaaaaaaaaaaaaaaaaatggactcggcaacttttaaactgagtctttaggggactgttggacgtgtttcaaagagg

SEQ ID NO: 262246 - DNA, 80 bp, Homo sapiens
  chr10:95143644-95143724
  hypo
ggccggctctaccccgtaggcctccacatagccaggattccattagaaccccatggatgctctcacgcagagcttgcaaa

SEQ ID NO: 262247 - DNA, 158 bp, Homo sapiens
  chr10:96154781-96154939
  hypo
ctctcagcaaagaggcgtcctagagagggtggctcctctctgcaggcaggtcgttccaagaggataagtcctctctgaagctggtcatcttgtgacctgctcagctctggccgagctgggggcttttttttttttttgagatggagtctaactctgtc

SEQ ID NO: 262248 - DNA, 92 bp, Homo sapiens
  chr10:97096180-97096272
  hypo
cattcacttggcctccgtagatggaccaggggcgagacgtgcagcccaccctgccaagtgagacgccaagtgcacacgcggcatgctgcagt

SEQ ID NO: 262249 - DNA, 37 bp, Homo sapiens; identical to SEQ ID NO: 213663
  chr10:97118425-97118462
  hypo

SEQ ID NO: 262250 - DNA, 80 bp, Homo sapiens
  chr10:97317229-97317309
  hypo
tttacaaaaaaaccgggacttcagcagaactgagtcccacctcagcatcagccagcatcaccacccgcacacctgacttc

SEQ ID NO: 262251 - DNA, 79 bp, Homo sapiens
  chr10:97322744-97322823
  hypo
gtatttattgagcacgtctaggctgctatgcaccgtactatacttgtgctaagagctttacatgcgttaactcacatcc

SEQ ID NO: 262252 - DNA, 74 bp, Homo sapiens
  chr10:97326022-97326096
  hypo
agtaaatctacaaacgcgtgcctcagggcacggaactgatttgaagatgatggaacgcccgagccaagaattcc

SEQ ID NO: 262253 - DNA, 44 bp, Homo sapiens; identical to SEQ ID NO: 213665
  chr10:97617586-97617630
  hypo

SEQ ID NO: 262254 - DNA, 94 bp, Homo sapiens
  chr10:97801082-97801176
  hypo
tcagccacctgatacgtacctactctctcacttccctcaggcctttgcatgccttaccttatcatgaaacaaagtccacccatttctttttttt

SEQ ID NO: 262255 - DNA, 411 bp, Homo sapiens
  chr10:98129736-98130147
  hypo
gactgaaagccgggcgtgtctgactccacaactcctgctgtgaatcatcacactctgccccggccccagcgtctccgggacttaccccagagccacagaagcggccgagcctgggcgctgagctgtcgtagccgtcgtaggcttccatgtagtcgtagccgcagtcggcctcctcctcaacctcaaaggtccggaatgtcagctccacgccgtagccgtcctctgccacgatcacccagtcacagcgggcctcgctcgggtagttgttgtccccaaactgggcgtgggaatagagctctttggtctgcacttcagccttcagcctgcccccgcactctggagcagagagaagtgagatgtcccctcagcacaagacaccctcgtgcctcccgcctgcgtctgctcggcttt

SEQ ID NO: 262256 - DNA, 96 bp, Homo sapiens
  chr10:98144322-98144418
  hypo
ctcacctctgaacccgcatacctgagaagaagtgggccctgaagccgcgcttggagacggtgttgtcggacttgaactccacgcgcatgttgttgc

SEQ ID NO: 262257 - DNA, 95 bp, Homo sapiens
  chr10:98292766-98292861
  hypo
attgtgtgaaacaatcgcataagatttagcattctctttaccattttttctccggtataggacgaggcacagcattgacacgacaaggaaagttg

SEQ ID NO: 262258 - DNA, 38 bp, Homo sapiens
  chr10:98338545-98338583
  hypo
ttcatggccgggtacggtgactcacacctgtaatccca

SEQ ID NO: 262259 - DNA, 136 bp, Homo sapiens; identical to SEQ ID NO: 213666
  chr10:98350862-98350998
  hypo

SEQ ID NO: 262260 - DNA, 81 bp, Homo sapiens
  chr10:98364556-98364637
  hypo
ttgtaataaggggccggaccctttgacacaaaacaaaatgcaaagtacacactcaaaagtataattttttttttccccgag

SEQ ID NO: 262261 - DNA, 176 bp, Homo sapiens
  chr10:98380115-98380291
  hypo
aaacgaaaggactccgatcgtttcttctggttgagctgccactctttgaagtggagcacagcctcatccacgttgacaatgcccagcttcacctgctcctggagggtgataagctgccgctggcctggcgttttcattcccgcaaaagggtcatatatactcgactggggcctgtc

SEQ ID NO: 262262 - DNA, 144 bp, Homo sapiens; identical to SEQ ID NO: 213667
  chr10:98469423-98469567
  hypo

SEQ ID NO: 262263 - DNA, 95 bp, Homo sapiens
  chr10:98482590-98482685
  hypo
accctgctccactccgtgcactggctctctccaggttctgcagtcggtccctgcaacactgggtggtaggtgaattggctcgaggaagaatggag

SEQ ID NO: 262264 - DNA, 120 bp, Homo sapiens; identical to SEQ ID NO: 213668
  chr10:98526399-98526519
  hypo

SEQ ID NO: 262265 - DNA, 90 bp, Homo sapiens
  chr10:98528136-98528226
  hypo
acctcctgctgtgtgacgcggttcctaacagaccacggactgatacaggtctctgtaccctggtttaatgggtaccgggtttcagcttgg

SEQ ID NO: 262266 - DNA, 34 bp, Homo sapiens
  chr10:98676070-98676104
  hypo
agccaccacacccggcccccttgaaagtttatat

SEQ ID NO: 262267 - DNA, 45 bp, Homo sapiens
  chr10:98713009-98713054
  hypo
atatcaaaaaatacttgagccgggcgtggtggctcaggcctgtaa

SEQ ID NO: 262268 - DNA, 54 bp, Homo sapiens
  chr10:98746417-98746471
  hypo
ttattatagtgcagcgtgtacttgacttttccattgggccgctctacaaaaaaa

SEQ ID NO: 262269 - DNA, 60 bp, Homo sapiens
  chr10:98982990-98983050
  hypo
tgtagttttggttacgattcattacctgctcctttttttacggttcgttacctgctcctg

SEQ ID NO: 262270 - DNA, 37 bp, Homo sapiens
  chr10:99108579-99108616
  hypo
tacaggcgtgagccaccgcgcccggccaacactatcc

SEQ ID NO: 262271 - DNA, 393 bp, Homo sapiens
  chr10:99206759-99207152
  hypo
ccggccttttcccggttttttaaactgcagcttccagtcctgcggtccgatcctcttcgcggcccctcatccccacttcagtaagctttctctggttgaaaaagccgaactctggttgtgtgggcccgtcatcaaaagataagcagccccaaaataaagttgttactctttttcttctcagcgtgttagcccagaagggaggtctgcacatgaataaaatgctactctttattgatgttgggtatctcctacttgagattgcaaacatcctgagagcagcgtctttgtccagatgacattcgccacgactttgatctcagttcacctgacttctgatggctttgccgtctgtccttccctgtcccctcagtcgactttcccattgggaaacag

SEQ ID NO: 262272 - DNA, 251 bp, Homo sapiens
  chr10:99240758-99241009
  hypo
ctcgtgcccgagttcggggttctggattctctagagaggacctaggggaaaacaggatagagagaacctgcaattacccagttcaaatgtttgaagaaataaacattttacattagtcacactcaccccctgggcatggaagcagagccaagccctgttaagagtaaaaacagcccaggaaggtgttcctgaggtaacggcattacagataccagtaaggacagaaggcttaagagcgatcctcagactga

SEQ ID NO: 262273 - DNA, 124 bp, Homo sapiens
  chr10:99329947-99330071
  hypo
tactgcctgtcaccgccggtgaacctgctgctggagcacacggaggaggagagcctggagccccccgagcctccacccagcgtgcgccgtgagttcccgctgaaggtgcgcctgtccacgggca

SEQ ID NO: 262274 - DNA, 328 bp, Homo sapiens
  chr10:99358763-99359091
  hypo
atgctgaggcaccttcgcttggcccagtgtcctggtccaggcctccttctgcctgctctcacctctctccttcctctggcagccactcaagccacagtggagatgaccgtcagcatggcccaggtcggggctgacgcggccatggtggtgaccccttgctactatcgtggccgcatgagcagtgcggccctcattcaccactacaccaaggtgtgtgtgaggcctgagaccaagaggaggctctgcccagggagaggagataagggaagctgggaatagggtggtgcttcacatgaacggcagctataggaaacgggtggactgccac

SEQ ID NO: 262275 - DNA, 191 bp, Homo sapiens; identical to SEQ ID NO: 213670
  chr10:99626199-99626390
  hypo

SEQ ID NO: 262276 - DNA, 172 bp, Homo sapiens
  chr10:100013352-100013524
  hypo
gacgaaagtcagtccggcccagattgtagatctgtgtggagaagcgcaataggcggcggtatccgtagggccagtccatgtgatccgcagacttggagaggcagttctcctcgtgggcacaatacagctggctgagcgggcggtcctccaagtaggccgtctcctgcactag

SEQ ID NO: 262277 - DNA, 78 bp, Homo sapiens
  chr10:100127560-100127638
  hypo
tcactattaccaagcgaggccaggctgctctgggagtgtggcaggaggccgaaggcggctgcacgctgccgtaacaag

SEQ ID NO: 262278 - DNA, 174 bp, Homo sapiens; identical to SEQ ID NO: 213671
  chr10:100170637-100170811
  hypo

SEQ ID NO: 262279 - DNA, 142 bp, Homo sapiens; identical to SEQ ID NO: 213672
  chr10:100171092-100171234
  hypo

SEQ ID NO: 262280 - DNA, 426 bp, Homo sapiens; identical to SEQ ID NO: 213673
  chr10:100178510-100178936
  hypo

SEQ ID NO: 262281 - DNA, 211 bp, Homo sapiens
  chr10:100194215-100194426
  hypo
tcggatgctggcaacgtctgcactggccactgtgattcatgtaacaggcatctgccacctgcagcatttgccactgacaccatgacctatctgggctaaaatgactcatgaaacaatgtttgtgcatttgagaaatgcctcaatatgggtagttgctcatatcgccacaaaactaaagtcccagagcttcacactccgcagcttcccaatc

SEQ ID NO: 262282 - DNA, 86 bp, Homo sapiens
  chr10:100207454-100207540
  hypo
tagccctgccacacgcatctctttgctcagcccaccgttgagatcgttcactcactatgctttcagtggtcgaatgaattccatca

SEQ ID NO: 262283 - DNA, 63 bp, Homo sapiens
  chr10:100217102-100217165
  hypo
tctggattatttcgcgctcggcaacccatttccccgggtgcccctgggcgagccatggatcct

SEQ ID NO: 262284 - DNA, 240 bp, Homo sapiens
  chr10:101493073-101493313
  hypo
aaaaataaaattaaaacaaaattttaaaatattgattagaaaataaccatagtaaacccattacatattgacataatatttttttgaaaaagaaatattcctaaacaacaacaacaaaaaaagcaaaagagtggaaatatatttttgcaagtttcttcagtatatcttaatggaagacagctggattctcatgcccgctgcttcattcagtctaacatgtcaagtagcctcttgaaaacg

SEQ ID NO: 262285 - DNA, 43 bp, Homo sapiens; identical to SEQ ID NO: 213675
  chr10:101493373-101493416
  hypo

SEQ ID NO: 262286 - DNA, 37 bp, Homo sapiens
  chr10:101769082-101769119
  hypo
ctccaccatgaccaaagctgcatctccagctgaacag

SEQ ID NO: 262287 - DNA, 223 bp, Homo sapiens
  chr10:102180363-102180586
  hypo
gcaggaggagaaagcgtcaaagatgattccttaccttttccttggtagcgctttcaattatgactaagtagttatttgtgcaagtatttgtttagctgccttccccacaagattataaacaaccctaggacagggatttatcttgaacatcttacttaggtacatgctgtagcagggtgtgtggcacatagtggtgtttaaaaacgatgtgttaaggctgggc

SEQ ID NO: 262288 - DNA, 203 bp, Homo sapiens
  chr10:102409486-102409689
  hypo
gaagaatttcagcgcgggcagtgccagtaaatgctgtgcatgtttaaaagtcatttccataagtaagtgcaatttctctactgtttgcccctgtttaatgaagtgaaatcttgtttgcattcctcccaatttcccaacgaaaggcgcccaaccgttcgcacaaaaattacgccgcccaaattaaaactcgggctctaagggag

SEQ ID NO: 262289 - DNA, 203 bp, Homo sapiens
  chr10:102748645-102748848
  hypo
cagggggatggagtgagctacgaggaaaccactattccccgacccagcgcctaccacaatctgtttggattaccactgattagtcgtcgagatgctgaggtggtactgacgagtcgtgagcttgacagcctggccttgaaccagtccacggggctgcctacccttactctaccccgaggaacgacctgcttaccccctgcctt

SEQ ID NO: 262290 - DNA, 317 bp, Homo sapiens; identical to SEQ ID NO: 213676
  chr10:102766308-102766625
  hypo

SEQ ID NO: 262291 - DNA, 262 bp, Homo sapiens
  chr10:102770159-102770421
  hypo
tccccatccagaggtcgtggcagagggggtctggccttccgaggcttgtggtagcgcccattggtcatgctgggggcaggggtaggcaccggggatggggagcgtctacctggagacttgccttgaccccggctgctgcggctgcggctgcggctacggctgcggctacggctctgagcccggccccggatctggctctgcggagggtgctctcggctcaggggttctgtcagcagccagttaggccgcaggggccggggag

SEQ ID NO: 262292 - DNA, 61 bp, Homo sapiens; identical to SEQ ID NO: 213679
  chr10:102872322-102872383
  hypo

SEQ ID NO: 262293 - DNA, 88 bp, Homo sapiens
  chr10:103033097-103033185
  hypo
tcgtgcttttcaacatttgtaagcaggcggggaataaggtaagcttgtggactccgaggctcgtgtgcgcaggcgcacatgcatgcag

SEQ ID NO: 262294 - DNA, 152 bp, Homo sapiens
  chr10:103198986-103199138
  hypo
aaattggatgtgtgcctgagcgcttcatcctgggctgtaatttcatcttttagctaagaaccacaaggtacacgagcaaagcaccctgtaaacaataatactgtggaaaaaaaataaacaaggtcgtgtttctggtacgttgatccgatggt

SEQ ID NO: 262295 - DNA, 34 bp, Homo sapiens
  chr10:103259007-103259041
  hypo
tttttttgagacaggagtctcgttctgtcgggct

SEQ ID NO: 262296 - DNA, 167 bp, Homo sapiens
  chr10:103372828-103372995
  hypo
gctggcccccagcccggggctagcacgcctccgtgatcacagcccccagcctgtggggctccagcctgctccccccaccctcaccccacccgggggccgagagcagattactgagaacaatttctttgtgactgtgtaattccctccgtgaccgcggcagtgggcag

SEQ ID NO: 262297 - DNA, 271 bp, Homo sapiens
  chr10:103425893-103426164
  hypo
ccattttccactctccgctcccacacacttagcctctccactccctgctggtctttccttccctctttcctacgattgctagaatgatttgttttgaacagcgacaggtttataggttagccgacacctctgctctgtggaattttaattaacttctctcatcgtcaatatgctaaggaatggggtctccattctccggggtcagcaatgtgtttcaggtcctgctatatcagccgtcaaattgaagaattaatgacgtggctaatcggct

SEQ ID NO: 262298 - DNA, 73 bp, Homo sapiens; identical to SEQ ID NO: 213684
  chr10:103553397-103553470
  hypo

SEQ ID NO: 262299 - DNA, 124 bp, Homo sapiens
  chr10:103555064-103555188
  hypo
tgcctcagtcgctgcgcaaacgtgacttcagttcatgtctaccgcccttaaatctacctgagctacctcacagatagaaccttgcaatttaaactaattaatcatgacgcgctgtgaacatctg

SEQ ID NO: 262300 - DNA, 129 bp, Homo sapiens
  chr10:103588893-103589022
  hypo
gctgctccagaccctcaggccggtgacacacggtggacaattcaaattcatcgtccacgctgtctgcgggagcggtgaggacagccgcgcctcaggcccagcctccgcgacccctcttcaaatcactgc

SEQ ID NO: 262301 - DNA, 91 bp, Homo sapiens
  chr10:103720633-103720724
  hypo
aaaactccgtctcaaaaaaaaaaaaaaaaaaagaagattaaacaaataaaggtgcgagatcaagctgaacgtgaaagtggggttacagctt

SEQ ID NO: 262302 - DNA, 201 bp, Homo sapiens
  chr10:103817633-103817834
  hypo
ttggactagccatagcgccagtgcctgggaaggcacctgttacttagcagacgggcctttccctgaggaagttagagaacactctgcttcaccacctcttgttggaagcctgacatcagccaggcctacccgcagccaaccggaggcttaaacctctccgagatgctgtgcttcagcggtcacgctcctggttcactttcc

SEQ ID NO: 262303 - DNA, 42 bp, Homo sapiens
  chr10:103897007-103897049
  hypo
atcgcttgaacccaggagaccgaacccatgagtgtcatgggg

SEQ ID NO: 262304 - DNA, 144 bp, Homo sapiens
  chr10:104140854-104140998
  hypo
gtgccatctcaattctctaccgtctccagaccccatgcccatggagcctcaaggccaaaagcctctcgcctcagcccacctgacttccgctgctggcgacactaggacacctggccatccaccgcccccagagattccatctga

SEQ ID NO: 262305 - DNA, 137 bp, Homo sapiens
  chr10:104161594-104161731
  hypo
agcgtctggggctgcgcagcctggtagacacgtaccgacagacaacctcacccagtggcagcctcctgcgcagctacgaggtgggttggcctgtgccctgccccctccccagcctcctttcccgatctgagtccagg

SEQ ID NO: 262306 - DNA, 42 bp, Homo sapiens
  chr10:104198522-104198564
  hypo
ccaagacttctaggccgggcacagtggctcacgcctgtaatc

SEQ ID NO: 262307 - DNA, 34 bp, Homo sapiens; identical to SEQ ID NO: 213685
  chr10:104230570-104230604
  hypo

SEQ ID NO: 262308 - DNA, 199 bp, Homo sapiens; identical to SEQ ID NO: 213686
  chr10:104239074-104239273
  hypo

SEQ ID NO: 262309 - DNA, 129 bp, Homo sapiens
  chr10:104384282-104384411
  hypo
ttcttttaaaataacgtgaagtttccagcgggaaccagcaaatcaccaaaagcaaaaatggaggagcagctagggtttgtcctcatttttgatctggccatcccctcccccaaccgagtccaaaataag

SEQ ID NO: 262310 - DNA, 526 bp, Homo sapiens
  chr10:104416699-104417225
  hypo
cctggggccctgcagctccacgcagcacttggtggccctgccgggcggcgcccaaccagtgcactcaagccccgtgttccccccatcgcagtatcccaatggctccgccgcccagcagcccatgctcccccagtatggcggccgcaagattctcgtctgttctgtggacaactgttactgttcttccgtggccaaccatggcggccaccagccctacccccgctccggccactttccctggacagtgccctcgcaggagtactcacacccgctcccgcccacaccctccgtcccccagtcccttcccagcctggcggtcagagactggcttgacgcctcccagcagcccggccaccaggatttctacagggtgtatgggcagccgtccaccaaacactacgtgacgagctaacgccacgcaggcggcggggcgctggggaatcttcctccccagcccccgggctcgggagttatgcatccagagacctgcccttctaccttcctcgcctcccctcttcctcattcc

SEQ ID NO: 262311 - DNA, 57 bp, Homo sapiens
  chr10:104456328-104456385
  hypo
tttaaaatgcaaaaattcctgtcctcacggagcttaccttacagtgcaagagaaagc

SEQ ID NO: 262312 - DNA, 101 bp, Homo sapiens
  chr10:104737943-104738044
  hypo
acgtaagccaccatgcctggacttttttttttttttttaagctccacttagagccatctcaaacatacgattttcaaaactggactcgattttttttttcc

SEQ ID NO: 262313 - DNA, 120 bp, Homo sapiens
  chr10:104746123-104746243
  hypo
agtatgggtggtgatggaccatttgtaaagcctcagaagccaaactggaattaatgtgaaagttatagggaagttagtttcagcttaatcaaagtagaatttccaaaaagtagagccatt

SEQ ID NO: 262314 - DNA, 41 bp, Homo sapiens
  chr10:104793215-104793256
  hypo
ggattacaaataggcgtgagccaccacgcctggacaatcta

SEQ ID NO: 262315 - DNA, 94 bp, Homo sapiens
  chr10:104812049-104812143
  hypo
aaaaaaaaaaaacccaaaccgagtgtgtctgtatttctgtttgcccaggggtagtacttaccattaggaaggcgatttaccatttaggagatcc

SEQ ID NO: 262316 - DNA, 336 bp, Homo sapiens; identical to SEQ ID NO: 213689
  chr10:104837797-104838133
  hypo

SEQ ID NO: 262317 - DNA, 31 bp, Homo sapiens
  chr10:104874862-104874893
  hypo
gaaaatagcctttggctgggcgcggtggctc

SEQ ID NO: 262318 - DNA, 146 bp, Homo sapiens
  chr10:105127015-105127161
  hypo
ctcaaaagttaaataaataaataaatgtaatgtaatgcatgcagctcgattaacttttacaaaagtaaaaatgacaaaaaaaaaaaaaaagtaagcactattcaggtcaaaatgtaaaactaccagtatctcggaagcctccctct

SEQ ID NO: 262319 - DNA, 33 bp, Homo sapiens; identical to SEQ ID NO: 213691
  chr10:105238592-105238625
  hypo

SEQ ID NO: 262320 - DNA, 321 bp, Homo sapiens
  chr10:105345023-105345344
  hypo
aggcggggacgatccgggtaggagacaaagggcgagctccccttcctccaggctcatgatggtgttgctaaggaatcacagacacctaaggtgagttctgggcgggacttggtcatcttgtcagtggcccttatatgtcacctgggagactcacctggggggtgaggcgagggaaagcgcggattattgagtttgatgcccagaatcagatcaacccatagtctcacagatacataaacagtccagaagcacacaacccactgaccactcaaaaatgagaggaaaaggccaggtgcggtggctcacgcctgtaatctcagc

SEQ ID NO: 262321 - DNA, 144 bp, Homo sapiens
  chr10:105403459-105403603
  hypo
gaaacttctcatgacgagattcaatgccactcaatgctgtgtccgcccagcacatgtttgcacgacccactctcggggaaccactgatcttcttcaggtgaagcttggggtaaagaatctgcagaccaggccaggcgcggtggc

SEQ ID NO: 262322 - DNA, 199 bp, Homo sapiens
  chr10:105413585-105413784
  hypo
cctccccacacagcccggagggcttgcctcaaggctcacccttctcagggagttctccggctcaccagcttcccgaggccccaccctcccacctcctgctgcccagctcccgcttttcttctgcttggggcacatagatgcatgcctgctttgcagtcgcagccccaccacgccctgtactcctcgctctgcctgtcta

SEQ ID NO: 262323 - DNA, 282 bp, Homo sapiens
  chr10:105436790-105437072
  hypo
cgagtcttgcaatccgcctcctccctggctcagtctccctgagagccgcgagtgagtgatggagtcaatagcaacggactcaggacagacattcccctccccggacaacaaaatgtggaatgtctccttctctccagactggactcttgctatcggattatcaatgaatcaaccgccaactatttcgggagcatcaacggcccctggttgagaccatctgactctccaccctctgtctcaaagcatcagacacacaaccacagacaccgtccccagcattcc

SEQ ID NO: 262324 - DNA, 42 bp, Homo sapiens
  chr10:105440561-105440603
  hypo
tatttttttctttcacacttcgaaacagaccaattctaaaaa

SEQ ID NO: 262325 - DNA, 38 bp, Homo sapiens
  chr10:105487458-105487496
  hypo
ggaggcagaggacgcgtgggccacgagggcctcagaca

SEQ ID NO: 262326 - DNA, 65 bp, Homo sapiens
  chr10:105639324-105639389
  hypo
atgtgtgcaaggcccgtgcggctgggctgggagggcagggtaagcggggccgtgctgacctctgt

SEQ ID NO: 262327 - DNA, 76 bp, Homo sapiens
  chr10:105725850-105725926
  hypo
ttttaccctcaagggagtgtcgcagtcatcagttgagaagtgggggcccggcgcggtggctcacgccagtactttg

SEQ ID NO: 262328 - DNA, 76 bp, Homo sapiens
  chr10:106029646-106029722
  hypo
taataaatattgaagagattcgaatctagcctgaactcttacagtaagaccgttcgtgagatgaatttatatgtgc

SEQ ID NO: 262329 - DNA, 75 bp, Homo sapiens
  chr10:106030047-106030122
  hypo
ggcgtgagccaccgcgcccggcctgtatctgcctttttgaccacaccattattcgtgggatttaacaggagttaa

SEQ ID NO: 262330 - DNA, 35 bp, Homo sapiens
  chr10:106032651-106032686
  hypo
gagccaccgcacccggcccagttattggactattt

SEQ ID NO: 262331 - DNA, 55 bp, Homo sapiens; identical to SEQ ID NO: 213693
  chr10:106075696-106075751
  hypo

SEQ ID NO: 262332 - DNA, 93 bp, Homo sapiens
  chr10:106094618-106094711
  hypo
acgcagggaagagacgacattcagtctgtgtgatgtttgcgaagtctccttgcaaattaataaaccagcattctgattcgtacaccctcttct

SEQ ID NO: 262333 - DNA, 94 bp, Homo sapiens
  chr10:106174643-106174737
  hypo
ataaactcttcgaaaacagaaaaggtcttctctgaattgttaaaaagaccaagggttgtctctgaacactccccacgcccgtgaatgggcagca

SEQ ID NO: 262334 - DNA, 36 bp, Homo sapiens
  chr10:106199914-106199950
  hypo
cctttaaacatttaccgtctacgcatgctaacgtct

SEQ ID NO: 262335 - DNA, 37 bp, Homo sapiens
  chr10:111668073-111668110
  hypo
gatgacaggctgggcgcagtggctcacgcctttaatt

SEQ ID NO: 262336 - DNA, 41 bp, Homo sapiens
  chr10:111674530-111674571
  hypo
gtgaccaagggcgagactccgtctcaaaaaaaaaaaaaaaa

SEQ ID NO: 262337 - DNA, 187 bp, Homo sapiens; identical to SEQ ID NO: 213694
  chr10:111684022-111684209
  hypo

SEQ ID NO: 262338 - DNA, 32 bp, Homo sapiens
  chr10:111696450-111696482
  hypo
gcatgagccactgcgcccggccagcaagttgg

SEQ ID NO: 262339 - DNA, 329 bp, Homo sapiens
  chr10:111921293-111921622
  hypo
ctgggatttataggcgtgaaccaccatgcccaactgtcaatcagttatcaaccaggatgccaggaccattcaatggtgaaaataagagtcttttcaacaaatggtgctggtgcaaatggagattgacatgcaaagacaggtcaggactacacttcgtgtttcctgtgtccggtgtcaatgtgtgaagctgccttggattaaacatccaacgagaaaggaaaaaccctcgtctcctcttcctgggatcccagccgccagagcaggggcaccaggcagtactcagcaccacctaaagaagtgcctgtgctttgacccggcaattccacttc

SEQ ID NO: 262340 - DNA, 39 bp, Homo sapiens
  chr10:111946085-111946124
  hypo
taaagaaactgctggctgggcgtggtggctcatgcctgt

SEQ ID NO: 262341 - DNA, 201 bp, Homo sapiens
  chr10:111987863-111988064
  hypo
actgcaaagacctcggatttgtgggtcaatggatttgggtactatattcttcttaccgtatctttttttcttgctttcttcagagtgtgaacatggctacgcctcttcattcccgtccatgccgagcccccgactgcagcattcaaagcccccacggaggttgagccgggcacagaaacacagcagcgggagcagcaacac

SEQ ID NO: 262342 - DNA, 42 bp, Homo sapiens
  chr10:112030548-112030590
  hypo
ctattaaaaaaggtgttggccggttgcggtggctcatgccta

SEQ ID NO: 262343 - DNA, 266 bp, Homo sapiens
  chr10:112170716-112170982
  hypo
ccatgccccagaccccaccacgaactctgaattctcgtggcaatcctctatgtggcgaccatcagccacactggaatggagggacaaggctgtcgggaggaggcatttctcacgcctgtgccgtgaacgtgctacctctgcatgctcaagcccatgctgcgccactcacaaggggctgtagcattctgggccagcgcccttctctctctgcctcctcgcctacagcaagctttcttcaggcctgcggctggtgggccccaagccaa

SEQ ID NO: 262344 - DNA, 40 bp, Homo sapiens
  chr10:112326386-112326426
  hypo
gctgggattacacgcttgagccactcgaccaggcctattt

SEQ ID NO: 262345 - DNA, 346 bp, Homo sapiens
  chr10:112524228-112524574
  hypo
agaacatgtggcataaacatcgactgatattgtttgccatttacactcagcatgtgtaatgcagcaggaatggctcccggtggcatgtgactgcccttccaggcgggtatgccgtgctcaggcactgctctttctctttcgctccctccctccctcgcttgcataccccctccgctgcccctttccagactcgagagagtttgagtgaaggcttgtcatgattggcatgcagaaagctggtagaatgtcattggaattttctagggaggcacatgcgcaacacccaaaatgactccaggcttcgatagccgcaggtcagcccgtcgtgccaggcaccctggtatgt

SEQ ID NO: 262346 - DNA, 224 bp, Homo sapiens
  chr10:112540576-112540800
  hypo
caagaacccattctcggtcagtaacccgaaccctctgcttccttcacctgccagtctccagctggctcaactgcaggcccagctcaccctccaccggctgaagctggcacagacagctgtcaccaacaacactgcagccgccacagtcctgaaccaagtcctctccaaagtggccatgtcccagcctctcttcaatcaactgaggcatccgtctgtgatcactg

SEQ ID NO: 262347 - DNA, 166 bp, Homo sapiens
  chr10:112553600-112553766
  hypo
tgataaagaaattcaaagtacgatctcaactcgcatttttcaatgtaaagaataatgtttagccccctgcttcctgtggtattattacctttgaagacctttaagggcttataagagagcccgggttgggaattactgcgtagcatggtgacgcttgctcaagagc

SEQ ID NO: 262348 - DNA, 43 bp, Homo sapiens
  chr10:112595366-112595409
  hypo
acaggtgtgagacaccacgctcggcctgtactttctacatttt

SEQ ID NO: 262349 - DNA, 35 bp, Homo sapiens
  chr10:112761502-112761537
  hypo
ttaataaggtcaggcgctgtagctcatgcttgtaa

SEQ ID NO: 262350 - DNA, 210 bp, Homo sapiens; identical to SEQ ID NO: 213725
  chr10:114200386-114200596
  hypo

SEQ ID NO: 262351 - DNA, 106 bp, Homo sapiens
  chr10:114252634-114252740
  hypo
tacagttgttcaaacataaccgtaatcgagttttatgacacttcttagaggctccctcacgatcatgtgcagtccgtcctcattcgtactcccattccatgtgacc

SEQ ID NO: 262352 - DNA, 73 bp, Homo sapiens
  chr10:114343131-114343204
  hypo
tttgtgtgtatatccgctttatcaggaatgcggttgcattcaggtctgttgtcctaagcgcctttgtttgtgg

SEQ ID NO: 262353 - DNA, 96 bp, Homo sapiens
  chr10:114410445-114410541
  hypo
taccatgtcactagggataggaattttcagcgctattataatcttttggggccactgtcctatacgtagtccctcgttgaccaaaacattgttatg

SEQ ID NO: 262354 - DNA, 47 bp, Homo sapiens
  chr10:114498664-114498711
  hypo
tagccgcatgatcccgcagtgagggcttaacacgttccacggcctga

SEQ ID NO: 262355 - DNA, 232 bp, Homo sapiens
  chr10:114542054-114542286
  hypo
agtggaacactaaaacctcacgccgacttggaggccacactggaaaaggatgttgcaatgacgcttggatcaggccaggccctgcgtgaaggccctttggcgtctttttcggcgtggaagcgcatgctctttctccttgaggagaagataggaccttagcgtttccaaggccttctgagtgaaaacatctgtatccgatctttcccgtcgcggcatattagtgaagtctggc

SEQ ID NO: 262356 - DNA, 40 bp, Homo sapiens; identical to SEQ ID NO: 226545
  chr10:114571159-114571199
  hypo

SEQ ID NO: 262357 - DNA, 219 bp, Homo sapiens
  chr10:114571439-114571658
  hypo
ctcaaaaaaaaaaaaaaaaaaaaaaaaaaaaagagtgcagtccatgcctggaagtagaggagaactggctattggagaacactcgtaatgcctgttccagtggaattcctgggctcctcgagcaagagcagagaactgtgccaggtgcagtgccgcgcctgtcccctgcactggaaccagccttctgtgattccggctgccacacgcaggagctcgttt

SEQ ID NO: 262358 - DNA, 250 bp, Homo sapiens
  chr10:114591112-114591362
  hypo
gggctgggaagaggcgctgggccatcggccacacctgagctaatattcctggcgcatcaggtgcttctcaagtgtttgtggacagacggctgccttggatgaaatggtattcaccaggcgtgtccttttactgtccagtttggtcaccaagattctcccctattttaagagggagctgagcagcttcacaaggctagtcttgtttggatgcgtagcacaatgaatttgtacccgccgagcctccagcgct

SEQ ID NO: 262359 - DNA, 228 bp, Homo sapiens; identical to SEQ ID NO: 213728
  chr10:114591692-114591920
  hypo

SEQ ID NO: 262360 - DNA, 324 bp, Homo sapiens
  chr10:114752045-114752369
  hypo
cagtgaatgtgcgtcggtagcatagattccattccgcacgccaccctcgcctccgccccccagccctgggagggatgcatgccctccgggagacacccagacccgacagagaggcctttgttggagctggaggtgagaatctgtgggcgttgggattcctgggttcgagttccagctcactgccaattgcccgagtgctgggcgaacatttctggaatcaaaaggagtgcagcctgcccagcagggcctacgggagccggaggctgcagggtgctaagattgcgttatctttaccaagtgcccggagctcctgggagggaagag

SEQ ID NO: 262361 - DNA, 147 bp, Homo sapiens
  chr10:114834271-114834418
  hypo
gggacatttaaaagagttgtcggactgtgcgggaccttggcacactgctgacggctgcacactcatcactgcggggctcatcacacattgacaccagcaccatattttgctgggtttcctgatctcggttgagtatttggatttgaa

SEQ ID NO: 262362 - DNA, 86 bp, Homo sapiens
  chr10:114858115-114858201
  hypo
gtgccctgatttaacgtatgagggtcaagtgtgagacgtgggatttttatttaaaaaattgtattttaggccgggctcggtggctc

SEQ ID NO: 262363 - DNA, 102 bp, Homo sapiens; identical to SEQ ID NO: 213730
  chr10:114867548-114867650
  hypo

SEQ ID NO: 262364 - DNA, 138 bp, Homo sapiens
  chr10:114868048-114868186
  hypo
gtgaagtggggaatcgcttttgtcccttccctgatgaatgggtgtaaagtgttcactgaacctggaaacacctccttttgtgtccggtgctctcctaacacaggccgttaaacttggggcaatcgctcatggtggggg

SEQ ID NO: 262365 - DNA, 109 bp, Homo sapiens
  chr10:114868454-114868563
  hypo
ctgcagggccagggcgctccatttcttcccaggactgcctgccctggtcgtggccgtcatttctgcagggaggttgctgttttcctccaggcatcggagttaaaaagca

SEQ ID NO: 262366 - DNA, 321 bp, Homo sapiens
  chr10:114877412-114877733
  hypo
cgcttagtcaatgccgggaaacggcggtctgacagctaatagatatctctgccctcaattgtttagacattttttgtcttttgtgacattgaagaaaagacaaggaagggaatggaagcaactaaaaaatgtcaaaagatcaaaaaatcaatgggccgcaggaatgcaatctgtttaccggggtgtagctgctgtttctgctccgccacaagtccgaggcggttgtctggggcaggcaccgaagttgcgtcgcctccctccctgggagctgtgatacggcacacaaagcgggcacattagcttgctcgcccccaccccccg

SEQ ID NO: 262367 - DNA, 241 bp, Homo sapiens
  chr10:114878744-114878985
  hypo
tcaggcgctgtcattcgttccttcctattttcgggctgctaattgatgtttttgatgtcagcaagaaaattgaagaaaatgtcatgtgtgaaccagtgcggaagttaataagattgacttcgttgacagaatttacaatgagagcagagaccgcataatgggaccgctgcgaattcgtgtgctctctttggagtcaaaattgacacctcacgctaggccagtggtcgataggagagatgga

SEQ ID NO: 262368 - DNA, 296 bp, Homo sapiens
  chr10:114902488-114902784
  hypo
ccagtgaatggcagcgtcaacgtctcatttaaataatggtagtacagggaatagcttttaaatggttatcgtaaaacatatgattaacgtctgtggactgtttacttttcctctgcgaacattctttcaagtgtgcaaatggctcgatgtagggtccaagcccagctaatctgtttggtttttgtaatagagagaaagcaatgtctgcatgaaaatgtcacccagggagacttaatttacagattaaaagcttcctgaatgaattttttaaaaaatgaagtcgttttcgtccacga

SEQ ID NO: 262369 - DNA, 41 bp, Homo sapiens
  chr10:114913258-114913299
  hypo
ggtgaagcagcttgacgtataggggtcgaggtcgttaaatt

SEQ ID NO: 262370 - DNA, 237 bp, Homo sapiens
  chr10:114925528-114925765
  hypo
ccgccctcctgctcgctgaggccacccacaaggcctccgccctctgtcccaacggggccctggacctgcccccagccgctttgcagcctgccgccccctcctcatcaattgcacagccgtcgacttcttccttacattcccacagctccctggccgggacccagccccagccgctgtcgctcgtcaccaagtctttagaatagctttagcgtcgtgaaccccgctgctttgtttatg

SEQ ID NO: 262371 - DNA, 204 bp, Homo sapiens
  chr10:115201245-115201449
  hypo
ttgtcttccctggcacggcataatcaacctcaccaactgtcccacagatttttaccatgttctcctgaaaattacttcaaaggtgctttgctcagaatgaccccaagcagacactgctattaatgacagctggggcgcacacacatgcatgcatgtgcacacacatgtgcgcgtgcacacatacacacacgccactgctaatga

SEQ ID NO: 262372 - DNA, 83 bp, Homo sapiens
  chr10:115548281-115548364
  hypo
cgagaccctctctcaaaacaaaaacaaaacaaaaaacagccctgcgagaccaggactcttattgtccccgggtttcggatggg

SEQ ID NO: 262373 - DNA, 120 bp, Homo sapiens
  chr10:115585200-115585320
  hypo
aaccaatgagtcgtacaggttaaatgtgtgaatcgtatggtatgtgaatcatttctcaataaaactgttttaaaaacattttaaaatagagtttgggggccgggcacacgcctgtaatcc

SEQ ID NO: 262374 - DNA, 37 bp, Homo sapiens
  chr10:115612073-115612110
  hypo
aacagagagagactccgtctcaaaaaaataaataacc

SEQ ID NO: 262375 - DNA, 37 bp, Homo sapiens; identical to SEQ ID NO: 213731
  chr10:115671808-115671845
  hypo

SEQ ID NO: 262376 - DNA, 125 bp, Homo sapiens
  chr10:115844822-115844947
  hypo
tgggaacatgcaggcggacgctgcagcagctttggtgtgaagactgcatggtctgtgaacaaggtcaccaagtggagaagaataatgatcatcctggcctctcagaacagcgtggcacctgcaga

SEQ ID NO: 262377 - DNA, 33 bp, Homo sapiens; identical to SEQ ID NO: 213733
  chr10:115925581-115925614
  hypo

SEQ ID NO: 262378 - DNA, 95 bp, Homo sapiens
  chr10:115940180-115940275
  hypo
atgctttaccgaagcgttgcgttttgtctgtttaaaaccggagtgtttttgtttgttctttgagtaagagtttcactcttgttgcccaggctgga

SEQ ID NO: 262379 - DNA, 37 bp, Homo sapiens
  chr10:116007333-116007370
  hypo
agacaagagccaccgcgaagggcttattttttaaaaa

SEQ ID NO: 262380 - DNA, 81 bp, Homo sapiens; identical to SEQ ID NO: 213734
  chr10:116011528-116011609
  hypo

SEQ ID NO: 262381 - DNA, 105 bp, Homo sapiens; identical to SEQ ID NO: 213735
  chr10:116028357-116028462
  hypo

SEQ ID NO: 262382 - DNA, 156 bp, Homo sapiens
  chr10:116034555-116034711
  hypo
ggcttaggatatgttttgaaggcagagcagtgagcggccgccactgaattggaggtgggtgtgtgagagaagaattgaggattttgacttgagccccagagtgaatagtggtgccatctcccgacatgggaaagatgacaacgggggaagagcacg

SEQ ID NO: 262383 - DNA, 350 bp, Homo sapiens
  chr10:116045866-116046216
  hypo
ggagctgctggtggcggtgcctgtgggggagtaccaggatgtgcctgacctggtctggagcctcgatggcattcccttccgtggtggccccaccctgacgggcagtgccttgcggcaggcggcagagcgtggcttcgggagcgccaccaggacaggccaggaccggccacgtagagtggtggttttgctcactgagtcacactccgaggatgaggttgcgggcccagcgcgtcacgcaagggcgcgagagctgctcctgctgggtgtaggcagtgaggccgtgcgggcagagctggaggagatcacaggcagcccaaagcatgtgatggtctactcggatcctcaggatc

SEQ ID NO: 262384 - DNA, 143 bp, Homo sapiens
  chr10:116050042-116050185
  hypo
aatgagggcagctgcgtcctgcagaatgggagctaccgctgcaagtgtcgggatggctgggagggcccccactgcgagaaccgtgagtggagctcttgctctgtatgtgtgagccagggatggtattgcgagtcctgccaagt

SEQ ID NO: 262385 - DNA, 38 bp, Homo sapiens
  chr10:116188468-116188506
  hypo
agccattttaagtgctcgtttagtatcatgcaggctct

SEQ ID NO: 262386 - DNA, 151 bp, Homo sapiens
  chr10:116190955-116191106
  hypo
gctggcaacaggagcggggagcaggtagggatcacaggcacagcagcgcggagccggcagggccacctcctcctctacacacaagcatgtggcacttagcgcgccaacacacacctgctcagtttcacagggaacacgacacagcttttca

SEQ ID NO: 262387 - DNA, 186 bp, Homo sapiens
  chr10:116203666-116203852
  hypo
ccacacttcctttcccgtggaatactctgtaggttccaccacaagtgaacagtcaaggcaggtgccttacaagcaggtggctggctctcgaatcagggaaggttgggggtttgctgcttacctgagttgatgggagaatcgtagcgactggctaacagagatgacctttcccggctctctttctcc

SEQ ID NO: 262388 - DNA, 38 bp, Homo sapiens; identical to SEQ ID NO: 213738
  chr10:116282622-116282660
  hypo

SEQ ID NO: 262389 - DNA, 95 bp, Homo sapiens
  chr10:116304716-116304811
  hypo
gctgagaaagatggcggtagctatgagggagccggtctgccacttacctccaggactttccctgtgataaactggtgacacgcctcacatttcac

SEQ ID NO: 262390 - DNA, 196 bp, Homo sapiens
  chr10:116331009-116331205
  hypo
ctggactacataggtattcacgtcagtgggtcaccggggcacttactgctggagaaggtggtttctttcggactggacgacatcggctgtgcacagagttgacaaaggcagtctctcccattgaatgtgactcggtctccgggtggaaacgggcgcctggaggcagaaagacatcgccctcaaggttattgcagca

SEQ ID NO: 262391 - DNA, 89 bp, Homo sapiens
  chr10:118740858-118740947
  hypo
aacagaaaaagatttgactgacctagaatgaagctctctgcacaccagctcttcatcagccccaccacacgcaccgcaagaactaagta

SEQ ID NO: 262392 - DNA, 33 bp, Homo sapiens
  chr10:118742173-118742206
  hypo
agagattaatctggccgggcgcagtggctcacg

SEQ ID NO: 262393 - DNA, 99 bp, Homo sapiens; identical to SEQ ID NO: 213743
  chr10:119180987-119181086
  hypo

SEQ ID NO: 262394 - DNA, 102 bp, Homo sapiens
  chr10:119374701-119374803
  hypo
agacggggtttcaccgtattagccaggatggtctcaatatttactatcattgtagaaaaagtttgtagccttgtgctttgagacatgcgctctggagttaga

SEQ ID NO: 262395 - DNA, 204 bp, Homo sapiens
  chr10:119543606-119543810
  hypo
aaacttggcagggaagggcacggacagtggcggtggggctgggtggaggggctgccctgtgaacgcttgtgcccgagcagagctctaagccttgacctcagctgaggaccccggctgaccccctcgcagccctgtgacggccttgcgagcctttctttctgggacagcggttatggacttctcgtgcctgacctcaacccctct

SEQ ID NO: 262396 - DNA, 75 bp, Homo sapiens
  chr10:119680912-119680987
  hypo
cttatttatttttgtttgtgcgtgtttagtctccggcacctcccactagaatgcgagtgccacatccaacattag

SEQ ID NO: 262397 - DNA, 273 bp, Homo sapiens
  chr10:119806965-119807238
  hypo
cggccgcgcctctgccgctatcagtgtgtgtgaccttggccgagtcatttcacctccatgagcctcagtgttttcacgagtaaaaaagccagttctacctcatgtctaagactccatcacgactctatgggctcgacgtcaaaaggacccccgtggggactcacactgtggtggactgtgcaaatcatgtggagaccatgccccaaacacgggtttcgagtttcaggggataatacatgtgcctttcctagcacaatgcggcacataaatctc

SEQ ID NO: 262398 - DNA, 63 bp, Homo sapiens
  chr10:119876202-119876265
  hypo
agagtgcgtgtgtgcgcacgcacacgtgtgtgtgtgtctgtgtgtgtgcgcgtgagcgtgcat

SEQ ID NO: 262399 - DNA, 47 bp, Homo sapiens; identical to SEQ ID NO: 213746
  chr10:120011733-120011780
  hypo

SEQ ID NO: 262400 - DNA, 189 bp, Homo sapiens
  chr10:120170438-120170627
  hypo
tacattccccacagcactgccgctttccagaaggtttcatgcttggtctttcccgagtccaagctggcatcggagaagaacaggaatggctctcagtgcttggcatagccccgtgcaaactccagtgagtgtgtgcttgaaggacaggtgccacatcagcactggatcggcttcctagggctgcagcag

SEQ ID NO: 262401 - DNA, 41 bp, Homo sapiens
  chr10:120518464-120518505
  hypo
caagaaagacataaccggccaggcagtgtctgatatctgta

SEQ ID NO: 262402 - DNA, 34 bp, Homo sapiens
  chr10:120584843-120584877
  hypo
aatgctgcgattacaggcccgaactcatgatctc

SEQ ID NO: 262403 - DNA, 108 bp, Homo sapiens; identical to SEQ ID NO: 213747
  chr10:120601821-120601929
  hypo

SEQ ID NO: 262404 - DNA, 35 bp, Homo sapiens
  chr10:120800790-120800825
  hypo
aaaatgaggctgggcgcagcgcctcacacccgtta

SEQ ID NO: 262405 - DNA, 93 bp, Homo sapiens; identical to SEQ ID NO: 213748
  chr10:120822534-120822627
  hypo

SEQ ID NO: 262406 - DNA, 151 bp, Homo sapiens; identical to SEQ ID NO: 213749
  chr10:120926967-120927118
  hypo

SEQ ID NO: 262407 - DNA, 49 bp, Homo sapiens
  chr10:120966063-120966112
  hypo
acctggagtctgatgttctgagcataacactggaaggagctaagagccc

SEQ ID NO: 262408 - DNA, 35 bp, Homo sapiens
  chr10:120996576-120996611
  hypo
ttttttttttttttttgagacggagtctcactctg

SEQ ID NO: 262409 - DNA, 155 bp, Homo sapiens
  chr10:121103957-121104112
  hypo
tgcgatagttcagagtaggtttttctttgtgacgcccggtcgcaggatgtctttcagcaccacctgtcagagctctccaagccggcagctgttcccgctgcccacctgtcccttccctgctctttttggggatggtttctcgctcccctgctgtc

SEQ ID NO: 262410 - DNA, 214 bp, Homo sapiens
  chr10:121182611-121182825
  hypo
tgggcaaacccggccgcactgctgctggctcctcactgaccacctcccttcccttccttcttccagtcccctgttttcatagcccaagttggccaagacctggtctcccagacggaggagaagctcctacagaagccgtgcaaagaactcttttctgcctgtgcacagtaagtgccgtagtcacctggcctgtcctccccgggctgcccagaga

SEQ ID NO: 262411 - DNA, 125 bp, Homo sapiens
  chr10:121228865-121228990
  hypo
caggagcgcttcaccgggggcctggaggtggtaagtgccaagaaacagtggccatgttcctgtggtctcgagtgatgttacaactccctggcaaggtgggcagtggcacccgctatggagatggg

SEQ ID NO: 262412 - DNA, 149 bp, Homo sapiens
  chr10:121260422-121260571
  hypo
tctaaggtatgtcaggtgagcgaagaggacacccgacagagctgaagtgccccagattagacggctgcccccgccggcatggcaggtgctcagagggctgtccccaggcacagtagcttcctctggccgccactgaacctcttttctgg

SEQ ID NO: 262413 - DNA, 174 bp, Homo sapiens
  chr10:121264282-121264456
  hypo
gcgctaaggagtgccggcagccaccagcagtctgtaagctgaaggggcaagtaagcaccccccacaccctctcgccaccacccaccagagtcttgtggagaacagggccctgccaacaccttgatgtcatattttcaatccgtttctgctgagcgaatacgtttctgctgtttg

SEQ ID NO: 262414 - DNA, 80 bp, Homo sapiens
  chr10:121264730-121264810
  hypo
gtgagtggaagacacgggaacagagctgaggccaccatccgtccaacaaacggctgctggtgaagcggaaaactcaagtt

SEQ ID NO: 262415 - DNA, 131 bp, Homo sapiens; identical to SEQ ID NO: 213750
  chr10:121265440-121265571
  hypo

SEQ ID NO: 262416 - DNA, 251 bp, Homo sapiens
  chr10:121265790-121266041
  hypo
cagcagatgagcagacgaagcagctcaagtcagcccttgccccagagcgccaggacgggccacacagaaggctctgtcgccttgcacggctctccagcttcacgacagaccagccagagatggacagtgtgccaggggtgggattggaactccagaaggagtctggacaccagcgggatcagagagacctcgcttggacgatatcccctcccaagctcacgggttcacgcgtgtggcggtcacacgtgtgg

SEQ ID NO: 262417 - DNA, 301 bp, Homo sapiens
  chr10:121397983-121398284
  hypo
acaactggcacaagcgccgcaagactggcagcaagagaaagccctacgacaagaagcggaagtatgagttggggcacctggctgccaacaccaagattggcccccaccacatccacacagtccgtgtgcggggaggtaacaataaatacggtgccctgaggcgggacatggggaatttctcctggggttcagagtgttgtactcgcaaaacaaggatcactgatgttgtctacgatgcgcccaatagcaagctggtccgtaccaagaccctggtggagaactgcttcgtgctcactgacag

SEQ ID NO: 262418 - DNA, 279 bp, Homo sapiens; identical to SEQ ID NO: 213755
  chr10:121429483-121429762
  hypo

SEQ ID NO: 262419 - DNA, 174 bp, Homo sapiens; identical to SEQ ID NO: 213756
  chr10:121550361-121550535
  hypo

SEQ ID NO: 262420 - DNA, 61 bp, Homo sapiens; identical to SEQ ID NO: 213757
  chr10:121591477-121591538
  hypo

SEQ ID NO: 262421 - DNA, 126 bp, Homo sapiens
  chr10:121663600-121663726
  hypo
ccagatccggagagcgtggttcttggcacggatggagggcgctacgatgtttacctctatgaccgaataaggaaggctgcctactgggaagaggagccagccgaagtgagacgctgtacttggttt

SEQ ID NO: 262422 - DNA, 165 bp, Homo sapiens
  chr10:121702239-121702404
  hypo
agacacccaggcctcgtcagctatgttaacgtgctgtatgacaagaggaacctgctttctaagtctgctggacacgcgtgcttcttgaatccaaccagacaagcatgttttctcaaaaccacagtataagacaaggaaactgcacagattcgagtgatttttgag

SEQ ID NO: 262423 - DNA, 42 bp, Homo sapiens
  chr10:122214596-122214638
  hypo
tccaaaagccagctcctttccgtgaggctgtgtcctcaggct

SEQ ID NO: 262424 - DNA, 34 bp, Homo sapiens; identical to SEQ ID NO: 213758
  chr10:123037580-123037614
  hypo

SEQ ID NO: 262425 - DNA, 34 bp, Homo sapiens; identical to SEQ ID NO: 213759
  chr10:123037854-123037888
  hypo

SEQ ID NO: 262426 - DNA, 84 bp, Homo sapiens; identical to SEQ ID NO: 213760
  chr10:123063523-123063607
  hypo

SEQ ID NO: 262427 - DNA, 77 bp, Homo sapiens
  chr10:123335738-123335815
  hypo
agaaagcatttcccaaagcgacaggccattagatcatgtagcgcccaggaaatagatacttacgttacaagctatgt

SEQ ID NO: 262428 - DNA, 137 bp, Homo sapiens
  chr10:123492975-123493112
  hypo
tttccagggagtcccgagcagctccaggagcaggccctgcctgaggtcccggttgctgggattcagcctccacacaacacatggtgttttctctagcaggtttctccaacgagtccggcctttctttggctccctta

SEQ ID NO: 262429 - DNA, 196 bp, Homo sapiens
  chr10:123757357-123757553
  hypo
actctgatgcgatcccgatccaatgctctgaatcccaaggaggccacaagcctaggggagatttgtccatctcagcccaagaggtcccatcccacccccaaaggcaggcacgaagaccaagacttcaggtggtggcagcaagggagcagccagacgctgctcaaggaactgacaaggaagactcctcggctgggca

SEQ ID NO: 262430 - DNA, 103 bp, Homo sapiens
  chr10:123837325-123837428
  hypo
gtcttgaacttcttcgggaaaatgtccttgtgtgtacaatggggccacccttctaccaggctgttgtgtggattaagcgcaatcgtaactgaaaagtgcccag

SEQ ID NO: 262431 - DNA, 238 bp, Homo sapiens
  chr10:123842298-123842536
  hypo
tgcccagcccaccaccgtcccaggagcgagagcacccctcgtcctccatgccctttgccgagtgtcccccggaaggttgcttggcaagtccagcagcggcacctgaagatggtcctcagactcagtctcccaggagggaacctgccccaaatgccccaggagacatcgcggcggcatttcccgctgagagggacagctctactccataccaagagattgctgccgtccccagtgctgg

SEQ ID NO: 262432 - DNA, 334 bp, Homo sapiens
  chr10:123879960-123880294
  hypo
ggttagagccaccgcgggtgccctggctggttgcgcacaccctcttcctagggaggcagcacccacttggctctcagcacgccactccctctttgtcgcacatcatgagtcgacgctgctctgaggctgtagggtccttcgctgagagagtcagagcagctgggatggagctcagcctcgtgcggccttggggagagggactttctgctgtcacattgctcacagtgatgaagggcctgcatagagcctggcgcatgctaggtgctcataaacattgattcccttcacttgttgccacctgtattcattctttctttctttctttttttttttg

SEQ ID NO: 262433 - DNA, 237 bp, Homo sapiens
  chr10:123910181-123910418
  hypo
tggtacgagcatgtgcggctcaggaccccaccatgcccgagtgcctcgccgtgttgatgagccagtttctttaatacttcgctgtcaggagaaggacctgctgagcgctggagtctaggtggagtcatgcagcgttcctgggtcctttcttctgctttgtttgcattttttgatcctgccagccagcctctcggcagatacatcccggttgattctatgccacggactattcggaag

SEQ ID NO: 262434 - DNA, 176 bp, Homo sapiens
  chr10:123952375-123952551
  hypo
aggaagctgggttcccggggcagcacccggggcagcacccagggctcgccaggctgatctgaactctcattcttctttgctcctcagttgtgtgacctccttttgttttccacaccgataaacagatgcttcaggtacctcgatctgttgttgtgcaagtgcggatctttccttct

SEQ ID NO: 262435 - DNA, 42 bp, Homo sapiens; identical to SEQ ID NO: 213763
  chr10:123971195-123971237
  hypo

SEQ ID NO: 262436 - DNA, 39 bp, Homo sapiens; identical to SEQ ID NO: 213764
  chr10:123977732-123977771
  hypo

SEQ ID NO: 262437 - DNA, 179 bp, Homo sapiens
  chr10:123988940-123989119
  hypo
tgactatctggagcccgacttagcagaaaagaaccccccactattcgctcagaaactccaggtttgtagcccacgtgtgaccttttgggagtttgtcaaaacctcagtagagaatgaacccccgaggcccaaatgaaataaggcaggatttgatgaggaactgccgagaacgttcccag

SEQ ID NO: 262438 - DNA, 87 bp, Homo sapiens
  chr10:124028462-124028549
  hypo
acttcgtctcaaaaaaaaagcacagtgtcgccattaacagtcatgtacaaaaatgcaggagaaagcgtctaacacttagtgaacaac

SEQ ID NO: 262439 - DNA, 284 bp, Homo sapiens
  chr10:124248922-124249206
  hypo
tcctttggattttaggcttccgttttctaaacgagaggtgccggtggctagtgggtctgggtttattgtgtcggaagatggactgatcgtgacaaatgcccacgtggtgaccaacaagcaccgggtcaaagttgagctgaagaacggtgccacttacgaagccaaaatcaaggatgtggatgagaaagcagacatcgcactcatcaaaattgaccaccaggtaagggtgttctcgcctgcagaggtgagttctcagatgccccggaacacccttggcaaaggca

SEQ ID NO: 262440 - DNA, 189 bp, Homo sapiens
  chr10:124609891-124610080
  hypo
ccatgtgactcactttagtacgttgtttattttgaacttgtgactcactttagcgcgttgtgtattttgaagtaaagacagagcacgacaactatcagcaggagcaaggccgccaggataccaccagcgatgacaggcataatcactgtatggaggtcaaaagacttcgatgtacctaggcagataagt

SEQ ID NO: 262441 - DNA, 45 bp, Homo sapiens; identical to SEQ ID NO: 213766
  chr10:124712595-124712640
  hypo

SEQ ID NO: 262442 - DNA, 120 bp, Homo sapiens
  chr10:124738944-124739064
  hypo
tccagtccgggcgagagagtgagacgctgtctcaaaaaacaaaaaactgtaatctgaattcaatttttctacaacacacccccagacaaaaaaaacttggccagccgcggtggcttgcgc

SEQ ID NO: 262443 - DNA, 78 bp, Homo sapiens
  chr10:124922178-124922256
  hypo
tgtgccaattccatcggtaccccacgagcatcgcatcacttgccttcagtaatgatgggactacgcttgcaatagcgt

SEQ ID NO: 262444 - DNA, 31 bp, Homo sapiens
  chr10:124931354-124931385
  hypo
ccctttttggcacgaccgttgttccttcttt

SEQ ID NO: 262445 - DNA, 124 bp, Homo sapiens
  chr10:124964477-124964601
  hypo
gaagggaggccagccgcatcttattcccttgtgtccatgctgtgttcttggtgtgcggtccctggagcaagtgcaaggaataagacaaagacatcagtgactgtgtctccgatggacagtgacg

SEQ ID NO: 262446 - DNA, 162 bp, Homo sapiens
  chr10:125017526-125017688
  hypo
taagatgatttcaccgggaaaacattaaggtatacaaagagttcttaataaatagaaataaatagtgcagggtttgcgccatggtgattttcgatggttatctgccctcgccgctgctgctccagctgcatcttccgcggggctcagcgcagcattttgctc

SEQ ID NO: 262447 - DNA, 290 bp, Homo sapiens; identical to SEQ ID NO: 213767
  chr10:125617037-125617327
  hypo

SEQ ID NO: 262448 - DNA, 58 bp, Homo sapiens
  chr10:125769654-125769712
  hypo
aattcagctctcacgtcgtcttccacgcaaacgcctcatccgcgaggacctgcgccag

SEQ ID NO: 262449 - DNA, 80 bp, Homo sapiens
  chr10:125984183-125984263
  hypo
cacacacagactcccgtgccccgcgggcagagcaggctgcctgctgcttggatgtggccaccgagcgggtgcatccagct

SEQ ID NO: 262450 - DNA, 45 bp, Homo sapiens
  chr10:126101961-126102006
  hypo
aagatattgttgaccaggtgcggtgactcatgcctataatcccag

SEQ ID NO: 262451 - DNA, 45 bp, Homo sapiens
  chr10:126102246-126102291
  hypo
gtctcaaaaaacaaacaaacaaacgaaaaagctattgttagcaaa

SEQ ID NO: 262452 - DNA, 120 bp, Homo sapiens
  chr10:126114966-126115086
  hypo
gtgagaccctattaaaaaaaaaaaaagtcatatagaatccttcctttctctcttttttcttttgttctctttttttatttttggagttgggggacagagtctcgctctgtcaccaggctg

SEQ ID NO: 262453 - DNA, 120 bp, Homo sapiens
  chr10:126115344-126115464
  hypo
caggatcctttcctttaacctgtattctcccccaaaagattttagttacaggctggacgcggtggctcacccacctggcactttagaagatcggggcgggcagatcactagaggtcagga

SEQ ID NO: 262454 - DNA, 81 bp, Homo sapiens
  chr10:126186174-126186255
  hypo
tcctgcctgcctgccgtcaggtgggagggagaggcagacgagcagatggagccctgtgatgagctgcgagtgggcagggga

SEQ ID NO: 262455 - DNA, 93 bp, Homo sapiens; identical to SEQ ID NO: 213769
  chr10:126190197-126190290
  hypo

SEQ ID NO: 262456 - DNA, 264 bp, Homo sapiens; identical to SEQ ID NO: 24604
  chr10:126198878-126199142
  hypo

SEQ ID NO: 262457 - DNA, 387 bp, Homo sapiens
  chr10:126238653-126239040
  hypo
ggcctccgagccaggctcctcgttgcaaatggacttctctcctttgcgtgctgtgaactgggcgtgaacacctcctgtgatggggagctcactccttgccgagggagcctggtaagctgccggcacagtcatcctcataccctctctcctgacctgtgtcttatggcctctgcccccaggcagctgcggggcagggggctggggtgacccccgtcttggttgttgagcccttccactagctggagggtgactgtccccccttctcccccgacacaaggcacagcctttcttgtggctgtcaggagagagggcctgtcctcctttgcgcccacgctgcccctgcgccttgtggcactgcattcaaagtgagtgcgcctgcttttgttt

SEQ ID NO: 262458 - DNA, 34 bp, Homo sapiens
  chr10:126240418-126240452
  hypo
acctcaccacggaggcgcacgcaggatgtccgca

SEQ ID NO: 262459 - DNA, 46 bp, Homo sapiens
  chr10:126254748-126254794
  hypo
gtgggccaggtcctggagaccgggcgtgtggttatgggctctccag

SEQ ID NO: 262460 - DNA, 151 bp, Homo sapiens; identical to SEQ ID NO: 213772
  chr10:126265312-126265463
  hypo

SEQ ID NO: 262461 - DNA, 34 bp, Homo sapiens
  chr10:126267744-126267778
  hypo
taaggaacatctcccgggccgagcgttctgagcg

SEQ ID NO: 262462 - DNA, 77 bp, Homo sapiens; identical to SEQ ID NO: 213773
  chr10:126287226-126287303
  hypo

SEQ ID NO: 262463 - DNA, 362 bp, Homo sapiens
  chr10:126296072-126296434
  hypo
ccacggacgccattcggctaggtacacgtgcggagtggggctggccggattctcattacaaagcgtcatcttctatggggagacctcttgttccctctcggggctggttgcttttgcctggacaataagcctggccccagggcacctggggaaggtgtccaaggagggggtcctgggggccagtcccccgggggctcggatgatgaatcatgggcggtgtttgctggaagaatttttgttccgcttcgggcaacaaggaacccaaacctctcactgttgtggggagaaaagttggaaatcagatgggaactggctgcggtaccagagaggacgtcagacccgggccgcggcctcagcccccg

SEQ ID NO: 262464 - DNA, 411 bp, Homo sapiens; identical to SEQ ID NO: 213775
  chr10:126305757-126306168
  hypo

SEQ ID NO: 262465 - DNA, 317 bp, Homo sapiens
  chr10:126307213-126307530
  hypo
cctgtcctccaggccgcaaacacgcccttctcctgagtccgggtaagcagagggccatgcacgggagacagtgggccacgccgggctgggcttcgtgcttctggggcccccgcaactcactcacgcagcagaagtctgcactgtgctgcctgcagcgggggcagaaacccggagccagtgagcctgtctgtgccacctcagctaccctggtgggtgggtggtgggggccatcccaggcccctcagggctgcaggccaggctgggcccatctccgcacgctgctgtgtggcctcacctcccagcgctgtcgaaggctg

SEQ ID NO: 262466 - DNA, 240 bp, Homo sapiens
  chr10:126309753-126309993
  hypo
aggctgtgtgccctcggccacaccgggcatgtggtgccaggaccccccacgcccagtggtactccgggggcaagacatggccatgtgctctccacattcacccaacaactgccctggccgcctccacatttgctctaagaagacatggtctccatgacccccaggcagggacaggccaagatgtctctgtctgctcagagccaccagctcttgggttcggctgtccgggatcacaagtag

SEQ ID NO: 262467 - DNA, 119 bp, Homo sapiens
  chr10:126311518-126311637
  hypo
agaggcagaaaagacgcaaacttcaaagctgtcctctgggctgcagtagttctgtggacctggtggctgccacgctcggggagccggtgagaggctgacacacccgctgtatgacgcgg

SEQ ID NO: 262468 - DNA, 219 bp, Homo sapiens
  chr10:126311864-126312083
  hypo
gttcccaggggccccgcggtcccgccaggctgcagccggctccgctctcctgccacaatcctcgtccagggcgcagctgtctgactcctcacaggacaggtcctcctggcaggcgaggtggtcgtcgaaggaagggggaagaggctcagggaccggggtcccagcgggggtcctgccccctgggccggaggctgagagcagggcggtccaggccctggt

SEQ ID NO: 262469 - DNA, 184 bp, Homo sapiens; identical to SEQ ID NO: 213776
  chr10:126312314-126312498
  hypo

SEQ ID NO: 262470 - DNA, 229 bp, Homo sapiens
  chr10:126313238-126313467
  hypo
ggatttcaagggtacgcaggccagttctgcttggcgtcagctgccagcgatgggggtagggctgacactgtgcacaagtgggtgcagttcaacacctgctcccagggcagagcacaaaatccagccttctcctcagaatgatgcacatgccacagacaggacagaggctgagacagtgaggggcactcccggcgcagtcctggatatccccaaccggactgcagcaacg

SEQ ID NO: 262471 - DNA, 150 bp, Homo sapiens
  chr10:126314040-126314190
  hypo
caatcccctcaccacggcagagagctggagacggcgacccctgcacaacagccccaggttcctcaccggctcctggccaggcctggacgatggatcggcaaccaggatcctcgcctgcccctggccaggcctgggcgatggaccagcagc

SEQ ID NO: 262472 - DNA, 284 bp, Homo sapiens
  chr10:126314663-126314947
  hypo
gcctgacgcccgaacgcgtgccagcgttttctgcgagctgtcatgtgaggggcctggggcgtggcctgctgcgagtgttttctgtggcctcgcacgtgaacgcagcaggagcgcagcctgcgcaatcggacagacgccgcacagcgcttgtctgtgctcaccctctcggtcctgctcggagcttcccactgacctcctctggcataaggcgcaggtagcgggggtgcctaacttatggccaccatgattgtgtgggtctcggcactaaccgtggtgctacggtc

SEQ ID NO: 262473 - DNA, 217 bp, Homo sapiens; identical to SEQ ID NO: 213778
  chr10:126317368-126317585
  hypo

SEQ ID NO: 262474 - DNA, 331 bp, Homo sapiens
  chr10:126321123-126321454
  hypo
ggctggtgggcactcgttcgcattcagctgcctggggccacatcggggtgctgaagacaggactgctgagcacggcctctgggctccaccccagcagctcacaactctgttccagatattgtcttccatggagggcacactcttggagaagtgagcaaatcaccaactggtttagccactcttgcagatgagcagacagaggccgagtgaggagaagggacatgccccagactgcacagctgcgtgatgtgcaatcgcaccccatcactctgggctgtgctcaggaaagcatgcagtcctccggcaggacggtggggtagtatgggctgga

SEQ ID NO: 262475 - DNA, 190 bp, Homo sapiens; identical to SEQ ID NO: 213779
  chr10:126325797-126325987
  hypo

SEQ ID NO: 262476 - DNA, 376 bp, Homo sapiens
  chr10:126331895-126332271
  hypo
agcccaggcggctcggcagggccctcagcagttctccctattcacgacgcgcaggtggctgataaatttcccagggtttctcggcgcggtgattgcgcctggctctttcagcgtggctgcaggaatctatacaggtccacttaaatcagtctgaagctgtgaaagcctccatcactcgtcgcccgggcccggccgcccaaacagagccccgggagggccagcgggggggtgcagggctgggaggacagtgccaattaaaaatctgagcctgtgggcctttctctctcttgttttcattcctacagctacattgtgtccactggcagcggattccaaaggcgaagaggctgcattcacggcccggagctttagagcc

SEQ ID NO: 262477 - DNA, 354 bp, Homo sapiens
  chr10:126354232-126354586
  hypo
ctgggcattggtcacgtgggccggtgatatggccctttccacgtttctaagtgatgacttgttggtgctgtgacctccaggaggccagggctaactgtcctctccattgctgcatccctggtgcctacaagggcctgactcacagcaaatgctaggtaaataaatagtggctgaacaaagagattaatctagaattgaatctcgatcctcagaggacaagactagctcatcttactgtgactcggcttatagtcggctacgtagacacagctgtctccaccccagccctgtagcctgcacctaccttgcaggtaaggatggggtcttgtacacgctagtcttccctgagccctg

SEQ ID NO: 262478 - DNA, 328 bp, Homo sapiens
  chr10:126367644-126367972
  hypo
ctcacccccaaaggcgaatgtgtaaaccaagatcaaaaggcccacgaaagagaagccagagcccagcggaaggaagcgtgggccacacctgggtaccagcctacccttccaaagatacagaaagcccaactccaagccttgcttccatgggcatgcagagcagaccccaaccccttctcagtggtcccaaatgttgagtgaagccacagcacgcagaggctggggtctgtggccagtggtctcacctcactggccatctggcaacacgttagtccttgtacaccagcaacatgcccagctcatcaggttcccacgcacaaggccgtgc

SEQ ID NO: 262479 - DNA, 310 bp, Homo sapiens; identical to SEQ ID NO: 213782
  chr10:126370268-126370578
  hypo

SEQ ID NO: 262480 - DNA, 256 bp, Homo sapiens
  chr10:126386075-126386331
  hypo
ctgcacaaggtcaacgccgtgttcatcccacggggttactaagggtccatgctgaccaacctggggacacagaggtgaaggagggctcactcttcatggaagacggtcacagacaaaccacagggagatcagggctggaggggatgtccagggcaagtgtgctgggatgagggtggaggtcggggcagcctcctgggggggatgcttagacacttgatgaggaccacaggagcttctagggcggaaggggaacggg

SEQ ID NO: 262481 - DNA, 128 bp, Homo sapiens
  chr10:126420270-126420398
  hypo
cggctcccttctagcgtgcgggattccagtgaggtgtggcatgctagactgccacatgaagttttggctgtggcccttccccgcatcacctccaaaactgtaaaatgcttccccgaccttggagacgg

SEQ ID NO: 262482 - DNA, 79 bp, Homo sapiens
  chr10:126435116-126435195
  hypo
ctaacctgattaagccggagaacaccctgggaaatataaaatgcagggattacttgcagtcttttacatcaagaccaat

SEQ ID NO: 262483 - DNA, 1148 bp, Homo sapiens
  chr10:126690291-126691439
  hypo
ggcagctccctgctcgcccggctccccagccctgctcctgacaccaagacccacccagtgcttccggtacctgggtgctgccccgactggccgtgaaggattcaactaagattctgacccatacactccatgccccaggctaaggctgtggagagacagctggagcccatgggggtggcctccctgaaaacgtggccggtggtgcccgagagcaggattctcagatgtatgtaacactccgctcacacacagagcccatctgacacccagcccgtcccggaagcaccggggcccactggggccttagccgatgggagagaggtggggaaatagcgcctgggctattcctggagcacaggaagagctgttccaaggccaggctgctgccttggaattcatggtgcctcatgaatttggggcacctcagcactcgtaaggcagagtacagcccccacccccaaaatgcaggggtggcgtgttccaaacacagagcaagcacagtgcccacctggccctctcccgaggacgctcgatgccagcggtctgcttcttgtgcctctgcactcagcactcacgagctcacacggggtgctgggcagaggcccccctcaacatgcacccccagccgcaagtgcatggggccgataagcagctttgaagcccccaactctgggttcccgcctgctgcctctgcttttcttcggaagcctctgtcatcaactgtgttgggcaggggcccacctgctttggtgctgacctggaccacatgctgctaaggctgccctcccagaacgggaggcccaggttcccatgtggacaggggcctagagctgtgcacacggcaggggcagtttaggggacacacacggcaggggtcatttaggggacgcacccagcaggggtggtttagaggacatgtggccagtcgcattctcccctctggaggcggcactgggtgtctccaaattgagcctgtgccagctgggtgttgctctgagggcagagatgcctcacagccccgcagaccccacacaagggccagcagggactatcctacctgtgtcatgtgaaggcagggccgcaaggtgctccacagcccggcctggaggcagccaccttgctacagccagaagcggctgctccgtggt

SEQ ID NO: 262484 - DNA, 238 bp, Homo sapiens
  chr10:126694641-126694879
  hypo
ggttgcctagcgatcggctccctccccgacacgggttgcctttctccttggtgaaacccaccctctaccctccctgatggccgggcacgcagaacgtggctgaggctggcccgagacctgtccaaggtctgaggctcgaatcctggcagcaggtccttcatggcaaggcgggaaaagagaaaagccaacgggttctcatgctgggaaaagatgccgggcacgacggctggaggtgggg

SEQ ID NO: 262485 - DNA, 264 bp, Homo sapiens
  chr10:126696783-126697047
  hypo
ggattacaggcaataagccaccgtgcctggccggctctggcctctttttttaaaacgcactagattttatggaagtttcctgacaccgtagcagtctcaagacaccagtgcctgagtcactccctgttcctgacaggggctacggctgcccaaggacagacactggccacataccccagggttgccccatgaagtccctgcaggttgcagtcttagagctgaccgagctatcacattcatgagaagaaccgctgctcagagtca

SEQ ID NO: 262486 - DNA, 339 bp, Homo sapiens
  chr10:126697823-126698162
  hypo
acagagccaagcgattcacggcttcatcagcccctgtgacctgcaggtggcctgggaggcaggaggagcctaagcagccggtgtggctcccagcctcatgcacaatgatccaggaagaaagaggagacaaaaccacacaaactccagaggccggggcgggacagggagtgacccaacacagccgaacctgaggccccgcctgcctccaaggaagccccacttaatatcccaccgatcccaccaccctcagaaaagcttcctcttaaatgcggcctgctccccaattaagtggccgctttctgcaatccagcatgacccgatccccactggctgagctca

SEQ ID NO: 262487 - DNA, 80 bp, Homo sapiens
  chr10:126701135-126701215
  hypo
cccactcgtgtggccgatcctccaagcctctgtggaagagatgagcctcagggcatcgccaaagactaaaaattgttgtt

SEQ ID NO: 262488 - DNA, 53 bp, Homo sapiens
  chr10:126702213-126702266
  hypo
ccctgtgccgtaggcgctgctgtttccccagcaggtaacggaggcggggggaa

SEQ ID NO: 262489 - DNA, 215 bp, Homo sapiens
  chr10:126702577-126702792
  hypo
tcacgtgaggcatgcgctcttcccacccgggtgtctctctagatcttgcagcctaaaagagacgtcatcatggtaactgttatcagaacggcggagaacagaagggcacatccaagcaagaccgagacgccacaggatagtaacacgtgtgtgctggccccactccccaagctggatgcagggacacacggtcctcctcacggtgtcctattggc

SEQ ID NO: 262490 - DNA, 36 bp, Homo sapiens; identical to SEQ ID NO: 213784
  chr10:126709396-126709432
  hypo

SEQ ID NO: 262491 - DNA, 105 bp, Homo sapiens
  chr10:126710674-126710779
  hypo
catctgccccacgccggcctgggcggtggcctctcccctggccccagtctggctgcggtgctgagctctgcccttctcctgcttccctgccggtgcacacacatg

SEQ ID NO: 262492 - DNA, 136 bp, Homo sapiens
  chr10:126711480-126711616
  hypo
gtgtgggccgatggcggcgaccctctatacagattctgatagggctaaaattattgatggaggtgctttctacctaggagatcagcgttcacacctccagttgctggaaaccgaggccacacgaaaagaagccatg

SEQ ID NO: 262493 - DNA, 1831 bp, Homo sapiens
  chr10:126714618-126716449
  hypo
cccaggcagggcaggcggggaggatgtattacttggttctggtgcaagcatggtggacacgatgatgggtgcccctgtgcgccgggccaccttctggtacggtgagtgaggcgtgtggaggctctggctggccggcggcagggtggatggccccaggggtgcacctggcttccgcaagacctgggggctgccgtgagggctgggcagcggagaggcggccacgttgcgctccctctttagcagctccatgggcaccgtgtatgccgtggagtaggctgttctggggcctgggtgaagggggtttgaggggcccgggttagtcaaggccacccctgcctgcagggggtacgtggggctcagacgcgctgtcagggcgcaaggggtgggagagctgtacccggagttggaggggaagtgtggggcatgggtgcccacgccaggggcagaataggtggctgccgtctccaggaggtgctgagatggtgcgctggagggacggcgagccgggtctccagctcggggggatgctgtctgcagaggagccgcagcgcccagagaagccaagtcaccatggagcagttcgcttcggtggctgaagctgctggaccgcgcccggggcagcgggcccccccggtcctgcctccgcagctgcatttcggtcctgcagctattggccaggcggctcagaacacgggcctggcccaggttgggtgcgacagacttgatatccgcgtcctccagggtagccaggacggccggggagtcaaagccctgctgcagtagggctcccagcgtggcctctgccagcccctccgcccgcagaaaggccaggaactcagggagcacggtcctcttgccaccaggaccctggaaggtggacaggtcagcttcgtaagtctcgtaagccatcttggatgggatgctttcccgggcaggcccgtagccacgattcagggcccctggggccacccctgtgctgccttcgggggcagcagctgaactggggtccacaaccaggcacgtcggggccacctgtctggcaggggcagggtcaatgggtctttcgctgatgtcgctgaagacctggctgagggggtaggcaggcacctccgccccatacctggtgtcgggctgctcccgtccataccgcccgggagatgcagccctgctctgtgtctgccgcccctgagggatcattttacctccaggatcccggtacaggtgaccggcgtcctgcagggcaggtgaccggccttgcattggatcccatgacgttctgctgccaagcactccgtagctggggaccggccggctgactcctgggtcccgatagaggggaggctctttgggtaccctagcagctccagacggatcactgtagtactcccgtggcagcagggggctgcgaccagacatcactgcctgtctgctgtcgtagaaggtgaagtcaggagtagacccctttcttgcagccactgagttataaacggcctcccggtacaggtagggctcggcggccacgggcagggcagcgtcctgtggtcggtggtttggctcaaaccaagtcccctctgctgtgccatacgtcagggagcttctcctccccagaggccgcagggactcggcgttctcccaggggccctcgtaccacccagcagcatcccagctctgagaacgaccaatatttatatgcctgctgggaactggcattggaaaaaaaatgactgcggatgaggcagaggagaagcttttctttataaatcttcaattacatacatcaaaaacagacctggctgtgtgctaacccttccgagacggcagggacaaccaa

SEQ ID NO: 262494 - DNA, 313 bp, Homo sapiens
  chr10:126721932-126722245
  hypo
ggaacgccctcgagcgcgcacgccaaggtgcctgagctttagtagcaagcgagccaagtggtagaaaccaatcagagaggagtctcatttcacagctttaacactgtacgttctggaaaaggagagagggcaagaagccggcagcaaaatgtatcttggggttctggttcacagtcaccccaaatacctgtcaattaggttgagctgtgtgaagcgcgcagaaggttctccgcattcgtgcgggctgctgtctgctgctgtctggctaccctggggcctcctccaaacacggagactacggatgcactgttcc

SEQ ID NO: 262495 - DNA, 40 bp, Homo sapiens
  chr10:126726953-126726993
  hypo
actcacccctaaacccgaacccacacgctggtttcttacc

SEQ ID NO: 262496 - DNA, 306 bp, Homo sapiens; identical to SEQ ID NO: 213786
  chr10:126732716-126733022
  hypo

SEQ ID NO: 262497 - DNA, 42 bp, Homo sapiens
  chr10:126738868-126738910
  hypo
atctctagattcaaagacaccgcttcccagaccttatctttt

SEQ ID NO: 262498 - DNA, 89 bp, Homo sapiens; identical to SEQ ID NO: 213787
  chr10:126751063-126751152
  hypo

SEQ ID NO: 262499 - DNA, 181 bp, Homo sapiens
  chr10:126763482-126763663
  hypo
catgagtcctaccttgactacgacttccacaggcggagccgagaaaacaataataggtgggaacctggactcctaactgacgccaggcagactcaataaagtaaaccaaacttttaaaagaaaacaaaggagaatgtcctaaggatcttgggtagacaacggtgatctaagacacaaatgc

SEQ ID NO: 262500 - DNA, 285 bp, Homo sapiens; identical to SEQ ID NO: 213788
  chr10:126767711-126767996
  hypo

SEQ ID NO: 262501 - DNA, 578 bp, Homo sapiens
  chr10:126771762-126772340
  hypo
tctgacaccaacaacgtaagaccaccagggccagcacgcattctcaacatactttccaaagctggaaaaaagcacagccaagtcactcagaaaagcctctcttgatttggcttctggataaaaaagagtctccctgtcgtgccagatggggtcaactactcggtgaaaacagaggcccattccacaggcaccactgctgagcctctgagttcccaggacagggctgtccgaggacacaacactgacagccatgtgcagacccccgacctgggcgaggataccgccctctgagactcagtcgcctgtctacaaaaaaggaaaagataccacattaccgtgaccatctagtctaatgaaaatgccaccaggatcaaagaccataacgcaaagccctctgtttgcaccttagtccgaacaagcacccaggatacactcgctgttgtttgtttgtttgttttaaggcaggatctcactctgcctcccaggctggagtgcagtcttgacctcctggactccagccgtcctgccacgtcagcttctcaagtagctgtgactgtaggcacgcaccatcacaccca

SEQ ID NO: 262502 - DNA, 38 bp, Homo sapiens; identical to SEQ ID NO: 213790
  chr10:126772640-126772678
  hypo

SEQ ID NO: 262503 - DNA, 120 bp, Homo sapiens
  chr10:126774972-126775092
  hypo
tgatccagcaatccctgtaatctcagctacccgggagactgaggcaggagaaaatacaaaaatttgccaagtgtgctggtaatcggctgtaatcccagctacttgggaggatgaggcagg

SEQ ID NO: 262504 - DNA, 199 bp, Homo sapiens; identical to SEQ ID NO: 213791
  chr10:126775428-126775627
  hypo

SEQ ID NO: 262505 - DNA, 51 bp, Homo sapiens
  chr10:126786130-126786181
  hypo
cccgctgctacaggcgcgccttaggtgcatgcctcacgtggggtccatacc

SEQ ID NO: 262506 - DNA, 334 bp, Homo sapiens
  chr10:126786698-126787032
  hypo
acgaacaaaaaatgccaacaataccagtaacagcagcagcagtcagtaatcaatgttcaaaaagtgcctgctatccccgttttcttttttgccaagcactgagacggtcccagccatcagtccacaggtgtgtggacccagcacgtgttcagctcttggagtgaacggaatggaacttaggcagactactccccaaattccattccctccctaggctgctaatgacaatgacacccacatacactagccctggtggctgagaatatagtaatatcaagagaatacacggtacccagctgcgtctggtatatgcgtggtccgtaaggcatcactt

SEQ ID NO: 262507 - DNA, 92 bp, Homo sapiens
  chr10:126787572-126787664
  hypo
gcctcctttccacgcgctgtcggtctgcaagcatggagtctagggagacactgtagaaaagccatcatactagcacacggtcaggcacgttc

SEQ ID NO: 262508 - DNA, 291 bp, Homo sapiens
  chr10:126789760-126790051
  hypo
cccagtgacctgaatctaaccgcctttcatgtgaagtggccgtgttcccggcctctcccagtgtggctctcgagagaaagcctcatgtcttcgtcctctccatggctggcctcaggctctttggtcacacttaatgttcaggcaaattgcagagacctcaagccatttaaaggagtagagacatgttcccagggaaggatgtccattacgaaacagatgtccaggtgggcataggagcgggtgcagcagcatggtgccagcacctcgccttggctgcggctgggatcagca

SEQ ID NO: 262509 - DNA, 193 bp, Homo sapiens
  chr10:126792667-126792860
  hypo
atccctattaaaagacagcacggtaccgttcccagaaatcaaggctcacaccacgtggagctgactggatgctcacggggacattcgatcccagcggcctggagaaaggacggaacaggaggaccctgtgcgggcgccattgttgttcatcagtatacatttataaagaaacggaaattaaacactgtcatca

SEQ ID NO: 262510 - DNA, 437 bp, Homo sapiens
  chr10:126794866-126795303
  hypo
aatatcaaagcccccgggaagccatcttcactgtaaagggaccctgcagtgtatgggaagccaggctcactaccacagtgtttccggaaaggcttccaccagcaagggacgcggggcgacctgagtttggggttgcttcatcggctcctgaatgccagatatacctaaggccacacatgctggcaggtggatctgggcgtcaagttcttcactaacaaaatgggggtcttgggaagggtatgaggatcacggaaagagaagcggacaccacgcctccatttcccagcataacgtcactcagtggcaacagagactcctggccccgccaagagtgagaggcaagtgtgcccaccatcctgcagatgccctgctcggaggtacccctccagcgaaggagcaactcagcaggaacccacccaggccggccacacagtgtt

SEQ ID NO: 262511 - DNA, 50 bp, Homo sapiens
  chr10:126809817-126809867
  hypo
ataccaatgcacagcgctcagcgtggcgcctggcacgccagaggcaccca

SEQ ID NO: 262512 - DNA, 229 bp, Homo sapiens
  chr10:126811107-126811336
  hypo
tctgagagcatgagcgccaagaaagaaaaccgagactcaaaagcccaagggctgtttcttcatgtttcagtcaatgtacactgtgcaaacacatgcaacacagatgaacaaaactcacaaggtgaagggggttcttccactctttccaaaatcagccaagccaactggtacaaaagtcactcccaatacgaccccatggacatctgctgagacgcgacgaggtaagagg

SEQ ID NO: 262513 - DNA, 421 bp, Homo sapiens; identical to SEQ ID NO: 213793
  chr10:126819309-126819730
  hypo

SEQ ID NO: 262514 - DNA, 89 bp, Homo sapiens
  chr10:126828915-126829004
  hypo
atcacgatgactgccgcttaaacctgccctcagcctgactgatgtgatgagggaaggggacaaagaatgagctccgaaaggacatttcg

SEQ ID NO: 262515 - DNA, 404 bp, Homo sapiens; identical to SEQ ID NO: 213794
  chr10:126830138-126830542
  hypo

SEQ ID NO: 262516 - DNA, 120 bp, Homo sapiens
  chr10:126839532-126839652
  hypo
gccaagcacagcgctgtcctcgcagaggcacaggtgatagttagtcactgttttaccaatgaagagtcagggcaacgcaacaacacacaatggcccagcgagctagtgccagacactaag

SEQ ID NO: 262517 - DNA, 136 bp, Homo sapiens
  chr10:126912092-126912228
  hypo
gccgcggtaaggaacggatgaggaggatgtttaatccgcccagccttgcagctaatgaggcgggagtatttgggtgattgttgatgcaggtggaaaaactgtttctaaagagtactgattggccaggcgcggtggc

SEQ ID NO: 262518 - DNA, 149 bp, Homo sapiens
  chr10:127263257-127263406
  hypo
gggtggccgttcatcggggaacggatgtttattgcccacctcctagtgccaggcgtagtgcccagctggggacacagaacagggaacagcaccgttatgacctctgcttctctgtagggaggacttctcccacacggagaactcggctc

SEQ ID NO: 262519 - DNA, 37 bp, Homo sapiens
  chr10:127277450-127277487
  hypo
ctgggattgcaggcgtgagccacggcacccaacaacc

SEQ ID NO: 262520 - DNA, 274 bp, Homo sapiens
  chr10:127314344-127314618
  hypo
acccagtgcagagccactttcgtggcaaatactttctgtgtatctaccgggctatgtttctccaagcgatgccaccgctgctacaggtgaaggatttcctcaactctgagcacgctccctctggtcatgggttctgtcggagttggtatagtggacaccgaggtgtgccgcccagaccgccccctgccatgaaggaggcattacccatcacctgctctcgtagacaccttcagggaccacggctgcagagaacgacctcacccaaggttacaga

SEQ ID NO: 262521 - DNA, 171 bp, Homo sapiens
  chr10:127415615-127415786
  hypo
cattcttggagctgcgtattgtacaaataagtaaactaacgctcatcaaaagatgtttcacatggtcatacagctggcgaaactctcaggctagggcttaaacccagatctttctgcctgcagaggcctgttcctccagcagtactccactgtgtccgtgtactccacaca

SEQ ID NO: 262522 - DNA, 322 bp, Homo sapiens
  chr10:127451804-127452126
  hypo
gacctctgaattgtcggtaggcattgctggtcccttacctgtctctttttcttttttaaccctagcaataacatcgaagatgacacaattctcaaaaccaacaagcacatttactcccagcttttgagagcaactgcaaataaaaccgcgactcttctggaaagaatcaacgttatcgtccacctgctgggccagcttgccgccggcagtgcagcgagcagcaatgccgttcagtgactgcacagagccgtgtcccagacacgctgtcagtgccttcaacacggagccggtttgttcattcggtgctttgtttcattaaata

SEQ ID NO: 262523 - DNA, 108 bp, Homo sapiens
  chr10:127463306-127463414
  hypo
cgcgggggaggaagacgctccccccggccttgcggggcaggtcgcgcagggcaggtcgtgcggggcaggtggggggtgccaaggaagtccgggcgtggccacaccgca

SEQ ID NO: 262524 - DNA, 309 bp, Homo sapiens
  chr10:127464146-127464455
  hypo
tgtgcctgtgcgcgcgtgcgcatgtgcctgtgtgcacgtgcacgggcctgggggtattgctgttcttccagcttcctcctacctgagcagcgtggaggtcggcaatgggcttggcctggcgcagtggggacggctccaggtccgagcggtcccggctgtggaagagactctcgggctgggtgggccagggagcagccagccagcagagcagcagtgtcggacggaagatggaggcggcgagcattggcctggtctgaacccttgccctccctgcctggcttcttccccgtccccgtcacctctccttaa

SEQ ID NO: 262525 - DNA, 91 bp, Homo sapiens
  chr10:127616426-127616517
  hypo
gtacttaccttttggtgcacacgtgtgtactttaatttgatctgtatctgggagtgcaagtgctttatagagtgtacgtacagttttagga

SEQ ID NO: 262526 - DNA, 85 bp, Homo sapiens
  chr10:127659356-127659441
  hypo
gggggaccgtggaaagtgagagatggagacgagggagaggggaagaccgtggaaagcaggagacgggagagggagagggagagct

SEQ ID NO: 262527 - DNA, 259 bp, Homo sapiens; identical to SEQ ID NO: 213798
  chr10:127817216-127817475
  hypo

SEQ ID NO: 262528 - DNA, 57 bp, Homo sapiens
  chr10:127914044-127914101
  hypo
ttccgtcatccatgcgtgatcctgcccgatcatttggaaaatcggtttttagccgtg

SEQ ID NO: 262529 - DNA, 36 bp, Homo sapiens; identical to SEQ ID NO: 213799
  chr10:127937968-127938004
  hypo

SEQ ID NO: 262530 - DNA, 84 bp, Homo sapiens
  chr10:128767291-128767375
  hypo
aaagaattcaggtagcggtagacatcttgatagcagtaaaaaaaatacaaccaaaaggaaggccttcaccgttacctgagtgtt

SEQ ID NO: 262531 - DNA, 34 bp, Homo sapiens; identical to SEQ ID NO: 213800
  chr10:128767590-128767624
  hypo

SEQ ID NO: 262532 - DNA, 44 bp, Homo sapiens; identical to SEQ ID NO: 213801
  chr10:128779079-128779123
  hypo

SEQ ID NO: 262533 - DNA, 135 bp, Homo sapiens
  chr10:128804389-128804524
  hypo
ggccagcccctgcagcggagttgctgactcgcagggtgtgggggtccatctgccgtgagcaagtcatcctgatgcagccccaccagtgggactgagccatcagcccctctccctgcgagacgtttctcacctcct

SEQ ID NO: 262534 - DNA, 140 bp, Homo sapiens; identical to SEQ ID NO: 213802
  chr10:128804853-128804993
  hypo

SEQ ID NO: 262535 - DNA, 254 bp, Homo sapiens; identical to SEQ ID NO: 213803
  chr10:128813792-128814046
  hypo

SEQ ID NO: 262536 - DNA, 116 bp, Homo sapiens; identical to SEQ ID NO: 213804
  chr10:128816343-128816459
  hypo

SEQ ID NO: 262537 - DNA, 115 bp, Homo sapiens
  chr10:128819000-128819115
  hypo
gagtaatcactggccgcgctgtgggcaccagagagagagagagtatgggcggttatcagtctgtctcgctgtctttagcctgcagaacctgtgtatcacccggttttgtcactgt

SEQ ID NO: 262538 - DNA, 76 bp, Homo sapiens
  chr10:128863994-128864070
  hypo
ttgagtgaatgatgcggctccgactgctgcattgaaaaggcctggggtcagaggcggaggttgcagtgagccgaga

SEQ ID NO: 262539 - DNA, 38 bp, Homo sapiens; identical to SEQ ID NO: 213805
  chr10:128874462-128874500
  hypo

SEQ ID NO: 262540 - DNA, 217 bp, Homo sapiens
  chr10:128888487-128888704
  hypo
tgggtaccaggcagtggcaccggaactcattaagaaggtgactaatttcagggccgtgttaacatagactgaggctccatcatggttcccaggtgtttgtcggtcgccgctggagaccattgtgtggatcagtcacatggtctgctgcagtgtgagtgacagacggtgacttgctatcagtatgcaaaggtcacccggtgactattccaagaagtgt

SEQ ID NO: 262541 - DNA, 31 bp, Homo sapiens; identical to SEQ ID NO: 213806
  chr10:128891890-128891921
  hypo

SEQ ID NO: 262542 - DNA, 78 bp, Homo sapiens
  chr10:128897856-128897934
  hypo
caagagagagcgcagggaggtgccattgtcttaaaccgccagctctcacgtgaactaatagagcgggaactcactggt

SEQ ID NO: 262543 - DNA, 204 bp, Homo sapiens
  chr10:128898512-128898716
  hypo
tgggaggcagtagccgtgcggcccaggtgctgtttgttccggggggagttaacagcctgaaccgagggctctgtcgctgcctagaagggggctgtgaggaagagagaacacccggtgtgatgcccaggcctgtggcatgcagctggggcttggcggtgcagcgcctggcactggaatccctagggaaggcgaggcagcggtggc

SEQ ID NO: 262544 - DNA, 194 bp, Homo sapiens
  chr10:128899935-128900129
  hypo
gattcacacagtgtccggcagcccaaggggagccagcagcaggtgggccataaaggcctgtcttgtttgtggccgattcaccctggtgaaatggtatttatgaacttgctacaggcggttgatgctttgctgggcacagtataaaatgcatgaagccagttcgtgcctcaccctctgggcgttcgcaagcgaaa

SEQ ID NO: 262545 - DNA, 203 bp, Homo sapiens
  chr10:128904395-128904598
  hypo
ttctcagtatttctgcggttcttctcataaggattacaaattggtatgaacactccctaacctgcatgctgctcagccttcttgtttcttgatttgcagggggcagcactgaaatacttaccaacgatcgtcaacgatgtgaaattggtgtttgatcccaaagagctcaggtaagtatgcagcccaggcgaatgcttgtcacg

SEQ ID NO: 262546 - DNA, 62 bp, Homo sapiens
  chr10:128930828-128930890
  hypo
gcatttttcctcatcacacacggatctgagcaggtgaccgcggctgggataggtgctgttgt

SEQ ID NO: 262547 - DNA, 194 bp, Homo sapiens
  chr10:128936062-128936256
  hypo
ttctaaagacggcctcgagactccagacaccgtgagtgttaaaggaaccagagtttccatcttccgtgctttttagattcagttttggatttttgcttgggagttgaggagtaagtctcctgagagtaaggcgaaggtatgacctgagtttcctcaatagggtggagttttcttagaaccggctggagtttgtc

SEQ ID NO: 262548 - DNA, 418 bp, Homo sapiens
  chr10:128973759-128974177
  hypo
gggcgcctggagcccgttgagatgtgtggctctcctccgctcgtcatctgccgggcagagtgaccactggctggcggctgcagagtctgacaaaccaggctcgggggccctggcactgagggcaggtgcgtaaacggtggcaacctccgttttaaacaccctcctgagggcaggtggagcgggctcctcggagtttggcctcccccggtcctgcttggccctcccgagcagctggtaatcgggctcttcggatggaggccgagtggagttttggagcgcagcttctccatagctgagcggctccgggcttttacagggctctgtgcagttgacccccaaaggctggtccactgtgttcatgtgttggttggaatggaaaaccaaggctgtggtcttgtgcacccgccccgcgccacat

SEQ ID NO: 262549 - DNA, 204 bp, Homo sapiens; identical to SEQ ID NO: 213807
  chr10:128999161-128999365
  hypo

SEQ ID NO: 262550 - DNA, 41 bp, Homo sapiens
  chr10:129057988-129058029
  hypo
atgtcgctcctactccgagggtctcccgtttaggagggaat

SEQ ID NO: 262551 - DNA, 131 bp, Homo sapiens; identical to SEQ ID NO: 213808
  chr10:129065863-129065994
  hypo

SEQ ID NO: 262552 - DNA, 95 bp, Homo sapiens
  chr10:129144158-129144253
  hypo
gctgggaattgtagtgcagacggtagtgaccaacacacacaaagcacagtgcggcacaacgcacttcaacgcactgtaatccaccaggtgcggac

SEQ ID NO: 262553 - DNA, 146 bp, Homo sapiens
  chr10:129144283-129144429
  hypo
cccgtccagcaaaaggacagctcggccacagcaggtgaagccacctgcccaagtgtccagcgcccgctattgggtgaagctgggacccgagcccagccacagctcctggcctcggagatgcctgcgggagaagagaggtgaattta

SEQ ID NO: 262554 - DNA, 91 bp, Homo sapiens
  chr10:129156702-129156793
  hypo
tcctgagttatttatcaaagcgcactctgtgcagcagcctgccggagcacctgatctccttgcctgtgccgcctcaatttacattttgttt

SEQ ID NO: 262555 - DNA, 214 bp, Homo sapiens
  chr10:129165713-129165927
  hypo
ggactctctgtccagcgctgcagtgagtgccttaggtcagcttgacagcactcgctctggggaggtggcgatgaagctccacaaaaggctccaggctgaaggtccctgatgctagtggaagcctgctgtgaagtgtcgtgttctgcaggagctgggccagacagaagcctgtgagatgggaggccccagatgtgcacagcggccttgaattctt

SEQ ID NO: 262556 - DNA, 94 bp, Homo sapiens
  chr10:129182943-129183037
  hypo
catgtctccagaaccgcggcccacacgcgtgtccgatgcgaagctcacaccattctgacgtccctgggtgtttccgcctcgggtccgctcatgc

SEQ ID NO: 262557 - DNA, 327 bp, Homo sapiens; identical to SEQ ID NO: 213809
  chr10:129195281-129195608
  hypo

SEQ ID NO: 262558 - DNA, 447 bp, Homo sapiens; identical to SEQ ID NO: 213810
  chr10:129195668-129196115
  hypo

SEQ ID NO: 262559 - DNA, 47 bp, Homo sapiens
  chr10:129199502-129199549
  hypo
gacaccgtctcccacgtggcggtgttactggccgcaaatctgtatag

SEQ ID NO: 262560 - DNA, 159 bp, Homo sapiens
  chr10:129218388-129218547
  hypo
gtgaaacgcatgtacgtcagaagctgcagtgcaccctctccctgttctccgtgcacctctggcggtggtgtgcgtcctcatctgtgttttcccagctgaagttgtgcaagttatttcactgttctacttatgctcctggggcctcgggagcctttccca

SEQ ID NO: 262561 - DNA, 116 bp, Homo sapiens
  chr10:129227987-129228103
  hypo
tgacctttagggagcgaggtgtgcagggccccagggatgagcccgtgagcacctgccacgttcggcattggcccccgtgccctcaccggcccacagcgccacgttcggcattggcc

SEQ ID NO: 262562 - DNA, 196 bp, Homo sapiens; identical to SEQ ID NO: 213811
  chr10:129236892-129237088
  hypo

SEQ ID NO: 262563 - DNA, 200 bp, Homo sapiens; identical to SEQ ID NO: 213812
  chr10:129237715-129237915
  hypo

SEQ ID NO: 262564 - DNA, 205 bp, Homo sapiens
  chr10:129239688-129239893
  hypo
ccagcaccaggaggcggagaatccgaacctcccactgggggacaggcttactattcttggtccagcccagcaacctgtctgtctacgcagagggcacctcctccaggggacgggtgccggcaaggtctgtgaggacagtcagacacctgaagtttcctagcaggcggctgcgtgccagtgaccagccatgcgcaggaggggaggt

SEQ ID NO: 262565 - DNA, 201 bp, Homo sapiens
  chr10:129241061-129241262
  hypo
ttgttcttgaccgcacggatgttgccccgtgtgtccttgctggctatctgcatgtcttgcaataatactcagccacttttgcatctatattcaggtcacctgcgatgtgctgtccagcccaggctgtgtgaggacagcagtgccagcccctcgtgtgggggaggtctgctgtaaccacatgctgggcggctccaaccccag

SEQ ID NO: 262566 - DNA, 168 bp, Homo sapiens
  chr10:129242400-129242568
  hypo
gcggccccagagaccgaagagccaggtgatgaacgtcattggaagcgaaaggcgcttctcggtgtccccctcgtcaccgtcctcccagcaaacaccccctccagttacaccaagggccaagctcagcttcagcatgcagtcgagtaagtggaacgctccccacatacg

SEQ ID NO: 262567 - DNA, 698 bp, Homo sapiens; identical to SEQ ID NO: 213813
  chr10:129245252-129245950
  hypo

SEQ ID NO: 262568 - DNA, 48 bp, Homo sapiens; identical to SEQ ID NO: 213814
  chr10:129245980-129246028
  hypo

SEQ ID NO: 262569 - DNA, 90 bp, Homo sapiens
  chr10:129249788-129249878
  hypo
gtgatgttaacatttcgtgcgactgctttttcttcaaaggagttcagttctcaccatggagtgagtggcctttagcgtcatggagcaagg

SEQ ID NO: 262570 - DNA, 99 bp, Homo sapiens
  chr10:129721602-129721701
  hypo
gaagaacctcataatggaatcgcttgcctgttttgatcctgatgtgaaaaccagtttgaatttttttttttttttttttttttgagacggaattttgct

SEQ ID NO: 262571 - DNA, 84 bp, Homo sapiens
  chr10:129865329-129865413
  hypo
acgtacacccacacacaggcacacacatgcacacacacgcacacaaccgtacaatgcatgcacgttcacacacacatgtgcaca

SEQ ID NO: 262572 - DNA, 130 bp, Homo sapiens; identical to SEQ ID NO: 213815
  chr10:129907594-129907724
  hypo

SEQ ID NO: 262573 - DNA, 62 bp, Homo sapiens; identical to SEQ ID NO: 213816
  chr10:129907754-129907816
  hypo

SEQ ID NO: 262574 - DNA, 260 bp, Homo sapiens
  chr10:130123679-130123939
  hypo
tcaatgttccctcgcgcggcggggccaatccacacccatatttttaatgatctgacccaatgtgaatctgccggttacaaagatgctgccttagaattttaaaaaacctcataaataatttgttataaccgcagggtatcatgttaccatgttacttatcatggaactaggataatatttaaattgcttatttacagcgttaaagtaaatagtggtttgggcatttctgcaaagcaggggacatgcgttgtcactccctg

SEQ ID NO: 262575 - DNA, 401 bp, Homo sapiens
  chr10:130185248-130185649
  hypo
cttcgccaggagtccgggcatcgcggagattcatcttcgtcctggcacccaccatgcggtgcccagccagccctgcacttggtcggccctgctcgagaatccaacctggttccattttcaattttggaagcgttgttgcggattaaaaaccggtcaaatgatgggaaagagtcagagagaacagctgctctgtccccgccatcctgccaaggcctaaatgagcctccaggaagcttcagagagatgagggatgcatttcccagcaggagtgatgcatggcccaggaatggcaagtcacgtcgggggcttgtggcaccctggggaggacctgtcagtgcagcgccaactggctgccagtgcccatgcacacacgatggaaacttgatcggtcaagtttctga

SEQ ID NO: 262576 - DNA, 283 bp, Homo sapiens
  chr10:130203290-130203573
  hypo
ccaggtcaacaggaccccctcgcacagcggtgtgatgtgtaagctgcacaacatcagggcgggagttgatgtggcccacagtgtgaacggcgccctccaagatgagcagtgtgatgctccgcagagtcgtagacaggaaaagtggaggctgaagtgggaccggacagcactggcacggcttgactttggcaatggacaacagggaaaatggaggcgcaggtgagaaaggaaggcaggtgaagcgcccgactcactccaagccgggggtctgaatcagatctgc

SEQ ID NO: 262577 - DNA, 52 bp, Homo sapiens
  chr10:130259851-130259903
  hypo
tcagttcttgcctttggtcccggctgctgccggaactcctggtctgggctcc

SEQ ID NO: 262578 - DNA, 122 bp, Homo sapiens
  chr10:130265103-130265225
  hypo
cccggtgagggtcacggctatgcactgagtggggtgtgccaaaaggatgctgtgggaggcacatgaacttccagagaggccccctccaggctggccgctgtcccccgcggggtggaagacag

SEQ ID NO: 262579 - DNA, 216 bp, Homo sapiens; identical to SEQ ID NO: 213818
  chr10:130300171-130300387
  hypo

SEQ ID NO: 262580 - DNA, 88 bp, Homo sapiens
  chr10:130577811-130577899
  hypo
aaggctgccaatttgagcaccggccaaactgcaaccagaccccaggaaaggtaaaatagattgaaatgtattgcgcggtactcagatt

SEQ ID NO: 262581 - DNA, 302 bp, Homo sapiens
  chr10:130748864-130749166
  hypo
taaagtggagaggcatccagcgggtcccagcagctcagcccaccgtgctgctccctgcctcccaaagcctcccgaggccatgcaaggacacaggcaacatccgctaagcgcttcccccagagagcacaccgggaccctctggctcggccttacccttccccgcagagctaggacggtgcgcacaggccatggtagtgaggaattgccacgttgtggagaaggagaacctggcttcctgggagagagccgacttcagttgcccttcacaacacttagggcccggctgctgggggctaattagg

SEQ ID NO: 262582 - DNA, 40 bp, Homo sapiens
  chr10:130828604-130828644
  hypo
gcacatccacaaagcgccccagctacgtcgctgggcagcc

SEQ ID NO: 262583 - DNA, 183 bp, Homo sapiens
  chr10:130828912-130829095
  hypo
cgcagacagacactcgacacccagtttctccatggacggcatgcatttacatgcataatacggcggatgtgcccgctctgactgcagctcatttcctaagtcgcaagaaacgctggtatttttcaaaagtgatttcaaagaatttgtgtatgtgcatgtgtgtgcgcacgcgagcgtgtatga

SEQ ID NO: 262584 - DNA, 42 bp, Homo sapiens
  chr10:130911838-130911880
  hypo
cagaaggaggataatggtgacgctgatccttgctgatggagc

SEQ ID NO: 262585 - DNA, 71 bp, Homo sapiens
  chr10:131301187-131301258
  hypo
actttttctttttacggctctaccccgtatttcatttatatttaaaactgagttgacgaatatgaatacag

SEQ ID NO: 262586 - DNA, 221 bp, Homo sapiens
  chr10:131329753-131329974
  hypo
catccccccacctctctgctcgcccggtgtgcacacctgctaggtcagccctgggcatcgcatcagagacgctgccgtgctcggtggcctggggcttctgtcctgtagaggcctcagccattgcattttaggaatcggcactaaactaacttctactgctgcccacagaagaactgtgccaaatgctctggttgtctaccggaaaaaaaggtagtatgcag

SEQ ID NO: 262587 - DNA, 297 bp, Homo sapiens
  chr10:131348388-131348685
  hypo
ctgcatctgccatttgtgaacgtacagttgagcgacattagttggtgccatctgtgagtgcacagtgcagcaactttagggggttcacaatgttccgcagccatcaccgccgcccagcactggcatgtttcacagtgttccgcagccatcaccgccacccagcaccggcatgtttcacagtgttccgcagccaccaccgccgcccagcaccggcatgtttcacagtgttccgcagccaccaccgccacccagcaccggaatgtttcacagtgttccgcagccatcaccaccacccag

SEQ ID NO: 262588 - DNA, 249 bp, Homo sapiens
  chr10:131377660-131377909
  hypo
cagagctttctgctcatccccggatcatggcagcgtcagatggaactcggcctgccccgtttctgtgcagctgtcaggatgtatggggttttcccatgctccgtgcctccatgcctgcggcactttggaaggacgttaaggcaggacatctttaggagaatgtctttattgactttgtctttatttaccttgggcctggcgctgttatctcagctgagtgtccgtgtttaaaggcgacacatggaacga

SEQ ID NO: 262589 - DNA, 265 bp, Homo sapiens
  chr10:131378237-131378502
  hypo
aacactccttaggccggtgtgtggtactgtcaggtgcttatttttgtttcacaaacttggtatttattaggtgttccaggctttgttcgacccgggtgggagggaggatctttgttggaggactctcactttctaattgcgggtttttgttctgaagccatagggtgtgttgccgtctcagcagggaggagtattccccattaacgggcaggtggcatcgtgggagaagcacctgctgtgcccgggggggcgggactgcgcagga

SEQ ID NO: 262590 - DNA, 124 bp, Homo sapiens
  chr10:131412743-131412867
  hypo
gtgtgttcctggccctgacacgtgctcggcggctggtttttctccttcagatcagcggccttggacagctttcgcttctttggcagccgtttcaagctgctccgtcttgtcattttagagttca

SEQ ID NO: 262591 - DNA, 126 bp, Homo sapiens
  chr10:131428277-131428403
  hypo
aacttgtaaaagaacgtcaggtggaagcggtgagagggcctggacagttgttctgcagctgtgttctttgtctggttaatcgcgtgcgtctccagtctgtggctggccagccgcgtccacctgcgt

SEQ ID NO: 262592 - DNA, 189 bp, Homo sapiens; identical to SEQ ID NO: 213819
  chr10:131566934-131567123
  hypo

SEQ ID NO: 262593 - DNA, 191 bp, Homo sapiens; identical to SEQ ID NO: 213820
  chr10:131577565-131577756
  hypo

SEQ ID NO: 262594 - DNA, 248 bp, Homo sapiens
  chr10:131592426-131592674
  hypo
ggagcagccgcagccgcgctgtgcacccaggaacctgtccttcaggaaggaggcggcggtagaaattaatctgctcagattttccaactaatgaagtattcccaggaccgaaggggccacacagagacgtctgcggcgctgcttcccattcgcgcagatgcacacggattccgggcccagcgctaactcggatgtgttttccagctccgtttattgtcttccataatgcttaacgtactgtttgtata

SEQ ID NO: 262595 - DNA, 392 bp, Homo sapiens; identical to SEQ ID NO: 213821
  chr10:131638468-131638860
  hypo

SEQ ID NO: 262596 - DNA, 534 bp, Homo sapiens
  chr10:131647410-131647944
  hypo
cagtgcatgaatcacggccgggactccgtccgactgcacacactgtgtttaacaagctttataaggagccatcgggctttattatggctctgcctgactccaacaaaaactgagcctggaggcccggggacacgagttaagatgaaaatacttattggagtacattacttcttgatgtagatggcgttttccgtggagtcactccacggtgcgtggcacaacataaatcagaggtttttcggagactaataagacctgccaccatctattcattactctgcctgcaatttgggccatcactcattagtaatttgatgattaacacgccccacctcagcaggtgtgcaaggtgcgggggcggacacaaagactgcggcttccggagaggacggctagggggccgcctttgcaagtgctctccaaaataattggtcaccgttctcgagtgcttgggcgtcggcgcatcttgtaagcaacgcaggaagcctcgcacgtacactcaataatgcgcccgaaagttgaggaccacaatat

SEQ ID NO: 262597 - DNA, 54 bp, Homo sapiens
  chr10:131660294-131660348
  hypo
gggactaaattgtggacacccgccaggagacacgggagaaaccctcacccaggg

SEQ ID NO: 262598 - DNA, 140 bp, Homo sapiens
  chr10:131660570-131660710
  hypo
ctgcatcccagggctgggagcggtccaggtattccgccgtcaagagctccctgtgtccacttcggatgtggttgctatcgactgccaatatcttgtttagtaactgggttcagtctgtcgcagacaacatgttgactccc

SEQ ID NO: 262599 - DNA, 175 bp, Homo sapiens; identical to SEQ ID NO: 213823
  chr10:131686725-131686900
  hypo

SEQ ID NO: 262600 - DNA, 299 bp, Homo sapiens
  chr10:131694654-131694953
  hypo
aagacataacctgacagctccgctcccggccacgcggccaccgtcagccaccctggcctggcgtcgcccgccattcctggcccctccgagcagctggctggacggggcgggggccggcgtgggccgggtgtgggggtgcgacaggcccttgggggctgcccctgtccctgcacagcgagtggggggctggagtttgcaggacgtgctggggcgcggcctcctggcgagcctcccggaggcggtgcaccgtgcagcccttgagctccgctgacctcgccggtgcctttgtcttccctgct

SEQ ID NO: 262601 - DNA, 120 bp, Homo sapiens
  chr10:131713787-131713907
  hypo
gctacgaagtgagtcggggagcccattcttgcggggtgtgacgtcccatgaagtttgttgtaacgagcgacagcccagacatcaatgctgggcgagcacagccgccgagagtgcgggaaa

SEQ ID NO: 262602 - DNA, 240 bp, Homo sapiens
  chr10:131735251-131735491
  hypo
tcagtcacccctcccgcgacagtgcatctcctacgtgatgcatgccgagtgccaggcgccagccagcttcattcgggccccaagggctgcagtgaggaggagcccagagaatccccaaaagctggactggctgtctgaaagtgggacagcaatcgtgccgggaacaagatccctgagtctacaactgggatcagatgggtgggacaaccacaggccgtagggggccgggtcgacaaggga

SEQ ID NO: 262603 - DNA, 132 bp, Homo sapiens
  chr10:131811606-131811738
  hypo
cagggctctgcagccgctgcgggcttgccgaccgtcgcctggttgtaatcaccatgacttatgggtcttggctggtgttttgggcaagatgaacattgttggagcagaaattcatagcgcgtcataagtatt

SEQ ID NO: 262604 - DNA, 118 bp, Homo sapiens
  chr10:131825392-131825510
  hypo
cactgtccccagccggaggccaccgctgctgccctcacagctgccatctcacggtctccccctgccccacttcagggctctccccggggggccaaacaaggcccggcgatggggtgga

SEQ ID NO: 262605 - DNA, 152 bp, Homo sapiens
  chr10:131826126-131826278
  hypo
caaccccggcccgtcggccgtgagactttcacttgcagctgcttggaataatcaggacattccccgaaggcccaggtactgctgtgctctcctcgggggccgaaaccccttcctcagtgcgtgtgctgtgggcgtcacgtgcagagcttccc

SEQ ID NO: 262606 - DNA, 1046 bp, Homo sapiens
  chr10:131844032-131845078
  hypo
cgattgcctcgactcgaggctcagctaaggagcagtcaggtccgtgtcacctgtggcttccactcccaggaagtctgatggctccggtcgtggctgttgtggggaatccgtcgtgtggagaacgtgcctgccacgtgcgggggagaaaggagccaccttccgagtacgcgacctcacctgccgggcgtgaggtgctggactgagaccagggtggggctctgggcatgggaggtggggctgggcgtggggcacgtggcacagagggatgcgcgtggtagggctcagggcagacggaacgtggaacagggagtggctcagggcatggggatggggcggggcgtgggacggggcgtggcgtggggcacaggaaggggcagggcacgaggagtggggcgagaggtgctaagtggggcctgagtggggcgcggggcgtggcgcggagtggggtggagcgggtggggcgaggctcggcgtgggacacgagggacgggacgcgggggcacggcaatgggtggcgcagggcgcactctcgggctccctgcaggtgggcagccccacctgtgcacgccgctcccccgcccagcgcctcccccgggacctgctccagaagcgccagttgcgggaccccacacggaaggcagtcttcggtggttctcactgcaattcctcttaattatgtgtgacataaaaagaccacctacagacgagacaatgctgccgtaagagtctcggggttactgcagggaattcttcataaccgaagtgtgttttccccgaggagttatgctaccatttgatttaatttttaatttttacattttaatcaaaaatagatcaaatggtggtggtctctccggggaaacacacttcagataggaagccggccatgctcctttaaatatggaaactgccgtctccgcgctgcgggctgggcgtgtcctttctgggaggggccttgggccatgcacctgaggccaccagctcgcccacgccgcccgctcacctgcacgcggaggttcatttaatccgtgcgtctatgcagcgcc

SEQ ID NO: 262607 - DNA, 75 bp, Homo sapiens
  chr10:131936598-131936673
  hypo
aggcttgagcccccgtgacctgccctgttgatctaaattgagtgaaattttgccgactgaatttgaattagaggc

SEQ ID NO: 262608 - DNA, 180 bp, Homo sapiens
  chr10:131937432-131937612
  hypo
tttaaatgtaagtaccatttggatgttgtatccttgccgctggcctgtacttgaaatggcccaggaaacaatgtgcactttccttagtgactagttcaaacggacacgtgataaatgatgtgtggcatctggggaaggagcacatttctgcagcttttttggtgaagatggagacattta

SEQ ID NO: 262609 - DNA, 73 bp, Homo sapiens
  chr10:131975644-131975717
  hypo
tccacctgccggctcgcattaacagcagtgagggtggcgaggactgccttatttggcgcgctcccaatgttcc

SEQ ID NO: 262610 - DNA, 232 bp, Homo sapiens
  chr10:131987122-131987354
  hypo
caaagctcttatccaaggggcgagtggctcagccagggttcattaccaggctccggatcctgcttctcccggatcacagcaagcgctgtgcttaggcctggggtgggggacggattctccctgaaggcaggtctgacgcgggcgggagcacccaccccgctgggttcttacggcggatccgttacctgggtctccagagggtgaggtcgccgtgggcaccctgggagcagca

SEQ ID NO: 262611 - DNA, 190 bp, Homo sapiens
  chr10:132237997-132238187
  hypo
agtgaatccccgcaccgagtttagaaactgcgctagccagtccctcccaactcctgacagcatgttatgctgctggttatttgtggcctggttagaattttccaacagatgcagtgcctgacatgtgacatcacagtgcagagtgtgccccgaaactgtctggtttctagaagcccgctggacccgtgcc

SEQ ID NO: 262612 - DNA, 38 bp, Homo sapiens
  chr10:132251719-132251757
  hypo
cagctgctccgtgaacggccgtgcgctttcatctgtgc

SEQ ID NO: 262613 - DNA, 36 bp, Homo sapiens
  chr10:132284135-132284171
  hypo
cagtgtcgacagcgcggcagccgtggagaggaaggg

SEQ ID NO: 262614 - DNA, 234 bp, Homo sapiens
  chr10:132365737-132365971
  hypo
caaagcagaaatggcgtgacagccacatgtgcggggccggggaagtggaggctggctgctcctcacgggcactcgggtgaggctctctccacctcgcgcaggggctacccgctcgccgtgctgagcccttccagctctgccacgcgcaggaagccggtgcggtgacggcagcgcacgctcccaggcacctgcctttgcccacgccggggaggcgcttcctgtgagtcaggactc

SEQ ID NO: 262615 - DNA, 54 bp, Homo sapiens
  chr10:132421233-132421287
  hypo
gcacatggtgctcccgcccctctctctctctgaatctttcgctgactacacgga

SEQ ID NO: 262616 - DNA, 139 bp, Homo sapiens
  chr10:132869742-132869881
  hypo
tgggcaaggtcctttattatcggagatgcatgctgatgacgacgtattcaagggtaaaatgtcgtgatgtcttacactcgctccacgtcttcgtgaaaatgtacgtgtgtgtgcacgcgcttgtatgtacatatggaca

SEQ ID NO: 262617 - DNA, 91 bp, Homo sapiens
  chr10:132873694-132873785
  hypo
ttaggcctccgtgcgctgggcgcacctgggtccggctccagagtctgggtctccgtgcagccttaggcctccttgcgctgggcgcacccgg

SEQ ID NO: 262618 - DNA, 78 bp, Homo sapiens
  chr10:132933678-132933756
  hypo
aagacatcagtttcaacaatcgcaggggcctctgcacattttctttctataaaacccgacaattctccctacacctgt

SEQ ID NO: 262619 - DNA, 42 bp, Homo sapiens
  chr10:132956922-132956964
  hypo
aaggttgaggtctacacttacgtagacagaggatctaattct

SEQ ID NO: 262620 - DNA, 163 bp, Homo sapiens
  chr10:132958985-132959148
  hypo
ctcacctacccaggattcatcggcaaagacccacgccgagggaggggagtgcagcagccagggaaccgttttcatttgctggatcgcacgaagccttgctcatggtaacacaatatcgctggggaagaaagccgcagctttcgcagtgagaaggttctagggc

SEQ ID NO: 262621 - DNA, 370 bp, Homo sapiens
  chr10:132977019-132977389
  hypo
ctgcccgttctatgcgctccaggatgaagatctggctctccgcacttgaggagcctctctttgatcaagttaaacaacagaatcaacagatgggactccactgtacactccgcagagctgcaaatgaattgtttaatgagaaggcaaagcggttccagcagagccccgctcactactcatgtatgctcatcagtgctcgtgcggtccctcagggacacactcctacgtgtcatcacggagggttccgtctcatgatggcaccagcccagcctccagcccctctgacagcaggggaggctgagcccgcgtcggcaccatgctggtggaagccggggcttctgtgaacacacctgcccggctctctccacgg

SEQ ID NO: 262622 - DNA, 192 bp, Homo sapiens; identical to SEQ ID NO: 213824
  chr10:132992257-132992449
  hypo

SEQ ID NO: 262623 - DNA, 305 bp, Homo sapiens
  chr10:133058385-133058690
  hypo
agccgaatgtttccctcaaccggagccgggcttcaggtcccacagcgcctgggcccaggccaggggcatctaaccaggaagcctccgcgcgctcgctaaggcagcaccaggcgtcgggacggcgctccgagcctacctgagacgggggacgtccggaggggtattttgatgggtgccaaggtcaggaagtggcgcggctgcacgctggagggggacgggccccggaggttctcagggtccacggagaccatggcagcggcggcggcggtggcgatggcaatggcggggctgctggtcaccttaag

SEQ ID NO: 262624 - DNA, 34 bp, Homo sapiens
  chr10:133146661-133146695
  hypo
cgtcccccaggtcccggggcgagggcaggcacag

SEQ ID NO: 262625 - DNA, 83 bp, Homo sapiens
  chr10:133218245-133218328
  hypo
atttgaacccttctcgtgacgactcaccgtatgccgtacttgggagagaacacaaagggcagaatgatcgcaccgagtccaaa

SEQ ID NO: 262626 - DNA, 32 bp, Homo sapiens
  chr10:133229420-133229452
  hypo
tcccactccacaaccgccgtcgctcatgctgg

SEQ ID NO: 262627 - DNA, 114 bp, Homo sapiens
  chr10:133514941-133515055
  hypo
acccatgacctagacgtgtgttgttattacacaaaagagattacctgccttctgcctgcccagaagagaggtccccgtgggcagagctagagagcaacgcgggagtcagtaagc

SEQ ID NO: 262628 - DNA, 89 bp, Homo sapiens; identical to SEQ ID NO: 213826
  chr10:133557718-133557807
  hypo

SEQ ID NO: 262629 - DNA, 158 bp, Homo sapiens
  chr10:133572409-133572567
  hypo
cgtgctgtcaatcacgcatctgtaccatcgagtaagacacgtgctgcaggatcttcatacatgctctctttcacgcatctgtaccatgctgtgggatcttcatacatgctctcaatcatgcatcggtaccatcgagtatgatgcgtgctgcaggatct

SEQ ID NO: 262630 - DNA, 93 bp, Homo sapiens
  chr10:133590116-133590209
  hypo
ggggaactgcacagcgctgaatgcccggtcaataacacggctgattgggtgcttgcaggcactcagggtgagaaggagcggcaacgtcacaca

SEQ ID NO: 262631 - DNA, 383 bp, Homo sapiens
  chr10:133783038-133783421
  hypo
cgcacacgggagggcgaggtggagacacgggcagcgctcaggtcccggcccaggaaactcagtggcttttatcccgtttccttcaaccccagatgtgagccctctggccaacctacctaacccacctgcccccagtggcattccggtctttccagtctgtccaacacacggcagccacagaacactgtctgcacgccaggactagagccctcctccccgctgagaggctgggaccagcccgaggaggagccgttttggcttcccgctctggctcttcaccaccgctgcggcgaacgctcttcagaacccacagcggcgcctgcctggtctctgtgttttctgcagggtgagtgagtataagcagccaggaaaggccaggcgcg

SEQ ID NO: 262632 - DNA, 34 bp, Homo sapiens; identical to SEQ ID NO: 213828
  chr10:133790491-133790525
  hypo

SEQ ID NO: 262633 - DNA, 306 bp, Homo sapiens
  chr10:133806789-133807095
  hypo
ttttcagttcttgccgctggcaaatcgagctgctgggaacgttcacattcatgtgccagcgtttgtatcgacatgttctttcatttcttgcaggtaaatgccatggagtgcagcggctgggtcgtatggggagggtgtgcttagctttttaaggagctgccatcgtgttctccaaagtgctcgcacatgttactttcccagcagcaggagagtgccagtggctgaacacccacgccaactgtggtttagccgggctttttaattgtagccattctaatgggtgtgtgctgccgtctcgtgatttta

SEQ ID NO: 262634 - DNA, 279 bp, Homo sapiens
  chr10:133834565-133834844
  hypo
acactctgaaagagaggattcggggtcggctgctcatgaggatgagacggcaaagactggaaggagggagattccctctatgggagtcttccatgattacgcatgaggaggtgcgagaggcgttgctgggaagcttgttccgggtgctcctccaggtgcgcacgcgcagtacccgtccacgcttgttcatacgtcgcctgtctcactagcgtcttcaacgccagggtcggtgtgaggacaggtaagctcacagtgcgcgtgctctccagaggggaaggt

SEQ ID NO: 262635 - DNA, 575 bp, Homo sapiens
  chr10:133920809-133921384
  hypo
caaaacacatccatctgtgacgccccgagggacacacgctccttgatggtcaacaggccaggcttgcgggctccccaggtgccggcaaggttccagggccggcgtctgagggctgcaacccagacccgctgggcaccctgcggggcatgtttagttgtacctggaggagaggatgtgctctcttggcacaacgtgcagaaggcaccggaggaaaggaatggagaagaagcctgtttgcctcagagctcctcatcctggacgccctcgccagagggttcatgttatggtttcctgcataagcgatctgagccctgcctcctcaagcgtaactgacagcatgctggatgcacaggcagcaactcccttttgccaagtgatcacagcgcctcttggagtcagttccacgtggaacagtgcagctggcacaagctcgtccatgttattcacatgccccaccgtggtgggcctgtcgacggcatccaggctgattcgattctcggctgatactgcagccctgtacctgggtcttggactacatgcaaaagaactcctgcaggagacgttcttgcaagcca

SEQ ID NO: 262636 - DNA, 487 bp, Homo sapiens
  chr10:133951545-133952032
  hypo
cacgggcagtaaaccgtggactgaaaccggtggagctgctctaccacttacacaacctcttcaactggcttccgcaggagcgggacaagctgttaagattccggaagcaaagaaagaaaatggcaaaacttcccaaggtaaggaacagcacaccggcacgtgcggagagtacgccgggtgtgtgcggagaggaccacgcccgcgtgtgtggagagcgctggtgtgtgcggagaggggtgcgccggtgtacgtggagggcgctgggtgtgtgtgccgaggaccgcgcccacgtgtgtggagagtatgccgggtgcgtgtggagaggaccgcgcccgcgtgtgtggagagtacgccgggtgtgtgcggagaggggtgcgccggtgtatgtggagggcgctgggtgtgtgtgccgaggaccgcgcccgcgtgtgtggagagcgctggtgtgtgtggagagcgtgctggcgtgtgcttagtaggaatcagt

SEQ ID NO: 262637 - DNA, 592 bp, Homo sapiens; identical to SEQ ID NO: 213830
  chr10:133953707-133954299
  hypo

SEQ ID NO: 262638 - DNA, 72 bp, Homo sapiens; identical to SEQ ID NO: 213831
  chr10:133955513-133955585
  hypo

SEQ ID NO: 262639 - DNA, 172 bp, Homo sapiens
  chr10:133979198-133979370
  hypo
cgccttagacgggccgtgtgtcatcccacatccaccctagccctgccccgcccctcgtaggcggtgacacccatgcccttccactgggcactcactgccgcctgtgagaatcatcatcctgaggaacgagttactcaaggcacagcctttgaggccccggtggactccaggc

SEQ ID NO: 262640 - DNA, 291 bp, Homo sapiens
  chr10:133981379-133981670
  hypo
cgcccctcggccctcgcccctcactccagccaagcggagcctcgctgactctgcactctacgtttcatttcttccagccccacattgaatcggacccttttcctccagtgggaccagaaagcagggacaaaatgggacgtcgcgtctccatcctgaagacccagggagatttggtctctgcacgcccgtcccgtggaggaagagtgagaaggggcagtgtgtggggcgtggagctgccgtccacgtgggatgtgccagaactagaactggctctgccgacttctcgggggc

SEQ ID NO: 262641 - DNA, 1011 bp, Homo sapiens
  chr10:133982428-133983439
  hypo
agcagcccaggtggggatggcgggcgcaagaagggaaccgcggggacggcctttcccctcccgccctgtgtggggacgctgcacgagccgtggaccaagaggctgacaggtaagggctgccatctgtccgcggggagggcctttgcaccctccctgcgaggtgagctccagcttcttcacacctctgtgtccccgtctgcacatgcgtgacgctgccaccccgtccactgctgacccgtcaagatcacctctcccgccactgacgggacagggcctgggggctggtgtggagcgtggcgtgagctgtcgctggggcagggtctgcagacatggtgctccacggggacctggcgtctggcagagctggtcctcctcccacttgcaggaggaggcttgcgggaaaagggagaaaccccgtaggtgcaatgaggccgctctccgagtgcgcctccctccgctgctcccgtgcacttgaacgtggacgccgccccacactcggccccggcacctgaggtgtccgctctggggaggcgactctgggtgctcccagcagggagggagggaggtcaggactctgggcatgctccaccgtggagctttcctcgccagcggggttccctatgggagggtttgtggatccgttgtgtctgtgggactcagcggggccctggggcagggtgagccggttcttggggaggcagtggcagccccatggggggccgcccagggagcgctccatctcccccacctccgacccacaccgtgtctgagagccacctgtgtctcctgcagtgggcagcggctgtgggccacgggcactgttgttcccgggagatgctccctgcgtagaaaatgggagggggaggaggaggtgcgaccaccaccctggactcaggagagggcggcagctccatcttcacccttgactcaggaggggtccgcagcgaggaggaggtgcgaagggggcggcggctccgtcttgcaggtcccctggggcgcgttcttcaggtg

SEQ ID NO: 262642 - DNA, 219 bp, Homo sapiens; identical to SEQ ID NO: 213834
  chr10:133983713-133983932
  hypo

SEQ ID NO: 262643 - DNA, 53 bp, Homo sapiens
  chr10:134002751-134002804
  hypo
ggtggagggaaaagcgttgccgagtccagcccgtgggcgcgtccttctccacc

SEQ ID NO: 262644 - DNA, 138 bp, Homo sapiens
  chr10:134013835-134013973
  hypo
cctctcatgggcctcgtgctgcaggggtggtcgtgtttggggagcccatcaccgccagcctgggcaccgacggttcacactactggagcaagaactgggccaaggccgcagccttcgtcacatcaccccctgtcaacc

SEQ ID NO: 262645 - DNA, 134 bp, Homo sapiens
  chr10:134014003-134014137
  hypo
gcttgctgtccaggtaagcagcctctccaggtggccccaggttggccgcccgctgcacaccctgccaaggctgtggccccgacaccccaggcctctcccacggctcccatagggcagcccggacagtggcgggt

SEQ ID NO: 262646 - DNA, 313 bp, Homo sapiens
  chr10:134016118-134016431
  hypo
aggcactggaccctcgggcctctctccccagaacgtggagtacaacatcttcgagggagtggagtgccggggagcgcctgccgtggtcataagtcagggccgagtggcgctggaggacgggaagatgtttgtcaccccgggggcgggccgcttcgtccctcggaaaacattcccggactttgtctacaagaggatcaaagctcgcaacagggtagggcggcacccgcaagggtgttgtgcaggtaggcaggtgggcgctgagttctaggcccagaacgcacccctggtcaacctggcccggcctcccgagggg

SEQ ID NO: 262647 - DNA, 478 bp, Homo sapiens
  chr10:134019294-134019772
  hypo
cctctcccccacgccgtctctgcacaggcggggcctggctggctgtgggctggtccgacgactcctgcagccgcagctcttctcccctcaatggcagggaggagcgcaccctctcacagggaagagggccggcagggcagccaacatccagggcggggcagagggcagccaacatccagggcgggacagaggcccccccccccccccgcctacattctcaccggacagcccgagccaccccagaaggccggggagcatgcacgggagtgtgtggaagtgaagcacacaccaccgccacccaggtgggcgctgctcacagacgcaggcccagcactcaaggccgggcagctatgaggctgacccgagcccccggtgtgtgactgcggtgctggcgcgtgctgtgtctcaaagggtgcgtggacgttcccagacggttgtcctcatcccaagagcggggcctggtcgcagtcactgggca

SEQ ID NO: 262648 - DNA, 142 bp, Homo sapiens
  chr10:134022678-134022820
  hypo
ctgggcatccccatcgggcctccacctgtggctttggatgacggcctctgggctattgaagtgccccggccctccagcagccagactgcccgggagctcgcatctctgcgggtgactcacccaagcccgaggatgccaaggc

SEQ ID NO: 262649 - DNA, 286 bp, Homo sapiens
  chr10:134024097-134024383
  hypo
caccctgtaaacccacgaacagagtgtgggagatgcagaaggctgttctccgatgaacggttcagggatttgctgacgtgcgtcacactcggacgtgcccgccaagataaaggacaagcggtctcaccttgcgcctcttcccacgaggaaggaagcatagggctcaacacatttcttgggtttggggagcagctcacgttccccaccccgaggcagtgccctccgtgtctctcctggatctgtggtggtgtgagggtttcaccctggcagcgggaatgtggactct

SEQ ID NO: 262650 - DNA, 349 bp, Homo sapiens
  chr10:134035687-134036036
  hypo
ccagcacacctgggcgagtgtgagggcttcacatggccgtccccacacacacaactgatgccgacgcacctgggtgagtgtgagggcttcacatggctgtcccggcacacatacctgatgctgacgcacctgggcgagtgtgagggcttcacatagccgtccccgcacacacaaccaacaccagcacacctgggcaagcacgaaggcttcacatggccatccccgtgcactcataaccccagccctggttgtccctgcccacctgcttcataaggagcgaggtgggggctgggaaaggcagaagggaggtctctggccttctcaggacttcaggaaacggtctgctgga

SEQ ID NO: 262651 - DNA, 301 bp, Homo sapiens
  chr10:134036086-134036387
  hypo
tagagaggagccccaagcccagcccgccgccgcgccctgagcctgccctggcactcacggactgggagctgtccctgctgttgtcccgggacttgttcttggccagacgcttcttcttcttgtgcaggggcctggactccaggatcatctcctccagctcaaaggtggggtcgcagtgcagacggcctttctacagagggatgggtgctgagccccggcccgtggaggacgccacatccatccccagggccccccacctgagccgcccacaggcttacgttgggcacgaagcccggctcca

SEQ ID NO: 262652 - DNA, 301 bp, Homo sapiens
  chr10:134038775-134039076
  hypo
ccaccagtccacctcgaaggagtagccggtcccgccgttgacaaaagagtggaagatctccggagctttccgacagaaagaaggaaaaacagctgccacggggtcacagcccggacccgtgggcacagggccggcaccttgaggccacatcccgagaccaggctgcctccagggtgggacagagaagccaccgaggtcttgtccttcccacctggaggaagccagctcccatctggaaccccagctcgggctcacccatgtacggcttggtgcctgctaatgccgtcgcccgctccccgtc

SEQ ID NO: 262653 - DNA, 105 bp, Homo sapiens; identical to SEQ ID NO: 213835
  chr10:134044632-134044737
  hypo

SEQ ID NO: 262654 - DNA, 455 bp, Homo sapiens
  chr10:134049509-134049964
  hypo
caggattggtgtcgcgtcggtccctgatgaggccggacccgggtgcttgtggggggtcacagtgttcctcctctataccatgtgagttgcatcttctaaaaactagaaaaagagaagagttgaggcaatgcttccgtggccccaaagcccacacatgggcctcagtcaggagcacagaaaggacccctggccccttccccaggtggcagagcctgcgcacggcctggtcagcgaagggacgtggtcaatgctgggacctgggctctgggcccacgcggaggcccgactgccccggaaatggccaacaatgtccccgcggtcctggatgccacaacctgtcatgaggttcgcagaagggggtgacccgatggggtggccaggggctcccggtccagatgaggaagctgaggctgggtggcaggtggcagccccaccgtgcacgggccccacacaca

SEQ ID NO: 262655 - DNA, 333 bp, Homo sapiens; identical to SEQ ID NO: 213836
  chr10:134053690-134054023
  hypo

SEQ ID NO: 262656 - DNA, 161 bp, Homo sapiens
  chr10:134056818-134056979
  hypo
agcctctggaaccccggctggacgctgaggaggcagcaggcttctaatcacactgagcagcctgggggcgaggcgggggtggagagtgggctggacggaagtctatgccgggtaagggggcaggcaggggcggagggcaggctggacgaatgtccatggca

SEQ ID NO: 262657 - DNA, 128 bp, Homo sapiens
  chr10:134057208-134057336
  hypo
atttccgagagcggcggccccgagggtggagccatggccctggtggtagagcagctgcaccagggccatttggcaggacccgactctacccggtcagactctaaatgctgcgccgccctgaacgggtg

SEQ ID NO: 262658 - DNA, 115 bp, Homo sapiens
  chr10:134058332-134058447
  hypo
ccaacagccctgagcgtctctgacgaactccgccagcttcagcacctcacctcgatggtcaaccagcctcaccagcaacaaaacggtgcaggtccacgggcgcctcccaacatgc

SEQ ID NO: 262659 - DNA, 87 bp, Homo sapiens; identical to SEQ ID NO: 213837
  chr10:134065942-134066029
  hypo

SEQ ID NO: 262660 - DNA, 118 bp, Homo sapiens
  chr10:134089039-134089157
  hypo
cgagtctcagtgcccgctcttccttctggccactccgccgacgtgtcactgcaatgcagggtcacagcacagccaggccacggggccagtggccaggggccagcgcagtgcagagcca

SEQ ID NO: 262661 - DNA, 137 bp, Homo sapiens
  chr10:134095686-134095823
  hypo
gcaggaccaaggtgcgccaaccagcccgcaccacgcccgagaggcttcgcagccgcccaccccggctctcacagcgcccatccctgccacacgccctgccagctgcgccagcttccccaggccgtccagagtcgctg

SEQ ID NO: 262662 - DNA, 174 bp, Homo sapiens
  chr10:134104519-134104693
  hypo
ctctctcctgcattcgataacagccctcatggctgtgggacctcactgtttgtatgttgaaaacacaaaatcaacacagccactgcacatagaagagaagaaaccaccggagggcaaatgtaattaatggaaattttctgaaccttccaattagctcggcggtggctgagctgg

SEQ ID NO: 262663 - DNA, 280 bp, Homo sapiens
  chr10:134106506-134106786
  hypo
tgaaacctgccccacgcaacgtgcagggcaagaggctgacccagaggtgagcagcgaacggcaaacatcagcaagcggggagcacggcacgtgcggggcggtcagtgcagcgcgtgcatgcgtgcggggagggcagcgctggggaagagccaagagaggcctggggccagggggctggggcaggacttagagtgggcctggctgagaggaggatggagtggccatcgctactctcacggtccctccacccaggcctggcgcctggcgggctcccctcctg

SEQ ID NO: 262664 - DNA, 421 bp, Homo sapiens
  chr10:134116364-134116785
  hypo
ccataaggaaagaacgaggcaaaaccatcacggggccactagagtcactccaaggcaacgtgacagaccacccagaaagccaacaaaatgaacttcaaagctatagactaacgagaatttagccaagtgcagtcatgtgcaagaggcagcgaagtctcagccacacacaaggtgaaccttgtaaaagtggagcgttccttcacatcagcagcagccagcgtggaaacggtcccactccagtcccacaggccgggagcagcaagggcgcagcctgcctggggctctgcggtgaggggctgcgtgggaggcctcagatccctacagggggaaacatcctaactgcactcatcctgggaaagaggagaactaatgcgagaaggagagagctttctcactctccgtcaagcgatactccctacgg

SEQ ID NO: 262665 - DNA, 104 bp, Homo sapiens; identical to SEQ ID NO: 213840
  chr10:134164631-134164735
  hypo

SEQ ID NO: 262666 - DNA, 44 bp, Homo sapiens
  chr10:134168482-134168526
  hypo
ttactcgggacgttcgcagccctgggcggcgagctgtgaggagg

SEQ ID NO: 262667 - DNA, 44 bp, Homo sapiens
  chr10:134171806-134171850
  hypo
agcgtggggaggagccgaggtgatggagcagcgtggggaggagc

SEQ ID NO: 262668 - DNA, 384 bp, Homo sapiens
  chr10:134188501-134188885
  hypo
cagagacgtggtgacgccctaagtcctgccagcctttctaacatctccccctccttgtctcccataaggccacagagctacaggatgaagtattgaagctaaaattgggattaaccttgaacaaagatcgtcgacgggcggccctcactggaaacctttcgcttggcctgccggcagcacagcctcaaaatacattttttaacacaaaatatggagaatcaggaaatgttcgcagataccagtgacaccaggtggctggactgatggagacgtcttcagacaggagccgctcagtcttctttcccgggcgtcgcctcctgtgtggtgccggaagagcgccaggttcagtgttaccctgagggctgatttcgcgcagcctgttgt

SEQ ID NO: 262669 - DNA, 401 bp, Homo sapiens
  chr10:134212591-134212992
  hypo
ggttctctgcccttgtattccgagtcccagggctcctgtttccagccctgcctcggaccgcagggtgctgacctgccttccccaggtgccagtttctcatcagggcgtggtgcccgcccttatcccctgcatgtgacagtggaggcccagtccccaagtgtgggtgctgactcacagggaagagctgctgggagccctatgacaggtgtccgcccacctcagggaacctgtgggtcccagcacaaccggcgctgttgagcgcaggcggcgggcagccaggcacctgttcagagcaatcccacgggaatggcggccccgctcacacaggcgccgggatgcagggctgaggtgggcccagcagccagcgtttgttgtcggccggtttgggagatggcattctc

SEQ ID NO: 262670 - DNA, 687 bp, Homo sapiens
  chr10:134217026-134217713
  hypo
caggggacagggctcggggacattggctgcacttgggcctcgagaatgatggggcagccaggtgcccgtgcagcgaggtggcctgcactctaggacgtgagctgcttctgaggacaaatcccccaaagccacgcacagtgctgggcactagccgttaagcgcaggctgcccggcccagcgagtcccaggatgagaaggcctttacaactgggattggtgtcccggctgtggcagccgcggggccttaattgtggctcccccagcagtggctgctcctgccccctgtgccccttcccctgcagctcgtgtggcccagcagggcaggacctgagggtgccaggtgggcagatggggatgagggctctctcggggccactgaaagcatctgggccatctccagagggctcagccccgggccacgcgcagccccaccccagacacacgtcatgcacctggaaccctgctcccgtaggacggcattctccagggctcctgcaggacggcattctccagggctcctgcaggacggcattctccagggctcctgcaggacggcattcttctgggctcctgcagggagctttctccaggggcttgctttgggggttgaagcgttgcctggccctaggggttgtcttccctgagtcccccagcccctcggagaggagggaacggctgagcctgtga

SEQ ID NO: 262671 - DNA, 201 bp, Homo sapiens
  chr10:134269926-134270127
  hypo
cggccaccttggccacggcctccccaagacacgacatgctttgaggtgtgagttggtgctggccctgccatgtggctgccaccacaccgcttccagaccatgaggcccctcacacacgtgtggccagagtgtccgcacggcccagggacaggagcgtgtgccctccaggaggctgttctgaggctgcgtggcagggcatgg

SEQ ID NO: 262672 - DNA, 135 bp, Homo sapiens
  chr10:134273059-134273194
  hypo
tctacagaacaactcagacccgccgcaggtgcctggtgatggtgggagctgtgttgcgtgcagtctggcggtgcacaggccacgtgctcctttctctgccgggctgcaggcttcggaaaggtggtggaggagtct

SEQ ID NO: 262673 - DNA, 43 bp, Homo sapiens; identical to SEQ ID NO: 213845
  chr10:134276612-134276655
  hypo

SEQ ID NO: 262674 - DNA, 81 bp, Homo sapiens; identical to SEQ ID NO: 213846
  chr10:134279122-134279203
  hypo

SEQ ID NO: 262675 - DNA, 105 bp, Homo sapiens; identical to SEQ ID NO: 213847
  chr10:134279498-134279603
  hypo

SEQ ID NO: 262676 - DNA, 106 bp, Homo sapiens; identical to SEQ ID NO: 213848
  chr10:134280450-134280556
  hypo

SEQ ID NO: 262677 - DNA, 111 bp, Homo sapiens
  chr10:134292419-134292530
  hypo
gcatgtgagtggctaagacacgtgtttgctcccacagtgctggaggccacgtgcctgcagtcaaggtgtcagcagggccacgctccctccgaagcctctgtccctcagggg

SEQ ID NO: 262678 - DNA, 185 bp, Homo sapiens
  chr10:134298547-134298732
  hypo
tatccgattcacgtcgctgagctagcgtgtcactgccgagagacaggctcgcctgtgaagcggaggaggacattagtgtagaaacgcacagccttggacaggctcgcctgtgaaacggaggaggacttcagcgtagaaatgcacagccttggacaggctcgcctgtgaaacggaggaggacttca

SEQ ID NO: 262679 - DNA, 383 bp, Homo sapiens
  chr10:134300836-134301219
  hypo
acctccagctggtgaagagtcgcaccaggtgtgggtgcaggaggacgtctggttagaggtcagaggcgtcatccccaaccccggccgatgttatcttacgtgcggggaaaggcaaggactggactcgttcatcttttacggaacgtggtgagtcaggcaagagacccgggccctgtgctccgtcctgttttgtcttcgatgcttctctccggtgagctgcaggtggccacagagtcaggcttgggaagctgtgccgcaagcgggaatgagtggacggggctgctcacgcggctgcttttccgtcacggatgccccacccggtcctgtgcgggaggccctgttgaggtgagctccgccctgccgagtgtagggactttgcctcc

SEQ ID NO: 262680 - DNA, 53 bp, Homo sapiens; identical to SEQ ID NO: 213849
  chr10:134302492-134302545
  hypo

SEQ ID NO: 262681 - DNA, 85 bp, Homo sapiens
  chr10:134304827-134304912
  hypo
gaacctgcatggacacggaacttgtgtggacacaaaaccgcccaaagcccatgctttgcatcagtgttcacgcttgcttttttct

SEQ ID NO: 262682 - DNA, 122 bp, Homo sapiens
  chr10:134346519-134346641
  hypo
tggagtaagtctgacccacccggcaggagtactgaagagcgatgattattagacgctagaaatgcactttacggctgcgcagtgctagacgcagacatgccgcagggcaccttctgaatctg

SEQ ID NO: 262683 - DNA, 274 bp, Homo sapiens
  chr10:134370565-134370839
  hypo
tcttttgtatgctgtgacaccggtttggtaggtctgagtggagatttggtcagttccgcctaaaggccgacgggcccggctttctggggagaaggttttcccttgcagaggggtatcctttggtgtctgttgccgctgtgaccgactgtctcacatgagggatggagtccaggctgaggcaccctcgcccggggccactgtgactcccatggagcctgggatttgttccggttaggccacgggtcacagtgctcagtgccgggcagatgtgggc

SEQ ID NO: 262684 - DNA, 55 bp, Homo sapiens; identical to SEQ ID NO: 213851
  chr10:134421293-134421348
  hypo

SEQ ID NO: 262685 - DNA, 45 bp, Homo sapiens
  chr10:134421771-134421816
  hypo
tccccagtggggccgtggagagctggcagcgaggctgggtgtgct

SEQ ID NO: 262686 - DNA, 55 bp, Homo sapiens
  chr10:134427568-134427623
  hypo
agtcgtgagcaccctcgacgcctttgggacccacggctttcgaagattaggtcca

SEQ ID NO: 262687 - DNA, 36 bp, Homo sapiens; identical to SEQ ID NO: 213852
  chr10:134457709-134457745
  hypo

SEQ ID NO: 262688 - DNA, 201 bp, Homo sapiens
  chr10:134459516-134459717
  hypo
tgtggggtgccggcgggggtcttttcatggtactatgatcaccagcctcaccattcgggactcacctgggggtcatcttggctgagtctcagttttccaaagagaggagtggcccagacgtgtggccacgagcctccttggggcggcgacagaaggccacggagtgacagcctgctgcctccacacggcgagggtctgtgc

SEQ ID NO: 262689 - DNA, 55 bp, Homo sapiens
  chr10:134460290-134460345
  hypo
ctctgtgggccgacgccgctgccacacactgtgggccgacgctgctgccacgctc

SEQ ID NO: 262690 - DNA, 39 bp, Homo sapiens
  chr10:134467311-134467350
  hypo
cggcagccttcagcgcggggagcacggcgccccccgtca

SEQ ID NO: 262691 - DNA, 209 bp, Homo sapiens; identical to SEQ ID NO: 213853
  chr10:134477300-134477509
  hypo

SEQ ID NO: 262692 - DNA, 378 bp, Homo sapiens
  chr10:134481125-134481503
  hypo
taatgacatttgaatcgagcattaacaggcttaattactttaaaattgtcattttaatttacactgatatagtattgatcatacaagcagagattaagctgttcagtggagcagatgatggggaattaaacattaaagggtcctcagggggccgtgtgcgctgcccggcgcgagccggaagagggatgatatttctcggtaatgaactggcggcatgcggggacatgaatcttgggctcttggaaaaggggaaataatggggtttgggaggcatttgcaggttattcattcgccgccatgcaccaattctccagtgattcatccgcctcaccaacatttatttatccagcaaattccggagctttgacctttttgcta

SEQ ID NO: 262693 - DNA, 373 bp, Homo sapiens
  chr10:134491022-134491395
  hypo
gtgctggtagcaggcgagaagccaggactgctggtcaccttgccgccctcagatgtaccccctttggagaagcctgccgcaggctgttttacaggccatctcgttccatttcagttgctcctcaccgtggtaatcggaaatgttaacgggcgcactcgtctggtggaatttatcgtggccagcgagggcgattaagcggctggtatgtggcgtgtttaccctcgtgtcagcatgactggtgttccaccctggcagatgaaggcccggtccttcctgggctcctaattggggacactacatccaagagccgtgacagggttcagcaacccgcgtgcagaatgccggcttccacggggcacgctttataaaatgc

SEQ ID NO: 262694 - DNA, 58 bp, Homo sapiens
  chr10:134492043-134492101
  hypo
agggttctgtccagcggtcctgagctgctgctgctcagccgggcgcccagagggtgtg

SEQ ID NO: 262695 - DNA, 514 bp, Homo sapiens
  chr10:134499296-134499810
  hypo
aagtggtctgctcccgccctgagttggctgtgtttgcaaagtgggcccgctatcagaattcagctcccgaaatcaagctaagtgacacggtgtggccatttatcacattaccggactccaattgaagttgagaggttgttttaatagcatttgtaaatactccatcttcactagccgcccctgtgagaggcactgagcccccatggtacgcagggttcgttgcgccctggtcgccagttggtgtggaagcctgatggtggtgactgggagcttcagttgcccattagctcccaggctgccttcagagaccagggtcccaccagtgcagccccagccagggcccaggttagccggggtctggatctcctgtgtggcccgcaccggatcgacttttcggtgccccaggggcttggctttgtccagtggaggccgcttcccggctgtgccgtggcctccgggggctggaggactcctgcccgtgtctgcagtcctcgcagaagcatcacagctaatg

SEQ ID NO: 262696 - DNA, 405 bp, Homo sapiens
  chr10:134503266-134503671
  hypo
tgtggcgtccagccgcgtacttttgccttctctggtatgaagagcagggatccctgtgctctgcaaccatccggctaatttgtaagtgggagacactggcagctcctggggcgatggggcagggtggggccaggcgcagtggagctgatggttggaggccccaggacgaagccgagcatcagtgctgggaagggtctggtccactcaatgcccggccggtgggacctgcgcccctgctggagccagcaccggctgcacggctcacctgggaagggtctggtccactcaatgcccagcccgcgggacctgcgcccctgctggagccagcaccggctgcacggctcacctgggaagggtctggtccactcaatgcctggcccgtgggacttgcgtccctgctggagc

SEQ ID NO: 262697 - DNA, 192 bp, Homo sapiens
  chr10:134504489-134504681
  hypo
tgtgcgatgacttcccgtctgacgctatcgtttcctgctgtgtgtgagttctcagaaccccacgcggcctccggagcagatgacatccatgtgaagtgccctgcacgtcgtagtaactgtggagccacaaacgatgtcgtttcgttcggattccgtgtttgtgctccctcgggagacggagcggctcctgtg

SEQ ID NO: 262698 - DNA, 350 bp, Homo sapiens
  chr10:134517971-134518321
  hypo
gttggacgccagcccgcggcggctgctggtgcgcagagccacccctcgcagcccgccggcaacatgggctctgtcctcccctccttgtacccgaggccccacagctgggacttgaacctggcagcctggcagtcctgtcttacccactgccttgaggccctgggtgctgctggtgtggatcctgtgcgtggctgggccgtgggggggcagtggctgttccaggtgggccgtctccccggaaagtgcaggctggatttggacgtgtgggagatggaggaagggcgtctagtcaggcagcaggcagctcctctggagtgtggaggatggaggaagggcgtctggacaggcgg

SEQ ID NO: 262699 - DNA, 295 bp, Homo sapiens
  chr10:134518523-134518818
  hypo
ggacaggtggcaggcggctcgtctggagtgcaggctgagtggaggggagagagtccaagcattgggggtgtcccagctgcaccgttggtgggagcatggagcccgctgtggggcatcagcagcacccacttctccccacagctcagcttcccactgatgtgtttccattgcagacacagttaccgacaggaaatgaacacagaggctccccggggcaaatggcctccccgagagaggaggcggacatgtttggaatcagagacaagtgtctggtgcagcacgcagggagcctgcc

SEQ ID NO: 262700 - DNA, 1192 bp, Homo sapiens
  chr10:134527001-134528193
  hypo
tgtgctgttattagcgggtatatggccttggctctcctctgcatctggcccttgctgagggccctgaggcgtggccccttatcccctctgaccgcccctgacctccgtctccagagtgatggagccctggtcccctgccactagcctggtcccggggagggtggcaactgcgaggcctgggtgctgctgtgctcgtggccacacactgaggccggccctcagccctgtgcacggccacaccctctgcaggggacctgtccggcctcccggatatctctggagctggcactgacaccgaggcagggatcggtctgagcctggggactgtgctctcaactgcccaccgtagggaagcagcacaggtgggggatgggggcctggggctttgtcagcgacaaagtgactgatgaccgcctgtgccctgggcgccctccctggacagcatgtcagtcgcccagggagaagggcctcacccacaggagcggcgcggttcttcctgcctgatcagccctcggcttgcaggcaccaagcgtctcggggacctcccacggagcccaggagcagggagggccctgccgtgtctgctgttgggtcttggtgacagcggttaggttgtcagcatggcatggcattaaaatgtgtcattgcccctcgctgccatggctccgcggcctcaagaaagcagcctttgggcttttgggccacttttctgcgtctctgcattcccatgaatggctcctgcggcgcgctcagccagccgcagatccggacctccgcggcgtggggcgggccgcgcaacacaaagggcggctctgtcggagtctggaacaatgggtcgccctttcaccgcggctgctaacctcttggcagccaccagcagaccacattctgctgtgcggatcgggcaggacaatgccgcgcggcctctgaatggacgctgccaccaacggggccccattcacggcgttgggaaccgggcgcacattgtctgccccgcagggagacagcgaggaggctcctgcagcctcttcctggtttaatctccccgcgcggcttcccaggtccatgtcccgtatcagctgcggggccggcagcaccaggcccaggagggagggcaggtcccagccctggaggaggatgcaggccaggttaaaacccagaggcaccgtaggaccttcgcaccgttgctcta

SEQ ID NO: 262701 - DNA, 124 bp, Homo sapiens
  chr10:134528539-134528663
  hypo
gctcttggaggcgccgagcactcagcccgtgttgggggcagccccggtccctctcctggacacacaggtcagcccttggggggcatctgggggctgagccagaggtgcacgtcagccttcctag

SEQ ID NO: 262702 - DNA, 557 bp, Homo sapiens
  chr10:134529078-134529635
  hypo
agttagctgtcagccgctcaaagagcccccaacctaaatgtttctctttagacgttcccagaacttgccttgctgtgcagccagtaaagaaaagctgctgcgtctccaggcaaaggcaaactcggcattaaagatctgggtcaccctgagcgctcctggccacagggctggttctcgcgctcctcacactcccgctggcctcggagaacagctcacaggctcttgctggtcgtgggctcgtcccaatcaggctttctcagactcggagacctcagggtggccgaggtcatgtgtctgtggagcccaccaggcaccctgtggtgtccctccgcatgcccgggactcctggcagcacaagcccgtgccctctgccgttccgctgccgtgaagcccgctgcctctgtgtcgccttagcctctccagggcgtggtcggtccactgctgcccggcaggaggggctcctttcgcctgtgcctcagctgatccatggctgcgatcttcattttgttgaacatggagtcaagagccaagaaaggtggtgccgctatgcagatgca

SEQ ID NO: 262703 - DNA, 49 bp, Homo sapiens
  chr10:134540684-134540733
  hypo
gagctgctggagtgccgtcacagcgccaccccctcgatgcccacagagc

SEQ ID NO: 262704 - DNA, 411 bp, Homo sapiens
  chr10:134542025-134542436
  hypo
ggaagcggcatttccggcaggtctggaacatctctgagtgagctcatttctaacctgttactcgagagccagtgagtccacagtgcacataagtacttcccgctctgactgggaggggccaggatgaaagtcaagaagaacccgcgaaagaccaaagccgatcaatcccgggcgcccagcaattggggaaaggtcagggagcttggaaagggccttttccttctggtagagcaaatgtcacagtaaagggcagctggtcctggccgggtcagagccgtggtgaggcacgcactggagcagccgcgggagcctccctggtgaagggagccagctgctgagcccggtggccgggccgtgtgaccacaaggcgtcgggggcagtgggaagcctgggctccggtgcctgtggggc

SEQ ID NO: 262705 - DNA, 67 bp, Homo sapiens
  chr10:134546239-134546306
  hypo
cccctcagtgctgcgtggcacctccacgtggccatgtcgcttcctgtgggccgcagacacgtgcagg

SEQ ID NO: 262706 - DNA, 400 bp, Homo sapiens
  chr10:134556147-134556547
  hypo
ataaattacagccccgtgaaacaaaaagtgcctcccgatgagttcggaccgtgagggacacccagctccgatgcttccttcccggggtctggaatccctggtgaaccggggcccttggtagtcaagaaacctgtcattgaaattcatgatgccggtttggttctctttgccgagatttatcattgacaggcatcctgcgtcctttggccctttatttaaccgctgaaggcattgtttttaagaccatttcttttagaagagtttcttttcagatgttcctacgaacatctgtttgtggctgaaattcgacccagccggcctgcgcctgccccgcgccccctttgtccccggccattgtttctgatttcatgctatcagaggtctgcgtgtttttctgcat

SEQ ID NO: 262707 - DNA, 172 bp, Homo sapiens; identical to SEQ ID NO: 213858
  chr10:134559539-134559711
  hypo

SEQ ID NO: 262708 - DNA, 372 bp, Homo sapiens
  chr10:134559957-134560329
  hypo
gctccgtgcacatccgaatgactgcgttatttccttgcacagaaaacagcctttctcctgggctgacacctgtgccctgggcctgtggacgccctgtccaggcagcatgcctccttggttatccaaacagtaagaagaaatgcaggaacttcgtgatccacacgcgtgtggatgaccctggcacacagcgttcccgttaaattctaagtgtggataagacggcacaccggaccactctttccagagcctctccttgcggctgctaataatgaaatacatcttagatggctttttaaacatagcatttagggtatttgtttctcctttcaaaagagaagaatcccttcccaaagtaggcgagccggaaaggcc

SEQ ID NO: 262709 - DNA, 654 bp, Homo sapiens
  chr10:134562453-134563107
  hypo
cccaccccagcctgcgccccagggactggtttgagcctgttaacaccacaaagcaggcgtgtgacctcagccatccctcccacgtcagcttcacccagatgagcctgttgagacggttcccggtcaagccgcctgcagcccttgcccgttgtcacagtcgaacagctctcgagggagttcagggacgggagagagcgagcgggaggaggccggccatgtgcccccgcaggcaccctctttgctgttctcagtgctgctgtgccttccgagcctgctggtgtcgcactggcttttgccccaaagcagctctgtgggcggcagcagctccggggtgtcctcacggttgcagccacgctttgttggggagcagccagcctcaggcccttcgcacgtgtgagggtcggctgttgcgggagtggcccctgaccccaggtgcggaaatctgggtgtgacaccagctgctgtctggaaccagccatcctatcccactgactcggggtgtcgggtgacgctgccatgggcaggtgggcccccctgggacttatctccgttgctgtctttctgcagacgctctgcacaaaagccaccatgcagacggtccgggccgccgacaccaatgaagtggtgaagctcatatttcgtgagtcggacaac

SEQ ID NO: 262710 - DNA, 134 bp, Homo sapiens
  chr10:134566208-134566342
  hypo
cgtggaggcggtgcggcatggaggggtgtgtctagagcatctgggagcaattgtctttcatgtggatccaaagtcctccttttctctcagcattttgacacagagcacgcccctgctgtcggtagccaccatac

SEQ ID NO: 262711 - DNA, 121 bp, Homo sapiens
  chr10:134567128-134567249
  hypo
tggagagattaaattttcctcggctgtcccagggccgggcttgggagtttccgcagcaccggcctcttggagggaggtgttttctgtgtgtttagcaaccgctgtagccccaggtgcattg

SEQ ID NO: 262712 - DNA, 58 bp, Homo sapiens
  chr10:134575252-134575310
  hypo
aagacccaccaaagacgatcttacagttgcaaactgtgaaccacgtaaggacacattc

SEQ ID NO: 262713 - DNA, 144 bp, Homo sapiens; identical to SEQ ID NO: 213860
  chr10:134577903-134578047
  hypo

SEQ ID NO: 262714 - DNA, 100 bp, Homo sapiens
  chr10:134583322-134583422
  hypo
gatacgtgtggctcccggtacagcccaggctcaggtggcggcgatttggacaccccagtggtagcatggagctgctgcctttttgcgcatcctagctaga

SEQ ID NO: 262715 - DNA, 208 bp, Homo sapiens
  chr10:134588784-134588992
  hypo
cacagccgctcccacgctgtaggcgcaggtgcgcccctgtcctgtgtgcctccccccccacccagcaggtatgctttcagataagcccacatgcctggcactcccacgtcagtcactgctgggcagcgtccaggccccgcgtcctgctgctctgcagcgtggccccgccagcacctcccacctgtgggtacagcggttgtgtgcagtc

SEQ ID NO: 262716 - DNA, 241 bp, Homo sapiens
  chr10:134589352-134589593
  hypo
gacgccaggtggcacgggctctccaagctccatggggtgcatgaggagggagaactggttcggttccagcttcctatttagaagtcacctattgtgtgctgtgtgcatgtgtgtccggggggcagtggacgtgtgtgcggatgcaatggacatgtgtccaggggcagtggacgtgtgtcaggggctgggcaggcccctgcctgcatccagtttccactcgtgtccgcggttgggatcagct

SEQ ID NO: 262717 - DNA, 535 bp, Homo sapiens
  chr10:134589801-134590336
  hypo
ggctcccgctggagcgcgcggaggatgggagctcctgcgtcagggcagagcaagttcccagtccccggctgtttccaggtggttgggcacagggcccacaggcgcccctgtgggcagggtccggggggcatgggaggggctgcagaatccgcagctgaggtgccgggatggacccgaaacccaatcacagccaacagggaaatttcacagagaatcagatcccagtcgcgacaggtgctgtatgatattttggaattaactgaaaaaactcttgagactctggtgaaggccccagagatgttgagagtaagcagagacgctgcacttaggggcaggtggctgagctcagccacaggacccccggggttcgttcactccaagtggaattcgttaccacttcagtgcagtcccaagcaacatgcccatttgggggtgggtttgcagcctgatgggtgggtcgggccccctgagaacctgcaggcccggaagtgggggctgtgcttgcgtgttccagactcggcgggtagtgggggcc

SEQ ID NO: 262718 - DNA, 663 bp, Homo sapiens
  chr10:134592901-134593564
  hypo
ccctgggaaaacgtcggaggtcacgcgagtgcagattggtgagcagcgcccaagggcagaaggctggcagggctgtggcctccccacattgtgctgccgctgccagggctccaccagctcagagcagggcagcgttgcagcccgttttccattcactcacagcctctcgggttctctggatccgggacttgacactttatgctcagggtgggggacagagcctcacaacacacacctggcggcctttgacagcccctgccttctggggctggagtttggacaggctctccccatggggccacccagtgggcagcgggtgtgcaggacaagcagacgggcgccgggcgcgctccgcagcctcatccatcatgacacgcgccgtcacctcgtcaccaagctccgttctgcctccggagccctaaaacaccaaaaggggctcgggacgcgggcggtgctgcttggggagcctcggtgacaagtgttcagtgaggtgtgccgcacgctgcctgtgcccgccgtaatttgtttatctgtccaaagattatgcagttgaaaatccacaattttatgctgcctttgtaaattaccacgctgcgtttgatgaatgtttctccacttctgcggaggcgccgcttcacccgcgagaggcgggaaggtgctcat

SEQ ID NO: 262719 - DNA, 93 bp, Homo sapiens
  chr10:134595971-134596064
  hypo
tgccggccggcagcgtggccctgagcatggcaagggggtctgtctctgccgatgctccttccgcggcactgactctgcgccgtgtcacatggt

SEQ ID NO: 262720 - DNA, 262 bp, Homo sapiens
  chr10:134606292-134606554
  hypo
ccgggcaggctgcttctcttctccctggtggtcgtgctttggggacgcgtccctgggacccctggctgctgggagctgccccgtgcgagtgccccgccttctgcagatggaatctgtcatcttcattcacttctcaggtgaagttcttaaaagggtggcacggcccaagctccttggtccccagcggagctgccccatctgttggcaccgctcaggtttctggccatgtgacttcggccctgacgcccgcctgcgttgcccc

SEQ ID NO: 262721 - DNA, 470 bp, Homo sapiens
  chr10:134607701-134608171
  hypo
ctccccacaatgggcgccccctgctgatgggcacctcccgacaatggcgcctcccagtgatggacgcctccacaggtcctcggggccccttcccgtccaggtcttcacagaggccccggcactgggtgcccagtggcctcggcagccgtgtctgcgtgacagaagccgagcgtgggacggctccagctcaggactgtctgagccccaccctgcgagggtgctctgagctctcagggcgttgcttctttgcccatttatcccgggtcttgggtgagttccagtggcggacagagctcagacaagagcagtgctcgcagcagcgccagcagggacagtggcaatacgagggtcacaggtgtgatcggaggccgccagcctgtgctgggtcaccgtgcggtgccagtgaaggtgccctctgcccaggagctgtgggggagccgggggtgccgccaggacgcagtgtgggtcgc

SEQ ID NO: 262722 - DNA, 441 bp, Homo sapiens
  chr10:134610520-134610961
  hypo
ccttccctgggagccgtcaagcatgaacctggatgtgcctggcctggtcccgggccctcagcctcccaacgcccctgcgcccgttctcactggcacggctcagtgtccacaccgggccagcagcgcaggaactggaggctctgcttcgtgatttccgcagtggcagatgacaggaatcaggttcctgcgggtggcagcggatgggggtgcagaactgcctttttgctgtttgcctgtttaccctctttgtgcccgcgccaaggtgggagccgctacacccagggaggcgctggagcgtgtgcggaggtcagagcctgatgccgcctcggtctctgggtgccggggcagccattccttcaaacaatggggtgcttccaaaccggtgcctcgtgaggaattgggaaagacaggagattgtcatcatcacgagagacaaaaccc

SEQ ID NO: 262723 - DNA, 203 bp, Homo sapiens
  chr10:134611724-134611927
  hypo
gcggctgggctggacggtgtgatcctgaggtgggccgaggcggctgggctggacggtgtgacccggaggtgggccgaggctggacgaggtgccccagaggtgggccgaggcggctgggctggacggtgtgatcctgaggtgggccgaggcggctgggctggacggtgtgacccggaggtgggccgaggcggctgggctggacg

SEQ ID NO: 262724 - DNA, 50 bp, Homo sapiens; identical to SEQ ID NO: 213867
  chr10:134620149-134620199
  hypo

SEQ ID NO: 262725 - DNA, 127 bp, Homo sapiens; identical to SEQ ID NO: 213868
  chr10:134620229-134620356
  hypo

SEQ ID NO: 262726 - DNA, 225 bp, Homo sapiens
  chr10:134639768-134639993
  hypo
agccaggcaggagccggagccgcagagacccaccacagagccaggcaggagtcggagccacggagccaggcaggaactggagccacagagaccagccacggagccaggcaggagccagagccacagagaccagccatggagccaggcaggagccagagccacagagaccagccacggagccaggcaggagccggagccacagagacctgccacagagccaggcag

SEQ ID NO: 262727 - DNA, 809 bp, Homo sapiens
  chr10:134651401-134652210
  hypo
gatgaacacatacacggacccagacacgcagacatgcacggacacagacacgcacgtgtacacagacgcacacactcacgcagacatgcacggacacacgtgtacacagtgcagactcagagccgtgcccccatgctcccctggggaaggccctctcttcctggccttaggcccctgggatgccagtcggctgtggtcaggtggtgcaggcagcagctccggcccgtccgctcccgtggactatgagtctgtctaataccagacccggcacgcagttcaggctcctcaccaccagcggcaggcggccaccacagcccctgagggccagccagagggctcctggaggcttgggcctctccgcatgggcagccctccatcgagctgtgaggcttctggttctgagtcatagcttcaagtttgcacaaacaaagcagtttttataaaacttactatcaaagtagaatatacagaaagtggcgtaaaagcccatgcgtgaaaagctcgatggatttttgcagtgggcacacctgtgtggccaggcaaagagatgggacattgccggccactggccctcgtccccacaaggggaccacaacagattctagcagctcaggtgggcttttctgccgggcctctggcttgcgccgtgggcttcacccaggtggagcgtggggctggccttcctccctgcagatgccacagctggtaatgccacagctgggaatgccacagcgtcttcatccgttctgtggccaagggcatctgggtggcttcccgtcaatgggggtcatgagcgatgctgctctctg

SEQ ID NO: 262728 - DNA, 137 bp, Homo sapiens
  chr10:134659534-134659671
  hypo
gttcagcggcatccgtgcccgcttaccttggacacggcggccagcctctgctccacacgggcgcccaggctggtggtggtcctgtcttggcaccggagctggtgctgtagctgcagcagggccgccagctgtgagct

SEQ ID NO: 262729 - DNA, 147 bp, Homo sapiens
  chr10:134663732-134663879
  hypo
agcaggagcacctaccgaggggcccgcctcccagtagcaggtagggtgcacagggtcagcttgcatggccagcaggtgcagggccctcccggccaggcccaggagccgggcgcggatctccacacagcccacgctcagcggctgcag

SEQ ID NO: 262730 - DNA, 480 bp, Homo sapiens
  chr10:134664777-134665257
  hypo
ttcctcatcaggggcgtgttgacgttctgcaactgagggggtcaggcatgcctctgaagcatggaagcttctggtaagcctgaatctacatccccacaacttggatgaggcataaccgacgtaagaaactcataacaaactgcgcagatctacagtggaaaactgacacactttgatcacgaatacacccgtgaaaccatcaccaccttcgagataatgcagtagcccttatccccaaatctcttcgcgtcccctcatgttccctcccggtcacctagctgcctgccggcaccctgcattccttggcattttccagaaccgtacctaagtggaggcgcacagagtgctgtctttccgtctggttcattttcctcggtaaagtcaccgtgagactcccccacgcggctgcacgcatgctccttccctctcacagccggcgtcggtgcaccgtgtgcacgcgccacaccctgcttatctatt

SEQ ID NO: 262731 - DNA, 165 bp, Homo sapiens
  chr10:134671583-134671748
  hypo
acttctgcaaggacaatgtacgacatccacagtaacagacacggctcaggtcagaccttgtggtgggttatgcttccctcgcgcaggcttctacacgcccgcactgggcccgccgtgtcgagacgcttgcgtgtggacaagtccgggggccataggttgggggca

SEQ ID NO: 262732 - DNA, 118 bp, Homo sapiens
  chr10:134680049-134680167
  hypo
tgcggctgtgcacccggccttgctagggcgccccgggtgtgggccggtggctgagcccctgcactaggatctgggcctaccccgcatccccccagcctctcctcgctaagcagagccc

SEQ ID NO: 262733 - DNA, 114 bp, Homo sapiens
  chr10:134680625-134680739
  hypo
acaggccggcccctcgcacactgacacacacacaggccggcccctcacacactgacacacacacaggccggcccctcacacactgacacacacacaggccggcccctcacacac

SEQ ID NO: 262734 - DNA, 769 bp, Homo sapiens
  chr10:134680972-134681741
  hypo
ttatttttctcttttttcaacgcgatctcttttctgcagctaatgcgaggaaaacagacaatacgcaagagccacatggccacgaaaatgtcccttcacgagtaaccaaagaaacgcaaacgaaaacagccacaattacattcttcacgcgcgtgtttacaaagatttttaaaaatcctcaggatctaacggcacatccgactcccaaatttgtgtccatcactggttctctcttccaaactccaaggtcatgtccagctgctgtttgacagccaggggtgtttaatgagcatctccgactccatctctccggcgtgcccagccccggccccgctgtgcctcccgcgggcacccccaccggaaagttcggaaccaactacaggtccctgggtgggctcctgctccccgctcggccttcccacggggtcttcaaggtgtctgctaccttccccttcgctgctccacctggccccggccacggcccccggctgtcccgccttctcctgtgccatgaacaccaggtcctggccatttgccacagcacgtccagagaggtcctttagaaggcaggccagcagggggtcacagcagaggtcaagacccagcaggcccagccccagggcgttttcgtcctctgacctctgaccctctcccgaggcctgcacgcccctctgcccaggcctccccggccacgcgcgttccaagtcgaggtgccccttgccgccgagacgtcgctgctcccagcacaccacatcgcgctggccacccc

SEQ ID NO: 262735 - DNA, 645 bp, Homo sapiens
  chr10:134682472-134683117
  hypo
cgcccagcacccagcgcccaagggtccagggcccggcagccagcctttctgtcctccggggaggggctcgggccaccctggagagcccccctcaccgcccctccctccctctgtgaggagcacctccccacaacccacctccagcacgacccaggagaaccggccacagccgtgtcccccaagtgctcactctccccagaggggcaggagtccagggaagagggtggccgcgcagctggctttcacctggccgcaccaagggcgagactcaaaccccaggcggcgcagggtgggacggcacacacctggcctgctccagctcgctgacgcacacctgcccgaccgcctcttcatggcgcgcggctgcttctctcagcttcagctcggagcacgcgtgggcgaggctgtggggagtgtggccgaaagagtcagtgttgcacgggcgcagagggagccagaaacgaagctactagtgtgcttcacagaaaacggtcaactaacacatcgaggcacacttggatggtattttcaatcatttttaaaggtaagcgaaattactagggaaaagtgcccggtagctccatcaaatttcaagtgggattcttctcccgctccttcacagatctcgtgcgaggcattatctgt

SEQ ID NO: 262736 - DNA, 257 bp, Homo sapiens
  chr10:134683320-134683577
  hypo
ccagcctcctctcccgtgcccgcccctgggatatctgagcaagctgaggatgcaacttgcagcctttctcccggatccttcagggcacaggcgcctccatttatcaaactgtgctgtattgcgctgctcagatgttgcatattttacaaattgaaagtctggggcagccctgagcgaccaagtccatcggcgccattttcccacagcacctgctcactcggtgtctctgtgtcacattttggtaattctcaaaatat

SEQ ID NO: 262737 - DNA, 76 bp, Homo sapiens
  chr10:134683637-134683713
  hypo
ttaccattgtaattgttttggggcaccatcagccacgcccatatgagacggtgaactgagtcgataaatgtcccgt

SEQ ID NO: 262738 - DNA, 140 bp, Homo sapiens
  chr10:134694272-134694412
  hypo
tggatacccaacggcggtccagatcacggagcaggaagcagagctctggggagcggcgtggggtcggcaccctgccagcggcgtgggctcaccatccggcgtgggctgtggctcagggacatcgccgggcggcttcatgg

SEQ ID NO: 262739 - DNA, 277 bp, Homo sapiens
  chr10:134698448-134698725
  hypo
agtgcccggggccacgcggtgcattctctgtgcccgtcagctgtggctgctctgcgtgctgccccacaccaggtccctgctgagcttctgtccacacggttctccctttcactaaaggacaaattttaccacgtgcacccacgcttacggcttcacacctgcaaggcctggatggcgttgttgtagcaggccagctctccagacacgctcggcgagttcagggccaggcggtgccacatgcgcgccaagtagtcctcactctcggccttgaatttct

SEQ ID NO: 262740 - DNA, 677 bp, Homo sapiens
  chr10:134699321-134699998
  hypo
cacaggcggtgggccgtccttggcagcacctgcacagcctcgtccagcaccttgaggccgccctcccagtcgtcctggtcggcatggctgtggaagagcaggccgtagagcgcagcacggagcgccaggtcgtcctcagcccctgggagggagaaggaggggtgtccttggagccgcctgatccctcatcaaaggcgccctcggacctcccagactaagctgcccatcacagtgcccctgaggtggaaccgcggctacagaggtgcccaggccagcgcatgccccgcagggctgaagtgagctgtggacctgcatggcccctccagccccacagtggccacccgggatgccctttccgttgcaggaagcagctgtcttgtctccttgctgcctgtcactctccatctccttggagaattctgcgttcacaaacacagacctgtgtttccacgtattaaagattggcgagcaggacttggggtcctttcaggagttgcatggaaagctcccccgcggccgaggacacagcgccacgtgcacgctcgggagtcctcatgcttggtgcccgcagcacgggaacaatccccgagtctccacgcaggcagcggagccatgtgacacgcagaggcaaaggtgcctgccttcagggcacacacaaaaatcgcctgcctgccggg

SEQ ID NO: 262741 - DNA, 365 bp, Homo sapiens
  chr10:134716710-134717075
  hypo
tccaacttctctagcgcaggatggcctctggcatcttgtcagcgtacagacccctccatccctgttttctgccaggcctggaatctagtcctgtgcacacacagtttaccaccagacaggcacagactcatgggtggctccacagaacgagggccccaccccacctgccgcgtcacatcctggacacctcagctgctacagcctcaagccctgacccatttctccccgcgactcttccatccatctgggcccaagccctgacccgtttctccccgcgactcttccatctgggcccgctctccaggctgcagcatgtgaagctcccttaggcagaatgcggagcccacttccgatatttccttcta

SEQ ID NO: 262742 - DNA, 669 bp, Homo sapiens
  chr10:134722154-134722823
  hypo
agagaaggggcaccgtgttagcaacaacgaacttcccacggcctgcagcccccacggaccacgcagcgcatgtgatcctaagcagaggcgtggcctgtgaagggccaccgtgccacaaaagctgagctgccacgtccgtgcctgtgaggacccctgatgtccttgtagctcccacaccccacagggtgtcctggacacgggactggcgtgtgcagcccttggctgcccctgagcggctcagggttgggtgggaatggagggtccgctcaaacagcgtttgcctcgcaccaggagacagggatgctctgagcatggagctgaaggaagtgcgtcgagggggcgcagctccgttgggaggtgggggagagcggggcagagtgggggtgagcatgcacgatggggctcgagttccagccacctagggcaagagcctcggcgtcctcgcctcttggcccctggcctcccgggacccctggggacacctacctgggccagggaggggacagtgaagtccatgaggcccagcccgttgcatgagtacatttccaaggcaacgaggactctggtcaccgagctgacatcctcattggtgccctggtggggaggatgccctgagtgtatcagcccaagcgtgcggggggagtctggaatatgcgtgaatttaacact

SEQ ID NO: 262743 - DNA, 43 bp, Homo sapiens
  chr10:134723477-134723520
  hypo
ttgacccaggtggcgataagctgctgccgggtgccggtgggca

SEQ ID NO: 262744 - DNA, 178 bp, Homo sapiens
  chr10:134724608-134724786
  hypo
cacagctgcctgagccgcccacggcgccctcccctccgcagcctccagcctgatccctgtaggtccccggagccggccccttgtcccttctcggaagaacgacctgcacctgatgccacagccggtgttcctggccggcccacactgactgcccagggccagccgtccccactgggag

SEQ ID NO: 262745 - DNA, 241 bp, Homo sapiens
  chr10:134729784-134730025
  hypo
aagacactcctgaacgtttcctcgtagtaacagcaaactacgcctggggtcttgcgaggaacgacggctaaaaacaggagaggccacgtcaccccattttctctttcatggtctcagtcatttacgtgacgatggacacgtcccccacgcaagaagccggtgtccttacgaatgcaaagggtgtccctccccacgccagcctgagtgcaggggacactctgacccacggccccgggcggtg

SEQ ID NO: 262746 - DNA, 1291 bp, Homo sapiens
  chr10:134732857-134734148
  hypo
acaggaggcagaagcggctcgccgtccgacagacgtcccacacgccttgtttccgggccactttggccagctctgcccaaatctgtatcctgctcaccgagaacccaaacgagtgaaaggtgagtagacaagtgtggttgctgaagttagaaaacacctgggctggctgcctgagaaaaggccactgtggctctgcagtttcaaggtggcaaggagcccggcactcgcgctgggtacggcctggcgggtgcatgtcccagggtcgggcgcagctctccgctctccctgccagccagctgtgcgcggcacctcccttccctgtggtgagaagaaaggccacacaatccactccccgggggagtgcacgggacaggcctcccggggatggtaccgaccgcagggtcggtaccaaaaatcagcctgctctggtcacaggcgctgcgtgtcctccgagtgacagcagtgacaggcgggacagggcagccgcacacctcataggccgtggctgtcatcacaggctggggggtcccgtctgtggcgggactcccaggcagggacctcgtcccaccatcctggagcaggtggcctggcgagtccccagacggccacatgcagggtcagctcagccgccacagacactggccctcgggctgagcgacccccgggctgagctgtgcgtggcgctctggccttttcctcactcacctctccttgtcgttttcgttgcccaggcgccgcaggtgcccggcagctttgtccacgctgacggtgtggtgccacgccttcgcacagaggtaggtgaaccggcccctgttcttcccggtggagactgagggcggaaatgcaaaggcaggtgttgcagctgctggccaagggccggggacgtgcccatcagtaaccaatgccctgcgccggcgccggggtggccacccacaggtagcggctccaggggccctagatccccggctcccagaagccgagctcctcacagagctgcagagtggcattgcctgtgtctcctgccggcgatgaggccgagccagtgctcctctgagtgggggaggctccaggaactttggagcagagtctgccaagaccctcctgctgctctgctggctgcgctgtccagctgccctccaagcagaggcacccggcctcagactcccgagctcccacccagcccctgcgtagcaccccaagtcccagcaggtttatccgcatgacgccagatgttccgaatcaccgctccttttcctggcaaataatcacgagcacccggaactcagctcca

SEQ ID NO: 262747 - DNA, 392 bp, Homo sapiens
  chr10:134734534-134734926
  hypo
cggcagccccttcccgctccaagagtcgccaaccttcccttgcagggcgcgacccaccctgcgtctgcccatctcctcgtctcagacccgagacatgacccagcagctccactcccgaccaccatctccacaggctgcagtctgggtgacacctggttcgtcgtgctgggtgaaagccgccggctgctgggcactgagctggagggaggcctggcagcagcccccagcaggaccctcaggggaccagcgggaagggctcccaagccaggcccagcctggcccctgcactgggctggagagagtggggccgcctgcgttcccagagccactggcgagtgcccagagaagctcgggcagtgaggatgcaacacacctgccgaaccctggctcag

SEQ ID NO: 262748 - DNA, 154 bp, Homo sapiens; identical to SEQ ID NO: 213874
  chr10:134736024-134736178
  hypo

SEQ ID NO: 262749 - DNA, 1459 bp, Homo sapiens
  chr10:134738018-134739477
  hypo
cacagaggacccgacgtgcctggcccggagctgggacagagggtggcccttattgagtacagggggagtctgttgcttgtggcactgtcatggcaagggggcttgggccaccttctcctcctctgtctcctcctatgcgccacgccctctgtggaggacacagcacaggtgagcgccccacctgtccagcttctccagcacgtccgcaacgccagccaggggcttccgcaggtggtgccgcaggttgtgctgcagcaggggcaggcaggtgttccactgcgtggcgcacaccacgtggatgacccgggggtcgcccaggcgcacggctcgctgcagcgcgacgtctagcctctgtatgatatccagctgggcctgcggagaagacgtgggggattctagggaggttgctggctcgagctgcggggctggggcggcacctgcgtgcagggcacactgagaacgcaggccctaaattcatcaccctgcgtggcgtcatgctcaaatctgtccgtgaaaatggccagagtgactctttctaggaggaagtggacgtctcacaagatattacatgcaggaggcttggcggtgcccacacatcgtggctgcgcccgcctcccccgtgtggactcagcgggcgctgctcccttcctgatcccgtctctttcctggggcctgtgctcgctacgcttcccacccccagaatgcctcctccggtctgtgctacacgggcccttcccaggacaaaggctttggccaggatttcagtggagcagtctccccacactcccacctcccacaagccctgctggaccgcccaccgtcctgggctcacttggccacgtccccacagcctgtggcttccacgggggcctagccctcacgctgcccctgggctgggtggggcctgaacctcacaactccatcctgccacttggctgctgggtctgaaagcctcgtacgccggtgccggcccctctgaggtcctcagcaggtgagtcggggaagcagccgcacaacccacagcgccacagccacaagcagcctctgttcactttcacaacaaagtgcaacagccaaagcgtctggaaatcattccttaaacgaacactcattaagcgcctaccacgtgtggcaccagcgcacagcagcagtcaaaaacctcccgcgagaagctcagccccacggaggcagacccaggagcaagtccacagcggcatcggcacccgccgggctgtgacacgtgtgccaggcagtgcgggctgaggatggatgcgttaggagtggggatggggaaggcctcccagctgccgtgctcatcccctgccacggcacctctggcactgacccgcacgcccctggctcctctgtacccagcggagcctcgcactgcctggctgacagggcctgagggttcccagccgaccctgtggcacttgccgtggtaccacatcagggctgc

SEQ ID NO: 262750 - DNA, 230 bp, Homo sapiens
  chr10:134739718-134739948
  hypo
gccctcatgggacgcgtggccgtcccccgtcctcccaggcaggcatcaccacacggcggggagggggcagctccgtgggggctgcaggaggagggtcagagggagtcgcatcccagcccccacctgcacgaccccaccccaccagggcggcgtgtaggcccctgtgcgcaggacagggagtgtggcactggaggctggactcacacccgctgtcacgggagccagggcga

SEQ ID NO: 262751 - DNA, 179 bp, Homo sapiens
  chr10:134740788-134740967
  hypo
tatcagacacagacgtcccggggagcaggtcctcggcggcagacgcctccgtcccggggagcaggtcctcggcggcagacgcctccgtcccggggagcaggtcctcggcggcagacgcctccgtcccggggagcaggtcctcggcggcagacgtccacaagcacgggaagtacccgcag

SEQ ID NO: 262752 - DNA, 272 bp, Homo sapiens
  chr10:134746663-134746935
  hypo
tttggggtggggtgcggacgcttctccgcccctcgtccctgcccacctcctcctccccctgctctgctgttgggccctctcaggtcctggcaggcctggcatcacaacactggcctctccgtcctacctgagctccagcgcacaggcctgctgggcaggtcgggaagagagaatccgtaaaagtgcctgagaatgccgcctgtggacagacctcggaacagggctatttacactggtcccaagacctctcgtcggagcgcctggccacagaa

SEQ ID NO: 262753 - DNA, 193 bp, Homo sapiens; identical to SEQ ID NO: 213879
  chr10:134758118-134758311
  hypo

SEQ ID NO: 262754 - DNA, 257 bp, Homo sapiens
  chr10:134787903-134788160
  hypo
caggtgggctctgccgctgcctgtgagatgaggccagatcctcgccgcccgcacctgcctctccccaactcgccctgcgcgggacaggtggacgccgcccacacctacctctcccccactcaccctgcccgggagaggtggacgctgtctgcacctgcctctccccaacgcgccctgcccgggagaggtggatgccgcccgcacctgcctctcccccactctccctgcctgggagagatggacgccgcctgtgcctg

SEQ ID NO: 262755 - DNA, 299 bp, Homo sapiens
  chr10:134790701-134791000
  hypo
cttaccctggtggtcggaggcgcggtcatcagccagggatgggttggcctcgtgcgcgtgccctgcgcggtgctgagatcagcccagcacgatgtctagcatgttctgcccgaaacacacgcctcagaagaaagcgccaggcaaactgaaggacgcgaagccgtgggccggcctgccgagatcctgaaacgcaggcagagccgagacgctcttcagagcacgggtgtgtggcggccgaacacagcacctgaccctgggcttagtcttggacttctggaagaaaccgcggaactggtgca

SEQ ID NO: 262756 - DNA, 256 bp, Homo sapiens
  chr10:134793862-134794118
  hypo
gaggaggagcaagtacctggcgagtgcctggtgagagcccggtgagtgcccggtgagtgcctggtgagtgcccgcaagtgcccagcgagtgcccggcgaatgcccagtgagtgcccagcgagtgcccggtgaatgcccagcgagtgcccagtgagtgcccggtgaatgcccagtgagtgcccagagagtgcccagcgagtgcccggtgaatgcccagcgagtgcccggtgagtgcccgcaagtgcccaacgagtgc

SEQ ID NO: 262757 - DNA, 307 bp, Homo sapiens
  chr10:134794148-134794455
  hypo
tgcccggcgaatgcccagtgagtgcccagtgagtgcccagcaagtgcccggcgaatgcccagcgagtgcccagcgagtgcccggtgaatgcccagcgagtgcccagcgagtgcccggtgagtgcctgcaagtgcccagcgagtgcctggtgaatgcccagtgagtgcccagcgagtgcccggtgaatgcccagcgagtgcccagcgagtgcccggtgagtgcccagcgaatggaggctcctcgggtaacacgcgtggacccaggcacaatacaaagtcaaccgcccggggctctagagcaggagaaa

SEQ ID NO: 262758 - DNA, 110 bp, Homo sapiens
  chr10:134795408-134795518
  hypo
ctttgtcaaagcggcgctcagatggagacaacgtctcgtcaggtgccacgatgggtctgtgttgtgcgagcatgttgctttaggctgccttaggccgcccacctgattct

SEQ ID NO: 262759 - DNA, 286 bp, Homo sapiens
  chr10:134795896-134796182
  hypo
gagcaacacgccagcgccccaaggctggccacgggcaggacgcagagacagacgcgtcattagagcatgggcgcggcgtgtccgtggcacgtgaggccccgggccctgcctttgctttcggtctctgtgcacgctgcctcctgacctgatggtccagttgcctgcggaagtaggtctgtgcacagtggaccttttaaaagagacacgaaacctgggagggcctggccttccctctgtgcgctgctgctgtttgtctttttcctcagcttcccgttgttcgatggag

SEQ ID NO: 262760 - DNA, 585 bp, Homo sapiens
  chr10:134797188-134797773
  hypo
tcacccctgagctcagaacacggcgtcgcccgagctgaccaccgctccccttctcccgccctccagcccccaacaaccaggaatctcttgccgcctctggattgacctattctggacattccacgtaaatggaatcataaaacatacggcctttcgcgtctggcttatccacggagcgagatgccttccagcttcatcacgccgtagcctgcgtgggttctgggtccctgtcctcgtcactagtcgctccagtgcatggatgagcacgtcctgttcacgcgtcctcgccattggtggtgtctggggggctccccgctgctggctgatgcgaatgttcctgcacgtgtgtttgtgtgaacgccggctttcagctgagggtggggctgctgaatctcacggcagctccgagtttaattctcggacgaggctctctgtcagtcgcgcgtgaccgcgtgggctcaggcgtctgtgcgagttgctgcgcgcgtgtgggtgtgcggccgacgtaagctcgtctgcgtccctcccgtttagtgcccggggtcgggccgtctgttacaaaccgtcctgttggtgtgagaatcc

SEQ ID NO: 262761 - DNA, 345 bp, Homo sapiens
  chr10:134803434-134803779
  hypo
actgctccacttgacattcccgccagcagagcacgcgtgttccggtacctcccgccctcagcagccctagcccggtcggcgtttgtgtttttaattttggccattccattaggtgcaccgcgatttaatgtgcgtttccacgtggattaacggtgtgaactgtctcttcgcgtacttgctggttgtttgcgtgtgttctttgctgaatgaagtgtctgctggaaccgggggtgtgtatttgtatcaggttgttcgttgtcttatttctgggcgacgagttcctcgtctattctagatacaagtcccttcccagatccgggcatcgcagacagtttcacctgctca

SEQ ID NO: 262762 - DNA, 309 bp, Homo sapiens
  chr10:134807156-134807465
  hypo
ctgtgggcatctgtcttctgcggagtgtgcgtgaggcggcatcgcacactgcggcatctgtcttcggagtgtgtgtgagtgtgtgtgagtatgtgtgaggcagcgtcgcacactgcgtggacttttaactgcccgtcgggatgctttgcaggtgagtcccgataagcggaaaccgcaacgctccttcagcaccagtgcaggttcacggtttcatggggggaacgtcaattcagtaagacgagtgacgaggcgcgtctcagcggaaccccacccactgccgtcaccatcgctgaccactccattggttga

SEQ ID NO: 262763 - DNA, 222 bp, Homo sapiens
  chr10:134817170-134817392
  hypo
gtgcacgcacagacgtttgaggtgtgcgtgcggttagtacacgcacatacgtttgaggtgtgagtgcagttggtacatgcacatacactcacttgctctgttggcagagggggtctgcaatcagtgacaccccaggaggggtgagcaccctaccacccagacctcggcttacaaacacccttctccagtaaaagcagccagggctcccgatcctatgactgg

SEQ ID NO: 262764 - DNA, 224 bp, Homo sapiens
  chr10:134827960-134828184
  hypo
aagactgcggtggacgcctccagaggttcccacttggcttccagtggagcctctgccaaacccggcctgtgcaagggcagagacaaggcccagcagggctcgagcaggcccaaacgcacgacgcagctgctgtgcctgggtctgagctgcacccacaggtgacgtgaggggcgcctaggaggcgggggaggcacggggccgggaaggctcgggggtcccagagc

SEQ ID NO: 262765 - DNA, 504 bp, Homo sapiens; identical to SEQ ID NO: 213887
  chr10:134829385-134829889
  hypo

SEQ ID NO: 262766 - DNA, 515 bp, Homo sapiens
  chr10:134830234-134830749
  hypo
gagatggtctcatccgctgggcgagcaggccagggctgcccgtctccacctttgtgctggaccatttacaatcaaagcgcagcatcgagatacccaggaaagagccaggaacaggccaggaagctgctgccccaccactgaccccaccgctctccttccctccttccttcccgctgggctgggcacaggtggagctcaccgtcgtcccccttcatcccttggcccctccaaggctcaaggactggaggccgactgggcagcagacatgtcaccatcaccatgctccccgtcaccacgctccctgtcgccatggtcactgtcaccatgctccctgtcgccatgctccccctcgccacgctccctctcgccacgctccccgtcgccacggtccccgtcgccacgctccccgtcgccacggtccccgtcgccacgctccccgtcgccacggtccccgtcgccacgctccccgtcgccacgctccccgtcgccacgctccccatcgccacagtccctgt

SEQ ID NO: 262767 - DNA, 176 bp, Homo sapiens
  chr10:134833358-134833534
  hypo
ctgaattcatgtccgcccatgcccgcccccagctacttccagaggcatttgaagggaggacctgtgccctgcacagctgcttctcaaaggggtgccagcacctgtccatgcgtcactaacccaagctccatgccgggcacaggctgggcgtcagagccaccgaaacaccaacctct

SEQ ID NO: 262768 - DNA, 50 bp, Homo sapiens
  chr10:134833860-134833910
  hypo
tcgctggggtgggcgccggctgtggggcagagacgcggcgctgcgtgtga

SEQ ID NO: 262769 - DNA, 164 bp, Homo sapiens
  chr10:134834668-134834832
  hypo
cctgtctgcggtgacggccgcccttcccgtcagcccctccgcggtcccggccccagccctgggttgagggagggctggggaggagcagggacagacgggcaggcaccaggacgctggctgctgcgtgaatgtcacctgtggtcacggccgacgcccggcgggcc

SEQ ID NO: 262770 - DNA, 392 bp, Homo sapiens
  chr10:134836851-134837243
  hypo
tcaggtgacaccaacgtgaccacggcaagagcgagctggagcggagcctcgggtagccatgactaacagacatggttcgcaaacccacgcacaccttccaaaaacgccaggctggcctcacatgaccaggggcctcaccaagtgcagtgggtccctgcgtgtcagggaggctgcccagagctgtggctgctcctgtcttagcctcaacctgtgcccggggccctgtggatggatccgcgtggggcggtggtgttccaagtccacgtggggcggtggtgttccaggtccacgtggggcggtggtgttccaggtccacgtggggcggtggtgttccaggtccacgtggggtggtggtgttccaagtccacgtgggacggcggtgttccaggcca

SEQ ID NO: 262771 - DNA, 204 bp, Homo sapiens
  chr10:134875676-134875880
  hypo
gtcccagcacacaccgcatgaaaatagccagttccgggggctccgcacccgcgtagggggcgcgtcggtcctttccattttagctgcgtgggggagggtgttggcggcaccattgtgctttcattccacgtttcctcagtgattcaacacgttaagtaacgtgtcacgtgcctgctggccaccaccgtccgctcctgggaagaa

SEQ ID NO: 262772 - DNA, 91 bp, Homo sapiens; identical to SEQ ID NO: 213888
  chr10:134878528-134878619
  hypo

SEQ ID NO: 262773 - DNA, 150 bp, Homo sapiens
  chr10:134886535-134886685
  hypo
acctggcaccccaccgcccagcgcacgcaagccaagtcccggagctgccatgctcgtctgtgaggaaacgctggagctgggtgcccagggctgctgggggtccacgagcccccggggccaggccgtgagcttggtcggtgggcccacggc

SEQ ID NO: 262774 - DNA, 293 bp, Homo sapiens
  chr10:134894542-134894835
  hypo
agggaagccggagccgcggacctgtcccacgttgagatcagggtagacctgggagccagctgggcgggacgcactgctctgatacagggaagctggagcctcggacctgtcccaggttgagatcagggtagatggtcttggagccagctgggcgggatgcgccgctctgatgaagggaagccagagccttggacctagatgtaaaagctctgtgttcacaaatcttcccggggacccacattaacttccgagtcgggaaggaatcatctgcatgaaatcgggggtttcacggt

SEQ ID NO: 262775 - DNA, 281 bp, Homo sapiens
  chr10:134907950-134908231
  hypo
ccgcccctcgcccccgtagctgagcaggagtctgagtcctgcaggaaggcgcggcggccacagcagccccagggaggccgtgagaggacgcgtgagggcccggggcagaccaccccaggctcttcaacacaacagatgagaacgaagtccttgttccaggcgactcactgaggaaatgctccgatagactcggagagggctggacacagagtggaccccactctcttggcttctctcgcggatctgggtttgcaacaatggctcgtcggaactgtgtagag

SEQ ID NO: 262776 - DNA, 420 bp, Homo sapiens
  chr10:134911962-134912382
  hypo
actcagggcagactcggacgacccatctgctctcccctgaccgggtcctcggacagctgcccctgaccccacggagagcccggacttcccggggacagagcctgcgccccagggggctcccttccacgcctccccctgcagagcctctgctcatgtgaaaccctcctttcccgtcccacagcgccatccgcatcagccgcaagggccggcacacgctcctgaatttctgcttccacgcggccctgaccttcactgtgttcgccggcggcatcaatcgcaccaagtaccccatcctgtgccaggcggtgagtgccggggcgccctcgttggctcctcccagaggggaactgcgtgagcgtcgtcttgtttactaaataatattccagcgtttgctcagctatttcccgggaagagggtcgg

SEQ ID NO: 262777 - DNA, 288 bp, Homo sapiens
  chr10:134913649-134913937
  hypo
gactgccaggaggccgtgcccccggcctgggcctgggcctgggcccagcatggccccggcggaggagtcgctggcacgcacctgaaggtggctaaggtcagacgtacctcctgcctccttaatcattcctctggtaagctggaaacaaccacagcaagtgcccgggaaacgccattgacgtcccgcctgtaagtgcctgcgagaggccgtcaccatcacgtctgcactttgccaccaagtacgccccacactgggatgaagcctgctggatccgcgggtgaggccccc

SEQ ID NO: 262778 - DNA, 258 bp, Homo sapiens
  chr10:134920248-134920506
  hypo
gcttcctgggggaaggccatcgaggccaaagaccctcacagataaagcggaaggtcatgtctctgcacacagtctcacccccgcggctcagagtgcccatcgcgggctcctgggcagtgtttatctggggccacgcccgctctgagcgccactggagtcacgattgcatctgaaggccacgttaagaagcgtcaccgtttcaacagcaccacgtcttccaattcgtgagcacaggacgtctttccttttatttagctc

SEQ ID NO: 262779 - DNA, 96 bp, Homo sapiens
  chr10:134926796-134926892
  hypo
agtccaatggcaccgcggcacttagattccgtgtcacggcccggcttgccgaggatgcctgctcccgccttcacctgcctcgcagcctccccagtg

SEQ ID NO: 262780 - DNA, 470 bp, Homo sapiens; identical to SEQ ID NO: 81119
  chr10:134940814-134941284
  hypo

SEQ ID NO: 262781 - DNA, 1406 bp, Homo sapiens
  chr10:134941647-134943053
  hypo
agggccaatagggcccggttcccatccacactctcagcgactctagaaacgcccaaggcccccaagccgcagctgtgcaaagccactcgctaggccgggtgggtgcagggccctttgctctgcagggggcgtcctgagtcctggccgtgctggccccgctgacactgacgtgcgtctccccacagctgctggatggcctgggagcccagcctgggcgccttctacggcccagccgccatcatcaccctggtcacctgtgtgtacttcctgggcacctacgtgcagctgcggcgccacccagggcgcaggtacgagctgcgcacacagcccgaggagcagcggcggctggcgacacccgagggcggccgtgggatccggccaggcaccccacccgcacacgatgcccccggcgcctccgtgctgcagaacgagcactcattccaggcacagctgcgcgccgccgccttcacgctgttcctgttcacggccacgtgggccttcggggcgctggcggtgtcacagggccacttcctggacatggtcttcagctgcctgtacggcgccttctgcgtgaccctgggactcttcgtgctcatccaccactgcgccaagcgtgaggacgtgtggcagtgctggtgggcatgctgcccgccccgcaaggacgcccaccccgcacttgacgccaacggggccgcgctgggccgcgccgcctgcctgcactcgccgggactgggccagccacggggcttcgcgcacccaccgggcccctgcaagatgaccaacctgcaggccgcgcagggccacgccagttgcctgtcaccggccaccccgtgctgcgccaagatgcactgcgagccactgacggcggacgaggcgcacgtgcacctgcaggaggagggcgccttcgggcacgacccccacctgcacgggtgccttcagggcagaactaagccgccctactttagccggcacccagcagaggagcccgagtacgcctaccacatcccatccagcctggatggcagcccccgcagctcgcgcacagacagcccccccagctctctggatggcccggcggggacacacacgctggcctgctgcacccagggcgaccccttccccatggtcacccagcccgagggcagtgatgggagccctgccctctacagctgccccacgcagccgggcagggaggcagcgctcgggcccggccacttggagatgctgcggaggacacagtccctgccctttggtggccccagccagaacgggctgcccaagggtaaattgctagaaggcctgccgtttggcaccgacgggaccggcaacatccgaacgggaccctggaaaaacgaaactactgtgtagatgggggcagaggacacggtgttcctggaggagcttca

SEQ ID NO: 262782 - DNA, 93 bp, Homo sapiens
  chr10:134943513-134943606
  hypo
cttgcgttctactccgggggtggcggcggcaggtctgtccccagcattctcgctctgggcagaaccctcgggaccctccgctgtcgtgtgtct

SEQ ID NO: 262783 - DNA, 384 bp, Homo sapiens
  chr10:134944405-134944789
  hypo
taacacacacttgcacctgctgtgcacatgtgcacacacacgtagtagtgtgttttccagccacccacacactgggtttgcattggagattgtttcaccctgcaaacgtcaacgtcagcagactcgtcggtgcgctgtgctatccggttgggaggtctcaccaggagcagagcctccctaacgtgcacctccgagaagaggggtgtcggggagtgttcccagcacctgctcggtggaagggctctccggagactggcactcagtatctgagtatgaggagcctcacttcccggggtgtcggtaaacttgaccgtgactcagtaacccacagcgtgctcctcccagcaaaccccgtgtgtccttacaggtcgaccagacgggccg

SEQ ID NO: 262784 - DNA, 115 bp, Homo sapiens
  chr10:134945553-134945668
  hypo
tgagtgtgcttgcccgtgtgcctgcgtgtcagacgcactggagcgtgggtgtatgccggcctgtgcgagtgtgcccgtgtgcctgcgtgtcggatgcaatggagcgtgcgtgcat

SEQ ID NO: 262785 - DNA, 95 bp, Homo sapiens
  chr10:134945698-134945793
  hypo
gcctgtgtgtcggatgcaatggagtgtgcgtgcatgctggcctgtgcgagtgtgcctgtgtgcctgtgtgtgtgtgagtccgtgtgcctgcgtgt

SEQ ID NO: 262786 - DNA, 375 bp, Homo sapiens
  chr10:134978859-134979234
  hypo
tggccctgctggcacggctgacctgggctcccttcccgggtccacgtgtctcgacaccattctgtgggctggcggcaggcgcctgacctgtgagtgacagccagaggcaccccagggccccgcagggggacggggaccggctgagacgcgcctcatgctgactcccttcctcctaagcagcacaacctacggggtcctcagactgacttaccgcttggtgcacgtctgtgcccgtgtttgcaggcacgtgtgcgtgggcatgttgcgctgtgtgcatgtgtgtgccagtgcacgggagtgtgtacatatgtgtgcgcctgcgtgtgcaggtgcatgggtgtgtgcatgtgtttgtgtgtacgcagtgcccaggta

SEQ ID NO: 262787 - DNA, 723 bp, Homo sapiens
  chr10:134980289-134981012
  hypo
acagctgagccctcgcggagtccaggagcccactcggatttggaggtgagcccacatgggggcggccgagccacatggagggaaccgccgtgactgtgtcctccgtgtgaattgcctggaacaaatgttggcagcgcgtgtggttgtaagtcatgtgagtgtcaggatcacgccccgttagctctgcacgagtccacagttggggatgtccactccgtcgcctcgctcatctgttggcagcctccacaggccagtccagccgtgagcctgcggggtcggggtgctccacggagcaggtgacccagcagctctggccgagcctccgggaggaaggccccgtgcccaggctccaggagccgacacctgctctgggcagcacgccgacggtgccaccaaatgttccgtggctctgacgtccagggaacagcaggacgactcttgaaacaaaatgagacgtggtctaaagccctttccctgacccacgcgttgaaacgctgccacgagtcgtccgtttccccagggaatcgtctcggtgggggtgccggggcctggctgggggtcctgccgggctcacggccagggccggtcttggcaggagaacgtgtctctggctgacatcctctccctgcgggaccgcggcctcagcgagcaggaagcctgggccgtgtgcctggagtgcagcctgtccatgcggagcgtggcccacgccgccatcttccagag

SEQ ID NO: 262788 - DNA, 646 bp, Homo sapiens
  chr10:134996305-134996951
  hypo
ctaggcccaactgcgcgggcggcgagggcgcgggcagtgtgggcgcaggtggtgtgggcgtgggtggcatgggcgcaggcggcaagggcatgggtggcgtgggtgcgagcaatgtgggcacggacggtgtgggcacaggcggtgtgggcacaggcggtgtgggcacaggcggtgtgggcacaggcggcgtgggcacaggcggcaagggcatgggtggcatgggtgcgagcagcatgggcggcgtgggtacaagtgaggagggtgtgggcggcgtgggcacgggcagtgtggacgtgggtggcggcaggggcggcaaaagtgtgggcggtatgggtgtgagcagcgtgggcgcgggcggcgagggtgccagcggcgtgggcgcgggcggcaagggtgtgggcagcgtgggcacgggtgctgcttcccctcaggggaatctcacgattcctgaaacttgagctcctggcccggagaagtgctggccgcggtcggggtggcgcacacgcagagactctggagctgacagcctgtcgtgcccacaggcgcacatctactctctgggggccacgctgaaggccgccctcgagtacgtggcagagcccacactggaacccaggctgagccaagacctcgaggcgctgctgag

SEQ ID NO: 262789 - DNA, 191 bp, Homo sapiens
  chr10:135001613-135001804
  hypo
actgcccctgcgtccgtccgtggatgcctgggtgctccccgtgttggctatttcgagccgtgctgctgggaacatgggtgtgcacgtatgcgtgagccctgccctcggttcctcggggaatgtggccgtgtggaactgctgtcacctgggaggtgtatgttgagcttttcaaggaacggcagcactgtcgt

SEQ ID NO: 262790 - DNA, 370 bp, Homo sapiens
  chr10:135002064-135002434
  hypo
tgtcccagctgggccggcccttccgggagtacgagctgtgggccctgtgcctggcctgcctccgcgcactgcagacacgccctgagcacccaggtgacgcacgcaccatcccatcccccccgccgtccccaccccccactgctgttccaccccccaccgccgtcccacacccccgccgtcccaccccccacaccgtcccacgcccccccactgtcccatcacccctgccgtcccatgcgtaactggcccccacctgaaccaagggacccaggggcagccaggacagtgtctccggtgaacggaacaggcggctcccgtctggagcaccttgtgggtgcctgctgggttgcagcaccgagggaggtgtggg

SEQ ID NO: 262791 - DNA, 237 bp, Homo sapiens
  chr10:135002754-135002991
  hypo
gcccgtggctgccccgtgggccctgactcgggacggggcctgtgacacgggggcttcaagttaccgtgttctccctgccgcttggctccctttcagccgcagatatgccgctgcagccactgtgtcggctggggcagcgctaccctcggggagggctgggaggaggcagctccgaggaccccgggggctggggtcaggccatgtgcgtgcactggcaggtgcgtgcccgtgcaatgg

SEQ ID NO: 262792 - DNA, 235 bp, Homo sapiens
  chr10:135008714-135008949
  hypo
acaggcggtgtgttcgctcggagagccagttgttagccatgtagcagcacggcaccagtcggggggcttccgggagcaggcaccagtcggggggctcccgggtccgtgaggtgggggctatgctggccagttctcctcaaaccctcgagctgctgccttcgtgaggagagtggaaggtgggaaagtccagttgaggcttccaaccctctggtgtttaaaacgcggacagaaccat

SEQ ID NO: 262793 - DNA, 353 bp, Homo sapiens; identical to SEQ ID NO: 213896
  chr10:135009175-135009528
  hypo

SEQ ID NO: 262794 - DNA, 762 bp, Homo sapiens
  chr10:135014642-135015404
  hypo
tccagaagaaaagaggagagcgtgagggggcagagggacacagtcctgatagcagagccagcgaggacagggcccggccccaccccggggcgagtacgagtttggaagcagtgagggcgcagagtggggctccatctggggagaggcctctctctgtcacccggccccgtgcggcagttcagggtcccagcatctcccctgcactgggaggcggcagccgtgcccggggggcgcccgtggtgggcgggtgcaagagagaagggcgtcgggtgtgcaagcaccaccggcctcccattaacagcctgcccgggctccgcccacaggagccactgtccacgtaacctgcgtctctttctttcaaggaaaagagaagccagccatggccaggaccagcagcagggccccctgctcacccacctcggtgtcggatgtggactcggacgcactgtcacggggaaacttcgaggtggggtttcggcctcagaggtccgtaaaagccgagagagcgcagcagcctgaggctggcgaggacagacggccagctggcggggcctcagacgtggaggcagtgacccgactggccaggtccaaaggggtcggcccagccttgtcccccggcccagccggattccagagctgcagccccggctggtgcagcgccttctacgaggccgactgcttcggggccgacgtccacaactacgtgaaggacctggggcggcagcaggcggacggggccctgcccgacgcccagagcccggt

SEQ ID NO: 262795 - DNA, 42 bp, Homo sapiens
  chr10:135015690-135015732
  hypo
ggcccctccatgctcgtgaccaggttgcgttcggtcgtgttt

SEQ ID NO: 262796 - DNA, 1799 bp, Homo sapiens
  chr10:135016598-135018397
  hypo
ccccaaacgcacggcgtccagcggggagcactcggcccccaaacgcacggcgtccagcggggagcactcggcccccaaacgcacagagtccagcggggagcactcggcccccaaacgcacggcgtccagtggggagcactcggcccccaaacgcacagagtccagcggggagcactcggcccccaaactcacggcgtccagcggggagcactcggcccccaaactcatggtgtccagcagggagcactcggcccccaaacacacagcgtccggcccatggccacagcctcacgtttctcttggaggagctactgtgtctctttcaaaacaggaggctcagaaacacagcaagggcaaaaaccacctggagacagactttcacatccgcagcccaaaacgcacacggtgcagcgagggccgttctctggggcggctggagcagccggtgggcatttcctcccttcagcgctgacccccacctactggtgccggccgtgtgtgctgggctcagcactgcgggtgccctggggctgtggagctggcatccgcgtctcctgctgttaaaacaagcgtggctcccagagtcagcgtggacagcactggtgtgggttcctcccccgtctgtctgcaccggtgaagcctggcctcgtgtttccctcctcactgccccacatgtggtgtggattttagttaccgtggatttattaaaatcagtcaagaccgtcctcctcatggagtccgcctgtggttcccgcgtgaggagcgcccccgacggacatcgagtctgactgtgaacggaggccgtggaggtgccggccagagaggagtctgcgtgagctgcactccagccaggcgggcatcgggctcgcaggcacccgcctccaggttcctggatgcgtcagggtacacagacctttcccaggagattttctcgacatcagcacctctgcaaatggatgggggtgagagggctggatggagcctggcgccggtgacctccgggggccggacgagggccccatggtgcaggccatgggggaacgtggccaccaccatcctcagaagccaggaccaggtgccccggcagcagaacacagctccatggggacacctgcgtttaccaacctcaacctgcccagcccggtaggtccttccttgatgatggaatgttctagacgctgtccaccgggtagccaacagccacgtgtggctactgagctctggaaacatggcccacgtgactgaggacctgatgttttaatttcactgcactttaggcagccacggcagcctgcagctcagtgtgggaggcagggtcgcacttggctgggtggcagcggggtccggagggcttggggaacctggcttagtggccgaggttctgcagaggcctggtctttacgcagctgggacactgcccacactgccgtagcggggagcctggccctccgtggcaccgccacggccgctgctgaacccgtgcgtgggagaagacagcacagggaccccgtctccatggaaccaccagatagagcggattcaagtagttaaatagaaatgtcgcctgcatttttttattttgcaaaaaacattcaaaaataaaccctgtcaatagcagagtcactggcggctgacaaggcgagggggtggctgtgtggatctgagccaaccgcacttcacaaaaggaagcctggtggaccggctcgcggatgagcccctcggggcggtcgcttcgggccctgggcacgtgaacccctcacaggaggctgcgggccgagggctgccgcgcctctcacctc

SEQ ID NO: 262797 - DNA, 366 bp, Homo sapiens
  chr10:135018667-135019033
  hypo
ccagcctctacgcccgtgtgcctgtcccgtaggacagaaggagtgctcagacgagggctgcccggccaggcgtgggaggcatcctgggacaacgcggcgccctctccctgaatgtagagtcccgtccagggaggcgctcagccccagctgctgtctgtgcatgaagcagtgcccggcggccctcgcccccagctcctgtgatcaggacctgcccgtctggcctcagtcctgcttccctcatggcgacagccctggggatgaggtccccggctccatctcgcaggcaggaactcagactctgggcaggttccggagaatcacacccgggcgtgcactcacatttacactcaacgctcatgctctatg

SEQ ID NO: 262798 - DNA, 638 bp, Homo sapiens
  chr10:135022966-135023604
  hypo
gtggcttgtgtgcgcgtgtgtggtgtgcgcgtctggttgtggagttctgtgtggctttgtgcatgtgtgtggtgtgcgcgtctggttgtcgagttctgtgtggctttgtccacgtgtgtggcgtgcgtgtctgtggttgtacagtttgtggcttgcatggcgtgagtgtgagtgctgtgcttccatggaaggagcgtctcctggccgtgatgtggtcacgaggggcttccccgctctgtggacctggtgggcgtcacctttgcagggcagcctggggctggggctgtggccacctgtgtcctcggaccccaggtgagtgggtgaccaggccccttgttccagggccacgccatctcctgcctgagactcctccagggtgggaggaggccttgccaggcctccgcttcctgaccgtggccgtcgggctcccaggacagtcccagacctgcaggcggggccctggtcagtgtctcctgagggtggcgcggtttcacccagtgaagacccagaacctttgagcgtgcagcattgcgcccggtcccgaggcaccagctccctcagcttcccgagctaacgggtcctgcgagtggagacgtcacaaagccctgcatagggctgcgttcagaaaggccctggtg

SEQ ID NO: 262799 - DNA, 180 bp, Homo sapiens
  chr10:135025085-135025265
  hypo
ctgagctgggcggccgcacccggggctcccacagtgggaggtgccgccctcctccagaaggtggcagtgacccccccaccactgtgcttctgcctagatcctacccctggacggctctgccaagcacctgctgggcctcctggaggtgggcatggaccggcgggccgagggcaaccctcg

SEQ ID NO: 262800 - DNA, 374 bp, Homo sapiens
  chr10:135025540-135025914
  hypo
gcacatcacacacatccacacgtgcacatatgcatgcaccttcacacaatccacacgtgcacatgcgtgcacactcaatccacacgtgcacacgcacgtgcaccttcacacagccatacatgcactcgtgtgcaccctcacacatatccacacctacacgtgtgcaccctcacacatatccacacctacacgtgtgcaccctcacgcaatccacacatgcacacacgtgcacccgcacacgcatccacacacacacgcatgcaccctcacatccacacgtgcacactcacataccccctccatgttcccggtcccaggcagccctgctgcgctggcacctcctgcaccatcccgggtgctcaggggaggagggt

SEQ ID NO: 262801 - DNA, 146 bp, Homo sapiens
  chr10:135026335-135026481
  hypo
cccctgcgccaagaccagtgagaaggggccctacttcctgacggagtacagcactcaccagctcttcagccagctcacgctgctacagcaggtgaggagggcgaggatctgcgcccaggtcacctgcgagtcggggccccagaaac

SEQ ID NO: 262802 - DNA, 585 bp, Homo sapiens
  chr10:135030353-135030938
  hypo
taacaggagggaaattctgacgcctgcggcagcacgatgaacctcgagggactcaggctcagggaaacgagccagtcgcgaagcacggacagtggacggctccacgtacacgaggcgcctggaggcgcaagattcacggagacaaagtagcagggtgggcgccgggggctgggagtggggcacggggagctcgtgttgaacggggaccgagtttccgtttgggaagatggagagtcgcagacatgctgcacagtgtggatgtagttaacacggctgaaccgtgcactcagaaaaggctacaaaggtaaatcctctattacatactttttacaattaaaaatcaaaaggttaaaacaacagtgaaaaagtgtggcgaaatagttttatctcaaaattacatactttgcatctacttaaaccgatgaagaaacagactgagacgtcagcgtagaaagtgtatccggtaaacacttctcaagctcctctcaaggcgctcaggcaagagggctggggccgcagtcggggtgagcccaggatcacatgaggcgccttcagctgcacaggggccctgcagacaagagttga

SEQ ID NO: 262803 - DNA, 157 bp, Homo sapiens
  chr10:135035224-135035381
  hypo
tgccataaatgtatgcttatcgtaagagatcagaaaacccatgtcagcaaaagagaagttaaaaacttaaggtaggccagacgcggcggctcacgcctgtaaccctaggtaggccgggctgggtgcagccactcacgcctgtaaccctaggtgggca

SEQ ID NO: 262804 - DNA, 134 bp, Homo sapiens
  chr10:135067365-135067499
  hypo
aacttggggctgtgcggcggagccgtgggggtgcccgctctgcggtggtcggctgaccctgggatgccctggtcagaataacacggggcccagggtcagatgtgcgtctcggaagaacacggaccatttcttag

SEQ ID NO: 262805 - DNA, 99 bp, Homo sapiens
  chr10:135069286-135069385
  hypo
atgctgggggtcagcggtgcacacgattcagccacgtccacagcttttctttatttcagggtctcactctgtggcccaggctggagtacaggggtgcaa

SEQ ID NO: 262806 - DNA, 338 bp, Homo sapiens
  chr10:135069625-135069963
  hypo
ctgaggaagttatatatatttgttaaacatacgtgtccttctcagaatctgtgagaagcgcagatacaattgtcaacagattccagaaacacggggagcagcagagctttgccgccgcctctctccagcaagctttgaacagccattgttttcatttattcctgcttgtaaaacgacacattgttatgatggagaattgtgagtactgcagaaaagaaataagttttgccaccaaaggcgatcactgtggatcatgccggttcctgcacacctgtggggtgctctgagcgtggactccccacgcgagccgtccagacgtgctcagggtggcctcccct

SEQ ID NO: 262807 - DNA, 40 bp, Homo sapiens; identical to SEQ ID NO: 213903
  chr10:135073971-135074011
  hypo

SEQ ID NO: 262808 - DNA, 334 bp, Homo sapiens
  chr10:135076254-135076588
  hypo
gtgctgcctggaaccgggtgcccagggcagccggctcagcaggccccagagcaggggcaggtgtggctgggaggggctgtatatgtggcctcctgaacacagcgggagaccagcggccacctggagacacgtacacacacacgcacccgcaagcacacagctcatcccagcctggtgcctgcagacagctggggctacacgtggccaaggcggggagaaggaattggctgagggcgtggacagcaggagcctctcaggtagatgcattcctgaggttagaacagcagctgagcctgcaaagtcagggtctagggctgagcggcactagctggac

SEQ ID NO: 262809 - DNA, 146 bp, Homo sapiens; identical to SEQ ID NO: 213904
  chr10:135081994-135082140
  hypo

SEQ ID NO: 262810 - DNA, 192 bp, Homo sapiens
  chr10:135085113-135085305
  hypo
tcaggggcgttggcgaggcacaccgactgcggccgctccaaaaagctctccaggtaggcctggctgcagtcactgaacatcctggggaaactggagctggggaggcggggcagcattgggggaggcggcctggccccttccccacccacctcgtacctccagcataccctggctctgcagggcctggccgcc

SEQ ID NO: 262811 - DNA, 69 bp, Homo sapiens
  chr10:135086763-135086832
  hypo
ccgaggcctgaagacggctgccgtccggggtcccaggaggctgcccaggctgtcgtcgctgaccccgca

SEQ ID NO: 262812 - DNA, 531 bp, Homo sapiens
  chr10:135087235-135087766
  hypo
ggagccctggcgttcgtccgccacacccacctgaggccggcacaggtgctgaggctggcggctgagtccgggtacccctctacgtggccctggtagaagcagtggtcctgcgggggaagcaggagaggggtccacaggctgtgcccccatggccccacaggctcggggagggccgcccagcccctacctgcccgcccagctgctccgcccgacccatacctgcccgcgaggctgctccgtcacctcggagccattggcagccgtataggtctctgtgtagccggagcccagcaggtccctggaaaagaagtgctgtgactgcctcggccccctcggtgcagagaggctggcccagaggctggacgccggggacaccagtgtgctggagccaggcccgggcaggggggccgacccgagacccactcacctgttcttccgcaggtggagggtgaagttgtgccctgtggccccaaggacgtagctcaccctctctgggtgcaggccctgagcgaggagggaagggtcccaggt

SEQ ID NO: 262813 - DNA, 77 bp, Homo sapiens; identical to SEQ ID NO: 213906
  chr10:135102837-135102914
  hypo

SEQ ID NO: 262814 - DNA, 193 bp, Homo sapiens
  chr10:135107041-135107234
  hypo
ccagggaccgcgcccggtgcccacctggtcacagcggagtagctggcggccactgggaggatcctgtgcaccagctccctgatggacaggtccaggttggggtccacgaggaaggtccggctctgcctcccagccaggggctgagcactgacgtacctcccgtccacgcccaccagcacgtacagcaggtcct

SEQ ID NO: 262815 - DNA, 74 bp, Homo sapiens
  chr10:135111401-135111475
  hypo
aatcaacgcatcacgtacctatcggcagagcccggaaatcaacgcatcacgtacctatcggcaaagcggtgtct

SEQ ID NO: 262816 - DNA, 37 bp, Homo sapiens
  chr10:135113437-135113474
  hypo
tcccaacatgggccgtacgggcgcagtgtggcacgtg

SEQ ID NO: 262817 - DNA, 579 bp, Homo sapiens; identical to SEQ ID NO: 213907
  chr10:135120291-135120870
  hypo

SEQ ID NO: 262818 - DNA, 149 bp, Homo sapiens
  chr10:135124038-135124187
  hypo
gggtgtgggaatgagcgggcgcagcgcctccgcactcacacccctctgggccatgcctgtacctcctgcagcagtcggccgtggtcatccgcactcacacccctcggggccgtgtctgtacctcctgcagccgtcggccgtgctcacac

SEQ ID NO: 262819 - DNA, 83 bp, Homo sapiens
  chr10:135125636-135125719
  hypo
gtcacaacccaggcgtctgccttaatagcatcacctgtgccgtctgcgtttctagcgtcacctgtgccgtctgcgtttctagc

SEQ ID NO: 262820 - DNA, 202 bp, Homo sapiens
  chr10:135128535-135128737
  hypo
gtggtggggccgcccggggcctgtcggctgcttgagaaagcacaacacaagaaaaatgcaaacacgcagatttactgctggttctccatctccctgagaagatcctgccccagcccgttgaatcctctggctcttgcgtgagctccctgcacaaggccagcagcacagccctggcggcagcgctccacgaggatgtattagc

SEQ ID NO: 262821 - DNA, 321 bp, Homo sapiens
  chr10:135153717-135154038
  hypo
tcccccgtcccctccgcctttgtgctgggtcagacccagctgggtttggctctcactcaccctgaggatggccctggcgcccgcatggtgcccagcacacagaaggcgctccataggcatttgcctgagtgcggctcccagctgtgggtggtcagcaatgacaggagcatgcgttggtgatgccttcgttttcattgctaaaccgtaacccattgttcccgctgttaactcatggacatgccgcgtttcatccacgctgaacggtaacccgttgttactactgtctttttgttttgttttgttttgtttttttgagacgga

SEQ ID NO: 262822 - DNA, 114 bp, Homo sapiens
  chr10:135202198-135202312
  hypo
ccgcccacactctgcgaactgctgcctgagggacgctctgtggggtggctctttgtgcctctggggcccctgctccatcagtggttccttgctgagaaacgcgggcggagagct

SEQ ID NO: 262823 - DNA, 201 bp, Homo sapiens; identical to SEQ ID NO: 213911
  chr10:135204811-135205012
  hypo

SEQ ID NO: 262824 - DNA, 148 bp, Homo sapiens
  chr10:135228980-135229128
  hypo
tggtctccctttctcacttgcgtggtgtctgatgagccgtctgcggtcatgtttgtttgttttagtgcttgagaggggttggtctccctttttcacctgcgtggtgtctgatgagccgtctgtggtcgtgtgtgtttgttcctctgct

SEQ ID NO: 262825 - DNA, 611 bp, Homo sapiens
  chr10:135269750-135270361
  hypo
tgctctgaggctggcgtacagacacagcacgtgcgacggagtggtgttggtccgacaccacggggcatggggatacgtgtgcaaccaggagtggacgctggcagaggcctctgtcgtgtgcaggcagctgggctgcggccctgccgtgggcgcccccaagtatgtcccgctgcctggagagatggcccagccctggcttcacaacgtgtcctgccggggcaacgagtcctccctctgggagtgcagccttggctcatggtgccagagcccgtgcccccacgcatgggtggtggtcgcgctgtgctccagtaagtagggaggagtgaaggggacggggctgaggaggaggaggagtgggaggacgaggaggaggactgggaggacgcagaggaggactgggaggatggcgggtctcggagacgggcggggaggctgtgggtctggagctctctctgggaggggctcctctctgggcaccggggccatcctgactgtaagattcagctgtggaaaaaccaacgccagggagagtcagagattggaggaaggaagcagagtgcggcccaggcgtgggggaggcagcagccgagcgggggcggggtctgtggacg

SEQ ID NO: 262826 - DNA, 37 bp, Homo sapiens
  chr10:135381713-135381750
  hypo
gtcctgttgcctccgggaacccagtcctcctcgtcct

SEQ ID NO: 262827 - DNA, 86 bp, Homo sapiens
  chr10:135381780-135381866
  hypo
ttctccagcctgagcccgccgccccggccgcagccacgcgcagggaggagcccggggcaccatagcacagcgccggcctcacacac

SEQ ID NO: 262828 - DNA, 399 bp, Homo sapiens
  chr11:232824-233223
  hypo
tcccaaggaagaagcataagcgataggttttggccgtccccagaaacaggcacccgagcatcccctgtgagaaacaggcacccgagcctccctgggagaaacaggcacccgagcctccgtgggagaaaaagaatgtgtgcgactcacagagggctcacctctctcaagcccatcgatgttctgcgtgtagagccgcagaagcagccccttgtcatgaagcagccggagaaagtagtgagtgacgttgggcttgtagtttccagggtacagctccttggccaaagtgaaaaagggcttggggttgtgaaagaagaatgggagttcaaaaatggcctcggggtacgggagatcgtactgctggaggttgctgtacaggccactccccggcgatctgcaggg

SEQ ID NO: 262829 - DNA, 138 bp, Homo sapiens
  chr11:251677-251815
  hypo
agtcaaggctcttgtgtgagcgctgtgctccctagacagtaaaaaatgacgggaggagcggcatctgcttctcacaagccatctgggtccatgggggtgtgtcaggctatcttgtcttacacacgcctccctctctgc

SEQ ID NO: 262830 - DNA, 38 bp, Homo sapiens
  chr11:367112-367150
  hypo
cgtgagccaccgcgcccggccaggttgttctcttattc

SEQ ID NO: 262831 - DNA, 155 bp, Homo sapiens
  chr11:372118-372273
  hypo
gctgaccagtgagaccgacggccggggggtccacgctgcgccatccacacagagggctgaggactccagtgagagccgtgaagaggagcaagcggtgagcagagccctggggagaacacgtgtgcacggagacgagaccccgaagccacttgtgt

SEQ ID NO: 262832 - DNA, 1659 bp, Homo sapiens; identical to SEQ ID NO: 213915
  chr11:375766-377425
  hypo

SEQ ID NO: 262833 - DNA, 209 bp, Homo sapiens
  chr11:380579-380788
  hypo
gccccagtccccccgcaccagcacacccagggccatgccaggggccccaggaacctcctccagtatcccgcgtttatgcaccgcgctccagggtcatgacccagtaccaccggacgactcccggaagcccccgtggtgatgggacccggcacctgacccctcccgaggtctcctagcggcgctttgccggggggaccttgcaggacctg

SEQ ID NO: 262834 - DNA, 36 bp, Homo sapiens
  chr11:381324-381360
  hypo
ccacctctccgcccccggccccggggtcctgaccac

SEQ ID NO: 262835 - DNA, 185 bp, Homo sapiens
  chr11:390912-391097
  hypo
ccagaccccaggagaacccccgggagatgccccgcctgcctcagacagacgcccccttccccagaggagcgccgggggcatagcaagagcccgggactcgtctgatgaacgaacaagtagtggacggacagatggacagactgaccaacaggccggcagtggacggggtgtgtgcagatgaaagg

SEQ ID NO: 262836 - DNA, 849 bp, Homo sapiens
  chr11:391859-392708
  hypo
gcggcccgaggctccgtgcagattccgggccccacagacaaccgcttcctccaggaagcctaccgtcaagcccccctccagggctcctgtgtcaggagctggctccagggagagtgcgaccctcagggctggtcacagggatcagatgagactccgccgagcctggagctggaagctgcagcggtggcctagcaggcatcgccatccgtctggcccggccgcagtgagggaaggtgcaccccagattcctggctttgccaaaactgtgcctggcgggcaccacgcatcctcagggaggcgccgcagctctgggggggggcacccacagccctctctgccaaggggaggagggaaggtgggcagagtcggccctgggggccctgcaggccgcggggtaccggcgttcccatcatagctccagccgcacggaagccccttcactgagtcctcttgtgagcccttcggcctgactgggctgcagaggccctccaggctggcttccccctcatgccgcccagcctggcccctgcagggccccaggtgggcctggggtggacctgggtgcagggcgggacccagcccatgccaggcacatacctccaggcccgctctgcgccgcacaaacttgtctcccaggatttttccacacgaaacctgtctcccagggaatcagccagtccgatgagctgggcgttcccaccccgccctccgaggcccccacagtcctgtccccgccgcagaggctgccccgcacgcgccgggccagggatggagtcctggacacctcggccgtcagcagtggcctctgggatgagctgggaggctggcgggatccggaccacgagccgg

SEQ ID NO: 262837 - DNA, 108 bp, Homo sapiens; identical to SEQ ID NO: 24822
  chr11:393555-393663
  hypo

SEQ ID NO: 262838 - DNA, 145 bp, Homo sapiens
  chr11:394012-394157
  hypo
gggagaaaaggaggcgggaggccaggctgggacctggggccatgcagggcctgttcttccgcccaaattccaccttaagcaggcggcggcccctccctcccacctggccaggtgtccccgcccccagctgcgctcagggctgggc

SEQ ID NO: 262839 - DNA, 33 bp, Homo sapiens
  chr11:394430-394463
  hypo
caggagcaggtccgcgcccgcctcttgcagctg

SEQ ID NO: 262840 - DNA, 329 bp, Homo sapiens
  chr11:394829-395158
  hypo
tcggtcggcaaacccggaacacgcacgcgcctggccccggtagcacagactcacatagggtctcagggacacccagacacccacgctcctcccatacctcacgggaatgagcagaacgggaaagcggggagaggtgtgggggtgctggaagtcctggaggaaagccaggcctgtctggaccaggggctccctgaggaattagaggggagggcccggctggagtgacctagatttctctgtgggaacagcaggtggaggagcacccctcggtgccagccagacccacctgtggcggaatcctggccccactcacgcgagtgtgtgtgcat

SEQ ID NO: 262841 - DNA, 39 bp, Homo sapiens
  chr11:404582-404621
  hypo
gaggagaaggtgacgtggcccagcgtccaagggacagac

SEQ ID NO: 262842 - DNA, 52 bp, Homo sapiens
  chr11:405079-405131
  hypo
ctggcacctcagggccgagaggggacagggtggacagcgggtgcaccacagg

SEQ ID NO: 262843 - DNA, 153 bp, Homo sapiens
  chr11:419276-419429
  hypo
tcagaagaggacatgcggaacctcacatcgggagggagccgttctggcagggcctactcaggaggcagccaggtctgggaacttcacccccaactgcggtcctggccagttatccctgacctccagcccagggcctgccgtcagtgggcgcag

SEQ ID NO: 262844 - DNA, 425 bp, Homo sapiens
  chr11:421330-421755
  hypo
gtgctcacacccagatgaaccgcacccgcacgtgggcacgcacacacacacacacacacacaggggaggccacaggctcccagatgaaccgcacccacacgtgggcgcgcgcacacacacacacacccccacacaggggaggccacaggctcccagacgaaccgcacctgcacgtgggcgcacacacacccacacacacacaggggaggccacaggctcccagatgaaccgcacccacacgtgggcgcgcgcacacacacacacacccccacacaggggaggccacaggctcccagacgaaccgcacctgcacgtgggcgcacacacacacacacaggcaaggccacaggctccaacacacgctccagacagtgtctgttacgagtggcctcggtttctccccgtggaaacggcacgatgggtta

SEQ ID NO: 262845 - DNA, 521 bp, Homo sapiens
  chr11:429289-429810
  hypo
ggggagacagacatgggacacgcaccccacacgtggggagacagacacagcgacacgcctcacgggtggacagacacgggacactcaccccacacgtggggagacagacacagggacacgcctcacaggtggacagaccaggacacacgccccacatgtggggagacagactcgggacacacacctcagacacggcaggcatatgtgggccgtgcagggcatcgggcgccaacagcccctgctcgggtcggcctcagctgcgctgccagctccacctcacctgttcctcgtcccacacgtacaggtcccagtgcaggaccacgcgggcgcgctgccgcttccagatctccaggaacaccgtggctgcggcgggggcaaggaggggcatcactgcactacgccaggtggacctcggagcttgggctggcacttcccctggccccgcagaggcgtcccgcagcaactcaccccagagagccatgaagatggcgaacaccaccgtgccatcattgtcaaagagg

SEQ ID NO: 262846 - DNA, 144 bp, Homo sapiens; identical to SEQ ID NO: 213921
  chr11:431645-431789
  hypo

SEQ ID NO: 262847 - DNA, 134 bp, Homo sapiens
  chr11:438117-438251
  hypo
ggggtgatgaccccacgcctctgcaaacagcaggatcagcctcccctggggaatggggtgcaaagcccccatcactgacgtgggctgacagggagccctccccccagggcagagctacacgcacacctggggcg

SEQ ID NO: 262848 - DNA, 252 bp, Homo sapiens
  chr11:445980-446232
  hypo
agaggcagctcctccgtccctgcagcctccttttaactgtgggatatggcagccacccgtggagcggtccgggtgacaaagccagcgagagctagggagcgcccaggtgaaatcccacaggcaggtgtgagcaccaattgtcattacctttgccctgggcccctcagagacctgtcctccccccccgcccccaacagcctcctgggcgcggccacagacacagacacagtgtctggacgagcagactcgtcc

SEQ ID NO: 262849 - DNA, 154 bp, Homo sapiens
  chr11:449360-449514
  hypo
cccggcctgcctagcataatgttttcaaggtccagctgtgctgtagcatgcgcatgcttcgctcctctatggctaataacatgccgctattatcaaaatgctgcaactaggagcgctagtgtgtaaatttggcgtggacacttgtttccaggtt

SEQ ID NO: 262850 - DNA, 203 bp, Homo sapiens; identical to SEQ ID NO: 213924
  chr11:455934-456137
  hypo

SEQ ID NO: 262851 - DNA, 101 bp, Homo sapiens; identical to SEQ ID NO: 213925
  chr11:464468-464569
  hypo

SEQ ID NO: 262852 - DNA, 34 bp, Homo sapiens; identical to SEQ ID NO: 213926
  chr11:471551-471585
  hypo

SEQ ID NO: 262853 - DNA, 195 bp, Homo sapiens; identical to SEQ ID NO: 213927
  chr11:472768-472963
  hypo

SEQ ID NO: 262854 - DNA, 42 bp, Homo sapiens
  chr11:475001-475043
  hypo
cgagtttgtgtgatacggacatattcacgtgtttgtgtgata

SEQ ID NO: 262855 - DNA, 49 bp, Homo sapiens
  chr11:476445-476494
  hypo
gggaagaaaagctgccggaagctcaacccatggccgtccttgcttggag

SEQ ID NO: 262856 - DNA, 64 bp, Homo sapiens
  chr11:486110-486174
  hypo
gtgtgtgctgtgagcacaggtgtctgtaaatgatgtaaacctcccttgacgtcaggcccaaaag

SEQ ID NO: 262857 - DNA, 1672 bp, Homo sapiens
  chr11:487199-488871
  hypo
ctgaggccctgtccgtctggatggtgctcatggtgggcagggggcccctgctctctaggctgtcgtggacgtggtctccacaggccacggcagcacctgtgagtccctggccttcttcccggggtctggcaggtgctgctcaggtgtgggctgatctgccggtgtggggagtgggggtggctgtgccccagggtcaagggtcataccctgtcgcccacaggacaagttggatggctttgttcccgcgcactttcttggctggtacctgaaggtacggcacctcctcttcccggcctccccgccccggttctgaggcctgccgtgggctctggaccgtttctgtccatggagttgagctcagggtgctctgagtgtggtgggagggtgtcgcactgcagccacccagaggttcgagaagccgtggggctcccggacctcccagaagccctgatcctggtcgggtccccgctccgtcctcagggtcggggcggtggaaagaggcggcagggcaggaagtcccgcccctgcctgggcttgggcactgccccatcccacttctgagggaccctgtgctacctatggggctaagagcagtgcctgcttgaccctgcagcccaccctggcagagtttggtgtcaggccccgggcacggggatgctgccttgtttgctgacagtcgtacatcgaggctgctggaggggcagccacccaccccacgctcaccctgagacctcactgggggccctgccagtgctgtcgactccaagaatgctgccagccggggtgggggctgcacgcacccgtgggcagggccgggcgtggcctgcgtcccatactctggctgccagccgggtgggggctgcacgcacccgtgggcagggccgggcgtggccggcgtcccatactctggctgccagccggggtgggggctgcacgcacccgtgggcagggccgggtgtggccggcgtcccatactctggctgaccctggcgcccacagaccctgatgatccgagactggtggatgtgcatgatcatcagcgtgatgttcgagttcctggagtacagcctggagcaccagctgcccaacttcagcgagtgctggtgggatcacgtaggtgccagcacagcccccggggcagtcggtgcaggctgaggggcattctcggaacccctgtgcccagcgcggcccctggaccccctcattctccccggggggcagtgggtgcaggctgaggggcattctcggttcccctgtgctcttccggggtcctcctcggggggctcgttacccctcacccctgcaacgagtgctggcccctccctgcagtggatcatggacgtgctcgtctgcaacgggctgggcatctactgcggcatgaagacccttgagtggctgtccctgaagacgtacaagtggcagggcctctggaacattccgacctacaagtacgtcgtgggggctgcgagggcagggccgggtgggggttacctggaggcagcctcagcgtccgtgctccagcagaccccgagcaccaggcccgtccagtgtgcggctcaggaggggtgaccgtggggctttgcctcctggaacctccctctgacctggtgtcactcaagcccggccgcccctcacagtggccatggcgtctgacccacgtacctccctcctc

SEQ ID NO: 262858 - DNA, 136 bp, Homo sapiens
  chr11:489087-489223
  hypo
acggcaccgtggagcgccctctgaggcgctgcagccactgctcaagctggaagagactgaacagcagagggccgtggagaagcagggcttgtagctgggtggccagacctcggagaacagccgggcagcagctggg

SEQ ID NO: 262859 - DNA, 729 bp, Homo sapiens
  chr11:492551-493280
  hypo
gacacagcctggggggactccgggagccatttgcacccacacccccgggtctgcctcggggccccgggcgtcaaaaagctttacttttagtatttttccttgactacttttggggaaaatttcaagccctctaagtcaagggctgtaatgtggagcacacacaagagcagcctctggggctcagcaggaagacgtccggtgtggccaccgcgcctagcagtcctctttccagtcacggccactcacagctttggcctccgtggccctgcacggatgagttcttccagctgccctgccctgcgtgctgcaggacacatggggccttagcattctgctctttgcaggtggcagctttgatcgctcaggaggaactgccacctgatctccccactgcaggggcccccactccccccctcacgcgctgcgggtcctgtcactccacccacgctgtccatccccgctgatgctctgagccaggtggtagcaggtgggggtggcgccccgctcacggtctccatctgctcttcccgaggagggcgaggcagggcttgtgattaaagtcctgtgttccggcgcccgtgtcccaaaggcagcccctgggagcccttccggcagcaactcaaccccagacagcgcccaggggctctggttcctcacgcgctgagatgctccggactcaccttgggcatctctcgccccaggcctggcgtcacccatttccccaaggag

SEQ ID NO: 262860 - DNA, 64 bp, Homo sapiens
  chr11:528257-528321
  hypo
aggcagctggtggcgagtcctgagcagggatgtgatccgacgggcaggcggcgcccgggacaga

SEQ ID NO: 262861 - DNA, 261 bp, Homo sapiens
  chr11:528626-528887
  hypo
gtgtggtgcctccgcgggtgctctgacgatcgtctcgagccacgggggtgacagtgacaaggacctgtgtgcacgttagtggggcagccaggcctagctggagaagaaacacacacacgcacacgttcacccacatacacgtgcacacacatgctgccagttcagggggtggaggacgctgactccaggcccagctgacctgcgcggggccctattgtgatgtgtgcagccaccccatgacgtcaccggtgccaagtgccg

SEQ ID NO: 262862 - DNA, 38 bp, Homo sapiens
  chr11:532700-532738
  hypo
gcagcttgtgctgccggatctcacgcaccaacgtgtag

SEQ ID NO: 262863 - DNA, 74 bp, Homo sapiens
  chr11:533443-533517
  hypo
ctgcctcacctgccgggtcttggccgaggtctcgatgtaggggatgccgtagcttcgggcgaggtcctgagcct

SEQ ID NO: 262864 - DNA, 37 bp, Homo sapiens; identical to SEQ ID NO: 213934
  chr11:534210-534247
  hypo

SEQ ID NO: 262865 - DNA, 36 bp, Homo sapiens
  chr11:539725-539761
  hypo
ggtaagcctgatgcacgtagtcgagggacacactgg

SEQ ID NO: 262866 - DNA, 337 bp, Homo sapiens
  chr11:548735-549072
  hypo
gcgtgaaccaccgcgcccggcctcaagtggttttttaaggacagaaataacgaagtgctccttagacgtcgccacagtggacactggaacgaaaggctttgcagcctcctgggaagaggcgtgaactgagagtctgacacccagcctaatggctgcataagctcacagccagcaaacatctgtgagtcagagatcaaggggtttccattagctgctcttgaagaaatcactagacacaaatcccagccaattcagagcggagtggaaaagccattgaaggcagcaggctgaggacagacactgactccacagcgcgaaaggacggaccaccgggaat

SEQ ID NO: 262867 - DNA, 152 bp, Homo sapiens
  chr11:550045-550197
  hypo
ctggctcagagccccgcgctgcccaggaactctacgcctcctacaacaacatctcggacctgagcccactgtgcctgctggaacaattggaggtgctggacctggagggcaacagcgtggaggacctggggcaggtgcgctacttgcagctg

SEQ ID NO: 262868 - DNA, 1621 bp, Homo sapiens
  chr11:561904-563525
  hypo
ggggtcaggcaggccgggcaggtagagctgaagtgggacctggtggtccagctccatggtctcccccaaggagagtggggctggttgctgatcctttttgttcttcccaactcttcaagccaggtggacagagagtcggggggacataggctgaccttctcctcttcttcccaggccagactggccgctttgtgcttgtgcagcggcttcgggagaaggagcggcagttgctgccacaagagtgtccagtgggcgcccaggccacctgcggacagtttgccagcgatgtccagtttgtcctgaggcgcacagggcccagcctagctgggaggccctcctcagacagctgtccacccccggaacgctgcctaattcgtgccagcctccctgtaaagccacgggctgcgctgggctgtgagccccgcaaaacactgacccccgagccagcccccagcctctcacgccctgggcctgcggcccctgtgacacccacaccaggctgctgcacagacctgcggggcctggagctcagggtgcagaggaatgctgaggagctgggccatgaggccttctgggagcaagagctgcgccgggagcaggcccgggagcgagagggacaggcacgcctgcaggcactaagtgcggccactgctgagcatgccgcccggctgcaggccctggacgctcaggcccgtgccctggaggctgagctgcagctggcagcggaggcccctgggcccccctcacctatggcatctgccactgagcgcctgcaccaggacctggctgttcaggagcggcagagtgcggaggtgcagggcagcctggctctggtgagccgggccctggaggcagcagagcgagccttgcaggtgagcccggggacctgatcccctgtcactcccccacccctgatatgggcagatacggggatcacagggtcccactcgggaggcaggtgagcccggggacctgatcccctgtcactcccccacccctgacgtgggcagatatgggggtcacagggtctgactcgggaggcaggtgagcccgcggacctgatcccctgtcactcccccacccctgacgtgggcagatacgggggtcacagggtcccactcgggaggcaggtgagcccggggacctgatcccctgtcactccccaacccctgacgtgggcagatatgggggtcacagggcccgaccagggaaagtgctccctccggagcacaagggctgtggagcccagtggctgtgcctcctaaggatctcatgtgtccccaggctcaggctcaggagctggaggagctgaaccgagagctccgtcagtgcaacctgcagcagttcatccagcagaccggggctgcgctgccaccgcccccacggcctgacaggggccctcctggcactcaggtcggagtggttctggggggaggctgggaggtgaggacctggcccagccccactccaagctgacttcccaacccacagggccctctgcctccagccagagaggagtccctcctgggcgctccctctgagtcccatgctggtgcccagcctaggccccgagggtatgtctgtgccccacctccccctggggcaccgggccctcctgtgg

SEQ ID NO: 262869 - DNA, 159 bp, Homo sapiens; identical to SEQ ID NO: 213937
  chr11:563846-564005
  hypo

SEQ ID NO: 262870 - DNA, 156 bp, Homo sapiens
  chr11:567175-567331
  hypo
gatcccacctggtgtaagtacgggcagagggcagagccaggctgtatcgaggggcggcgctgggaccctcctcgcccagagttcctactcatccccagcacagaagtgctctgtagggccagctgaggacaccccggttcactgagggtggcccac

SEQ ID NO: 262871 - DNA, 102 bp, Homo sapiens; identical to SEQ ID NO: 213941
  chr11:590964-591066
  hypo

SEQ ID NO: 262872 - DNA, 197 bp, Homo sapiens; identical to SEQ ID NO: 213942
  chr11:591096-591293
  hypo

SEQ ID NO: 262873 - DNA, 110 bp, Homo sapiens; identical to SEQ ID NO: 213943
  chr11:593651-593761
  hypo

SEQ ID NO: 262874 - DNA, 122 bp, Homo sapiens; identical to SEQ ID NO: 213944
  chr11:601646-601768
  hypo

SEQ ID NO: 262875 - DNA, 129 bp, Homo sapiens
  chr11:605030-605159
  hypo
tgatgaaggcttcacgtggcatttacagagccctcgtagatgccatccccgtctctctgttcatctttttctttgttactggattcagagtgaagccaccactcgctctcgaatcgcgcggacgctggg

SEQ ID NO: 262876 - DNA, 60 bp, Homo sapiens; identical to SEQ ID NO: 213945
  chr11:609531-609591
  hypo

SEQ ID NO: 262877 - DNA, 116 bp, Homo sapiens; identical to SEQ ID NO: 213946
  chr11:618979-619095
  hypo

SEQ ID NO: 262878 - DNA, 302 bp, Homo sapiens
  chr11:625775-626077
  hypo
ctcagtgtcctaaccctgcacggtgccctcatggtcgccttcaagccctgcacgctccgtgctccacaggctctgaggggtcaagccactggtccgaggccacacgagacagagggtccggagtcctcacgccagagtggattcctggcaccccaggtgacacctccaccctcccctcttcctgcccgcctgagcccccctggccccttcacaccctccccactaccccttacagaaacactgaccacatgggcccccgggcaggagctgagagggtgtccgggatcccccgagccccagaa

SEQ ID NO: 262879 - DNA, 131 bp, Homo sapiens
  chr11:644102-644233
  hypo
tccggcctggccgcgctgtcccgtgcaccagaggtgcggtgggcttggttttcccacctgcgcagtaggaggaaggggaggaaacccccccccgagggctggcactgcaaccggccgtgtggggcagggag

SEQ ID NO: 262880 - DNA, 164 bp, Homo sapiens; identical to SEQ ID NO: 213947
  chr11:688383-688547
  hypo

SEQ ID NO: 262881 - DNA, 152 bp, Homo sapiens; identical to SEQ ID NO: 213948
  chr11:700514-700666
  hypo

SEQ ID NO: 262882 - DNA, 68 bp, Homo sapiens
  chr11:702894-702962
  hypo
tccagggagcgcctcgcaccaccttccctcccctttgctctgttctccaggcaccaggggcaacctga

SEQ ID NO: 262883 - DNA, 135 bp, Homo sapiens
  chr11:727709-727844
  hypo
cagttaagtctcccaggagccgtgtgtctcagttctctgggagtcggagtgggtcctggagcccccggaaactgcaccttttctaagcagtgccgggcagagggctggccgtccgccaggctgctctgcccctga

SEQ ID NO: 262884 - DNA, 310 bp, Homo sapiens
  chr11:733218-733528
  hypo
acaccacccagtgtgcggcgtttgccatggcagccccgtgaaacacagaagcctgccttctcaaccgcactcacctttgctcgaatatgagcagcccccattcttccccgacacacacagtcaaatcagcaaacgtcactgatttgatgcagtctcacctggaagcgtaagcatccggcgtcccgggcgcctgctgcctaggtgttggggctgcccggggaagagctgggagccatgtcccagccgtgactgacctggccagcttccccaggttacttgaaagaacctcttgtgtcgagacgtgggtagt

SEQ ID NO: 262885 - DNA, 32 bp, Homo sapiens
  chr11:739281-739313
  hypo
tatatatacacctctatcgatacgtggattga

SEQ ID NO: 262886 - DNA, 33 bp, Homo sapiens; identical to SEQ ID NO: 213950
  chr11:744542-744575
  hypo

SEQ ID NO: 262887 - DNA, 493 bp, Homo sapiens
  chr11:763193-763686
  hypo
gccctcacctgccccgccctcacctgcccccgccctcacccgcccccgccctcacccatccccgccctcaccgtccccgccctcacccgcccccgccctcacctgtccccgccctcacctgccccgccctcacctgtccccgccccgcagggagctcgaggagcagcacggcatccactgcaacatgacgttactcttctccttcgcccaggctgtggcctgtgccgaggcgggtgtgaccctcatctccccatttgttgggcgcatccttgattggcatgtggcaaacaccgacaagaaatcctatgagcccctggaagaccctggtgagggtccctctgtggtaatggggtaaggggagcagcctcagcagcacctcaggcaggaagagcccgagacggagctgccgcatcaacaagcagtgaggtgcacaggtcggcgcggggcaggcaggggtggcggctcaaggtagtgcagccggcaggcactggga

SEQ ID NO: 262888 - DNA, 212 bp, Homo sapiens
  chr11:763889-764101
  hypo
ggagagctgctgcaggacaacgccaagctggtgcctgtgctctcagccaaggcgggtgaggccccactgcccagctgtggctcctgctcgggcaaggccagcactgccgtgccacgctgccctgtgggtgatccctcccacctgtggggcgagctcatcttgggagacatgagggtgaagtagacctcaacggagggcttggctttcctaac

SEQ ID NO: 262889 - DNA, 626 bp, Homo sapiens
  chr11:772495-773121
  hypo
accgtggccgacggcgcagatgggttctgaaagccgtacatggcgttgaggccctggaccccgccacccgcaccctgaagcccctcccagatgcccctgcttgtggctcccccaggcttgtgccgcctgcctggcccctcctcccaggtttccctggaaactggactcagcacccgggtgtcctggctcagcccgcacagctggcatcaggaatctgctcgggggagctggtgcttcaggactaggctctggtttagagcccaaatctcaggttttggcagccgagacacacgcagagaggaggtcctgaggttccaggtctgtttaccaaaccctaggacgctgcccggcagccccactgcatagcctggcaggcactgtgggaaaggcccctccccggctagacaggacgcccctgggcaggtgggaggtagcctgaggcaatgcctgtgccttgcagtggggacatcctggctccatccgaaaggctgagtgtgttcccacggctgaggtggccacaaacaattgctgcctgtccaggccatgctggggacggcggccccactccaacacacaaagggtgctgtgtagagcgctggcttgtccaccccggccagtggacacac

SEQ ID NO: 262890 - DNA, 189 bp, Homo sapiens
  chr11:775074-775263
  hypo
ggccacctgcaggttgaaggcggtgctggccatcgtgaaacagtggaggaaggactgggccgacacacctgcagaaggtcccagtgagtgtgggctcgacaggactagcgtgccccgcctcagggggctacccagacacccccatggcctcgactgaccccagaacacgctgaggagcagccctctccc

SEQ ID NO: 262891 - DNA, 142 bp, Homo sapiens
  chr11:782434-782576
  hypo
aggccctgctctgcccgtcgagcctccagggcaagtgcaagctcagcctgggcctggagacggcggatcggagcgtgtccaggtgctcagggactggtcaccgaaaggcaaggagccctccctgggacgagggagacaccca

SEQ ID NO: 262892 - DNA, 391 bp, Homo sapiens
  chr11:799207-799598
  hypo
gctcacagggacccgtccccacacactggagagacttgaaggtgggggctctgcccatccactggggaatatctgggccagcctaaaagtctgtggggcctaggcctgggcaggctctgggggctgtggagccgaggagccaggcagagcggggtccttgggggccaagcccatgcgtcggatgctgtcctggtacttgcggcggccgagctccaagactgcgcgcacctcttcagccacgtcctgccggtcactctgctccagggcctgcaccaggagccccacagcccctggctgcccagcctggcgctcagcccaggagaagagcatgtgacggatctgctcatccagatcatccctgcaggcagaggatgggcgacagaggggtcct

SEQ ID NO: 262893 - DNA, 316 bp, Homo sapiens
  chr11:799830-800146
  hypo
tgcgctgcacctcccggtaggacacccccaggtgcagggccacggctggccagtccagacccagacgcccagccacactcagcaggttgctctgcgtcagaaagccggtctcggcatctcccagattcaagggtgccaaggagaggccagccccccgccgtggcccctcggaccctcgaagtctctgttggaaggaaaaagtgcattaagccctgggctccacccccaactccaccatgtcaccctggtcacccctgggcctcggtcctgccccgcccctctgctgtccctcagtcccaccggcagcttgatgggc

SEQ ID NO: 262894 - DNA, 1538 bp, Homo sapiens
  chr11:823372-824910
  hypo
tgtacagctttgatcttgttctggatctaggataggttttggggttgggagctgcgggtagtgaagggaggtggctgttgggggtgccagggattccaggggcagaacgggcatccctggctccctccgctccatttaaccctcctcactgcaggtgctgcgagagatgtgcaagcagggataccgggatggcctgcgctttctgcagcggaacggtgcgcggacccgggcgggagagggcggggtgggctcggctctgctaccccctgcgggccgcggccgcgctgatgaactgagaatcccttctctccccaaccccaggcctcctgaaccggcccaaccccttgctggcgttgccccccgcccgcccccacggcccagaggacaaggaccaggcagtggagagcgcccaagcggaggattactcgcagctgcccggagaagatcacatcctggagcacctgcccgcccggctcaatgagggtgcgcacctgggggacgggaggggaggaggggaggcaggagggaaagagagagaggagaggacggtgagcaggggagggaagccgagcgggtcctgggccccgctgcctccactggccgccgacctcccgcccacccgcagccctgctggaggcctgcgtggagcccacggacctgctgaccaccctctccaacatgctgcctgtgcgtctggccacggccatgatggtgccctacacgctgccgctggagagcgctctgtccttcaccatccggtgtgagggctggggggtcgggagaggggcccaggggacggactttgggatcatccgcgagtgatggttaccagggaaggtggggtggggtgagcagtgccaagtcagggcacagacagggcccggcgggtgggcatgtgggtctggccaagtccctgaacgcgccgctcgccctgtccccagcttgctggagtggctgcccgacgttcccgaggacatccggtggatgaaggagcagacgggcagcatctgccagtacctggtgatgcgcgccaagaggaagctgggcaggcacctgccctccaggtgagccgccgaccgcgcgtccacccggggcccgcggtgctagcgccgggagctgaagccctccctgccgcatccctgccccgcaggctgccggagcaggtggagctgcgccgcgtccagtcgctgccgtccgtgccgctgtcctgcgccgcctacagagaggcactgcccggctggatgcgcaacaacctctcgctgggggacgcgctggccaagtgggaggagtgccagcgccagctgctgctcggcctcttctgcaccaacgtggccttcccgcccgaagctctgcgcatgcgcgcacccgccgacccggctcccgcccccgcggacccagcatccccgcagcaccagctggccgggcctgcccccttgctgagcacccctgctcccgaggcccggcccgtgatcggggccctggggctgtgagaccccgaccctctcgaggaaccctgcctgagacgcctccattaccac

SEQ ID NO: 262895 - DNA, 143 bp, Homo sapiens
  chr11:826059-826202
  hypo
ggatctgggactgggcgagccggccaggcaggtccctgatgtgcctgtgccagaggccaccccccttggtctcaaggtcctgtcctataagcccagccttttgtggttcagctgggtcgcacgctggatcccaggccccttcc

SEQ ID NO: 262896 - DNA, 665 bp, Homo sapiens
  chr11:850442-851107
  hypo
gtcggagtcgctgccccggccaggcgttgggtgcggttgtggggatggtcccgggaggacccaagaccgctgctccggctaggagcctggactgggcgggtggggaaggtttgcaccatcgcggggtccgccccctgcactcagagcggctgccccacgccctggtcccctctcctctcctctcctctcctcacttgatgagacgggacacgttgcacacgtgcgcgccggacagggccacccgggcactgcgcctctcctagggtcggggttcgagtccgggtcgtggccagttttgcgcggggccccggtgcctcctctgcgcccgctccctcctcggtgcagccgttatccttgcctcggccccgcccctccaggcaggcgacctgtcgggcccagggactcacttccgagggtttgagccggctgccgccaaggtcccccagtcgccgggaggcgctgcggaagggaatcctggacactgagcagggccgtgggccatcagtgttcgcgggagacactggctttcccgcgcctccggcagcagaggcttccctaacttttgcggaggtggggtcaggtgtgctcagacctgcagtggtgtccgggggggccctgtgtgctggatggagcagagctgaggtagagggcggacagggttccac

SEQ ID NO: 262897 - DNA, 43 bp, Homo sapiens
  chr11:858811-858854
  hypo
ccacccccgctcacacgcacccccggctcgcatcctgggctcc

SEQ ID NO: 262898 - DNA, 398 bp, Homo sapiens
  chr11:859260-859658
  hypo
acaccctggcccacacgcaccttggctcacgtgcaccccggctcacacgcaccccccctttcacacgcaccccgggctcacacgcaccccgggctcacacgcaccccccctttcacacgcaccccgggctcacatgcaccccggctcacacgcaccccctctcacacgcaccccggctcacacgcacccccctcacacgcaccccgggctcacacgcaccccgggctcacacgcaccccgggctcacacgcaccccctcttacacgcaccccgggcccacatgcactccggctcacacacaccctcactcatgcaccccgggcccacacgcaccccagctcccatgtacccctgctcacatgcaccccagctcccatgcatcccgggctcacacacaa

SEQ ID NO: 262899 - DNA, 408 bp, Homo sapiens
  chr11:862650-863058
  hypo
cttgctcatcatcaccggcgcctttgtcatggccatcggcttcgtgggctgcctgggtgccatcaaggagaacaagtgcctcctgctcactgtgagtgccggggcccaagcgatgctccgggtgggaccacgcagggtggggctccggtggcccccaggccttggctgccgcagtgaccccccagacgtgggcaccacctctggggccggacctccaggctggcagtgtggcccggggccctggccactgttgggtcttccaggccacactggggctggggggtgatttgcagagcggtgtgggggtcactcaagagaacgtgctgtaccttgtcaggggcctcccctgacgggacactggccctggtgagtgcaggcacagccccgcacacacgtacacacgcatgc

SEQ ID NO: 262900 - DNA, 212 bp, Homo sapiens
  chr11:864622-864834
  hypo
ggcagccaggacagcgggtgtggatttaccaggcctggaggggcagcgccagcgaccctgggaggctgtgctgtggctctatagcgactggggcacaagggcactgctaccccacccggagggtgcgccccaggttgtcccccgccctctgacgcagcgtcctgagccgtctgctcccagcgccccatccgggccgcgcaccgtggggttct

SEQ ID NO: 262901 - DNA, 34 bp, Homo sapiens
  chr11:865452-865486
  hypo
ctggatgagggaggcggggtacagtgggaggggc

SEQ ID NO: 262902 - DNA, 597 bp, Homo sapiens
  chr11:865516-866113
  hypo
acaggtatgcccagcaagacctgaagaaaggcttgcacctgtacggcacgcagggcaacgtgggcctcaccaacgcctggagcatcatccagaccgacgtgaggcgtgggcaggtgggcggggtcggcgggtgccccctcccctcctgcctcagcccgacctgagcttgccccccagttccgctgctgtggcgtctccaactacactgactggttcgaggtgtacaacgccacgcgggtacctgactcctgctgcttggagttcagtgagagctgtgggctgcacgcccccggcacctggtggaaggcggtgagtgagacccccaccctgggggctggtaggggcctagagggcgggaccagcaggccctgccgtgacacgcatgacatccctccctgcagccgtgctacgagacggtgaaggtgtggcttcaggagaacctgctggctgtgggcatctttgggctgtgcacggcgctggtgcaggtatggcctgggggcctgcgggctccctgcccccactttgttaggaccttctgagcccagggaacaaagtagcaaagaccttgcccccaggaacccacgatcgggggaggcc

SEQ ID NO: 262903 - DNA, 70 bp, Homo sapiens
  chr11:873624-873694
  hypo
gaacacggacagctcggcctcacagaaacatccagaacagacaaacctacagagacggtgggctggaggt

SEQ ID NO: 262904 - DNA, 61 bp, Homo sapiens
  chr11:873724-873785
  hypo
cagctgctaaaaggcacagggcttctttttttggggagcagtaatgcgggctgtacaattc

SEQ ID NO: 262905 - DNA, 206 bp, Homo sapiens
  chr11:875482-875688
  hypo
gctgtagacactgagggccccgggtgtggagaagacctggctcctcgtcactggctatcggagagcgctggggtgttaggagaacacggtgagcatgaggccggggatcggggctggggttgctgaaactcttagcgccacatgaggccgagggagtcaagtcctggggtggccatgaggggctcgccacaccattctatgcactt

SEQ ID NO: 262906 - DNA, 206 bp, Homo sapiens
  chr11:898338-898544
  hypo
actacttcaggtggtgggggcgggggagccgattccagaacccacggctcacacagaaggctgaagggctggacagctgccatagggctctgctgtccaggcacccgcggtggagaccgcaccatcctcgctcgttgcaaccagtggagtgagaggagtccacctgtcctgagcatgtcgaggacgccccctaccaacatcctggg

SEQ ID NO: 262907 - DNA, 79 bp, Homo sapiens; identical to SEQ ID NO: 213955
  chr11:907472-907551
  hypo

SEQ ID NO: 262908 - DNA, 83 bp, Homo sapiens
  chr11:937330-937413
  hypo
accactgaccacagcgcaacaccattgtccgtctccagaaagaggccttcagtgccgtgagcgcatgtcagatctctgccatc

SEQ ID NO: 262909 - DNA, 37 bp, Homo sapiens
  chr11:938960-938997
  hypo
atgtagtttaaggccaggtgcggtggctcacgcctgt

SEQ ID NO: 262910 - DNA, 144 bp, Homo sapiens
  chr11:946374-946518
  hypo
actgagcttgccatcgtatgagctagctcagtgtgaaaaccctgtttctgaaagagagactgtcagttgagaattctgtgtccagtaaaactgtcctttgaaaatagaggaattggctgggtgtggtggctcatgcctgtaatc

SEQ ID NO: 262911 - DNA, 262 bp, Homo sapiens
  chr11:971727-971989
  hypo
tgatgtccggaacactcagacgcgtggcccacagtgaagtgagtgggaccggggggtccagttcctgttggcatctggctcgtggcacgctagtcaggtgtgccccacaggaacgctgcgccatgagagcatcgtagcagaggcatcctcggttccactggaacagacgtttgccgaatcctgagaggcgccgctcccacagcagtgccctgggtgcgtgggtggtgcctgggctgcttccgcatctgtgtgtcactgattg

SEQ ID NO: 262912 - DNA, 96 bp, Homo sapiens
  chr11:980553-980649
  hypo
gtgacaggctgcccggtgctttggggaggactgcttgtgccctgggatctgaatctgttctcactgagggccaggaggagcggggagggaggactc

SEQ ID NO: 262913 - DNA, 689 bp, Homo sapiens
  chr11:985302-985991
  hypo
ttccagctgggtacacaaatgtgaatgaactatattaaaaatgctctcatgatgtatgggtgcagccgggaggggcagggtgggctgcgggccactggagactggtgagcaccgttctgtcttgcccagaagaccctgcagtgcgaggccgcctgactgagtgcctggagaccatcctgaacaaagcccaagaaccgcccaagtcgaagaaggtccagcactccaacgcgaagaatgccgtgctcttcgaggccatcagcttaatcattcaccatgacaggtgtgtcggctgcctgtggagaggcttcgtctcgcgcacacacacacgttccttctcgttggcacgagactgggcggatcatgtctggtttgtccactccatgggcctccccttcgtcctgcctctgtgctccctgccggatgctttttttctttctgtgcagcccggcccctcctgctctgagctcaccgtggattgctttggtgactgtggtctcatcccacacgagggccttttcctccttcccctgagcatccccactcctgactggcttctcatgtagtggaacagagaggagacgggtggggtggggggtgtgcgcgcatgtcccgtggctttgctggatgtggagccgcacttggtgggtccagggtcgcagggcagtgctggaaacgtctgtgcccatcca

SEQ ID NO: 262914 - DNA, 101 bp, Homo sapiens
  chr11:986394-986495
  hypo
gcagccgcgctcccggccttctcggccttctccctgccctgggctggtgcctctggctgagaccccattgccggtcacagcttgaccggcctcccgcgggc

SEQ ID NO: 262915 - DNA, 173 bp, Homo sapiens
  chr11:986840-987013
  hypo
gcgagaccaacctgcgctacctggccctggagagcatgtgcacgctggccagctctgagttctcccatgaggctgtcaagacgcacatcgagacggtcatcaacgccctgaaggcgagtgccctgtccttgggttctgctcactccctgagcaggtgccgtgggtcttcctgt

SEQ ID NO: 262916 - DNA, 294 bp, Homo sapiens; identical to SEQ ID NO: 213957
  chr11:991642-991936
  hypo

SEQ ID NO: 262917 - DNA, 529 bp, Homo sapiens
  chr11:993204-993733
  hypo
gcaccgcgccaggacgtgcccgcctcgccttaactctggcacctggctgccaccccggctcattgtttgtgcttcgcaggctcttcaggctcccgcgtgccacgagaacctggtcaaagtgggcggctacatcctgggggagtttggaaacttgatagctggagacccgagatccaggtgagaggccctttgcgagtcggggctgtgtgcgctccggcgggcctctcggtggtcggtggcaagaggcgaggcaccagctggccctgccgtgaggcctcgcagagccgcttctgctccccatcggcgtctttttgttttccttcagttgatagaaaaagcagggattctagtagaaaatggagacgtggggttgatggctgacttagtgaaaggggcgtctttgcggtgggatctggagctggaagagggtcccgaccagcggcctctggtgcaggccagggggtctcgccgccgtcccccccccgcgggggcgtgctgcagcctgcgaggggacgacggtgtccctgtg

SEQ ID NO: 262918 - DNA, 301 bp, Homo sapiens; identical to SEQ ID NO: 213959
  chr11:996128-996429
  hypo

SEQ ID NO: 262919 - DNA, 263 bp, Homo sapiens; identical to SEQ ID NO: 213960
  chr11:998037-998300
  hypo

SEQ ID NO: 262920 - DNA, 56 bp, Homo sapiens; identical to SEQ ID NO: 213961
  chr11:1000519-1000575
  hypo

SEQ ID NO: 262921 - DNA, 369 bp, Homo sapiens
  chr11:1005978-1006347
  hypo
atgtgcacctgtgccgtggctgagccgctgcagtgagggctagtgtgcaacaccgatgctgtgctggacgcgtgcccagccgggtcccctgacaggaggcagccggggccggtgcgtgtgtttgcatgttgcagtcatggggcggggccggcagaggcctgtgtgattgtggcgtccctggaaaagatgcttggcaggcccctccagctgtagcccagcctgcagacggggcgttctgtgggtccttccccgtgcatatgcgtgtgatctcacccatcccgtgtgggtgcgcaggaggggccgagggaggagggtgctggagggcggaagttacctctgactggaggagatacccggcccgtgttacca

SEQ ID NO: 262922 - DNA, 169 bp, Homo sapiens; identical to SEQ ID NO: 213964
  chr11:1006970-1007139
  hypo

SEQ ID NO: 262923 - DNA, 500 bp, Homo sapiens
  chr11:1008031-1008531
  hypo
cccgtggacccgaccgtggaggggggcgcgcaggtgcagcaggtggtcaacatagagtgcgtgtccgacttcacggaggcgccagtcctcaacattcagttcaggtaagagccgcctgtgcgccccgggccaaggggtgtgtgggcgcctgagctgtgtgcctgggctccatgactgtgcctccgtgtccttcctgaggggacccggggcgtgcgggtgctcacggtgcatggatgcggcctgagctattgctgcccccggctctgcagagcgcaggaaacaaggggaggcggagccctgggctccgggacggcaggtggcagctcccacatggggccttgctaggatctttctgggcaccatggggcccacctcatggggtggcagacagccagggcccccgcgccacctgcccggcttggtaccagacgacagctgtggggtgcaggcagctggtttccttcggccccctggcctggggggcgcgttttttgctcagt

SEQ ID NO: 262924 - DNA, 59 bp, Homo sapiens
  chr11:1008941-1009000
  hypo
gccacacacgatccgtggggactgaaggctcggccccccgacccgctctggtgggtggc

SEQ ID NO: 262925 - DNA, 63 bp, Homo sapiens
  chr11:1011267-1011330
  hypo
atgctcctgcagtcgccgaggccttggatgtgcagccaggggaggagcgtcctgccggccccg

SEQ ID NO: 262926 - DNA, 452 bp, Homo sapiens
  chr11:1013508-1013960
  hypo
tgagtacgagccgccggccaggcgtgctgggatcggggcagggcagctccagctgctgctcataggagtggagggggcggcagcagctgcagcgggcatccacctgctgggtgatgatgttgaagctgccgagaagtcaagacagagcagggtcatgactgctgcaggggcataaggcccctccctccccagggcagctgctccgcagaggcctggacctccccgctgagctcccggctcacaggggccagggcggtgttgggcagatggagcgcagagtggctcacctgatggggcagcaggcgcctgggtggggtgcccgaacctctctggggtggggttgtgagcaccttggtggacgtggggcaggcctcccacctgtggactcacctggcagcggaaatgcaggcgccctcacagcgggttaccgtcacgttcgccatgcacccctt

SEQ ID NO: 262927 - DNA, 187 bp, Homo sapiens
  chr11:1015847-1016034
  hypo
aaccgtgtggtaggcgacaaggtgggaccagggtgcctggtggtaaggttggtgactggagaggtggggatacccgtcacccccgaggtgagtgacacaaagcctgatgtgggaactcgggtggtgagagaagtggaccgcgaggtggtggactgagaggagaaggcaggggcggtgtgggtgctgg

SEQ ID NO: 262928 - DNA, 491 bp, Homo sapiens
  chr11:1024949-1025440
  hypo
acgtccccgcacagcgggctctccttccacgagttcaccaactccagctcgctggatgccacgtacctgctgcgcgtctcgaagtcgtccttcatgttcccgttgaagttgccacacaagccgcagaggggatcctgcagacggtggcatcaggccgggcccaggggccgtgccatctgtctccacccctgcatcagggagggcctgggaggaggcagagggcgtgcggtacctgggaggcacgggcgatcctgatgaggatggtcatgtgcctgttccagatgagcgtcaggttgtacctcccggggatgctgatgtccacgacaaggctcagcgcacccggcgtcaccccgagctgcacgtggggctcctccccggtgaccgtgtagtttctgtccgccagcaccacggacaggccctgtggggtggggttggcataggactgcctgtctgtctcccccggcccctggcacagccgtgctggaccgagc

SEQ ID NO: 262929 - DNA, 482 bp, Homo sapiens
  chr11:1029015-1029497
  hypo
tggcagggatgggcgcaggaaaggccttacctgcctggagaggtagaccacagccaccagggaggtctcggagtgtgagacgccggacttgtcgtacacagccatgagggcaccgtcctcgggaagctgggggctctgcgagggggcggggctcagacacgggtggggtcaccgggagcgcccctccccacgggccacagggctcgtcctacctggaggaggatgtaggtgcaggtgccgtggaagcggtagggcctggcgtcaaatgtggtaacaaaggagccaccttccagggagcagtgtccggggcacggccgctccgtgcacacccagcggcccagggtgcaccggctgtgggtgggcgtgggggtagcggcatggtgggcagggccgctggagccagacagcacacccctgcctgccctaggccagtggaacccctgccggccggccagagccccctccggcgcctcactcaccag

SEQ ID NO: 262930 - DNA, 268 bp, Homo sapiens
  chr11:1035491-1035759
  hypo
ggcgtggtagggagcgggctcagagacccccatatctcctacagttgaagggtggtgcccggcgtggtggggagcgagctcagagacccccacatctcccacggttgaagggtggtgcccggcgtggtggggaaggggcttcaaaggagagaaggggtggggtgggcttgggtcgccctacagtgggacacccctgggggggtcccactgtgctctgagcccgaggcgcccaggttggcagcagctccgagggcgagctctgtcacgc

SEQ ID NO: 262931 - DNA, 336 bp, Homo sapiens
  chr11:1043703-1044039
  hypo
gaggcggatgcgtgcgcacacatgctcccaggaggtgtttgtaacaaccccaaactggaaatgacccagatgtccatcagagcgcagcctgttcacctgctcttccagcttcagcaattacaaacaaagcagttagaacacgtgtgtccgtgtctcagaggagcatgtgctgccacttctcccggcgtggactggctggatcacgtggttggcgtctgaatttttcagaaacggccaaactgttttccggcatggctgtgccattgtgcctcccacccgtgatgtgagttccagcccctcctcaccctcctgtatgcttgacgtcgtccgttttta

SEQ ID NO: 262932 - DNA, 69 bp, Homo sapiens
  chr11:1047107-1047176
  hypo
tattatgtcttcaagttcaccgctgtcctcttctgcattgtcgcatccgttgttaatcctgtccagtgt

SEQ ID NO: 262933 - DNA, 38 bp, Homo sapiens
  chr11:1056099-1056137
  hypo
gccattccccagggacgggtcctcgcctgcctcgccgg

SEQ ID NO: 262934 - DNA, 45 bp, Homo sapiens
  chr11:1060630-1060675
  hypo
tggggaccccaggccgctgacatggggacgcgctagagctttcga

SEQ ID NO: 262935 - DNA, 80 bp, Homo sapiens
  chr11:1061401-1061481
  hypo
taggtgtgagccagtgggcccggccacgtgctcttatgtagcttatcagagtgtatgacgctgcctgtcccattgctggg

SEQ ID NO: 262936 - DNA, 171 bp, Homo sapiens
  chr11:1075762-1075933
  hypo
cgcctccgactgccgaggctcctacaaggaatttgctgtgcacctgaagcggggtccgggccaggctgaggcccccgccggggtggagtccatcctgctgaccatcaaggatgacaccatctacctcacccgccacctggctgtgcttaacggggccgtgtgagtgtggtc

SEQ ID NO: 262937 - DNA, 357 bp, Homo sapiens
  chr11:1082517-1082874
  hypo
gcatctgtgagcgccgggccacactctgcctccctgcctcactgcccgtccaccttgctctgtcgcccagaggtgcaaatatgacacgtgtaactgtcagaacaatgaggactgcctgtgcgccgccctgtcctcctacgcgcgcgcctgcaccgccaagggcgtcatgctgtggggctggcgggagcatgtctgcagtgagtgccgtccccgtgggctgcatcctggggatggggtccgggctttgagctcctgggacggggctgggggccctgagcacgggtggtccagggagaggggtcggccccctgcagccacggaccaggctccagcttcgtcagccggtggtagcaggaa

SEQ ID NO: 262938 - DNA, 502 bp, Homo sapiens
  chr11:1088802-1089304
  hypo
cccacctggagcatcggttcccaccgaggagacctgcaagtcctggtacctaagcccacgtggcagggggcctgggggagctgcacatatgggcacatgagtacacacacacgtgtgagcacacagtgtacacagtacacagacacacaaccgttccacatgggtgcacatgcacacaaacgcacacagcataccacgtgcacacacacggtcacatgcatgcatggtgcacacatgcacacatgaatggatgccaacatgcaggcacacacagtcacacatgcacacagcgcacacatggacacatgcctagacgcagatacccaggcatacactcacggttacacactcacgcacatatgcatggatgcagacacgcaggcacacacggtcatatagtcatacaccacatgcacacatgcacagacagacacccaggcacacacagttacacagtcacacatgcacacatgcatggatgcagacacgcaggcgcacacac

SEQ ID NO: 262939 - DNA, 226 bp, Homo sapiens
  chr11:1094962-1095188
  hypo
caggaggcagcagccgtcgagggtggctgtgtccagggcacggcttcccttgggtggcctctgtggggacctccgctgtggggacctccacggggtccagcggctagccctgcctccggatagccctgcctctggacggtgtgatcgtgggtctgtctcccttcgcaggtgaggaggtgtacaacggcacatacggagacacctgttatttcgtcaactgctcact

SEQ ID NO: 262940 - DNA, 231 bp, Homo sapiens
  chr11:1095391-1095622
  hypo
ctgcgcagcatgtccgggcagctgaggccccaggcaccacttcctgctggtcgtctgagggccgaggcctccagcaacccttgggtgcagggtctgccgagccctccacattttcaccgtgccccgctgtgcctggcgaggtggctggctgcagtgaggtccgtggaagccacttcggcctccagcctcccggctcagcacccgcccctcctgagcgcagaccaccccatc

SEQ ID NO: 262941 - DNA, 379 bp, Homo sapiens; identical to SEQ ID NO: 213966
  chr11:1096252-1096631
  hypo

SEQ ID NO: 262942 - DNA, 267 bp, Homo sapiens; identical to SEQ ID NO: 213967
  chr11:1098559-1098826
  hypo

SEQ ID NO: 262943 - DNA, 1077 bp, Homo sapiens
  chr11:1103462-1104539
  hypo
gcagcagctacccccgcccacggcatcgtgggaaggtgctctcatccccaggaatgtccgggggtcccgggctcattctcctttccctctagggctccatcacattcatgcccaatggatgctgcaagacctgtgagtacagggcacagcctggggggtaggcagggtgggggcacaagggctggtgccctcagccccgcctggggtggctggaggctggacaacggcctctgggtgggcagtgagggctgggggctgaggccgagcctggggaggggacgcagcgagggagagcctcctcgaagatgtggaggccctgccctaagccgctgcccgctctccccaggcacccctcgcaatgagaccagggtgccctgctccaccgtccccgtcaccacggaggtttcgtacgccggctgcaccaagaccgtcctcatgaatcattgctccgggtcctgcgggacatttgtcatgtgagtcccaggctgggagtgtgcctggagggggtggtggagaccccagggaggcgagaggccagcgctggccccggaaggtcacccctcactccgccctccccccaggtactcggccaaggcccaggccctggaccacagctgctcctgctgcaaagaggagaaaaccagccagcgtgaggtggtcctgagctgccccaatggcggctcgctgacacacacctacacccacatcgagagctgccagtgccaggacaccgtctgcgggctccccaccggcacctcccgccgggcccggcgctcccctaggcatctggggagcgggtgagcggggtgggcacagcccccttcactgccctcgacagctttacctcccccggaccctctgagcctcctaagctcggcttcctctcttcagatatttattgtctgagtctttgttcagtccttgctttccaataataaactcagggggacatgctgtactgtgtggtttaggttggtgctgcaggggtgcggcttggccactgtgcatggcggaggccaccaggctctgcgtgcaggacacgggggcaccacacacacgccacgcggttggcaaatc

SEQ ID NO: 262944 - DNA, 345 bp, Homo sapiens; identical to SEQ ID NO: 213970
  chr11:1105012-1105357
  hypo

SEQ ID NO: 262945 - DNA, 251 bp, Homo sapiens
  chr11:1155528-1155779
  hypo
aacccggcgcacaacgggcgggtgtgcagcacctggggcagcttccactacaagaccttcgacggcgacgtcttccgcttccccggcctctgcaactacgtgttctccgagcactgcggtgccgcctacgaggattttaacatccagctacgccgcagccaggagtcagcggcccccacgctgagcagggtcctcatgaaggtggatggcgtggtcatccagctgaccaagggctccgtcctggtcaacgg

SEQ ID NO: 262946 - DNA, 284 bp, Homo sapiens
  chr11:1161252-1161536
  hypo
caggtgcgggctgacggacagcgagacctgcctgaagagcgtgacactgagcctggatggggtgcagacggtgagtggagcctggcagggcaaaccccgggaagagggaaggggcctgtctcttctgcaagtcacctctgcccaagcccttcatccctggcatgaacagcgagaggcggggaccctctggcaacactggctgtgtccattacttatgggtccacgtgactgtccctaaagggagaagctcagggccgggcctcccgggccgccatacctgaccc

SEQ ID NO: 262947 - DNA, 43 bp, Homo sapiens
  chr11:1161745-1161788
  hypo
tttcacagcctccgcggggctgaggtgccgcaagcctgccccg

SEQ ID NO: 262948 - DNA, 260 bp, Homo sapiens
  chr11:1162084-1162344
  hypo
tggcgcccaagctccgtgggcagacctgcggtaagagggctgccttctgggcttggagcccacccactctggccagggcgcatggtcctcaacctgcctaacccgcccccaggtctctgtgggaacttcaacagcatccaggccgatgacttccggaccctcagtggggtggtggaggccaccgctgcggccttcttcaacaccttcaagacccaggccgcctgccccaacatcaggaacagcttcgaggacccctgctc

SEQ ID NO: 262949 - DNA, 251 bp, Homo sapiens
  chr11:1213296-1213547
  hypo
tcccctggaccccacggcggggacaaggaaacctacaacaacatcatcaggagtggggaaaaaatctgccgccgacctgaggagatcaccaggctccagtgccgagccgagagccacccggaggtgaacattgaacacctgggtcaggtggtgcagtgcagccgtgaagagggcctggtgtgccggaaccaggaccagcagggacccttcaagatgtgcctcaactacgaggtgcgcgtgctctgctgcga

SEQ ID NO: 262950 - DNA, 1284 bp, Homo sapiens
  chr11:1214722-1216006
  hypo
tgggccacacccaactgctccgaggccacctgtgagggcaacaacgtcatctccctgcgcccgcgcacgtgcccgagggtggagaagcccacttgtgccaacggctacccggctgtgaaggtggctgaccaagatggctgctgccatcactaccagtgccagtgtgagtggagcgccgagcgggacccagggcagccggggcagccactccccacccaggtggaaatgggcggggcagaggagggggcttggctgaagcagaaaagaattgggtgggacagcaggaaggacttcccagcatcaaggcggggccgcatggggccgagcctccccgcttaggggtgctgagtgaatccctgtgagcctcggagcagcctggctggagaaggtggaggagtctgtccctgcctcgctccagccttgtcaagcgcccgctggatggagctctgtgcggacgctggccacgtgtgttctgatgacgtgagggtcttgtgcgccctgtgagatgagacggtggggggtcagggacagatgtgacctgttgggaggaaagccccagggccatggtgccaccacccgagccacccgtaaggctgcccctggggcctggcaggtgtgtgcagcggctggggtgacccccactacatcaccttcgacggcacctactacaccttcctggacaactgcacgtacgtgctggtgcagcagattgtgcccgtgtatggccacttccgcgtgctcgtcgacaactacttctgcggtgcggaggacgggctctcctgcccgaggtccatcatcctggagtaccaccaggaccgcgtggtgctgacccgcaagccagtccacggggtgatgacaaacgaggtgggggcgcgcccggtgtgccgcggagggggtgggggacgcggctttcccggcaagagcctgagcagcggctgaccgcccgcccgcctgccttctgacttcccgtcgaccacgccctgcgtccagatcatcttcaacaacaaggtggtcagccccggcttccggaaaaacggcatcgtggtctcgcgcatcggcgtcaagatgtacgcgaccatcccggagctgggagtccaggtcatgttctccggcctcatcttctccgtggaggtgcccttcagcaagtttgccaacaacaccgagggccagtgcggtgaggccacagggctcccgggcatcgtctggcattcgcgggggcgggggtgccgggcaggggcgaggccaccacgtgccgcgtgtgccggtgtctctgctttctggctg

SEQ ID NO: 262951 - DNA, 325 bp, Homo sapiens
  chr11:1221488-1221813
  hypo
ggtgggactgttggcgcctggggaactggcaaaggagagctggttgtcagacactggcagcatgcctccaggagcagggaacacgatgaggccgcccagagcttggcacggcgccggcttacggcaggaggctggggtggcgcagcagctggtgctgagcagcccctgcccacaggtactcgctcgagggcaacacggtggagcacaggtgccagtgctgccaggagctgcggacctcgctgaggaatgtgaccctgcactgcaccgacggctccagccgggccttcagctacaccgaggtggaagagtgcggctgcatgggccg

SEQ ID NO: 262952 - DNA, 238 bp, Homo sapiens
  chr11:1228795-1229033
  hypo
gctcaggaagccaccggtagctccactgagaccagcctcctctcccggggcgtctcagctgtccccggggccacgtccccccctcacttgggtctccacagcagcgccggccgagctggtttgcagactctgcctctggagaatcgtgggcggtggctcctgtttgcctacgtgtgtgctgcatggacagagctgcaaggccccgggcgaacatgcaggcagacggacgtggatacac

SEQ ID NO: 262953 - DNA, 355 bp, Homo sapiens
  chr11:1250878-1251233
  hypo
cccgtgcatgggccggccctgcctcacgccgcgccccacaggcacggtgctggatgacatcacgcactctggctgcctgcccctcgggcagtgcccctgcacccacggcggccgcacctacagcccgggcacctccttcaacaccacctgcagctcctggtacttatgagcccaccagcctccgcctggggtggggtgtggagctcctggtatttatgaacccgccagcctctgcctggggtgggggtgtggagctcctggtgtgcacccaccagcctccgcctgcggtgggggtgtggagggtggggcccacctcctcccgacatgccggttctgctcacggcctccctcccca

SEQ ID NO: 262954 - DNA, 235 bp, Homo sapiens
  chr11:1254260-1254495
  hypo
gccccaagtcccagcgctacgcctacgtggtggatgcctgccagcccacttgccgcggcctgagtgaggccgacgtcacctgcagcgtttccttcgtgcctgtggacggctgcacctgccccgcgggcaccttcctcaatgacgcgggcgcctgtgtgcccgcccaggagtgcccctgctacgctcacggcaccgtgctggctcctggagaggtggtgcacgacgagggcgccgt

SEQ ID NO: 262955 - DNA, 99 bp, Homo sapiens
  chr11:1255097-1255196
  hypo
tgccctgccctgccccgccccgcatcaccccgcctggcctggccccaacacgccccaccctgccccaccccacctgaaccctgccgggccaggtcagtc

SEQ ID NO: 262956 - DNA, 224 bp, Homo sapiens
  chr11:1256364-1256588
  hypo
cctgcgtggcctacggggatggccacttcatcacctttgatggcgatcgctacagctttgaaggcagctgcgagtacatcttggcccaggtacgccgccccctcgcccactcctgcaggccgggcacactccagcccgcggccagcagcttgtctctttctggcccaggactactgtggggacaacaccacccacgggaccttccgcatcgtcaccgagaacat

SEQ ID NO: 262957 - DNA, 358 bp, Homo sapiens
  chr11:1261378-1261736
  hypo
ctgggtgactctgccggctccatccccagcctgcacctgcacctatgaggacaggacctacagctaccaggacgtcatctacaacaccaccgatgggcttggcgcctgcttgatcgccatctgcggaagcaacggcaccatcatcaggaaggctgtggcatgtcctggaactccagccacaacgccattcaccttcaccaccgcctgggtcccccactccacgacaagtaagccctgcctggctctcctgaggcccagtaccgtctgggtgacaaggaggaccccctgggctcttagtgcaggtgccctgtatggtagcgacagtcccaatccactgaccttccgggctctgtctagg

SEQ ID NO: 262958 - DNA, 1814 bp, Homo sapiens
  chr11:1262078-1263892
  hypo
aggcccggccctcccggtctccaccgtgtgtgtccgcgaggtctgccgctggtccagctggtacaatgggcaccgcccagagcccggcctgggaggcggagactttgagacgtttgaaaacctgaggcagagagggtaccaggtatgccctgtgctggctgacatcgagtgccgggcggcgcagcttcccgacatgccgctggaggagctgggccagcaggtggactgtgaccgcatgcgggggctgatgtgcgccaacagccaacagagtcccccgctctgtcacgactacgagctgcgggttctctgctgcgaatacgtgccctgtggcccctccccggccccaggcaccagccctcagccctccctcagtgccagcacggagcctgctgtgcctaccccaacccagaccacagcaaccgaaaagaccaccctatgggtgaccccgagcatccggtcgacggcggccctcacctcgcagactgggtccagctcaggccccgtgacggtcaccccctcggccccaggtaccaccacctgccagccccggtgtcagtggacagagtggtttgatgaggactaccccaagtctgaacaacttggaggggacgttgagtcctacgataagatcagggccgctggagggcacttatgccagcagcctaaggacatagagtgccaggccgagagcttccccaactggaccctggcacaggtggggcagaaggtgcactgtgacgtccacttcggcctggtgtgcaggaactgggagcaggagggcgtcttcaagatgtgctacaactacaggatccgggtcctctgctgcagtgacgaccactgcaggggacgtgccacaaccccgccaccgaccacagagctggagacggccaccaccaccaccacccaggccctgttctcaacgccgcagcctacgagtagcccggggctgaccagggctcccccggccagcaccacagcagtccccaccctctcagaaggactgacatcccccagatacacaagcacccttggtacagccaccacgggaggccccacgacgcctgcaggctccacagaacccactgtcccaggggtggccacatccacccttccaacacgctcagcccttccagggacgacggggagcttgggcacatggcgcccctcacagccacccacgctggccccaacaacaatggcaacctccagagctcgcccgacaggcacagccagcaccgcttccaaagagccgctgaccacgagcctggcgccaacactcacgagcgagctgtccacctctcaggccgagaccagcacgcccaggacagagacgacaatgagccccttgactaacaccaccaccagccagggcacgacccgctgtcaaccgaagtgtgagtggacagagtggtttgacgtggacttcccaacctcaggggttgcaggcggggacatggaaacttttgaaaacatcagggctgctgggggcaagatgtgctgggcaccaaagagcatagagtgccgggcggagaactaccccgaggtaagcatcgaccaggtcgggcaggtgctgacctgcagcctggagacggggctgacctgcaagaacgaagaccagacaggcaggttcaacatgtgcttcaactacaacgtgcgtgtgctttgctgtgacgactacagccactgccccagtaccccagccaccagctccacggccacgccctcctcaactccggggacgacctggatcctcacaaagccgaccacaacagccactacgactgcgtccactggatccacggccaccccgacct

SEQ ID NO: 262959 - DNA, 99 bp, Homo sapiens
  chr11:1274056-1274155
  hypo
ctggagaactgcacggtggccaggtgcgtgggtgacaaccgtgtcgtcctgctggacccaaagcctgtggccaacgtcacctgcgtgaacaagcacctg

SEQ ID NO: 262960 - DNA, 1542 bp, Homo sapiens
  chr11:1275272-1276814
  hypo
cgagggcaccaccacggagcctgccagcccgtccatctctgtcccgcaggcatctgcagcatgtggggcggctcccactattccacctttgacggcacctcttacaccttccggggcaactgcacctatgtcctcatgagagagatccatgcacgctttgggaatctcagcctctacctggacaaccactactgcacggcctctgccactgccgctgccgcccgctgcccccgcgccctcagcatccactacaagtccatggatatcgtcctcactgtcaccatggtgcatgggaaggaggagggcctggtgagtccaggctgcgggtggcacagtgttggcccagtcccaaccgcacctgggcaggccgactgcaggccggggtgacccaggtgccgcagcgatggcccagtgcccaagacagctcccagggggcagggaaggcctgtggagccgcctaaggccgagcgcaccctgtggcctaaatgcagccagctggagactccaggcccccagggaagatctgggctttggggtgggggatacacaggggggtctctgcacatggaggcagagccccaaagagaagccctgctccccgagcccacctggcactgcctcccagctcagggttcccctggattcccccagatcctgtttgaccaaattccggtgagcagcggtttcagcaagaacggcgtgcttgtgtctgtgctggggaccaccaccatgcgtgtggacattcctgccctgggcgtgagcgtcaccttcaatggccaagtcttccaggcccggctgccctacagcctcttccacaacaacaccgagggccagtgcggtgagtgggcggcgggtcctgccccggccagggctgctgctgggcctgacaacccagtgagcataggggaagcctggggaggggaatgagtgggggaggggggtgggggctgtgaaaggctccccagattccagccccgcggtgacgcccccactcccaggcacctgcaccaacaaccagagggacgactgtctccagcgggacggaaccactgccgccagttgcaaggacatggccaagacgtggctggtccccgacagcagaaaggatggctgctgggccccgactggcacaccccccactgccagccccgcagccccggtgtctagcacacccacccccaccccatgcccaccacagccgctctgtgatctgatgctgagccagtgagtcctcccctcgggggttgcaggccctggggcgcccccgcccgcccgcatgcacgcacgcacgcagctccctggggctgggggccctccgtcctgatcgctttgccccacagggtctttgctgagtgccacaaccttgtgcccccgggcccattcttcaacgcctgcatcagcgaccactgcaggggccgccttgaggtgccctgccagagcctggaggcttacgcagagctctgccgcgcccggggagtgtgcagtgactggcgaggtgcaaccggtggcctgtgcggtgagtgggggcggccccgggccccc

SEQ ID NO: 262961 - DNA, 31 bp, Homo sapiens
  chr11:1281709-1281740
  hypo
agcagtgggatgcccgcgtccagactccacc

SEQ ID NO: 262962 - DNA, 233 bp, Homo sapiens
  chr11:1298242-1298475
  hypo
ggcaaaacggcatcgaggcagaggctctatggctcctcccccatctgcagcagggagttgatggcggcatccttgttccctcgctgggcttccagcacggagcggatcacctcctggtccatgttggggaacatgtcctggatggctttcaggtcctcctcgctacagcggggctgggcgttcacggcggccgggggcagggccacgggcaccatgccggggctacagacagc

SEQ ID NO: 262963 - DNA, 96 bp, Homo sapiens; identical to SEQ ID NO: 213978
  chr11:1301051-1301147
  hypo

SEQ ID NO: 262964 - DNA, 138 bp, Homo sapiens
  chr11:1306745-1306883
  hypo
acacgacaacagacgcaacagcgcagtagagagcacgcatcacccaacaggagcgtgaggttcagacacaacggcgcagcgcagggcacgcgtcacccaatgggcgtgaggttcggacacgacggcacagtgcagagc

SEQ ID NO: 262965 - DNA, 139 bp, Homo sapiens; identical to SEQ ID NO: 213979
  chr11:1307128-1307267
  hypo

SEQ ID NO: 262966 - DNA, 109 bp, Homo sapiens; identical to SEQ ID NO: 213980
  chr11:1312471-1312580
  hypo

SEQ ID NO: 262967 - DNA, 55 bp, Homo sapiens
  chr11:1312883-1312938
  hypo
gccgccccgtcctcgctgaccccccgctgagggcacggccgccccgtcctcgctg

SEQ ID NO: 262968 - DNA, 278 bp, Homo sapiens
  chr11:1360071-1360349
  hypo
gggggcccgggccacggtggatggttctggagctgcccggcctccagcaggaaaccttcctcttctgcacttgagtgtctgcgggaactcccacgccacttcccgaaaggatgaaccttctcaatgtgctgcgcctgcacctggcgagcagctttggcatttctcaggcgctcatctgtcagggcatccactgggatccggcactgctccgggcgtgggggatgcaactgatgggatcatacgcgtgcatctgtgagtgtacacgtgcgtgtgtgagg

SEQ ID NO: 262969 - DNA, 371 bp, Homo sapiens
  chr11:1374621-1374992
  hypo
ctctttccagcccacggagcagagtgccacctccctgcctacctcagccccagttccctcaaagggcaaacgttccacctgccgacccattttcctgctttgggccggccagggccaggcctggtcttcccagccctactgcggtgcccgacccacaggacagcctggggggcatcaagcccaatgcctctgagagcctgtgagtgagtggcctccatggtgctggggccgctccagccgccttgcttggcccccgggcctcccttcaggatctagatcacacccagacacccgtccctgcctctgccccagcacctccgcctggaatgtgaatccgcagctacctgtggagccggcgccttctctccgtc

SEQ ID NO: 262970 - DNA, 178 bp, Homo sapiens
  chr11:1375494-1375672
  hypo
agcctgcacgtgcccggccctgctccacacgagcttccgggtgtgccggtgagccggatgcctgctgggttcccacagcagcctctctgttcttctccctgattgtagagacgtgacccttgcctgctggctccagctcagggaggtgtgctgtgtgtccttcgcgacgtgcgctagg

SEQ ID NO: 262971 - DNA, 58 bp, Homo sapiens
  chr11:1390811-1390869
  hypo
agagccgctgtagcacgaggttttgcggctcaggccccagctgcgtaccagggtctgg

SEQ ID NO: 262972 - DNA, 150 bp, Homo sapiens
  chr11:1397882-1398032
  hypo
gcagtgaatgaaaacgtgcagggtaacaagcgtcagagctcggcccatgagggcacaccagggtggctggttcacatccacagttgatggaggaaggaacgggcgtgagcccatggccgtaaaatcagtgcaactcggcccggcgcggtg

SEQ ID NO: 262973 - DNA, 636 bp, Homo sapiens
  chr11:1417382-1418018
  hypo
tgtgtggacccctgcgtcccccgctcctcgtctctcttcccttccacccacgtcccccactcctggtccctcttcccttccacccacgtcccccactcctggtccctcttcccttccacccacgtcccccactcctggtccctcttcccttacagccgcctcgaggactgcatggggccagcaaggcctgtaccccaggacaccagagttgctcggaccggctcccggacctgggcctaagcgagctctcctggttctcactcccgagtctgcggagtgaccccgggccctctcatcatggcctcaccctgctccggcgctctgggtgctttgaagcagacaggagaccccctccaggctggcccgagggcaggtcagaccccagtccctgggaacagcctgagtgggctgtgcctccccgtcggccactggcgctcaggaggagccgtcgggaaggcccctttgccatcacctggtggcgcttgcttgagggcttctgtgccttccagtcctcactgggcacagactagcttctttgggcacctggggagggtcaggctgtctctgaagtcagcagccctgctgggcagccggcaccaggagaggaggcgggctggtccccgtgactgccggccg

SEQ ID NO: 262974 - DNA, 1033 bp, Homo sapiens
  chr11:1430821-1431854
  hypo
tgtagagaaggcgccgtccagagacagagccactgctgaggtgggtggggggtgtatgaagggcacaaggacgctttgggggtgtcaggtatgatggccctcaggtcatggtttcacacgcgtgtgctttaaatgcgtgctggctgtcacgtgtcagtcgtgcctccacagagcttcaggaaccaccgagatggggagcctgccggagacacaggttttctgagcgcaccagcggctccaaaagcagagggaagagccctgcgtgcaggtggggcgctcatggcgtcggcctcgcagagcggtgacggacacagagtccgtgtttgggggggtttgggacgtcggcctcgcagagcggtgacggtcgcagagtctgtgttttggggggtttgtgacgagtccgtgtttgggggggtttgtgacgtcggcctcgcagagcggtgacggtcgcagagtctgtgttttggggggtttgtgacgagtctgtgtttgggggggtttgtgacgtcggcctcgcagagcggtgacggtcgcagagtctgtgttttggggggtttgtgacgagttcgtgtttgggggggtttgtgacgtcggcctcgcagagtggtgacggacacagagtccgtgtttgggggggtttgtgacgtcggcctcgcagagcggtgacagttgcagagtccgtgtttgggggggtttgtgacgtcggcctcgcagagcggtgacagttgcagagtccgtgtttgggggggtttgtgacgtcggcctcgcagagcggtgacggtcgcagagtccgtgtttgggggggtttgtgacgtcggcctcgcagagcggtgacagttgcagagtccgtgtttgggggcgccgtgaaagcacccagcgtagtcatgctgctgtgtgcgatgggtgctgggcccgcagacttcggtgcttcaaaggcctcactgctgagcacgagacgccgcttttgatgtcgtcaggctctctggtccccgggagtggactcgggggctccgagtgcagggctcacactgtg

SEQ ID NO: 262975 - DNA, 87 bp, Homo sapiens
  chr11:1433176-1433263
  hypo
ttaacagcagtcctgcggtgggtggagtctcagctgcgccgccccgtcctgcggtgggtggagtctcagctgcgccgccccgtcctg

SEQ ID NO: 262976 - DNA, 239 bp, Homo sapiens
  chr11:1433608-1433847
  hypo
cgccgccccgtcctgcggtgggtggagtctgagctgcgctgccccgtcctgcggtgggtggagtctcagctgcgccgccccgtcctgtggtgggtggagtctcagctgtgctgccccgtcctgtgattggtgaactctgagctgtgctgctctgtcctctctggtctgtgaagtctgagctgtttggtaggcggggccgagggagcaggcgccctcagaaaatgcgagacagggtcggg

SEQ ID NO: 262977 - DNA, 190 bp, Homo sapiens
  chr11:1434052-1434242
  hypo
acacagcaaccccgcgtcccaggcaaccctgcgtcccaggcccgtcgggtctctggcccagggcacagtagtggcagtcactcgcatgggacgggaccgcccatggcctcccaccgtgcacgccctttctgactgctgtaggcctgaggggtggatgggcggggctcactgcaggcgctgcccccggcac

SEQ ID NO: 262978 - DNA, 326 bp, Homo sapiens
  chr11:1446145-1446471
  hypo
ctggcgggaggggtgttctccccgcctccatgggcaaagaatctggggcccttgtcagagaccgcggggtcagtgggattggcgcccaggccctgctgtgacgccacgtgtttcccactcagcgaggctgttcctgccaggcgtggggactcggaccctggtcctgagtgctgccccgaggcccgtgatgggaagcctgacgtctgcatcgtcctgcgctgcgtggccggtcggtcccggcgctctcagcacttggagtctcagctccccgggtcatcagtccaagccactcagcaggtggcttcggcttaaggcctctcaggtgg

SEQ ID NO: 262979 - DNA, 558 bp, Homo sapiens
  chr11:1446896-1447454
  hypo
cccacacccccgctcgtctcccactctgtgtcctctccactggccttggggtagatgagctgcccccgtcctttctttgggaacccacccccttctgggcgagggtgggtagcaggcacccgacagggtccccaggtggcactccaggccgtggcactagatgtgcactgtggagatgggaagaggtgtggggcaggggagggcgtggggggaacgctgagtttcctgggtacacctgccccggggccagtgcctcaggcctctggagagcggatttgcggcctcatggctggggagggctgaggttctgctgtccggtgtggtgccacggtgagcacacctcacctgtccagccttccccctaaacccagtgctctggacggtgggctggcccctggctcctagcctgtgcgcgcccattcaggaaagcaaacaccagcacacaccggtccctgtggggccttgggtgctctgggcacccagctgcatgggacgggcagggccacgtggccatcagggcctggatgggggcctggcacacagcgggcactggggatg

SEQ ID NO: 262980 - DNA, 86 bp, Homo sapiens
  chr11:1450676-1450762
  hypo
cacaggtgcatgtctgtgtgcgtggccacacgtgctgtccctgcccagggccctgctgctctgtcgccagcatcctgctgtgccca

SEQ ID NO: 262981 - DNA, 50 bp, Homo sapiens
  chr11:1455552-1455602
  hypo
tcccctgtgataacctgggccggctctgcgtgtctgggggcacctaggag

SEQ ID NO: 262982 - DNA, 651 bp, Homo sapiens
  chr11:1464364-1465015
  hypo
tccgggtgagtcagcgccgccgcgtgcagctctgtggggcccagggtggcggggacctgaccctggtgggaccccagcctgccgcacccccaggtgctgctaggctgcctgtccccgggccgactccctctgagcccaggccctccaaggcccccgccctgccctgcgccccccaacagcccgggcactgctgtccacagggggagaagtatgacggccggaaggcggacgtgtggagctgcggcgtcatcctgttcgccttgctggtggtgagaccctggccccctcaaccctgccctggcctctccccaaacctgcccccccacgctgacccccacacccggccgcccgcagggggctctgcccttcgacgatgacaacttgcgacagctgctggagaaggtgaagcggggcgtgttccacatgccgcactttatcccgcccgactgccagagtctgctacggggcatgatcgaggtggacgccgcacgccgcctcacggtgcgtgccctcggagcggggcggccccagagcgtggcgggggggcgcgggggcgggcgtgtgcctgtgtgtgcacaggtgtgtgcccagacgtgtgggcacccaggtgtgtgggtcggtgcccaggtgtgtggacgtgtgcacaggtgt

SEQ ID NO: 262983 - DNA, 896 bp, Homo sapiens
  chr11:1466357-1467253
  hypo
gcctgcgctgggtgcggggtgcgggcaggacgcaggaggcctccccgggctgggcacagggagagtggcaggatgaagggccccaggtgagggcgggcgtcccaccctcgcagccgcccaggcccggccggagctgatgagcgggtggcccgtcctgtgtccacagagggggcaagaatgagcccgaaccagagcagcccattcctcgcaaggtgcagatccgctcgctgcccagcctggaggacatcgaccccgacgtgctggacagcatgcactcactgggctgcttccgagaccgcaacaagctgctgcaggacctgctgtccgaggagtgcgtctggggctgctcccgggtggggcacggggcctgaggtgggagcgctgccccggaggagccggcggccccgtgtgccagcgcgtctcgcgcctctcgcccgctgtagggagaaccaggagaagatgatttacttcctcctcctggaccggaaagaaaggtacccgagccaggaggatgaggacctgcccccccggaacgagataggtatgggtccaggggtggcctccagcccggcctgcactgccccaccggggtccgggggctgtctggcctgaccttcgtctgtactcagaccctccccggaagcgtgtggactccccgatgctgaaccggcacggcaagcggcggccagaacgcaaatccatggaggtgctcagcgtgacggacggcggctccccggtgcctgcgcggcgggccattgagatggcccagcacggccagaggtgtgtgtgccccgaggctgctgggcctccctccctgggccctggctgcgcggcactgccgcctggctcatcgctacccattggcctggggtctcggctgaggccattgggtgggg

SEQ ID NO: 262984 - DNA, 637 bp, Homo sapiens
  chr11:1468915-1469552
  hypo
cggcctcagagccacgtggagttcttacccggtgtggcccgggccctgggggccgacctgtgcccgcgtgtggccgtcagtaactgtgttttctcgctctgttctgctgtagtaaagcaatgttcagtaaaagcctggatatcgctgaggcccatccccaattcagcaaagaagacaggtatacaccccgaccacccgtccccgcacctcccagccccagacacgctgtcctgcctcaggccgggcaggcacatgggcgggtctggtggcgggctgggctgcagggctcctgctgcggtgaagccagccagcaagccaggcaagggcccgcgggccaggcagaggccgaggaggggtggggctgctgaggcgtggcccacgcctgcctgtgagggaccacgcaccatggcttacagggcctggggctagagcccggcgtggctgcaggccgagccgctcctcctgccagcccctgtgctgtgtccggtgggcctcggtggccctgctgcccctggggccggccagagttgaagccgagcagccgtcctgtgcccacctgcaggagctgaggagggcaggaggcgccgccgtcaagaggggcctctacctggggccagttttgcgagcctgggcgggt

SEQ ID NO: 262985 - DNA, 196 bp, Homo sapiens
  chr11:1471369-1471565
  hypo
gtgccgtgtgcatgcgggggactggggtgcatgtgccgcgcggctgcccccaccccgctcgctccctgcgcctccccgtagcctattaggaagcttgtcctgcccccaccgccccccgagccgcccttcgtggcccgccccctggccacctccacggagcccgaagcttgtgggagcgcctcgaggcctggacacg

SEQ ID NO: 262986 - DNA, 227 bp, Homo sapiens
  chr11:1471902-1472129
  hypo
cacgcccaaccccacgcccccgtccagccccagcgtcggaggggtgccctggagggcgcggctcaactccatcaagaacagctttctgggctcaccccgcttccaccgccggaaactgcaaggtgagtgtctgcccggaggcgccagagtggggctgggagagagcagaggctgccttggggagggccccgcccggcagtgccagaccagtccgaggggcctgtagc

SEQ ID NO: 262987 - DNA, 777 bp, Homo sapiens
  chr11:1477650-1478427
  hypo
ccgtgttccagaagccggtcaagttccaggttgatatcacctacacggagggtggggaggcgcagaaggagaacggcatctactccgtcaccttcaccctgctctcaggtgagctggcgcccccagggcggctccgggcccaggcccgtccagggcataaccccctgtctcccctaggccccagccgtcgcttcaagagggtggtggagaccatccaggcccagctgctgagcacacacgacccgcctgcggcccagcacttgtcaggtgaggcgggctcagctccggccaacctgcggcctgcgagtggggcgtggccagctggtgctgcgcggacgggaggcgtgaggacccgggcgcagcctcctggcccctcttgacggacgcccccacctccctgccccgagctgtggctgcacccctcagggagcagagcccctccctggcctggcgggaccacccgcctcgcctctgcacgccagggacatagggcgcagccgcaccacactgaaaggcgcctcttgtccaccgtagaaccccccccaccagcgccaggactaagctggggtgctgggcttaagggccagaaggtggccaccagctacgagagtagcctctgacgctggcaggtaaggcgcccggcctgtgctggggcggggaggggctgcgggcaggtcctcggcggagccaggctggccctgagcagggccctccatgcccacccacaggtctcggccctggacaggccaagcatgccccgggcggcccatctgctag

SEQ ID NO: 262988 - DNA, 59 bp, Homo sapiens
  chr11:1482007-1482066
  hypo
ccgcccgccctgccccgagtggacccgcggccgcgccgcccgtccgtccagactgttct

SEQ ID NO: 262989 - DNA, 857 bp, Homo sapiens
  chr11:1483177-1484034
  hypo
gtagcgggcggcagcgccagcgcccctctgtcaggctggggcaatcttggttttgtgtccaaaggtgaaggggtaggaggagggccctcagctggccctccccacacacaggacggcaggggcactgtgaggcttttcttattaaaatgaaaaaattgaaaaaaaaggacaaagagtcggtggcgctcctctgcagggcgttctgtgcagagcgaggcccagggcgcagccctcagagggctgcaggcccaccctgcccagtgcccgccgccgtgcttcaccccagctccagcttctgtgttcccttccgcccatgtgcccagccctcccaggcgggcacagcccgggtgcggcggccgtgggggacggcgggtctgatgcatgcctctgccatggagtcgtctgtctgcttcggtgcctgcccctgcctcccacccacctcgtgtatagattttaacgcttctgttaacattagacctctgccacaggctgggatttctatacataagaacaaaagcaaacacctaggacagcaaacgccaggcggtacaggcgggaaggggctctccacggagatcgaggacacgaagcaaactgcctcttgcttgccttccccttttgtgcttcggacacacgcggactccagcaggcgccacggaaatgggcaagcccctgcagtgtacccctgtcataactgtgagcagctgcagctccggaacaataaatcccttccgcaaagacagcgacgcaggtcttcatctgggcagggcgggcgcgcagggctctgtgacagcccgggacagcttcttgttccccacttgcagcccctgggctgcgccagtgtgaatgcagctacc

SEQ ID NO: 262990 - DNA, 161 bp, Homo sapiens; identical to SEQ ID NO: 213991
  chr11:1494354-1494515
  hypo

SEQ ID NO: 262991 - DNA, 283 bp, Homo sapiens; identical to SEQ ID NO: 213992
  chr11:1497177-1497460
  hypo

SEQ ID NO: 262992 - DNA, 162 bp, Homo sapiens
  chr11:1508342-1508504
  hypo
acaggcagcaactctgctgacgagctccaggtcgatggcactcccctctcccttgtccggcccagcctagcccagtcagtgctcgggccagggacggacagacggacagacagatgggccgccctgccctgcagtgtgtacgcagctggaggcactcaaagt

SEQ ID NO: 262993 - DNA, 482 bp, Homo sapiens
  chr11:1509374-1509856
  hypo
gtgctcacggctgccggtctgccctcgggggctccaccaacagcagggacacaggtgctggcaggtcacccaagtggcaaagggagccacaggaagagcgggctccaggcctggggaggcccccgtgagtagcagggctgggaccaggaggtgcatgacgcagacctgcccactctcgggaggcatggcctggacagagaaggccgtgcagaggcccatgacagggagaatgagctgctgggggttggagggcagagcataaaggaagctggggatggtggaggcttcgggcacaagaagccaggcaaccaggcaaggcaatggtgagggtggcacgggggcgggggaacagtcaggacaaggtgccgggtagggtggggggagcacaccaagcgtgcctagtctggtccaggcaaggcagtggtgagggtggcacgggggcgggggaacagtcaagacaaggtgcccggtagggtggggga

SEQ ID NO: 262994 - DNA, 239 bp, Homo sapiens
  chr11:1521173-1521412
  hypo
cacacgaatgttcacggcagctgcaagtgtgctggtcagaaaggagagaacctgcacacccaccatggggaggtgacacagtgcggcctcagcatccacggaccgcgcctcagccacagacaggagtggcctgggagacacgcggaacacggaagactcctacagcaagtgtgctgagtgacggaggccaggtgaacatcaggttcacactgtgattccgttcacgggaaattccagga

SEQ ID NO: 262995 - DNA, 870 bp, Homo sapiens
  chr11:1535822-1536692
  hypo
tcttcagcatcctagtgggacgggagcacccagggaacacaagtgcaccatgacgcggagcccttcatcaccgcaggccacggcgcttgtccttcccagaggcccccaaccacagctgctgagcgacacccacaccgcttctctcttcacacagcggactgatgaggagtcccgccaagcaggagctctgagccacagcacagagtgtgctggcccaagtccacgcctgcatgcaagctcagccatgcgtctaatggcaataaccgtggaatgagctcgtgaggttcggagagtcccaccccgacggggagagccacagggagccccaatctcggcagtgaccggctccaggtccccacgtaccgtgagagtggggacagcggtggacagcagcccttgagcagggcacaaccttcagagagacctcgacaagtgaacacttaaaccaaggtcgaccctgggggaaacgcagacctcctcccagtgcccccttcagaaaaggtactcaaacactggctcccatcatgagctgggcacggaaccaggcatgggtactacctgcctccagggcttggagctcgggaggggaaccaatcccgggccctcgacctgggaggtgccagaaggccctcacacaagactccagcactagggtggggaggttaaagtaaacaggacagaggggttcaactaagacaatacctttgctcacggtcagaggcgaaggcactgatgccagccggcgccgactcaggtgagcacacaagctctcccgccgcggctgcaccacatgcctgataaagggacagccctggatgtctagttcctcaggcacgtgtgcacacatgtgtgctgcgtagcactggcacc

SEQ ID NO: 262996 - DNA, 208 bp, Homo sapiens; identical to SEQ ID NO: 213994
  chr11:1552162-1552370
  hypo

SEQ ID NO: 262997 - DNA, 197 bp, Homo sapiens
  chr11:1553266-1553463
  hypo
ctcagagcaggctgcgcgcatgcaggcctccaacaggaacctgactcaacccagattctcaggcccacactcttgtatttcatgacaccactgctatgacaaatggtcctgtcacatgtggcacaaagaacagggcacgcagcagaagggcagatgtgccgggaggaggaacccagagcggccgcccatgtagaggg

SEQ ID NO: 262998 - DNA, 190 bp, Homo sapiens
  chr11:1555916-1556106
  hypo
taaaagtcacagtcacaaaccgcggatcagtggtggaaggagagtggcagatgcacatctccccaggacggaattgcacttggtgatgaagaggacggagctgcagacacacgcaacgccatggatggacgttcgcaacactgcgccgcataggacaggcacacagcccgtgtactgggattccatttgc

SEQ ID NO: 262999 - DNA, 120 bp, Homo sapiens
  chr11:1560263-1560383
  hypo
cacacgtgtattatttagcctctagagtatctaggtcctcggctccggggcctgtgaacgtggcatcattcatacgatgtgatatcctaagagacaatcaaaatctgtgtggacgaggcc

SEQ ID NO: 263000 - DNA, 39 bp, Homo sapiens; identical to SEQ ID NO: 213995
  chr11:1584969-1585008
  hypo

SEQ ID NO: 263001 - DNA, 38 bp, Homo sapiens; identical to SEQ ID NO: 213996
  chr11:1586817-1586855
  hypo

SEQ ID NO: 263002 - DNA, 613 bp, Homo sapiens
  chr11:1602581-1603194
  hypo
gtctatatctcgggaccgtgggggtccatatctaaggactgtgggggtccatatcttgggaccatggggggtctatatgtcaggaccgtgggggtctatatctaaggaccgtggggttctgtatctcaggaccgtgggggtctgtatctagggaccgtggggatctgtatctagggaccgtgcggatctgtatctagggactgtgggagtctatatctaaggaccgtggggtctatatctagggaccgtgggggtccatatctcaggaccgtggggatctgtatctcaggaccgtgggggtctgtatctcgggaccgtgggagtctatatctagggactgtgggagtctatatctaaggaccgtggcgtccatatctagggaccatgggggtccatatgtcgggaccgtggggggtctatatctcgggaccgtgggggtccatatctaaggaccatatgtcgggaccgtggggttctgtatctcaggaccgtgggggtctgtatctagggaccgtagggatctgtgtctagggaccgtgggggtctatatctagggactgtgggagtctatatctaaggactgtggcggtctgtatctcgggaccgtgggggt

SEQ ID NO: 263003 - DNA, 212 bp, Homo sapiens; identical to SEQ ID NO: 213999
  chr11:1749039-1749251
  hypo

SEQ ID NO: 263004 - DNA, 224 bp, Homo sapiens
  chr11:1759618-1759842
  hypo
gttgaaaaagcatacgtcgaaccgtcataagatggggaccgtctgtatatgctgggtggggtaacaggtgcatagacgaacatatgaatatatgtccaagtggacagatggatatgcaagtgtatgccacatgggtggggcatctgggtaagcgggtaagtgaacggctgctggatgggaggtgatgtgtggatatgtaagagcatgttcggtgggcaggacag

SEQ ID NO: 263005 - DNA, 223 bp, Homo sapiens; identical to SEQ ID NO: 214000
  chr11:1795687-1795910
  hypo

SEQ ID NO: 263006 - DNA, 191 bp, Homo sapiens; identical to SEQ ID NO: 214001
  chr11:1800816-1801007
  hypo

SEQ ID NO: 263007 - DNA, 94 bp, Homo sapiens
  chr11:1801339-1801433
  hypo
tccgggtaaggatgcggaggcagggaggaagccagcctcctgcccggcgggcacaaatgccccaggccaggggtacaggcgggcaggtgccgga

SEQ ID NO: 263008 - DNA, 93 bp, Homo sapiens
  chr11:1805366-1805459
  hypo
cctgccacctttgccgcatcaccatcggccgcccaggatcagcagggtcctcctggtccccagctccgatgggcccaccgcagagttatacat

SEQ ID NO: 263009 - DNA, 222 bp, Homo sapiens
  chr11:1806143-1806365
  hypo
caccatggtgcagtcggcagaggtactcgtttaaaggcttgtctgatcccattgctctgccccgggactctctgtgatttccagcgcacttggctacgggaacagagttctggggcccaaggtcccttgtggtcttggtcccctgctgaccttggtggcgcccgctcaccccaggaactcttccccacgtggcctctgcccagcgagcgctgaccctctgcc

SEQ ID NO: 263010 - DNA, 31 bp, Homo sapiens
  chr11:1811101-1811132
  hypo
tgtgagccaccgcgcccggccctcgttgagt

SEQ ID NO: 263011 - DNA, 38 bp, Homo sapiens
  chr11:1819538-1819576
  hypo
ttcgaatggcctggtgcgtgtggctcactagatgtgag

SEQ ID NO: 263012 - DNA, 110 bp, Homo sapiens
  chr11:1824188-1824298
  hypo
tggaaggtggatggcgaggccgggatggagccgctgatccacgcagagtatttgcgctcgggaggagcaatgacgttgatcttcatcgtgccaggcgccagggcggtgat

SEQ ID NO: 263013 - DNA, 441 bp, Homo sapiens; identical to SEQ ID NO: 214003
  chr11:1824638-1825079
  hypo

SEQ ID NO: 263014 - DNA, 141 bp, Homo sapiens
  chr11:1825139-1825280
  hypo
tctctcgctctgggcctcgccacccacatagaagtccttctgacccatgcccaccgtcatgccctggtgtctggggcaccccacgatggaggggaagacggcccagggggcatcgtcgtcggtgaagctggccttgcacat

SEQ ID NO: 263015 - DNA, 40 bp, Homo sapiens; identical to SEQ ID NO: 214005
  chr11:1825529-1825569
  hypo

SEQ ID NO: 263016 - DNA, 286 bp, Homo sapiens
  chr11:1826892-1827178
  hypo
cggagctcagcctccgagtcacaccagcgtagggaagcgtgatcaccaccttcatcaaggacacgcggagctcagcctccgagtcacaccagtgtagggaggcgtgataaccaccctcatcaaggacacgcggagctcagcctcgagtcacaccagtgtagggaagcgtgatagctgccttggacatctgtcaagaccccaagggtcattccttaggggcacagagtaagctccaagataggatgttcccccgagacacatctagatatcccgataactcttaaag

SEQ ID NO: 263017 - DNA, 65 bp, Homo sapiens
  chr11:1842377-1842442
  hypo
gagcttgagaacaacggggccacacctacaatgcggcagcttacgaatcgcgccagacccagcaa

SEQ ID NO: 263018 - DNA, 163 bp, Homo sapiens
  chr11:1845539-1845702
  hypo
cccagagtcacctgcggggctgacgtggagagagcgagtacgtgtgtgcgtgggtgagtgtgcacgtgcattgtgtgcacaggtgcgtagcagtgtgcccgtgcctggcgtgtgcgtgtgtgtgaggctgtgtgggtcaagcgcccacactcacaggtgaggg

SEQ ID NO: 263019 - DNA, 309 bp, Homo sapiens
  chr11:1847136-1847445
  hypo
tgcatgcagtgacacctacacgcagtgggcctgcccgcagtgatgcctgtacgcagtggggcctgcacgcagtgggcctgcccacagtgacgtctgcacgcagtgacgtctgcccacagtggggcctgcacgcagtgacgcctacatgcagtgatgcctgtacgcagtgacgtctgcccacagtggggcctgcacgcagggcgtttgctcacggcaggtgcgtgcatggtggaggcggtgccgcggggctttggtccagcctggtcaaggtgtggaaaagcccccgtcgcacctgcaagtcccccacct

SEQ ID NO: 263020 - DNA, 835 bp, Homo sapiens
  chr11:1857227-1858062
  hypo
ctgcgcaggaccagcggttctgcgagtttccggaaagggtgacgggggaagggcagaccccatgccctgggtggtggggagctgacagggcaggggcccttggctgagcccaccccgctggctcccagatcagggtgggcctgaggcaggcagccgacctgaggcctgggggcaccgtggacccctatgcccgggtcagcgtctccacccaggccggacacagacatgagacaaaagtgcaccgaggcacgctctgccccgtgtttgacgagacctgctgcttccacgtgagtcagggatggtcggctgggtgggcctggacggctggatgggcctgggctgggtgggcctgggcagctgggtgggcctgggcagctgggtgggcctgagctagggcagcagggcctggctcacgccgctgcctcagatcccgcaggcggagctgccaggggccaccctgcaggtgcagcttttcaacttcaagcgcttctcggggcatgagcccctgggtgagctccgtctgccactgggcaccgtggatctgcagcatgttctggagcactggtacctgctgggcccgccggctgccactcaggtgaggtgctggtcaccaggccacagcccaaggcagagctggcagggaccctgccctatgggccatcggaaagacaggcctgatgggcagcattttcgggggtctgagccccaactcggccagaatcaccctcccgggctgaagcccctcttgctgcccacagcccgagcaggtcggggagctgtgcttctctctccggtacgtgcccagctcaggccggctgaccgtggtggtgctgga

SEQ ID NO: 263021 - DNA, 245 bp, Homo sapiens
  chr11:1858535-1858780
  hypo
gacatgctggcccacgcccggcggcccattgcccagcggcaccccctgcggccagccagggaggtggaccgcatgctggccctgcagccccgccttcgcctgcgcctgcccttgccccactcctgaatgcaccacatgcctctgtctccccgctgagcccaggcacttgcccaggccgccctgcaggaccactgcaataaacgccttctcctgccactgtgtgtccggctggagcctggagggga

SEQ ID NO: 263022 - DNA, 49 bp, Homo sapiens
  chr11:1858842-1858891
  hypo
tctccagactcagccaggccctgaggcctctgaccggtccctgcttgac

SEQ ID NO: 263023 - DNA, 139 bp, Homo sapiens
  chr11:1860100-1860239
  hypo
ctgtggctctccacgcccccattggtctgaggaggactctatgccctttctgagcaggggcccagcctgggggaggccatttatacccctccccctgggcccaccagcccaactcgccgctgccggcctgacctcgctc

SEQ ID NO: 263024 - DNA, 109 bp, Homo sapiens
  chr11:1868082-1868191
  hypo
ggagggaaaatccacgaagtcagggacctggagttatttgcagctgtgtcagtgctgctggggcgaggcatacacctgtgacgggacctcaggacggggacacgggtct

SEQ ID NO: 263025 - DNA, 622 bp, Homo sapiens
  chr11:1869646-1870268
  hypo
ccctccgatccacccggccccctcgaagccttccctgcccctttcctgtctgtctctgtccccgttgagagcttctcttcctcactctcttcactcctgggccagattcccaagctcaccagtggccacggccagtggaaggaaaggggccgagtgaccccagctcgcgtgcagggagagggcacagcccccagctttgctccccacagcaaacccctccagcacctgcgtgtgcccacagagtgatttgccagggaggggcgctgcgggatggcctgtactgcgggacgtcctttccagcccatggtgccagcacacagcatctcctgcccaggcctctccctgctcggctgggacttctacacgcacctccagcctgctacacaggtcccaacccccggcttctcccctcaaatccaggtctgcacctctcagacatctgccttgtggcctctgcacctggagtgtccctgtgtcctgcccgcctggcacagagctcctcctggctcacccctcaaggcttccctgcttggctccatcccccggaatctgatgccctcagctggctccatcccagaatccaaactaactcatcacctgatgcagccgcttgctggtcccc

SEQ ID NO: 263026 - DNA, 85 bp, Homo sapiens
  chr11:1919472-1919557
  hypo
ttttttttttgagaccgagtctcgctccgtcggctggagtgcagcggcgccagccatgtctcggctcactgcaacctccacctcc

SEQ ID NO: 263027 - DNA, 31 bp, Homo sapiens
  chr11:1935033-1935064
  hypo
tagacgcctcaccccgcgctctgcggtgagc

SEQ ID NO: 263028 - DNA, 939 bp, Homo sapiens
  chr11:1950284-1951223
  hypo
tgctcccccgcagccgcactggcttttctcttgcatgtgtgcttgtgccttttgccacctggaagacaccgcagaggaggacgcggaaggtaagggcccgtccctgccgccggaggtgcaggaccctggctctagccgacgcgagggaaagaggacaggctggggtctctcgctgccctgcctcctcctccctctgtcctctttctcttcccctggcacgggggcctcggagggccaggccttgctgctccgcacggtgccgctggggtcgagctgccagggcctcgcgggtgccaccgctccaagtttctgccacacagcggagggggagtaagcgggaccagccagcagtgccagagcccgggccgggcacgcccccctcccctttctcccaagcccctttcctcccaatcttcttcccgagcccctgtcctctttgctccgtctcctcccttcccagccttcaaggacgcggcctgtctcgctcctatttcttccctacctcttcctcacccttcctcctggccccaggccctgagctcttcccctccaaccctgccaggggcttttgcaggcctagagcagaaacaggaccctcttgtttctgggggttgggggtactcccagctgaaaaggacggtggccttcagtgaaggggaacccagggccgcaggccgcccagtctcacccaggctgtctctctccctctccccacgctggtgtccctctccctacgctggtgctgtgtggaccagaggagaaaccgagacccaagtgagtgtggggtcctggcaggcccgctgctgagtgtgttctggggtgggggtggtcaagtgagtgtggggtcctggcaggcccagtgccgagtgtgttctggggtggcggtggccaagtgagtgtggggtcctggcaggcccagcgcctcgtgtgttccgtggt

SEQ ID NO: 263029 - DNA, 176 bp, Homo sapiens
  chr11:1955098-1955274
  hypo
ctggtggactccctcggaggagccggggacagggctgagcagacccccttctctggctgcaggagaagcgccgtgcagagagagcggagcagcagaggattcgtgcagagaaggagagggagcgccagaacagactggcggtgagggcaccatccgcactgctgcctcatcagaga

SEQ ID NO: 263030 - DNA, 86 bp, Homo sapiens; identical to SEQ ID NO: 214008
  chr11:1956448-1956534
  hypo

SEQ ID NO: 263031 - DNA, 235 bp, Homo sapiens
  chr11:1956828-1957063
  hypo
ccctcccaaacacccgtttgggctccaggggcgaggggtgaggggcgcagccatgggtgatccacgtgctcggggcaaatgcagacactccagcatcaccatcagggccacgatgtccaccctccagcaccgccagaggccccaggggagggcggctgtgcccacggggcttgtgctctacccaggtgcagcaggtgtggggcgaccagtccaagccagccgggcaaatccgagc

SEQ ID NO: 263032 - DNA, 1004 bp, Homo sapiens
  chr11:1957392-1958396
  hypo
ctcgatgccccagccgcccatccagccttgtaaccatcttggtctttctagatcatgaatgtccgggccagagtgcagatgctggccaagttgtaagtagccgggtccgccctgggccaggcccgtgggtgtgcgttgcacggtgaggtgaacctctcgcatggcaaaaacctggatcgctcaggatgctggcggcagggggcctggagccttcctcctgcccccgctctcccctcgtgcctgcagccgggggcttcccagtggccgctgccctgttggcaagcgaggaagggcccccaccttcccaggagctccgcctcaagccagcagcggccacagagtgcccctgggcacaggcacgagggcgggagcggctggcccaggagcagcagggccgttcggagctctgagctcagcggctgaagggagctggagctgagaaggaggggtccgcaggcctcacctgcaacccctccccagccccatccgtgctccgtaccccccgccccacatcctgccgcaggctgaaggtaagtggccagctacgggctgctgtgtgtggcagtccaggccagtacaggctggcgagagtaagtccaggcatgagcccaggggccacgggacggtgtccccctgcacaaggagccaggagacagtaagggagccgaggagccctcatgggggcccagcagccctgggtcgcgcagcccagcccaccctgcggtggagacaggccttcacccagtacacgcaggcctggccctcgggtcgtcgcagtgagtcactcatgttgttcacagatcaccacgctcaggagccgcattgaccaggcccagaagcagtgagtagccctgccgtcctcgctccgcactgggcacaggggcccttggggccagccgctgtagccagtccctaacaagggccggtggtggctggcctcggcagggcagtaacgagactaacccggccaggccacccaggccagcatgcgcaggcctgtggcc

SEQ ID NO: 263033 - DNA, 253 bp, Homo sapiens
  chr11:1958920-1959173
  hypo
ctccctcctcctgtcgccttggcttccctgcggcgcccagggcgggctcctccgtggtgcacgtgacctcacggcctccctgttgtgccgtcaggggtcattgcagacccctctgagggtgggcagtcggcgtggtgtgcatgtgcctgcgtgtgtgcatgtgtgcatgtgccgagagtgcccaggaacgtgtgtgagggcacggcctttgccagccaggtgtcctgctgagcagccgcgtctgaatggggcc

SEQ ID NO: 263034 - DNA, 89 bp, Homo sapiens
  chr11:1962757-1962846
  hypo
gcagaaaacatgagcgacagacagaagcagccaagccctggaatcagaaatatgagcaaccgatacacgcacgccgctacacctggctc

SEQ ID NO: 263035 - DNA, 34 bp, Homo sapiens
  chr11:1975868-1975902
  hypo
gaccattgactgcccgctgccccgaggcttgtgt

SEQ ID NO: 263036 - DNA, 101 bp, Homo sapiens
  chr11:1975932-1976033
  hypo
cgcaggaatgaagggcgcacgacatgagaggcaactccagaacaaaccgctgccgccagctgggccgagctccgtgctcggggctccggcctccaggtcca

SEQ ID NO: 263037 - DNA, 50 bp, Homo sapiens
  chr11:1980680-1980730
  hypo
gcccacagaagggaccggctggacgcgccagctcccgtgacccgctcctg

SEQ ID NO: 263038 - DNA, 114 bp, Homo sapiens
  chr11:1982883-1982997
  hypo
ctccactgggtgaacggtccgcgtgttcatccgccgtccatcagtggacacgtggcggcttccgccttttggctctcgtgagcaaggttgtggtgcacacgtgtgtgcacattt

SEQ ID NO: 263039 - DNA, 99 bp, Homo sapiens; identical to SEQ ID NO: 214009
  chr11:1985748-1985847
  hypo

SEQ ID NO: 263040 - DNA, 333 bp, Homo sapiens
  chr11:2005410-2005743
  hypo
ggacacgggctttgcggcacaacctggtccttgttctctggctgggctagggtcacctggagctggtgcccgtgatatccgcctgacgcggaagtgggcaccgttttctggatgctcccttactttctcagcgctgtgtggagggggaatgccccgtgcttctcaccctgtcttcgcctgtccccaccccaagctccactgggcggggaggagaggggcacctccataggactcagctatccccccaactcccacaggaacctcaggcccagagtccccaggagggagcagccggcaacacggtttccgctgtggagacggggcgtcctggct

SEQ ID NO: 263041 - DNA, 176 bp, Homo sapiens
  chr11:2013349-2013525
  hypo
tcacacacacaccccgcggagcatctccgggccggacaggacccacgccctccacagcccggaaaggcgggttaactggtcagcatgcagagacccaccaagtggagaccccgctcccaggcacagacgcacagctgtggatgcacgtcctcggtgacaaggtagctgaggtcgcg

SEQ ID NO: 263042 - DNA, 54 bp, Homo sapiens
  chr11:2013555-2013609
  hypo
caggggactcgccaggagatgcgtgcaccgagggtccagcgtggccacagcagc

SEQ ID NO: 263043 - DNA, 292 bp, Homo sapiens
  chr11:2026725-2027017
  hypo
gtgggacacgggtacggcacgtcacctggatagggacacgggtacggcacgtcacccgggtgggacacgggtacggcacgtcacccgggtgggacacgggtacggcacgtcacccgggtgggacacgggtacggcacgtcacccgggtgggacacgggtacggcacgtcacccgggtgggacacgggtacggcacgtcacccgggtgggacacgggtacggcacgtcacccgggtgggacacgggtacggcacgtcacctggatagggacacgggtacggcacatcatgcgg

SEQ ID NO: 263044 - DNA, 146 bp, Homo sapiens
  chr11:2027241-2027387
  hypo
gctggctccttcttcgagctctaagggaggctccagtgctggccgactttcccagtgttcccaggctcccagacctgtcaccccagccgtgcccatcttccaggatgctctcatcctgcgccttcacgcagcgttgctctctcgtg

SEQ ID NO: 263045 - DNA, 220 bp, Homo sapiens
  chr11:2029642-2029862
  hypo
ctacttggaccgaccggctgagcccagcttctggtggatggcagccgcatggcggagcctggccggtcacccacgggcagaagatgtacccagctaagctctgccccgaatcctggcttgcagagctgtgagagctcacgtcacggctcttttaagtcactggcttgggagtagttgctcatccagcaaggactggtgagaagcccgagcccctccactt

SEQ ID NO: 263046 - DNA, 176 bp, Homo sapiens
  chr11:2037058-2037234
  hypo
cgatgcccgtgggccgccggctcccctccgtgctaatgccaccctccaaagccatggcttcctctcgagccttgggtgtccagcagcctgaccagacagaggcctcctcagccccgcaccgaaggaggatggaggggccgggccggctcctgtcggttgcccgtgctggccgaccc

SEQ ID NO: 263047 - DNA, 191 bp, Homo sapiens
  chr11:2051191-2051382
  hypo
gccaggacggcaagccgggagtatgtgctccttggggagcggggcccaggtctgggctccagggctgcctcttggctggatacccagcttcacatttggctcaacacagcaaggaggggtcaggggtctcaggcagtcaggcctccagtctcagtcctcacaccactgcccccgggcgcaggaccagcaca

SEQ ID NO: 263048 - DNA, 54 bp, Homo sapiens
  chr11:2054681-2054735
  hypo
accagggtgggccacgcccgagttcagcggggggtgtcacgcatgtgaggccgg

SEQ ID NO: 263049 - DNA, 305 bp, Homo sapiens
  chr11:2055187-2055492
  hypo
gcaggtcctccggacggcactcgggtgccactgctgcagtgatgaggtgggggcagcatggccccagtggcctgggcagggaggctggcgtcagcgggggaatctgttgacctcaggaggtgccagggctggagcggcactggggagtgccatgtgctgtgtgtgctgagccacgtggactcgtgaggctctggccttggagcctgggtggccgacaccgaccctggtgagtctgagagtccatcttgctcggacggtctgtgatccgctaccttactcgtctgtggctgcgccccctccacacc

SEQ ID NO: 263050 - DNA, 159 bp, Homo sapiens
  chr11:2096090-2096249
  hypo
cgggattgctgggtcgtatgggaattctatctttaatgttgtgaggagccaccatagtgttctccagcgcagctgcatcattctacactctcaccagcagtgcccgggggttccaacattgccacgtccttgccttattattttcggggtttcttagcg

SEQ ID NO: 263051 - DNA, 152 bp, Homo sapiens
  chr11:2107097-2107249
  hypo
gtgacagaagggctcgaggctggtcgcctggagggcgttttgaagccagggtggacgctgatccatcctgagaccaggaatccagggcatgggagagacgacgcctgggtttggggcacctgaagggtaaccaaacacgtatcgtggccgag

SEQ ID NO: 263052 - DNA, 174 bp, Homo sapiens
  chr11:2108013-2108187
  hypo
taccgaggaatgcacgtcagaaccagtaggacagctgccatcccaaagccagaccacggcaagcgctgggcgtgggggagtcggagctgcctgtgctgctggggatgggccgtggtgccaacgctatggggccgtgggctcctcacacatgtaaacctacggttgccattccac

SEQ ID NO: 263053 - DNA, 146 bp, Homo sapiens
  chr11:2109250-2109396
  hypo
atagagacagaaagcgccaggggtaccaggggctaggggagggaatgcggagtcggtgttcgatgggggtgggggttcagtgtgggaaggtgagaaagttctggagatggatgccggtgacatctgcacgacgtcgtgaatgtaca

SEQ ID NO: 263054 - DNA, 188 bp, Homo sapiens
  chr11:2113263-2113451
  hypo
cggaggaggtagtgcggtgtgcgcctttggggccggtggctcgggaagggcaggcagagccctctacgggggactatgtcctttgtggatgggcagaacagtgcacagtgggagtgccttgcactaacagattggaaactgaggcacagaggggaaaagcgtccctggtcctccggcctggtggagca

SEQ ID NO: 263055 - DNA, 359 bp, Homo sapiens
  chr11:2117527-2117886
  hypo
tgcctgggctgcagcgtgcacacagggaccacgcacgtgcacccatgtacacacgcacctgcacacatgcacatacatgcttgcacatacgtacgcacgccagcatgcacatcacacacagggcctcagggtaaccttttccccagtcccggctgtgatattgcgaaaggagctcagggtggggggcgggctgctgggtccaggcccccaccgtcctgcctagcagtcatttggtttctctttgcctcagtttccctttctctgcccctcacacctcccaaagtcctttggagaatccgtgagatgggggggtgacaggccctgtatgtcagcacacacagccacgtgatgtgggaccc

SEQ ID NO: 263056 - DNA, 54 bp, Homo sapiens
  chr11:2119433-2119487
  hypo
gtcctgacacctgccgacctcacacatgggccctctgggcgcctgccctccccc

SEQ ID NO: 263057 - DNA, 36 bp, Homo sapiens
  chr11:2119758-2119794
  hypo
gtgctgccggaagtcgcagagcgtccccccggctcc

SEQ ID NO: 263058 - DNA, 149 bp, Homo sapiens
  chr11:2122400-2122549
  hypo
aagggaggaagacccggggcctccagacacagtgtaccagaggagaacccttcccatccagcatggccaagcgggacccgtgtggcacttgaagctgggtccctggactcaccaccttccctcactggacccctcggcagccatgcagg

SEQ ID NO: 263059 - DNA, 478 bp, Homo sapiens
  chr11:2124957-2125435
  hypo
ggactcaaaatgaacgagggccgtcctgtgcgtgctccactccaaatcccatctgctcccacactgctggcccagggaaaatctgggtagtgacagtggccgtccctcacgccctccatggccaggtgccagtagcgtgttccacaagcatcaccttcgaaaccctgaaggagtcaggactgtcgctgttccagacaaggagactgaggatgagtctccattaagtggctttcccgcagacacacagtaagtggcacaagagtcaggagtttgagcccgggtcagcccagctccagccatggtcgcaggggctgcctgcaacccctgacgaggggcaccccggggaggcctggacccagcacctgcagcccaacctgggcagaggctgatccagcagctaggaagggcatgggtccaggagatggcagagcagggaacagagcgctgccgctcagggtactcccggggagctgtggtt

SEQ ID NO: 263060 - DNA, 42 bp, Homo sapiens
  chr11:2125676-2125718
  hypo
gcacaaccccctcccgtgccggagtgcgcacacacacacaca

SEQ ID NO: 263061 - DNA, 282 bp, Homo sapiens
  chr11:2125778-2126060
  hypo
cacacattcatatacacacacgcccacacacacaaacacacattcatatacacacatgcccacacatgcaaacacacattcatatacacacgcacgcccacacatgcaaacacacattcatatacacacacgcgcagcaggcctccttggtcaaggcctccagagctttgtccttcctcacggttccagtggcccagaagactcaccatgttgccttgccccagcccagggccccaagtgagtgtatcaggatccctgagcccgccccgaaatccccaggtt

SEQ ID NO: 263062 - DNA, 171 bp, Homo sapiens
  chr11:2136032-2136203
  hypo
gagtttccggggagcgctgggtgagcgggaaagaccaggagtaaggagccgaccccctcaggcttcctctcccatgttttccacaagggagccccccaggcccagaggcgctcaggggaaggcctcgcccaagctgggcttgccgtctgccctgagcgcctggaagtgctc

SEQ ID NO: 263063 - DNA, 57 bp, Homo sapiens
  chr11:2136427-2136484
  hypo
cagaagcccttcctcgccactgcccagtggtgggttcagcggcggagactggcctgt

SEQ ID NO: 263064 - DNA, 501 bp, Homo sapiens
  chr11:2152091-2152592
  hypo
gggtccccaggagacgggcaaagatgatccctaggtgtgctccggtgggggggtccccaagatcttccttccaggagcacaccagggagtcaggctactcgtgggggcatgtctgctcagctaccgccatctccaatgtggccaaactccttcctcactctggctgggccaacacacagtaagtaaggtgtatcgggaatgggtggggtatggggagcatcgtggctcacgctgcgggggccgtggggacaggcgccaaggaggccagcctcacaagggcatctctgtcatggtggaaagatggaattaggcctgggacacaccccgcccaccctacgggtgtatcccaaatgccgccggccgcacactcaggccgcaccatctgagccccctcctctgagaggcagggcacagacagggccgaggggcagtggagatgggaacaggagcggggctcagaccatgaaaacattggagaatcttagcgggactttggcctga

SEQ ID NO: 263065 - DNA, 323 bp, Homo sapiens
  chr11:2175988-2176311
  hypo
tcctcaccacccaccgagccacccatgtgtaacgggcccatgccaggaaccccgcgctctagagaggatcaggggatgcccaaggtccctccgaaactgggcagcagcgggcctggatgtgggcaggtggtggccctgtggaggccgggctggggtgggaccgagctttgaagtgaaggtggactttgaagacagaagggtgcgatttgagtcccagcgtgagcagccgcaagctggcagggccgcggggggctctggctctgttttccaaaaacacagatgggctgggaagggggtcagagagaggcctgggcggaatgtgg

SEQ ID NO: 263066 - DNA, 190 bp, Homo sapiens
  chr11:2176341-2176531
  hypo
tcagcagcctgggccacacagggccacagggagcagagcctccccgaagcccacaggcctgtggacccccagggcttggcctcctcgaggccggtctccatccctggcaagggctgggctggctctgcctaggggtcacagccacccgggtttagacattctcagcccccctgggcgaggagagcctggc

SEQ ID NO: 263067 - DNA, 200 bp, Homo sapiens
  chr11:2183694-2183894
  hypo
ggggcatgggctccgagccctgctgcctgcagcccctacctgcctcttagcaccaggggcaggatcaggaggtcccagaagcaggaggatgagaccatgggggcaggcaggttggagtatcctgtgccccggcccctcgcatccctatgtcccaccctggcctcagcctcggaacctctcggggccgctctgcacacacc

SEQ ID NO: 263068 - DNA, 407 bp, Homo sapiens
  chr11:2209803-2210210
  hypo
catcagaggacatcatcaaccgtaaaaaggcaactcccagaacaggagaaaatgccgcaaatcacacacctgatcggggagtagtacccggaacccacagagaacccctaaaacacaaccgccaaacaccagattcaaaagtgggcgaaggacgtagacgggcgcctctccagggaaggtgtatccaggacagcagccgcagggaaaggtgctcaatgccacgaatcattagggcaatgccaatcaaaatcacggcgcgacaggattccacacccgttagggtggccaccgtcaacaaacccaaacaatgcagaacacaaaatagcaagtgctcacgagaatgtggagaaatcagagcccctgcggtgggtcgtgccgcagggcagccgctgcggacagcaccctgg

SEQ ID NO: 263069 - DNA, 204 bp, Homo sapiens
  chr11:2210733-2210937
  hypo
agccacggcgcccggcccaggaaggacattcttacatccgctacaccgtggatgaacctcgagaaccttacaatcagggagaggagccagtcacaacaggacaaatgctgcccgagtccactcccacgtggtccctaaagacgtcaaatctgtcaggatggagaggagaatggggctgcggggggctggcggaggggatggggc

SEQ ID NO: 263070 - DNA, 411 bp, Homo sapiens
  chr11:2221258-2221669
  hypo
ccctggcacctacccgggcacaccggtgagcactggatggccgttccacctggagaaaatgtcccctgtgctgagcaggacagacagggtgtggaggtgagggcaagacagaggcaggggctggacagggagcgggcacagaacgaccagggctctggacaggccagggcagagaaagcagtggcctgcacaatcttgccctggtgggcggcctccgggactaaagacgctcgctatcctgagagctcagtcaactcaggcagccagaacaaagggccacagactgggggcttaaaccctacgcattcatttcccatagctctggggtctgggcggcccagatcaaggggccagcagatgcggttgctggtgagaacccgcttcttggctccccgtcggggcctccccagg

SEQ ID NO: 263071 - DNA, 72 bp, Homo sapiens
  chr11:2225630-2225702
  hypo
cgtccctagcctggcggcaggtgctctgggccctctccctgggactatctgcctggacggcattttctggcc

SEQ ID NO: 263072 - DNA, 125 bp, Homo sapiens
  chr11:2226010-2226135
  hypo
ctcctaggaccctccggagcctgagggtcagaaggtggtgacatccagtcacacggagagggacttggagtgtctgtacggcaccatcctgtcccgctgcctaaagggagcgcctgcttcaattc

SEQ ID NO: 263073 - DNA, 70 bp, Homo sapiens
  chr11:2229025-2229095
  hypo
tcatggcatttcacatggttgtcacccaaagaaagccctcagccgtggagccttgccctctccagaagcg

SEQ ID NO: 263074 - DNA, 182 bp, Homo sapiens
  chr11:2229125-2229307
  hypo
caacccgtgtgggttcacagcctccatcagcaggtcagttgtttgttccctctgaggagcaggagcaggggcccaggcacgctcccagtgggcaccgaacacctgctgctgggtgcctgccccgcacgtaggagggacacagcggtgagcaggcgctggtcctcatgcggctgcctgctggt

SEQ ID NO: 263075 - DNA, 202 bp, Homo sapiens
  chr11:2235851-2236053
  hypo
cctgccacagttgccggctacacgcaggccacagtccgtctcccgctaggccgcctccctctcccctgtgctccaacccagaagccagctgccctctgtcactctcagacgacagacggcagcacgggtccagctgccccaggcccgagccccggggctcctcaccgcctgggcctcctcgccaggccggaccttgatgctg

SEQ ID NO: 263076 - DNA, 166 bp, Homo sapiens
  chr11:2236827-2236993
  hypo
aggtgacgggggaccgggacgggtgctggagggtacatgagggaggactgggacaggcgctgcgggggtaggtgagaggggacccggaaggccgctggggagtaggtgaaggggactgggacgggtgctgggggggtaggtgaggggggaccgggacgggcgctgg

SEQ ID NO: 263077 - DNA, 180 bp, Homo sapiens
  chr11:2237500-2237680
  hypo
ctgagcctgggatgcgcaggtcctcacctgaggaaagtaggcaccagccaggtgtaacctgggccagatgggcagccccgagggccgcgccccacctctcaggccccgctcacagccaggccccagggctgctcccaggcccctgggagagcagggtgccgtgggcggtcagcaatgggt

SEQ ID NO: 263078 - DNA, 46 bp, Homo sapiens
  chr11:2269906-2269952
  hypo
attcccagagcgggacgcttccaccggaagacgctattaagacagc

SEQ ID NO: 263079 - DNA, 92 bp, Homo sapiens
  chr11:2277665-2277757
  hypo
cctgtgtgctcctgcgtgctcccgtgtgctcctgcttactcctgtgtgctcccgtgtgctcctgtgtactcctgctgcgaagggtaaaatga

SEQ ID NO: 263080 - DNA, 922 bp, Homo sapiens
  chr11:2278017-2278939
  hypo
cgtgtgcgtttctgcgtgtgtgtgtgtgtgtgtgtccatgcatgtgtctctatgaatatatgtgctgtatttgcatgtgtgtgtgtgtctatgtgtgcatatgtctgtgtctgtgtgtctttctgtgtgtgcggtctgtgtctgtgggtctacacgtgtatatgtgcatgtgtctgtgtgtgtcgcagtgtgttactgtgtctgcgcgtgtgtgcatgcatatgtgcaggagggagggagggctcaggccttagcagagtccctggggctctgggagtggagggcagtgaggctgaggctggtgcaaaggtggtttcaggcgctcaggtgaagtggagcagaaacagaagttggaatccagccccagcgggcgggcggcagcagcagtgccggccctgcccagaacaggttcgacctgagccggcactgcccggctgccctggggctagggaggctgagacagagaagggaagccagagggtgggggtgggggcccggcactggcagagctgcctgccctcaacgaccgcccctgccggagacccccgccccacccgctgtggttctgctggcccaggtttcgctgggcccactcccagggtttggcatcactggagcccagggtcccccccgcaccctccccacagccttggccctgctgctgcctgcctcctccagggtaccccgaggcccacgtcaggagacccgcctcaggcagcagtggcccggtggctgcttctgcctagcccgcagcacgtgccaccctgggcgcactgccttcccgaaggctctcctccctccccggggcgctccctcccactctggaatgcctccctgcctgcacagcaggagtgtttggctgaggtctgcagccccgacacaggtcacctcccacgcctatgggggcttcagaaagtcccgg

SEQ ID NO: 263081 - DNA, 278 bp, Homo sapiens
  chr11:2288976-2289254
  hypo
cgccctaaagaaaccgggggagccccacaacccctcccccaccaggacactaaaaggcagctttcggtacagtgagacatcaaagcctcctaggccctgagtcaaaggtatagccgtgtaatatcccagtgccagctctccggctgcggggagcctggcgcaaagcttccaagccttccttgttcctttcaagagccgctcttagaattcaggtgagcggagacctgcagggcctccccagtgcgggcaaaacccaaagctagcgagagggcagcctc

SEQ ID NO: 263082 - DNA, 41 bp, Homo sapiens
  chr11:2294016-2294057
  hypo
ggggtcaacagggacgagcggtacagcggctgggttgctct

SEQ ID NO: 263083 - DNA, 106 bp, Homo sapiens; identical to SEQ ID NO: 214011
  chr11:2294685-2294791
  hypo

SEQ ID NO: 263084 - DNA, 89 bp, Homo sapiens; identical to SEQ ID NO: 214012
  chr11:2328966-2329055
  hypo

SEQ ID NO: 263085 - DNA, 39 bp, Homo sapiens
  chr11:2330508-2330547
  hypo
gcggactggggtgtcgcagcctccaccccctccacggaa

SEQ ID NO: 263086 - DNA, 71 bp, Homo sapiens
  chr11:2330577-2330648
  hypo
cctgcctggaggagggtccggcctagctgaccgtgggcaggggccaagggcgtccccgtggaaaggccagc

SEQ ID NO: 263087 - DNA, 350 bp, Homo sapiens
  chr11:2334646-2334996
  hypo
gagggccactctgacggccattgtgtgaaggccccatcgttgatgttgggaagcactgtgactggctgcccagggacccaggttccgctttggggagatccacctgctacaaggagggcagtgctgggacgtcactcagcactaagggcccactagcgtttgggatgtcgtggggagggggctgtgtccccggatctcccaccagggccaggacctccctgtggtctctcggtgcaggtggaggacgccatgctggacacctacgacctggtatatgagcaggcgatgaaaggtacgtcccacgtccggcggcaggagctggcggccatccaggacgtggtgagcgtggg

SEQ ID NO: 263088 - DNA, 390 bp, Homo sapiens
  chr11:2337176-2337566
  hypo
tggcccaacatggacgctcaggacagctgggagacggcaccggccgggcccagggcagtgccagagtgcccacagaggccagccctgtcccactgggcttcacctgctcgtgctgcctttccctagagccctgggggcttcctaggaatgtgccgcacccgccgccctgctgccctggcattggcctaggtgggcgctgcagctccatggccccacagaggccgcttgtccaggcagggagggccgctcagggcgggtaccatgcctgctgccctctcacaggactgccttcagggcatccggagcttcctgaggacacaccagcaggtcgcctccagcctgaccagcatcggcctggccctcacggtaccctctcgcctccctcactgc

SEQ ID NO: 263089 - DNA, 142 bp, Homo sapiens
  chr11:2348407-2348549
  hypo
ggaacttttcctccacagcacgtgcactccgtgcatctgcagagctggcaccgtgctgacaccatcgaggtttaccgcctgcgccttctgggctggcagcccaaggaacacctgtacccacgtgagcctccatgggggtggg

SEQ ID NO: 263090 - DNA, 222 bp, Homo sapiens
  chr11:2362552-2362774
  hypo
aaagacataaatgccggttaaaacggattaaatatcccgttcgcactttaagcaaaagtgaccattaagcttgtgggcgcggtaggccagaggctcaggatgcctcctttccactgggacggtcctcaaatcaagcggacatggagtgcgtggtagctcttttcgaagattccaccacctggaataacgaattgtgccaagctctttctctgctatttcctg

SEQ ID NO: 263091 - DNA, 33 bp, Homo sapiens
  chr11:2375968-2376001
  hypo
atgctatttctatcctatcggttctgtttacct

SEQ ID NO: 263092 - DNA, 572 bp, Homo sapiens
  chr11:2412913-2413485
  hypo
gcctctctcggggccgtggtgccctcacaggtggtgtcaggaaggacgggaaaggctgcttgtcccaggggctcatgtggagaccaccccctgcacgcagctggggcgctcctgcctgtgtcctcagaagcactcggcttagctttgcccatgtgcctgggctgtgggtggcagagcccggccagcatcctccgatctccaagggtgcatctctactggaggcccctcctgggcctcttgctccccgcttcccagatcattaggatatttggggtccagaagggcctcccagccatcctgggccttgtcctccggggccaccagtccagccagtgacaaccacagcatccccggcctggaacgaggctgcccccagcacgttcctcgtactcctgtccagggacaggaggggctgcccctgccaccgagtccccttctccaggacctggggcctgtgggtgtgaggcaggtgttcttggaaggggtcactctccaggcacccggcggccaaggcttgtggctggagcagctcccgctgtggggtcggcgtcgggccccgtgtggccggagag

SEQ ID NO: 263093 - DNA, 174 bp, Homo sapiens
  chr11:2413789-2413963
  hypo
cctgccacccccgacgtgggctctgcctgggcccccactggacagggaccccttggagctcctctggccaccaagtcctcgcccattccagaatcggccttctggagcctcttgctgtccctgatgcgggctgggccttgccaagggctttttttcctgcgccgggaacagggt

SEQ ID NO: 263094 - DNA, 157 bp, Homo sapiens; identical to SEQ ID NO: 214014
  chr11:2414473-2414630
  hypo

SEQ ID NO: 263095 - DNA, 218 bp, Homo sapiens
  chr11:2423368-2423586
  hypo
ttaaatgaggtaacgagtcaaaagtccctaccctgggtcctagcctgtcaggggctccgaaaacccaggctcaggtcggtcctgcccggcacctgtttcacacatgtacactccggtctgaggttggtcctctcccccaccccacccacctgcagttgagcagctgaacagaggccatgccggggcactccgaggcctgagacgaccacgcctgtgcc

SEQ ID NO: 263096 - DNA, 197 bp, Homo sapiens
  chr11:2423833-2424030
  hypo
ggtttaggtgtggcgtggccctggggacgcatggctgaggcaggaacaggtgagccgtcccccagcgtggagggcgaacacgggacggagtatgacacgctgccttccgacacagtctccctcagtgactcggactctgacctcagcttgcccggtggtgctgaagtggaagcactgtccccgatggggctgcctgg

SEQ ID NO: 263097 - DNA, 160 bp, Homo sapiens
  chr11:2428378-2428538
  hypo
tcttgaagacccggcggagcgtcaggctcaggtggctgagcaggatgaagggcggggccagggcggggcgctcgtggtactccacaatcaggttgtagcgctggaacttccagaacatgtctgcgttgccctgcaccacctggaacgtgtagctgcaggg

SEQ ID NO: 263098 - DNA, 1484 bp, Homo sapiens
  chr11:2435284-2436768
  hypo
actcacctgaacgccgtcgtgggcaaagaaggccttggcgtcagcctcggtggccaggtgcaggcaggtggtcttgctccagcagcggttccggcgcaccagcagggcgaaggcgcgggcctcactgttgctgtagcactcggagaagaggtctgcccccggaggccctggccgctaggacgagacgccgatgcccggcccggcccccgacgcccctcctccatcccctgcccagacctgggctctgcagccgcaccctgcgttcaacacgcagggcccagccaggccttctgccccctccggcctgctccgggcccttcctgaacctccgtccttctccggctctgtccctcccccagcaggacaaagggaacctctgccacgctaaatgtccctcgtcctgcggcagggcccagtgtatgcccggggtgtgaggctgtatcgtcctcaccacgtgcacagcggtcccacactcagggtctggggccgcctccaccccaggcagagccgtctgtcctctcctatggaggaggcccctgagggcacctggagccccacggcggtaacaggcagccctggcgaggcccaggacccttcgtccgacccctccgtcacatcctcccccgcgcgcgggcccggccccagccgccggtcactcaccaagggccagccgctcgtatttcgcctcgcgcgtggctcgggccgcctcggcctccgtctccaggtgcgacatctctttgaggattttgcaggcggccagtgcggctgccacaccttcctggccctacgagacctggtctcaggaggccgcccctcccctgcccccgcgctgggcccgcggcctgggctcaccatggcccagaagtaggtggccatctcgtggcggttctgcagcacggcccacaggaacaggtcccgccaggggttctcgctcttctggttcaggtccagcagccacttctggcccgtgggccgcttggccgggcccttctcctggaggacacgggcgtcggcctcctgctgcggccccagcctcgccctccatccccacggagcccccgctcaccgccctcctgcggtcccctggccggccgtcctggtagaagcctcggcaggcgtcctgcaggaagtccttgagtacgcgggagacctcgtgcagggagaaggccggtggccccgcgggtggctcccgggcctgctgggtgcccaggccggccagcgtcagccgggcctcctcctgcttccgctgcagcaggtcgaagagcaggctcttgcgtgacacggagcggtagagctcctgcagccgcccatacgtcaggaagtcggccacgtctgcgccgttgtccacaaagaggcgcacaaactcgggcttgttgctgaccagggcgtccaccatcacctcctccaggtcacaggacttggcggccatgggcacccgagggaagggggacaagagagtgagcgagagacaggaggagggggtc

SEQ ID NO: 263099 - DNA, 258 bp, Homo sapiens
  chr11:2441484-2441742
  hypo
tctccagcctcagccgcagctccgtcagcccatcgcccttccccggggggcctggctccaccaggatgaagtgggagaggttgctgtccagtgaacagagggggccctggctgccgccgtcatcctcagggtagtggacaggaaaatcctcctgcgcccatgcagggagacgaggctgagccctcgagaggcagcttgggctggtcccgctgcgggatcctccctgccaggccgtgcacaccacgccatggggccccg

SEQ ID NO: 263100 - DNA, 33 bp, Homo sapiens
  chr11:2441826-2441859
  hypo
gacagtcaggggcaggggcggtggggagcgggt

SEQ ID NO: 263101 - DNA, 95 bp, Homo sapiens
  chr11:2446552-2446647
  hypo
ccaggttcctgaggcgccaggtgttcctggctgtggccgcgtggctccagcttctgccttggttgccgcatggtctgcctcgcctgtctgtgtcc

SEQ ID NO: 263102 - DNA, 57 bp, Homo sapiens
  chr11:2448567-2448624
  hypo
agcaccctgacacgcggctgctggccaaggcgcgggtggagccgtctgcctaccttg

SEQ ID NO: 263103 - DNA, 299 bp, Homo sapiens
  chr11:2485035-2485334
  hypo
gatggcccggcccccgctaccacgtggaggctccctgtaggtgcttgtgtagatgcccccgtgcggggacttgtttggctgatggatcagggggaaggttctccccacggtgtgaggcagcaccgagggctccgtgcccagcaggctcactgtcggcagttgggtctggtttgataaccgtggaccggggtgacaggccctgactctgcagagcaggactgtggaaaatggacactgatgctgcccggtggatccaggcagggccgggatgtttgcaggacccacgggacaattagaac

SEQ ID NO: 263104 - DNA, 127 bp, Homo sapiens
  chr11:2543213-2543340
  hypo
ctcccacagcgtctcgggctatgaccctggcagggttcctgcattctcctgtgttcccgggcacccggggctgagatgttgaaatgatgtcggataattcaccgggtgccttcggggctggtactcg

SEQ ID NO: 263105 - DNA, 182 bp, Homo sapiens
  chr11:2560627-2560809
  hypo
gtggctagaggaacgggcttacgctaggcaggcgctggcatcttagacaatacctgacatctttgcgggagctctggtgagaggccccacaagcgtgtgaccctgtgcggactccaccgcggcagcctgggagccaagccgatggctgtgctggccgaagggaacaccgccatggtgctctg

SEQ ID NO: 263106 - DNA, 38 bp, Homo sapiens; identical to SEQ ID NO: 214020
  chr11:2562214-2562252
  hypo

SEQ ID NO: 263107 - DNA, 353 bp, Homo sapiens
  chr11:2569188-2569541
  hypo
agagacaggggagcagggagcggtgggggatgaggtcagggaggtggcaggacctggcgtgtgagggcttggggcgactctggggagttagggtttcgctctgcatgacaggagcctggggcctggcatggtgtgactcagacttaacgccgcccctctgactggtagaggccaggcccaggataaggtggcggcaggcaggtctctaagcagtggcagctcagacccgaggtcccagggtcatgcgtgtttgtcctgattgcacgagtcgtgtgagcacagaaacgtaggtggaaagatggtggcttcgtccagggaggtagactgggaacgtcttttgctgcttcccttgg

SEQ ID NO: 263108 - DNA, 41 bp, Homo sapiens
  chr11:2579781-2579822
  hypo
gtcaggtggctgctgcgccctgtgtccgcctcctgaccttg

SEQ ID NO: 263109 - DNA, 43 bp, Homo sapiens
  chr11:2581754-2581797
  hypo
ttccttctgggggggcgggggggggtgacgtccatcctggggg

SEQ ID NO: 263110 - DNA, 130 bp, Homo sapiens; identical to SEQ ID NO: 214021
  chr11:2594826-2594956
  hypo

SEQ ID NO: 263111 - DNA, 63 bp, Homo sapiens
  chr11:2595670-2595733
  hypo
ggcctgggggccgcacgggggctggaggtgggggcgggcagggcagccgtgggaaacacgtgg

SEQ ID NO: 263112 - DNA, 199 bp, Homo sapiens
  chr11:2596284-2596483
  hypo
agtgggtactggccccggcacggctgataagcagtgcccagccttcgctgctgccctgcctgccttcccagccgcccactggagctgtgggcagcggacgctactccccagccccccagcccgcagcagagcggcactcccactcccacacctgtgcaaacatccgcccgctggccgggaacacggcccctttgtgccc

SEQ ID NO: 263113 - DNA, 31 bp, Homo sapiens; identical to SEQ ID NO: 214023
  chr11:2597548-2597579
  hypo

SEQ ID NO: 263114 - DNA, 66 bp, Homo sapiens
  chr11:2610097-2610163
  hypo
aggcagttgggggccgcggggccgggaaggtcactgccttttttgggagcccgagcaagccagtga

SEQ ID NO: 263115 - DNA, 143 bp, Homo sapiens
  chr11:2720203-2720346
  hypo
gggattcccacctccgatcctaattcgggccctgactcagaaccactaagtggatttccgactccggtcccaattcgggctttgactcaaaaccacaacatggattcccaacttccatcccaatagcgcggactcagaaccac

SEQ ID NO: 263116 - DNA, 263 bp, Homo sapiens
  chr11:2750149-2750412
  hypo
gcctgatttggggcagatagcggggtgattaatgctcgtgataaggtgttgattggttctgggagccactgcagacacaggggctgttgtgcatgcagggctggcaactgtagtcacagaacaatagcccgtttatgtagcacactcccaccccccgcctgccccaggcgggcacaaagggcgctcgggccaggaacccatgagctgggctctcccggggccgagggtccagacctgttgccgagaagctgcttagcaaggcc

SEQ ID NO: 263117 - DNA, 210 bp, Homo sapiens
  chr11:2753751-2753961
  hypo
gatgtggatgcagccgggcagtgaggagcgcaggcgaatgttacagcaggcgcgagcgaaggggcccgaggcaccggtgcttccgacggggcccgagggccgtctgacctttccggccacggggcagcagttgcgtgagcaggaacaatcgccccagtgtgcaaggcacaagcggccttttcttcctcaccgggccggcgcacacagctc

SEQ ID NO: 263118 - DNA, 493 bp, Homo sapiens
  chr11:2757685-2758178
  hypo
cctctggggttagacggtggcccccgtgcctggagagaaggtgcactttggggatgggaggcgctaggtgccaatggccctaggagggggctttggagctggacccttgagggagtcaatgccagctcatcgccatagcggcttgcttagggccgtccctcccaccccccagttacacagcctgcaaaccccaacctagccccttccaggtgtcccttgtgatcttccgccactgacataggtgtggcccagagcaaagggcggcttcccatttcacctgcgcatctgcagctggtatgcggctgccctggtgggttcctggctggctggcatgcgccctgcgcctctgctgggcctggtggggcctaagggtgaaaactcggtcaagataagatgcccacggctcagggaccccacagtcacaggtggggagtggcgcagagcctgggcctgcctcgggctaccctgaagtgccagccgagggtggctgagg

SEQ ID NO: 263119 - DNA, 109 bp, Homo sapiens
  chr11:2758838-2758947
  hypo
gactccgttcacggcgaagaagctttgtgtaaaatgccgggaagccttcgtgctgactcggccctcgcagaccataaaacacggctggtgggtccgagcccggcaggga

SEQ ID NO: 263120 - DNA, 385 bp, Homo sapiens; identical to SEQ ID NO: 214024
  chr11:2772656-2773041
  hypo

SEQ ID NO: 263121 - DNA, 330 bp, Homo sapiens
  chr11:2781507-2781837
  hypo
ggcgggcaggcgggcgtggaggagctaatgggtaagttaggcagcacattaacaaatgaaccagcggatgggggtggggagctcatctcattcatctacaaattattaacaataacttgttcattaatgaatgaacaggtgagatacaggtcagtgggtgcatgaatgagtgaggagatgaatgaagcgggtcttttctcagcagctgacccacggccaagcccccgctgggcagcacgtcccttcctcctctcccaagctgggtggtgcgggcagggagagggtccatccgcccttcagtaggtgaggaagccacgggcctggagggtg

SEQ ID NO: 263122 - DNA, 180 bp, Homo sapiens; identical to SEQ ID NO: 214025
  chr11:2782400-2782580
  hypo

SEQ ID NO: 263123 - DNA, 256 bp, Homo sapiens
  chr11:2818020-2818276
  hypo
cacacaagcccccactgctgcgccgtccctcctgcgccacctgacagatgtggcggtgagaaaacgatggggcagggaaacgttcgccattcggtgccaataaaggccgcctttatcccgaccgtaaatggtttctgtgtggagtgagactgtgcctgtcccgggcctaaccccccaagggccagagaggcgaaattagatccgtggggagagattttacaacgtatgggctggtggcaagtggcggcaaaccgtc

SEQ ID NO: 263124 - DNA, 116 bp, Homo sapiens
  chr11:2818306-2818422
  hypo
ggcctcacctgggctgtctccagcaccccaggatttacgaggactcggcccagagcctcgatgccggccgctccgggcagacctgggggggtggcgggggggaggccctgtgaaga

SEQ ID NO: 263125 - DNA, 155 bp, Homo sapiens
  chr11:2826847-2827002
  hypo
gttgtaacagagatcgtgtgaccaacgaagccagaacgatttactctctggccctttagagaaaagcgtgctagcccttgctctaagagtttcagtgaagagacgcaagatgcagaaatgaacctaattgtgtggtcttccgtgctggggaagcc

SEQ ID NO: 263126 - DNA, 131 bp, Homo sapiens
  chr11:2864467-2864598
  hypo
ccgcgaccttaccacgtgctgtgacctattgccacttgtgcccagctccacacaggagccgggtctgacatccgattgctcagagcctggtatgaaacattctaggtaccgccctgagagtggcttagtaa

SEQ ID NO: 263127 - DNA, 218 bp, Homo sapiens
  chr11:2865183-2865401
  hypo
cccagcagttcttggggaaccggccccagtgcctagagcatgcactgccttcccccagggcggcagctccccgatggcacctgcccggatgcacctccgcatgggtggggtctggcctcggccatgggaggtgcttctcaggctcctccatcgccaaaaaaaaccaaacgtgccagcgagatgaaggcgccctgcccgcagagtggtggggtgggact

SEQ ID NO: 263128 - DNA, 295 bp, Homo sapiens; identical to SEQ ID NO: 214027
  chr11:2868805-2869100
  hypo

SEQ ID NO: 263129 - DNA, 215 bp, Homo sapiens
  chr11:2874227-2874442
  hypo
ctgagtgaggcagagcgtaaaggagatggacagcctggcccagggcagccctgctggactccaggagatgcttgggcccgctccccactcttccttctagaccctcacccatggctcccagaggggacgaggccgcccttaattcccagagccaagcccagccccaccgcccacctatccccaggcttgggtttcgcacacgtacaggcagcgag

SEQ ID NO: 263130 - DNA, 160 bp, Homo sapiens
  chr11:2874823-2874983
  hypo
ccctcctgggcctgcgccctgggaagccggtggcagcggcaaacccacggagaggagttaacaggtgcccgaggacagagaagactcatgctgaggggagagaccccagagcaaaaaggcctcagagctcgtgaagccccccacccggtacagacaggga

SEQ ID NO: 263131 - DNA, 54 bp, Homo sapiens
  chr11:2885741-2885795
  hypo
tggggggttccagtagacaccgaggccgaggccggagggctcagccacccttgt

SEQ ID NO: 263132 - DNA, 102 bp, Homo sapiens
  chr11:2910403-2910505
  hypo
gccctcactgctgtgcgttccttctaggaaagacccagaagccagagaagcctaggtcccaatcctggtggatcttcgtgctggaatcgttaagccagctgt

SEQ ID NO: 263133 - DNA, 201 bp, Homo sapiens
  chr11:2934242-2934443
  hypo
gagcagtgtcccatacgacccagggcaccccaagcgctgagcggaggctgaggagtgcaggggtgtttgtaacagggcacctgctgtacagggaagaggctctcgggggcagatagatgcagggcaggggctggcaggcagctgagggagcagcaggatatgggcgacccaggcccgccgcccccccagccaggtgactca

SEQ ID NO: 263134 - DNA, 97 bp, Homo sapiens
  chr11:2934473-2934570
  hypo
gcccaggacactccggttctttctgttcttcccacagtgggcaggcagcaggccccgctgagatggttctggccccgctgtccctcaggacagccct

SEQ ID NO: 263135 - DNA, 197 bp, Homo sapiens; identical to SEQ ID NO: 214033
  chr11:2939101-2939298
  hypo

SEQ ID NO: 263136 - DNA, 304 bp, Homo sapiens; identical to SEQ ID NO: 214034
  chr11:2942534-2942838
  hypo

SEQ ID NO: 263137 - DNA, 41 bp, Homo sapiens
  chr11:2963522-2963563
  hypo
gtctcaaaaaaaaaaacaacgctgagcttcattgaggacta

SEQ ID NO: 263138 - DNA, 385 bp, Homo sapiens
  chr11:2965737-2966122
  hypo
aatgtgttctaaggttaggccgagcactctccacaggcctggtcagtgcggacacggccatccccggctgccggagagcgccgtcacccacttgaaaaccccacccaccagccgccaagcggtcacaccaaacccaggaccttcagacaggatgaatggtggggccccgcaatggggctactgagaaagcaggacttgacgctcatacgctccactgaaacgcaggacttcccagcccagtccctcagtggagaagactgccgaagcccggctccggcagcagggtggcgcctgcgtcatgaggacgggctcgcatcttcagccctggtggcagggagcggcgtttcttccgcacaggccttgcgcctgctaggaagtggcacat

SEQ ID NO: 263139 - DNA, 84 bp, Homo sapiens; identical to SEQ ID NO: 214036
  chr11:2987080-2987164
  hypo

SEQ ID NO: 263140 - DNA, 273 bp, Homo sapiens
  chr11:3021376-3021649
  hypo
acagcatgcgcatgcggagggcaaggacaaagaattggcgcacccacaacccaacactgccacactccccatgctgaggctgctgccaccatccacatgcactggatggagtgtccccccctggatgtccacagcaccaatgactgtcttttgtcccgatggatatggcctggcaccagcttccgcaggcatgaagcaggctgtggtttctgcttacgccctcctcagccaaggatgggtaagcaccttcgcgtctgggtggtgattcttagt

SEQ ID NO: 263141 - DNA, 107 bp, Homo sapiens
  chr11:3031444-3031551
  hypo
cagtccccctttagcgccctcccggggctgtggcatgccagggaagccaaggccacgtgcacagtcttgtatgaccccagggagctggggcccgggctcggccttcg

SEQ ID NO: 263142 - DNA, 158 bp, Homo sapiens
  chr11:3035022-3035180
  hypo
cagtgaccggagattgcgctactgcactccagctgtggaaagaagagtttttgttcgctgagagctgctcacactcctatatccataactgaataatagctcagcggccacgacacagggcagggactggcatgggcgacagagtgagactctgtctc

SEQ ID NO: 263143 - DNA, 33 bp, Homo sapiens
  chr11:3046728-3046761
  hypo
attataggcgtgagccaccgcacctttatttta

SEQ ID NO: 263144 - DNA, 166 bp, Homo sapiens
  chr11:3050212-3050378
  hypo
cccttgtgcttacccgtaaccgttgtccacaatcttctggacaaagttcacaatttctggcacatactcactaacccgggttaagacatctggagggagaacctgtgcaagacatgagaatgtcctgggattttcccttctgaaaaccacgcgctccataaaaacg

SEQ ID NO: 263145 - DNA, 52 bp, Homo sapiens; identical to SEQ ID NO: 214037
  chr11:3060355-3060407
  hypo

SEQ ID NO: 263146 - DNA, 53 bp, Homo sapiens; identical to SEQ ID NO: 214038
  chr11:3109135-3109188
  hypo

SEQ ID NO: 263147 - DNA, 330 bp, Homo sapiens
  chr11:3110964-3111294
  hypo
atgacaaccccagccgcggcctcctggcctccccacctcccgccctagctctaccaggtctctcgcactctctgacccggagtctggatggacaccctgagtgtggcccacctgtgcagctcctgctgggcctctcggatggagaggatggcctcgtgcagggcctgcagccgccgcgcctccttcctgcaccgagggcatgggctctcaccgcctgggacggccccgagtgagacaaaggaggggaggggaggagtgaggatgagctggaggtccagtggggctggcacgtgggtcacagggtcatatccagctcgggcctccacccca

SEQ ID NO: 263148 - DNA, 59 bp, Homo sapiens
  chr11:3122919-3122978
  hypo
ggtgggacacctgcgtgcagggaggcggctctgtaaacagccccggaaacaggtaatcc

SEQ ID NO: 263149 - DNA, 43 bp, Homo sapiens
  chr11:3127001-3127044
  hypo
ccatgccctctgcccggagccccaggctcgcacctgcagcagc

SEQ ID NO: 263150 - DNA, 181 bp, Homo sapiens; identical to SEQ ID NO: 214040
  chr11:3128518-3128699
  hypo

SEQ ID NO: 263151 - DNA, 425 bp, Homo sapiens; identical to SEQ ID NO: 214041
  chr11:3141593-3142018
  hypo

SEQ ID NO: 263152 - DNA, 311 bp, Homo sapiens
  chr11:3143176-3143487
  hypo
gcagcacgctgacccgtgtcctgggtggccggaggccgggcatcacctaccttcaggctgtcagccatgatgaccacgctggggtctgtcagagcgctgagcagctgccgtgtggcgcgcttcttctcctgccggtagttctccttctgcgcctgggcccggggcacccgcggtgggtcatgggagaaggcaccgagctgccccagctcctcccaccgtccagcccagggatgggtccaggggcaggggcaggagaggaagtaggaggaagtagggggtgtggaggcgaccaggtgcggtttgtcccctcc

SEQ ID NO: 263153 - DNA, 281 bp, Homo sapiens; identical to SEQ ID NO: 214042
  chr11:3145124-3145405
  hypo

SEQ ID NO: 263154 - DNA, 275 bp, Homo sapiens
  chr11:3162893-3163168
  hypo
gcattgccaagttgcgattctcatgcatcccagtgctttgccgaggtgcctacgccacccttgcatgtgtgtcctcccctgggcacaggatgctaaatggggtgacagtaggaacacccaccccccacccgcctcccacccagtgcagggactgggaggactctacgccctggaaggaaaaaagactgcaagagtacaaatgcgccattttcccactttctctccatgttacagttgcagtttcttttctttctttttattttttttgagacgga

SEQ ID NO: 263155 - DNA, 311 bp, Homo sapiens
  chr11:3164463-3164774
  hypo
gggggcagaggaggcaggtgcggagcggggcagaggaggcaggtacagcccagtgcgtggaccagcgaccggctccaggggcccatggggggctgcactgtgggcgaaaacgcacggacgcgacacacccaagagaaacaagcacacgcccccaggtggtccgcgcacgcacgctcccagcagcatggctcagggccatcagagagcggacacagccagacatccacatgggtgaacggataaacatggatcacatctgtgcaacggatggaagaacattcggccttcaggaggcaggaagcacggcactc

SEQ ID NO: 263156 - DNA, 69 bp, Homo sapiens
  chr11:3164804-3164873
  hypo
gatgcaccaagtcaaagaagccagataccaaaggccacatcttgtccgcttccacgcccacgcagtgtc

SEQ ID NO: 263157 - DNA, 393 bp, Homo sapiens
  chr11:3167019-3167412
  hypo
gaaccccggcctgtcgccctcagtggttggcaatgggcacctggtagcccagcctgcgttcacttaactttgttacctggaggaaagtcacaactccacgacactcctagatgactctgggtgggctgagggttacagggacactggtacatcctcccggggtcacaatcggcaaatgtgctctgaacaccaccctcagctgccgttccacttgcggatgggaggattcacctgggggcccctccgccctgccgggagcaagccagacccaggggccttggccccaggagcccacagaagccgagtgtcatttctattccaggcccttccatctcaccagatgctaggggtacaaaagaaaaataagccagggtcccgcggccccgtcggagc

SEQ ID NO: 263158 - DNA, 63 bp, Homo sapiens
  chr11:3168979-3169042
  hypo
agggaaggccgggcgtggccctagacagggcacaggggcatgaaaggcgctggggaggaacag

SEQ ID NO: 263159 - DNA, 190 bp, Homo sapiens
  chr11:3169704-3169894
  hypo
ggtcacagaagagagaggaacggaggtgagtgcggagtctctttccagcggctgtccaggtggaggagacggggcgctgtctggaaccggcttccatgacggcagggcgggggcaccgtcctctgcacttttgtacatctttgacattttctatcatacgaagccaaacgggagaggacacagatttctc

SEQ ID NO: 263160 - DNA, 123 bp, Homo sapiens
  chr11:3172032-3172155
  hypo
actgtgatcacgcacgcctgcatctgtgatgtcatccccatgccccagaatgccacccctggtctttctacaggttccgatcctagtccgtcttcccaggagtcacggcgggctgcccgctgt

SEQ ID NO: 263161 - DNA, 54 bp, Homo sapiens
  chr11:3179502-3179556
  hypo
aagtggaaacccagcatgggcgctggagtgggcgagggttcccttcaaagctgg

SEQ ID NO: 263162 - DNA, 295 bp, Homo sapiens
  chr11:3187736-3188031
  hypo
tagcagcaccagccgcttgtgtgcggatcacaggaacccacggcttacggaggcgagtgggctgatcggacttgccctaagcttacccccagggctagcattgccattccatagtcaccttgtgaggccttgggatgcagaactgctcagtcaagatgctcagggccatggtgggaccctgctccgcgtggcctgtggcaggcggcctctgcctctgcaggagagggtctgtgcagctgggatccacatacaactgctgggtctgctctttgaagactccgcccaaagctgaggt

SEQ ID NO: 263163 - DNA, 216 bp, Homo sapiens
  chr11:3212407-3212623
  hypo
aagatagagagagggcggggctggatgaactcgcaggtttggggtctcctcccctgttttcagctccatattcacagtagtgttgctttggtgaattttcacaggatggccaaggccaattcctgccctagggaaagcgtgaagaggcctgggctctattaaaatataaaatatttgtactcaggccgggcgcggtggctcacgcctgtaatccca

SEQ ID NO: 263164 - DNA, 35 bp, Homo sapiens
  chr11:3212863-3212898
  hypo
acgccgtctcgaaaaaaaaacgtacttagtggcgg

SEQ ID NO: 263165 - DNA, 757 bp, Homo sapiens; identical to SEQ ID NO: 214047
  chr11:3243293-3244050
  hypo

SEQ ID NO: 263166 - DNA, 272 bp, Homo sapiens
  chr11:3246365-3246637
  hypo
ctgatttacagactcgtacccgggcgctggggaggggatagggaagctggccgcaggcctgtctccgctcctgtcctcacacacacagtcctcacccacagcctccctgggccctgaggacggagcgggttacacaggctccctggaatgttggctgcccccaggagtagccgcctgttcttgggaattctgtgctgaccgcggcagccccgcaggggcccggggttgcgggtggatggggtgggctgggcactgaccgaggagctttgcct

SEQ ID NO: 263167 - DNA, 34 bp, Homo sapiens
  chr11:3247717-3247751
  hypo
caggcctgctgggcacgtgcgggagcctgaggtg

SEQ ID NO: 263168 - DNA, 246 bp, Homo sapiens
  chr11:3249605-3249851
  hypo
aggtggtcaggtggcgtgggcggcggcacgagtaccaggctgggaagagggcggccaggcactgctccacgctgacggccgccaggagactcaggcccacgatgtagcagaagaagcgcagcgttgccaggctggtctgcacgaagcccgggaagtccagccggccttgcagcaagtcggggacgatggccaccatgtggcagccaaggaagatgagatccgcgcaggccacgtccaggaggtaga

SEQ ID NO: 263169 - DNA, 237 bp, Homo sapiens
  chr11:3254282-3254519
  hypo
acctctcctcttgcggaccaagtgagagcaagtttcccgcacgtggcctttgacctgtcactacatcagcaggcatcccccagggcaccggcatcctccatccccaaaacggaggggccgcacacaggtcgtctggcgtctgtgcaatgctggtgtctgatgaatgtgtcgcgctggtgtctgacgtccatgcggggctggtatctgacaggcagcagtgccgcttgctgagttgtg

SEQ ID NO: 263170 - DNA, 86 bp, Homo sapiens
  chr11:3511141-3511227
  hypo
cacatagtattcttacgggttaaattgagtcctcttcaaaacatgttgaaatcctaaattctaggagctcagaatgtgaccttatt

SEQ ID NO: 263171 - DNA, 125 bp, Homo sapiens
  chr11:3681140-3681265
  hypo
tcaatgcagccgtgcgtgaggcgggccgctcccgggcccactacctccaccacttctccttcaagacactccatttcctgctgactgaggccctgcagctcctgggcagcggccagcgtccaccc

SEQ ID NO: 263172 - DNA, 225 bp, Homo sapiens
  chr11:3688512-3688737
  hypo
ggaagacggtgagcgccagcagcacggtgacgcccagcgacaccttctcgcctgagtcggcaggcaggtggaaggcgagcggcgcaagcagcgagatgagcacgcagggcagcagcaggttgcacacgtaggcggcggcgcggcggcgcagcagcagcgtgaaggtgacgtcggggtagggctcggagcagcagccgtaggtgagcacgcgccgccgcgccggca

SEQ ID NO: 263173 - DNA, 50 bp, Homo sapiens; identical to SEQ ID NO: 214050
  chr11:3688971-3689021
  hypo

SEQ ID NO: 263174 - DNA, 222 bp, Homo sapiens
  chr11:3697393-3697615
  hypo
ggctcccaacagccagttctcgcagataggactgggtaaggctgcgcagttcgtccatggcatagtcctcaggcatgggaagccggccaatgtggggagccaagaggcgcaaagggactcgctgagggtctggtgttgagtcggaggttctatcaggaggatgatgcagactcagcaccacgcgcagcaggttggctacacgtttggccatgtctagagaga

SEQ ID NO: 263175 - DNA, 149 bp, Homo sapiens
  chr11:3705440-3705589
  hypo
tcaaaaacaaaacaaaacaaaacaaacacatagcattaatttttaaaaataaaataaagtattttcatgttcaaaaagttggggcttggctcggcgcagtggctcacgcctgtaatcccagcactttggcaggccgaggcggacagatc

SEQ ID NO: 263176 - DNA, 39 bp, Homo sapiens
  chr11:3767212-3767251
  hypo
aacagggccgggcacggtgcctcacgcctgtaatcccag

SEQ ID NO: 263177 - DNA, 36 bp, Homo sapiens
  chr11:3828814-3828850
  hypo
ggcgtgagctaccgcgcctggccctcacagggtttt

SEQ ID NO: 263178 - DNA, 359 bp, Homo sapiens
  chr11:3845111-3845470
  hypo
ggtgcccaattacctgccctcggtgagctcagccatcggcggggaggtgccccagcgctacgtgtggcgtttctgcatcggcctgcactcggcgcctcgcttcttggtggccttcgcctactggaaccactacctcagctgcacctccccgtgttcctgctatcgcccgctctgccgcctcaacttcggcctcaatgtcgtggagaacctcgcgttgctagtgctcacttatgtctcctcctccgaggacttcagtgggtgcctggatgagggaggagtggggaagtgttccctgaggggacgggcctgcccctaccacattcggaccttcctacttcgtggtgtgggcactccctgca

SEQ ID NO: 263179 - DNA, 99 bp, Homo sapiens
  chr11:4095786-4095885
  hypo
gaaaagaagctgcgcgatgagatcaaccttgctaagcaggaagcccagcggctgaaggagctgcgggagggtactgagaatgagcggagccgccaaaaa

SEQ ID NO: 263180 - DNA, 37 bp, Homo sapiens
  chr11:4494114-4494151
  hypo
ataaggctctaaataataaacgttaggctgggcgcgg

SEQ ID NO: 263181 - DNA, 152 bp, Homo sapiens; identical to SEQ ID NO: 214052
  chr11:4599983-4600135
  hypo

SEQ ID NO: 263182 - DNA, 120 bp, Homo sapiens; identical to SEQ ID NO: 214053
  chr11:5177827-5177947
  hypo

SEQ ID NO: 263183 - DNA, 158 bp, Homo sapiens
  chr11:5687849-5688007
  hypo
catctaaggtttcagatttccgggaaaaattacaaacacttggcaaatgagaaattatgtgcactaaactattactggcctgaatatcgtgtggttagaaagaacttgataccaccacgtaggtgtgcgaggtgtgcgattttagacacaagaatagc

SEQ ID NO: 263184 - DNA, 164 bp, Homo sapiens
  chr11:5950918-5951082
  hypo
ttcaggtcacgcaccgcccacttcctcacgggtccctccttcgccaatcacgccacctcctcctccacctccatcatctcctcctcctccaccactaccctcacctgcccctcccaagtcccctgtggccgcacacacccaggccaggccggcactccttgccc

SEQ ID NO: 263185 - DNA, 75 bp, Homo sapiens
  chr11:5951372-5951447
  hypo
gcggttccatccaccgatccagagtgggattaccaagttgggcaagcagggcgtcgccgccgggacataatggtt

SEQ ID NO: 263186 - DNA, 34 bp, Homo sapiens
  chr11:6432992-6433026
  hypo
ctgactgcccctctccggccgcacttccatccca

SEQ ID NO: 263187 - DNA, 236 bp, Homo sapiens
  chr11:6477624-6477860
  hypo
tggctgccggggccgccaggggacttgacacggcgcttcacatcgtccggggaaggtggcaggtcccccggacgcagggcacgcacgcggaaggggctgccgcgcactggctgtccgtagagcagcaccgagaggagcagctcgccttccgtgcgcgctgtgtacactagctcatatgtgccattcttgtggtccaccactggcaccggaaggcgcgtgccgtccgggccggtgat

SEQ ID NO: 263188 - DNA, 80 bp, Homo sapiens
  chr11:6478112-6478192
  hypo
caatgcagccagccgctctcgcatgtgcttgcgcaccagcaacacctccggggccgagcccaggcgcagtgcctgctctg

SEQ ID NO: 263189 - DNA, 100 bp, Homo sapiens
  chr11:6497209-6497309
  hypo
cacctggccaggtctcagctttcaaactgacatccccatttccaccccagtccatgccagatgcccctcctttgtgctcccacagcgccctctgtacttc

SEQ ID NO: 263190 - DNA, 120 bp, Homo sapiens
  chr11:6521106-6521226
  hypo
ttttttaaaatatctggctatcagagctctctacaggatttcagaatgcttacagagaccttctcttctcagcgttctctaactttcgatttttttttttttttctgaaacagagtctca

SEQ ID NO: 263191 - DNA, 113 bp, Homo sapiens
  chr11:6585065-6585178
  hypo
tgttctgcactatgggctggcgcattgccggggactgcccacggacctgctgctgcagcaagtggaggcaacactcactcgggagcaggcccgcctgggctactaccagtttc

SEQ ID NO: 263192 - DNA, 89 bp, Homo sapiens
  chr11:6730930-6731019
  hypo
aataaatctgataatcgtacaaacttagaactagaaagactggtctaatatgtttacagagtgaggattttgaacgcaggtgtctcccc

SEQ ID NO: 263193 - DNA, 94 bp, Homo sapiens; identical to SEQ ID NO: 214056
  chr11:8254114-8254208
  hypo

SEQ ID NO: 263194 - DNA, 160 bp, Homo sapiens
  chr11:8255452-8255612
  hypo
tttagaaaaaaatggctttgcgctccttcaggaaaggttttaaagcattacccagtaattactactcacccatgaaaacactgatatttcacaatggatgatgtttgcgccgacacgcacgcctgggcacacactcagatgcatgcgctgggcccagcag

SEQ ID NO: 263195 - DNA, 202 bp, Homo sapiens
  chr11:8269570-8269772
  hypo
ctgggtcttaacttacgtgaccagggctcagaaaagttaagtggtttgcccaataacacacagcagtgggtggtagagcaagattgcccgtgatctcacagtcagaggaccacagtccatgcttgttacctcccaagtcaaaagacagctacccctgcagcaagcggtcaggccctcatgccgctgccgtcaatttcaaaga

SEQ ID NO: 263196 - DNA, 533 bp, Homo sapiens
  chr11:8336904-8337437
  hypo
gctccagaagccaccgagtagaggctcggggcctgctgccatccatccctggagtcatctctccaggttgagtacggcacgatttaatgctcccatccctccattcctgctctgcatgacaaattgttttaataaacataaaccgggtaataataaagtcataataagcccgcgactcaccttatatcactgcagttaaatcctcccataagccggcactggttacaatgacaattacggccgggccaatccgcaggcaggcctgcgtgcggacagatttaatatcgtttgtaaatatgattagtgggctgtcatgttattgcaggctgctatttacatttctctccggggttatacactccgccaaatcaacattaagtagtgggtctctctttcctccttaaatcatacattccttctgcctgcgccaatcccgcttaatgaagaaagggaacctgacggcaggcgctgggcagaacggagcctggcctcggcatttttctgaagacagatgggcacggggagccccaaga

SEQ ID NO: 263197 - DNA, 214 bp, Homo sapiens
  chr11:8358361-8358575
  hypo
ggctgtggggcccgcgggctgcaaggccagtgctctgcaggcagggccaggctgcctcttgcccacacctggccactaagccccgaggccggtaatgaggatctcctgcaccaccgtggctcagaggaggcctcctggcagcctggccttgttctcattgtcctgctccagcccaaatgcaccaggcccaggcctcaatcgtgatcaatgggcc

SEQ ID NO: 263198 - DNA, 166 bp, Homo sapiens; identical to SEQ ID NO: 214058
  chr11:8656271-8656437
  hypo

SEQ ID NO: 263199 - DNA, 169 bp, Homo sapiens
  chr11:8725356-8725525
  hypo
gtccactgtctctcccgcctgatggtgtactcccagaaggcccagtgatccgccagatgctgggtacaccccaaatggtcagtgaacgtggactcacagaaagaagtagcacaatgatgccagagccctttatacctgctccaggccctgtccccgccccaaaattcgc

SEQ ID NO: 263200 - DNA, 31 bp, Homo sapiens
  chr11:8735205-8735236
  hypo
catgagccaccgcgcccggctgagatctaca

SEQ ID NO: 263201 - DNA, 41 bp, Homo sapiens
  chr11:8751526-8751567
  hypo
tccttcttgggtctccgggtgactggcggggctggggtgga

SEQ ID NO: 263202 - DNA, 366 bp, Homo sapiens
  chr11:8752347-8752713
  hypo
gcccaggctgtgggcgcgggtaccggtacgggtcagcaagacgccccgggggccagctgctggccccgggaatggcgtgctctgggcaagggggaggcaggcagcgacccctgctacatcctgggctgcgccttggacactttccttttgggcgtctctcttgcacgccgaagggcttctgtccaaataaccgaagctggcggtcttgaagggacaggtgggtggggaagtatctggggagggatcttgaggattctggggtgaaggagctggggggtgccggtccttgaggagcacccgggagctggagtggctggggtacctgcaggctgaggtttcactatcactgagcgggtagatgggact

SEQ ID NO: 263203 - DNA, 179 bp, Homo sapiens; identical to SEQ ID NO: 214060
  chr11:8759790-8759969
  hypo

SEQ ID NO: 263204 - DNA, 35 bp, Homo sapiens
  chr11:8791120-8791155
  hypo
aaaaactcccataagcgtctcgtcttagaaaaaag

SEQ ID NO: 263205 - DNA, 125 bp, Homo sapiens
  chr11:8829417-8829542
  hypo
cttcttcccagacaccactccgggatatggctggcaggtcttccccatcctacagtaaagctggggctgtgggtgacgcgctctagtatgccatacgccctttcgactcaatgaggacagacctg

SEQ ID NO: 263206 - DNA, 190 bp, Homo sapiens
  chr11:9074512-9074702
  hypo
ggacctctcaaagcacggtggtcggggcatctggcggaggacctggaagccctttgagggaatctaacacctggaggccagagaggcctggccccagtgtgaggacctgccccgggaactgggccccactcacctgaagagaggtgaatgccagagtgacatctgaggaagcacccgtctcctccaccac

SEQ ID NO: 263207 - DNA, 77 bp, Homo sapiens; identical to SEQ ID NO: 214061
  chr11:9328213-9328290
  hypo

SEQ ID NO: 263208 - DNA, 42 bp, Homo sapiens
  chr11:9343803-9343845
  hypo
tagaacttaatacacatttacgccagggtgtaccacgaacat

SEQ ID NO: 263209 - DNA, 240 bp, Homo sapiens
  chr11:9405263-9405503
  hypo
tgagccaccgcgcctggcaggaaggtgtattttaatagggattatgcttttactctgcattaagaggtgatttatatgaagtcccaactaaaatttggatactcaataaaaagccatgatttcagtatttggtaattactaatacgtaatgtgataaaaacctttcacacataaagttcatttaatcttccgtgttattgccttaggataaagtctcataagtggaattactgggtcaga

SEQ ID NO: 263210 - DNA, 36 bp, Homo sapiens; identical to SEQ ID NO: 214063
  chr11:9418901-9418937
  hypo

SEQ ID NO: 263211 - DNA, 36 bp, Homo sapiens; identical to SEQ ID NO: 214064
  chr11:9422432-9422468
  hypo

SEQ ID NO: 263212 - DNA, 41 bp, Homo sapiens; identical to SEQ ID NO: 214065
  chr11:9531940-9531981
  hypo

SEQ ID NO: 263213 - DNA, 41 bp, Homo sapiens
  chr11:9540962-9541003
  hypo
gattacaggcgtgagccaccgcacccagcttggttttgcct

SEQ ID NO: 263214 - DNA, 93 bp, Homo sapiens
  chr11:9548319-9548412
  hypo
attgcaggccaggcacggcaggctgggagtacaggtgcacgctgccatgcgcagctaatttttgttttttgagacggagtctcgctctgtcac

SEQ ID NO: 263215 - DNA, 151 bp, Homo sapiens; identical to SEQ ID NO: 214066
  chr11:9552471-9552622
  hypo

SEQ ID NO: 263216 - DNA, 323 bp, Homo sapiens; identical to SEQ ID NO: 214067
  chr11:9554672-9554995
  hypo

SEQ ID NO: 263217 - DNA, 120 bp, Homo sapiens
  chr11:9567890-9568010
  hypo
cggccatcttggctcctcccgccgaaatttttaagttctaaacaactctttaatcagtgacaaaccaaaactgaattacagacttttattttttttttgagatggagtcttgccctgtcg

SEQ ID NO: 263218 - DNA, 36 bp, Homo sapiens
  chr11:9593563-9593599
  hypo
aaaaaggccaggcgcggtggctcacgcctgtaatcc

SEQ ID NO: 263219 - DNA, 69 bp, Homo sapiens
  chr11:9596898-9596967
  hypo
aacagggaagatgcaccttttaaagtgagtttgttttgttttcaatgtactgtttgtcatcagcctagg

SEQ ID NO: 263220 - DNA, 49 bp, Homo sapiens
  chr11:9620658-9620707
  hypo
tttgtcacacactattgctacgagtatcgaacaacccattcttggggag

SEQ ID NO: 263221 - DNA, 35 bp, Homo sapiens; identical to SEQ ID NO: 214071
  chr11:9771063-9771098
  hypo

SEQ ID NO: 263222 - DNA, 84 bp, Homo sapiens
  chr11:10004724-10004808
  hypo
ttcaagcccgtctggcagcccgtcttgccctctgcctggaaacagactcagggctactggggggcacagcgggagagaaactgg

SEQ ID NO: 263223 - DNA, 226 bp, Homo sapiens
  chr11:10509588-10509814
  hypo
gtttgtggttttgcatccttcgggatcatgtggatttaaagaaaagcctctgatatgctcagatctctgcctctcttctcccaccaaggggatggcagccttgtccggggctcctggcagtctccgcctgcaggggccgcaactgcggtaggagcgaaggttaaatgatcatggccctagcctttccattctcttttgctgaagcgctgtgcagtgaggcacaggg

SEQ ID NO: 263224 - DNA, 112 bp, Homo sapiens
  chr11:10512606-10512718
  hypo
cttggagatgctcagccagccgtggacagcattccctgccctgaggtcagccgcctcctcaccccagcccgggctgagcgcccagtcggccgcagcagtagctccagagtgt

SEQ ID NO: 263225 - DNA, 192 bp, Homo sapiens; identical to SEQ ID NO: 214072
  chr11:10519312-10519504
  hypo

SEQ ID NO: 263226 - DNA, 267 bp, Homo sapiens
  chr11:10522099-10522366
  hypo
acacaccagggcacactccacgtgtacctgtacatccctgagataatggaagcataggacatgctatcacacatgcacggtcacttactgccacaccaacaatgtccacacgtgcatattttcgttcagcaaatcactgcatctggcatgcgataggcattgccctgggcactggacaaataacggggaacaaaacagactaaatccatgcatgcccttacaggcagaggctcctaccaatacgcacacagacgaggcacacgtggc

SEQ ID NO: 263227 - DNA, 193 bp, Homo sapiens; identical to SEQ ID NO: 214073
  chr11:10712069-10712262
  hypo

SEQ ID NO: 263228 - DNA, 34 bp, Homo sapiens; identical to SEQ ID NO: 214074
  chr11:10811103-10811137
  hypo

SEQ ID NO: 263229 - DNA, 151 bp, Homo sapiens
  chr11:10865158-10865309
  hypo
agtgctgggattacaggcgtgagccaccgcgcgcggctctagtggagtcttgaaatgactgcagctcttgctaacaccttcatcgcagccagtgagagactctgaagctaagctccacctgattcctgacgtatagcaactgtgaggtaat

SEQ ID NO: 263230 - DNA, 139 bp, Homo sapiens
  chr11:11177834-11177973
  hypo
tcagctgagtctgtcgccagggattgctctcagatgccgagagccacctcgcccgtcacatccccttcccaggggctgtgcatccaatgtcgagtcagtgcgggggattagagggccggggtcctcgccctacctcagt

SEQ ID NO: 263231 - DNA, 42 bp, Homo sapiens
  chr11:11178003-11178045
  hypo
gcttccctgcaggattgcggaggtcttcgctgcttctgcatc

SEQ ID NO: 263232 - DNA, 206 bp, Homo sapiens; identical to SEQ ID NO: 214076
  chr11:11534254-11534460
  hypo

SEQ ID NO: 263233 - DNA, 207 bp, Homo sapiens
  chr11:11601780-11601987
  hypo
cttggtgaaatacctcggcagactcagggcaaacctcatgtgttctcaatccgacagcaaggaaggtgccatcttattccttctccctcccgccacccccaaagactagccctgggtcctcctcatcaaatttgctttcctaagaccgtccctgagatgtagccatgaacatcccaggcttctcatgtttcccggcttttgcccaga

SEQ ID NO: 263234 - DNA, 437 bp, Homo sapiens
  chr11:11833040-11833477
  hypo
gctccaggccttccgctgcggcacctaaagaggccgggcggcccagaggcccgcaagccacgcccccttccaggccccgcctccgtttggccactccccttgctgtcagctcttccaccagttcctgcccctgcccctttcctcccacgcatccgcacccgagcagccccacctgctaagccacgccccctgtcctgtgctgtcctgcactcccaggtgccccacgctttcccaccctcccagtcaaccggcgcagggagcctcatcattattagtgcgtggacaatcacatgtaacaaaatgagctaacgtgcagttatctaccaggtgccaggctctgtcctaagtgttctacacataaacgttaagttaccagtattgtgcttattttataattgggagactgagacataggttggttaaaaagtttaagactt

SEQ ID NO: 263235 - DNA, 75 bp, Homo sapiens
  chr11:11862893-11862968
  hypo
ggggtggctgcctccccaagcagggggtggcccctgaggtccctccagctgggggcccttgagagggagggtggg

SEQ ID NO: 263236 - DNA, 111 bp, Homo sapiens
  chr11:11960215-11960326
  hypo
gggctcctttttggcgtaggcaataagtcgagtttttgttttcgtcatttttaagtgcggcaatgctgcatttagtgtctggtgacactagactagcgttccacatgcctt

SEQ ID NO: 263237 - DNA, 245 bp, Homo sapiens
  chr11:11991422-11991667
  hypo
aatgtcaggcatgataccatcgctgtttttacggataagaaaaccgaggctccgagtagggtgaacggccgcccaagtgaagggactgagtctgagccagagccccagcggccagagaagtcccaacagggctgggaacaaatcacagacgcgctttgtctcagcccagcacacgctcttgtgcacagacacaactcaggctgctcagccggaagcctcccgacgttctttccaaagcagaatgg

SEQ ID NO: 263238 - DNA, 168 bp, Homo sapiens; identical to SEQ ID NO: 214079
  chr11:12073851-12074019
  hypo

SEQ ID NO: 263239 - DNA, 43 bp, Homo sapiens
  chr11:12106316-12106359
  hypo
gatcagatagggccacgcaaggggtttggggtgctggcaatga

SEQ ID NO: 263240 - DNA, 262 bp, Homo sapiens
  chr11:12115688-12115950
  hypo
gagagtgtgagtaccgagaaagcatggcactgggcttgaaggatgaggagttcgccagacacagaggatgaggagagcagcacgtgagtaaagaaaacagagaaaggaactctctgtcatgttgtgggctggagggcagcattcacactggacaagtgcttcagaaagatccttctggcaggtagtgggcagaaaaatgagtgaagtcagagcgatcgactaggaatccactgaaagtggatttaaatgagaggtgatgaaa

SEQ ID NO: 263241 - DNA, 102 bp, Homo sapiens
  chr11:12145846-12145948
  hypo
ttgcgatctttgaccgactgactttgggaagagtgattgaagccgcccctagcctagtctctgtccttttgcttctctgacctaagacgcctttctgaagct

SEQ ID NO: 263242 - DNA, 86 bp, Homo sapiens
  chr11:12158740-12158826
  hypo
ggtaatgatgatgacgggcgggcagggctgccgcttctgcccaggtggccgcccttggagctcgccaggctcgcccggtgtgtggg

SEQ ID NO: 263243 - DNA, 50 bp, Homo sapiens
  chr11:12172361-12172411
  hypo
agagttggttaaggcgaggatgagctaccctcaacttttatgtgaaaatg

SEQ ID NO: 263244 - DNA, 69 bp, Homo sapiens
  chr11:12172441-12172510
  hypo
tacctagagcttgaggtggtaggagttatccccacgcagcttcccgggaactgacgcttattgagctca

SEQ ID NO: 263245 - DNA, 398 bp, Homo sapiens
  chr11:12182000-12182398
  hypo
ggaggggacacctgccaccacgtgcgctggacatccccaccgcacctcctcacgaatcctgaaccttgaacttgctgtcattccaccactgtcccgctctttccacactcacatccctgtgtgggtatttccatggcctggaatgtccactgcccagtcttctagtaaaataaatctcattcctaaaattgaagctttcttgagatttctctcttgtggcccctctggactcctcgaggctctgttggacaccgcctgctctgggcttccatgcccttggttcatattccacaagcacttgcctgtggtcttgtaatccatctgcccctgtgggcggggcctgagcctacgtattcccggccccttgagtggtgcccgactcttgctaatgcaccagt

SEQ ID NO: 263246 - DNA, 406 bp, Homo sapiens
  chr11:12183611-12184017
  hypo
ccctactttcacaggtgtgacgtttctccagatacttcatgctgttcacctgtgtcctcgccgcaccactgccgcacacgactcctgaaccatgggggaaaacgaggatgagaagcaggcccaggcggggcaggtttttgagaactttgtccaggcatccacgtgcaaaggtaccctccaggccttcaacattctcacacgacacctggacctagaccctctggaccacagaaacttttattccaagctcaagtccaaggtgaccacctggaaagccaaagccctgtggtacaaattggataagcgtggttcccacaaagagtataagcgagggaagtcgtgcacgaacaccaaggtaaggggaaaccctcctagtcttacctttgcagggcgtgtgggttgacat

SEQ ID NO: 263247 - DNA, 133 bp, Homo sapiens
  chr11:12205861-12205994
  hypo
cctgtcctgcaagccgctccctgttcaccattctcctcctggttaagtacgggcatctgtgtcccaagagagggctccactgcagaccctgaccaccagcatacctgcccacagaggccgaaaatgtggtagt

SEQ ID NO: 263248 - DNA, 427 bp, Homo sapiens; identical to SEQ ID NO: 214082
  chr11:12209618-12210045
  hypo

SEQ ID NO: 263249 - DNA, 41 bp, Homo sapiens; identical to SEQ ID NO: 214083
  chr11:12214008-12214049
  hypo

SEQ ID NO: 263250 - DNA, 99 bp, Homo sapiens
  chr11:12225814-12225913
  hypo
ggaccctgtggcttgcgcactgccattgaacttgcctacctgggagccaaagtggtcgtggtggagaagagggactccttctcccggaacaacgtgcta

SEQ ID NO: 263251 - DNA, 172 bp, Homo sapiens
  chr11:12230962-12231134
  hypo
ctcatagccaccacacggggggtataatcattctcttcccacctctctctgccaactcatctcatttctctgtcctggtagaaattggctggcgggcagaatttctccctacagaccattctctgtcggagtttgagtttgacgtcatcattggtgccgatggccgcaggaa

SEQ ID NO: 263252 - DNA, 287 bp, Homo sapiens; identical to SEQ ID NO: 214086
  chr11:12240002-12240289
  hypo

SEQ ID NO: 263253 - DNA, 280 bp, Homo sapiens; identical to SEQ ID NO: 214087
  chr11:12247647-12247927
  hypo

SEQ ID NO: 263254 - DNA, 344 bp, Homo sapiens; identical to SEQ ID NO: 214088
  chr11:12248494-12248838
  hypo

SEQ ID NO: 263255 - DNA, 131 bp, Homo sapiens
  chr11:12250137-12250268
  hypo
aagggagtttgaggcgctggcagaggcagagcagccaggaaagaagatgggaaggggaacaggcagttggaaagtcagagagggagtcgggaagcccacggaggagagcgcttctacgggatgggccctgg

SEQ ID NO: 263256 - DNA, 54 bp, Homo sapiens; identical to SEQ ID NO: 214089
  chr11:12253012-12253066
  hypo

SEQ ID NO: 263257 - DNA, 118 bp, Homo sapiens; identical to SEQ ID NO: 214090
  chr11:12260726-12260844
  hypo

SEQ ID NO: 263258 - DNA, 138 bp, Homo sapiens
  chr11:12262549-12262687
  hypo
tgtggctgcttttttggactcgcctttcttctcccaggaacgccgtgtctcagggataggtaagccggtcctgtgctcttcctccggccctcctgttcactcttgctgccccaagccggaggaggccacacccagccc

SEQ ID NO: 263259 - DNA, 208 bp, Homo sapiens
  chr11:12267673-12267881
  hypo
gacttggtttccaccgggcattagatccttctaagagacggcagggagcagcctgctggaaacatgcagagctgctgggtaagacagagatgctgtcagccactaagcgtgtccccatcacatcagcatcacaccggctgaggccctgcctgctgctgtctctggctcttcaggcagccctcccctgaggactcggctccctatcagc

SEQ ID NO: 263260 - DNA, 218 bp, Homo sapiens
  chr11:12276133-12276351
  hypo
gggtctgagtaccacgtttaccccatgcccctgctgagtgaagctgtgaatgccccagggctggggggcaggagaccagagtacagtctggaatcttgaatttatttgctaagcggcctcagatagaccgttcccttctctgggattcatgtacatatctgtgcaatgagaggctcaggaactttggaaggccttgcaccccacggtgaatgtaacag

SEQ ID NO: 263261 - DNA, 317 bp, Homo sapiens; identical to SEQ ID NO: 214091
  chr11:12276763-12277080
  hypo

SEQ ID NO: 263262 - DNA, 381 bp, Homo sapiens; identical to SEQ ID NO: 214092
  chr11:12278213-12278594
  hypo

SEQ ID NO: 263263 - DNA, 170 bp, Homo sapiens; identical to SEQ ID NO: 214093
  chr11:12279381-12279551
  hypo

SEQ ID NO: 263264 - DNA, 320 bp, Homo sapiens; identical to SEQ ID NO: 214094
  chr11:12281098-12281418
  hypo

SEQ ID NO: 263265 - DNA, 469 bp, Homo sapiens; identical to SEQ ID NO: 214095
  chr11:12283307-12283776
  hypo

SEQ ID NO: 263266 - DNA, 395 bp, Homo sapiens; identical to SEQ ID NO: 214096
  chr11:12283996-12284391
  hypo

SEQ ID NO: 263267 - DNA, 198 bp, Homo sapiens
  chr11:12296625-12296823
  hypo
acttgaatgaagaacgaaaggacaagagcagtcaaagatgctggcgaggtgttggctggagcaacaggaagctgaagttgccatttactgagagggggaaggctatgggcaagacatgttgggtgggtggagaagatgaagaactctgttcggacttgttgagtctgatgtgtctgttagacacgtagacggagatgc

SEQ ID NO: 263268 - DNA, 362 bp, Homo sapiens
  chr11:12298408-12298770
  hypo
aaagcatcacctatgcgccaggtcgataaataaaatagacacatatgctagagagtggctggtcagctgccttagattgggtggccaggaaaaggcctctgtagcaattattgatgcccacaataatgctgagtgacaaaccagccccaaagcgagtgacttaaaccagccaccgttcattacaccacgattgtgtaaaaaagtagaccggagtaagccaaccctgaccaagtaagccaggtgcagctgggcagttgtggtcttggtgggctcgcctgtgtgtttgggccagtagggttctgctctggagcctgcgtgtcagctggggtgacagagggctattgggccgtgggtctttcatc

SEQ ID NO: 263269 - DNA, 191 bp, Homo sapiens; identical to SEQ ID NO: 214097
  chr11:12315587-12315778
  hypo

SEQ ID NO: 263270 - DNA, 33 bp, Homo sapiens; identical to SEQ ID NO: 214098
  chr11:12554120-12554153
  hypo

SEQ ID NO: 263271 - DNA, 139 bp, Homo sapiens
  chr11:12769804-12769943
  hypo
ggtctaatccctgcaattcttagaaatacctaccaaggacaatatcagcaaaagttttttgagttccaacaatctgtcaggtattgggagagccccaggcacctgaaggagtggagtaggtggccggctgtgtccaggc

SEQ ID NO: 263272 - DNA, 215 bp, Homo sapiens; identical to SEQ ID NO: 214099
  chr11:12823851-12824066
  hypo

SEQ ID NO: 263273 - DNA, 33 bp, Homo sapiens
  chr11:12841278-12841311
  hypo
tgaaccaccaagcccggccggtaacaaagtctt

SEQ ID NO: 263274 - DNA, 129 bp, Homo sapiens; identical to SEQ ID NO: 214100
  chr11:12944977-12945106
  hypo

SEQ ID NO: 263275 - DNA, 104 bp, Homo sapiens
  chr11:12990320-12990424
  hypo
tggaatgatgatcccgagtaatttataagctgactccactgacatgggctccagcaagtcctggcgggtgtttggtggtgcagggggagcggcccttgctggtt

SEQ ID NO: 263276 - DNA, 86 bp, Homo sapiens
  chr11:13114153-13114239
  hypo
ctatcatgagactctcgtgtcatctttgtgccaggtgtggattttatttttcttttttcttttctttttttttttttttttttttt

SEQ ID NO: 263277 - DNA, 70 bp, Homo sapiens; identical to SEQ ID NO: 214101
  chr11:13185770-13185840
  hypo

SEQ ID NO: 263278 - DNA, 184 bp, Homo sapiens
  chr11:13334701-13334885
  hypo
cccacctcaggcctcgctttcttcagctctgctgagcgtgcctctcctgggtcggctcccggttctcctccagctgctgagattccagcctccacagcctgctctgctggttctctgttctttgtccttagcttctggtttggcttggtccctttcacgtcatccttaacgtcctccctgggtg

SEQ ID NO: 263279 - DNA, 519 bp, Homo sapiens
  chr11:13375541-13376060
  hypo
cacagcacagggaccgagaagctgctcagcttctctaggcttttatgtcttcaccagaaaaatgagcgggtgggcttaaatttcctacaaaaactcttaaaataaatatgatgctctttccattctatcacatgcctgttctgggtccgggggtgtgagagatgcattagtgctgctgtaaaccagccccgggtctccccccccggccccccaccaccaaacccccaagcaccaacctgggttctccaccacttttgagagctcatcgaaataaacacacctttgtgcctcttgtaacaattccagatcatccaatggcagaccagagaatggacatttcttcaaccatcagtgatttcatgtccccgggccccaccgacctgctttccagctctcttggtaccagtggtgtggattgcaaccgcaaacggaaaggcagctccactgactaccagtaaggcctttggggcatgtcttcctcttgttaaacttggtgtcagttctcgggcatggaacatc

SEQ ID NO: 263280 - DNA, 33 bp, Homo sapiens; identical to SEQ ID NO: 214105
  chr11:13700080-13700113
  hypo

SEQ ID NO: 263281 - DNA, 147 bp, Homo sapiens; identical to SEQ ID NO: 214106
  chr11:14498537-14498684
  hypo

SEQ ID NO: 263282 - DNA, 122 bp, Homo sapiens
  chr11:14520358-14520480
  hypo
ttctcaaaataatatcgaagtttacctagatcattttttaagctaatttcagatggtggttctgaatccattggcacgttaattaacgtgtagcatacgttctcagccgccgtcatggtttc

SEQ ID NO: 263283 - DNA, 120 bp, Homo sapiens; identical to SEQ ID NO: 214107
  chr11:14542801-14542921
  hypo

SEQ ID NO: 263284 - DNA, 80 bp, Homo sapiens
  chr11:14564352-14564432
  hypo
aaaccatctttgcaggttggcgaagctaatggattccttctcagaatgatttttttctttctttcttgagacggagtcta

SEQ ID NO: 263285 - DNA, 45 bp, Homo sapiens
  chr11:14674976-14675021
  hypo
gtacacaacaaaaacacatccgccctcgggaggctgaggcaggag

SEQ ID NO: 263286 - DNA, 63 bp, Homo sapiens; identical to SEQ ID NO: 214109
  chr11:15959967-15960030
  hypo

SEQ ID NO: 263287 - DNA, 42 bp, Homo sapiens
  chr11:16050846-16050888
  hypo
agcaggatgtgagaccgagagacagttccttcagtcctaaag

SEQ ID NO: 263288 - DNA, 42 bp, Homo sapiens
  chr11:16051188-16051230
  hypo
aaaacaaaaaaaaaaccgattgtctaacgagaattaactaaa

SEQ ID NO: 263289 - DNA, 37 bp, Homo sapiens
  chr11:16790662-16790699
  hypo
gtgtgtaccttctataggtacgttacatttgccataa

SEQ ID NO: 263290 - DNA, 142 bp, Homo sapiens
  chr11:16847524-16847666
  hypo
agggttgttacagggatttacgtaggtaatggcagtaaagagtttaaggctgcccttacgcagcaagtgctggctaaatgacagctcttgccactacattatcgtgctcgttataagcagcgatcctgagtctattactcac

SEQ ID NO: 263291 - DNA, 123 bp, Homo sapiens
  chr11:16863137-16863260
  hypo
ggccctgacccaagcgttcatgtcctcctgggtgtcggcactgaagtagtaggtcctcatgcctgactgctcggcctgagagcccgctgtggagctgttatagatgagcgctcgcatccccgt

SEQ ID NO: 263292 - DNA, 40 bp, Homo sapiens
  chr11:17037336-17037376
  hypo
ctgcaacctgtgcaacagcgagactcagtctaaaaaaaaa

SEQ ID NO: 263293 - DNA, 259 bp, Homo sapiens
  chr11:17100561-17100820
  hypo
agactgactcagtgccggtacacaacaatgcgttgaaagaatgggcaaatgaagcagcttcttaaaattttaaaaagtaagcatagctctaggaaggagggaggtcagtgaaatcaaactcctgtcgacaagcttaaagtaactggcaagacgctgggaaactagatactgaaacatccgctcttaacttttaacctgtcactatttgaaataaagttatcagggatagccgggcgcggtggctcacgcctgtaatccc

SEQ ID NO: 263294 - DNA, 79 bp, Homo sapiens
  chr11:17101060-17101139
  hypo
actccgtctcaaaaaaaaagtatcagggataaagagagaaccctttataacaacaaacgggtcagttctccaagaaaac

SEQ ID NO: 263295 - DNA, 121 bp, Homo sapiens
  chr11:17430256-17430377
  hypo
cggtacatctgaggcgtatttctcaatggctgggtttgcagagcaaattagtgcatcctgctcaagctggctggttactcacaaggactccacccacggcagcggccgtcatacactaagt

SEQ ID NO: 263296 - DNA, 35 bp, Homo sapiens
  chr11:17566571-17566606
  hypo
ttacaggcgcgggccaccgcgcccggccttctctg

SEQ ID NO: 263297 - DNA, 105 bp, Homo sapiens
  chr11:17653682-17653787
  hypo
gtgcagcagccctgcgtggccctgactgtgtacgtggccatgtgccacaaatttcatgtgtgcatcgagtggcggcgctctgactactgccgtgagtttgcgggg

SEQ ID NO: 263298 - DNA, 158 bp, Homo sapiens
  chr11:17905736-17905894
  hypo
tatggcaacgaggcgtacgtgcggaaacacatgatggccagggtggaaggggagtaacggggtttaggttggtacggtactgggttatgctctgtgccgcactgcgagcccttggcgggcacagccgccagggtgggagaagcgtaccagaagcagct

SEQ ID NO: 263299 - DNA, 80 bp, Homo sapiens
  chr11:18100061-18100141
  hypo
cataaggtccttgtgcttcccgttttaaaacacgctctcagaaggctgggcgtggtggctcacgcctgtaatcccagcac

SEQ ID NO: 263300 - DNA, 32 bp, Homo sapiens
  chr11:18401403-18401435
  hypo
tacctcatatgatccaccgcctcggtctccca

SEQ ID NO: 263301 - DNA, 155 bp, Homo sapiens
  chr11:18512368-18512523
  hypo
agagagcagatttctctcttcgttggagtattcatgcctcgttctgtgactgccttcgtgactacagccatatcatcatagcgctcagcctgctcagtgagttggctttctgtaccagctcacttttatccagtcgttcccgtgggagggctgca

SEQ ID NO: 263302 - DNA, 34 bp, Homo sapiens
  chr11:18610571-18610605
  hypo
gtttccagacagatgtattaaattccacagtgta

SEQ ID NO: 263303 - DNA, 141 bp, Homo sapiens
  chr11:18656775-18656916
  hypo
actcgggatcttttcggtgggatggaaatgcctccaaactggattgtggggatggttgcactatacatgtactaaaaatcgtacacttaagacgggtgagaatgatacagtatgtaaatatgtcaagctgttaaaacatgc

SEQ ID NO: 263304 - DNA, 98 bp, Homo sapiens
  chr11:18657233-18657331
  hypo
aagctgctggctcttactctttgatggtttaatgctgcgaacgtaattcaaaatcaaagctgttggaactttaagttattttgcgccttaaaagaatg

SEQ ID NO: 263305 - DNA, 229 bp, Homo sapiens
  chr11:18978176-18978405
  hypo
gatgggccacaggacgtacaggcagcgctcggtgctcatggcgcttagaaagctcaggcttgcaaggtaggaaaacatcatcacagggctgaggattttgaagatgggatggaggatattgatgaggcttaacggaaaacgtataatgtggcttctgagaaagaggaagtcggccatggacaggttgaagatgtagatggagaaggcgttcctgcgcatgcggaagccc

SEQ ID NO: 263306 - DNA, 36 bp, Homo sapiens
  chr11:19080253-19080289
  hypo
tgagccaccgtgcccggccctgcacctgtattttta

SEQ ID NO: 263307 - DNA, 32 bp, Homo sapiens
  chr11:19140970-19141002
  hypo
cttgcttgcccggtcatccccagccacaccag

SEQ ID NO: 263308 - DNA, 39 bp, Homo sapiens; identical to SEQ ID NO: 214116
  chr11:19238182-19238221
  hypo

SEQ ID NO: 263309 - DNA, 117 bp, Homo sapiens
  chr11:19240816-19240933
  hypo
gcctcaccacagtctgaacacgcatgacgatgccaggcggcccaagctctggagtgcgggcctcagctccaggcacagctgcacgcacacgctggcgctgcacagggtctgtccctc

SEQ ID NO: 263310 - DNA, 93 bp, Homo sapiens
  chr11:19247019-19247112
  hypo
agggtggcttgaagcgagagccgggctgttcccgacaggtacggctgccacggaagttggtgagaccattagcttcaacggtgttacatgaaa

SEQ ID NO: 263311 - DNA, 229 bp, Homo sapiens; identical to SEQ ID NO: 214117
  chr11:19256431-19256660
  hypo

SEQ ID NO: 263312 - DNA, 109 bp, Homo sapiens
  chr11:19913974-19914083
  hypo
tttagacttccaggtcctaccgcgagggtatccgctgcaggcagcgaggccaaaacacgcggagggtcaactactgctaacaaccgacgcagccagagctttaacaact

SEQ ID NO: 263313 - DNA, 97 bp, Homo sapiens
  chr11:27380960-27381057
  hypo
agcttagatttgggcgtaaaacagcctggggtgaaatcctatctgcttcttcctagctatgtacattttttttcttttttttttcttttttttgaga

SEQ ID NO: 263314 - DNA, 36 bp, Homo sapiens
  chr11:27381177-27381213
  hypo
gacgcccgccactacgcccagctaagctatgtacat

SEQ ID NO: 263315 - DNA, 97 bp, Homo sapiens; identical to SEQ ID NO: 214121
  chr11:27485359-27485456
  hypo

SEQ ID NO: 263316 - DNA, 99 bp, Homo sapiens
  chr11:27495267-27495366
  hypo
tacctgtaccaactacggctttaagggtacttcgtttcttgctctctgccatggcgttgagtcgttttactctataatggagacatttttaatgaatac

SEQ ID NO: 263317 - DNA, 34 bp, Homo sapiens
  chr11:27526853-27526887
  hypo
gggcgacagagcaagactacgtctccaaacagca

SEQ ID NO: 263318 - DNA, 104 bp, Homo sapiens
  chr11:27678524-27678628
  hypo
tgagcaaacataggtccttccgtcaaaagcagcttactctgaccaacgcccaaagaatgagcggggcctgggaggtgcatcacgggatgtggagtgtgagcatt

SEQ ID NO: 263319 - DNA, 337 bp, Homo sapiens; identical to SEQ ID NO: 214122
  chr11:30445728-30446065
  hypo

SEQ ID NO: 263320 - DNA, 161 bp, Homo sapiens
  chr11:31533740-31533901
  hypo
aggatgttatggtgttagaacggtaaaactatactgtaatattgtgattattgcctgaatatattatgtggttactgtgtaacaagtaaatattatagcttccgtgtagtacggtgacattttactactgccaccgtgacgtcattgtaattttaaacatg

SEQ ID NO: 263321 - DNA, 83 bp, Homo sapiens
  chr11:31760147-31760230
  hypo
gtggaatgcgcctatagtctcagcgccgggggaggtggaggtgggaggattgcttgagcctgagcctgcgggtcgaggtctca

SEQ ID NO: 263322 - DNA, 212 bp, Homo sapiens; identical to SEQ ID NO: 214124
  chr11:31808822-31809034
  hypo

SEQ ID NO: 263323 - DNA, 44 bp, Homo sapiens
  chr11:32535832-32535876
  hypo
agaatatcaaaatttttggccgtgcgaggtggctcacgcctgta

SEQ ID NO: 263324 - DNA, 96 bp, Homo sapiens
  chr11:32727120-32727216
  hypo
catgggatctgggccagtatcgcaagccgagtgcagcccgccaggtcaagtgaatggaacaagtccagcgggtgcgagcaaaactcaagcagaggc

SEQ ID NO: 263325 - DNA, 40 bp, Homo sapiens
  chr11:32907343-32907383
  hypo
ataggcaagccacacccctgtcgcacgtccttcgaggggg

SEQ ID NO: 263326 - DNA, 54 bp, Homo sapiens
  chr11:32912159-32912213
  hypo
gaagcagcttggttacgaatcatttgagagatcccgaaacgttcacagagctgg

SEQ ID NO: 263327 - DNA, 41 bp, Homo sapiens
  chr11:33181224-33181265
  hypo
ggcaggatcacagagcgcagggaggtcgaagctatggtgag

SEQ ID NO: 263328 - DNA, 42 bp, Homo sapiens; identical to SEQ ID NO: 214127
  chr11:33183722-33183764
  hypo

SEQ ID NO: 263329 - DNA, 38 bp, Homo sapiens
  chr11:33202743-33202781
  hypo
taaaggacttttaggctgggcgcagtggctcacacctg

SEQ ID NO: 263330 - DNA, 86 bp, Homo sapiens
  chr11:33277374-33277460
  hypo
aaaacaactgtcattcgaaagtgttatttccagtggcctcagggcatactatcctttctcttttattttattttttgagacagagt

SEQ ID NO: 263331 - DNA, 127 bp, Homo sapiens
  chr11:33667398-33667525
  hypo
cagcctggcatccgcgggccacgcaggccagagccggcaccaagaggcctacggctcagcccagcacctgccctattcggaggtggtgaccagcgctccggggaccatgacgcggcccagggccggg

SEQ ID NO: 263332 - DNA, 92 bp, Homo sapiens
  chr11:33874007-33874099
  hypo
gtgccctgttcactcggcccgccatgctcaagctcttcttgcgaggaacgcgtgggtgaacaagtgcaggatctggccggctgctttgggca

SEQ ID NO: 263333 - DNA, 32 bp, Homo sapiens
  chr11:33993993-33994025
  hypo
aaccaccggccaggcgtggtggctcatgtctg

SEQ ID NO: 263334 - DNA, 65 bp, Homo sapiens
  chr11:34097799-34097864
  hypo
gaagacagcacgtcgggagcagcttatgagagaagaagctgaacagaaacgtttaaaaactgtac

SEQ ID NO: 263335 - DNA, 42 bp, Homo sapiens; identical to SEQ ID NO: 214129
  chr11:34109547-34109589
  hypo

SEQ ID NO: 263336 - DNA, 61 bp, Homo sapiens
  chr11:34190350-34190411
  hypo
gcagttggcggggccgcctccctggctgggaatcctcctctgtggccggcaacagcaaagg

SEQ ID NO: 263337 - DNA, 111 bp, Homo sapiens
  chr11:34190793-34190904
  hypo
tgtccctgtccccacgcactccagacatataaagaggccaaataaaaccaggccggctcgcagatatcaggcatcatcatcatatcaacagcaatacgactacaataatca

SEQ ID NO: 263338 - DNA, 38 bp, Homo sapiens; identical to SEQ ID NO: 214130
  chr11:34192314-34192352
  hypo

SEQ ID NO: 263339 - DNA, 34 bp, Homo sapiens
  chr11:34264829-34264863
  hypo
atatattttagatggagtctcgctctgtcgccca

SEQ ID NO: 263340 - DNA, 393 bp, Homo sapiens
  chr11:34264983-34265376
  hypo
tctggcaaatctcttaaccctactaaaccccacattcctcatccataaccctgcccctcctccaacaacagaaatcactgacactgcaagcacccttgctcctgacatcccacttgatatcacctttgatccgcaaggataatcctagaaaatatgtcctagtcttacgcgattttacagatttattatctatctgtgaaaatgggaacaacaatattgattctcttaactttcttgaagagtcaatgagatcatttacggaatgtgcttggcacagactcagtgaaagataaaagcttgaagcctatggttagacctaaggtcagccacccacccagacccaggaccaagccctgaatgtctagagcacggttcttcgcagacacaccccag

SEQ ID NO: 263341 - DNA, 75 bp, Homo sapiens
  chr11:34270689-34270764
  hypo
aaatgaaagacactcgcaacatgaatttgcaagtggtcatgacttgcaccctcgtgaatgcgcagccttgagggg

SEQ ID NO: 263342 - DNA, 101 bp, Homo sapiens
  chr11:34407511-34407612
  hypo
tacccattgttttacaccctcaccaacacttggtatttcagatggtttacattttttttaaatttaatatccaaatttatttttaccgtttttttttattg

SEQ ID NO: 263343 - DNA, 200 bp, Homo sapiens; identical to SEQ ID NO: 214132
  chr11:34511230-34511430
  hypo

SEQ ID NO: 263344 - DNA, 574 bp, Homo sapiens
  chr11:34516981-34517555
  hypo
cagccgaggcgctacgcgttcttgtcgtctcaagtttctcaggtcccctcaacaatcctatccagtaggtgtaattgggctattccacaaaaaaggaaatagaggctccccttaaaactcaaaggtcttccagagatctcttttaccaccgaagggtgggtggaggggcagttgatttattttatttaaaaattttcagaattttatatgcattaagatcaaagcgtcaatattgtgccagggtgcttgaggctgatgtcgtagcctctacctggcagataggaagagccagggagccggtgagaccgatgactcaggtcttgctcactggccactggctggagctggcttaccaggcccgtgggggctcttcagggcaggcaggggttcctggcagaacaaggggccattcctgagttcggcctgagctttcatctactgatttctggctttagtaaacctgaggggccttttggactttactggcgtcctgtgagagatgtttatgagccttgacatttttcagctgcgggccctgccctagatggccatcggtgtgcggccgtcggagggc

SEQ ID NO: 263345 - DNA, 92 bp, Homo sapiens
  chr11:34518320-34518412
  hypo
gtcactctctccactttacacgtgaggagattgccgttccggggactgacgggacccctgtaaggtcacgcggcctgtcagtaaaggagcta

SEQ ID NO: 263346 - DNA, 302 bp, Homo sapiens
  chr11:34535008-34535310
  hypo
ggctggtggccacacggcctgcggaggcaagcaggtctctctgaggcaagccgtcacatccgtgtcaaacagctcccggaggccctgggactgcacccagcgcaggtgccggccctggagctggagatggacgagcagacccaggccccaggccgagcctctgagccctgacaccccttacgattcatccaaaaaagcaaagaaaaggcgcttacgtgagggcagcggtggctaggtccaaagaggaggctttcaaggcaagagaaggcaggcgctcccagcaccagcgtgcagtggaaata

SEQ ID NO: 263347 - DNA, 44 bp, Homo sapiens
  chr11:34592834-34592878
  hypo
atggtctcagcctttagaaccgcaggaggccaggcgcggtgact

SEQ ID NO: 263348 - DNA, 169 bp, Homo sapiens
  chr11:34631595-34631764
  hypo
agcagtgcagtttgggaaggcgtgggtgcgcccatggagagggtgatcccctctctcttctttccaggcatgcgtaaggagcagtggcagagaattacggaacagaggatgctatcataggtgacctatgagccaggcacgtacatacgtgtcatctcaatgaaagctt

SEQ ID NO: 263349 - DNA, 42 bp, Homo sapiens
  chr11:34666542-34666584
  hypo
gttggaatatccatgtgtcacgttctgttggatttcccctgc

SEQ ID NO: 263350 - DNA, 156 bp, Homo sapiens
  chr11:34897219-34897375
  hypo
aattgtaacacacccctaaacgctactggggctggagcccaaaagcactcgccccgccccagctcttgcccccgcccatccgtgtgctcgccctcccgaaaggagttcgagcctgtagtggctgagcacatgagcgacacctctgtcataagtcct

SEQ ID NO: 263351 - DNA, 103 bp, Homo sapiens
  chr11:35016467-35016570
  hypo
aacttggggatgtttggcatcgacgaatttactgcagtgattaaccctcctcaggcctgcattttggcggttgggaggttccgacctgtgctgaagctcactg

SEQ ID NO: 263352 - DNA, 77 bp, Homo sapiens
  chr11:35150808-35150885
  hypo
ggaagtgacctcagtgaactcggaagtcatgtattgaaaattgcagagtttggccgggcacggtggctcacgcctgt

SEQ ID NO: 263353 - DNA, 37 bp, Homo sapiens; identical to SEQ ID NO: 214136
  chr11:35516160-35516197
  hypo

SEQ ID NO: 263354 - DNA, 74 bp, Homo sapiens; identical to SEQ ID NO: 214138
  chr11:35661156-35661230
  hypo

SEQ ID NO: 263355 - DNA, 242 bp, Homo sapiens
  chr11:35684977-35685219
  hypo
tcagaggaagagagcgagacagaggaagagagtgaggatgagagcgatgaggagagtgaagaagacagcgaggaagaaatggaggatgagcaagaaagcgaggccgaagaagacaaccaagaagaaggggaatccgaggcggagggagaaactgaggcagaaagtgaatttgacccagaaatagaaatggaagcagagagagtggccaagaggaagtgtccggaccatgggcttgatttgag

SEQ ID NO: 263356 - DNA, 38 bp, Homo sapiens; identical to SEQ ID NO: 214139
  chr11:36060520-36060558
  hypo

SEQ ID NO: 263357 - DNA, 37 bp, Homo sapiens; identical to SEQ ID NO: 214140
  chr11:36060798-36060835
  hypo

SEQ ID NO: 263358 - DNA, 316 bp, Homo sapiens
  chr11:36100376-36100692
  hypo
ggctcccagggtggcgggcaaggtgcaggtggtacggcagccccagtcaaccccacacaaatgaacctgacgcttccagggccagtcccataagtcccagctgtgccatcagctgggtgctcgcaggcccctgggatacagcggagagcgaggttaagactgtggcagaggcttcaggtctgggagcggatcctaccaggccgtgtgagggtggggtttttggctccctcagggacgcagggcacaggggacctactgccgccactgctgctcctgcagccactcctgctgccacagctcacgcttccttactgca

SEQ ID NO: 263359 - DNA, 120 bp, Homo sapiens
  chr11:36245105-36245225
  hypo
ccgtctttacaaaatatgcaaacattagctaggttgtgtgacgcacccttgtagtcccagccactgagacgggaaggtggctcgagcccaggaggttgaagctgttgaaccaagatcgcg

SEQ ID NO: 263360 - DNA, 49 bp, Homo sapiens; identical to SEQ ID NO: 214141
  chr11:36248992-36249041
  hypo

SEQ ID NO: 263361 - DNA, 207 bp, Homo sapiens
  chr11:36277915-36278122
  hypo
atctgaaggctcaagcggggctggagcatccacttccaagttgtctcactcacgtggctgttggccagaggcctcatttcttttccacacaggctgcaccatgggaccgcctaagtgtcctccctgcatgggggcaggcttccctcagagtgagtgatccaagagaccaagggggaagtcacgatgcactggcgtcacacaggtcac

SEQ ID NO: 263362 - DNA, 42 bp, Homo sapiens
  chr11:36292455-36292497
  hypo
gggactaacctatttctccacggtggtggaatgcccaggatt

SEQ ID NO: 263363 - DNA, 183 bp, Homo sapiens
  chr11:36300631-36300814
  hypo
ctacaggctcctttcgagaacctgaagctgtgcttactgaaccgtgacacaagataccggctcctgtggagtgagggtcttgaatccagggtggtaggattcatgtcctttcctctcaactggttgcctaggagggcaaagagaacaaacagctcctggccggctgtgcgggttcctcctggg

SEQ ID NO: 263364 - DNA, 42 bp, Homo sapiens
  chr11:36419756-36419798
  hypo
tcctggctctcttcctgcctcgagcaccttggatgtgtttct

SEQ ID NO: 263365 - DNA, 190 bp, Homo sapiens; identical to SEQ ID NO: 214142
  chr11:36476161-36476351
  hypo

SEQ ID NO: 263366 - DNA, 37 bp, Homo sapiens
  chr11:36823633-36823670
  hypo
gtgagccaccgcgcccggcagatatatcttattttta

SEQ ID NO: 263367 - DNA, 46 bp, Homo sapiens
  chr11:37929404-37929450
  hypo
aggcaaccttgcaacggaggttcttcctcctccctgcactgctttc

SEQ ID NO: 263368 - DNA, 43 bp, Homo sapiens
  chr11:37929480-37929523
  hypo
acagttacaaacgcccatctgactctcccggtaaagggatgct

SEQ ID NO: 263369 - DNA, 45 bp, Homo sapiens
  chr11:38195082-38195127
  hypo
atacattctgagaaacgtgttaggtgattttgtttgttacgtgaa

SEQ ID NO: 263370 - DNA, 39 bp, Homo sapiens
  chr11:38358533-38358572
  hypo
cactattagaaatgtcaggccgggcgccgtggctcacgc

SEQ ID NO: 263371 - DNA, 82 bp, Homo sapiens
  chr11:38525522-38525604
  hypo
gttggagctgagcttttgctcgccatcccccactgctgattgtggtcttcacagacaccgccgctgacttccacccctctgg

SEQ ID NO: 263372 - DNA, 159 bp, Homo sapiens
  chr11:39766926-39767085
  hypo
tatacttcatttgctgaagacgcatgagagctgtcaacatgagagcactgctcgcggcttgcccatatccctggtaacattttagacaggtgcccataagaggaggtgatgctgtctgctttgacttcactatcgcccgcttctgttggctgttcacat

SEQ ID NO: 263373 - DNA, 82 bp, Homo sapiens; identical to SEQ ID NO: 214143
  chr11:40039796-40039878
  hypo

SEQ ID NO: 263374 - DNA, 395 bp, Homo sapiens
  chr11:43543794-43544189
  hypo
ttcaaggccctgagagtgatcgtgtggatagacagtggcaacgacaacgtggacatcaaggctgccgcgagctcggaattgttgtgtgcaacatcccgtccggagccctggaagagacagccgactccaccgtctgcgacatcctcaatctgtaccggaggaacacgtgggtgtgccaggcactgcgggaagggacgtgggttcagagcatggagcaaatcctcgaggtggccttgggagtggtccgcatccgtgggtagacgctgtgggtctcatgagctttggtcgcacgaggcaggcagttgcatttcaagccaaggcctttggattcagcgtcatattttatgacccctacttgcaggatgggatagaacggtccctgggcattcaatggg

SEQ ID NO: 263375 - DNA, 140 bp, Homo sapiens
  chr11:44594534-44594674
  hypo
cccagacagaactctccctgcgggcaatttggctctgcgaggggcggggccccactgagtctgccctatgtgtctctaagacgaaccaatcataagcctcccagggcgtggcgtgaagcggggatttggtaggggagcgc

SEQ ID NO: 263376 - DNA, 166 bp, Homo sapiens; identical to SEQ ID NO: 214145
  chr11:44608908-44609074
  hypo

SEQ ID NO: 263377 - DNA, 229 bp, Homo sapiens
  chr11:44609386-44609615
  hypo
gagaaccgtctcttcggactcaggggcagtggaactcagactgccttcaggtggccgagaacttgaaagccctggtgttctttgtggcagtccctccatctgtctgtccatccatccatccacctacctacccctccatccctgcatccacccagtctttcatgcagcaatatttgttgggagtctgccttgttctcgtaaataacagtcttcccgtcaaggtatcaca

SEQ ID NO: 263378 - DNA, 41 bp, Homo sapiens; identical to SEQ ID NO: 214147
  chr11:44611373-44611414
  hypo

SEQ ID NO: 263379 - DNA, 41 bp, Homo sapiens; identical to SEQ ID NO: 214148
  chr11:44611654-44611695
  hypo

SEQ ID NO: 263380 - DNA, 180 bp, Homo sapiens; identical to SEQ ID NO: 214149
  chr11:44621700-44621880
  hypo

SEQ ID NO: 263381 - DNA, 256 bp, Homo sapiens
  chr11:44625096-44625352
  hypo
tggtcgggttgtaacggactcaagcatctgcatccctaagaggctcctctgatccacactactctccagccttctggagacgccagcaccctcgccctccaggtgcgtcccatgccctgggggtacagtgtacccatgctggtgagttagagatgacatgagctttaccctgtgtgatgggttgggtgtcttaggaaatgttggccaagtgcccctgcaggactcctgacctctacctcccggaatgggcctgtcc

SEQ ID NO: 263382 - DNA, 175 bp, Homo sapiens
  chr11:44637485-44637660
  hypo
acggacggactgaccgactgaccaacagatagactgaccaggttcccagcctgtctcaatagtgatccaatgaccacctggctctcctttcttgtggtcccggatgctgcatgtgcccttggctgggacctgacatctctgatctgcaatcctgtgagggcgcaggacacagtgg

SEQ ID NO: 263383 - DNA, 485 bp, Homo sapiens
  chr11:44639741-44640226
  hypo
aactggacagacaacgctgagctcatgaatcgccctgaggtcacctacccctgttcctgcgaagtcaagggggaagaggacaacagcctttctgtgaggaagggcttctgcgaggcccccggcaacaggacccagagtggcaaccaccctgaggactggcctgtgtaccaggaggtgtgcggggggctgcggatcgggggcggggctccgagggcgttgggggccatctgggctactgctcagcaattccttcctgcatttagttccttcccttaattcatctgtcatttgtaccttcatctacttctttgttaatgtatttattcaaggaacaggcagagccctctgtaggggcttccgggctgggactggggggctctcggtggttctgcatggcggggtgggatggtgcagagcggggtgatgtgaccgcattctgcccttgcagggctgcatggagaaggtgcaggcgtggctgcaggaga

SEQ ID NO: 263384 - DNA, 519 bp, Homo sapiens; identical to SEQ ID NO: 214151
  chr11:44640525-44641044
  hypo

SEQ ID NO: 263385 - DNA, 206 bp, Homo sapiens
  chr11:44675159-44675365
  hypo
gagaggccaggaacacggggctgagcctccagggtcaggtcaggtttctgggcccccaagaagaacctggaaagtggggggctcttcgctcttttccctgttgctgctcccctccccctctcaccctagcattctggctggttctctcctctccggcttttccacttatgaaagccggaagccatgggttgcgcacactgtctggg

SEQ ID NO: 263386 - DNA, 147 bp, Homo sapiens
  chr11:44941373-44941520
  hypo
tgctgcggggtcaacgggcctgaagactttaagtttgcatctgtgtttcgactcctgaccctggatagtgaagaggtgccggaggcctgctgccggagggaaccccaaagtcgggacggggtcctgctgagccgggaggagtgcctc

SEQ ID NO: 263387 - DNA, 86 bp, Homo sapiens; identical to SEQ ID NO: 214153
  chr11:44944309-44944395
  hypo

SEQ ID NO: 263388 - DNA, 33 bp, Homo sapiens
  chr11:44993090-44993123
  hypo
tatgatactgtgtatcggcgagttcagcacaaa

SEQ ID NO: 263389 - DNA, 371 bp, Homo sapiens
  chr11:45011418-45011789
  hypo
aacgccggcaaccccgggcctctcctttcctgcgaggcccagccttcagcaaaggctgtgaagctgactgcagttgcctcggcagcagcctggtgctgaggtcaacactgtcatcttgctggagtatgggagtcggtgcaaacatggcttctcgtcagccaggaagacgcccagcctggcacaaccttcggttctgactcccatcacctcctgttgacagcgtctggctggcatcctaatcgctcattggacaaattgccagggcagcggtagacagctggcatgtgttaactcgctcagtcctcacagcgatcccatggggaaggcggttatcatccccgttattgtacggccagagaaacagtggcaca

SEQ ID NO: 263390 - DNA, 79 bp, Homo sapiens
  chr11:45195152-45195231
  hypo
acaagagagaaacaccgcgtcaaaaaaaaaaaaaaaaaaaagttctgcgggagggaccgccttgggagaatgtgttcca

SEQ ID NO: 263391 - DNA, 102 bp, Homo sapiens
  chr11:45230781-45230883
  hypo
ggcccgtgcagggcgcggcttccccagggcggaactggatggcaccgacagcccttcgaccagctgtgagtatcaccagtcccccccgccacccagccggct

SEQ ID NO: 263392 - DNA, 90 bp, Homo sapiens
  chr11:45234259-45234349
  hypo
ggcagctcctccacgtccatgcccagcagaccgaggtgttccggcagttctgccaggagctggtgaccgtgcaccgggacatggccaaca

SEQ ID NO: 263393 - DNA, 61 bp, Homo sapiens
  chr11:45248080-45248141
  hypo
cctcatccatcacatcgcccgggccctgcgggaagacctggtggagcgcatccgccagtca

SEQ ID NO: 263394 - DNA, 191 bp, Homo sapiens
  chr11:45417059-45417250
  hypo
cagttcttgaccatccgcagtaactggcctagtcagtgcctggctgcccagcactgtctggacatcagtgggatgatggtcagtcctggggaggaagcagctgctccatgagaaagagtatgtgtctgcgtgtgtgtgtgtgtgcgtgcgtgtgtctctgtttgtagggagcaggccgggattagccagaa

SEQ ID NO: 263395 - DNA, 42 bp, Homo sapiens
  chr11:45773610-45773652
  hypo
cagcaatcccatttctaagacgctgcctgcagaaatatttga

SEQ ID NO: 263396 - DNA, 80 bp, Homo sapiens
  chr11:45838883-45838963
  hypo
aaaaacagtgaaagacatggagaatttaggaacagtgacctaccacacgcctctcctgcgttgccctttcacttctgctt

SEQ ID NO: 263397 - DNA, 195 bp, Homo sapiens; identical to SEQ ID NO: 214157
  chr11:45951099-45951294
  hypo

SEQ ID NO: 263398 - DNA, 499 bp, Homo sapiens; identical to SEQ ID NO: 214158
  chr11:45953589-45954088
  hypo

SEQ ID NO: 263399 - DNA, 189 bp, Homo sapiens
  chr11:45955789-45955978
  hypo
caagggcagtggcactgagccgcctggtttctaacaggcctggcagcccctaagagcagagcgccttctctctgcccagggagaagaagctctgctggctgctgtgcagcccctgggccttgctgtgttcctcagtggagtgggcggctaccacctaaggaacagggcgggtggagtgggtaggctggg

SEQ ID NO: 263400 - DNA, 157 bp, Homo sapiens; identical to SEQ ID NO: 214159
  chr11:45956742-45956899
  hypo

SEQ ID NO: 263401 - DNA, 56 bp, Homo sapiens
  chr11:46275737-46275793
  hypo
cccccagttcccagaaccctcgcaggctgcggcccggcctctgagccttgcaggag

SEQ ID NO: 263402 - DNA, 32 bp, Homo sapiens
  chr11:46298483-46298515
  hypo
ttacaagctgaaaatcggctgggcatggtggc

SEQ ID NO: 263403 - DNA, 590 bp, Homo sapiens
  chr11:46337893-46338483
  hypo
accttacaagatggccgccacccagactgggacctgcctcatggtaggtgtggctccctccaccacagacccacaggaggagagttcttcccaaggctggctttttccagggttgggcagagctttaaggatcggtaacatcgtgggcagcgtcccagggtacaccatcctggcgcctggtgggctggttctagcagactccagactccttctccaagcccatggtgccttctgcctcacaccggtccccgactggttaacacagtgtagatgtgtaggtgactccagtggccccagctaggggacagctgggcaggttccttgaggaggcggcttccacaggccttgtgcagggaagggcttggggagactcagggaagaacggacatggttctttctggaacagatggcagtgaaaaggctgaggaaacccctggaaacccggaaggctcccagggcgtgtttcagacctcttccagtccctcttctatcttcttctggaaatggccagtctcttgccgcctggctcagcatgccccggccctccgagaccctcgagctgtcaggcagcagaaccaggctatgggcag

SEQ ID NO: 263404 - DNA, 41 bp, Homo sapiens
  chr11:46390759-46390800
  hypo
ccatggtcccatgttagtgggggagacggacccaaagctcc

SEQ ID NO: 263405 - DNA, 623 bp, Homo sapiens
  chr11:46391520-46392143
  hypo
agacgacgccaggacggcaagtgtcggcactgtgggaaggtgagaggccctgcccgaggacatcgccacctgcacctgcggtcctgagcccaggccatgtggccggtgtggcctgccgatcactgaccacaccctggtgtgcagagtccggggctgaccctcagcctggctgcagtgccttcagttctcaagcaccctggcctgctcttggtctctgggcttagtaggagagcagggaggaaagttttcttcccatgtggcacacctggcctgctttgaagctgcaagtggccctttggagaatcgtatagacttactcattcggtgactccatggatacttgtgtgccgagcgccaagctgggcagcggtttcccaccctcctgaggacagtgtggcttgaagccaggctttccaggcgaccgcctaacccagtccacagttgtttggttcactttcttgtttgcttcttgcccgcctccctcagtaagtgcaggctctcaaagatggagaggcttgcttcactgattctcagcgcctggcccactgcaggcctttcataacagcctgtgtgatgaacagggaatgaatgtgataggtactcggaagcggcagtaaatttct

SEQ ID NO: 263406 - DNA, 32 bp, Homo sapiens
  chr11:46483754-46483786
  hypo
taaacaagtgagcacggcggtgtaagcacaca

SEQ ID NO: 263407 - DNA, 42 bp, Homo sapiens
  chr11:46542429-46542471
  hypo
caggcgtgagccaccgcgcccggcccctatagcattttgtac

SEQ ID NO: 263408 - DNA, 34 bp, Homo sapiens; identical to SEQ ID NO: 214165
  chr11:46589409-46589443
  hypo

SEQ ID NO: 263409 - DNA, 180 bp, Homo sapiens; identical to SEQ ID NO: 214166
  chr11:46617388-46617568
  hypo

SEQ ID NO: 263410 - DNA, 90 bp, Homo sapiens
  chr11:46777023-46777113
  hypo
tgggattacaggcgtgagccaccgcacctggccccatttaaatataaataactagtccttagggattcagtcattcggcaaatatttact

SEQ ID NO: 263411 - DNA, 180 bp, Homo sapiens; identical to SEQ ID NO: 214167
  chr11:46783059-46783239
  hypo

SEQ ID NO: 263412 - DNA, 32 bp, Homo sapiens; identical to SEQ ID NO: 214168
  chr11:46844005-46844037
  hypo

SEQ ID NO: 263413 - DNA, 132 bp, Homo sapiens
  chr11:46916229-46916361
  hypo
agaagacaagctcgcggcggtggtggaaatcaagggcaatggcattctccaggttgttaagcagcagtgtgtactcagagcggtgtggcagcacctgccggatgtcgatgcgattggcgaacagcagcacag

SEQ ID NO: 263414 - DNA, 138 bp, Homo sapiens
  chr11:46920035-46920173
  hypo
cggtagtggcctctttggctccacaagccttctccttagttcaagcccaacctaattccatttccccactcactgcagttgcgctcatcagactggtcatcacagtccgcgtcaccatcgcagcgccagcctgcattg

SEQ ID NO: 263415 - DNA, 80 bp, Homo sapiens
  chr11:46959055-46959135
  hypo
aatgaaaaaaggcacacacacgcatagatatgtacacacacacacatatgcacacaatacacattttattttattttatt

SEQ ID NO: 263416 - DNA, 31 bp, Homo sapiens
  chr11:47081353-47081384
  hypo
atatgttaagacacagagtccgctgggcgcg

SEQ ID NO: 263417 - DNA, 186 bp, Homo sapiens; identical to SEQ ID NO: 214170
  chr11:47169578-47169764
  hypo

SEQ ID NO: 263418 - DNA, 57 bp, Homo sapiens
  chr11:47215892-47215949
  hypo
cgcctcagcaggagacgccccaggagttgccattgtgtactccgggtttcagctctg

SEQ ID NO: 263419 - DNA, 611 bp, Homo sapiens
  chr11:47264239-47264850
  hypo
ggcatgactagcaaggaggccggtgacagctcacctgtgtctgcaggaccgcttgccagctggcactcctgctgccaatccttgggcacgacgggctctgtgaggcgaaggaagtcctgcagtgggcagcggtgagggcagccaggcaggctgagcggccagggggccttgtcactctcgttccgaaagtacatctccactgagaaattcctgagggtcgacaggaggcaacatgggagctgctcagcctgcccatcatggggtccttgggctgccccgagccacctcccgagggcccccctccagaggacactgctagctccactcacccagaatcttcctggtacagttcaaatatgtggcaggaggcgtagggggcttgttcaccattgtagacatccagtgccatttgcagggcaaccagggtagtgtcgtgctgcgggggagaggggctgcccgtcagcattgttccccacacccgcaggaaccgaacagagaagaaatccagctccttgcctgacacagcacgctagggagcgcaggcactcaccgcagagtaaaccagcagcttggggagctgggaggtggtcgccattagggtcaggttcttc

SEQ ID NO: 263420 - DNA, 251 bp, Homo sapiens
  chr11:47348746-47348997
  hypo
gccagcctccctggcgccgctctggtctccacctggcctctgtgccagacaaaggggcaccgggcgtcgcaggcagactcacttgagggacagaggagtctagcgggacagctgtagccggaagctgggagccagcgctagggagtggtgtagtgggttctcaccctggggctttgagttcctgctgtgtttgtgcttcattcttttgtgcccctcatcgctgctatgaaaaccttcgttctccagcaggt

SEQ ID NO: 263421 - DNA, 458 bp, Homo sapiens
  chr11:47358890-47359348
  hypo
gtttttaactggggagggggcggggggcaggaccaggccaggcaggctcaccgataggcatgaagggctgggaggcagggctgggcctggacatgccgatggcgttgaccgcgtagacgcgcatctcgtacaccacgccctcgatcatgcgccgcgcttcatgactcagctcctgaatcaggtcgaagttcagccgcatccaccggtagctcttcttcttcttgcgctccaggatgtagcctggctcaggggaggtggcagctctggtctggaacccaggcatccccacaccaccttccctcggatctgtttggcgccctcacacctccatccggtgcccttgcactcacccaggatgggctgcccgccatcgtaggcaggcggctcccactgtactgtgcaggagtcctctcccacgttgctgatcttgggggccgcaggtgcgtctggcacgtctg

SEQ ID NO: 263422 - DNA, 80 bp, Homo sapiens
  chr11:47431265-47431345
  hypo
tggggtgtcgcgggcggcagggcctcccctggcagccagagacacccagctgggccgggccgtgccgccggtggctgagg

SEQ ID NO: 263423 - DNA, 180 bp, Homo sapiens
  chr11:47479675-47479855
  hypo
aatcctggaagcatatgaccccatctgttatcaatgggctgtgggatggggcattcgctcacttttaaccatgacttactgttgttactagcgactttaatgagtgcttgccaggggcagtagcttggctatttgtttgtgcatttattcttttttgagacggagtcttgctctgtcgcc

SEQ ID NO: 263424 - DNA, 158 bp, Homo sapiens
  chr11:47485990-47486148
  hypo
tttgtcacaataaaaacaaacgacactgggtaaacaatggttgagctggtctcagatctagtgacgtgagagtatggagaggagtgctctttagaagttgcccgtcccccacaggcagcagcgccctgcaggagcccgctgaccaaccagttacaagt

SEQ ID NO: 263425 - DNA, 37 bp, Homo sapiens; identical to SEQ ID NO: 214173
  chr11:47506517-47506554
  hypo

SEQ ID NO: 263426 - DNA, 165 bp, Homo sapiens
  chr11:47599039-47599204
  hypo
ttggcacagtgcttggcagccgtatagagctcaggatcactgtgccgatctgccagccacatcacctgaaggcagtttcccacttgcactgtgcgggccaaaaaccgagagcattcctcaaagagagatgtcagctgatacatgtctgacacctcataaatttcc

SEQ ID NO: 263427 - DNA, 189 bp, Homo sapiens
  chr11:47599234-47599423
  hypo
ccatggtagatataatcaaccaggagctggaaaacagactcgctgacatcctgcagcacaatcacccggttgtgggcctccttcaggttggaagtgaacatggatcggaagaagcagctctgagctgagaggaccagccgatggagctgaaactcccggccttccaccgaaatggtgacatcagcaaag

SEQ ID NO: 263428 - DNA, 44 bp, Homo sapiens
  chr11:48008070-48008114
  hypo
aattttttctttttttaagacggagtctcactctgttgcttagg

SEQ ID NO: 263429 - DNA, 197 bp, Homo sapiens
  chr11:48061635-48061832
  hypo
tggccgcttttgccttttcttgacattgccaatgcatcctgtccccgagcgtctctgagttttaagtctcagatttgttttctttggagacaaactgcaggtaggtgttacttctcaccgaagttcccagatagcacaggctttgctaaacaacacagcaccaggaactccatcatagagaccgcaggatgctgtgt

SEQ ID NO: 263430 - DNA, 74 bp, Homo sapiens
  chr11:48065754-48065828
  hypo
cacttgtgtttgttttgaggcgtatgtgcttcatatggttgaactcattcctcgcccagctggacatagagttg

SEQ ID NO: 263431 - DNA, 89 bp, Homo sapiens
  chr11:48146569-48146658
  hypo
catgatgagtccctcgtgggacctgtggacccatcctccggccagcagtcccgagacacggaagtcctgcttgtcgggttagagcctgg

SEQ ID NO: 263432 - DNA, 31 bp, Homo sapiens
  chr11:48365007-48365038
  hypo
gtcttgtctgtatgtgtaagcggatgacatt

SEQ ID NO: 263433 - DNA, 50 bp, Homo sapiens
  chr11:49124076-49124126
  hypo
acccggagggtgccgggtcccaggtctcctcacacggagcggcctaagcc

SEQ ID NO: 263434 - DNA, 81 bp, Homo sapiens
  chr11:49212565-49212646
  hypo
gtatacaaaaacaggttggccgggtgcggaggcaggcagatcacctgaggtcaggaggcgcgatctcggctcactgcaagc

SEQ ID NO: 263435 - DNA, 98 bp, Homo sapiens
  chr11:50258375-50258473
  hypo
gtttcgaacaactgggtttaagcgatcttctcaccttggccatcagagttgtcgggattacaggcgtgagggaccgcgccctgcttggattaggctat

SEQ ID NO: 263436 - DNA, 58 bp, Homo sapiens
  chr11:55940876-55940934
  hypo
tttaatgtgaaaaactgaatcgcagtttttaattgccgctaaaagtaatggcaaaaac

SEQ ID NO: 263437 - DNA, 158 bp, Homo sapiens
  chr11:57010762-57010920
  hypo
agactccatctcaaaaaaaaaaaaaatttgagcaactactatgtgccaggctctatttgaggcacttgccatacagtgtgagcaattcaaactatgccctcggtttcctgcactttcattctagaggtggaagagagacaaaacgatgaaagttagat

SEQ ID NO: 263438 - DNA, 72 bp, Homo sapiens
  chr11:57069626-57069698
  hypo
ggcccggtgcccacgcttgcgccccaagttggcacggctccgatacatggcactgtcgaggatctcggtgtc

SEQ ID NO: 263439 - DNA, 273 bp, Homo sapiens
  chr11:57071397-57071670
  hypo
tctcactaactcatactgcccgccctgtccagcggccactccccaaaatgacacattcacattcatcaccatcacacacactcaggcagagagcttgtgcgctgtttgtcactcccccagatggacctcgcacccaccacatctacaggcacggcacagagccacacctgacacaaacacacgcatccccgcatccccacacccccaccccacacacacacactcatactacgcacagaggtgtgggaaagcctggcacggcagtgcctggaa

SEQ ID NO: 263440 - DNA, 147 bp, Homo sapiens
  chr11:57072387-57072534
  hypo
ggtggcccaagccactcaggcagaggtcagtgagctctggaggtggccttgaggagcagagagtggcgagtggggaaaacccaagaaagtgcagctacgtccaccccgccggactaaaccccactcgcccttcaccccatcttagaa

SEQ ID NO: 263441 - DNA, 38 bp, Homo sapiens
  chr11:57134905-57134943
  hypo
aagttctggccggacgcggtggctcacccctataatcc

SEQ ID NO: 263442 - DNA, 42 bp, Homo sapiens; identical to SEQ ID NO: 214176
  chr11:57152967-57153009
  hypo

SEQ ID NO: 263443 - DNA, 390 bp, Homo sapiens; identical to SEQ ID NO: 214177
  chr11:57182504-57182894
  hypo

SEQ ID NO: 263444 - DNA, 246 bp, Homo sapiens
  chr11:57188497-57188743
  hypo
tgatgatggtcgaacggtgttggccaaataggttcccaatctggggatgataggactagcctggatcacttatttattcatgaaacagatacttcctgagcacccagcatgtggcagaccctccttatacccaaactcaccctccaccgctagagctcccacctcagcttgggccaaccccatctgaggcagccaattatagaaaagggtctctccttccctccaccttcccgccaccctgccgag

SEQ ID NO: 263445 - DNA, 281 bp, Homo sapiens
  chr11:57202848-57203129
  hypo
acccaagatatttacataagcgaaatgagtgcatacgctcaccagaagtagtgtacaagaatatccatagcaactttattcataacagccagaacctggtaacagcccaaatgcccaccgataggaatacggataagcaaattgtcccgtagtcacacgacggaatactgcatcacaacaaaaagaaccaacctttcatacacacagtgtagattaatttcgcagatgtgatattgagcaaaataaaccagatgccaaaaagtacacaatgtatatatatt

SEQ ID NO: 263446 - DNA, 165 bp, Homo sapiens
  chr11:57206942-57207107
  hypo
ttttgtcctggccctgactcacttgtcctgatttctcaagagagggactttcagaaaatgaaaaaaaagagaactttactaaagatcttcagtattggtcagaagagaacccatcctctctcagcaaggatgggagacggcgaagagatacgcttcatgggagag

SEQ ID NO: 263447 - DNA, 200 bp, Homo sapiens
  chr11:57235325-57235525
  hypo
caacctctccaccatctacccgggcactttccgccacttgcaagccctggaggagctggacctcggtgacaaccggcacctgcgctcgctggagcccgacaccttccagggcctggagcggctgcagtcgctgcatttgtaccgctgccagctcagcagcctgcccggcaacatcttccgaggcctggtcagcctgcagt

SEQ ID NO: 263448 - DNA, 174 bp, Homo sapiens
  chr11:57254651-57254825
  hypo
ctgcaggcctgtcagcgtcccaaagtggttggatgggaacctgtccacgagacggggagtatcaggggtgtgtggccctctccagcccaggccagcacctctcctatcccctccccaccatggtccccgctggccaggcagggtggtgcttaagcgttcgggctctttgcatgg

SEQ ID NO: 263449 - DNA, 117 bp, Homo sapiens
  chr11:57373338-57373455
  hypo
ggagtgggctggaccgcgctccaccatgccgtattcactaagtgagcagatagaaccatagaaagcatgctcactctcaaatcgtgctcatggaaagaacgacgtgttcaggactca

SEQ ID NO: 263450 - DNA, 43 bp, Homo sapiens
  chr11:57423901-57423944
  hypo
aatgtttactattattataaccggactcagaaactctgggttt

SEQ ID NO: 263451 - DNA, 39 bp, Homo sapiens
  chr11:57446669-57446708
  hypo
tacgcccaggctgtcgtgaagtggcgcgatcttggctca

SEQ ID NO: 263452 - DNA, 75 bp, Homo sapiens
  chr11:57500993-57501068
  hypo
gctgcgattacaggcgtgagtcaccgcgcccagcctatagtgaggaatttacagatgaaacgatatagctggaat

SEQ ID NO: 263453 - DNA, 121 bp, Homo sapiens; identical to SEQ ID NO: 214182
  chr11:57580247-57580368
  hypo

SEQ ID NO: 263454 - DNA, 120 bp, Homo sapiens
  chr11:58437898-58438018
  hypo
gtagtatcaccctcctctctcccccactggatattacgaaccatatcacagggggttagacaccgctcgcgatatggggagtaatatcacccccctgtcccccctggatattatgaacca

SEQ ID NO: 263455 - DNA, 61 bp, Homo sapiens
  chr11:58904855-58904916
  hypo
ggccactgcagaccgcgtgcccctactagtccctgcggccctgggcgctcgaacctcgggc

SEQ ID NO: 263456 - DNA, 42 bp, Homo sapiens; identical to SEQ ID NO: 214183
  chr11:58949204-58949246
  hypo

SEQ ID NO: 263457 - DNA, 42 bp, Homo sapiens
  chr11:59031094-59031136
  hypo
aaggccccgaggccaagggccgcaactgctgcatctgtgtct

SEQ ID NO: 263458 - DNA, 101 bp, Homo sapiens
  chr11:59312646-59312747
  hypo
ttggtattccaggacagagacgacagaaacctgaactaagtagcaaaatggaggagaagtcgttgtgaaaccgcccaatgggctcaccttacccactgcct

SEQ ID NO: 263459 - DNA, 43 bp, Homo sapiens
  chr11:59316335-59316378
  hypo
acaggcgtgagccactgcgcccggcctaaaaaccaatttaaac

SEQ ID NO: 263460 - DNA, 176 bp, Homo sapiens; identical to SEQ ID NO: 214184
  chr11:59423038-59423214
  hypo

SEQ ID NO: 263461 - DNA, 272 bp, Homo sapiens; identical to SEQ ID NO: 214186
  chr11:59665529-59665801
  hypo

SEQ ID NO: 263462 - DNA, 119 bp, Homo sapiens
  chr11:59807944-59808063
  hypo
gtcttgatgctcctcgctgtcttgatttggaccggtgctgagaacctccatggtaaataacaagttttagagaatgcttcctcgaaggagttaatcataatgatcgctttccatgcagg

SEQ ID NO: 263463 - DNA, 37 bp, Homo sapiens; identical to SEQ ID NO: 214187
  chr11:59809609-59809646
  hypo

SEQ ID NO: 263464 - DNA, 37 bp, Homo sapiens
  chr11:59834956-59834993
  hypo
ggataaggggcgtgagccaccgcgcccatcccataat

SEQ ID NO: 263465 - DNA, 40 bp, Homo sapiens; identical to SEQ ID NO: 214188
  chr11:60143549-60143589
  hypo

SEQ ID NO: 263466 - DNA, 367 bp, Homo sapiens
  chr11:60282698-60283065
  hypo
ggtttgcagaaaccgttcctagaggcaccaaaacgtagttaaccgggtgtctgaccacatggctgccaggagcctagtgagtctgcgcacacgcactacctccgccccggcagttcctgagtgggtgcgcaggcgcaagaggagcacaccgttgccattgcagaccgtcactccctgaggagcctgagagccggccgggtgctgggctcctggctatccctgtgatggtagctcagcgagatctggggacctggcgctgagcgcgttgccagccgggatcttcctcttcatctaggcctgggcgctggcgtgagaactcggactgggtcctggacgagcgccccccgaaactccttggaaccttgaa

SEQ ID NO: 263467 - DNA, 321 bp, Homo sapiens; identical to SEQ ID NO: 214191
  chr11:60514866-60515187
  hypo

SEQ ID NO: 263468 - DNA, 894 bp, Homo sapiens
  chr11:60524470-60525364
  hypo
acgtgatcgccttgaagttacgcttgaaggaggaaaactcatcaattttcggggaatcccggtaagggacagtcctgactcccgtcaggaggatgggacccacgcgtaaaatatcaggggttggattatcatgggtcaagaaatgaccaaagaacagaaagtgttttttaaaaacagtgcgacagctacttaaggctaaccagtgcactgcagagcctggagctctacacaacgctatgatcttaattcggcaggaatgcccttggtttcctgatcaaggaaccttagacttgagttatggagcaggtaggtcactgcctgaaaacaggatgtgagcaaggtcattttactgaggttattgttttgaccacctgggcgccggtacactcggtgttgtatcctctttatctgccagattgcagtgggtcagaccgcccgtctttgcctgaagggaattcaggaggtttaaaggagaaggaagaacaggagccaaccaggacagcgggaggcgggcggggggtcctctctctacttcattcccttctgtagggcataaggaggatatttttttctagtgatcatgaggacggaccggagccttttcctccccctatagaaaagccattgccctcttttcctccacccttaaagggacctgtattcgttggccccgttcaggcaatggcgcctcccatcccccttgaggagtctggaggccgcccaagagatggttcttggataagacctccagtcagtgaatatctatatgatcgggtggccgtgtcctcaacgccaactcctcgtcaaactttcttagtagaggggtgcctccaagagggacttaggaagggagactctgaggcgctttttggcgcattccctgttattgttcaa

SEQ ID NO: 263469 - DNA, 42 bp, Homo sapiens
  chr11:60640963-60641005
  hypo
ctgctgcaccagtgctggggcgctcccagtgccaaccccttc

SEQ ID NO: 263470 - DNA, 269 bp, Homo sapiens
  chr11:60648547-60648816
  hypo
gattatgttccagccgctttgtgtcaacagagccttaggtttactaatgcagcagagaaggcagtcagaccatgcctttattcgataggtgtcaagtgtcagggaccaccatgaccttggcgacatgtgtcaatacagttaaatctcaaggacaatgccagtgcaggcagagcacggaagatgcacggtagtcaacatttactgagtgcctcatctctacatgaaacagttcacttaattctcaagagccctggaacaaaaggcaacag

SEQ ID NO: 263471 - DNA, 33 bp, Homo sapiens
  chr11:60660676-60660709
  hypo
aatatagctaggcgcggtggctcacgcctgtaa

SEQ ID NO: 263472 - DNA, 93 bp, Homo sapiens
  chr11:60680209-60680302
  hypo
gcaagtgaacaaggcgggaactggagtgcacaagcgctggaacaagccagccgtttttcagcaccagtgggatcacactccactcactcaaga

SEQ ID NO: 263473 - DNA, 33 bp, Homo sapiens
  chr11:60680362-60680395
  hypo
gcgtgcgcttttggacaccggcaggagcgaact

SEQ ID NO: 263474 - DNA, 230 bp, Homo sapiens; identical to SEQ ID NO: 214192
  chr11:60689401-60689631
  hypo

SEQ ID NO: 263475 - DNA, 132 bp, Homo sapiens
  chr11:60695104-60695236
  hypo
ccctccaggtggtcccccctcgagtcactgagccccaccaacggccagtcccatgggacgtgcgggccgtttcagtggaagcggctgtgactccagcagagccctacgcccgggttctcttccacctcaaag

SEQ ID NO: 263476 - DNA, 159 bp, Homo sapiens
  chr11:60696096-60696255
  hypo
acagccatccctgggcgcctgcgtggtggagctggagcttccctcgcactggttctcacaggcctccaccacacgggccgagctggcctacacgcttgagcctgcagctgagggccctgggggctgtggctccggcgaggagaacgaccctggggagca

SEQ ID NO: 263477 - DNA, 164 bp, Homo sapiens; identical to SEQ ID NO: 214194
  chr11:60703904-60704068
  hypo

SEQ ID NO: 263478 - DNA, 220 bp, Homo sapiens
  chr11:60714069-60714289
  hypo
acttggctgcccatcgggggcttggtgatgaagacgggggtggcaaagaggaagatgaaaaatgccaggcccacacagcccacagggatgctgtagcccagcaggaagctgatgttctgctgaataaacgccaccaccagcagcgacagcacagcacccaggttgatgctccagtaaaaccagttgaagaagcggcgggtggcgtcgcggccgagatcca

SEQ ID NO: 263479 - DNA, 32 bp, Homo sapiens
  chr11:60754318-60754350
  hypo
ccctggcgccgtggcgcacagctgtaatccct

SEQ ID NO: 263480 - DNA, 153 bp, Homo sapiens
  chr11:60850614-60850767
  hypo
ggacaacgcctgatcgagcggagggtatcctctcagcgggagaatcaggagccctgggtccctgttggttccttaacttgctgtgtgatcatgggcagggcgcttcacctctctgaaagatggggcaaatgtcatcttcgctgtcttcctcct

SEQ ID NO: 263481 - DNA, 173 bp, Homo sapiens; identical to SEQ ID NO: 214195
  chr11:60880738-60880911
  hypo

SEQ ID NO: 263482 - DNA, 189 bp, Homo sapiens; identical to SEQ ID NO: 214196
  chr11:60897022-60897211
  hypo

SEQ ID NO: 263483 - DNA, 52 bp, Homo sapiens
  chr11:60897862-60897914
  hypo
catttggtaaagaaccggcagcgctgacctagcgtcacgcggatggcacata

SEQ ID NO: 263484 - DNA, 103 bp, Homo sapiens
  chr11:60920711-60920814
  hypo
gaatgaggtctcatgagctatgatggttttataagtgtttgacagtttatcctacagacactgtctcacctgccgccattaagacgaacgcacttcaccttct

SEQ ID NO: 263485 - DNA, 32 bp, Homo sapiens; identical to SEQ ID NO: 214197
  chr11:60926976-60927008
  hypo

SEQ ID NO: 263486 - DNA, 152 bp, Homo sapiens
  chr11:60927368-60927520
  hypo
gtctcaaaaaaaaaaaaaaaaaaaaaaaaaaatccaaacttggccacttactggctgtgtgacactagccaggttatctaacatctccgcaactcacttcatctgtaaaacgggatcatcacctatttggacatgttcgcaaaattcggtat

SEQ ID NO: 263487 - DNA, 153 bp, Homo sapiens
  chr11:61036509-61036662
  hypo
caccaagaccccaccggtgacaccggcccctgcctccccgccctgcaaaagaaacagcaacgctgcaaactggccaaggcttgccctgaaaggcaacatgacgcggctggaagatggcaggtctcccctaaagaggatcggctacttgagaaa

SEQ ID NO: 263488 - DNA, 350 bp, Homo sapiens
  chr11:61049429-61049779
  hypo
cggagcccttcttccgcccatcccttagctcaaaacacttggggagtttctctgccatgttcttacagggtccatgcctgccccgaggtgcgggatgtgactcagacagctgggagcggggctgaaatctagtgcttgtcttgttaataggttcacacatcgagcaggtatttaatgcgagtatcagagactcagccccagcactatgcagcggtaattaattgctgcgtggtaggggtaagccccaatgagaagctcatctccaaaccttccaccctcccgtttttctttccgaaaaaagtctcaaaactcactgggctgctgaaggaaggcttcgggacaaataccta

SEQ ID NO: 263489 - DNA, 37 bp, Homo sapiens
  chr11:61056997-61057034
  hypo
aggcgtgagccaccaagcctagcgaaaaaaaaaatta

SEQ ID NO: 263490 - DNA, 351 bp, Homo sapiens; identical to SEQ ID NO: 214202
  chr11:61076171-61076522
  hypo

SEQ ID NO: 263491 - DNA, 169 bp, Homo sapiens
  chr11:61094130-61094299
  hypo
atgcacaccttcaataataccgagcgccaaaacgaagggcagagaaggtgagggagcgaacaagaacagggaactagcctagacccaggtggaggcacatttcctaaaccccctaccaacctgcgatcaccatggaagcttcagcttcgacattttcctgtttccaagg

SEQ ID NO: 263492 - DNA, 354 bp, Homo sapiens
  chr11:61106581-61106935
  hypo
gtgttcacctccccggcagtgggcagcatcctggcagccatcagggccgtggcccaggccggcacaggtaagcctggcatgcaggaggggctgcggcagggagggcacagtaagcacactgagcccttccggctgctcccgcagtggggacgctccttatcgtgaagaactacactggggatcggctcaacttcggcctggcccgggagcaggcccgggctgaaggcatcccggtggagatggtggtgattggggacgacagcgccttcactgtcctgaagaaggcaggccggcgggggctgtgcggcacggtgcttatacacaaggtgggcttccaccggggacgtggagact

SEQ ID NO: 263493 - DNA, 100 bp, Homo sapiens; identical to SEQ ID NO: 214204
  chr11:61108987-61109087
  hypo

SEQ ID NO: 263494 - DNA, 169 bp, Homo sapiens
  chr11:61110433-61110602
  hypo
tgccacctaattgccggataccttgagcctctgtttgttttcttgtctgcaaattgggggtaataataatggtacctgctttataccgttgttttgaggattaagtgagattaaacatatgtaagacactcaacacagcgcccagcacctggcacgaactgagtaaatg

SEQ ID NO: 263495 - DNA, 53 bp, Homo sapiens
  chr11:61118455-61118508
  hypo
cccatacctgtctgtcggtcaggatccccggctctgggcgcttccaagatgaa

SEQ ID NO: 263496 - DNA, 43 bp, Homo sapiens; identical to SEQ ID NO: 214205
  chr11:61122609-61122652
  hypo

SEQ ID NO: 263497 - DNA, 120 bp, Homo sapiens; identical to SEQ ID NO: 214206
  chr11:61263503-61263623
  hypo

SEQ ID NO: 263498 - DNA, 492 bp, Homo sapiens
  chr11:61292552-61293044
  hypo
ccttcctaccgcagcgtccccttctctactgccacctccctcatccgagccgctggcacctcttgcctaggcagctgcaagtgtctccaaaccgccctccccgcatccacgctttctcctaccgtccattctcaatgcggcagccagagagaccttttaaaaatagaaattccatcatgatatgctcctgcttaaagcctttcaatggctcccagtgcacttagaataaaagccgggcaccctaccttggcttcaagtccttccacaatttggcccggctgtcctctccctgcttggcttgtgacctctcttcactcaatgactgggctccagccacatcggcctccttcctggcccttcaacaccccgactcctcccgcctcagggccgggcgcacactggccccatcatgacccccctcctggctactctcatccttcaggtctcagcattctttcctggcaccccagagagtgtcggatcccattatcc

SEQ ID NO: 263499 - DNA, 75 bp, Homo sapiens
  chr11:61302241-61302316
  hypo
cacccagcgacacgcgggcgcccctcccagagggccatggcacacatggacatgtggacacgcacgcaccacata

SEQ ID NO: 263500 - DNA, 260 bp, Homo sapiens; identical to SEQ ID NO: 214208
  chr11:61305393-61305653
  hypo

SEQ ID NO: 263501 - DNA, 79 bp, Homo sapiens
  chr11:61464743-61464822
  hypo
ccagcctcctgagcttggcccgctgctgtggtcaggagcatagaagccgggccagggcgagggaaggcctggcctaaac

SEQ ID NO: 263502 - DNA, 98 bp, Homo sapiens
  chr11:61467504-61467602
  hypo
gccccagcagtgcccggcctcgcccgcgcagagcatgtgacttggcagtgcctgggcctggcatgcctggcgtgccagggcagcggcagcagcagccg

SEQ ID NO: 263503 - DNA, 50 bp, Homo sapiens; identical to SEQ ID NO: 214209
  chr11:61474397-61474447
  hypo

SEQ ID NO: 263504 - DNA, 52 bp, Homo sapiens
  chr11:61475156-61475208
  hypo
tgtggaggccatgtcggggcggagtgcccaaagcaagcggggccatctggag

SEQ ID NO: 263505 - DNA, 120 bp, Homo sapiens; identical to SEQ ID NO: 214210
  chr11:61475743-61475863
  hypo

SEQ ID NO: 263506 - DNA, 44 bp, Homo sapiens; identical to SEQ ID NO: 214211
  chr11:61476225-61476269
  hypo

SEQ ID NO: 263507 - DNA, 198 bp, Homo sapiens; identical to SEQ ID NO: 214212
  chr11:61478512-61478710
  hypo

SEQ ID NO: 263508 - DNA, 189 bp, Homo sapiens; identical to SEQ ID NO: 214213
  chr11:61479892-61480081
  hypo

SEQ ID NO: 263509 - DNA, 370 bp, Homo sapiens
  chr11:61488080-61488450
  hypo
cctgcctgctagtagcatctcgaggtacaggggccacctggccttgctcacacgggcgttcctgtgacaggtttgtgatcctgtccgtggtgctcttcggcctggtctataacccgcacgaggcctgctccctgaacctggtggaccacggccgcggctacctgggcatcctgctgagctgcatgatcgctgagatggccatcatctggctgagcatgcgcgggggcatcctctacacggagccccgtgactccatgcagtacgtgctctacgtgcgcctgggtaagggccacccaccctggggtgctgccccagacaactcccacctctccattcactcagccagtatttactgcgcacatgttgcgag

SEQ ID NO: 263510 - DNA, 198 bp, Homo sapiens
  chr11:61490187-61490385
  hypo
ggtctgctaatggcccgctgcctctgcctttgctactgagctggctgaaagcccagcgataggaaaggccaggccggggttctaggcccttccctggcatgcaagtggcagccatccttcagccaggcctgctctccttgcagccatcctggtgatcgagttcatctacgccatcgtgggcatcgtctggctcactca

SEQ ID NO: 263511 - DNA, 187 bp, Homo sapiens; identical to SEQ ID NO: 214215
  chr11:61490855-61491042
  hypo

SEQ ID NO: 263512 - DNA, 35 bp, Homo sapiens
  chr11:61494080-61494115
  hypo
catccaggggtgccccgcagcgggcagggacctta

SEQ ID NO: 263513 - DNA, 213 bp, Homo sapiens
  chr11:61495640-61495853
  hypo
tcgcctacctctttgcggagttcttccgggaccttgacattgtgccatccgacatcattgctggcctggtgctgctccggcagcggcagcgggccaagcgcaacgccgtgctggacgaggtgagcaccaccagccccttctccaggtcacctctccacaccacccttctttcaggccccttccctgtggcccctgcagcggagggctcggctc

SEQ ID NO: 263514 - DNA, 320 bp, Homo sapiens
  chr11:61498684-61499004
  hypo
gccaggggttgggtccgcaggctcccaccctggggaactgctgggccctgaggctgtaggcaggaagggcaggaggtgaccgccctctgcctcctctcttctagcaagagatgctccgctacaaagaggtctgctactacatgctctttgccctggctgcctacgggtggcccatgtacctgatgcggaagcccgcctgcggcctctgccaactggctcggtcctgctcgtgagtacccctgtcccatcccccagcgattgcacctctcctcccgggtggtgtgtgaggaagggctaccgggctgcgcctactgctttgc

SEQ ID NO: 263515 - DNA, 174 bp, Homo sapiens
  chr11:61502322-61502496
  hypo
gttgcctgtgtcctgcgaggccgcggttcgcccctggagtcaccatcgaggaagacaactgctgtggctgtaatgccattgccatccggcgccacttcctggacgagaacatgactgcggtggacatcgtctatacctcctgccatgatgcggtgaggccgggcagggctgggg

SEQ ID NO: 263516 - DNA, 143 bp, Homo sapiens; identical to SEQ ID NO: 214216
  chr11:61508687-61508830
  hypo

SEQ ID NO: 263517 - DNA, 606 bp, Homo sapiens; identical to SEQ ID NO: 214217
  chr11:61511517-61512123
  hypo

SEQ ID NO: 263518 - DNA, 171 bp, Homo sapiens
  chr11:61514701-61514872
  hypo
tctgtattgggttagaacttcgtttctcaaagttcacggtgctcatgactcactggggcgcttgctaaatgcaggtgcgggtttagtggtccggggtggggcccaggtatagatttcttacctgctcctgctcggctagtgccctggcccggggccacactttgagttgca

SEQ ID NO: 263519 - DNA, 458 bp, Homo sapiens; identical to SEQ ID NO: 214219
  chr11:61522483-61522941
  hypo

SEQ ID NO: 263520 - DNA, 99 bp, Homo sapiens; identical to SEQ ID NO: 214220
  chr11:61525593-61525692
  hypo

SEQ ID NO: 263521 - DNA, 411 bp, Homo sapiens
  chr11:61536686-61537097
  hypo
aagctcagctgctcaccccccggccccttcccctggctctcgcagcacactgccggactctcccccagactcgggctccgaggcctactccccccagcaggtgaatggtgagtccagcgggcaccgccctcctgctccagggtttgggcaagtagttggggcggccttatcagggaggtaggggaggagggagggggccagcggctgcccaacgggctgagattatcgctggtcaaatactccctggcgcttggctattgtttccccacgggcgggtggggagcctggccctgcctctgagcaagtatccccgcggtgatgccacccgcctgcccgcctgcgccatcatggacgcacccttcggcggtaagtgggtggctggggaaggccgtgggtgcagcctgggtgcag

SEQ ID NO: 263522 - DNA, 46 bp, Homo sapiens
  chr11:61615510-61615556
  hypo
ctgaagtgctatccccgagggttgaaggttccgggaactgctccta

SEQ ID NO: 263523 - DNA, 407 bp, Homo sapiens; identical to SEQ ID NO: 214223
  chr11:61632399-61632806
  hypo

SEQ ID NO: 263524 - DNA, 176 bp, Homo sapiens; identical to SEQ ID NO: 214224
  chr11:61634597-61634773
  hypo

SEQ ID NO: 263525 - DNA, 42 bp, Homo sapiens; identical to SEQ ID NO: 214225
  chr11:61635271-61635313
  hypo

SEQ ID NO: 263526 - DNA, 329 bp, Homo sapiens
  chr11:61640576-61640905
  hypo
caggtggcccgctgcgcggggccctttcaggccccccatcatggagggctgtgggaggccagtgcaggtcaagaggcacaaccgtctttcccagtccatgtccagaagcgtccgcagacatggcccccagccctgggtcctcatctgctgggcccgctcatcccaccatgcagaagcgtcaagtgacttgaagcccagcatgaataggaagtgaataggccctcgggcaggtccgagtccaggcatccctgggctcccaggcccagggcatctagagctaaagggagctccttagcgctccccctcaaccccgccgccggccccaacac

SEQ ID NO: 263527 - DNA, 236 bp, Homo sapiens
  chr11:61641255-61641491
  hypo
agcccttctctgcccgcctgggtgttgccttcactgatggaggtaggcgtccagccagatgtcaccagacttcttcagggacctgggaggtgggggtggcagtgggggtgggtgttaggagctcagttgcaagatcctaacacccctgtatcccccatggtaagtgtgagcggagatccccattccctgtgggttcccttccctgggggcaggcagcgatgcgggctggagggtgg

SEQ ID NO: 263528 - DNA, 215 bp, Homo sapiens; identical to SEQ ID NO: 214226
  chr11:61644863-61645078
  hypo

SEQ ID NO: 263529 - DNA, 111 bp, Homo sapiens
  chr11:61646081-61646192
  hypo
agttccaccagtgggcggagaagccctgtggaggaggagggggctctcagggcaggctgtgcccccgactgtgcccacacacttgggcagacccagcgccacccagcacct

SEQ ID NO: 263530 - DNA, 42 bp, Homo sapiens
  chr11:61653516-61653558
  hypo
atttggcctgtgtagcggagcccaagtcgaaggcagacaccc

SEQ ID NO: 263531 - DNA, 167 bp, Homo sapiens; identical to SEQ ID NO: 214228
  chr11:61662932-61663099
  hypo

SEQ ID NO: 263532 - DNA, 225 bp, Homo sapiens
  chr11:61664739-61664964
  hypo
tgcaggagtgagggcgcgtggccacccagcctgtaccaacaaagcctgcctttattaaatagagatcgcgttacattccatccaaagaaggaaatccggacgtggtgagggatgcgtccaggtgggagctccgaacgctggtcctgagtgggctctgatgggtgggagggcccaggtcctgcctgcccacccaggccccacatgccagggcgcgtgtctgcatgg

SEQ ID NO: 263533 - DNA, 141 bp, Homo sapiens
  chr11:61665672-61665813
  hypo
gtctccctgtgtgtcggcttgttctggggtgggtgtttgctctgtctcagagctccccttcaggcctgggccgcgccctaagcctcctgggggaagaagccgagcttggccagtgacatctccttccgcaacctcatgatc

SEQ ID NO: 263534 - DNA, 181 bp, Homo sapiens
  chr11:61666025-61666206
  hypo
gtgccgaccacacccgagggatctgtttgcactacactgacggccacccccacagcccgacgcagacaagcaggtacacgctgtcacatgccacagcggtggtccagacctgggaactacattagacaaggcacagatgcctccctggggtctcacaaggaccctgcgcagtgaggcgggg

SEQ ID NO: 263535 - DNA, 143 bp, Homo sapiens; identical to SEQ ID NO: 214229
  chr11:61667785-61667928
  hypo

SEQ ID NO: 263536 - DNA, 229 bp, Homo sapiens; identical to SEQ ID NO: 214230
  chr11:61668805-61669034
  hypo

SEQ ID NO: 263537 - DNA, 248 bp, Homo sapiens; identical to SEQ ID NO: 214231
  chr11:61672904-61673152
  hypo

SEQ ID NO: 263538 - DNA, 396 bp, Homo sapiens
  chr11:61673894-61674290
  hypo
ctgccacccttccccgtgcccagagcccgcttcccaccctcacctccttgccctctctgtctggggtgagggtgtgtcccgcagcgggacacacggcggggcagagggtgctgctggtgctcttgtggcgagagtggccctttcggggcccggccttggtggggctcagcagctgggggtgaagctcgcggttgggagaggctggtgtggacgtgatgaccagcgtcttcaaggctgtcacctctgcctgcagcatgtcgatctgcatgggatgggatggctgtcaaccctcacccagactggatgccatcctggctgccaccgcctatcagcctaactcaggacaatgcacccctgcagtgacaggcacttagtcccacccgacgccctcagaac

SEQ ID NO: 263539 - DNA, 459 bp, Homo sapiens
  chr11:61674740-61675199
  hypo
cccattcctgctggccccaccgggccaggtgagcgtccactcgggcagcaaagctcagtgctcgctgagccgggaggcagggggggtgcctgggctggcctgggcaggcggggatgggcctcaccttgccccgagcctccttcagctgcttttctgatgccgcctgcttcatgttggcttctcgaaccatcttgtgagcttcctaggaagaaggcagtccctgcgtgagtggtgaggagccaacggacgcccagatgacccattccccaagttgttcccgcgcccagccggtgtacctcaaacaggctggccgtcagctcttccagctcctgttctagctgctcccgcaccttggacagccgctcacattcctcgtcctttagcttcagctcctggaggaaaagaggcaggcacttgagcacctcagcatccccaggcctggcacgggagggaccaggc

SEQ ID NO: 263540 - DNA, 154 bp, Homo sapiens; identical to SEQ ID NO: 214235
  chr11:61679898-61680052
  hypo

SEQ ID NO: 263541 - DNA, 66 bp, Homo sapiens; identical to SEQ ID NO: 214236
  chr11:61688731-61688797
  hypo

SEQ ID NO: 263542 - DNA, 94 bp, Homo sapiens
  chr11:61713860-61713954
  hypo
gtgtctggcacccccgcgcatctccccagctctgccctgctgccccaagagatggctctctgctggggagctcgagagcttggaatctgctgca

SEQ ID NO: 263543 - DNA, 221 bp, Homo sapiens; identical to SEQ ID NO: 214237
  chr11:61717670-61717891
  hypo

SEQ ID NO: 263544 - DNA, 139 bp, Homo sapiens
  chr11:61736213-61736352
  hypo
gtcttttgacgcatcggtggaagaactgaatttcaggatgctcacaaacctgcagctggaagctagacttccaaaccttagtttaaaaaagcaactctactgaaatactaaaataaattgccgacggaattagggtgat

SEQ ID NO: 263545 - DNA, 37 bp, Homo sapiens
  chr11:61736665-61736702
  hypo
atatgttgcctggggctgggcgcggtggctcatgcct

SEQ ID NO: 263546 - DNA, 76 bp, Homo sapiens; identical to SEQ ID NO: 214239
  chr11:61770026-61770102
  hypo

SEQ ID NO: 263547 - DNA, 148 bp, Homo sapiens; identical to SEQ ID NO: 214240
  chr11:61770721-61770869
  hypo

SEQ ID NO: 263548 - DNA, 37 bp, Homo sapiens
  chr11:61784772-61784809
  hypo
ctacaatttcccagacggatgattcattcccttcacc

SEQ ID NO: 263549 - DNA, 33 bp, Homo sapiens
  chr11:61795462-61795495
  hypo
agcaaggggtccaggcgaggcgtggtggctcac

SEQ ID NO: 263550 - DNA, 39 bp, Homo sapiens
  chr11:61797090-61797129
  hypo
ttcttggggccgggcgtggtgactcactcctgtaatccc

SEQ ID NO: 263551 - DNA, 31 bp, Homo sapiens; identical to SEQ ID NO: 214241
  chr11:61811795-61811826
  hypo

SEQ ID NO: 263552 - DNA, 44 bp, Homo sapiens; identical to SEQ ID NO: 214242
  chr11:61825693-61825737
  hypo

SEQ ID NO: 263553 - DNA, 55 bp, Homo sapiens
  chr11:61889939-61889994
  hypo
ggctctagataaacgcacactccgttgccattcacaaggcgttttgtttttactt

SEQ ID NO: 263554 - DNA, 129 bp, Homo sapiens
  chr11:61912296-61912425
  hypo
gctgttggggccacgttggggatacctctgcctaagaagcattctgatgctgccacccacgtggctgcaggctgctggggactgtgggcagcttttggggctgggtggggggtcgtccttgctcatgtc

SEQ ID NO: 263555 - DNA, 236 bp, Homo sapiens
  chr11:62167973-62168209
  hypo
gaccagcaggggcgcggctatttctgtgcaaggcttgggcactgggcagaaccccaaccctccatgctattaacacagaggagaaccccagcttcatattttatgttttatgaaacacgtttgcatctatttctactttgtggagtagccagggcagaaatcatcattgccattttccaatcggggcccctgacactcagtgctgtggagtgccttacccgcgtcacacagcaggt

SEQ ID NO: 263556 - DNA, 142 bp, Homo sapiens
  chr11:62184162-62184304
  hypo
acgtgtgctcttaccggtgttaaggcgtctcggagtgggacggttccggggtcaccacagccttcaactgtcacatggcacaaaggcctcatgcatggattcattccagggattcctgtttagcaagcgttgcgtaccttgg

SEQ ID NO: 263557 - DNA, 88 bp, Homo sapiens
  chr11:62257978-62258066
  hypo
ctttctttaaaggaggtggagtatgtccctgtttatatgctgaacggacattcaccccaggctatgggtggagcgctgggcaaggaag

SEQ ID NO: 263558 - DNA, 54 bp, Homo sapiens
  chr11:62356614-62356668
  hypo
ccctgggcctttctcgcagctcgtagttctaccaggtgccggtgctttctgcct

SEQ ID NO: 263559 - DNA, 187 bp, Homo sapiens
  chr11:62361980-62362167
  hypo
aactcacagtctcataggcccgtttcaccataatgccccccagtccccggttctgggacagctggtttctgttgatcggtgtcttggtaccccgaggtgtttttggtttcaggggtgcctgggccactggaaaaaaacagaaaactttcgcaccttttcttcccacgcagttcccctttgttacttc

SEQ ID NO: 263560 - DNA, 105 bp, Homo sapiens; identical to SEQ ID NO: 214245
  chr11:62387277-62387382
  hypo

SEQ ID NO: 263561 - DNA, 38 bp, Homo sapiens
  chr11:62418574-62418612
  hypo
gctatgtttctttctccccccgccccgagagggagtct

SEQ ID NO: 263562 - DNA, 31 bp, Homo sapiens; identical to SEQ ID NO: 214246
  chr11:62423247-62423278
  hypo

SEQ ID NO: 263563 - DNA, 77 bp, Homo sapiens
  chr11:62440582-62440659
  hypo
acattttcaaaacaggtcatgtggtgtcaggttggagtgtacttccagggataaccgtgggacattcttgaaatctg

SEQ ID NO: 263564 - DNA, 148 bp, Homo sapiens
  chr11:62450079-62450227
  hypo
ggctggtctcgaacttgtgagctcaagccatcccctgccttgtgctggaattacaggcgtgagccaccatgcccagtgctggaattacaggcgtgagtgctgtaattacaggcgtgagtgctggaattacaggcgtgagtgctggaat

SEQ ID NO: 263565 - DNA, 197 bp, Homo sapiens; identical to SEQ ID NO: 214247
  chr11:62474896-62475093
  hypo

SEQ ID NO: 263566 - DNA, 101 bp, Homo sapiens
  chr11:62479575-62479676
  hypo
aacagagcgaggctctgtcaaaaaaaaaaaataaaaataaaaataaaaaataaaaaagcaatggcgctgttgtaaatttaatttaccgtctcgttctccag

SEQ ID NO: 263567 - DNA, 183 bp, Homo sapiens
  chr11:62484466-62484649
  hypo
cttggccccggcttcggttctgccggttacgcttgtttcggttgtttcggcgatttgtccgcttctcggaggggggcagaagcttccttgcctcctccttgtacttagtgacaatgggctgagcttcctccttctccagctccccatatgtcacctcatccatatagtcgcatttttcaggca

SEQ ID NO: 263568 - DNA, 105 bp, Homo sapiens
  chr11:62527793-62527898
  hypo
actcgcagtcatatctctctcgaggcttaaagtgttttttgggcttccaatagctcttaaatttttttttttttttgagactccgtcttgctttgtcgccaggct

SEQ ID NO: 263569 - DNA, 66 bp, Homo sapiens; identical to SEQ ID NO: 214248
  chr11:62532994-62533060
  hypo

SEQ ID NO: 263570 - DNA, 213 bp, Homo sapiens
  chr11:62541857-62542070
  hypo
ctttatttcaaagacaatggggagccattgggaggagtgctgcacagaagccacatagctgtccattggatgtagggacctggacgtcactggtgacccattgatcccctgccagaggagtagtgggggcaatgcctgggtgggtcatcctggatctgggccttcctgtctgaggtgtggatgcatcactttggcgcacgggagcctaccttc

SEQ ID NO: 263571 - DNA, 296 bp, Homo sapiens
  chr11:62581077-62581373
  hypo
cacatgatcaacaacgtagagtaaaagcactctgctagataccgtggggaataaagatcaatcagggttggaccctgctaaagggataagatcaagtgggcaggagtggattcctaaaacctcctacacctcctctcctctactggcttttcttcttaatgagctgagaagactgaagtggtctgaagataaatgccgctccaccccgagcattgctacaatagcctctgtcttcccacctatcgccagctcctcttagagccaagccttgatttatgccccggagcccacttcct

SEQ ID NO: 263572 - DNA, 34 bp, Homo sapiens
  chr11:62617578-62617612
  hypo
ggaaactcaggtgtcggatcgcttgagcccagga

SEQ ID NO: 263573 - DNA, 120 bp, Homo sapiens
  chr11:62658210-62658330
  hypo
gtgcaagcagatctgcagtatttgctgttgggatcctgttgcagtactagtgatctgcgcaggcctcatggcccttggagttagttcggctctcttagttttcttacagaaaagaatgct

SEQ ID NO: 263574 - DNA, 178 bp, Homo sapiens
  chr11:63325853-63326031
  hypo
gaagatgcacctggtcactgcgggagacgccatagcgcagatggttcacgaagtgctcgcagttgtcactggtcagcgaataaggcaactcctgccccaccaactcctctgcccgcttgacgattttgttggaaggcagtggtgtgtatctgtcatcgtgcttgttattgaccctgta

SEQ ID NO: 263575 - DNA, 304 bp, Homo sapiens
  chr11:63377496-63377800
  hypo
aattaacttccctaaggtctcggagctccccgaaaagtagcaccaggattccgcagcagatctgcctgagcttaaaggtgaggttcttcccaccacaccaagtaattcactccaaggtactgacgttcaacaactgtgctcccatggcaaaactggcctctgcctcaccgcactctcggcctgaaatgcccttttgccgttcacctggaagattcctactcatccctcgagatgggctcaacatgtccactcctcaatgcatcccctgatgcctcagcaaagcgagttgctgctgcctccacag

SEQ ID NO: 263576 - DNA, 40 bp, Homo sapiens
  chr11:63389635-63389675
  hypo
actgcactccagccttgacgacagagcaagactcagtctc

SEQ ID NO: 263577 - DNA, 221 bp, Homo sapiens
  chr11:63398535-63398756
  hypo
aaaatcaatagctccgcccagctcacgatattgaccagaatacctgatgtagccccaggtgaggagtgctattaacagtagtccaaccatacagttgaacaactgggctacaacctcaagacctatgaagccagtgaggcctgaggctatgtacaaagctacaatgcccgtgaacagcactgcaggggttcggaaggtgctgaagacgttcttgctaccat

SEQ ID NO: 263578 - DNA, 152 bp, Homo sapiens; identical to SEQ ID NO: 214252
  chr11:63399450-63399602
  hypo

SEQ ID NO: 263579 - DNA, 120 bp, Homo sapiens; identical to SEQ ID NO: 214253
  chr11:63431996-63432116
  hypo

SEQ ID NO: 263580 - DNA, 88 bp, Homo sapiens; identical to SEQ ID NO: 214254
  chr11:63434153-63434241
  hypo

SEQ ID NO: 263581 - DNA, 95 bp, Homo sapiens
  chr11:63529491-63529586
  hypo
tagcctccccgccccggctttaggaccgcgggaactgttcctgcagcagcctggctttgtgaagagcagacagtagggcccggagtctcccagcg

SEQ ID NO: 263582 - DNA, 180 bp, Homo sapiens
  chr11:63562759-63562939
  hypo
cgccaccacgcctgactaatttttgtatttttacaccatgttggccaggctggtaaatttggtgatttcttaagcgtatcttgggggaaaaaagtttctgagagcagtaagtataaacgtgtgtctaaaatgtgtgtccttttatttatttatttttttgagatggagtcttgctctgtc

SEQ ID NO: 263583 - DNA, 96 bp, Homo sapiens
  chr11:63609980-63610076
  hypo
ttcctgtattctttaaaacgggaaaaaagacaagcagcagctcctcaggtcacaaggccaggtatatcaaacactggcctccgagaatagatcatg

SEQ ID NO: 263584 - DNA, 31 bp, Homo sapiens
  chr11:63641119-63641150
  hypo
tattttatttttttctgagacggagtcttgc

SEQ ID NO: 263585 - DNA, 226 bp, Homo sapiens
  chr11:63675218-63675444
  hypo
cctgacaggcccttgcgtagccacggcccctcctcctacagagattcaaagcattgcagcccctttcctccaaaaggactgcagtcctgagaccctagcgtgtggctccaaaaacgcactcacacctgcaacccccagaacagcgcgtgagccctggctgtgggggagcagcctcgtgccgggccgtgtgctcagtgtgctcagtgaagtgcgtgcacagccactc

SEQ ID NO: 263586 - DNA, 110 bp, Homo sapiens; identical to SEQ ID NO: 214256
  chr11:63675664-63675774
  hypo

SEQ ID NO: 263587 - DNA, 379 bp, Homo sapiens; identical to SEQ ID NO: 214257
  chr11:63676299-63676678
  hypo

SEQ ID NO: 263588 - DNA, 91 bp, Homo sapiens; identical to SEQ ID NO: 214258
  chr11:63676708-63676799
  hypo

SEQ ID NO: 263589 - DNA, 31 bp, Homo sapiens; identical to SEQ ID NO: 214259
  chr11:63743821-63743852
  hypo

SEQ ID NO: 263590 - DNA, 69 bp, Homo sapiens; identical to SEQ ID NO: 214260
  chr11:63764163-63764232
  hypo

SEQ ID NO: 263591 - DNA, 150 bp, Homo sapiens
  chr11:63764790-63764940
  hypo
accagggcctgaccggcacctgtgccacaggaggtggagcccatgtgcaaggagagcgaccacatccacatcattgcgctggcccaggccctcagcgtgtccatccaggtggagtacatggaccgcggcgagggcggcaccaccaatccg

SEQ ID NO: 263592 - DNA, 281 bp, Homo sapiens
  chr11:63779084-63779365
  hypo
aatgaagaacaaacacaaaacgcaagcagggaatcagggctgcgggacgaagacatggagcagggcagtgcatcagggttctgggcagagtggccagggcaggcaggatggcccttgtgcgtgttcgaacaatgggtggctggtcatgggaggggcgcgggtagaggcctgaactcctgtaggagggatgtccagggaccccacgggaagatgggtgtgtctgggcagagtcagatggggtctaacttgggcaggtaggcgattaggactggatgaactca

SEQ ID NO: 263593 - DNA, 81 bp, Homo sapiens
  chr11:63783735-63783816
  hypo
ctgggctccagccccgatccgcagcctgcgtccgtggtaactgccagagctcatcagggaaagcagcgggtgaggccaggc

SEQ ID NO: 263594 - DNA, 182 bp, Homo sapiens; identical to SEQ ID NO: 214262
  chr11:63784048-63784230
  hypo

SEQ ID NO: 263595 - DNA, 42 bp, Homo sapiens
  chr11:63786387-63786429
  hypo
gggggatgggcactggactgcgagtccaagctggggctcatg

SEQ ID NO: 263596 - DNA, 31 bp, Homo sapiens
  chr11:63814029-63814060
  hypo
tttttctttttgagacggagttttgttctcg

SEQ ID NO: 263597 - DNA, 31 bp, Homo sapiens
  chr11:63814240-63814271
  hypo
gattacaggcgtgagccgctgcgcctggcct

SEQ ID NO: 263598 - DNA, 437 bp, Homo sapiens; identical to SEQ ID NO: 214263
  chr11:63832549-63832986
  hypo

SEQ ID NO: 263599 - DNA, 554 bp, Homo sapiens
  chr11:63849155-63849709
  hypo
ccatgcaggtgagggcgtgtggctgaagcctgttcctgcttgggggttggccacacagcatcccaactccaggtccagagccgagcctgacagccctcctccactgcctcctggagctgccggagagaggtccgggtccgttctccccaattcacagacatgaagactgaggccgtggttccagtggctgctcggtggtggggctggagcttggcagcatcctgcagccctctggactcccggctctcgagtgccgcgttctacctgctgtgttctaaatggacatgccatccccacagctgtgtcaataaagcagccatttacagagcgggcgccggatcccgtgacaggttgaaaagtgtgtgagctgcagcgtcctgggctggggcagaggggccgtggcgagaacagatggggctgtgcccatctccccaggccctcctgtggctgcgcctggagcctcccgggagggaggccagagccaggagcaggccagagccaggagcaggcgcgaaacatcccttaaatattggtgctctcggcagcactgggcc

SEQ ID NO: 263600 - DNA, 79 bp, Homo sapiens
  chr11:63860749-63860828
  hypo
ggccatctagaactcgatcgagtcagctgctggtgttgtcactgctgcggacacagtccttacccgtaagagctcacgg

SEQ ID NO: 263601 - DNA, 95 bp, Homo sapiens
  chr11:63864328-63864423
  hypo
tcgagggcctcccccggcagagctgagagccgatgcctgtccctccgtgagctgggtgcgagtggcccttgctggtcccccgctcacccactctc

SEQ ID NO: 263602 - DNA, 280 bp, Homo sapiens
  chr11:63864923-63865203
  hypo
tgccctgctctgggcgctgcctgctgagtttctctgatggccatcttgagggtgggcgctggcaaaggcccaggcccgccggccgggcggcacagactcctgaagccacccacggcctggctcgcacactctcgcaaataccctgaaagtctgggttttgtcaggagatggtttaattagcagagcggaggctgggagggttcgcaccacacaagcaggctctcgcctccgcctcttctcaccctgctactcgggtgccatgcagcggtgccaagcctgg

SEQ ID NO: 263603 - DNA, 77 bp, Homo sapiens; identical to SEQ ID NO: 214265
  chr11:63871583-63871660
  hypo

SEQ ID NO: 263604 - DNA, 258 bp, Homo sapiens
  chr11:63883405-63883663
  hypo
ttccaggagggccgcggcagcacgggtctcattaatgcgcagcctcttggctcctgataagatttaacattagccagatgttgttagagtccgacctcggcgggagcaatcacctgcggcataaacctggcacaaaggccactcctccagcttgacctcaccccgcaggaccggacttcggtcaccccttggtacaggctggcaggtgggagggaatgcacgattcactcctggggtcgctgtcgccgcctccctctc

SEQ ID NO: 263605 - DNA, 330 bp, Homo sapiens; identical to SEQ ID NO: 214266
  chr11:63885570-63885900
  hypo

SEQ ID NO: 263606 - DNA, 254 bp, Homo sapiens
  chr11:63888534-63888788
  hypo
ctggggcaggagtgcgggagacttagtgctagagagcaggcagagctgggagccagcctgtgcccagccacgccctccgagacaaggcctgagtgatgagctttcctcccctcccattgcacagagcaggcccaggcaggcaggagccctggcagctgccccagaggagctccttgggccccaggaccacgcgagtctcctgttcctggttcttgcactaactgggcgagggcggggctcggcccctcttacca

SEQ ID NO: 263607 - DNA, 33 bp, Homo sapiens
  chr11:63889204-63889237
  hypo
catttccaagggaacgtccgcggctgggctgac

SEQ ID NO: 263608 - DNA, 144 bp, Homo sapiens
  chr11:63892468-63892612
  hypo
ccacgtctcccccggagacccctgcctgggacagctcctgcttctggtacctgctggagaccctggccagggcctggctctttgagaccactgtcactgtcccctcccgccccttgtcactgaaatgcccggcctgtgccagga

SEQ ID NO: 263609 - DNA, 82 bp, Homo sapiens
  chr11:63894386-63894468
  hypo
ggggcctgagtgacgggcctgaccgtccccgctaccgcctgctgccatgcgaccagatggctgacccggcccggcttctcag

SEQ ID NO: 263610 - DNA, 187 bp, Homo sapiens
  chr11:63905995-63906182
  hypo
tgatgatgtttaaaccgtacctgaaatacagccaggcggcaataataaaacagccgcgggccctgctggcagaggaatggctgacagccgggcctctctccccaactgcgatgccgctcggctctggtttttaccgcaattacaatgtccgaagacagggaggaggcagcagcggggaggaggagag

SEQ ID NO: 263611 - DNA, 402 bp, Homo sapiens
  chr11:63908846-63909248
  hypo
catctgcacagagccggggagcgggggcactgtggccaccacgtgctgctgcagccagaccccttcatatcctaggcacacagagtacccatccgttaaacgggcaggcaagccacggcctcctggggagccctgaaaccagctcggctgtgccttgccaaggaactggcggatcattccaggagagcgagccaagggctgcagatccagcccttttcatgcttggccaatttaatggtccccattaatttcaaaacacacacattcccacaagctccggcctcctcggctcagtgctcgggtggacagcacaccggggacgcaagcaggggcacaggtgcaggcgctgaggcctcaaggacaggaaggagccacagaggatgtgctcgggacactgggcac

SEQ ID NO: 263612 - DNA, 144 bp, Homo sapiens; identical to SEQ ID NO: 214269
  chr11:63912569-63912713
  hypo

SEQ ID NO: 263613 - DNA, 252 bp, Homo sapiens
  chr11:63916439-63916691
  hypo
ttcagaccctgcctccgtcattccctgggattccaggcgggtaccgggtcctcctggctgtgagagtctagaacaaaaagatcccaggagaacacaccaagaggtgtatgggtaaactgaggcaagcagggggaggtgaaagctgatcatttgcaggaggtaccatgtccctcggcaccgctgggacaggggtgatgcccagaacggcgctgatgacaccagtttcagcaccagtgcgaggtgctgagcccc

SEQ ID NO: 263614 - DNA, 84 bp, Homo sapiens
  chr11:63934615-63934699
  hypo
ttttaagtacttttatatatttttatgtactattaatattactttatgataaatataatgaatacaggccgggccattataata

SEQ ID NO: 263615 - DNA, 271 bp, Homo sapiens; identical to SEQ ID NO: 214271
  chr11:63963859-63964130
  hypo

SEQ ID NO: 263616 - DNA, 148 bp, Homo sapiens
  chr11:63978732-63978880
  hypo
aacctgcactccaggcgtggcacctgcactgttccgggggatgccagctcacttctcggacagcgcccagactgaggcctgctaccacatgctgagccggccccagccgccacccgaccccctcctgctccagcgtctgccacggccc

SEQ ID NO: 263617 - DNA, 164 bp, Homo sapiens
  chr11:63979092-63979256
  hypo
actgctgcttctgccgcggcccaggtggctggactcgtcgcggtgtctcatgcagcagggcatcaaggccggggacgcactctggctgcgcttcaagtactacagcttcttcgatttggatcccaaggtgggtcggggcagggagaaagcgggcctcaggtcca

SEQ ID NO: 263618 - DNA, 215 bp, Homo sapiens; identical to SEQ ID NO: 214272
  chr11:63988354-63988569
  hypo

SEQ ID NO: 263619 - DNA, 161 bp, Homo sapiens; identical to SEQ ID NO: 214273
  chr11:63990015-63990176
  hypo

SEQ ID NO: 263620 - DNA, 31 bp, Homo sapiens
  chr11:64011977-64012008
  hypo
tttattaaagggcccgcgccgcagagtcaat

SEQ ID NO: 263621 - DNA, 58 bp, Homo sapiens; identical to SEQ ID NO: 214274
  chr11:64032945-64033003
  hypo

SEQ ID NO: 263622 - DNA, 88 bp, Homo sapiens
  chr11:64034944-64035032
  hypo
gccagcaacggtcacgcacccgggagcagcgggcacctgtcgggcgctgactcggagagccaggaggagaacacgcagctctgaactg

SEQ ID NO: 263623 - DNA, 460 bp, Homo sapiens
  chr11:64044375-64044835
  hypo
ctctagctttacattctctgcgtgttgggcttctgagtcagcggctggggcggacatccctgctgatgcttccgcgagcatccctgcactgggattttcagagtcctcagattcccaagaaggagaatacgaagttctccctgttttatagatgaggaaacagaggcacacttaattacaagacacttgcacactgaattgcacacttaattaaaacagtggtgttccagaccgtttggagcagtgaagctctgccatcaggcaagggctgggtttggatcctgcccctaccacatgccgaccacacacaatctgctgccgggggaggctgacgtcagtggccagcacagtggccagtgctgccaccccaccctgggcagacactcgcagcctgtccgcctccggcacctgtaggcctcagccttgactatagccttccggtacagaagccccttcaggc

SEQ ID NO: 263624 - DNA, 117 bp, Homo sapiens
  chr11:64054225-64054342
  hypo
tctccttctacttccgagatactccccgcgccaaccgcctggggcccttgcccttctggcttctctactgctgccccgtctgcctgcagttcttcaccttgacgcttatgaacctct

SEQ ID NO: 263625 - DNA, 94 bp, Homo sapiens
  chr11:64055231-64055325
  hypo
ctttctgctggtgaacgtgctgtgtgctgtgctctcccatcggcgccgggcacagccctgggccctgctgcttgtccgcgtcctggtgagcgac

SEQ ID NO: 263626 - DNA, 179 bp, Homo sapiens
  chr11:64056037-64056216
  hypo
gacaggagtaagtatcgatgatggcttcctcccccagagcaccagccacatcctcaatgggcaggtctttgcctctcggtcctacttctttgaccgggctgggcactgtgaagatgagggctgctcctgggagcacagccggggtgagagcaccaggtaggagccgtggcactgcctca

SEQ ID NO: 263627 - DNA, 78 bp, Homo sapiens
  chr11:64069275-64069353
  hypo
gctgggaggacaggccggcaccatcctgctcagctaattttttattttttgtagagaaaatttcgacatgttgcccca

SEQ ID NO: 263628 - DNA, 39 bp, Homo sapiens; identical to SEQ ID NO: 214276
  chr11:64078889-64078928
  hypo

SEQ ID NO: 263629 - DNA, 115 bp, Homo sapiens; identical to SEQ ID NO: 214277
  chr11:64081531-64081646
  hypo

SEQ ID NO: 263630 - DNA, 329 bp, Homo sapiens; identical to SEQ ID NO: 214278
  chr11:64088215-64088544
  hypo

SEQ ID NO: 263631 - DNA, 159 bp, Homo sapiens
  chr11:64089708-64089867
  hypo
gggattacaggtgtgagccactgtgcccagccttgaggcaggtgttactgagcactgagaaggagccagcaatctgaagaggaagggaagaagcgctccccacagaggcagcacagagggcgaggcctggccgatggcatgtggcgcacagtgtggcct

SEQ ID NO: 263632 - DNA, 77 bp, Homo sapiens
  chr11:64105954-64106031
  hypo
cataaaacagccaggcgctcttaagccagctttacaattgtgcagatgaagtggagccgagttttcactctgctcta

SEQ ID NO: 263633 - DNA, 188 bp, Homo sapiens; identical to SEQ ID NO: 214279
  chr11:64112373-64112561
  hypo

SEQ ID NO: 263634 - DNA, 158 bp, Homo sapiens; identical to SEQ ID NO: 214280
  chr11:64118936-64119094
  hypo

SEQ ID NO: 263635 - DNA, 346 bp, Homo sapiens
  chr11:64120022-64120368
  hypo
gggttgggctccccgtggggctcacctattgggagtggtgggcacctggcatggcattctgcccaatggcttcctctgggggacctaggcttaggaggtgacagacccccccgccccgggtccagatagtccagccagctgcttgtggtggccataggttcacacagccctcttagccccttgtccatcccaggcacgagcagctgcaggcccagcgggccagcgtggaggcacaggaggtggccctgctggcagagcgtgaacgcctgatgcaagatgggcatcggcagcggggcctggaggaggagctgcggaggcttcagagcgagcacgacaggtgccgccc

SEQ ID NO: 263636 - DNA, 526 bp, Homo sapiens
  chr11:64120593-64121119
  hypo
ggggccggctggcgcggctggagctggagcgggcacagctggagatgcagagccagcagctgcgcgagtccaaccagcagctggacctgagcgcctgccggctgaccacgcagtgtgaggtgtggctggagggccggtgggggtatgggcgtgtggtggggcagaaagcctagacccaggtggtcctgagctgggtcccaccctccgagccatggtgcccccctgccagctattgacacagctgcgaagtgcccaggaagaggagaaccggcagctgctggctgaagttcaggccctgagccgggagaacagggagctcctggagcgcagcctggagagtcgggaccacctgcaccgcgaacagcgggagtacctgtgagtgggccgcctgggagcggggtggggcctgcatcccctttgggcgttcctggggagagcccttagtgagggcctagggacagggttggagctgaccttccaggtcagtccaatctgcggcacgggaccagtgcgtcctcgctgcagc

SEQ ID NO: 263637 - DNA, 451 bp, Homo sapiens
  chr11:64124342-64124793
  hypo
gcattctgggcagagggaaccgctgagggaacagcaggcgtggtgcagctggaagcggggggtattggcaggtcgggggtgggcagaaggtgctcgagcctgtgggcctcctgggactctgggagtcctcctgagggaagcagatctcagctgagcctttccctctaggccctgaggtacaggaaccggagaaacgtcccctcaccccatccctcagccagtgacaccgtgggaacagcaggcttgggagtgcagccttctcggcactggagtgtcagcggaggccccaggcagcccaagagctcagggagccagggaccccaaggggagtccttggacaaggaggcctgggccctgagatcctccacggtcagcgccggggcccggagatggagctgggacgagtgtgtggacaggggggatggctggcccccacgagcagctccaggct

SEQ ID NO: 263638 - DNA, 339 bp, Homo sapiens
  chr11:64129093-64129432
  hypo
accccggctccacccggcaggctgtggactggtggagcctgggcatcttgctcttcgagctgctgacgggggcctcgcccttcaccctggagggcgagaggaacacgcaggctgaggtgtctcggtgagtagggctggacgtggagggcggccagagggctgcagggcctgcctgggcagggctgtgggtggggggcttgctgcccctgacacccccccaatcctcccagacggatcctgaagtgctcccctcccttcccccctcggatcgggcccgtggcgcaggacctgctgcagcggctgctttgtaaggatcctaagaagcgattgggcgcgggg

SEQ ID NO: 263639 - DNA, 642 bp, Homo sapiens
  chr11:64135636-64136278
  hypo
gaccacaacaacgcggtgatgaccgatgggctggaagcgcctggtgctggagaccggccaggtcgggcagcggtggccaggagcgctatgatgcaggtgggctgggctgggctgggttggggggaaattggttttaggagaggcctaggcccggggactctaggcctagatccaactggcgcccgcagcgtgagctcagcaaggtcctaagcctctccgacatggggcgtggcggggccgcggggctaccaggtgggacctctgacgcgccgccttcgccttcgccttcgccttcgcctccaggactcgcccttcttccagcagtacgagctggacctgcgggagcctgcgctgggccagggcagcttttctgtgtgtcgccgctgccgccagcgccagagcggccaggagttcgcagtcaagatcctcagtcgcaggtgggagggcccaggcgcgggcaggggtgggggtggcagagcgctgtcccgggggcggggccgaagcgcggcgaccgtaactccttctgctccgtcccccaggctggaggcgaacacgcagcgcgaagtggctgccctgcgcctgtgccagtcacaccccaacgtggtgaatctgcacgaggtgcatcacgaccaggtgatggct

SEQ ID NO: 263640 - DNA, 82 bp, Homo sapiens; identical to SEQ ID NO: 214285
  chr11:64143181-64143263
  hypo

SEQ ID NO: 263641 - DNA, 149 bp, Homo sapiens
  chr11:64150446-64150595
  hypo
catccgtcaatgctcggatggctttatttctcagagcagcccctcctgacccctccactagcctacaagccccgactctttgtgccgtcagtaggcagcagttcccaccgaagcagccgtccctgtgtgttgctgtcattgtcttttct

SEQ ID NO: 263642 - DNA, 163 bp, Homo sapiens
  chr11:64160546-64160709
  hypo
gccacgggagcgatcggccgctgccaccattgaacactgggtgccacgcctggccccactgcagcctctggctctgtgccccaaaagccacctactgtccctgaagttggacactgtggccagaatggacggacttgacactgtccctaattctttttttttt

SEQ ID NO: 263643 - DNA, 230 bp, Homo sapiens
  chr11:64168611-64168841
  hypo
caatgcggatgccccgcagagggcacccccggcagaggagctcttcagagccaggtggacacaatgatgagagcgtgagggagaatttctctgtggatgtcagttatcctctttccccagccagcccagtgcttgcccattgtgtccatgttcaacgtggccatggtggcagagatggaggttatgcaggggttcagcggcgaatgtgtacttctcggcaccagggcttc

SEQ ID NO: 263644 - DNA, 107 bp, Homo sapiens
  chr11:64310457-64310564
  hypo
tcacatgcaccgggcggacagcggaggccccgggcccggggaggcggcagcggccgctcaagtgaacccgggtctggaagctccttacagcacgatgatgcccaagc

SEQ ID NO: 263645 - DNA, 198 bp, Homo sapiens
  chr11:64313082-64313280
  hypo
agggtctgaagtctacctgccgccagggcaagggcgcatatgtcaggaagagtgggaaggggggctggggagaacgtatgcccccaggcttctgcctctccagttgtctgcgcaaagaacaaatcctagtgcgctgtggcaggggcggcacgtctgtttgctctcacgtgccactccgttccttgctccattgcctga

SEQ ID NO: 263646 - DNA, 52 bp, Homo sapiens
  chr11:64319242-64319294
  hypo
cagtccaagtggccacgaacgggagggcggttaaatgcgtgatggtaaatcc

SEQ ID NO: 263647 - DNA, 585 bp, Homo sapiens
  chr11:64323492-64324077
  hypo
gagcaagccggaggcgtgggcctcttccagaccctgcaggtgctcaccttcatcctcccctgcctcatgataccttcccagatgctcctggagaacttctcagccgccatcccaggccaccgatgctggacacacatgctggacaatggctctgcggtttccacaaacatgacccccaaggcccttctgaccatctccatcccgccaggccccaaccaggggccccaccagtgccgccgcttccgccagccacagtggcagctcttggaccccaatgccacggccaccagctggagcgaagctgacacggagccgtgtgtggacggctgggtctatgaccgcagcgtcttcacctccaccatcgtggccaaggtagggcctcccccagagccactcgagtcccgtcaccttggaggtcagagtcatggatcaggttggttggactccaaggtccagtcctgggagggacccgcctcctctcgagcctctcagcccctcgtcagccacacacaggggagtgggcggcagggatcagtctacagatggggccagcccaggctcctggtagtgcggggggcacctggg

SEQ ID NO: 263648 - DNA, 42 bp, Homo sapiens; identical to SEQ ID NO: 214288
  chr11:64335474-64335516
  hypo

SEQ ID NO: 263649 - DNA, 87 bp, Homo sapiens; identical to SEQ ID NO: 214289
  chr11:64347188-64347275
  hypo

SEQ ID NO: 263650 - DNA, 222 bp, Homo sapiens
  chr11:64367275-64367497
  hypo
tgagccacctgggccgccgccccacgctggccgcatccctgttgctggcagggctctgcattctggccaacacgctggtgccccacggtgagggggcaaagctgtacaccagagacttccctaccttgggggggtctcgggctgggaacagcacccctccttggaggtgctggactagagcaggtaccctggtaggaaggaggctgccggagccgtctaggg

SEQ ID NO: 263651 - DNA, 101 bp, Homo sapiens
  chr11:64367837-64367938
  hypo
gaaatgggggctctgcgctcagccttggccgtgctggggctgggcggggtgggggctgccttcacctgcatcaccatctacagcagcgagctcttccccac

SEQ ID NO: 263652 - DNA, 49 bp, Homo sapiens
  chr11:64390387-64390436
  hypo
aggtgaccctcagtccgcacattggggtcgctctcggcggccagcgcca

SEQ ID NO: 263653 - DNA, 58 bp, Homo sapiens; identical to SEQ ID NO: 214291
  chr11:64418855-64418913
  hypo

SEQ ID NO: 263654 - DNA, 98 bp, Homo sapiens
  chr11:64504253-64504351
  hypo
cctgtactggtggccgcaggctggtcaccatggccagctcctccaggatgctaaagagctgcttcatcttggccccgttgagccgggtccgggctggg

SEQ ID NO: 263655 - DNA, 65 bp, Homo sapiens
  chr11:64521038-64521103
  hypo
gcgtgcgaccccgcgatgcacaggtgtgccatgttgatgcgcttcactgcgccctcctccaccag

SEQ ID NO: 263656 - DNA, 300 bp, Homo sapiens
  chr11:64599005-64599305
  hypo
agcagcggcagcccgttgtcgtaagcctccttgagtgtgtacacgggccggggtcttggccgcgcgtccagcagcagccgctgcagctcacccagcacctgcagccagcgttcccgctccccctcgctctctgccagcagcagcacagtgcacgtggtgggcggcactgccagctgggaggttgtcacctgtgggcaaggaccccagctggagggccgtggaccagagccatctgtcctccctcccttcctgcctccagcagccgctgtgccccgggggcctagcgtgcactgtcagcag

SEQ ID NO: 263657 - DNA, 177 bp, Homo sapiens
  chr11:64600135-64600312
  hypo
tcaaacagcagcaggcgtgagtcactcagggcagcaaacacgcgctgccagccccgccggacacctgagggccgcggcacctggcggaaaggcaagcatgggagggctgcagggaccctcagccccccatgcccatcttcccctccctcggcccccactcaccgacagaaagccctc

SEQ ID NO: 263658 - DNA, 494 bp, Homo sapiens
  chr11:64602459-64602953
  hypo
atgggctgggccctcagtctcgcctgcgttccccaccccgacccacccctggcacccaccagctgaggatgtcggcgagctgggcctcccagttgctctccgtctcccgccgctcaccctccagccgctgcttgctctcctgctcctgggccagctctgcttctagctggggccggccagaggaaaggtcagccccaggccccagcagtcctgggactgccgtctccctgtaggtaccccagcaccccgagccccgtccatgtccaccctgctcactggctgcagcttgcccacccctcaactggctccccattgccttgtccgtctgttgtaccctccgtctgttgtaccctgctcacccgctcctgctcccggctcagcctccggttttcctcctgcagctggcacagagcctcctccttaccactcggcctggggaggagaaggccaaggccgtgactcaccgcccaggccaggcccggcccctccctgcc

SEQ ID NO: 263659 - DNA, 83 bp, Homo sapiens; identical to SEQ ID NO: 214294
  chr11:64607057-64607140
  hypo

SEQ ID NO: 263660 - DNA, 247 bp, Homo sapiens
  chr11:64609226-64609473
  hypo
gggtgagcccagcccggtgtgaacacctccccccacctaccccaggccctttgctcacctccccaaaggctcctcggccgatcaccttcaagatctcaaagtcatctctctgcagacgcagttctttcacctttgatacgaaggggctggctgaggggacacagggcgggactcagagtgcagggagggagggctccattccccctctcaccttgggcaagccaggagctgccgctcctgtgagccc

SEQ ID NO: 263661 - DNA, 221 bp, Homo sapiens
  chr11:64620283-64620504
  hypo
caacagtgacttcccggcaaggacagcgcccgcatccatcctcacctaatactgtatggagtgacgggctaaggagaacaaggccagttcctgcagactccgagcagcgctggggagaagctccctgagacccccgcgggaaagcctggtgggaagcccagctgtgtggtacctggtgctccacctgccttggtgccatcacagcccggacagtggccact

SEQ ID NO: 263662 - DNA, 400 bp, Homo sapiens; identical to SEQ ID NO: 214295
  chr11:64621797-64622197
  hypo

SEQ ID NO: 263663 - DNA, 86 bp, Homo sapiens; identical to SEQ ID NO: 214296
  chr11:64624927-64625013
  hypo

SEQ ID NO: 263664 - DNA, 133 bp, Homo sapiens
  chr11:64631090-64631223
  hypo
ataaacactcctgccgcctgccccggccccaggcccaagcgtgcttggcgccatctgtgagcccaaagccacaggggcgcggagcccctccccacacctggcgctcccagaaggaactcgggccactaactaa

SEQ ID NO: 263665 - DNA, 331 bp, Homo sapiens; identical to SEQ ID NO: 214297
  chr11:64635186-64635517
  hypo

SEQ ID NO: 263666 - DNA, 59 bp, Homo sapiens
  chr11:64646831-64646890
  hypo
cttccccacaaaggctatagctggggcaaggcagggagggcatgaggaggaagttgagg

SEQ ID NO: 263667 - DNA, 105 bp, Homo sapiens
  chr11:64648942-64649047
  hypo
aagagaggtgccttttccgcttgcggtgccgtgcagtgaggagctcttatctgtgctcttggctatgccatccaagggccagctgcagtccgtgcaatccactgc

SEQ ID NO: 263668 - DNA, 101 bp, Homo sapiens
  chr11:64653030-64653131
  hypo
cagcagagaattaccctgcccgaaatgccaatagggcagaagctgaggcatcctgatgagcgcgcgcacgccacacgcacgtggctggccattattgagaa

SEQ ID NO: 263669 - DNA, 295 bp, Homo sapiens
  chr11:64667889-64668184
  hypo
gctacacgtgacatcgagaacaaggcccgttgttctatgacacacacgtgtagtaggcactcgccaccccactcaccttgctcagctggatctccatgaggacatggtgctgccgcccgctgcccccctgcgtgcgccatgagttctggggccggttggggccagagcagcgggaaggggagctcctgggacctgagaggccagttcttgccctgggaagagggacaggggccaagctgactcagaggaaccccattccctccccgtcctcagcgggccttttagcctgggacaa

SEQ ID NO: 263670 - DNA, 72 bp, Homo sapiens; identical to SEQ ID NO: 214298
  chr11:64672165-64672237
  hypo

SEQ ID NO: 263671 - DNA, 197 bp, Homo sapiens
  chr11:64774015-64774212
  hypo
attaaataaaaaagggtccctgtgccttggagcaggggagcagggaagccggtcaggaggctgctgcagcgatccaggtgagtgggtgggggggtctgtcatgcggagagaagagtggtacctgcctcttaggttccggagtgagggcacagcaggacacgggcaaccaggggcagcagctgcgctcctgcgttcat

SEQ ID NO: 263672 - DNA, 34 bp, Homo sapiens; identical to SEQ ID NO: 214299
  chr11:64804457-64804491
  hypo

SEQ ID NO: 263673 - DNA, 165 bp, Homo sapiens
  chr11:64809834-64809999
  hypo
gggattacaggcgtgagccaccgcgcccggctgattttcaaactcttttaacctccccgcccagtcagggttaccaagcaaacaagaacacatatgcccacgaatatacctgagacagaagtttaaggcattagagatactttctatgggcgatgcattccaata

SEQ ID NO: 263674 - DNA, 94 bp, Homo sapiens
  chr11:64820396-64820490
  hypo
tgagctaaagttcccggagggcagagcctgggcgctgcctgcttcacagcagcatcgggccttgctccatccaggcacacgggaggcacttgga

SEQ ID NO: 263675 - DNA, 156 bp, Homo sapiens
  chr11:64833875-64834031
  hypo
ctggtctctgtggtcgtggggcaggtcaggcagcttgaagaggagacctgccttccgggggtttgggtcactgcaggcagagacagctcgagtgagcagcatggggcagccgcctcttccctccccgctgccatggctgcccgcacacctgagcag

SEQ ID NO: 263676 - DNA, 935 bp, Homo sapiens
  chr11:64875426-64876361
  hypo
cgcgccatccaggacgactgccaggtcatcacggcccgcctggcccagcagctgcggcagcgctttaggtgtggcccctctgccctgaccccagcgctcccgccagccccgagccccatctgtgcccggctcctgggccctcctggagctgtccccctgccctgtgtgtgctttgctttcctgctcctgccccatccaccggcagccccggccctgcccttcactacctctccctcgtgcagggagggcggctcaggcgccccggagcaggcagagtgcgtggagctgctgctggccctgggcgagcctgcggaggagctgtgcgaggagttcctggcgcacgcccgcggccggctggagaaggagctgagaaacctggaggccgagctggggccctcacctccggctcccgacgtgttagagttcaccgaccatggaggcagtggcttcgtgggcggcctctgccaggtggcggcggcctaccaggagctgtttgcggcccagggcccagcaggtgccgagaagctggcggccttcgcccggcagctgggcagccgctattttgcgctggtggagcggcggctggcgcaggagcagggtggtggtgacaactcactgctggtgcgggcgctggaccgcttccaccggcgcttgcgggctcccggggccctgctggccgctgccgggctcgcagacgctgccacggagatcgtggaacgagtggcccgcgagcgcctgggccaccacctgcagggtctccgggcggccttcctgggctgcctgacagacgtccgccaggcgctggcagcacctcgcgtggctgggaaggagggccctggcctggccgagttgctggccaatgtggccagctccatcctgagccacattaaggcctctctggcagcagtgcaccttttcaccgccaaagaggtgtc

SEQ ID NO: 263677 - DNA, 230 bp, Homo sapiens
  chr11:64898551-64898781
  hypo
agagggacccaggaccgagcttgggacagcagccatgacaagcctacttacagggtgttcatgttgcggatggctcggcgagacatgatggcatctgtcacagctttcttgaactgtctgaaaggacagtcagtgaaagcaggagaagggacgggatcaggtcaggaggatcgggggacagggccgggctcacctcatggccaggtacatgggccggatggcaaagagtg

SEQ ID NO: 263678 - DNA, 189 bp, Homo sapiens
  chr11:64950292-64950481
  hypo
gattatgagcagctgcgggtgcgatgcctgcagagtgggaccctcttccgtgatgaggccttccccccggtaccccagagcctgggttacaaggacctgggtcccaattcctccaagacctatggcatcaagtggaagcgtcccacggtgagaggggccatcctgggtgggactcggctaagccagatc

SEQ ID NO: 263679 - DNA, 189 bp, Homo sapiens; identical to SEQ ID NO: 214304
  chr11:64950870-64951059
  hypo

SEQ ID NO: 263680 - DNA, 773 bp, Homo sapiens
  chr11:64951332-64952105
  hypo
aattccactcctcccggaggtcggtctcagttgccccatctgagaaaggagtgttcgctggggaaaacagatcagcacgtgtggccttctccacgtgtcaagcctcctatcccccaactcctcctgcgctttggcaaggtctgactgagcccagcagaaaagaaagactcgggattaagtctacgtaaaccagcttttcctgacggtgtgcccagggcccatttttcaagtcacaccaatcaattctcaatgagctgcctttgggagggacatgcccagcaaccctggatgagactctccagccttggaggccccagccctgcccgaaggactcttgggtgttccctccttctgcctggttagagagccccttaccctactctgtccttgcccgccttgcgcgggtggaggtggccctcggaacccagggtgcggaacccacagtgcggatccactttggcccagcgccacacccacctgctccagtctgcaggggcgcagtctcgcccccttccctcgctcctccaatccgctcctccctggcctccgattggccagttcagtacccgccacccacactctccgcaacctgggctcctagggccgcctccaccccgccccgccccccgttgtcctggccccgacccctcagatggtacctcgagtccttggtcgcttctgaccccagacgccttcggccccgaccctgccctgggaaacgtggcctttgtggcatctcagaaacaaagcccgtgattgtgagaaccagtcct

SEQ ID NO: 263681 - DNA, 77 bp, Homo sapiens
  chr11:64955443-64955520
  hypo
gtggtgagcctgatccggatgcggaacccctggggcgaggtggagtggacgggagcctggagcgacaggtgaggggc

SEQ ID NO: 263682 - DNA, 302 bp, Homo sapiens
  chr11:64955905-64956207
  hypo
ggacccatatgaacgggaccagctccgggtcaagatggaggacggggagttctggtgagcgccccctccccttctaccccacctctccacccctacacatcagctctgtgccctgacgggctgtgcctcacctgtgtacctcccacctcaggatgtcattccgagacttcatgcgggagttcacccgcctggagatctgcaacctcacacccgacgccctcaagagccggaccatccgcaaatggaacaccacactctacgaaggcacctggcggcgggggagcaccgcggggggctgccga

SEQ ID NO: 263683 - DNA, 218 bp, Homo sapiens
  chr11:64971912-64972130
  hypo
cagttgctctgctcgctaacctaacggacttgctcagacttaagcctctagtttccaaatgcaggccgtgagggcatggaccgagcctggcccagcctgcccatcaccctgcatgttccaggtgctcaataatatttgttgaatgaatgaatgcgtgcacagggacgtgctgaggaggcttgggggccaattggctctgccccgccctgcctctgatc

SEQ ID NO: 263684 - DNA, 180 bp, Homo sapiens
  chr11:64974941-64975121
  hypo
attacaggtgtgagccaccgcacctggcccaaactcttgccttttactcactgagctgaacagcatccccttcatttaggtcacatgagtgctggatatggggcggggcagggcagggcaggaacgagattcccttttcagattagaaaagtgagactcaagccgggctcagtggctcac

SEQ ID NO: 263685 - DNA, 500 bp, Homo sapiens
  chr11:64975361-64975861
  hypo
gtgacagagtgaaactccatctcaaaaagaaaagaaaagaaaagtgaggctcagagaagcgaagtgacttgtagcagatatgtgacctcagccctccctccagctgcctccacacgggcagggccggggcctctcttacctgctttctccccttctcggtccagcaagtgctctcagaagaggagattgacgagaacttcaaggccctcttcaggcagctggcaggggaggtaggttggggcatggcaggttgggaggggcctgtgaggggcagccctctcctggggcaggtgccacctcctctctctccccaggacatggagatcagcgtgaaggagttgcggacaatcctcaataggatcatcagcaaacgtgagtccccgcggggctgtcccaccaccccaccatttcttccacatcagaatccaggctcctgctcacacattgagctgaacctcatcccttggtctgcatgagtcggggaatcctccagtttttct

SEQ ID NO: 263686 - DNA, 462 bp, Homo sapiens
  chr11:64977145-64977607
  hypo
ctcagagaataaggcaagcccggctgtgggctgactgtacatggcttttgctgcttctcctcacccagccccaagtcgacttgccggctcggcggccatctccccttctgcacagttgcccactctcccatgactggtctaagtgatggaatttccttcttaacggccacccagcgtgatggcaatgggaagctgggcctggtggagttcaacatcctgtggaaccgcatccggaattacctggtaggttgtccccactcacctcagtcatgcaggtgcgggccgggcaggtgggaagggccgggtgactcagcctggccctcaccctctgccgccacctcagtccatcttccggaagtttgacctggacaagtcgggcagcatgagtgcctacgagatgcggatggccattgagtcggcaggtgagactccaaggctgacggcacctgtggggcccaggac

SEQ ID NO: 263687 - DNA, 42 bp, Homo sapiens
  chr11:65023027-65023069
  hypo
tgttacttacagcttcgtgacctccagcgaatcacctctctt

SEQ ID NO: 263688 - DNA, 144 bp, Homo sapiens
  chr11:65028520-65028664
  hypo
atgctgggattacaggcgtgagtgaccgcacctggcctgggatggacattttaaaggttcctgatacatattgctaaattgttttctcgaaacgctctataccatcccaccagcattgtatgacgcctacggttgagatttttg

SEQ ID NO: 263689 - DNA, 122 bp, Homo sapiens
  chr11:65120977-65121099
  hypo
ggatctgaactgcccgcagtgcagccctgcagcctttcccagggcacgttgatgtgcacacagtttccctgaaggcaaagtgaacatgtggagagcttacgtggcagcgcgtatgtcttcag

SEQ ID NO: 263690 - DNA, 471 bp, Homo sapiens
  chr11:65123943-65124414
  hypo
gcttctttgggatccgcagtgaggctctgcctgcctcctaccacccggacctgggcatcccctggttagagtggttggcacagtttgaccgggacatgggacagcagggccgacaggtggctttgctgctggctgcccgagtggtggaggagctggcaggcctgcctgggctctaccacgtgaagctcttgcctctggccgcctctagcaccacgcctcccctgcccagctcagtggtccgggcctttaaggcccattaccgacaccggctgttgggcaaactggctgccatccaaagcgagagggatggcacctcgctggccgaggccggggcaggcatcaccgtgctggacgccctgcacgtggcgtctgccgcctgggccaaggtgcctcctcagctcattttcagcagcttcattcaagaagggctggctcccggcaaaacgcccccgtcctcgcacaaaacctctg

SEQ ID NO: 263691 - DNA, 133 bp, Homo sapiens
  chr11:65145405-65145538
  hypo
gccctggagatggctgatggcgacgggggctggcggtcgcctctggtggtgggtggtggtacttagggtgtggcaggccaagtcttcgcttgtttactttggtcccaggagtaagggtcgtaggttaggtacc

SEQ ID NO: 263692 - DNA, 191 bp, Homo sapiens
  chr11:65168192-65168383
  hypo
agcatgtcctgctgggcctgcgcttccaggagctgtcgtgggaccacacctcccccgaggaggaggagcccatcttgtggctggagttcgacggggacagcgagggcacacctgtcaacaagctcctcaagatctactccaagcaggtagcgcgggtggtgcctgcacacgggtggggaggctgggcccag

SEQ ID NO: 263693 - DNA, 120 bp, Homo sapiens
  chr11:65276490-65276610
  hypo
gctgggattacaaggatgagccaccgcgcccggccgactgctcttaataatataaacaagccctaggcattccccatatgtactcctccagttgtacacagggacctcagttttttcttt

SEQ ID NO: 263694 - DNA, 891 bp, Homo sapiens
  chr11:65306213-65307104
  hypo
ctggggtctggcgccgccctgcgcagcccgcgcccacgtcagacgtgaacatcaatttgcttcgaaagccaagggtaaagaggcacgatctgatttatcagtttctaggaaacaccctctgggaggaaggcaggcagcgcccgccggagaccttacaaccgcccgctaaccggggaggggggccggtaggggcgcctcgggtctcaaggcgccgggagggtctgcgggccctgaaggtccctgggtccgagccacaagtcggggcagaagtgaggccgagctcgcggaaatccctcagtgatcaccgaggtctgggccgagggcggcgtcggcggcgtcagcggcggcgctggggaacgcaggccccgtgcgggcggctgcgcgcgaagccggctttgcagacgcagcggaaggagccgctggtgttcacgcagcgctcgctcttgcacagcagcccgcgctggttcagctctcggcactcgtcgatatctgaaggtgagggcgacaggtgcggcttcgctgagcctccaggcggctcctcaccaccggccccgcccctgcccccacccccgaagcccggctcacccacgcagcgggcgcgggaggcgtcgagctggaagccgccgggacactcgcacacggcgccgcccggccgcggcacgcagcggccactcacgcagcgacactcgtctgaatcctcctctgaactgtcctcatctgcgtggcccggaacaatatggacttcaacactgagccccggccaaaggctaccaaccccgccaccgcccgacccggcagcactcacctcttgggggcttccccaacagcagggggcttgtgtcccagaaggaattgctctcgctctgcgatgtcgggcaatgggaccctggg

SEQ ID NO: 263695 - DNA, 106 bp, Homo sapiens
  chr11:65309028-65309134
  hypo
gggagttgtccagtccgagggaggagctgggaggacactcaccctcacaaccgtgctggtcctgggtgggagtgaagccctcatcgcagacacacacataggagcc

SEQ ID NO: 263696 - DNA, 224 bp, Homo sapiens; identical to SEQ ID NO: 214315
  chr11:65353078-65353302
  hypo

SEQ ID NO: 263697 - DNA, 385 bp, Homo sapiens; identical to SEQ ID NO: 214316
  chr11:65366939-65367324
  hypo

SEQ ID NO: 263698 - DNA, 343 bp, Homo sapiens
  chr11:65374934-65375277
  hypo
cgctgctcgcgcgccgctcgcgtcagctcctcctcgcggctcagtagttcctgcgcccgagacagcgatggtggagaggtcagcctggcaccaatcccggcagcgcccgccccgactctgccccagggagatcggggagacactcgttccaacgctgggtcccttgattcctcgcaccttttccttggctcgcagctcgtcgaagagaccctggatctcgcgcttccagccttcctgcatggaatggaaggagtcccgcggcatttcccgtaggacctgtgcctccagcgcctccaactgctgcaggatggaggcgaagtcgggcctgcggtgggggtcctgc

SEQ ID NO: 263699 - DNA, 146 bp, Homo sapiens
  chr11:65385897-65386043
  hypo
agatgacacgctgcgttcctttgacacggtcattggagcagggacgccaccgggcctggctgagccgctcctggtcgtgcggcccaaggacttggccctgctacggcctagcaaacggcagccacccctgcgaagacactctccac

SEQ ID NO: 263700 - DNA, 579 bp, Homo sapiens; identical to SEQ ID NO: 214317
  chr11:65386921-65387500
  hypo

SEQ ID NO: 263701 - DNA, 223 bp, Homo sapiens; identical to SEQ ID NO: 214318
  chr11:65388104-65388327
  hypo

SEQ ID NO: 263702 - DNA, 120 bp, Homo sapiens
  chr11:65393284-65393404
  hypo
ggcagcccctccccggcctgtgccaggtggccctctgtggtcccttggcctgctcccatcagctgagtctctggcctctccctcctgcagtcggtgctgggtttcgtgttgtacgcactg

SEQ ID NO: 263703 - DNA, 903 bp, Homo sapiens; identical to SEQ ID NO: 214319
  chr11:65397157-65398060
  hypo

SEQ ID NO: 263704 - DNA, 201 bp, Homo sapiens
  chr11:65402722-65402923
  hypo
cagcagccctatacgatgccattgcggccaacgaggagcggctggtcatctcacatgagggtgacccagcatggcgcagcgccatcctcagcaacacgccctccctgctggcgctgcgccatgtcctggatgatgcctccgacgagtacaagatcatcatgctcaaccggcgccacctcagcttccgagtcatcaaggttg

SEQ ID NO: 263705 - DNA, 485 bp, Homo sapiens
  chr11:65413816-65414301
  hypo
acacacaccctgcacgccacacaccacctacaggtgggcaccggagtggtcccaggtctcccgtgggcatggagtcctgccgcccctcactaacgcctccctccccgcagggtggccgtgagccgcacccaggacacccctgccttcgggccagctctgcctgctggcggaggccccttcgcagccaacgccgacttccgggccttcctgctggccaaagcgctgaatggtgagcaggcggccggccacgcgcgccagttccacgccatggccacgcgcacccgccagcagtacctgcaagacctggccaccaacgaggtgaccactacgtcgctggactcggcttcacgcttcggcctgccctccctgggtgggaggcgccgggcggcccctcggggcccaggcgccgagctgcaggcagcgggctcactggtgtggggagtgcgcgcggcgcccggggcgcgggtcgccgccggggctcaggc

SEQ ID NO: 263706 - DNA, 49 bp, Homo sapiens; identical to SEQ ID NO: 214321
  chr11:65425914-65425963
  hypo

SEQ ID NO: 263707 - DNA, 32 bp, Homo sapiens
  chr11:65465492-65465524
  hypo
ccaccgcgcccggccatggcttacctattctc

SEQ ID NO: 263708 - DNA, 77 bp, Homo sapiens
  chr11:65476358-65476435
  hypo
gagggccaccgccacgcctggctaattaaaaaaaaaaaattttgtagagacagagtctcgctctgttgccgaggctg

SEQ ID NO: 263709 - DNA, 39 bp, Homo sapiens
  chr11:65511031-65511070
  hypo
gctgggattacaggcgtgagccaccgcaccctcttggcc

SEQ ID NO: 263710 - DNA, 153 bp, Homo sapiens
  chr11:65511331-65511484
  hypo
cagcggcagcccgtcgggagctgcagctgccaagatgcaggctgcagcgtgggagtcgcagaggaggaggcacagccggggctgtgtggcccaaggggccagcgggagctgggaacaggtgaaagcctcaccccctgccgagttggcagggca

SEQ ID NO: 263711 - DNA, 37 bp, Homo sapiens; identical to SEQ ID NO: 214322
  chr11:65524510-65524547
  hypo

SEQ ID NO: 263712 - DNA, 108 bp, Homo sapiens
  chr11:65561324-65561432
  hypo
atagggcgggaaggcggtgcagcagtggtggtcggggcagccccgctctgctgcatgcctgcgatgggagggacggagtctccaggttccagccgtctcatggctagg

SEQ ID NO: 263713 - DNA, 32 bp, Homo sapiens
  chr11:65577928-65577960
  hypo
ctcacatgcacacacgtagacacacgcacaat

SEQ ID NO: 263714 - DNA, 91 bp, Homo sapiens
  chr11:65578020-65578111
  hypo
cacacgttgagacgtgcactcacgtatacactcccacacacgttcagacgtgcactcacgtgcacactcgcaaacacgcacactcacacat

SEQ ID NO: 263715 - DNA, 267 bp, Homo sapiens
  chr11:65582709-65582976
  hypo
ccaccccaatcccccgctttgggcaggtgcatagggaggactcaggaaagaggtgttctgccatggaccagtccaggtccaaaaagtctcgagaagcgcccgggagccaggagaaaagccgagagatgaaaggagatgcctgaggtgccgcagcccaggtctgagccgggctagaaaccgcgtgacaaaacaaagatgcgttcttagccgtgatggaactcccagattagcttggctttcttccttttgttttgttttgttttattc

SEQ ID NO: 263716 - DNA, 332 bp, Homo sapiens
  chr11:65629224-65629556
  hypo
ccacccactgccccgaaactgcctgctgttttatcccagatttgcagcggatcatcccatcacctggcccattttacagagaaggaaactgagagacaactgagtgacttacccagggccacaaagcctgctggggacttattcaaagatgactggctggctttcatgttcagaactcctctgtacctttcaggttcctgcccagcccaaagcgggaggctctggcagctactggccagctcggcactcaggagcccgagtgatactgctggtgctctaccgggagcacctggtgagcactgggctacaccgggaggcggaaccatggcagt

SEQ ID NO: 263717 - DNA, 92 bp, Homo sapiens; identical to SEQ ID NO: 214328
  chr11:65634006-65634098
  hypo

SEQ ID NO: 263718 - DNA, 99 bp, Homo sapiens
  chr11:65665115-65665214
  hypo
tcttcattttcagacgggagaacagttgtccgcagacacagagccaatgagcccagcagctgggctcttacccactcctgcacccgtttgcacgaagag

SEQ ID NO: 263719 - DNA, 360 bp, Homo sapiens
  chr11:65684985-65685345
  hypo
ccccaagctggaaacggctctcatagagagtggggcagaggtgccagcgattggcccggtagatgcccaggtaggtgtagacatcaggcttgtaggtgagcaggcacttaatgcccgctgcacggatggctgaatccgcctccagtacacccaagcggtccgtgaagtcgtccgtgtaaacacagatgacctggcgcccaccctccttggcacgtgggctcaccttggccacctgaagctggccttcaaccacggcccgggcaatgccagcccaggcgtggtccagcttgaagcccggtgccagatgcataagccacttgcccgagagcacgtggtgggtgatggcgagctggcgcaggg

SEQ ID NO: 263720 - DNA, 277 bp, Homo sapiens; identical to SEQ ID NO: 214331
  chr11:65698237-65698514
  hypo

SEQ ID NO: 263721 - DNA, 36 bp, Homo sapiens
  chr11:65722778-65722814
  hypo
aaagagttaggtactcggctgtacgccgtggctcac

SEQ ID NO: 263722 - DNA, 65 bp, Homo sapiens; identical to SEQ ID NO: 214332
  chr11:65733942-65734007
  hypo

SEQ ID NO: 263723 - DNA, 199 bp, Homo sapiens
  chr11:65740976-65741175
  hypo
aagcctgacagtagcgagtaggagtaaaggacatggagcggccagagtcctcagccacgctactcacagccatgggcaggagtctaatcagatgagagggaatgtgtgcgtgcccggggcccaccccacacctctcccgagtgtgcccatgtgcaccaggagacattgtcagtgggcctgcagccgcagtacttgggac

SEQ ID NO: 263724 - DNA, 314 bp, Homo sapiens; identical to SEQ ID NO: 214333
  chr11:65743837-65744151
  hypo

SEQ ID NO: 263725 - DNA, 55 bp, Homo sapiens
  chr11:65746343-65746398
  hypo
cccctacatcgtgctcagcggcagcggcaagagcatgaacgcgtgagtggctcga

SEQ ID NO: 263726 - DNA, 39 bp, Homo sapiens; identical to SEQ ID NO: 214334
  chr11:65754937-65754976
  hypo

SEQ ID NO: 263727 - DNA, 240 bp, Homo sapiens; identical to SEQ ID NO: 214335
  chr11:65761070-65761310
  hypo

SEQ ID NO: 263728 - DNA, 34 bp, Homo sapiens
  chr11:65787645-65787679
  hypo
agcttctcttggatccgggcggccctctgggaag

SEQ ID NO: 263729 - DNA, 41 bp, Homo sapiens; identical to SEQ ID NO: 214336
  chr11:65810130-65810171
  hypo

SEQ ID NO: 263730 - DNA, 78 bp, Homo sapiens; identical to SEQ ID NO: 214337
  chr11:65817722-65817800
  hypo

SEQ ID NO: 263731 - DNA, 241 bp, Homo sapiens
  chr11:65935759-65936000
  hypo
ttggaggagaatcaacgtatcaatgctagagtgtctcttgtgcatgaacatggcatctcttttgtcttacaatgacatttgtatacgtacagtataacttacaactccatgcaggtcttgcacatcttatggagcgagacagtgtagagacagcgtagagtagtggttttaagagcaaaggcttcggaaccaggctgcctggtttcagtcctcacttagctgcttacggtgtcatcttggg

SEQ ID NO: 263732 - DNA, 40 bp, Homo sapiens
  chr11:65944154-65944194
  hypo
gattacatgcgtgaaccatcatgcccggtccatatacact

SEQ ID NO: 263733 - DNA, 60 bp, Homo sapiens
  chr11:65996092-65996152
  hypo
ttgagtgagtaaaaagaagccgaatgccaaaaaatgcacgccataggattccagttctgt

SEQ ID NO: 263734 - DNA, 70 bp, Homo sapiens; identical to SEQ ID NO: 214338
  chr11:66047173-66047243
  hypo

SEQ ID NO: 263735 - DNA, 268 bp, Homo sapiens; identical to SEQ ID NO: 214339
  chr11:66052169-66052437
  hypo

SEQ ID NO: 263736 - DNA, 199 bp, Homo sapiens; identical to SEQ ID NO: 214341
  chr11:66099978-66100177
  hypo

SEQ ID NO: 263737 - DNA, 59 bp, Homo sapiens
  chr11:66101899-66101958
  hypo
aacagaatcagacaggctggcgctgtggaggggagcagagggtcggatggggcagtgct

SEQ ID NO: 263738 - DNA, 590 bp, Homo sapiens
  chr11:66101988-66102578
  hypo
cctcttaggcgacagcagcttctcagggcccagctccgcactcagcatggcccgggcccggctcagcgcctgacggatgccctgcagctcctggggctcgggcccagcccgcacctgggtcagtaggtcctgcaccagctggcccgcggctgtgtgtcggtcctgcatcagtgctgccgcagcccggcccacctgccgctccggtgccagtagggagcagaaggcggcgctcatggaccgaagcagaggtcgtcggcggcccaggtggggtgaggtcgctgggctcccccgggaccctggcaccccctcctcctcggagctgctgggggagccgcagtccacctcttggagggagggcataggcggaaggctagggccactgcctgctggcacgcggtaccccactgagctctccctccgtagcagctggcaagggggcagccgctctgtctggctggggactgcccctggcagcacggggacggggggaggtggcacggcaggtggagacagggggctggaggtctctgtggacacgcgcactttgaagcttctcttgaatttctcccgcttggtgggccctaggtccc

SEQ ID NO: 263739 - DNA, 170 bp, Homo sapiens
  chr11:66113511-66113681
  hypo
ggaagggctcagcagcgtcggggagagttggggtacttggccttcaactcctgtttgaactggcgatataggatcttattgtgctgattttcagcctccttttggggatggaacttcaacgcttctttgaagcccttatgaaccaagaaaccttcgttcaggacctcaaa

SEQ ID NO: 263740 - DNA, 307 bp, Homo sapiens
  chr11:66113950-66114257
  hypo
ttatgagcacctggctgattcggttgaagccgtactgccgaaagcgctcgtcgaaggtgggcaccttgcctcctgccacgtagaatggctcccaggggtcctgccaaggtaccacgtaggcgggccgcagcaagctctcttccggcaggttgacccagcgggaatagttggtgggtgcctggcagggggtgcacaacccataatagaagggccgcacctcgccaacctggtagagctgcaccagctcgtttttgttcatgggcatgcggcgggctcttcggatttcgaaggcaggcaccaccagcgc

SEQ ID NO: 263741 - DNA, 163 bp, Homo sapiens
  chr11:66243063-66243226
  hypo
ggcaggtggaaaacgagtccaacgtgctgcaggacggctctctcatcgacctgtgtggggccacactgctgtggcgcacaccggcggggctgctgcgggctcccacactgaagcaactggaggcccagcggcaggaggcaaatgcagcgcggccccagtgccc

SEQ ID NO: 263742 - DNA, 316 bp, Homo sapiens
  chr11:66325260-66325576
  hypo
ttcgggactaccggcgtctgcacaagccgccccgcattcaggaaaagtgccagctggagatcaacttcaacacactgcagaccaagttgcggctcagccaccggcctgccttcatgccctccgagggcaagctggtctcggtgagctctacacacattccctaggtgaccttgaggtccgtatcccatctgtacaatgggcaaaccgtgatggagcgcacccctgcctgctccacaggacatcgccaacgcctggcgggggctggagcaggtggaaaagggctatgaggactggctgctctcggagatccggcgcc

SEQ ID NO: 263743 - DNA, 233 bp, Homo sapiens
  chr11:66373085-66373318
  hypo
ggaggctgtgctctgcggatggtgcatgaggaacccaggggtgggggccaaacaggtacccacccctgaccacacattcttctgcaggttggcctgtggcatcattgcacgctccgctggccttttccagaaccccaagcagatctgctcttgcgatggcctcaccatctgggaggagcgaggccggcccatcgctggcaagggccgaaaggagtcagcgcagccccctgccc

SEQ ID NO: 263744 - DNA, 714 bp, Homo sapiens
  chr11:66410884-66411598
  hypo
agtgatagcaacccttcttgcgtctgtttcttcaaggcaaacgaatgcacgtgcagttgtccaccagccggcttaggactgcgcccgggatgggagaccagagcggctgctatcggtgcgggaaagaggggcactggtccaaagagtgtccgatagatcgttcaggccgcgtggcagacttgaccgagcaatataatgagcaatacggagcagtgcgtacgccttacaccatgagctatggggattcattgtattacaacaacgcgtacggagcgctcgatgcctactacaagcgctgccgtgctgcccggtcctatgaggcagtggcagctgcagctgcctccgtgtataattacgcagagcagaccctgtcccagctgccacaagtccagaatacagccatggccagtcacctcacctccacctctctcgatccctacgatagacacctgttgccgacctcaggagctgctgccacagctgctgctgcagcagcagccgctgctgctgttactgcagcttccacttcatattacgggcgggatcggagccccctgcgtcgcgctacagccccagtccccactgttggagagggctacggttacgggcatgagagtgagttgtcccaagcttcagcagccgcgcggaattctctgtacgacatggcccggtatgagcgggagcagtatgccgatcgggcgcggtactcagcct

SEQ ID NO: 263745 - DNA, 81 bp, Homo sapiens
  chr11:66413515-66413596
  hypo
gaaattccgagctgcggttgtgcatgagaatacacccttcgtggtaccccatctccgggacgttctcggctctgtgcgttc

SEQ ID NO: 263746 - DNA, 36 bp, Homo sapiens; identical to SEQ ID NO: 214348
  chr11:66453719-66453755
  hypo

SEQ ID NO: 263747 - DNA, 278 bp, Homo sapiens
  chr11:66454424-66454702
  hypo
actctcctcccatcccgagagcactgttccctgttcctaccccagcttgaagacatgtttgcgctttcggtaatcaaaggcgacgctgccctgggccctggccaggctgacaggcacttctccgtggtatggcactcccgcgctggctgccttggcatccttgtaaaagccgaggctcccacgccgcaggacacagtacacgttctgccaggacctgcgagggacgcggtgctgactggccggcctcagtggcgcccgcaacctggagccctcttggg

SEQ ID NO: 263748 - DNA, 265 bp, Homo sapiens
  chr11:66457265-66457530
  hypo
cctcacccacctcctcggccgcatagtggctcctggccagcagctccttccccatgtcgatgcaggaggagaagcggtctgcccgggcctctatctctgccttgatgccttgctggttcttgatgactagatccgcggaggacacatccctggggggaggcagaaacagcatcacctgctgcccacagccccatcacagcccagccacacaacccgtggaggccctgagccctgggattctcaccggggacgctcctgggcatcc

SEQ ID NO: 263749 - DNA, 119 bp, Homo sapiens
  chr11:66461612-66461731
  hypo
ctcatcttccacatcgcggtggaactggtgctgctcgcgagaagcctgcaggcgccggcagcgttcccgcatgggctggcacaaggccctgaacttctcctccacggccctcgaggttc

SEQ ID NO: 263750 - DNA, 130 bp, Homo sapiens
  chr11:66475123-66475253
  hypo
gccgagcggcgatgcgcttgatgtcgtggtagcgctcggcggccagctctgcagccacggcgtccactgcctgcacccggccgctgtaggccacgatgtccgtctcaatggcttcgtgcttccgtactgc

SEQ ID NO: 263751 - DNA, 75 bp, Homo sapiens
  chr11:66475610-66475685
  hypo
cctgggacacgaggcgctggttctcgctgagccaggtctcccgcatggcagccttgcggtcgaagcgggcggcca

SEQ ID NO: 263752 - DNA, 50 bp, Homo sapiens
  chr11:66484936-66484986
  hypo
aagacacagcaacacacccacgtcgctccgtgtctttcacctccagccac

SEQ ID NO: 263753 - DNA, 80 bp, Homo sapiens; identical to SEQ ID NO: 214350
  chr11:66510746-66510826
  hypo

SEQ ID NO: 263754 - DNA, 140 bp, Homo sapiens
  chr11:66511194-66511334
  hypo
ttcagtgcagtcaaacgtggaaaggggcctggatagggaggggtcgactcccaggtcccacctttgcgggggaagctggtccccctggattaggctgggagatgcttggggctggttgtaaggtaaaagacggggggtcg

SEQ ID NO: 263755 - DNA, 46 bp, Homo sapiens
  chr11:66513182-66513228
  hypo
ggctagaacccagggcgctgactcataggccagtgttcttttccca

SEQ ID NO: 263756 - DNA, 240 bp, Homo sapiens
  chr11:66513570-66513810
  hypo
gcccggcccgatatgggaatatcgtaacagaggacgtgtgaaggaatagttagactctacacgtacctggaaaccattcttgttaactggtacaaatgaggatcttagttcccagatctccctgcctttaaaaagggggtaataattttccttgtgttgcctccctgtaaaagtgagaatctgtttgcatgaataataatgggagttggccgggcgcggtgggtagcctgtattctcagc

SEQ ID NO: 263757 - DNA, 33 bp, Homo sapiens
  chr11:66515370-66515403
  hypo
ataagctaccgcgcagggcagcattagcactct

SEQ ID NO: 263758 - DNA, 88 bp, Homo sapiens
  chr11:66557362-66557450
  hypo
tatttacttattcatccagacgtgtgtttgttcaagtcagtgtcagtgagctagatactatctgtaggtacagtgtcttaagatatgt

SEQ ID NO: 263759 - DNA, 88 bp, Homo sapiens; identical to SEQ ID NO: 214352
  chr11:66557750-66557838
  hypo

SEQ ID NO: 263760 - DNA, 145 bp, Homo sapiens
  chr11:66600088-66600233
  hypo
atggctggctgtgccttctacgatgcacttcccaggaacgtgtccactgttcctttcagctgcttcaccgcaaatactcttgccagtttccctcggacttggaaagccgctgtccacgccttgcgcaaataaagctaaaatccat

SEQ ID NO: 263761 - DNA, 34 bp, Homo sapiens
  chr11:66602481-66602515
  hypo
ggcattgtttccggcgggtcgggggagggggtag

SEQ ID NO: 263762 - DNA, 1338 bp, Homo sapiens
  chr11:66625240-66626578
  hypo
tgctggccagtggagcggccgcctgcccgctgccctgcgtctgccagaacctgtccgagtcgctcagcaccctctgtgcccaccgaggcctgctgtttgtgccgcccaacgtggaccggcgcacagtggagctgcggctggctgacaacttcatccaggccctggggccccctgacttccgcaacatgacgggactggtggacctgacactgtctcgcaatgccatcacccgcattggggcccgcgcctttggggacctcgagagcctgcgttccctccaccttgacggcaacaggctggtggagctgggcaccgggagcctccggggccccgtcaatctgcagcacctcatcctcagcggcaaccagctgggccgcatcgcgccgggagccttcgacgacttcctagagagcctggaggacctggacctgtcctacaacaacctccggcaggtgccctgggccggcatcggcgccatgcctgccctgcacaccctcaacctggaccataaccttattgacgcactgcccccaggcgccttcgcccagctcggtcagctctcccgcctggacctcacctccaaccgcctggccacgctggctccggacccgcttttctctcgtgggcgtgatgcagaggcctctcccgcccccctggtgctgagctttagcgggaaccccctgcactgcaactgtgagctgctgtggctgcggcggctggcgcggccggacgacctggaaacgtgcgcctccccgcccggcctggccggccgctacttctgggcagtgcccgagggcgagttctcctgtgagccgcccctcattgcccgccacacgcagcgcctctgggtgctggaaggccagcgggccacgctgcggtgccgggccctgggtgaccccgcgcctaccatgcactgggtcggtcctgacgaccggttggttggcaactcctcccgagcccgggctttccccaacgggaccttagagattggggtgaccggcgctggggacgctgggggctacacctgcatcgccaccaaccctgctggtgaggccacagcccgagtagaactgcgggtgctggccttgccccatggtgggaacagcagtgccgaggggggccgccccgggccctcggacatcgccgcctccgctcgcactgctgccgagggtgaggggacgctggagtctgagccagccgtgcaggtgacggaggtgaccgccacctcagggctggtgagctggggtcccgggcggccagccgacccagtgtggatgttccaaatccagtacaacagcagcgaagatgagaccctcatctaccggtgaggatgcgtgc

SEQ ID NO: 263763 - DNA, 34 bp, Homo sapiens; identical to SEQ ID NO: 214354
  chr11:66628276-66628310
  hypo

SEQ ID NO: 263764 - DNA, 200 bp, Homo sapiens
  chr11:66629459-66629659
  hypo
agggagcagaggaaccgggcacaaccccaggagccagccaggaccacagagcaacgggcaggggcaggcgagggggatggcctgggtcacccctgtgcatggccacgcatcccctcaacaccgaagcagccgcaggacatccccgccaggacaccaggagccgcagcaaggtgcagggggagcgcgtgatgtcgacagct

SEQ ID NO: 263765 - DNA, 349 bp, Homo sapiens
  chr11:66631165-66631514
  hypo
gcccttggtggggaagtgaacggtcagggggccctccaagggccgggagcaaaggcaggcgggggctgcagcctctcaccttcacacctcggacgcggaactccgcaagggccctgctcatcttggtggcggccgtggggtggtctttgccgtgggcaatgactttgaccagcagggagtcgtagtggggcgagatgacggctccttggaaggcggaagcattatccaggcggatgcccatgccctctccgctccggaacacctgtgggaagggtgaggcgtgaggacctgcgccagaaactgcggtcaaaagtgccccacccaccccgaggctggccaggtgtgcacc

SEQ ID NO: 263766 - DNA, 591 bp, Homo sapiens
  chr11:66633441-66634032
  hypo
cctcctgacctgggcgcccagcagtctcttcccctgggaggcgccgcccctcctctgggcactgcctgcctccgtgtactctatgtccacttcagagcccacatgcgggtcctccctaactgccgggctgtggcaacttggcactgcagccccaggcaccaggcagaacctgtgcacaggtgagctggcatctccctctgctcgagctccgcccacctcaatgcggccggtgtccggctggaagctgcgcgcggggtcctcggtggtgacccggcactggatggcacacccgttgatgcggatgttctcctgccgcaggcccaggtcgggtaggctcctgccctcagccacgtggatctgagcatggaccaggtctacgctgtagggcattggggggaggggggaaaggacgggagaaagggggaaacatgaggcgggggatagacgaggggcaccgcagccagtggggcgtccacacacagtgcgactcctgcccataggctctgggccagcctgaacagccggttcctcccaaccagtggctccaccagcccctgccctgctcccgccgggagccgactaaactacaca

SEQ ID NO: 263767 - DNA, 62 bp, Homo sapiens
  chr11:66637038-66637100
  hypo
taaataagacctgacttaaacgcgaccctggtcgatgcctcgcattagctgtggctgaggcc

SEQ ID NO: 263768 - DNA, 97 bp, Homo sapiens
  chr11:66637738-66637835
  hypo
gctcctgtcccaacacgggaagcccacccttcacctgtttagcgagtttcacagagtcgctggtgagccgagtccgaagctgcgggtccaggtgggc

SEQ ID NO: 263769 - DNA, 40 bp, Homo sapiens
  chr11:66639553-66639593
  hypo
gaggcagcgggggcggtggaggttcggcggattcccagga

SEQ ID NO: 263770 - DNA, 41 bp, Homo sapiens; identical to SEQ ID NO: 214356
  chr11:66643997-66644038
  hypo

SEQ ID NO: 263771 - DNA, 100 bp, Homo sapiens; identical to SEQ ID NO: 214357
  chr11:66644472-66644572
  hypo

SEQ ID NO: 263772 - DNA, 197 bp, Homo sapiens
  chr11:66648999-66649196
  hypo
ggcgagggcctggccgtcacctgccccgctcctgacagagctgccgcttccatagcacacaacacatactcactgagctccacctggtgcccggccagtgccagtggaggagggcacaatggtgggcagtgaccccagcagagccttgctccttgccaggcaggggccactgtggctcttcacgcagactcactcag

SEQ ID NO: 263773 - DNA, 138 bp, Homo sapiens; identical to SEQ ID NO: 214358
  chr11:66652536-66652674
  hypo

SEQ ID NO: 263774 - DNA, 100 bp, Homo sapiens
  chr11:66654307-66654407
  hypo
acctgggagtcatcccagcccgctccagagacgaaggcaggaaggcacgctgctaggatgtgtcagtgccacggtgcacgcccctggcttcagaacctag

SEQ ID NO: 263775 - DNA, 356 bp, Homo sapiens
  chr11:66655204-66655560
  hypo
gaaaggtcttggagcgcctggagtgatgccaaaagtcccactcagaagaaagatcagtttgggatgccaaaagagacctcccactctctttcagtttgggaggtcaaaaatccaacatcactttcacaggccgaaaccaagtgagggcagggctgcgcccctccgagggcctgcaacgaatccctcccgagtcttttccagcctctatggctgccgggctcctttgctcgtggccacatcactcccacctctggctctgtctccacatcgccttctcctcagcataggtctctgtcctctaaggacacttgtgatggcattcggggcccacctggatgatccgggatcacctttcc

SEQ ID NO: 263776 - DNA, 38 bp, Homo sapiens
  chr11:66658551-66658589
  hypo
gagtctcgctctgtcgcccaagcttgagtgcagtggcg

SEQ ID NO: 263777 - DNA, 100 bp, Homo sapiens
  chr11:66662144-66662244
  hypo
cacaatgggctgaacgggctgccgtgtataaagagggcaggctgaaagctttcaaaaagcaatcagggctgggcacagtggctcgcacctgtaatgccaa

SEQ ID NO: 263778 - DNA, 92 bp, Homo sapiens; identical to SEQ ID NO: 214360
  chr11:66665004-66665096
  hypo

SEQ ID NO: 263779 - DNA, 298 bp, Homo sapiens; identical to SEQ ID NO: 214361
  chr11:66676020-66676318
  hypo

SEQ ID NO: 263780 - DNA, 223 bp, Homo sapiens
  chr11:66676878-66677101
  hypo
gcaggacatgatcttcggaacaggtgtccctgccgctcccccccgaagagaagctgcctgagagtggggtcacagcttactcagctctgcctgcaatgagcacttcacaggctgctactggattggaccaaaaatgtcatcaccaccacgtgtcctatttggtccagcgcagcctgcctgagtctccatcagcactggggagccggagcggacaagaagacac

SEQ ID NO: 263781 - DNA, 304 bp, Homo sapiens
  chr11:66677363-66677667
  hypo
tatggctggaacaccgggtatgagcagaaggggacgcaggggcctgaccactcactgcggcagagcaacacagcatgatccatgctgtcttcaatttacacagaaagcccggtgttgaaaaattcaacaattaaccttccatgcaattgtaaaataccctgaaaccaacaattatgacgactttataggtgttttcttcatctgagaaaaacacaagcggggggagtaagtgtctggcttaaacggtagcaaggttatgcgctgctgccctggcgaacgagtcgctcacatgctcaacaacact

SEQ ID NO: 263782 - DNA, 199 bp, Homo sapiens
  chr11:66683036-66683235
  hypo
agctgtggaccactccgtgccctgtgatcctgcagggagcaagggctccaggggtgattctgctccatccatggaggggtgtaccagggccctgcccgcagggggagctaccaggggagggaccacaggcctcagaggtggcatgccaggttccgagacttcctcgatttatcctaaagtctcacgctaacgtaacaga

SEQ ID NO: 263783 - DNA, 39 bp, Homo sapiens
  chr11:66683678-66683717
  hypo
gacagcaagcctgtcctgctcgttgccaagcagttttat

SEQ ID NO: 263784 - DNA, 99 bp, Homo sapiens
  chr11:66683837-66683936
  hypo
tgagccactgtgaccgacctgccaagcagttttgtatgtgcagtctgtgctctgaacagggttaaggaggacttcaccgtctaagcagatctggcttat

SEQ ID NO: 263785 - DNA, 147 bp, Homo sapiens; identical to SEQ ID NO: 214363
  chr11:66695456-66695603
  hypo

SEQ ID NO: 263786 - DNA, 346 bp, Homo sapiens; identical to SEQ ID NO: 214364
  chr11:66701354-66701700
  hypo

SEQ ID NO: 263787 - DNA, 33 bp, Homo sapiens
  chr11:66706997-66707030
  hypo
ggacacagtggttcacgcctgtaatcctaatac

SEQ ID NO: 263788 - DNA, 44 bp, Homo sapiens; identical to SEQ ID NO: 214365
  chr11:66710160-66710204
  hypo

SEQ ID NO: 263789 - DNA, 87 bp, Homo sapiens
  chr11:66807525-66807612
  hypo
tgagcatggagtacgacactgcctcccacacgctgaacgtggcggtgatgcagggcaaggacctcctggagcgggaggaggccagct

SEQ ID NO: 263790 - DNA, 33 bp, Homo sapiens
  chr11:66867270-66867303
  hypo
ctagcttgggcgacagagcgagactctgtctca

SEQ ID NO: 263791 - DNA, 120 bp, Homo sapiens; identical to SEQ ID NO: 202625
  chr11:66897392-66897512
  hypo

SEQ ID NO: 263792 - DNA, 240 bp, Homo sapiens; identical to SEQ ID NO: 226547
  chr11:66897572-66897812
  hypo

SEQ ID NO: 263793 - DNA, 150 bp, Homo sapiens
  chr11:66974946-66975096
  hypo
tcgatagagatgatcgatgcatcttttatggcagggagtcgtcgcatggtggatgtcatggacgtgaacacacagaaaggcattgaaatgaccatggctcagtggacacgctactatgagaccccagaggaggagcgagagaaactctat

SEQ ID NO: 263794 - DNA, 31 bp, Homo sapiens; identical to SEQ ID NO: 214369
  chr11:67002080-67002111
  hypo

SEQ ID NO: 263795 - DNA, 84 bp, Homo sapiens
  chr11:67021693-67021777
  hypo
ctccggaacatgaccgacttccggctggcaggccttgacatcacagatgccacgcttcgcctcataattcgccacatgcccctc

SEQ ID NO: 263796 - DNA, 77 bp, Homo sapiens; identical to SEQ ID NO: 214370
  chr11:67051193-67051270
  hypo

SEQ ID NO: 263797 - DNA, 49 bp, Homo sapiens; identical to SEQ ID NO: 214371
  chr11:67059786-67059835
  hypo

SEQ ID NO: 263798 - DNA, 300 bp, Homo sapiens
  chr11:67072096-67072396
  hypo
ggcctccactctagacctatcgaccgcgtgggggcccatgaatccgtgtagacaagggctgcaggtgaatgtgatgcatgctagactttgagagcccctaccctaaggggaatgaggagccatgacagttgcccactgccctgccaggcagagctttgcggtgctccgtggggctgtcctgggactgcaggatggaggggacaatgatgatgcagcagaggccagttctgagccaacagagaaggccccgagtgaggaggagctccacggggaccagacagacttcgggcaaggatccca

SEQ ID NO: 263799 - DNA, 209 bp, Homo sapiens
  chr11:67073281-67073490
  hypo
tggagacagctcgccgtcctcagcaagacgtggcaaacaagatgcagtgaatctttggtaaaactgaatttacaacagaagtatcatcccctatcgtgagattttgtccttaatatttctttggtgataaacatttctcaaatgaaatgatagcatttgcaagtgacagggtaaaaaaaaaacaacaaaaaaaaactggccgggcgcgg

SEQ ID NO: 263800 - DNA, 99 bp, Homo sapiens
  chr11:67076905-67077004
  hypo
acttctaccctgagcgcttcacctaccacaatgtgcgcctctgggatgaggagtcggcccagctgctgccgcactggaaggagacgcaccgcttcattg

SEQ ID NO: 263801 - DNA, 170 bp, Homo sapiens
  chr11:67077277-67077447
  hypo
cgtcagccgctcagcggccacagtgctggcctatgccatgaagcagtacgaatgcagcctggagcaggccctgcgccacgtgcaggagctccggcccatcgcccgccccaaccctggcttcctgcgccagctgcagatctaccagggcatcctgacggccaggtatggga

SEQ ID NO: 263802 - DNA, 461 bp, Homo sapiens
  chr11:67077697-67078158
  hypo
aagagcctgggccacggccacgtataaacctccgaggggtcatgaggtccatcagtcttctggagccctccttggagctggagagcacctcagagaccagtgacatgccagaggtgaggctggggctgggggagctcagcttgcaggggtgggggccataaggagggagatggggaaagaccaggatgggcgtttgactgtagacctgagcagggcgtacccgggctaagtctggcccgcccatgcagggtgtcctgggaggacccagggggcctggtcccagcctccttcacagtcagcccagtatctcttagcacccggcgtctccagcctgtcccatgaatacccctgaagatggggaccagccacgtcctgggcccctgagagcagctgagatccagtgagggcaggcggaggcactgtaggcacaggctggagaggggtcacgggggcagggcagg

SEQ ID NO: 263803 - DNA, 217 bp, Homo sapiens; identical to SEQ ID NO: 214373
  chr11:67078398-67078615
  hypo

SEQ ID NO: 263804 - DNA, 361 bp, Homo sapiens; identical to SEQ ID NO: 214374
  chr11:67078645-67079006
  hypo

SEQ ID NO: 263805 - DNA, 41 bp, Homo sapiens; identical to SEQ ID NO: 214375
  chr11:67091662-67091703
  hypo

SEQ ID NO: 263806 - DNA, 76 bp, Homo sapiens
  chr11:67145532-67145608
  hypo
ctaacaatagtttacgcgcacgcagctgttccccacatcaggcacagtgctaaggctttcgcgggctattttattt

SEQ ID NO: 263807 - DNA, 41 bp, Homo sapiens; identical to SEQ ID NO: 214377
  chr11:67150726-67150767
  hypo

SEQ ID NO: 263808 - DNA, 183 bp, Homo sapiens; identical to SEQ ID NO: 214378
  chr11:67166353-67166536
  hypo

SEQ ID NO: 263809 - DNA, 442 bp, Homo sapiens
  chr11:67186967-67187409
  hypo
agctcagtggctggcgctggcgggggcggcaggcatggcgtctgcacccgcgggcagagctgggtgcagtggtggacacagtgctggcgctgctggagaagctggaggaggaggagagtgtcctggtggaggctgtgtacccacctgcccagctgccctgctcaggtgagagccacctgggctgaccagggatgggagtttggtgtggccttctggccactctgtgctggccttagacctccccgtcttcccccagatggtccttcacccggccccggcctggccgtgcgaatctgtgctgtggtgtgtcggacacagggtgataggccactgctgagcaaggtgagcgtggcccaggcccaggctgtgaccctgcctgccacacgccagcccagtcccagtagtggtttgccaagggcccctgagccgtctctgggcagag

SEQ ID NO: 263810 - DNA, 235 bp, Homo sapiens
  chr11:67201983-67202218
  hypo
accagggcacggatcgtgactaaggatggcaggcactgagtgtcgcatggccctgcctccgccccccagggcttcacatacgtggcgccgtctgtcctggacagcatcaaggagggcttctccttccagcccaagctgcgctcacccaggcgcctcaacagtagcccccgggcccccgtcaggtactgagggacgtgggggtgtgtggctgggttagggacgctggcaggcagga

SEQ ID NO: 263811 - DNA, 583 bp, Homo sapiens
  chr11:67203183-67203766
  hypo
tgggacaccaagaccggcctctacagtgcggtgacatggaggccctggcccccagctgccctggcgctgtcatcccaggctgcgctgccagcaaaggcgtgcaggtcactcagcagggcctcagcactgccccctgcgctcgctggtcctggggagccgaggaccaggtcgccctccgtgtcactgtctctggcttcctcagcccgcacggggacctgctctgggctggacgcctctccacattgctgctcgccttccccagggtcagcctgcaggccaccatccgcgacgtggtcatagtctgtgtcctgctcatcctcctgtcgctcaaggtcattgtctgtggaccccagctcagctcgggcctgcagccagcgacctggggggctggcccagagcaggcgccgcgtgcggccccacagcgcggcacctaggcgggccgggtggtagtagccccctgagtcacggctgaggcggcgccaggccagtgctaggccagtggccagcagtaggagcagcagcagcagcaggacaacggtgacagagctggagcccacgctgtcctccgcgctgccacccgagc

SEQ ID NO: 263812 - DNA, 201 bp, Homo sapiens
  chr11:67205682-67205883
  hypo
ctgggcgctggcttcggcctgggcctgggacgggtgggggtgggaactgacccctgcgctgcctcagaggctctgggcagccagctagcccggtgcgacccgctggcagaagctgagtgggaagggggcggcggaggagatgaaggtggcgtgtggctgtggccctacgcatccccgttctccatgcggcccagctgctcc

SEQ ID NO: 263813 - DNA, 213 bp, Homo sapiens
  chr11:67206219-67206432
  hypo
gcccggggccatggcgggccggctgtcagacaacacgttgcgccggctgatcttcaggtcccgctgcttgctgggcacgtaggcctcccgcagtgagatgaggatcgggtcggcatcccgcccgctcacccactcctcagcctccagggctgcctcgggcccggctgtgtcggggtacagatcatcctggaagaggtccgactgggcaggggg

SEQ ID NO: 263814 - DNA, 34 bp, Homo sapiens; identical to SEQ ID NO: 214380
  chr11:67208822-67208856
  hypo

SEQ ID NO: 263815 - DNA, 56 bp, Homo sapiens
  chr11:67209515-67209571
  hypo
gtgtgcccacacaccgtcgggtaggccttgtcaatgcggcccgtctgtgggcacga

SEQ ID NO: 263816 - DNA, 219 bp, Homo sapiens
  chr11:67209932-67210151
  hypo
ccactggcctccacaatcaccgccaggaacttggggttgacggcgcagaaggtgctgtcccaggtaacacgggacacgcgaatgtcctcatagcactggtcgttcttgaccggctgcccgaacacatgccggaatttgctctgccggaccactttgcggaaggacatgtctgcgggacagagaggcctgggtcagtccggcccatcccaacaactccag

SEQ ID NO: 263817 - DNA, 61 bp, Homo sapiens
  chr11:67221670-67221731
  hypo
agaggcctgcagccccacctcgcccttccccgctggcagcggggagggagtttccctttga

SEQ ID NO: 263818 - DNA, 201 bp, Homo sapiens
  chr11:67230825-67231026
  hypo
gaccagctcagtgccggtttccttctccctccccgacagtgtcatgggaagagccctgggctacgttcctaattctacctaccacctgctggctgtccttgggtgagtcagtccttatctgtaaaatgggacggaggtagtgaagattacaagatataacccgtgttcagtgcttagcgcagggcctagtatattttcttt

SEQ ID NO: 263819 - DNA, 289 bp, Homo sapiens
  chr11:67257336-67257625
  hypo
gcacacaggagatgtgacatcgatgtttgatgctttttgagtgacaagtagctctgctgctggtgtgtgatgtctgggggcccagccagcccagatgtgggtcaggtctgctgctgacggacgcagctgtggtgtccccgagccccgctgtgatatgccccatgccctgcaggtggagagccctggcacgtaccagcaggacccatgggccatgacagacgaagagaaggcaaaggcagtgccacttatccaccaggagggcaaccggttgtaccgcgaggggcatgtg

SEQ ID NO: 263820 - DNA, 36 bp, Homo sapiens
  chr11:67259309-67259345
  hypo
ctcctccctccccccggcgctgggtcccctcatatg

SEQ ID NO: 263821 - DNA, 383 bp, Homo sapiens; identical to SEQ ID NO: 214382
  chr11:67259386-67259769
  hypo

SEQ ID NO: 263822 - DNA, 127 bp, Homo sapiens
  chr11:67260399-67260526
  hypo
ctcacctggcactgcgcctgtagcttccgcacggcacggcccacgatgtaggtctggctcggggacagccccagcgccgcgtatacagccacatctttgggagacccataaccggccacgatgttca

SEQ ID NO: 263823 - DNA, 376 bp, Homo sapiens
  chr11:67260761-67261137
  hypo
gtcaggcagggcccgggccgatccagttgggaacagatgggcctccgccgatccgggggtggagggtaagggggagcgggggcggggtcaggacccggagcctcccccagccgccgcacctcctgcaccaggctctgcagaaacattgccttctggcgtagtgggtcgtgggtgaggccgtcgcagaaggagacgacgccgtgggggaagttgtgctgcgacagccatgccaccacgcggtgcttctgcatatccggccggcctgtgacatacacgatcaggtagccggagtcctgccagtgcctgtggggcgggggcagcggtcagctccgctggccaggggtgaggggccggtcaccccggtgaaatgggtggt

SEQ ID NO: 263824 - DNA, 35 bp, Homo sapiens; identical to SEQ ID NO: 214383
  chr11:67291006-67291041
  hypo

SEQ ID NO: 263825 - DNA, 147 bp, Homo sapiens
  chr11:67353108-67353255
  hypo
gaccagttcagcagaggcagcgtgtgtgcgcgtgcgtgtgcatgtgtgtgcgtgtgtgtgtgtacgcttgcatttgtgtcgggtgggtaaggagatagagatgggcgggcagtaggcccaggtcccgaaggccttgaacccactggt

SEQ ID NO: 263826 - DNA, 258 bp, Homo sapiens
  chr11:67378802-67379060
  hypo
tcaggactaggcaggtgtgccggccccagccctgaccatgcatccctttggggaccgacttggggccccagggggtgtcacgggcggctgggacaacctccttgctgtgatccctggcggctcgtctaccccactgatccccaagtctgtgtgtgagacggtgctgatggacttcgatgcgctggtgcaggcacagacaggcctgggcacagctgcggtgatcgtcatggaccgctcggtaagggttcacacaccagc

SEQ ID NO: 263827 - DNA, 110 bp, Homo sapiens
  chr11:67406911-67407021
  hypo
acctctgcttcagaacgtagcctacctgccatggagacagagaggctgtccggctcctggagaaacactgcttggctggggctgggaacctgcctgctggaaggggtggt

SEQ ID NO: 263828 - DNA, 37 bp, Homo sapiens
  chr11:67425589-67425626
  hypo
tttctggccgggcacggtggctcacatctgtaatccc

SEQ ID NO: 263829 - DNA, 184 bp, Homo sapiens
  chr11:67430155-67430339
  hypo
ggtgagtgcagggtgcggtgtgaaccagaggggtggtgcagagaccagtgtgggatgtgagaggatccctgggggaggcagtgctggtgcagttgggatggggcagagatggaagtgcgcgtgtgcctagaggggagagcaaaggcctggagggctccacgctctcaaccgttcagggctgatg

SEQ ID NO: 263830 - DNA, 267 bp, Homo sapiens
  chr11:67432665-67432932
  hypo
gtgcgagtccagactcgtggcccagccgtgggccctccattgagaaagggtcttggcccaggtgggctgcggtagggcagcaggactcaccgatgtagcgatcgctctcgttgctctggcccccaatggccacgcggctgcagcccagcaatgcccgcagccgctggaactgtttctggttgatgatgtggcccaggtttggggagctctgggggtcgtcgccatagaaacgggtgatggtgctctgcagggcgggcagcagcctct

SEQ ID NO: 263831 - DNA, 94 bp, Homo sapiens
  chr11:67450464-67450558
  hypo
cagcagcggcacaacgtgtgtgtcttattgcgatgctttccaaacgatgatgctcccttcgtcatctcgcttctgcggccgagaccagaaagtg

SEQ ID NO: 263832 - DNA, 714 bp, Homo sapiens
  chr11:67462527-67463241
  hypo
ggctttttacactcttcactcgctttgtcctacctggccactttcctcacgggaatttaggcccctcttagcattggcgtgccggtataaaccccaaggcaagatccgccttaagccgtatgaggtagccacggaaccgcaggcaagactcactcgctcggtccagcagtaggacttatcatgatttacacaagcaacaccagctgcagtgaggcttgtgactattcacacacacttttaacctccagaatatcccgaccaccaagcaagtactttgtcgcacccttgcgacgtttctttactttgctctgtgaacagagtttatctggtccccgaggcagtgcaatgcaagcctattcgccgttttccacgttgctgagggtccgggtttattcatcacaacaggtaagtccggattcccagtccctgaggccaccgcagtaaggcagtggggcgcctccccttggtgggggggcgggaatcagagaccccgacccgaaggagactgggtgatcccagacgagcccccaagactgttagaaataaatccttattccccgatgtcacaaagaagaatcagcagacgaaaagcttcctcagcaaggtgatttttaccttctgcagaaagagtgctgcccgtccgcaatcctgccacgatcgcatacaaaataaaaaaggcactagaatatttatcccttacgcatgaggtcccta

SEQ ID NO: 263833 - DNA, 260 bp, Homo sapiens
  chr11:67764062-67764322
  hypo
ctgtacttaccaaggcgataccagtgcaggcaaagagcacctcgaagccgctgtagataaagaaaggcacgaggtggcgcaggcggtagtcacgcacgtgcttgaagggcagctggaagatgttgccccagcccacgctgcgcagatcgatctcctccgtgggccggtaagcggctccgcacaaacccagcacctgcgaacccattacttgaaggggcggccagccaggcccaggcctggcctccaggcttcagccccgc

SEQ ID NO: 263834 - DNA, 552 bp, Homo sapiens
  chr11:67781064-67781616
  hypo
acagcaaatgttttatgcagcgtgatgtcatttaatcctcacaatgacaccaggtgccattagcatccccatttcacagatgaggaaaccgaggcagagaaggtgagtgatttgcccaaggtcccacaaccagtaagaggcagagcccggagacaggcctgatggtggctcgagaggctcgttcttggctcctgggtctcagtcctgctcccgtgacgagccatcccctatggggaccatggtgcctgtcctgtgtgcgggccactgcccagcttctcccaatcagagcaggaagatggtgggttcagcctggccccacaatcactccagctgagggctggcctggggctcctgaccaggctctcagtagcacactggtccagcagggccatcctgcagaccggagcaggtcccgccctcaaggtggccacttaacaatcacccacagccttgcgctcaccgatgctgggccctgggctcagaaccgactgtgtggtctcatcattagctggcaggtgccatcattacaccggtaacatgagaggcttcaag

SEQ ID NO: 263835 - DNA, 180 bp, Homo sapiens
  chr11:67785446-67785626
  hypo
ctaaacaggagcagagcaagcgcacagccacctcggggcctttgcagccgccagggcctctgcccaaagtatgccgcctcccagtacccacgacttgcttgttccttgacttcaggtcactgctccaatgtgaccgccgcctggagacctgcactgaccgctttgtaaaaacagcacaca

SEQ ID NO: 263836 - DNA, 257 bp, Homo sapiens
  chr11:67786112-67786369
  hypo
cggccgggctgaggcgggcagggggctcaggggatatttgctcccacagggtggcccctctgggtgggagctggctgctgaggggccggggtgctgagcacttaatttcatccccggctcccggcccaggccacgcagctggactccgccttcatccggaaggagccctttggcctggtcctcatcattgcgccctggaactatccgctgaacctgacgctggtgcccctcgtgggagccctcgctgcaggtgagag

SEQ ID NO: 263837 - DNA, 185 bp, Homo sapiens
  chr11:67786588-67786773
  hypo
ccaggagctggctacgcctcctccagctctctccctgcactgccctgcagggaactgtgtggtgctgaagccatcggagattagcaagaacgtcgagaagatcctggccgaggtgctgccccaatacgtggaccaggtgagcagggctgccgggcaggtagagcgggaacaggcaaggctcaagg

SEQ ID NO: 263838 - DNA, 87 bp, Homo sapiens
  chr11:67795520-67795607
  hypo
cacccctcaaagcagcgcctgcctcctccctcctgggtcttccctctccctgcctcagcctcctccctcagccgctcccaaccatga

SEQ ID NO: 263839 - DNA, 82 bp, Homo sapiens
  chr11:67797203-67797285
  hypo
ctacctaccctcagcgcagatcctcccaacacacacatgcaggcagcctcggggcctctgcgggtccctctaccacagcatt

SEQ ID NO: 263840 - DNA, 742 bp, Homo sapiens; identical to SEQ ID NO: 214389
  chr11:67808550-67809292
  hypo

SEQ ID NO: 263841 - DNA, 64 bp, Homo sapiens; identical to SEQ ID NO: 214390
  chr11:67810254-67810318
  hypo

SEQ ID NO: 263842 - DNA, 445 bp, Homo sapiens
  chr11:67811379-67811824
  hypo
tgcccccggccttccggaggcgggtgtaggaggtgggtgcccccggcctcccggaggtgggtgcaggaggtgggtgccctggcctggcctccaggaggtgggtgcaggaggtgggtgccctggcctggcctccaggaggtgggtgcaggaggtgggtgcccccggcccagccaccccacctgcctgcccagcccccgctgactgcccactctggcgcaggtcctcggggagacagagcggttcctgagccaggtgctaggccgggtgctgcagctgctgccgccagggcaggtgcaggtccacaagatgaaggccgtgtacctggccctgaaccagtgcagcgtgagcaccacgcacaagtgcctcattgccgaggcctggtgctctgtgcgagacctgcccgccctgcaggaggccctgcgggacagctcggtgagcagcctga

SEQ ID NO: 263843 - DNA, 100 bp, Homo sapiens; identical to SEQ ID NO: 214392
  chr11:67815195-67815295
  hypo

SEQ ID NO: 263844 - DNA, 729 bp, Homo sapiens
  chr11:67817080-67817809
  hypo
gcaggtgtgcacagcagggacgccctgactctcgccctctccctggcaggaggtggtccaggccacgctggtggtcctggccttggccatggtgcccatcctgctgcttggcacacccctgcacctgctgcaccgccaccgccgccgcctgcggaggaggcccgctgaccgacaggtgggaccggggcctaaggtgtggggggctgcttgcggggagaggccactgtccggtgtgtccctgactcctcgcttcctgacagactcctgagtggccaggagcaggcctggcgggtggtgggggacctcctggggctggagtgctgccaacactgcctgctcatgccccaggaggaaaacaaggccgggttgctggacctgcctgacgcatctgtgaatggctggagctccgatgaggaaaaggcagggggcctggatgatgaagaggaggccgaggtgggtgcagtgccttcctgggggtgggacggctgaggccctgccggccctcactgcacccgccccgcagctcgtcccctccgaggtgctcatgcaccaggccatccacaccatcgagttctgcctgggctgcgtctccaacaccgcctcctacctgcgcctgtgggccctgagcctggcccacgcccgtgagtgacctggccaccgacggctggccccagctcctggcttctcacataccgctgctggctgggcgggttgcttctctctgggcct

SEQ ID NO: 263845 - DNA, 210 bp, Homo sapiens; identical to SEQ ID NO: 214394
  chr11:67850480-67850690
  hypo

SEQ ID NO: 263846 - DNA, 77 bp, Homo sapiens; identical to SEQ ID NO: 214395
  chr11:67864777-67864854
  hypo

SEQ ID NO: 263847 - DNA, 119 bp, Homo sapiens
  chr11:67916022-67916141
  hypo
aaggaggagaggcccgggggtggagcggaggtttcgggtaaacagaggcggcctgactgacagaggggcatcagccaggggaaaatagaaccgggatccaggatcgtctgagtacgcag

SEQ ID NO: 263848 - DNA, 43 bp, Homo sapiens
  chr11:67916579-67916622
  hypo
atagaagagtcactctgggccgggcgcagtggctcacacctgt

SEQ ID NO: 263849 - DNA, 172 bp, Homo sapiens
  chr11:67926119-67926291
  hypo
tatagccattcaacgtatttggttcaagcttgatgtcagaggcctccttcagatttgttcttgtcctcactgaccgccgagttatgtaggtgcagggcgagctctccccctgcgaatgagcacctctcacaggattctgtctgtgttctctcgccgcgtgtctagtcaagca

SEQ ID NO: 263850 - DNA, 320 bp, Homo sapiens; identical to SEQ ID NO: 214397
  chr11:67931311-67931631
  hypo

SEQ ID NO: 263851 - DNA, 155 bp, Homo sapiens
  chr11:67949302-67949457
  hypo
cacaagagtgtaaaagcacacgtaaacggaacactctggtgggaagtaggcaggccgtcccctgcactcccacaccggcctgaagtgctggcattgctaggaacccaggctgctctaaccagggcaacagaatcgtctgtacttccacaggttat

SEQ ID NO: 263852 - DNA, 216 bp, Homo sapiens
  chr11:67970707-67970923
  hypo
tgggattacaggcgtgaggcaccgcacccggccccatacactttcatatcattagaatccagcacaagaccagacataggtccattcatatcaccttccctttctattctcaaaccaactgctacacataagcagaatcggtttttagttttctcctaaatgtgaaatcacaaaaggacttgacatcaaagaattccaaatcggtctttatcaatg

SEQ ID NO: 263853 - DNA, 369 bp, Homo sapiens
  chr11:67984063-67984432
  hypo
cctgctatgctctctcgctccctttcctcgagtgccaggttcactcagtgacaggatggcagggattcacttgctttgatcctgtgcttactgggatggcccacaggtcacgttgaccccagaattccaggctggaggcaggttgcttttcattgtaaagcgatatgttggctttcgtgctccgcacatgcgtctgccccagtccccaccccgcccggaagctaggactcctctgatgggagcaggtgtctgaaaccggagggagagtggggcgtacccggctttcccagtggcccctctgggcggctggcgggtttcctggtcacattcctgagcaccactacccccggcaccattcttgctttccac

SEQ ID NO: 263854 - DNA, 179 bp, Homo sapiens
  chr11:68119117-68119296
  hypo
atttgtgagcccttgcgcctggtcctgctccccacgcagcgggtatagcccagtctctggccctttcagtgagtgggaggagatggtaaatgaatagtatttgaaagggacgtgtgcgtagggggataaagcagtgcttgggtgctgtggcgaggggcttccgtcggagctcaggtgct

SEQ ID NO: 263855 - DNA, 262 bp, Homo sapiens
  chr11:68133046-68133308
  hypo
cgctgtgaggaggacaatggcggctgctcccacctgtgcctgctgtccccaagcgagcctttctacacatgcgcctgccccacgggtgtgcagctgcaggacaacggcaggacgtgtaaggcaggtgaggcggtgggacgggacggggcgggcgggcggggcggggcctggcgggaatgggttgcggccgccgggggtgccccagaaggaacctcggcaaacccgttcgaaatgatccacttggcgggtgtggtgattcaag

SEQ ID NO: 263856 - DNA, 322 bp, Homo sapiens
  chr11:68133368-68133690
  hypo
atcctgttttgttttgttttatttttgccccagatattttccacttttttactctccgccttggtcctcaggcacttggtgcttcctgggactgtgttgcagtgaggcatggctcttctcctctggggcaccggctgaggatctttctttccaggtgtcggttcggggcgggcccttcgggaaatcacacacgttcaggatgcagctcgccttcggggatgctcccgggcctgggatagccagtctggcctctggggctgaccctggggcctggcaagcgagggggtaacgagaggtgtcaggaaagcgccatccctgggac

SEQ ID NO: 263857 - DNA, 192 bp, Homo sapiens; identical to SEQ ID NO: 214401
  chr11:68142591-68142783
  hypo

SEQ ID NO: 263858 - DNA, 76 bp, Homo sapiens
  chr11:68153340-68153416
  hypo
tgggcatgctggggacgctgagcagcatggccagcagctgggtctgcagcctggtacccggcgggacttgtggttg

SEQ ID NO: 263859 - DNA, 94 bp, Homo sapiens; identical to SEQ ID NO: 214402
  chr11:68158724-68158818
  hypo

SEQ ID NO: 263860 - DNA, 393 bp, Homo sapiens
  chr11:68161251-68161644
  hypo
ataaaacaaaaataaaaataaataaaaatttattaaaacattcatcacagccagcctagtgggtgtcccatgtggctttgcctcgcatttccctgataactaggatgctgagcgtcttgtcccaggcttgccacacctcagcactttgagatacgtcgcacagtccccatttgcgaacgagaaatgaggtttagggaacagcagctgtgtcatgtcacacagcgagcagggggtctctgagccgtctgaccccacagccgaccaagctccaatccttaccgcctcctagtgttgtggatgtagcccagggtgctcccacatttttcagatgagaacaccgaagctcaaaacaggagcgttttgtccacattggatacacgatgtctgtggttt

SEQ ID NO: 263861 - DNA, 145 bp, Homo sapiens; identical to SEQ ID NO: 214404
  chr11:68162351-68162496
  hypo

SEQ ID NO: 263862 - DNA, 33 bp, Homo sapiens
  chr11:68165099-68165132
  hypo
ccgagttcccatcaccgtcgtcatcatcaccat

SEQ ID NO: 263863 - DNA, 99 bp, Homo sapiens; identical to SEQ ID NO: 214405
  chr11:68172056-68172155
  hypo

SEQ ID NO: 263864 - DNA, 196 bp, Homo sapiens; identical to SEQ ID NO: 214406
  chr11:68176056-68176252
  hypo

SEQ ID NO: 263865 - DNA, 128 bp, Homo sapiens; identical to SEQ ID NO: 214407
  chr11:68177518-68177646
  hypo

SEQ ID NO: 263866 - DNA, 225 bp, Homo sapiens
  chr11:68178823-68179048
  hypo
cagttgcgtccccccgccacccactgtcctgcggtgagagcagactcactgagcctgcccttctcccttgtgccttccagctacatctactggaccgagtggggcggcaagccgaggatcgtgcgggccttcatggacgggaccaactgcatgacgctggtggacaaggtgggccgggccaacgacctcaccattgactacgctgaccagcgcctctactggacc

SEQ ID NO: 263867 - DNA, 68 bp, Homo sapiens
  chr11:68189965-68190033
  hypo
tgtcctctcctcctacgtcagctcagtaagagcccttcgaagggatgctgtgtcggaggccccaaaag

SEQ ID NO: 263868 - DNA, 362 bp, Homo sapiens
  chr11:68190242-68190604
  hypo
cccccacatctgtaccgatccctttacccgcaccttccctacccaccctcacctcccctgtaccttcacctcccccactcacccgcccctgcaccctcacctgtcccccaccttcacctaacccccaccctcacctgccctcccctcacctggcctccttccgttggggaaggggttgtaaggggcggcccccaaactgtctgtcctggtgccctgcagagaaaacagtacgtgagggccgcagtccaaaagcttgagtcctggaaggtggaggagacagggatgtgttgggaagggccccatggtcttggatcccttctcgactgtcaatggggccttcatgggagcgccagtctagtgat

SEQ ID NO: 263869 - DNA, 388 bp, Homo sapiens; identical to SEQ ID NO: 214409
  chr11:68190854-68191242
  hypo

SEQ ID NO: 263870 - DNA, 263 bp, Homo sapiens
  chr11:68191537-68191800
  hypo
cctcccagaggcccccgacgctcccacctgttggtcgtcagagcttctggttggtgggaaggcacccaggaccttgaggtctccagagagaaaagccagggaaagagggagaccgaaacccatgtgacatgaaactcaggctccaaactgagcacgggaacgtttggggacaggagcgcgatggccttcctcagatagctggggggctggcatgaagacgggagctacagccagcacaggtcctgggccgggagcccagagat

SEQ ID NO: 263871 - DNA, 253 bp, Homo sapiens; identical to SEQ ID NO: 214411
  chr11:68192497-68192750
  hypo

SEQ ID NO: 263872 - DNA, 136 bp, Homo sapiens
  chr11:68192960-68193096
  hypo
ctcagagagggtgagcgagctgcttggggccccacagcaggagatggagcaggactgcagcctagcctctgcccccagcacctgcgcaagaagctgctctgctctggactgtgttaggctgcgagggctggagaga

SEQ ID NO: 263873 - DNA, 251 bp, Homo sapiens
  chr11:68193464-68193715
  hypo
ggaggacgccaacatcgtgcagcctctgggcctgaccatccttggcaagcatctctactggatcgaccgccagcagcagatgatcgagcgtgtggagaagaccaccggggacaagcggactcgcatccagggccgtgtcgcccacctcactggcatccatgcagtggaggaagtcagcctggaggagttctgtacgtgggggctggcagtggggtgggcagggtggcctctaaacccgacccctggaggag

SEQ ID NO: 263874 - DNA, 41 bp, Homo sapiens; identical to SEQ ID NO: 214413
  chr11:68196105-68196146
  hypo

SEQ ID NO: 263875 - DNA, 77 bp, Homo sapiens; identical to SEQ ID NO: 214414
  chr11:68199350-68199427
  hypo

SEQ ID NO: 263876 - DNA, 192 bp, Homo sapiens; identical to SEQ ID NO: 214415
  chr11:68201117-68201309
  hypo

SEQ ID NO: 263877 - DNA, 140 bp, Homo sapiens; identical to SEQ ID NO: 214416
  chr11:68203449-68203589
  hypo

SEQ ID NO: 263878 - DNA, 441 bp, Homo sapiens
  chr11:68204359-68204800
  hypo
tctgcctgcccaaccagttccggtgtgcgagcggccagtgtgtcctcatcaaacagcagtgcgactccttccccgactgtatcgacggctccgacgagctcatgtgtggtgagccagcttctggcacggggaaggggcgtccgggctgggttcccccaggaacgtggagtttaggggaggagacgtgcctttccagcggggctgggggctgtgtgggagactcaggcggctgggaggctccttgcgggaggcagggaagcctttcccagggcagcggccaggaggacagactgtgagctgtgggctcggcggctacagagtctgcctcagtgggcggggctgatggtgtccaggtgcctgcagcacgcacccacccacgggaccttgctgagcagcgtctgtcaggcagcaagattacccgagggctgcagtggtcctgtt

SEQ ID NO: 263879 - DNA, 62 bp, Homo sapiens; identical to SEQ ID NO: 214418
  chr11:68206026-68206088
  hypo

SEQ ID NO: 263880 - DNA, 128 bp, Homo sapiens; identical to SEQ ID NO: 214419
  chr11:68207214-68207342
  hypo

SEQ ID NO: 263881 - DNA, 194 bp, Homo sapiens; identical to SEQ ID NO: 214420
  chr11:68207880-68208074
  hypo

SEQ ID NO: 263882 - DNA, 196 bp, Homo sapiens
  chr11:68210030-68210226
  hypo
actgcgcctgggctgacatatgtgttttcgtaagcccgaaagatagcatctgaagagtcaacattgagccttgccttttgctgctaacgatgtataaaagctgctgttctgagcatttcggaggctcccagctgccgtgtgcaccctgcctagagctctaccgtaacccatctccgggaggaggtgctattgtttt

SEQ ID NO: 263883 - DNA, 127 bp, Homo sapiens; identical to SEQ ID NO: 214421
  chr11:68216740-68216867
  hypo

SEQ ID NO: 263884 - DNA, 218 bp, Homo sapiens
  chr11:68225539-68225757
  hypo
ttccctggcatggccgctcccgccctgcccaggtgatcagcctgtgaatcccctccctaacccccacacagagcacacctcccaggctggcttccggcttgactatgttcctccatgcctctctgagtagcaggatcaatgtgagaaaggtctgccctgtctgcagcctccccagaagcacagtacttttcgtggcgcgtacacgggctggtagatac

SEQ ID NO: 263885 - DNA, 279 bp, Homo sapiens
  chr11:68226726-68227005
  hypo
gaccgcgccgtgacctcctgtggattttcatgggactctgagaggcgcctcaaatccattttggaataaggcaggttattagcatggggtctaaccgtgggctgtctcggtgtcctgggctggctcttggggcgggggtcctgatgtccgggacctcggtcctacctgggaggcacagatatggcggggaacgggaagcccgggggagcatttagaagctcgtgtgcacagggaaaccctgtctctacaaaaaaattaaattagcggggcccagtggtg

SEQ ID NO: 263886 - DNA, 156 bp, Homo sapiens
  chr11:68341483-68341639
  hypo
aaaatgattgtttaaaagtccgcagtatttaccgagtgtttcatcacttcatcctatcaggaatctgagtatttgtcctttacctcttgtcagggctgagggaggaagacggcatggttacatgggacacctaacgaggatagctaactgtatcgt

SEQ ID NO: 263887 - DNA, 232 bp, Homo sapiens
  chr11:68383036-68383268
  hypo
acttttatgtgcagcgtgtcccacctatgttgtttggctcccagcccaacaagtcacagttaggtgctccataatgattcttaagatgtgatgcttatgtagctccttattttgcattttcccttcacctgtttgcttaaaaacatgttctctagtcattacctcctagcaggtcctctgcacagccttttgctttctgggcacgcatgcatccctccgtgcctgggcccac

SEQ ID NO: 263888 - DNA, 99 bp, Homo sapiens
  chr11:68385168-68385267
  hypo
gttaagcaaaagaagtaagatatgtaagcatctatacgaagctctaaaaccgaccaaacgaattgatgggagaaattcgaatagtgttttctcctggca

SEQ ID NO: 263889 - DNA, 229 bp, Homo sapiens
  chr11:68385504-68385733
  hypo
ccccatggcatgcaccgtggccccgggactgcctttcctaccccgccaaggaggagagaccgaggagcagggcatgctctgggctccagcctggatttgcccgcccatggagaggacacgttccggatcgtcctcttccacacagtagactctgtcctgccgaagggagaagtctgcatccctgggttagacacgtctcatggagtcctctgcccgtgaccaggggggg

SEQ ID NO: 263890 - DNA, 33 bp, Homo sapiens
  chr11:68408313-68408346
  hypo
gaatgtcctgttcatcggcgtagaagggctcac

SEQ ID NO: 263891 - DNA, 86 bp, Homo sapiens
  chr11:68433120-68433206
  hypo
cctgccaaggccatcgtggatgacggtcgcattactcacgcgcgttgccacccaaccggctggggcatcgccgcacttcccattct

SEQ ID NO: 263892 - DNA, 137 bp, Homo sapiens
  chr11:68442013-68442150
  hypo
cccaaatacttttcggtggaaacgagacagccccatggcctgcgctgctgtaagatatctcatccctgcacctcagtgtctcagtcctggaggatacgggctccccaccttccacggaccccggcactgcgggttgc

SEQ ID NO: 263893 - DNA, 244 bp, Homo sapiens
  chr11:68472884-68473128
  hypo
agggataggagcatccaagccgagatgaaaaatacaccaagccttctgctgaccttccgccgccaacagcaccttctctcctaaggatgctccctggccgccagactttctgtgcagtgcgcagcctgtgttcactgacaggaaagagcgatttcagcgcgtgtcattctaaacaatgatttcttctccgtgtctatgaaaaaacaaggtttttttttctttcggataaacaaaacaaaaaccc

SEQ ID NO: 263894 - DNA, 37 bp, Homo sapiens; identical to SEQ ID NO: 214423
  chr11:68505095-68505132
  hypo

SEQ ID NO: 263895 - DNA, 113 bp, Homo sapiens; identical to SEQ ID NO: 214424
  chr11:68549945-68550058
  hypo

SEQ ID NO: 263896 - DNA, 302 bp, Homo sapiens
  chr11:68564260-68564562
  hypo
tctgtggacagacccgccgccccaccgtcctcgtcagacagcagcccgggcgggtggactcaccatggcataatagttgctgttcaccatgagcggccctcgtcctcggaggtagatgtactcctcccaccagtcgctcacctagtgggcgcaaacaccagacaaacccgcaggctcagcaggggccaggcaggctccctggcagcagcccagagccgcggggaagggcaggcagtgcttttggcagacatttcggcgtctaacaggggccattccagaacagggaacgcagtcctaactag

SEQ ID NO: 263897 - DNA, 161 bp, Homo sapiens
  chr11:68657683-68657844
  hypo
cctgactctctgggttctcacgtctccaaattcaggatgcccgggatgggcgggaccaggagcgctcagcccactgggctggcgccccctgctgcacgcggagaacacgatgggggagctgggccagcacctaccagggcgctgggcacctgaggggtttt

SEQ ID NO: 263898 - DNA, 246 bp, Homo sapiens
  chr11:68664617-68664863
  hypo
ccctggggcaggacgcgttccccctgcacgcctgtgcccagaggggctccgtgctcagttcctgttatctctgctctgacccaggtcacagtcccctctcttctgcaccgtttactctgaacaagcatttaatgggcaccgaccccccggcctgaccgagggcgagacacacagaagggacgacagagtgcctgccctggaaacactgtcaacaccagaagcaccagcaccgagggtgaaactctt

SEQ ID NO: 263899 - DNA, 198 bp, Homo sapiens
  chr11:68679246-68679444
  hypo
tcttggggagcacgcgcaggagccgtagcctgggttgttgaggaaggctcctggagccctttgaggcgtggcagccttcgtgtcggccaggccctgggtcagggtttatttgttcaccacgcttgctgtgctcgtgctcctccgtgtgcacgcccgtgcaggggcctggagttggcctgggcccggtctgtgcccgtc

SEQ ID NO: 263900 - DNA, 340 bp, Homo sapiens
  chr11:68682153-68682493
  hypo
aatgcaagatttgattgagagcacgtgtgtacatgccttgtgcttctttctacctttaaggctttttgttgttttagtgtcaacttcagtggtttgattacaaagtaaatgaccagatcctaacttgcggttcccaggttctgtgctgcgccccctccaacatcgccgtggacaatctggtggagcgcctggctctgtgtaagcagcggattctgcgcctgggacaccctgcccgcctcctggagtccattcagcagcactccctggatgcggttttagcgcggagcgacagtgcccagattgttgcagatatcaggaaggacatcgaccaggtctttgt

SEQ ID NO: 263901 - DNA, 73 bp, Homo sapiens
  chr11:68691889-68691962
  hypo
ggagagcccaggcccggctgaacaaggtgctgtgctcaggatctcacaaggctgcgatcgaggtgtcagtggg

SEQ ID NO: 263902 - DNA, 227 bp, Homo sapiens
  chr11:68700807-68701034
  hypo
tggctgaggagtacggcgcgagggtggtgcggacactgacggtgcagtaccgcatgcaccaggctatcatgcgctgggcctcagacaccatgtaccttgggcagctcacagcccactcttccgtggcaaggcacctcctgaggtgagtagctcggcaccacccgccgccccatccttctgccctggctaatcctctgcgtcacctgtttctacgcagcaagctaaag

SEQ ID NO: 263903 - DNA, 203 bp, Homo sapiens
  chr11:68701352-68701555
  hypo
ggaggacgaacagtcgaaagggaaccctggtgagcttgcttgcagatggccagcttttttgtttaaacatacctccagctctttaaaaataaaaggcactttaattgcctaattccgggaggagctgagagcagttgttgatggccgtgaaaaaacggagccccacactgcaagaggctgagcagcatcgttttctccagggt

SEQ ID NO: 263904 - DNA, 87 bp, Homo sapiens; identical to SEQ ID NO: 214427
  chr11:68727156-68727243
  hypo

SEQ ID NO: 263905 - DNA, 48 bp, Homo sapiens
  chr11:68728254-68728302
  hypo
cccgcctggcagatccgggcccccaggggctcccgcagcctctgcctc

SEQ ID NO: 263906 - DNA, 127 bp, Homo sapiens
  chr11:68772696-68772823
  hypo
gggtcttggaggccgcttcctgcccctgcctcctccaggcgctggagtctcaggaggcgttccccgggggacactgcatctccatggtgactgtgttgggcgtgctgcccccggcctcccccagctc

SEQ ID NO: 263907 - DNA, 243 bp, Homo sapiens
  chr11:68800914-68801157
  hypo
gggctgggggacatcgcccactctccaagctgctcacatacattagtagccgctggagatgggtgggggcttctcagcttcacaggggcaaggtgcagtggcagagtaggccttgcccatgaaccgccagggtcccctagccgagatgagttccctctggcaggctgtggaaggatcatccctccctgggtgcgtgacccccagccccgcccgacctcaggtctatcccggggcctcccctcc

SEQ ID NO: 263908 - DNA, 281 bp, Homo sapiens
  chr11:68822121-68822402
  hypo
tggggctcgggtcacggcccaccctgcatgcacccatgtcatgcctcatgtgacttttcgcttgtagtaccgctccatcaaccaccgggtggatgccagctcgatgtggctttaccgacggtattactcgaacgtatgccaacggtgagaacgcacccatgtggaactcagggttcctgccggcttgcgtggcaggggaggctggcccccacctggggatcacctggtctcagggtccaggcaggctccccactacatagatagggcggttaccatcatcc

SEQ ID NO: 263909 - DNA, 63 bp, Homo sapiens
  chr11:68830513-68830576
  hypo
ggccacgtggttgcgggtggggcccaccggagtctcatcttggactgcgtgctccgcatccct

SEQ ID NO: 263910 - DNA, 176 bp, Homo sapiens; identical to SEQ ID NO: 214428
  chr11:68838712-68838888
  hypo

SEQ ID NO: 263911 - DNA, 71 bp, Homo sapiens; identical to SEQ ID NO: 214429
  chr11:68853901-68853972
  hypo

SEQ ID NO: 263912 - DNA, 76 bp, Homo sapiens
  chr11:68856610-68856686
  hypo
gggagggggcgacccgaacaacagtgcagtcggtatcgagattggggagaggagcgagtccaaggagaaggtcatg

SEQ ID NO: 263913 - DNA, 196 bp, Homo sapiens
  chr11:68968788-68968984
  hypo
gtgtggctatacatgcgtgcacacacacatacactgcaaatgtgttcatgttgtgtgtgcgtttgtgtgcacacacgtgtgtctgggcaggtgtacatacctgcatgtgtacacaagtgtatttgtgtgtgcatgcccatgtctgtcccatgtctgtgcacatgtgtgcatacgtgtttggcggggtgcatacttg

SEQ ID NO: 263914 - DNA, 199 bp, Homo sapiens
  chr11:68970085-68970284
  hypo
ggcatttcaccaaaccgagggttccctctcaccccctctggctggcatttcactgagcagggggccccctctcaccctcaggcagacctgtcattgcacccagcctttctctctcctgatgtgcaacaccaggctgggccggcgctgaccaccctggacatggcagtgtggacggtaacagagccggtgacccgccctc

SEQ ID NO: 263915 - DNA, 210 bp, Homo sapiens
  chr11:68970656-68970866
  hypo
ccccggggtgcattcgcgtcaaagaggttgaggtggaaccagctgcgaccctcagcagcagcaagtggccactttggggaccctgtgggttttgagtcagaggaaaacagagtttaagccttttcccatttgtcctgagagtactcaccaggggcttgcgactgcagtgtttaccccgagataactccgccacgaaatagctcgatttta

SEQ ID NO: 263916 - DNA, 174 bp, Homo sapiens
  chr11:68972048-68972222
  hypo
tcctcatggccttggcgggctcgggtggcaggggggacctccatctccaccctgctctgtttgacctgggctgcttactggagggtggagggagagcagcagggccttggagggacttagtgaatgaccagcagaaggagtggcttccgatggcacaggcgtccagggcagatg

SEQ ID NO: 263917 - DNA, 250 bp, Homo sapiens
  chr11:69056019-69056269
  hypo
acacgaatcttgtccggaagcaaggtccaggggcttctgacccagggaggtgggcatgactcatgctgagcagccgaagctccctgacttgccgtgtctgctccggcctctgcatccacctgttgcctctgcctgggctgcttcctcttgcctgcgcagcctggaaagcttctgctagctctgcagcactgacagcaaagccccccgccctccctggcccagctcctccgagctccggcatcgtctcgga

SEQ ID NO: 263918 - DNA, 45 bp, Homo sapiens
  chr11:69192163-69192208
  hypo
tgaacgcagacgcccgcccaggaatgcacacgcccacccgtgaac

SEQ ID NO: 263919 - DNA, 286 bp, Homo sapiens
  chr11:69192498-69192784
  hypo
ttccgaggctgctccgatgtgtgggaactgagggggttcccaggatgtgagactttcagtgctgaaactgggaaagtcctgggcgagccgggacaagtcgctcaccctactagagacagttgggcgaaggagacacattgggatcagtctcccatggccttcaagtgtcagggcaggggctggggacctcccatataacgagcagcctcaggagactccaggcaggcaggagcgtcgggggctgcgactccagaatggccaaggcttctaccgtccagcccctttg

SEQ ID NO: 263920 - DNA, 223 bp, Homo sapiens
  chr11:69193143-69193366
  hypo
gtgctggacacacacgaaggacatgagcagccacgggtccacgaaagagccatttctaccacaagccggactgggcttcgcggaggtgccccggggaaacccatggggaggcacagcctggactggacagggaggcagcccccattcatcagctccttccctggcacgcattagttggtacctactgagtgcagagccctgggccaggcggttctggaggctg

SEQ ID NO: 263921 - DNA, 134 bp, Homo sapiens
  chr11:69205855-69205989
  hypo
aacagggaactgatcgttggacagcagctgccctgggtttcggggtcaggggtatcctgctgcaaaggcagacaggagtggaaggtggagtgcgtgatggaaacaaacagggaaccgatcgttggacggcagct

SEQ ID NO: 263922 - DNA, 534 bp, Homo sapiens
  chr11:69206200-69206734
  hypo
tctcccagcacacccgggcgagctgaggaaaaggctcaggggctgacagatacagggactgagcgcggctaggatagccctactgagggagccagaggggccctggggagatgcctggcgggcccgtctcctagcgactgacgtcccgccaccccacgggccccttgtgctgggcactgcccacccctgacactggctgcgagcacttttcactgctgttctgcatgaataagcgccaggcctcttgccaattgtccccctcttaaaaggcagccccggcgaaaggccttttcaagtgggatcgcacagtgccacccaggccgggcgggcattgttttggggagccagggtcctgcttggccgccggggtcggggggcccacaaagcatggtgatggcggctccacgcactcagcgcagcagccctgcttattaatctgcaaaactcacaccgatgcctttggaggggagattgagtgaaaacgatgtccttaggggagtggcctttgcaggcgcctcctgggttcctcactac

SEQ ID NO: 263923 - DNA, 217 bp, Homo sapiens
  chr11:69244619-69244836
  hypo
cctaaggaccgacacgggggccactggagctggcacgcagtggcatggggagaggggtttccagaaacaccaggtgtgccctgctttggctgcataccctcagctagggctgggacagtcactctgaactggctaccagggtgctgggcacgggatagctgtggcctagccaaccgcctctggtccactcgagtgtgtgtgccgggcatccactctc

SEQ ID NO: 263924 - DNA, 189 bp, Homo sapiens
  chr11:69280487-69280676
  hypo
atctgtccggggtgcggtctgggcatgaaaagtttttcaggctctccaggtgattctcgtgtgcagccaagttagagaacactgactcccggggaggtggattacctgtcctcccggcaaagcgcaggactcgcagtttggcaagcttccagcagcagcgagttcgggtggctccgtggggagccttac

SEQ ID NO: 263925 - DNA, 75 bp, Homo sapiens
  chr11:69337266-69337341
  hypo
ctttacacaaatcatggagctggcatcttcttggcttctggggagacctagggaagcttacgatcatggcagaag

SEQ ID NO: 263926 - DNA, 562 bp, Homo sapiens
  chr11:69339659-69340221
  hypo
ctgtgtccaaagacaaatatcgctgctgtcatggaagccccaaggagctcacggtccccttgggggcaaatggctccctcgggaaatgacagcaaaacacccaagatggagaattttcatcaccctgcgcggtgtgatgaggggctggggggaactggggctggagttgccagggggcctgaaaggagaggctgcacaggtagagaggcaccctggagggccaccgcgggacctgctccctgggcctgcccccatgtctgcctgccccgtccccacacttgccccctctgccctcatccctgcccgccccgtccccatgcttgcctccacgggcctctcctcgcacaggaggaggggctgttcctgccgcacacctgcggtggccatcctctcactcagcatgacagctgctggtccgtggtgctcaggggtggctgcgcaggctattagaatgtgtccctacatccacagtggttattatgcactgctttccgaggagccgccagacttccccataatctggcaactaaagggttggcacttggcacgggaagtggggact

SEQ ID NO: 263927 - DNA, 221 bp, Homo sapiens; identical to SEQ ID NO: 214433
  chr11:69357102-69357323
  hypo

SEQ ID NO: 263928 - DNA, 95 bp, Homo sapiens; identical to SEQ ID NO: 214434
  chr11:69367214-69367309
  hypo

SEQ ID NO: 263929 - DNA, 209 bp, Homo sapiens
  chr11:69431510-69431719
  hypo
gcatcctaagcgctcgaggtgttgatccactcgacaaactggcagagagccacttccgtgagcacctgcagggtgcacagctgagcccaaacccaggccctgcctcacagggtgcacggtctactgcaaggatttacacaataaataccatacattacagagcatgctgggaaagcaatgcataccacagagcaaaagaaaatgggctg

SEQ ID NO: 263930 - DNA, 52 bp, Homo sapiens
  chr11:69458859-69458911
  hypo
tgtccccagaccccctcctgcgctggagagcgctcttccagctctggtgagc

SEQ ID NO: 263931 - DNA, 663 bp, Homo sapiens
  chr11:69468277-69468940
  hypo
cttagccatggtggacccagcgggcaggttctgcctgctttggcgggcagacacgcgggcgcgatcccacacaggctggcgggggccggccccgaggccgcgtgcgtgagaaccgcgccggtgtccccagagaccaggctgtgtccctcttctcttccctgcgcctgtgatgctgggcacttcatctgatcgggggcgtagcatcatagtagtttttacagctgtgttattctttgcgtgtagctatggaagttgcataattattattattattattataacaagtgtgtcttacgtgccaccacggcgttgtacctgtaggactctcattcgggatgattggaatagcttctggaatttgttcaagttttgggtatgtttaatctgttatgtactagtgttctgtttgttattgttttgttaattacaccataatgctaatttaaagagactccaaatctcaatgaagccagctcacagtgctgtgtgccccggtcacctagcaagctgccgaaccaaaagaatttgcaccccgctgcgggcccacgtggttggggccctgccctggcagggtcatcctgtgctcggaggccatctcgggcacaggcccaccccgccccacccctccagaacacggctcacgcttacctcaaccatcctggc

SEQ ID NO: 263932 - DNA, 326 bp, Homo sapiens
  chr11:69481589-69481915
  hypo
tggcaggacctgtgcggcctgggagggagggcagggactcgcctgtgcattccggaggcggctgtgcctggtggcagtgaggcacagccttagggcggaagtcctagctctgctgctgggtgcccttagaccaggcaatcccttcgcgtctcccctccctcctctgtaaaatgagaataacacccatcttgtgggctcctgaagggattaaataacacacgggaggcacgtcccgcaccgcctggcacacaatcggcctcgacatgcggcacagcacccgtccaaacctcccatgagcctcattcggggccaaccatctctctcat

SEQ ID NO: 263933 - DNA, 89 bp, Homo sapiens
  chr11:69525488-69525577
  hypo
aagtgcgcagtttgcgggcatgaccctggtgtcctgcacggagccagcctggcacttgacgctgccaagaaatattggatgaatcattt

SEQ ID NO: 263934 - DNA, 91 bp, Homo sapiens
  chr11:69593280-69593371
  hypo
agttgtataaccttacgctatttcacttcttagcattctcagtttccccatctgtaaaatgggcatgagctgatgtcggccttagcaagac

SEQ ID NO: 263935 - DNA, 308 bp, Homo sapiens; identical to SEQ ID NO: 214439
  chr11:69931075-69931383
  hypo

SEQ ID NO: 263936 - DNA, 61 bp, Homo sapiens; identical to SEQ ID NO: 214440
  chr11:69946372-69946433
  hypo

SEQ ID NO: 263937 - DNA, 506 bp, Homo sapiens; identical to SEQ ID NO: 214441
  chr11:69946945-69947451
  hypo

SEQ ID NO: 263938 - DNA, 33 bp, Homo sapiens
  chr11:69947852-69947885
  hypo
gatggatgaggtcccggccggcactcgctcttc

SEQ ID NO: 263939 - DNA, 188 bp, Homo sapiens
  chr11:69949119-69949307
  hypo
ccacagagatgcaccgccccccctcaacccagaactttccttctctctccagactaaaatccacggagtcgggtttgtgaaaatccatgccccctggaacgtgctgtgcagagaggccgagtttctgaaactgaagatgccgacgaagaaggttggtgttgatggtcctgctccgaaatgaatcgcca

SEQ ID NO: 263940 - DNA, 183 bp, Homo sapiens
  chr11:69953589-69953772
  hypo
tggaggcggcggggcggggaagcggtcagatggcctgggccagggggaactggaaggacgctggccttgcctgagagagtggaggcagaattggcatgctctgaaatgcacgtctgcatagcacgaccagttcttctcaccccagtttacagatggaaaaactgaggccgggagtggtgatgt

SEQ ID NO: 263941 - DNA, 454 bp, Homo sapiens
  chr11:69962346-69962800
  hypo
ggccaacagggcggccaacagggacgtgcacggcctttctatcataacgggggcacacctgggcaaccctcacactctgtgtgaaatgttgccccaggatgatcttaatttgtgtcaacgagagctgctggggtttatgttttgaaacataatggatgtgagcgcctccaaagctccattggatgataagaacgtccctttcctctttttttaacagggagactacaacggtgaaaacgtcgagttcaacgacagaaaagtaagttgatggagcggagcaggaggtggctctgtcagagcctggaggcgttctggggcggggtgggcctgcagctggaccgaggacttaccggcctccagggcctccccagggcgctcgctgcagggggctgagaagcgggtgtcccctctcaccttttcaggagaaaagtccgtgagctttgtgtggctggtt

SEQ ID NO: 263942 - DNA, 220 bp, Homo sapiens
  chr11:69970425-69970645
  hypo
tcaccaaccccactgcttcctccccctcagctcctgtacgaagagtgggcacgctatggagttttctataagtaccagcccatcgacctggtcaggtaagaacgcgccacagcctgcgggaatcaagtccctactccgatggcagtcggataacatccctgtgggtttcaaccgctctgaatgttcagtacccgggaacgtgtttgaactcaaagagctt

SEQ ID NO: 263943 - DNA, 77 bp, Homo sapiens
  chr11:69971958-69972035
  hypo
caaaaaaagagagaagaggggagggcttcagaaaagcagagagcacccccaacctgatggggcggcccaggacccca

SEQ ID NO: 263944 - DNA, 121 bp, Homo sapiens
  chr11:69972731-69972852
  hypo
ctggctggtgttcgcgggaggtgagcatgaatgctaggcttcggtgcaggctggtacttgcgggaggtgagacatggatgccagaggcctcggtgcaggctggtgcttgcgggaggtgagc

SEQ ID NO: 263945 - DNA, 49 bp, Homo sapiens
  chr11:69972882-69972931
  hypo
cttgcgggaggtgagacgtgaatgctagaggcctcggtacaggctggtg

SEQ ID NO: 263946 - DNA, 127 bp, Homo sapiens
  chr11:69973147-69973274
  hypo
aacactagaggcctcggtgcaggctggtgcttgcgggaagtgagacatgaacgctagaggcctcggtgcagtctggtgctcccaggaggtgagacgtgaacgctagaggcttcggtgcaggctggtg

SEQ ID NO: 263947 - DNA, 193 bp, Homo sapiens
  chr11:69976910-69977103
  hypo
ggcctccgctgcaccgggcagctggggacctattccttccggcccagcccccgttctcccagagaagagtcctgggatccccgtttctccacctcctgtgtccagagcacccaggccacgtccaaggcagccgccccaccaggcggatggagatgctgtgtgaaccgctcatagacggcgcctggcacagagc

SEQ ID NO: 263948 - DNA, 362 bp, Homo sapiens
  chr11:69977943-69978305
  hypo
tctcccaggccagctcggcacccaggaggtgctccatcatggcccaacaaggtgactccagggctgccccctctcttgcagcatggagatgtgtgaccagagacacaatatcaccatgtgcccgctttgcgacaagacctgcagctactggaagatgagctcagcctgcgccacggcccgcgccagccacctcttcgacaaccccgccacggtcttcttctctgtcttcatggccctctggggtaagcagggctccagagcactgggtttttgggcagtggtgagtctgagtggtacctaggctgcttctgtctgtctttgcgaaatcatcctcaggcaggggttgtcgggaaaaaacatag

SEQ ID NO: 263949 - DNA, 544 bp, Homo sapiens
  chr11:69982805-69983349
  hypo
tcagctccaccacacgagggtgtgggcagagcagtgtgagggacaggtcttgctttcccgggattccagtcacaggtggggacagacacgcacagaaatcagcatagcctcgagataaatgcagttgtttctcttcgtggacaaaggcgttcgattttccagaggaggccaagaatgggagccgtgggtccgtagcttggtgtagggcgtgagttccagtggtgagcagtgagacacgctgagctgggctggccagggagggggtgagcgccccgtgctgggaagcattcaagctgaggttggaggacttcttgctggggcaactgcagagcattgggaggtgatgtctatgtgtgatccaaggccacgtggcttattgggaagattcccaggcctacaacccagctctggtttttaatttggggatcaaaatgtatcgtaaatttagaattataaatgtagggtcagcagcagtctgtcaccgctgaagcacacgtgccagagctcccgttgtttatcacactgtatccgaacagcggagaac

SEQ ID NO: 263950 - DNA, 163 bp, Homo sapiens
  chr11:69985998-69986161
  hypo
gtgtgtgctgaacacgtgccttgcttgttcctgactggattacctccaagtttttctctcacctagagtagtttccccgtctgactccacaaaaatacacctccttccctttgggagctgcgctgaggactgcctccgtgccaggccccgggctaagggctct

SEQ ID NO: 263951 - DNA, 130 bp, Homo sapiens
  chr11:70002186-70002316
  hypo
ttttttttaacattcacatccgtgtttctctgtcttccttcggcacccagtgagcccagcatgttgcgatggcactgcatggctatggtgggtctgcggtggcggggacgggggtggggctctggcttga

SEQ ID NO: 263952 - DNA, 224 bp, Homo sapiens
  chr11:70002957-70003181
  hypo
ggcccatgcacgcacgcacatgcacccacgctgacacacagagatgtctcatcgtgatggttccagacagtgaccggcattgttttgtgttgtagactgacaaagtgaagctgacatggagagatcggttcccagcctacctcactaacttggtctccatcatcttcatggtaagttccagaaggttaaggccagacgaagtcaggggaaaccgcaaggaagtg

SEQ ID NO: 263953 - DNA, 106 bp, Homo sapiens
  chr11:70008172-70008278
  hypo
ggcagtgagggccccgggcagtgaggacccgggagtgagggccccgggcagtgaggactctgggcagagaggacctcgggcagtgaggacccgggagtgagggcct

SEQ ID NO: 263954 - DNA, 262 bp, Homo sapiens
  chr11:70016944-70017206
  hypo
tgggctgtggctcacggggtgctgactagcactgggctctctctgcagtcatccagtttggcttcgtcaccctgtttgtcgcctccttccccctggccccactgtttgcgctgctgaacaacatcatcgagatccgcctggacgccaaaaagtttgtcactgagctccgaaggccggtagctgtcagagccaaagacatcggtgagtgaccccacgggccggcagaaccggttccgagtgcgtgctgggtttggggaggggg

SEQ ID NO: 263955 - DNA, 101 bp, Homo sapiens; identical to SEQ ID NO: 214444
  chr11:70020524-70020625
  hypo

SEQ ID NO: 263956 - DNA, 484 bp, Homo sapiens
  chr11:70021160-70021644
  hypo
ggcaccctctgcttcgagaagctctggctgtccccagacagtggctgaatgaagcttgcaaacccaccagggtgaaagggagcagcagctcagtggccctggcttcccgcagtccctctgcaggcattggcgtccccaccagcagcaggccttccgcgtgcctctttggactctttgcacctggctggtttttgctcagttcttacggatcagctactcacttcctggttcctgtccggttggctgaaggcataatctgccctcctttcacgagtttgtttatgggttccttaaccgtaacctttccttgaagaggcttttgtattccttctgtgatccgtgcagggcccccaggcgagctccttgagaggacagagagggcccctgtggcccctgtgacctgcgcccctgaggccctgggtggctgggggaagctgtgccacaaagcgcaggtgccttgatcaccctgtcgtccagcgggtca

SEQ ID NO: 263957 - DNA, 621 bp, Homo sapiens
  chr11:70022807-70023428
  hypo
tgcttcctgtcatggcctgaaccagtctttcaggttaatttgggggtgccctggccgagacgatgaaccccattcaaatggttcgggggacccttagaattttatttttggtttacagagatccttagagcagtgagtgtcaccctggaatgtgcgtcagaataactcggggctcccagccccaccccaggagaggcggatcccgtgggctggggctggggtgccggttcagcatttctctaacacaccccgcggatgtgcagggccacacggagagccatccgcctggacgtagatatcctgcagacctgtcaggacaggctccatcggggcccggaagcgaggaagaccccgctcccggctccatctcatccccgcctcatccctcccatttcctgttgtctctctgggccggttgggcgatcacctgggcggacccccttgcctgcctgagtcctgcacttcgacggccctgaactcaggagccacgtccctcgggagccccaaagacttcaacctccaccccaggcccaccgcacctcagcaccccacttcggaggtctcaaactcagcgccccaagggccaggtgggccacacgcgcaagtgagactaagtcctgg

SEQ ID NO: 263958 - DNA, 37 bp, Homo sapiens
  chr11:70023977-70024014
  hypo
tacaggcgtgagccaatgcgcccggtcttgatttttt

SEQ ID NO: 263959 - DNA, 219 bp, Homo sapiens
  chr11:70028534-70028753
  hypo
gtcaccccctgttgcggccggcccttctgcgcccaggctgggggtccccctcactgccatgtcccctgcacaggccttcgtgatctccttcacgtctgacttcatcccgcgcctggtgtacctctacatgtacagtaagaacgggaccatgcacggcttcgtcaaccacaccctctcctccttcaacgtcagtgacttccagaacggcacggcccccaa

SEQ ID NO: 263960 - DNA, 338 bp, Homo sapiens
  chr11:70031509-70031847
  hypo
tccactgtggagagagactccgtgggtgcggggccatgggctgctcgcccaagagagggctgccctcccggaggcagccgcacaccaagctgagcctctcccaggcgtccctcgagctgcctgactccagccagagcctgagccccaccgaagtcccaccctcgactccaccacggtcttttgcaggtataaagactaccgagagccgccgtggtcggaaaacaagtacgacatctccaaggacttctgggccgtcctggcagcccggctggcgtttgtcatcgtcttccaggtgcggtgggtccctctttgtttccggtttgaagatgggagcattt

SEQ ID NO: 263961 - DNA, 273 bp, Homo sapiens
  chr11:70054496-70054769
  hypo
taggcgtgagccaccgcgcccggccttggacatggatttcttaaagcaacttgaaaaaacaaattctatgttcattttttttacaatcaggtagaatttgtgtttctggaaaaggtacgcacaaatcttgggcttacttgaaagctggaggtaacagccgtctcttgctctctgactcctttttcccctaagacagaagagggaagacaagtccaaacgtctgtgctttgcgggagacttcaggggaatttgatcaagcgtttcctggaacaa

SEQ ID NO: 263962 - DNA, 182 bp, Homo sapiens
  chr11:70080115-70080297
  hypo
ctactcattgcccatctctgcgtagatgccccagcggatcaccgttcagtcgacatttaccaggcactccctgttcgggggtgagtgttggctatggagttagccgccaggagcctgcctcctgctgactgggcgatctgggcaagttatttagcttctccgcctcagtccttcctatctgt

SEQ ID NO: 263963 - DNA, 74 bp, Homo sapiens
  chr11:70125200-70125274
  hypo
ttcaagtacctctgcggtgaggtactccaggatggctgtgctattcacagcggcagtcgcgcccacacgtccag

SEQ ID NO: 263964 - DNA, 31 bp, Homo sapiens
  chr11:70139604-70139635
  hypo
aaacataatagagtcgcggtggcaaggccag

SEQ ID NO: 263965 - DNA, 182 bp, Homo sapiens
  chr11:70164144-70164326
  hypo
ttgcctcttccacttcattgcgcttacctggcagaaaccaccccattcagtccgttctccatgcccattcacctccactgacccgcagaggccctaagtgccgccagcatctctgttagtgcatcccgccctctttcttctacgcggcatgctgcctacccgtcctctcttctagatgccat

SEQ ID NO: 263966 - DNA, 95 bp, Homo sapiens
  chr11:70177350-70177445
  hypo
aaaaggcagtgaagtctgtagtaagaaattgggtctcctgtggtttcgtaaaccatacttattcttgtaattacgagtatcactgtattccagcc

SEQ ID NO: 263967 - DNA, 143 bp, Homo sapiens
  chr11:70189849-70189992
  hypo
gagagtgatgctgacgtgtctgatggtgaagatgacagggacactctcctcagctcagttgacctgctatcgcccagcgggcaggccgacgcgcacacactagccatgatgcttcaggagcagctggacgccatcaacaaaga

SEQ ID NO: 263968 - DNA, 95 bp, Homo sapiens
  chr11:70263136-70263231
  hypo
gcggcaagtatggcgtgcaggccgaccgagtagacaagagcgcggtgggcttcgactaccagggcaagacggagaagcacgagtcacagagaggt

SEQ ID NO: 263969 - DNA, 141 bp, Homo sapiens; identical to SEQ ID NO: 214448
  chr11:70268911-70269052
  hypo

SEQ ID NO: 263970 - DNA, 77 bp, Homo sapiens; identical to SEQ ID NO: 214449
  chr11:70281167-70281244
  hypo

SEQ ID NO: 263971 - DNA, 68 bp, Homo sapiens; identical to SEQ ID NO: 214450
  chr11:70282721-70282789
  hypo

SEQ ID NO: 263972 - DNA, 377 bp, Homo sapiens
  chr11:71108172-71108549
  hypo
aacttgccggcctccgtcactgtgtgagccaggccctcatcctgaacccctctccgtgtctacgctcatcccactcttctgtgtctccagagaactttgctgcccccgccggggagtgagatgtcccctgtggagagggccgccccactccttctccagctccccaccgcctcacgggcactcgacagtctgaaagtaggagcctgctgcgccccaaccaggcagcccagctgtggcctactcctgtgatccacctctccacaagccgaggaggactcaagggtccgctcagggctttttctcaaatgaggtggcagctcatgcctgcactgtgatggatagagctgccatttctgggccgccgtgtgtgcctctgc

SEQ ID NO: 263973 - DNA, 161 bp, Homo sapiens
  chr11:71135268-71135429
  hypo
acggggcagctcagcgtggagacgccgcacatttcaacctgacagttgaggctgtgcaaacagaaggtagtcaggactgctgaagcctgactgagaggcatgatggcactgtctctgccagtcggcaagtgaacgcagagggcctccgtggagtcgttcac

SEQ ID NO: 263974 - DNA, 202 bp, Homo sapiens
  chr11:71146644-71146846
  hypo
cgccccagaagcccgacaccagcagcttgctgtggtgcctctgcccatcggcggatgtgtaggagcactcgatgaccttgggcttcctgccccagatgaggcagcgcccatccgtgcggcggaacaggtccttctggtggttggccacccggaagatgtagtagcccaccaggcccagcagcaggacgcccacggcgtgcgg

SEQ ID NO: 263975 - DNA, 319 bp, Homo sapiens
  chr11:71169277-71169596
  hypo
cttcgctttcagtacggcacatctggctgcggcagtgggtcttatgctggctgctcattggaatcacctggaaggctttgagaaaacacctgagccccggcccccagacacgttcagactggactggcccacaggccctgcccctccccgctcacctgagttgtttctggagctcaccttctcactgtctctgcagcggctacggatgttgggatcattattacgagtcggacaccctcttgcactcgtttcaagtcctagcggcccttgtggagtctcccgtcactcaggacatcatctgcgacgtggggatgtaagt

SEQ ID NO: 263976 - DNA, 200 bp, Homo sapiens
  chr11:71178322-71178522
  hypo
gtagcacccgcaggcgctgggcacaggcaaacagacgtctctctggagaaattcaccttcaatccaggctgctccgaatttctagacgtgacatttaaggaaaatgagaagctcagagtccagtcataaaacatacaaggaaataaggcacaatgagtcagaaccagcaaaaaaaatacagtagacgcagatgtgaaagc

SEQ ID NO: 263977 - DNA, 33 bp, Homo sapiens; identical to SEQ ID NO: 214451
  chr11:71184882-71184915
  hypo

SEQ ID NO: 263978 - DNA, 216 bp, Homo sapiens; identical to SEQ ID NO: 214452
  chr11:71185635-71185851
  hypo

SEQ ID NO: 263979 - DNA, 210 bp, Homo sapiens
  chr11:71188521-71188731
  hypo
cgcaaggtggccacggccatcctgtgaaccgccgcagtggtgcaggtgctgttcccgctgtcccacactcgtgtttagcaaggcaacactcaggaacacaatttgataaagatattttttcatgaaggaataacccctatgagttaaaacctcatttctgcatataccgcaattggcagaacccctaccatagccgggttcaaaggcagg

SEQ ID NO: 263980 - DNA, 953 bp, Homo sapiens
  chr11:71192113-71193066
  hypo
ccctgctgcttccccgtgctgtgaccttgggccccaaggtgctgtccgtccattctgtggttcagtgtccccattttaaaatgaggacgatgataatacccacgtcctgggtctgtcttcagaatcacatgtgtcccttctcacgaggtgcctaaagcagagacgggcgtcctgagagcccagcgttgactctggcactgcagcctcctggggcctgcttgggtgggttgttgggtgctgtgggcaggggccaccgcctccgggctccatgttctgattgccctgcagccttggacctgcctgctggctctgggattttttaagacgaagtcaacaggtaagacttccagtttctagtgagcccactttgcttgttctgctggttggtctggttttattctggggcagggtagggatttttttttttttttttagtgcaaacaacaaaaagcatttcatcactctgcctccatggggagcttagtctgtgctagccagaggcaaggtgggcacagtggctggtgggtcagctccacctttggaggctcagcggaacccagcccatcagcattcagggtcacgctcaccatcttgccagcattgtaatcatgcgtatctgcagttcgtcggtggagtcagcctctgacacgccccgcagtgaagtgtcttttttccctctgaaaaatccattcatcctgccacgtgcgggtatttgtcctgaccccatggaaagtgctaacacccacgtgcatttctgtggacgcctccttgaggtctatgggtggagcttggctgatccatgggcatgctgcttctccgaggctctgctcacgctgtctgattggtccattccaggcagggtttttgctgcccttgagtggcggggtggacagcgcagccaccgcctgcctcatctactccatgtgctgccaggtctgcgaggccgtgaggag

SEQ ID NO: 263981 - DNA, 153 bp, Homo sapiens
  chr11:71193408-71193561
  hypo
atgcagcagaacagcggtgatgatgcccgatggatggggctgtgggccatagcctgggctggcgctgcacaggcacctgggggtgtagaccggggtgcagccgtacgggcacctgagggctgtagaccggggtgcagccgcacaggcacctgg

SEQ ID NO: 263982 - DNA, 844 bp, Homo sapiens
  chr11:71229611-71230455
  hypo
gaagcgcccttgcccgctttacctgcttggcggcgcctcctgcggccagttcctcggagcatccacctgtgcagggcccgcgtcctcccctccccgcgccagcctgaagcccccgggcagcctcggtttctccttttcttctggatctccagggactgcgcggcacctggggtcctctggtggggaatgaatgagtgagtgaatgaatgaatgaggaacagggtggccatctgggtctcagtgtctgtctgggggcggggtggggggcgtcccctgatgggtccggcttgtcagcgccactcctgggggcttcccgtgggggtggcacagggcagggcccccccatctcagggctgcttcctgtggggagggtccccgagaagcggagcgtgggctggtttttagggggtaacccacgaaggttccgccagcccccggtcggttctgggaacccccgggcttgaggaacctgcccggcaccgccctggaacccgggcctgcagcctcctcggggcctcgtctccttcctcccagggaagctgtggggcagggacctggtggacggcgggtgggacccgactccctcccatcccctcacggtggggtcgcggctctgggggctcctggggccgctgccggaccctcagctctgtcgccggggggccgcagtctcggggcggcacagatggggcggctccaaggcttcagccacagacattggtttcctctgttgggggcgcggaggcccaaggtcagggagtctcagggtttgcttccttcccaggcccctcctgggctgggggcgggtgtctcctgcgccccctcgggccgccctctgcgggtc

SEQ ID NO: 263983 - DNA, 90 bp, Homo sapiens; identical to SEQ ID NO: 214456
  chr11:71282211-71282301
  hypo

SEQ ID NO: 263984 - DNA, 120 bp, Homo sapiens
  chr11:71296339-71296459
  hypo
ttccctccaggatcatgggaacgatatccttggcggcgtccactttctaccatatatgtagtcatatcacctcctccgatttggaatatttttgaggaccatctcacacgggggtgtaca

SEQ ID NO: 263985 - DNA, 82 bp, Homo sapiens; identical to SEQ ID NO: 214457
  chr11:71321043-71321125
  hypo

SEQ ID NO: 263986 - DNA, 332 bp, Homo sapiens
  chr11:71507734-71508066
  hypo
ttgtcccatctcaccgacaaagacactaggacacacagaggacaagcaacccccgagctcccacagactgctgcccggccacctggctcttgtgcctccactctacacccaagccccccattgccaccagcctttgccccagctccccctgagcacagcccctcctggcagccatgtgcacagatgtacccgcagcagcctctgcctgcacacagagacacggacaagccagtgcctgtccacgtggggcagcccgttaactacagagccaacaaacaagccaggacacgaagacatactgggttccacgacagagtcctgcacaacctcac

SEQ ID NO: 263987 - DNA, 36 bp, Homo sapiens; identical to SEQ ID NO: 214458
  chr11:71647445-71647481
  hypo

SEQ ID NO: 263988 - DNA, 35 bp, Homo sapiens
  chr11:71647721-71647756
  hypo
gagccactgcgcccggcctttttcaggtcactttt

SEQ ID NO: 263989 - DNA, 31 bp, Homo sapiens; identical to SEQ ID NO: 214459
  chr11:71673295-71673326
  hypo

SEQ ID NO: 263990 - DNA, 770 bp, Homo sapiens; identical to SEQ ID NO: 214460
  chr11:71724323-71725093
  hypo

SEQ ID NO: 263991 - DNA, 752 bp, Homo sapiens
  chr11:71725580-71726332
  hypo
ccatcagcgcggcccgcagccgttccagctcattgcccatctgctctgcctcccgctccatagcctgcagcgctgcctgtgtgctgcagaactggcgtccctgttgctcttccagccactcgggctgtctgtctcctgccctcgcaggctccttgactaactcccgggaggctgtttcctgctgctcacctgccttgcgcaccaaggtctccaagcgggccacctctttgctggtggcagccatcttttcctgcagagtggagaggtcatctgcaagcttctgggccctgacttccttctcttggacctgctggagtgctctggccaggttggcatggagctcagctagttcgttctgctgccggcttatctggagctcgctgtgggattctatgcctgccaccttctcctttgcctcctgcagctcctggcgggccttctcacattcctccttcaaagtcatcagctgttcctggaacatggcgccatactgtgcctcctcttgctggctatcctcataccgctcacgccaggcagctacttctttgacgagctgctcacactcactctcagctgtgtgctgggcagccatggcctctgccagctcccgccgcaggacttcagtctcagcctgatgggcctccccaagctgctgtaatcgagcctccagccccttgcgcccagccctctcttcttccagctcctttcgttcccgcttatgctgctccaccaggcttcgggtctctgccttc

SEQ ID NO: 263992 - DNA, 84 bp, Homo sapiens
  chr11:71792521-71792605
  hypo
cccaacgcaaacataaagctcccaaaatcggatgcttcaagttccaggcataacctgggagatcagaaacgccctcagaaatgg

SEQ ID NO: 263993 - DNA, 44 bp, Homo sapiens
  chr11:71937179-71937223
  hypo
atctttggtcggggcgcacattagcctagaccaggggagacctt

SEQ ID NO: 263994 - DNA, 37 bp, Homo sapiens
  chr11:71938062-71938099
  hypo
ggatcagacgtgggcgatcagacgtgggcaatatctt

SEQ ID NO: 263995 - DNA, 54 bp, Homo sapiens; identical to SEQ ID NO: 214462
  chr11:71948504-71948558
  hypo

SEQ ID NO: 263996 - DNA, 49 bp, Homo sapiens; identical to SEQ ID NO: 214463
  chr11:72006579-72006628
  hypo

SEQ ID NO: 263997 - DNA, 41 bp, Homo sapiens
  chr11:72021664-72021705
  hypo
ggtgacagcagtgacgtgaaaggagccgtgttcttctaaaa

SEQ ID NO: 263998 - DNA, 179 bp, Homo sapiens
  chr11:72109413-72109592
  hypo
ggttcgaatcaagtcgcccgagagcggatactcagccattgtgtccagttttaatcctgtgttttcccaagtaattaagccttcttgcttatgaacttgtgactaagtaaagcatcaccgagaggttgtaacatcaaagtgccttccaccgtctgtccgtgtttggtaaaattggattt

SEQ ID NO: 263999 - DNA, 581 bp, Homo sapiens
  chr11:72407946-72408527
  hypo
caagtgccacaagggaagggcgcaggagtccggagggatgggtggaggaggaggaggctgggcacgggctgcagggcccacctgaggcctccagccaggttaggcgctgggcgcgagtgaagagcccatcaggcaggtcgcgcaggaagcgcttgagcgccgaggaaacatcatccacgtgctgctcgccctccttgaggtgcacagagcgcgcatcctgccgcaggctctccagcagccgctgtgtcttcgatgtctgcccacacttgcggtagatgccctcggaggtcaggcctagggaggggcggggccaagcgttcggggcctgaggcatagagtcatggggcggggccgcgcagctctggggcgggaggcggctctccgggaggggcggggctggcaccctaggggcagggctcaccgcactgcgtgatgtagtccacacagcggtacacgatcaccgggatatccgagtccccaagctgctgctccgacagcgtgtcccccatgctggcggctgctttctggatggcccccagccaacccatgaagtccagccgccgctcgccctgtatgtacag

SEQ ID NO: 264000 - DNA, 405 bp, Homo sapiens
  chr11:72413650-72414055
  hypo
cagaaacacaaatccggggggctcagaggcgcacaaacaccagcacagctgccagccatcctgaggggcccacactgcaagtcagggaagtcatcaacagtcacagagacacagacacagaggaacatgcatacgtagtacaaatacacactgacatgcaaacccaagcacaccccagctcacacatgatttatcacaggcccttgaggagctgcgatcacggcctgagagcagcaggtaaatcaaaccccaccaggcactgcacagcctggtggacccccaccctctgccacgctcacctgtggtccggttgttccgaaggaattccatctgcagcgtctgccccgcctgctctgcaagagccaggggcgtgggggcctcagggtcccccgagaagcagttgat

SEQ ID NO: 264001 - DNA, 107 bp, Homo sapiens; identical to SEQ ID NO: 214465
  chr11:72437783-72437890
  hypo

SEQ ID NO: 264002 - DNA, 537 bp, Homo sapiens
  chr11:72465692-72466229
  hypo
ttaacaaaattaagggcagacgcaggggaccgcggcagcggccatgaggcaggtgggaagcaggcacagtgatgagccggctgaggctgtgggatcgtttattggggctctgtccagccaggctgcagcacccgcctgggcctggcccggtgccaccaggtgccgggtgggggaggggagaaagtgcaggagcggccgccgccccagggctcgcccggtcctgtctccgtccctgaagcggtgcggcgctcaggtgagcgaggtgtcgtcgtcgctgccctcgccgcccgcgccgcccatccgctcctctctgctctcggccaccgcgctctcgtcgatgttctccagtgagtccgcatgctgcaccgacagctccgacagcgccaggctcggcaacgggctctgctccgggtgcagccacggcttgaagtgaggcaggtgcttctgtttccactcggggtacttgaggcacgccttgtacatcttcttcatggcctgtgggcccgccgccccgccgggtcagggggtggctagggg

SEQ ID NO: 264003 - DNA, 523 bp, Homo sapiens
  chr11:72475519-72476042
  hypo
aagaacctttgctgtggcagcgcaggtgaagaaactgaggcaggccgggtcgtgggggtcaggtaagtgtccacaggcctccctagcctggcctggctcgtgccctttccatagcccccagcaggcagcactgctgcgctaagcagaagaaattacacccatctttgttcctgcgggcggcggtggccacgccccaaaggtgtaattctaagaggcttggggagggacaggtggcggggtagggctgagtctctggagagcaccaggtgggcgggccggtaccaggaacccccagctattaggccctggctgagtgagtgtccacaccagatgttgccgtcaggtgttgcctggtaggccatcttggctgcccccggagaaactccccctggaaacaggaacccaaggggtgttgctccaccaaggagccatgctgggcttgagtacgtttaaagcctggtgacagcagggaccccgacatgcagtggtattacatttgagaaaacaggccagccaggtgcgg

SEQ ID NO: 264004 - DNA, 481 bp, Homo sapiens
  chr11:72532174-72532655
  hypo
caaatctcttagctacgtgactttgggcaagacacttaaacctctctgtcggtgtccttgtctgtgaagtgagagtggcagtaccagcctcctggtgtggtgaggatggaaggagcgtgtagcctgctgggaacatcatggcgcccgagggccggatgggcatttggcagcctctgcgcgaggagtcctcgcagtggttatgcatggtgctgggagcggagcgctggcttcccactcttcaggcgaggcagtggagcgggttgctcttgccagagaggttcctagtagggtcgcagagaaacgaagcggcacggcgaggattgggacccagggctgactccagagcccgagggccttccactgctccacaaacagcagcgcgtccctgtgcaaggtcccaaacctgtgtggggctcagcttgcttttcaggaagggggcgggcaggtgagcagccgactcccttagcgccttcggccccgg

SEQ ID NO: 264005 - DNA, 80 bp, Homo sapiens
  chr11:72907831-72907911
  hypo
cacagaaccactgtcggagagtttcgaggactcagagagaacacaaacaccaggagactggaaattcaactttctttctt

SEQ ID NO: 264006 - DNA, 38 bp, Homo sapiens
  chr11:73057918-73057956
  hypo
tccccacaggacatgcggaagcacgtggccatgaccct

SEQ ID NO: 264007 - DNA, 222 bp, Homo sapiens
  chr11:73063840-73064062
  hypo
gagggagtgtgcaccgaccctgtgggtccttcagggctacatgcagccgctgaagcagccagagaactccgtgctctgtgacccttcactggtggacgagatcttcgaccagatccccgagctcctggagcaccacgagcaattcctggagcaggttcggcactgcatgcagacctggcatgcccagcagaaggtgggagccctgctcgtccagtcggtgag

SEQ ID NO: 264008 - DNA, 805 bp, Homo sapiens
  chr11:73072924-73073729
  hypo
cgtgtatgtgtacgcgtgtgtagaagggtgtatagggcatccacacacacacacccatgcaggcctgcctccctccattctgccggggtttcccaggagtggggaatgctggcagcagttcctccattcaccttctcctgtccattggcgcctcctgcagttctcctgtgcggctcccaccctgaacagctgcccggagccctcgcctgaggtatgggtctgcaacagcgacggctacgtgggccaggtgtgcctgctgagcctgcgcgccgagccggacgtggaggcctgcatcgccgtctgttccgcccgcatcctctgcatcggggcggtgcccgggctgcagcctcgctgccaccggtgaggcctgggcggcggggtgggcggcaccgcgggcctgggagaaccaacccctgtcccagcacactctcaggccgccccggcgtggttgtgggcggggcccggcgagtgtgggcggggtcggtgggcgtgtccaccaccggggccccgtctggctcgtagctgctgtcatcctcactccgtcttctcgcagggagcctcctccgtcgctgaggagtcctccagagacggcaccggagcccgccgggccggagctggacgtcgaggccgctgcagacgaggaagccgcgacgctcgcggagccggggccgcagccctgccttcacatctccattgcaggctcgggcttggagatgacgccgggcctcggcgagggtgacccccgcccagagctggtgccctttgacagtgactctgacgatgagtcttcgcccagcccctcggg

SEQ ID NO: 264009 - DNA, 92 bp, Homo sapiens; identical to SEQ ID NO: 214470
  chr11:73093212-73093304
  hypo

SEQ ID NO: 264010 - DNA, 50 bp, Homo sapiens
  chr11:73310292-73310342
  hypo
ttcaggaaagaggttcgccaaaatattagcaatgattatcttgggggaaa

SEQ ID NO: 264011 - DNA, 68 bp, Homo sapiens
  chr11:73310372-73310440
  hypo
ttttttgagacggagtctggatctatagccaggctggagtaaagtgggggcgatcgcaggtcactgca

SEQ ID NO: 264012 - DNA, 42 bp, Homo sapiens; identical to SEQ ID NO: 214471
  chr11:73464045-73464087
  hypo

SEQ ID NO: 264013 - DNA, 157 bp, Homo sapiens
  chr11:73476967-73477124
  hypo
gggattataggcgtgagccaccgcacccggccgaacattaatatataattctaatgaaaaaagccaatcattgatgacggctaagcagaaagctaaaaggcatcattgagccgctgtaccagccctggaactggccgcctagatttctttttagtaa

SEQ ID NO: 264014 - DNA, 101 bp, Homo sapiens
  chr11:73491527-73491628
  hypo
gagcgaaacaccatttcaaaaataaataaataaataaaaataaaaaataaactttgagtggatagcctcttggagatggggcaggtcgggaaggagagaca

SEQ ID NO: 264015 - DNA, 144 bp, Homo sapiens
  chr11:73492565-73492709
  hypo
ccgttaacaatgtacggcagaacaatgaaatctaagaccattataggacccgtgaccggctgggtggtgttgatttttgctgttgttgtttttacttttctgtattttccaaatgttttatagttaattatgcctccctacttt

SEQ ID NO: 264016 - DNA, 38 bp, Homo sapiens; identical to SEQ ID NO: 214472
  chr11:73643144-73643182
  hypo

SEQ ID NO: 264017 - DNA, 174 bp, Homo sapiens
  chr11:73662120-73662294
  hypo
caggattattactctgtgctcgggatcactcgcaattcagaggatgcccagatcaagcaggcgtaagttggggtgggagccaggccttaggggtgtgctggggcaggccctgccctcttctcttccaaaacgagctttcctgcacagcttagcgcagacaaggtaaaccttgtt

SEQ ID NO: 264018 - DNA, 35 bp, Homo sapiens
  chr11:73662698-73662733
  hypo
tttttgttttgagacggagtcttggtcttgttgcc

SEQ ID NO: 264019 - DNA, 155 bp, Homo sapiens
  chr11:73662973-73663128
  hypo
agtcaccgcacctggccaaaaacatgtttttttttttaacaaatatttattgagcgtctaccacaagggttgagagggtacttcactcctgctgcagtggtagcagctggagataaatgtcggaatccgacatcgacactcccttacctcatgca

SEQ ID NO: 264020 - DNA, 438 bp, Homo sapiens
  chr11:73685693-73686131
  hypo
gctacaagagagggaggagacgccaaggttgagcttgctttatggatgacaagtgggctaggctgggctgtcgggggcaggacgaagattctggctgaactttccaagggacgggacgcttgggatcctggctggtacgaggcctcccacactgtcaaatgtcaactccaccagcactgagacaatgagtagatgagaatgtagaaagagggaaggtggtaggtaaaggagcggaaggaagaggtggggaaagagggaaggagagaagggaaggagggaagagaaagaaggaagaaaaggaaagcatggcccggctagagacaaagccagaggtgatcaggtcagcagcaggagaggctcagaagggagcctctcgggaagtgcaggcagccatgagggctcgtttcagctgctcataggtgacgaacatcaccacgt

SEQ ID NO: 264021 - DNA, 119 bp, Homo sapiens
  chr11:73687939-73688058
  hypo
gaccacctccagcccgggcctgagcttggaatcggacctttaccacatccgtgggctgggccacagccacagccagggcacctgtggtgctgcctgctaggaggcggctcccaatgctg

SEQ ID NO: 264022 - DNA, 179 bp, Homo sapiens
  chr11:73688955-73689134
  hypo
tttgacagaatcatacaggccgatgcggacagaggcaaagctcatttggcgctgcaggccggcaaccagcccattgtagaggcttcgggggccctcagtacgcaccatggtcagaatggtgcccatcacaccgcggtactgggcgctggctgtagcgcgcactggcccctgactttctc

SEQ ID NO: 264023 - DNA, 178 bp, Homo sapiens
  chr11:73883502-73883680
  hypo
tagatctgagggaagcgacgtactggcctaagactttgaattagtgaagcattgggagttcgagaaatagtttgctggaaaggaaggagagccatgtagaagagataggttttggaattttagatcgttaaatggcttgtgccaggttaggggatacttgggccgaggagaaagaatg

SEQ ID NO: 264024 - DNA, 189 bp, Homo sapiens
  chr11:73965091-73965280
  hypo
atccttagccatagcgagcggtggtggtggatagcatcacaagaaacgagcctgaaaatcaggtccagccggtccaagcacatggcctcccatctgggagagcccactgtcccactcccacatgtctgggcacctgccctgggctgaggccaggctgctccaggggcctcctgcgccctcacctgccac

SEQ ID NO: 264025 - DNA, 96 bp, Homo sapiens
  chr11:74100758-74100854
  hypo
tgctaggattacagacgtgagccactgcgcccgaccgggaaaataattttagatcaaagacatatccgaataggtttctaacggccttgtagaaaa

SEQ ID NO: 264026 - DNA, 120 bp, Homo sapiens
  chr11:74107339-74107459
  hypo
actcattaggaaaagtacagttaaaactggcacctaaagagaacaaaaagtcttgctactccaagtgtggtccacagaccagcagcattagtatcacctgaaaattcattcttttttttt

SEQ ID NO: 264027 - DNA, 44 bp, Homo sapiens; identical to SEQ ID NO: 214476
  chr11:74168144-74168188
  hypo

SEQ ID NO: 264028 - DNA, 93 bp, Homo sapiens; identical to SEQ ID NO: 214477
  chr11:74168435-74168528
  hypo

SEQ ID NO: 264029 - DNA, 31 bp, Homo sapiens
  chr11:74246354-74246385
  hypo
gttttgttttgagcccgagtcttgctctgtt

SEQ ID NO: 264030 - DNA, 31 bp, Homo sapiens
  chr11:74246625-74246656
  hypo
ttacgggtatgagccacggcacccagcccaa

SEQ ID NO: 264031 - DNA, 64 bp, Homo sapiens
  chr11:74264050-74264114
  hypo
actggaaccacgttcggctgcttgctgctcaaaagccaaacaggagagacgagggttggtggga

SEQ ID NO: 264032 - DNA, 197 bp, Homo sapiens
  chr11:74424486-74424683
  hypo
ggcggacagtggaggcggtaacaactcacatgggcgccctgaaggggacacaagggtcagccctggttcaaagaaccatcgtcttccacctgtacctgtcctttcccaaaactcccaccccaactgcagaagtctgaacttgtcgtaagcctgtgattggactgaaaacaattaagtgtgcccggttcctccccatt

SEQ ID NO: 264033 - DNA, 247 bp, Homo sapiens; identical to SEQ ID NO: 214478
  chr11:74994376-74994623
  hypo

SEQ ID NO: 264034 - DNA, 74 bp, Homo sapiens
  chr11:74998668-74998742
  hypo
gaggacactgaggcccggagagatcttcatgccaagcaccactgccagtggagcagcagcggcagagaagctgg

SEQ ID NO: 264035 - DNA, 67 bp, Homo sapiens
  chr11:75001250-75001317
  hypo
actggtaagcctccacgatagccattagagctctcctgggctacgcaacagccgccttgcagtcagg

SEQ ID NO: 264036 - DNA, 95 bp, Homo sapiens; identical to SEQ ID NO: 214479
  chr11:75026127-75026222
  hypo

SEQ ID NO: 264037 - DNA, 452 bp, Homo sapiens
  chr11:75035341-75035793
  hypo
ttcctttactgctgggacagcgcctagcacacagcaggctggctgagcacttcctggtgaatgaatgaatgaatggtctttatctgcccgtgcgaagctcctctgagtccacagcagccgccctcgtcagcctcaggtagggatgaggtctggccccactccatgtcctcagggttcagaacagggcctggcaccgaggaggcactagcaagggccgtgaatgaacgaagggctgaataaatgaacatcctacccaaagaagccctccctgatcaccgttgccgagccctggaggcctggggagtgtgcgtgtgggtgtgggtgtggaatagggggcagcaagaatggaaacatacctgggtcttctgagaacccagagagcctgtgcacctgactccaactccacctgcctcctcgggccccttccctttctgctgcgactttgcctgttt

SEQ ID NO: 264038 - DNA, 44 bp, Homo sapiens
  chr11:75053731-75053775
  hypo
gatgaggatgaagaatggagcgcgccctccagaggccgggagag

SEQ ID NO: 264039 - DNA, 203 bp, Homo sapiens
  chr11:75088468-75088671
  hypo
tacagcctggtccccgtgcccatgcagaggtagctgctgctgctgagctgatgttgagcatggcagggacagagttctatcttctgcttggaactgacactggaaaatgggatcctgtggtcatgggggcagtgtattctactagattctgctaagttgctttaaaattagctgtatcggctgggcacggtggctcacacctg

SEQ ID NO: 264040 - DNA, 87 bp, Homo sapiens
  chr11:75101269-75101356
  hypo
ctcacagtgggtatcgacacctagggagagatctggaaacttgtgcccccgtagtttacactgccttaccagaacagtgtcattttt

SEQ ID NO: 264041 - DNA, 294 bp, Homo sapiens
  chr11:75136560-75136854
  hypo
gaaggggtcgtagcgctccacgctgtgcaggcgcctcaggccgtcgaagccacccaccgcgaacagctgcaagtgaggacatgggccggggagccgggtgccagggccttagggccctcggcctcatcgcttcagtccttacagtctttgagctggaaactatccctgtccccaacccagtttcaggaccaaactgacccccgagcccagtgctgccaccacctgggcagcctccacccagttgctgtacctccctgagccggtttcctctcatttagcggggatgagacctta

SEQ ID NO: 264042 - DNA, 250 bp, Homo sapiens
  chr11:75146457-75146707
  hypo
tcccagagcactccgagttcagacacacttccaccagctctcctaggctccccagcttctgtgtcaggtacaggtgggacagacatgtcttcagctaacgcccactccgctctatgagggtcttggtgtggctgccaccccctcgggggcccacaggggtggcggtgctgttggcatatgtgtcataactgttgtctgaacatacggagagcacatcggagacctctacaccatcgctgatctctgctgg

SEQ ID NO: 264043 - DNA, 386 bp, Homo sapiens
  chr11:75150986-75151372
  hypo
agacagtactcgtccgggggctgtggacagacggcccgaggccaacttccagtcatggccagtccagactgaggctccagactgagggtccgtggaccaaaggaccccacatggccactggggaagggcaagggaggaccctgagagggtctgggggctgaagatgacattttgcaggtgtaggctccaggcgctgtgggcctgggggccggggcgtgtgtgtgcacacgtgtgcactctcagggtaggaggggactgtatggtgctcagggcagaggggttgtgtgctaggcctgcagggtctgtgtgtctagggtcctcaaagcaggagccagatactgaaagacaatggctttgccgccccccgctgccgactctcatccatc

SEQ ID NO: 264044 - DNA, 642 bp, Homo sapiens
  chr11:75152262-75152904
  hypo
acggatgggacccccgcacaccacagcagggagaagagccacggtgcgttgactgtgtagaggttcacactcaggttccaggacgcgtagtccctgtggggcaggggagaggcaggtcagcatgcggaccctggcagctccaggcccagtgtcggggctggtaaagcacgtcctgttcacgacctcacagccatgcccggggcaaggaacattggctccagagggccaagctccgggacaagcccgggtctgcccgacacgctcaccctcttgtctttgaaccatgtgtgcctgattcctctgtgtgcccatccctctgcccgaccgtgtgtgtgtgtgtgtgtgtgtgtgttggggggtggtggtggcaggactgggagagactcagtcccaccctctcctggaggagcccagggcagggcaggcacctgagctcctggcgggacacctgagtgtagcgcaggttcagccgctggatgtggcctctccgcaggctggcgactgcctccttggagcctgatgtctgttggaagccgggagccaccttccgcaccaggggcctctgcctgctaggcagccacatgacctgcaggcagaagagaggcagcctcagacttctcttctgcacgatgcgtaagagta

SEQ ID NO: 264045 - DNA, 544 bp, Homo sapiens
  chr11:75161622-75162166
  hypo
gcatctaggtccgccgtgatgggggccatcctccttgcagcctccagaagaaagcaaagcacagctctcatggaggatgaggtggcacctctacgggacagagatctctggtgacaggtaagacctgaaatctttaaccacgtgaagctcggcagaggttttcggctcctcggcccccagcccctcgcccctagccgtggatctcactccacccacccccctccacacccccaggcgtgcctccccgaagcccaggttgtggctctcctccaaagcctcccgcagatcccagtctctggaagggtcagtcaaagccgccacctccgtccccctagtttctccagactcgtctcccatctccctccaaaggcctgtccttctcccacagcactgccggccgccctgcctccctggagccgttctagctgctggcagggccttcaccccctttctcccgaggcaacctttcccagaggcagcagcggccagggccctctgatgccgagcagggacagtggcatttctagacgatgagggtggggcg

SEQ ID NO: 264046 - DNA, 223 bp, Homo sapiens
  chr11:75167768-75167991
  hypo
ctctctcccagccccggccgaggcggcccttaccttgtgcagccagtgcaggttcatctgctgccccacggcaatgtgacatagtgccaggacctgaggagggacccacagggtgattgtcaggcccgtgtgggcgggaaggctttgccagtttctcagacaccctgctccccactgcggctctgggcctgaccctgggcagaggcagcgaacctccctccag

SEQ ID NO: 264047 - DNA, 127 bp, Homo sapiens; identical to SEQ ID NO: 214483
  chr11:75242019-75242146
  hypo

SEQ ID NO: 264048 - DNA, 202 bp, Homo sapiens
  chr11:75285550-75285752
  hypo
acagtcagtgggggccgagctgggactagatcctagtcggttgggtagttgcttcgccacataggaagggcaggagaggcccctaacacagtgcctggaacccagcactgagcacagattctagtaatgaaggcatgttaacttgcatacgatctgtatccatctctcttaatccttgcaatagccccgttaggtgggaagt

SEQ ID NO: 264049 - DNA, 120 bp, Homo sapiens; identical to SEQ ID NO: 214484
  chr11:75303123-75303243
  hypo

SEQ ID NO: 264050 - DNA, 43 bp, Homo sapiens; identical to SEQ ID NO: 214485
  chr11:75303273-75303316
  hypo

SEQ ID NO: 264051 - DNA, 141 bp, Homo sapiens
  chr11:75315461-75315602
  hypo
gtaaaagaagagcaagcctgcgccggggcttgacaccggacggcagcccagtgtgtcagaatgccggggacaagaggattttaaggacaggagatacagagtgtgctgagcaatatacacgtcatattggcaaatattatt

SEQ ID NO: 264052 - DNA, 92 bp, Homo sapiens
  chr11:75389093-75389185
  hypo
tctgcggccggaggcgccttctgcctaagtattacttgcgccgctggactcattccgcccacttggccgtctcagctcgagctaccgcctgg

SEQ ID NO: 264053 - DNA, 45 bp, Homo sapiens
  chr11:75392223-75392268
  hypo
tcacaagggtggagcgtctgtgatgggaatcgtttccttataaga

SEQ ID NO: 264054 - DNA, 40 bp, Homo sapiens; identical to SEQ ID NO: 214487
  chr11:75426561-75426601
  hypo

SEQ ID NO: 264055 - DNA, 101 bp, Homo sapiens
  chr11:75459473-75459574
  hypo
cagataaacaaaaggcgttaggttggtgcgaaagtcattgaggtttttgccaatagcatccctacaatggactattatttgatcgtaaaaagtaatgaaat

SEQ ID NO: 264056 - DNA, 180 bp, Homo sapiens; identical to SEQ ID NO: 214488
  chr11:75536035-75536215
  hypo

SEQ ID NO: 264057 - DNA, 31 bp, Homo sapiens
  chr11:75748469-75748500
  hypo
ggcgcagtggctcacgcctgtaatcccagca

SEQ ID NO: 264058 - DNA, 36 bp, Homo sapiens
  chr11:75799383-75799419
  hypo
ttataatgagaaaaacgaggacgaggggtgggaagt

SEQ ID NO: 264059 - DNA, 396 bp, Homo sapiens
  chr11:75852055-75852451
  hypo
gatctagttggcagcttaaacggaggccacgcgaatgtgcaccctagccaagaacaaggagaagccctctccgggcaccgggccacagtcaatggcactctcctacccagcgagcaggccgggtccgccagtgtccagcttccaggcgagttccacccagtctcagaagctgagctctgctgtactgtggagcaagcagaagaaatcatcgggctggaagccacaggtttcgcctcaggtgatcagctagaagcatttaactgcatcccagtggacagtgctgtggcagtagagtgtgacgaacaagttctgggagaatttgaagagttctcccgaaggatctatgcactgaatgaaaacgtatccagcttccgccggccgcgcaggagttccgat

SEQ ID NO: 264060 - DNA, 168 bp, Homo sapiens
  chr11:75858211-75858379
  hypo
caggactaatggaccgcctgaagctaaggagaggacaggagcacttgggaaggaagcggtctggggggcctaactgagcagcaccctgcctcacaggagagcaagtcacagacgtttcagccccaacgctgccgctcactggctatgtgaccccggcgaggcgcttga

SEQ ID NO: 264061 - DNA, 167 bp, Homo sapiens; identical to SEQ ID NO: 214491
  chr11:75882508-75882675
  hypo

SEQ ID NO: 264062 - DNA, 228 bp, Homo sapiens
  chr11:75905704-75905932
  hypo
cccatgaggagcccgtagctgaggttgtccgcacatcctccccagcggttcccgggcccgggtggctcacctgggacggggccgcaggagcagccgggcaggtcgccggaggtgcaggcccgggcgatggcgtggctgatggcggcggccgacagcgcatacacgaaggccgactcccgggtccctgagggtgggaggggaaggtcagccgacgctgatccagggcta

SEQ ID NO: 264063 - DNA, 86 bp, Homo sapiens
  chr11:75993075-75993161
  hypo
acccacttcctcccccgggctccccacctccgaatctgcctcactcattccagggggatgcagacatcacccgcaaacaaacaggg

SEQ ID NO: 264064 - DNA, 35 bp, Homo sapiens; identical to SEQ ID NO: 214492
  chr11:76077428-76077463
  hypo

SEQ ID NO: 264065 - DNA, 55 bp, Homo sapiens; identical to SEQ ID NO: 214493
  chr11:76164362-76164417
  hypo

SEQ ID NO: 264066 - DNA, 180 bp, Homo sapiens
  chr11:76205112-76205292
  hypo
ctggtccagccgcagcctcgcatggagcttggcatctctgccagtgcctggagctgcccgccccactgcagcagctggcatctgtgcctggctcactgttgacaggtgtgggatccgggccggtagcacgagccaagcaccgcctgcagggacaagtggacagaatgagcccagtgggca

SEQ ID NO: 264067 - DNA, 191 bp, Homo sapiens
  chr11:76315100-76315291
  hypo
ccccttggtccaggacggaggcctgaaggagggtgtcctcgagccaggtgtgcaggtctgggtccctgctccgggaggaggcagctgaggctggccaggccagtgggcaagagctaaccgttctggtatgaccatggctgccccaggaccactgctatggtggggaccacctgggccgagactccccctgt

SEQ ID NO: 264068 - DNA, 183 bp, Homo sapiens; identical to SEQ ID NO: 214494
  chr11:76339359-76339542
  hypo

SEQ ID NO: 264069 - DNA, 831 bp, Homo sapiens
  chr11:76371478-76372309
  hypo
ccccagggctctggcgcccagttccagtgtctccagggcattgtggcttaagtcaaggagcatcaggcagggcagggagcctaagcgccgggcctcaaaggtccgcaagcagtttctgctgaggttcaggaagcacagggaggtcaggtgctcaagaaagctgtcggggatgagctcaatctcattgtagctcaaatccagattcaagagctgggaaagggggcggccgctggcattcccgctgggggctgagaggggcagggctgaccagccctcggaaggtgcgtggatgcccttgctgtcctggggtggccctgtggggagccggatgaggttgttggacaagttcaggtagatgagtctcgggagcgcggccaggtcggggaaatggagcagtttgttctcccgcaggtcaagccaggtgagctggaactcagcctggggctgggaggccgtctgaaaggcctcgatgctgttgcagctcaggtctagcacccgcagctgctggaggctgaagtcggagatgcaggtgagggaattcctggagaggttgagatgggtcaggcggggcagaccctcgaaggcgccatcctcgatgtccatcagcacgttgctatgcaggtcaagctgctccagcgcaggcatgtcccggaaggtgtggcgggtgaggcgagtcagactgttctccgccagtgagagggtatgcaggctgggtgcctcccccagcagccgctccagcaggccgctgtacaggctgttcccagacaggtccagggaggtcacgcgtggcagggggcccaggccaccagcactcagcgcagtggccatcgc

SEQ ID NO: 264070 - DNA, 436 bp, Homo sapiens
  chr11:76407635-76408071
  hypo
taaggaaaaagaaacgtaaaatgtttttactatagagttttgaatctcagacatccagaagcatgccactggaggcgtcccagccagcgccccagggaagattgggagatggatgtggccccctcaccctggaggcccctagcccatacctgaatgcaggccagccctgatgcaaatgggcacgttgggtgcatgcctcttccggaagtcacccacagagccaaggatatccagagccatgttattgatctcggccgcatgctgactgccattgcactgaggcagcccccacaccaccatgtaggcgtccccaatggtctccacctagaaaccacagccttcacaatccagcgtgagaacatatcctcgctggcccaccacacattctgctacacatggctgcttctcgggagtcccaacccgccccgtgggtctc

SEQ ID NO: 264071 - DNA, 192 bp, Homo sapiens; identical to SEQ ID NO: 214498
  chr11:76408273-76408465
  hypo

SEQ ID NO: 264072 - DNA, 39 bp, Homo sapiens
  chr11:76419081-76419120
  hypo
tttttttttaatgtcgcgatcccagctcaccacaacctc

SEQ ID NO: 264073 - DNA, 159 bp, Homo sapiens
  chr11:76419240-76419399
  hypo
taaactgccttcttgagaggagtgctgaggtggaagacgacggatgttagcacctggcagactctcccccaccctcaggccccgcaacaactgccgctgctctgttgccaacaatgcccaccaatgatcttgaaaccttgacagcgcagctctttcctc

SEQ ID NO: 264074 - DNA, 89 bp, Homo sapiens
  chr11:76419671-76419760
  hypo
agaggggctgacaccgagctcaggctctggagtccacagatcagagcgggactttagacgacccatttacagtccgcacaaggcgcatc

SEQ ID NO: 264075 - DNA, 72 bp, Homo sapiens
  chr11:76447828-76447900
  hypo
gctggcggtgagaccgaatgtgcagagccgacactaggctgtggagacccgagggcccggcaggctcccctg

SEQ ID NO: 264076 - DNA, 55 bp, Homo sapiens; identical to SEQ ID NO: 214499
  chr11:76463185-76463240
  hypo

SEQ ID NO: 264077 - DNA, 143 bp, Homo sapiens
  chr11:76506255-76506398
  hypo
ctggagaggccagcccgagaaaccgtctagtctggtgggtttcaaactgggtttcctaacaccctaggcagggatggtgggcagaagtcgagggcttcaggtccccctcacttcagccagaccaggcccgccttcatctgctg

SEQ ID NO: 264078 - DNA, 104 bp, Homo sapiens; identical to SEQ ID NO: 214500
  chr11:76674834-76674938
  hypo

SEQ ID NO: 264079 - DNA, 120 bp, Homo sapiens; identical to SEQ ID NO: 214501
  chr11:76901057-76901177
  hypo

SEQ ID NO: 264080 - DNA, 166 bp, Homo sapiens
  chr11:76905510-76905676
  hypo
tcacgcccctgaagacgctggagaagtgggcccagctggccatcgccgcccacaagaaggtagaagggctgagaggagtcctagagaagggatgtggacctgaacaaccaaggaggtcccaggcctcatctgaacctctctgttggggctgcgggggatgggatgg

SEQ ID NO: 264081 - DNA, 107 bp, Homo sapiens
  chr11:76924554-76924661
  hypo
cctgctcctgtacaccgtgtttcccaaggttctgccctgtcttcttcttggctccctcctcaaactctccctggaccatctcattcaggccacggtgtcagttccct

SEQ ID NO: 264082 - DNA, 35 bp, Homo sapiens
  chr11:76955354-76955389
  hypo
gcgtgagccaccgcgcccagccctgggctagtatc

SEQ ID NO: 264083 - DNA, 146 bp, Homo sapiens
  chr11:77383098-77383244
  hypo
agctggaaagtcttcgcttgtgtactcgccttatttctttaccacgtcgcaaactcttctgggaaccgtcactttctgagtcttctttgtagttaatttgtcttttctgatttctccttgaccgccttcgccgagtttctacaaaa

SEQ ID NO: 264084 - DNA, 81 bp, Homo sapiens
  chr11:78021125-78021206
  hypo
ccatgcataggataaaatctcgcataacaaagaattgtcccacctacaatttcaatacacgcctctgagaaatgtgggggt

SEQ ID NO: 264085 - DNA, 347 bp, Homo sapiens
  chr11:78380585-78380932
  hypo
gatatcaccgccccgctgcctcaggaagccatcctcatccatcttgtattgcacgtcacccagccgagtgatgcggtcgcggatgtcataccgtagtggtgtgagccgtgcactgttcccagggctcagtaagtgcaggttcccattgaggtcgtagctgtagcgccagagtggcttgtcattgatggagactgtctgcagctggccgtcagcatcatactcataggagtagcgagtggtattggcgtagggtcctaccttcagctccttcttcactactcgccccatgttatcatactggacggtcatccagtacatgagcgagcggaagatctcatactgcactt

SEQ ID NO: 264086 - DNA, 201 bp, Homo sapiens
  chr11:78387183-78387384
  hypo
aggcctcgctcacccgcagccggcgcccaaagacagtgacctggccccgagcctgctctttgcgctggcgccactccaccaggttgaggccgttgtcgatgggcagcgtgacattcctcttgcccacggtggggttgacggtgccagccagcaagtggggctcagtctgcagcgccacctccatgccgttggccagcagca

SEQ ID NO: 264087 - DNA, 73 bp, Homo sapiens
  chr11:78497977-78498050
  hypo
cactcgcacttgccgtcgcggcaggtcccatgctcggcacagcgcgggtggcaggcccgctggtcgcaggctg

SEQ ID NO: 264088 - DNA, 407 bp, Homo sapiens; identical to SEQ ID NO: 214505
  chr11:78534089-78534496
  hypo

SEQ ID NO: 264089 - DNA, 42 bp, Homo sapiens
  chr11:78982381-78982423
  hypo
tttctaaagggctttagagacggcaaagccacttgctcctct

SEQ ID NO: 264090 - DNA, 103 bp, Homo sapiens
  chr11:82843543-82843646
  hypo
aatgaaaatctagttcgtatgattgaacactcacagaaagaacttcagaaggtaagaaaacatattcaaggctctccctctccctctccctctccctctccct

SEQ ID NO: 264091 - DNA, 218 bp, Homo sapiens
  chr11:82931326-82931544
  hypo
tgtctttagtctggcggctgtgctaattgcctttaagtggctgacaggtgcccagtttagcctctgaattctaaggaaggacaggacagaatagcaagtgaaagaggtccgattgtattcaccacgtgacgatctagatgcctttcctggacactcctggcaggctcgccaaaatgtaatgcctaaggttcttacctagccatgccaaagaattggtg

SEQ ID NO: 264092 - DNA, 136 bp, Homo sapiens
  chr11:85247648-85247784
  hypo
acagggaagtgtgaagagagaggcgcaggcaggagctggggctgcgtgcggtgctcacaggccagtgcgggttccaggtgagcgcaggcttggcaagccccgcactcagggcagcgggctgatgcctgctgggctt

SEQ ID NO: 264093 - DNA, 42 bp, Homo sapiens
  chr11:85319011-85319053
  hypo
acattggatttttctcggtcctctttgtggtctaggaggaca

SEQ ID NO: 264094 - DNA, 202 bp, Homo sapiens
  chr11:85564731-85564933
  hypo
gggccccaaagtgacgtcagccccatctcaaattcaaaccccatagtaaacgaacaagatagaccttaactactgactaattctccaaagcaaaaagtcaggaaaataaaaaaatctcgttaagctgtaaaaaataaaaataaaaataaaaatacatatccaggtacatactctttctttctttgagacagaggctcgctct

SEQ ID NO: 264095 - DNA, 169 bp, Homo sapiens; identical to SEQ ID NO: 214506
  chr11:85692740-85692909
  hypo

SEQ ID NO: 264096 - DNA, 180 bp, Homo sapiens
  chr11:85749362-85749542
  hypo
aaaaaaattaaacaaaacaaaacaaaaaaagaataagagttgcatggtaaagtacctgagaatttggcagccactatgccagaagtaggtcagtattttgaacacaagttcaatctcttacaatggtaaatgagccttaaggaatctccagaccccacacccaaagtaagtcaaagtcct

SEQ ID NO: 264097 - DNA, 338 bp, Homo sapiens
  chr11:85906159-85906497
  hypo
taaggaccatcttgagatggcggccaccgagggggtcggggaggctgcgcaaggcggtgagccccggcagctggagcagcccccgccccagccgcacccaccgctgccccaggagcagcacgaggaagagatggcagcagaggctggggaagccgtggcgtcccccatggacgacgggtttctgagcctggattcgccctcctatgtcccgtacagggacagaacagaatgggctgatacagatccagtgccgcagaatgatggccccaatcccgtggtccagatcatttatagtgacaaatttagagatgtttgattacttccgagctgtcctgcag

SEQ ID NO: 264098 - DNA, 279 bp, Homo sapiens
  chr11:85989383-85989662
  hypo
gtagacactgacaacgttatgtgtggtctttaacctgttgtcatgttttttccctagatgtacaacactgactcatcataaatgtggtgctgctattcgacaaaccagttttagcagggatagcagcattcttatagctgtttgtgatgatgccagtatttggcgctgggatcgacttcgataaaatacttttgcctaatcaaaattagagtgtgtttgttgtctgtgtaaaatagaattaatgtatcttgctagtaagggcacgtagagcatttagag

SEQ ID NO: 264099 - DNA, 83 bp, Homo sapiens
  chr11:86267641-86267724
  hypo
ggtaggcgtgtacacgattggcatgaacttctccacgtccgaagtcagcactcggtagaagagcttctcgttccggtcttgga

SEQ ID NO: 264100 - DNA, 174 bp, Homo sapiens
  chr11:86408236-86408410
  hypo
ctagttgacctgaagcggcagggatctgcagtaaaaacttcggagcatagttccgtagctgttgttccaatgcagctggttagatccgactatcctaagctgaggcaaagagtagaaatccaggaaggtctacaagcagacttcaaggacagacagttacgcacagggagttgt

SEQ ID NO: 264101 - DNA, 31 bp, Homo sapiens
  chr11:86464895-86464926
  hypo
taagcactttttggtcgtccttccattctct

SEQ ID NO: 264102 - DNA, 31 bp, Homo sapiens; identical to SEQ ID NO: 214512
  chr11:87434384-87434415
  hypo

SEQ ID NO: 264103 - DNA, 91 bp, Homo sapiens; identical to SEQ ID NO: 214513
  chr11:87434775-87434866
  hypo

SEQ ID NO: 264104 - DNA, 185 bp, Homo sapiens; identical to SEQ ID NO: 214514
  chr11:91435729-91435914
  hypo

SEQ ID NO: 264105 - DNA, 481 bp, Homo sapiens
  chr11:92648642-92649123
  hypo
cccagctttacaatgggattcggaacctcccaaagtcagtccgatgccccctcccgcaacccggtgtgtttgtgtatccccgcggtgcaggccgactgcgcggtgctcttcgtggcaggcggctgggcggaggccggcatcttcaagaacccgcagacccacgagctcgcgctgctggccaactggcgggacgtcacgcagctcatcgtgatcttcaacgaaattgactccaccgagcccgcctacagcggctcgcgcctccaggtgatcaccaaggaagtaagcgcctgcatcaagaagatcggctacaactggctgcctggccttcagtccatctcgagctggcacggcgacagcatgctggagcccagcactgacgcgagtgtggcgcgggtcggcagggacagccggggtggaggcgagcggaccacaccccggactcacctcccctcgacatcccgaagatgccctggttcaagtg

SEQ ID NO: 264106 - DNA, 101 bp, Homo sapiens
  chr11:93065699-93065800
  hypo
taagggtggtggatgcggaggcaggcctcgtgtgctcttctgttaccacaatgcaacctttcttcgccagcttgctccttttttgccgcattgagtatctc

SEQ ID NO: 264107 - DNA, 129 bp, Homo sapiens
  chr11:93212118-93212247
  hypo
cgtccccctcccgcgcctcctctccctgccgatggggtccgcagccggctgcggggctcactcggtgatggtggggcgcgtggccacgtacacaaacaccacgatcaagagcacgaccacggccagcgt

SEQ ID NO: 264108 - DNA, 106 bp, Homo sapiens
  chr11:93214579-93214685
  hypo
ccttgagtgatgcccaccttcgcgggaccgtggtgaggatggagtaggaagctgtataactcagggcttggcacagagcgggcggcgaattcgtgctagctgacat

SEQ ID NO: 264109 - DNA, 76 bp, Homo sapiens; identical to SEQ ID NO: 214515
  chr11:93425626-93425702
  hypo

SEQ ID NO: 264110 - DNA, 454 bp, Homo sapiens
  chr11:93476508-93476962
  hypo
gctctgccacccaggctggagtgcagttgaagcaggatattcctctgaccccttcgtgggtcttgcggctgcggtgcctcacttacttagcccacggctctcaactcctcgcgggagggggggcgcgagtgaatgaggcgggaactggagtgctggaagccacgaactccagtcacccaggcctgctgcgctccaccctttatgggagggtgcgtgggggtgagcagatgctggagccggagcgagcgcttttggtcgccggtaggagcgaactccatgcaggccctgcggctgtgtctaggggatgcccgcgacccctgaagacccacagcctgtcttacaacctgtcatggttgtgaaaagttttgagagaacgtctgcacagtgtctaacggtgtctggtatatagtgtgcactcaaatggtaaccagtttagttgcgatagttggtctac

SEQ ID NO: 264111 - DNA, 347 bp, Homo sapiens
  chr11:93911548-93911895
  hypo
cctgctgctctttgcgatcctcctgtacctgcccccgctgttctggcgtttcgcagctgctcctcatatttgctcagacttgaagtttatcatggaagaacttgacaaagtttacaaccgtgcaattaaggctgcaaagagtgcgcgtgaccttgacatgagagatggagcctgctcagttccaggtgttaccgagaacttagggcaaaggtaacttagccccagcaggcagctcatcgggttttgtaggacaaattctctgcccttctactgccagtctgggcccagagttctcattgctaggaggcggggcaggagtggaagcagggggacgtcatgcacctagt

SEQ ID NO: 264112 - DNA, 87 bp, Homo sapiens
  chr11:94163940-94164027
  hypo
actcttacaaagcttaacttgcagtaaattcctatgtcttttaattaataagaaatttaagtcactttagatcggggccagtaagca

SEQ ID NO: 264113 - DNA, 42 bp, Homo sapiens
  chr11:94276063-94276105
  hypo
agtataggcgtgagccaccgcgcctggcctatacttgatttt

SEQ ID NO: 264114 - DNA, 79 bp, Homo sapiens
  chr11:94390523-94390602
  hypo
actccagaaaattccgtaagtggggctcttgagcgtctacactcgggtcgctcccacactgtggcgtgtacttttattc

SEQ ID NO: 264115 - DNA, 271 bp, Homo sapiens
  chr11:94532870-94533141
  hypo
tggagaaacaggtccggtccacgcagcctcagcagaacaacgaggaactgcccacttacgaggaggccaaagcacagtcgcagttcttcagggggcagcagcagcagcaacagcagcagggggcggtgggccatggttactacatggcagggggcaccagtcagaagtcccgaactgaggggaggcccactgtgaaccgtgccaacagtggacaggcgcataaggacgaggcgctgaaggaactgaagcagggccacgtccgctcgctcag

SEQ ID NO: 264116 - DNA, 37 bp, Homo sapiens
  chr11:94885453-94885490
  hypo
ttgaaagtaggataaaaggccgggcgcggtggctcac

SEQ ID NO: 264117 - DNA, 103 bp, Homo sapiens
  chr11:94895732-94895835
  hypo
aaaaaaaaaaaaaaaaaataggcatcccccaactctgggccacagctggagacctaagtgctgctgcactctggccaggttggacagccgcacttctcttgaa

SEQ ID NO: 264118 - DNA, 93 bp, Homo sapiens
  chr11:94924623-94924716
  hypo
tgtaaaactggctccgcaagaaagactccaggtactgagtgtgtaaactcatgacctgtgtgatgttgtccagacgaccggatgtagagtatt

SEQ ID NO: 264119 - DNA, 34 bp, Homo sapiens; identical to SEQ ID NO: 214518
  chr11:94952098-94952132
  hypo

SEQ ID NO: 264120 - DNA, 203 bp, Homo sapiens
  chr11:95526175-95526378
  hypo
tattcaactgttttcgacattgataaactcatacggagctagttataagtacattgagatgctttacaggcaaagatttttaacaagtagattcataaataaccgtctttgggaagcagtgaccatgtaaatctcaaatgtgaacagcatggaagtagggcgataggtttcagttaggttctaggtaacgtttattgagtgat

SEQ ID NO: 264121 - DNA, 113 bp, Homo sapiens; identical to SEQ ID NO: 214519
  chr11:95631021-95631134
  hypo

SEQ ID NO: 264122 - DNA, 167 bp, Homo sapiens
  chr11:95658584-95658751
  hypo
cagacagatcttcatcggaatcccggttctgtctctacacttgctctgtgctgtggttaagttgtttcacatctctaaaatgggaataaaatgggaataaaaatatctacgtaataggttgtttttctctgtgcagagtcggttgcacagtacggtctcactaagta

SEQ ID NO: 264123 - DNA, 144 bp, Homo sapiens
  chr11:96117187-96117331
  hypo
tctgaagtttttctcgcttttgtgcagctaatgttttttcaggagtcttttgctccatttccactgaagaaccttcatcttcaaccactctacggggacgtttaacacctacttttctaactaggatatcgctgtcatcactct

SEQ ID NO: 264124 - DNA, 51 bp, Homo sapiens
  chr11:97332188-97332239
  hypo
ggccaaagttgcctactccacggaactgtcggaagctggcaacaggtggaa

SEQ ID NO: 264125 - DNA, 180 bp, Homo sapiens; identical to SEQ ID NO: 214521
  chr11:97588956-97589136
  hypo

SEQ ID NO: 264126 - DNA, 37 bp, Homo sapiens
  chr11:97936947-97936984
  hypo
caatgaaacagcctcggcttggcgtaatcggcacgaa

SEQ ID NO: 264127 - DNA, 43 bp, Homo sapiens; identical to SEQ ID NO: 214522
  chr11:102245881-102245924
  hypo

SEQ ID NO: 264128 - DNA, 77 bp, Homo sapiens
  chr11:102246147-102246224
  hypo
ccttattgcatgaccgtgtagcaaaatatttaaagtctggacttctacattgaaacagatttgtgtttaaattctag

SEQ ID NO: 264129 - DNA, 49 bp, Homo sapiens
  chr11:103870883-103870932
  hypo
ctggggtagctgttcgggaatctaggactctgcacgtagccgtttcctt

SEQ ID NO: 264130 - DNA, 705 bp, Homo sapiens; identical to SEQ ID NO: 214523
  chr11:103907385-103908090
  hypo

SEQ ID NO: 264131 - DNA, 201 bp, Homo sapiens; identical to SEQ ID NO: 214524
  chr11:105850438-105850639
  hypo

SEQ ID NO: 264132 - DNA, 42 bp, Homo sapiens
  chr11:107696428-107696470
  hypo
atacttatgctgctggtccacggaccagactttgagtgagca

SEQ ID NO: 264133 - DNA, 87 bp, Homo sapiens; identical to SEQ ID NO: 214526
  chr11:107931201-107931288
  hypo

SEQ ID NO: 264134 - DNA, 34 bp, Homo sapiens; identical to SEQ ID NO: 214527
  chr11:108031057-108031091
  hypo

SEQ ID NO: 264135 - DNA, 199 bp, Homo sapiens
  chr11:108031526-108031725
  hypo
gtggcaagaactgctgaattcgctaatcactaaagcggaaaaaaaaggtgtggttttgaaattaaaactttcaaacttgccttaattttcttctttttcattggtattgatgaatttgtaagatttttactagaaggacgagagtttcgctcacgttcatctaattcctcaattttccgcttttttgtggtgctccttg

SEQ ID NO: 264136 - DNA, 177 bp, Homo sapiens
  chr11:108603172-108603349
  hypo
tttgggctactcattgtgtgcgcacacttggagtataaaatgaatgtttgcctttagacttcggcgtaaatggagacgagaggtactgagtgccaggtgcaagcaaggccttctggaatgctgccttgtcacaatccttttctgtttgacgagatcgatgcagtgaaggacaacaag

SEQ ID NO: 264137 - DNA, 34 bp, Homo sapiens; identical to SEQ ID NO: 214528
  chr11:108674027-108674061
  hypo

SEQ ID NO: 264138 - DNA, 200 bp, Homo sapiens; identical to SEQ ID NO: 214529
  chr11:110144181-110144381
  hypo

SEQ ID NO: 264139 - DNA, 354 bp, Homo sapiens
  chr11:111154359-111154713
  hypo
cttatccagacatagcgatctcagataacaggccaggagcacctcttgttaacagttctatgtatatggagaggtagctccgatgttgtgaaaaagatgcttccttggttaaaatatgaatgccaagagattatttcatttatgtcttcctagcacagcgccggtcaccgggaaggtactcagtaaatgtgaatgaatgaacagacacggtactgtctaaaatgaactcacccctaaaggcgacaatgttttcaaacgttagttatttgggctaatgcaggaatatttcacgcttttcaagacatttctctatttccatgttagcgttggagtcaggcacgcgttagtaacatc

SEQ ID NO: 264140 - DNA, 220 bp, Homo sapiens
  chr11:111500769-111500989
  hypo
cagtcacgcaaagtcggatcaacccaaatgtccatcagtgggaaaatgtatccagaacaaatcgtagtatagtaatacaaaggcagatgattcaaaaaggaaatgaactatttatgcatgcaacaacatgcatacatcttacagacatgtgctaagtaaaagaagctggacacaaaagagtacagattatatatggttctatttacgtgaaattctataa

SEQ ID NO: 264141 - DNA, 140 bp, Homo sapiens
  chr11:111558643-111558783
  hypo
tgaggaaaaaaatttcctgactactaatagtggagttattttattttggtgactaattcttaatcctctcttcatttacagactatcttgctaatcatggccggttaaatgagtctgaagccaggcgaaaattctggcaa

SEQ ID NO: 264142 - DNA, 222 bp, Homo sapiens
  chr11:111574699-111574921
  hypo
acttataggatatacgtatttctaatacctttacgatagtaaaaaagcaaacagtgctcttcaggaagaaacataacaagaaagaatatcaaatgccgccttgtttgctgtgaaagaccaaggctccgggctgtgctgcctttcccccgccacgtagccataagtgaaaccaaactgattctcctgctttgctcactttgcgcccagtgatgtttttctgta

SEQ ID NO: 264143 - DNA, 43 bp, Homo sapiens
  chr11:112066436-112066479
  hypo
gatttcaggcgcgagccactgcgcctggtctgaattacatatt

SEQ ID NO: 264144 - DNA, 69 bp, Homo sapiens
  chr11:112108640-112108709
  hypo
tgaccagagccgaacgatcatttgtattacctcaattgaggtaggaactaccagcgagttataaaaata

SEQ ID NO: 264145 - DNA, 268 bp, Homo sapiens
  chr11:112370523-112370791
  hypo
gtgggaagcggaggcggccaccgcgtgcaggaagggtctcccaggtggccggagaacccacaggcgtgtacggacaaggtgccctgggtgccctggctgacccctggtcagcccggccaggggtagagaccttcccggaaggcgaagatcgcataggtaactgggaaagtgtgttttttgaggtgggggaaccccatgcagccaggtcagggctgcagggtaggccgcctgccccacaatcagagcactgcctcgttacccgctcagg

SEQ ID NO: 264146 - DNA, 209 bp, Homo sapiens
  chr11:113552728-113552937
  hypo
agctcccgtacgggcggcaggcccttctcttcctcctcctgagtgggctcaaccactcgaagccagcacctataacatgctgagcccgcaccgggctctaggaaccagaaatcagagtgaccaggggaaactgggacatcgatatgcatggcttgccggagtaacactacacctgactcaccttcctagcctcccgcaaattgccagag

SEQ ID NO: 264147 - DNA, 235 bp, Homo sapiens
  chr11:113560952-113561187
  hypo
ctggcatgcatcagcccttccgtccaggtagccagcgcaaagcatgcggggggtgagggctccgctgtacacgcaagagctgttgcagagctgagtgctgaacaagggcaccaccgtgtcctggagcatatccgagctgtaagctatgagagacaccgagaaaaactgcagggcacaaagcaaggcccaggcaggcagagcagcaagaggggaggtaattcgaagtcccagagac

SEQ ID NO: 264148 - DNA, 116 bp, Homo sapiens
  chr11:113688515-113688631
  hypo
ccgggagcgggaaccgagctgggcctgagccatatttcacatacctaagcgacaaagacagtggtactctactgcccaaggctgttttgtattttaagagtcgctgacaaaagatc

SEQ ID NO: 264149 - DNA, 34 bp, Homo sapiens; identical to SEQ ID NO: 214530
  chr11:113747597-113747631
  hypo

SEQ ID NO: 264150 - DNA, 173 bp, Homo sapiens
  chr11:113902120-113902293
  hypo
agtcaggggagctccgcagcatccctaatgcggtgctaaattctcagcagcacagtctccgtgttaaagccttcgctggcaattaggttcattaactatcacaataccttatttattactcatcgtgccatatggtttcccagctaaagaatggcgcccgttctcctacagac

SEQ ID NO: 264151 - DNA, 199 bp, Homo sapiens; identical to SEQ ID NO: 214531
  chr11:113921422-113921621
  hypo

SEQ ID NO: 264152 - DNA, 63 bp, Homo sapiens
  chr11:114013829-114013892
  hypo
ggctcctgtgcacacggtgaatgtgtgctggctgatgagggtgaggagcggtgggtacccggc

SEQ ID NO: 264153 - DNA, 375 bp, Homo sapiens
  chr11:114069850-114070225
  hypo
tgggacctgggaccgggatgccagacacggatgctgggccccgggacggggatgccggacatggatgccgggccccgggacggggatgacggacatggatgccgctgggcccagggacggggatgccggacatggatgccgctgggcccagggacggggatgccggacatggatgccgctgggccccgggatggggatgccggacatggatgccgctgggccccgggacggggctgctggacatggatgccgctgggccccgggacggggatgctggacatggatgctgggccccgggatggggatgccagccatggatgccgctgggcagtgggcaggacacagaccttgcccttccccggcctcccaccctag

SEQ ID NO: 264154 - DNA, 92 bp, Homo sapiens
  chr11:114082516-114082608
  hypo
gcgctttataagctcgcgatgaaagctgtaaaacgagatggtcaaggatctggccaggcctggttcgggattatggccggcccctggaatgc

SEQ ID NO: 264155 - DNA, 285 bp, Homo sapiens
  chr11:114103481-114103766
  hypo
gggcacatttgttccgggcctgcgcactggccaggccccattgttctgcctcccacccccatgtgggcccattgtcctcgcccccagcgggtgctgcttactgctgatttatacgggcaggcgtcctgcgggctccaggcttctctgccacagctggcggaggtgcttaaggccttggaccccgtgacctttgccctagtcctgctgtcattttgaaagttacagaccagagggctgcatacctctccggatttactttccaccccaactcatccccggccccac

SEQ ID NO: 264156 - DNA, 666 bp, Homo sapiens
  chr11:114112596-114113262
  hypo
ttttacataccacccgacacagttgcccactacccttgctgctgcgatgtatttgatcaatgtctatcctttagctttagcttccagagctcgggaacgacgtcgattttgcccatcactggggccacatactgggtgctcagtgttgcatagcctgggcccactctggatttgcccctgagcatggggatttggaggtgtgagtcccgacactggctctcactccagatgggtaaagaatgcaccttgtattcccacctttctgaggcaccccctctcctgtctcccacaggcactgacatggccgtcttctgtctgctgtgtgggaagcgcttccaggcgcagagcgcactgcagcagcacatggaggtccacgcgggcgtgcgcagctacatctgcagtgagtgcaaccgcaccttccccagccacacggctctcaaacgccacctgcgctcacatacaggtaggtcagtccagctgatgggtggatctgggtctctgggagccagcgtctatatttacctccaaggacgtaaagtggaggtggtgggctgagtcagccttcagtccttctgctcaaggcttggacgtgcagaggctgcccgtcgtgcaggtaaatgtggacagttctcccagtcccctcctgtggaccgtcggttcaaagtc

SEQ ID NO: 264157 - DNA, 171 bp, Homo sapiens
  chr11:114115566-114115737
  hypo
cccttcccccccaccgccgccttcacccccacccggctgggtggctgccgatgtacgttttaattaccggctccagctgaagtctcacgtggccttggctttatttatttatttataccttaatgaggatactgaatctttgattaaagtcgtaatcgttgccgattcagt

SEQ ID NO: 264158 - DNA, 65 bp, Homo sapiens; identical to SEQ ID NO: 214535
  chr11:114127910-114127975
  hypo

SEQ ID NO: 264159 - DNA, 180 bp, Homo sapiens
  chr11:114284756-114284936
  hypo
cctgtgcaacttatcgcttttcagtgctgtgtaccggccattccagctgcctttgtttcgctggactctcagctgtgtcttctgaactcagtgagtttgccaggctctgcctgccctgtcccccaaccccacacaatgcagcctaaacgttccctcaaggtagcacgcaaggtaatcatg

SEQ ID NO: 264160 - DNA, 79 bp, Homo sapiens
  chr11:114483428-114483507
  hypo
ataatgtgttgcctcgtgggtaaccactgttacccagtatttaataagtgttgcctcgtgggtaaccactgttacctgg

SEQ ID NO: 264161 - DNA, 87 bp, Homo sapiens
  chr11:115939372-115939459
  hypo
tcaaaaaaaaaaaaaaagattttgggaggcgacacaattcggcccataataatccctagccctcacgccacccctcactgaaggtgg

SEQ ID NO: 264162 - DNA, 124 bp, Homo sapiens
  chr11:116132012-116132136
  hypo
tcaatgcattttaattcatacgaagatatttgtctgctgctccattccttcgaggcgcagagacacgttgaacaaaacaagtcagcctcgcgtggagacaaacgctccagcttctccctgaaat

SEQ ID NO: 264163 - DNA, 31 bp, Homo sapiens
  chr11:116256383-116256414
  hypo
gcgagactccgtctcaaaaaaaaataaaaat

SEQ ID NO: 264164 - DNA, 37 bp, Homo sapiens
  chr11:116365360-116365397
  hypo
gttaatgccttccaacgtttttccttctaaaaccttc

SEQ ID NO: 264165 - DNA, 170 bp, Homo sapiens; identical to SEQ ID NO: 214538
  chr11:116591713-116591883
  hypo

SEQ ID NO: 264166 - DNA, 33 bp, Homo sapiens
  chr11:116613907-116613940
  hypo
aaataaataatacattcctgcgcatgcctgtaa

SEQ ID NO: 264167 - DNA, 36 bp, Homo sapiens
  chr11:116672910-116672946
  hypo
gatattgaccaggcacggtggctcatgcctgtaatc

SEQ ID NO: 264168 - DNA, 338 bp, Homo sapiens
  chr11:116691761-116692099
  hypo
cttccacgtcccccgcatgggggcccagtttctgcctgagctgttccatctgctgcaccagggctttgttgaagttttccccgtagggctccacccggcgtcggaactcctccacctgctggtccaggtgcccacccagctctgccagtgacttctgcagcccctcggtgttgcccctcaggttgccacgcacgtcctcggccaagggcgccagcctctgccgcagctcctcggcactggccgagatcctggccttgagctcctcggcgttcttcttcatctggaaggtcaggccctcaagctggtggttgagcttctcctgcgtgtcctgagcatag

SEQ ID NO: 264169 - DNA, 155 bp, Homo sapiens
  chr11:116821480-116821635
  hypo
tttgacagaaggaagccctgcgttcttggctgcagtagcctggacgggaatttccaccttgctgaccagactttgtttcttaccgaatttgcacagatgttcttgaataatgttccttcattttctgcttactcttaggacgatttccagagact

SEQ ID NO: 264170 - DNA, 33 bp, Homo sapiens; identical to SEQ ID NO: 214539
  chr11:116959822-116959855
  hypo

SEQ ID NO: 264171 - DNA, 35 bp, Homo sapiens
  chr11:116960726-116960761
  hypo
aacagttccgtactcgcttccgcaattctattctg

SEQ ID NO: 264172 - DNA, 36 bp, Homo sapiens; identical to SEQ ID NO: 214540
  chr11:117047303-117047339
  hypo

SEQ ID NO: 264173 - DNA, 255 bp, Homo sapiens
  chr11:117054572-117054827
  hypo
cctttctaccccttcgcagaaggtacattttgtgccctgggcctggctagggatggggaggtcttggtcactttctgggagcaagaagagcctgcgtggctgattggtggacctgataggacatgggtttttggctccagtctctcaaaggcctgatcccactgactctagccaagctccaggcaactagtttaccactttgacattttacttccagatgaaccggtcgatcaagggcaccgccagaaaaccctg

SEQ ID NO: 264174 - DNA, 104 bp, Homo sapiens; identical to SEQ ID NO: 214541
  chr11:117056079-117056183
  hypo

SEQ ID NO: 264175 - DNA, 492 bp, Homo sapiens
  chr11:117058317-117058809
  hypo
gcctcaccactgatcgttccccacagagaatgtttctggatctaccgatggtctggttgacagcgctggcactggggacctctcttacggttaccagggtgagtgggccaggctgggaggggcggtgtggtgcaggacggtgttgtctgggtaaaatgtcacggtgggcggttgcctcttctgccagatgctggaacctgggaagggcctgctgtcttcctaacccctctcttccctcatcccctcctccttggccccagttccctggtaactttccctttcctttgaagggcacgaccagttcaagcggcgcctcccctctggccagatgcggcagctgtgcattgccatgggtagacctggggtgggggtagggctgttttgccaatcagtgcctgccggctccggttgactgccggctgtggggccagaaagattctatgtgcatggcttccccatgtaattccagtaattgcccgctcttgtgtcttc

SEQ ID NO: 264176 - DNA, 238 bp, Homo sapiens
  chr11:117062556-117062794
  hypo
ccatttctgcagctcccttccgtgtccctcatcctagacacatcgttcatgtacatgatcgccggactctgcatgctgaagctctaccagaagcggcacccggacatcaacgccagcgcctacagtgcctacgcctgcctggccattgtcatcttcttctctgtgctgggcgtggtgagggcctgacctgctctgctcagcctgtatgataggaaaggtgcacgtgcgttcagacacg

SEQ ID NO: 264177 - DNA, 119 bp, Homo sapiens
  chr11:117068432-117068551
  hypo
ctgcccacctggccccgcccaccagactgaggctcacttcacctctgacctgagcggcccccagctcaccaagccacaggcccaagcagtgctccctgatgcggcgtttataatccgct

SEQ ID NO: 264178 - DNA, 335 bp, Homo sapiens; identical to SEQ ID NO: 214542
  chr11:117073748-117074083
  hypo

SEQ ID NO: 264179 - DNA, 70 bp, Homo sapiens; identical to SEQ ID NO: 214543
  chr11:117074288-117074358
  hypo

SEQ ID NO: 264180 - DNA, 139 bp, Homo sapiens; identical to SEQ ID NO: 214544
  chr11:117075033-117075172
  hypo

SEQ ID NO: 264181 - DNA, 234 bp, Homo sapiens; identical to SEQ ID NO: 214545
  chr11:117076078-117076312
  hypo

SEQ ID NO: 264182 - DNA, 115 bp, Homo sapiens; identical to SEQ ID NO: 214546
  chr11:117097881-117097996
  hypo

SEQ ID NO: 264183 - DNA, 120 bp, Homo sapiens; identical to SEQ ID NO: 214548
  chr11:117188182-117188302
  hypo

SEQ ID NO: 264184 - DNA, 76 bp, Homo sapiens; identical to SEQ ID NO: 214549
  chr11:117188542-117188618
  hypo

SEQ ID NO: 264185 - DNA, 150 bp, Homo sapiens; identical to SEQ ID NO: 214550
  chr11:117267876-117268026
  hypo

SEQ ID NO: 264186 - DNA, 231 bp, Homo sapiens; identical to SEQ ID NO: 214551
  chr11:117335664-117335895
  hypo

SEQ ID NO: 264187 - DNA, 266 bp, Homo sapiens
  chr11:117347130-117347396
  hypo
gaagaggcctcctgcgtcacaacgacagctcacgacatctcaacaccagtccctctgacagccacactccagctcccacagaacaccatgccatgccaggccagctcaccccatggtggccggcacagcccctacaccagcttgcgctatgaggctggtgtaggggagggccatcctcaaagaacccatccttgctctgtgcttggtgaacaggggcgaaatgtggtgtctgcatttttaaatctgcacagcgccatctgatagat

SEQ ID NO: 264188 - DNA, 254 bp, Homo sapiens
  chr11:117376184-117376438
  hypo
gcgctcccggctcacggtggcggctgcgttgctggcgatgcatgtatagttgccgttgtgcttgagggagacgctagagatctgcagggagctcatgaattccttgctctcgatggtcacgcccgagcctgagatgatcacctgtccgtccttcctccaggtgatacggatgggcatgtcccccgaggacaccacacagggaatgtagagcagctggccgatggaggcgggtgggaattcgaagggctggatca

SEQ ID NO: 264189 - DNA, 198 bp, Homo sapiens; identical to SEQ ID NO: 214552
  chr11:117380436-117380634
  hypo

SEQ ID NO: 264190 - DNA, 381 bp, Homo sapiens; identical to SEQ ID NO: 214553
  chr11:117389166-117389547
  hypo

SEQ ID NO: 264191 - DNA, 180 bp, Homo sapiens
  chr11:117391899-117392079
  hypo
gcactggtaggccccggaatggctcttctgggccgaggtgatgagcagcgtctcgttgctgagcccgcggatggagatggcctcgtcaggcagcaccagctccgtgttgcgataccagcggatggtgaactctggggagcccgtcagggcacaggagaggatgaccgtgctgccaatgcc

SEQ ID NO: 264192 - DNA, 114 bp, Homo sapiens
  chr11:117403090-117403204
  hypo
ctgtcacagagaggcgtgccccattgctctgccgggtctccccgctatacttgtgcttggtgatgcagcgataggtggagagggcgtcctccttctgtacgtcagagatgtaca

SEQ ID NO: 264193 - DNA, 206 bp, Homo sapiens
  chr11:117488134-117488340
  hypo
tgcatgatatttcacgctgactcggtctctcaaactgttattccatctacacacggcactgtgggatgcctgcgatattttataaagttaataactttctcttaattggatgagtttatagaatagtctgcgcaattaacaataattacgccaaagacactttgattccaaggatgctccacaaacattggcgcattaagccattt

SEQ ID NO: 264194 - DNA, 82 bp, Homo sapiens
  chr11:117497923-117498005
  hypo
cagaacggagatggcgggagttttcccttccgcccccggtctgctaagacactgttagaggttacaagtaaccccgcctctt

SEQ ID NO: 264195 - DNA, 243 bp, Homo sapiens
  chr11:117498035-117498278
  hypo
aaagctccttcctcaccaccatctgaggtgggttttcattcgccctgccctgtttcccatgggtcttgggcacaggggctggtgctgatttccagggctttgactgaaggcctctatgtcgtccccagcctgagtacaatgccgggagaggtgcccagtcgcactgctcgcagccccacatcaccacactcgtgccttcccctgagccgctgcacccaccattccctacggcccagtgcctgg

SEQ ID NO: 264196 - DNA, 100 bp, Homo sapiens
  chr11:117949567-117949667
  hypo
ccacaacagccccacgcacatgcaccgggttcgcagagattacacagctaatacatgtgagtaggttctggaaaccatgaagccccgcacagatgtaagg

SEQ ID NO: 264197 - DNA, 125 bp, Homo sapiens; identical to SEQ ID NO: 214554
  chr11:117957555-117957680
  hypo

SEQ ID NO: 264198 - DNA, 32 bp, Homo sapiens; identical to SEQ ID NO: 214555
  chr11:117977482-117977514
  hypo

SEQ ID NO: 264199 - DNA, 39 bp, Homo sapiens; identical to SEQ ID NO: 214556
  chr11:117994509-117994548
  hypo

SEQ ID NO: 264200 - DNA, 87 bp, Homo sapiens
  chr11:118088742-118088829
  hypo
taaatatcatttcctcgggaaacctctcttcaaccactcatcccaggacaggtccccaagccacatgtctttttttttattttgaga

SEQ ID NO: 264201 - DNA, 200 bp, Homo sapiens
  chr11:118133141-118133341
  hypo
gcataacctaccagtgtgcacgacgctgagccggatctcccctatcaccccatcaacatcaggtgggttcttcacctggcaggtgtatgtcccattgtcgtcgaactgcagtttccagagaaggatggaggcatcgtaccgctcaggattcccatcccaagacacccggtccttaaaccgcccactcatgggttggaagg

SEQ ID NO: 264202 - DNA, 44 bp, Homo sapiens
  chr11:118772066-118772110
  hypo
cagcatctgctgctgcggggtcatctgcacgttcaggttcatgt

SEQ ID NO: 264203 - DNA, 511 bp, Homo sapiens
  chr11:118773643-118774154
  hypo
acaggtaaggggacgttccacccagtcctgctgctcacagaggcgccacgctcacctggtcaagcttggcccggggcacgttctgctggtggtaggcgaggatggagtcggcccggccctgcagcactgcctctgcagccctgcacagagtgggggcaccgacagctcagagaggtgagcaggagggagccccaccctcacccaccccaccctgcccctgcacggggctccctcggaaccccaggctgagaggtgctgggcagagagagagagagacttggcctgcccaccaggcacttacgtgttggccaggtgggtggtgaagacatatacgaactgcgagggaggctttccggggacgcccccgcccccgcccccgcccccaggggcatcaggccgaaggccaggaggagggccgtgcggggcgcctggcacgctgctctcgctgaggggcagttgggtggtttggccgggacccagctgtggggccgccatggctgggtctgctaca

SEQ ID NO: 264204 - DNA, 85 bp, Homo sapiens
  chr11:118780943-118781028
  hypo
agcctccgccccgacgggcggcagagacagaattcactaaaaggctaggtagcaaaggtgccgtgtggggcggctgtgaggtctc

SEQ ID NO: 264205 - DNA, 31 bp, Homo sapiens
  chr11:119040421-119040452
  hypo
cgagtggtggctcgcgcctgcagtccccgca

SEQ ID NO: 264206 - DNA, 261 bp, Homo sapiens; identical to SEQ ID NO: 214557
  chr11:119044183-119044444
  hypo

SEQ ID NO: 264207 - DNA, 54 bp, Homo sapiens
  chr11:119052936-119052990
  hypo
agctggaccgcaaccggcagctgcaggagctgaacgtggcgtacaacggtgctg

SEQ ID NO: 264208 - DNA, 308 bp, Homo sapiens
  chr11:119243048-119243356
  hypo
tggtctgggcccccccgcatccagcccaggttggggcaaggcctgcaggagacactggcatgtcacatagaaaaggagaaggtgagaagagtggttcattgggcgcagcagagcattcctgagaacactactggactatcctcgagtgcgcgggccctgagtgggctttctaggcagagtgggaaggcccctcccctcggcacggagccccaggggcaccagatgtgccaggatgacttctcttgtttgtctccaccaggagcagcctgtcagtcatcagtcaggttgggagtcgagccctcagcctg

SEQ ID NO: 264209 - DNA, 190 bp, Homo sapiens
  chr11:119244100-119244290
  hypo
gtaggcaccatagcccgacttggcatagtgggcatctgtgtagcgggccgattctgtgtagcgcttcagggtggaggagagctgggacatccttcagggtggcactcagtggggactgggagcctcatgggctgaaagacaaggagtgtagttgtcagagggccctgccaggtgtcgggctcccacagac

SEQ ID NO: 264210 - DNA, 298 bp, Homo sapiens; identical to SEQ ID NO: 214572
  chr11:119290804-119291102
  hypo

SEQ ID NO: 264211 - DNA, 55 bp, Homo sapiens
  chr11:119352936-119352991
  hypo
ctgggcgttggggtccgacccaaggggctgccccaggccccgcatgttcatgcat

SEQ ID NO: 264212 - DNA, 90 bp, Homo sapiens; identical to SEQ ID NO: 214573
  chr11:119405812-119405902
  hypo

SEQ ID NO: 264213 - DNA, 85 bp, Homo sapiens; identical to SEQ ID NO: 214574
  chr11:119493220-119493305
  hypo

SEQ ID NO: 264214 - DNA, 67 bp, Homo sapiens; identical to SEQ ID NO: 214575
  chr11:119493693-119493760
  hypo

SEQ ID NO: 264215 - DNA, 225 bp, Homo sapiens; identical to SEQ ID NO: 214576
  chr11:119505167-119505392
  hypo

SEQ ID NO: 264216 - DNA, 277 bp, Homo sapiens
  chr11:119506102-119506379
  hypo
atcgccaacgaatccgagttctggggataaatccttttctcgcccggtaattgctctgtaagccaaaaggaattacactttttggcaaccacaacagagcctccccaggacgccagagcttcccttccgctggtgacttccacacaccaccccgcaggccgttcacaagcctctgtccatccagacgccctaaccacggcccctgggctcaggacatagggtgtaggtgctctcttcgccccctcaacctgccgctcctgcccgtggctggtgggtg

SEQ ID NO: 264217 - DNA, 68 bp, Homo sapiens
  chr11:119506662-119506730
  hypo
gcaagaccgagaagcgtcagtggggattagggccagctgcagctgttccattccgtcacagagatttt

SEQ ID NO: 264218 - DNA, 155 bp, Homo sapiens
  chr11:119506967-119507122
  hypo
aatagtggtctccccgctcccctacctcccttgctttcgggcctgggatgatgtgctctctctctcctgaggcaggcgtgagctggtgtctgcaggtgggagattctcgccctgcttggtgcttagaatgccctggcccccgacgcaggactctg

SEQ ID NO: 264219 - DNA, 302 bp, Homo sapiens
  chr11:119523963-119524265
  hypo
cttacacaggatcccggcaagtaaaaatgatcacggttgagacctatcctctcgcttcctatgtcaggtggctcccggggcatttctgtggattaaactgtagaaggcactggaagcctttgctccggggtgaatgtggcctcacattcctgcagctggcctcagtgtcccctgcaggagggtggcccggcgcggggatcccaacccagccctgccctgagggacacatccccgttcctccagacccgcgcccctccaacaggctggtgggtcgtggtgcgagacgacgtcaatcagagaga

SEQ ID NO: 264220 - DNA, 149 bp, Homo sapiens
  chr11:119531882-119532031
  hypo
aaggtagcgcatcacgctgggaggggagggtggcagcttctcctggattcttttcatttatacaaaaaaggaaaaccaattttttcgaccaagaatcccattcctcacagcaggggtcagaagagcagcagcaccgagtgggacagggg

SEQ ID NO: 264221 - DNA, 122 bp, Homo sapiens; identical to SEQ ID NO: 214579
  chr11:119532474-119532596
  hypo

SEQ ID NO: 264222 - DNA, 784 bp, Homo sapiens; identical to SEQ ID NO: 214580
  chr11:119535381-119536165
  hypo

SEQ ID NO: 264223 - DNA, 186 bp, Homo sapiens
  chr11:119536817-119537003
  hypo
gcacaagcacagggcaaggacggcagaaatgggggtgaaagcatgtgcgtgtgtgcgtgcgtggcaatgtcgagtacacacaagtgggcacatgcacaggcatacacgcttgccgtcatagcaagcctgccacccagagagcacatgctgggagggcctgcatgcctgtgccgacatgatgaacat

SEQ ID NO: 264224 - DNA, 159 bp, Homo sapiens
  chr11:119540985-119541144
  hypo
atgtattttatctattgtctttcctcctatgcgaaaacgtaagctccacaaggatagggactttttgtctgttttgctcatggatttataccaagcacctagaccgcttgtcatgtggtcaatgttcaagaagtatctgttggacgacagaatgaattc

SEQ ID NO: 264225 - DNA, 99 bp, Homo sapiens; identical to SEQ ID NO: 214581
  chr11:119541630-119541729
  hypo

SEQ ID NO: 264226 - DNA, 637 bp, Homo sapiens
  chr11:119548209-119548846
  hypo
gaggagggacagtggcgcccaccccaggaggcccctggcagccagccctgctcacactgcacgttgagagtgaggctttccttgaagcggtccatgtggtagttgacgatgcaggccaaggactgctggtgggcttccctgctgggcaccaggcggtagcggctgatgaccgtcactgtgccattggggttccggatctcctggtactctgcctcaccttttaaccgagtttcccaggataccacactgggaggcttcccattggctgaggtgcaggtggccaccaggaccttgtcatcctgccccttcttggctcgaagcactgcctgggtaccctctatccaattggtgggtttggctgcgaggaagcagagagagtgatgggactagccctgttgacttgtccaagatgcaccggccaaaagggcgtggcatccgtcaggccttgtcttcaggtccccttggccatccctgcctctcagctgtgctgcaccaaagactgtcccagaacctcttgcaggaagttcatcatgtctaacgttatgtcctccctgccctactagtcatatccctgtcatcgagcttaggcctcctggagtcccagcatgtctaaggcaagcagcgcaggtggctcctt

SEQ ID NO: 264227 - DNA, 383 bp, Homo sapiens; identical to SEQ ID NO: 214583
  chr11:119549111-119549494
  hypo

SEQ ID NO: 264228 - DNA, 161 bp, Homo sapiens
  chr11:119549862-119550023
  hypo
tttttggttgcttttcgagcagagccccagcctaggagccatgcactggctgctttgtcttcctgggccttggtttcctcctctgttatatggggtggagaatccagtcctctctacctcacgaggttactgggggaaacaaatggcgtgatggacgagaa

SEQ ID NO: 264229 - DNA, 314 bp, Homo sapiens
  chr11:119574541-119574855
  hypo
agagtaatgagatgcgcggctcagcctgttcagcctgtcacctccactgcatccaggatgccgggctcggaactggcacacaggtgctcaggaatggcgctcacagggagagagtggcctttatcatgcccatcctttcacactcggagtacgtgttagtgtgcctttttgccacctcttctccaagacaatggttcctcctggcaaatctccccagctttacccaggaacacggttctccgggcaagaagctgcctcaaaaggctcacccaaggtcacacagctgggtgcacccctcacgccccaccatcatt

SEQ ID NO: 264230 - DNA, 73 bp, Homo sapiens; identical to SEQ ID NO: 214585
  chr11:119576250-119576323
  hypo

SEQ ID NO: 264231 - DNA, 500 bp, Homo sapiens; identical to SEQ ID NO: 214586
  chr11:119579305-119579805
  hypo

SEQ ID NO: 264232 - DNA, 58 bp, Homo sapiens
  chr11:119588092-119588150
  hypo
agggaataaatctgggaagttgctgggtaggagggtgcctcaacggcagggctggcca

SEQ ID NO: 264233 - DNA, 158 bp, Homo sapiens; identical to SEQ ID NO: 214588
  chr11:119588398-119588556
  hypo

SEQ ID NO: 264234 - DNA, 135 bp, Homo sapiens
  chr11:119589825-119589960
  hypo
gcctccaaaagcttcggattttggattagggatgttcaacctgcgccaagactctctgaagattcagcactaataactccccaaatgcatcaggcatggacaactacaacaccaggttatcgctgcaccactgaa

SEQ ID NO: 264235 - DNA, 147 bp, Homo sapiens; identical to SEQ ID NO: 214589
  chr11:119590581-119590728
  hypo

SEQ ID NO: 264236 - DNA, 40 bp, Homo sapiens
  chr11:119602212-119602252
  hypo
gattacaggcatgagccactgtacccggctgcactctctc

SEQ ID NO: 264237 - DNA, 102 bp, Homo sapiens; identical to SEQ ID NO: 214593
  chr11:119606539-119606641
  hypo

SEQ ID NO: 264238 - DNA, 32 bp, Homo sapiens
  chr11:119681395-119681427
  hypo
tccccggagaacaacggcgctgtcctattcct

SEQ ID NO: 264239 - DNA, 130 bp, Homo sapiens
  chr11:119757773-119757903
  hypo
gaactccagctgggccgagtgaccttgtaggttttgaggaacacgggcagctgggaaacagaggaatggactggccaaatttgtaccatcttcccagctggagggaggtgggagccgggcctcttctgag

SEQ ID NO: 264240 - DNA, 326 bp, Homo sapiens; identical to SEQ ID NO: 214594
  chr11:119970226-119970552
  hypo

SEQ ID NO: 264241 - DNA, 120 bp, Homo sapiens
  chr11:119993681-119993801
  hypo
gagtatctcttcatggtgtccggtgcactccactcacccccgaagctgttcgtgtagttgttcacatagcgatggtcaccacctaggaagcagagggtcgggtcagcagaggagccaggt

SEQ ID NO: 264242 - DNA, 331 bp, Homo sapiens; identical to SEQ ID NO: 214595
  chr11:119994862-119995193
  hypo

SEQ ID NO: 264243 - DNA, 714 bp, Homo sapiens
  chr11:120008004-120008718
  hypo
gtagcagatgcaggtctggtcggtctggcagaagagctccatcgtcttgccatgcacgggacacttgcgggcctcaaagtcccggatgggctcgagcagctggtggtctcggaaggcggcgccctccaggtggggcttgagatgcagctcgcagaaggaggcctggcacaccaggcaggacttgaccgccttctgcttgttgccgatgcaggagtcgcacagcacctcctcggagccggacttggaccgtgaaaaaaggcccgtgtcggcccgggggtagctgttccgccgggtctccccgggctccatgatggacaccgtgggcttccgggactccgagaaaatggacttgcgcagctcgcccttttcggcaaaggtaacgggtggcttcttggcagcccccagctggagccctgcgtacggcgacctcttgccttccatagagtccatgctgaagtagttggagttcttgtcgtccccggactcgacaaactggatgatgggtcgccgccactcattgcccgcgaacagggcgctcctaccttcccctggcttcagggcgctgcccaggctcttgccctcagctgcctccccgccgtgcccgttggtggtcttggcatccttgccgtcagccttggtgccattctccaggctgccactggggcccgacgggctccgggcatccctggcttctgggctcgacccgttgctcct

SEQ ID NO: 264244 - DNA, 77 bp, Homo sapiens
  chr11:120041663-120041740
  hypo
actcactgactccaccgaggcagcactggctgcagctgggattggcccagacatttaagagccgaggactaagcaat

SEQ ID NO: 264245 - DNA, 153 bp, Homo sapiens
  chr11:120043749-120043902
  hypo
cactcagtaagtcagcggtggccataggatcctgatcccaatctagcgattctcccaagaaatcacacttgactttggggtggcctcctctgtgtgaacctagtccagggcgttgaaagggcacagaacagagatcctcgggaggaggaggaa

SEQ ID NO: 264246 - DNA, 40 bp, Homo sapiens
  chr11:120221759-120221799
  hypo
taaaaatgggtgaaattggccgggtgcggtgactcacgcc

SEQ ID NO: 264247 - DNA, 180 bp, Homo sapiens
  chr11:120338503-120338683
  hypo
ttagtagctttagtacggggtatatcaaactatgaatcatagaccaagtcatgctcactgtctgtttttgtaaataaagttttattggagcacagccgtgctcgtctgtttatgtactgtccctgattgcttttacattataacagcagagtcgagtagttttatcggtgcccatttggc

SEQ ID NO: 264248 - DNA, 225 bp, Homo sapiens
  chr11:120367536-120367761
  hypo
ggttactactgtatcgattaaactccgctttgtttcagagatgatcataatttggccagcttcatttccctctactgtccatcgtgagccctcttccccagtaaggcttaggctcctccaagtctccccacctcacattctaggccgggactccacctttgcttttcccttagtctgaaatgtactttggaaacttccaagatgagtattaaaagtaatagctgg

SEQ ID NO: 264249 - DNA, 61 bp, Homo sapiens
  chr11:120384060-120384121
  hypo
ctgagagacaaatccggtcctgcctgactccctgactgtctgtgctcgcgtggtcaggggc

SEQ ID NO: 264250 - DNA, 72 bp, Homo sapiens
  chr11:120446084-120446156
  hypo
ctcttcatggaacttgtctgcgtcgttttacttctcttccctctggcgcacgggtcctctcaccatctatct

SEQ ID NO: 264251 - DNA, 112 bp, Homo sapiens
  chr11:120772901-120773013
  hypo
gcaaacatggaattggctgccgctcccattccctgaacaccttttctgtatcagaccccgtgttcagcggtttgccacattctcacctcgcgttcacagcacccctgctcca

SEQ ID NO: 264252 - DNA, 32 bp, Homo sapiens
  chr11:120908934-120908966
  hypo
agttcttggattacaggcgtgaaccactgctc

SEQ ID NO: 264253 - DNA, 35 bp, Homo sapiens; identical to SEQ ID NO: 214602
  chr11:120950504-120950539
  hypo

SEQ ID NO: 264254 - DNA, 616 bp, Homo sapiens
  chr11:120998441-120999057
  hypo
cttcctttccccgcgtcagtgtccacagtgcagtgcccgagcttcagccactactccgtgtgcacaagcagctgccccgacacatgctccgacctgacggcctcgcggaactgcgccacgccgtgcacagagggctgcgagtgcaaccagggcttcgtcctcagcaccagccagtgcgtccctctgcacaagtgcggctgcgacttcgacggccactactacaccatgggggagttcttctgggccacggccaactgcactgtgcaatgcctgtgcgaggagggcggggacgtctactgcttcaacaagacctgcggcagcggggaggtgtgcgccgtggaggacggctaccagggctgcttccccaagcgggagaccgtgtgcctgctcagccagaaccaggtgctgcacacctttgacggcgcctcctacgccttcccctccgagttctcctacaccctcctgaagacctgccctgagcgcccagagtacttggaaatcgacatcaacaagaagaagcccgatgcaggacctgcttggctgcggggacttcggatcctggtggccgaccaggaggtcaagataggaggcatcggggcttcggaagtcaaggtaa

SEQ ID NO: 264255 - DNA, 378 bp, Homo sapiens
  chr11:121000556-121000934
  hypo
ttctgtctccccaacggcaagtgcacggacaacctggcagtgttcctggaaagctggacaactttcgaggagatctgcaatggagagtgtggggacctgctgaaggcctgcaacaatgactcggagctgctcaagttttatcgaagccgctccaggtgcggcatcatcaacgacccctccaacagctccttcctggagtgccatggggtggtgaacgtcactgcctattaccgcacctgccttttccgcctgtgccagagtgggggcaatgagtcagagctctgtgactctgtggcccggtatgcaagcgcctgcaagaatgcggacgtggaggtggggccctggcggacctatgacttctgccgtaagttggggttg

SEQ ID NO: 264256 - DNA, 381 bp, Homo sapiens
  chr11:121023446-121023827
  hypo
gtaatgaagaaaggcggcagacctcctggctcctgcctctccccgtgcctttcatctccctgagtaggtgagcaatggccatgagaaaaccctcctcggtgccttgtgatcgtgcgagtcttgacttgtctctcttgttccagctgtcacctgccctccaaacagccattacgagagctgcgtgagtgtctgccagccccgctgcgccgccatccgcctgaagagtgactgcagccactactgcgtggagggctgtcactgcgacgctggctacgtcctcaacggcaagagctgcatcctgccccacagctgcggctgctactccgatggcaaatattacgaggtatgggaggccagcccggccttttcctccttgccaat

SEQ ID NO: 264257 - DNA, 35 bp, Homo sapiens
  chr11:121323736-121323771
  hypo
cacacttagcattattagcacaataaaagtgggca

SEQ ID NO: 264258 - DNA, 216 bp, Homo sapiens
  chr11:121348737-121348953
  hypo
tctcaaaaaaaaaaaaaaaaaaaagaaagatctttctgccagtttctcaccaactctttctttttcatctccttttctctgtattccaggtgtacgtgtcttacgactatggaaaatcattcaagaaaatttcagacaagttaaactttggcttgggaaataggagtgaagctgttatcgcccagttctaccacagccctgcggacaacaagcggg

SEQ ID NO: 264259 - DNA, 360 bp, Homo sapiens
  chr11:121349214-121349574
  hypo
aactcttgtaataccttgcccgacttgcagatggcaaaaatgtttcccaggtacactgagaataaccttgcaatcaaattcatgttttctaggatactatcagtgtgtctgcttgcgtgcttatgcgtgcttgtatgcgtgtgtgtgcatgtacgtgcttgtgtgcgtgtgagtacctgtgtgcgtgtgggtacctgtgtgtgtgtgcttgtgtgcatgtgggtaactgtgtgtgtgcttgtgtgcgtgtgagtacttgtgtggatgtgcatgcttgtgtgcgcgtgagtacctttgtgtgtgtgcttgtgtgcgtgtagttacttgtgtgcgtatgggtacctgcgtgtgtgtgcttat

SEQ ID NO: 264260 - DNA, 103 bp, Homo sapiens
  chr11:121516994-121517097
  hypo
tgagaccaggagatggactgataccctgcctcaaaaataataaaataaaataaatcacactggaggattcatcagggaatcaactttccgattacagagagcc

SEQ ID NO: 264261 - DNA, 240 bp, Homo sapiens; identical to SEQ ID NO: 214607
  chr11:121665534-121665774
  hypo

SEQ ID NO: 264262 - DNA, 147 bp, Homo sapiens
  chr11:122621690-122621837
  hypo
attattgagatagagttgagcgaacatcagcatttcagtgcctgacaagacggatgtgtacctgcaggtaggcggaaagaaccgtaccacgcgcctgggttttgggccatgttgtttacgcttcccggcctctcatgttttgggaaa

SEQ ID NO: 264263 - DNA, 260 bp, Homo sapiens
  chr11:122628720-122628980
  hypo
ccttctttaaacactcaaccactccttttgagtcgaagcttcctgggggcccttcgtctggcaagggcttaggtgtctttaccaagtgccaaattgccagattccctgagcgctgggaactgaggcccagaaggaaggcgaagatgtggccgggggtggggccggtctggggggtatcgtagttgggccagcagacacacggctggctagagagttttggacccctctcacttcctggcgtgtttggtcaagtcccattt

SEQ ID NO: 264264 - DNA, 104 bp, Homo sapiens; identical to SEQ ID NO: 214609
  chr11:122632802-122632906
  hypo

SEQ ID NO: 264265 - DNA, 120 bp, Homo sapiens
  chr11:122945970-122946090
  hypo
tatatctatcttcctgagtagtactgcattactctctcttattgtatgaccaaccctcttgatatatttgcagttgtagttactgaatcacagacttcgccagcaagtggccagggtttt

SEQ ID NO: 264266 - DNA, 39 bp, Homo sapiens
  chr11:123027337-123027376
  hypo
gctggaagaaggaagcgtcatttgcgagtctttacctgt

SEQ ID NO: 264267 - DNA, 44 bp, Homo sapiens
  chr11:123614727-123614771
  hypo
cctgacaagtttggcgaagaaaagagattttgtcaatggataaa

SEQ ID NO: 264268 - DNA, 180 bp, Homo sapiens; identical to SEQ ID NO: 214610
  chr11:124071495-124071675
  hypo

SEQ ID NO: 264269 - DNA, 99 bp, Homo sapiens; identical to SEQ ID NO: 214611
  chr11:124387388-124387487
  hypo

SEQ ID NO: 264270 - DNA, 184 bp, Homo sapiens
  chr11:124638960-124639144
  hypo
caggcaagaaagggggtgtgcgtgctaacagcttcttgaaaacgggctctggaaggagcttgatccttgagacttttcctgctacgttctcataccttctaggggaggagctttgggaacattctggcgaggcttcacgtggccattctcagtctgtcctctcgctctccttgactttctttgc

SEQ ID NO: 264271 - DNA, 141 bp, Homo sapiens
  chr11:124792306-124792447
  hypo
ccatggggttcttccgttcctgctcaccacttcgagggagggtgtctgctgcacaggggagagaagcgggtggctggcccaggtacagactctccccaccagccggcacctactctctgtgcttcccgaatggcccgccac

SEQ ID NO: 264272 - DNA, 309 bp, Homo sapiens; identical to SEQ ID NO: 214617
  chr11:124794645-124794954
  hypo

SEQ ID NO: 264273 - DNA, 324 bp, Homo sapiens
  chr11:124948906-124949230
  hypo
tggccagagccacttcctagcgtggtgggggcagaaacatggtagggagttgaggtggacacagaggagcttaaccgcagatccaactttctcttccccagtggggtttttggggagcggcttccgctccgttactacctctcagctggaatgctgctcagtggccttttcacctcgctctttggcctgggatatttctggaacatccacgagctctggtactttgtggtcatccaggtatgaatcaccgtcttgcacttgggcctgtgttgccgtctcgggaaggacctgggagaccgcagctcacagcgggtgggagcctgt

SEQ ID NO: 264274 - DNA, 163 bp, Homo sapiens
  chr11:125211589-125211752
  hypo
gttgatgaagggaacggcatggctgtgaaatacagaacaccttggtagcggacaagaaacacagcaaaaggcacgagagcatcttaggttgggcgacggagggagtatctgctggggtgcgagtctgtgtggccgcgccacgtcctctcgcatcatggctgtc

SEQ ID NO: 264275 - DNA, 81 bp, Homo sapiens
  chr11:125758706-125758787
  hypo
attcaagtagtaccataacttctaagtcataatccaattccaggagtttattccaaggacataaatcggacaagaatgcaa

SEQ ID NO: 264276 - DNA, 70 bp, Homo sapiens
  chr11:125791137-125791207
  hypo
acaaggagaggagccggactatgagacctacctccaccgcatagggcggacggggcgctttgggaaaaaa

SEQ ID NO: 264277 - DNA, 429 bp, Homo sapiens
  chr11:125817624-125818053
  hypo
tctgtccagggagtgcgaggtggctccgtggagctggcctgtggctcagggcctgccccgctgctggtcctctggagcttcacccccctgggctccctggttccccggcctgtggccgtcaccgatggagccatgtccaaggtggaggccatcgcctcggctctgggagtcgtgagtctgaggaacagcagcctggtgctgggggagcttcacgagggtgcccgtggccacttcctatgccaggttctgcacgtggctggcggccagctccacgctgcctactcccacctcacgctggctgtgctgggtgagggcctggccccagctgcagctggtccgcgggctgctttggatttctctggaagtgtgctgcccattccctttgtgtgtgtgcgggacccaggttctaaagggcgccccactccaggg

SEQ ID NO: 264278 - DNA, 178 bp, Homo sapiens
  chr11:125824157-125824335
  hypo
atcgagccagagagccgaggacggcggctggggggcttggaccccggggtcctttatgccttccgcatcctggctctgaatcaccacactgcaggacatccctctgaggtgaagataccaggtgccagctaatgccagggagggacccaccttttctccaaagcgctggcccctggtt

SEQ ID NO: 264279 - DNA, 108 bp, Homo sapiens
  chr11:125827969-125828077
  hypo
cagagctctgcccgcggaggccagagagcagcttctctggctgcggagttggagcctcggaggaattccacggcagggatagatcacagcatacggaacgggactggt

SEQ ID NO: 264280 - DNA, 31 bp, Homo sapiens; identical to SEQ ID NO: 214619
  chr11:125836034-125836065
  hypo

SEQ ID NO: 264281 - DNA, 178 bp, Homo sapiens; identical to SEQ ID NO: 214620
  chr11:125902449-125902627
  hypo

SEQ ID NO: 264282 - DNA, 40 bp, Homo sapiens; identical to SEQ ID NO: 214624
  chr11:125945776-125945816
  hypo

SEQ ID NO: 264283 - DNA, 156 bp, Homo sapiens
  chr11:125954978-125955134
  hypo
gccgaggctgcttcttgacctataggtcagcgcctgtgataaggcaaacttggggagaacagccctgtccggtgggtagacagcctgcagcagtgagcgccccctttcctgggtggcggcagaacagctccgtgcgcagctgctgtccccagcact

SEQ ID NO: 264284 - DNA, 197 bp, Homo sapiens; identical to SEQ ID NO: 214625
  chr11:125971129-125971326
  hypo

SEQ ID NO: 264285 - DNA, 124 bp, Homo sapiens; identical to SEQ ID NO: 214626
  chr11:125988689-125988813
  hypo

SEQ ID NO: 264286 - DNA, 182 bp, Homo sapiens; identical to SEQ ID NO: 83335
  chr11:126030295-126030477
  hypo

SEQ ID NO: 264287 - DNA, 466 bp, Homo sapiens
  chr11:126055110-126055576
  hypo
cagtgctaagcagcgcctctcaaatccagcccacccatttattttccaaaactcctgggagagacgacagagggacagaggcgcagggctctgtggaagccaggcctgcacccctcccccaggcggcctcctctccactctgggaccagccctgccttcccccaggctgcggtgggtcccgtcggagcacagcggctgctcataaagctcccgatgaaaggcacgctggacaggagaggtcaaggttcacacaagcagctccgccttctgtttcatttacaagtggcagtcacctcattaaacccggtccccctccacccctaccccaccctcacccccagcccaccgcacgcatccccacacccggtccctcccgctcagccctggccggcacagagaggctgggttggagatcgagtggtccagagatgggcaggtgacctgctggacacgcccacccataccc

SEQ ID NO: 264288 - DNA, 78 bp, Homo sapiens
  chr11:126083887-126083965
  hypo
cttaatgtttctccggtgagtctaggcacttggtgatttaaagtagagttgttctcagtataaagaatttatgtggcc

SEQ ID NO: 264289 - DNA, 44 bp, Homo sapiens
  chr11:126085298-126085342
  hypo
ttttaagatttctggccaggcgcggtggcttacgcctgtaaccc

SEQ ID NO: 264290 - DNA, 419 bp, Homo sapiens
  chr11:126272980-126273399
  hypo
gtagcagccagccccggaagccctggaatgcctggggccactgagcaatcctcaccctcagccccacaaggggagggcgtggctcgtgaaattcctgattgggtatagcccagcaagccccaagactcgcccagtttgcttagcgcaacactgacgctgttttggaatgaagacaagacaatgtagaactttactggggaagaggtcgaagaagggctaattgtcttgttgttcaagactggttagcgctgctcacctctgacgctgctcacctctgacgccaaaggtttttccctggaaggcagccctggaggatacctgtgtatctgtctttcacaaaaggtgaaatgagctctttgtagtgtttcccgcccaggctgcattttagaatcacagaggaggtacggcgctgatttgtt

SEQ ID NO: 264291 - DNA, 125 bp, Homo sapiens
  chr11:126278421-126278546
  hypo
cctggcggtggggacgctgcccgagtcaggacctcacgctccttgatgtccgcctggcagtcctaaagaggctgtgaggggacagcatgaaccgggctcccggaagtcagcgccttaggctgccc

SEQ ID NO: 264292 - DNA, 100 bp, Homo sapiens
  chr11:126578518-126578618
  hypo
ggcaccggcgaactcgagagccaagagcggcactcccacctgggcactccttgctgatggaccgggacctcctctcccatttctccggggcctccagggc

SEQ ID NO: 264293 - DNA, 206 bp, Homo sapiens; identical to SEQ ID NO: 214629
  chr11:126619095-126619301
  hypo

SEQ ID NO: 264294 - DNA, 32 bp, Homo sapiens
  chr11:127323962-127323994
  hypo
cctggcatcatgcacgtcgctgacactggttc

SEQ ID NO: 264295 - DNA, 100 bp, Homo sapiens
  chr11:128290555-128290655
  hypo
taaaaactccccagcgactaaaggtgaaacaccttagaagcaaggagggccatcggagcctgaacctgagctgtttccatgtgtgcgtacagccttgtgg

SEQ ID NO: 264296 - DNA, 273 bp, Homo sapiens
  chr11:128350030-128350303
  hypo
cccacccacagaaacgtgcagatggagttggcctaagcagcgggagggcgcctacctgtgtagccagctagggcagcagcaggaatgacaggcttgtccttattgaggtcagcacggtcccgcacatagtccttgaaggtgcccttgggcttgtggttgggcagggcagccggatagtcctctgagtcgaagctgtcataggagggaacacgctgcaggctgttgaaagatgactggctgctccaggactgggtgaggcgatcacaactatcg

SEQ ID NO: 264297 - DNA, 38 bp, Homo sapiens; identical to SEQ ID NO: 226548
  chr11:128563857-128563895
  hypo

SEQ ID NO: 264298 - DNA, 386 bp, Homo sapiens
  chr11:128634600-128634986
  hypo
ccctgagcggcagccgtggagccccatggccgcacgcagggcttgcgctggctggaggaggcacggtgcttgggagctgcaagaatggagggaggactggcaggcgagcgggcgaggtatggctttccttctttctctccctgagcagtgggaggagggccagctgggcaagtgtggggaaccaggatggtgccagcccttctccctaaggacacccgcctgcaggtcctagtgcagaagcctgggaccgaggacagggccattttccagaggagaaacaccctggcgggcgagcggccaaaccgatcacctgtccagctggagagcaggtgtgtgcacagggccgggggagggagagaggaggagggaagcggaactgggagaac

SEQ ID NO: 264299 - DNA, 160 bp, Homo sapiens; identical to SEQ ID NO: 214632
  chr11:128737284-128737444
  hypo

SEQ ID NO: 264300 - DNA, 788 bp, Homo sapiens
  chr11:128812234-128813022
  hypo
cgttcaccaggggacgtgagaaaggggctggcctgtggaccaggactgacccaggtctgagccccagctcagcggtcggctagctgtgcgagcttgcgcagtagctccccaagtgtggctcaggacgcacagcatcggcgtcagcatcgcccaggaacctgttagagatacacatttttggccccaacctgcatcgaccaagtcagaaattctgcagtgtgtgttttcgtaagtcctccaggtgactctgatgtactctcagggttcagaaccattgagagagagcagtttagctgacctcctccaggcctcacctgcgcatggtcacgactgtactttccgcacacagtcgccgagatgcgtgtgaaaccccaagcacaaagcagagtgaatcgcagtggccagagcatacctgaagcaccagcgctggtcccctccctccccctctcctcacctgcctcctaggagtcggagggtccgtggaaatggtctcctcctgcacatctgtgctgctgtgactgggtgcaggtctgagcagaggctttcggagtgagctgagcaggcgagcccgagcacggcctctcagggagcgagcccataggctggggagccgtccctggagatgcccctgggctccttgcggggcatggctgagttcctgcctgtccttggcaggcccgcagtggtggggtggctcaggcagttacccttttcacaaccagtgctgctgggggtgaaggcaacgggtgggtgagcacggacagtgtgagccacgtggccgggagctg

SEQ ID NO: 264301 - DNA, 79 bp, Homo sapiens; identical to SEQ ID NO: 214635
  chr11:129207798-129207877
  hypo

SEQ ID NO: 264302 - DNA, 159 bp, Homo sapiens
  chr11:129315219-129315378
  hypo
ttggttatcagcaatcttttcgtgagtcagatgattaaggaatcgacaggcagcctcctctgccagcaccgcccagtgcccgtgggccaatgcgtgtgccttcgtctctgacgtcacttgtttttcaccagcaacagcgttgctggcatggttgtgggc

SEQ ID NO: 264303 - DNA, 184 bp, Homo sapiens
  chr11:129575147-129575331
  hypo
agtgtattgtgtttgatgctcggttcattttttaatattgcgaaggaatttataaatacaaaacaaatatcgcttgatggtgcacacctttgagaggcaaggatctgaccgatgagtacttgcctgtgcagaccacagccttaataatcttctaacccatggcgaaatccttctgggatgtcta

SEQ ID NO: 264304 - DNA, 94 bp, Homo sapiens
  chr11:129686910-129687004
  hypo
gattacaggcgtgaaccaccgcgcccagctagaaatggccacttctttcacgttctcttcgaccgctttctgcggtgtctgcccttttcctcct

SEQ ID NO: 264305 - DNA, 174 bp, Homo sapiens
  chr11:129732117-129732291
  hypo
aaggcccatttccccgcactgcatcctacctctccccactgccaacctcatcccgtgccagtctacttgcccatcacaagctcaacctgggaggcccattcacctctgctctctgcaatgcaggcctcccacctcctaagactggatcgcccccaggctcgccaggatacatca

SEQ ID NO: 264306 - DNA, 299 bp, Homo sapiens
  chr11:129742115-129742414
  hypo
gagaatacgagttccgcgagggcaaggacttagtctgtttaatgtaccattaaatctccaatacttaggacactctctggcttaatgtttgttgaacaaaaaaaaaacattactttatcgttatgtggttccatttctccacctgtaaataataagagtgcctaccccacagagctaagaagattagactatttaacaagcaaaaaatgcttaacgcggtgcaggcacacaggaggcactcctatcagtattagttgctatactgcttacgattctttgaagttcgatgattattcttt

SEQ ID NO: 264307 - DNA, 288 bp, Homo sapiens; identical to SEQ ID NO: 214637
  chr11:129775501-129775789
  hypo

SEQ ID NO: 264308 - DNA, 125 bp, Homo sapiens; identical to SEQ ID NO: 214638
  chr11:129785494-129785619
  hypo

SEQ ID NO: 264309 - DNA, 73 bp, Homo sapiens; identical to SEQ ID NO: 214639
  chr11:129802032-129802105
  hypo

SEQ ID NO: 264310 - DNA, 147 bp, Homo sapiens; identical to SEQ ID NO: 214640
  chr11:129803839-129803986
  hypo

SEQ ID NO: 264311 - DNA, 270 bp, Homo sapiens
  chr11:129816769-129817039
  hypo
gcctgatgccccttcgtccctgtgtgacccccagcgagcttcccaatcttctgagcttgtttactcatcagtaaatcagaaaacgaaggagagtgtccctcaaagggctgcagtgaaggccaggtgggatgaagcaagcagagaatgtagcacagttggctgcacacggaaggacctgacgcacgggagctatgttcacacacacgcacacgtacacagacacacaagatggacacagcttccctgggggagacccgtgcccacacttac

SEQ ID NO: 264312 - DNA, 98 bp, Homo sapiens; identical to SEQ ID NO: 214641
  chr11:129859713-129859811
  hypo

SEQ ID NO: 264313 - DNA, 41 bp, Homo sapiens
  chr11:129897979-129898020
  hypo
tgtatccaagagatgaaaagttacagcgctcaccactattt

SEQ ID NO: 264314 - DNA, 190 bp, Homo sapiens; identical to SEQ ID NO: 214642
  chr11:129902831-129903021
  hypo

SEQ ID NO: 264315 - DNA, 36 bp, Homo sapiens
  chr11:129968002-129968038
  hypo
ttaaaacatggatatttggccgggcgcggtggctca

SEQ ID NO: 264316 - DNA, 36 bp, Homo sapiens
  chr11:129968278-129968314
  hypo
acagagggagactccgtctcaaaaaaaaaaaaaaag

SEQ ID NO: 264317 - DNA, 605 bp, Homo sapiens
  chr11:129993351-129993956
  hypo
ctggcctgagctggagctttcggccaccgggcctccaggctccgtccagtctcaggcctcccccagcccatcccccagctcgccagcctgtagcattttgaagcatttgacgtcactgcctctgtcctgctgacactctgaccattttcacacagctgtctgctcccaggaggcgatgacggggccctgccgggccgtgatgcctcgttggtacttcgacctctccaagggaaagtgcgtgcgctttatatatggtggctgcggcggcaacaggaacaattttgagtctgaggattattgtatggctgtgtgtaaagcgatgagtaagtcctgcctcgcgctggtcccgtgcggcagcaccgtcctgtctggcgtccgtctccctgccgtcttcgtggctgcatctgtgtggtgtccctgcccactcgggtgtttgctgtcggtcgtcttcccctcatctttgtgctttctagatctaggctttgctctcctgccggcagtggtaagctcagttctcgtgtcctgtgctcaccgtgtgtctggtggtgcttggtggtgatggtgcgtacccaccttggtatagcgggcagcacagccaggggctt

SEQ ID NO: 264318 - DNA, 80 bp, Homo sapiens
  chr11:130013341-130013421
  hypo
aggtggcagggagcgcggcagccctggcggagggatgcaggtgggccggaagatcccacgattccgatcgactgccaagc

SEQ ID NO: 264319 - DNA, 120 bp, Homo sapiens
  chr11:130017431-130017551
  hypo
tgagccaccgcgcctggctgggggcatgacattcttgaggaatctgtcagagatctgtggccaagatacaagataacccagatctgattgattttttttttttttttttgagacggaacc

SEQ ID NO: 264320 - DNA, 282 bp, Homo sapiens
  chr11:130059523-130059805
  hypo
tggcaggcccaggtgtgccccgagccgcccatgtgtcctggagtcgctctgggcgcacgtgggggaaatggggcccagagctccgcctcaggctcccgctctctccccagcgagggcagcgtcatcgcctactactggtctgagttcagcatcccgcagcacctggtggaggaggccgagcgcgtcatggccgaggagcgcgtagtcatgctgcccccgcgggcgcgctccctgaagtcctttgtggtcacctcagtggtggctttccgtgagtccgagggc

SEQ ID NO: 264321 - DNA, 616 bp, Homo sapiens
  chr11:130060258-130060874
  hypo
tgaggtccacacccacggggtctcagggtcctcccccagctctgcccagccctgcccccacacgtgccctccttcttgtctcctgcgcagacagctgcagctttggcctgcacgcccgcggtgtggagctgatgcgcttcaccacgcccggcttccctgacagcccctaccccgctcatgcccgctgccagtgggccctgcggggggacgccgactcagtgctgagcctcaccttccgcagctttgaccttgcgtcctgcgacgagcgcggcagcgacctggtgacggtgtacaacaccctgagccccatggagccccacgccctggtgcagtgagtaccccggggggcgggtagggctgtgggagcttggcggctgccctgtagggggccagcttcttcaacgattgggatacagtttatgactcttggccgcaggccactgctaaacatccaggcagcaggaggcacgtgtggtgtgatcctcagctgcagctccaggggagtctgggaggtgatttttctcagccttggcaaagcagaggaaggctctatagtccccagataccaaatccagcctgtgcggcctgtgccctgaaccgccggagagaaggcact

SEQ ID NO: 264322 - DNA, 480 bp, Homo sapiens
  chr11:130067710-130068190
  hypo
gcctcaggcctgcctgtgcccgcagcatgcccggggcagttcacgtgccgcacggggcggtgtatccggaaggagctgcgctgtgatggctgggccgactgcaccgaccacagcgatgagctcaactgcagtgagtcaggctgggagccccggtctccccaccctccttccccaccctgcccgcgtcccatggccctgctggctgactgccgaggcagaaaggccggaggtggtgggagtttttgctctcggccctgtgtagagacctctggccccactccccaccctgccatatggagatcttggcctgtggggcaggtggtggggtatctcggaagtgctgaggtcagcttggtagctggtggagcagggccccttgggcctctctgtagatcagaaagcggtccccaggtagctctgatcgcctgggcatcctggggaagcagtgagtgatgagggcctcacggccgacctcccctt

SEQ ID NO: 264323 - DNA, 84 bp, Homo sapiens
  chr11:130074709-130074793
  hypo
agaaaaaagaaaggccagaaggtgatggacgctggggcagtgagagtggaccagggctcgggtgggcacgcgagtgatgtggag

SEQ ID NO: 264324 - DNA, 42 bp, Homo sapiens
  chr11:130075918-130075960
  hypo
taggatgcagtcaagggtcacgccttgtatttagtcattagg

SEQ ID NO: 264325 - DNA, 660 bp, Homo sapiens
  chr11:130079179-130079839
  hypo
gccagagcccactgagtagacgcggattacccgtttgtcagccccgggcatctgggctgttccagagttttctagtccaatgacccgtggggagcgtctcgaatgacgctgccctcgaagcagcccggctctcagccccgtcctgccctctccccaggcactggcgcgctgatcctgcaaaagggtgagatccgcgtcatcaaccagaccacctgcgagaacctcctgccgcagcagatcacgccgcgcatgatgtgcgtgggcttcctcagcggcggcgtggactcctgccaggtggcccccggggcaggagggcggcaggtgggccccgggagaggcgggactggggactcacggcagggcttgtctccgcccagggtgattccgggggacccctgtccagcgtggaggcggatgggcggatcttccaggccggtgtggtgagctggggagacggctgcgctcagaggaacaagccaggcgtgtacacaaggctccctctgtttcgggactggatcaaagagaacactggggtataggggccggggccacccaaatgtgtacacctgcggggccacccatcgtccaccccagtgtgcacgcctgcaggctggagactggaccgctgactgcaccagcgcccccagaacatacactgtg

SEQ ID NO: 264326 - DNA, 241 bp, Homo sapiens
  chr11:130089773-130090014
  hypo
atctagagggtactcactggcgtctgtttgccaggccttgttctaggaaccaggagtaccgctgggatcctccgaataacgcctggagggcagcgaggtgcagggaggggaagggacgcgcatggcaagctcctgcctcgcatccccacgcaccgagagccctcctgcctgcacgtctaccacaggcggaaggagggaaccttccagaggcagagggtacgggctgagtggtttgtaaaca

SEQ ID NO: 264327 - DNA, 173 bp, Homo sapiens
  chr11:130250620-130250793
  hypo
cagtgaggtgggtgccggagcagcgcactggagcagcacactggagcaccgcaccagtgtttgtggggctcagaggagggcaccaatgggtgcagccatgcgaagagcagtgtcctgggggcccttggagagaggctccagcacccttccagagcacccgtggggtgcctggg

SEQ ID NO: 264328 - DNA, 44 bp, Homo sapiens; identical to SEQ ID NO: 214651
  chr11:130264261-130264305
  hypo

SEQ ID NO: 264329 - DNA, 81 bp, Homo sapiens; identical to SEQ ID NO: 214654
  chr11:130356098-130356179
  hypo

SEQ ID NO: 264330 - DNA, 374 bp, Homo sapiens
  chr11:130781407-130781781
  hypo
gggagcagagaaccttgaaacggcattctcctccccgatccctcccataaaccaacaggccaatcagcgtggctcgacgtgggaagcaagcgggcagtaggggttggggaaactcctgacttttgatgaactttcgtagatctggtttctcctccagacgggtctgcagattcaagaactcccgatagcgacgattcacagtgtggtaggccagctgctgcaggccgctgctgttttcaccgtcaagggctgtctcgtactgttcaacgaacaaattgattgactcaatcagccgggtttcagcaatcttctattctggctttactgactacttggtcaatggccacatagcaagagtacgaaactaagaacaa

SEQ ID NO: 264331 - DNA, 264 bp, Homo sapiens
  chr11:130785377-130785641
  hypo
catgactgtccatcacgctcatccttctccgaagctcctggaccaaccctttcatggctgcctccatttcttcctcaaaggctggctcctggctcacggaacggtaccaagataacacaaaatctcgaataatcatctggatggtgcggttgatctcccgttccagctgcctttctgcctcagggcatggaggacaggtggccaacgggatgaagcgttccagatgcagtcgacctgaagccactccagcgaggctggagccca

SEQ ID NO: 264332 - DNA, 200 bp, Homo sapiens; identical to SEQ ID NO: 214656
  chr11:131648918-131649118
  hypo

SEQ ID NO: 264333 - DNA, 130 bp, Homo sapiens
  chr11:131707599-131707729
  hypo
acccgagggctatgcgtggtgttgcgggagacctgtcattgctgcctgccgcgatgccaggccccacgctgggggagccacccgggtcctcacctggagatgtggctctctgtggcgacgtgccctgacg

SEQ ID NO: 264334 - DNA, 212 bp, Homo sapiens
  chr11:133076714-133076926
  hypo
cctccacactctcacgatgtccacacagctacggtgacctattcatgtcttaggacgggtaggtggagggagcctgggatcaccaatgactgagaagcgaggcccggatcacgtaatccagatgttgctcctgaaatgcactcacgtgatctctcagaggaacgccatagaaaatctccttctaagagccgggcgcggtggctcacgcctgt

SEQ ID NO: 264335 - DNA, 68 bp, Homo sapiens
  chr11:133233052-133233120
  hypo
agggaggacagcaaaggccccgcggctactggaaaccccatcatgtcgctgagcactgggctccactt

SEQ ID NO: 264336 - DNA, 374 bp, Homo sapiens
  chr11:133703493-133703867
  hypo
cccactccgcggccgcgcggcgccctgatcgcgcgtctcaggccccgctggaacccggggcctccctgcccgctccactccttcccgcggcgcacccccgccctccgcctgcccctgccctgctggccccccgccaggcagcctctcccgcatcggagaccacccgcccggttttcatgtcccggtttggctgggtgtctaaactccgcctctcgggatgggacagagccccaccccacctcgcagtggacaccccaggacagtggcttggtcttcacaacactgggtgcggttcatggagcagcacctcgcattgctccctgcagtgacccacgcaggaggccgcctgccctggtggacgtgggcacaccctc

SEQ ID NO: 264337 - DNA, 33 bp, Homo sapiens
  chr11:133704391-133704424
  hypo
ccaaactccagatgcgcgcgagagacagacagt

SEQ ID NO: 264338 - DNA, 922 bp, Homo sapiens
  chr11:133734501-133735423
  hypo
gcctgatcccacgccgccactcacagacccttcgttgaccggcagcattgaacaggaaaaaaaaaaaaagatgaaaacacagaaaaccccaaaaacccagacggggagacgatgtggggaagagaacgtgctgggagcctcagtagccagtctcctcctcgtagtaagcggaatattcaggggcctctccagggccaggacggtcgcctgcacccgagggagccccatcggccactgggccttgcgggcagtacttggggtcgtatatctgccggcccaggccaaagacctggccgctctggttggcgccctgcgcgtagcccatctgcagggacatgaaagagttgttacacttgtcggttcccagcttggtgtcatagatgtaccgccgggtcccgggagccgtcgtgcccacctggctggcacacttgtttgcacccatctggaggctgatggtcgagcggtccatggggggcaatacgtggttcttggggtcatagagatgcctcctcgtgctgtacgcggtcatgcgggactggctggtgcatttgtgggtgcccatctgcagcccgatgacgcactggcgggcattcatggtggcgtcctcaaagtcccactcctgcttctccgagtgcgtgtcaccgatgtccgcccctctctgcggccccttagtcttggccttccctgccagggcgagaagagacacctgcacctgcatcgtgttcccactctcagacaggtcgttggcctcaaacaggtccacggggttcatgccgtaggttttctagctggtgccagttctgcacggagcggttgatcttggggtctgagcccggctgcagcttgttcatgagtgtgcgtaagataatccaatccttcaggccctaatggaagtcgggacgatggagaggccagtgagtcc

SEQ ID NO: 264339 - DNA, 79 bp, Homo sapiens
  chr11:133771363-133771442
  hypo
ctgcccatcttgcccggcactcatctcttgccctcccgctccccacacccgagtgccactcgcccgaagctcccagtct

SEQ ID NO: 264340 - DNA, 34 bp, Homo sapiens
  chr11:133776833-133776867
  hypo
tgagcagcacatcacgacgcgggggcagagggtg

SEQ ID NO: 264341 - DNA, 469 bp, Homo sapiens
  chr11:133777670-133778139
  hypo
ggcaggatccagagcgtcccaggccccagcagccagaggcgccctagcttcacctgagctcatccccctgcagctcaggtccaccggaggacgaaggccccggggcagagaagagtcggcaggcagcacgtggtgagtgcgggaaagccacaggcggctccgcacaagtggtaattaatcaatctggagaattagctcccacaaaagcaaaggaggatccaatcagccgctgtggaacagcactgcacagagtgctgagccggggacggtataaatagagccggcagcttggcgctagcacaggtggctccgcagtggggagactttggccacagagctcacggcctggctgggcggaagggcgccgacggatgcgctggacatgtgcaccagaggcttgctttagccccgcggctgagttagcctctactcctgcagcgtgagccacgctggaaggaagaaagatgca

SEQ ID NO: 264342 - DNA, 1044 bp, Homo sapiens
  chr11:133790244-133791288
  hypo
aggtctgtcctgccacttggcggcggggggcgctgggacagggcccctgccgggcgacttgcctgcccaacccttcggtgcctccagagacaggatgcccgggtaggccgcgggcacctgcagggaggtggggggcagtcctcgggggaggccggccttgggctgcagactctcgggcacatcacagggtggcagctggtgggggaacatcatcgctggggtctccagccccccgaaggggaattctggccggccccagggctcaggggagcgccctcctgtaggtgtctgagtcaagggcagcgtgctgttggatgcattctctccattctcctcggggatggtggggtggccaaagggcccctcggtgggcaggggcggggacgacatgacggagctcagggggctgcccacttctggcacgtagaacgggggcggctccacctccccagggctgctgctgctgaggtacccataatactggccatggtggaagggccggggggcagggggccgggcctggcctgtggcctgaagccgaccttccaggccaccggggccctccagcccgcggggctggaaccgagggctgtatgctggtggtggcaggtaggactcctggctggatgacagaggggtgagctgggacttcagggcggccacagatgtgggcaccagtgggtcctcgttctcctcgtccgactggcggaactcggggtacatgtccgtctcctcggcgaaggggaagccctcgatgcgcctgctcttcagcgagggctccatctcggcagggtccatcacgaagcggccgtcagggcctctgctgatgagctcgatgggcgtggtggcctctgcctcggcctctgccttggccacgctgtacttcttgctgctgatggcccgcttggtcttcttgtacagcgacagctccttctcacgggtggggctcagcatcctcttggccgcgggctggccctggtcgtcggaggattctgacggcgctcggagcgtgcggatgctctcggggctcaccttgccagagga

SEQ ID NO: 264343 - DNA, 54 bp, Homo sapiens
  chr11:133795668-133795722
  hypo
tgccggggatgccatcgtcgagcaactcccagcgctctgcgacacggaactcca

SEQ ID NO: 264344 - DNA, 183 bp, Homo sapiens; identical to SEQ ID NO: 214663
  chr11:133799603-133799786
  hypo

SEQ ID NO: 264345 - DNA, 259 bp, Homo sapiens
  chr11:133800161-133800420
  hypo
tagcgatgtgacgccggagaaagcattcgggccacggcaacctctgcttcgaggaacctacactagagaaaccccagctcgcacctcccgagttgtgaaggacgagctgtgcagaccacttggaacagaacctaaaactggtggtaaaggctccaaaagcattggctgtgactgtgattatagccgtcaggacccagaaggacaggctgagagggcccaggcgaaggtcctgggacacgcgcttcgggcaatcggaaac

SEQ ID NO: 264346 - DNA, 100 bp, Homo sapiens; identical to SEQ ID NO: 214665
  chr11:133804995-133805095
  hypo

SEQ ID NO: 264347 - DNA, 379 bp, Homo sapiens
  chr11:133805532-133805911
  hypo
aggcggagggggagcgccccaggctgttgctgggcacacaggtgtacttccccgagtcctccggcttcacccggaagatgatcagggtcccatcgattaggatgcgcaccctcagcttcaggtcgctgcaaagcggcatggggacagggggttgggcgagcagaaggggatcttgccgcagacacacagtcaccgtcactgccccagatgtggcatggagagcccatgcccctggcatccccagggcccctccatgcagaccctggccttggcatgtgagacacacggaccagactgcccacctcccccagctccaagagccacgggcagcctgcccgtgcaatttctgctcaggggccctgcccgtgggggctggggt

SEQ ID NO: 264348 - DNA, 246 bp, Homo sapiens
  chr11:133915023-133915269
  hypo
gtacaggagggaggcggctagcatcgctggaatgcgttgtctgtgtttggggcaagtatgattacatatgggagagcacactgcctgagagcttcccacattgaagccacaagcaaagatgacgttccatgcatgctggcttccagtcctcacagctcgtcttcaaggcaaatgctcttcccagccttccctagcattctgtgacttgctcagggctaccgctggcaggtgcgaatcctgcattca

SEQ ID NO: 264349 - DNA, 166 bp, Homo sapiens
  chr11:134011307-134011473
  hypo
ttccccactgttgccggtacatggacagggagagagggaggagaggggggagaggggctggagaggttgcctggccaggcagactgcactgaatgccaggcgagcatgggcggtatctgagggcccgctgtgaggctctcaggggaggtgccgtggctgcatctat

SEQ ID NO: 264350 - DNA, 187 bp, Homo sapiens; identical to SEQ ID NO: 214669
  chr11:134015727-134015914
  hypo

SEQ ID NO: 264351 - DNA, 138 bp, Homo sapiens; identical to SEQ ID NO: 214670
  chr11:134023320-134023458
  hypo

SEQ ID NO: 264352 - DNA, 52 bp, Homo sapiens
  chr11:134027875-134027927
  hypo
cctaagctccgactccgatgcctgctctttgactccacggctttcttgacag

SEQ ID NO: 264353 - DNA, 35 bp, Homo sapiens; identical to SEQ ID NO: 214671
  chr11:134071993-134072028
  hypo

SEQ ID NO: 264354 - DNA, 94 bp, Homo sapiens
  chr11:134075571-134075665
  hypo
tcaagaagaaatttctacaatgcccagacttgatccatttttagtgatgtttatctgtaacattacatgaagactattgcgactggcatatgag

SEQ ID NO: 264355 - DNA, 97 bp, Homo sapiens; identical to SEQ ID NO: 214672
  chr11:134083475-134083572
  hypo

SEQ ID NO: 264356 - DNA, 178 bp, Homo sapiens; identical to SEQ ID NO: 214673
  chr11:134088871-134089049
  hypo

SEQ ID NO: 264357 - DNA, 37 bp, Homo sapiens
  chr11:134152957-134152994
  hypo
agaattttttttttttaagacggagtcttgctctcgt

SEQ ID NO: 264358 - DNA, 36 bp, Homo sapiens
  chr11:134153234-134153270
  hypo
ggcatgaatcaccgcgcctgaccaaaaaatgttttc

SEQ ID NO: 264359 - DNA, 62 bp, Homo sapiens
  chr11:134182296-134182358
  hypo
agcggccagtcctacgggcttgtcctgtatgagaagtccatctgctccggaggccgcctccg

SEQ ID NO: 264360 - DNA, 386 bp, Homo sapiens; identical to SEQ ID NO: 214674
  chr11:134212673-134213059
  hypo

SEQ ID NO: 264361 - DNA, 32 bp, Homo sapiens
  chr11:134222550-134222582
  hypo
ttttttttgagatggagtctcgctcttgtcgc

SEQ ID NO: 264362 - DNA, 32 bp, Homo sapiens
  chr11:134222822-134222854
  hypo
tgagccactgcgcctggcctcaatatattttc

SEQ ID NO: 264363 - DNA, 168 bp, Homo sapiens
  chr11:134227491-134227659
  hypo
tgcagagaaggagagccccacgagaggagagtgcagctccctcagggacgtcctgctccactcatgcttccctggtgtcggggcggaggcgcccatgtgtgactcaggtgggcaaagagaagcagcagcgtccagcctctgtggtccggaagctcttgggagaattca

SEQ ID NO: 264364 - DNA, 386 bp, Homo sapiens; identical to SEQ ID NO: 214675
  chr11:134228005-134228391
  hypo

SEQ ID NO: 264365 - DNA, 233 bp, Homo sapiens
  chr11:134232150-134232383
  hypo
ctacctttcttatttctctccgagggtagtttgctttttacaaaagcgctgcccgcgttcccttccccggcgctgcccgcgttccttccccggcgctgcccgcgtgtttttctgctggctgttccactccatctcctgcgcgaggggatgctctggatcagccgctacccagcagcttaggaaagaggctctcggctgccactcggagcgccgggtgtgggagaggctgttga

SEQ ID NO: 264366 - DNA, 420 bp, Homo sapiens; identical to SEQ ID NO: 214676
  chr11:134252615-134253035
  hypo

SEQ ID NO: 264367 - DNA, 216 bp, Homo sapiens
  chr11:134317568-134317784
  hypo
agcagtcttcaggttctctgcgtgcgagctgacgcagcttactttgggccaggtgcactggatgcgccctcgctccctccgtggggccctggctggtgtcggagccctagcgcagccatctcacaggtagaaacgcccgcgcggggcgctcactgcctcggactcggcccttccgctgcgaggccctgctgtctcgggttcccccatcagttttgg

SEQ ID NO: 264368 - DNA, 57 bp, Homo sapiens
  chr11:134356383-134356440
  hypo
ggggtactgctgtgggcatgcgagtgcttgctccccggggcactgctgtggacatgt

SEQ ID NO: 264369 - DNA, 196 bp, Homo sapiens
  chr11:134378732-134378928
  hypo
gggaggtgcatgtgccgcacgggtgcgggaagtgtgtgaaaagtggttgtgtgggggcagggtgaaggcctaagaggcagctgccattcaccaatctccttgttggtgttcagtcttgtatggcagcttcctttagcttccctcttctcagaaatattcatggttctgagcccacgctttccgtaatgtggattca

SEQ ID NO: 264370 - DNA, 329 bp, Homo sapiens
  chr11:134401569-134401898
  hypo
acctccagtgcagccacctgcgggggagtggccttgctaagtcccatctgacgcctacagcggcctcactcagcaagacccatctgacgcctacagcggcctcactcagcaagacccatctgacgcctacagcggcctcactcagggcccttctctggcccccattgctcccgggaccaagtacaccctcctcggctgctgtgagagtccacacccctgagcccctcctcggtgaccggcactgtctgtcccagtctcccaggtctgccggaccctcttcctgccctcctgtgctgacacccctgaccgctgcaggcccagctcaggtg

SEQ ID NO: 264371 - DNA, 403 bp, Homo sapiens
  chr11:134458220-134458623
  hypo
gagtgctgcatctgcgatgtgaacctgtgctggattccctgctgagagctgcacctgtgatgtgaacctgtgctggattccgtgccgagagctgcacctgcgatgtgaacctgtgctggattccctgctgagagctgcacctgcgatgtgaacctgtgctggattccctgccacgtgctgcacctgcgatgtgaacctctgctggattccctgccgagtgctgcacctgcgatgtgaacctgtgctggattccctgccgagtgctgcacctgcgatgtgaacctgtgctggattccctgccgagagctgcacctgcgatgtgaacctgtgctggattccctgccacgtgctgcacctgcgatgtgaacctgtgctggattccatgccacgtgctgcacctgcg

SEQ ID NO: 264372 - DNA, 344 bp, Homo sapiens
  chr11:134526969-134527313
  hypo
gagcccgagagccgcggagaacacgtggagctcttgcagtggcgaacacgtttcttcctaaaggagacacacagcaattttgctttccatgtccattcttgggattgtctttcgtgaatgagttaacggacgcagagaaagcactgagtcttcccagagggccagtgaggggccagctacgcaaggcttcccatccctggggcgcagcactcctgataccaggcagaggtgtgtccagcccggagcttgagcagcagcagcgcctcctgaccgactccatggggttggcctcagggcctcccaggacccgcccagcccggagaccagcccgcaggccacattcc

SEQ ID NO: 264373 - DNA, 33 bp, Homo sapiens
  chr11:134534372-134534405
  hypo
ggcaggtcgcccactcgccgtccaccgagggca

SEQ ID NO: 264374 - DNA, 234 bp, Homo sapiens
  chr11:134571549-134571783
  hypo
tctgcagccgcctccggtggtcagctgctgcagagtctcctcatctcactcagggtcatgctatgcccgggcggtccacacccagtgccggggccccgaggcagcagaatgggagaaccctggggggaatgactcactccagagccttcccctgggtcctggcggccccgagagggaggacaaagctggagcacctgcagcagccagagaaagcgtgcccggcaatgcttcaag

SEQ ID NO: 264375 - DNA, 402 bp, Homo sapiens
  chr11:134608535-134608937
  hypo
agcattccttgagctcacagcgatggcgtgtgtgtctgtgtgagtctgtgtgtctctctgtgcgtgtctgtgtgagtccgtgtgtctctccatgagtgtctgtgcgagtctgtgtgtctctccgtgcgtgtctgtgcgagtccacgtgtctctccgtgcgtgtctgtgcgagcctgtgtgtctctccgtgcgtgtctgtgtgagtctgtgtgtctctctgtgcgtgtctgtgtgagtccgtgtgtctctccgtgagtgtctgtgcgagcctgtgtgtctctccgtgcatgtctgtgtgagtctgtgtgtctctccgtgcgtgtctgtgtgagtctgtgtgtctctccctgcgtgtctgtgtgaatctatgtctttctgtgcgtgtctgtgtgagtctgtgtg

SEQ ID NO: 264376 - DNA, 32 bp, Homo sapiens
  chr11:134831337-134831369
  hypo
gatccaacgagagccgctgagtcacatctggc

SEQ ID NO: 264377 - DNA, 185 bp, Homo sapiens
  chr11:134852669-134852854
  hypo
cccactgtgggcttcgtaacattagatccacggacctcaccttgggtgagatgagacatacgtacccctattttaaaaataaaataaaatccatcggtgattctgccgcacagtcaaaattgaaaagcactggagcatcacttggacaactggtcagatcggaggatgtgcgtcaaggagagaag

SEQ ID NO: 264378 - DNA, 185 bp, Homo sapiens; identical to SEQ ID NO: 214679
  chr12:287240-287425
  hypo

SEQ ID NO: 264379 - DNA, 40 bp, Homo sapiens
  chr12:287644-287684
  hypo
ttttgctctcccagcggggggggctcgccttaaatcagag

SEQ ID NO: 264380 - DNA, 95 bp, Homo sapiens
  chr12:318480-318575
  hypo
agaccacgcggaaccgtttgtccgcaacctgccgcagacacagtacaactcctcagaatcctcccacggagggtggcacacggaatgtgttctgt

SEQ ID NO: 264381 - DNA, 169 bp, Homo sapiens
  chr12:334115-334284
  hypo
cgttgtatttgtacggaatgtagatggtaccaaaaaaatcgctccaaggccagagttggcctccagttaccacctctgcgcccggagccctttctgtcaccctgcaatgactacactggcactggtttcagaatgccgctgacacacgccctcgcggcgcgtgaatgtt

SEQ ID NO: 264382 - DNA, 137 bp, Homo sapiens
  chr12:363089-363226
  hypo
aaaatgttggcagacggttttttcatctgggctgagataggcaggaaggtgatttaaattccccgctggctatggacagtcctatgaccagaaccctctcccgctaccttcttcccacatcacgcctcctgcgttat

SEQ ID NO: 264383 - DNA, 271 bp, Homo sapiens; identical to SEQ ID NO: 214680
  chr12:417387-417658
  hypo

SEQ ID NO: 264384 - DNA, 148 bp, Homo sapiens
  chr12:563165-563313
  hypo
taggttaatacggccgtgcgctccactcggccgggctgcctgcagcgctccccgctgtggattcaaccgtgttcaaggcaagggaagaacatccacgccccctttctcttttctttttctttttctttttgagacggagtctcgctct

SEQ ID NO: 264385 - DNA, 187 bp, Homo sapiens; identical to SEQ ID NO: 214681
  chr12:646784-646971
  hypo

SEQ ID NO: 264386 - DNA, 108 bp, Homo sapiens; identical to SEQ ID NO: 214682
  chr12:658733-658841
  hypo

SEQ ID NO: 264387 - DNA, 289 bp, Homo sapiens
  chr12:665735-666024
  hypo
tgaacgtggaaaagcgtcaggaccagctacgtgggggtcgctacctcctggagcttgaactgttggaacaaggccagcgcgtggtgcggctctcggagtatgtgtctgcacgaggctggcagggcatcgatccagctggtggggaggaggtcgaggcccggaacctgcaaggcctggtctgggacccacacaaccgtaggagacaggtcctgaatacccgggcccaagagcccaagctgtgctggcctcagggtttctcctggagtcaccgagccgtggtccacttcgt

SEQ ID NO: 264388 - DNA, 217 bp, Homo sapiens
  chr12:666656-666873
  hypo
cctcagccgaggtccgatgggcactcctgactcacctgggagctgggggtggaggcgctcatccgctcatctttgccttgtctgtgtttccttctcctgcctgaccccctggggtagtgaagaaccaggcacgctgggtacagcaattcatcaaagacatggaaaacctgttccaggtcaccggtgacccacacttcaacatcgtcatcactgacta

SEQ ID NO: 264389 - DNA, 91 bp, Homo sapiens; identical to SEQ ID NO: 214683
  chr12:667201-667292
  hypo

SEQ ID NO: 264390 - DNA, 148 bp, Homo sapiens; identical to SEQ ID NO: 214684
  chr12:670522-670670
  hypo

SEQ ID NO: 264391 - DNA, 799 bp, Homo sapiens
  chr12:674438-675237
  hypo
ctgttttatgtgccccgaaggctgtaatgaaaacattgatgaccacagtgaagaagaccaagatggtggctgcgttgttgagctggttgagtcgccactgcttttctacctcattcaggttcagccgtgctgcagggaagtggagtggggggaaagggtcagagacggggccacagcacggagctgcccccacaacacccaccagagtttggagagaggggcccttcagaaacccatgtggcagaaatcaagggaggtggtcgtcatcgggctgagatgcctctgccctcgccaaccagtacaatggggcaccctagtgtgcttcatcccaccaggatttgggaacttaagctgggtcctgtaagcgtggggacgagtgctcatggagaagcggtgagcgagtgagtgagttagcagttagcgaggtgctggcgcagtcattcagcaggtactgcggagggtctgctccatgggataccaggagacaggacagggcgcctgccctcgcggggtggaagttggtctttgggcctctgttagcggagggctcactgcaggtcagcgtgtggttgcaaagctgcctgtgccaatgcagggtggcccaggggacacgtggggcctttctgccagccacgggtgccgaggcagaaggtctgactgcaggctgggctcctcaccaatgaccacgagcaggacaccgatgaccacctgcaggagcagagagaggctgatgagggtgaccagggtggtgtagtagtgagaggatggtccctgctccagcaccgccttcagccgcatg

SEQ ID NO: 264392 - DNA, 62 bp, Homo sapiens
  chr12:708874-708936
  hypo
tcccagcaagtctggaagtgcggaggccctcccagccccacgactgcgcttggcctactgcc

SEQ ID NO: 264393 - DNA, 197 bp, Homo sapiens
  chr12:718161-718358
  hypo
tcatgcacatacacggcgccacgctaggggctgtacgcacgcacggcgccacgcgctaggggctgaacgcacacgcacggcgccacgctaggggctgaacgcacgcacggcgccacgcgctaggtgctgaacgcgcacgcacggcgccacgctaggggctgtacgcgcacgcacggcgccacgcgctaggtgctgaa

SEQ ID NO: 264394 - DNA, 71 bp, Homo sapiens
  chr12:724161-724232
  hypo
ccacaggaggattctgcactcccatggtctctctgaagagtcgggagagcggtttgtgtgaatgtgtaagg

SEQ ID NO: 264395 - DNA, 38 bp, Homo sapiens; identical to SEQ ID NO: 214686
  chr12:750707-750745
  hypo

SEQ ID NO: 264396 - DNA, 157 bp, Homo sapiens
  chr12:751045-751202
  hypo
tctcttctaacactgccctggagctaggacatttcctagactggctcagaaaagacctgtctttgaggacaatgccgctttagggtagaatctagcggaacaccacctttcgacatggtcccggcatggcctccccttggggcgtggaaggcgggaa

SEQ ID NO: 264397 - DNA, 39 bp, Homo sapiens
  chr12:885896-885935
  hypo
agatcttaatgtgttcttgctctgcgtggtgtttgtacc

SEQ ID NO: 264398 - DNA, 206 bp, Homo sapiens; identical to SEQ ID NO: 214688
  chr12:934133-934339
  hypo

SEQ ID NO: 264399 - DNA, 237 bp, Homo sapiens; identical to SEQ ID NO: 214689
  chr12:939093-939330
  hypo

SEQ ID NO: 264400 - DNA, 236 bp, Homo sapiens
  chr12:974283-974519
  hypo
tggccgtagcatgtcggtttgtgttcccatctttctgctgttgcctctgtgtcccgcatctctcccagtgctcttccaccccaccgccagtactgtctgcacctctttctccttccctcctccggactgccccgaggaaacttttgccgaaaagctttctaaagcattggagagtgtcctgcctatgcactctgcctctcagcgcaagcaccgacgctccagcctgccttccctct

SEQ ID NO: 264401 - DNA, 69 bp, Homo sapiens
  chr12:1005679-1005748
  hypo
gccgtcttctgacccggaggccgcttttttaagtagggatgtggatgatggttccggtagtccacactc

SEQ ID NO: 264402 - DNA, 319 bp, Homo sapiens
  chr12:1026088-1026407
  hypo
cctccatccatcacgccttctaggtcctgtaactccatgagcaggaggagccaaacaatttcatgttctgtgttagtgaagttttgataaaaaggaatccttctttggttttgacttagggcagatgttctgtaaaatcgcatttgaatctttcctgggctgctgggtctgtctttgctgcctccttgtcctttttccacggaaatgagcacacacagtctctgtggaggtctgtaccttcccaaccctttctgccagggccacccctgcaaatcgcgctcgtcactgagggagcctcgggcacgctgtggcatcacga

SEQ ID NO: 264403 - DNA, 38 bp, Homo sapiens
  chr12:1073021-1073059
  hypo
cagaactagagtgacgagggcagcggtactctttcaaa

SEQ ID NO: 264404 - DNA, 86 bp, Homo sapiens
  chr12:1079112-1079198
  hypo
tgttgacagactttgcgtcagtgtgaagtgagacacattgtcttcatatatcccactccatttctggtgatataatttagggctgg

SEQ ID NO: 264405 - DNA, 84 bp, Homo sapiens
  chr12:1353962-1354046
  hypo
gtgtgaaccagcacacctggccttatacttaatgttttgaatagtttatgtttaatctttatcagatgccgttttgatattcaa

SEQ ID NO: 264406 - DNA, 99 bp, Homo sapiens; identical to SEQ ID NO: 214691
  chr12:1411786-1411885
  hypo

SEQ ID NO: 264407 - DNA, 69 bp, Homo sapiens
  chr12:1476691-1476760
  hypo
cacaacgctaattacggtctcttatttactagcaatagaagtctaatgttgtggcgttctcaaggattc

SEQ ID NO: 264408 - DNA, 175 bp, Homo sapiens
  chr12:1553850-1554025
  hypo
tcctataacttggacgatgaccaggcggcttgggagaatgagctgcagaagatgacccgggggcaggtgagcctctcactcaaactttgaaaagagcctgtgaaaatccagttgctgtgtaggttgatgcagtgggggctaccttggggaatccagttgccgtgtagttgatgca

SEQ ID NO: 264409 - DNA, 252 bp, Homo sapiens
  chr12:1605198-1605450
  hypo
aactccaatggcaggcagcccgagggccaggggtcccaggatttacggtgggtgtgggagtcatcacagccctgacgggcatgagcctcctttcccttcccgcctgatctccgggtttgcagcttttaaagtcaattcccggttccctttttccttctttctaccctcagccccgggccaggttatccgtatcaggtctcactgttccagagcttagagtaggtgcccagcgctgagggatggtgctgctgt

SEQ ID NO: 264410 - DNA, 53 bp, Homo sapiens; identical to SEQ ID NO: 214692
  chr12:1607425-1607478
  hypo

SEQ ID NO: 264411 - DNA, 38 bp, Homo sapiens
  chr12:1650724-1650762
  hypo
gcaacaggtgctggctcaaccctcgccccaaaacctca

SEQ ID NO: 264412 - DNA, 157 bp, Homo sapiens
  chr12:1656342-1656499
  hypo
ttacctgttacagtcgtgatggaagcttttgtttccacaaaccagtaaattctccagtctccctcacagagaccctgaacactgcggtggagaggagactcgggtgtccgacactggatctgagcctctgccgtccgccctctgtcctctggtgcac

SEQ ID NO: 264413 - DNA, 218 bp, Homo sapiens
  chr12:1711558-1711776
  hypo
aaacataacaaaagcgtaggcgcataagagaatgatctttcaggtagagccagccatgtgtttgcatcttatcttctcctctgtaagtcaggaagggtagcatgttccattcatgcgcaaagaaatagtccagaactcctcttctgccagacatccatccgtcctgtggccttggacctatggtttcactaccaactcttactctttcttttttctga

SEQ ID NO: 264414 - DNA, 140 bp, Homo sapiens
  chr12:1716712-1716852
  hypo
aagtcactttctcagggtcacgggaacaattcaggttgaacgcatctctcctccgacatgccgagcgtctttgagtctcctcacccaggcgcacactcaggattgcagtcatctgctattgttgcctttatttattttga

SEQ ID NO: 264415 - DNA, 54 bp, Homo sapiens; identical to SEQ ID NO: 214696
  chr12:1738021-1738075
  hypo

SEQ ID NO: 264416 - DNA, 222 bp, Homo sapiens
  chr12:1766124-1766346
  hypo
gagagatgcacaagaggctacgtgcatccaaacagcctcgcaatcagaccgcacgagatcatgcagctcacaaatctggacagacctgaaagatcgtatctcgaacgaagccactgaatgtcgctggctcccatgcaggcccgagcagggaacagccggcaaccacacagttgcacacaggctgctggctgtgccctaggaccggcccggaatccagctggg

SEQ ID NO: 264417 - DNA, 120 bp, Homo sapiens; identical to SEQ ID NO: 214697
  chr12:1840409-1840529
  hypo

SEQ ID NO: 264418 - DNA, 180 bp, Homo sapiens; identical to SEQ ID NO: 214698
  chr12:1840589-1840769
  hypo

SEQ ID NO: 264419 - DNA, 495 bp, Homo sapiens; identical to SEQ ID NO: 214699
  chr12:1943596-1944091
  hypo

SEQ ID NO: 264420 - DNA, 232 bp, Homo sapiens
  chr12:1948633-1948865
  hypo
aagccatggcaaaccgcagcacagggcagtgaacctgggttccaacgagaggcggtctgcgttcaaatcccagcctcattcattattagctgtggggctttgggcaagtaagttttctgtgtctcagtcccctcagctgtaaagtagagccagaaccatcgccttcactgggtcaccccaaggaccacatgggaggcagtccacagtgcccggcacacgctgaacacacaca

SEQ ID NO: 264421 - DNA, 70 bp, Homo sapiens
  chr12:1973182-1973252
  hypo
cagccgtgagtggccgggcccatcccgtccaaagacaaatgtctggagtgcttccgctcatctttaaaag

SEQ ID NO: 264422 - DNA, 233 bp, Homo sapiens
  chr12:1980082-1980315
  hypo
acagtgtaagagcacgtcacagagtactctagccctgtgttcctgaaatccagggtgcagggattcaagggcactggaggaacacgaggcaaagctgctctgaatgccagccgctggtgtgtgtgtgtatacgtgtgtgttgctggtggtgtgtacgcacgtgttgctggtgtgtgtgtacgtgtgtgctgctgttgtgtgcatatgtacacgtgtgttgctggtgtgtgtgt

SEQ ID NO: 264423 - DNA, 133 bp, Homo sapiens
  chr12:1987522-1987655
  hypo
ggtgttcagaaaggcgtatccgtgcactccaagctgccagagtccagggtggaggcgcattaggcctgctgtttgtgctgggcatctggagttgggcaggggtttgggggccacaggacggtcaaagatggca

SEQ ID NO: 264424 - DNA, 196 bp, Homo sapiens; identical to SEQ ID NO: 214700
  chr12:1992047-1992243
  hypo

SEQ ID NO: 264425 - DNA, 478 bp, Homo sapiens
  chr12:2017665-2018143
  hypo
ctcggcctctcccacgcggtgttggagggcgtgctaggattgcctccggtggagccccggccccgtttcctccacacgaccgggttcacacctgaacaccccccaggactgcgtcacggacatccccacgccaactcccacgccggactgcctcacggacatccccacgccaactcccacgccggactgcgtcacggacatccccacgccaactcccacgccggactgcgtcacggacatccccacgccaactcccacgccggactgcctcacggacatccccacgccaactcccacgccggacagcgttatggacatccccacgccaactcccacgccggactgcgtcacggacatccccacgccaactcccacgccggactgcgtcacggacatccccacgccaactcccacgccaggttcctgcaccccacacccggctcctcctcacgacactgtggcccgcgctggccttcca

SEQ ID NO: 264426 - DNA, 86 bp, Homo sapiens
  chr12:2023585-2023671
  hypo
gggaggtctccctgcgcagaggccacagccctttcaccttctacggcccgagcagcttccagggccctgcacgtgccctccaagtc

SEQ ID NO: 264427 - DNA, 182 bp, Homo sapiens; identical to SEQ ID NO: 214703
  chr12:2023975-2024157
  hypo

SEQ ID NO: 264428 - DNA, 95 bp, Homo sapiens
  chr12:2040490-2040585
  hypo
tgtgcgtccatccccgcggagctggtggcagagtggcggatgccgtggtggagcactgcatggagcactgacggatgacacgtgcacatggcgat

SEQ ID NO: 264429 - DNA, 229 bp, Homo sapiens
  chr12:2046016-2046245
  hypo
tgggcaggctccccagcctgcgcggccacgcacctttacaccacgccgcgctgccccagcctgcgtgctgcaaacgacgcatttgacctccaagatgactccacgttccaaagcctgcaaggcaggctgatttcttggagaagggaggaggcggcacatgtctgaatagagcaggccctgttagaaaacagaaggcttcattgctaataggagcgagcgaccaatctgt

SEQ ID NO: 264430 - DNA, 212 bp, Homo sapiens
  chr12:2048775-2048987
  hypo
aataaaacacctgtcggctgtgcagtaatcgaagatctttttattatccgagaataagaagtgctattgaaacgcaaagctttatttattacaaatactcagcagggacgaattcccatagatactcttaacaacttggcaggggctcttctgactccttccaagattaagctcctcatctctgcgaacataaaactcgatctgctacacag

SEQ ID NO: 264431 - DNA, 78 bp, Homo sapiens
  chr12:2088760-2088838
  hypo
agccaccgtgcccagcccatttctcttaagtaaataactacgaacggaacttgttggatcatacgctagttatatgtt

SEQ ID NO: 264432 - DNA, 209 bp, Homo sapiens
  chr12:2222748-2222957
  hypo
tggtctggctgcttcggccacagtctctgggcagctgaagtgtcctcagatgccaacctcaccgcccacagtagcaccctcttatctgcggcttttcttgatcctgcggcacctggccaattgactagcggtaccacgtctcaaggtcatgcatgtgttctgggagattcaggtttgggccaggctgagctgatcgcttggcaaacctt

SEQ ID NO: 264433 - DNA, 155 bp, Homo sapiens
  chr12:2224504-2224659
  hypo
catcgacgcagcccggcaggctaagctgatgggcagcgctggcaatgcgaccatctccacagtcagctccacgcagcggaagcggcagcaatatgggaaacccaagaagcagggcagcaccacggccacacgcccgccccgagccctgctctgcc

SEQ ID NO: 264434 - DNA, 108 bp, Homo sapiens
  chr12:2591271-2591379
  hypo
tagagaggaggatgtctggccgcacgccttcacaagccagcctggctctgccaccccaggcaggccgcgaggaaagcagatggaagcgagagcctttcctggaccagc

SEQ ID NO: 264435 - DNA, 90 bp, Homo sapiens; identical to SEQ ID NO: 214709
  chr12:2595422-2595512
  hypo

SEQ ID NO: 264436 - DNA, 57 bp, Homo sapiens
  chr12:2597995-2598052
  hypo
tcaggagcttgctgtcccttcgttcccaaacctgccgtctgatcacaagccaggacc

SEQ ID NO: 264437 - DNA, 250 bp, Homo sapiens; identical to SEQ ID NO: 214710
  chr12:2602368-2602618
  hypo

SEQ ID NO: 264438 - DNA, 157 bp, Homo sapiens; identical to SEQ ID NO: 214711
  chr12:2613883-2614040
  hypo

SEQ ID NO: 264439 - DNA, 36 bp, Homo sapiens
  chr12:2654536-2654572
  hypo
tctcaattggtcatcgtcaacttcccatggcctgcc

SEQ ID NO: 264440 - DNA, 426 bp, Homo sapiens
  chr12:2664072-2664498
  hypo
aaagtgccagcctttaaaagcggatgaggttttgatccccatgaacctaaaattctgctcacaatcccggaggatagcaacaatagcaacaaaatcagtcttcaagtgtggtgcccaggcttatccatccagacctgtaacaaagcagacaagaaggctctgtccatttcgtgctcagaatgtgcccggatgccacagaaggacctgtagtccacgactgtgcttgaagcaggacctcctttcccagcacccccagcgccaatcctgcttcccagggtcatttcccttggagacgaacactcaggattaggtttccccagaggggagcttttcagagcccacttgcacttgtgacccgcttgcactgtgagcaagacaacgcctcatggcaaagggccggtggtcgtcatcaaggggcaccccaga

SEQ ID NO: 264441 - DNA, 33 bp, Homo sapiens
  chr12:2743147-2743180
  hypo
tgcaggggacacaccgcccggctccccggggcg

SEQ ID NO: 264442 - DNA, 114 bp, Homo sapiens
  chr12:2777032-2777146
  hypo
gagcatgcccttggcatggacgctgtggtgagcttcacaccgcgcttgctcgtcatgacccattgcatgctgaaggccccacaccagagctccgtgccagggaagcctgttctg

SEQ ID NO: 264443 - DNA, 148 bp, Homo sapiens
  chr12:2778007-2778155
  hypo
agagccaaaccatatcactctgccacggtgttctgcggtcccctaagcaccgcctgccatcatcaccagctttgcttctcttcgcctgcagcgcctggtctccatgaacatgcctctgaacagcgacgggacagtcatgttcaatgcc

SEQ ID NO: 264444 - DNA, 268 bp, Homo sapiens; identical to SEQ ID NO: 214713
  chr12:2788594-2788862
  hypo

SEQ ID NO: 264445 - DNA, 70 bp, Homo sapiens
  chr12:2788892-2788962
  hypo
agggccacgggccccccttgtcccctgccatccgggtgcaggaggtggcgtggaagctcagctccaacag

SEQ ID NO: 264446 - DNA, 83 bp, Homo sapiens
  chr12:2798044-2798127
  hypo
ttgcagtcaatatctgagcccgaaagaccctccctctcagggctgcaggagggctcgtgtgcggaaagccatgactgcacaag

SEQ ID NO: 264447 - DNA, 82 bp, Homo sapiens
  chr12:2846932-2847014
  hypo
caaaatacatgcaaagcacccggcacagtgcccagcacacagtcagtgctcatgaagtgtcggttccctctgcccactgcag

SEQ ID NO: 264448 - DNA, 553 bp, Homo sapiens
  chr12:2964259-2964812
  hypo
ggaggggggatggggtgctccgtgggggggcatctgtgggcattggagtcggtcagccagcgccagacattgctatcgtagggcctgtcaggctgggtggggaaggtggcaggcagacggcacacatcgagccacgtgtgaaagccccaggtgtgctgggcgccacccttccaagggtggatgagccgctgacgcaccttggacttcatatctgtgcagggcggcagcttcagagccagctggtggtaggcttgccgggtgaagccagggaactcccaggactcgctggggaggaagaactcacgctgagcccacgtttgggagggtgggagggactcgctggcctggaccatctagggagagacaaaagggagcctggggaaggttgtgcagacaggggtgcagaaaggtgggtgaggcactccgctctccttcccaggcacgacctctgccagcccaggattctcatgaggacgcagaagtcctggcagggccgcatctccatccctctccttcccggcggaagttatggctgctgcgtatcatcttcaca

SEQ ID NO: 264449 - DNA, 206 bp, Homo sapiens
  chr12:2972288-2972494
  hypo
catttggattgccgcgcctgtggtgggtgctactggcgtctagtggggaaaacaagggatactgctaaacacccttcagtgcacaggacagtccctcccacgcccaacaaagaattctccagctgtcaacgtgaatagtacttgagaaaccctgagttagtctgacccagtcactttactactgccaggtacgaactgcatttccc

SEQ ID NO: 264450 - DNA, 89 bp, Homo sapiens; identical to SEQ ID NO: 214715
  chr12:2995016-2995105
  hypo

SEQ ID NO: 264451 - DNA, 148 bp, Homo sapiens; identical to SEQ ID NO: 214716
  chr12:3030587-3030735
  hypo

SEQ ID NO: 264452 - DNA, 523 bp, Homo sapiens; identical to SEQ ID NO: 214717
  chr12:3103769-3104292
  hypo

SEQ ID NO: 264453 - DNA, 196 bp, Homo sapiens; identical to SEQ ID NO: 214718
  chr12:3118651-3118847
  hypo

SEQ ID NO: 264454 - DNA, 82 bp, Homo sapiens
  chr12:3129381-3129463
  hypo
acgtccccgtctctccgggatgatgccatattgtaatagtggattcatctggttatttccccgactggaacagaagttgctt

SEQ ID NO: 264455 - DNA, 36 bp, Homo sapiens; identical to SEQ ID NO: 214720
  chr12:3147030-3147066
  hypo

SEQ ID NO: 264456 - DNA, 46 bp, Homo sapiens; identical to SEQ ID NO: 214722
  chr12:3215227-3215273
  hypo

SEQ ID NO: 264457 - DNA, 98 bp, Homo sapiens
  chr12:3266175-3266273
  hypo
gtacaaattctcccccgctgagcctcatagaaacaggccagagagggcagagcaggttttattatttccacttaattcaggctgaatgtggtgttttt

SEQ ID NO: 264458 - DNA, 178 bp, Homo sapiens; identical to SEQ ID NO: 214723
  chr12:3302735-3302913
  hypo

SEQ ID NO: 264459 - DNA, 129 bp, Homo sapiens
  chr12:3316845-3316974
  hypo
agcccttgggcaggggaggctgcaggatttcaaatctcccttgcagtggctagctcactgcgtcaggaccacgcagagaggccctgttttagtggctggtggggggtgggtgaccggccaaggaggaga

SEQ ID NO: 264460 - DNA, 303 bp, Homo sapiens
  chr12:3324917-3325220
  hypo
ttgctgctctctccaggctccgtggtgggcccggcacagcctgtatcggagtggagaacgtaggttggtccagagcacgttccaccgggacctctccgtctggagcctgtatcagagtggagaacgtaggttggtccagagcacgttccaccgggacctctctgtctggcttgctcaggctcatttcttctgtctggggacttacggggatgagcatgaaaacctgtgcatcctggaatcacagggacacggctccatgttcccagcggttgatccattatccctggtcgccctgcttccttc

SEQ ID NO: 264461 - DNA, 45 bp, Homo sapiens
  chr12:3333941-3333986
  hypo
ccctgacagatttcccggttctgtcagcttcgcttcagcagtgct

SEQ ID NO: 264462 - DNA, 44 bp, Homo sapiens
  chr12:3369201-3369245
  hypo
tttctgctgagaacctagtacgcgtgagatgcctgtgaggcatc

SEQ ID NO: 264463 - DNA, 109 bp, Homo sapiens
  chr12:3370679-3370788
  hypo
atagatggagaactgcgtctccaaagtaggggacacaggcggagaagcatgttcaaaagactaggacagacactttgcctccgaagatgtgactcggggcatgcatgac

SEQ ID NO: 264464 - DNA, 245 bp, Homo sapiens
  chr12:3389522-3389767
  hypo
ctcactgtgtccctccgcctggcaggtgaacgagaacgccaagaaggacctgaaggaaggcctgctgctgtaccacaccgagaacaacgtggggctgaagaacgcctggaacatcatccaggctgaggtgcgggctgggccgccctggtggggccaggcagggaggaggggtggcggccggtacttctagctgccttccccggtgacctggccgggcacctgtgctttctggattttagccggga

SEQ ID NO: 264465 - DNA, 111 bp, Homo sapiens; identical to SEQ ID NO: 214725
  chr12:3390417-3390528
  hypo

SEQ ID NO: 264466 - DNA, 433 bp, Homo sapiens
  chr12:3392261-3392694
  hypo
ggtaagaagtacgacgcatgagcgggctggccgggagtgcccaccccgccctgctgccctgtggagggaagaggattgagctttgtgtcacctgcctgcgctctccagatatgacccctgcacccaccccccacagcctgccctaccccacctaccctgcctcagcctcggacttctcagtgggtggagtgccagggaggaggaggcacacggagacctggggctcggggcccctggattcctgcatctgcatatgcgtatttgccaaagacgacagggtgggctggggtgcgctccggaggaacccccggcactgatgggcttctgcccctgcccttcctcacactgacactttgtccccacatggggtggggagcagagtgcccgccccgtggagataccgccccagcgggggctgcgacatccatggcca

SEQ ID NO: 264467 - DNA, 430 bp, Homo sapiens
  chr12:3414073-3414503
  hypo
agggcagggagtcacgcggcctcacacatccctgtgtctctgtctgtgtgtgctggcgccgcacgactgctgggccacttgcttgtaaaatggggccaacaaaaggacctgcgccctgggccatcgtgcggactgaaagaggtgattcatggaaagcaattagaagagagcctggcgcagcacccgcagttaatgagagacacttttgtgatcatcgtcgtgtgaatgcaggtgcgcgtgcccgtgtcatttacatccatggggtgctgctgggaggcctgacgctagccctggctctgcagccactgctttctgggggtcggtctcctgcctgagatgcaggttggggttctaactgttcccggcctgtgtgagggcctgcgttcgcgtgcactggtgccctgcaggtcttggtcggtgacaccgcctc

SEQ ID NO: 264468 - DNA, 152 bp, Homo sapiens
  chr12:3420373-3420525
  hypo
gctcatctggatcccgcactgaggctggctagaactcccgggcagtgggccgggctgttgggcctttagctgtgtgacagcacagatgccaacaaatccacctttgccccgctaccctgcatttacccagcgtttcccggctccctccgtgc

SEQ ID NO: 264469 - DNA, 328 bp, Homo sapiens
  chr12:3562709-3563037
  hypo
cagacgctgcattccgcatgccatcgtgaccttgaagtagggctgagaatgaggtgtctgggtcaggaactggtgagcgcggtcaggggacacccttaggagaggagcttgcccttcacagccagggcaaatgctggggcgcagccatgctggctgtctcctcgtctgttctgcccacacatctcctgcggcaccctgtggtctgtgtcctgacgtggcccgactgtggacccccttgtcctcctgcccgctgtgtctatttctcagctcctgctatgctaggtctgggcttccgacgccggccctgctccggcgattgaaaatgact

SEQ ID NO: 264470 - DNA, 115 bp, Homo sapiens; identical to SEQ ID NO: 214733
  chr12:3901112-3901227
  hypo

SEQ ID NO: 264471 - DNA, 36 bp, Homo sapiens
  chr12:3998558-3998594
  hypo
tgagccactgcacccggccctcctttctctaaattt

SEQ ID NO: 264472 - DNA, 92 bp, Homo sapiens
  chr12:4033270-4033362
  hypo
gccacgggggcggccgtggtgctggcagatgaaccatgccaatatggagggagcgagggacagattttaataagccacggtgaggacggtgg

SEQ ID NO: 264473 - DNA, 222 bp, Homo sapiens
  chr12:4060807-4061029
  hypo
tccgtgacttgcatcgtatccctgtaaaccaggcaaggatttggggaccaagcccattcacgcccgcacctcaggtgatctcgtgcctgagaattcacaaagaatgccctcccctctcttcactgcatcctgtctctagagcccgcgtcactgcatcttcccacctccctggacacggccttaacctcatttttttctctggggcaccgctgcagttcgggc

SEQ ID NO: 264474 - DNA, 137 bp, Homo sapiens
  chr12:4304033-4304170
  hypo
actatttcctgtgcactcatcgagtgcggctgggacaccaactatgaccgagatgcgctccctgcccttggaaagccccccagtcccatggaggagtaagaaacccatgggggaggaagaaagagaggtgagggctg

SEQ ID NO: 264475 - DNA, 171 bp, Homo sapiens
  chr12:4309610-4309781
  hypo
agggtactcctgtcatcccacgtgctcattcatgagtgagggcagatgcggggagccgcactggacagcaaccaagatggagagccgtgcggtgcagcgtggtgccctcccgtaaattccacccgcgcactccaaggttccacggcacacgtaaaccatctgcccagccct

SEQ ID NO: 264476 - DNA, 65 bp, Homo sapiens
  chr12:4362284-4362349
  hypo
cctcaaaagtgaagcatagacgctgccatagtaacaggttcagcgagacctggagctgctggggc

SEQ ID NO: 264477 - DNA, 153 bp, Homo sapiens; identical to SEQ ID NO: 214737
  chr12:4433845-4433998
  hypo

SEQ ID NO: 264478 - DNA, 38 bp, Homo sapiens
  chr12:4534348-4534386
  hypo
agccaccgcgctcggcccacaaacgtggacttctttcc

SEQ ID NO: 264479 - DNA, 699 bp, Homo sapiens
  chr12:4554341-4555040
  hypo
catgagcccaaacccccaagcgtcccgactggctgcagctggcactcactgtaggggttctcctcgtgggtcccgctgatccggccgtcggggagcacctggaggtgaaagccgatgcccacgttgcagtagagcctccgctgccgcttgatccccaccaaatagccactttcccagttcaccccggcaatctctccagctagcccggcgcgagacctggacagcagggtgccccagcccctcgagtccagcagcgtgttgttggcacgggtgcctgcaggcgagggcaccaccatgcccactaggatgcctaggaagacgagagcccacagcgtgccctgcagacgtcctgctccccgggacatagtgatgaacagtttctgtcccagggccatccaccttgcctctcaggcacgtggtcagaattaatggccctaaaaataccgcccttcttgtttttctccctccggcatggcggcaggggcttatttttggaaggcagatgaaggctgctgacatgaaaccaaagcctccatcgggcactcgggttgagagcagagggacccaggctgagccgcggccggtagagaccatggctcggggacgctctctagctcgcccgcttgctccgtccctagttgatgatatttgatttgacctatctttatagttgcttcagcagcccggccctcccctcca

SEQ ID NO: 264480 - DNA, 223 bp, Homo sapiens; identical to SEQ ID NO: 214739
  chr12:4672161-4672384
  hypo

SEQ ID NO: 264481 - DNA, 169 bp, Homo sapiens
  chr12:4734867-4735036
  hypo
agagagagagagagagcaagcgagcgagaaggcagagaggagagagaagagaaggttgtagggatggtctttttaattcccgcacttcagtgtgaagcatctggggtaagtgtgcgtgttctccagactcaaaccctccctttggcgcgcagttctgatgcttactggg

SEQ ID NO: 264482 - DNA, 292 bp, Homo sapiens
  chr12:4737611-4737903
  hypo
gttttcagagccatcgatcttctcattgatctctttgcgggccatggctatgactagattcgtgaggcggttagcatagaaggaaacttcatctactgaactcccgttgccaagttgggccctggggccctggcaaggaatctctttgtgagtcatctcaaaatgcaatctttctggagtgcccttggtggtggtgttgtaatagtctacagagaaacctttgtgtgggtctcctgagttggacgtttccccaccaaatgattctccgggtttgaaccgaacatcttggaac

SEQ ID NO: 264483 - DNA, 42 bp, Homo sapiens
  chr12:4810316-4810358
  hypo
ggtggtaccattgaccaaggcgtggaacactggaaaagaagc

SEQ ID NO: 264484 - DNA, 101 bp, Homo sapiens
  chr12:4872384-4872485
  hypo
caaagcacagaaacacttggcgttttatttacagaactctggaatagattttggagacgtttcttccagaatggcactccgggaaaaactgaaatgtaaaa

SEQ ID NO: 264485 - DNA, 295 bp, Homo sapiens
  chr12:4920513-4920808
  hypo
agatcgtgggctcgctgtgtgccatcgctggggtcctcaccattgccctgcctgtgcccgtcatcgtctccaacttcaactacttctaccaccgggagacggagcaggaggagcaaggccagtatacccacgtcacttgtgggcagcctgcgccggacctgagggcaactgacaacggacttggcaagcctgacttccccgaggctaaccgggaacggagacccagctaccttcctacaccacatcgggcctatgcagagaaaagaatgctcacggaggtctgacccatgcaggc

SEQ ID NO: 264486 - DNA, 44 bp, Homo sapiens
  chr12:5087446-5087490
  hypo
ggattacaggcgtgagccactgcgcccagccaatccagtctttt

SEQ ID NO: 264487 - DNA, 121 bp, Homo sapiens
  chr12:5208523-5208644
  hypo
acagcggagggctgcgaagtgcatcggcgatgcacatctgccatgcgcgagtgcagggatgggcaacagttccagcctggccctctgcaccttagatgctttttctcgcagcgtgcccagc

SEQ ID NO: 264488 - DNA, 40 bp, Homo sapiens
  chr12:5231585-5231625
  hypo
ggctcctccgcctcagaggtattatcgcttcagttccaga

SEQ ID NO: 264489 - DNA, 360 bp, Homo sapiens
  chr12:5252233-5252593
  hypo
agaaatccacatcatccgtaatccaatcacctccacatcatccgtaatccgatcacctccacatcatccgtaatccgatcacctccacatcatccgtaatccgatcacctccacatcatccgtaatccgatcacctccacatcatccgtaatccgatcacctccacatcatcggtaatccgatcacctccgcatcatccgtaatccgatcacctccacatcatccgtaatccgatcacctccacatcatccgtaatccgatcacctccacatcatccgtaatccgatcacctccacatcatccgtaatccgatcacctccacatcatccgtaatccgatcacctccacatcatccgtaat

SEQ ID NO: 264490 - DNA, 120 bp, Homo sapiens
  chr12:5252653-5252773
  hypo
tgggcagagacaaatatgcaaacaatatcaccttcctcaaacagcatgctataacatgtatgcttgcataataaatatttaaaatataagattacccactttgggaggccgaggcgggtg

SEQ ID NO: 264491 - DNA, 86 bp, Homo sapiens
  chr12:5319955-5320041
  hypo
gccaaggcatttatgccccccggggctcccttctgtcatccctcctgctctgcacggcaacagcactgctccgcgcccactgcctg

SEQ ID NO: 264492 - DNA, 122 bp, Homo sapiens
  chr12:5323919-5324041
  hypo
ggcctggaaaatataatgtacgggagatgtaatggtgacccaccgacctggccgggatgccttgcttccccttcctcccacacctacacacacgtgcacacgttgagagagactgagtcaag

SEQ ID NO: 264493 - DNA, 153 bp, Homo sapiens
  chr12:5335903-5336056
  hypo
gaggctgctgaaattgaaaacgcctgttaatagcacaagtgacacatcatagatcactcgctgacaggctgaactgggcgccatcttgaagaacgtaggctgcatgctaatgacgcccaggaggagctgcgcgctgcattgtggaggcacctc

SEQ ID NO: 264494 - DNA, 91 bp, Homo sapiens
  chr12:5344278-5344369
  hypo
gtcttccctgcccccgcatagatgattgctacatttgtgccttttattattattattattattattattgttatatatatatattttttga

SEQ ID NO: 264495 - DNA, 42 bp, Homo sapiens
  chr12:5384590-5384632
  hypo
gccaaggccaggtcctgccccggctgtggatcccaaagtcct

SEQ ID NO: 264496 - DNA, 86 bp, Homo sapiens
  chr12:5435949-5436035
  hypo
gagtagatatacactattatcgggcagctttaattattagaaattcttactttcggccggccgcggcggcttatgcctgtaatccc

SEQ ID NO: 264497 - DNA, 85 bp, Homo sapiens
  chr12:5437112-5437197
  hypo
ctgcaggctctgtgacagagcgagactccatctcttaaagaaaaaacaggccgaggcgggtggatcacaaggtcaggagatcgag

SEQ ID NO: 264498 - DNA, 36 bp, Homo sapiens
  chr12:5532611-5532647
  hypo
tggggcggcagagagagactccgtctcaaaaaaaaa

SEQ ID NO: 264499 - DNA, 38 bp, Homo sapiens
  chr12:5579368-5579406
  hypo
cgtgagccactgcgctcggcctcctgagctcattttaa

SEQ ID NO: 264500 - DNA, 216 bp, Homo sapiens
  chr12:5589467-5589683
  hypo
aaaaacaatcccaccggcctttatttaccacagtgggtagcctcgggaggagggggagctgggtgggaaaggaagacaatagaatgctgtgttgccttgctgtaaaagcttgctctaagcaaataaagtggcaagctcagtcagagccctgctcaattagccccagtgcttaaaggagggtctccctgcagctgttggcggcgggcgggctggagc

SEQ ID NO: 264501 - DNA, 202 bp, Homo sapiens
  chr12:5603080-5603282
  hypo
ccacaagcagagaccgcaggataaagcagacatccaatgtaaatacaacccgtgcaaaaagcagagtcggcagacctggagtgcattcgcagtatctcccgggggtgggggaaagaaatcacctcttcagaatgtccagaggggagttgccttgcttacctggggggcggtaccctctctcgtgccctcacagggctactca

SEQ ID NO: 264502 - DNA, 500 bp, Homo sapiens; identical to SEQ ID NO: 214744
  chr12:5603567-5604067
  hypo

SEQ ID NO: 264503 - DNA, 321 bp, Homo sapiens
  chr12:5632712-5633033
  hypo
tagagggaggcttgagaacacgggccttgaacatcggagttggtgtggccatagccaccggaccctggaagaggcgcgtaacagattctccccgccagcccctgagtgagtgcagctctgccaactcttgatgttggcccagggaaactgttttcagacttctggcccccacaactgcgagagaataaattacgttgttttaagctactaaggttttagtaatttattacggcagccacaggaaactaatacagtgttttccctgggcccggcccggccttggaactgtgtcgtcctatcggtaccctggacccataagag

SEQ ID NO: 264504 - DNA, 119 bp, Homo sapiens
  chr12:5672755-5672874
  hypo
ggggctgagttggagaggcccggcctggggaggtggcggccctggagcagaatgcctctgtgtcaatcctggctttgcaacttaccagcccagtgatcgcaaccagtgagcataactct

SEQ ID NO: 264505 - DNA, 108 bp, Homo sapiens
  chr12:5674728-5674836
  hypo
agattatgacaaaagccagacgggcggacagaataaaccagtactgtttcgaaaactcataagggttcggggcccatggcggctctcggtaatccttaaacctgccca

SEQ ID NO: 264506 - DNA, 125 bp, Homo sapiens
  chr12:5687506-5687631
  hypo
tggggcctctaagtggggcacgtaccgatatctttggttcttacagcatccggccgtctcagctctgtaacaaacttctttgcatcgagccgcacttcaatgacgttgttgaggagggcaaacac

SEQ ID NO: 264507 - DNA, 174 bp, Homo sapiens
  chr12:5697256-5697430
  hypo
aagcacaccagaggcggggggcagctttggtttcattgctctcatttttgttcaaagtccaagacatgggcccttctggaacgggggaggtctagccagtcgggaaggaaggaggaagcctcacttcattccatccttccatgtcaagcacaccagaggcggggggcagctttg

SEQ ID NO: 264508 - DNA, 75 bp, Homo sapiens
  chr12:5713302-5713377
  hypo
ttaaaaagtggatggtggatcgtacacagaagggaaggacaatgaggaatcagcgatgattctcatggtcttagg

SEQ ID NO: 264509 - DNA, 128 bp, Homo sapiens; identical to SEQ ID NO: 214745
  chr12:5726939-5727067
  hypo

SEQ ID NO: 264510 - DNA, 202 bp, Homo sapiens
  chr12:5951755-5951957
  hypo
atgactcactctttcgttcgctaccagcatttatttagtgcctgctgtacaccaggcactgttgtgggtgctgctgataaaacggtttagattaacttgctattgtaacacattttcatatttttaacgtcactgtttctgggccctgagtcacacttgtccactgaaaggcctccacgtagtcaaccgggcctggggtctt

SEQ ID NO: 264511 - DNA, 161 bp, Homo sapiens; identical to SEQ ID NO: 214746
  chr12:6030343-6030504
  hypo

SEQ ID NO: 264512 - DNA, 60 bp, Homo sapiens
  chr12:6030959-6031019
  hypo
ggtgaaggggcctgtgtacacgcgtatctacccgagtgcgctctaacacacacaccccct

SEQ ID NO: 264513 - DNA, 40 bp, Homo sapiens; identical to SEQ ID NO: 214747
  chr12:6159830-6159870
  hypo

SEQ ID NO: 264514 - DNA, 47 bp, Homo sapiens
  chr12:6172072-6172119
  hypo
tgtaagggtcgggccgcagggagccagtaccccgtgagggcacctac

SEQ ID NO: 264515 - DNA, 95 bp, Homo sapiens
  chr12:6199649-6199744
  hypo
ttgtgcttaaagcccggcgtgtgcttgtcctgcttctgccggctcccattctcaaggcaggggcactccagcggaaaacacgggacagtgggaga

SEQ ID NO: 264516 - DNA, 79 bp, Homo sapiens; identical to SEQ ID NO: 214748
  chr12:6220788-6220867
  hypo

SEQ ID NO: 264517 - DNA, 83 bp, Homo sapiens
  chr12:6284864-6284947
  hypo
ctgccttcatccctacgtgaaaaaagcaagatggagaaagatgtgtgcaaaatgtttccacttatccacgaaaagaggggtaa

SEQ ID NO: 264518 - DNA, 85 bp, Homo sapiens; identical to SEQ ID NO: 214749
  chr12:6294432-6294517
  hypo

SEQ ID NO: 264519 - DNA, 309 bp, Homo sapiens
  chr12:6334302-6334611
  hypo
tagctagagttactcgttttcactgctgtatagtgttctgttgcctataaaataccccttcagccaatgggcggcaggtaggtcactgtttattcctcgcttgctggtatttttagtacctgcatgaatcaaacacaccccgtaatggcatctacaactaccaggcgtatatgaggggcagagaccaagggtggtcacaaagtcctttgcaagtctcacccttaagcgcgtggggactgtgttgttgctggcagccagaattaatgctgatgtcctgtatgtcttgcagcttgccgggattgctgtcct

SEQ ID NO: 264520 - DNA, 44 bp, Homo sapiens
  chr12:6336636-6336680
  hypo
gacaggcgtgagccacctcgcccggctggaagacactaacattt

SEQ ID NO: 264521 - DNA, 301 bp, Homo sapiens; identical to SEQ ID NO: 214751
  chr12:6344303-6344604
  hypo

SEQ ID NO: 264522 - DNA, 76 bp, Homo sapiens
  chr12:6363069-6363145
  hypo
aaaagaattttaacattttcaactctgtgagagaccccattcttcatgaaatggagtgattcgtagctgttatcga

SEQ ID NO: 264523 - DNA, 306 bp, Homo sapiens
  chr12:6373751-6374057
  hypo
gggcccactggcgtcgtgccagccctttcaggtaacttaggtcaatgagaaacaaacaggttccagaactttctctagatcatactgcagcaggtgctgaagtggggatttgaaccaggttcaccacactttgaaacccatgctctctttaccaccgcttgagacacccaaacacacacatgtatcggcacggctacgtctcccggtctgtttccagtttcacgttcctccctcctgggccaaaccaccactggggactcttttcttcctacagctccaggcagcgctgcatcatggaaaggtcac

SEQ ID NO: 264524 - DNA, 88 bp, Homo sapiens
  chr12:6375951-6376039
  hypo
tctgtctggctgacaataaccgctcaccgcctaggactagacaattcacaagacagtttcttaacacgtccttattccaacctcaaca

SEQ ID NO: 264525 - DNA, 35 bp, Homo sapiens
  chr12:6381467-6381502
  hypo
tgtcattctgactcgtgttgagcatagactgtggg

SEQ ID NO: 264526 - DNA, 187 bp, Homo sapiens; identical to SEQ ID NO: 214753
  chr12:6388701-6388888
  hypo

SEQ ID NO: 264527 - DNA, 275 bp, Homo sapiens; identical to SEQ ID NO: 214754
  chr12:6391153-6391428
  hypo

SEQ ID NO: 264528 - DNA, 38 bp, Homo sapiens; identical to SEQ ID NO: 214755
  chr12:6396069-6396107
  hypo

SEQ ID NO: 264529 - DNA, 105 bp, Homo sapiens; identical to SEQ ID NO: 214756
  chr12:6421423-6421528
  hypo

SEQ ID NO: 264530 - DNA, 50 bp, Homo sapiens; identical to SEQ ID NO: 214757
  chr12:6422991-6423041
  hypo

SEQ ID NO: 264531 - DNA, 245 bp, Homo sapiens
  chr12:6425447-6425692
  hypo
gtccccagcctgattcgaacccaccggagcttttgggatgaggtgctggggcccaccctggaggagactcgggcctcgggccagcctctggaccccattggtctgcaaagtggcttcctgacggtgaggcctgtgaagggctgtgtctggatggggcaggactcggagccctcgggggtcctgtgtgtagggcatgcccacagtatgcaaatctctgtgatttgaggggccgcaggacacagccc

SEQ ID NO: 264532 - DNA, 214 bp, Homo sapiens; identical to SEQ ID NO: 214759
  chr12:6438303-6438517
  hypo

SEQ ID NO: 264533 - DNA, 158 bp, Homo sapiens; identical to SEQ ID NO: 214760
  chr12:6464388-6464546
  hypo

SEQ ID NO: 264534 - DNA, 38 bp, Homo sapiens
  chr12:6481166-6481204
  hypo
atggccaggctggtctcgaactcctggcctcaagtgag

SEQ ID NO: 264535 - DNA, 418 bp, Homo sapiens
  chr12:6483476-6483894
  hypo
ccctggaccacccttccaggcgcaggcaccagggaaggggcagagggactaaccgacctgtagggattgagggtgcagatggtcactgcggggaagacgagcttgtccgagttgaggttgatgttgaggctgacggggtagctgaagtactctccgaaaagcaggccgaattgccagtacatcatgccaaaggtgcagagccacagcactgcccagaaggccgtcttcatgcggttgtgctgggagcacaccaggcggatggcgccgtggatggtggtgttgttgcagaagaactcgaagagctctcggtaggagcggtggaactcgatcagggcctcctcctccgccgtgggctgctggggcgccgcaggttcggggcccagcccctgctcctcacgcttgttccccttcatgagcc

SEQ ID NO: 264536 - DNA, 97 bp, Homo sapiens
  chr12:6514987-6515084
  hypo
tatgagagtatttttaaaaacattcaaattgtcggtcacagctccttgcctatgcgcctaaaaagagatagcccaagacagacgggggaaagaaaag

SEQ ID NO: 264537 - DNA, 120 bp, Homo sapiens
  chr12:6531710-6531830
  hypo
tacaggtgtgagccaccgcacccggcccctattttaattttaaaaagaaaacaagatcaggtcatactttggtgcattctttttttctttctttctttttttttttatttgagatggagt

SEQ ID NO: 264538 - DNA, 186 bp, Homo sapiens
  chr12:6587832-6588018
  hypo
gtcggccaggcagcggcagggggaagtgggaatcttctcacccagagaagcactgactcccagctggggaatgcagacatggagatgactctggagcgagcagggagtatgctcgatgcagaccagatgccgccgtccaggatttctgccgcagccactttcatacagcacgagtgcttccagaaa

SEQ ID NO: 264539 - DNA, 497 bp, Homo sapiens
  chr12:6636152-6636649
  hypo
cagtgagtggagagctctgccggcgccgagttctccgggaagaacaggagcacaagaccaaagatcccaaggagaaggtgtgtgaatgtcctcagcacttcccagatttatttcatacctcagctcagaactgagctgatccccttccggcaatctctgctcctctgctattacatgaagcgaagagtttctgcctctctgtggctactaccgtaggaaaggttcgtgtgaacaatgacgaaactgtcagtgatcacccaggaaggaaagatttaggtaaatgcagagtgtggagttagagacctcagcataaaacagaggctttgtgtctgaggcagggtttgttagaacacgcacgtacccgccggccttttccatcagcttccattgctggcctggccccggatggggccctgtgttccctccactagaggcaatgatgtcttgcagacaaataagacacagagccttgcagcgctggagaaaagtctgacctc

SEQ ID NO: 264540 - DNA, 57 bp, Homo sapiens
  chr12:6637925-6637982
  hypo
gaaggggcaggtcagcgagatggcggtgctgctcatcgaccccgagcctcagattgc

SEQ ID NO: 264541 - DNA, 212 bp, Homo sapiens
  chr12:6638551-6638763
  hypo
aggcagacaggggccgtggcagagaacatcagagaagacgagtgctgggggagggtccagggttggtcttagtggatggcagagctggccctgggccatcgaacatcctcatctccccttcctgcagacagctcctctcctacatcaccaaggacaagcagacagagagcctggtggaaaagctgtgtcagcggttccgcacatcccggtat

SEQ ID NO: 264542 - DNA, 475 bp, Homo sapiens; identical to SEQ ID NO: 214764
  chr12:6678912-6679387
  hypo

SEQ ID NO: 264543 - DNA, 110 bp, Homo sapiens
  chr12:6686946-6687056
  hypo
tcaccttaaaccttcgagctagaaatttattcttgatctctaagaaattgccacggttcatttcacccttgaaaggctcattgaggatggcatagcgtgggtcattctgg

SEQ ID NO: 264544 - DNA, 38 bp, Homo sapiens
  chr12:6749347-6749385
  hypo
cgtacaaatccagcccgtaaaagcggcctgattctggg

SEQ ID NO: 264545 - DNA, 44 bp, Homo sapiens; identical to SEQ ID NO: 214765
  chr12:6831877-6831921
  hypo

SEQ ID NO: 264546 - DNA, 36 bp, Homo sapiens
  chr12:6848750-6848786
  hypo
acagagcgagactccgactcaaaaaatgaagaaaaa

SEQ ID NO: 264547 - DNA, 239 bp, Homo sapiens
  chr12:6857750-6857989
  hypo
aagaaaaaacttacgttaagagccaggagttggggtttaatcccctatgtcagtgagaacattgttctctttccatgtcaacttgtactaccaaaggcagctcctgcgggagcctgaactgagcctgccttgcagccgaggaccgtccgcaggtgcaccccaccctccttactcctgatacttacaagagaggctgagggcccggggccctcaccagtcatagcggcgggactgtcggg

SEQ ID NO: 264548 - DNA, 47 bp, Homo sapiens
  chr12:6868198-6868245
  hypo
actgtttggaaactcgcgactgtgtggctatccgggataactgacct

SEQ ID NO: 264549 - DNA, 45 bp, Homo sapiens
  chr12:6871063-6871108
  hypo
aaaaaaaaaggcaaaggcattcccgaaggagggcagggggaataa

SEQ ID NO: 264550 - DNA, 55 bp, Homo sapiens
  chr12:7249425-7249480
  hypo
agggcgatgtccccgctaaagttatgggactcattctgacggtagtcggggtgca

SEQ ID NO: 264551 - DNA, 48 bp, Homo sapiens
  chr12:7351759-7351807
  hypo
ttcccagcctcctccatccacgttctcgaaccaacttactttattctt

SEQ ID NO: 264552 - DNA, 88 bp, Homo sapiens
  chr12:7368502-7368590
  hypo
ccattttacaaagacgcgatttaaattatttgtaatcaatttaaatatattaattaaattaaaaaaaaatttttttttgagatggagt

SEQ ID NO: 264553 - DNA, 42 bp, Homo sapiens
  chr12:7826421-7826463
  hypo
ttttattttttattttttttcgttttgagacggagtctcgct

SEQ ID NO: 264554 - DNA, 265 bp, Homo sapiens; identical to SEQ ID NO: 214767
  chr12:7858583-7858848
  hypo

SEQ ID NO: 264555 - DNA, 37 bp, Homo sapiens
  chr12:7910484-7910521
  hypo
tgtgaaaatacattgtcagccgggctcggtggctcaa

SEQ ID NO: 264556 - DNA, 38 bp, Homo sapiens
  chr12:7963845-7963883
  hypo
atagtgatatacagtccgacttctgtatctgcagatgc

SEQ ID NO: 264557 - DNA, 32 bp, Homo sapiens
  chr12:7968173-7968205
  hypo
ttgttttgttttttttgagacggagtttcgct

SEQ ID NO: 264558 - DNA, 120 bp, Homo sapiens
  chr12:7969976-7970096
  hypo
ctgggattacaggagtgagccacctcgcccagcctgactactgtattattaaggtgtatcttcaatatgtcagcctacgtaggctggttttaagataaggtgagttggccgggcatggtg

SEQ ID NO: 264559 - DNA, 103 bp, Homo sapiens
  chr12:8001694-8001797
  hypo
cccacctccgtctcccaaagtgctgggattactggtctgagacactgcgcccgctttcactgagttcttatttggacctctcaatcttcgggcaagataacat

SEQ ID NO: 264560 - DNA, 32 bp, Homo sapiens; identical to SEQ ID NO: 214768
  chr12:8009570-8009602
  hypo

SEQ ID NO: 264561 - DNA, 32 bp, Homo sapiens; identical to SEQ ID NO: 214769
  chr12:8017218-8017250
  hypo

SEQ ID NO: 264562 - DNA, 64 bp, Homo sapiens
  chr12:8022094-8022158
  hypo
atgttactcttcacgcgtatatagccatggttctttccaaggaaattcccgcaaaaccagttgc

SEQ ID NO: 264563 - DNA, 31 bp, Homo sapiens
  chr12:8071329-8071360
  hypo
aaagctgttttcttttgagacggagtttcgc

SEQ ID NO: 264564 - DNA, 38 bp, Homo sapiens
  chr12:8072019-8072057
  hypo
gcatttttttttttttgagacggagtctcgccctgtgg

SEQ ID NO: 264565 - DNA, 38 bp, Homo sapiens
  chr12:8072297-8072335
  hypo
catccggcctcagctacgtgcatttttattcaaaggct

SEQ ID NO: 264566 - DNA, 31 bp, Homo sapiens; identical to SEQ ID NO: 214770
  chr12:8146997-8147028
  hypo

SEQ ID NO: 264567 - DNA, 31 bp, Homo sapiens; identical to SEQ ID NO: 214771
  chr12:8147088-8147119
  hypo

SEQ ID NO: 264568 - DNA, 98 bp, Homo sapiens
  chr12:8178281-8178379
  hypo
ttgactacctactatgtatccgacactgccgggcaccagagataagatgtagttctcagcaaggcgctgtggctcacgcctgtaatcccaacattttg

SEQ ID NO: 264569 - DNA, 31 bp, Homo sapiens; identical to SEQ ID NO: 214772
  chr12:8180905-8180936
  hypo

SEQ ID NO: 264570 - DNA, 120 bp, Homo sapiens; identical to SEQ ID NO: 214773
  chr12:8181176-8181296
  hypo

SEQ ID NO: 264571 - DNA, 36 bp, Homo sapiens
  chr12:8252176-8252212
  hypo
aaaagtggcacactgggggccgggcgcggtggctca

SEQ ID NO: 264572 - DNA, 32 bp, Homo sapiens; identical to SEQ ID NO: 214774
  chr12:8398731-8398763
  hypo

SEQ ID NO: 264573 - DNA, 36 bp, Homo sapiens; identical to SEQ ID NO: 214775
  chr12:8423886-8423922
  hypo

SEQ ID NO: 264574 - DNA, 120 bp, Homo sapiens
  chr12:8597879-8597999
  hypo
ctaatagccagggggggataggggctggctgttactccccgtacagttgggggggcctcacccccctgcgatggggctcctaagagccagggggagagaggggctggatcttactcccgg

SEQ ID NO: 264575 - DNA, 47 bp, Homo sapiens
  chr12:8601976-8602023
  hypo
actccactttgaatcgcgtcactcagggtggccgcagtcgcccgcag

SEQ ID NO: 264576 - DNA, 164 bp, Homo sapiens
  chr12:8751034-8751198
  hypo
aagatacgtgaaatgttaatattaatggacccattttacagagaggaaagaaattaaggctttacagagattaaacatctaacccattgtcacatggaaccagaactctagtttaggtttacttgacttcgaagtcatactgacaggcccggcacggtagctca

SEQ ID NO: 264577 - DNA, 489 bp, Homo sapiens
  chr12:8757660-8758149
  hypo
ctgcttctaatctttaatttcggctccagaggtgaaccagaatccccgcccacttcttcccctcgagcttccccactaactcattcattccgcatcgcaatcccgaatgcgggctgctgcactgcgcctgcgcggaaggccctttcgcacctttgaaggtcatgatggctatttgcaccccggcgcggtgcagccgccgcagcccctcgggctcagccttgcggtcctcacagaagtagaggcgcgcggtgaagatcctcagactgaggttggggttccctcgcagaaagtcggccacatgtcgggcacagtcgtagcaggggctccaggaggtgaaccaggtgacgcggtagcagcggccagggtctaggtcccagtccgagatgtagcggaggaagagcaattccacgtggcagccgttctggagagacagagaggaccacgctaaaattcactgacttttattgcggctctggtagccttagtcat

SEQ ID NO: 264578 - DNA, 274 bp, Homo sapiens
  chr12:8808409-8808683
  hypo
cgcttgagtcacatcgtctgaaaagaaaattagaaaacaatttctgagattctctgtctccctgccacccttgcacttccagtaagttaaattgcgaagcatagtgcccagcggagttgagtatcccacaaatgtttttccttgactgcttacaataatgacaaacgattgatgacttctttgcaatacttatttaaaatgaaatcggatataccaaaggcattgtgattttgacattcataattctttttttttttttttttttgagacggag

SEQ ID NO: 264579 - DNA, 33 bp, Homo sapiens; identical to SEQ ID NO: 214779
  chr12:8808923-8808956
  hypo

SEQ ID NO: 264580 - DNA, 32 bp, Homo sapiens; identical to SEQ ID NO: 214780
  chr12:8890590-8890622
  hypo

SEQ ID NO: 264581 - DNA, 180 bp, Homo sapiens; identical to SEQ ID NO: 214781
  chr12:8893949-8894129
  hypo

SEQ ID NO: 264582 - DNA, 89 bp, Homo sapiens
  chr12:8906530-8906619
  hypo
taagccatcttattcgccatgaagcgccatacctgttccagaagtatgttaaagagtctcatggacgggatgtacgtgtcattgtcgtg

SEQ ID NO: 264583 - DNA, 42 bp, Homo sapiens
  chr12:8936109-8936151
  hypo
tgtagacaattgcaacgcaatggcaactatcttattaaaatt

SEQ ID NO: 264584 - DNA, 120 bp, Homo sapiens
  chr12:8936631-8936751
  hypo
actcaggaggctgaggcaggagaatcgcttgaaaagccttagctgggcatggtgcctcacgcctgtgatgccaacactggtaggttgaggtgggcggctcacttgagcccaggagttcaa

SEQ ID NO: 264585 - DNA, 35 bp, Homo sapiens
  chr12:8975182-8975217
  hypo
gtatataaagctacgcggagcgatctctgcccctg

SEQ ID NO: 264586 - DNA, 132 bp, Homo sapiens
  chr12:8995543-8995675
  hypo
ctgtacacagctacgtttatggattctttatccatccttggctggaccgctaatgaaatacccacatgccattctcaggcagtgaagatttgagagaaagagctctatttgaaaaccgtaacaagtccgtgg

SEQ ID NO: 264587 - DNA, 300 bp, Homo sapiens; identical to SEQ ID NO: 214782
  chr12:9108768-9109068
  hypo

SEQ ID NO: 264588 - DNA, 99 bp, Homo sapiens
  chr12:9109308-9109407
  hypo
tggggattaccggcatgagccactgcacctgacctttgaagttccgcagttgctggtgtcttttgagttttttggacgccactgcgttcccttcgttca

SEQ ID NO: 264589 - DNA, 42 bp, Homo sapiens
  chr12:9187311-9187353
  hypo
ggattacaggcgtgaggcaccgtgcctggccattatactttt

SEQ ID NO: 264590 - DNA, 199 bp, Homo sapiens; identical to SEQ ID NO: 214783
  chr12:9585208-9585407
  hypo

SEQ ID NO: 264591 - DNA, 36 bp, Homo sapiens
  chr12:9824089-9824125
  hypo
acaggcgtgagccaccgcgcccggccgaggattaac

SEQ ID NO: 264592 - DNA, 206 bp, Homo sapiens
  chr12:10025415-10025621
  hypo
tctgggactcctgccgccgccacgcctgcagcagcacgccctggcctgcaaggccagctctgtcaggattagcagcttaactctttccctctgggcacaagctcgttcctggttcccctctgcctgccttcaaggcgactggctctcccttacaagggtcaatagtgctactctctttctgggcaccagtgcgagccatgtcatgc

SEQ ID NO: 264593 - DNA, 214 bp, Homo sapiens
  chr12:10073226-10073440
  hypo
gctgtatttactcaccccttcagttcctctctttgagagctgcgcactccagctacttctagtcggccatcttggccactctccaacccccagcttttctttaaaaactaatctattttcttactctgtgtccctagagtccacgtgtctccttctttgccctctttacttccattaattcactcgcgtcttcgaagtgcacatatttccttca

SEQ ID NO: 264594 - DNA, 47 bp, Homo sapiens; identical to SEQ ID NO: 214784
  chr12:10264178-10264225
  hypo

SEQ ID NO: 264595 - DNA, 112 bp, Homo sapiens; identical to SEQ ID NO: 214785
  chr12:10267999-10268111
  hypo

SEQ ID NO: 264596 - DNA, 122 bp, Homo sapiens
  chr12:10523866-10523988
  hypo
tccaattggctatccgcttcacgctggcatttcgtcaatctaaaaaggtaaaaacaaaacaccgcaggccaaaggaaactccttgagtcctttaatcctcaggtttacgtaaatgttattaa

SEQ ID NO: 264597 - DNA, 32 bp, Homo sapiens; identical to SEQ ID NO: 214786
  chr12:10767896-10767928
  hypo

SEQ ID NO: 264598 - DNA, 75 bp, Homo sapiens
  chr12:10823868-10823943
  hypo
caggcgtgagccaccacgcctggccatgttgatttttaatagcgttgaaatagcgaaggggaattaaggttacag

SEQ ID NO: 264599 - DNA, 65 bp, Homo sapiens
  chr12:12001023-12001088
  hypo
gacatgtctgttcacgcttatgacaattgcaagagacaccatccattgagcgtttatgatggcag

SEQ ID NO: 264600 - DNA, 165 bp, Homo sapiens
  chr12:12006113-12006278
  hypo
ctgtctcagaaaaaaagtatacgattttcataatcaaaaaagtttgatttacaacttcacatcgctctgaccttttgagtttcaagtgctgcattctgtgccccatgagcttggtgagggtaggaggtggcaggtgcgctccaattgtatctttggcaccgtgcc

SEQ ID NO: 264601 - DNA, 188 bp, Homo sapiens; identical to SEQ ID NO: 214797
  chr12:12184633-12184821
  hypo

SEQ ID NO: 264602 - DNA, 302 bp, Homo sapiens
  chr12:12476519-12476821
  hypo
tgaccttcaatgaacgggttataaaattcactcatgatcacttattgaatgcctatgtgccagacacactgttaagcatgatggaatcagagaaatgttgctgtctaacgtatcccagtctagtggggtaatatataacctgatacattatgattccatggaagtgtttcactaatggtataaatcacgagctgtgtcagaaacccaggaggaattgatacgtctcccgggagagtgtggggagactctggtggaggtgacgtgtgatcgtggtcttgaaggatgagcggaaatttgccaag

SEQ ID NO: 264603 - DNA, 42 bp, Homo sapiens
  chr12:12504473-12504515
  hypo
cattattagaaacttcgtattcggtgctttaatacaatgaac

SEQ ID NO: 264604 - DNA, 42 bp, Homo sapiens
  chr12:12504815-12504857
  hypo
caggcgtgagccactgtgcccggcctgaacctgttttcattg

SEQ ID NO: 264605 - DNA, 40 bp, Homo sapiens; identical to SEQ ID NO: 214798
  chr12:12604522-12604562
  hypo

SEQ ID NO: 264606 - DNA, 179 bp, Homo sapiens
  chr12:12605362-12605541
  hypo
aacttggagagccgcggtttcccatgattgttaagattaggatcgccttgatcgtggctgggtcgggcccaccgggtaggcactgggggccagggtgcgggccggcgcgcaagcctcgcctcgtgatcttgccggcgatccttccccacccactccctcccgcacgccggcaagagttt

SEQ ID NO: 264607 - DNA, 445 bp, Homo sapiens
  chr12:12618403-12618848
  hypo
cacaggctggacacccggccctgcggagaggacttgattaaacaaggtataatgtacttctctttcccatccacagatggatctgtctgtagaaactctgttcagcttcatgcaggagcgccagaaaagatacgccaagtatgccgagcagatccagaaagtgaacgagatgtccgccatcctccgccgcatacagatgggcatcgaccagactgtgcccctgctggacaggctcaacagcatgctgcccgagggcgagcggctggagcccttcagcatgaagcccgaccgcgagctcaggctgtagctgctgcccggcctgcctggggctgggagccccagacaccgacaccctgaggacgtgtggagctaaggtcatatcatctgaccaggtctggaggctggcgggaggctccctgaaagtgggtgcgaaggagtccggctg

SEQ ID NO: 264608 - DNA, 90 bp, Homo sapiens
  chr12:12656416-12656506
  hypo
cccgtttttttgttacggtgatcaaacattcagtatctagcgccatctgtggggccttcctccacctttgagctgcggctgtttagctac

SEQ ID NO: 264609 - DNA, 97 bp, Homo sapiens
  chr12:12848446-12848543
  hypo
tgagagacaaaaagaggtcagattggtcagatccctcgagacagttcccaaattcctgacttctgttaccgcgactgttcttcgcaattccacctcg

SEQ ID NO: 264610 - DNA, 86 bp, Homo sapiens
  chr12:12869234-12869320
  hypo
gaaagcattcactagcatctgaatattgttctgagtttgttggagcagtgaaatctggtgagagagaagggtggaggaaggaagga

SEQ ID NO: 264611 - DNA, 101 bp, Homo sapiens
  chr12:12869500-12869601
  hypo
gacagctacaaagtttattaagggacttgagagactagagttttttgttttttttttttaatcttgagttcctttcttattttcattgagggagagcttga

SEQ ID NO: 264612 - DNA, 82 bp, Homo sapiens
  chr12:12902967-12903049
  hypo
ccccacactgaaatcccttccggtagagacaaagcataataagaaattgggaaagatggccgggcgcggtggctcacgcctg

SEQ ID NO: 264613 - DNA, 31 bp, Homo sapiens
  chr12:12923066-12923097
  hypo
ggggcggtggctcacgtctgtaatcccagca

SEQ ID NO: 264614 - DNA, 176 bp, Homo sapiens; identical to SEQ ID NO: 214801
  chr12:12989449-12989625
  hypo

SEQ ID NO: 264615 - DNA, 147 bp, Homo sapiens
  chr12:12990441-12990588
  hypo
ctgtggaccctcctcgtcaacttccaaacacttggttcttttccaaagcctgcctttccctctgggatgttgatgaagccacttgctttgtttgctcctttccccaccccctaccccagtctgtaagtcaggaatactctttccccc

SEQ ID NO: 264616 - DNA, 89 bp, Homo sapiens
  chr12:12990618-12990707
  hypo
accgacccccctcactgcttccctctctcctcactgcgtatccatccagtaggcttggtccacagcccgtgctcctgtatcaaataagc

SEQ ID NO: 264617 - DNA, 37 bp, Homo sapiens
  chr12:13003128-13003165
  hypo
gacgtggccgggcgcggtgggtcacacctgtaatccc

SEQ ID NO: 264618 - DNA, 158 bp, Homo sapiens
  chr12:13035881-13036039
  hypo
aggagagctagcacacagtacgacttcaatcaatacttggttcttacctctgtcttccctgaggtgtttcattcttcagatgcctcaggaaaccatgagtgaggctgtattaaacaacgtgtttaaggccgggcgcggtggctcatgcctgtaatccc

SEQ ID NO: 264619 - DNA, 37 bp, Homo sapiens
  chr12:13050517-13050554
  hypo
cagacaaaaaggagcgaatacgcttcttttttttttt

SEQ ID NO: 264620 - DNA, 36 bp, Homo sapiens
  chr12:13050854-13050890
  hypo
tttaacctcctttgcggactcctacctagatgagat

SEQ ID NO: 264621 - DNA, 86 bp, Homo sapiens
  chr12:13056218-13056304
  hypo
taattttttaaaaatagacacggtcttattctatctcccaggcagaattgcggtgacgtgatcacagctcactgcagcttcgaaat

SEQ ID NO: 264622 - DNA, 355 bp, Homo sapiens
  chr12:13079663-13080018
  hypo
ttgggacaaggcgtcggccagtcatccacattgtctttttgcagatccactaatcttccatgcaggctccaacagctccttcccggcctgggaacccaaatccgcaggaagaatctcggggtgttgtcttggcttattcattcagagctgtcgtgtgtggttctgcaaacagtactcagatgcgttccctctccccgtagggatcttgctggagatgcccagggttaacagtggaactccatatggagacagaggcatggggggagcttcgctggagatgggacagcctgctccaccgcgaagcctactgaggctctcttcttacgtaccccgcgcaatctcatctccctgaaca

SEQ ID NO: 264623 - DNA, 233 bp, Homo sapiens
  chr12:13173189-13173422
  hypo
gttaagcccaacattcgaatcatcctagcccaggtaccagacatgtcagtgaagaagacttcatccgcagacatttgagacatccccaactgcttaaacctttccagtggcatcgcccagacattgtgaagcagagacttgctatcctcactgcgctttgtcggaattcttgacccatagaatccttaggtataataaaatggctgttttatggcattcgtgtgaaggaggat

SEQ ID NO: 264624 - DNA, 199 bp, Homo sapiens
  chr12:13215211-13215410
  hypo
taggcttagtactgctgggccgtgtgctcacgtggagcggaataaataacatccttcccaggtttagaggttggagtttggtcgcggggtgcttctgagtgaaaaaaactgggatttgagttaactgtagaactgaagccatctggaaaacttcctatgatgctgtggtgcttacttatgtgaccgtgtgggggaagga

SEQ ID NO: 264625 - DNA, 174 bp, Homo sapiens; identical to SEQ ID NO: 214805
  chr12:13222376-13222550
  hypo

SEQ ID NO: 264626 - DNA, 191 bp, Homo sapiens
  chr12:13237737-13237928
  hypo
accatgctcaagagacggatgttggcttaagcacatgttgataatcagcagacgtgtaaggtagggctcaagcctactccccaaacccgcttaactcctaacactgctcttcctctacagatgacctaactgcttctttcagctcctggctggcccctctttgaaatcccttgttccgcagctcggagtag

SEQ ID NO: 264627 - DNA, 51 bp, Homo sapiens
  chr12:13281247-13281298
  hypo
gctctgggggtcttcgtgggcaagaagcgtgtctgtcgcctgcatataatt

SEQ ID NO: 264628 - DNA, 176 bp, Homo sapiens
  chr12:13519033-13519209
  hypo
catcttgtagcggtcgcgggtctgacacacacggttccagttgttgtggaccttgcaaattctctggccgagatccaggcagtaggcgtcctcctccgcgggctcccgctgaggccccatcacatgttcctggtgcagttcttctccactgtgctgtgaagcgtgtgggatgtgcc

SEQ ID NO: 264629 - DNA, 646 bp, Homo sapiens
  chr12:13716429-13717075
  hypo
ctttcttgcaagcctcacaccggatgcacgcctgcctgcccgagttctgacccgtcaccgtcgtggagtagttgtgcagcttggagggacagctgcggcagaagttgcccccggaccggtcctcccactccacgttggtcaggttcttctcccaaggtgcaggtaccccgctgaccacgccgtgtttgtcgcccgtcccgtgcttgatgtgagacctgttggtacagggccctcctccgctgacggagtcgcgcttaaagtcatcactccgctccttgtagatgtcggtcaggtctacgtgctcccagtggggtgagttctcctttgttcggaactggtccaggtagaagtcccgtagcccttccttgtccctgaagtagcgcttgtggtcaggggagcggggcggtcggcgacggtaggccagctcgatctcgtcaaactccctgcgggacttggccgaggcaggccgcttcttcaggctgtccttatattgctgcttacgcctcttggcggcattgccctcgatgttcccataggtgacggtgtgggttgagatgtcagagacatcggagcggatcaagtcgtcgtggccactgtagcggtcgctcttgaaggagaatttgccgtacaggtcactgagctggct

SEQ ID NO: 264630 - DNA, 36 bp, Homo sapiens
  chr12:14469618-14469654
  hypo
accatacctggcctcagtctgcgttttaaattgatt

SEQ ID NO: 264631 - DNA, 36 bp, Homo sapiens; identical to SEQ ID NO: 214807
  chr12:14721513-14721549
  hypo

SEQ ID NO: 264632 - DNA, 36 bp, Homo sapiens; identical to SEQ ID NO: 214808
  chr12:14721789-14721825
  hypo

SEQ ID NO: 264633 - DNA, 197 bp, Homo sapiens
  chr12:14743808-14744005
  hypo
cggcaggcaggtggcagaggcgactagttcttccggggcagctgtggtgcagtttccagcatacagtctctcatggtataggtgccaagcagtgcctgctgtggtgtttttctgaaatagttctctgtcgtgactagttattgtttctggattctcctggctttgcgagggtaagcgtctggaaacttttatggcag

SEQ ID NO: 264634 - DNA, 87 bp, Homo sapiens; identical to SEQ ID NO: 214809
  chr12:14818119-14818206
  hypo

SEQ ID NO: 264635 - DNA, 283 bp, Homo sapiens
  chr12:14818749-14819032
  hypo
caagttccagtcatgcatatcgtatttctatactatttcaaaggttgagttgctgaagcggcttcattgtctggggacatacccaaggttcgtcatcgcgtgacgagaagattaaggacacagacgcaaacacggagcgggtcaagtagcggaaagtttaataggcaggaaagaagagaacagctcaccggtagagaggtaggagggctctgaagggaaaaaaccatgcttgtggtgggaagcagtaggttatatagggaggcttcaggaggcggtgtctgat

SEQ ID NO: 264636 - DNA, 240 bp, Homo sapiens; identical to SEQ ID NO: 214812
  chr12:14819092-14819332
  hypo

SEQ ID NO: 264637 - DNA, 72 bp, Homo sapiens
  chr12:15057301-15057373
  hypo
gctgagctggacgtcgagaggaacacactgacactggcacacctgcaggccaccgaccggcagaagcagaac

SEQ ID NO: 264638 - DNA, 120 bp, Homo sapiens
  chr12:15095459-15095579
  hypo
tctgtccactccttcttaatcgacaggttccactcccagctgaggtggtcttgcttgtcatcgtcggtgaagaaggacttgttgtggtacgtgcctcgcgccagcatgcccttgggagcc

SEQ ID NO: 264639 - DNA, 58 bp, Homo sapiens
  chr12:16109905-16109963
  hypo
cggcagttctgaggcgtgcggaacaaatccaggctcgcagaaccgtgaaaaaggagtg

SEQ ID NO: 264640 - DNA, 196 bp, Homo sapiens; identical to SEQ ID NO: 214814
  chr12:16150422-16150618
  hypo

SEQ ID NO: 264641 - DNA, 112 bp, Homo sapiens
  chr12:19260900-19261012
  hypo
ggcaggcgtactccacggtgtagatggctccccggctctactcctcccaacgctgcatgtctgccttgcgctgggccagctccggggagggagtggcgcatgtgctcctgca

SEQ ID NO: 264642 - DNA, 311 bp, Homo sapiens
  chr12:19459336-19459647
  hypo
gtagagaaaaggtggcgacggcgactggagcagcagaggctgtagcatcggatacccacctcccacgaaccggttcctcttccccctccttgctgtgtgtttgatgtgttgaagcaggagggagaacgccgcgagcagcgccgtgagcaacactaccatcgtccccagcactgcggatccgggccctagcggcgggcccagtagcggaggtggtggcggcggtggaggcggcggcatcgaggtaataggtgactgatctccccgggcgctagctctgagcagatgcggactctcttcggtttcctaggcaa

SEQ ID NO: 264643 - DNA, 151 bp, Homo sapiens
  chr12:19512469-19512620
  hypo
tcagcaaagaggtagcgagattattttatgaaaggtattccaaaggaatagatttgtgaagattaaatcaagtggtaaggttgaaaataaagtgtgtttctttcagtcacagagtccatagagctaaatgaaaaaataagctttctggccg

SEQ ID NO: 264644 - DNA, 36 bp, Homo sapiens; identical to SEQ ID NO: 214819
  chr12:19539887-19539923
  hypo

SEQ ID NO: 264645 - DNA, 84 bp, Homo sapiens
  chr12:19549593-19549677
  hypo
cttaggaaaataataccttttctttttctaaataaaatacaaacagagtcttgctgtgttgccgacaattgtcttgaactcctg

SEQ ID NO: 264646 - DNA, 35 bp, Homo sapiens
  chr12:19636459-19636494
  hypo
tgaagcaaaagttcacggtgcgagtctccacatgg

SEQ ID NO: 264647 - DNA, 43 bp, Homo sapiens
  chr12:19928383-19928426
  hypo
tgtggcattttccccgctcctctggccgccgaaggagtcctgt

SEQ ID NO: 264648 - DNA, 41 bp, Homo sapiens
  chr12:20015441-20015482
  hypo
gagtttggctcagccgggcgcggtggctcacgcctgtaatc

SEQ ID NO: 264649 - DNA, 180 bp, Homo sapiens; identical to SEQ ID NO: 214820
  chr12:20704639-20704819
  hypo

SEQ ID NO: 264650 - DNA, 109 bp, Homo sapiens; identical to SEQ ID NO: 214822
  chr12:21847672-21847781
  hypo

SEQ ID NO: 264651 - DNA, 156 bp, Homo sapiens
  chr12:22161232-22161388
  hypo
gtccagggctagagtaagtgcggtcctccggcccttgtggcccagagccatgctgaggagctgtgctgcgtgcctccgcatgctggggtccctgcgcccaccaccggtaggcctgcccctgctgggtagtgagccgtgacctgtgctgacccaaag

SEQ ID NO: 264652 - DNA, 137 bp, Homo sapiens; identical to SEQ ID NO: 226549
  chr12:22529506-22529643
  hypo

SEQ ID NO: 264653 - DNA, 159 bp, Homo sapiens
  chr12:22698124-22698283
  hypo
tctgtctccaaaaaaagaaaaaaaagaaagaaagaaatagagataccaggcacatctcgaatagtgaaataaatatttagtgaaatattttattcagtcataggcacttgtgttgtgcactgggtcacagatattactgtgggcggggtgggggaggtc

SEQ ID NO: 264654 - DNA, 115 bp, Homo sapiens
  chr12:24323135-24323250
  hypo
ggcagctctcctctgccatccgcaaaatagcaggcagcgctagtgcaaggacagggaacttgcgccacatctgcaaggcaactgtagggtggccggtgacatttctgcattagtc

SEQ ID NO: 264655 - DNA, 37 bp, Homo sapiens
  chr12:24617258-24617295
  hypo
ttttttttttttttttgagacggagtctcactctgtc

SEQ ID NO: 264656 - DNA, 54 bp, Homo sapiens
  chr12:24679251-24679305
  hypo
aggaaaatttgatgatgcagcggagagaagaacgtgggtggagtcctgtatgag

SEQ ID NO: 264657 - DNA, 120 bp, Homo sapiens
  chr12:25203074-25203194
  hypo
aaaaaacaaataaaaaaaagtgttggtgaggatgtagagatattggagtcctagtgcacagttgggggaatggaaagtggtgcaggcactatagaaaatgttatggagggccgggtgcgg

SEQ ID NO: 264658 - DNA, 42 bp, Homo sapiens; identical to SEQ ID NO: 214825
  chr12:25344062-25344104
  hypo

SEQ ID NO: 264659 - DNA, 268 bp, Homo sapiens
  chr12:25537194-25537462
  hypo
agtttccctgtaggtttaatgaggagaaaagaatctgccattacccaatggcctgaactaggagtaaagtgcttatacaaagattaatcattaagcgactttattataggatactgttgcaaacacgaggcaatgagaaaatgagcttaagtatcttgggttttcctaaaaagtatctcttacatgaggacacacaaaaaaacatgtcacctgacaccttccgtgtttaaccgggactaggtttatcgaagttgacaggatagcagga

SEQ ID NO: 264660 - DNA, 179 bp, Homo sapiens; identical to SEQ ID NO: 214828
  chr12:26398930-26399109
  hypo

SEQ ID NO: 264661 - DNA, 165 bp, Homo sapiens; identical to SEQ ID NO: 214829
  chr12:26492034-26492199
  hypo

SEQ ID NO: 264662 - DNA, 63 bp, Homo sapiens
  chr12:26893421-26893484
  hypo
ggacatctgcgatacgtcacacagtagaaagagtaagcttcattccgccgtataaggtgatcc

SEQ ID NO: 264663 - DNA, 34 bp, Homo sapiens
  chr12:26949667-26949701
  hypo
gaagttatgactaggccaggcgtggcagctcaca

SEQ ID NO: 264664 - DNA, 199 bp, Homo sapiens; identical to SEQ ID NO: 214830
  chr12:26966974-26967173
  hypo

SEQ ID NO: 264665 - DNA, 39 bp, Homo sapiens
  chr12:27489588-27489627
  hypo
tatttttaaacctggctgggcgcggtggctcacgcctgt

SEQ ID NO: 264666 - DNA, 87 bp, Homo sapiens
  chr12:27600853-27600940
  hypo
tgtgctgccaccgcaaccttccctagcacttaacacattgcacctgaccagagccaagtggcctgcaagctccgcagggacaggaac

SEQ ID NO: 264667 - DNA, 153 bp, Homo sapiens
  chr12:27671115-27671268
  hypo
ttttgatcagtagtgagccacgacgtattattttaaaactgagccctatttaatattgtggcaggtggaaatcaaggggggacttactggttttgagtaatgctctgttgttactgggcgtgttcctaagacgttgaagaggccaatgcacag

SEQ ID NO: 264668 - DNA, 79 bp, Homo sapiens; identical to SEQ ID NO: 214831
  chr12:27742242-27742321
  hypo

SEQ ID NO: 264669 - DNA, 78 bp, Homo sapiens; identical to SEQ ID NO: 214832
  chr12:27742381-27742459
  hypo

SEQ ID NO: 264670 - DNA, 138 bp, Homo sapiens
  chr12:27842659-27842797
  hypo
tcccttaactatagttggtgcgcatgcgtgggccgggtgttggctgcacttccacctaaaggctgcattgctcattcccgccgccccaggaaggttgtataccagtcaaatctatacgtactgtacctgcgtttctct

SEQ ID NO: 264671 - DNA, 114 bp, Homo sapiens; identical to SEQ ID NO: 214833
  chr12:27950701-27950815
  hypo

SEQ ID NO: 264672 - DNA, 240 bp, Homo sapiens
  chr12:29373862-29374102
  hypo
ggtcttgtgtcccttctccccgattcttcccttggggcaggctgtccttatccacattgggctgccagcgcttgggaggggctactggcgcagtgtgtttactggagttgtgcgcatgctcacttgaggcatgaagtgagcgtgcgtacaactccaataactggtaacaacactcccttaccaggggcgtattcctgtaaggtcatatacccgtaaaatcagccgctttacctcttagtg

SEQ ID NO: 264673 - DNA, 45 bp, Homo sapiens
  chr12:29889831-29889876
  hypo
ctcagaaatgccacacgtaaagcagttccacgaagagcagcacaa

SEQ ID NO: 264674 - DNA, 34 bp, Homo sapiens
  chr12:29890152-29890186
  hypo
acatgcaaaacaggggtggccgggcatggtggct

SEQ ID NO: 264675 - DNA, 159 bp, Homo sapiens
  chr12:29945371-29945530
  hypo
tgctacatgcatacatcatgcgagcagcatgtgcgcattttcacagcacacatagaacatgctgcaacacgcgtgaagcatgcatgcagcatgcacactacatgatgcaagtagggcacaatgggtatggtacaagtcgtggcctgtgtagagcatgca

SEQ ID NO: 264676 - DNA, 178 bp, Homo sapiens
  chr12:30274285-30274463
  hypo
gcacacaggcagctggaagtcgagaggagcagaggtgcggaagagcgcactgagaggcaccagaagacgccggccggccattgaccagcggaacgacatggaccctgaggggaatatggctggggcggtcagagaagagtcaggccactgaacacccgactccaagagaaaaccacct

SEQ ID NO: 264677 - DNA, 42 bp, Homo sapiens
  chr12:30473847-30473889
  hypo
gagaaaagggacagtagggccgtgtggtgtccaaaggtggac

SEQ ID NO: 264678 - DNA, 190 bp, Homo sapiens
  chr12:30861038-30861228
  hypo
tggcctttaatcattcgtgcacaggactgctctcttggtgggtgggggaggggagcgggcatgttaattacccacacgtgtgttgactcaaagcttttgtcattaaatctgtactaaataaatacaaatattgctggcttattggggcttcactctcgctgtactctctcgtcagcggtgctgagcagtg

SEQ ID NO: 264679 - DNA, 35 bp, Homo sapiens
  chr12:30950607-30950642
  hypo
accgcgcccggcccggtaaactttttatcctcttc

SEQ ID NO: 264680 - DNA, 52 bp, Homo sapiens
  chr12:31255264-31255316
  hypo
cttgggtctgagatcgtgtgggggtggcagctggaaacgttgtgggtgtcat

SEQ ID NO: 264681 - DNA, 277 bp, Homo sapiens
  chr12:31255691-31255968
  hypo
cgggatctctcagccgaacaagccctctccaggtggtaggtacagagtggagagaggctgagttttgatcacagtcggagaggctgagggaaggggtagaacggagcagctggtgacgtgggtgatgacccgggaggtcctgacgtccacctgctgggctcttgtctcccccgcccaggtgtgtggtgatggtgggcatgcccttccccaacatcaggtctgcagagctgcaggagaagatggcctacttggatcaaaccctcgtgagtgaccccag

SEQ ID NO: 264682 - DNA, 108 bp, Homo sapiens
  chr12:31399695-31399803
  hypo
cttattatcgaaaccgcaaatatgtcgcataccaacgtctgagcccttttaattactgtcattgcctcctccctgacagctgtctacagcacccgaattattttcttt

SEQ ID NO: 264683 - DNA, 35 bp, Homo sapiens
  chr12:31663419-31663454
  hypo
atccattttcaagcacactgcggttattgctggaa

SEQ ID NO: 264684 - DNA, 36 bp, Homo sapiens
  chr12:31881031-31881067
  hypo
cagttctcccacctcggcctcccaagtttaatgtaa

SEQ ID NO: 264685 - DNA, 110 bp, Homo sapiens
  chr12:31973813-31973923
  hypo
acagtaaggtgcttttggcacgactacaaattatacgaacatatatgagatgtctctgcccacgtaagtccacttaggtctgaggtcccggagttcttacaggagtctgg

SEQ ID NO: 264686 - DNA, 36 bp, Homo sapiens; identical to SEQ ID NO: 214837
  chr12:31986810-31986846
  hypo

SEQ ID NO: 264687 - DNA, 39 bp, Homo sapiens; identical to SEQ ID NO: 214838
  chr12:32140933-32140972
  hypo

SEQ ID NO: 264688 - DNA, 223 bp, Homo sapiens
  chr12:32142773-32142996
  hypo
aaactctgtctcaaaaaaaaagtcagttagcattgaaacatgcatatgggaaaaacttgcatcaatgaagaaatatactcttaatcagaacaggacaaataacctaaagaggagggaatgaagagcagtgagaggcctgacagtgggaaaacaatgcctctcgggttggaaggcagaaagccaaaaatgcgaaagatacaaatgggtacgaagattggagtaa

SEQ ID NO: 264689 - DNA, 142 bp, Homo sapiens; identical to SEQ ID NO: 214840
  chr12:32155239-32155381
  hypo

SEQ ID NO: 264690 - DNA, 42 bp, Homo sapiens
  chr12:32597609-32597651
  hypo
attataggtgtgagccactgcgcatggcctaagcaatgattt

SEQ ID NO: 264691 - DNA, 79 bp, Homo sapiens
  chr12:32831135-32831214
  hypo
aagatttttttcatgaacaccgccccccgctgctccgacccctgcttttttatttatttatttatttatttggtagaga

SEQ ID NO: 264692 - DNA, 300 bp, Homo sapiens
  chr12:32831274-32831574
  hypo
ttctgcttcctaaagtgctgggattacaccgcgctcggtcctgaacacacattttgtttgtttgtttgtttgtttacaaaacccctggagaacccgcgtattctaacctgggctggtttttgtatttttgcaaaataacaccccacacattctcgtatcagcgtgcagatttttttgcacccagtttggttgtttgcggccataagcttttctttaagcctttccaacccgtccttctagagaaagtgtcttcataaggaagtcacactgctcacgcctgtaatcccaacactttgggag

SEQ ID NO: 264693 - DNA, 193 bp, Homo sapiens; identical to SEQ ID NO: 214843
  chr12:32864283-32864476
  hypo

SEQ ID NO: 264694 - DNA, 43 bp, Homo sapiens
  chr12:32995444-32995487
  hypo
gattacaggcatgagccattgcctggcccgcctcattatcttt

SEQ ID NO: 264695 - DNA, 87 bp, Homo sapiens
  chr12:33034690-33034777
  hypo
gaattctcctgcctcagcctctgtgagccaccgtgtctggcctcatattattattttatgttggctgaggctcgcgcctaggctaac

SEQ ID NO: 264696 - DNA, 682 bp, Homo sapiens; identical to SEQ ID NO: 214848
  chr12:34319319-34320001
  hypo

SEQ ID NO: 264697 - DNA, 122 bp, Homo sapiens
  chr12:34357282-34357404
  hypo
cgtccctgtgcacccggattcccattgccaccgacttcgagtaaactccagtcccgaggacacgagagacacccaggcctcaggccccatgggcacgctccacgccacggctcctaccagag

SEQ ID NO: 264698 - DNA, 393 bp, Homo sapiens
  chr12:34358287-34358680
  hypo
agactggggaaggactggagcgtcggaggaaagggggcctcccggaaagctcaaagtctgagcaggggatggaaaactctggcgtccccactcaacagcagggcggtgctgcggcgatccagtgcacgcccttgccgccggcgatggcgggaggctcttggaggccggaaagcgcagcgcagcggcccacagtgctccggcgtggagggggagagcagcccggcagggggcgagtggctgaggggtccctgatccgagccccgcggcctccgagtggggatgaagcctggagtcaggcaggcgtggctgggccaggctcttgtgtcatccaggcatcactgccggtgtctatggccataccaccctgaaggcgcctgatcttctctggtctgt

SEQ ID NO: 264699 - DNA, 354 bp, Homo sapiens
  chr12:34364381-34364735
  hypo
ccatggaaggaccccagcctcgctgcttttatccggtgctgctcacccccccagtctcggcgcagaggctgccgggaaggcactgtggtccgtgggagtaccccggcccaccgctttttccccttgcagcctcaacgtcccctttcaagcctggcgtcatgtttccttcccccggaggccttcttgacgctttggggtgccccccgtgggcgtgacacgcaccctgggaggaagccagggactgcacgacactcccaggcccagcgcaggcgctgccgggaaggcactgtcgtccgtgggaggactccggccggccgcgttttgccccatgccgcctcaaggtcttctttcaaa

SEQ ID NO: 264700 - DNA, 72 bp, Homo sapiens
  chr12:37971169-37971241
  hypo
cctcccacctggtccatacccggtgagccccgagacccaaccttgtgcaccgccagtcttgttatcaacaaa

SEQ ID NO: 264701 - DNA, 42 bp, Homo sapiens
  chr12:38543128-38543170
  hypo
gcagaaacatgtttggggaacggtttctgtgaacttggggag

SEQ ID NO: 264702 - DNA, 725 bp, Homo sapiens
  chr12:38548366-38549091
  hypo
agtgggccaggatcctcccacggatgacagtgttttcccggcagcccctgagccaggccctggagggtcgtggagtctctggcttgcaccaagggtgcgtgtgaagcccacgggggacaccccaaagcggcaagaaggcctccggggatagggaacaggacgccaggcttgaaacaggacgttgaggcagcacagggaaaaaagcggaaggccggagtcccccccacggatgacagtgccttccaggcagccactgcgccatgcccggggggcttgtgcagtccctgactcccacccaggctgcgtgtcgcacccacaggggtcaccctaaagcggcaagaaggccccagggggaagggaacaggacgccaggcttgaaaggggactttgaggtagtccggggaaaaacttcccacggaggacagtgttttccccgtagcccctgcgccagacccgggagagccatgcagcccatggctttcacccagggggcgtatcgctcccatgagggacaccccaaagcagcaagaaggcctccgggggaagggaacatgacgccacgattgaaatgtgaagttgaggcagcacggggaaaaaagcagcaggccagggtagtcccacggatgacagtgccttcccggcagccgctgcgcctgtcctgggagggtcgtggattctctggcttgcacccagggtggcatcgcgcccactggaggcacccaaag

SEQ ID NO: 264703 - DNA, 419 bp, Homo sapiens
  chr12:38550957-38551376
  hypo
aaggggacattgaggcagcacggggaataaggctgtgggttgaagtccttctaacaatgacgctgccttcctggcagcctctacgccctgcccaatagggttgtggagtcgcttgcttgcacccagggtgcgtgtcgcaccccagggggcaccccaaagcgccaagaaggcctccgggggaagggagtagaacgccaggcgtgaaaggtgacgttgaggcagcacgagggaaaaagcagcaggcagcgatcgtcacacggacgacagtgccttcccggcagcccctgcgccagactcggggttgtcgtggagttcctgacttgaacccagggtgcgtgtcgcgcccacggggggacaccccaaagcggcaagaatgccccctgggaagggaacaggacgccaggcttgaaaggggactt

SEQ ID NO: 264704 - DNA, 216 bp, Homo sapiens
  chr12:38551794-38552010
  hypo
ggtcgtcccatggacgacagtgccttcccagcagcccctgcgtcaggcccggggtggtcgtggagtccctggcttgcaccgagggtgcgggtcgcacccatgggggcaccccaaagtggcaagaaggccgccgggcgaacgccacagaaggccaggctttaatggggatgctgaggcagcacagagagaaaagcggctagtcgggttcctcctacg

SEQ ID NO: 264705 - DNA, 83 bp, Homo sapiens
  chr12:38552283-38552366
  hypo
cagggtgcgtgtctcgctcaagggggcaccccaaagcggcaagtagattcccgggggaagggagagcacgtcaggcttgaagg

SEQ ID NO: 264706 - DNA, 1386 bp, Homo sapiens
  chr12:38553243-38554629
  hypo
cctggtttacacccagggtgcgtgcctcgcccacgggtggcaccccaaagcagcaagaaagccccggggggggaagaacaggatgccagacttgaaaggggacgttgaggcagcccaggaaaaaaaggggcgaggctggggtcctttcacggatgacagtgccttccctacagcccctatgccagtcccgggagggtcgcggagtccctgtcttgcacacaatgtgcgtgtctcgcccacggggggcaccccaaagtggcaagaagtcccccgcgggaaggcaacaggacgccaggcttgaatggggacgtttaggtagcctggagaaaaaagcagcgaggctggggtgatcccacgaatgacagtgccttaccggcagcccctttgccgggcatgcgggggttgttgattccctggcttgcacccagggtgagtgtcttgcccacggcgggcaccacaaagcagcaagaaggttcccgggggaaagggacagcacgtcagtcttgaagggggaagttgaggcagccccggggaaaaaaagcggggatgctggggtcctctcacggacgacactgccttcccagcagcctctgcagtgggcccgggagcgtcctggagtccctgtcttgcaccccgggtgcgtgtctcacccacggggagcaccacaaagcggcaagaaggccactgggggaagggtacaggacgccagggttgaaggggatagtggagacagtccaaggaaaaaagtggcgggatggtgtcgtcccaaggatggccacccctgcgccgggccagggatggtcgcggagtccctggcttgcacccaggttgtgtgtctcgcccacagggggcaccccaaagcagcacgaaggcctccaggggaagggaagaggacgccaggcttggaaggtgacgttgaggcagcagggggtaaaaagtggcgggccgggccctcccacggatgacagtgccttcccggaagccgctgcgcagggcccggcgtgtttgtggagtctctggcttgcacccagaatcgtgcggcgcccacgacgggcaccccaaagcggcaagatatcccccgctggaagggaacaggatgccaggcttgaaaggagaagttgagccagtccggggaaaaaaatcccatggagaacagtgtcttcccggcagtctctttgccgggttcggtcgtggagtccctggcttgcacccagagtgcgtgtctttaaagcggggcatcctgttaccattctccgggggaattcttgccgccatggggtgccccctgagggcgagacacgcaccctgtgtgcaagacagggactccacgacccccccaaccacgagtctgccgcaggggctgccgggaaggcactgtcctccctg

SEQ ID NO: 264707 - DNA, 135 bp, Homo sapiens
  chr12:38555926-38556061
  hypo
cagggctgaaccgccggcctagccccagggaccctttctctcacaacgtccctaacagcgtcgcttgtcccgacaaggacgtgacccacggccaaatgagttgggggagctgctttgccccgcgctgccactaga

SEQ ID NO: 264708 - DNA, 204 bp, Homo sapiens
  chr12:38595391-38595595
  hypo
gaccgggcagtgcgggaaccagatcggcgccaaggttggcagccagggctctgagggcccagctcgggcctgccgggtggccagggaagatgttggtagcggcagtggtggggctggcgcccctgcgttgcggcccctgggctccctgccagggacgcagtggaactggccagctggcgaggcggccagggtggaccccaggga

SEQ ID NO: 264709 - DNA, 65 bp, Homo sapiens
  chr12:41925115-41925180
  hypo
actccacgtcattccgccagtggatggcctgccggagttccagtgcctgtcggtgcttacaacgt

SEQ ID NO: 264710 - DNA, 120 bp, Homo sapiens
  chr12:41967350-41967470
  hypo
ggcatgaccacagacgatgacaccatgagcgagatgaaaatggggcgctactggagcaaagaggagagaaagcagcacctggttagggccaaagagcagcgccgtcgccgtgagttcatg

SEQ ID NO: 264711 - DNA, 120 bp, Homo sapiens
  chr12:42066119-42066239
  hypo
tggctcctccctctcttagatatattctaataacaaaattttctggtatgaaaatcactagcataaaaagtaactgaaaaatgtaatcagttatatgttcatcatgtggaaacattaaac

SEQ ID NO: 264712 - DNA, 98 bp, Homo sapiens
  chr12:42503371-42503469
  hypo
aagaacaatctctgcgaagcacatggtttaaagagttttttccactctgctgcattctcacttggaaaggttatggggtataacgtataattaaatgt

SEQ ID NO: 264713 - DNA, 32 bp, Homo sapiens
  chr12:42504945-42504977
  hypo
cagggaggagccaagatggccgaataggaaca

SEQ ID NO: 264714 - DNA, 40 bp, Homo sapiens
  chr12:42758694-42758734
  hypo
ggcgacagagggagactccgccttaaaaaaacaaacaaag

SEQ ID NO: 264715 - DNA, 183 bp, Homo sapiens
  chr12:42836274-42836457
  hypo
tgttggcttcaggcctttggcgttctgtctgtaccgaataaatacaagcggctccagcttatcaggactgcactctcttttgggctgcgctaaagccggcagtcccctagccattcttacacaaaatacctgcgtctgaatactcctttcatccggtcgctcggccagagtctgcaggacaga

SEQ ID NO: 264716 - DNA, 150 bp, Homo sapiens
  chr12:42847594-42847744
  hypo
tcagccaccgtgcccggccgcctggccgatggtattctaacgctacagcattatcactaaaattatctaaggttttaaagttttttccccattaaaaaaaaaaaaaaaacttggctgggtgtggtcacgcctgtaatcccagcactttgg

SEQ ID NO: 264717 - DNA, 41 bp, Homo sapiens
  chr12:42848888-42848929
  hypo
atagaaagcagagtataggccgggtgcggtggctcatgcct

SEQ ID NO: 264718 - DNA, 78 bp, Homo sapiens
  chr12:42854066-42854144
  hypo
ctttctacttctccggcggcggtggtgatgagacctggatcccctctcttcaaaattgtagacgcgtctccgagtcct

SEQ ID NO: 264719 - DNA, 89 bp, Homo sapiens; identical to SEQ ID NO: 214863
  chr12:42857519-42857608
  hypo

SEQ ID NO: 264720 - DNA, 38 bp, Homo sapiens
  chr12:43159470-43159508
  hypo
tcaaaaaaaaaaaaaaaaaaaagcggtgggggggcggg

SEQ ID NO: 264721 - DNA, 33 bp, Homo sapiens
  chr12:44214605-44214638
  hypo
tataagaagcataaagtggccgggcgcgttggc

SEQ ID NO: 264722 - DNA, 205 bp, Homo sapiens
  chr12:44278770-44278975
  hypo
tggcacgctcgcaacgtattttcatactttctgctttctctaataaatctgcttttctttacttactaatgtcttggtaaattattctaactgcctgcgcaatacaggccccagatagtcgctacccgagacacctatcccatcccatttatgaaagtgaggcagcaagccaataaacacttcatggattcgtagcaatcacagt

SEQ ID NO: 264723 - DNA, 43 bp, Homo sapiens
  chr12:45344717-45344760
  hypo
ttcagaccttattagaaatgtgtcggaggaggagccaagatgg

SEQ ID NO: 264724 - DNA, 85 bp, Homo sapiens
  chr12:45826930-45827015
  hypo
tcgcataggatacccgcttctagttagctacctacagcttcccacatcagtggcctccaatcaggcatagcggaagccttcccac

SEQ ID NO: 264725 - DNA, 133 bp, Homo sapiens
  chr12:45862284-45862417
  hypo
aaaaagcactgtcataaatccgaagtccaactgggcaagcaattccacgattcagtctgccccagcacacatcttcttaggttcttaagattcgagtccaggattcatcgccgatcatgttgcaggtgaatta

SEQ ID NO: 264726 - DNA, 36 bp, Homo sapiens; identical to SEQ ID NO: 214864
  chr12:46610346-46610382
  hypo

SEQ ID NO: 264727 - DNA, 36 bp, Homo sapiens; identical to SEQ ID NO: 214865
  chr12:46610622-46610658
  hypo

SEQ ID NO: 264728 - DNA, 42 bp, Homo sapiens
  chr12:46634310-46634352
  hypo
gttattttaatgtgtcagatcgcagagcacacacatagctgg

SEQ ID NO: 264729 - DNA, 131 bp, Homo sapiens
  chr12:46757484-46757615
  hypo
tttggtaaaggaggcgttacttaccgtaaaatgttaggtatccaaagagggcggcaagcagatacatgagaaacatagcaaaaaatgaaatcttggacacattcatcattcttctacggctgcggctatgt

SEQ ID NO: 264730 - DNA, 214 bp, Homo sapiens
  chr12:47497158-47497372
  hypo
ttacgggaaagatgcgcactgcagcagggcctggaatgtggctcccatctgcactgccagaagccatgatgaagtcacgagttgcacaacagtagtaattcgcagctatttatgaccattttaatagcaaaggtctagattagaaggctgtgtttacatgccatgtagcagaatagttcacgaatcattcccacagtaacgtttggtcaaacca

SEQ ID NO: 264731 - DNA, 39 bp, Homo sapiens
  chr12:47603245-47603284
  hypo
gcaacagagcaagatttcgtctcaaaaaaaaaggtaata

SEQ ID NO: 264732 - DNA, 1090 bp, Homo sapiens
  chr12:47628718-47629808
  hypo
tacccccaacctgcactgggcgctccgcccagaggtgagtccctcccagcccttctctccttctgtcctagccatccgcagagccatcctgtgcaaaggaaggagctaggctgtgcgccctgggcgtcatgatccttctgcgggcctccgaagtgcggcagctgcttcacaataagttcgtggtcatcctgggggactctgtgcatagggcagtatacaaggacctggtgcttctgctgcagaaggaccgcctgctcactcccgggcagcttagagcaaggggggagctgaacttcgaacaagatgagctggtggacggaggccagcggggccacatgcacaacggccttaactaccgtgaggtccgcgagttccgctccgaccaccatctggtacgtttttacttcctcacccgcgtgtactccgattacctccagaccatcttgaaagagctgcagtcgggcgagcacgcccccgacctggtcatcatgaattcctgcctctgggacatctccaggtatggtccgaactcctggagaagctacctggagaacctggagaacctgttccagtgcctgggccaggtgctgcccgagtcttgcctcctggtgtggaacacggccatgcctgtgggcgaggaagtcaccgggggttttcttccgcccaagctccggcggcagaaggccaccttcctgaaaaacgaagtggtcaaagccaacttccacagcgccaccgaggcacgtaaacataacttcgatgtactggacttgcatttccacttccgccacgcgagggagaacctgcactgggacggggtgcactggaatggacgtgtgcaccgctgcctctcccagctgctgctggcccacgtggccgacgcctggggtgtggagctgccccaccgccaccccgtgggcgagtggatcaagaagaaaaaacctggcccgagagtcgaagggccgccccaggccaacagaaatcacccggccttacctctgtccccacccttaccttcccccacataccgccccctgcttgggttcccaccccagcgcttgccgctgctcccgctcctgtccccacagcctcc

SEQ ID NO: 264733 - DNA, 149 bp, Homo sapiens
  chr12:47699297-47699446
  hypo
acggttctcccccggagttgggccgctcatcaacgaggctctcctccaactgccccagccaaactccgtattgttctgcggatcggggtgcctgctggattgcctgtgccagtgcattccacttgacacccagccgcctgtgtgtgcct

SEQ ID NO: 264734 - DNA, 120 bp, Homo sapiens
  chr12:47799205-47799325
  hypo
ccaccacacccggccacattctatgatttttttaggtaaatgtagagttgtgctgtttttaagtaaatgtagagttgtgcccatatcaccacacgccagtgtgagaacattttcatcacc

SEQ ID NO: 264735 - DNA, 191 bp, Homo sapiens
  chr12:48191883-48192074
  hypo
gtgttacctgtagggaatgccggggctgttgggatggactgttctttctagggccgcctgctgttttttcagaatcacctccgctagcttctgcttgaccacgctgctggctacagcacctgtaggggcagagtcaggagggggctggaggtgggtggacaggcggcctcgtggcactacctggccactgc

SEQ ID NO: 264736 - DNA, 48 bp, Homo sapiens
  chr12:48218921-48218969
  hypo
agcgcaaatgagtgcgtcgcaaagagggaagaccggagcacatcggga

SEQ ID NO: 264737 - DNA, 39 bp, Homo sapiens
  chr12:48226920-48226959
  hypo
tgtgtgtgtgcgcgcgcgcgcgtgcgcgcgcacgcgtgt

SEQ ID NO: 264738 - DNA, 90 bp, Homo sapiens
  chr12:48238689-48238779
  hypo
ccgggggcgggtggcggcagcggatgtacgtctgcagtgtgttggacaggcggtcctggatggcctcaatcagcgcggcgtcctgcaccc

SEQ ID NO: 264739 - DNA, 97 bp, Homo sapiens
  chr12:48240443-48240540
  hypo
ggtcacgtcactgacgcggtacttgtagtcttggttgccacaggtccaggacatgtcgtccatggtgaaggactcattggagcgcaacatgatgacc

SEQ ID NO: 264740 - DNA, 131 bp, Homo sapiens
  chr12:48347939-48348070
  hypo
acttctcataactgcgacggtgagacacgcctgggaagccaagcccaggtgagaagtgatggctgtctcctcaggaatgtgctgcccaattaacactgcctcccagatggctcctgcggaggctaggacta

SEQ ID NO: 264741 - DNA, 37 bp, Homo sapiens
  chr12:48590827-48590864
  hypo
gaaaagaaaactgaccgcaaaatgggctcttattttg

SEQ ID NO: 264742 - DNA, 32 bp, Homo sapiens
  chr12:48727661-48727693
  hypo
cggcggtcgggcggcggcggctgccaagtctt

SEQ ID NO: 264743 - DNA, 59 bp, Homo sapiens; identical to SEQ ID NO: 214871
  chr12:48745168-48745227
  hypo

SEQ ID NO: 264744 - DNA, 76 bp, Homo sapiens
  chr12:48838930-48839006
  hypo
gggcgacagagcgagactccgtctcttaaaaaaaaaaattaatacattgatgaacggatgagtatgtgaatgaata

SEQ ID NO: 264745 - DNA, 138 bp, Homo sapiens; identical to SEQ ID NO: 214872
  chr12:49065584-49065722
  hypo

SEQ ID NO: 264746 - DNA, 38 bp, Homo sapiens; identical to SEQ ID NO: 214875
  chr12:49191468-49191506
  hypo

SEQ ID NO: 264747 - DNA, 176 bp, Homo sapiens; identical to SEQ ID NO: 214880
  chr12:49416383-49416559
  hypo

SEQ ID NO: 264748 - DNA, 250 bp, Homo sapiens; identical to SEQ ID NO: 214881
  chr12:49422761-49423011
  hypo

SEQ ID NO: 264749 - DNA, 48 bp, Homo sapiens; identical to SEQ ID NO: 214882
  chr12:49436025-49436073
  hypo

SEQ ID NO: 264750 - DNA, 231 bp, Homo sapiens
  chr12:49443423-49443654
  hypo
ggctaactctaatcacatcccgcagctagatagcccctcacctgtttgatgcgggaacgggctggggagctgcgccgccgccccttctccccctcagctttgcctccgctgatagctgtcccagcatcgcacaatagtgagtcatcagtctctggcagtgagtcagtacagagccgtagggagccctcatctcgggctggactaacatccgtagagacccccaactccatg

SEQ ID NO: 264751 - DNA, 44 bp, Homo sapiens
  chr12:49520524-49520568
  hypo
ggattacaggcatgagccactgcgcctggcctcttctttttaaa

SEQ ID NO: 264752 - DNA, 154 bp, Homo sapiens; identical to SEQ ID NO: 214883
  chr12:49620906-49621060
  hypo

SEQ ID NO: 264753 - DNA, 85 bp, Homo sapiens
  chr12:49647106-49647191
  hypo
gtaggtgtaagctacggtggaagctatggaaggagacctgaggatgtagcggaatagaggacagtgcacacgtgggcgtgtcaat

SEQ ID NO: 264754 - DNA, 102 bp, Homo sapiens
  chr12:49657607-49657709
  hypo
aagggtttaattcctcggagctctactttcctcatctgtaaactagggataataattcatagagtttgtcatatggatgaaatgtgatcatgtgatatgaaa

SEQ ID NO: 264755 - DNA, 383 bp, Homo sapiens
  chr12:49927213-49927596
  hypo
ggcacatactccctcgccaactccggcagggctatgttggccaccttcccttcgggtcctgcagttaactgcagtgtctcacctggcgtggagtccaggtgttgttcacaatgggcattcaccacaggtcactgaccatctgtcagaaataaccatgccgttcccttttcataggctgtttaccaaaggagaagacaaagtggccgcactgcatggcatagtcctgaattgccgtcatcctagtcaaatcttggttcagacctgattctttttcttactagccaagcaatatgggccagtttctttatctgtaaacacaactctgtgcctcccaggtttcccttgtttgaaagttgattgtgggccgggcgcagtggctcaca

SEQ ID NO: 264756 - DNA, 247 bp, Homo sapiens; identical to SEQ ID NO: 214885
  chr12:49935483-49935730
  hypo

SEQ ID NO: 264757 - DNA, 102 bp, Homo sapiens
  chr12:49989771-49989873
  hypo
aataaataaataaaaataagactagagcagcgaaatgtgacgatcacttagagaaacaggccattaggaatccattctcactgtgttcgctctagacaaaac

SEQ ID NO: 264758 - DNA, 420 bp, Homo sapiens
  chr12:50036036-50036456
  hypo
cacgggagagggagcgggagaaggaggaggcacgcaggatgcggcgcagggaagctgcctttcgaagcatgctgaggcaggctgtgcctgctctggagctaggcactgcctgggaagaggtcaggagcgtagcctggccccaagcacccctcaagcctgagggcagcggtgcttcaccactgagggcccaccccagtcacgtcacagccctgggccagctccagttcccttcctttctctgccccagccctgccctgtgctcatggcggtgtccaggccaggctgagtggggcctagtctgatcagcagtgctctcctcgttcaaggtccgtgagcgttttgtgtgtgactcagcctttgagcagatcaccctggagtcggagcggatccggctcttccgggagttcctacaggtgctgg

SEQ ID NO: 264759 - DNA, 223 bp, Homo sapiens
  chr12:50037798-50038021
  hypo
gggccctaggccagtcagcacgctggtcaagcttccacggcccttagtgcaggctaagggtgaactgtgcctttgctccaacagacaggctgggacacgtcagaaagtgagctgagtgagggtgagctggagaggcggcggcggacactcctacagcagctggatgatcaccagtgacccaatgagctgttctctgcctcgggtctgtgtgaggccatggctc

SEQ ID NO: 264760 - DNA, 182 bp, Homo sapiens; identical to SEQ ID NO: 214887
  chr12:50185746-50185928
  hypo

SEQ ID NO: 264761 - DNA, 151 bp, Homo sapiens
  chr12:50237319-50237470
  hypo
gtgactcaaaaacttccacccggttcaggaaagggtagccaggaggtgcaggtcacttgcgaagccagccgactcagccctgtcccccaggggcaactgtagaccatgagctccttgagaggcaaggaccgtgccttaagagccagcactt

SEQ ID NO: 264762 - DNA, 38 bp, Homo sapiens
  chr12:50262263-50262301
  hypo
gggtttcaggaaagacgggaggccgggtggcactgagg

SEQ ID NO: 264763 - DNA, 193 bp, Homo sapiens
  chr12:50269011-50269204
  hypo
caccataagcctctgcggcaggtgtcgcactatcagctccaccatttgctaaggacactgaggcagagacagtgtaagtgacttgcccgcatcacccagcccagggacagctagagggtgagcttgggctttggggagtctctggagaagagactaccagccatatgtccaggtgcgccgactgggctgcagg

SEQ ID NO: 264764 - DNA, 46 bp, Homo sapiens
  chr12:50282793-50282839
  hypo
cctggccttccctggcggataggggagggaacggcaccttgggcca

SEQ ID NO: 264765 - DNA, 184 bp, Homo sapiens
  chr12:50296427-50296611
  hypo
agttctccatgtttacggaactgaacactccccaggcctcccactgcctcccactccccagcccccctcatcacccggatctgaaggatcatgtccacctaaatcgagttcagcctccaccctgccactccgccccccagagcctcctggaccctaatgcccaggcccccgacacacatacggc

SEQ ID NO: 264766 - DNA, 97 bp, Homo sapiens; identical to SEQ ID NO: 214888
  chr12:50322851-50322948
  hypo

SEQ ID NO: 264767 - DNA, 307 bp, Homo sapiens; identical to SEQ ID NO: 214889
  chr12:50366185-50366492
  hypo

SEQ ID NO: 264768 - DNA, 233 bp, Homo sapiens; identical to SEQ ID NO: 214890
  chr12:50400184-50400417
  hypo

SEQ ID NO: 264769 - DNA, 184 bp, Homo sapiens
  chr12:50467724-50467908
  hypo
gtgacccttctaaacgaagtggccaccacggagctggccttcccggcagtcaccctctgcaacactaatgctgtgcggctgtcccagctcagctaccctgacttgctttatttggcccccatgctgggactggatgaaagtgatgaccccggggtgcccctcgctccaccgggccctgaggcct

SEQ ID NO: 264770 - DNA, 132 bp, Homo sapiens; identical to SEQ ID NO: 214891
  chr12:50484303-50484435
  hypo

SEQ ID NO: 264771 - DNA, 180 bp, Homo sapiens
  chr12:50602878-50603058
  hypo
tacaggtgtgggccactgcatccggcctgattgggtctatttttaataaaaactaaaacaagctggaacaacactatccgtgctacatcacacacaggtcaggcatactttcatgaattattatacatccatatgactcacacagctcaacatactcttgctctaggagcagccgctatc

SEQ ID NO: 264772 - DNA, 80 bp, Homo sapiens
  chr12:50785992-50786072
  hypo
aatgggcaaaatcattatgtcgatgtggtgaaggtttcacaggtttgttgtttgtttgtttgtttgtttgtttgtttgtt

SEQ ID NO: 264773 - DNA, 32 bp, Homo sapiens
  chr12:50790624-50790656
  hypo
tagatgtgttggccgggtgcagtggctcatgc

SEQ ID NO: 264774 - DNA, 136 bp, Homo sapiens; identical to SEQ ID NO: 214892
  chr12:51116977-51117113
  hypo

SEQ ID NO: 264775 - DNA, 40 bp, Homo sapiens; identical to SEQ ID NO: 214893
  chr12:51148430-51148470
  hypo

SEQ ID NO: 264776 - DNA, 112 bp, Homo sapiens; identical to SEQ ID NO: 214894
  chr12:51346409-51346521
  hypo

SEQ ID NO: 264777 - DNA, 181 bp, Homo sapiens; identical to SEQ ID NO: 214895
  chr12:51346933-51347114
  hypo

SEQ ID NO: 264778 - DNA, 120 bp, Homo sapiens
  chr12:51407288-51407408
  hypo
caggctgtaaatcacttttgtaatgatgattaatatcattaaggcactggaaaatcagctgggcactgtttaaggcactggaaaatcacctgggcgtggtagtgcatgtctgtggtgcca

SEQ ID NO: 264779 - DNA, 120 bp, Homo sapiens
  chr12:51407528-51407648
  hypo
agaaaaagaagacacagaaatgtctcgtctacatctgaggaagatttttatccagaataggcaaaacaggccttaaaagtttttatttttttttgagatggagtctcactccgtcactca

SEQ ID NO: 264780 - DNA, 570 bp, Homo sapiens
  chr12:51421110-51421680
  hypo
aaccctgtctcaaaaaaaaaggatagccacctggaaggaacatttcctcgcgcccccagagccacatcatagtatctgctgccccaccaagagcaccccacacctgggaggaaccgagaaacatcagctagtgcagccagtttgaccgccttaggtgtcctcccaagcctccgtagtgaattgttttcctcctcgcccagctgactcgattctccccagacttcatcctacctacccaaaagcaatcccactctatcgccagtttcagcctcacaccgtatcttttgctctgaagatgagactgccaaactggtgaagagggaataaatggcctaacaaattaccgtaattttctgcaatgtcgtttacagccaccaaaaacattagatcctcccgccaccctcactccccgacccctcgcactgcttacagcattaaaggtaattgagcttctttattcacgtaaaaacagctaggagaaaatttcattagtaagagagaccaagaaatgaggaaaggagcgtgaactgcaaagagaaaaatccaaataaagtgcgaagtaaaaacaaa

SEQ ID NO: 264781 - DNA, 113 bp, Homo sapiens
  chr12:51461520-51461633
  hypo
aaccacattcttcccgtgacaggcggatggctcgaagttcttgcttctcttcagcatcaatacggtggaccccagaagccctcagcagggcccgtcgccgtttggtgggcaga

SEQ ID NO: 264782 - DNA, 120 bp, Homo sapiens
  chr12:51478095-51478215
  hypo
gcgagactccgtctcaaaaaaaaaaaaaaaaaaatcttctcaactttgcaaactaatttatttatttaaatagaaaaggggttttcgccatgttgccccggctggtcttgcactcctggg

SEQ ID NO: 264783 - DNA, 151 bp, Homo sapiens; identical to SEQ ID NO: 214897
  chr12:51479055-51479206
  hypo

SEQ ID NO: 264784 - DNA, 101 bp, Homo sapiens
  chr12:51565447-51565548
  hypo
accgcacccggccgaaaggagatttttcatctgttatcaacaactggcttgatacataaagatccagaagcatcttaagttttcttcgtcactttttcatt

SEQ ID NO: 264785 - DNA, 111 bp, Homo sapiens
  chr12:51592045-51592156
  hypo
cttcccaggaggccggtcatggggtgagttctggcgtggggggagaggggcagtctcagacagctggccgaagtacggcaggcctgcggggccagcgtggcgtcacggcct

SEQ ID NO: 264786 - DNA, 120 bp, Homo sapiens
  chr12:51615467-51615587
  hypo
aaaaacaaaaaacaaagtatattacttaaaaaatttttttttctttttttgcctgggcatgccaaagaccgcacctggcttttgttgttgttgttgttgagacagagtctcactctttag

SEQ ID NO: 264787 - DNA, 240 bp, Homo sapiens
  chr12:51794744-51794984
  hypo
gttcccttgtccccctcacagggagtgcaacaaggggagtggctcgcttctttagggcccggctgctgaaatctctatggaacatacagatgggcaggttgtggggttcagatcccacggcagcgtctacctttggacagtgccaacatgtttttcttttgtttgtttgagacggagcgttcctctgtcgccagttagtgtttacagctcctagccccagtgggcgtgtgctaccgtgtg

SEQ ID NO: 264788 - DNA, 81 bp, Homo sapiens
  chr12:51795224-51795305
  hypo
agctgggctctcctctgactgccccaggcaaactctatgtctttccgtgggccgatggcgtgccagcgtgctggcatctgc

SEQ ID NO: 264789 - DNA, 83 bp, Homo sapiens
  chr12:51844686-51844769
  hypo
ggatgccgcttggccggcagagccatcggcatcaccgcactcatggccagaagcaccggagacgagggcggggcaaaggagcc

SEQ ID NO: 264790 - DNA, 94 bp, Homo sapiens
  chr12:51873686-51873780
  hypo
ctgcccttttttctgtctcacgaaacagagggctgtttctacaaggccaagttttgtataaatggaatttttttttttttttttttcagatgga

SEQ ID NO: 264791 - DNA, 328 bp, Homo sapiens
  chr12:51919431-51919759
  hypo
tgtgcccggcctacatttattatctcattgtttccttggatcgggagcctgggcgtggctcaacagggtcctctactcagggtctctcaggggctgcagtcaaggtgtcggctgcggcttctgtctcgtctgaagctggaggtccttttctaagatcctggaagttgttgggagaattcagatccttgtggctgtgggctgaggccctccactctcagagaccactggtttctatggccgtgtcatgtcatggctgatagcttctggaggcccagaatccagtcacaggttttctaaatttcgaaatatttctcgaagttcttacttc

SEQ ID NO: 264792 - DNA, 65 bp, Homo sapiens
  chr12:52294333-52294398
  hypo
ctccccgccaccaggatgccagtgaccaagaaggatctggcggaggacgcgccgtggaagaagat

SEQ ID NO: 264793 - DNA, 245 bp, Homo sapiens
  chr12:52387804-52388049
  hypo
tggtatgccaacggcgcagcccgcctgacggccctgcgcatcaagaagaccctctcccagctcagcgtgcaggaagacgtgaagatctaactgctccctctctccacacggagctcctggcagcgagaactacgcacagctgccgcgttgagcgtacgatggaggcctacctctcgtttctgcccagccctctgtggccaggagccctggcccgcaagagggacagagcccgggagagactcgct

SEQ ID NO: 264794 - DNA, 106 bp, Homo sapiens
  chr12:52388409-52388515
  hypo
gagacggaatctgccgctttgtctgtccagccgtgtgtgcatgtgccgaggtgcgtcccccgttgtgcctggttcgtgccatgcccttacacgtgcgtgtgagtgt

SEQ ID NO: 264795 - DNA, 39 bp, Homo sapiens
  chr12:52462471-52462510
  hypo
ccttaagaatgcctcctggccggtcgcggtggctcacgc

SEQ ID NO: 264796 - DNA, 234 bp, Homo sapiens
  chr12:52467434-52467668
  hypo
atgaactgtcgctcggaggtgctggaggtgtcggtggaggggcggcaggtggaggaggccatgctggctgtgctgcacacggtgcttctgcaccgcagcacaggcaagttccactacaagaaggagggcacctactccattggcaccgtgggcacccaggatgttgactgtgacttcatcgacttcacttatgtgcgtgtctcttctgaggaactggatcgtgccctgcgcaag

SEQ ID NO: 264797 - DNA, 179 bp, Homo sapiens
  chr12:52490992-52491171
  hypo
ccagggggtgtatagtatcccgacctgtgataggctccgccacgatgcggggagtactatcacccccctctctttccctggatattacgatacacatcgcaggggggcgggcgacccccacgatgcggggagaaatatcacccccccccggatattacgagccacattgcaggggggtg

SEQ ID NO: 264798 - DNA, 122 bp, Homo sapiens; identical to SEQ ID NO: 214900
  chr12:52539734-52539856
  hypo

SEQ ID NO: 264799 - DNA, 308 bp, Homo sapiens
  chr12:52567344-52567652
  hypo
gtccaggctgcttctcgtgccctgtgtggtcagccccacctggctccgagagtatgcctcggcctcctccaggctgcgagccgcgacggcgtcatactgggccttcacctcctccacgatgccgctcaggtcgatgtggcagcggctgtccatgccgacggtcaccgacacatccttcacctgtgctgccaggtccttcagctcctgaccgggcacagatgtgggggctcagggctggtggggagggcacaaggaccctcagccccacacagtcactttgtccccggggtgagcggagagtggagctg

SEQ ID NO: 264800 - DNA, 98 bp, Homo sapiens
  chr12:52647005-52647103
  hypo
ggcgttctccacctcggctgtcagcctctggatcatgcggttcagctcgttgatctcctccttggtgcggcgcagggtctccccgtgcctgatcaccg

SEQ ID NO: 264801 - DNA, 153 bp, Homo sapiens
  chr12:52647390-52647543
  hypo
gcggtaccaggactcggcctcggcccggctgcgggtggcaatgtcatcgtactgagctttgatctcagtgatgacacagtgcatgttcaggtcccgactgttgtccatcttgacgaccactgaggtgtctgagatgtgcgactggagaacgcg

SEQ ID NO: 264802 - DNA, 42 bp, Homo sapiens
  chr12:52648051-52648093
  hypo
cctcctcatatagccgcctcaggaagtcgatctcctgggtca

SEQ ID NO: 264803 - DNA, 59 bp, Homo sapiens
  chr12:52750116-52750175
  hypo
gggcgggacgcggggcgtctcgggcaggggtgaaggagggcagccggggcccaggcgtg

SEQ ID NO: 264804 - DNA, 114 bp, Homo sapiens
  chr12:52779175-52779289
  hypo
atccggggtgagtacgatccaaaggtgatgacactccgactaccaaagctgccaaggccccggaatccaggcccactccaacaggagacagagttggcccggaagcgattcagg

SEQ ID NO: 264805 - DNA, 348 bp, Homo sapiens
  chr12:52793641-52793989
  hypo
gtgtctgtggcatggcgtggctctcattagctcctcacccacttctgcggagaaggagtctgggggtcctcccctcccctggtttgtcacctctccagtctccctgcccccaaccacagggcctcacccggcactggtaccaggcctctgcttcggctttgctgcggctggcgatgtcgtcatactgcgccttgatctcagcgatgatgccgtccacgtccagctcccggctgttgtccatcttcacaatgaccgaggtctcagagatctgagactggagcaggcagatctcctgggggcagggcccatgtgagaaggagtgagctctctgagcgtccggggacagga

SEQ ID NO: 264806 - DNA, 95 bp, Homo sapiens
  chr12:52906094-52906189
  hypo
tggaagaagagcagttactacgtggcatgctgaagccacgctcctaaaaacagatggcagccaggcgcggtggctcacgcctgtaatcccagcac

SEQ ID NO: 264807 - DNA, 172 bp, Homo sapiens
  chr12:52910443-52910615
  hypo
cttgcggtaagtggcgatctccacgtccagggccagcttggtgttcatgagctcctggtactcacgcagcagccgggccatgtcctgcttggccttctgcagggcctcctccagctcggccagcttgttcctggcatccttgagggccagctccccacgctgctcggcatcc

SEQ ID NO: 264808 - DNA, 72 bp, Homo sapiens
  chr12:52911390-52911462
  hypo
actcggcttctgtccggctgcggttggcaatctcctcatactgggccttgacctcagcgatgatgctatcca

SEQ ID NO: 264809 - DNA, 622 bp, Homo sapiens
  chr12:52913580-52914202
  hypo
tcggtcctcaccctctggatgctggggtcgatttgcaggttgaggggagtcaggagactctggttgacagtgacctcttggatacctccaggagggcagacaggaaagccagggccaccgaagccacctccaaagccagctccgccaccgagcccaaagccaccaccagctccaccgccgaaaccaaatccactaccggcaccacctccaaagccatagccgcctccagcaccagcaccaaaccggttcctgaagctgccaccactagtgctgatggatatcctcttggagccccccaggttgtagaggctccggctgccatagccacccactccacaagcacccgcaaggctgaccctgccgaagccaccaccaccgccacccccggaccgggacacggaggtgaagctggtgcgggagacagacggggtgatggcagaggcggtgctgaagctacgactgcccccgctccggaaggacacacttgactggcgagacatggtggcttgttcctggtggagcaagagaaccaggcactagtgggttgggaggtgctggagagaacagagctcagcaggacgcagaaggtggctctgttacccaggaacggtgatgccccctt

SEQ ID NO: 264810 - DNA, 185 bp, Homo sapiens; identical to SEQ ID NO: 214904
  chr12:53007442-53007627
  hypo

SEQ ID NO: 264811 - DNA, 105 bp, Homo sapiens; identical to SEQ ID NO: 214905
  chr12:53040689-53040794
  hypo

SEQ ID NO: 264812 - DNA, 56 bp, Homo sapiens
  chr12:53041516-53041572
  hypo
cttcttcacatgtgcgatctccccctgcagcctctggatcacgcggttcagctcgc

SEQ ID NO: 264813 - DNA, 56 bp, Homo sapiens
  chr12:53041986-53042042
  hypo
cttgctcctctgggcgatctcctcatactgggccttgacctcggcgatgatgctat

SEQ ID NO: 264814 - DNA, 268 bp, Homo sapiens; identical to SEQ ID NO: 214906
  chr12:53045572-53045840
  hypo

SEQ ID NO: 264815 - DNA, 419 bp, Homo sapiens
  chr12:53068868-53069287
  hypo
tagctcttttctccggtaaggctgggacaaatcgacctcggtcttgccaagcatatttgttagtgatgctgggggagaactagagctaatgaaacagagggcatctctttatctggttactccggaataagtggtagaaacaaacttcacgctggaactgccaccagaggacttgacacccccagagctggatccccggcctcctatggagcctccagagctcccgccgccagagccccggccgccagagctgccgccgccgccgcctccagagccacctctgtagcccccactgctgcttccggagccgtagctgccatggccgccgccgccacctccagagccatagctgccacctccggagccgtagctgctacctccggagccatagctgccacggccgccgccgccgccacctc

SEQ ID NO: 264816 - DNA, 421 bp, Homo sapiens
  chr12:53183249-53183670
  hypo
cctctccctccccacggtgctcacagaataatgaacaaccggatccgcaccatggactgagaagacgaactgcctttgtttcagaggaagagttctccagctgctctgtggatcacagagcccacatgggagaggcagaggcagggaggccagggaggtgaccagggagctcagtgccctaaggagaaggacatggagcgaatactcagaggcccggagtgaaacacagtgcactttattggcgacagaccggaggggcggagggggctgtgtgctatatacatcagagctgtagtgagcatcccacccagggaggggactccggggcagcagaaggtggcggcctaggccacacctggacaatcacaggcacaggctggagccggagagaagagcctgaaattctcgtgactgggcttgg

SEQ ID NO: 264817 - DNA, 175 bp, Homo sapiens
  chr12:53189555-53189730
  hypo
ctgcaaaggcacagctgctccgccctcccccaaagcctccagcccgggagccgccagctgccacgctgatggagatgctcttgttgccgcccaggttgtagaggctgcgactgccaaagccacctgctccgctccggaagccataggcccctccgccagctcccccagagtgggc

SEQ ID NO: 264818 - DNA, 203 bp, Homo sapiens
  chr12:53214328-53214531
  hypo
ggtgataccaagagacgcatggagggaggagcagtaagatttggcgagtgatggaggcaggagtaggacggaggtagcttctggggtgacaggacagagggcttgaaattgcagccctggacactactgacccacctccagccagctggatgactacagcatgagaggtcacttctgtgagcgtgaatcgcctcacctgtaaa

SEQ ID NO: 264819 - DNA, 149 bp, Homo sapiens
  chr12:53241431-53241580
  hypo
agctggggcatgtaggacaccggtctccctgcctttcctccaaggttctccagatctgcttggggactgcgggacacctcgtttacctgtagcaggtgggcacctgagagcctggggaatggggacgcggaggggtagaggggaggcca

SEQ ID NO: 264820 - DNA, 33 bp, Homo sapiens
  chr12:53345414-53345447
  hypo
tactggtctcagcaggtgcgtgaggggagggga

SEQ ID NO: 264821 - DNA, 160 bp, Homo sapiens
  chr12:53452999-53453159
  hypo
tgagtcccctggccggccgccccctacagctgctgaacggcaggagctggatcgcctcctaggaggctgcggagtggccagtgggggccggggagctgggcgcgagacggccatcctagatgacgaagagcagcccactgtgggcggaggcccccacctc

SEQ ID NO: 264822 - DNA, 75 bp, Homo sapiens
  chr12:53454239-53454314
  hypo
tgcctcggtctccccgagatgccccatgcagtgcttcgtcagagttgtctggtccctccacgcccctgcacacca

SEQ ID NO: 264823 - DNA, 81 bp, Homo sapiens
  chr12:53463204-53463285
  hypo
cacagaagcctgtgcgtgtctccagcagaggctgctcccgcatccccactcccagcctcagacggccgctgcttagctcag

SEQ ID NO: 264824 - DNA, 86 bp, Homo sapiens; identical to SEQ ID NO: 214909
  chr12:53467253-53467339
  hypo

SEQ ID NO: 264825 - DNA, 195 bp, Homo sapiens
  chr12:53474292-53474487
  hypo
tttataacacttattaccgtcttgctttcgttattggagttacttgtgtgtgtagacccgtctctgctagactgtgagctccttcagaccccagactattctattcttatcacactaggtactctaacgtgttgagtgccaggaaagccatcagctcgcataccgtgaatagtgcccactcggcataacggcaat

SEQ ID NO: 264826 - DNA, 75 bp, Homo sapiens
  chr12:53509321-53509396
  hypo
ggcctgggctgtgcgctgctagccgcccacgccgtggtgctctgcgcgctgccggtccacgtggccgtggagcat

SEQ ID NO: 264827 - DNA, 40 bp, Homo sapiens; identical to SEQ ID NO: 214910
  chr12:53517536-53517576
  hypo

SEQ ID NO: 264828 - DNA, 58 bp, Homo sapiens
  chr12:53547966-53548024
  hypo
agatatggaccaaaacgaacaagacgtgatcttgagggagtttcgttatggctctagc

SEQ ID NO: 264829 - DNA, 196 bp, Homo sapiens
  chr12:53662984-53663180
  hypo
gtgtctaccccacagcgtcctcccctctacctggaacgaattctctttgtcttactgcggaatgctgctgcacaaggaagcccagaggccacactccgccttgctcagcccctccatgcctgcttggtgcagtgctctcgcgaggctgctccccaggactatgaggccgtggctcggggcagcttttctctgcttt

SEQ ID NO: 264830 - DNA, 57 bp, Homo sapiens
  chr12:53668186-53668243
  hypo
actgaagcagctgcacgagggatggaatgcagtggatcggtgcgagaagccaaggat

SEQ ID NO: 264831 - DNA, 125 bp, Homo sapiens
  chr12:53677870-53677995
  hypo
agctggagctggcccgcaatgacattgatctctgtcagtcggacctgcagcaggttctgttcttgcttgagtcttgcacaggtgagcagccatgtccccatgaccataggcggtgctgaaatgac

SEQ ID NO: 264832 - DNA, 307 bp, Homo sapiens; identical to SEQ ID NO: 214911
  chr12:53685893-53686200
  hypo

SEQ ID NO: 264833 - DNA, 59 bp, Homo sapiens; identical to SEQ ID NO: 214912
  chr12:53686627-53686686
  hypo

SEQ ID NO: 264834 - DNA, 240 bp, Homo sapiens
  chr12:53778351-53778591
  hypo
gagccactgcacccagccacattttctgttttgtatgttttttttccacacccctttaaaaatgtaaaaccattcttagctctaaggccttctttggcctgtaggccaactcctccataggataaaaattgattatgggccgggtgtggtggctcacgcctgtaatgcaggcactgagaagacgaggcaggtggatgggttgagttcaggagttcaagaccggctggggcaacatggcga

SEQ ID NO: 264835 - DNA, 93 bp, Homo sapiens
  chr12:53785410-53785503
  hypo
tttaagtaatttcaacttttattttgtttgttatatgatcttgagatttgggatacaaatgatcttgttacccgggtccggtcatgagcatag

SEQ ID NO: 264836 - DNA, 92 bp, Homo sapiens
  chr12:53796833-53796925
  hypo
aggtagaagaactgcttgaaccagggaggcggaggtggcagtggaccaagattctactgcactcccactccgtctcaagaaagaaaaaaaaa

SEQ ID NO: 264837 - DNA, 32 bp, Homo sapiens
  chr12:53810592-53810624
  hypo
caaaattaagaaactgacatcgtggccaggtg

SEQ ID NO: 264838 - DNA, 43 bp, Homo sapiens
  chr12:53823277-53823320
  hypo
cagaatgtgctcattcgggaagatggatcgtgtgccattggag

SEQ ID NO: 264839 - DNA, 35 bp, Homo sapiens
  chr12:53830285-53830320
  hypo
ggattacaggtgtgagccaccgcacccggccaata

SEQ ID NO: 264840 - DNA, 120 bp, Homo sapiens
  chr12:53832350-53832470
  hypo
caagatcgtgccactgcactccagcctggacaacggggccagggcgagactccgtctcaaaaaaaaaaggggggggcaaaggacattaacagacatttctcaaaagaagatatgcagccg

SEQ ID NO: 264841 - DNA, 41 bp, Homo sapiens
  chr12:53836912-53836953
  hypo
ttacaggcgtgagccaccgcgcctggactgaccagtgcttt

SEQ ID NO: 264842 - DNA, 157 bp, Homo sapiens
  chr12:53898408-53898565
  hypo
tgcgtggggaccagcgtgggtgtgagaagccttttttcactcagcctcatgcaccctgtgtctcccttccaaggagctggtggtgcagaaaggctggcggttgccggagtacacagtgacccaggagtctgggccagcccaccgcaaagaattcacc

SEQ ID NO: 264843 - DNA, 204 bp, Homo sapiens; identical to SEQ ID NO: 214915
  chr12:53899813-53900017
  hypo

SEQ ID NO: 264844 - DNA, 404 bp, Homo sapiens
  chr12:53994392-53994796
  hypo
ggcgtgagccaccgcgcccggcatgaagagaaaacatttctaaacttgctttgtatttagatggacagctttagaaaggaggagacagcaacatgtatttttccatactgtgtggtgggaaacaaacaccagtagaataacaatatggaagacagcaaggcagatttcattacggtagagtgcctacacttcctcataacttggatttacacactgcaaatcctctgatctgattacctccagtgatcacgtaaaatactggctttaaactctttgccttagtgataaaacagccactttgattcacaacgagacattcacaataaagtatattgtaaacgtacctgtccacagcccggggcattgcacacaaacggtctgtcgtctcccatatttcatatagc

SEQ ID NO: 264845 - DNA, 36 bp, Homo sapiens
  chr12:54023346-54023382
  hypo
gattacaggcatgagccaccgcgcccggcctgaagc

SEQ ID NO: 264846 - DNA, 44 bp, Homo sapiens
  chr12:54031206-54031250
  hypo
taaataaaagctttgcaggccgggcgcggtggctcatacctgta

SEQ ID NO: 264847 - DNA, 87 bp, Homo sapiens
  chr12:54051791-54051878
  hypo
tctgtctcagtctctcgagtagctgggattacaggtgcacacaagcataccagctacttttagtaactttctatttttttttaaatt

SEQ ID NO: 264848 - DNA, 155 bp, Homo sapiens
  chr12:54122158-54122313
  hypo
aggataacaatacatgttgacgttccggtttttatttaggagaggtgaaagattgacacgtctcccacaccccaagtcacgttatagacttgggcatcctgtcccccctctcgctattctccatccctgtagtcggaggcattcagaattacctc

SEQ ID NO: 264849 - DNA, 44 bp, Homo sapiens
  chr12:54629097-54629141
  hypo
ctgcttagaaatcaccctctcggcccggcggtggctcacgcctg

SEQ ID NO: 264850 - DNA, 148 bp, Homo sapiens
  chr12:54651109-54651257
  hypo
cagtatcattagaacgtaagctccacaagcggagagattttgttttctttactgctgtgtcttctaactcttaggaagagtgcaggagggggaagaaaaagacaaaaatgcttgtgattcctaaggaagtaaaccaaaggtatctatc

SEQ ID NO: 264851 - DNA, 178 bp, Homo sapiens; identical to SEQ ID NO: 214921
  chr12:54651287-54651465
  hypo

SEQ ID NO: 264852 - DNA, 38 bp, Homo sapiens
  chr12:54718115-54718153
  hypo
caggcttgagccaccgcgcccaggcacaacggcttgtt

SEQ ID NO: 264853 - DNA, 97 bp, Homo sapiens
  chr12:54720206-54720303
  hypo
agccactgcgccgggccaggaattcttattgtatgatctaggatgctaatttctccctctctggttacatgagaattgtggtcgctaaagggctgta

SEQ ID NO: 264854 - DNA, 122 bp, Homo sapiens
  chr12:54767804-54767926
  hypo
gagctgggtctccaggttctcggacgccaggctccctgcctctggtcttggcagcctcaatgcctttgactcgtcgggcgtggcgattacctttgtagtgcgcctcagcctggctctttagg

SEQ ID NO: 264855 - DNA, 31 bp, Homo sapiens
  chr12:54890476-54890507
  hypo
tataaaaaagtattagaggccgggtgtggtg

SEQ ID NO: 264856 - DNA, 91 bp, Homo sapiens
  chr12:55310066-55310157
  hypo
ccactgtgcctggctcaactgtccactttataaggacactatcaccattccatttacctttctctctctccttcaacgttcccacttgtat

SEQ ID NO: 264857 - DNA, 39 bp, Homo sapiens; identical to SEQ ID NO: 214924
  chr12:55481152-55481191
  hypo

SEQ ID NO: 264858 - DNA, 36 bp, Homo sapiens
  chr12:55511044-55511080
  hypo
tgagccaccgcgcccggcctccatatgaatgctgta

SEQ ID NO: 264859 - DNA, 278 bp, Homo sapiens
  chr12:56078877-56079155
  hypo
cagctcgggatgcccgtcagcagccaggatggggtgtgcatccgggccctcccgccgggggctgccccagttgttcctcaggatggtgcccgtcttctcctccttgaactgctgtcggtcttcccgaggaatcttcaccgcatggtactggggcacggtggcctcggggtgcttcgcccgtttgaagaatcccatctataaggacaccaggccagaccatgaggagcctgaagagctgcggtccctggagcagatgcctagcgcggcacagctcctca

SEQ ID NO: 264860 - DNA, 33 bp, Homo sapiens
  chr12:56108936-56108969
  hypo
ccggctaatcacggcatttttataagccttgtg

SEQ ID NO: 264861 - DNA, 180 bp, Homo sapiens
  chr12:56116619-56116799
  hypo
cccaaggcctgagttcttagcaggagtataaggcgcctaagcttagtctaccttctaaggaagcctgcgtttgtcaccatcactcagcaaataacctgaatgtctcctgtctctcagccttaatttttcaggcagcatcatgggacacatacttttagttttgagacaaggccttgctct

SEQ ID NO: 264862 - DNA, 269 bp, Homo sapiens; identical to SEQ ID NO: 214926
  chr12:56142456-56142725
  hypo

SEQ ID NO: 264863 - DNA, 88 bp, Homo sapiens; identical to SEQ ID NO: 214927
  chr12:56182547-56182635
  hypo

SEQ ID NO: 264864 - DNA, 151 bp, Homo sapiens; identical to SEQ ID NO: 214928
  chr12:56183314-56183465
  hypo

SEQ ID NO: 264865 - DNA, 31 bp, Homo sapiens; identical to SEQ ID NO: 214929
  chr12:56183705-56183736
  hypo

SEQ ID NO: 264866 - DNA, 140 bp, Homo sapiens
  chr12:56230959-56231099
  hypo
tgggatagcctttctctactcgaagctgctggttgaggcgccagtagactttgcccttgaagaagtagactcggccatcttgccaactcatagcagccgagggctggtttggcactcccgtaaacaaacccttgattggt

SEQ ID NO: 264867 - DNA, 137 bp, Homo sapiens
  chr12:56329173-56329310
  hypo
ctgtattatattaacgtaagatatgttattatcattactgaatcaaggaaagtcgcccactgcaccttggtccctggatccagtagccaaaacctggggctccctaagcactgctgacctagcggagtggaaggaag

SEQ ID NO: 264868 - DNA, 196 bp, Homo sapiens
  chr12:56329557-56329753
  hypo
gaacgcagtccaggcggggccggggctagggaccttgccagagctggttctgtgtcgcgcgtcagaagcgctagaggtcgttgcgtggcgtgggtggctcggggagtgggtggctgagcggagctggggtccctggccagaggcggaacaaaatggggtcatggccaggaagacgcgctaacgcagtaagagtcac

SEQ ID NO: 264869 - DNA, 120 bp, Homo sapiens
  chr12:56354598-56354718
  hypo
gcgattacaggcgtgagccaccgcgcccggccttctctgtgtttttaaattttaactacaatgagtatgtattacacatataacttgttttaaaaattaaaggaggaggccgggtgcgat

SEQ ID NO: 264870 - DNA, 32 bp, Homo sapiens
  chr12:56441277-56441309
  hypo
acctgccagataggccgggcgcggtggctcac

SEQ ID NO: 264871 - DNA, 174 bp, Homo sapiens
  chr12:56480248-56480422
  hypo
gtggagaggtaaggaagaggcgttccgctgcggcccttaaccctgtcacttctttccctacctcagagattctgtcagggggtgtttatattgagaagaacgataagctttgtcacatggacacaattgactggagggacatcgtgagggaccgagatgctgagatagtggtga

SEQ ID NO: 264872 - DNA, 56 bp, Homo sapiens
  chr12:56504406-56504462
  hypo
aaatgaaaacttcacgtgccttcttcagtgaggtggaaaggcgttttgatgccatg

SEQ ID NO: 264873 - DNA, 440 bp, Homo sapiens
  chr12:56558007-56558447
  hypo
tcttccccacctgcccgctcaccctccctccaggtggacccctctccctcacccttctcccctcttggccccttctcacctggcagtgggctggcactgggcaggaggttgccctgaacagctgccacaatggcagggctttgggctgcggcggatccgagccccggcccgagaggcaaggaagatggcatggtggtggtcgccggcaggttaggatgtagagggttcgccatggacacaggcaggttaggtggggggagagtgcccggggcgaacgggagatggtggtgatgcccatgcaggttaggaggagcggggaggttaatactgatggagtcagctagactaccaaatgggatgatggatggagcaggaggaggaggaggaggcggcatgccaaaaggcaaacccaaaggagcattacccgccacgcctgggtg

SEQ ID NO: 264874 - DNA, 148 bp, Homo sapiens; identical to SEQ ID NO: 214933
  chr12:56601395-56601543
  hypo

SEQ ID NO: 264875 - DNA, 207 bp, Homo sapiens; identical to SEQ ID NO: 214934
  chr12:56604087-56604294
  hypo

SEQ ID NO: 264876 - DNA, 90 bp, Homo sapiens; identical to SEQ ID NO: 214935
  chr12:56610573-56610663
  hypo

SEQ ID NO: 264877 - DNA, 200 bp, Homo sapiens; identical to SEQ ID NO: 214936
  chr12:56993681-56993881
  hypo

SEQ ID NO: 264878 - DNA, 81 bp, Homo sapiens
  chr12:57054399-57054480
  hypo
gtggcgatatacgacgctttttactagcaggaatagacattcaacatttaattgtggtcaatgtttaaatgaaacccacag

SEQ ID NO: 264879 - DNA, 35 bp, Homo sapiens
  chr12:57211451-57211486
  hypo
caaagtgctgggattacaggcgttaactgctttat

SEQ ID NO: 264880 - DNA, 108 bp, Homo sapiens
  chr12:57431637-57431745
  hypo
cccatggggtcttaccggtctcccccattccagtgaggccaggtgctccggctcagcaatcggtacctttccaggaagggcccataaccctggcggtgggcatagcct

SEQ ID NO: 264881 - DNA, 32 bp, Homo sapiens; identical to SEQ ID NO: 214937
  chr12:57446184-57446216
  hypo

SEQ ID NO: 264882 - DNA, 172 bp, Homo sapiens; identical to SEQ ID NO: 214938
  chr12:57489924-57490096
  hypo

SEQ ID NO: 264883 - DNA, 74 bp, Homo sapiens
  chr12:57499242-57499316
  hypo
gggaatacctggtgacgagggttctcaggacttcatccagccggccagtcagcgatgcccgggtcttgggctca

SEQ ID NO: 264884 - DNA, 91 bp, Homo sapiens
  chr12:57559573-57559664
  hypo
tgtggtgcccacagcgaacccatcctacgtgcctccaccccagtgccagccaggcgagtttgcctgtgccaacagccgctgcatccaggag

SEQ ID NO: 264885 - DNA, 153 bp, Homo sapiens; identical to SEQ ID NO: 84277
  chr12:57559886-57560039
  hypo

SEQ ID NO: 264886 - DNA, 356 bp, Homo sapiens
  chr12:57570816-57571172
  hypo
tctccagccctgactagtttcgaggtggtgattcagtatggcctggccacacccgagggcctggctgtagactggattgcaggcaacatctactgggtggagagtaacctggatcagatcgaggtggccaagctggatgggaccctccggaccaccctgctggccggtgacattgagcacccaagggcaatcgcactggatccccgggatgggtgaggaccttgcccagccttctcctggccccatggcccccctgaagtcccattcagcctggccagggacaccttactcctcagtgccatctgcctcctcccaccctctacctacgatcccaccacagtcgctccctgagggcc

SEQ ID NO: 264887 - DNA, 35 bp, Homo sapiens
  chr12:57572148-57572183
  hypo
gccatttactcagcccgttacgacggctctggcca

SEQ ID NO: 264888 - DNA, 38 bp, Homo sapiens
  chr12:57577265-57577303
  hypo
ctggctgtcggcatcgacttccacgctggtgagccatt

SEQ ID NO: 264889 - DNA, 182 bp, Homo sapiens
  chr12:57583524-57583706
  hypo
tagggaactggagaacggagctggcttttgtgtggcttggtggtctcagactccactgtgcctaaggatcgcctaggagcaagagaatgtggagtcccctgccccgccctgggcctagctgagtgacaagctctgggaccgaggacccagggctcaccatccaatgccggtggtccaaggac

SEQ ID NO: 264890 - DNA, 71 bp, Homo sapiens; identical to SEQ ID NO: 214941
  chr12:57584915-57584986
  hypo

SEQ ID NO: 264891 - DNA, 197 bp, Homo sapiens
  chr12:57593155-57593352
  hypo
gtcttccatgccctgcgccagccagacggtgagcaggcaaggggtgggagcaggcgaacggtgagccaggcaccggggtccctgggagttcctgctcatcccttctctagcattgaccaagccctcctggccagacactgggagactccaggagggtctagacaggggatggtctggctcccgggagcttcagcccg

SEQ ID NO: 264892 - DNA, 67 bp, Homo sapiens; identical to SEQ ID NO: 214942
  chr12:57595540-57595607
  hypo

SEQ ID NO: 264893 - DNA, 149 bp, Homo sapiens
  chr12:57596873-57597022
  hypo
gatgggccttgggctcgggactgtggcactactgaggcctggagtccttgtgcccaccctcctgggcctgtctccccctgtccttcccagcccctcggccctgctccgagagtgagttctcctgtgccaacggccgctgcatcgcgggg

SEQ ID NO: 264894 - DNA, 78 bp, Homo sapiens
  chr12:57601872-57601950
  hypo
acgtgtactggaccgactcgggccgagatgtgattgaggtggcgcagatgaagggcgagaaccgcaagacgctcatct

SEQ ID NO: 264895 - DNA, 200 bp, Homo sapiens
  chr12:57625974-57626174
  hypo
acttcctctcacttcgcagtctcacccacggctacatgtctgacgtcaagcggatatcagccacgtccatcttcttcgagtctatgccctataagctcaacgtgagtgctctagggtgtggggaggggctcttggccctggtggtggtcctcccctggagaagctgagggcctggagcgccgggccgtccttagggttaa

SEQ ID NO: 264896 - DNA, 80 bp, Homo sapiens
  chr12:57642438-57642518
  hypo
agccaccacgcgtggccatgtcccctccttgctctccacagcctactcacgatcttgccgaagcatctctgcatttccac

SEQ ID NO: 264897 - DNA, 150 bp, Homo sapiens
  chr12:57858461-57858611
  hypo
tcttttcttctccccggagtgcagtcaagttgaccaagaagcgggcactgtccatctcacctctgtcggatgccagcctggacctgcagacggttatccgcacctcacccagctccctcgtagctttcatcaactcgcgatgcacatctc

SEQ ID NO: 264898 - DNA, 56 bp, Homo sapiens
  chr12:57868221-57868277
  hypo
tgggaacacatacctcccatcggaggtgaccgcacgctctgcaacatgaatgagga

SEQ ID NO: 264899 - DNA, 300 bp, Homo sapiens
  chr12:57881026-57881326
  hypo
tggattacatgcataagccaccgcgcccggcctatgtacatttttgttgttgttgttgataggatggatatgtacactaacttccactttgtcactaattccgcacatggtaactccgaactctaaaactctgaccgttaagagcttgcatcgagagccactgcgagtagctgctgttatgacatggccatttcattctccacaacaagagaagcagccgcggcttcagtcaccgccctccagcagcgtaagaggataaaagtgcgacttgccctaaaacctaaacgtctcttctggatc

SEQ ID NO: 264900 - DNA, 82 bp, Homo sapiens; identical to SEQ ID NO: 214943
  chr12:57885677-57885759
  hypo

SEQ ID NO: 264901 - DNA, 103 bp, Homo sapiens
  chr12:57963865-57963968
  hypo
tcgtggtgcgcatcgcgcccgaggagcggcagaaatacgaggaggagatccgccgtctctataagcagcttgacgacaaggtgagggcggccaggcagggcac

SEQ ID NO: 264902 - DNA, 105 bp, Homo sapiens; identical to SEQ ID NO: 214944
  chr12:57982779-57982884
  hypo

SEQ ID NO: 264903 - DNA, 42 bp, Homo sapiens
  chr12:57986074-57986116
  hypo
cacagccattgcccatcttccgtcaggtctggagtgggagaa

SEQ ID NO: 264904 - DNA, 86 bp, Homo sapiens
  chr12:58068674-58068760
  hypo
ttgcgagccgggccgccccacgacagcagccagccaggccgcctaggacctgccgccaggtgttcggtggcgtcccaccgccccgt

SEQ ID NO: 264905 - DNA, 44 bp, Homo sapiens
  chr12:58122681-58122725
  hypo
cctgtaatccccaccgcctgtaatcccagcactttgggaggccg

SEQ ID NO: 264906 - DNA, 36 bp, Homo sapiens
  chr12:58124644-58124680
  hypo
gcagagatggccctcgggggccgcttgcccgggact

SEQ ID NO: 264907 - DNA, 166 bp, Homo sapiens; identical to SEQ ID NO: 214945
  chr12:58152861-58153027
  hypo

SEQ ID NO: 264908 - DNA, 219 bp, Homo sapiens
  chr12:58241482-58241701
  hypo
tctcaaaaaaaaaaaaaaaaaagtacaaccttcgaatcccgaaaggggtgtgtgcgtgtgggcggacctaggactccagagtataagagctggaactgacctcgggactgtgtcccccaaaacactgaaaatgagacctgaggtgctgggctttcctcacacccaccgacttactcccatttaggcggccccgactccgcccctcctccctacctccct

SEQ ID NO: 264909 - DNA, 157 bp, Homo sapiens
  chr12:58262604-58262761
  hypo
tcaccacccactggcgatgccccattcacaagggggcccggctggccacgcgacccagcagcatccatttgaaggcagcaagcaacaagctggctccattcacaaaccctgtcctcctttgaaaaccaatcaccgtgcgaagcgtgactgggtggtg

SEQ ID NO: 264910 - DNA, 212 bp, Homo sapiens
  chr12:58263123-58263335
  hypo
ttaaaaattgtcctctccaccgccccagcagtcctgccgctgcctctcccatctcctactggcttcaccgcccaagtgggtgacatcagacttggagagtgcagctcgccttcctctgctgggaacatggatcctccgctcctgtgggcttcggtgtgatctttaagcccactaggtcttcctgcccatccgggtgttctagacccaactct

SEQ ID NO: 264911 - DNA, 41 bp, Homo sapiens
  chr12:58274994-58275035
  hypo
ttacaggcatgagtcacggcgcctggcctagtattaaattc

SEQ ID NO: 264912 - DNA, 226 bp, Homo sapiens; identical to SEQ ID NO: 214950
  chr12:58284085-58284311
  hypo

SEQ ID NO: 264913 - DNA, 123 bp, Homo sapiens; identical to SEQ ID NO: 214955
  chr12:60507737-60507860
  hypo

SEQ ID NO: 264914 - DNA, 44 bp, Homo sapiens; identical to SEQ ID NO: 214956
  chr12:60507890-60507934
  hypo

SEQ ID NO: 264915 - DNA, 189 bp, Homo sapiens
  chr12:61582596-61582785
  hypo
ctaacttggccggccggaccaaattcctaaccctaaaaggacgaacttaaccgtttatctaattgagtgatgtcttccaaggttgctgaagtgggctctgccatttccgattagaacctcatcagatccagctggcgggcaacaagatggtctctagtgctgaccggcattcaccgcaaggcacggttc

SEQ ID NO: 264916 - DNA, 121 bp, Homo sapiens
  chr12:62266114-62266235
  hypo
ctttacattgatctaaataccggacaaacttggtgttaactagttacaatggcatggaccttaacagacaaatctcgaaaaaaattcgcccttagggtagaatgcgcggtggattagtcac

SEQ ID NO: 264917 - DNA, 157 bp, Homo sapiens
  chr12:63014933-63015090
  hypo
tctctaactggtctccgtggcttctcttgccttcctccagtcttgcccgtgaaccttgattagaggacaacacaacactaacagccactcctccctctccctcctgactccttatttgagttagaggctctcgtaacacctgcgtcttcccctttgt

SEQ ID NO: 264918 - DNA, 40 bp, Homo sapiens
  chr12:63033701-63033741
  hypo
cgtgcccggccaggccacattcttacgagttaattcttct

SEQ ID NO: 264919 - DNA, 42 bp, Homo sapiens
  chr12:63126532-63126574
  hypo
tagtagggacggggtttcaccgtgttagccaggatggggacc

SEQ ID NO: 264920 - DNA, 395 bp, Homo sapiens
  chr12:63195599-63195994
  hypo
tccttgaatgcactttcaagcgctccgatgaccaggcactcatggggaatcttcttctcggtaaagaagcgtgtggggggcgtgctgggggagcccggggcccccacccctccgcgcagggaggctgcccgggtcagagtccggctgttggcgggcgtgttctcaggctcctcccccaggcaggtagggggcaggacggcggagttcttcaggatgtccacgatgtcctgcagctgctccgtgatgtggtgctgcagcaggcgtgacgccaccaccgcggccccggaccccgcgtgcccgtcaaacagcgaccaatagtggcaggaaacaccctcggattcctgtgggagaggacgacagggaggagtgagaacggctgtggactttgcctcagg

SEQ ID NO: 264921 - DNA, 192 bp, Homo sapiens; identical to SEQ ID NO: 214959
  chr12:63271246-63271438
  hypo

SEQ ID NO: 264922 - DNA, 266 bp, Homo sapiens
  chr12:63397171-63397437
  hypo
gcgctggcaagggccgcgcagccgcagtagagggccagggggcgggtggtgcgcacccgccacagagggctgaaggtgctgcccacggctttcttggcgtctcgacgttttggtcagcggcttttttccattctttccctccacttcttgagtgagcagccatgagttggactgtacctgttgtgtgggccagccagagagtgagctcggcaggagcgaattttctgtgcctggggatggccctgtgtccccgtcaggcagcgtgc

SEQ ID NO: 264923 - DNA, 33 bp, Homo sapiens
  chr12:63397758-63397791
  hypo
atcacagcaggtgcacgccgagaaaagggagaa

SEQ ID NO: 264924 - DNA, 40 bp, Homo sapiens
  chr12:63788040-63788080
  hypo
aaaaaagaaaaaaaaaagcgggaggagtgagtaatattaa

SEQ ID NO: 264925 - DNA, 98 bp, Homo sapiens
  chr12:64373753-64373851
  hypo
gcctctagctgcagccgcctgcggccccatggcaggattcatgcagtgtggggccgagtgcaccatgggcttccttgatttgttcttttttgtttgag

SEQ ID NO: 264926 - DNA, 275 bp, Homo sapiens; identical to SEQ ID NO: 214962
  chr12:64521629-64521904
  hypo

SEQ ID NO: 264927 - DNA, 392 bp, Homo sapiens; identical to SEQ ID NO: 226550
  chr12:64782916-64783308
  hypo

SEQ ID NO: 264928 - DNA, 214 bp, Homo sapiens
  chr12:64797258-64797472
  hypo
aactagtgaggaggcggagtggcagtcaagtcgaggcagcctaagcctacactgcctctatgttgcattaataaattaataaatctgtgaccaaataaatgaagtgacatttagtagcatcgaaagatcccgtgagtaggacttcctaagaatgctctccttcttttcatggacaaaattttagtctgtttaaaataaattttggaccggacac

SEQ ID NO: 264929 - DNA, 75 bp, Homo sapiens
  chr12:64799659-64799734
  hypo
tgctgggattacaggcgtgagccaccgcgcccggccttccactgcatattgatcgtccaaatgccttctatgtgg

SEQ ID NO: 264930 - DNA, 144 bp, Homo sapiens
  chr12:64993418-64993562
  hypo
tcgggctgccttgccgcttgccgttgtaaagtctatgccacgcttccaggggaagatgagaagtgttaggaggattaaatgagtttaggagcgctcaaaatactgcctgataagccgggcgcggtggctcacgcctgtaatccc

SEQ ID NO: 264931 - DNA, 32 bp, Homo sapiens
  chr12:65030351-65030383
  hypo
aaaaattaaagtagccgggcgcggtggctcac

SEQ ID NO: 264932 - DNA, 47 bp, Homo sapiens
  chr12:65516500-65516547
  hypo
tcctgcctaattcctcggatgcacaaagaaaacggaagcaaaagggt

SEQ ID NO: 264933 - DNA, 32 bp, Homo sapiens; identical to SEQ ID NO: 214965
  chr12:65557257-65557289
  hypo

SEQ ID NO: 264934 - DNA, 32 bp, Homo sapiens; identical to SEQ ID NO: 214966
  chr12:65557469-65557501
  hypo

SEQ ID NO: 264935 - DNA, 41 bp, Homo sapiens; identical to SEQ ID NO: 214967
  chr12:66213996-66214037
  hypo

SEQ ID NO: 264936 - DNA, 31 bp, Homo sapiens
  chr12:66248227-66248258
  hypo
cacaatccattcatcgcgattagatttcccc

SEQ ID NO: 264937 - DNA, 33 bp, Homo sapiens
  chr12:66269546-66269579
  hypo
tagtaggcctacgtatgccattagtcaactttc

SEQ ID NO: 264938 - DNA, 89 bp, Homo sapiens
  chr12:66343866-66343955
  hypo
cagattcattgctggtgggacggactgcaaaatggtacagctgctttagaaagctgtctggcagctcctcaaaaagtgaaacaaagaat

SEQ ID NO: 264939 - DNA, 39 bp, Homo sapiens
  chr12:66523435-66523474
  hypo
attacaggcttgagccaccgcgcccggctgaatttcttt

SEQ ID NO: 264940 - DNA, 92 bp, Homo sapiens
  chr12:66843698-66843790
  hypo
cacaatttgatacagattatcggactacttaattggagttaaaagctgtttcagaaactttaaggcagctgtttaccatcttcactaagaaa

SEQ ID NO: 264941 - DNA, 94 bp, Homo sapiens
  chr12:66889676-66889770
  hypo
agtgaaagcaaaggagtcctcggcggcaggtgagcaatggtgatgaaccgaagcgcgccaggagaaggccggcgggatttcatatgagtgcagc

SEQ ID NO: 264942 - DNA, 35 bp, Homo sapiens
  chr12:68433185-68433220
  hypo
ttaagattgtgttgtctgggcgcggtggctcctgc

SEQ ID NO: 264943 - DNA, 35 bp, Homo sapiens
  chr12:68433460-68433495
  hypo
aagagcgagactccgtctcaaaaaaaagattgtgt

SEQ ID NO: 264944 - DNA, 49 bp, Homo sapiens
  chr12:68978249-68978298
  hypo
ctttatttccttgccaggagcggtggctcacacctgtaatcccagcact

SEQ ID NO: 264945 - DNA, 33 bp, Homo sapiens
  chr12:69002754-69002787
  hypo
ctcaaggccaggcgcggtggctcacgcatgtaa

SEQ ID NO: 264946 - DNA, 43 bp, Homo sapiens; identical to SEQ ID NO: 214968
  chr12:69133795-69133838
  hypo

SEQ ID NO: 264947 - DNA, 209 bp, Homo sapiens; identical to SEQ ID NO: 214969
  chr12:69190343-69190552
  hypo

SEQ ID NO: 264948 - DNA, 43 bp, Homo sapiens
  chr12:69193920-69193963
  hypo
ttaaaactcttaaacgtggccgggtgcagtggcgcacgcctat

SEQ ID NO: 264949 - DNA, 97 bp, Homo sapiens
  chr12:69203731-69203828
  hypo
ttgagtattacagatagtgccgctttgtacatgcatcccgtgtgactatttctgtaagaaagattttatagaattataggctggcctcggtggctca

SEQ ID NO: 264950 - DNA, 104 bp, Homo sapiens
  chr12:69218066-69218170
  hypo
atagcatatctactgagtagcgccccgccgccccccgcccaccaccaagtttctgatcctttttcttttctctcagaatcatcggactcaggtacatctgtgag

SEQ ID NO: 264951 - DNA, 137 bp, Homo sapiens
  chr12:69219402-69219539
  hypo
gcctgggcgacacagtgagactgtctaaaaaaaagagagagagagaaaatagttgacagagagaaaatagttgagaacagttagtagacgtagtagacgagaaggctgttgcctgaggaagtcgcagtaactaagac

SEQ ID NO: 264952 - DNA, 34 bp, Homo sapiens
  chr12:69220640-69220674
  hypo
agaacttgtgatctcgataaaacgtaaaaatccc

SEQ ID NO: 264953 - DNA, 34 bp, Homo sapiens
  chr12:69225858-69225892
  hypo
acaacaaaatctcgtttttcaggttaagtcccta

SEQ ID NO: 264954 - DNA, 39 bp, Homo sapiens; identical to SEQ ID NO: 203092
  chr12:69241507-69241546
  hypo

SEQ ID NO: 264955 - DNA, 198 bp, Homo sapiens
  chr12:69277880-69278078
  hypo
attccatcggaaaaaaaaaaaaaaaaaaaaaagcattctgagggaccttgatcaagggacctcgatcaatagacaagatagcaaaagggaaacgcagtctgagctgctgtctataacgaacagttgttttattaaaactaactttggtcagactccttgcaacgtagtcttttttaaagaagccgcccgtgatgctca

SEQ ID NO: 264956 - DNA, 114 bp, Homo sapiens
  chr12:69461743-69461857
  hypo
aagaaaaaaaaaagtgctctcggatagttctcaggccaagtgaggtcccagcgtgtttggtcggcagctctgctgtccaccccaccaggacccgatatactgtattctattatt

SEQ ID NO: 264957 - DNA, 64 bp, Homo sapiens
  chr12:69639025-69639089
  hypo
tcacaccagcattacgagcccaaacgtgaggaatgcattgggctaagatcgctaaacaatagta

SEQ ID NO: 264958 - DNA, 102 bp, Homo sapiens; identical to SEQ ID NO: 214971
  chr12:69644224-69644326
  hypo

SEQ ID NO: 264959 - DNA, 98 bp, Homo sapiens
  chr12:69799148-69799246
  hypo
caatgtattggtctcgatttcatggatagatgattcattcttactaaagaagacctttagtgacctcagcgtacagttttttttctttccttattaag

SEQ ID NO: 264960 - DNA, 33 bp, Homo sapiens
  chr12:69820434-69820467
  hypo
gccaccgcatccggcctaaattctcctttaaac

SEQ ID NO: 264961 - DNA, 126 bp, Homo sapiens
  chr12:69964171-69964297
  hypo
cagaactgattttatacacccgcaaacgtgactcagtaaaatggcactacctctgcctgcgacgctatggctatgactcgaatctcttttcttttgaaagtggtcgaaggtgtcaaactggacaag

SEQ ID NO: 264962 - DNA, 153 bp, Homo sapiens
  chr12:69999219-69999372
  hypo
gcattttcttgccagggctccgaataatagaagtcaacaaaatactctgtacaaaaccctttataaaagtctgctgtgtgccgtattagcatattagatcaatagaagatattaagagaacctttttaaaaatcacaattactggccgggcgc

SEQ ID NO: 264963 - DNA, 178 bp, Homo sapiens; identical to SEQ ID NO: 214973
  chr12:70004624-70004802
  hypo

SEQ ID NO: 264964 - DNA, 287 bp, Homo sapiens
  chr12:70087357-70087644
  hypo
tgagtgaataaacaaacataaagaattttcaaaggaattctggaggtcctgtctcagctgagaagagcccatggaaggaaaagccattcatagtacctgcttcaaccacgtggtccattgtgggaaatcttttgtacacagcagtgctcaccgagcgaaagatgagcagggaggtgagattgacgtagcgcatcagcgtccttctaagcaggcgcccgtgctcgtcgcttccgtgaacactgctagagatgaggaacattagcctgtctggccagggcaaattcaca

SEQ ID NO: 264965 - DNA, 72 bp, Homo sapiens
  chr12:70135096-70135168
  hypo
tagttgtaggtggtcgtacagctggccagtgacagagccggtattaaaaactgtatccgactgcccaaaatg

SEQ ID NO: 264966 - DNA, 209 bp, Homo sapiens
  chr12:70173198-70173407
  hypo
tcggccatcttggctcctcctcccatttgtctttctttattccctcttgaactccaattactcgaacattttctcttttgatgctatcccatagatcttgtaagctttcttcattcctctttagtctttttttttttcttctctacctgtatatttttcacttatcctgcctttgagctcactcatcgtttcttcgcttggttaattct

SEQ ID NO: 264967 - DNA, 33 bp, Homo sapiens
  chr12:70435915-70435948
  hypo
ggcgcagtggctcacgcctgtaataccagcact

SEQ ID NO: 264968 - DNA, 171 bp, Homo sapiens; identical to SEQ ID NO: 214974
  chr12:70648187-70648358
  hypo

SEQ ID NO: 264969 - DNA, 100 bp, Homo sapiens
  chr12:70651428-70651528
  hypo
gagccaccgcgcccggccccaactacccttttcttaagtagactcttcttccctagcatctattgtaattagctattacgctaaaaaaattttgtctttc

SEQ ID NO: 264970 - DNA, 205 bp, Homo sapiens
  chr12:70765937-70766142
  hypo
gaggaactatgagggcgaaagtgaggttggaccacagtgagcaaggtggacagtgggaaatgaggttagggtcctaaagaacacgatacggactttggattttattccaagcatgatgggaatctgtgacattaagcggggctgaaatatcatcagacttagacttttaaaaaatgcaaatgatccctctcgctgctgagttgaa

SEQ ID NO: 264971 - DNA, 194 bp, Homo sapiens
  chr12:70954498-70954692
  hypo
ttaccacccacagcacgtacttccttccaggaacaaggccttgaaaccgccactccgtcaggtccttgtctttccagttttccttctttgtgccattgggattatagagaatcagctcataaaagtcaaagtccccagaggctggactccagttgaaccaaaggctgtctgtcgtgttccgattggaccccctg

SEQ ID NO: 264972 - DNA, 42 bp, Homo sapiens; identical to SEQ ID NO: 214975
  chr12:72098321-72098363
  hypo

SEQ ID NO: 264973 - DNA, 120 bp, Homo sapiens; identical to SEQ ID NO: 214976
  chr12:72127145-72127265
  hypo

SEQ ID NO: 264974 - DNA, 104 bp, Homo sapiens
  chr12:72165399-72165503
  hypo
gctgtttgttatctccctctcgcgttttgcatgaaaagacatagtttaagtattttattaagagaagattgaggccaggcacagtggctcacgcctgtaatccc

SEQ ID NO: 264975 - DNA, 98 bp, Homo sapiens
  chr12:72272242-72272340
  hypo
ttagctttcctcactactgacgatagggttagggttaatagggatggtggtgagggtttttgtttttttttttggaggagtctctctctttcatccag

SEQ ID NO: 264976 - DNA, 40 bp, Homo sapiens; identical to SEQ ID NO: 214978
  chr12:72642202-72642242
  hypo

SEQ ID NO: 264977 - DNA, 102 bp, Homo sapiens
  chr12:73130929-73131031
  hypo
tgtctcacaagctataagatcgtcaagcctccaggcttcagttttcttttccgtaaaatgggcttaaaaattatactcaagtcgggccgggcgcggtgactc

SEQ ID NO: 264978 - DNA, 166 bp, Homo sapiens
  chr12:74564711-74564877
  hypo
ccctgttagggtcttgcctccggccaccacttgtcccatctcgtccccgcctgcgcctcccgccccccgttctccgtcatccctgctccagccgctccagggaagccagcctcggcagccaccgtgaagaggaagcggaagagccggtggaggccagaagagaata

SEQ ID NO: 264979 - DNA, 237 bp, Homo sapiens
  chr12:75699403-75699640
  hypo
cagcagcaggccgcggagaagggcggcgcccaccaggcccctagcactgcccagtctggcccggcacagctgctgcagaaggcgcacgacgagctcgtgtggtacatgcgggtcaaggaccagaagaagatgatcatctggtttccagacatggtgaaggatgtcgtcggcagctacaattagtgatggaggggcatattcaggctcaccagcctcatcctcgcccaggtgttcggg

SEQ ID NO: 264980 - DNA, 44 bp, Homo sapiens
  chr12:75702602-75702646
  hypo
aaaaatgagtaaggcgcttgcagtgagccgagatcacaccacta

SEQ ID NO: 264981 - DNA, 31 bp, Homo sapiens
  chr12:76706641-76706672
  hypo
tctttaaaaagagggagcagcgggctgggcg

SEQ ID NO: 264982 - DNA, 120 bp, Homo sapiens; identical to SEQ ID NO: 214979
  chr12:76878984-76879104
  hypo

SEQ ID NO: 264983 - DNA, 38 bp, Homo sapiens; identical to SEQ ID NO: 214980
  chr12:76879284-76879322
  hypo

SEQ ID NO: 264984 - DNA, 70 bp, Homo sapiens
  chr12:77002013-77002083
  hypo
ccgtgctcaaggtgcgaattcccggtggctccaccccactctcccagtgcgcgggcggtcccccagtcag

SEQ ID NO: 264985 - DNA, 86 bp, Homo sapiens
  chr12:77085816-77085902
  hypo
agataaggcatgtaaataaacgaccactgggtgaggcagaaaaagtgtactgagtgtgtaacgccaaaggttcttttgtttgtttg

SEQ ID NO: 264986 - DNA, 321 bp, Homo sapiens
  chr12:77216007-77216328
  hypo
attctttgggaaagcgtaataagaaacatgtaatgatgcaggtgtttttagtaatttacacaatgtcaaaacaacgttaatagggcagtaaattaatttttatagaagttctttaaaggtaactaagatagcctgcttttaaacttttaataggaatttcttctgtttatattatcagggcgaatcagcgcttgatttggcaaaacagagaaaaaatgtgtggatgatcaaccacttacaagaggcaaggcaagcaaaaggatatgacaatccgtccttccttagaaagctgaaagctgataaggtaaactcataactgaa

SEQ ID NO: 264987 - DNA, 54 bp, Homo sapiens
  chr12:77424235-77424289
  hypo
cacttgctgagcacgtgttagctcatcccagagttagacgcccaggtatggcct

SEQ ID NO: 264988 - DNA, 32 bp, Homo sapiens; identical to SEQ ID NO: 214983
  chr12:77453497-77453529
  hypo

SEQ ID NO: 264989 - DNA, 311 bp, Homo sapiens
  chr12:79842602-79842913
  hypo
ttctatttccaattctttagcgctcaaggacgctttatagtcgggccttatctctagagctagatgattcatattcatttcatggcttctttcagaaagtgcaggtggtggtaactgttttggactatgacaagattggcaagaacgatgccatcggcaaagtctttgtgggctacaacagcaccggcgcggagctgcgacactggtcagacatgctggccaaccccaggcgacctattgcccagtggcacaccctgcaggtagaggaggaagttgatgccatgctggccgtcaagaagtaaaggaaagaa

SEQ ID NO: 264990 - DNA, 164 bp, Homo sapiens; identical to SEQ ID NO: 214984
  chr12:79926688-79926852
  hypo

SEQ ID NO: 264991 - DNA, 41 bp, Homo sapiens
  chr12:80871262-80871303
  hypo
tctgctccttacttacatttcgagaacaatgtttagaaatt

SEQ ID NO: 264992 - DNA, 43 bp, Homo sapiens
  chr12:84323713-84323756
  hypo
tatttccagccgggcgcggtggctcatgcctgtaataccagca

SEQ ID NO: 264993 - DNA, 38 bp, Homo sapiens
  chr12:86216675-86216713
  hypo
caccacaaaatgtctactgccggccaggcacggtggct

SEQ ID NO: 264994 - DNA, 40 bp, Homo sapiens; identical to SEQ ID NO: 214988
  chr12:89020039-89020079
  hypo

SEQ ID NO: 264995 - DNA, 158 bp, Homo sapiens
  chr12:89772134-89772292
  hypo
tcttctctaatgagcgttgtttgttttactctaggatgcatttggataaaatattgggataaaatttagagaggtctgtttagaaaagggaattaaacatgattggctattattgtgtctttgttttctcatttaaaaaaattacagaggccgggtgt

SEQ ID NO: 264996 - DNA, 94 bp, Homo sapiens; identical to SEQ ID NO: 214990
  chr12:89800520-89800614
  hypo

SEQ ID NO: 264997 - DNA, 33 bp, Homo sapiens; identical to SEQ ID NO: 214991
  chr12:89915163-89915196
  hypo

SEQ ID NO: 264998 - DNA, 157 bp, Homo sapiens
  chr12:89916944-89917101
  hypo
ttataatctaaacattcagacgagatccctctactgcgaatagccccatgccagcctggtctatcctctggaacatgtaaattaggaaaaacgtttttcaaataccagtcaaagctcttgcatctcaaccgctctcgtagtaattttctttcagaaa

SEQ ID NO: 264999 - DNA, 33 bp, Homo sapiens
  chr12:89973340-89973373
  hypo
ctgggaggcatgagccaccgcacccggccaaaa

SEQ ID NO: 265000 - DNA, 136 bp, Homo sapiens
  chr12:90025699-90025835
  hypo
gctcggcctgaaggttatacaactattaaatgtcaaggcaaagattcagtccagctctgtcagaggataaagagtatattcttcttcagttataatgctgataagtctgcttacggttctccgacttgtacatcca

SEQ ID NO: 265001 - DNA, 126 bp, Homo sapiens; identical to SEQ ID NO: 214992
  chr12:90049546-90049672
  hypo

SEQ ID NO: 265002 - DNA, 243 bp, Homo sapiens
  chr12:90313458-90313701
  hypo
tctccaacacagacccggtgagaggtactgggcgatgaggaagtacagctccaactccatgagaggcaccgggcctcaggtggacaaggcctcctccttggccgggcgctgggcgggaggcgggagcgagcgtgctagccaagcatgtgggccgcgctgaggcttgacgaggccggcgtcccttttcctgaggcacgtgcgccgccgccgccatcatgccgtgcgcgccgccctaatgctttt

SEQ ID NO: 265003 - DNA, 75 bp, Homo sapiens
  chr12:93475466-93475541
  hypo
gtgaggatagcccaccccaagggaagaatcaagggaggagaaacagaaacccaggaaccacgccaatggagaaaa

SEQ ID NO: 265004 - DNA, 39 bp, Homo sapiens
  chr12:93476370-93476409
  hypo
tatggaaagcagccatgtaggctacgggacctcaatcag

SEQ ID NO: 265005 - DNA, 327 bp, Homo sapiens
  chr12:93709062-93709389
  hypo
aaaaaaatgcgcaccgccgggcccgcctccctcagcacccaatgctggtcggagccctcgggcaaacaaactacctcctgcatccgggaacttaccctccaggcggaaggaaagaatgcggggacagagacctgtcctgggagaagctccttaggagatgaaggagcaccgaaagatgcctgacgtttttacgactcctctttcatgtttgtgtcccatctcttctcagaagaattagccatgttttgtgaattccaggtgccatcttcaaaaacacccttggattctagccaatcaccaaaatggcagagacggccacctgagacc

SEQ ID NO: 265006 - DNA, 170 bp, Homo sapiens
  chr12:93710944-93711114
  hypo
catgtcttctaacatcgacccaggactcccgcttctctttacaccatatactgttctttatgtgccgctgtttttctctttatagtttttctaggacaaaaaccaagctccatcagaaggttaaacctgtgtcaggtttacagtccaatgaccgccgtgggtcataatcc

SEQ ID NO: 265007 - DNA, 96 bp, Homo sapiens
  chr12:93738883-93738979
  hypo
catgacatatgccaccgcaagtacattcatccaatatgtgcatgttacagggctatgcactgcgaagtcttgtttgcttgttttttgagatgggag

SEQ ID NO: 265008 - DNA, 141 bp, Homo sapiens
  chr12:94093737-94093878
  hypo
gcagcatgaaggagcgatctcagcggggaagggaataaagtagggagtgcttcgaaggtgaatctgggttttatggaaggtagagtcattggttccaggggaagaagccagtccagatggaggagacgccaagtacttccc

SEQ ID NO: 265009 - DNA, 42 bp, Homo sapiens; identical to SEQ ID NO: 214996
  chr12:94145345-94145387
  hypo

SEQ ID NO: 265010 - DNA, 281 bp, Homo sapiens
  chr12:94145627-94145908
  hypo
gactctgtttcaaaaacacaaacaaaaaatcctttatctttactttgctcctttcaggatagctctggaatttgaatctgctttccagagctttattctcaactgccagcctcatttttcatactgtagttacttaagggtggaggtagtcgggccggcaagtaactacctgcagtgtacttgagaacctttgaaagcatctgtacttgccaagggtggggcatgtatgcttgagagccctttaaagcgtctttacttgctaagggcgctatgaccattcc

SEQ ID NO: 265011 - DNA, 40 bp, Homo sapiens
  chr12:94203995-94204035
  hypo
aagacaggaagagaaagaaccgatgtgccttaagaatagg

SEQ ID NO: 265012 - DNA, 56 bp, Homo sapiens
  chr12:94233300-94233356
  hypo
cttgctggccagtacgactgtccgatctttatttccattggcggtgaacaacgttc

SEQ ID NO: 265013 - DNA, 104 bp, Homo sapiens
  chr12:94235585-94235689
  hypo
cgggacagtctcttcgctcagcttttttttctagtcccgcacacctgcagcatatgacacttacatcagtaacagtggttcactgcagccgtgagctggggtga

SEQ ID NO: 265014 - DNA, 251 bp, Homo sapiens
  chr12:94658439-94658690
  hypo
catttttttaaatgtcgtttatttctggcttgctaaagggtgattaaatacgaatgtaaacaaaggtacactctccacatctaactgttcctaggcattaacccactgatgagcattagtctgccatatgtaagtttaaacataaaataacaaggtatactgtgggtactgcacgtcgctgtgaatgtgcacgcgtgcgcgtgtgcagatgtgcattcgcgatggagagaggaggcggttttctgagtttt

SEQ ID NO: 265015 - DNA, 77 bp, Homo sapiens
  chr12:95397956-95398033
  hypo
tggcgcgtgcccgtagtcccagctactcggtaggctgaggcttagatgggagcatcgcttgagcctaaaaaatttca

SEQ ID NO: 265016 - DNA, 40 bp, Homo sapiens
  chr12:95467948-95467988
  hypo
taatcactagagactgggcacggtagctcacgcctgtaat

SEQ ID NO: 265017 - DNA, 89 bp, Homo sapiens
  chr12:95492921-95493010
  hypo
ggattataggcgtgagccactgcacctgacttgacccttttaatttttaatccactgtgtcccgatgcgcagcacaatgcctggcccaa

SEQ ID NO: 265018 - DNA, 41 bp, Homo sapiens
  chr12:95562127-95562168
  hypo
ttgcttattttcataaaaatcgttaatagcagccaggcgcg

SEQ ID NO: 265019 - DNA, 152 bp, Homo sapiens; identical to SEQ ID NO: 215001
  chr12:95602736-95602888
  hypo

SEQ ID NO: 265020 - DNA, 209 bp, Homo sapiens
  chr12:95676257-95676466
  hypo
tggaagagcttaagcgcagctatgagttctatcggtactttgaaactcagcaccagtcagtaccgcagtgtttatccaaaactcaacagaagtcaagagaactgaataatgttcacacagcagtgcgtagcttgcagctccatctgaaagcattactgaatgagtaagtttagaaattataccaagaaaggtctcggtaattagcaagc

SEQ ID NO: 265021 - DNA, 37 bp, Homo sapiens
  chr12:95900348-95900385
  hypo
acaggcatgagtcaccgtgcccagcctatatatgttt

SEQ ID NO: 265022 - DNA, 153 bp, Homo sapiens
  chr12:96115682-96115835
  hypo
agtgtgcatgtgcatgcacacgtgcgcgcacacacacactcacacacaaatttccaaatgcgaccccatctgtgtacattgactggccacatctgtatacatctatatatatacacggtgggcactgattccgagactgcttaaagttgtgat

SEQ ID NO: 265023 - DNA, 94 bp, Homo sapiens
  chr12:96131819-96131913
  hypo
tcagcagctgcacgcgaaggttggtgatcttcagctgctcctgaactttggcactgtaagggttctctgtatcgtatggtggtgacaaagcttt

SEQ ID NO: 265024 - DNA, 39 bp, Homo sapiens
  chr12:96431742-96431781
  hypo
caggcgtgagccaccgcgcccggccgagaaagaattttt

SEQ ID NO: 265025 - DNA, 32 bp, Homo sapiens
  chr12:96437261-96437293
  hypo
gtagtcccagctactcgggaggctgaggcagg

SEQ ID NO: 265026 - DNA, 92 bp, Homo sapiens
  chr12:96437413-96437505
  hypo
atgtagttcttttccatttagagagttttattggtgattattataggaaaacagactggagagagaataaaagtaggcgctgcagcaattct

SEQ ID NO: 265027 - DNA, 174 bp, Homo sapiens
  chr12:96566283-96566457
  hypo
agacaaataaaatgtgggggcggagatgggaagttgggttgcccataaaattcgcccacaatctcatgaccgagacaagagcagttgactaaccctaatagaaactctagaagaagtgttatggtcggaacaaaatgtgctacttttgactgcggagttgaaaatagttcacag

SEQ ID NO: 265028 - DNA, 59 bp, Homo sapiens
  chr12:96613304-96613363
  hypo
tcatagttaaactacgtcgagtggaacgaaaacaatatggagagcgctgtggcagctgg

SEQ ID NO: 265029 - DNA, 77 bp, Homo sapiens
  chr12:96633652-96633729
  hypo
ttagtgtctgcaccacctttcggggcctgacatgtggcgtctcgcctgtaggctgcggccagcatctaagcggagca

SEQ ID NO: 265030 - DNA, 83 bp, Homo sapiens
  chr12:96641021-96641104
  hypo
aagacagcccccccgtggaagaagtcaggactgtgatcaggtttgtgaccaataaaaccgacaagcacgtcaccaggccggtg

SEQ ID NO: 265031 - DNA, 62 bp, Homo sapiens; identical to SEQ ID NO: 215005
  chr12:97339536-97339598
  hypo

SEQ ID NO: 265032 - DNA, 38 bp, Homo sapiens
  chr12:98895875-98895913
  hypo
agtttatagccaggcgcggtggctcacgcctgtaatcc

SEQ ID NO: 265033 - DNA, 240 bp, Homo sapiens
  chr12:98947861-98948101
  hypo
tgctaggattacaggcgtgagccaccgcgccgggccaatatctagcagtctttcatagatgtaatggtaataccaggggatgagagagtgcagggggaaaaataatttcttaagaaatggctgaaaatttactaagttcccagaaactatataagcccaagtatgggaagttcaagtgaccccaaaacaaagtcaaaccaaggcaactgtggccgggcgcggtggctcatgcctgtaatc

SEQ ID NO: 265034 - DNA, 84 bp, Homo sapiens
  chr12:98948341-98948425
  hypo
gtgagactccgtctcaaaaaaaaaaaaaaaaaaaaaacaaggcaactttagtgaagctattgcgtaccagtttatgataaaggg

SEQ ID NO: 265035 - DNA, 85 bp, Homo sapiens; identical to SEQ ID NO: 215008
  chr12:98983724-98983809
  hypo

SEQ ID NO: 265036 - DNA, 120 bp, Homo sapiens
  chr12:100624655-100624775
  hypo
aaatagttgaattgctagttataccccttttattctgaagtataagccctaaactaacttaaaatagtttctagtgacaatctttttttttttttgagaatgagtctcgctctgttgccc

SEQ ID NO: 265037 - DNA, 33 bp, Homo sapiens
  chr12:100969543-100969576
  hypo
ccgcgcctggccgttatctctattttatagggg

SEQ ID NO: 265038 - DNA, 169 bp, Homo sapiens; identical to SEQ ID NO: 215009
  chr12:101711200-101711369
  hypo

SEQ ID NO: 265039 - DNA, 94 bp, Homo sapiens; identical to SEQ ID NO: 215010
  chr12:101718176-101718270
  hypo

SEQ ID NO: 265040 - DNA, 196 bp, Homo sapiens
  chr12:101720929-101721125
  hypo
tggccattgtcctgcggttcctggccgggacccaacctgaggagatccagatattcttagacctgctgtttgaacctgtgaggcatttcaagaatggtaactatcagctacctctcactctaatacctgttgtctgcggtggacttctcacatctcaggctacatttcccatgctcctgggcgtctttctaacagg

SEQ ID NO: 265041 - DNA, 36 bp, Homo sapiens
  chr12:101962172-101962208
  hypo
cttggatttgaacccgatcagcggctttcctttcac

SEQ ID NO: 265042 - DNA, 192 bp, Homo sapiens
  chr12:102108364-102108556
  hypo
tttgtgttttattgcgctcattggcagacttatgtttcaggcatgttgagatttggaaagtaagtatgctttttaagttgtacattaaaaaatataattgaattcatttgcacaatctgttatgtcattcatcgataataaggagaacaaatcttcaatcagtaacttaaattaattcgtcggagtactcat

SEQ ID NO: 265043 - DNA, 197 bp, Homo sapiens; identical to SEQ ID NO: 215011
  chr12:102132858-102133055
  hypo

SEQ ID NO: 265044 - DNA, 56 bp, Homo sapiens; identical to SEQ ID NO: 215012
  chr12:102133325-102133381
  hypo

SEQ ID NO: 265045 - DNA, 36 bp, Homo sapiens
  chr12:102134948-102134984
  hypo
tgggtaaggaatgacggatgacgactcccagacttg

SEQ ID NO: 265046 - DNA, 33 bp, Homo sapiens
  chr12:102276171-102276204
  hypo
gccaccgcgcccggcccctgatggtctaatgtt

SEQ ID NO: 265047 - DNA, 358 bp, Homo sapiens; identical to SEQ ID NO: 215013
  chr12:102301886-102302244
  hypo

SEQ ID NO: 265048 - DNA, 31 bp, Homo sapiens
  chr12:102457128-102457159
  hypo
aaggaagatttggcccgcaatcagtctgatt

SEQ ID NO: 265049 - DNA, 150 bp, Homo sapiens
  chr12:102457339-102457489
  hypo
ggagacgtagccagaaaattttcgtttaagggccttttatgccagatttgatactatagtccatgtttatctaatgtgattcataggccatctgtagcaattatttgggtgtgggtggtgtttcttaaagttgcacgttgcccagcttaa

SEQ ID NO: 265050 - DNA, 92 bp, Homo sapiens
  chr12:103926638-103926730
  hypo
ggcagacacagagtcgagtcttcaaagaggtcacatcaaaacgcccctgccccacaggcaaggtgaagcgcggatcacggagacaacgggga

SEQ ID NO: 265051 - DNA, 98 bp, Homo sapiens
  chr12:103970054-103970152
  hypo
acaaaaaaaaaaaaaaaaaaagattgttgtgcctgccgatagaatcccttggtttaattttactaaaagtacaagacgaggaagaaaatataactttt

SEQ ID NO: 265052 - DNA, 126 bp, Homo sapiens
  chr12:104169295-104169421
  hypo
cttgaagccaagaacaccagcgcattcttttagaaccccgacaccgagcagttctgggcgcaacacacacccattaagtgtcagcctccaatacaccctgatggcgaaaacacctagaagcaagca

SEQ ID NO: 265053 - DNA, 39 bp, Homo sapiens; identical to SEQ ID NO: 215014
  chr12:104220732-104220771
  hypo

SEQ ID NO: 265054 - DNA, 37 bp, Homo sapiens; identical to SEQ ID NO: 215016
  chr12:104506941-104506978
  hypo

SEQ ID NO: 265055 - DNA, 42 bp, Homo sapiens; identical to SEQ ID NO: 215017
  chr12:104685528-104685570
  hypo

SEQ ID NO: 265056 - DNA, 92 bp, Homo sapiens; identical to SEQ ID NO: 215018
  chr12:104686067-104686159
  hypo

SEQ ID NO: 265057 - DNA, 35 bp, Homo sapiens; identical to SEQ ID NO: 215019
  chr12:104691424-104691459
  hypo

SEQ ID NO: 265058 - DNA, 77 bp, Homo sapiens
  chr12:104695397-104695474
  hypo
agccaccgtgcccggctgcttttgttgaatttaaagtggatgtgagaagctcctaagaatatcgttcactgtaaaag

SEQ ID NO: 265059 - DNA, 92 bp, Homo sapiens
  chr12:104696546-104696638
  hypo
gtgagccaccgcgcccggccattcccattgttatgtatactttgctatttgctgctggtgagacagataaggagtcacgtctttaactgcac

SEQ ID NO: 265060 - DNA, 112 bp, Homo sapiens
  chr12:104698274-104698386
  hypo
accagaaaaaagttcgcaagatggaagaaaatggcaacatgcctacaaagttgcagaagttggacctgagtagttatccagaagcgacagaaaaaaacgtagaaaggatttt

SEQ ID NO: 265061 - DNA, 36 bp, Homo sapiens; identical to SEQ ID NO: 215020
  chr12:104702054-104702090
  hypo

SEQ ID NO: 265062 - DNA, 35 bp, Homo sapiens; identical to SEQ ID NO: 215021
  chr12:104703967-104704002
  hypo

SEQ ID NO: 265063 - DNA, 143 bp, Homo sapiens
  chr12:104799424-104799567
  hypo
tttttgtttttttctatgttggataagattatcttttcaaacttattttcacaatcagcactgagatgaccaactagccaagctgccccgtgtgcctgccacctctccatccacgggtgcctgccagccggtaatgagaagtt

SEQ ID NO: 265064 - DNA, 175 bp, Homo sapiens; identical to SEQ ID NO: 215023
  chr12:105096586-105096761
  hypo

SEQ ID NO: 265065 - DNA, 131 bp, Homo sapiens
  chr12:105097266-105097397
  hypo
acttccccccaccccggctgccgtctttcttctccagtctcacctggatgaacccatcctccacctcctctcccacctgagaacattctactgccgcagccagagctggtctacagcgtaagtcggatcat

SEQ ID NO: 265066 - DNA, 49 bp, Homo sapiens; identical to SEQ ID NO: 215024
  chr12:105132876-105132925
  hypo

SEQ ID NO: 265067 - DNA, 329 bp, Homo sapiens
  chr12:105392583-105392912
  hypo
gtgtgccctctgtgcgtgtgcttacatgggtagcagtggccactcagggtaagggggcgggctgctggtctccatgcatagtttcacaccactggcagtgttgacacaggggcagggtactggtggctgcgggactggtgccaaatgtgcgcacgtttatgctggctgcagtggctgcacagggcgcagggcaggtccactggtcactgtgcctagttttgcagctggtggcagtgttggtgtcggagtggggtactggtggtctccgtacctgcagatactccagtggcagtggcagcatggtggtcgggtgcagtgtgctcaagcca

SEQ ID NO: 265068 - DNA, 239 bp, Homo sapiens
  chr12:105472670-105472909
  hypo
atgcatgtgcacagcgtgtccaatactgggagttaaggagtggtgacaagcgacaccgtagcaagagacattatggagcgctttgtgtcaaataattgggaccttattgtgaagacaatgagattcactgagccgctttaagcaggagagttaattgaaaccaggagagtctagtttctatgctaatagactgcttaggtaactctggaggcatgaactagctccgggtagacacacct

SEQ ID NO: 265069 - DNA, 146 bp, Homo sapiens
  chr12:105607980-105608126
  hypo
aaaaccatacttccatcctttgggaactattcactccctactaaaacaatcatcattcctgcccatgacaacgtggttgtaagtaaatattttaaactggaaatcttgcttctggggtttcgacaactaaccgcgtttccttagca

SEQ ID NO: 265070 - DNA, 40 bp, Homo sapiens
  chr12:105773503-105773543
  hypo
agaaacaatgtagaaacaatcggccgggcgcggtggctca

SEQ ID NO: 265071 - DNA, 204 bp, Homo sapiens
  chr12:105955873-105956077
  hypo
agaagggtggattgccgggagaaagtgtggcactgccatcagactgtaggtggcctcgccattgggtcaagcaagtatttggtgctggggagtatggagggggcacacgggccttctcaggcagcccaagaaggacgaggccttataggaaaactgacttaagatgaaccctgccagaaagggccactccgtcaccagccttgt

SEQ ID NO: 265072 - DNA, 158 bp, Homo sapiens
  chr12:105956297-105956455
  hypo
ttctgcctaaactgcggtgtggtgtgagtgagcccgctcccttggagctgccccacagcggtagcggaggtgagtcatggccataaaatctggaaagctcgtagggggatggagggcggtggagaaatataaattattgtgatcgtctttcaggagcg

SEQ ID NO: 265073 - DNA, 117 bp, Homo sapiens; identical to SEQ ID NO: 215025
  chr12:106460688-106460805
  hypo

SEQ ID NO: 265074 - DNA, 142 bp, Homo sapiens
  chr12:106643971-106644113
  hypo
cacaggtctctgacctgtggcgcggggagacagcagaagaaatcagaagacactcatcacaggaaccttgtttaaaaactattcagctgagttcgggttgtgttgttaaaatctctagcgcgcaaaaagaggttatccccct

SEQ ID NO: 265075 - DNA, 59 bp, Homo sapiens
  chr12:106669249-106669308
  hypo
gagcttagcaaggatctacccgggcaggagtcagacccgcttgctgcatgggagaaaag

SEQ ID NO: 265076 - DNA, 42 bp, Homo sapiens
  chr12:106829974-106830016
  hypo
atttggactttagggtagagcgcacaagtgtctggtggttac

SEQ ID NO: 265077 - DNA, 189 bp, Homo sapiens; identical to SEQ ID NO: 215028
  chr12:106881472-106881661
  hypo

SEQ ID NO: 265078 - DNA, 42 bp, Homo sapiens
  chr12:107103207-107103249
  hypo
tgtaagtactgagttgagagcgggatggaagagagaattaca

SEQ ID NO: 265079 - DNA, 39 bp, Homo sapiens
  chr12:107114442-107114481
  hypo
gcgtgagccacttcaaccggcctcatttttcaaagagac

SEQ ID NO: 265080 - DNA, 87 bp, Homo sapiens
  chr12:107436703-107436790
  hypo
acaaagtccagctgacggaattacctggagtccacgtaactgtgctcaccgtagagaaaaagcaaacactaggctccacaccctgca

SEQ ID NO: 265081 - DNA, 113 bp, Homo sapiens
  chr12:107436820-107436933
  hypo
gaattggaactatggctggagggtgtcttgctctggcggtgagtagccgtgactctccttcatctctgagactaagatgcaactgaaccaccgccccagccaagtggtccaac

SEQ ID NO: 265082 - DNA, 41 bp, Homo sapiens; identical to SEQ ID NO: 226552
  chr12:108298348-108298389
  hypo

SEQ ID NO: 265083 - DNA, 519 bp, Homo sapiens
  chr12:108926049-108926568
  hypo
actggtgcactggacggcccggtgcagagccttccggcagtgctgggtgtcaccatgagctctaaggcagaaaacaaaaagttgctgccaccaggacacaaagtggaaggcactcgaagggagaggccgtcttctcccaggtagaaactcactcttcagtaactctagcttctgagaagaccttagctttcagatctatccatgatgctttctccttccagagtctctacagtcacctacgaagtatttccctgaagcactctctccctcagccatgtaggggctactggaaagtgtacctgatattgtgatctgcaaccagcattctgcctttacagcattcacatgtgcggcacatggcgggggagtccaacagctctctgtaacctgatacagtccccagggaaattttactatggcgtcctactgacaggagagttatgaatccagggtagtgtcaaatttcatacccagagtcagatcttttttttttttttgaaagggagtctcgctcttgtc

SEQ ID NO: 265084 - DNA, 32 bp, Homo sapiens; identical to SEQ ID NO: 215032
  chr12:108963690-108963722
  hypo

SEQ ID NO: 265085 - DNA, 92 bp, Homo sapiens
  chr12:108985671-108985763
  hypo
tcgggcctgctgtcgggggctctgtcggggacctcactgaaggcccgggggcccccggcccggtcactctggtccacgtacttcttcttggg

SEQ ID NO: 265086 - DNA, 43 bp, Homo sapiens
  chr12:109014134-109014177
  hypo
tgcttaaaatcaggcgtcagcaaactgacggagctgaaatgag

SEQ ID NO: 265087 - DNA, 212 bp, Homo sapiens
  chr12:109050947-109051159
  hypo
tccaatctaagacaatcaggcgtttagaaaactacactaagaatcccataatctacttactcactggaagacctgctcagaacagagagaaagctcaagtgaaagcaagtggaaagcctggggagggcgtaccggattccagagagccagctgccgctcgctcatgcggctgaacccagtggtgaagacattgccatcggccaggaagatgg

SEQ ID NO: 265088 - DNA, 169 bp, Homo sapiens
  chr12:109181383-109181552
  hypo
agaacgtgtgccgcggtgaggctgccaccaccaggactcttctgcaggatgcgaagggaacagtctggatgtgtgcgcctatgtgtgcacgttcttcctaaaacatggttcttcttgaagacacggtgggagcggagttttgtgtctcctggccggcggctcctggttc

SEQ ID NO: 265089 - DNA, 80 bp, Homo sapiens
  chr12:109195703-109195783
  hypo
gggttgctgactaacgcaacagccagcagacctctgcgtccacactagggtttgcagcaactgtgcggggcagggaagcg

SEQ ID NO: 265090 - DNA, 180 bp, Homo sapiens
  chr12:109204591-109204771
  hypo
gcccccagggtggcgcttgaaaccttgttgtgcctgtcagttgtatgtctctccttgtacccccaaagctggtgagttcctgctgcaccacattagtccgtgaactttcaggacaagccccatggagggcatgcggtgagagttcacttaacccatcgaggtggcggatgggtatcggtt

SEQ ID NO: 265091 - DNA, 261 bp, Homo sapiens
  chr12:109208564-109208825
  hypo
ggacctgggagaactgaagtcggggtgccgaggggaggcaaagggaggagagggtgggaaggaagagcgccatgggggcggtgcggacgagcgcacgggccagtctcctccagccaggcagcagcggagtgggatgcgcatgtgggcatctaaggcatgcccgtgactgctggcctgtgagctctgtgagactgtaggtgtgtctgccgtgctccctgatgtggccccagcacctggcggggcgcccggcacagggaaaga

SEQ ID NO: 265092 - DNA, 134 bp, Homo sapiens
  chr12:109209742-109209876
  hypo
taccgtgacactcacggcctccctgactggtttctgctgttgattctgcctcaaatgctcctcaaatgcaccttgctgctccgcctccaccctagagctcgcctgactgcccacttgcccgttaagagtcggct

SEQ ID NO: 265093 - DNA, 126 bp, Homo sapiens; identical to SEQ ID NO: 215035
  chr12:109213025-109213151
  hypo

SEQ ID NO: 265094 - DNA, 204 bp, Homo sapiens
  chr12:109488356-109488560
  hypo
cagtctggagtcggagaaagcgattgaaagggagggaaaaatcttgctggctctaatgctttataaactgtgctgtccaatacggtagctgctggccacttggggctattgagcacatgaaaagtgggtactccaaactgagaggtacttagtaccaaaaaacaaaaaaataatgggccgggcgcggtggctcacacctgtaat

SEQ ID NO: 265095 - DNA, 245 bp, Homo sapiens
  chr12:109507775-109508020
  hypo
cagggcggggagggcggtggaggagaggggctggcgaagttggcagggagcagattgtgcagggactaggaggctgcgggcggcatcagcttctattgtgtttgcagcggggagccactagaggactttgaactggggactggtttgatctgacttgttagaaaaggaaggctggaggggcaagaatgcaagccgagaggaaaggtgggaggccgctgcagttatctggccgagatggtgtggct

SEQ ID NO: 265096 - DNA, 41 bp, Homo sapiens
  chr12:109540086-109540127
  hypo
aagtcccttgggggcgtaaaatcacccctggttaagaacca

SEQ ID NO: 265097 - DNA, 156 bp, Homo sapiens
  chr12:109637356-109637512
  hypo
ggtgactgcagagccggccgtggggaatcctgaaccctcaaactcccactcttctggctttgtcccatgtctgaacaaacaggcctacctctccccttgaccactgtctgcaaatttctaagggaatcagtctgtggatttcagccaaatcccctg

SEQ ID NO: 265098 - DNA, 210 bp, Homo sapiens
  chr12:109717149-109717359
  hypo
aagtctcactcaacacgggcaggcattgcggctcaggcctcggaggagtgtcaaggggtcgggggatgctgggttgcttgtccaccttcctccattcttctgacttggaagagcccccagaaactgctccggaagctccagggggaggcacgagaaggagaggggctgctgaggggaaccgcttccctgtccagccggcaacttcgccac

SEQ ID NO: 265099 - DNA, 364 bp, Homo sapiens
  chr12:109796964-109797328
  hypo
cccaggcatttgagcgcctcatagctcgtggggaacctgacaggcaattgtattatgaaagctgacatgctgaatggacccttcttgacgatattctttacctgtctctttgtgttaaagtggggacaagcaaagtagcagaggagagagtcgaccgaggcgggagggaggtggcaggtggaatgaaatatcgggcagtttcatgtgcggagctgatgtcgccggcataacaagaaagggttgcacagaacaaatctctattgttccctgtcatctttaaatgagtgtcaaagtaggcaggggggctttgaccgttaaccgcacaatttagcctgcctgttgtgtctcgcgggccccacctcct

SEQ ID NO: 265100 - DNA, 417 bp, Homo sapiens
  chr12:109873123-109873540
  hypo
tataaacattgttccgccgtttcagttctcgtttggatcagattctgttgttcactactagggtgtaaaaccgtgagagaccagccccttgaaattaaagtttacaaaacttcacttgtctgcgtgtctgatgttggaaagtttagcttcaaagcctgcagcctgggtgtttgctgggaatggtcaatgagaaaagttagatggggaaatgcaaaaagtaaaaaatcaaaactgcggggggagggagcgtctcttttgaaatgtaaccggtctgtcaagaactacgcttgagtcatttgagggcctgctgtgcgccaggtgaacactaagtcctttaaaccatggtctcattctgttctgagaacagacctgtaagggaggtgacataggtgctatcgtctccgctttctatgcagg

SEQ ID NO: 265101 - DNA, 39 bp, Homo sapiens
  chr12:109878129-109878168
  hypo
cgtgcccagccgacagagtactttcgaatcatttctatt

SEQ ID NO: 265102 - DNA, 195 bp, Homo sapiens
  chr12:109881228-109881423
  hypo
aatgcttgacatcactttaccggtgtctgagtagcaagaaactcggtactctgccccaccttccctggtgaagtcaccttccccttgcagtatggtgtcccggtcattaaatatgacagaaaaggcttcaaagcacggcagcggcaactcattcttactcagaaagcagcttacgtggtggaacttgccaaaatc

SEQ ID NO: 265103 - DNA, 214 bp, Homo sapiens
  chr12:109886526-109886740
  hypo
ctttgagcatttttttatggcgcaaagagacagaaaggttaatgacacacttaactgttacagtgactttgggtagggccctaaagacagcacacgctccagagggcgggctgagtgttgttcacacttgggtcctgaatcgctgttgtaaggtacagagacacactttaactggggaatggggtccccacacagtgatcgccccacgggaggg

SEQ ID NO: 265104 - DNA, 175 bp, Homo sapiens; identical to SEQ ID NO: 215038
  chr12:109887568-109887743
  hypo

SEQ ID NO: 265105 - DNA, 199 bp, Homo sapiens
  chr12:109887946-109888145
  hypo
gtataaaacggtaacgattcccttgacaaacccatccatcacctgacgcacattcacatctcctggtaactactctacctagtctagtctcaaccacccctgtcagtcacgactcactcctgttcctttgcaggtgcagaggagcctgggaggtaggtcactgagaacacccgtcctacataggcgctgcgcccagccg

SEQ ID NO: 265106 - DNA, 178 bp, Homo sapiens
  chr12:109898435-109898613
  hypo
cctacttgtagggccgcctggcactcttccaccaggccttggactaggtagtacttggcttctgctagcagctcctcgatctcccggcggctctcgggtaaaggcaccgccccgtctcgaaggtagttgagtatcgtaccaaagtgcttcccacagcggtcaatgaggatccagcctg

SEQ ID NO: 265107 - DNA, 33 bp, Homo sapiens
  chr12:109916584-109916617
  hypo
caaaaaaacaaagattatcgagaactgatagag

SEQ ID NO: 265108 - DNA, 46 bp, Homo sapiens
  chr12:109935639-109935685
  hypo
agttctcagacaatctgattcggccgttcctcatccacatcatgtc

SEQ ID NO: 265109 - DNA, 303 bp, Homo sapiens
  chr12:109935997-109936300
  hypo
tctggcagtttctgatttaacggtctgctattctttgcagcgcctcactgttttagaatcccatgacatgcttcgtaaattcatcatatttttaagagaccaagatcgatgccgtgatgtatgtgaaagtttagaaggatgccatacgctttgtctaatgggtaagtatccgtggctggaacttgattgtgtcctggccatcagggaaagcccgagtgttttgcctgtcactattctagagatttggttgttttctgtaacaattggaagtgcttacaataaaaaacacgtatttagatagac

SEQ ID NO: 265110 - DNA, 159 bp, Homo sapiens
  chr12:109936815-109936974
  hypo
agacggggtttttcaccatgttgcccagtctagtctccttgggctcgaacaatccacacgcctcagcctgcgagattacagacttgagataaaaacttccctggggccaaatttcatgaggagtttctggtgcgaatgttcacacgagtgacgttgact

SEQ ID NO: 265111 - DNA, 172 bp, Homo sapiens
  chr12:109970800-109970972
  hypo
gggctccctctgttcgcaccacgtgcagtgggtgccaccagcctccgcctcgccctcaccgtctcccattttctcctcacatggtctctctgtgggagggtgtcagctgctgctctgttcctcttaacaatcccacaggagacctgcctctcggggacgcctcaccagtgcc

SEQ ID NO: 265112 - DNA, 76 bp, Homo sapiens
  chr12:109973151-109973227
  hypo
cgcctgctagggacgctatggacaccgtgagtccaaggcgctgctcctgccttgaagccacgcgctccacgccgcg

SEQ ID NO: 265113 - DNA, 179 bp, Homo sapiens; identical to SEQ ID NO: 215039
  chr12:110019852-110020031
  hypo

SEQ ID NO: 265114 - DNA, 141 bp, Homo sapiens
  chr12:110164950-110165091
  hypo
gctctccagctctctgtggtcggggtcttctgaggccaggctgggacacactggcctttgtgtgagcttgagccgggccgggcggccagcagagtggggagagggcggtgcagcctggccggccagggacaaatgctcaga

SEQ ID NO: 265115 - DNA, 43 bp, Homo sapiens
  chr12:110170347-110170390
  hypo
agatcatttgtaaccgtcaccaggcaatcgggcccgtcgctga

SEQ ID NO: 265116 - DNA, 338 bp, Homo sapiens
  chr12:110224374-110224712
  hypo
gaaatgaactctgctcgggcctcttggggcctcagtggctccagaaattgcaatgggtagacgacgctggagcagcaggggccccgagccagtggggacagttccgccctgccatcctggccccactgccccagcctcacctgaagcaccacctgcggtcaggagtgccgtccgagctcttgcccacggtgaccatctccccagagcggaaggccttcctcaggaatacggggaaggagcgctcaatgtccaggatggtggtggcccactgcggggagggagggtcaggagggacatcggtgagcctcacagcctgcgcctgccgctctggtggcaga

SEQ ID NO: 265117 - DNA, 34 bp, Homo sapiens
  chr12:110250928-110250962
  hypo
agatgaggcgggatgcggtggctcacacctataa

SEQ ID NO: 265118 - DNA, 344 bp, Homo sapiens
  chr12:110258637-110258981
  hypo
ctattaagggatcgtaatagggtcgttgtgagaggtatataccttgagtcaagtgcctggcataaagaaagcctcaataaacagcagattgcacaacagatggcttctctctgagaatcccggattcaaaggcggtggaggtctctggctccgtccccatgccccaacttgcggagggtggaaaaaggggcccatcctcggggttacccgcggctttgcctgatctcatggaaaccctggcaaacatttgtcaaatcccatcctcctgattacgtgaccaaggaaagctgcttaaatctgggggcaagtttgggcatgcaaacctgctccgccccagcggggag

SEQ ID NO: 265119 - DNA, 674 bp, Homo sapiens
  chr12:110352780-110353454
  hypo
cgaggtacacgccacgcatatgtatagcctctccagctttccatgaggtacacgccacgcatacagcctctccagctttctacgaggtacatgccatgcatacagcctctccagctttctaccaggtacacacaatgcatacagcctctccagctttccacgaggtacacgccacgcatacagcctctccagctttccacgaggtaagcgccacgcatacagcctctccagctttctatgaggtacacaccatgcatacagcctttcaagtcccgcatgctcccttccgttccttggcacgtgcattgctgttgctcagctggattctccagtctgggtagggccgcaggcttaccttcctcatcagaggcagggctctgccctgtgggccttgtcttggggtggtgactttgctcttggcactcaggttgcagagcgccggctgcaggcatgggaagcagaccagcaggaggaggaggaagaggaggaggcccggcgggtcgagcagctctcagatgccctgctgcagcaggaggcggagactatggctgagcagggctaccggcctaaggtaggaagtctgccaggatataggccaacaccggcaagacagactctgcccggcccctgctcccctgggcctgctcatcgccccgcgccggggtctgctctcc

SEQ ID NO: 265120 - DNA, 71 bp, Homo sapiens
  chr12:110357433-110357504
  hypo
gaacagtgacaagagtcagacgctcgaatcggacacatggatgagcagacgtcactggcaaacagccagtt

SEQ ID NO: 265121 - DNA, 192 bp, Homo sapiens; identical to SEQ ID NO: 215041
  chr12:110378869-110379061
  hypo

SEQ ID NO: 265122 - DNA, 36 bp, Homo sapiens; identical to SEQ ID NO: 215042
  chr12:110388924-110388960
  hypo

SEQ ID NO: 265123 - DNA, 100 bp, Homo sapiens
  chr12:110389830-110389930
  hypo
tcttggaatgacctcggctctcactgagtgaaccaggtggcttccgggaagtctgcgcaggggtgtcccctgcatctgctaatgacgccatctttctcac

SEQ ID NO: 265124 - DNA, 162 bp, Homo sapiens
  chr12:110489068-110489230
  hypo
gcatgacttgcttccgtgtgactcgttttccctctctgcacaatgggaagcataatcatacctgcctcatgaattgtgaggatcaaatgatatatgtctgcaaactcctttgcccagtatctggcacatactgagcactcgctataggaaagctgctgcccc

SEQ ID NO: 265125 - DNA, 87 bp, Homo sapiens
  chr12:110518055-110518142
  hypo
tccgctcccacccccgagatggagtctcgctctgttgccccggttgcagtgcagcggcgccacatcggctcactgcaaccttcccct

SEQ ID NO: 265126 - DNA, 38 bp, Homo sapiens
  chr12:110563201-110563239
  hypo
ttttattttttctgttgagacggagtctctctctgtcc

SEQ ID NO: 265127 - DNA, 37 bp, Homo sapiens
  chr12:110563479-110563516
  hypo
gagaacgacagctcccggcagcaactcattgcttaat

SEQ ID NO: 265128 - DNA, 105 bp, Homo sapiens
  chr12:110563722-110563827
  hypo
aatggaattggacacagatacggaatttacagtttagcagggaagagaagatgcgtacctaaagaactagcacaagatcggccaggcgcggtggctcacgcctgt

SEQ ID NO: 265129 - DNA, 121 bp, Homo sapiens
  chr12:110717632-110717753
  hypo
tgcccctcttgaagcggctctgatcctgtgacctaaccagtttccacctggcttctctcagtgcgttgccatatagtataattttttgtttgtttgtttcgtgtagggttttgttggttct

SEQ ID NO: 265130 - DNA, 31 bp, Homo sapiens
  chr12:110767512-110767543
  hypo
ccccgcgcccggccatcctatattttttgac

SEQ ID NO: 265131 - DNA, 444 bp, Homo sapiens; identical to SEQ ID NO: 215043
  chr12:110778337-110778781
  hypo

SEQ ID NO: 265132 - DNA, 236 bp, Homo sapiens
  chr12:110782524-110782760
  hypo
gctctggctaccaggcgtgagcaggtggtggtagcaccacaggccccggttaccatcactgtcccatgtctttgatcttcgtccttgtggggactggcctgcatggcctcggtggcagcgagccctgcagaggcaagtgcatcagcatcactgtgtttgttcccaggttacgtcggcgctgctaccgtgggtgctgctgcatggtggttcattgctgctgacggtggtccaagagt

SEQ ID NO: 265133 - DNA, 101 bp, Homo sapiens
  chr12:110783743-110783844
  hypo
ctgccactgtgacacgtgccttgccttgggggtgcgtttccccacctctccttgctctgcagcttgtccgaaaaccagtccttgctgaggatgcccccctg

SEQ ID NO: 265134 - DNA, 347 bp, Homo sapiens
  chr12:110783925-110784272
  hypo
aagtggttgggtggggcttgggaccagccacctccttccaggggaggctggaggcgtgacacgtcttccctgtgtgtcagctcatcttccagatcacaccgctgaacgtgacccagtggctgatggtgctgaaaatctccttgcccgtgattctcatggatgagacgctcaagtttgtggcccgcaactacctggaacctggtaaagagtgtgtgcagcctgccaccaaatcctgctcgttctcggcatgcaccgatgggatttcctggccgtttgtgctgctcataatgcccctggtgatctgggtctatagcacagacactaactttagcgatatgttctggtct

SEQ ID NO: 265135 - DNA, 142 bp, Homo sapiens
  chr12:110784843-110784985
  hypo
tccccaccttacccccgccccgcttggcttcttctttaggattgtgatggttcgttctgtttacatcagttttaacgagaggtatgcctgtactcgcttgtgcagaaaacattgttccagattcaatcgactgggtttatgt

SEQ ID NO: 265136 - DNA, 303 bp, Homo sapiens
  chr12:110785458-110785761
  hypo
gtggcactaaccaccaccaccgttactacgatcaatgtttgcgcatgttcgagatgagtctcaccaacagtgtgtaagtcattaacagtcctaactgtggtgttttcctccaatgccttccaacatccatcaactaacgtgagtattttcttcctgggatttggatgctttagcctaaaggtgactgccaccaagtgagataactgtatgtcactaacttataagccgcctccatggcagatgctgctgtgctccctgatgccctgtgagcaccggggttgcctgtggcgcctgccatgtgac

SEQ ID NO: 265137 - DNA, 148 bp, Homo sapiens; identical to SEQ ID NO: 215046
  chr12:110806697-110806845
  hypo

SEQ ID NO: 265138 - DNA, 164 bp, Homo sapiens
  chr12:110807995-110808159
  hypo
attgtaccgaaagacgcaccttggtttgtttatctactcatctaaggacacgtgggttgtttccaccttttgctgctgtggacagtgctgcgtggacatggacgtgcaatcttttggcgttccagctttcacttcttcgggtgtacacccggaggtggaacact

SEQ ID NO: 265139 - DNA, 201 bp, Homo sapiens; identical to SEQ ID NO: 215047
  chr12:110808573-110808774
  hypo

SEQ ID NO: 265140 - DNA, 120 bp, Homo sapiens; identical to SEQ ID NO: 215048
  chr12:110915437-110915557
  hypo

SEQ ID NO: 265141 - DNA, 97 bp, Homo sapiens; identical to SEQ ID NO: 215049
  chr12:110916597-110916694
  hypo

SEQ ID NO: 265142 - DNA, 37 bp, Homo sapiens; identical to SEQ ID NO: 215050
  chr12:110916994-110917031
  hypo

SEQ ID NO: 265143 - DNA, 267 bp, Homo sapiens
  chr12:110983626-110983893
  hypo
aggggactatgaatgagccacgtcctgctcacacttaatggctgagaggggagattacctgtcgctcaagacgactccctcggcttcagggggagcgattgagagctggaatggagtgttgaagtaatgctgctgctcatctgatcggtgcacgacttcaccacccctgacaaccaggaagcctgaatcgcccaggtttgctgtgtgtaagcggtggctggttctgtccagcaccacaatgcaggcggtgctgctacctagaaacaa

SEQ ID NO: 265144 - DNA, 316 bp, Homo sapiens; identical to SEQ ID NO: 215051
  chr12:111083708-111084024
  hypo

SEQ ID NO: 265145 - DNA, 153 bp, Homo sapiens; identical to SEQ ID NO: 215052
  chr12:111087519-111087672
  hypo

SEQ ID NO: 265146 - DNA, 120 bp, Homo sapiens; identical to SEQ ID NO: 215053
  chr12:111195775-111195895
  hypo

SEQ ID NO: 265147 - DNA, 294 bp, Homo sapiens
  chr12:111369070-111369364
  hypo
aggatcccagagctcggatccagcctcaacgacccagatagccctgcagtggctttcttgtccctggtatttttagccctcggtcatctatcttgcctgcactggggacagcggcactcagacaagcccatttttactggtgcccttcagatgcccgcgggctcagctgtctcggtgcctggcattccgggggtattgttcctctctacgagtcccagattccagcaacagctgctgccccaggctcccccgccagcttccccctgcgctccccctgcccgcctgccagagccc

SEQ ID NO: 265148 - DNA, 398 bp, Homo sapiens
  chr12:111402645-111403043
  hypo
caatcagcccaaagcggaccccgagtggaaggtggttggtgtcccaaaggcaaattagggtgctggtatctgagcaggaaaaagagatatcaggaaggccaaacaacagacattccctgtgggcataaagttggtacttgcaaaacagcgccaatacctggatattcctgttaccagaaaaacaaagagctggatcgccttcccagtttctcggaaggacaccgtggtgtttctgagggaaggtcatcagggcccagaaaagtcgttttcttttcagcccccaccccgaccctggttccctgaaaaggttggaagagctccatcccggccctgtggtgatgccaggcgattatgtccagggcaccacgtctggactagttgaccgagagatctcgaga

SEQ ID NO: 265149 - DNA, 242 bp, Homo sapiens
  chr12:111501288-111501530
  hypo
ggcctttgggacatcgcgaggcggcaccatcgcctcccacagccccggcaaaggttggcctcatggggcctgcactttgagatacggtgggcttccgttttagatcagtctggtgctccagtaactccagcagggcctgccttgggggctgggggttctcaggcaggctggctcctggaagggtaaaattcccagaggaagggaggtagcgagtccgggggatttggcggccgcccctgcat

SEQ ID NO: 265150 - DNA, 241 bp, Homo sapiens
  chr12:111664455-111664696
  hypo
ttccctttaactagaattctcgcgctttatttttatattattgatctttttgacacgaattgctttttggccttgtgcgaatgttgtaagctttccgcctgcagaggaatgggctggcgtctgggccgggctgggaagagtgatcgctccagccgcgtggcagtaacattcccgcacatttaacaacaattagtctgtgccgacgccatggtaggctttcgtgtatgaaaatttacaaggc

SEQ ID NO: 265151 - DNA, 182 bp, Homo sapiens
  chr12:111725445-111725627
  hypo
ggcataccctgctgcgcaggccctgcctaatgacggggcgtgggggctgccggcagatgaaagccaccgccgccttcccgcgcacctgcttacctcggcatggacgcccattgtccaagcccctgccacctaaacaaacaggccacagcagagtaaaacagggaagccgccttgttccagcc

SEQ ID NO: 265152 - DNA, 388 bp, Homo sapiens
  chr12:111800614-111801002
  hypo
ggtggagggggctcgggtccaggcctgaaggtggcctcagtgctccagacagcgcagccattctccttgggcgggagggcactgggccggcggggcaggggcagggctgggaccggggctggggcagaaggcagggatgggactggggccagggcagagggcagggacgggggcaagggcagggactggggctggggctggggcagggccatgccacccccgccacgtacagccgccagctgctgctccagctcgcgcaccaccagccgcaggtagtcgaagctggcacgcgacagggccttgacccagccctccatggcatcctgactctcagcggccagcacgtaggtgcgcgcccgggtccccgcaaagcgcacagcgaaggcga

SEQ ID NO: 265153 - DNA, 180 bp, Homo sapiens
  chr12:111829848-111830028
  hypo
caaaatttttaaaaatagtaaaaagcaacttgtaaccatgcattaggctggaaattaatgggtttaatatgcatgagtgggttctaatccccactctgccatttgcaaactgtgtgtccttcagcaagtcactttacctctctgtgccttggcctcctcatctgtaaaacaggggaaaca

SEQ ID NO: 265154 - DNA, 61 bp, Homo sapiens
  chr12:111855883-111855944
  hypo
gcttactccttgtcgcccccccacccacgtgtctttcagcccggccgcaccacctgggtct

SEQ ID NO: 265155 - DNA, 113 bp, Homo sapiens; identical to SEQ ID NO: 215059
  chr12:111885452-111885565
  hypo

SEQ ID NO: 265156 - DNA, 42 bp, Homo sapiens
  chr12:112015341-112015383
  hypo
tacaggcatgagccaccgggcccggcccgcatgtttcaatta

SEQ ID NO: 265157 - DNA, 220 bp, Homo sapiens
  chr12:112082001-112082221
  hypo
gtcacttgcccctcttgctgcggcccttcctggagggcaacttcccactgccccccgaagaggcagggctcgaggccgaggccatggcgatgttgatctgtccctcctggatttcctgccgggtctcggcaggcagatggttgatcttctgctgtgtctccaggtagaacatgacgtcacgcagctgctcctggatctcggtgatctgcagatctttttg

SEQ ID NO: 265158 - DNA, 81 bp, Homo sapiens; identical to SEQ ID NO: 215060
  chr12:112082472-112082553
  hypo

SEQ ID NO: 265159 - DNA, 86 bp, Homo sapiens
  chr12:112110965-112111051
  hypo
tggaaccaaataataactgacgcttgttatgaaagaactctttaaggaaatgtcagcattgggctgggcgtggtggctcacgcctg

SEQ ID NO: 265160 - DNA, 120 bp, Homo sapiens
  chr12:112126606-112126726
  hypo
aaacaaaacaaaaaaaagaaagcaaaaaaagtgcagctcgctgccagcacagtattctcagggcaagcaagatatgagttaagtaatccctagattgcttataatactggctgggcacga

SEQ ID NO: 265161 - DNA, 168 bp, Homo sapiens
  chr12:112171648-112171816
  hypo
gggcaaacagaccacgcagaatccaccctagccggcagttttcttagtgctgtctctattcctcctgcgacttttcaggctcgacaacctggtgtttcatccagaagagccagaggtgcttgctgtccttgactgggaactttctaccttgggcgacccccttgctga

SEQ ID NO: 265162 - DNA, 54 bp, Homo sapiens; identical to SEQ ID NO: 215061
  chr12:112194070-112194124
  hypo

SEQ ID NO: 265163 - DNA, 159 bp, Homo sapiens
  chr12:112196487-112196646
  hypo
agggatgcctcgggcgtgccaaggctgtcactcagagacccctcttgttggtatttctgctgccctccctgctgcgacataggtacagatttctccccttcgtccattttaccaaaatggatgcgcgttgggacaggtgagtcccggactccagcggcc

SEQ ID NO: 265164 - DNA, 91 bp, Homo sapiens
  chr12:112218335-112218426
  hypo
acccctccttttcatcattccggactcggtcaaatgtccactcctcagggtgacctgcccctaccaccacggctggagttctctacccccc

SEQ ID NO: 265165 - DNA, 82 bp, Homo sapiens; identical to SEQ ID NO: 215062
  chr12:112288155-112288237
  hypo

SEQ ID NO: 265166 - DNA, 37 bp, Homo sapiens
  chr12:112535637-112535674
  hypo
ccgagcagacccggcggctcatgcctgtaattccagc

SEQ ID NO: 265167 - DNA, 34 bp, Homo sapiens
  chr12:112560194-112560228
  hypo
ggcgcagcggctcacgcctgtaatcctaacactt

SEQ ID NO: 265168 - DNA, 90 bp, Homo sapiens; identical to SEQ ID NO: 215063
  chr12:112574643-112574733
  hypo

SEQ ID NO: 265169 - DNA, 35 bp, Homo sapiens; identical to SEQ ID NO: 215064
  chr12:112575271-112575306
  hypo

SEQ ID NO: 265170 - DNA, 31 bp, Homo sapiens; identical to SEQ ID NO: 215065
  chr12:112591128-112591159
  hypo

SEQ ID NO: 265171 - DNA, 130 bp, Homo sapiens
  chr12:112591860-112591990
  hypo
atggaacactagacacgggaaccatgcggccagttctttgcagaggcaggtctctgaaaagaattatcctgagagaaaaaagcttcgtctgcatgcactcgcgcacacacacaaacgatacatagtaggg

SEQ ID NO: 265172 - DNA, 267 bp, Homo sapiens
  chr12:112605589-112605856
  hypo
gtggagcctcctcccggcctctgcctaccttgttcttattgacagctgagctggggcacagcagcagcagcgacagcgaggaactctgcagctccttacacacctgccacaggaagtggcggaaagagccgcctgtaggacagacgagacacatgggcacctggggtgtcccggcgggaggcgacaccgttccctccctctcacctgctggctggagcggctactccttccacggcctacctgccgctgtggcggggtagaaagaag

SEQ ID NO: 265173 - DNA, 644 bp, Homo sapiens
  chr12:112610022-112610666
  hypo
ctctttggaaacacaggggcacctgaatgggccttcctgcaatcctagcttttaacaaaaacatggtgttccccattatgaaggctaatgcctctactgcaagttatcagactataaatgcttctcactccccatggcagcctggcctcagcggggcctccaggcagcggcctgggcattccccgcagccgtgcatttctgtatctgctccctggctttgttgtcactggcattaaaaaaggccccagactaattaggccacagtcctggctccctgccttgccctccctgtttcgtcagcccactcttccttgcacacctggcgcatagcaggtgttcataagtgttcgttcgatggacgtctaaatgaatctagcccttgtaaatgccccttgtcatggggcatgcccgcatcaggcagcaggggaggggataggcccagggccacatactcaggagacaggccactctggggtcagcagcatccgcggggtccaggtacacctcatggggatggagccgtgcgggtgtgatggcgaggtggcggcatagctggttgatgtactgcacaagtgccacgtccatctccagggtccactttcttgaggccttctgtgcatgtcggacatcgatgcatgcgcacc

SEQ ID NO: 265174 - DNA, 93 bp, Homo sapiens; identical to SEQ ID NO: 215069
  chr12:112612659-112612752
  hypo

SEQ ID NO: 265175 - DNA, 70 bp, Homo sapiens; identical to SEQ ID NO: 215070
  chr12:112616770-112616840
  hypo

SEQ ID NO: 265176 - DNA, 230 bp, Homo sapiens
  chr12:112620317-112620547
  hypo
gtttacaagggggacgcatgagctgtcctcaagcatatgatgaaataattaccagcaatgttctagctgcacaggacagaacaaaataaatacactgcacttgaaccaggggaaggctggctagacaaaaaggaaaaaatgacttgaatacaagcccacattcaagcctgttgcaggcggcgcaaagccacccctggtagcctctccagctggaacgcggcaggcctgtg

SEQ ID NO: 265177 - DNA, 251 bp, Homo sapiens
  chr12:112622465-112622716
  hypo
gggatgtagatctcgtctttgaagaccccgccgtgggcgttgcaggccttgcggatggcgcctctgactacgccctcgtccaggtgggtggggatcccggagatcaccagcaagcggctgtgggcggtggggcccaccagggcctggcaggcatcggcgatggcgtcactcgtcacgcccagcccctgtgggtccttcctggtgaggtggcggaggatgatgagcagggtgagtgcgcggtggaaccacag

SEQ ID NO: 265178 - DNA, 160 bp, Homo sapiens
  chr12:112628549-112628709
  hypo
ccccaccctagattccgatccccagggaaggcagcctcacctagcagctccaccacctgcaggaggacggatgtcggaatggtgtcaggctcatcttcggacttcccttcactgtcctctgatttccaggacagcagctgctctgcgaaggccatagcca

SEQ ID NO: 265179 - DNA, 382 bp, Homo sapiens; identical to SEQ ID NO: 215071
  chr12:112657024-112657406
  hypo

SEQ ID NO: 265180 - DNA, 177 bp, Homo sapiens
  chr12:112681203-112681380
  hypo
cactcccccgactcgtacggcagctgtcagcaattcccgcatgtgcaccagtgcctgcttgcgagtgtttccccgccgccaccttgtctgtgcagccaaaaggaaactgctgctggacacctgaaacacacaaggagggacacctgactcctgctaactgccgcaagaccccgcatg

SEQ ID NO: 265181 - DNA, 114 bp, Homo sapiens; identical to SEQ ID NO: 215072
  chr12:112684718-112684832
  hypo

SEQ ID NO: 265182 - DNA, 243 bp, Homo sapiens; identical to SEQ ID NO: 215073
  chr12:112743070-112743313
  hypo

SEQ ID NO: 265183 - DNA, 53 bp, Homo sapiens
  chr12:112753046-112753099
  hypo
ctgaactaaatgatcgcctgtatctgacgggctgacttcgacttgctgcctta

SEQ ID NO: 265184 - DNA, 481 bp, Homo sapiens
  chr12:112893631-112894112
  hypo
atgaaccctctgtccgtgcctttatgaatatcaacatagacatgtttttttttttttttttgcattaacaccgttttctgtaatattttctttattttacatcaactgctgtactcgatcagccccttaacacgactcgtataaatgctgctgaaatagaaagcagagttcgagaactaagcaaattagctgagaccacagataaagtcaaacaaggcttttgggaagaatttgaggtaagttattaaaaaactgtttttacgtgagttgttatatcctatttttagtggaggagaagttgctcttgtgtttggaattggacctgagagacttgaaactgacgtccttttttaattcggccattgattgacacggagcaagttgctgagagggcttcttcgaaacagaagagcattgtgttctgagggaagggagttggcagtgagtagtcaatggatgtgctagccgctccatttggctc

SEQ ID NO: 265185 - DNA, 34 bp, Homo sapiens
  chr12:112919567-112919601
  hypo
ttacaggcatgagccactgcgccccagctgattc

SEQ ID NO: 265186 - DNA, 248 bp, Homo sapiens; identical to SEQ ID NO: 215080
  chr12:113598986-113599234
  hypo

SEQ ID NO: 265187 - DNA, 156 bp, Homo sapiens; identical to SEQ ID NO: 215081
  chr12:113629777-113629933
  hypo

SEQ ID NO: 265188 - DNA, 308 bp, Homo sapiens; identical to SEQ ID NO: 215082
  chr12:113669642-113669950
  hypo

SEQ ID NO: 265189 - DNA, 822 bp, Homo sapiens
  chr12:113685186-113686008
  hypo
ccttctgccccctgccttcccgctttctgggcctgaaatgtcctcctcagaaagctgccgagccttcgagcataccttctgcgggaacaacgcagcactcggagtgggagcatatccattgtcccttcagccacttctgcaacctcttaagtggggaagagggttagacagcagacagggcaggggattagcactccacgaggtggcccagccccacccggcccctgccgtgccctcgtcttggctggtacagctgcactgctgcgtgaaggccacgtacaaaaggaacagaatggaactgtggctcctcgccttccatttgcaccctttctataatccctaaatatgtagcccagttgctcgtgccttgatgtgaaggaggccctttgcgatcacctgtggctttcttgaaaagtccctgagtggccagtgtcaccccaggccttccatccctctctccgtgtggagaaatgagcgatcatgctttgccttttgggaccacatgagcactccaagtcctgttttctgaggttgagtggttagaagcacagaacaaagtccgtcctgggagggggagaattcgctgttctttcaccttagctcttgagtcttattctcccctttccctttcaaggttctaccctgaattactcttaacacaaaacagcccctcttccgcagatccttaaaagaaaggtttttacaaatacaaacttaccacatcacaccccttcctaacaccctttggcgctgcccactgcaccccgggtggagcccgccctcttgcccgaggcctgccaggccccacggatggctccttgt

SEQ ID NO: 265190 - DNA, 427 bp, Homo sapiens
  chr12:113690093-113690520
  hypo
tgcaccgtgggacgcgtcgggccacctggtcccagggatgctgcggtataagtggtaagggataggggagcttttgaggaggaccagacgttgtctccccaccaggaacgggctgagagagcctcctgagcacaaggaggaagctcctgtcaattcgaggagacccctgtgtgagaagaagggcaggaaggctccaaagggggtcttcacggcagccgctcacatagacactcgtgtctagtgtcaagtgggagggtggcactaatggctgctgccatctgtgccagctagcagctgcctgctccgctccatcattgttatttatgttacctaggactcttctgtgttgccggtgccagcccctgctggggcatgtggaggtcgtggaggacagggcatgggctcacgaggacgcagctccatccag

SEQ ID NO: 265191 - DNA, 86 bp, Homo sapiens; identical to SEQ ID NO: 215083
  chr12:113704020-113704106
  hypo

SEQ ID NO: 265192 - DNA, 450 bp, Homo sapiens
  chr12:113725552-113726002
  hypo
tgctcctgagtgtccgcctccgtcccgccccctgccacccttcttcactggtgagctccattgcccccgctccccggggcacatgggcttctccccgctctttcccaggagcaaggccttgctcctgtctgagcctgcagctctactgcaaggagatgtggcctggccctgctcctcttcgtggaaggaccccgcccagccggtgtcctggggctgccaccatcccttccctcatgcatgaatcacctgagcccagctcagggttggtggcgcccaagggagtggacgcaggtggaggagaggccctcacctgtcttcaccgcatggcgtgtggaaggcggggccggcatgttctgagggcgggggctgaggcgtgcacctgtgtgtggaggtgacgggtgtcctcctcgctcaggttgtttaagttgaaggagcgctaccgcaacgtgc

SEQ ID NO: 265193 - DNA, 176 bp, Homo sapiens
  chr12:113734198-113734374
  hypo
ggctggcctccatcggccacgtccaaagctgtcactgctactgcttcaggctcacatccccccgacctgatggcgtgcccgccccctctccctgcggcccatgccacaggtttctgtgttttgctttagggacagaaccacttaggaaggaaagaactcccggtctccagggtggt

SEQ ID NO: 265194 - DNA, 107 bp, Homo sapiens
  chr12:114163037-114163144
  hypo
tgagcagacggagccggcagctggtggcagagggaggagacaggagggaggcgcgtggagggcaggcggggacgaggggcccacggtgcccacggcggcactgggcc

SEQ ID NO: 265195 - DNA, 61 bp, Homo sapiens; identical to SEQ ID NO: 215085
  chr12:114254876-114254937
  hypo

SEQ ID NO: 265196 - DNA, 800 bp, Homo sapiens
  chr12:114273198-114273998
  hypo
atcttaattgcacacgtgagcacctgacggcaggctgtggtactcgaggaggaccaggggaggggcatgacaagggaatcacgaaaaggagaggtgtgggggaaaagctgcatctttgacactctggctgggaggcagtgggggccggggtcagtgggggctgccgggaccagggctctagcaagcaggctccttccctgctcctcgcgaggctgggagggtgactgtttgctggaggccggcgacccatggggacagccacccgtctgtgccggaagagcacttctccgggcactctgctcatagatctcccgccccagcccaacctggcttgggcaggcgggggaaggccccactgccagccactcgccatgctggtcatgtctgcgctcccagctctggaggtgaaaggtagagacgctaaccacagcccatcagtcctccccagctggaataagacaacatgggaagcagagccacgctcccagccaaataaaagcctgtttgcccagcctccctggctgtgagtgctgtaaaacacagggttctgcgcacggatttcttccataccattatattctctcggctgcgctcgcaggtactgtggcctgccgcggccctgaaagcttctcgatgccgtgaccctgctggtttgtaacacgctcaggaagaaaaggacacagccagcggcggactttcctctttcttccctccttgctctctcttttcaaactcccacatgcaaggcagtgaagaatagcacttcacctaccacggggctgctgcgctggagatgagaa

SEQ ID NO: 265197 - DNA, 115 bp, Homo sapiens
  chr12:114282481-114282596
  hypo
gagcggccgtcttccgccgcagggcctgcagggtcacctcggagtcggcccactccagcaccagcctccgcccgtacaagtgggtgctgtgacacagggcgttgaaggctctctg

SEQ ID NO: 265198 - DNA, 197 bp, Homo sapiens; identical to SEQ ID NO: 215089
  chr12:114282867-114283064
  hypo

SEQ ID NO: 265199 - DNA, 265 bp, Homo sapiens
  chr12:114290576-114290841
  hypo
tgaagtcccttgtccatgttcgcacagctgcaaagaggccgcttgatgtcacaggccacactaaccagcgtgcagcacgttcctcctctgcactcagtttaaacaaacgtgttgaacgcacgccactgacaatctaatagcgatggtttactgtgcacacaacacggctcagcactgtgctgggtgcgctgggcacccggcgaggaggaaggctgtcccggccttaatgagctttgtccggctcgctcatcattggtcccttcca

SEQ ID NO: 265200 - DNA, 200 bp, Homo sapiens
  chr12:114295304-114295504
  hypo
aacacagggcaccacgtgcctgccccgctgtgagggtgagggccgtgacctgctgcatgcaaggtgtgtcccctgctgtctctgatgagaggcgagggaaaggctgccagccaggaggagagaggagcagatgtccagacaaatatggccatgtgtcaacaaaacaggcacttgagctcaagactcggagacaaaggtgg

SEQ ID NO: 265201 - DNA, 139 bp, Homo sapiens; identical to SEQ ID NO: 215091
  chr12:114318248-114318387
  hypo

SEQ ID NO: 265202 - DNA, 109 bp, Homo sapiens
  chr12:114318957-114319066
  hypo
tccccacccagccccgataatggcttttctcgagcgagtttctcggtagctgcagctgcagaagcacagacaggtacagttgccatgatacggccgttgtggtaattta

SEQ ID NO: 265203 - DNA, 187 bp, Homo sapiens
  chr12:114334064-114334251
  hypo
tccctgtaatgtgctttgttcgcttgccccagagcagggaaaaccaggcaaattctccggaatgcagcggccccatcacgtgaggtgcttagagctccagggaatttctgggctcgggggcatgtccgccttaaaggttcaggcccaggctgtccccacaggctccgccccccatgggaggggagcc

SEQ ID NO: 265204 - DNA, 538 bp, Homo sapiens
  chr12:114337459-114337997
  hypo
ttagtaaatatttgctaaaccgacaagttatttcttaactaaaaagcagtgtttgagacctcccttttccgtggaaaactctgcgatgcgtgaggggagagaagctgttcctaaagaggaatcccccaagctgtctggggctccctgctgcctttcaccacccagaatgctggaagacatggcgcgcaattatcagctccaacaatgagccaacggcggccctccgagcaagcccagacaaagcacagagaccttgcagctgaaaaggctctgaatgcagacaggggaggtgtgaaagcaaggttagagtgagctgccgcggctgcttggggcaggaggggaggaatgagggcgcacaatgccacccttcccccggtacaggcacgctctccctggggcaccctgttccactgtctgagcttttgtcgcccactctggaaccagtctaggcgtgcagtgagggaaaacgccagctgcagcggaagcccgagcctgcgaaatctcaaaggaaggacgaaaacaacggcaagaaaaccct

SEQ ID NO: 265205 - DNA, 151 bp, Homo sapiens
  chr12:114349904-114350055
  hypo
tggtgcactgaggcccgagtggaaggctggtggcctccgggaagggccccaggcactgctgcctcgggctaggaggctgccttctctcccctccagcaggcggggtagcttgaggccctgcccagagaatgctctccggagccctgcactc

SEQ ID NO: 265206 - DNA, 283 bp, Homo sapiens
  chr12:114399937-114400220
  hypo
aaagtgaagagggacggtctttgaactcaagtgctgagtgaaagatcaaacaacgtcacacttgacaggaaggtaagggtgagactcctgcccactcactgtgatccgggatgtgtcgatgaagctcttgttgaaatgcttctgtgccttctgggcctcttcctcggacttgaagccaataaaaccaaacttgcggaacttgccatctttggtgaacttcaggctgcagtctgtcagcgtgccgaaggcggcaaacagctgcctgaaacgctcctccttcatc

SEQ ID NO: 265207 - DNA, 117 bp, Homo sapiens
  chr12:114982647-114982764
  hypo
agaaggcacagatctgaccacgagtgagattaggagaggcagcagaagcaggagcgagagcctcagaccccagcaacgcattcctgatgaggccccggccagtgcagcagggagctt

SEQ ID NO: 265208 - DNA, 79 bp, Homo sapiens; identical to SEQ ID NO: 215095
  chr12:114983017-114983096
  hypo

SEQ ID NO: 265209 - DNA, 235 bp, Homo sapiens
  chr12:115188683-115188918
  hypo
ggggtgatattatacaaatacgtctctggctgcattgctgggagccgtaaatgtgattgctaatgctgaaagtggaacccgcgcctggcacatagtaagcgctcggcacttggcggctctggagtgcttagaagacagaagccagatcgctatcctggacagggggtgatatatggtatcgagctctgactgagaattgaattcaacctcagccggagaattagaacattgtgat

SEQ ID NO: 265210 - DNA, 88 bp, Homo sapiens
  chr12:115192172-115192260
  hypo
aaaataagattgtatcgcatatacttttttgcatttatttacttatttatttattaaggagacaagagctgactatgttgcccaggct

SEQ ID NO: 265211 - DNA, 140 bp, Homo sapiens
  chr12:115204970-115205110
  hypo
tcttaataagacctccaggcgcatgacaaagcagaaaccttcagaaacaaaatctaccgagttcgaagaacgggcctggcccaaggcactttggacgctgtccgttctgtcttcacagcggcttgcagtaaacttcttgg

SEQ ID NO: 265212 - DNA, 50 bp, Homo sapiens
  chr12:115255837-115255887
  hypo
tctgtgggtggtgaacaggacggggggccggagaccctggctgacctgta

SEQ ID NO: 265213 - DNA, 149 bp, Homo sapiens
  chr12:115544514-115544663
  hypo
ccattccaatgagcactgtgcgtgtgatgggatgagtgaataactgacggtgtgcatcaggctttgggaaaccactcctgggtttgtacaccgtttctttgtcagtgtgcgaaatgagaccccaacacgcaagagtgtgtgtgttatat

SEQ ID NO: 265214 - DNA, 43 bp, Homo sapiens
  chr12:116040841-116040884
  hypo
acaggtgtgagccaccgcacccggcctgaaagtcactttaaga

SEQ ID NO: 265215 - DNA, 203 bp, Homo sapiens; identical to SEQ ID NO: 215096
  chr12:116394793-116394996
  hypo

SEQ ID NO: 265216 - DNA, 138 bp, Homo sapiens
  chr12:116401202-116401340
  hypo
ggtatctaccttaaaacatccgacgtggttttggagtcaagagggtgtggaacccgctgagaattcctggcaggcagaagttcgtctgtctgtgctactgaaatgtggtgatgcagcgaagcctggtgaaaaaacaaa

SEQ ID NO: 265217 - DNA, 259 bp, Homo sapiens; identical to SEQ ID NO: 215097
  chr12:116443623-116443882
  hypo

SEQ ID NO: 265218 - DNA, 315 bp, Homo sapiens
  chr12:116475434-116475749
  hypo
acacttgggtagtgcgttataaattcttccagactgtaggataccattcccagcaccgtagtggtatcagagaagcagcacactttgtgttaatgaaaaaatggtgttctactggcctacgggacttaattctccctgggtacatcacttattaagagcaagtgatagtgaagaggccgtgactcagtatgtccttaattcaaagagtcgaagaggctgaggggtcccactccggtagtaaaaactaatataattttcaagatgccaaaatagatataagagctgctctagtcagtgatgcgtgcttgaaaaacc

SEQ ID NO: 265219 - DNA, 35 bp, Homo sapiens
  chr12:116678339-116678374
  hypo
tatttttttttttttggagacggagtctcgccctg

SEQ ID NO: 265220 - DNA, 34 bp, Homo sapiens
  chr12:116678614-116678648
  hypo
agccaccacgcccggacatcaaggtgtatgtttt

SEQ ID NO: 265221 - DNA, 42 bp, Homo sapiens
  chr12:116724732-116724774
  hypo
ttcttgggcttctctagtcacgtgggtactaaattctcatca

SEQ ID NO: 265222 - DNA, 218 bp, Homo sapiens
  chr12:116755982-116756200
  hypo
aattgtttcatgaacgtctgctgtgatggcaaacctttcgggtagatccatctagtttctcacgcgtgcggcaagcggctgccgtgtttaccgaccgtcctgtgactgtggggactggcaaagctaaatggcctgagtgggttgaactgtggccgcacctggttagcaccgttctttttcttcttctgaaggaaaggcgtggctgttccgaggtgcct

SEQ ID NO: 265223 - DNA, 168 bp, Homo sapiens; identical to SEQ ID NO: 215098
  chr12:116756230-116756398
  hypo

SEQ ID NO: 265224 - DNA, 148 bp, Homo sapiens
  chr12:116756739-116756887
  hypo
atctgtttaatgtgcgttctgtgccattcacggattttggcaaggtctggcgaggtggcatggcacgctcaggcttgtgctaagccaaacagggcatgggggagagagggactggaggccgacgaaggagtcccgcttctccctctgg

SEQ ID NO: 265225 - DNA, 69 bp, Homo sapiens
  chr12:116757111-116757180
  hypo
aacactgcaaggcccggaaggccagaaaatgctaacacctggatccgatagtcccgacgcctaaagaaa

SEQ ID NO: 265226 - DNA, 43 bp, Homo sapiens
  chr12:116770791-116770834
  hypo
gattaaatgcgtgagccaccgcgcccagccaagatgactgttt

SEQ ID NO: 265227 - DNA, 92 bp, Homo sapiens
  chr12:116804026-116804118
  hypo
aatgtgaaggaattcgaactgggttcagacacgtgaaccgtggcctggatgtcccaatctcacttgcctggtgtcctcgggcccctgtgggt

SEQ ID NO: 265228 - DNA, 142 bp, Homo sapiens
  chr12:116842262-116842404
  hypo
ttggtgtctggtcaccgcacgtcgttattcagttcacacacagctaagcgtgcagctgtgttgcctccttctctctgggtgataactcacttgacattttacataaatggatagtaaaaagaaggaattagccaacaaagat

SEQ ID NO: 265229 - DNA, 34 bp, Homo sapiens
  chr12:116936895-116936929
  hypo
acttccagtctccacgcttcgcctactctgggca

SEQ ID NO: 265230 - DNA, 245 bp, Homo sapiens
  chr12:116941179-116941424
  hypo
tagtcatggtgtacacagggcgtgggacgctggataaaacctaaagagacctgacccactgccctctaggtgcttagcctctgaccacaccaagctagcgacattccaatctctcataaaaagcatttcaaaatgaaagagactgggcaaataaatcgtggtacatgcacggaatgcgatggccttcaggcattgaaaagaaagaagtacgtttcccatactacggggatttgctcacctaactt

SEQ ID NO: 265231 - DNA, 54 bp, Homo sapiens
  chr12:116972375-116972429
  hypo
caggaaatttatatgctcagcacaaaccaatgtgaaaatggaatctcatttgcc

SEQ ID NO: 265232 - DNA, 40 bp, Homo sapiens
  chr12:116981481-116981521
  hypo
ggcatgagccaccgcacccggctggcccctagaattcttt

SEQ ID NO: 265233 - DNA, 192 bp, Homo sapiens; identical to SEQ ID NO: 215100
  chr12:116999941-117000133
  hypo

SEQ ID NO: 265234 - DNA, 210 bp, Homo sapiens
  chr12:117135886-117136096
  hypo
cctaaaggcaacggcggcggcaacaaatagatgggttaatttgtttcatgcccccgttgtcaccaggctctcgcagaataaaaccaccaccaccaccaccacaacctccatttgtggggtttaataccccagctgctgggaatcagattcagccggaggaagaaaatgtgacgtcgatgcagagatccatttattcggtgatgtttgctt

SEQ ID NO: 265235 - DNA, 324 bp, Homo sapiens; identical to SEQ ID NO: 215101
  chr12:117150057-117150381
  hypo

SEQ ID NO: 265236 - DNA, 100 bp, Homo sapiens; identical to SEQ ID NO: 215102
  chr12:117150587-117150687
  hypo

SEQ ID NO: 265237 - DNA, 490 bp, Homo sapiens
  chr12:117155345-117155835
  hypo
caccaccgtgagcccggcctccggtttcatctttcccgaatgggactggctggaggggccaagctgctttacagaagagttccatctggtaagcccgggtggtgagcgaagccaaagatgacaacacgagaaggggtcaaagccaaggtttcctcacgctgcctttgtcttcttcctgcagcctggcccgatggctgaagctgggtcccaggaggcgagttcttcagcggggcctcctcacccaggctggagcaagtccgctgcacccgtcaagcggggaagagctcgggcgggctttctccatagcaatactttgctatggggtcccggtaggtgttctcatgctgcacgctctgttggcaaaaggaaaataagagcgcagtgagagcgagcacagcttcacacacctccctctcggaagagtgagagtggatcgggactgtcagactctccctgcagggggctggccgagtccatctccaaatgtcac

SEQ ID NO: 265238 - DNA, 194 bp, Homo sapiens
  chr12:117157435-117157629
  hypo
aacaaagcgtgacacggcttcgagtctcttctcccttaccaccccaccaaaaggatcgacagtgtgtattttctagtttccttctaacccgtcagctgccatcccacagctagagacatcacagcttctgacctgagatgaggtcctgcatttggccaggcacaactcaaagtgatcttcgactgccatgaaga

SEQ ID NO: 265239 - DNA, 84 bp, Homo sapiens
  chr12:117160857-117160941
  hypo
gaagccagcctcaccgagttcatccgtgatgaggtgcttcccttgaatggagttgcggcactgattgctcggacgactgctatt

SEQ ID NO: 265240 - DNA, 61 bp, Homo sapiens
  chr12:117161612-117161673
  hypo
tatgtaacccgctacggaacacacccaggccggccagccctctacccggacaagcaattgg

SEQ ID NO: 265241 - DNA, 41 bp, Homo sapiens
  chr12:117162195-117162236
  hypo
gtttactacatgatcgtttcgatggtataaaaaacctgaaa

SEQ ID NO: 265242 - DNA, 148 bp, Homo sapiens
  chr12:117392976-117393124
  hypo
attacctccgtgagcgccttctctggccctcgttcttgtctttctctgctgtcacttgaccacttagcaaggatatgcagcagcgcagaaaagacctgcaccagttgttttctttgttggagagataagtggacgtgccttcaactgc

SEQ ID NO: 265243 - DNA, 378 bp, Homo sapiens
  chr12:117407820-117408198
  hypo
ttagataaagcaggcgaaggttctgagtaatgagcagatgctgctaatgcagggacggcggagaccttgccaggactccatctgctccgtgcttgcctgcctttggcctcgtgccacagcattagggaatggcagtgtgcttcgaaacccgctccctggtcaccgagtttgtcttgaaatctcgctctttggtgagaaatgagattacacacttcttaggtgcaaagaagtttttatttgtccccctcagtagagagaggagagacgcgatctggtgcatattagcatgaggaagcctggacgggacagccagcagtcctctttatatggtgccatcaagcacggcaaagtggcttatccacctccgcaacactccca

SEQ ID NO: 265244 - DNA, 155 bp, Homo sapiens; identical to SEQ ID NO: 215107
  chr12:117408228-117408383
  hypo

SEQ ID NO: 265245 - DNA, 116 bp, Homo sapiens
  chr12:117461716-117461832
  hypo
ctgtccttggcctgcgtctttcttgctccatgtgcttttaaaccattcagatgagaccgtgtgggtcctccctgacagtctgtgcttgatgtccttattatcgatgtttgtttgca

SEQ ID NO: 265246 - DNA, 205 bp, Homo sapiens
  chr12:117464845-117465050
  hypo
ggacttgcccagggaggcagcgatgggccagtctctgttgcatgtggctgattcgtctgcagtagggtgtgccctttatgtctggaatgtaccaggttgtgggggcagatgccagcatgcgtacggggcatgcagacctgtttacaaagtcatgcccaaagcgtggcctgctcacctgagcttcgggaactgaggtgagacactg

SEQ ID NO: 265247 - DNA, 239 bp, Homo sapiens; identical to SEQ ID NO: 215108
  chr12:117466159-117466398
  hypo

SEQ ID NO: 265248 - DNA, 184 bp, Homo sapiens
  chr12:117472595-117472779
  hypo
gcccgaggcacagaccgcagtgcccagatggtggggctgactgagatccgtgcccggggcagcaaccctcggtctgtgttgatcaaaggccagcagccccacaagacgcatcagcctgccccttctgggatcaggtttgcaccaactcatcgccaaccctgatcgttcccgggatgccacagac

SEQ ID NO: 265249 - DNA, 92 bp, Homo sapiens
  chr12:117474092-117474184
  hypo
cctacccaggaggtcgtgcgcattaaccaaaagctgagcctccccaggccgcactcactttcccggggccattcgcccgctccctgtgtagc

SEQ ID NO: 265250 - DNA, 134 bp, Homo sapiens; identical to SEQ ID NO: 215109
  chr12:117476986-117477120
  hypo

SEQ ID NO: 265251 - DNA, 281 bp, Homo sapiens
  chr12:117484292-117484573
  hypo
ggccttccagaaacgcagaccataagcgggaaaggcactgcgcgtctcgggagggctgcaggggcgctcaccatctgccccatgcacacgctggccgcctccatcatggccccgtcggcgatggagcgagcggactccttctcgatgtgagggtttcccgacagcagctcctcgaccacctgccaggtggggcggaaacaaacggtgaccttgggcctccatcagggtcgtggggggcagagggggaaggcaccaggagccccgggcgggccagaggagca

SEQ ID NO: 265252 - DNA, 287 bp, Homo sapiens
  chr12:117484911-117485198
  hypo
agctagcgctgtggcgttagggcctggcaactgccccgtgagcatgaatatcacgacagtaagcgttacccgttaacacaagtcaaacggtgtcgagttcaaaatattgttcccacagccctggagggcaccatcatctcacccatagcaggtcacggtccacagtgcttctgatctgggcccgactgatctaacatgggcagccccaggcctggcatcagggaggcgatggccgggagggggcctctccatgttgttcccagcacggccttgggagctggagctct

SEQ ID NO: 265253 - DNA, 115 bp, Homo sapiens
  chr12:117487070-117487185
  hypo
acgatggctgctctcgccttgcgtctgtgccccaagaacctgcttcgtggcggggctgcaggctccggaagctgaaagctcagcccttgccctgccctcacggagctcatcatca

SEQ ID NO: 265254 - DNA, 40 bp, Homo sapiens; identical to SEQ ID NO: 215112
  chr12:117529341-117529381
  hypo

SEQ ID NO: 265255 - DNA, 408 bp, Homo sapiens
  chr12:117529746-117530154
  hypo
gcatgcgggagaggcggtttctcccggcactgcacttggcaaatcccactagaaggcctggttttgagtctggattccctacccagcaactaagtgatcttgggcagtcatttcctctgtccaaacctcagtttgcccatctataaactggcagcaatagtcccaccctcaaagggcttttcggcagatcagatgattgacaagtgctcaagaaagagcagctgtcacctcattcacagctggctgcgttttttaaggagcggaactggtggctcaaagaaggacacagcctggatgagacatctgagcgaagtggcacaggacggctccagcaccgagctcagtgcacatggaacgccatcctccagggtcccgctctgtggctgcgacagatggtgagatgatggg

SEQ ID NO: 265256 - DNA, 196 bp, Homo sapiens
  chr12:117531044-117531240
  hypo
tgagccgaggccaccgtctgaggccacttaaagactttagaaccaagaagtattacccaggggcgagaacgcagtggagaaaccagcgccacccccaccagccacgcttggctacgccagtcctccctgccatctctagctccttctccaaatgagattagaccaggaatggaatccgactctctttttttctttg

SEQ ID NO: 265257 - DNA, 296 bp, Homo sapiens
  chr12:117579415-117579711
  hypo
tgcagaaatgtgtccgtccccacggacagcctggcttagctgtccgtggctgtctcctgcggtggaggagcacactggagtggcccgtgcagtggaccagagcttccacccacactgtgttctgtctcctttcctagaacacaactggacgtttcccacctccgtgcaaaatgagtggacataaggggtgccacttccacacctggctcatggaagctcccagatggtctcagccctccatgctccccgctacttcaggcgggatggagatggacggctcaggttgctctgatgcc

SEQ ID NO: 265258 - DNA, 81 bp, Homo sapiens
  chr12:117583676-117583757
  hypo
gattaattcactagtgtaggcggagagcaacattgtctttgcagctggggaagagcacacggtatttaaacttagtaggag

SEQ ID NO: 265259 - DNA, 180 bp, Homo sapiens
  chr12:117586330-117586510
  hypo
gatcaggggttgctccatgacgtggcacagtggcacagagtttaaactgggcacttacaacgtgccagaccccacagcggtgtcacaggcacccctgccacgtaaccctggaaggagcccccttctgctgttgcgtgggctgcccaaggatttaaccccggactcaaaccagacagtccc

SEQ ID NO: 265260 - DNA, 61 bp, Homo sapiens
  chr12:117588319-117588380
  hypo
gtgtgtgtacttaaacaaaacgtattctaaccactcacccgcaactggcttattcaattgc

SEQ ID NO: 265261 - DNA, 43 bp, Homo sapiens; identical to SEQ ID NO: 215113
  chr12:117588696-117588739
  hypo

SEQ ID NO: 265262 - DNA, 103 bp, Homo sapiens; identical to SEQ ID NO: 215114
  chr12:117588799-117588902
  hypo

SEQ ID NO: 265263 - DNA, 289 bp, Homo sapiens; identical to SEQ ID NO: 215115
  chr12:117593454-117593743
  hypo

SEQ ID NO: 265264 - DNA, 86 bp, Homo sapiens
  chr12:117597670-117597756
  hypo
aattacccccaccttcgctggatgtgtggctgagcgcgaagggagagggcagaaatgaagacattgtgcctcggggcctggcgtat

SEQ ID NO: 265265 - DNA, 329 bp, Homo sapiens
  chr12:117599139-117599468
  hypo
gaccaaggaactccacgggaggtggggagcatcaggcaagcagggccagaccgccgagaacctaaaagccacacggaggagagcaagtctggtcttcaaggcaacaggggagccaccctgaggggtttaagcagtgaagggacctaattgatattttgttaagattcctctggcctgcatacagagcgggttcacaggggctcagagtccagagagggaggacaagcaggaggccagggcactgcttcgggctgcagaagtgctggtctcagcgggtcgactttcacccgtctgggagacagagtcacgtgcaggggtgtagcaggtgt

SEQ ID NO: 265266 - DNA, 357 bp, Homo sapiens
  chr12:117600037-117600394
  hypo
ggatcatgatgaggacgaaggtctggcagcaggaaggagaaggtgcctgtgtgctggcttcttcagaagcgctctggccttggcccactgtaccacgggatgccgcatggggtgggctagggcatcagcttgcctgcactgaactcctagtgccgtcacggcatgtgcaggagacctggctaagttatttaacttctccctgcctcagtttcattatttcccatatggcaaaaagaaaaataatatctaccctatagggctgctaagaagatggaaggaggcgttcagtcagtactcccgacttaaaatctcaccatcccgccctctctatgtccatacagccgtcataaccctgca

SEQ ID NO: 265267 - DNA, 165 bp, Homo sapiens
  chr12:117600622-117600787
  hypo
ctgacatctgcaggcgccacaccctcccacccctggaccacgtgcaggctgttcccactgactggagtcacgtacttttctgccctctgaagttgtttttcatttttcaaggtcacacctgaaacccttcctctggagaggaaccttgtccgatttcttcagcac

SEQ ID NO: 265268 - DNA, 87 bp, Homo sapiens; identical to SEQ ID NO: 215118
  chr12:117788578-117788665
  hypo

SEQ ID NO: 265269 - DNA, 600 bp, Homo sapiens
  chr12:118198707-118199307
  hypo
cgcaagtctgttcccggtttccttgacctgggcagttcctgggaccaaggggcagcccctcgcaggccgggtttcgaccgccccagggcacccaccgatcgcactcacttgggcgtgtgggcctcgtccacgcggtgccccagctggaactcgtgggatttgctccgatgcagcgcggtgaatcccgggatcaagtgtatcagttttcgggaggagggcggtggggtccccgggggcttcagcttgttcttcttcctcatgggcggcgtgcccggcggggtcacggtggtgacgatgttgggggtgcgcggcggggtgcggaccgcgtgccgctgccggggcgatgggggcagggaacggtggcccgactccagtggcgggggcgggcacaagcccgggtaggcgtccacggtaagcctgtccacgtgggtgtacacaggggccccgggagtggggctggtgtgacaatagtgctggacgcacttggacgggaccctggggctctgggagagatgggtgcggatccacggggtgggctccggggggcacacgggattgttctccttccccgtctctgtcgtgggccactggatggtccag

SEQ ID NO: 265270 - DNA, 196 bp, Homo sapiens
  chr12:118293044-118293240
  hypo
ctgcccttgctggtgtcttccggcctccaaatcccaggtccacgctgcctcttcctgcgtttcggatttgccccccagggttgactctgtctcgtcctggcctgcagtggcgggcacgggatgccgagggaccgcggcagctgtgctggggacaagtctccacatccccgaccccggggcctgctcacctgacatg

SEQ ID NO: 265271 - DNA, 225 bp, Homo sapiens
  chr12:118293460-118293685
  hypo
tagaggagaacactccgcagtgtaaacgctttgcatgacagtggggtctccgaatctcgggtttgccactcattatctagataacctctgaccagtcgctcaacctctctgggcctcactttgctcatctgtaaagtgggactcctaagtgtccatacttggcaaggtagcgcaggtgcttagtgctattataattactaccctgtctggcgtcaacactgtgcc

SEQ ID NO: 265272 - DNA, 59 bp, Homo sapiens
  chr12:118313383-118313442
  hypo
ctgtgtccctcaggactgcccgtcagcaccccataatcgctgccttctccctaaaggta

SEQ ID NO: 265273 - DNA, 57 bp, Homo sapiens
  chr12:118318419-118318476
  hypo
accctaggccaaggacgacccagaaaacctgccggaggaagccgtaaacatccacta

SEQ ID NO: 265274 - DNA, 79 bp, Homo sapiens
  chr12:118331634-118331713
  hypo
ccaagataaatatattttaacgcagcattttaaaaagtcaaaattcatagccagaaaaatccacaaagaacaaaattct

SEQ ID NO: 265275 - DNA, 33 bp, Homo sapiens
  chr12:118361694-118361727
  hypo
tttttgagacaagagtttcacgcttgttgccca

SEQ ID NO: 265276 - DNA, 32 bp, Homo sapiens
  chr12:118361967-118361999
  hypo
ccactgcgcccggcctatatttgcttttttaa

SEQ ID NO: 265277 - DNA, 107 bp, Homo sapiens
  chr12:118461363-118461470
  hypo
tggcagcctttcttcggcatcttgttctgccgagtgactgtcattctgggcagatccccatgtgagaacattgggtacctacagaatggaaccggtgtcataagcaa

SEQ ID NO: 265278 - DNA, 107 bp, Homo sapiens; identical to SEQ ID NO: 215121
  chr12:118474193-118474300
  hypo

SEQ ID NO: 265279 - DNA, 120 bp, Homo sapiens; identical to SEQ ID NO: 215122
  chr12:118481549-118481669
  hypo

SEQ ID NO: 265280 - DNA, 48 bp, Homo sapiens
  chr12:118533281-118533329
  hypo
tcctttccaaggctccgagcacctctccagccccggtccctgccagcc

SEQ ID NO: 265281 - DNA, 325 bp, Homo sapiens; identical to SEQ ID NO: 215123
  chr12:118583595-118583920
  hypo

SEQ ID NO: 265282 - DNA, 213 bp, Homo sapiens; identical to SEQ ID NO: 215124
  chr12:118590038-118590251
  hypo

SEQ ID NO: 265283 - DNA, 89 bp, Homo sapiens
  chr12:118860392-118860481
  hypo
tgtttaaagtcaaatagtagcgtgtgtttaacatacatcacaagccttgaactttttttcttttttctttttttttagacagagtcttg

SEQ ID NO: 265284 - DNA, 31 bp, Homo sapiens
  chr12:118870267-118870298
  hypo
gactagaggccgggcgcggtggctcacgcct

SEQ ID NO: 265285 - DNA, 31 bp, Homo sapiens
  chr12:118870538-118870569
  hypo
tgacagagtgagaattcgtctcaaaaaaaaa

SEQ ID NO: 265286 - DNA, 99 bp, Homo sapiens; identical to SEQ ID NO: 215126
  chr12:119626324-119626423
  hypo

SEQ ID NO: 265287 - DNA, 51 bp, Homo sapiens; identical to SEQ ID NO: 215127
  chr12:120117233-120117284
  hypo

SEQ ID NO: 265288 - DNA, 378 bp, Homo sapiens; identical to SEQ ID NO: 215128
  chr12:120117590-120117968
  hypo

SEQ ID NO: 265289 - DNA, 153 bp, Homo sapiens
  chr12:120127978-120128131
  hypo
tcctcacggctcccgcaggcagccggcccctgctgctgtcttcaaacagcctcccgggggaccgctctctccgcgtgctgagcatccggccgggggacttctctcgctccagggggcggccaggagacttgtccctgcgcagctcggtccgcc

SEQ ID NO: 265290 - DNA, 196 bp, Homo sapiens; identical to SEQ ID NO: 215129
  chr12:120134818-120135014
  hypo

SEQ ID NO: 265291 - DNA, 394 bp, Homo sapiens
  chr12:120137279-120137673
  hypo
tggtatgcgtgccccggtgcagttccctggccttgaatctgggctgactctgcggtctgctctaaccagtagagcgtggtggaagtgagcacgcttgccagcttccgcttctatattcttggaagaagccagcgtggaaagcaacaaggcctccagccaccagccgcagctaagcgcccacattatggccagcactcattgcgtgccatgtttgtgagcctgtcttgggctttctagttgtcccagtggccctgctgataccacatgaagcagaactgtccagtcaagccacggagttggggccaataataagctgttgtttgaagtcactaagctttcagatggcttgttatgcagcaagagagaaacaaaatagcctcgaagggtatctggg

SEQ ID NO: 265292 - DNA, 1358 bp, Homo sapiens
  chr12:120147741-120149099
  hypo
gcccacggtggtttcgttgcaatcaggacaaagggtttggctttagatagtcttcgaggcttagcactcttcacttggcctaacagtgggatgttctttgggaatgtcagactgtgctaaactggatactggaagggaactgaatctggacagagggggtccattagctgaggcttgggcatctatggggacacagagataagagctacaacggctcctctctactattttgtgttttacgagcatgaaacgtggcttcaacatattggctcccttgaaagtaaagaaaaaacaccatgtccttggcctcacacctgctatcatgagtagcttctccaggtccttgataatataaatttggaagactgctccaattcctgggacatgggttagggagtttttcaagacattcagggcgtagagcccttcctcggtgcccaccaacaccacctgcaagggcagaagtccgaaggcagaacataagcacggtcacgtcaccagaacaatctctagtaagagcaacaaggcctccacagccctttctttcttgatggggtgtggctgtaaccagacaccagctggccgtgcccatgcaagcattacctggtcactgaagggcagcgtgcagttcatgtctagacggtcatcaccttccagtttcagcagggagtttccaagcagtttcttttcataggtgaaagaaaagaaaaacagaagacatcgtgaggctgatctgtttatgaccaaaccatccagagaaaccaagagaaggttaaggccaagttattcctggaaatgctcagaaacgcacatatgctcttagctcagcccgtattttgatctgagctccaaatgcaaaatgcgagtgctattggtatctctggggcagctgttaattagcatctgagttataatttggctgggatgcagaaataagggagggtagtagacatggaaagctattctgtaataagaaataagctgaagctaaggagatttcacctgcgcagggttaataagacacatgaaagactccttcccccataaggctgcagcagaagtgcaaaggcgccgtgttagcagcgagccagcacgcctctgcatctctttacctgaacccaggcaggcagaagctcgtaagaaacacagtcgcgggcctattgtacacatattaacaaggatttcagtaaaagctcacgtgtgaaacgaccaacaagtcatccaaacaggtctaaccactgagtaaagcccttttcaggaggcttgtggttaagaatctgccaattgctaacacataaagtgtttattaggagtgaagagtctgaaaagagctgtttggtcttcgctggagcaaacgt

SEQ ID NO: 265293 - DNA, 102 bp, Homo sapiens
  chr12:120150400-120150502
  hypo
ttggctgtatttgcgagttcggaagcaccaacggcaccatgaatagatacatccccgtcgggaaggcacagctcaaattcttccaccggcctctgtccagct

SEQ ID NO: 265294 - DNA, 266 bp, Homo sapiens
  chr12:120151876-120152142
  hypo
gaagtaagaagctcgaaaatgaatgcactatatgatgagttagaaaaaaatcacctccacctgatagactttttaagctggagatgcacaggtgcccagcacagatgcacaactactgatcttaccgagacatttggatgcctggcgtccaaagtgcacggtatccagacacacagcacactttgtggctcgcatgttcagtcctacgttgaatcggtgaggaatattgtggtgcatgcgttccttaagacgccgactaaattctg

SEQ ID NO: 265295 - DNA, 434 bp, Homo sapiens; identical to SEQ ID NO: 215133
  chr12:120155994-120156428
  hypo

SEQ ID NO: 265296 - DNA, 85 bp, Homo sapiens
  chr12:120165250-120165335
  hypo
cagaagggggaaggcgaggaggggagtgagggatgaaaaattacctatcgggtacgatatacactatttgcgtgacaggtacacg

SEQ ID NO: 265297 - DNA, 310 bp, Homo sapiens
  chr12:120172972-120173282
  hypo
ggctggtaagctgcatctctcgttccgtgatctcccggcggagatggtccacttcacttcgcagttgtacaatctcgtcgttggcgccagaagcctcatcgagttgtttggacaagtagaagttttggttgttgagttcagcgttgtcctcggtcagctggtttagctgctcctccaggtctgtgattacctaaaagaggaaaggaatccagttacacgccaagcacattcatttcaaataagaaattgcttctagggctatggatttctgaacccacgtgacactggcaatcaacgtgccgctcatgag

SEQ ID NO: 265298 - DNA, 304 bp, Homo sapiens
  chr12:120186343-120186647
  hypo
caccttacatgccccgatttcacatcttggctatcatgccgatggcttactaattaattaaacagagggcttgatatttatgtacgagaatgagaacgtgcactgactcatgattttaacaaatcaaagaggatgactttgggatcccatcatcacgctatgcagggagaaggattcctttcattagtgtctctagctttcaactcttgattattcaacattagtcacttgacagaatcggtaaaagaacagaggagtgaaaacacaaaatgtgttcatgaggcctggccggtgcacacagagc

SEQ ID NO: 265299 - DNA, 93 bp, Homo sapiens
  chr12:120189897-120189990
  hypo
tccagctctgtcttcgcctggcgaagctggctctccagggccgcccgtgcagcctgcagggctgtcaactgtgactcgcgctcctgcagggag

SEQ ID NO: 265300 - DNA, 97 bp, Homo sapiens
  chr12:120214487-120214584
  hypo
atgctgacattctgtcgctttccgcttgaattcttcagcagcaagccgagactctctcagctcagattcgtagagatcactccgtcttcttgctgag

SEQ ID NO: 265301 - DNA, 304 bp, Homo sapiens
  chr12:120222343-120222647
  hypo
gaatgttaagagacgttgagcgtaatcaacacagtggccgcagtgacataagcaggagttttaaaagactaggaagagagacttcgcatcactcaaagcagatgggatgtatctcagccacaggtgaggacccaggccacctgccggaagaagcagacatctggctgggtcatgctgagaaacggactgtttaaatccagggcctcctctggtttagatttaaaggatttacagcaacagcaaggcccgaattcatctccctctgagctgctggaggcgcgacttcagcgaaggcaggagcgcc

SEQ ID NO: 265302 - DNA, 363 bp, Homo sapiens
  chr12:120241060-120241423
  hypo
ggcagttcttcacccgagaagcctgaggggctcagctggcacggagaggatgaaacccacgaattcttctctggttcatcaaaattggaggtgtcatcgtcagacttgagggtgggaacgaaggggggaggagctggttaaagaaaaacaagaaaggaggcggggaggaaaaaaaatttcagccggattcaacactgttgcggagaagatcgtcttactccttcggcgctggcgatggcactgcagcgcctgctttcaatctagctcgcaacctcggctcctacagcaacaagagattaaccccttctctgccaacatggccaccaacccgcagacaggctgccttcccgcctggggtaaact

SEQ ID NO: 265303 - DNA, 35 bp, Homo sapiens
  chr12:120241909-120241944
  hypo
acagcacccctgcgcgctgacggtgggaatgcacg

SEQ ID NO: 265304 - DNA, 36 bp, Homo sapiens
  chr12:120265239-120265275
  hypo
caatagattttttttttttccgagatggagtctcgc

SEQ ID NO: 265305 - DNA, 97 bp, Homo sapiens
  chr12:120339153-120339250
  hypo
cctctattctactttctgtatctatgaatttgcccattttaggcacctcatataagtggaatgatatcatacagcagcccttcgtgcctggctgatt

SEQ ID NO: 265306 - DNA, 32 bp, Homo sapiens
  chr12:120431043-120431075
  hypo
ggcatgagccactgcgccgggccggcaccttt

SEQ ID NO: 265307 - DNA, 149 bp, Homo sapiens
  chr12:120540010-120540159
  hypo
atagtcacaggtctctctaccgggattaaccaaaataaagcagctgaaatcctagcgacaggaccaacccagagcaaggattcatgaggtcagcgcccagaccagccaacggcatgagggcttgcctcgcctgggcctgcagccccagg

SEQ ID NO: 265308 - DNA, 130 bp, Homo sapiens
  chr12:120543004-120543134
  hypo
gttgagattaggtaggggaacgacatcccactcaaaagcaaatagctgaggatgatacgcaaccagaacacattcagaaaagcggccagcacccggggtcttccagccaggggaacgccaaggagtgcag

SEQ ID NO: 265309 - DNA, 35 bp, Homo sapiens; identical to SEQ ID NO: 215137
  chr12:120545353-120545388
  hypo

SEQ ID NO: 265310 - DNA, 297 bp, Homo sapiens; identical to SEQ ID NO: 215138
  chr12:120565538-120565835
  hypo

SEQ ID NO: 265311 - DNA, 127 bp, Homo sapiens
  chr12:120574316-120574443
  hypo
agaggctgagtgtctcgagcagagccgccttcacattccagctgaacctgtcccccaggatgcggatcagagggccagtgatgctgaccacggagggcctcagggcgtcagccgaggtcaggcggat

SEQ ID NO: 265312 - DNA, 255 bp, Homo sapiens
  chr12:120580290-120580545
  hypo
acaaggcccaggaaactcaccgttctcttatctgcacacgtgctggccaggaaacccagcaggagcccaaagagagtgggtaggatctcacgcaaggtgcggggggtattggagacaacaatcttccagacatgcagggacgcctgccgcaccaccagctgggtgtctgagcggcccatgtacagccctgccaacacccggttccgccgctctacccccagggcagtgatgatcgcctgcagccagtagaagggg

SEQ ID NO: 265313 - DNA, 115 bp, Homo sapiens
  chr12:120597713-120597828
  hypo
cagcaagggcagaaaagagtcgaccaaaacagggatgtactgggtcaggccggacgggttcttggccaggatgatgtccagcagtccaagcgccgcctccagctccccatccagc

SEQ ID NO: 265314 - DNA, 171 bp, Homo sapiens; identical to SEQ ID NO: 215141
  chr12:120613496-120613667
  hypo

SEQ ID NO: 265315 - DNA, 201 bp, Homo sapiens
  chr12:120620161-120620362
  hypo
catgtttgtccccagaggtgcgctggataagctcccagggatgcagccctctatctaaccagcaggctgcttcatggagcggtacttgtgtttcctaaggccggtcatcactggcacctacctgcctgggactctccagtttccacagtcatctcaaccctcaacgaaacctggctttgcgacaactctttgaggtggaca

SEQ ID NO: 265316 - DNA, 282 bp, Homo sapiens
  chr12:120647681-120647963
  hypo
gaagcacgcaaatccggacatgacgacgaggaggcagtagagacccatcctcaactgtaagtaactgccttcggcagggaaggggctaacccacgttgtgtgggctcaggcacggccgcgtctggttctgtgcaggaacacaggcagaggcaagccctgggtccgcatcatggctctgccctcactcagattgccttgtacatgtaggttcttgtcctagagcctctttccctacttctaaatgagtggaaagccacccacaagcccgtgagtgaggatgcc

SEQ ID NO: 265317 - DNA, 75 bp, Homo sapiens
  chr12:120662007-120662082
  hypo
gattgtgccattgagggcctcgctggacgggggtggggggacggggggtggcacggcaatctcctggtatgtgtg

SEQ ID NO: 265318 - DNA, 89 bp, Homo sapiens
  chr12:120725460-120725549
  hypo
cacgttcaccctcccgcttcttcccctccctgacccgtgacagccccgtgaaagctgcagaacacttacaaatgtatgtatcaggccag

SEQ ID NO: 265319 - DNA, 120 bp, Homo sapiens
  chr12:120736009-120736129
  hypo
aaaaaaaaaaaaaaaaggagggggctgtcatatgagtttccccgcctagtagatcctacagctactgactttcgctgttgctggagctactactccctgtgtactaagttaaaaagaatc

SEQ ID NO: 265320 - DNA, 120 bp, Homo sapiens
  chr12:120758714-120758834
  hypo
cgccatgctcggcttgttaatgtttattatatttcatgactacagtgtcaaaattagcctgtagagtgtggtgaagtcttttatttagaaaagaaagtcgtggccgtgtgcggtggctca

SEQ ID NO: 265321 - DNA, 240 bp, Homo sapiens; identical to SEQ ID NO: 215144
  chr12:120908355-120908595
  hypo

SEQ ID NO: 265322 - DNA, 43 bp, Homo sapiens
  chr12:120909713-120909756
  hypo
gcttgtaggatttttatcagacggaaataagcaagagattctc

SEQ ID NO: 265323 - DNA, 36 bp, Homo sapiens
  chr12:120927818-120927854
  hypo
aggattacaggcgtaagccaccgtgcctggcctatt

SEQ ID NO: 265324 - DNA, 36 bp, Homo sapiens; identical to SEQ ID NO: 215145
  chr12:120956375-120956411
  hypo

SEQ ID NO: 265325 - DNA, 40 bp, Homo sapiens
  chr12:120983607-120983647
  hypo
ctgggattacaggcgtgagccattgcgcccagcccccagt

SEQ ID NO: 265326 - DNA, 31 bp, Homo sapiens; identical to SEQ ID NO: 215146
  chr12:120991484-120991515
  hypo

SEQ ID NO: 265327 - DNA, 38 bp, Homo sapiens
  chr12:121135003-121135041
  hypo
catccaagacgtttcggttatgtcgggtcctcagatcg

SEQ ID NO: 265328 - DNA, 94 bp, Homo sapiens; identical to SEQ ID NO: 215147
  chr12:121166589-121166683
  hypo

SEQ ID NO: 265329 - DNA, 40 bp, Homo sapiens
  chr12:121197975-121198015
  hypo
tggtgtcgggatcccggggctggatcgcttgtcttcagac

SEQ ID NO: 265330 - DNA, 179 bp, Homo sapiens
  chr12:121198381-121198560
  hypo
aaccagaagcgaagcggagtctgccgcatgaattcttaagacctcaggttatctaggaaatctaccgcacgctaaagtgctcctccgtaagtgctgcagttagaatcttcacagcctccctgcaggatgtttgtatcaagcacctgctaaccactggctccgtgcggtaagacttctga

SEQ ID NO: 265331 - DNA, 135 bp, Homo sapiens
  chr12:121199362-121199497
  hypo
actgaagaccagaaagagaccgagatggcttccttctgagcctgtaccgctgacatagctctgtagagaagggggttgtataaatgatgtccctaaggcatgtactcccatgtatagacacgagtgctgcattcc

SEQ ID NO: 265332 - DNA, 39 bp, Homo sapiens
  chr12:121199754-121199793
  hypo
ccaagccaccgaaccgttcctatgcggggagctgtcact

SEQ ID NO: 265333 - DNA, 138 bp, Homo sapiens
  chr12:121200046-121200184
  hypo
tgagaaaacagaataagaggcggacctaagtgtatcaggcagcggggagcaaacgagcactggaagggaagtctaatgtgtgctttaactgcagccacccactcaaccctccgagacgagtagagtatttgctgtttc

SEQ ID NO: 265334 - DNA, 221 bp, Homo sapiens
  chr12:121203946-121204167
  hypo
tcgagatcacaagctcactcaggggcttaagcagaatcacctccagcgaggagagtgcaaaccgaggcacaggccaatccaagttattgctttcacaggtttataactgctgctctcacctttaaataggccatcgtgaggagtggcaataaagtaaatggcaccaaatagagaagggcgggctgggcggcccggtgaatgcgagacgccacagtagcagt

SEQ ID NO: 265335 - DNA, 241 bp, Homo sapiens; identical to SEQ ID NO: 215149
  chr12:121205142-121205383
  hypo

SEQ ID NO: 265336 - DNA, 149 bp, Homo sapiens
  chr12:121212805-121212954
  hypo
caaagacagtgacaccaaaccgagctcaaatgttctctacgaggatgacataacctgtaaggtttctaagcagtgctcacattcgcgatacaggctctctagatatctatgccctatgtggagtcagcgcaccaagagtgtagcatttt

SEQ ID NO: 265337 - DNA, 31 bp, Homo sapiens
  chr12:121289697-121289728
  hypo
tacctggcccgtttcacactgattttcaaac

SEQ ID NO: 265338 - DNA, 110 bp, Homo sapiens
  chr12:121328591-121328701
  hypo
atatacacacaaacacggagcgaaaagtcaacaggccttattatttgatgagaatcaagaatgtctccgaggtatctagctgtgaagccgaaacccgatgctctcaacag

SEQ ID NO: 265339 - DNA, 37 bp, Homo sapiens; identical to SEQ ID NO: 215150
  chr12:121352799-121352836
  hypo

SEQ ID NO: 265340 - DNA, 279 bp, Homo sapiens
  chr12:121363905-121364184
  hypo
tcagaggatcctgtcgtagtcagcctcattccccaactgagaaacccctggcgttggcttgacgggggaaaaacagagctgatctgctatcctgagtcagctgttgggagaacctgacttctcaggtgagacaaggacccccaacaaggcgaggcctgggaatgctacccaagaaaaggaaacagatgtgacccttctgctccgagctcattccatggtgactcaaataaccgagtcttccctggcctctcagctccagcacctcggccattcccgtat

SEQ ID NO: 265341 - DNA, 35 bp, Homo sapiens; identical to SEQ ID NO: 215151
  chr12:121531380-121531415
  hypo

SEQ ID NO: 265342 - DNA, 103 bp, Homo sapiens
  chr12:121622522-121622625
  hypo
tgcccagctgctgccgctggaggatccggaaagagtttccgaagagtgaagggcagtacagtggcttcaagagtccttactgaagccaggcaccgtggctcac

SEQ ID NO: 265343 - DNA, 88 bp, Homo sapiens
  chr12:121653376-121653464
  hypo
gccgggatttttattggacagcacagctctgtaggattccttatgacgtattcactgtctcagtcacgagaatctttaaagcagtaaa

SEQ ID NO: 265344 - DNA, 97 bp, Homo sapiens
  chr12:121667860-121667957
  hypo
ccaggtaaatttccacgtaccctttgttgcatttttcacagtccttaaaaaggaagcgctccaggccgggcgcagtgactcacacctgtaatcctag

SEQ ID NO: 265345 - DNA, 170 bp, Homo sapiens
  chr12:121675681-121675851
  hypo
atcgggcattgaatcgatcacagagtagaaaaatctgcagtccccagaaactcggcctccagctggagaggggaaccagcgtaccctgaaacttccctagcaccttggaagcaagtggaggtcatggttcttccactcggcaacgtgaagctccccgctggaagacaagt

SEQ ID NO: 265346 - DNA, 999 bp, Homo sapiens
  chr12:121687592-121688591
  hypo
gatttccggcaccacgatcctcgactcggggttcttgtccagcatacgggtgatcaggtccttcaagtcctcagctatgtcgggcctggggatggagaggcgtcagggtggcagacacgggaccgccaagaactcggacaggagagatgcgggacggcgggagatactcactggtctggaaattccagggcctgactcttgatcttactgtgtaaacacatgatccgctcgtccatgaatgggcactgcaaagaggccagggacagagtggcagtcaatggcggccacatctgcccttcgagggccacctgtgctgtgccactccacataggatacagcagagaaatcaacaattgcggcccaggctagggggcaagcagttcccattctccccgagaatggccaagacacaggggtgtggggcctggccgacgcagggcagagccaggaatggccctctcgaagggctagagcctttcccaagcacactgcaggctccctctgtagctgggcctcagtttacctacttacaccaaagcaaacactgctcgtcacctacttgccaggtgaacaacaggaacaacaagaataacacaaaagactttgtgttatttgtggcagcagcagtgattttcaagggcttagcctggatcgcgccacgccctgccctgaggttttcattcactgttccccgtccctggaatgttcttctcaccaacatctacgtggcttggtctctcccaccatgcaggtgtctgactaaagctcaccttctcagggaggacttcctgaagccctgtctaaaacagacaacccccaatgccgccaccgcccacatcactcctcatcgtagcacttatccctgacgttatcgtacagatttgtttattgtttaacccctcccacgggaacgttagctccaagaaggcagggatttctggctgtcttgctcactgcggactctccgtgcctaggagcgttcctgcacaaagtaagggc

SEQ ID NO: 265347 - DNA, 135 bp, Homo sapiens
  chr12:121693277-121693412
  hypo
cactttccactttgcacccacgctcagaatgctaactacccactgggtgagagccctcccgcaggccctgctcacagtactcgatgcctttgatcagatcctggaagtagaaacgggcctggtcttcagagagtg

SEQ ID NO: 265348 - DNA, 149 bp, Homo sapiens
  chr12:121706435-121706584
  hypo
ctcacgtggaaagccggcctgccggatcagcttctttttggacagcaccttcattgcctgcaggaaaatgaaggacagcacctttagccaggtcctgtttaaagcagggaggaaaaggggaaggagggcgcagtcggggttcctctact

SEQ ID NO: 265349 - DNA, 178 bp, Homo sapiens; identical to SEQ ID NO: 215155
  chr12:121711833-121712011
  hypo

SEQ ID NO: 265350 - DNA, 77 bp, Homo sapiens; identical to SEQ ID NO: 215156
  chr12:121754200-121754277
  hypo

SEQ ID NO: 265351 - DNA, 152 bp, Homo sapiens; identical to SEQ ID NO: 215157
  chr12:121756057-121756209
  hypo

SEQ ID NO: 265352 - DNA, 120 bp, Homo sapiens
  chr12:122136316-122136436
  hypo
ggtgacaaaaaaaaaaaaaaaaaagatcgaagaactgtttcatattacaggcagccaaagagacatgacacctgaatgtgatggagaatcttggattggatcctttgctataaaggatgc

SEQ ID NO: 265353 - DNA, 101 bp, Homo sapiens
  chr12:122158112-122158213
  hypo
atgcgtgcctcccacgcacagacccccacttaccgctcccgtaacataccgttcatggattctgacacatgactcagaatctgtcccgcacaggacgcata

SEQ ID NO: 265354 - DNA, 212 bp, Homo sapiens
  chr12:122179049-122179261
  hypo
gacttggcctgcggcggtggtttacgaatgcctgcttgatagagaaaaagaacacacaggcaggcacacatacatgggggataaagcaaatacagcatgatggaacagctagtgaatctggtgaagaatagaggcgagttctttgtattgtttttgtaattctgcaagcttgaaattattattattactattattattattttgagacagag

SEQ ID NO: 265355 - DNA, 280 bp, Homo sapiens; identical to SEQ ID NO: 215159
  chr12:122182117-122182397
  hypo

SEQ ID NO: 265356 - DNA, 375 bp, Homo sapiens
  chr12:122192680-122193055
  hypo
tggacgtgaattttggaaggatgctattcaacccagtacaccttctataggctaaaaacggggcagaggagggggattggacgggccgttcatctctgtgccggtgcccccgggaagcctgccctgctgtttaaccttaggcaaatgacgaacctctcccagcctcagtttcttgacagatacagtgagcgtgacaggagctacttggcagggcagcttggagggcaggagaagctgtgtctggagactggttagactggtgcctgtttaaatattagcaccggttagcatcaccgttgttttgggctaagactgggcatacgggaaaaaggctcacagcttcatagctagtgcgtccacagagcaggattctct

SEQ ID NO: 265357 - DNA, 135 bp, Homo sapiens
  chr12:122206327-122206462
  hypo
cccagaactgttgcatgggccgtcaagggaagagtgatggtttagatccagtctcgttcttacgatgtgcgtatgcgagaccctgcctggaaaaaaaagagaaagcacgtgggcgtgtgtgtggacccatttccc

SEQ ID NO: 265358 - DNA, 581 bp, Homo sapiens
  chr12:122208736-122209317
  hypo
aggtggggcctcagcgagacacatgcctgcgttgctctcccctcctgagcactttccgttctctccctctcccgagaattaaaggctggtgggtgtctcaccactacgtctccacattcctgtccggagtgatgctgacctggtgagtagcccctcgctgggcccctccagcctcccagggagtagagcctggggcccgggaatggggagggggctgatccagacagcggtggggggtgtgctccagggccaacttgggaaagaaagtatgagcctgcagctgcgccgggctgcgcgggccccacccagcccgtgaggggttctccagggaatggtttcgggtgtccctggccagggcagaggtagcggggctgcaaggctggagggagcgagtgaggctgggcactgaaggagactgcggaggacagaggggtcacagggagttagcgcttctgcacggccatgtggacccctgtgcttctagaaaggaagatgggatgacctcgcccagccccagggatagaagggcggaagtctggacctcagtttgactttatacaccttttcgcctcttctggttg

SEQ ID NO: 265359 - DNA, 332 bp, Homo sapiens
  chr12:122212934-122213266
  hypo
tggtgggtgagcagcgcctgccttcctctccagttctggcagctctacaatgccgtcacgctgtttgagctctccagccacgaggaatgcagagaatggcaggtatggggggtgggggcatgctcgggggaggttcccgggagggctggggtggcagggatggggtgtatgtgtggcatgctggggtgcggattcctggggagggctgggatggcagatgtgggggtggggtgtgtgcgtgtgtgtggtgtgctgtggggaggttcctggggcgggctgggctggcaggtgtggggtgttgtggggggcctgcttggcgggaggcttctgga

SEQ ID NO: 265360 - DNA, 95 bp, Homo sapiens; identical to SEQ ID NO: 215163
  chr12:122213469-122213564
  hypo

SEQ ID NO: 265361 - DNA, 210 bp, Homo sapiens
  chr12:122213594-122213804
  hypo
ccagaagaacagaggcaagacaaagcagccgtgagcctcgggctcctgtgccctcggcccggacttcagactgcagggggctcccgggctccttcccagcagccctctcaggcccgtggcatcgctgggagagggcccaggccctggtcccccagtggaccccagtggtctagaggaatgtgagccccgcctgtccgcacagtgtccgcc

SEQ ID NO: 265362 - DNA, 169 bp, Homo sapiens; identical to SEQ ID NO: 215166
  chr12:122218793-122218962
  hypo

SEQ ID NO: 265363 - DNA, 102 bp, Homo sapiens
  chr12:122246168-122246270
  hypo
gaccctcccagtgggcgagctggacgctgtctctccaatcgtgaatgagaccctgcaggtgggtttatggccgtcagtctgccccatcgccagctctttgat

SEQ ID NO: 265364 - DNA, 204 bp, Homo sapiens; identical to SEQ ID NO: 215169
  chr12:122252457-122252661
  hypo

SEQ ID NO: 265365 - DNA, 79 bp, Homo sapiens
  chr12:122255282-122255361
  hypo
gcgagagcgagaccgggatatggcagacaccccctgtgagctcgccaagcgggaccccaagggcgtgggtgtgcggcgg

SEQ ID NO: 265366 - DNA, 165 bp, Homo sapiens; identical to SEQ ID NO: 215170
  chr12:122261814-122261979
  hypo

SEQ ID NO: 265367 - DNA, 121 bp, Homo sapiens
  chr12:122265477-122265598
  hypo
gcgttcggagcagcgccgcctgctgtcctccttcactggcagctgtgacagtgacctgctcaagttcaaccagctcaaggtgaggccgggcttcacccagatcgccggggtggcggcagga

SEQ ID NO: 265368 - DNA, 110 bp, Homo sapiens
  chr12:122268640-122268750
  hypo
cctggaagccacccggacctggacgcagggccaggtgctgtgggaaggatggaggcccccacggccttgacctcagaacactacgccctgaaagcgcccctcactgcccg

SEQ ID NO: 265369 - DNA, 211 bp, Homo sapiens; identical to SEQ ID NO: 215171
  chr12:122276669-122276880
  hypo

SEQ ID NO: 265370 - DNA, 41 bp, Homo sapiens; identical to SEQ ID NO: 215172
  chr12:122282339-122282380
  hypo

SEQ ID NO: 265371 - DNA, 154 bp, Homo sapiens
  chr12:122285028-122285182
  hypo
ccaccacaatggatcgcagagagctatattccgtgtgcacctgcgtgtcatccacggaccagaagcggtggaactgcaggtttttcaggtacctgtagggtgggcggtggaacacatatgctctgagcgcctccagggacggcctccatcaccc

SEQ ID NO: 265372 - DNA, 78 bp, Homo sapiens
  chr12:122353722-122353800
  hypo
aacgaggctgaacacgaaatgagcttattttcttttcagaagcccctgaatgtgacagtgatccgcaggggggaaaaa

SEQ ID NO: 265373 - DNA, 117 bp, Homo sapiens
  chr12:122396582-122396699
  hypo
tgggcctatctgtgcgtctctgcgcgctcaccccagcaggctggatgaggcgccttctctctggggctcccgcggtgtcctgggcctatctgtgcgtctctgcgcgctcaccccagg

SEQ ID NO: 265374 - DNA, 34 bp, Homo sapiens; identical to SEQ ID NO: 215173
  chr12:122425316-122425350
  hypo

SEQ ID NO: 265375 - DNA, 58 bp, Homo sapiens
  chr12:122438023-122438081
  hypo
gtaatgggagggacccggagctagaaagcaaaagaatgtgattcgtgttgcaactacc

SEQ ID NO: 265376 - DNA, 379 bp, Homo sapiens
  chr12:122439464-122439843
  hypo
gagggatggaaatccgagcctgcaacctgctccgtcaaaggtaccccagctggctttgtctgggcatgtagctgtggctcactgatttgttgtagacttcagtacatttatttctcctgatcggtgcaagccactctccctaagactgcacataacaaagcatgtctgttgggaatcccacatgaataagttatgaaaagaacagtgagtggtggcttttgttcccgcgctctgtccgtccttttgtttcttctgggcttattttccctttgttccactgacctgtcatcttgccggcttgggtgggtgaatattggccacccgtagaggatccagtttgacagctgtttcaggagaataggtatgtaaagagagactt

SEQ ID NO: 265377 - DNA, 160 bp, Homo sapiens; identical to SEQ ID NO: 215174
  chr12:122444435-122444595
  hypo

SEQ ID NO: 265378 - DNA, 85 bp, Homo sapiens; identical to SEQ ID NO: 215175
  chr12:122455990-122456075
  hypo

SEQ ID NO: 265379 - DNA, 39 bp, Homo sapiens
  chr12:122458548-122458587
  hypo
attacaggcatgagccaccgcgcccggccagtatttgtt

SEQ ID NO: 265380 - DNA, 76 bp, Homo sapiens; identical to SEQ ID NO: 215177
  chr12:122463063-122463139
  hypo

SEQ ID NO: 265381 - DNA, 384 bp, Homo sapiens
  chr12:122471978-122472362
  hypo
agggagacttcgctcgcaaacatgcatgtaaatacacgcatgcacatacagagcatgcacacacacacacatcctttgcttaccactggtggtgaggctcacgtatcctgcatctttcatatatatatatatatatatatatatatatatatatatatatatatatatatatcttggcgatattgacatatgttaagtgttagtattctgcagatcaccccatgttagtctgtgaagaaccaccttattccctgtaattgttgcatccgatttcattgaatgaatgtaccacgattgatttaacgagtctcctacagttcagccaaggttgtttctaacatgattcctttcgtaaaaaaaaaaaaaaaaaaaaaattgaatggc

SEQ ID NO: 265382 - DNA, 84 bp, Homo sapiens
  chr12:122472662-122472746
  hypo
aaaaaaggaatggcacgaaaagcatccccatcctccctcctttctcccggggtcctccctcctttctcccggggtcttccttcc

SEQ ID NO: 265383 - DNA, 360 bp, Homo sapiens
  chr12:122473251-122473611
  hypo
aaaaaaggcaaggacgagaagtgtggctcagaggtgaccactccggagaacagttcctccccagggatgatggacatgcatggtgagtgcccatggcctgccagcctctcctgcccagcccggggccttggccaagcactcggtcatgtttttgtttctccagcaggtttgttcacattccaggcaaggggtaggagggctgggcagggcccggcggcctctgtgccaaggagaagagtcagcggaggagaggatgtttcttttcccagcgtaccaagccaagagacataaactaagccagagacatagaaattagaccctctcctcacccagggacaagaaccccgcaggagatgtttc

SEQ ID NO: 265384 - DNA, 120 bp, Homo sapiens
  chr12:122474042-122474162
  hypo
ggcctccaaactggatttctgatttcatgttaatcccaccaggaccttgggaactgcccttccacgtctacacctaacttcctttgctgtttaatttcaaatgttgtaacttagccgggt

SEQ ID NO: 265385 - DNA, 143 bp, Homo sapiens
  chr12:122474514-122474657
  hypo
aacacagaacgttccgagctagtccccagtgtcccccgcaggtcctcacggttttctccatccacccaaggaaaatgccctcagagattcaaacctaaagctccttttttttttttaaggcagagtctcgctcctgtcaccca

SEQ ID NO: 265386 - DNA, 83 bp, Homo sapiens
  chr12:122474897-122474980
  hypo
accgcacccgtccctaaagcttcataaaaattaagttggttttccgtgtttggaaatcaggaaatctccgtcctgccatccct

SEQ ID NO: 265387 - DNA, 213 bp, Homo sapiens; identical to SEQ ID NO: 215178
  chr12:122479007-122479220
  hypo

SEQ ID NO: 265388 - DNA, 449 bp, Homo sapiens; identical to SEQ ID NO: 215179
  chr12:122480940-122481389
  hypo

SEQ ID NO: 265389 - DNA, 389 bp, Homo sapiens; identical to SEQ ID NO: 215180
  chr12:122481629-122482018
  hypo

SEQ ID NO: 265390 - DNA, 145 bp, Homo sapiens; identical to SEQ ID NO: 215181
  chr12:122483263-122483408
  hypo

SEQ ID NO: 265391 - DNA, 318 bp, Homo sapiens
  chr12:122491189-122491507
  hypo
ccgcgcccggccagggctcctagtctgagaagtaagtgtcaaccctgctcagactccctgggaaggagggtcttgctgtcccgttcccccgccctctgtgtcccggcctgtcccaggccctgcactgtctccttcttcttcccatcttgcctgcttgcttttaaacttaagcatgggttattttcccctttgttattactctgcctcagaaaccccagcagggaagtcttggtcgcacaggcattctctaggattcgtttcgtgtgtgctttttaacatcagggtaccatggtgtccgggcctcgggtaggatttttg

SEQ ID NO: 265392 - DNA, 195 bp, Homo sapiens
  chr12:122493939-122494134
  hypo
tgagacagactagggcgcagccatctagaagagcatggttgtgccttccaggttctgataaacattcttgcagcgtgcagtgagaaaagcaagctgcagatccgcaggcgtagcatgagcccatctggttaaaaacagtagaaaccaaagcctggtgatttatattaagaccaaagttgtcggctgggatctctg

SEQ ID NO: 265393 - DNA, 93 bp, Homo sapiens
  chr12:122511273-122511366
  hypo
ctctttttttaatcataactttaaaaacccagttttaagttttattttttgtgctacactgtttcttgtgttccatatcgttctcgtacttga

SEQ ID NO: 265394 - DNA, 76 bp, Homo sapiens
  chr12:122591533-122591609
  hypo
caggactccaactgggcccacgcctctcctctgagagcactggcaggggttcaacgtcaccagccctcctccttgt

SEQ ID NO: 265395 - DNA, 178 bp, Homo sapiens
  chr12:122602777-122602955
  hypo
attccaaatggtgcacggtttaggatttatagattgtttatttctgcaactttccatgtaatattttcagacagcggttgatcatgggtaaagcacaataccgcagaaaagggaggaatgccgtacattccagtgttatatttcaacaatacaaaacggtgttcagtgaacactcctt

SEQ ID NO: 265396 - DNA, 492 bp, Homo sapiens
  chr12:122614571-122615063
  hypo
gacatgctcatgtcggaattcagcgacaccctcttctccacactttcttcacaccagccggtggcctggcccaatccccgggaaataggtaacccaaaccagggccttgggctttgaacagccagccgcttccttctctgccaggccccctctgggccagggttccttcagggccatctctgagctgctgcacgtcacggttgggggcaggcagtaaggaagggaaggatggctggcctcatttgacatccaggccgcacgtaccgagtgggtggggtctgcagagtgggcccactgggcagctgccattcccgtagtgccatggtgggaggacagcagcagggtctagtctgagtcattggcacatttcagataccgttctcttcacggggtacgtgtgccgtgcctaagccgaggcggccgggccgtgactcatgctaaagaaaatcagaagcactcccgggtgtgaccgctcaccttggtggcattcag

SEQ ID NO: 265397 - DNA, 532 bp, Homo sapiens
  chr12:122622385-122622917
  hypo
ctgctcaggctgcccgcatcagttgcaggaggggtgtggccaccaccagagctgtgctgtggggaggaggcagggctgggtggggaaggcggagcttgcagcacctgggatgcaccggttcagccctgccgttcccagccccagctgtgcaccattctgcagagcgggttttctgtggttcccagtcttgtccctccggctcctcattggagccttcagcttctcgtcgtgccctcctcccacgtagctctctagccctggcccttgggcacccaggatcagcgtagggggtgaggaagggtggacagtgtgcctgcaatgtgcctgtcttagtgaccagcgggttctccagcagaaccggcagatgaagcacatctcagctgagcagaaaaggcgcttcaacatcaagatgtgcttcgacatgctcaacagcctcatctccaacaattccaagctggtgagttgccaagagcgtgggctgtggcagggcaggggagctggcaggacgtgctccctgcgtggtcattgctgg

SEQ ID NO: 265398 - DNA, 171 bp, Homo sapiens
  chr12:122623390-122623561
  hypo
gagtccccgttacccggcgccagtttgatcacatgaaagacatgtttgacgaatacgtgaaaacccggaccttgcagaattggaagttctggattgtatctttgggttttctttttgctcttcccggccctcagccaatgcactgaagccacagaccgtggcactgtagtt

SEQ ID NO: 265399 - DNA, 284 bp, Homo sapiens
  chr12:122623820-122624104
  hypo
gccagctcggtcctcgaagccacagggagggtgagtgccacccctgctgtgacaggcggaaaccaggactccctccactgagtggtagagcccaatttgaagcctaatggagcatgtccacctctaggggctctcgtgccaaggccaccttgcactcagccttccaggtggcagcacggctctcacggggagtggttcccgcctggtcactccccaccctgccaccgctctgcctctgagtaaacggtcggcacatgtgttgggttgaccgtggcattggggca

SEQ ID NO: 265400 - DNA, 34 bp, Homo sapiens
  chr12:122691182-122691216
  hypo
ggtcacgtggagcgacgtgcggctatccgcagca

SEQ ID NO: 265401 - DNA, 449 bp, Homo sapiens
  chr12:122712004-122712453
  hypo
agattttcaagcagcggcactcaacaactaggtgtggtctagagaccaattacaacctccgcgtggtccccgagctctcagggagctgcgcacaggcgttcctagcccaggcggggcgctggcaaccctgcccgccctctgcctgtgtcgccaccacagcccacagggctcagatgtggtttcacagacccagatgggctgagcaggcggcacactagtgggtatttcaagccccttcttgtttttttctgaacattgtaaggggttatggggttatagtgcgaacagtttcgtttctaacaaacacattgagagcagtcccatctcctccgagtctgggcaccagaagaaccactggacagtgttcacttgcgaccgcccaactactaaagcaaaagctgttgtcttaaaaaacatgcaagtgcaagcatgcacgggtgtgagaacca

SEQ ID NO: 265402 - DNA, 176 bp, Homo sapiens
  chr12:122734927-122735103
  hypo
gcctctggtctcaacgtttctgtcaattgatcaatacgtaacccagttttatatgtgtttctgcttaaagatgcctgacttaacataattgttgatcactcacactgaactgacagccagcagctctgtgactcgtgcctgaacgaagcgtctctgacacacgtaatgtctccgcc

SEQ ID NO: 265403 - DNA, 31 bp, Homo sapiens
  chr12:122752535-122752566
  hypo
aatttaacacacatggaggccgggcacggtg

SEQ ID NO: 265404 - DNA, 59 bp, Homo sapiens
  chr12:122877152-122877211
  hypo
ccaccatggcaagccggctcgagaatcactcccactctaatgcccgctaccactcagac

SEQ ID NO: 265405 - DNA, 36 bp, Homo sapiens
  chr12:122878701-122878737
  hypo
gaaaaaagttccattgtttacgtactgcattactta

SEQ ID NO: 265406 - DNA, 69 bp, Homo sapiens
  chr12:122907908-122907977
  hypo
gttagtgtcccatcctccttcccccctgggatttcctttaaaagcttttgaaagggacaggagggaagg

SEQ ID NO: 265407 - DNA, 44 bp, Homo sapiens
  chr12:122908028-122908072
  hypo
tcccatggaccatggcaaccccagaagccttacatctccaggga

SEQ ID NO: 265408 - DNA, 43 bp, Homo sapiens
  chr12:122908102-122908145
  hypo
ttttgtggtggataagggggcaggggcttcctcctccttgcca

SEQ ID NO: 265409 - DNA, 34 bp, Homo sapiens
  chr12:122908260-122908294
  hypo
tgtaaatttgtctcctggcccctcctctccattc

SEQ ID NO: 265410 - DNA, 32 bp, Homo sapiens
  chr12:122950311-122950343
  hypo
aaaaaaaaagcgggggtgaaatacattttatt

SEQ ID NO: 265411 - DNA, 103 bp, Homo sapiens; identical to SEQ ID NO: 215189
  chr12:122952405-122952508
  hypo

SEQ ID NO: 265412 - DNA, 287 bp, Homo sapiens
  chr12:122958416-122958703
  hypo
ggtacctcaggctcatccagcgtctgcttttcagatgtttttccctccgggacagggaggtctagctcatttggacaaggtgatgaggcaacggaattgccagttaaaggtgtgtccacaggaacgtcggagtcgctgtttacgctctcggcctgctcaagagctgcccagatccgcctctgctgttcttcaagttcttctagagtcagtgcgtcctcatccacagctccagatgctgttctggtctggggtgagtcactgggagtcagcggcggggtgccctttgg

SEQ ID NO: 265413 - DNA, 143 bp, Homo sapiens; identical to SEQ ID NO: 215192
  chr12:122970385-122970528
  hypo

SEQ ID NO: 265414 - DNA, 120 bp, Homo sapiens
  chr12:123031662-123031782
  hypo
gagccactgcgcctggtctgaaatgtaaatttttaatcattaagaagacacgtaggctaggcgtggtggctagcctactaaaaatacaaaaaatacaaaaatacaaaaaattagctgggc

SEQ ID NO: 265415 - DNA, 76 bp, Homo sapiens
  chr12:123031902-123031978
  hypo
caagagcaaaactctgtctcaaaaaaaaaggacatgtaaatgaaatgtctctattgcagaacgtgctgagtttatg

SEQ ID NO: 265416 - DNA, 164 bp, Homo sapiens; identical to SEQ ID NO: 215193
  chr12:123044412-123044576
  hypo

SEQ ID NO: 265417 - DNA, 36 bp, Homo sapiens
  chr12:123097245-123097281
  hypo
tgagccactgtgcccggccacctctttggttttcag

SEQ ID NO: 265418 - DNA, 37 bp, Homo sapiens; identical to SEQ ID NO: 215194
  chr12:123120645-123120682
  hypo

SEQ ID NO: 265419 - DNA, 36 bp, Homo sapiens; identical to SEQ ID NO: 215195
  chr12:123120922-123120958
  hypo

SEQ ID NO: 265420 - DNA, 180 bp, Homo sapiens
  chr12:123128962-123129142
  hypo
gggcggcttcttcgcagcccgggctctcctccgactgcccaggccaaactccgcctcattcccccagtcaatggcctgatggcctgtaggcatgccagtgtctgactatgtgctcttccgccagcgtgctaccctcgatgtcctctcgatgtccagccacctgtgtctgcctgctagggt

SEQ ID NO: 265421 - DNA, 931 bp, Homo sapiens
  chr12:123213913-123214844
  hypo
tgatgcaactcctgcgaccgaggttcgaaattggcatctcttccggcctttgtgtttttgagtgtcctggctgcttgggtttcagactgcagattttgagcttgttgtagaatttgggaaaggaggggcttgaaaaataatacaccaggggatccagcatgctgttcatgtaggtgaagctgagggttatgtgcagggccccatggacagagggatcgcaggcactcgagggcaccgtccagaggaaatagagtctagcagacacgctgggcaggtagcatgtgatgaacacaattgccaccaccatgatgaaccgggtcgccttcttcatccgagcctgtctggccagctgctgcctccgcctcaggctccaaacaatcttgaaggagcaaaataagatgatgccgaggggcataaagaactccagctggaacatgatgtcatgccagccattggccgactccatgatgaagctctcacaggagacggccgtctcttgcacgcagagatggttctccagcaaaagatacactgttcccaggatgaccagggcccacagggtgcagacgatgccagccgccacccgggtggagatagtgttcaccgcgtggtgggggtggaccactttgaaatacctgtccgcagccaccaccgtaaggaacacgatgctcccggccctgttcatggccaacgtgaagagccccactcggcagggaatgtccccaaaagcccagtgtctacgtctgaggtaatagtctgtccgaaaaggcaggcagatcataaggaggaaatcagccacggccaaattgaaaaggtaaacagtgctgggcttccaggtcttcatgtggaagcagaaaccacacagggcgaccccattgcctagtgcgcccagcacaaaggccacaatgagcagcggcggcatcacctggga

SEQ ID NO: 265422 - DNA, 37 bp, Homo sapiens
  chr12:123233816-123233853
  hypo
ttcagccaccgcgcccgccctattactattattatta

SEQ ID NO: 265423 - DNA, 205 bp, Homo sapiens
  chr12:123324497-123324702
  hypo
ttagaaaagggcaacatttacgtgtataggagtgatttgcccgcagcatggcatgggcgttgagctcgttgttcctgggcatgcgcactgctgtctcgccccgtgacatcctctgctcggttccaccccatcagcccacatggtgatgccctcgtggtgatgcccggcaggccgctgacttcccgacccctgggctgcatattgc

SEQ ID NO: 265424 - DNA, 324 bp, Homo sapiens
  chr12:123325625-123325949
  hypo
cggctaacctgagacgccttggctgctctgttggcaatgcccttacccgccccctccccgcccaacttggtaatctgcgatgctaacttgaatatcacctcctctgtgcagccacccgctgccgtcctcctgcccaagcctctctgtgctgcccagtcctcatgacattatttgcgctgcttccacatctgccctgacacgctgtggctggcccagcagagcgggaggaagcagacagacatggggtgggcgcatgtgtagaccaggctcgcctgagaagtgggagtgtgtcatctccttgccgagttccctgagcaactgctc

SEQ ID NO: 265425 - DNA, 521 bp, Homo sapiens
  chr12:123333079-123333600
  hypo
gctgcccagcagctccattctcagctggaagttctgccacgtcctccacaaggtccttcgagacgggcaccccaatgtgagtagcagctgctgcctctgctccccggagctggggcactgtcccgcggacatgcgggctctggccctgttcctgtccccgtagctccgggctgttcctcccgcctcgggtggggagtgcgtgtctcagggccctgccacacggtcctggacactcccccactcccgtattccctgcgctgcaggtgctgcatgactgccagcggtaccgcagcaacatccgggagattggagacctgtgggtaggtccagccattctaggtcctgcctggcattcggggctttcctgagcgtgtggggctgagcgaagggtggctccctgtgggcagttccctgcgggtggctgggttttcccaggggcgacagtgggaggggcagcacggggagatgctgcctgcctttgagggcctggcccagggcgctccacacgcataaccagtggg

SEQ ID NO: 265426 - DNA, 336 bp, Homo sapiens
  chr12:123340660-123340996
  hypo
tgcccagctggagggcgagcggagccagggcctgcgtgaggaggctgagagtacgtggggccttggccacaggggtccaagggtgtgtccccagcccctgccaccccacacggggcatcactgcccctcctctcgcccccagggaaggccagtgccacggaggcgcgctacaacaagctgaaggaaaagcacagtgagctcgtccatgtgcacgcggagctgctcagaaaggtaggtgcagcccatcctccatcccagccggtggcagggcctctcggggatggcagcagagcatgagcccttcccctgcccatgcagaacgcggacacagccaag

SEQ ID NO: 265427 - DNA, 77 bp, Homo sapiens
  chr12:123359583-123359660
  hypo
cagatgttttcatataaatacgataactttttttttaaattgagacagagtctcgctctgtcaccgagactggaatg

SEQ ID NO: 265428 - DNA, 87 bp, Homo sapiens; identical to SEQ ID NO: 215200
  chr12:123409957-123410044
  hypo

SEQ ID NO: 265429 - DNA, 325 bp, Homo sapiens
  chr12:123416625-123416950
  hypo
ctgggagagctcctggggcccgtctcttctcagcatccatctgctgggcgatgggggctctggccacctggagccgctcctgcccccgcattgcccaccaccctgtgactcaccagatactcgctctcggcatccaaagcgctggtggcttcatccaggatgaggactggggggttccgcaccagagcccgggccatggccacccgctgcttctggccacctgacagctgggcgcccttctcccctgtctctgtatggtggaggcacagagacaatttagcaatgggtgaggccgggcagcaccggggaagagtgagaggccctg

SEQ ID NO: 265430 - DNA, 105 bp, Homo sapiens
  chr12:123428943-123429048
  hypo
acaatctcccaggacaaactcgtagatgatgaaggcgatgaggttgccgctggtcatctggcctgagatgacaaggtggcccccgtagtagaggatgctgacctg

SEQ ID NO: 265431 - DNA, 296 bp, Homo sapiens
  chr12:123434319-123434615
  hypo
actggaaggaccaacctgtgcggttctcatcaaagaagcttgtctcctgggacaccagtgagcggaagagacagtttcgaaggcgaatgttcagtctggcaaatatgagggtaaaaatgccgccccgaatacctgcggcaaatgagctaattgcagataagagatattatagcacgatgtccttccagaccagtgaccacacccggctgccccctcccgctgccggcaggcctgggagccccaccgcagccccactccagggctggcatccctgcggggtccccctcattcccagt

SEQ ID NO: 265432 - DNA, 244 bp, Homo sapiens
  chr12:123434937-123435181
  hypo
cttccctccctggtgcaggtcggggtgtgcggggcagggcgtgggggttgagccagctacctgccaatggccagcaggcacacgatgacgacagccgtgctgaactgatccatgcttttctggatgacgatgccatcaatggcgcggcccgtgtagtagggcaggaaggtctctcctgggggaggcagggcagcctcagggacgtctgcagccaggggaacccgcacccttcctcctgaggctc

SEQ ID NO: 265433 - DNA, 57 bp, Homo sapiens
  chr12:123446773-123446830
  hypo
ttgtgagtggggcttgtccacggtagggttaggaccgggctggggtgtgtccctggg

SEQ ID NO: 265434 - DNA, 167 bp, Homo sapiens
  chr12:123470902-123471069
  hypo
gggtcagtgaggacggctgtcacaggctggggctccccgagctgcccgcctgcacccgcccccacaatgcgcccactcacctggcactgctgctgcagcttcttggtgggccggcccacgatgtagatctgcatgggggacaggctaatggcgctgtacaccgccac

SEQ ID NO: 265435 - DNA, 191 bp, Homo sapiens
  chr12:123481877-123482068
  hypo
accagggcaaaggcgtcagagcagacgggcgggcagggcaccaggcggatggcaaggcggcccagggcgctggggtagtgcacgcgcatgacggtgtcgaacacgttggcgatggtgttagcatcgcccttcttggagctggggtccccggcgcctgtgtccaggatggtgcctccgtgcagcaccagtag

SEQ ID NO: 265436 - DNA, 157 bp, Homo sapiens; identical to SEQ ID NO: 215201
  chr12:123542055-123542212
  hypo

SEQ ID NO: 265437 - DNA, 42 bp, Homo sapiens
  chr12:123563306-123563348
  hypo
ggggactcccaggctccccacgctgggtggcatctcccatca

SEQ ID NO: 265438 - DNA, 259 bp, Homo sapiens
  chr12:123579931-123580190
  hypo
aatcatttcttgggcgtgcacccacatgtgtacatctcgattttacaggctctgttaaagcgcaaagatctttcaggtactcaacaaagcaagatgtcgtgatgttgccaccagcctgccccctcctccccccgcctccgacctgtcacccagatgaagtgagacgaagtgtcttccaatacacacatcggagtgtgtcacttctctgagtaaaggccctcaacgctccccttgggtttcaaggcgacatctaagctcc

SEQ ID NO: 265439 - DNA, 31 bp, Homo sapiens
  chr12:123584528-123584559
  hypo
aattgcaggtgacacgcgcacagcctactcc

SEQ ID NO: 265440 - DNA, 103 bp, Homo sapiens
  chr12:123618508-123618611
  hypo
tgagccaccgcatccggccccagcctcattactctgaaaaacatagagactgagggataggcaaagatttcaacaatataaggaatatctccaaccaggagct

SEQ ID NO: 265441 - DNA, 163 bp, Homo sapiens
  chr12:123618851-123619014
  hypo
tgcccaccttggcctcccaaagtgctggggtctgccaagcccggtgaccacccctgagccatatgaccaggtaagagcacacccaggacattggtgatgtgatggaaaccaccactccacacctcctgcaagagtctgcggcggtgtcacccacagggtcctg

SEQ ID NO: 265442 - DNA, 381 bp, Homo sapiens
  chr12:123636568-123636949
  hypo
gccaggaaggccatcgttcccgactcgcctccaggtgcccctgaccatgaccacgcagaggaggaccaaggcgtaccaccatcacctagaacgcttcagctccttccctccaccaagaggtgccctaggatccatccagaaagatctgcggagcccacagagtcccaacgggaactgtgctcctggatggacgccccttaacccataactcaaggacttctctatgcctgggacttaaaatcaccaacaacccgctcctgcagccagctagcagaaataaacacacaaaggccacacgccagttcacagccacaagtatttattgagtgcctgtagtgcaagaaagagagatggtccctgctcccgcggagcttacagctt

SEQ ID NO: 265443 - DNA, 41 bp, Homo sapiens
  chr12:123736871-123736912
  hypo
ggagcctgaggtgacagaatcgcctgaccctggggaagtca

SEQ ID NO: 265444 - DNA, 180 bp, Homo sapiens
  chr12:123737476-123737656
  hypo
ataaaatagactctcatactgtcatctttacattttgatttcagagattctcaaacatttaaatactggcacttgacccagatcctaatttttgcttgatgcactatttacctgtatcaaattacagtccgttcctttgaatttttttttttttttttttttttttttttttttttttga

SEQ ID NO: 265445 - DNA, 152 bp, Homo sapiens
  chr12:123757399-123757551
  hypo
ccaaaggcgcaggcgacgacaccccctccccagcttaacccccatccttgagatcagctgtaggccagcactagcgaagaatgctcagtgaaaccttattccatgaataaattaatgccacccatgtggctggtcccgggcgcccagtcctt

SEQ ID NO: 265446 - DNA, 537 bp, Homo sapiens
  chr12:123773444-123773981
  hypo
ctcccaccgccttccgcagcagtccaagacagcagcccactccgggcccacacactgcacctgggctgggcaccgccccaccctggctggctccctgactcagtgcctgtgccatctgcaaaggcacggtgacagcacttacattttataaagacactatgaagatgttcatgagatctgcgaagacagcgcgcaaagaaagcacaacccgtgactcgtatttaatttatttagaatcttacaaaaacaaaaaacaaaacaaaaaccaccacaacagaaaaaaaaactaaatacagaatttgttacgcttcacggttgatcgtttttacttgcaagagtaaataaaccttgctaaaatgcagccagtacatttttattgcatgagaccaaatttttcagttacatatcaaaaatgattgggataatcaattccggacgcttggtaccgtgctcccacgaaaggctggatgcagcaatgcagtatcattggaacagggcgcacccttcacacactgatggacacgctacaacaggagc

SEQ ID NO: 265447 - DNA, 104 bp, Homo sapiens
  chr12:123881627-123881731
  hypo
tctgctctttcccacgctgctgccatactaggagcctgcagaccagtgagcagcaccggctggaaggccagctggcctatgcgggcctccgctgccatgtttgc

SEQ ID NO: 265448 - DNA, 42 bp, Homo sapiens
  chr12:123881965-123882007
  hypo
tttcagccctcatgcggactccttcagcgttcttgatgttaa

SEQ ID NO: 265449 - DNA, 154 bp, Homo sapiens
  chr12:123882805-123882959
  hypo
gtggctgagcaagactccgtctcaaaaaaaaaaaaagacagcactgcagatggtgaggtggtgccagaccacagaatcccagacacctcccagccagggttggagctgcggtgtgcccacacacagggcctctgctgagcgtccaccaagggct

SEQ ID NO: 265450 - DNA, 43 bp, Homo sapiens
  chr12:123894663-123894706
  hypo
gattataggcatgagccaccacgcccagcttaaaagttaatgc

SEQ ID NO: 265451 - DNA, 364 bp, Homo sapiens
  chr12:123959873-123960237
  hypo
tgtcactcggggaccgcagtgggcgttgattactgacccgtcacttaaaggaccttctttactggatcatgggcaaggtggttttaaaacagaaacagaagagacaaaaagaattatcggtgacagagccgagaattctgaggcttcgctcgagtagaccgagcgcagccagtggcacagctgaaatcacactcaacatccacgtcaaatggagcacacaggtggcggccatgcagcttaagtggccagggggagacaggtcagccccagcagtagccgaagcagacattccaagggggcagctcaaacaaaacccaaaacacacacagtgcctacaagggaaacaagtcgtcggacaggctgc

SEQ ID NO: 265452 - DNA, 128 bp, Homo sapiens
  chr12:123986831-123986959
  hypo
gtctgaggctggaccggccactgccgggcagacgtcgtagcagaagtctttttgtgtaaggttacaaaggcctttgtgcaaagctgtcgtttttccagagtcttttttgttatcgggcatgcaagcgt

SEQ ID NO: 265453 - DNA, 300 bp, Homo sapiens
  chr12:123997853-123998153
  hypo
ttgaacacttgtcccgacatgccctgtcctggggcgccaggacccactcactcatttactccttgctggggctgccttggctccccgagaggtgggcgggaggcgagcatgaggagagaggggcggctgggtctatgtggaagcccagcagcctcatcaccttcctgggcggcagccgtaggagctatgagaccgaggcagaagcctggcgcctgactcctatcccagcttcggcctcttagttgctttcccttcaggcctcggtgctctcgagaggcctgtgcacgcttcatcgatgtg

SEQ ID NO: 265454 - DNA, 86 bp, Homo sapiens
  chr12:124004350-124004436
  hypo
tgagctaaccctttgggagccggacccacgctagatgccatttaagtgtgtctcagattgctcacgtgtgggctgattcatgacaa

SEQ ID NO: 265455 - DNA, 43 bp, Homo sapiens
  chr12:124085762-124085805
  hypo
aaagtttgctgagtgaaggccgggcgcggtggctcacgcctgt

SEQ ID NO: 265456 - DNA, 125 bp, Homo sapiens; identical to SEQ ID NO: 215207
  chr12:124111672-124111797
  hypo

SEQ ID NO: 265457 - DNA, 38 bp, Homo sapiens
  chr12:124128645-124128683
  hypo
gggacgtgagccaccacgcccagccaccagtgttctgt

SEQ ID NO: 265458 - DNA, 276 bp, Homo sapiens; identical to SEQ ID NO: 215208
  chr12:124141811-124142087
  hypo

SEQ ID NO: 265459 - DNA, 142 bp, Homo sapiens
  chr12:124152494-124152636
  hypo
accgttagcagtgacgagtctgtacaggtctgcagcaactcgattcttgcctcctcagaggaaagaatttggccaagcagcataaggcagagtgagagaccaaggcaaagtttaaagcaggggtaaacgtttattaaaaagt

SEQ ID NO: 265460 - DNA, 186 bp, Homo sapiens
  chr12:124171333-124171519
  hypo
ggagatcctgaccacggtcacagctcctgcctttatgtttgtcttccaggaatgctcatcaaatttaacaacgctgttcagacggtcctgcttcaccggcgtgtttggaggagacgtcaatcctccttttgatcagctctgctctgctgggacgacgacacgtggtgtccccgattggtttccctt

SEQ ID NO: 265461 - DNA, 48 bp, Homo sapiens
  chr12:124175161-124175209
  hypo
aactataccaagaacgagatggtattatcaatgcgaagataaagaatg

SEQ ID NO: 265462 - DNA, 167 bp, Homo sapiens; identical to SEQ ID NO: 215209
  chr12:124272114-124272281
  hypo

SEQ ID NO: 265463 - DNA, 212 bp, Homo sapiens; identical to SEQ ID NO: 215210
  chr12:124335328-124335540
  hypo

SEQ ID NO: 265464 - DNA, 42 bp, Homo sapiens; identical to SEQ ID NO: 215211
  chr12:124338357-124338399
  hypo

SEQ ID NO: 265465 - DNA, 41 bp, Homo sapiens; identical to SEQ ID NO: 215212
  chr12:124338459-124338500
  hypo

SEQ ID NO: 265466 - DNA, 96 bp, Homo sapiens
  chr12:124393561-124393657
  hypo
tttaatgctgcccccgcaccattccaggcgcctggtctggaacctgagagggggacccggccctgcccttagggacgctcccgcccaggagtgcgg

SEQ ID NO: 265467 - DNA, 125 bp, Homo sapiens
  chr12:124398892-124399017
  hypo
atgagctgatgcaccggcgcgtgaagctgctgggggactgcctgctctgcgcggctttcctcagctacgagggagccttcacctgggagttccgtgacgagatggtcaatcggatttggcaaaat

SEQ ID NO: 265468 - DNA, 241 bp, Homo sapiens
  chr12:124404099-124404340
  hypo
ctctggctccggaacgtttccaccagccccgaaatgaaatcccatacccattagcagtcaccccctggccccccactcctagtccctggcagtcaccgctctgccttccatctgtaaggatttacttgctctgaacacttcatgtcaatggcatcatacggtgtgtgacttcatgactggtatctttcactccactccgtgacctcacggttcatccgtgttgctgcgtgtgtcagcgctt

SEQ ID NO: 265469 - DNA, 102 bp, Homo sapiens
  chr12:124423712-124423814
  hypo
aactccagacctgcacgcccagtttccctgtaccaactccaccacccagggcctgcctaggcactggacgccactggacgtctttcccgggcttctgtctgt

SEQ ID NO: 265470 - DNA, 159 bp, Homo sapiens
  chr12:124432973-124433132
  hypo
taactgcagaaatacaaaagcgtccttaaagcgtcccattataatgggcagacagcctggagaagaaacggcaggcgagcagggagagtgtgaccatgtaacgcgcagagctccacagtgagcgctggtgagccactcggagccctcacagtgggggac

SEQ ID NO: 265471 - DNA, 39 bp, Homo sapiens
  chr12:124444122-124444161
  hypo
attacaggtgtgagccaccgcatgcggccttaggtgcca

SEQ ID NO: 265472 - DNA, 36 bp, Homo sapiens; identical to SEQ ID NO: 215215
  chr12:124514725-124514761
  hypo

SEQ ID NO: 265473 - DNA, 114 bp, Homo sapiens
  chr12:124562301-124562415
  hypo
gagtgcctgtgtcccctcaccgctgtcacactgtagcacgcgttccgcgccacttgtctcctcagtcccctcctccctcgcagaatttctctcggaaaccttactctctaatca

SEQ ID NO: 265474 - DNA, 50 bp, Homo sapiens
  chr12:124582793-124582843
  hypo
ggttaagtgcccagcgttacatgataggaagcagccgtggctgcactgga

SEQ ID NO: 265475 - DNA, 172 bp, Homo sapiens
  chr12:124651761-124651933
  hypo
gagacagattccgccgcctcccccactcgggtctgtttttcagccgtggctccggcagtgggtctgattttatcccgcaaagtgatgtcctgtgaccgttcgatagttccctgagtcactcaataagccagttgggccccatctccctgccctcttgcgagtgtcgggcaga

SEQ ID NO: 265476 - DNA, 145 bp, Homo sapiens
  chr12:124668398-124668543
  hypo
tgggtagcgaggctcgccaagcaagcttgggcctgtctgctgcttgaactcatgctcacggccgtggcttagtttgcatcagatagcccagaaagtggctgagtgacctgtagaaagtgtttcttgggctgggcgcgttggctca

SEQ ID NO: 265477 - DNA, 323 bp, Homo sapiens
  chr12:124669010-124669333
  hypo
cggtcctcactattcgtggttgctgtgtttgcgaatttgcctgctcaccgaaatgcatctataactccaaatccagtactcacgacaccttggccgtcacttgatgcgtgccgagtagcgagcaacgtgtctcccgacacacatgctctcagctgaggttgcacagggcagtgctctgcctcctggcgtcagctcacacacccctgacaagtgcccttttcagtctgtttggtgtcatgctttttgcacttgtgtgcttcttgttggttttgctgtttgcgacaacatccttgtggagcggtgaagggcgggtctggtgtttc

SEQ ID NO: 265478 - DNA, 103 bp, Homo sapiens
  chr12:124693754-124693857
  hypo
gctggaggctgccgcgtcgacagcacccaggatgtgtctcagccaggcccacagctcctggctgcgctgccacacgtgagcagaaagtcgcacggctcatggc

SEQ ID NO: 265479 - DNA, 252 bp, Homo sapiens
  chr12:124716386-124716638
  hypo
tctcctgctttccccgtgggatgaactagcttgagaggcacaagattcctgagcaggcagagggactctgtaggagtctcagagctcctgaggctgcaccctcgccctggagccccatgaaatcttcaattttgggttttatgagcttcacaaaccttccaggggcctctccggctccggatggggtgcgttggaggcctggtgcccacgtgtctcctgggccctccacctgtgccccgcctgtttgcacag

SEQ ID NO: 265480 - DNA, 216 bp, Homo sapiens
  chr12:124788613-124788829
  hypo
gccttcttggccgcgagaggcacttcccttgcccactccccaggctggctggagtccacagggcgccacgaccgtttcgatgttcgaatagccctgcagccagaaagacgaagctgcgagcctcaggatgaactggtggctgccaccatcttcccttggtgtccagccctgcagctccgcgggagtgtcctgggccttggcggggacttcccgagc

SEQ ID NO: 265481 - DNA, 352 bp, Homo sapiens
  chr12:124791415-124791767
  hypo
gttcccgcccagcccgatgtccaccctccactccctctgcccgaggccggtgtgcatgtggtcaccatggttataggcttggccctctgcggcccaggcacgagcaccagtctggaggaatagggtccccaccacctgctgtcccccgtgggagccagctatcccctcttcagccaagaacaaagcactgagcatcaccacgcactagacgctggggtgtaagggatgcagaccgtgcctccccatccgcgggggcatcgtgatctgggtagggccagagagcagggagagggccgcaaacctagaaataaatgcgtaagcaaaacctgctaagtgccgtgtcccagtgacg

SEQ ID NO: 265482 - DNA, 225 bp, Homo sapiens
  chr12:124798801-124799026
  hypo
gtacccaccgtcacggcctacagcgagaccatcgtggcagcacccaactgcacgtggcgcaactaccgcagccagctgaccctggagccacgcccgcgcgccctgcgcttccgcagcaccaccatcatcttccccaagcatgccaggagcactttccggaccaccctgcactgcagcctgggccggcccagccgctggttcaccgccagcgtgcagctgcagctt

SEQ ID NO: 265483 - DNA, 245 bp, Homo sapiens
  chr12:124819439-124819684
  hypo
gtgaagatgccatcggctcgcatcacaggctcctcccatggattagggggcggtgatggtgccggtgctcggggctttgggatctcaccctcacccacgccctggatccccccagcgccatgccctggatcccccagccaccccgccaggacagaagggctgtggggttccccatcccctctccaggcctggtgcccccaggtgcaaaggtgacaagcagcagcagagaacgcgtagttacactg

SEQ ID NO: 265484 - DNA, 375 bp, Homo sapiens
  chr12:124821027-124821402
  hypo
gagtagtcgtcagcgcgtgcaaaccggcgaggacggatgggcttcaaaacaaaataccaaaaccaacaacaaaaaaaacgggggccaaagtaaaaagcagagatctgaaaatatctttggaccacgagacggggtgggtgcgggccggaagtcttaccatcgcgaggggagccgttggccagcgcacctccttctcgcgcccctttatcgtgagcaatttgacgcatgataatcgcgtctatgaaggtggccgctgtcagggtggtcttacccagagaacggagttccagttcctggatggaaaagggtttactttgagtcttttcccggtgcgggtccgaggccgaggcaggtggcgccggcgggtccgggctg

SEQ ID NO: 265485 - DNA, 123 bp, Homo sapiens
  chr12:124827621-124827744
  hypo
tccacgccactcacgccccgaagcaggtgctcatagggcgagatggggtgtgggtggtgctcgggcacggtgctgtgcggggacttggcgatctcacgaggcgtcgacgtcagctttcggtcc

SEQ ID NO: 265486 - DNA, 184 bp, Homo sapiens
  chr12:124829274-124829458
  hypo
ccggggcgccgcgcgcaatggagccccccgagctgctggcggtccctggccggctcttcaggctctcctcgtagcaggcacgttccagtgcccgggcgtcggccatcacatccagcgggtgcacgggtgggaacgtccggccggggctgccgatgagggagcgtacgtcgtgctttttggagcc

SEQ ID NO: 265487 - DNA, 100 bp, Homo sapiens
  chr12:124831187-124831287
  hypo
ctcatggatggagcggcccgcctccttcaccgtggccaccaggccctcatgggccggcttcagcttcagggggcccagggcctgcgtcttgtaggcctcg

SEQ ID NO: 265488 - DNA, 110 bp, Homo sapiens; identical to SEQ ID NO: 215219
  chr12:124831992-124832102
  hypo

SEQ ID NO: 265489 - DNA, 931 bp, Homo sapiens
  chr12:124832318-124833249
  hypo
cgtgactgtacacccgttgggggcaacgagggagcagggaacagggcagtaccttgtgtgatggacccgcggatgtggtgctgctctttgaggtggtgggggctgtgtcgctccggcgggatggcacggcccatgagacctgggtaggagagggtgaggccatcattccgtggctccctgagccgacactgggcagtgacaggggtcagtgtttacagccgccagtggtcatccccacgatgatggtggagtaggacccagcacgggaaggtccctgcgctacctccagatggagcctcagaaagcccagcctcggtttccccatctgtaaaacggggtcagccatccccccaccgcccaccagggggcaccgagagatgaagtctcctccctgctatcaccttcgatgctggctgaggagatggctctgcccacgcggccctccatcatgtcataggtgcgcttgggggcggccgtctcatgggggggtcctgagctgcttctgccgtcctccttggagcactgggtcacagacatgccacctggaaaccacacaaagcactcggtgaggagctgggcacgggcccaggaccacggtgggcaggcaggacaggcagagccggtaggcaggagccagcagtgcttccatgctggccccgtcacaaagcctcacagccgaggcctccagagggagctggcagcctgcaggccctgggggcctgccagcaggacccaggagcttttccagggggttgcacggtgggagatgcagggcacgctgcctgcaccctgtaccctagccctccagggtgctctgtctgcaagcaagggtgtgcctgtgaccacatgagcacgtgagtctgtgtccacacccacgggtgccgacatggggcgtgaacaagtgcacacacatgcacgtgagcaaggacgc

SEQ ID NO: 265490 - DNA, 314 bp, Homo sapiens
  chr12:124843495-124843809
  hypo
caagtggcagatagcggcttcgaacccaggcactggggctgcagaccatggccttaatccagactgctatgccacatggcctgcggcagagaagcaatgatgggtcctagatttcaggcctggggagatcctgtaaactcagcggggccccggggctcaggcctggcttcatggcatcttcctgctggcctctcgccctttgctgaaatctgtcctcagctctgaacctctccctgaggaccaatcctatggagagataaccggccaagaagttgagcagagacacaacttgggaatgacggagccctctgggt

SEQ ID NO: 265491 - DNA, 735 bp, Homo sapiens
  chr12:124850143-124850878
  hypo
agcagacacagactcggtgatgcctgcttaggctgcccatggcgcacagacgggggccagacgaggaaggtcaccctgacttctgcatgcacctccaccgcccccaccgccagcccactctcctccctcccctccctccacctgtccagaccctgcttgatctcccaggaccacctaaagcctctcctttggccactgccatgcctcactccctggacctgggcccagctgtgctctccccgccatcctcaaggtacagacaaggtaccctgacccaggtccaaacacagatggtatcacctgtcccaacattctccacctgcggcttcaactgccgccacccctatgtccctccccacaggtttacctaccaccatccgtttcaaccagctcgcacttgcaagctgaaatttaaaagagaatgctgcagccactttggaaagcagtcggtgagccctcattgccctaaacccagcactgccactcctaggcacacaccaggcaaatgagagcaaatgtctatgcagaaacctgcacgtgcccaccactgcagcaccgcccagcgcacaacagccagaaggcagagacaacccgacatccaccaagagacgaatgaggagacaaagcgtgccctgtccgcacgatggaacacatggccatcaaaaggcatgaggctctgacacgggctatgacgtgggtggaccctgaagacacgatgcgcgtgaaacaagctag

SEQ ID NO: 265492 - DNA, 263 bp, Homo sapiens; identical to SEQ ID NO: 215224
  chr12:124856543-124856806
  hypo

SEQ ID NO: 265493 - DNA, 794 bp, Homo sapiens
  chr12:124869698-124870492
  hypo
catttacacgctggcgaggcgagcctgcaccttctgtgcttgtggaggagggaagggtctcagcctcccgtggcctgcctcaagccctccaggatgctggggctgagacgtccgcccccgcccccccagacctgtccctccccaaccacggcagccctaaagctgtgaggtcaaatggggcaggggagccactcgctcaggacccatttgcctccgggtcctcattccaacgcgctgacagcccgaattcctggctgagtcagtctggtccaccgcgctccttcccccacaccgtgagacagggctgagggcccccagaggtgtctgtctgagaggagtggggtgcagggtgggggtggagggcagcctggcccggcccgtctccaaggcagggacactcatagcagcattgccgcctgcagccatctcggggtactcccgggcttgaacccccagaagctgagttctaacaaggcggcataatagcccctccctggcccatgcctcctggggtgcagagacatctcctgaggcagtctgggctcctctcccagcttcccagaggcgcggtgcagcgtgactgggggctcaccatcttcagcttgtgctgctgcaagatctcatcgaggttctgcctcttcttgtagttgaagtagaagttcttacactgcgacacagtcttggagcccaccatccgggcgatggccgaccagttgcggccgtgttccaggagacctgtctcaggagaggagggcagtgagaagaggccaggcccggcacgcagagggggcctg

SEQ ID NO: 265494 - DNA, 424 bp, Homo sapiens
  chr12:124879851-124880275
  hypo
cctgccagcacctgtctccccgccccacccccgctccctcctgccatcgcctggaacacacagccattagcagccaccctgagcagtaattgtccagattgctgtaattcacggcagacgaacatgctgctgctcacgacattattacaaatgtcactgagcagggcctccgcgtgcacggcccccaggggacgctcactgccgtctccatgggcaggacccaggatgagctcactgtcatcactgaggacccaaccttgagatggtgggacacgggctcctctccgccggtgagtcatccccagccgtcctcccagcctccggatctgcccttccagaaggcaaacagagggcaggcactgtcttcccagttctcaggcaatgggcggtgggggcgggggtggtcaccggtgaggaggtggta

SEQ ID NO: 265495 - DNA, 190 bp, Homo sapiens
  chr12:124881245-124881435
  hypo
aggagctctgagggcgaggggcagggtcccggggtgagggcgggggctgtgggggtcttctcagggctgtggggaccctcagcaccccccacaactacagtggaggacggggccgggcccaggagccccgtgatccaggctgttctcagatacacctgcccttatgtgccaagagcgtttgctataaagg

SEQ ID NO: 265496 - DNA, 213 bp, Homo sapiens
  chr12:124881710-124881923
  hypo
gccaggtgctgccccggcctcagcagtgctgccagtgatgcgccagctccgacagcccctgccccaggccaggcacggccgagggagggaggagattcgctcccactcagcccaccatgggccctcacacagggttatctgattccgcacagccaacctagacgaccctcccactcaacagacgggcaaaccgaggcccagaggcaggtcact

SEQ ID NO: 265497 - DNA, 248 bp, Homo sapiens
  chr12:124886238-124886486
  hypo
ggagagttttactgcgggaggctcagattgatcacctctgccttcccattcatcttcctgaaaggcccttgctggaagcgtctgggagacggggtgaggaagccagatgttctctgaagccaaattcctgagcccattacaggtacctggcgctaagtcgtgccgcccccctttctccagctggctgcactcctgcagcccctggcaggcacaggaggctgtcacggcccccgcggtgaggctgtgcc

SEQ ID NO: 265498 - DNA, 458 bp, Homo sapiens
  chr12:124893321-124893779
  hypo
aaagaaagcgaaggttacaagcactccaagggcattgcttcctgatcatctggctacatggagctacgaagtcatccgtgccgtggaggtgacttccgccaactccatgcacagggtgagaacaggataagacagcctggtgctaggggcatctttccccagttccaagtcagcggcagcacgttgtcacgtggcactgggcacggtgagaggatttatttacaccatggcaaccggcacatgctacaaacgcagcttccccctacagaaagctggttgttaaacatttaccagcactctacggcagaaagatgcgtgtcgacagaacgtgagcaacatttaacacgcacatggaagcctgttccgcctgtacagatgtgtgctgtgccagccgaggctctgttgtaaatcctaattcagatcccgacccgcaactcggcatcaaatccacagtccct

SEQ ID NO: 265499 - DNA, 33 bp, Homo sapiens; identical to SEQ ID NO: 215230
  chr12:124894790-124894823
  hypo

SEQ ID NO: 265500 - DNA, 722 bp, Homo sapiens
  chr12:124895907-124896629
  hypo
ggggaacagtggagagtggacggcagcagtcgggggcggagcctcggcctccctgggcttccttcttggacccaggccggatgactggagcccaggacgggctgttcccgtctcagtgtcccatctctgcagaaagagaggcccccttggccacatgaacccccatcgctgcgggaaggccatattggctaccaggggccgggccctgccacctggcctagccagcctcacatcctcgctccccaacggtctgcagtcaggccccagcattcctgggctctggttttgcaattcactaggataacgcggcccttccatcaatgaatcatggactataaaccactgtgccagcgcttgagctgttccccgcaccgccccacagtccgtgattcacctcagggtggtggtgatggggctcggagcccaagagaggatgctcgggcctcaacccagcctccaggctcaaaagccgctcacggccgatctcaggggccaggttccgggaggtgggggctcggccctcccttgccaaagctcaggcctgtggggtctcatgggggtgggtgtggaggggctagcattccaaaagcctatgcccgggcctgcatccccgtgtcagaacacagagaagcttccagaaagaggatggcaccctccattaaacaagaaggcaatcccaccactctaaacagccatgcacatccctcgcctccagccggcca

SEQ ID NO: 265501 - DNA, 172 bp, Homo sapiens
  chr12:124901267-124901439
  hypo
cagggagtccccgcggcacagatagaccccgcggcacagggagtccccgcagcacagatagacccgtggcacagggagaccccgcagcacagatagaccccgcggcacagggagaccccgtggcccagggagaccccgtggcacagatagacccgccgcacagggagacccg

SEQ ID NO: 265502 - DNA, 293 bp, Homo sapiens; identical to SEQ ID NO: 215232
  chr12:124911265-124911558
  hypo

SEQ ID NO: 265503 - DNA, 71 bp, Homo sapiens
  chr12:124915171-124915242
  hypo
ctcctgcagctcgcgctgcttgcggatctcagggaactgcttctcgtagtactcgcgcaccttgctctcct

SEQ ID NO: 265504 - DNA, 592 bp, Homo sapiens
  chr12:124929576-124930168
  hypo
agttcccatcagccgacccccaaatgaggcagcaggagggaagaaatcaggctgcgaaaagagaaaaacgagcaacggaagaaaccggcttccaggcctgagggggccggtgaaccagggcaacccccgggcaggcagaggcagaatgtgcctgagcgccatctgccgctcatccccaggtcccacgcactttcaccacatcccacgcgggctccatagactcccgggaattcctggagcatcctgcccagggtggggcccatccctcgatggagcccccatctcctgcccctctgcggctgccccggccccgccccggtggtctgagcgctccctcctgcagcaggggacaccagcagcgcccgaagcaggtggcggtgggagggcggcggaggcggctacgggcgactccaacgcgtccgaaatcgtctgtgcggcaggaagtcaagcgtgaaattaactttcactccgcggccccagcatgcagacgcagagaaattaaagtgacggggcaaggtctctggggagggaacgacctcccacctagaagcaatgacagcagcgggggcgaggaggccgtgagcgccaggga

SEQ ID NO: 265505 - DNA, 82 bp, Homo sapiens
  chr12:124948000-124948082
  hypo
tgtgcacacctgcccggcccccacccacgcaggcagctcccaggaggcggggaggcgggaaaagcctcgctcagcgggtgcc

SEQ ID NO: 265506 - DNA, 154 bp, Homo sapiens
  chr12:124959338-124959492
  hypo
cagaacccagcccccgccctgtgccatccttggggccaagccggcagctgctggcagacaaggcccagagcagcgccaggccaccacctccccgcccccgcagcagctgcacccagaggacacagggtgcattattctccggacaactgcagcc

SEQ ID NO: 265507 - DNA, 249 bp, Homo sapiens
  chr12:124959724-124959973
  hypo
acacacggactcctcgagggaaacagagaaaagggctcatatccctcaatcgccccaatgcagtcctccatgctcctcaggccacctcccccagggacacctagaaatcacacctggggccgctcacagctcagcctatcccagtcctctgcacaccccatgaagtcctctgcacaccccatgaagtggatcccacaacagccctccgaggggactgctgctccatctccattacgcagaggcagaaac

SEQ ID NO: 265508 - DNA, 268 bp, Homo sapiens
  chr12:124964413-124964681
  hypo
ccccacgtccagctcgctcagcctggggccgtctacaaaagggggtcacagacccagcctccttgggctgggaagagatcagggaatgacactggctgggcatgacttggcacgtggcaggcagtcggcgctcacttaatggcacccgccatcactgcagcattcttaccactgcgtgaatgcctcctgcgtgccagcctcctgataaaggaggtgcctcaccctaggggtcaaccattcaatccaatccggccgcactgggcagaaa

SEQ ID NO: 265509 - DNA, 230 bp, Homo sapiens
  chr12:124966043-124966273
  hypo
gcagccagggctggaaggagcgaggaaagaggaatgtgcctgggggagggcgctcctgcggagggcacagccggtgcaaaggtccccaggtgggaatgtgcctggcgtgtttgaggaactccagggtggcctgggaggctgtacgtgagcggttgagagggctgctgcagggagatgaggtcagggaggtgacggggctggatcacgccggacctgcagcccatggcaag

SEQ ID NO: 265510 - DNA, 172 bp, Homo sapiens; identical to SEQ ID NO: 215234
  chr12:124967300-124967472
  hypo

SEQ ID NO: 265511 - DNA, 191 bp, Homo sapiens
  chr12:124970972-124971163
  hypo
aactctctcctcaccgttcattcccgggctggaactcagacagcagggagggcctccgccgctggggctggatgatggagccgggcgacaggtgggaggcatagtcgcgggagtggtgctggtactccaggagcccgacgtcctgcaggaggggacagaggagtggtgagcgtgggcgggcacgggcatgg

SEQ ID NO: 265512 - DNA, 165 bp, Homo sapiens; identical to SEQ ID NO: 215235
  chr12:124971726-124971891
  hypo

SEQ ID NO: 265513 - DNA, 724 bp, Homo sapiens; identical to SEQ ID NO: 215236
  chr12:124979279-124980003
  hypo

SEQ ID NO: 265514 - DNA, 134 bp, Homo sapiens; identical to SEQ ID NO: 215237
  chr12:124980537-124980671
  hypo

SEQ ID NO: 265515 - DNA, 163 bp, Homo sapiens
  chr12:124989193-124989356
  hypo
tgacaaacagatgaaacaaacgcagtctgtccatcaatggactacgattcagccacgcaaaggtaagcgctgactcagccacaacgcaggtgagccctgaagacatggcacaaaaggcaaagaagccgctcagaaaggccacgcactgcatgattccattaac

SEQ ID NO: 265516 - DNA, 935 bp, Homo sapiens
  chr12:125000464-125001399
  hypo
cacccaggactcttctccaccgggtaggaaaatcgagtccctgaggactttggcaaaggtcaggggcagccacgacacagctctgtggccaacccaagtggacaccaaggccctgggggtgacaaggggacatggatgagaacccccccgccttcggaggccattctcgaggtcccaggagaggccccatgacaatgagacagcgggcagctggtgcggggggcctggacgcccggggaactccccactggctcctgctggcccaagagcggaggccctgagccagtcactggcccagcatccggtgtcacttacaaacacaggacggctgccaccttctgcaggagaactggccctcccgcgccagtccccaggccacaccaggcactgtggggggtgcctggcccagggctggcacggaggggctcaggctgagtgggagacggggcagaacaggcaggcatggggggagacctggggatcccaaacaaaggcagagcctgggaagcacccactcgacctacctcccattatctggacccaggtttctacaaaacatgagagctctctgcaaagaagaaaagaaaaatggacggaactcgaacttaaatccaaccttgtggttacaattacggaggcccacccaggccagcactgtgcgggccccttcaggcttctctcaggctctcccgagacacaccggcaggctgcagtgctaccactgtggtaaaggacaaggaaactgaggctctgtgggattccgggacttgcccaaggtcacaccatccttgaggggtcgagccaggactggaacctcagtccggccactacaacttcataaataccatcgccctgagatgctgaaatcccaggggccccccaccctcagaccaggtgccggtattgtcagcatcgagaaaacaaagtgccagtga

SEQ ID NO: 265517 - DNA, 273 bp, Homo sapiens
  chr12:125008003-125008276
  hypo
aggacacatcacgccggccagcatcacccaagctctcagtgtgccagggtcagtgggcttcacgcggcctccactgtgccttacaaccggcgtgtccagtcttttggcttcactgggccacactaaaagaactgtctcggatcacacataacactaacactaaccatagctgatgaactaaaaaaaaaaaaaacaaaaaaccgaaaaacaatctgttttaagaaagtttacaaatttgtgttgggctgcatttaaaaccgtcctgagccgcag

SEQ ID NO: 265518 - DNA, 348 bp, Homo sapiens
  chr12:125009052-125009400
  hypo
gcctgtctgagaacaaggcccgcatggaaggaggcacagctgaggcaaagccagctcccagaggcattgtttgagcacctagatccagccgtgcctgaacgtgtcctaccctggccactctgaggacccatcaactccccgtcatagcctaactcggctcgagtgtgtctctgccacaactcaggagccctaactaactgcccctaactaatcacccccaggtctccccttgaatgactcgtccctggacgcctggcctgatggaagactaattcagctcttgcctcacccaggtgaatgcctgaacctcgtcctcacaaccctcaccacccgcgatagcacttgctt

SEQ ID NO: 265519 - DNA, 430 bp, Homo sapiens
  chr12:125042262-125042692
  hypo
atggcgtgggtgggcgggatggcaggttaaagcaggtgtctcccaacttctcccgcttgccttcctcccctggtttacccagcagtgggcatcacccaggagccaccgccacacagaattcctcccaaatcctgaccctgtggacctggccaagcccccaggacccaggaaaggccccctgactcctgccaggctccagagggcgacatcccctgcaggcccccatgctgacaggcctggcccagcctagggaaaagcccaggccagggcctggagctgcatccggccccaaccccacccggcaggctctcctctttagcttcaggagcagggctggcaccaggcaggttcccatggtcaccgagacactatagccacactggggcccatgctccctgatggtctcagcaggtaccgcagagttcaatgt

SEQ ID NO: 265520 - DNA, 53 bp, Homo sapiens; identical to SEQ ID NO: 215242
  chr12:125062418-125062471
  hypo

SEQ ID NO: 265521 - DNA, 275 bp, Homo sapiens
  chr12:125062705-125062980
  hypo
tgcaggggcggggccgagacaagcctgggcagggagaagggaagggagcccgtctgtgcctgtagcctgggcagggagaagggaagggagcccgtctgtgcctggaaaccaatttgctctggcagcgctgtggaagaaaaattccacgcatgtccccgcgagcccttcgaagctcttcgtggaaaggcacacactgcagtcttggagtgcatcctgctcttagggcctctgggggccaagtcaagccgatgaagggtgtgcgatgtgggtggatc

SEQ ID NO: 265522 - DNA, 218 bp, Homo sapiens
  chr12:125092407-125092625
  hypo
gtcactactgcagcaaaagccgaaagccaagctccgtgtccatcgcgaaggcactgggcatgtggctatgcagccgtgacaaaggatgaagccatcccgtggccagggcgcagagtgacctcccagatctacgtttcatgtggcgtttctgccgtgtatttttaaacccggggacaaatgtatgcgtagtaaaggtcgtgaggtcatttgtctttggt

SEQ ID NO: 265523 - DNA, 252 bp, Homo sapiens
  chr12:125102490-125102742
  hypo
ccctcctcagccctcgtgcttgccttccaaagagctgtggctgttttctccgctcccctgcggtggagaaggaagagggcacatcgctggaggcatcttgtctgtgcctatgcagttctgactgcgtttgtgccccttcgattcacgcccattgcacaaatggggacactgaggcaatgagaggcgaggagacttgcccaagacctgcaggctccgtcaggggcagggtcaccggtgcggcttcagaggcag

SEQ ID NO: 265524 - DNA, 86 bp, Homo sapiens
  chr12:125103114-125103200
  hypo
aatagaatcgtacacgagaccttttgtgtctgacttctttcacctgcgtcgttctcgaggttcatccgtgccgtagcgtgagccag

SEQ ID NO: 265525 - DNA, 105 bp, Homo sapiens
  chr12:125105685-125105790
  hypo
cttttgctggggaacggtgaatcaacggcctgctgcgggctctgtctgggtggaggctggctggcccagccacagtcccaggggctgtgccgctttcccagctga

SEQ ID NO: 265526 - DNA, 164 bp, Homo sapiens
  chr12:125119170-125119334
  hypo
cctcagaactcatgcagccacttccaccacacccagtggttgaggtcatcacaaaagtccatccgggttcaagcggaggggaccaagacccaccttttgagtgcttcaacctcaccaggaatccaggatccttccacctttctgctctgcggactttgctctgt

SEQ ID NO: 265527 - DNA, 84 bp, Homo sapiens
  chr12:125128937-125129021
  hypo
cgtgcccggcctgattccatttttttattcctagaagaggcaaaactagtccatagtgttaggggtgcacgcttgggtggaaaa

SEQ ID NO: 265528 - DNA, 230 bp, Homo sapiens
  chr12:125145440-125145670
  hypo
tgcagcgccccagccgacaaggacgcagtggggcggaggccccccaccccgccaaattagggggaaacgcagccttgcctgctcttctccagggctggggcagccagggagacgcggtgtcattaagtagtgagcgcaaagggcggcagtgtctgcagaaggagccacgcggccgcgcttaatgaacagtgacatctgctcggctctttaattaacgagcccccacgcgc

SEQ ID NO: 265529 - DNA, 394 bp, Homo sapiens
  chr12:125151971-125152365
  hypo
aggggtagccccacagctgtcggggcaaacctccttcgacgctctccaacagctcaggccagcccatttctcactgacttgtggatggaacgtgtcaccttcagaggaagggggcaaaataaacctttgaaggtgagcttgctaaatgcttgcgtagtgaggcccctgcatctccttttgccgagactgggggaggctgaatggcaccaggccctgtctctcagccccgctcagccccatccctctagttcagtcctgtgggaccgcccgatccttgtgcagcccagctacaccagcaggtcgccgaatgtggattgtatccgggtggcatctacacagatcagaaggtagttcagataatgggatcctttgaagcagtcgatgaaacattcca

SEQ ID NO: 265530 - DNA, 45 bp, Homo sapiens
  chr12:125177731-125177776
  hypo
ttatgcatatagatttatatcggcgaactcttgattatggtattt

SEQ ID NO: 265531 - DNA, 520 bp, Homo sapiens
  chr12:125184198-125184718
  hypo
acattggagtgtgtggacaacgcttacaaacggagatgttccatctcagttcttgaatatgaagaactgtgtcctgcaaggttgctgcaaggattgctgcacgtagagggtctcctgtgtgccaggcatggctagggggccagggacacaaaggactagacagggggtcgaaggctcaaaatcatattcaagatgaggaaactgaggctcagagacgctaagcacacttccaaggtcatacagccaatgagcgggagagccaggatttggaccgctgaccacctggtttccaaacctggtctcccttcacccctcctccccgctccacgcctgcagtctccaggacggagaaagtccttttcacttagcgttccacttgtgtcctcattagaactcctacttgcggccgggcgtggcagctcacgcctgtaatcccagcactttcggaggctagaggcaagacaggcagcgtcaacaagcagagctgctggggcacggcgatagggactggaagggagtg

SEQ ID NO: 265532 - DNA, 151 bp, Homo sapiens
  chr12:125221107-125221258
  hypo
cctacccacgcacccgcgcacccacccacccatgcacccacgcagccacgcacacacccatgcatgcacccggccacccacgcacccacgcacgcacccacgcatgcatccatccatgcacccacccacccacgcacgtacccacccacgc

SEQ ID NO: 265533 - DNA, 51 bp, Homo sapiens
  chr12:125223362-125223413
  hypo
ctctgaaccaaactggaaggcgagctggccgagaagccccttccttctcaa

SEQ ID NO: 265534 - DNA, 156 bp, Homo sapiens; identical to SEQ ID NO: 215250
  chr12:125223879-125224035
  hypo

SEQ ID NO: 265535 - DNA, 35 bp, Homo sapiens
  chr12:125224155-125224190
  hypo
gatcacaggcgtgcgccactgcatgcagcctcatt

SEQ ID NO: 265536 - DNA, 140 bp, Homo sapiens; identical to SEQ ID NO: 215251
  chr12:125236641-125236781
  hypo

SEQ ID NO: 265537 - DNA, 83 bp, Homo sapiens
  chr12:125257116-125257199
  hypo
agttgtttgagaggaagggccgcctctgtctggtccacaattgcaccccctgtgcctagcgcgtagtgagcactggataagta

SEQ ID NO: 265538 - DNA, 518 bp, Homo sapiens
  chr12:125277444-125277962
  hypo
cctcggccccaggtcgcctcttctatctggtcacccacttggccccagttgcatcccagttagcagcccaggtgccacgcggtggaaccagagggaggacttgggctgcaaacgcctcttccatgcctggggctgtttccccacccacaaatccatcaagaacaaattccctaagtggcctcaaaatataaaaataaaatgcaagggcgggatgaaggaagagagctcacagttattactcgctgccgtgctctgacaaagtgttattctttccagccgagaggcatttgacaaagctgaatagatgctcacattcctgcaacccagggatttttctaagagaattttttttaacgaaactatttcagatatgctaagaagtacagacactgacatagcaacaaatcagtataatccctcaccaagttctagcaacgtgtaatgttatagcaagtgctggtgcgcgtggggaggaactggaaccctgctgcactgctgctaagaatggggatggggcc

SEQ ID NO: 265539 - DNA, 226 bp, Homo sapiens
  chr12:125299402-125299628
  hypo
tgagtccccacgctccgaccacctcagggactgctctctgcacaaggggcaggcgggaggagagacaggggacgaggtcagggtgcgaggcggcgtgggccacagggcagcctcaccaagaccaggatgttgggcatgacgatgtagtcgctctccgagccgtgggacttggagggctggaactggaaggtgcggtactcgaggaaggacacggtgtcgttgttgt

SEQ ID NO: 265540 - DNA, 70 bp, Homo sapiens
  chr12:125301969-125302039
  hypo
tgacttgcctgcttccggaacaatctctggggctcagtcagcagcctccccatcccgtccactctgagac

SEQ ID NO: 265541 - DNA, 84 bp, Homo sapiens; identical to SEQ ID NO: 215252
  chr12:125333253-125333337
  hypo

SEQ ID NO: 265542 - DNA, 61 bp, Homo sapiens
  chr12:125336069-125336130
  hypo
atcacaagcagaatggacctcggtctcctgactcagcctcgcacagtcctgctaatgagaa

SEQ ID NO: 265543 - DNA, 153 bp, Homo sapiens; identical to SEQ ID NO: 215253
  chr12:125447387-125447540
  hypo

SEQ ID NO: 265544 - DNA, 107 bp, Homo sapiens
  chr12:125448950-125449057
  hypo
gccgggctccgtccgtcctgctctgcccgctcgctggtcagctgatgcctgggagacccaggtgacacggaaggaggatacgccagtgacgcggtcgtagtagcgtt

SEQ ID NO: 265545 - DNA, 189 bp, Homo sapiens
  chr12:125498606-125498795
  hypo
gaggagaccttgtcccttaccgccttaagagcttcagaggcatcccatgctctcaggatgaagtaaccttcccgttttctctaccgtgccccatggtgtgccaggtaaacagggatctcctagctgcccccgctccactgctctccttctgtccacaaggtggaggccgctcttcccctgggcctttcc

SEQ ID NO: 265546 - DNA, 161 bp, Homo sapiens; identical to SEQ ID NO: 215254
  chr12:125500619-125500780
  hypo

SEQ ID NO: 265547 - DNA, 503 bp, Homo sapiens
  chr12:125565910-125566413
  hypo
atcacagttagtttacaaatcgcatcccttacttaagcaagggcctaagcagccgattattggctcgggggctttaagatcattgtgcttcgttttctgcatgtttttcctgacttgttccttacccagctgggtgcaggtgctcacggagctctgctccatgctcactcaggcgttctcagcaaaactcatctctcctatgggtaatccccgtcgaggccatgcgatgccctgcttaaaaaaatacatacatgtgcacaattgccttcatgctccagcgagtagagcaaacaacatgcattagcacatccgtgttgagattgttagaacagctgcctgcgcagcacattttgcttttgaagagtagctatcagcttaccgagtattttcacatgatggaaagttttctgggctgggaatgtgggagaggtaataaaaaggctaccccagggcagcaaggagaggatgaagggcagacgcgtacaactctaggcaaataggaa

SEQ ID NO: 265548 - DNA, 418 bp, Homo sapiens
  chr12:125578190-125578608
  hypo
tctgctcaccccatggctcccgcagcttctgggaagtgaacagtcccaggccctgcggctacgtctcaggtcagaaaacagggccacctgccctcctgctgagatgcttctctctgtcgctcattttgctagtgtccgaggtatagactccatcctgccggagacgggggtgtgtgtgacgcacgttactcgcactcgaactgagatccagccggttggcagggagtctgtcggcatttggtggcttcgtggcaggcattattgggcagcactcctggccgtgtgcacccagcgtgggagggcctgcgtggatgccatgttcatagcgcttggtcccacagacacctggacacccgctgtcggagctgagtaaggacctggcacaggtcgactgcgcgaaagcctctgctcaccctct

SEQ ID NO: 265549 - DNA, 327 bp, Homo sapiens
  chr12:125605535-125605862
  hypo
tgtgcatgtacctgtgtacacgcgtacatgtgcaagtgttcacagcatggtggctggttccgtgccgtaatcacgggccctgggttggccagagcgctgaggctgattgaggtgtggtcgtgctgtcgcagggctccctctggatgtggccatcgccccgcctgagagagcctcctgcgccgtttggcgaggcaggtgtgacttggcaccctggcaggggctgcgggtgaggggctttcggaagaatgcaggctttaaaccactacactggtcgccaccagcagtgagagggagcgggtgctgggcggggcaggacacttcagctca

SEQ ID NO: 265550 - DNA, 216 bp, Homo sapiens
  chr12:125609559-125609775
  hypo
ctccatctcaggtatggccccggtggggacagtccttccagccatccccgccggccccataagtatgcacacctctgcccagtgcttggattcatcccaaggacacagtccgctgggcagccaatacgcacagtcccttctcatgatctgaggcagtgatgttccacgaagtcactgtgaacacggaacccatacggaacccttgctcctggggga

SEQ ID NO: 265551 - DNA, 76 bp, Homo sapiens; identical to SEQ ID NO: 215259
  chr12:125636433-125636509
  hypo

SEQ ID NO: 265552 - DNA, 163 bp, Homo sapiens
  chr12:128247734-128247897
  hypo
tcctgggacttgggaccttccgtgcttaaacggagacagttagggacaaactgggacgatttgcgcaccttaattcgatgagctgatgccgtcatatcaacgcacactttacctagcatgcataagcctagagtcagcagtcgtgatctgattgttttacaca

SEQ ID NO: 265553 - DNA, 93 bp, Homo sapiens
  chr12:128310534-128310627
  hypo
tctgctgtgtatcagcagtccggtctgtggccttctgttacagccacactcatggaccaacatgtctcctgcgcaatccctgctttcattctt

SEQ ID NO: 265554 - DNA, 108 bp, Homo sapiens
  chr12:128313387-128313495
  hypo
aggagagcatgcctcgatacctgctggtccgagggggagaagaaacaggaggtgtgtgcagcagatctgacctctctcagccaccgctgacaccggccctccaccaaa

SEQ ID NO: 265555 - DNA, 69 bp, Homo sapiens
  chr12:128386219-128386288
  hypo
taagggtaggagaccatgagcgacaaagacctcggtataaaggagcccggttggtgtcagctactgttt

SEQ ID NO: 265556 - DNA, 37 bp, Homo sapiens
  chr12:128439870-128439907
  hypo
tataagaccgggcacggtggctcgcgcctgtaatccc

SEQ ID NO: 265557 - DNA, 65 bp, Homo sapiens
  chr12:128489343-128489408
  hypo
tggggttttgtccgcggctagtcctgctgcagtgcatctgggctaatgcccgaggttcgttgctg

SEQ ID NO: 265558 - DNA, 263 bp, Homo sapiens; identical to SEQ ID NO: 215261
  chr12:128773737-128774000
  hypo

SEQ ID NO: 265559 - DNA, 353 bp, Homo sapiens
  chr12:128899665-128900018
  hypo
gatgaccacggcgccggggagaagctgccatgcctgagggtctttgctttccgagaaaccagagaggtgcggggcagctgccggctgaagggggacctggggctgtgtgtggctgagctggagctcctgtccagctggttcagtgccccgacggtgggtgccgggaggaagaagtccatggaccagccggaggggacccctgtggagctctactacaccgtgcacccaggaaacgagcgaggggactgtgccgggggtgacttcaggaagggcaacgccatccgtccaggaaaggatgggctggaggaaaccacgtcccacctgcagaggatcggcaccgtcggcctttaccg

SEQ ID NO: 265560 - DNA, 137 bp, Homo sapiens
  chr12:129148503-129148640
  hypo
tacaggcacatgcacccacacgcacgcacgcgggcactcacacaggcacacacgcatacacacaggcacacgcacccacacgcacgcacgcgggcactcacaggcacacacacatacaggcacaagcacccacacgc

SEQ ID NO: 265561 - DNA, 56 bp, Homo sapiens; identical to SEQ ID NO: 215263
  chr12:129148670-129148726
  hypo

SEQ ID NO: 265562 - DNA, 45 bp, Homo sapiens
  chr12:129151360-129151405
  hypo
cagtgaaaaatatatatgtccgaggcaggtggatcacgaggtcag

SEQ ID NO: 265563 - DNA, 197 bp, Homo sapiens
  chr12:129180361-129180558
  hypo
cccttcccacaaggcccactcgtgagagcgaggatgaggacgaggaggagcggcggggccggggctgcgcactgcaataccagcacgccaccgtgcgggtcctcacccagtttgtgtctgagggcgccggtccatggggccagccgaactacctgcttagtcctaactggcagttcgacatcactcacctggtggca

SEQ ID NO: 265564 - DNA, 591 bp, Homo sapiens
  chr12:129189630-129190221
  hypo
gcaggaggctgtattcagcacgtggctgcagttcagtgatggctctgtgacgcccctggacatctacgacaccaaggacttctccctggcagccacctcccaggacgaggctgtcgtgtcagtcccccagccccgctctcccaggtggcccgttgtggtggccgaaggggaaggccagggcccactgatccgagtggacatgacgatcgccgaggcctgccagaaatctaaacgcaagagcatcctggctgtgggcgtcggcaacgtcagggtcaagttcggacagaacgatgctgactccagccccggcggggactatgaggaagatgagatcaagaaccacgccagcgaccgccggcagaagggccagcaccatgagcgcacaggccaagatgggcacctctatggcagctctcccgtggagcgtgaggaaggggctctccgaagagccactaccacggccaggtccctgctggacaacaaagtggtgaagaacagtcgggcagacgggggcaggctggcaggagaggggcagctgcagaacatccccattgacttcaccaacttccctgcccacgtggacctccccaa

SEQ ID NO: 265565 - DNA, 206 bp, Homo sapiens
  chr12:129298024-129298230
  hypo
aggagcaaagtaggcgcacagggctattttggtgaagtttcaatctaccacgtggaaggaatattagacacattcgctacggctccaagagcatgagtaagacaaacacagacaggccgcaggcaggcagatgtgtgagtgggcccgcagaagaatgtccagcaaccagtgccatgccacaatggggtgcacggctcagagacaca

SEQ ID NO: 265566 - DNA, 68 bp, Homo sapiens
  chr12:129305165-129305233
  hypo
ctcatcagtaaaatgggcaccgtacgtgtcatgtagactaagtagtcgtgtagacatgtagacatgta

SEQ ID NO: 265567 - DNA, 31 bp, Homo sapiens
  chr12:129806103-129806134
  hypo
tttcttttttttttttgagacggagtctcac

SEQ ID NO: 265568 - DNA, 277 bp, Homo sapiens
  chr12:130037481-130037758
  hypo
ctggcatttaaggtcatccacggtccagatccaacaactacaacatggatgccccaagtccgagtctctggggacaagaaaggtcacgccaccatccgagccccagccttgctggtctgacagcatccaccggagcagcttcggttactcaacctttcaaggccaggctcttccccttttgagactccgagagtgttgcgcgtttgctcccagctgtgtctgagtcactgcttgtggctcatcagtcaggctccctgctggtcgctctcaccactgc

SEQ ID NO: 265569 - DNA, 39 bp, Homo sapiens
  chr12:130060596-130060635
  hypo
gcgtgagccaccgcgcccggcccagatagatacatttta

SEQ ID NO: 265570 - DNA, 628 bp, Homo sapiens
  chr12:130184244-130184872
  hypo
ggccggctctacttcggtgagcgataacacagcttttctggtcaaacagcttctggaaaacaccacctgatcgacgggcgggtacagacagacattgggaaacgacttacctcaacgtgaagcgatcttcagtggaatttctggagatggaaacaggaaaagtcagcacgtctcctttcctcacggtctttggtatatagtggatggccacgctgttgtccagacgcagttctctcagggagggtttcctgtgtgtctgataaaggaagatgctcccgatcctctgcaaggggggcccggactcatcgatgtcactgtggcctgtccggatcccattgcttctcctcgcgtcttccctgacgcagtcccctctctcaccccctgggtgcacggtgtagtagagctccacgggggtcccctccggctggtccacggacttcctcctcccggcaaccaccgtgggggggctgaaccagctggacaggagctccagctcggccacgcacagccccaggtccccctgcagccggcagctgccccgcacctctcgggtctctcggaaagcaaagaccctcaggcacggcagcttctccccggcgctgcggtcgtcccagtctctgcccatgat

SEQ ID NO: 265571 - DNA, 35 bp, Homo sapiens
  chr12:130326761-130326796
  hypo
ggatgacaggcgtgagccaccgcgcccggccagca

SEQ ID NO: 265572 - DNA, 185 bp, Homo sapiens
  chr12:130493341-130493526
  hypo
ctttttcttaaaaacgtcctaaaggaactaagctccggccagcaccaccacctggagctgcaccgtgtctcccgcggcaggacaggagtccagaactccccttgtccctttgcccagttcccatcacgagaggggctggggtgggcaagcagtgggtatagcagcaggtgcggctaccctcggcc

SEQ ID NO: 265573 - DNA, 138 bp, Homo sapiens
  chr12:130628827-130628965
  hypo
aaaaaaaaaaagtaaagagaagcatgtaaaatgaattgtgataacattttatttaactcgatgatccaaacgatgctcatttcaatgcaggatccatatgaagattactgtttctccccgcctcgcatctccatttgg

SEQ ID NO: 265574 - DNA, 85 bp, Homo sapiens
  chr12:130663584-130663669
  hypo
aaagagcgaaactccacctcaaaaaaaaaaaatggtccagcgatgctgtcaagactggagtttttgtgtacgcctgtgcagctga

SEQ ID NO: 265575 - DNA, 55 bp, Homo sapiens
  chr12:130744952-130745007
  hypo
catcaatgctgtgttcagggcggggggagcgttcgccttttcatgctcacggttg

SEQ ID NO: 265576 - DNA, 91 bp, Homo sapiens
  chr12:130821453-130821544
  hypo
ggcgtagacccggtcgctaccacctgcgatgccttggaaatgcagccggcggggcccacctgtggagcctgcagaccggaatctctggtct

SEQ ID NO: 265577 - DNA, 38 bp, Homo sapiens
  chr12:130828450-130828488
  hypo
cgtgagccaccgcacccggcccattgaaggattcttaa

SEQ ID NO: 265578 - DNA, 143 bp, Homo sapiens; identical to SEQ ID NO: 215272
  chr12:130852207-130852350
  hypo

SEQ ID NO: 265579 - DNA, 42 bp, Homo sapiens
  chr12:130883021-130883063
  hypo
taatgtgatcatttgagctgcgtgcttcatcaacttagtatt

SEQ ID NO: 265580 - DNA, 63 bp, Homo sapiens
  chr12:130889076-130889139
  hypo
tcaggtgatcagcacgcctcagcctccgcatgagtcaccgtgcccggccgttggatctatata

SEQ ID NO: 265581 - DNA, 201 bp, Homo sapiens
  chr12:130892170-130892371
  hypo
ggaatgaggaggtgaacacacgtggcctcagtgtggtgtaccacgagggaagggaagggtgtggttgtgtccgtcatgaagtgcagtgtttggctggtacctcgacatcgacgttgggcgagctttctctggggtcgtagtcatacagggccaccattctccgcgtcgataccgaatgacgcctgccacttctcctgcttc

SEQ ID NO: 265582 - DNA, 33 bp, Homo sapiens; identical to SEQ ID NO: 215273
  chr12:130894171-130894204
  hypo

SEQ ID NO: 265583 - DNA, 224 bp, Homo sapiens; identical to SEQ ID NO: 215274
  chr12:130906937-130907161
  hypo

SEQ ID NO: 265584 - DNA, 36 bp, Homo sapiens
  chr12:130907881-130907917
  hypo
gagtcactgaggcacggatctcgcacctctcctggg

SEQ ID NO: 265585 - DNA, 742 bp, Homo sapiens
  chr12:130909491-130910233
  hypo
agaattagtcctggaggcaccgaggggggggaagcatgcgtctactcaggccgggggcatgccgtggagggctctgcaatgaaaacagaatgggttacggggctggggcggggtggaggctgaggcagagcacacgcagagccagcgggccgggcaggagccagcgccatgcatccagccaaggagagggcaggtgagatcccggcggcacatcaggccccacagtgcccacggtaccgctgctgtagatggtgggtgtggccacggtgccaggggagactgcccgggggctacatcctcagaaaccctgagggcagctgccactggaggccgtgtgtgactggagacagttcaccagacacggagcctgacccgtccctgtccatccactgggccaacttcccttccagcgctcggcaccctctgcaggactttctagttaggctgacgtgtcacccttctccctaagatacaagctgcgtgaaaccacgccatccccggccccaccaacagcgcccgcacaccatcgtgcagagtctgtgtcagcaaaggactggggtccgcctgtctcctctgcatcctgcatcaagtccctgagagccacacttgagccatcacagtctccagtgggtggcacagagctggccacaccgggagctgcttaaccagaccagtgtccatgacttttatactgcccgtctgcacgccatcactctctgccggggacagccctcaactcacc

SEQ ID NO: 265586 - DNA, 381 bp, Homo sapiens
  chr12:130913639-130914020
  hypo
tcaaaaaacaaacaaaacaaaagacacttaggtttttaaaacatgccacgttgtctaacacacacgcgcagacactggcagacagcctggcctggcaggaggtggagccaccgcacagactgtgtgcttactccgggcccagctcagcctcagcatgagacgaagattgtgcagatagtaggggcactgggcggaggctgcggacagcagaaaggcttcaacaaaaaaagtgtgtttaaatgaagaggctacctggtaacatgccagcttggagacagcgacagccctggtggtctctcccagtgatggtgccagcagcagccgctgggtttccactcacagagaaagcacctagtcacgtggtaacggtattcaaagcaa

SEQ ID NO: 265587 - DNA, 258 bp, Homo sapiens
  chr12:130915750-130916008
  hypo
gtgtgaaatgctagagataccgtagtcaactaaaagtggaggcttccacccactagaacatcggtgtcttggagcagatgggatagcgccagggggtaagggctcatgtgacggggcgggcagcatggggaagcggatggtcagggaacacttcccgggttgtaaaactggcagtctgtgcaccagctcaacttcagtcactccctaccactgtcatgatgcgtcacctagccagacgccatctgtatgattaatgaa

SEQ ID NO: 265588 - DNA, 577 bp, Homo sapiens
  chr12:130918920-130919497
  hypo
acaaacatctgcccagttaacggaggtgaatgagcgaatggcaggttctgcctgaactgagcctaaccctacccggacctgcaaaaccacccctatgaccgaataccaggatggtgcagcgggggagggtggaagccctgcacttcgactttttcaattatccccaatgagggtatgtgacaggcattaaatataaacttcagaaacctagcacgacttaggaccccagctgggcgtctccatctctctcagggacccaagggtagcggggaaagtgcccatgtctcttgatctccacggggcccgctccgagcccgcgcccaccaggaggatggtgtggggcccggcccgctctcacctgcttgccaagttcagagcctttcaggaagtcgtccaccgaggcgcccctcctcttgaagtctggagagtcataggcgtcctcctcgtctgaggcggcgtactgccccgcgctgcttctctctaggaagacgctccttttctctaacttggaaagaaaaaggaggcacacgggtgaggcagggccaccttcagctacgctcagccccacctgcattca

SEQ ID NO: 265589 - DNA, 172 bp, Homo sapiens
  chr12:130920513-130920685
  hypo
aggaggacagtgtagggtcccggtgagaccccacaggctgacccagcagggccgagggtcctgaccagggctgtgctgccacctcaggtggaaacgggctcaacacaacaggagagatgagagcgggttctgggtggggatgcgggcacacgttctggctcccagccccaca

SEQ ID NO: 265590 - DNA, 609 bp, Homo sapiens
  chr12:130921354-130921963
  hypo
aggagccaccgaggcgggagccccagccttaccctgctgctctcggccaccctctgcgcggcctcccgggccatggccttggcgacggtggtggacaccggggtgccctgtggctgtggcaggatgcggctgggtgagggcgaccgccttccggggcccacgggcggctccagcatgtgcccatgcacagggccaggtgcacggctctgctcccaggcctcatccatcctggcgtggggacccaggtgctcgtctttggtttcggggactccagaacttgctaatggctttgattggggtgcaggtctcgggtggggggtaggaggcaccaggagctcggggggaacggcagcaactgcagagtccacggactcgccctgggcggagagggtccgcacggtcacgcccttggcctccaggctccgcagccgcacaagctccacggccgtgctgtctgccgtggggaagatgacttcagccacctgtggacaagcagagctggctcgcgggctgcccgaggtgagccccgcggtcctgcaatggggagccgaccagtcctctgcccagaggccaggtgcaaaggatcatgcccagcgacctccgactcca

SEQ ID NO: 265591 - DNA, 39 bp, Homo sapiens
  chr12:130922987-130923026
  hypo
tctccaggagacccggatggtggcgggggtcaccccagc

SEQ ID NO: 265592 - DNA, 141 bp, Homo sapiens; identical to SEQ ID NO: 215279
  chr12:130925068-130925209
  hypo

SEQ ID NO: 265593 - DNA, 436 bp, Homo sapiens
  chr12:130926606-130927042
  hypo
gggtagccaggagagctgggcggagatctgcgtgatgttgtccacccgcaggtgggagggggccaccaccacgtccttgcccaccagcagcgtgcactgcagctcatccgagctgcccctgctggtgacgcactgcacggagatgcggtaggtgcaggctgccatgttgagcttctcgatgagggctttagttctgctccccagcgtgaggttcatgcgtgtctccttgtccaccaggacgttgtagctgctcaccgttccccatcctggtggcaccgccgggggctcccagcccacaataacacttttggcgagttgtttgatgagggtgatttttctagggtaaggcacgatgtcttctccgatgtcgtcgatgttcacgtccagggtcccggcactgttgtcggtgatgcccgcatctatgtgggttggggag

SEQ ID NO: 265594 - DNA, 102 bp, Homo sapiens
  chr12:130929720-130929822
  hypo
ctcatccatgtctccatagacgtagaggtattttcccgccgtgaggggcagctcagcttcggggttctcgttcggtccatcgaaggggttgtaactgcagag

SEQ ID NO: 265595 - DNA, 292 bp, Homo sapiens
  chr12:130931808-130932100
  hypo
gtccctggctggtaagggcacggagaagaagtgggagatcctacggctgtcgtgacaacctcgtcggtgctcctgcgtgtgggccctggaggccacccgacctcgtgggtgttcagggcagacgctgccacgtactgtgtggatgagaccaggggacacgtcgggaatggggactcaacagagacagaagtaggtcaggggtcacgcagcgctggaggcgggggaggagggacaggtgatcactgatgggaatgggttcttgaggggcgatgggagacgagggacaggtgat

SEQ ID NO: 265596 - DNA, 586 bp, Homo sapiens; identical to SEQ ID NO: 215281
  chr12:130933878-130934464
  hypo

SEQ ID NO: 265597 - DNA, 332 bp, Homo sapiens
  chr12:130934697-130935029
  hypo
ctgccccactcacaggggctcggtggacgccgaggggccgcacttacctatagcgggcaacacagaggtggaccttccccgagtatctctgcttggaggtattggaattccgttcattctccatctgtgaaaaaggcaatgggtgtgtgggttattgaagctggaggtgtcccaccccattcccgcggcacacgggaaagcccctcgcagcttcctgggccccaggagggacggcctgagactgtggcactcccaggaggcactgccacccgcacacccacatgcgagcttggaaaggagggtggtccctcggtgtggaccccttattacat

SEQ ID NO: 265598 - DNA, 415 bp, Homo sapiens
  chr12:130939634-130940049
  hypo
gggtttcccagagcagaagccgtgcgtttcttgtcgcacggagtggggctctgtgtggcccttcacgggagggagagagacagcatggagacacgtgcattctgttttcccctgggaagaacggaaaccgtcttgttttcctccactcttcaggtgtcacagctcaaatgtggtttcttggcagccgccttccaggaccatctagaagagcccaagtcactgtccacctcatcacctggtcttcatgcagcgtctggatcagaggctccccacgtatcgtctgcccgccagcgggagctccgcacggtgccctgtctgtctctcagcgttgcaacctaggcagggcatgcagcctgggtgtcgtgagtgcctggagatgagcggcagagcgctcggaccctggtccctgcctgct

SEQ ID NO: 265599 - DNA, 124 bp, Homo sapiens
  chr12:130941078-130941202
  hypo
gggaaaggcttgctgggggccgtggagatgtccaggggggccaccgcgctgccacccagcaggtcaatcttgccagcgtgctgccggaacttctccaggtcccgggacagcaggttgaactgct

SEQ ID NO: 265600 - DNA, 190 bp, Homo sapiens
  chr12:130954679-130954869
  hypo
aaggccactcatgtcgtgtttgcgaggaccacacccggggaagtgcctcagatggcgctgaggactctgattccccaggccctcctttctctgatcctacaaatgcctccccaggatgggtgtcataccttaaaaaggtaccccaaggcagttcatcagagaccaggatggcctccggaaggtccaccgg

SEQ ID NO: 265601 - DNA, 175 bp, Homo sapiens
  chr12:130958396-130958571
  hypo
tcaaagcattaactatgcatcgggcggtgagctcagcttctcttagtatcacacgttacataatagccttaagactgaaagcggtcattctaccagtaagaggaactgtagaccgaagtaaaatcggtcaagtctgcggatgaattataaatacggaaaagccctttagctcaca

SEQ ID NO: 265602 - DNA, 143 bp, Homo sapiens
  chr12:130963328-130963471
  hypo
gtgcaagcagagagagggagcggcctgggagccaaggccgcaggtcggccgctccaccacaccagggatccccggcccacccgtggactccctgcctcgcacgccgcgcccggctgcccgccgcttaccttctgcagaaggtc

SEQ ID NO: 265603 - DNA, 445 bp, Homo sapiens
  chr12:130968370-130968815
  hypo
ccccgaccctcacctacacacggtgcccggagcccccaccctcacctacacacagtgcccggagcccccgtccccacctagacacggtgcccggagcccctgtccccgcctagatgtgtccctgagccatgccactaacaggggctgcgagggcttccgcggctcctggaaaggccccagaagttcccccaggcactggcttgctggcatggacaatgtcccatgggaaggatagactggaggcgaaacatctctccagagtctgccggcgactgtcacttaggtgtccttggccggaaggagcccgatgccccccgaagtggacccctggccccatgtcgcatcccagctgaaagcccctcggtggggagtaaagcggcatgctgtcacagggccacctgactgcctcttgcctcctgatgccgctgccaccaccatctgcctg

SEQ ID NO: 265604 - DNA, 281 bp, Homo sapiens; identical to SEQ ID NO: 215285
  chr12:130985315-130985596
  hypo

SEQ ID NO: 265605 - DNA, 215 bp, Homo sapiens
  chr12:131077263-131077478
  hypo
tactgagggcacagagaacccgggggaccttggccgtggcgggccaatcagcctgcatttgtgagaagagcgtttcgcccagcacgtggatttgtttcccaggcagggaaatcgggagcgggagagatggacagcgagctggtgaggatccgggctgcgatgtcgggagcggtgagagcgagcgcggcttccacgctgacccttctggcctcatc

SEQ ID NO: 265606 - DNA, 454 bp, Homo sapiens
  chr12:131095739-131096193
  hypo
ggaccgggaaccgccgcagctcctggaactgcacattcccctcccatcccacgagctctgtccccacgtcccccagaccccacaggggaagcactcagtgcctgcctctccaggagccgccttctcctccctgatgattgacgtccctcccgtaaaggatctctttgagctacagcctccatcagacaatacgttgcaggatattgggggcccttttgtcttccactcccgcagaagccagggcacctggggccgcttcatttacccgcatctctgcccccgatcctccgctggaagacaccggctgccggctaccgggcttcgctgcaggtgtaagtggcagatgccaccatgctggcggcgacgcgtctcctgcggagaggatttacctccgtagcctgggctaggaccttcaggaggcctgcacagcctcgatttaggaagccctttgcct

SEQ ID NO: 265607 - DNA, 209 bp, Homo sapiens
  chr12:131097715-131097924
  hypo
tgagtaatgaggggatgggacggagggagagttgacagcagtgctggcgggttgccggggccaacaaggcaggggacgccgcccccaggtactccaattgtgggagctgcgaccgccccgccagagggccagtgggcaacccacagatacccctgccgcaatctccaggctcctactgcgacctcatcggccaagccacctggaagcca

SEQ ID NO: 265608 - DNA, 151 bp, Homo sapiens
  chr12:131102208-131102359
  hypo
gctgagtgtctatgacctgacgctaagcagcccagcaccttcagtcctcgaaggtccgcagatgcaccccagttctgaattcacagaatgcacgcaaattagattattctggtagaacaggaatcactccgttgtctgggctacttagaga

SEQ ID NO: 265609 - DNA, 338 bp, Homo sapiens
  chr12:131110922-131111260
  hypo
catcttctccatcacgactaccgccagcatcaccatcagctcctccatcaccatgactaccactggcatcaccaccatcttctccatcacgactaccgccagcatcaccatcagctcctccatcaccatgactaccactggcatcaccaccatcttctccattaccatgactaccgccggcatcaccaccatcttctccatcacgactaccgccggcatcaccaccatctcctccatcaccacgactaccactggcatcaccacaatctcctccatcaccatgactaccagtcatcaccatctcttccatcacaactactgcttcatcacacctcctc

SEQ ID NO: 265610 - DNA, 157 bp, Homo sapiens
  chr12:131111290-131111447
  hypo
catctcctctgttgccacgactacctaccaccaaaatcatcaccatctcctccatcaacacgactaccaccagcatcaccaccatctcctccatcaccatgactatcagtcatcaccatcatcttctccatcaccacgactactgccggcatcacca

SEQ ID NO: 265611 - DNA, 141 bp, Homo sapiens
  chr12:131111477-131111618
  hypo
tcaccattaccaccattatcaccacgactaccgccagcatcaccatcatcttctccatcaccatgactaccaccaaaatcatcaccatctcctccatcacaactaccaccagcatccccatctcctcgatcaagtctactg

SEQ ID NO: 265612 - DNA, 180 bp, Homo sapiens
  chr12:131125871-131126051
  hypo
ggctggatttaggatggtgactgccggacactcggcccggcttcacgggctggatttaggatggtgactgccggacactcggcccggcatcacgggctggatttaggatggtgactgccggacactcggcccggcatcacgggctggatttaggatggtgactgccggacactcggcccg

SEQ ID NO: 265613 - DNA, 50 bp, Homo sapiens
  chr12:131129060-131129110
  hypo
gattaaaagtatccttacttcgaggagccgtatcatcaagtgcaaattaa

SEQ ID NO: 265614 - DNA, 459 bp, Homo sapiens
  chr12:131133585-131134044
  hypo
gacctcctgactcagaggcacgggagcagatctcccggcttttcctgcccttcgtggcggccgataggctcagtcggaggtgggtatggaggtgggtacggaggtggcaggaggaagctatggacaagagagcaaccggagggacagaaccgtgccaagcgcgtgtgtgactgcaaagccagcctctaggccaagtaaggcgctggaatgtggggcttgctgcgacgtacgtttctctcctcctcagcggagagatgagtgctcccggccggaggccgctccgctccatgcagtgacttagagacccaggcccctccctccgtggccgcccaacccctggggcctcatggcctccgcatccagccagtggggtactgggaagggcggcgccttcccccgactcagggctccactctcccattggccagaacaagccacgtggccacccagacccaaggg

SEQ ID NO: 265615 - DNA, 77 bp, Homo sapiens
  chr12:131149029-131149106
  hypo
cacacactccccatcctggctctgtcgactacaggacctggaggtcatgacacctcggctgtcatgagcactcctca

SEQ ID NO: 265616 - DNA, 57 bp, Homo sapiens
  chr12:131157701-131157758
  hypo
cacacatcgctccccgtttaggttcctggtaaacagcaggagctgctcaggcagagg

SEQ ID NO: 265617 - DNA, 60 bp, Homo sapiens
  chr12:131157788-131157848
  hypo
gcgggctggctcgtctgccaacctcatcctggatctgggactggccgtcagatttcccag

SEQ ID NO: 265618 - DNA, 79 bp, Homo sapiens; identical to SEQ ID NO: 215288
  chr12:131159259-131159338
  hypo

SEQ ID NO: 265619 - DNA, 459 bp, Homo sapiens
  chr12:131159368-131159827
  hypo
gcctgctcgggacgggtcgtatacgtgggatcctgtaacacgtggccttccgggtccggcctcttccacacagcgtgtccgcaaggttcatccgtgtggtggcgtgtgtcaggcttcattccttttcgcggctgaatcagattccatcgtgtggatggaacacattcacgtttcgtttatctgctcatctgtagaggggcgtgcagtgagctttttacagatgttcccacccattcgtgtcaaagagagcatccttgatccaaagacacaaactacaaaagggcacagccgggactaggaccccagttgtcccgaaggacctgttggccgccagatagtggttgaaggaagggacgcaagccctggttgacggagccgcggcctctgctgagacaggcgggtttgtccgcaggccttcgggaacgatgggtgtctcacgcttctacctaaggccaacca

SEQ ID NO: 265620 - DNA, 287 bp, Homo sapiens; identical to SEQ ID NO: 215291
  chr12:131164354-131164641
  hypo

SEQ ID NO: 265621 - DNA, 31 bp, Homo sapiens
  chr12:131173699-131173730
  hypo
tcccgtgtcctgggccgggcacagtggctca

SEQ ID NO: 265622 - DNA, 132 bp, Homo sapiens
  chr12:131174313-131174445
  hypo
tgtgttcattttctatgcatcgtaccaaatgatcacagatggcggcttaaacagccccatgtgttagctcatagctctgtgggtcaggcgtctgggcaggctcagccaggcgctctgctcacagtcttgtga

SEQ ID NO: 265623 - DNA, 188 bp, Homo sapiens
  chr12:131182719-131182907
  hypo
aagactttcaagggagaaggcgtgggccacagagccagagggggtgcaaccgtgacttagtgaagccccttcctttgggtctcgttacagccacagaacccgcctccatctgactcaaacactgtccttaacttgctcacttcagaaggccgtccgtccctgctaccgctcctaatgtcctggtctct

SEQ ID NO: 265624 - DNA, 42 bp, Homo sapiens
  chr12:131186211-131186253
  hypo
caaagccatgggacacaaatcgctcctgcttgacagtgtggg

SEQ ID NO: 265625 - DNA, 222 bp, Homo sapiens
  chr12:131189179-131189401
  hypo
aaattaattagatggcactccgcattttctaacccactttccaaaggtgttccctccgtggactcataacccctcgccctgccaccaccgcctccacaggtctgtttcccaaagcgtagactgccagccagagagcacctgcaagacgggccgaggctccggggctccaccaccagggtcaccggttcaggtcctggcatcgctgctctctagctatgtgat

SEQ ID NO: 265626 - DNA, 215 bp, Homo sapiens
  chr12:131193261-131193476
  hypo
tgaaaatactgttatacctgcgccccagctcactgcaccttctctaagaggctcgcgtgggccctggacacaggcgtgtttcagagctccctgggactgcatctgacccagaaccggctccgccccagcttctctgggatctcacaggtcctgcagcgctgtagtcccaacccagcttcgcggtcaggcagcccgggtttgaaactgggcccatc

SEQ ID NO: 265627 - DNA, 154 bp, Homo sapiens
  chr12:131249877-131250031
  hypo
tgatgtggtgttgatgatgtcgtggtgatgtcattgtgctgatgttgtgttgatgtcgtggagttaatgatgtggtgttaatgatgtcatggtgttgatgtcgtggcattgatggtgtcatggtgttgatgacgtcatgatgttaatgcagtgt

SEQ ID NO: 265628 - DNA, 80 bp, Homo sapiens
  chr12:131264841-131264921
  hypo
cctaggatgcacgccgaagcaaaacatagcatctgtgagggatctgagcttgtgattcctgcattagaagctcagaaaga

SEQ ID NO: 265629 - DNA, 273 bp, Homo sapiens
  chr12:131264951-131265224
  hypo
gagtgagtcatgggagcaagggcctcctaccttctttccccgcccggagcagcaggggccctgccccatgcagaaccacagaggcaggggcgccgcctcacccctcctccaccagcgactcctgcagcctgggctcctgtcttctggcaggtgcccaccggagcagctcaggatcgcagatgtctcagaatcttccctctagcaaagttactcctaaaaacctatcccagccagggcagggaggagacaggagatgcccggctctgcccgcct

SEQ ID NO: 265630 - DNA, 402 bp, Homo sapiens
  chr12:131265526-131265928
  hypo
gcagagccacggagcgtccaccgatccccaggacaggttgtggctcagggaggcggcacccacaacaggcttcccaggccgcacctccaggccccgatctctgctctcacctcctgggctcaccctcccgggggaaggaggggctggacatggagcctgtggctgctcggtgtgggtggtgacactcttggtgacgtccctcggtcgtcaggactcatttccccggtgttggatgcagctcgaggacagcagaggggcccagcccataaggatgggaaggtctaactgtagatgctgacaccgaatgccggagacgcggatgcttctaccccagtggcaccaaggctgctgtctgcggaatcccaaaggtgacagctttctctaccacgggccgccccagcc

SEQ ID NO: 265631 - DNA, 293 bp, Homo sapiens
  chr12:131268401-131268694
  hypo
cccctgggaagcagacgtaaaatagaaacaataaatttaaaaactgatgagggacatcaacgcctacgtaccagagacaggtttcacaggttgagcctgggcaagttaccaacgaagaaaggaattaaaaatgaacaatcaaaaacgcagcaacaacaatcatcttcgcggatccaattccaaaattactacattactaaaaacatccagctttaaacaaatgatacatgcaaagaaacatgaaagtggaactcatccatgaaagcataaaaaagcagcgaatagaaactctc

SEQ ID NO: 265632 - DNA, 1712 bp, Homo sapiens
  chr12:131271736-131273448
  hypo
gggccggccacccgcgcccagggcagggatctacacttgagtgtttccgcgtctgggtcctaattcctagtgggagcacggaaggacacagggaatgttgggagctgcatgggccatgtcttggtcccatgggacctggccctacttgacccgaggccacaccagcttgtagacatgagcttttgggggggctttgagtcctaagagacccagctgcccacgccacacagggggaaaggaagcagctggagagtccgctgcccacaccaccccgggctccacggcctcacccccaggccgtcacagagctccagtctcccgccacttcagtgcaaccctcgctgtctgcccactcctccggacatgacgcttaggaccttaccttgctctccagctcagagcccggcccccatggccgggccagacctgccccggcctctcccctccgcctgagccacgccccggcttcctgctcaccaggcctgcgttagcatctgcagctgtgcttcttcaggccgccgcaacaccagccttcccgcactgctccaagacactgagcctggtgcatgctcaggaaattcaacaatttcaaaacattgtcactctccccgcctgacgaccagccttgtactctactcacagggcaacctgctttagcaaactcaacgacacattaaaaagtacaatttgcaaaggagagctaccacctggctgggtgttctgcgcctagagactgggccccgggagagcgctccacagtgaacttgcgaaggatggaatttacataaagaaggcaccgtctttagtcctggaaaggcaccctgggattctctacctccgtccgtctttttcacaggcagggaactgaggtcccaggaggcccaggtcaccccacccaaggaggcagggcctcccctgcactctctggaacctctccctgccaagaagccagaggccctgttttctcaggcttaggaatctgcactctcttgttcaaagactgtgagtcagaagaggagggccaagtgccgccttgaatttctcttactgctcaaatggaaaacaatgaaacagggctgtccacatcacagcctgccacctgccagtcatttagagcctggcgcgcatttccatagctcctctgacgccaggacaatcagacccgtctccggagggctcctgcctctggatgtctaaatgttcttgccttaaacccggtgtgacgctccacccctcccacaccgcacacatacgaattttaacaaaatcttcaaagcagaacttaacaaaaggttgcgtggtaccaggtccatttggttccatgtgaaaccaactaggaagatccgcattaggctcttcctcagctgcgccgagggcctggtttctattcatttgagaagctgtgtgcgcccctgtatggtctgttctttcctttagggctcgcttttaacagtgagtgttgttgtggcaactaaaataaggagccggccagtgctcctagggaggaaaacctcggcaactccgcaggtgcaggcaccggccacagacccacgcctggggcactcgcgtttgcattagcagagcgcaggagtcagggagcgcgggcaggggcgggaggaggggtctgcgcactggccacggtgtgggggacccagccctaccccttcccggggctgagtgggactcgccacgaggccagcagtttttccagg

SEQ ID NO: 265633 - DNA, 341 bp, Homo sapiens
  chr12:131288903-131289244
  hypo
accaccgtgatgaccgatgctcgactcgtgcatgccaagctgttctgcaatgaggtctgaagacgatgcctccggcacaggcaacctctcatcaagatgctcatccagcctgaccagtggtcccaagtgttgtcaagcaagtcagaagacagggccggctgcacacgttctaccctgaaagcctgctgtataaagaacactttctgagggcaggcggctgtggggtccaccgtctctgtctctcgggggcttctgttcgtacgtccctagccaatgtttccttcgagaaactggatttgttagcctctttctttggcgtctcagctcgctcagcctttggg

SEQ ID NO: 265634 - DNA, 40 bp, Homo sapiens; identical to SEQ ID NO: 215294
  chr12:131294422-131294462
  hypo

SEQ ID NO: 265635 - DNA, 262 bp, Homo sapiens
  chr12:131314794-131315056
  hypo
cccatctcaatgctccccagcgccacgcttccctgtgaaagcaagctgctttcccatggtgaccgtcccatgctgtgtgatgcaccccccacagtggcgtggcgtaaacaaccagaggctcaaccctcctctcccatggtgaccgtcccatgctgcgcgatgcaccccccacagtggcgtggcgtcaatcctcctccactctgaacccacggcacgggcggatttttgttccaagtcattcgcttgctggtaaacaatttgt

SEQ ID NO: 265636 - DNA, 225 bp, Homo sapiens
  chr12:131402641-131402866
  hypo
caggggaaagtggggactgacggctccccttttcacgataagggtggcgtgtttccatttgacgaacggacccccttactaagtacctgttagcgcaggtgacacccacctgctccgcgagctcagtagacacccatctccacgaggggggcagcagagcagaacgctgaggctcggagtctgaaccttgagaaagatttcgtcgtggaattctagaattgatag

SEQ ID NO: 265637 - DNA, 295 bp, Homo sapiens
  chr12:131418194-131418489
  hypo
caggcccctcggggcgtccccacgtcagatccctggggtcaagcctgtccccaggatgactccccaggttttgacctgatcgctgcacccatgaggctcccggtgtccgggcgctcctcaggtccccgacacggaggcaggcttgggatgactgcaacctgctctcatgagtcacagcaggtgcctgtcgagacccacacggacccgggcgggcaggacctcggatgctgactccctgtggggtcaggacctccttcctccaggttctgccgtctgaggccgcagcctgctcctc

SEQ ID NO: 265638 - DNA, 385 bp, Homo sapiens
  chr12:131443181-131443566
  hypo
ggctcgcctgcccccgggcagctctggcagaggaagcctggccctggcgcgtctcctcaggagcgctcatgacgggcacgggcgtcacaaacacaccaacagaaacaacctgtttccatcgcaagagaacagctccttaacacgtagcatttcattctaaagagtgctaaacagctatgaaaagcggccagtttgtctgcacgttgggcctttcaatgattttacatcatccttgcgagagccctgcggtggtgtcacgccctcgcaccgcgggtggagaagcgtgtctttcagacagaccaagcgatttgctcaaggtcacagggctcagaggacacaatattaagcccaagaagctcacagcgtgaggggaattaggggagac

SEQ ID NO: 265639 - DNA, 222 bp, Homo sapiens
  chr12:131478126-131478348
  hypo
gaccccagctccaccactcccggctctgtgtccgtgggaaggttatttaacctcagcacacctgcttcccactgtgacatggggacagtgagatcgcccatgtgtctcaggtacttctggctgtgagaaacagggccctctgcttagcggacttagacttcaggccatgtactcgcttcaggcaacaagaggcccagaggcgggaatcctaggagtcactaa

SEQ ID NO: 265640 - DNA, 522 bp, Homo sapiens
  chr12:131478661-131479183
  hypo
aaggctgcccagtgtgggagcgcttccgggctccgaagggaaggacccgcggggtgttgggtggaaagagcgggtatagacaagctggaaggtccttatgcatgtatgcacaggaccgggcgtgaggccccgagacagggcttggtatgcagtaagtgctttattaatacgaacactcttgtttttgttgagatgggctacaaggggtgactgtggcaggcggtgccttctatgcagttagcacttagtaaacactcacactccgggcactagtgccctgcctgtagctaaggtatgcagtcggggcttcatgcccacttggcactggcaccctcccctctagccgtggtacacagtcggcgctcaataaacacccactctgggcacgggcgccctcccgtctgactagccatgggtaccctgcagcatcctcaggaatgtgcagcagacacttagcaggctccctctgtgtttccgggtgtctagggaaggagggagtccgagtgaggataaattaattag

SEQ ID NO: 265641 - DNA, 108 bp, Homo sapiens
  chr12:131499288-131499396
  hypo
ctcaggcaaaaccatttttacgcttcaggcattgcgtgataagctcttggtcctgatgcttcataaccgctctcctctccacatgtcgtttgtttttgccagtgagta

SEQ ID NO: 265642 - DNA, 83 bp, Homo sapiens
  chr12:131501103-131501186
  hypo
agggtagggcagtgctgccccgcggcgtgtcaagcctgtagtcaagagtctgtagctgggcgcagtggctcagcctgtaatcc

SEQ ID NO: 265643 - DNA, 146 bp, Homo sapiens
  chr12:131512465-131512611
  hypo
cagaacagagctgccggatgttctagtgagcgcgtttctgctggtgaacctgactgtgcccttctttgtgggatctgcccaggatggcgtcgctgggtcgaggggcatgttcagcatgaacagctggtgcccggtgccttctccag

SEQ ID NO: 265644 - DNA, 73 bp, Homo sapiens
  chr12:131513785-131513858
  hypo
attgactattatagtcagtgcggatgaacacttgaacctgcagtgcgaatccgttcccctgaccccagcctct

SEQ ID NO: 265645 - DNA, 216 bp, Homo sapiens
  chr12:131515098-131515314
  hypo
gacagaagcttgctggacatcgtccctcccctgaggccaaggccggacgaggggtctcttcagctgcacatcggggcaggtgaggggtgtcagccacgtcccggggaatagtagcctgcccacctcagcagaatggcgaactcgctttcccgtggcctttggcatctgtagcgtggatgccatggagtgtggcgcgtgacacctcaatgtggcaca

SEQ ID NO: 265646 - DNA, 433 bp, Homo sapiens
  chr12:131518464-131518897
  hypo
caccctctgccagtcctccccgggggatgccggctccacctgcagctcacgtccgatttccaccggtacccatcgtcaccatcaccagccttgcccctggtttcactgtctaccccggaggccagcgccagcctcccagccgcccccagctgcacacagcagccagagtaatattcgacgtggccgtcaggtggtgtcaccctgtgctcgaaccctctcggggcttcctctgcatttcaagtaagatctacacgcccttcttcccctgcccaccctgccgcactctgggccactccccgcccattccactccgctcccgccatgcgtctgccttgctctgcgccacatcaagtgcattcccaccccagggcctttgcacgcctgtccttttgaatggaatgctcttcccccgggtccccgcatggttgacacc

SEQ ID NO: 265647 - DNA, 75 bp, Homo sapiens
  chr12:131556200-131556275
  hypo
gtgcacgcactggcgggtcctatgtgtccaggaggcccgaggaaggagagagtggagacccggatgccgggttca

SEQ ID NO: 265648 - DNA, 724 bp, Homo sapiens; identical to SEQ ID NO: 215295
  chr12:131572481-131573205
  hypo

SEQ ID NO: 265649 - DNA, 183 bp, Homo sapiens; identical to SEQ ID NO: 215296
  chr12:131573235-131573418
  hypo

SEQ ID NO: 265650 - DNA, 330 bp, Homo sapiens
  chr12:131581012-131581342
  hypo
gtacacagagccacatctcccgtgttaaccactgcatagctctcccgcgggtggacactgaagtcatggtggtctttggccgcagcaaataaccagcatcctatgcacacatcccgcctccatctgtgaggatgggttcccgtggggcactgctggtccaggtttacatcccgcctccatctgtgaggatgggttcccgtggggcactgccggtccagttttatatcccgcctccatctgtgaggatgggttcccgtggggcactgccagtccaggtttacatcgccacaactgtttaaagcagccatcgtctggggcacagtggggact

SEQ ID NO: 265651 - DNA, 34 bp, Homo sapiens
  chr12:131615309-131615343
  hypo
cgaagctggccatcccgtgcggggccccagtggc

SEQ ID NO: 265652 - DNA, 342 bp, Homo sapiens
  chr12:131623221-131623563
  hypo
ctcccacccattctcgcactccgcccccgcccgcagctgtgtgattttccatttgcttagggaccacgtctgccctgctccatgggagctggctggctcatgggctgctctagccccacggctacagctgcgccgggtgtgtggcacgctccatgagtcaccgtggaatgaacgcagcgtggacagatgcatgggggtgaaagcgtgggtgccgggcagatgggtgagcagaggagggagtgagcgctcagcacagcacgcctgcagtgcccttaaggggagtcagcgtggagaaccgtgcggctggagacgccacagtgcgcacatcctcatctcccccag

SEQ ID NO: 265653 - DNA, 127 bp, Homo sapiens
  chr12:131687733-131687860
  hypo
tgtccctggggagacggaaggagcagccgacttgcaccgagaagaaagcaaaacactctctcgtggttaagggcgttgcgcggttgctctcacagggaccggcgttccctgtcgggagggatgcggc

SEQ ID NO: 265654 - DNA, 140 bp, Homo sapiens
  chr12:131747238-131747378
  hypo
gcatggcgggacggcgtggctgagaagcagaggagaaccgtgccccgcagttctccacgggttcaaacaaccggatgttacctgtggcctccgtggatcaggaacttgtggcagaggcacaggctcgaggaagacctcag

SEQ ID NO: 265655 - DNA, 177 bp, Homo sapiens
  chr12:131758656-131758833
  hypo
cccagagatgaagccgctcctgacagccactcacagtaacaagggcagagcccagggaaaaatgcaccatcacggggaagactctgcagggacagggcagacccgagtcccgttgggtcccaaccctggccgcctgccctgcatcagaggttcccaaagcggcggacacgggcaccc

SEQ ID NO: 265656 - DNA, 565 bp, Homo sapiens
  chr12:131766862-131767427
  hypo
gcgttcctgggtggcgttcctgggtggcgttcctgggtggcgttcctgggtggcgttcctggggtactcgggagggagacggagagccaggcttgcttgcacccaggtggctgggtctgctaagatccctgctggccacgcagtgagctcagtgtcgttgtcaccatcctcgacgtcagccccacaaggagggtgctgcccgacatcccagcctcccgctgcggaagagagaggtttggtaaagaaggaacaggtctcagagtcccagcctgtgggctctggggaggggattagaaatggcgcttccagagtgcctggaaggagcgaagcagctgccagtgtcattgtcattatctatgttgaggatgacacaacaatgccctcgatgacgttgaaaggctgtttccagactcaggggctccccgcctcgctcagttgaggacctgccctggccgcagcccaccctcagccctcagcagagctggggcctgggcagctctgccgtcttcttccagaggggcgctggaagaagctcccgaggatgaagtctcggccgtcttcatcc

SEQ ID NO: 265657 - DNA, 183 bp, Homo sapiens
  chr12:131834063-131834246
  hypo
gtggccaccagcgtcgcagcagcaaggtgagcctgagcaggagcacactgtccctacctgtctctgtttcttcctgccccttggggtgtgggcaccttgccagctgggaagctgtagtctgtaacagtgatcatcgtgctcttcgctgccgtcatttccaacatcgtccgagaatttatgaag

SEQ ID NO: 265658 - DNA, 350 bp, Homo sapiens; identical to SEQ ID NO: 215299
  chr12:131836988-131837338
  hypo

SEQ ID NO: 265659 - DNA, 151 bp, Homo sapiens
  chr12:131872313-131872464
  hypo
taggccagcttagtccttagcgggaagacccctcgtgacccgtgacgccgtgggctgggggaccacgggagtcttagcgctgtgtcctccccggtgccgccacggtgcagtgctcgttttctcaggctgcgtggcccaggccccaggatgg

SEQ ID NO: 265660 - DNA, 402 bp, Homo sapiens
  chr12:131943499-131943901
  hypo
tgacaattaggcttcaatggcgttcacgttgacgggtgctggatcgcccggcttggggcgtctcacgtggcttcagccctgccctccctgcggatctggctctggtacccaccgcgctgaaggagggagcgtgggaacacgtgagcctctctgcacagggaggtcccaggactgacaccgacacggaatctcctcaccttccacgggtccctcgggtccccaaatccaaactcacgccgggaagtacctcaacgcacttccgccctggcccaggctggacaaagcccaggtgctgctgagctggaaactcgctcttcaatgaggttcatctttttccgcgccaatgacatctttatgggggaggcattcagttatgcgcccgaggctcagcacctcatgtgc

SEQ ID NO: 265661 - DNA, 434 bp, Homo sapiens
  chr12:131978695-131979129
  hypo
gagccgggaaagcgcgggcatcaggagcacgaggggcctcaggacagcgcgggtgaccctgggccaaccgagcctcgatgccagccccaagcccgtggagcccgctgtccccttgtatgtcggcggcagacagagggacagggtcaggtggggcagagtccacagaaggcccactgcactcgctacctgggcagtaggggagccgcccaagccgggcctccgacgtcccctggttggagggcgagtggttcaggctcactcccgagggtcctgaccagcagaaggaggggcccagggacaggtgaggagatgcagtcctggtcccggcgaggacagcggccggctcttcccgtggcccggagggccctgtcggaaacagcttgaggacccggagttcccaggagtctcctgccagccttcgtctctgcctgccc

SEQ ID NO: 265662 - DNA, 46 bp, Homo sapiens
  chr12:131999408-131999454
  hypo
cctgggcacaaccccgagccagccttccccacgctaccgggatatc

SEQ ID NO: 265663 - DNA, 109 bp, Homo sapiens
  chr12:132014576-132014685
  hypo
actaggacttgcacagggagcgctgggaaagagcctccctctctatccgggaacctcagagctgcaagtgggcaccactcgctttcacgtgtccatgctgggagagacc

SEQ ID NO: 265664 - DNA, 301 bp, Homo sapiens
  chr12:132060404-132060705
  hypo
caaagaggaattctaacacacggcttccccgtgccacctgccacctgccctgggctcagcgcacacaggcccccctgttgctgtgaagacgctgatctaagaggacaggggaagaccaaggactccacgctgctgggtcattttaacccctccacacaggcctggtgaccgtccccgtgtctcaacagtcggagcaaaatgcacagaggaaaggggtcaaatccccaaaagatgcagtgagtaagacccactgcagtgagtgagagccagtgcagtgaattagacccggtgcagtgagtga

SEQ ID NO: 265665 - DNA, 45 bp, Homo sapiens
  chr12:132069344-132069389
  hypo
ataataaaattggtcgcacggtctgctcaccgtcacgtagcccca

SEQ ID NO: 265666 - DNA, 206 bp, Homo sapiens
  chr12:132069627-132069833
  hypo
ctctcttcgcgtctcatcagccctctcttcacgtctggatcagccctctcttcgggtctggatcagccctctcttcgcgtctggatagccctctcttcgggtctggatcagccctctcttcgggtctggatcagccctctcttcacgtctggatcagccctctcttcacgtctggatcagccctctcttcacgtctgatcagccct

SEQ ID NO: 265667 - DNA, 496 bp, Homo sapiens
  chr12:132076259-132076755
  hypo
ccacagaggggtcacgcagcccagtcaccagggccatgcggctccacggcttctacgcttgggcactgaggaccgaggggttcaatcaggtcccagctccagtccaaccttggaagccaagtgttgggaagggagcatccgaggacagacagagccagggcccctgagtcactgcaggaggacgcccccgctgggactcggcgtccgctgcgctgagccgctaaggagccggtctacttgctcccgcagcagcccgggggccggagctgccgacaccagggagacgcgttttctgcactgactcctacgctcccgcgtggacatccccagcatgatttctgtctccacccacttcgcacacaccccgccccggccagacacccccaaacccacacagggtgcagggacaccgccctggccttggctgtggctgtcacactcgcctgtcccgccttggccccaagtcctgccagcccggctccgtccccgccccact

SEQ ID NO: 265668 - DNA, 57 bp, Homo sapiens
  chr12:132097243-132097300
  hypo
tggactgtggccctcgaggggacccatgtggaccacggcagccgaggctgcagagcc

SEQ ID NO: 265669 - DNA, 151 bp, Homo sapiens
  chr12:132101821-132101972
  hypo
cctctggctgatgtcctgctcgtccacctgcgtacccggctccttccatggaaagctcccgaatgcacggcctggagtgggctttctcctgaccagcgagccacttccttcgtcggacagagcaccatgcggagtggagattagagtggag

SEQ ID NO: 265670 - DNA, 76 bp, Homo sapiens
  chr12:132158658-132158734
  hypo
gcccagtttgctgataaacacgtggggctccagtgtccacttctgtctgacctgcgccaatgcctgtgacatcctc

SEQ ID NO: 265671 - DNA, 265 bp, Homo sapiens
  chr12:132169225-132169490
  hypo
aatcacggcgtgtccgtctcctgctctgtagaatgggaatcatgcgtgtctgattcctgctctgtagattgagaatcacggcgtctctgtttcctgctctgtagaaaatgggaatcacgtgtgtccgtttcctgctctatagaatgggaatcatggcgtgtctgtttactgctctgtacaatgggaaggaatcacgcgtgtccgtttcctgctctatagaatgggaatcatggcgtgtctgtttactgctctgtacaatgggaat

SEQ ID NO: 265672 - DNA, 241 bp, Homo sapiens
  chr12:132177128-132177369
  hypo
tctccacctgcccccgtgaaacacaccggatatcagctcccccaggcacagcagctgaatcccagggtctatgacgtgctgcggaggcggggagggggacaggaggccaccagatccctgacgtcacctgcccatccaggacaggaaaggacatcatcgtgcaaggagcctccgtggggtgtgctggagttggcccgtgagcttgcagagccggtcattagagctccgggaatgcacgagc

SEQ ID NO: 265673 - DNA, 92 bp, Homo sapiens
  chr12:132197185-132197277
  hypo
tttggaattagagctcgaaaacgagaactggtgaagggagggccgcggaatcagatcatgtctggatctgatggctccgtgctgtgctcaag

SEQ ID NO: 265674 - DNA, 64 bp, Homo sapiens; identical to SEQ ID NO: 215302
  chr12:132205019-132205083
  hypo

SEQ ID NO: 265675 - DNA, 622 bp, Homo sapiens; identical to SEQ ID NO: 215303
  chr12:132218721-132219343
  hypo

SEQ ID NO: 265676 - DNA, 118 bp, Homo sapiens; identical to SEQ ID NO: 215304
  chr12:132221105-132221223
  hypo

SEQ ID NO: 265677 - DNA, 677 bp, Homo sapiens
  chr12:132221597-132222274
  hypo
gtagtagcaaaagactgaggcgacgcacatcctcggtggaggactaatggagtccctctggtgtgctctcgcggtgggctgcagagctctgggggtgggccagggcccgagcgctgcagggccacccaccggaatggctcttcctgagggtggaggcgaggtgactcaaggggagggcagcacgaggcagtctgttcacgtcagaaggggagggaagtgtctgtagtgcttctgtatcggcacctaaaagggcaggtaagaaggaccagtggccagcacagagaggggaactggaaggacgaggtcgcagacaggagtggctgactcacctgcccgtttgcgctgcttgcattttttcagcgtgactcgtcaccctctcaaaacatgcagattgacgtggtacttattttgagactaaactggtatcctgagttaattccttacaactctgtattttaataatacgtgcttttatcattttgtttcatcagctcagtgtgtttttgtttaggcggaagtggcccccgtaacatctttcccccgtagagacttgcatacccagtactgctgtgtctcgtgggaggctgctgggtcactaagcttttctggctttcatacgctgggtatttaataatcaccttaggatatactcagtcgttctttcttatttacttcct

SEQ ID NO: 265678 - DNA, 42 bp, Homo sapiens
  chr12:132240156-132240198
  hypo
ctggcatactccatctttcacgtcccccttagctctggaacc

SEQ ID NO: 265679 - DNA, 230 bp, Homo sapiens
  chr12:132241086-132241316
  hypo
ggcgcgcctgaagacgcagccgaggtgggagcacgggcaggctcaggcgggaagaaggaggcatcgtccagtaagaccgtcccggacgggaagctggtgaaaggtatgctgccacttgcatgttggccttgcacattccaccataagttggcaagcgtaggatcctcggtgacctcagactcagcgccctcacctgcaggctggggtggggttggcggccccctggaggt

SEQ ID NO: 265680 - DNA, 295 bp, Homo sapiens; identical to SEQ ID NO: 215306
  chr12:132241764-132242059
  hypo

SEQ ID NO: 265681 - DNA, 81 bp, Homo sapiens
  chr12:132242312-132242393
  hypo
ttgggcctctcattcgagtaggttacctgagcacaagtgatccagctctcacccttcccggccacccgcatactctcactg

SEQ ID NO: 265682 - DNA, 102 bp, Homo sapiens
  chr12:132243979-132244081
  hypo
gcttggcaatctgtagaccacgatcacttacaagtatagatgttaaaatattaaactgaattcagctatgtatgaaaatagtaggccgggcgcggtggctca

SEQ ID NO: 265683 - DNA, 329 bp, Homo sapiens
  chr12:132247420-132247749
  hypo
ggcgtaagccactgcacccggccaattttttttttcttatggaaaatctcaaacatgtacgaaaacagaatatcacataatgaccactcacgccccacacacgtgctcatcatctggcttcagctgccggccctgctgctttttattttgatgttataaaatactgctgtcccggtatcagtatctttgtgtgtgccctgtcccctgaggcagttgttgatgaaaagtggttatatttcagagggtctgggctatcacatgcttaactgtctacttcacatcacacgcgggtttggagccataaaatgctaaagcggaaggacctccgc

SEQ ID NO: 265684 - DNA, 287 bp, Homo sapiens
  chr12:132249402-132249689
  hypo
gaatgagctctgctcttcactgagcctcaaatgcagtgccgctggcagtttgttttcgaagaaactgagttggccgtcttagctctaatgcgccacagtggaatgcattaatggcagctcactttgcacttggctggcagccccagggtaaaaggctcagcctgtcttcccagctcaggaaccaaactaggagatgccctcttgtgaggctgcctacccacagaaccattgggcccttgaaggtggtgtgtccccagctggttttccggctgcggctcatcttcatg

SEQ ID NO: 265685 - DNA, 241 bp, Homo sapiens
  chr12:132250662-132250903
  hypo
caaagcaaaagctggaagatcgcctcgcagctgctgcccgggaaaagctggcccaggcgtctaaggagtcaaaagagaaacagcttcaagcagaacgtaaaaggaaagcggcgttatttttacagaccctcaaaaatcctctgccggaagcagaagctgggaaaattgaggagagtcctttcagtgtcgaggtatagtaaaatcccacattggtatctgcggggctgtgtgatacatagag

SEQ ID NO: 265686 - DNA, 581 bp, Homo sapiens
  chr12:132259528-132260109
  hypo
cagctggagagttgactcctcgcactcctgtttgtcttgactgtgcctcagatggcgtctcgcgcccgtttggttttgtctttcacagacgtttgccagggaccatgtttttccatctcccctctgttttaacacagcgccttaccaatcacacaccaaattagtgcagtgattttgtgagcgtggagagagtaaatgaggagagttcttcaccagaaaaagacagcaaagacgtgtttctcttccttctcgtcacagaacaaactccttactcgagggtggagtatgtgtctcagctctccttctcttcagctctctctttgttttcctggggaaatcccgggccttgttgaaaggacctgcagcagctctgacttcccgaacactcacaggtgcccgtgttgaggttcccaatggcgtctttcagcccctgggccggcttgctttctgcgcagcgtgtgctcctgatgtagaggccgtggatactggcatttttttagtgcatcagctgatttctctggtgtccacccagggctcgcctcagaggatgtgctcagctcgcaaacctgtgttctttgctc

SEQ ID NO: 265687 - DNA, 111 bp, Homo sapiens; identical to SEQ ID NO: 215310
  chr12:132263619-132263730
  hypo

SEQ ID NO: 265688 - DNA, 339 bp, Homo sapiens
  chr12:132270179-132270518
  hypo
cacccctggaggggcgcgggtctcagggtccttggccgcgtgtggattatgtcaccacaggagagggacgagtcctttccaggcacatgaggaggaggaatcagtgttaatgggtggctttgcatctgtgaaatcgcataaacttaagttagctgaagctgtcgtgagactggcatttccaaattggattgaaggtttcaggcttcatgccagcgcaccacagcctgttcctgagtatctgtgctgagaggctgtaagattagtgtgaacaggagaaatttccaggtaggcctctagcttcattaccgttgggtttcttactgccggtattcagacagg

SEQ ID NO: 265689 - DNA, 320 bp, Homo sapiens
  chr12:132270820-132271140
  hypo
tttcagttcgttgtcggtaaagtagtgaagtgtggcaggggttctctgaagcctcagggtctacacaggcaccaccctgaggagcagcctctgcagacggggcctgatctctgccagggcagtaggaagcatgacacgtcccgccagccaggccacagagctgaacactgcctcctcccctgtccaggtcccgctcccggtcccctcggaggagagcccactcccctgagagacggagggaagagaggagtgtgcccactgcctaccgcgtgagccgcagccctggggccagtaggaagcggacccgctccaggtaggcc

SEQ ID NO: 265690 - DNA, 288 bp, Homo sapiens
  chr12:132284411-132284699
  hypo
gggcccccagccctccgacagcagccactggactccccttccccgtctccacgcctcctgcggtcaccgcacaccccttcttcccaggccgtcagctccccgtgggcatgtgtccctgccggcacccatgctgcaactgccggacaggccctccctgcggcagtggtgcacagcaggggagcagcccagccccgcctcaccatgctgagcaccgcatgttgccttgagcgccggctgcttgctcctggcgcctttcctgacgtgcagatgcccgggactccactgcag

SEQ ID NO: 265691 - DNA, 478 bp, Homo sapiens
  chr12:132285800-132286278
  hypo
tacatggaaaagtttttgtacgtatgtagtctttttttttttttttttttttttgccaaaagcctcgagcacctgatactcccagttggtctcccatccaagtactaaccaggcccaaccctgcttagcctccgcaatcagatgcaaccgggcccgttcaggcatggctgttcgtgtttgccgtggcccgtgtttgccgtggctgttcatgtttgccgtggctcgtgtttgccgtggctcgtgtttgccgtggctcgtgtttgccgtggctcgtgtttgccatggcccgtgtttgccgtggcccgtgtttgctgtggctgttcgtgtttgccgtggcccgtgtttgccgtggctcgtgtttgctgtggcctgtgtttgccgtggctgttcatgtttgctgtggctcatgtttgccgtggctcgtctttgccgtggcccgtgtttgccgtggctgttcgtgcttgccatggcttctggg

SEQ ID NO: 265692 - DNA, 561 bp, Homo sapiens
  chr12:132324904-132325465
  hypo
ggctctcatttccctccctccgtcatctatcccagtgaactactggaaccgccgtgagtgcatcggatgactcctggcgtggggaggaaggcggaagatgggggagaccctcataggggcacccccgggctgaggaggggcgttcagggaacctcggcctggggcacgtggcctgttctccgtgactcactctgggctgacccctgcctgcagggtccggacgttcccacgggactcaccactggggcacgacacggtgcgtgcactcatgtactacgccctcaaggtctggagcgacattgcgcccctgaacttccacgaggtggcgggcagcgccgccgacatccagatcgacttctccaaggccgaccataacgacggctaccccttcgacggccccggcggcaccgtggcccacgccttcttccccggccaccaccacaccgccggggacacccactttgacgatgacgaggcctggaccttccgctcctcgggtgcgtctggggcagccctcagggcagagtcaggagccccagcggcctgtgaggctgaggagca

SEQ ID NO: 265693 - DNA, 111 bp, Homo sapiens
  chr12:132326247-132326358
  hypo
acactccatcatgcggccgtactaccagggcccggtgggtgacccgctgcgctacgggctcccctacgaggacaaggtgcgcgtctggcagctgtacggtgagtgtctccc

SEQ ID NO: 265694 - DNA, 247 bp, Homo sapiens
  chr12:132328364-132328611
  hypo
actcccacctcgacgtcagctctgggggcagcagtctcgctgatcgcagctgcgcccccacagagcctgtctgctgagtggcctcggtttcatccctgggattcagaagggctggtgggatgtggggggaggcgggcgtcgggggtttgaggccgtcctcctccttgtctcccgcaggtgtgcgggagtctgtgtctcccacggcgcagcccgaggagcctcccctgctgccggagcccccagacaa

SEQ ID NO: 265695 - DNA, 163 bp, Homo sapiens
  chr12:132329467-132329630
  hypo
ctcggcccccgcccgctgaagcggtggacaggcacccccgttttaatttgcctttagcagacctctaggcaaggataggggctccacacaaggatgcctgtcccatgccgctcaggtcaggggctctgccgcaggatgccctgtcccgcgctgcccaggcccc

SEQ ID NO: 265696 - DNA, 208 bp, Homo sapiens
  chr12:132329848-132330056
  hypo
cttctggcggctgacgcgggaccggcacctggtgtccctgcagccggcacagatgcaccgcttctggcggggcctgccgctgcacctggacagcgtggacgccgtgtacgagcgcaccagcgaccacaagatcgtcttctttaaaggtgggtgggcctccccgtcgcactccgggcttcccgggccctctgtccgcctcatggaggga

SEQ ID NO: 265697 - DNA, 94 bp, Homo sapiens
  chr12:132333034-132333128
  hypo
gcagctgtcacctgcgtccacctcccgaagatttccaccttcccaaacggaaacgctgccccgtgaaacacggatgccccgccccgcccctggg

SEQ ID NO: 265698 - DNA, 199 bp, Homo sapiens
  chr12:132333509-132333708
  hypo
tgacgttttggggagcctatgttctgtctcccgcagcggctgcacaatttcatactccctccccggcagcgcccggctctgccgtccccatatcctcccgacacaggtgactttccacgttcttgacagtgggggcgagggggcgtctcattgtggttttgagggcgtttctagtgacgttgaccatcttcaagtgctc

SEQ ID NO: 265699 - DNA, 382 bp, Homo sapiens
  chr12:132349597-132349979
  hypo
aaaaaaaaaaagcaaagctggaaaagatagcttctaggtatacacatgcacatacgcactaagatcgcttctaggtatacacacacatacgtgctaagatagcttctaggtatacacacgcacatatgcactaagatcacttctaggtatacacacacatacgtgctaagatagcttctaggtatacacacgcacatacgcgctaagactgtttagtgagaagcaaggagatgatgcagtgtcagcggggagtctcgcagctgacacagggtgagtcctgtctgactccatttatgtgcagtccggggatgggcacgctaatgtccagaggctgagatcaggacagtgactcactcgtcaggaacgacggggcacctgccag

SEQ ID NO: 265700 - DNA, 244 bp, Homo sapiens
  chr12:132377978-132378222
  hypo
gcactaacttttccccggtcctctctcccagagcaatcgctgttggctgtgtcttctgtgagtgagcccccgggctcttttggctgccggcggtgtgactttggacacattctccaacttttctccgccttgatttcctcatctgtaaaacagggacataacagcaagtgcctcgtggaatcattgaatggatgcactaatcgctggaaagtgcgctgcttggcctaagtgatgagttagctgt

SEQ ID NO: 265701 - DNA, 34 bp, Homo sapiens
  chr12:132397845-132397879
  hypo
ctgtggccttggaagtggcccgtgttatttacaa

SEQ ID NO: 265702 - DNA, 130 bp, Homo sapiens; identical to SEQ ID NO: 215316
  chr12:132400435-132400565
  hypo

SEQ ID NO: 265703 - DNA, 292 bp, Homo sapiens
  chr12:132406594-132406886
  hypo
ttctttgttcaagcgttcctctggggaccggcagcagaggcaccgtgttctctcagccctggatacgtcttgtaatctttcacactttattcctaaaacgtgtcttatttttatgcagctcattttttctttaaaggagaaaacttgtaggtgtttaagaattggttttgggagggcgaggactgggccaggttagaggcagatggcacaggggcgtgtggcgggcgggtgaggctgctttgcacacctgtgttggtggctgtcccctgccgcccctccctgtggcagcagc

SEQ ID NO: 265704 - DNA, 120 bp, Homo sapiens
  chr12:132411602-132411722
  hypo
aagagagggagagggagaccgtggggagagcgagagcgagagggggagggggagggagagcgagagcgagagcgagagcgagagggagagggagagagatttttgtatttttagagacgg

SEQ ID NO: 265705 - DNA, 498 bp, Homo sapiens
  chr12:132423550-132424048
  hypo
actgggattacaggcgtgagccactatgcccggccctccagatgcatttttaacagctgaattcatgtgtgaaatgacgtaaggtccgcgtagtccttctttctcagagaccagcgtgcgaggcccaagggacccaccttccgtcacccgttctgctttgtttacagggtgtgtccgcagccggccaggtggtatccctgaaggtgtggctgattgacgacattctagaaaagatcaacagccaccttccctctcacattcggattctgggtaagccttgcagtgcaggcggccacacacctggttgtagatggtcttgcagagacacgaggctatgcatgctcctgccttttccaactgtctctgatgcagaagcgtagtcagagttgctttgcagctggttctgaccttcagaaacgggagccactagacaggagtagaaagctgttcatttgcagtgcttgttgctacacgggcgccttgttttaagcaaacaca

SEQ ID NO: 265706 - DNA, 181 bp, Homo sapiens
  chr12:132474661-132474842
  hypo
gttgtcatggggtcgtaagaatcagtctgtcggagctggtgaggccacttcccgagaccagagctcgggcaccttgcttaggaagctttcgagcaccagagtcagcaacgtgtgcactctcctgggctgttgcttgttggcctttgaatgagctgctcgtgcctccgtctgtcttgcacag

SEQ ID NO: 265707 - DNA, 193 bp, Homo sapiens
  chr12:132504707-132504900
  hypo
cccgcttcgaggacggccgcccatcgccacgttctctgccaatccggaggcaaaaggtagacttcacgtagttgtctgctctccgccttatggaggtttttgtgggacaagttcatggcactttcttctcgcgcctctggatgcggtaattgtccctgagtgggaacaggcaccacccgctggctttctgaag

SEQ ID NO: 265708 - DNA, 271 bp, Homo sapiens; identical to SEQ ID NO: 215320
  chr12:132514252-132514523
  hypo

SEQ ID NO: 265709 - DNA, 73 bp, Homo sapiens; identical to SEQ ID NO: 215321
  chr12:132529444-132529517
  hypo

SEQ ID NO: 265710 - DNA, 1163 bp, Homo sapiens
  chr12:132536800-132537963
  hypo
tgtcacacagtggcggatttgggaggcttcctcgttctgtggccccctttccgcacagtagtggagtgatccttgtcagaaggagttggctcagggcccatctccgcaaacccccaggactccctactgcccacgctctgagtcgcctggccctggctttcagccccttggtgctccctgagtgtgctggcagccgcgccccagcccttcacttaactgccctcgtgagatgttttcagagcgcactgttgagaattgcagccccgccctgctgttttcctccatagcagccagtacgtcttcagacccactgcacattttacctgtttgtcgtctgatgtgagtgctgtgatcgctgggactctagcgtctgggagcacagacccatcatttgattgatgttgtcgattaaatgaagagttaattcaccctactaatatttatggaccgcgggcctgcgcggcgtggagcctgggcattctcgggggagcgagagaggcacagtcccgccctccctttacctccctggagaggaactcgagggcatcctcacagaaggaacagacagagattttcccaagtacagtgcagacacatgaggtgggctgtgcgtttgggggctgccacaagtacgctggggacgtgttcggagatacttttcctggagagtgggagagctcggcctcaaggaagaggactcagcgccaggctgaggatgaggtctaggtggctcgatctcctgcagggcacattgggcaccttgctttacgccctcatctcttgggctggagctgccccagcacctggcagcatggtgtttctagggtacgtggtacttgtctgtcttaaaacttgcctgtatgtttttaacctttgcgtctgtctttcagtggaatcaactatgacaagccgctgcctcccatccaggtggcatctctccgtgcagagcgaatcgcaaaagagaaaaaggtcagcgccctgggcccttctgcttgagtgggaaaatgtggtgactgtgacttcatccagggggtatgcaggccgagtctgcccctccagtggctcctcttccttcctggcccctcaggctctggctgatcagcagaaggcacagcagccggccgtggcccagccacccccgccccagccgcagcccccaccac

SEQ ID NO: 265711 - DNA, 175 bp, Homo sapiens; identical to SEQ ID NO: 215324
  chr12:132541957-132542132
  hypo

SEQ ID NO: 265712 - DNA, 206 bp, Homo sapiens; identical to SEQ ID NO: 215325
  chr12:132546645-132546851
  hypo

SEQ ID NO: 265713 - DNA, 63 bp, Homo sapiens
  chr12:132547231-132547294
  hypo
ggcaagctgacgccggtgagcatttcccagaggaccatgaacgtgtgcgtcttgcggtcagtc

SEQ ID NO: 265714 - DNA, 193 bp, Homo sapiens
  chr12:132548919-132549112
  hypo
ttggtgctacagatttaaatcgacttgtttgtgaggataatagaattctttttgctatgaacttatcagtcagaatccgtgtttgtagttttcaccgacgaatgcacatttttaataaatgaacacctggaagatactgggcagcccatggaaggcggtctggatgctgcacggtagcaggtgtctgctttgg

SEQ ID NO: 265715 - DNA, 483 bp, Homo sapiens
  chr12:132549416-132549899
  hypo
caggtggcccggctcgtaagtgtcagtttctgtttgttttccaaaagcagcatctttttatgttttaacacagctgttgcgcttgctcaggtgcgtgtcacgtgttacaggagtgagtgtgagacgggttcttttccccgagaacttagtaccccttggacagaggacgggactcaccactcgtggaacattaacacagcagcagctcccagagcccatccaggcatcaccaagcttctcagggcttgaattgaggggggtggagagtgagcgaggtgagatgcagcctgcgtggcttccctgtgctgctgagggaccctgcagggaccaaggcctgtgtggctggagcagagggcgctgtgcatgtaagccgtaggcatgggcaggtggcggtctctgaagctgctctcaggtgaccgctgtaggcagggagagcatttggagatttcagaagggactagcatcaggcgcaagtgctgtctg

SEQ ID NO: 265716 - DNA, 236 bp, Homo sapiens; identical to SEQ ID NO: 215327
  chr12:132551505-132551741
  hypo

SEQ ID NO: 265717 - DNA, 100 bp, Homo sapiens
  chr12:132553984-132554084
  hypo
ggagtcttgagcgcggcatggtctctgcggccctaatttcgcagtctctccccagatcaccgcacagcagatcaccacccctggcgcgcagcagaaggtt

SEQ ID NO: 265718 - DNA, 371 bp, Homo sapiens; identical to SEQ ID NO: 215328
  chr12:132556450-132556821
  hypo

SEQ ID NO: 265719 - DNA, 225 bp, Homo sapiens
  chr12:132561923-132562148
  hypo
ttttctgactctctcggctcaggcttctccacagactgtggcgctcacgcaggcgacggcggccgggcagcaggtgcagatgatccctgcagtgaccgcgactgcccaggtggttcagcagaaactcattcagcagcaggtggtgaccacggcgtcggccccgctccagactccaggcgctcccaacccagcccaggtgcccgccagctccgacagcccaagcca

SEQ ID NO: 265720 - DNA, 141 bp, Homo sapiens
  chr12:132567363-132567504
  hypo
ggaacctttatttccgacctcctgcctgatcttgtgtagccacctacactccgaccagcccccagagcagcatcgttctgccccctgtgcagcctttcctgtctccctgactttgtgctcgtctcctttgttgtaaagtat

SEQ ID NO: 265721 - DNA, 38 bp, Homo sapiens
  chr12:132567750-132567788
  hypo
aaaatcaaagctggccgggcacggtggctcacacttgt

SEQ ID NO: 265722 - DNA, 38 bp, Homo sapiens; identical to SEQ ID NO: 215329
  chr12:132581294-132581332
  hypo

SEQ ID NO: 265723 - DNA, 98 bp, Homo sapiens; identical to SEQ ID NO: 215330
  chr12:132581392-132581490
  hypo

SEQ ID NO: 265724 - DNA, 438 bp, Homo sapiens
  chr12:132592865-132593303
  hypo
ccatggctacctgccggccacagatcgaggtttcaactggacttcaaacaaagcttcagtgcctagggccagatttgttctttccagccctgtgaggcctgaaattgcatcagcgagccaagtgtccccgtgcccctctgttagtggctgaggccgccagctgcatgggatgtgcaggcggtgatcaactttgcaaagcttaaacattattttcccttcttcctcccttccctttgaatattccctctcaggtaaaggttgtggccagaaagcacgggcagcctgggactcctgttgccatagcaacccagctaccgccgaggacttctgcggcttttccagcccagcagcagccgctccaggtactttctgatggctccacagtgcagctccccagactttcctcactcggatttgaggactcgatgtgctgaggca

SEQ ID NO: 265725 - DNA, 84 bp, Homo sapiens
  chr12:132601574-132601658
  hypo
gctcctctctgccctcgggacaggaggtggtcagggaaggtggtcccgtgtcctcaaggcggagtccctcgcagatggtgctga

SEQ ID NO: 265726 - DNA, 301 bp, Homo sapiens; identical to SEQ ID NO: 215331
  chr12:132603385-132603686
  hypo

SEQ ID NO: 265727 - DNA, 462 bp, Homo sapiens
  chr12:132617104-132617566
  hypo
ccttccatgagccccgcaacccccaggccttcctggagtgggcgcctggtgttgcctcccacccctgcccggcgcagcccctgggagcaggagccgtggggagggctggactgcagtaaggacgcctcgtgggatgtgccaaaccgctgcgtggagcctgggctgacttctctggatcttggtgcaactggcgtggcccttccaggaagccgggccacctggctcagagacgccagaccctggccggcaatggggctgccaggggcggggacgctggaggagctaggggtgtgggccactgtgctgcctgccccggcctggcggcctctccgtagcagagctgaggctgggacgcaggtgggggagcctggatgcgcctccttcctcagccacgggaggatgaggtccaggagcgcagcggggcccacgggggagcgccttcgggtgcggctcgtcgctgcc

SEQ ID NO: 265728 - DNA, 165 bp, Homo sapiens
  chr12:132622473-132622638
  hypo
cctgggacactccctatagccggagccttccttcagttagcgtcaggttccgggttcatccacggggtgcctatgctggtgcctcactcctttttctctcctggtgtggatttcccacgttttattctccattcatcagctgacggacatgtggtttctagtttt

SEQ ID NO: 265729 - DNA, 100 bp, Homo sapiens; identical to SEQ ID NO: 215332
  chr12:132630793-132630893
  hypo

SEQ ID NO: 265730 - DNA, 808 bp, Homo sapiens
  chr12:132643291-132644099
  hypo
ctcctcggatctcacgggggctaacgtgtcccccggaaagagatgtccccgtcctggcccccagcatcggcgagtggaccttatttggaaatagggtctttgcagattaaggagccagctgagatcatcctgcattcagggtgggccatcagtccggtggccggtgtcctagtcagaggcgtgaagaggagggcggaggccggaactatccatcggctccgagggtggagcaggggcctctgggagctggaaaaggcaggaatgggtcctccctgagtctctgagggccccgcctgcccacacctgcccatatttgccccaacctgcccacacctgcctcaggacagcatctcggtctcctggctgccagactgtgatgaagatgcatggttctaggccactggcttgtggtgacttgttgcatcagctgtggggagctcacacggtagcgcctgtcttggggggtgctgggcgggtgaccttcaggagacccctggggccccgctgccctcccaatgcctccagtcccagtgtctctgtggtggcatcctgtgctgaggatggtgcctcgcggagcctccactgcccctgtgtgctccgcaccacgtctgtctcgatggcgcccctcgaagacctcgggaagctccccgttcgctgtggccccccggggtctgtcccctgcagcactgttctctgggggctcgtggtccgagttctgatactgcaggtggcaggtcccctgaaggcatagtcagaggctttgctctgggctggcatggaggtatgggcgtggcggggtgtggctggg

SEQ ID NO: 265731 - DNA, 196 bp, Homo sapiens
  chr12:132653031-132653227
  hypo
agacggggtctaggccgggataacgggatagtccattgctgggccagggctgctgagcgtgggtggggactgccgactgcagtacagacccagacggcaggagcccggcaaagcctgcccttccgaggagcctcacgtcggaggagctgcctgggctgtgctggcgccaggcttagaagccggggccccaactccg

SEQ ID NO: 265732 - DNA, 36 bp, Homo sapiens
  chr12:132656982-132657018
  hypo
gctgcccatgagcccggagcccgccattcccgctgc

SEQ ID NO: 265733 - DNA, 252 bp, Homo sapiens
  chr12:132665276-132665528
  hypo
gacttgcagctccgcgtgtctccgtcacggccactgcgggaagcctcctcactgctgggagggcctgtgggtctcggggtgtacactcgttccggcccacgggtgcccctgcattctgtggggctttgggggtgtctgtgtggggtgcacgtggacaccacggccctgaaaggtctcgtgttgggcacttccaggtttgcagggagtgtgggctccagggagggcaggtgtcggccccgaggggagagctgg

SEQ ID NO: 265734 - DNA, 652 bp, Homo sapiens
  chr12:132665939-132666591
  hypo
acacagcacacacacgcacagtacacacacccaacacaactcaaaccacacacacactcagtacacacacccaacacaactcacacagcacacacacacacactcggtacacacacccagcacgcacacatagtacacacacccagcacaactcacactcagtacacacacccagcacatgtacccacccagcacacgttcactcgcaccctgcacagcccagcgcgcacacacccagcagacagcacatgctctcacatgctggcatcagccgtcagcctcagctgctggagggtgtggtggaggcgggcggtgagcgctgggtgctggggtccacgtccttccaagcccctgcatagcggccgccttggctggcgatgactggagggggtgaggggtgaggccaccagcacaggtgtgtcccttcactgtttccacctcgtgtgcccgccacgctgtcttcctgccgctggtgaagtctgtctcccccccccccccccccgagtgatggggcgcctccgactgcccggccacggtgcctgcacctccgctcctcctctccctgcaccctccaggcctgggggccccggggctgaccttgaccttcccacccgcccaggtgtggccgggacagcaccgcagttgtggcgcc

SEQ ID NO: 265735 - DNA, 140 bp, Homo sapiens
  chr12:132675095-132675235
  hypo
tcagccagtccggccgccgtggctttcctctgcagcccccggtgcctgctggcgtcgtgcctttccgtgtgctcgttggccacgcacatgtcgaggggccgttctgacgatggactgaggggctcggggatagcacgtgt

SEQ ID NO: 265736 - DNA, 123 bp, Homo sapiens
  chr12:132682562-132682685
  hypo
actgacaggccgtgcgagctgccttgagctgcaaacggggccctgcgcggctgccttggagcctcccaccccggggacgctgttgcgggcgggagaggaccgccgggcagggcccacgtgggg

SEQ ID NO: 265737 - DNA, 66 bp, Homo sapiens
  chr12:132682715-132682781
  hypo
cagggccaggctcccggcttgcacagctggctggtcttccgcctggacagacgtcatgaatgtggc

SEQ ID NO: 265738 - DNA, 200 bp, Homo sapiens
  chr12:132688064-132688264
  hypo
ccaggccatgtacacgtgggacttgaagtcatccatccacacctcggcggcgcgcagggcgttgcgcttggcatagtagtcaatgtcgttgttgtagggcttcctggtgcgctcgatgtgggccacgcgggagcagggcagcacctccatgctgccgccacactgccacacctgcggggagacggcgctgggtgccggcg

SEQ ID NO: 265739 - DNA, 284 bp, Homo sapiens
  chr12:132694697-132694981
  hypo
tccctggggcccgtcgtctgcaggccccgggctggcacatcacagcgagaggagagacaggagaggggccctgctgcgcgtgggcgttgggtcaaaaactccccctgtacattcaggactgacgttgtctttggcggcgctgtgggcctggcaaagggcctgcgggcgaggccgtcccgtgaagtcggacctgttcttctggtcaaggcaagcaaagcaacagggctcgtagggttctcctggaagcgctggggacatgcggccttcatcgtgaaactgtcatc

SEQ ID NO: 265740 - DNA, 89 bp, Homo sapiens
  chr12:132695506-132695595
  hypo
accatcacacttgagaggtgcgctcagcaaatccatgagatgcaccaaaaatcgcggtgcctgccgccggcctcagtccacagaaaggg

SEQ ID NO: 265741 - DNA, 480 bp, Homo sapiens
  chr12:132698402-132698882
  hypo
catcagttggtgcgcgtgggcgctgacagtccagaacagcccggtcacggagcagccctggagatgcaggcccaaccccaccccctatgtccgcacaccctccctgcagcatgagtccagggacacccgcgactccgagtcctcaaccacccccgctccctgccaggtcaggcgtggggatgggggtctgggcccctcagtcctcccaggtgaaagccgggacaccaccctcacaaggattaccaggaggggcactgaccccaagggcacctggagaagagagagccgattccggggtgccgtgtgtgaggtccctgatggtggctcctttggagatggctggagaaccacgcctgtgattccactgtccctaaccaggccagcgactccgccctccctcaccacaccggcgactccaccgtcagcaggagcccagggatgaagggggcgagcaggagcggagcccgtgtattaatcatg

SEQ ID NO: 265742 - DNA, 812 bp, Homo sapiens
  chr12:132983179-132983991
  hypo
ggggacgccgccctcgacatccccagcacagacgccgccgtcgacgttcccagtgcagacaccgccctcgacgttttcccagccaggacgccgccctcaacattcccagaggggacgccgccctcgacattcccagcaggcgcagctcaggagcaccttgccatctgcagctccctgggggacgagaagaaacagcagccacccctttctcgggcaccttcagctccgccgagaacgcccgacactcagagaccctgctctttgttaaatgggaatgagacatgacacagacgcggggcagcggccactgcagcacgggttgtccactgcccagctctggggccaaaccctcggcgtcgcgcaaaccatacctcccgcgtgacggccgtgtccggcctgctcacctgtgcgaggcagccctgcagagcaggtcaccaggccacaggagcaccagaagagaagccacgtccactgcgagggccatccggtgtcatgtccctgcctccactcagccccaggcccacagctgcagccacgcagccccgcacagcgtcaccgtctccaggatccatcggcagtggggggggccgtctcccacctccctcctcttacctccccccacctccccagggcacgcactccctggctcctgcgcgatgcccagcagggtccaaaatgcacctggatgcccgggagccgtcgtccgccccacaggcagccccaggagccatcgcccgccccaaaggcccccccgggagccgtcacctgccccacaggcccccccaggagccgtcgtgcgctcagtcgggtcg

SEQ ID NO: 265743 - DNA, 384 bp, Homo sapiens
  chr12:132985471-132985855
  hypo
agtctagcgagtaacggctgaggggcttggagcctgtgtgcctcagtttcctcacctgtgacgtgggccatgatagcacgcccctcacaagtgtcctgggggccaagtgagttcagaacactgctcagagctcacctgctgctgatgacaagtcgtgtcacgggacctgttgttttatgacacactcaaccccaccccacatggagccccgtccagtcagccggccccgttctctgctgagccaccagccctgggggtggccgggccaggcaggagccccacagaggcccctcagtgagctcagcgcaggcccaagcaccgccggtttctctgccgtccacaccgtccccagacgggccgcacccctgacgcagggagggcttc

SEQ ID NO: 265744 - DNA, 713 bp, Homo sapiens
  chr12:132986270-132986983
  hypo
agaacgcagagagccgcggtgccatctccaccctggctttccaggccctggagggcaaaggtcagtcagatggagggagcccggggtccctggcaggagtgtggccaagtcccagcagcgctgccccgagagaggaggacggcgcagctccattgctccacctgcccggctcagggatggaacccagagctgccaccgtcctgtgggtgacggcagaacatctggctgccgggtggcctccgtaaccgccacacacctgcctctgctggaatcacctgaggctctggtgcctcacacggattggccaaaacagggagcggagccgggaaggccacggacatctgtgtggtgtcacgaacaaggtccggccacgtgtgtgggagacgcgggcgccgaggcaggcgccaaactaagcccggccaccaaggggacgcccacaccccacctccgtggtgacccctgaacccccggagctcaccatccacaccagggtgagaggagaggatgggcaaggaaccgtcaaccagaggggatgctcagctgcgtgcacgtggcgggtggtacatgggggctcggggaggcacccagagaggatgcgtgtgtagtgcagaaaatgaggctttggggcccgcacaccgagcccaggacagcacggaggcgggagacactgccaagcccccctcaccctccttgatggacgccccagagtctca

SEQ ID NO: 265745 - DNA, 61 bp, Homo sapiens
  chr12:133002957-133003018
  hypo
ctagagctgcggtttcgtcaggttcatggtccaacttccaagttgccgagtccagtctgac

SEQ ID NO: 265746 - DNA, 193 bp, Homo sapiens; identical to SEQ ID NO: 215341
  chr12:133009778-133009971
  hypo

SEQ ID NO: 265747 - DNA, 398 bp, Homo sapiens
  chr12:133018848-133019246
  hypo
ctcggtggaatcccggctgttcgcagccgcactggatgaagctctcgtctcctctctggttcctcacaggtgtcggtggacttcggggaaggcaggtgcagcctcctgcgttggctccatcgcctctggccaaggccatggcacacactctgcccgcgttcctctgcactcccaggaaggcgatgcccccggccccagcctcggagaagtggacacgaagccccacttgctttgtggccggttccattttaatttggtctcaacggagtagaaaatgggagagagccggcgcgtgctccagacagaaatcagccaacgagcccatgagaccccaagtcactgaatccccccacactctggcgtctctgaacaacccgcaaggacgtcggtgccacggc

SEQ ID NO: 265748 - DNA, 209 bp, Homo sapiens
  chr12:133019660-133019869
  hypo
agcctgggggacagagcaagactccgccccgaaaaaaaaaaaacccacagtgcactgtgaatattttgtttaaacagtcaattaccttcgacggatacttcatccatttgtcaaatctcaggtatctaattcaccacgccgtggctgttccgggggctccgcgtctgtcgtcccacatctgcgctgctcctgccgggaggacacgcccg

SEQ ID NO: 265749 - DNA, 504 bp, Homo sapiens
  chr12:133088531-133089035
  hypo
tataacagcatcagcgtttgtaatttaaacagacgagcatgtgtcttacgtgatttattcccacaaagggcttttgtgctgggcttggctcgggattcattgcactctgaccgaacagaggggagacctggagcatctgttcctgaccttcctgcccacccatctgaggcctggaatgggggtttgtactgtgctcagcatgggggcaccggcctccagatccccccaccgcaaggctactgtgtgggccagtgtgacaggggtcgagacccccctctcggctcatgcctggggggcacccatccccgggatcagtgtcctggggactggtgagggagggtggttcagctcagagtcctctgcatggcctgggcacgcgtgagggagcatggttcagcccagcatcctctgcacagcctgtcaggtgcttgtgttctgctcacggaaggccggggcatggaggggccgagtcctggctgcagcgccctggctgagctccaggct

SEQ ID NO: 265750 - DNA, 144 bp, Homo sapiens
  chr12:133097814-133097958
  hypo
cgaggaggagggagcgcaggctgtggggctggggcaggggtgcgctgtgtccacactcatttccactcagacacggatggcggcagctccgcctctgcatacctgtgctccatttctgcaggggcgtcgcgttcccgtctcctg

SEQ ID NO: 265751 - DNA, 221 bp, Homo sapiens
  chr12:133099878-133100099
  hypo
cccagttctacagggtttttcgagacgtgggactttcagagctaaaaccggccacccgaggaaggggaagagaccccaccccacgaccggcctggccacctttcagggcctccgggtttgggaggagcacacgcagggcagcccaccgagcccctctgtggcatgggggtgacgcgttccatctgcgcccagccctgaccggaggtggcttttgtgtgggt

SEQ ID NO: 265752 - DNA, 1990 bp, Homo sapiens
  chr12:133100822-133102812
  hypo
ctagcccaccaccctgcccccggctcccgcccagtaaggctcagactcctcggggctgcatccctgcccggccagggcctcctccagtgtgggtgcctgctactgtgcggcttgatggacctcatgggccgggggcatttgacctcaggggcctgggtgacatcccttaattcgcactggcaccgtctgccttgtgtgcaccctgtcagccacccagggaggcctgttgctgcaggaggtgcacagagcgggcctctggctgagccgaaggtcggcagggagccaggctcatggctgcagcgagccacaccagccagtcctgggacgggtttccccgggctggggcgtgctcctgacttggatgactcaaagtaaagaacctcaccaggggccctggcatgcgaggcctgggggcccagatgtgctggggcgtgtcactacaaggtgcagaattgttccagatccaagttggccagagagggagaccgctgggcttccacgtgagtctgggcgctggctgtgcaggggcgtccctgctgggcgctggccagcaggagctctggcctctcacttccctcagctttgtgcaggtttgaaattatttccaagtaaaaaaagtaaatacatgcagggctcggggtctggtccctgcatggtcacttaacctgtctgcgcctctgttttctcatccgtgaaatgtaaaggaaaatagtttctactcggggccaccgtgtgagcaaatgtgtgagtgtgtgcaaagcgcccgggccaggccctggcacgcatcggcgcccatgttggctggtgtcaggggtggtggcggtgggcgtggggcgtgggggtggggtgaagggagtatgggtgctcccttcagcaggtgatgaaactgaggcacggggaggccgagcagtggcccaagggcccatggccagggtcaggcaggtcccaccaccacctcgctgcttgctctggcatggagccgaccgaaggaggtgctgtgggcacagccaggggacagtgggtggcactgaggctcgacctggaggtcatagccctgtacagccagatggggtggtgcgaaccagccagggtgtgggtggaggccctgcctgtggtccctagcacccccaggatgccttcaaagtcagcggcttgtggaaggggcggctccaagcacgtggcggttctcgtgtcactgagccggtgggtcctgggtaggtcctccccgtcctggtagagtgtgttatcagtgtgtgcgctgtcagctgggatggcattcctggctgtgcagagctctgtcctgctgctgctcccgcccccagaccaggacccagcccaccacagctcgtcacatcccaaagcgcccagcggctgtcggggcgcctggggccggggtgctggggtgccgggagcaggcatgtagccctagccagggggccccgatgcggacgcggtgaggtgggggtttgcctgagacagtgtctctctctgtcccagatgaaggtcaccgtgtccaaagggggcgaccgggacagtgacgacgacagcgtcctcgaagccaccagctcccgggacccgctcagcgatgtgagtacccagctgcccgcgcccggaggctccgagtctgggccgcctgcccgctgcgccccgcacaagggcgtccagtccgagtctgggccgcctgcccactgtgccctgcacaagggcgtccagtccgagtctgggccccctgcccgctgcaccctgcacaagggcgtccaggaagccgctggttagggtccggtttcccaccaaggctttgtcttagcaatgagcattttgccttcgttaaagcgtgattttttactcattaggactttcccattaggagagatttaaatgaagaaatggtgagtgagctggcaggagcccagaggccaaaacgttaagccttggacgctgtgcctgcactgctggcctgtgggtggagggcaggcggacggccgccgag

SEQ ID NO: 265753 - DNA, 430 bp, Homo sapiens; identical to SEQ ID NO: 215347
  chr12:133111679-133112109
  hypo

SEQ ID NO: 265754 - DNA, 512 bp, Homo sapiens; identical to SEQ ID NO: 215348
  chr12:133121646-133122158
  hypo

SEQ ID NO: 265755 - DNA, 44 bp, Homo sapiens; identical to SEQ ID NO: 215349
  chr12:133122901-133122945
  hypo

SEQ ID NO: 265756 - DNA, 608 bp, Homo sapiens
  chr12:133123360-133123968
  hypo
gagccacctggagtgtgactcgtcatgcgctgggagcagcacgttctcgctgcagagtgtctgctaaagcgcatttcacaccgtactgtgagctccgtcgctgaacactcggcagccgcggctgcacatggagggtggctgtgcgtttggttccctgcattaacccagtgggctccacataggagggcgccgcccacacatccggctggcactcaccaccctccgtgcactggggggtttattcttccaccaggtcattcattcgacgtgaatgcctcataattgcagttgccaggaggggatttttccccttttgactgtttcgggggacattgcagtcagtgtgttcttcgtagagctctgcttactgaaaacggagaacggacagtcagtgtgttcttcgtagggctctgcttactgaaaacggagaacggacagtcagtgtgttcttcgtagggctctgcttactgaaaacggagaacggacagtcagtgtgttcttcgtagggctctgcttactgaaaacggagaacggacagtcagtgtgttctttgtagggctctgcctactgaaaacggagaacggatttgttttcgggattatcacacc

SEQ ID NO: 265757 - DNA, 147 bp, Homo sapiens
  chr12:133129458-133129605
  hypo
gtgggcgctcaccccgcagttgctgggcctccgtggggtcctgggaaatttcaacagcagtccagtgtgcgggccgcgcctttgttctgtccagccagcggcccaggctgcgcctttgttgtatctggccgccggcaggccaggcac

SEQ ID NO: 265758 - DNA, 148 bp, Homo sapiens
  chr12:133129829-133129977
  hypo
ccacaccgggtgaccgtggggtgacctcacagggtgtgtggggttccgaagccgccaccctccttcctgagcctgcactttgacctgggactgctgagcccagaagggccttgagagggctggctcagtggcacgtgggggccttggg

SEQ ID NO: 265759 - DNA, 214 bp, Homo sapiens; identical to SEQ ID NO: 215351
  chr12:133131957-133132171
  hypo

SEQ ID NO: 265760 - DNA, 44 bp, Homo sapiens
  chr12:133146996-133147040
  hypo
acctcacacctggcgctccggtcccaggcgcagcaccagctcca

SEQ ID NO: 265761 - DNA, 934 bp, Homo sapiens
  chr12:133147759-133148693
  hypo
gggcccgcacgtggcgagcggccaccccggcttggcctgccgaccccgggagtgccaggtgactatccgcctcgccccgccgggagcccgcggccaacgtgcctctctgtctctctctctttttctcttgtagatcacgagctgctcaggcaagagctgaacacgcggtttctggtgcagagcgccgagcggcctggcgcctccctgggcccgggggctctgctgcgggcggagttccatcagcaccagcacacacaccagcacacgcaccaacacacacaccagcaccaacacacattcgcccccttccccgcagggctgcccccgacgccgcccgccgcacccccgccggtgcgtaggcccgcgtgctggcagggggcgggggcgggcgtggggcggggacacgcagcaggcacacacagacacacgctcgcacacacaccagcccaggaggaggtggggggccggcggcacctctctgtcgtctgtccggtccccaacgtgccttctggtgtccccaccccaagctgtgccatgaggcccccaccctcggcagtggtcctggacttaggcaggcaccccgtgcccacgtgcatgggacaccctcacgcctgcactagatccccagtgccagggctggaggcccagacaggcctgagggcacagggaccatgactcagggtgcctcccgtgttccccgccccggaggcccggtctgaggagggagttgctgggggctggagtcccctccactctctcgagttttattcggaaactggccagtttgtcagtaacccggtgtgtccccagcgcgacccagcagccagggcttcacgccccaggcctcagccaggcacacagactgcctgggggggccgagttcccaccccatgcaaggggacccttagaatggcagggccgccctggtctgaga

SEQ ID NO: 265762 - DNA, 94 bp, Homo sapiens
  chr12:133148941-133149035
  hypo
cgaggggcccggcgcgtgtcgctgtgcacgcaggtcctggccacggggcggtgggtggggctgcccctcgcctggcctcgcccctgctgcattg

SEQ ID NO: 265763 - DNA, 60 bp, Homo sapiens
  chr12:133149549-133149609
  hypo
aaggaggttcttacggggccatccacactgcgaggaggttcttacggggccgtccacacc

SEQ ID NO: 265764 - DNA, 148 bp, Homo sapiens; identical to SEQ ID NO: 215354
  chr12:133156531-133156679
  hypo

SEQ ID NO: 265765 - DNA, 532 bp, Homo sapiens
  chr12:133167897-133168429
  hypo
gtgcagggcctcagcattcacgctgcttcctcctgggagagcccgccccgcctctcagggactctcacaaccttggtgcgcagaaggttctggaccgcaattcggggacgccctcactggctttctccggagcgtgggcattggagtggaaatacgtagaattgctggggatcctcgaagccgccggcagcgcccgatgccagcttgtcccatcaggcgttggtcccgacctgcactcagccacctgcccccggttttgtaattgagcattgaggggaagatgcctgaacccatatgaaacctctttcccctcaaacgttccctgcacgcatcaattacatcagcgcagctgggccttcccctgagcgtgatgtccaggggcgaggccagtggcttcctgcgcgtgcccgtccccactcacagcccctgacctccggggcccccacgcaccaggcgctccctgcccggccccatctcccggagccctggaggctcagcctgggtgtcgtgtgtgcctcgtgctcttgggaaa

SEQ ID NO: 265766 - DNA, 209 bp, Homo sapiens
  chr12:133168795-133169004
  hypo
aaaaaaagaaaaaaaagaaaaccctggaattccagtccgaccgcacagggctcatcccgtgctcctggcatccactggcttccccacggcggggagcccgcctgctccccttgcagatgcccctactcctcacctgagcccagcacccacccggggccgcccacccggcacagcgcctgccctctgctcggccccggccaccccaagcc

SEQ ID NO: 265767 - DNA, 540 bp, Homo sapiens
  chr12:133172481-133173021
  hypo
gggccactgtggcccgggtgactggacgttttctgtttgtatcttgctccctggctatggcagatgctccacttgccaggtatactcagctccccacaccgcgagcacacgcaggactgtgcgtccagccctcatggctgttctggttacaggcccgttggggagcgtgcgctgccttgggcccggagcactcagcgctggcatcatcctctccagagcctctcgtgttctctgacacagcagccaggaatgtttccaagggtgacattacaaggatatctccagcagcctggctctcggtgaggaagatagagcagggcgcccgaggggcacacgttggacggcaagggcgtgtggctgtcccaaccctgggagcagggctgctcctcaaggcagcatggcctcacctgcccttgctgacaggccggctgacccctctgacgccttccagcagcgtttccagtgcttttctttcttcccaggaagatactgggccagcgccatcaggggtggctcatcggtcgtcgtggtggtctcacg

SEQ ID NO: 265768 - DNA, 521 bp, Homo sapiens
  chr12:133199799-133200320
  hypo
ccttgactgtggcctcccagcctcgggcatcggcctcaggtcaccccacggcctgcacatgctgtgtggctcacaaatatccagctcatttttggagaaactggctcttctggttgagccgctgcttgggaaccagggccagagcttcccgtttctgacccctccaccactactcaaatgcccgcagctagcctcacagtgaacccaggctgactggcgcccacggctgcaccgggcgacccctggtcctgctaggtggccttcctgggggacgagcggctgtcccctggccccatcactcctcattcctgagggttctccagattcgcttccaggaatgaagcctagtcagccagcctccctcctcccctgcttgccctaatttgatttgatctccactctggaggcctcagcactcctccatctgagcaggcatcaggtttctccaggcaggcggccccagcagcatccaggggccaaacacgtgcccagtggtacccagtccccgatctgaggcgctc

SEQ ID NO: 265769 - DNA, 209 bp, Homo sapiens; identical to SEQ ID NO: 215359
  chr12:133209151-133209360
  hypo

SEQ ID NO: 265770 - DNA, 151 bp, Homo sapiens; identical to SEQ ID NO: 215360
  chr12:133210035-133210186
  hypo

SEQ ID NO: 265771 - DNA, 59 bp, Homo sapiens; identical to SEQ ID NO: 215361
  chr12:133220203-133220262
  hypo

SEQ ID NO: 265772 - DNA, 153 bp, Homo sapiens; identical to SEQ ID NO: 215362
  chr12:133222188-133222341
  hypo

SEQ ID NO: 265773 - DNA, 44 bp, Homo sapiens; identical to SEQ ID NO: 215363
  chr12:133225533-133225577
  hypo

SEQ ID NO: 265774 - DNA, 566 bp, Homo sapiens
  chr12:133225891-133226457
  hypo
ctgcacaatctgccacggaaggtccaggatgctgcgggcagttcttcgcaagaagctccccagccccgtggcaggaccatcccggatggccccgggcctgagcacaccctctgccgactccagacgctgcctcttcctgcgggcgaggcgctgccgggcctgcagctgccacttcttcttgtggaaccggagccagacaagccattcctcctgggatggatggtgagcacagccagtgtgcaagtggtgagatgggaatgcccgccatgactttctcacaagcagcctccctaggggtcaggacgcatctcgggctccctgggctgtgcagacccctcagagacagacagtatcacagctgtgtgccttacctggctggttcccagggcgggaggctgccccaagatttcctgccagggcacagtcggcgtgaggtcctgggactcctcctggctctcccaaagaactcgcttcctcttcacagtgacaggggctgctgggtgaggcagctttacgaggccgaagtcctccatgtcaggagcacttggcctcggactgtcttctga

SEQ ID NO: 265775 - DNA, 63 bp, Homo sapiens
  chr12:133250822-133250885
  hypo
tcctccctacagacgcattccctggagcagctgtccaggggtcatgtccggtctccacccccc

SEQ ID NO: 265776 - DNA, 120 bp, Homo sapiens
  chr12:133262726-133262846
  hypo
tgctgggattacaggtgtgagccaccgcgccgggcctcatccgttttctgcttatggcaggccagtcctccggtcatgtttaccgtttgctctggccaccaagcagccgcgtcttatcct

SEQ ID NO: 265777 - DNA, 120 bp, Homo sapiens
  chr12:133262906-133263026
  hypo
gatcccggctcacagcagccttgacctgccgggctcaggtgaacctccggctcggattcgggagtattaatagctgggacctcgggcgcgcaccaccagcctgtctaatttttcttgttt

SEQ ID NO: 265778 - DNA, 61 bp, Homo sapiens; identical to SEQ ID NO: 215365
  chr12:133277669-133277730
  hypo

SEQ ID NO: 265779 - DNA, 204 bp, Homo sapiens
  chr12:133280428-133280632
  hypo
tgggccactggttctcgggaatttagagaaggaagcagagacaactgagaagacagactggccgggaacacggaggatctgggatggaagaggggagagctgggaagccgcgcctctgagtagcgtgggggcagagtcgccatcctaggtgggtgcaggtgtatgcggaagcagcattcattcagcaagcgtttcctgagcagt

SEQ ID NO: 265780 - DNA, 86 bp, Homo sapiens; identical to SEQ ID NO: 215367
  chr12:133308293-133308379
  hypo

SEQ ID NO: 265781 - DNA, 305 bp, Homo sapiens; identical to SEQ ID NO: 215368
  chr12:133312071-133312376
  hypo

SEQ ID NO: 265782 - DNA, 31 bp, Homo sapiens; identical to SEQ ID NO: 215369
  chr12:133348835-133348866
  hypo

SEQ ID NO: 265783 - DNA, 392 bp, Homo sapiens; identical to SEQ ID NO: 215370
  chr12:133351310-133351702
  hypo

SEQ ID NO: 265784 - DNA, 1100 bp, Homo sapiens
  chr12:133353481-133354581
  hypo
gtgaagtcacccagggcacccgtgagtccagccctgcaagtccagcccccgtgaaccgtcacctcttggtttcccacgggctgtttgctgagctgctcgtccagctgcttctgcaggagctggagctgtgcccgggcctcggccagctctgcttggaactgtgctatctcctgggaatgtttcccctcccgaatcctagcgtaaaaaaacaagaaagaagggaatcgccacgctcctccagtgtgctgtgccctcccgctgggaaatgctgcctgtggaaggcgttcgtcctggcaggccctctgctgtgcactgcgtgctgcagccatgcttggtgcccacagtgtgcactcgggcagtcctcacgaagcacctgagactcacacttcactggcacccctcacagatcccagagactcactttgccggcacccctcacagatcccagagagtgccggccccgagaccacagtgcatgggacccacagagccacagcatcagccccgcgccgggccgccccttcccgcctctgacctgaagctaagtactcctgctggggcgctttctctcttggggggaggacacggggcagtgagtgaggctcaggattctggagacggaggctgggtgccttctactcctatgattcactcaagtactcggcaatttgcaaaatatagatgaccctcgctgtgctgaaggtgtgaattagaccccgcccattgccaggacagccatgtttgagggctggcggggcccaggcactcactgaaggtcgtcggcctcggcctgcagcttctgcaccaggtgttccttggcctgcagctccttcttcacctcactcagctccaaggaggccgccttgaagtggcggcggttatgcccggcttccaccttggcagcagccacctaggaggaaggaagccacgttgtccatgccctgcgtgacacccacagctttatgacgtgccgggcgcagggggtgaatgcactcccggccccgtgcatgtcctggctgccggcgtgtgcttctccacaggcctgtcaagttccttgtaaagatgaaaccacctgacccggagctcggcacgcagcaagt

SEQ ID NO: 265785 - DNA, 513 bp, Homo sapiens; identical to SEQ ID NO: 215372
  chr12:133356750-133357263
  hypo

SEQ ID NO: 265786 - DNA, 229 bp, Homo sapiens
  chr12:133365635-133365864
  hypo
ctcgctccttctgcgccgactggagatgcccttcaaggtccgccatgtgctgacggacctgggccacctctctgtgcaggcgcgagagctccgcctcggcagtccgcttctccccgtgcacttgcatcagctcctgccgcagctccttcagctccgagtccagcctcttcctggtggctttcagctcactgatgagctggtctttggaggtggcgtcgcgccggtaggc

SEQ ID NO: 265787 - DNA, 376 bp, Homo sapiens
  chr12:133380424-133380800
  hypo
tgagagatgagcccaccaagcggcctccctgggaggactctggacccgggtcactctacacccctcgggctttgtcttcaatcttcccaccctgcttcgccctctccttcccactcctgttcacgcttgctctgagcaggccaaccacagtcttctccgtgtctgctgggcactggagtgtgagctctgggactggcccgggcggggactgagggggtggaaggcgtgctgccaagccacatggaagcccgccgcggcttccgcaatccactgccctacttgtactctctgggcgagccctatagggaggcagctggaccgacgcactgcatccagggagaaaaggttgccagacggacagtcaaggagctgttct

SEQ ID NO: 265788 - DNA, 127 bp, Homo sapiens
  chr12:133381358-133381485
  hypo
tctggtactgctcctcggccacctgcaagtcgttgttggacgacgccaggctggcattttttgcctccagcatgttctgcaggtcagtcatggctcgctccaggtcccagcacgactgcttcagggt

SEQ ID NO: 265789 - DNA, 179 bp, Homo sapiens
  chr12:133383641-133383820
  hypo
tgccacacatgctgcggcggctgattcccaaccacatctgtgaaacctcgtacccaacagaggagccacacatgctttccgacttcgccgcacgctgagatgtcagtcgaacgtccgttacctgactcgcctccagtgacaaggcttccagctgtccttcgagtcgcattttctctttg

SEQ ID NO: 265790 - DNA, 200 bp, Homo sapiens; identical to SEQ ID NO: 215374
  chr12:133384551-133384751
  hypo

SEQ ID NO: 265791 - DNA, 257 bp, Homo sapiens
  chr12:133393400-133393657
  hypo
ggaaagacagagcacgctggaccaccatggctttaacaacaaggtgacgtcgcttttcagacatgcagctggagtaggagagaagaggatccagactcatgagcacggcactttctcatcccacaaaggcttcactctgagaggagcagcccatgggccccgtcccacaggcggggtggccaggataaggcccacagcccctctggtgtccacgtccttcctgtaaggtgaacctgccctccacacctccacactct

SEQ ID NO: 265792 - DNA, 581 bp, Homo sapiens
  chr12:133403534-133404115
  hypo
cactcgcactcctgcgtctctagagagaagagacaggacaaagctgtcacttagaactgcgaaaggtacacacaaccctaggttcacagctgggtaacatcaagggacttcatactgagaaaccaccacctcaggcacctacaggactttctgcttcccccacacctgaattctgtatacaaacattcacggctccatctacaccacctcgtttcacctgttcctatcgggtattagaaacaacagagcacagccaaaaaccaaacacgatttcctcaggaaaagagtacctggtggaggccacactagtatccaaaagtaaacacagatctatacacaaagtgaaaaccaaaagcaagcaagcctcatgtcactgcagagacgtgaagggcaggcttggaagtcaggactccggcctcagctcccgaccctccaccacttacctgtgagagcctgggctaaagatttcttaatcacatttagcctgtttcctcaccagtaaaacaatgagaaaatgaacgcaaaattttgccaggattaaatataacaaggcacagagtctgtcccgtgtcctcaataaa

SEQ ID NO: 265793 - DNA, 136 bp, Homo sapiens; identical to SEQ ID NO: 215375
  chr12:133412307-133412443
  hypo

SEQ ID NO: 265794 - DNA, 69 bp, Homo sapiens; identical to SEQ ID NO: 215376
  chr12:133414280-133414349
  hypo

SEQ ID NO: 265795 - DNA, 108 bp, Homo sapiens
  chr12:133417245-133417353
  hypo
catgagggagcggcgcgtcctgggacctgcctccagccctgggcttggggccgtggtcactcacacaagggagcagcacgtcctgggacctgcgtccagccccaggct

SEQ ID NO: 265796 - DNA, 41 bp, Homo sapiens
  chr12:133421487-133421528
  hypo
ggattacaggcgtgagcctccacgcccggccccacatggat

SEQ ID NO: 265797 - DNA, 222 bp, Homo sapiens
  chr12:133424359-133424581
  hypo
aagaagccctcaccgagagctgtgggaacaagagctgccgggaacaagagctgcgggaagcggctcctacgaattggtggcaggaggcacaaaaacgaaatacctatttttggaatacggaaaaaacagacaaacaccaatggcatgcagagaaccagctggctgcaccagtgaggaaacatggctcccggctccccaacccgcagcgggtcaggtaaaaca

SEQ ID NO: 265798 - DNA, 127 bp, Homo sapiens
  chr12:133428295-133428422
  hypo
tgcagagggcacacgtaatcctggactgctgaagcacacgcacattcagccggagcacgtgggacccagggcagaaagacagcaggttagagaggccgccgggaagcacagcgaggagaggtgcacc

SEQ ID NO: 265799 - DNA, 387 bp, Homo sapiens; identical to SEQ ID NO: 215378
  chr12:133435576-133435963
  hypo

SEQ ID NO: 265800 - DNA, 98 bp, Homo sapiens
  chr12:133441852-133441950
  hypo
tttaaggaacctggaagatacgatgaagggtacacagcccaagagagctggtaaaacttcagcattcaggtggctattcaaatctggcatgttttctt

SEQ ID NO: 265801 - DNA, 442 bp, Homo sapiens; identical to SEQ ID NO: 226553
  chr12:133443618-133444060
  hypo

SEQ ID NO: 265802 - DNA, 74 bp, Homo sapiens; identical to SEQ ID NO: 215380
  chr12:133448788-133448862
  hypo

SEQ ID NO: 265803 - DNA, 125 bp, Homo sapiens; identical to SEQ ID NO: 215381
  chr12:133449100-133449225
  hypo

SEQ ID NO: 265804 - DNA, 172 bp, Homo sapiens
  chr12:133450372-133450544
  hypo
cagatgccgaggggcgactgcagccatcactcatcctcctgttctttccaaacaaaaatctgattatttcactcctccgcttacacccctttgatgactcctcactgctctcaggctaaagcccaagctcccttgtgtgactttgccgctcaccacacgctccgaccacaca

SEQ ID NO: 265805 - DNA, 136 bp, Homo sapiens
  chr12:133716926-133717062
  hypo
gcactccggcctaggtgacaagaatgaggcctcgactttggaaaaaaaagaaaagaaagacacttgtgttactgggtcactagacgtcttttttttttttttttttaaataagtcttaccacgtgtcaggcaccat

SEQ ID NO: 265806 - DNA, 35 bp, Homo sapiens
  chr12:133721475-133721510
  hypo
ttgttgttgtttagacggagtcttgctctgtcacc

SEQ ID NO: 265807 - DNA, 102 bp, Homo sapiens
  chr13:19239973-19240075
  hypo
ggtgcaaggccagcagggaacgtggatagctacggcatgaccccgttgctcccggccagagtgacgggccacaccaacatcgtggagtacctcatccaggag

SEQ ID NO: 265808 - DNA, 179 bp, Homo sapiens
  chr13:19664765-19664944
  hypo
tgcctgctcttagcaggtgacgggtcaagcgtagttcagaggccaggactatcatgggcacaacccgcttctgatggcggttggcagctttgttttctcagaactgccacttacggaaggttacatccagccccccggggccccgtggactgactgccggacaaacatccaatgtccct

SEQ ID NO: 265809 - DNA, 200 bp, Homo sapiens
  chr13:19692226-19692426
  hypo
tggtgcctctcccttctactcgtcctcctgcccggcaggagaagctcccgctgctggccgccctcctaccgttccatcgccaccaccacctgcagccacccagtgccccggatggcggctgctagcagccccttctcgtagttctctaaggcagatactgagcactgacactgaagagcctgaaacgaggggactccgcc

SEQ ID NO: 265810 - DNA, 77 bp, Homo sapiens
  chr13:20235856-20235933
  hypo
tggtgatgcttgccgccgccggagggcaggacgacctcctgcgactcctcatcacaaaaggcgcgaaagtgaacggt

SEQ ID NO: 265811 - DNA, 120 bp, Homo sapiens
  chr13:20265680-20265800
  hypo
acaacgagcaaataaatatactgataaaattgacatgaatgaaaagacttgatgggaaactgttctgaaaaaggcacttataagagatttacaaaggccgggcgtggtgagtcattgcct

SEQ ID NO: 265812 - DNA, 407 bp, Homo sapiens
  chr13:20392320-20392727
  hypo
atgcctccttggtgatgaaacggtgggtgatttggggtagatgacattcatgacgccagctcttctggaagtcatagtaaggcaccgaggggtggctcctctccctgcagcggctgtcgcttaccatcctgtagaccgtgacctcctcacacagcgccaggacgaggatcgcggtgagccagcaggtgactgcgatcctggagctggtcgcagcaggccatcctgcacgcggtggaggcgccccctgcaggccgcagcgcatccccagcttctggacgcactgtgagcggttatgcagcagcacgctcatatgagatgccccgcagggtgctatgcaggcccacgtccccacaaagcccatggcaggcgcccgggtgccggagcacgcacttggccccatggatctc

SEQ ID NO: 265813 - DNA, 38 bp, Homo sapiens
  chr13:20496685-20496723
  hypo
atgaaaagccagtggttggccggatgtcgtggctcacg

SEQ ID NO: 265814 - DNA, 85 bp, Homo sapiens; identical to SEQ ID NO: 215387
  chr13:20521929-20522014
  hypo

SEQ ID NO: 265815 - DNA, 87 bp, Homo sapiens
  chr13:20748824-20748911
  hypo
tggcctggccccagcggtctggtccaccttgtactcggtgcccccgctgccccctggcctcagctggagtgacgcacctcatccatg

SEQ ID NO: 265816 - DNA, 104 bp, Homo sapiens
  chr13:20969540-20969644
  hypo
atgtgtgcatgctgcgtgtcctcttggccacaccgcatttcccactctcctgaaggggacagatctcgtctgcttggtagaatgacgggcgctcctccccctgc

SEQ ID NO: 265817 - DNA, 321 bp, Homo sapiens
  chr13:20975930-20976251
  hypo
ggcactcccacagccgatcactcctcattgcacactgtgcctgcttcaagcaaaatcatgaagcacttctgtctgcttccttctgccaaaacatgcctgatatccgcacaaaatacctgacagcaaaagtgggaaaatagaacttatatgaagcgatgtacctccaagccatgcacagttccgccctgcatgctggcgccagtgctgcccagggctgctgtggccgctcctcttggaatgcgtggctcagggataccatgagcccagcaggccatgagtggggccacctgcaccccacgaccccctcgtttcagcgacccc

SEQ ID NO: 265818 - DNA, 534 bp, Homo sapiens
  chr13:20979785-20980319
  hypo
caagcccccatgcacgctccccacgctcctgctgctccccagccttggagagccatgatttctcagattctaaggagagggccctgggactttggtgaagagatgcaggaagaggcttatcctggagggagagggagggagccgcacgggctaggctgactgtgcgagaatggggtgcgcccaggggaaagcgcaggccagtcacggcccccacccagcactggcctgccccgacccgctgggccccgcagacttactctccctcacattcctcccctccctgctgccgggaggcgaacgggctggtgccggcctgtgcttagcaagtcaagtcagaagccagggccgggatcctggaagaggaggaggaggcgtttctagtcctgggcgccatggaggacataggctgggctactgctgcgaccctgactcatttcccacatctttcaaacccttaaaggctcagcagctggtcagtccgcctacaaaggtaacatggggacaaacgaagctgcagaacgtgcagagcctgcc

SEQ ID NO: 265819 - DNA, 72 bp, Homo sapiens
  chr13:21005162-21005234
  hypo
aatcgaggcaaccgcgtggcaaatgcacccggcagtccagtcagacaatgtacctaacggggatttggccca

SEQ ID NO: 265820 - DNA, 313 bp, Homo sapiens
  chr13:21047373-21047686
  hypo
ccggcaggagtggcggggagacccgcagtcccactgtgcggcacccacatgctgctcactgtggccggagcgtcggactttaaggagctgtgagacagctatattttatgtggaaatttccagacttttaaacatcagtgagtcattcaaacaaacaaatgaacaattatttttaaagctgcacatggccagactcggcccctggtaccagcctgagacctctgaactggccttcagctagaagagccagaggcagccttgtgatctcagcggacctggccagagtgggtgggcgggcgccaaggatggcgct

SEQ ID NO: 265821 - DNA, 156 bp, Homo sapiens
  chr13:21057336-21057492
  hypo
acaataaaagataaacgtgtgaggttctggatatcctaatacaccgggattttaccatgacacactgaacacacaaatcaatcacacatgaatcccaaatatgtacaattaagatacagcaagtaattttttatttattattatttttttaagacg

SEQ ID NO: 265822 - DNA, 96 bp, Homo sapiens
  chr13:21057552-21057648
  hypo
ccgcctcctgggttcacgccatctggactgaccatatcatcaacatgaagtcagctttctcacttggactgtaacgtaccacatcatcattctaaa

SEQ ID NO: 265823 - DNA, 116 bp, Homo sapiens
  chr13:21304077-21304193
  hypo
agttgcgtcccgtcgccttgggcttctgaagaaaaccccaatgcccacggtcccctgttaggcactgggggcctcctgccccgactctgccctcccgggccgctgtggccgtggct

SEQ ID NO: 265824 - DNA, 172 bp, Homo sapiens
  chr13:21407278-21407450
  hypo
agtgaacaaacatccgaaaactgagctaatacttctgaacgggcttctttcaataattaaataataaatatataataataaatatttgctgagcatctgtgctagggctcaacaatgcagtgagcaaaagcatggcccatgctttcacggagcttcgcgcagtaggtaaaca

SEQ ID NO: 265825 - DNA, 222 bp, Homo sapiens
  chr13:21562961-21563183
  hypo
cttgtggtgtgggtgcggcacgtagagcccggcggcagggggtgggaaagcgaggccggcgcctggcggtcctccctggcccttcgtgggcaggctggcgtaacccccggtctccggcggcgtcttgctctggaaggaggggctgcgctgcactccgtagcccaggggttccccaggcaccagcaggtgcggccgcccgtagtgcgcgccctgcagcgggaa

SEQ ID NO: 265826 - DNA, 318 bp, Homo sapiens; identical to SEQ ID NO: 215393
  chr13:21572946-21573264
  hypo

SEQ ID NO: 265827 - DNA, 250 bp, Homo sapiens
  chr13:21597248-21597498
  hypo
ccaaagatcgctcccggcatccatagcgctgcatcgagggctccgggctccgagggctccgaaggccggggagtgggaccagctcccacacaggagacgcagctcagggcttctacatttctaggaatgctaaaaacccaattttcttaattcctttttttttttctttttagagatagggtctcactacgtcccatcctcctgcctcagtctcctgacacactgggaccacaggcgctcgccccctctc

SEQ ID NO: 265828 - DNA, 120 bp, Homo sapiens
  chr13:21633733-21633853
  hypo
aaaaaacaacaacaacaacaacaaaaaacactcatatccatcctagagaagcgtgaaaatgtaaaagttcttgttcaaaattcttgtcaggtggggcgcggtggctcacgcctgtaatcc

SEQ ID NO: 265829 - DNA, 49 bp, Homo sapiens
  chr13:21677730-21677779
  hypo
atgcgtgacatcactcgagaaaggaataaacccacgttttggcttaatc

SEQ ID NO: 265830 - DNA, 112 bp, Homo sapiens
  chr13:21678550-21678662
  hypo
gctggtggctgcccgcctcgctgggcaccagccactgccatcgggagaggagtgcctgtcagctgccgccacccactcgaccctgccgccgcgactcgcaagctgtggccct

SEQ ID NO: 265831 - DNA, 82 bp, Homo sapiens
  chr13:21713731-21713813
  hypo
cggccagagttcttaatttttgccaatctagtgagtgtggtttaaaaaccaatcaattgaaactaatcgtggttttaatgca

SEQ ID NO: 265832 - DNA, 46 bp, Homo sapiens; identical to SEQ ID NO: 215397
  chr13:21809435-21809481
  hypo

SEQ ID NO: 265833 - DNA, 31 bp, Homo sapiens
  chr13:21863996-21864027
  hypo
cccaatactgatatgacacccgcaatactga

SEQ ID NO: 265834 - DNA, 69 bp, Homo sapiens
  chr13:21894157-21894226
  hypo
ccgtcttctacgtcccgagatctgcttgcggtctggaggacctgcaccgggagcgcatagtgtacaggg

SEQ ID NO: 265835 - DNA, 147 bp, Homo sapiens
  chr13:22021309-22021456
  hypo
tactttaaacaaccagagaccgccgaggtgcgggctgtgagagagggagcgtggagcctccgaggccgaggactcgtcccagtttggacagatagaagatgtgagcgctctccctctccctctccctctccgtctccctctccctct

SEQ ID NO: 265836 - DNA, 34 bp, Homo sapiens
  chr13:22049000-22049034
  hypo
tttttttttttgagacggagtctcgctctgtcgc

SEQ ID NO: 265837 - DNA, 34 bp, Homo sapiens
  chr13:22049274-22049308
  hypo
agccaccgcgcccggctgtttctgcatttcttga

SEQ ID NO: 265838 - DNA, 135 bp, Homo sapiens
  chr13:22058108-22058243
  hypo
aggccggaagactcgcccgcgatgccctcaacgatgtcattaacgaatggccttggaagagatgcgggtgtcggggtggacctgcttcagcagagtagctctccttgcggctgcgcttgcgcttcttgccaacct

SEQ ID NO: 265839 - DNA, 36 bp, Homo sapiens; identical to SEQ ID NO: 215398
  chr13:22091944-22091980
  hypo

SEQ ID NO: 265840 - DNA, 160 bp, Homo sapiens; identical to SEQ ID NO: 215399
  chr13:22214672-22214832
  hypo

SEQ ID NO: 265841 - DNA, 34 bp, Homo sapiens
  chr13:22239916-22239950
  hypo
accacacctggccgccagccagctttttatatat

SEQ ID NO: 265842 - DNA, 34 bp, Homo sapiens
  chr13:22338337-22338371
  hypo
agccactgcgcccggccagaaaatatttttatgt

SEQ ID NO: 265843 - DNA, 45 bp, Homo sapiens; identical to SEQ ID NO: 215404
  chr13:22350434-22350479
  hypo

SEQ ID NO: 265844 - DNA, 31 bp, Homo sapiens; identical to SEQ ID NO: 215405
  chr13:22392838-22392869
  hypo

SEQ ID NO: 265845 - DNA, 31 bp, Homo sapiens; identical to SEQ ID NO: 215406
  chr13:22392989-22393020
  hypo

SEQ ID NO: 265846 - DNA, 187 bp, Homo sapiens
  chr13:22417569-22417756
  hypo
cagaagcaaatgaaactgaccggatgcctagaagcaaacagattttattcgaatatccggttggatacacaagtctggagtgatgtggtgagattcggggaatgagcctgacctgggcactgctggcagggatggtgttgcagccaaggaactgctgggcggcgtcggactcagccctccttgtcca

SEQ ID NO: 265847 - DNA, 44 bp, Homo sapiens
  chr13:22467018-22467062
  hypo
ttgcaacaagaattgggggccgggcacggtggctcacgcctgta

SEQ ID NO: 265848 - DNA, 45 bp, Homo sapiens
  chr13:22496749-22496794
  hypo
aacagtgagagcatgtctgacgccgcaggtaagagcatatccaac

SEQ ID NO: 265849 - DNA, 157 bp, Homo sapiens
  chr13:22511719-22511876
  hypo
tttgaacatcatgcaacagtcgcttgtggtaattatttcttcagcctaggtctatttaatttaacgttgcttgggaaaaaaatgataataaaatcccaaaagataccgataagttctgcatcccgatatgtctttatgatgacgtagggtgacaaat

SEQ ID NO: 265850 - DNA, 180 bp, Homo sapiens; identical to SEQ ID NO: 215407
  chr13:22539244-22539424
  hypo

SEQ ID NO: 265851 - DNA, 199 bp, Homo sapiens
  chr13:22785989-22786188
  hypo
aatcatagtcaaattgtcctcgaaaagtgtatttcctggagcccagcatggcgccctgcagtgggcatgggcacgggcggtgcactgcatgggacttttccttctctccatccgggtgccatacacgagggttttcagcttagggcagcattcgcgttttcagtggttacatcgcaccgtcagcttacattaactttgt

SEQ ID NO: 265852 - DNA, 91 bp, Homo sapiens
  chr13:22786757-22786848
  hypo
aaaactctaaaagctatgccatgaggggctgaagtatcctcgttgtggaaaggcaggttacgcagagcacagcgaccgggagccccaggca

SEQ ID NO: 265853 - DNA, 369 bp, Homo sapiens
  chr13:23508831-23509200
  hypo
tcttttccgtctccggttaggtgagaaggtcaatctggccctgcgggttatgttgggggttacatgagaacctcattggcatgaagaggccaggcaggtcctccgacagtgccacagccccaggcttgtgccgccaaatcacggaggccttccgggccctgaacacgaaccggacggggccttcccgcattactacccgaatgacactgctggggggaccgctctctggatgccattgtggccacgtgtcgggacggtcggctgcttgactccacgacttaaagctagatttggccttttaagcctctgtctcagtgccctcgggtcccttctgcagctcacctacctgtccctcggcctctggggtgg

SEQ ID NO: 265854 - DNA, 140 bp, Homo sapiens
  chr13:23629553-23629693
  hypo
gtcttagtcgtcgtaaaggcagcattttacttgatagagaaacattggaggcgttaacactaagatcaaaaaaacaaggcaagcagttcaggccggatccctgcgtgtggtgaagaggctgccgccggcttcactccagg

SEQ ID NO: 265855 - DNA, 32 bp, Homo sapiens
  chr13:23654298-23654330
  hypo
acacaaagaaaactatctttcgggctgggcgc

SEQ ID NO: 265856 - DNA, 127 bp, Homo sapiens
  chr13:23896847-23896974
  hypo
cccagcccaggccctatcatcgcacctgcggcgatgcacagaccgccccccacccatccacctccccccccccccccccccgccaacaggtgtaacgtggtgccgcgggcagaggattcacctggaa

SEQ ID NO: 265857 - DNA, 201 bp, Homo sapiens; identical to SEQ ID NO: 215409
  chr13:23897356-23897557
  hypo

SEQ ID NO: 265858 - DNA, 155 bp, Homo sapiens
  chr13:23910726-23910881
  hypo
cactgattattcgtcggcaaagctgaaaattctcttctgttatttgctttgttcctctttcttgatcaatagattccaaaacaagagcaaaatcttcaacagtgcatgactgcctcacacccacggtttcaaaaagttcgcggaaattattttta

SEQ ID NO: 265859 - DNA, 135 bp, Homo sapiens
  chr13:24289626-24289761
  hypo
gtttgcattgcaggcggtggggccagctgcggtatggcggtggcggggggtggttacactgccagaggctacactgcccgagccaggaggcgggttatgtccgctattgtggactgctggcggcagggtgatggg

SEQ ID NO: 265860 - DNA, 252 bp, Homo sapiens
  chr13:24408049-24408301
  hypo
aaacccctcctggcggcagtgatgctccccacgtctcccacactaagtggcgcctcccttggcctgaccctgcggaaccctcggaagcaggatgcccctttgctgtcccctgcctcccaccctgaccccttcaccagccgtgtacttgtctgcgggttgctgggtcgccagagctgaggccacccagcaagggtgggtggagagaggccacgcgcccgggatgaggggagaggggccgagcccccggagccg

SEQ ID NO: 265861 - DNA, 35 bp, Homo sapiens
  chr13:24527676-24527711
  hypo
ccccgaatagctccccgacccgtccctgccatggg

SEQ ID NO: 265862 - DNA, 200 bp, Homo sapiens
  chr13:24658298-24658498
  hypo
aacttagcaacaagcgagacgagagaagaaagcagctgaacaatttaaatgcgttggggagatgtgggtggaaagaggggaaaagggccccaggtgcagtcgaaggaggcattcgctggtggggaaaagggtctctgtgcttgcagttctgcttcttttgagaaaggaaggaggagctgagcccgcgcatgatggagatg

SEQ ID NO: 265863 - DNA, 358 bp, Homo sapiens; identical to SEQ ID NO: 215411
  chr13:24718516-24718874
  hypo

SEQ ID NO: 265864 - DNA, 38 bp, Homo sapiens
  chr13:24720491-24720529
  hypo
aatttcaactcctctccctgcggccaggccagatcacc

SEQ ID NO: 265865 - DNA, 45 bp, Homo sapiens
  chr13:24720559-24720604
  hypo
tgcaggcaggcctgcaagaaattcgttggctttcatttaaagata

SEQ ID NO: 265866 - DNA, 43 bp, Homo sapiens
  chr13:24781502-24781545
  hypo
ccctgaacttaaaataaaaatcggaaagaaaataaaatctgtt

SEQ ID NO: 265867 - DNA, 89 bp, Homo sapiens; identical to SEQ ID NO: 215413
  chr13:24797623-24797712
  hypo

SEQ ID NO: 265868 - DNA, 48 bp, Homo sapiens
  chr13:24815548-24815596
  hypo
ggcgcatttgtgagacggcattactcagcgaaacgcagagtgttttgc

SEQ ID NO: 265869 - DNA, 51 bp, Homo sapiens
  chr13:24819243-24819294
  hypo
ttctttggtgcatccgtgggccccggcagcccacgccggagtctgagttag

SEQ ID NO: 265870 - DNA, 109 bp, Homo sapiens
  chr13:24868948-24869057
  hypo
caagctggagagcatcgacaagatagctcgctggcaggtgtctatcgtgggctgggaggtaagtggaaagcaccccacatgatcccatgccactcgcccttcccgcacc

SEQ ID NO: 265871 - DNA, 70 bp, Homo sapiens; identical to SEQ ID NO: 215414
  chr13:25026104-25026174
  hypo

SEQ ID NO: 265872 - DNA, 231 bp, Homo sapiens; identical to SEQ ID NO: 215415
  chr13:25026475-25026706
  hypo

SEQ ID NO: 265873 - DNA, 37 bp, Homo sapiens
  chr13:25084393-25084430
  hypo
taaaagtgttcactattggccgggcgcggtggctcac

SEQ ID NO: 265874 - DNA, 33 bp, Homo sapiens
  chr13:25463715-25463748
  hypo
tgcacacacacgcacgcgcgccccttttgacaa

SEQ ID NO: 265875 - DNA, 48 bp, Homo sapiens
  chr13:25469373-25469421
  hypo
cggctccttgcagcgcagtagatgccagaccccgagcaggtttaaaaa

SEQ ID NO: 265876 - DNA, 78 bp, Homo sapiens
  chr13:25642761-25642839
  hypo
cacacacacacaggcacacacgcacgaacgcacacacacggacatgcatgcatgcacgtggacacacgggcacacacg

SEQ ID NO: 265877 - DNA, 34 bp, Homo sapiens
  chr13:25668697-25668731
  hypo
tactctaggctaggcgcggcggctcacgcctgta

SEQ ID NO: 265878 - DNA, 101 bp, Homo sapiens
  chr13:25670562-25670663
  hypo
ttataaagggcaagccagtacgcatcatgtggtctcagcgtgatccatcacttcgaaaaagtggagtgggcaacatattcgttaaaaatctggataagtcc

SEQ ID NO: 265879 - DNA, 164 bp, Homo sapiens; identical to SEQ ID NO: 215418
  chr13:25932257-25932421
  hypo

SEQ ID NO: 265880 - DNA, 292 bp, Homo sapiens
  chr13:25939930-25940222
  hypo
gcgtcctcactgcacggcttgttcattggcactgcttcccgagtcctggggcttcatcacgtcgggcagctcaggcgggctggaaaacggctcgatgcacagggtctcaaagctgtcgtctgcgcggaaggcgagccccactgtggctggggcctgtggccgtgctgtttggctggtgaagccacactcacccagtgtcttgccatcatccaagagttggtcgtcctagcacagccactgctcatctggcagcagcttgaggatggcctcaacgatgcgcttcagctcgaac

SEQ ID NO: 265881 - DNA, 164 bp, Homo sapiens
  chr13:26354975-26355139
  hypo
gcccgctagccctccgctcacctcctgctatgtggtcgggtttgcaacagccaccgaccagcaccagtccagtccgtggcccaggggttggggatccctgtactacaggatatgagaaaaggccttactggcagtttgttttctgtgtcttcgaattctcacgc

SEQ ID NO: 265882 - DNA, 58 bp, Homo sapiens
  chr13:26548842-26548900
  hypo
gtctcctgctccatcgggatgaatttttcccacactgcagactcgctctcagtgtcca

SEQ ID NO: 265883 - DNA, 37 bp, Homo sapiens; identical to SEQ ID NO: 215421
  chr13:27556411-27556448
  hypo

SEQ ID NO: 265884 - DNA, 212 bp, Homo sapiens
  chr13:27610224-27610436
  hypo
ctcattctgacccgcgcaccgagatggaagctgtgacacaggaggctgtgtcagcgccatcccagctctgcaagtacatccaaattccaggttcccgcctcacctctctggtctacctaagagttcacagcgcagttgcagtgctctgggttcctgcctgcttcatggtaccagcccatgcccttctgtgatccacacgcgtccgggacctc

SEQ ID NO: 265885 - DNA, 178 bp, Homo sapiens; identical to SEQ ID NO: 215422
  chr13:27620503-27620681
  hypo

SEQ ID NO: 265886 - DNA, 399 bp, Homo sapiens; identical to SEQ ID NO: 215423
  chr13:27690601-27691000
  hypo

SEQ ID NO: 265887 - DNA, 98 bp, Homo sapiens; identical to SEQ ID NO: 215424
  chr13:27691060-27691158
  hypo

SEQ ID NO: 265888 - DNA, 111 bp, Homo sapiens
  chr13:27786256-27786367
  hypo
gccaaagccagagctggctccctctgctcctggggagatttcagggagaggcgtgggtgggagccagggctgcaggcgcaggttctgggtgggcatgggcttggcgggccc

SEQ ID NO: 265889 - DNA, 39 bp, Homo sapiens
  chr13:27786397-27786436
  hypo
ttcatctgggacgagctccctctgggctgccggaatgcc

SEQ ID NO: 265890 - DNA, 31 bp, Homo sapiens; identical to SEQ ID NO: 215426
  chr13:27914840-27914871
  hypo

SEQ ID NO: 265891 - DNA, 91 bp, Homo sapiens; identical to SEQ ID NO: 215427
  chr13:27915171-27915262
  hypo

SEQ ID NO: 265892 - DNA, 85 bp, Homo sapiens
  chr13:27934850-27934935
  hypo
atagtgcctgcacctcggaggcactcagtacttatttgttgaatgaatcaactaattccatctttaagaactgggttccggccag

SEQ ID NO: 265893 - DNA, 49 bp, Homo sapiens
  chr13:28124055-28124104
  hypo
ggaaacttactcagcgctcaatgtcacatcacaacgtgatgaatgaaat

SEQ ID NO: 265894 - DNA, 57 bp, Homo sapiens; identical to SEQ ID NO: 215428
  chr13:28152523-28152580
  hypo

SEQ ID NO: 265895 - DNA, 267 bp, Homo sapiens
  chr13:28239904-28240171
  hypo
gaccatgaacaaaaagagggcgataaggaaccagcgaagagccaggcccagaaagaagaaaacccgaagaaacacagaagccatccttacaagcacagcttccgcgctcgaggttccgccagttactccccgccacgaaagcggagcagccaggacaagtacgaaaagcggtccaaccggcggtgaggctggaaccagggccagccagccctgcgggcctccgtgctccttcggggtgcggtgtgcggagaaggcctgagctggcag

SEQ ID NO: 265896 - DNA, 243 bp, Homo sapiens; identical to SEQ ID NO: 215430
  chr13:28575159-28575402
  hypo

SEQ ID NO: 265897 - DNA, 38 bp, Homo sapiens
  chr13:28662983-28663021
  hypo
gtgctgggattacaagcgtgagctgcccacccagccca

SEQ ID NO: 265898 - DNA, 138 bp, Homo sapiens; identical to SEQ ID NO: 215435
  chr13:28745530-28745668
  hypo

SEQ ID NO: 265899 - DNA, 377 bp, Homo sapiens
  chr13:28745728-28746105
  hypo
ttgcttgactggtttattacaaaggatacagatgaacagtcagatgaaaaggtagaacaaggatcttttttctctgtggagttggggtgtgccaccctcctggctcataaatgtgttcaccggcccacaaactccttgaaccccacagttaagggatttttatggacgcttcatctcgcaggcaagggaaattattaactcagcctgtagcccctctctcctcactggaagatggttgggtagggctgaaagttccaaactggtaatcagggcttggtctttctggtgaacggctcccatctaggtacctaacaaaagtcacctcattagaacaaacgctactcctatcaccctggaaattccgagggatttaggag

SEQ ID NO: 265900 - DNA, 56 bp, Homo sapiens
  chr13:28838072-28838128
  hypo
tttcaaacaaacaccgccctatgtttctgactatcccttcccgcgtaacatttgtt

SEQ ID NO: 265901 - DNA, 86 bp, Homo sapiens
  chr13:29298157-29298243
  hypo
tccccgccgctgccgccatttcacttcattggagacactgaaggccgaggtcgccaccactcctcctaatcgacggagcgagagaa

SEQ ID NO: 265902 - DNA, 222 bp, Homo sapiens
  chr13:29913841-29914063
  hypo
ggaccatctctctctggatacgggcatagtcccagttgggaggagcggtgaggaggggccgggtgcggacccagcgcttcccattgacgtagacgactttgcagccatccttgacctgggagcggagaaggggcctggaccgcaaggcccggtgtttctgggattggggcggcaccctggcccggggcggcactatggtccggggccagcccaggtaccagc

SEQ ID NO: 265903 - DNA, 204 bp, Homo sapiens; identical to SEQ ID NO: 215440
  chr13:29920653-29920857
  hypo

SEQ ID NO: 265904 - DNA, 166 bp, Homo sapiens
  chr13:29933413-29933579
  hypo
ggactgcggcagctcgaaatgggtttccgcccaagccggacccgcaggcccgtgaggctgagcggcagctggtgctgcggctgaaggagcggtgtgagcagcagaccagacagctgggcgttgcgcaaggggagctgaagagggccatctgcggctttgatgccct

SEQ ID NO: 265905 - DNA, 95 bp, Homo sapiens
  chr13:30079033-30079128
  hypo
cttgtccagggcacgcctgctcggcacacgtgttgccaacgtgaaggcagacatggtccctggccctaggatgagtccacgctgggcttccgggc

SEQ ID NO: 265906 - DNA, 226 bp, Homo sapiens
  chr13:30079644-30079870
  hypo
tctgagccatcaccgctcccgaaacacatggggcggcagctgctgtgcctccttctcaattcttccacccccccacaccatcagaattcggatttctctccacgtggcgtctgcctctgtccccttccaggctggagcgacgtttccacgttcggatgctgcagcctctgcacctgcctcagacagacccaccagataccacctgtctcttcgtggcatttgggag

SEQ ID NO: 265907 - DNA, 242 bp, Homo sapiens
  chr13:30082638-30082880
  hypo
tctgcagcagcagaacctcccgcagtaattacactgggccagaaaccacgcccaacctgtgtcccaggggcacgctgcacgagcttgcttacccaccacgcaagctctgtggtctggctttctgtgtggccaaggaacacgaaatgtgcatgatgctttcaggtgcagacgctcatcacatattccagatcataggcacgctggggcccggagagcagctcgcctgccttcctctctgcaca

SEQ ID NO: 265908 - DNA, 149 bp, Homo sapiens; identical to SEQ ID NO: 215442
  chr13:30087251-30087400
  hypo

SEQ ID NO: 265909 - DNA, 54 bp, Homo sapiens
  chr13:30088601-30088655
  hypo
gggcggggctgtgcgtcacttgcactggtccaagttgccgtcaggagtccttgc

SEQ ID NO: 265910 - DNA, 45 bp, Homo sapiens; identical to SEQ ID NO: 215443
  chr13:30101132-30101177
  hypo

SEQ ID NO: 265911 - DNA, 458 bp, Homo sapiens
  chr13:30106967-30107425
  hypo
gatgagaattatgatcactgcgaatatgtcggggttttcagccagcacgccgggggcgttcagagtcatgtgtgtccgtgagaactccccgatgggtctgcctatcagctcgtcgaaggtggcgctccaggccctcgctacgcttgaagtacctgccacaaagcacacacaacagaggagatgtgaggacaactgttagccaggtatttgtagtggagctccatgttgataacatcattgcaggagtcaccgacggtgcactggaatctggcagcagcagccagaccacagtgtatgctgagccagaagtgacggtcgactagtgctaagtgcgagaaggcttctagggcctacagaggaatgcacttcacatcctacccaatatacacaggtgtattctatcaaatatatatatccgaataaaaagttcgcaaaacgagtgttacccttaccacctg

SEQ ID NO: 265912 - DNA, 246 bp, Homo sapiens
  chr13:30123249-30123495
  hypo
ttacgtggagcggacgtgctagtgggcactaagagaatagcctctatcagagaggagaatgcaattcaatttacctgaaattcctttcaggtatctggaaacaaatggccaattgcccgcatgctcacctgaatgatcaaagaccaggagaaaaccgtacccgtggaccaggaggaagccagcgaagaacaaggcagcccaggatgcgggaccagtgccattccttcccaccgcatgagagtgcca

SEQ ID NO: 265913 - DNA, 38 bp, Homo sapiens; identical to SEQ ID NO: 215447
  chr13:30128333-30128371
  hypo

SEQ ID NO: 265914 - DNA, 170 bp, Homo sapiens
  chr13:30141666-30141836
  hypo
cccacactgaatgttcggaatgctcaaagggcttggccgcagccttttctctgccaaggcacacctgacaggtaagctcctgccacactcctgggtgtttacaagctgctgggtacaactccctgcaggcgggcatccctcccacggatgcaacccggacagtgcggcag

SEQ ID NO: 265915 - DNA, 350 bp, Homo sapiens
  chr13:30146275-30146625
  hypo
tggtgagggtgcagcggccgcctgtgggtcccaagcacgactccaagtgcgacacgctgtctaggccatctggtcccacaccaagtcacatctgtgcccagagaagcccagtggaccagtgcgggccccccagccctcagggcagagccaggacgcttcacacaagagtcactcattggattttctactccacgcacacgctgtcaataatggcaggcgccacctaaaggggcaggtgccagtgtaatttaacaggggagaaaaagtacagaggccacccaggaggatgctggaaagacagagggtggggagtgggaagaaacactcaggacccgcggcaccagggcgtg

SEQ ID NO: 265916 - DNA, 31 bp, Homo sapiens
  chr13:30149064-30149095
  hypo
gccaccgtgcgtggccagagcagctaatact

SEQ ID NO: 265917 - DNA, 200 bp, Homo sapiens
  chr13:30163603-30163803
  hypo
tccgtcacacacaccggctcctgacactggccacgtcccagcgcagctgccccaaggaccccagggctccagctgtgccaggtgcctggacttgggagggggaagacccactttcagagacagcagagggaaatcagggcaaagagaggggaggcagggtgccctccagcgttggggcgggtgaccggtgccagcaccac

SEQ ID NO: 265918 - DNA, 36 bp, Homo sapiens
  chr13:30314401-30314437
  hypo
aatgccatgtgaacacgaaatcggagactggggtga

SEQ ID NO: 265919 - DNA, 31 bp, Homo sapiens
  chr13:30355023-30355054
  hypo
gtgctagccaggcgcggtggctcacgcctgt

SEQ ID NO: 265920 - DNA, 34 bp, Homo sapiens
  chr13:30707189-30707223
  hypo
atagcgacggggacccggaggcaggaccgagagc

SEQ ID NO: 265921 - DNA, 830 bp, Homo sapiens
  chr13:30707253-30708083
  hypo
actgggtgggccgtgctgggagaaggtcccggggatcactcctcctaggccgccggggcagtctctccagccaccctctttccccagagccagcgggctggggttcttggtttagactctcttctctcctgtcctggaggaccagccatttgacgcccttgtccactgggaggatgttttccatgattccacttcttcccttcctcggccacctaaggcaggccggcttatgcgtgactgtcaaccgaggcaggccacagcgctgtgggcaggcggttttgcacgtatccttagtgaccctgaaggcccagcctctgctggctgcctgagccgagggttttacttcttttcatttaatcactttattggtccttgccgggagggagcccatgggtcctggtaaaagtgcatctccctgtggttctggggctgatcctccttctggagcagaagacagagctcagtgaggaccgcctgtgctgcctgcctgggacgccccagccgcagggccgcgcaggcgtgtttctttgagagccctcccctggaagctccctttcactccaccctgttgataaggcccaggacaaaaagcaagcaaccgctggaaacacacctgctggaaacacgcctccagtgccagcccaggaggtggtggccctgtcctgacgccccgtctagccaccgggccagagctgggagccccatagtggagtctgtgtccggcaggtgtctctggacagctgaggttcttgtaaccaaagaggttcgtttacctccttagatcacccagggacaagtgatgtgttttgtggcctcggatcgttccgtgc

SEQ ID NO: 265922 - DNA, 81 bp, Homo sapiens; identical to SEQ ID NO: 215448
  chr13:30910053-30910134
  hypo

SEQ ID NO: 265923 - DNA, 142 bp, Homo sapiens
  chr13:30992817-30992959
  hypo
agcactccccaccgcggtgaccctcaatgactggcaagacgacccatttttaaagggccaatttttaacagctggaaacaataaacgtcgtgggaggtgaagatgctgggaggactgatttctccttcgctgttttcaaaag

SEQ ID NO: 265924 - DNA, 262 bp, Homo sapiens
  chr13:31002076-31002338
  hypo
agtggccgttaccacgatgcattctgggaaagaagcagcaccaaatccaagatggcggccagcaggaggctgatgaaggagcttgaagaaatccgcaaatgtggaatggaaaacttccgtaacatccaggttgatgaagctaatttattgacttggcaagggcttattgttcctgacaaccctccgtataataagggggccttcagaatcgaaatcaactttccagcagagtacccattcaaaccaccgaggatcacattta

SEQ ID NO: 265925 - DNA, 33 bp, Homo sapiens
  chr13:31002685-31002718
  hypo
gtgccaccgtctggcgttcgcttgcagcagtta

SEQ ID NO: 265926 - DNA, 49 bp, Homo sapiens
  chr13:31061045-31061094
  hypo
ccgagggactgcaccgcattccaaatgttgggtgcgggaggggaataaa

SEQ ID NO: 265927 - DNA, 43 bp, Homo sapiens; identical to SEQ ID NO: 215450
  chr13:31185329-31185372
  hypo

SEQ ID NO: 265928 - DNA, 206 bp, Homo sapiens; identical to SEQ ID NO: 215451
  chr13:31208407-31208613
  hypo

SEQ ID NO: 265929 - DNA, 35 bp, Homo sapiens
  chr13:31259579-31259614
  hypo
agactgaccatattaaaattcgatcacaccatttg

SEQ ID NO: 265930 - DNA, 52 bp, Homo sapiens
  chr13:31259644-31259696
  hypo
ctctgcgttagtttcctcctctgtaaaacacggatgatgctataaacacacc

SEQ ID NO: 265931 - DNA, 341 bp, Homo sapiens
  chr13:31305985-31306326
  hypo
ggactgcggccaggcggtcttctgcgggaatccgggcaggcagggcgggctgcgctcccctccccggctctcccggtgccccttgtctttttgttctgtctcagcagctctctattaagatgaatggcatttccaaaggcttcacctctgataagtgttcctctgcagctgcagccagaatcttaatgtgcgcgctgtaatttaatggccgtctcggctattaacacgctcttctcgggtgaagtggactccctccatccccgggcctctgcacgtgctctgcgcgctggctgggggtgactccaaggagctcagagcggggtgcccggcacctctcgcca

SEQ ID NO: 265932 - DNA, 55 bp, Homo sapiens; identical to SEQ ID NO: 215453
  chr13:31579360-31579415
  hypo

SEQ ID NO: 265933 - DNA, 260 bp, Homo sapiens
  chr13:31742917-31743177
  hypo
cccaggcagataacccgccggctggtgcctcccaactcccaaagctcctttcgcctgggttctggtgtgccatccatgcttacgcatctctctgtgcccagtgccctgcactaagccaggtgtgtagccggccctcacgctgttagctgctgttaaatgccagcactccgccccacccaactctgttgtggctcctccgactgccagcacggctacgtcatcaaacaggtgctcccaatcattcccggtcatatgaaaaa

SEQ ID NO: 265934 - DNA, 33 bp, Homo sapiens
  chr13:32244678-32244711
  hypo
gatacaggctaggctgggcgcggtggctcacgc

SEQ ID NO: 265935 - DNA, 172 bp, Homo sapiens
  chr13:32526648-32526820
  hypo
tccttaggcgtcctgcgtcccccgattcctgctccctggttgccgcgtccttggctggcgtcagaaaaatggctacaaactttctagtaggtgagaagatctggttccacaagttcaaatatggcgatgcagaaaggagattctacgaacagatgaacgggcctgtggccgg

SEQ ID NO: 265936 - DNA, 259 bp, Homo sapiens
  chr13:32885416-32885675
  hypo
tgggcctccggagcggctcggaggcggcgtctccaggcacctgcttgctcttcgtctcctgagggcacggggcgtctttctcccccgattcctccagctgcccgggctcctcctgcctgtcagctcctgacctccgtgatggtggctgcggctggctggcctccgcagggcccgggagcgccttgctctccgcttcgtccccatctctccgcaggcggatcaagcccctgcggccggtggcgggcgaagtgaccccaca

SEQ ID NO: 265937 - DNA, 157 bp, Homo sapiens; identical to SEQ ID NO: 215455
  chr13:32983222-32983379
  hypo

SEQ ID NO: 265938 - DNA, 35 bp, Homo sapiens; identical to SEQ ID NO: 215456
  chr13:33103876-33103911
  hypo

SEQ ID NO: 265939 - DNA, 122 bp, Homo sapiens
  chr13:33266483-33266605
  hypo
gtagaagatggtatcggggtctttgttgtgatcttctcttttattaaacaagtttgcgtccaaaaagcctttttttttttttttttttttttttttgagatagagtccgatgggtgacttgt

SEQ ID NO: 265940 - DNA, 56 bp, Homo sapiens
  chr13:33510409-33510465
  hypo
tgcctttgaatagcatttgtcgtattctgcctcacggcttcctgccttctttccac

SEQ ID NO: 265941 - DNA, 87 bp, Homo sapiens
  chr13:33640654-33640741
  hypo
cactaggcggcggcgctggaggcggggacttcctggccctggtggggcgaagtgcactcattcctccaccgcgtctcagagcaccgc

SEQ ID NO: 265942 - DNA, 52 bp, Homo sapiens
  chr13:33687132-33687184
  hypo
tgtgtaagctccacattcctcgtgtgaacacgcacccagagtcatcatcaac

SEQ ID NO: 265943 - DNA, 36 bp, Homo sapiens
  chr13:36673374-36673410
  hypo
gattacaggcatgagccaccgcgcccagcattattt

SEQ ID NO: 265944 - DNA, 592 bp, Homo sapiens
  chr13:36788448-36789040
  hypo
gagagtggactcgcgtcctggaaggggcccttcctgctattcgctccccacagttccccgacaatgagagctccccaggccgggctttgagggccgaggggaccaccgacctagggcccgcccgcgaggttataaacgcagctgcctccccttccacagcctcttacctggcccgagatctggcagtgctcctggcagataattgaggaagccatggccgctgcgcacgtgctgggtcctggggcagcctcccagcaggaggagctccacagccgctgcgtcccgggcccgccccctgcactaatggctcctggccgcagctgagggcgagcacgccccaggcgcccttaaagtggccctgtcgccagttctggcgcgtgggggagcagcaggccgctctgaggggtcaacgcggaacccgggtcgggggcctgcccgcgggggctactcaagctgtcctgggggcccttaggagaccgcgtcactagctgactgcgcactccaagtccccttcccagggcagctctcacgacactaagccccgcgtactcactcccactgcgccgcctggggaggcgggaggcaaggcgtc

SEQ ID NO: 265945 - DNA, 77 bp, Homo sapiens
  chr13:36789490-36789567
  hypo
cggggcgtgatttcgtctcaaaaaaaaaaattaaaaatattagaaacacttcatttttgtgccgtgatttaacaaat

SEQ ID NO: 265946 - DNA, 225 bp, Homo sapiens
  chr13:36909035-36909260
  hypo
aaaaacaaagtagaatttgtcgttatctttttgcacttatactggacacataaacattaacaaataaaaatgatgtagtctacacgtatttcaaattatgctttcatttttctttcgcttacctgaagaaacccgggaggacggtttagaaccgtatcgagagaattatccaaaaacctcacaattcgaaggtacccaggatacgaaggtgcactaacctcccct

SEQ ID NO: 265947 - DNA, 162 bp, Homo sapiens
  chr13:37453825-37453987
  hypo
taagaggccacagcaggctccggcgcgcacgggaaccgcacagcccttcacggcaaagtgggcggcgagtagctctccaggggtggcatagggaccaacccgcccgttcttctgggagcagctgggaccaattcaagttgcgaagtgtgttgactttctcct

SEQ ID NO: 265948 - DNA, 422 bp, Homo sapiens
  chr13:37643590-37644012
  hypo
cactgccaccccaccggctgcagtggggaggtgcgaggggtggcagcaggaacggctgtgggagcagcagtggcggtggtgggtcccctgtgccccacgtcccggaagcaacctcctgtgctgcccccaaactcatgcagccaggtgggacccgaccctaggcccggagctttcatcactcgggactctggccccacactgctgctctcacccacgcactgctgctgtggggagggcgtggggaggaggcggagctgggcccggggctgtgccacgcttcacgcttcacggaaccagcgggagccaaggacaagcaggagccgccccgcagccccttgggggccgccgctatgaggccaggccaagtcgcccagcccagagggggagtgatggagccacgcgattgggcacagaggagtggg

SEQ ID NO: 265949 - DNA, 388 bp, Homo sapiens
  chr13:37679436-37679824
  hypo
taggggaggatggaggcctccggggcccaccggcccgcaaggctgaggatgagggctgctggaaatggccaccgaggcgtttcccggtgttacagggcgtggagtcagcctgatccctgcagcacaccaggatttccgccaggccacagtttgcgagggtttctcaaggttccaggctgggccaccacctctttctcggtggcggtcgctgcctcgctgtcgtggcgatgtcgtgggctgagaaagggggcacagcgagttggggcagcagtactgctgccaccgctaccaacggctgtgggccagagggcccggtcacgccgccggcgccgccattttgttcctccacctcagccaaccacaaatcgagaatttttggagaagctgt

SEQ ID NO: 265950 - DNA, 60 bp, Homo sapiens
  chr13:37838971-37839031
  hypo
catgcatccatagcctgtaccggctattctgctccctccgatggcctctgctccagtgtt

SEQ ID NO: 265951 - DNA, 77 bp, Homo sapiens
  chr13:39358216-39358293
  hypo
cagagcgaaactcagtctcaaaaaaaaagctgacttcaggaccagccttggactccggggtccagaccaagtggttc

SEQ ID NO: 265952 - DNA, 200 bp, Homo sapiens
  chr13:39694434-39694634
  hypo
gaactgtcaccccccgccgcctactttttcttactctccttgggtcatgccaactgcctagtcagtcccagtgaggtgaactggctgcctcagttggaaatgcagaaatcactcgcttcttgcgtttgtactgctgggagctactgaccgcagagagctgtttgtatcttggcgctgccctgattttttttttttttaaa

SEQ ID NO: 265953 - DNA, 224 bp, Homo sapiens
  chr13:40762416-40762640
  hypo
tcccatcccactcccgcacgcttagccctcgcccccgactccaagctgggggcgacggtgcagattcccagctcatgaaagcagcccaggcgtctgcccagaggtcgcctgccttctcctaccaagaaggaaaggagcacggagacaaaccgactgactcaaaagcccttctttcctaggactcctgccaggacaggaggagaagttgccgctgagacgaggag

SEQ ID NO: 265954 - DNA, 85 bp, Homo sapiens
  chr13:41450220-41450305
  hypo
ttcaaagggagctgctccataaacttgtatgctgagcagaacagctggaccctgcctcgcattgtgctgtcggcaggttacacac

SEQ ID NO: 265955 - DNA, 107 bp, Homo sapiens
  chr13:41453084-41453191
  hypo
ggtccccccttcctcggcccttcgggggaactcctctaatagctgcagctagcagataggtgttttgccgggcttggcacttgctttctttgcggctctctctacgg

SEQ ID NO: 265956 - DNA, 120 bp, Homo sapiens
  chr13:41561358-41561478
  hypo
acagcacccggccgaaaatcactgctctccttttaagttactatggtaccaactgtttatggtgaaaattaataaatagtccggtgccgtggctcacgcctgtatcccagcactttggga

SEQ ID NO: 265957 - DNA, 146 bp, Homo sapiens
  chr13:41567499-41567645
  hypo
tgcaggtgtgggcagtgcaccgatgggtctggggggagcggggctgggcggctctgtcctctagcggagcccgtttgctactatccgcccaacttaagcacccagcgggcgaggaactagtttttatttattttttagagacaggg

SEQ ID NO: 265958 - DNA, 55 bp, Homo sapiens
  chr13:41767766-41767821
  hypo
aattgaacccattcggctgagctgcttgaagttgtgagctatgtaggactgggcc

SEQ ID NO: 265959 - DNA, 38 bp, Homo sapiens
  chr13:41884495-41884533
  hypo
gaccagtggccttataaaaccgtaattccggccaggtg

SEQ ID NO: 265960 - DNA, 81 bp, Homo sapiens
  chr13:42026224-42026305
  hypo
aaaataatgtcccacggtgataaccaagtgtgccaggagagaaaatatcctaggagtaactaatatcttataatgtcacac

SEQ ID NO: 265961 - DNA, 33 bp, Homo sapiens
  chr13:42600814-42600847
  hypo
attgcaggtgtgagccaccgctcccggcccact

SEQ ID NO: 265962 - DNA, 42 bp, Homo sapiens; identical to SEQ ID NO: 215467
  chr13:43217491-43217533
  hypo

SEQ ID NO: 265963 - DNA, 177 bp, Homo sapiens
  chr13:43543176-43543353
  hypo
atccataggtggccccgccctccctcattccggcagcggctgtgcttgcttacctagccgtctgggcaccaggtgaaccggtttagctctgttctgctccttccacttctccaggttggccagctcctgctccgcaactaagccaggcgagaaatatcaaatcgtcaattattagac

SEQ ID NO: 265964 - DNA, 84 bp, Homo sapiens; identical to SEQ ID NO: 215469
  chr13:43596563-43596647
  hypo

SEQ ID NO: 265965 - DNA, 41 bp, Homo sapiens
  chr13:43598748-43598789
  hypo
ggattacaggcgtgagccaccgcgtccggcatatttttaag

SEQ ID NO: 265966 - DNA, 120 bp, Homo sapiens; identical to SEQ ID NO: 215470
  chr13:43620969-43621089
  hypo

SEQ ID NO: 265967 - DNA, 122 bp, Homo sapiens
  chr13:43728028-43728150
  hypo
gtacttgcctggggcgtgattctggttgcgttgtttttctgacaattcaaccacatttggaattttcttacgtaggatatgggcttgagtttttaatttaaagtcttcgggtaaggtcagct

SEQ ID NO: 265968 - DNA, 177 bp, Homo sapiens
  chr13:44543798-44543975
  hypo
gtggtacagctggaccgctgggacctccacgctgagcccaaccccgaggcagggcctgaggaccgagatgaaggcgccaccgaccggttgcccctggatgtcttcaacaactacttcagcctgggctttgacgcccacgtcaccctggagttccacgagtctcgagaggccaaccca

SEQ ID NO: 265969 - DNA, 337 bp, Homo sapiens; identical to SEQ ID NO: 215471
  chr13:44544879-44545216
  hypo

SEQ ID NO: 265970 - DNA, 103 bp, Homo sapiens
  chr13:44947061-44947164
  hypo
cagtgtctgggaggcgcgtaaacgcttccatttttatccttccactgcagaaaatgcccagtttagtctgggagacactcagacccctcgggacaagggtggc

SEQ ID NO: 265971 - DNA, 87 bp, Homo sapiens
  chr13:44981953-44982040
  hypo
aagatcacagacttcggctgagtttgaagcattgagagaatatccaaccgcaagtgggtcacagagacctggcgatgcggatgggcc

SEQ ID NO: 265972 - DNA, 252 bp, Homo sapiens
  chr13:45003134-45003386
  hypo
agggcactatacttcggtcattcagggatccagctgacaaaggctctgtcactcccaaggttgccgggtcttctccatcccatcagtggaaggagaaggagcctggcagatcactgagaatggttttctcatgggccaagcctggggggcttcagttacttcatcactcatccactgactaaacctgagtcccacggtcactcctaactccaagggggcggggagatgtaattcaggcgtgtgcccaagtgg

SEQ ID NO: 265973 - DNA, 87 bp, Homo sapiens; identical to SEQ ID NO: 215473
  chr13:45154328-45154415
  hypo

SEQ ID NO: 265974 - DNA, 319 bp, Homo sapiens
  chr13:45383495-45383814
  hypo
cctgggaaagcacatgctctcgtgcgagctacacaatgtaagcacttacttgtgtttgtcttgtgctttggctgattcgactgccggtggaccttcatgcattcttcctcttgtcgtgtgctctggagaccctgtctgctgctgagtctctcccagggccccacagatgcagccgttccaatgagattgtgaggtaaagttgctcggggaattgttctgaactttcagaaatgccactgtcctacaaggtggagtctgttctcaactgtttgttgttgttttgttttgttttgttttgttttgatacaagttctagctc

SEQ ID NO: 265975 - DNA, 36 bp, Homo sapiens
  chr13:45491125-45491161
  hypo
gccactgcactgcagcccgtgcgacataactagact

SEQ ID NO: 265976 - DNA, 101 bp, Homo sapiens
  chr13:45493229-45493330
  hypo
aaatagaaattgttctgcctcgcactcattaccacgaagaagctccccaacagggaatgaacgcaacccaacataattaaaagtgaatatgggccgggcgc

SEQ ID NO: 265977 - DNA, 192 bp, Homo sapiens
  chr13:45500374-45500566
  hypo
gcaagagagaagctacgcagcagatgaatccgaaccaccagcagcaatattcctatggaaataaacaaagacaactaaatgagaaaagttaaaagcggtttattcagaacttgccatagcaagggagccagccaccatcgcttgtgttttggtgagactccaaggcaggcagaggagcgggaaagctttaaa

SEQ ID NO: 265978 - DNA, 108 bp, Homo sapiens
  chr13:45564773-45564881
  hypo
tttgtagactagcaccgacacccagttggagaagagtaaagctgaaagagtaaccctgccatttctgaatctaatttttcttcctggtctacccggaggctatgtttc

SEQ ID NO: 265979 - DNA, 137 bp, Homo sapiens
  chr13:45741238-45741375
  hypo
tttttaaagaacttcgtgtatgtgtatcagcccacaaattcttgcttatacagactgtatcattagctatttcaaaataataaagggtaaaaagccctacagacacatactatacatactattttactatttttttt

SEQ ID NO: 265980 - DNA, 31 bp, Homo sapiens
  chr13:45905219-45905250
  hypo
acaacaaaaaaatgtacgctttgcttttgtc

SEQ ID NO: 265981 - DNA, 300 bp, Homo sapiens
  chr13:45926321-45926621
  hypo
gaatagcgaacgcttccttgtgccagggaaggtggagcagtcatgactcaggcttcgggagcctcaggctcgcagctacaggcttatacacactcacatcaaatgctaatggggcccgagtcagaaagaaattagccagactaagaaaaacaagactttggaaatataaacgtttgaatgaacattttaagcatggtatctgcctgccaccttggttctcaaagtggtctcccagaccttttcagggatctattacatcaaaactattttcagggtttttttttttttttttgagactga

SEQ ID NO: 265982 - DNA, 104 bp, Homo sapiens; identical to SEQ ID NO: 215475
  chr13:45936013-45936117
  hypo

SEQ ID NO: 265983 - DNA, 41 bp, Homo sapiens; identical to SEQ ID NO: 215476
  chr13:45938917-45938958
  hypo

SEQ ID NO: 265984 - DNA, 64 bp, Homo sapiens
  chr13:45939385-45939449
  hypo
gatgctgtgggtgacgttggagagggaagcccggagccctgacctagtccggcgtggagagagg

SEQ ID NO: 265985 - DNA, 41 bp, Homo sapiens
  chr13:45939905-45939946
  hypo
cctcttaaacatatccgggcctggcatggtggctcacgcct

SEQ ID NO: 265986 - DNA, 98 bp, Homo sapiens
  chr13:45953004-45953102
  hypo
tagttgtttagagacgtaggacattggcctcatccagggccccagagtttcggttaaaagtccagctgccatcttttctctatctgacgcgttcaacg

SEQ ID NO: 265987 - DNA, 162 bp, Homo sapiens
  chr13:45965401-45965563
  hypo
gcagaacccgcggcgccagcaccagcgccagcagcagccccagggctaaccccaggcggccaccgcgcgccatcgtcccgaggagagggcggccgggagggagacgctgagcgagcgacaacagcggcagctcgggaatgggggctcggagcgcggcggcca

SEQ ID NO: 265988 - DNA, 136 bp, Homo sapiens; identical to SEQ ID NO: 215477
  chr13:46037882-46038018
  hypo

SEQ ID NO: 265989 - DNA, 87 bp, Homo sapiens; identical to SEQ ID NO: 215478
  chr13:46287705-46287792
  hypo

SEQ ID NO: 265990 - DNA, 77 bp, Homo sapiens; identical to SEQ ID NO: 215479
  chr13:46288451-46288528
  hypo

SEQ ID NO: 265991 - DNA, 87 bp, Homo sapiens
  chr13:46318163-46318250
  hypo
tgccatcttcatagcaattccgtccctcaccactaagtttaaaacttcaccatttcaggccgggggcggtggctcaagcctgtaatc

SEQ ID NO: 265992 - DNA, 107 bp, Homo sapiens; identical to SEQ ID NO: 215480
  chr13:46543045-46543152
  hypo

SEQ ID NO: 265993 - DNA, 145 bp, Homo sapiens
  chr13:46660689-46660834
  hypo
gggaggaagtgagtgctgattggttcatgggtggccataggcgggtgcggaaaaatcaccgtcagttcccactgcggtccacgggactggcagccttcctgggcttgaaggtggggcttcaccagggacccgcccttttctgcct

SEQ ID NO: 265994 - DNA, 145 bp, Homo sapiens
  chr13:46661315-46661460
  hypo
gagcatgaggctgccgccctgccatcacagaagggggcgggacttttacctcctcctggcttctgctggctccgtggagcacacagccccagccgtgcctcccgcatggcagcagccgctctagatgggccgccactgccattaa

SEQ ID NO: 265995 - DNA, 260 bp, Homo sapiens
  chr13:46946183-46946443
  hypo
gagagtatcctgggcggaccatgtgtacctctgttgaggacagagagaagctgctactcttttcactcgagccatggggagaagcgctgccaacggagtctgtggtatcctcagacaacgttgtctctgccagggagtccccgaggcacgaaggtgaagggcctgagggagaggcagcatctgtcacaaaatgggtcccactgttccctgctgctggcacctgagattgcaagtcctgcggctgttgctgcacatcctgg

SEQ ID NO: 265996 - DNA, 120 bp, Homo sapiens; identical to SEQ ID NO: 215482
  chr13:46948515-46948635
  hypo

SEQ ID NO: 265997 - DNA, 36 bp, Homo sapiens
  chr13:47349768-47349804
  hypo
acaacgaatctcaacgaaatccgcttcaagctatgt

SEQ ID NO: 265998 - DNA, 76 bp, Homo sapiens
  chr13:48318851-48318927
  hypo
gcactgactcctccctcttgcgtctatccttatattgaattaaaccggaaatagcggtccatgtgaccttcctcta

SEQ ID NO: 265999 - DNA, 40 bp, Homo sapiens; identical to SEQ ID NO: 215483
  chr13:48731919-48731959
  hypo

SEQ ID NO: 266000 - DNA, 159 bp, Homo sapiens
  chr13:49076869-49077028
  hypo
gaggcgccacgtgacggcgggcgtggcaaagcaggcaaacacgtcgtcagtgcaggagaagtgggtgaggtgcgggaggatcacggactgaccccggcactggccccacatgtacacgtgcccaccctgcgtcttggccgcagacgtgtgtgtggagtg

SEQ ID NO: 266001 - DNA, 43 bp, Homo sapiens
  chr13:49397811-49397854
  hypo
attatatgcatgagccaccgcgcccggccgcattgttaatttt

SEQ ID NO: 266002 - DNA, 36 bp, Homo sapiens; identical to SEQ ID NO: 215484
  chr13:49848524-49848560
  hypo

SEQ ID NO: 266003 - DNA, 303 bp, Homo sapiens
  chr13:49879455-49879758
  hypo
accgagttcgcactcgctgttaccagctggcgctcatcatcccaccctccctcattgttccccctccaggcccggctccagagctctcccccaccagacacacaggtgttcaggtcacttcctgaataaaggccagccgccttaatgatggcgtcagacccttagctgggcatttaaggctccctcccggccctctcacatccccacatgccccggacaaagcgcacacgcctcgtcattttccagccatgcttcgtgcccacggccctccctgcagcgggaatctctcgctctggtgacggg

SEQ ID NO: 266004 - DNA, 67 bp, Homo sapiens
  chr13:49883683-49883750
  hypo
ttcttgtaaaatatcgctttaaaatcccgttttagatggttgatgtctgaaacgaaaccacggcctt

SEQ ID NO: 266005 - DNA, 278 bp, Homo sapiens
  chr13:49884960-49885238
  hypo
ttttcttcaagtctcggatctgtttaatcaagtagttcttctcgtcagcgaactgctcatcatccgtcctttctttttggaagctgctcagaaactcaatgagtttgggctgattttttaacaggatctccacaataggctgtgttttgtgaggactggccacaaacacctgaaacaaaaagaaacaaatacttaggagtgcaagccagggacctcacccacgctacagcagtgcaggccagggacctcacccacactactcgcgtttcatgcgtgac

SEQ ID NO: 266006 - DNA, 121 bp, Homo sapiens
  chr13:49914522-49914643
  hypo
gtgggaggaatgagcgcagccaggacggaggacaagagatcaggaactgaagagggtgacaaactcctagccctcggagagtcaagtgcgaggggagagtgtgtgccgctgtgtaatgagg

SEQ ID NO: 266007 - DNA, 254 bp, Homo sapiens
  chr13:49922188-49922442
  hypo
agggagaccataggacgctggcaggctgaatggaggcctgtggacacccgagcaggctgcaaactccttcccttcaaacccggacgctagaggccttgtgtttgttgcagttttgcctgaggctttggggaaatgatggcattgcggttcctttcctctgatgtctcgggcaattcagtgcttgtccgaaacccgcacaccctcctgcttacgacaacaaaagtgccacagtggccgggcgcagtgactcacac

SEQ ID NO: 266008 - DNA, 137 bp, Homo sapiens
  chr13:50027700-50027837
  hypo
tgggattacaggcatgaaccaccatgtcctgctcagttggctcttgtgtccctttgatataccgtcatcagtgtaggtattttttatttgtctttgttttatagcacttcccttttggcactcgaagattgctctag

SEQ ID NO: 266009 - DNA, 125 bp, Homo sapiens
  chr13:50050853-50050978
  hypo
gtggaaggagtctacgaaacgtggaggaagtttttcgttacctgcttgagacagagtgtaactttttatttacagataacttttctttcaatacctatgttcagttggctcggaattacccaaag

SEQ ID NO: 266010 - DNA, 182 bp, Homo sapiens
  chr13:50411347-50411529
  hypo
acagccccaactgctcgagacgtgcccaaaggtgaggaactccctagtacttccaggttttcacacaaatctgaatggctcaatgggaccccacagggatccccaggccccgatagatgctagagattcgacaggaggctgaggggagggatggatggggtatcagccgaacccactgccac

SEQ ID NO: 266011 - DNA, 32 bp, Homo sapiens
  chr13:51568863-51568895
  hypo
gagctgaaggctgtcgccggtcggctgtctcc

SEQ ID NO: 266012 - DNA, 32 bp, Homo sapiens
  chr13:52242304-52242336
  hypo
gcacccggcccggaacttctcatttttattgg

SEQ ID NO: 266013 - DNA, 92 bp, Homo sapiens; identical to SEQ ID NO: 215486
  chr13:52334720-52334812
  hypo

SEQ ID NO: 266014 - DNA, 182 bp, Homo sapiens; identical to SEQ ID NO: 215487
  chr13:52335914-52336096
  hypo

SEQ ID NO: 266015 - DNA, 100 bp, Homo sapiens
  chr13:52343293-52343393
  hypo
tgaaagaagcggccgctgggctgtgcggctgcggcagaggagagggccagccacagcatggtgtccgcgccctgggcctcggagcgcaggcggtccccga

SEQ ID NO: 266016 - DNA, 198 bp, Homo sapiens
  chr13:52390091-52390289
  hypo
gtttatgccacccagccagccgcagatcatagagaggtacttgaatagccagaggcagagacagactcaaggccaagcaaagaacctgcagcagcggcacacggtgcacacggcgctgcactccgcaatgcctgtagcaggccagcccgccccctatgtggaagctactgctttgacgttgttagattttatagctga

SEQ ID NO: 266017 - DNA, 110 bp, Homo sapiens
  chr13:52493824-52493934
  hypo
cttccctaagcagacgtctcggctgtgtcccgagcaaacggtgccatggtgacctgcctttgcaggtctcctgctgcgcacctgcgtgagcatgtcgctctcctcacctg

SEQ ID NO: 266018 - DNA, 218 bp, Homo sapiens
  chr13:52532586-52532804
  hypo
tgcttgtggccaggacgatgagcacgtccatgttggctgacctgtgtctcagagatttgtaggcctgaacgtagaagtaccacccaccgaggagctgaaagacaaggacagtgaaggctgccagcaagtagggaggagagttcaatgagcgacacagggccaagggccctggggatggcaaagcctctagctttgtgcacagtcgtgacagtacttct

SEQ ID NO: 266019 - DNA, 37 bp, Homo sapiens; identical to SEQ ID NO: 215489
  chr13:52564916-52564953
  hypo

SEQ ID NO: 266020 - DNA, 37 bp, Homo sapiens; identical to SEQ ID NO: 215490
  chr13:52565193-52565230
  hypo

SEQ ID NO: 266021 - DNA, 32 bp, Homo sapiens; identical to SEQ ID NO: 215492
  chr13:52770512-52770544
  hypo

SEQ ID NO: 266022 - DNA, 36 bp, Homo sapiens
  chr13:53175586-53175622
  hypo
gattacaggcatgagccaccgcgcccggcctgccca

SEQ ID NO: 266023 - DNA, 124 bp, Homo sapiens
  chr13:60232278-60232402
  hypo
agaacagtgcctggcgtgtgagtgcacaagccgcatcagtgagtggttttattcctcactgcatttcggcatgctggggatgagctgctttactgctcagactgagccccgcggcagcccaggt

SEQ ID NO: 266024 - DNA, 89 bp, Homo sapiens
  chr13:60267289-60267378
  hypo
agcgtgaaggcctccggtggaaggcgcttatgactggaaagtagtgaccaaagagaagagtgactggactgagacggaagaggtagcct

SEQ ID NO: 266025 - DNA, 160 bp, Homo sapiens; identical to SEQ ID NO: 215493
  chr13:60492535-60492695
  hypo

SEQ ID NO: 266026 - DNA, 399 bp, Homo sapiens
  chr13:68343645-68344044
  hypo
gttctcacgctgaccgaccagggttgctctcctcgctcggccctgcaggctgcactcgactcgtgccaccaacccagatcctgtgcctgctgtggctctgcactcagcccacgggctggaccaggcgtgccgccagcggcttccaccttgggcacccgcatctagatgagcggaagttggtggtgcctgaaaacagggatgccagcaaccgtgaagcctggggagtcctgagagctgagcccctaagaaatgttatggctgctgtagttcagcgagcagcagggaatggcgcccagtggctttttctctcctactgcttggcgagcgggagggcgtggtacccgcagcttggcgaatgggcgcgtgttacagctttcctgctcccgctgccccacagct

SEQ ID NO: 266027 - DNA, 95 bp, Homo sapiens
  chr13:72305716-72305811
  hypo
tttcttgatgttctttagaaatggtgttatggaatattctttttacctaattcccatggttgtaatattaacactcaaatcgtagactagactcc

SEQ ID NO: 266028 - DNA, 83 bp, Homo sapiens; identical to SEQ ID NO: 215494
  chr13:73324107-73324190
  hypo

SEQ ID NO: 266029 - DNA, 267 bp, Homo sapiens
  chr13:73619519-73619786
  hypo
ataggagtccagtacgtatctgttggttgttttaaaaatactttatcataggaaaatcttcaatgactcctttctccctcatacatacacgctgtgggcaatttgcatcggcatctcttcaatcatcctttgtgtgtgctctgtcttctgttgccacgtgccattaggccaccctgctcattatgtctgggattccaaacctcaacaataatgttgtgaacagtgttaaggatctcatttctgccgggcgcggtggctcacacctgt

SEQ ID NO: 266030 - DNA, 157 bp, Homo sapiens
  chr13:73636133-73636290
  hypo
agtatcaacatgaacgtcttcctccctgacatcactcacctgagaactggcctctacaaatcccagagaccgtgcgtaacacacatcaagacagaacctgttgccattttcagccaccagagtgaaacgactgcccctcctccggccccgacccagg

SEQ ID NO: 266031 - DNA, 86 bp, Homo sapiens
  chr13:73636811-73636897
  hypo
tacaatagaaggagtaaccccgatttggagaaacgacgcatccactactgcgattaccctggtatgtgctcttacctggttgaagc

SEQ ID NO: 266032 - DNA, 50 bp, Homo sapiens
  chr13:73640031-73640081
  hypo
aatgcttatacctgcgattcaggaacttgacctgccggcaaatacattta

SEQ ID NO: 266033 - DNA, 38 bp, Homo sapiens
  chr13:73642917-73642955
  hypo
agcttttggttttaaaatctcgataatatttggctggg

SEQ ID NO: 266034 - DNA, 62 bp, Homo sapiens
  chr13:73809565-73809627
  hypo
agcgacggtgcggccggtcacaagcatgcgtccctttggcaggcaatcgctcgtctccacga

SEQ ID NO: 266035 - DNA, 203 bp, Homo sapiens
  chr13:73824308-73824511
  hypo
caagatgagggtttacgttgatctcatttaagtccagatgtaggcaagctggtctgttatatggcggctccctgatgtcatcaggaatcaggctctctgctctcatcctcaggctcacaaaatggttgttgcagctccggcaatcacaaccatgactcaagaagaaaaaagaggaagagcggcatgagcgaagaggatctgct

SEQ ID NO: 266036 - DNA, 101 bp, Homo sapiens
  chr13:73972455-73972556
  hypo
tgtgcatggcacataacattcggtgacttgtattggcatattcgtttacatgtgtcactgctgtacctgtaatttagtttaatgccagatcaatgtgccaa

SEQ ID NO: 266037 - DNA, 143 bp, Homo sapiens
  chr13:74248145-74248288
  hypo
agccaccatgcccagccgtgttttctttattgtacaactcaacaactgtaatagatgagttctttagcatatagtggttaaaacatgggcgaagtgctgggcccacctgctcgtcatgtgacctttgacgtatttgtttaact

SEQ ID NO: 266038 - DNA, 234 bp, Homo sapiens
  chr13:74269500-74269734
  hypo
ctggtttcagacatcgtgggatggtgatgcccttttgtgttaacactgtgaaggggattcagccctgctgaattgggtgccgctaagagatccagctcttacgctcagctggacaggtagcattcctcacaccaacatatgcctccggcggtgcagggccaaatgatctgaccgggaaaagctgcgatcacagtccgcgcacttgaatggcttcactcccgtatgtttgcggta

SEQ ID NO: 266039 - DNA, 75 bp, Homo sapiens
  chr13:74352828-74352903
  hypo
caccaaacaacagcctgtcacgcaggtattattctcactttgccaacgagaaacgcaagcttagagaggttatgt

SEQ ID NO: 266040 - DNA, 144 bp, Homo sapiens
  chr13:74445354-74445498
  hypo
tcagctgtagtactcgcaacagcagcagcagcttctctgtctctgcttcacagctatggtggcgtgtcctgaaatcaatgatggggaggcagacctgacttccatccctccttctcttcaatgaataagcgagcattcgctata

SEQ ID NO: 266041 - DNA, 186 bp, Homo sapiens
  chr13:75936267-75936453
  hypo
ctccgttgcacgccggtgacactgctgcaccgagaccgaaactcctgctgctcatcaaagccagaatcttccaaaatccgctcagggaagcagacccgagagctggtcagggcaggctggctggccccggcaggtaagccaaggtgggtgtcggtgccgtcagcctcctccggcaggcagtctccg

SEQ ID NO: 266042 - DNA, 32 bp, Homo sapiens
  chr13:76291201-76291233
  hypo
taagaacactcttctcggccgggcgcggtggc

SEQ ID NO: 266043 - DNA, 151 bp, Homo sapiens; identical to SEQ ID NO: 215501
  chr13:76352659-76352810
  hypo

SEQ ID NO: 266044 - DNA, 32 bp, Homo sapiens
  chr13:77356969-77357001
  hypo
ccactgcgcccggccacttctgttgtttataa

SEQ ID NO: 266045 - DNA, 165 bp, Homo sapiens
  chr13:77553618-77553783
  hypo
tttttgtctgaagcccggctgggtcgctggagatccagcggagtgtgcggagggaggcgtgttggataccttttaaaaatgagaagccccaggccgggcgcggtgactcacgactgtaagtcgcggcccaaccctttgggaggccgaggcaggtggatcacttga

SEQ ID NO: 266046 - DNA, 103 bp, Homo sapiens
  chr13:78633633-78633736
  hypo
atccagcagggtgtcggctgcgctcctgattcatcaaggagcccattactgctcccgattgggctaaaggctagccattgttcctacaggctaagtgcctttg

SEQ ID NO: 266047 - DNA, 36 bp, Homo sapiens; identical to SEQ ID NO: 215504
  chr13:79992932-79992968
  hypo

SEQ ID NO: 266048 - DNA, 35 bp, Homo sapiens; identical to SEQ ID NO: 215505
  chr13:79993208-79993243
  hypo

SEQ ID NO: 266049 - DNA, 40 bp, Homo sapiens
  chr13:83206248-83206288
  hypo
ttcaaaatccttaacttggccgggcgcggtggctcacgct

SEQ ID NO: 266050 - DNA, 40 bp, Homo sapiens
  chr13:83206528-83206568
  hypo
caagagagagcgagactccgtctcaaaacaaaacaaaaca

SEQ ID NO: 266051 - DNA, 108 bp, Homo sapiens
  chr13:84107123-84107231
  hypo
ggtcatcaagagcacgctgacactctggcaggccatcgacctgccggacaaggcagagtttggccggagcagtgtgaggaaagccggggctgccgagtggcccaactc

SEQ ID NO: 266052 - DNA, 43 bp, Homo sapiens
  chr13:84267883-84267926
  hypo
catcatattatatagtttttatttaaagcgtttctcgattaga

SEQ ID NO: 266053 - DNA, 60 bp, Homo sapiens
  chr13:84481754-84481814
  hypo
gctgtgaatcctgcatttgccgttcgtgtttcatctggcggttttgaaaccaggttttca

SEQ ID NO: 266054 - DNA, 115 bp, Homo sapiens
  chr13:86083230-86083345
  hypo
gaccatacacccctcgctgctgtaggcctggcttgcccttggcagttgtgggatctgggctgatagtgtaagcggagcgcagcctactgggctgagtgggcggaatgagcccagc

SEQ ID NO: 266055 - DNA, 201 bp, Homo sapiens
  chr13:86086568-86086769
  hypo
gggaagacttctcaccgataaaggatctgaagtatgaacagaaacaatacaagcagagaggagtgcattctccggtgtctggaaaggtaatatataaggcatgtcggttgatctgcatctgggagagttcacggggagtatgcaggacttccattgggaaaaatgtgaatactcataaaaatatgacgttaagcctgtttg

SEQ ID NO: 266056 - DNA, 51 bp, Homo sapiens
  chr13:87732415-87732466
  hypo
ccattcctggcttgaagattcggcctcaccggggacccaccccttcttgcc

SEQ ID NO: 266057 - DNA, 43 bp, Homo sapiens
  chr13:91755718-91755761
  hypo
aataaacctataaaaagatgcgctccaggccgggcacggtggc

SEQ ID NO: 266058 - DNA, 40 bp, Homo sapiens
  chr13:92746466-92746506
  hypo
taaatatttaagaaacttttcggccgggcacggtggctca

SEQ ID NO: 266059 - DNA, 103 bp, Homo sapiens
  chr13:92858652-92858755
  hypo
cgtgatccacccgcttcggcctcccaaagtgctgggagctcggctcccaaagtgcggtggctggaatgcagccaccgcacccggctgtcatgccatgtatttt

SEQ ID NO: 266060 - DNA, 150 bp, Homo sapiens
  chr13:95061643-95061793
  hypo
cctggtgaagccagaaccctcgtgggacacagcagccctgctggtcgcactcactaacattttttttttgcggggggtgggtggggcagacggagtctcgttctgctggagtctctcgctctgtcgcccaggctggagtgcagtggcgcc

SEQ ID NO: 266061 - DNA, 149 bp, Homo sapiens; identical to SEQ ID NO: 215509
  chr13:95238872-95239021
  hypo

SEQ ID NO: 266062 - DNA, 197 bp, Homo sapiens
  chr13:95411483-95411680
  hypo
agaagtgtttgtctgacttgcgctccttgtgcttcttgcccctgtccagctggccccggtgcccgcccccagagccaggagcaggcacgcagcgcagcttccggtccaggccaggcccgcgcagggcgggagcggccccttagaggccctgcgcgccggaggcaagggggcggcgcgaggtccctctcaacccatgt

SEQ ID NO: 266063 - DNA, 159 bp, Homo sapiens
  chr13:95683564-95683723
  hypo
tgccactgtgtgaatttgggcgactagctgcatcttggataccaaatgagacaaggagcagcgttttcaggcttgacacagaacgctacttaggggaagacatcggcctcccccagcaatctaccttctgttctccacggaccagctctgtgtccacat

SEQ ID NO: 266064 - DNA, 120 bp, Homo sapiens
  chr13:95693147-95693267
  hypo
gcttctctgtaattcactcccgaagaattctctaactgcagattcgcttattcctcgttcactcacactaccagggagaatccagagcgttgtaaggacgggtgtgcagggactggagga

SEQ ID NO: 266065 - DNA, 108 bp, Homo sapiens; identical to SEQ ID NO: 215510
  chr13:95751946-95752054
  hypo

SEQ ID NO: 266066 - DNA, 162 bp, Homo sapiens
  chr13:95767877-95768039
  hypo
taaagcaaaatccacgccagatacctagaggcagacggagagccacttaccaagcacgaagctgcttcaaactaaccctgacgcgactgtatagccactcccacacacaaggtattactcatgccaacttagcctctgagttataaccgcacctttctttta

SEQ ID NO: 266067 - DNA, 91 bp, Homo sapiens
  chr13:95775584-95775675
  hypo
aattgatgcttgtttgatgtcgctctggagtgttttttgtttttttgcgggggacgaagtctcactctgttgcccaggctgaagcacacta

SEQ ID NO: 266068 - DNA, 153 bp, Homo sapiens
  chr13:95788979-95789132
  hypo
tcacctaagggtggtggacacgctggggaaggacggggtggagaatcaaacacctgatgatgcaacaagtccctaggaagtgcctgggaacatgcctgccgaacgcccagcctgcccaggcgcacacggctcgccactgccagcatgtgctgc

SEQ ID NO: 266069 - DNA, 42 bp, Homo sapiens
  chr13:95839496-95839538
  hypo
gaatgcattgttcctgcatgcgggtatcttttttgacaaaga

SEQ ID NO: 266070 - DNA, 137 bp, Homo sapiens; identical to SEQ ID NO: 215511
  chr13:95852551-95852688
  hypo

SEQ ID NO: 266071 - DNA, 46 bp, Homo sapiens
  chr13:95869960-95870006
  hypo
tgacagtgagactccttctcaaaaattaaaaaaataaataaataaa

SEQ ID NO: 266072 - DNA, 140 bp, Homo sapiens
  chr13:95888736-95888876
  hypo
ttcatcccaaacaactagcacgggatcaggatatttacagaagacattcccatccctcagatgggtcatgatattaaatcccaacaagcctgtctcggcatgtgaacgcgcgcgtgcgcgcacacacacacacacacact

SEQ ID NO: 266073 - DNA, 209 bp, Homo sapiens; identical to SEQ ID NO: 215512
  chr13:96061946-96062155
  hypo

SEQ ID NO: 266074 - DNA, 461 bp, Homo sapiens; identical to SEQ ID NO: 215513
  chr13:96085829-96086290
  hypo

SEQ ID NO: 266075 - DNA, 92 bp, Homo sapiens; identical to SEQ ID NO: 215514
  chr13:96126087-96126179
  hypo

SEQ ID NO: 266076 - DNA, 184 bp, Homo sapiens; identical to SEQ ID NO: 215515
  chr13:96353304-96353488
  hypo

SEQ ID NO: 266077 - DNA, 153 bp, Homo sapiens
  chr13:96409578-96409731
  hypo
taagaaagtgaaaaacgtgctttccttcctccgttcttctctgtcctttcacgtgcctacatgtatttgcttcccggtaagtttttgggacccaggtcttctgagtctagatctgttgttcatgctcatggaccatatcggtagaaatcaagg

SEQ ID NO: 266078 - DNA, 120 bp, Homo sapiens
  chr13:97599724-97599844
  hypo
cgatctcgcctcactgcaacctccagcaccggggttccagacattctcgtgcctcaaccccgcgaatacctgggatgacaggcgcgctactgaaccggtacatttttgtattgtagagcc

SEQ ID NO: 266079 - DNA, 103 bp, Homo sapiens
  chr13:97599964-97600067
  hypo
gcacccggaccatagttttgttctgccatcttgagaacaagctgccgtcgttatttcgtggctgaaatgggatctgctcgtgattcaccgtcattccgggaat

SEQ ID NO: 266080 - DNA, 292 bp, Homo sapiens
  chr13:97980686-97980978
  hypo
accttagggccagcacttgccgttccgcggcctggcctgcttgcttgaaaatatcatcatgcacctacagcagcaagtgctgccaaggtggcactgaaagaggcaaaattcagaaaatcaggttgggattccagcccttcgctagaatcgttttccccaagaaaagtgttgctggagtctgccggtcaatgactcagcccatgtaaagacacagttcaaattattccagcggaatacaaatggcgggggcctgttaactgaattgtagatcgtagaaatccattgcttttcc

SEQ ID NO: 266081 - DNA, 94 bp, Homo sapiens
  chr13:97991043-97991137
  hypo
gaggcttaggagacgccgtgtgtcagccttttagcgtgagtgccaggcacgtaccctttaaagcagacgcattctaaacgagtgggacgacggc

SEQ ID NO: 266082 - DNA, 228 bp, Homo sapiens
  chr13:97999151-97999379
  hypo
acaacaccgtaaccgtttgtatggattacataaaggggcgttgcatgagggagaaatgcaaatattttcaccctcctgcacacttgcaggccaaaatcaaagctgcgcagcaccaagccaaccaagctgcggtggccgcccaggcagccgcggccgcggccacagtcatggtaagtgcggccgcccgccgcccctgcaccccggcgcctctgcggaggccgctccggg

SEQ ID NO: 266083 - DNA, 111 bp, Homo sapiens
  chr13:98528398-98528509
  hypo
ttgttaccatgtgtacggtaataaaaaaatggcgcaactcaggcagagaacctacctccataataaaagattagagtgggggctaccagatattcacgccctatgcaaatg

SEQ ID NO: 266084 - DNA, 80 bp, Homo sapiens; identical to SEQ ID NO: 215519
  chr13:98679646-98679726
  hypo

SEQ ID NO: 266085 - DNA, 90 bp, Homo sapiens
  chr13:98688094-98688184
  hypo
actggcccaagcccacgcaagagcactttcccactggaagctcaaccagcctttgccacatggagccagcccagatatcagggagactgt

SEQ ID NO: 266086 - DNA, 39 bp, Homo sapiens
  chr13:98695035-98695074
  hypo
caggcgtgagccaccgcgcccggccggattcaaaaatta

SEQ ID NO: 266087 - DNA, 92 bp, Homo sapiens
  chr13:98761016-98761108
  hypo
tcatcatcgcaaacacgtatcacttctttgtattgggaacattcgctatcccccttctaggtatttaaactgtatattattgttaactatag

SEQ ID NO: 266088 - DNA, 146 bp, Homo sapiens
  chr13:98768945-98769091
  hypo
catcccagactatggcgctttttacagcagtcttagaaaaccaatgcacctttctatctcttgcctctgcctccctctggatatctgcgtctttttcacactgcaaactaaatgtttctttttgtttgtgttttttgagatggagt

SEQ ID NO: 266089 - DNA, 153 bp, Homo sapiens
  chr13:98829228-98829381
  hypo
caggcgccgcctcctcgcccctcctgtcgccgtgagccgccttctgccagctgtggaggccccggggcctcggtgccacccgcgggggctgagccactgtgtcgccctcgtccccgctgctgctgctctctccgtgctcggggtcgcaggccg

SEQ ID NO: 266090 - DNA, 44 bp, Homo sapiens
  chr13:98851326-98851370
  hypo
cttttctctattttcgcacttctattagtcggatccgctattgg

SEQ ID NO: 266091 - DNA, 638 bp, Homo sapiens
  chr13:98869701-98870339
  hypo
tctacgaccgtcgtcgcaggaaatgatccttgtaactttctcgtgttgctgtcttgtcactgctgtactcgagcttttgtagctcctgagacttaagtagcattcatcctttgcctgaggatcaagtgtgggcttcgtagctcggggagcctgggagagagcaatgagcctccatggaggggccctgtacaccgggaggtgcctgggcaactcccatggctcatctcaaccacagtcctcggcggtttgttttctgcattagcttctcatgccagaacaccctcttatttgtttacctgcttagtgttggcctcttgcaggtagagtggccactccttggagggcaaggcctcttgttcttgttcgtcatcatatcctacgccgcagcggtgcctgtgcatgaaactgactggtgacagttctgctcggtcgtttaactatacgagagttggtgctgtcctagcataacaagggaaagagcaagtgggaagagcttctgagtcccttcctcgtgttttcacagcgtgaaggtggggctgggattggagtccggcccgccagaccctcaacttacccatcttctgggcactaagagccgcctcctttgtgagattcgcggacttcctctgcctcctact

SEQ ID NO: 266092 - DNA, 93 bp, Homo sapiens
  chr13:98873757-98873850
  hypo
agcaccacttggacaattgccgtgaaacctccatttctgccaagctcgtttactgcgtttttgtggacttacgtgcagcttctgtgagcttca

SEQ ID NO: 266093 - DNA, 43 bp, Homo sapiens; identical to SEQ ID NO: 215523
  chr13:98917861-98917904
  hypo

SEQ ID NO: 266094 - DNA, 212 bp, Homo sapiens
  chr13:98965960-98966172
  hypo
cctttttagcatgagtctatcgtcattcctttagagaaaaaaaatgcggaagaagtaacatggcacaacactgggaagggatcatagggaaggacctgccagccgcctcctcatctcggcccgctctttgctcacctcctcgccccacaagagcgcctgtgatagcccacttttaggaaagactagacttcgagaaaaacccaccaccttgc

SEQ ID NO: 266095 - DNA, 187 bp, Homo sapiens
  chr13:98981025-98981212
  hypo
ggtggcccttgagcacggacagcctggatctgctgggtaaagggagaagttatgtccagggtgggacagagaggacggcgagagatttcctcactactcagaacagcgggaaattcaaaacttagggattatttctgaaattttccatttaaaattttctatttaaaattgacgaagggtaactgaa

SEQ ID NO: 266096 - DNA, 245 bp, Homo sapiens
  chr13:99034906-99035151
  hypo
tcatttgtggatggcgaaaatttggagtcacctgatgtgcattcccagtggaggtcaaacgaggcaaagctctgccttctgttttttttttctcgtactgttaataagtatccttttcatggtctatttagtgccacgcttttcgcatttttgtgcatgtttttggtgatttcactgtttaaagcagtccccaggcgttgtgctgaagcgctgtctgtcttgtgtccccgcgtgcagtgctatct

SEQ ID NO: 266097 - DNA, 367 bp, Homo sapiens
  chr13:99047503-99047870
  hypo
atttggagaaggtgccgaatctccagggggccagagctgccggcgaggaaaggaaccgaaggtttccgccggggagccggggtcgcacccgagccctgcgccgaggagaagccccgcgggtaacaagcaggcggacggagccgcctcggcgcccacggaggaagaggaggaggtcgttaaggataggacccagcagagtaaacctcagcccccgcagccaagcacaggtccagcatcccgggctgccagaggcagcagtacttccattcctttcattgactgcagtgacgtagatagcgaatacgaccttcttagagaacaagcgtcccgatcccggtcccgatcccggtcccggtcccaaacaaat

SEQ ID NO: 266098 - DNA, 218 bp, Homo sapiens
  chr13:99059218-99059436
  hypo
ttcctctctgttgccggatgctgtctagggcctgttagttgctatttccttgcctccgctccccttcccactagccttctaactaccttttattctcggctccaactctttcaatgatgaggtgaatgctttttctgttccacgtcactgcaaagtcaaggtgtccagcatgctctcacttataactgcctcacccgatctcacgcacagtgcgagag

SEQ ID NO: 266099 - DNA, 376 bp, Homo sapiens
  chr13:99068034-99068410
  hypo
tgtacccatgcctttcctcacgttgccgtgatacggaagcgcaggttggctcctgtcgattgggatgggtaagatccgaattcgaggtcacacccccgccatggggctgtcttcagctgtaggtgtgggcctcgttgaaccgcatttcctcctgggtgaaatgtggatggcatctcccatgcagggtgttacgcaaatggcacagtgtctggaaggggcttagtatactgcgctgcgcagagaaagcggggaagctgatcattttttaaaaattaactttttatttggaaataattccagagaaaagttgccaagacaatagtgtttctgtatggtctgcacccatcctcttcccgttaacatcttatgtcaccat

SEQ ID NO: 266100 - DNA, 42 bp, Homo sapiens
  chr13:99072616-99072658
  hypo
caaccttgctgttggtcagccgcccacccacagttggtcatt

SEQ ID NO: 266101 - DNA, 108 bp, Homo sapiens
  chr13:99095616-99095724
  hypo
gaaagccccctcccaaggcacgtggcatcaatcttgtgtcggtggcaggcagccctcatgtgccagacgccaaatgctcgctgactcgcagatgagccatccccaggg

SEQ ID NO: 266102 - DNA, 444 bp, Homo sapiens
  chr13:99101263-99101707
  hypo
ctgttaagcaaagccgagatccagtgcaatacctggactgtcaccgtcctgtgagtggtgtacacaatgggaagataataagccgtggtgttttgctgtctgtctgtgtcacaagcatgaaaacccgtgtgtcattgatcagcaccatttgtggtatgttccgtgatgagcgtttagtgagcctgctggctgcagagcactatgaaatcatggtacgtagtccccggcacctgtcgttattcctatatcctcctgcaactgtggtttgaaactgcgcattctctagtagtatatatcgtgcctgtcttcaaaaacatttccctttttatactcattccccccaggcatggggtagtgtcagtcggactgcacagggaacacggtttccagtggctttggcccctactcgggaaacgtctgcctgttctcgatggtgatggggtg

SEQ ID NO: 266103 - DNA, 437 bp, Homo sapiens
  chr13:99104149-99104586
  hypo
aaaataactcttaaggtccccggcaaccgctacagcaatcgcacagatcagcaacctccaactgcatcatctcggtgagcaagtgcgcaagcagtccagggcgctgacctgggcactcggcagctccaggcctggggacttctccctggagtcttccaaagtgtctcatcacacacacacagccacgagtacacacgcacggccacacatacacagcaggtgccctgtcctctgaagagtcacatttcaaggagtatgcaaaataagcgtgttataaaatttatttgtgtaagcattcagacatttttaggtgggaaagatgatatgcagaatccactacaaggtgcaacagaaaatcgtattggaaaggacggtacatctggcgcagaccagcagtggcacgattccaaacaaatgtcagacgagagcgcttcatg

SEQ ID NO: 266104 - DNA, 101 bp, Homo sapiens; identical to SEQ ID NO: 215526
  chr13:99115922-99116023
  hypo

SEQ ID NO: 266105 - DNA, 95 bp, Homo sapiens
  chr13:99141397-99141492
  hypo
cctccacttcccattgcccccgggactaatgtgcatgctcctcagaggggcttcgatgatgatgaagtgaggccgtgtacacagcaagactcatc

SEQ ID NO: 266106 - DNA, 113 bp, Homo sapiens
  chr13:99157093-99157206
  hypo
ggtgtggatggaggcaggttcgggctgatgaggaaggtgcacgtctgtctgggcgacgctgacagagcagcttacctccgtgggagtctgtcgatgtcagggtcatgtgccca

SEQ ID NO: 266107 - DNA, 112 bp, Homo sapiens
  chr13:99189690-99189802
  hypo
ataaacaagtgaggcgagtgcagctgaggagctgaggccccagccgccagctgtggcacgagaggcagacagaccttccagactaaggaccgggccacgcactggccagggt

SEQ ID NO: 266108 - DNA, 168 bp, Homo sapiens
  chr13:99192183-99192351
  hypo
tgattcacagtaaccgccagtgcaaacggcctaaatgtccaccagctggagagtaaacagacaacaaacaggtggcccatccaaacaacagaatacgattctgctgcaaaaggaatgaacaacagacacaagctgcgttgcgagccccaagaacgtcatgctaagcaa

SEQ ID NO: 266109 - DNA, 166 bp, Homo sapiens; identical to SEQ ID NO: 215527
  chr13:99204543-99204709
  hypo

SEQ ID NO: 266110 - DNA, 154 bp, Homo sapiens
  chr13:99219592-99219746
  hypo
caccacggaacatacgaccagactgatgccacctccgccctgccaagaagcacatactcaattctggaccagggggttggaaccccaaagcatcataaacttaagcaagcgtttctccagagagatcctatgaggctcccggacatcgttctgt

SEQ ID NO: 266111 - DNA, 33 bp, Homo sapiens
  chr13:99235379-99235412
  hypo
tgcatgcacacatacgcacgcacacacacgttc

SEQ ID NO: 266112 - DNA, 41 bp, Homo sapiens; identical to SEQ ID NO: 215529
  chr13:99293494-99293535
  hypo

SEQ ID NO: 266113 - DNA, 255 bp, Homo sapiens
  chr13:99328243-99328498
  hypo
tcgccctgcagtctcgctgcagccccaccctcccgaaagcacgcgttcacccaggctgcagggtctctccctgtgtccgcttcttgccagcacctgcctgctgcccgacccctcccgcctgcaggcaatttgcccgtctccacttgccagaggcacctcccaggccacaccacagaaagcctgcacactccgatttacctccatgtcccgtgttggtcactgctgtggtttgggagccaccgccctctgctactg

SEQ ID NO: 266114 - DNA, 144 bp, Homo sapiens
  chr13:99328718-99328862
  hypo
caaggacctgagtcagactccggacttactgaagttcaaccttcctgaagacgaaaacaggctgagcagcatggatggcaaggccgtctctgccccaaggcaccagctggcggacaggatctcggttccatctaccagccactg

SEQ ID NO: 266115 - DNA, 70 bp, Homo sapiens
  chr13:99376081-99376151
  hypo
gttcaaggaaaaagacgaagacttaaggcatcaaatgcgcacaaggtgggagggtgatgggggcagcagt

SEQ ID NO: 266116 - DNA, 106 bp, Homo sapiens
  chr13:99376181-99376287
  hypo
tgtcgggggtgccatcatggttgtggtctgtgaggtcattaatggagcttactgaggtgactgcttgtccaattgtgtagacaatggagagcgacacaatggtcct

SEQ ID NO: 266117 - DNA, 42 bp, Homo sapiens
  chr13:99427801-99427843
  hypo
caacaagagcttagacggaggcttctccgccgtggctgtact

SEQ ID NO: 266118 - DNA, 455 bp, Homo sapiens
  chr13:99428268-99428723
  hypo
ttctaagggaccctggagtgcggcctgactgagagagtggatggggaggggatgccgggtctctggctcaggtgttgcgtgttgggagcccactaggtagaacaagtgtcctccacccagctcagctccggagccttcctcgaaaggcaagaggtcaattcatcttctgcctcagcagaatcgtcccttcctttacaaggggactttgctccatgatctgacagacctgggaagtgtgtggaggttttacacgatgactcagtgcacatcagagtcagagacaggacggccgaacactgattccagagataggcatgtgggccccgcccgggaaggagagctgcctgggagatggggagctgcaagagagcacccagaggggtaaatttgcacaaggccactgcgtacactggtacgtgcttccttgaaaatgtgacattttcaggcagggcgcg

SEQ ID NO: 266119 - DNA, 58 bp, Homo sapiens
  chr13:99444808-99444866
  hypo
aggtttattagccccggctgggatgtcagcgacatggaacaaacgtatgctgggtaag

SEQ ID NO: 266120 - DNA, 101 bp, Homo sapiens; identical to SEQ ID NO: 215531
  chr13:99851316-99851417
  hypo

SEQ ID NO: 266121 - DNA, 160 bp, Homo sapiens
  chr13:99851657-99851817
  hypo
aacgaacaaaacaagactgtgaaaatgaactttacgaataaagcctaaagaagcaaataaaagtcatacttttgccttctataatcagtgttaacattttggcccactggaacctctctttgagggtagggactgtgttgatctacgaatcacagattta

SEQ ID NO: 266122 - DNA, 40 bp, Homo sapiens; identical to SEQ ID NO: 215533
  chr13:99863141-99863181
  hypo

SEQ ID NO: 266123 - DNA, 124 bp, Homo sapiens
  chr13:100005097-100005221
  hypo
tctggaggcagcaccgtcggaaactctctacctccgtctccacccctgtgtccggggtaggggcagtgcacgtgtgttgcaaaggagtccaccaggaatccaaagggagcgaattctcatgtgt

SEQ ID NO: 266124 - DNA, 99 bp, Homo sapiens
  chr13:100020047-100020146
  hypo
tgatcaattggaatcgtctttttcctcctttacgtcagcgacaaaacgtaaactatcagggcggtcggcagtctgagccagcagcgccccctctagaag

SEQ ID NO: 266125 - DNA, 32 bp, Homo sapiens
  chr13:100020351-100020383
  hypo
tattggttggggggcggcgggtgggaatgtat

SEQ ID NO: 266126 - DNA, 108 bp, Homo sapiens
  chr13:100033196-100033304
  hypo
atgaagagcgagcccgctgcaagctgtgacagcagacgctctcttctgccaagacctgtgaaaagccagtcttagttgtcaaaaccagcaccgcggcacatgtcgttc

SEQ ID NO: 266127 - DNA, 160 bp, Homo sapiens; identical to SEQ ID NO: 215534
  chr13:100035864-100036024
  hypo

SEQ ID NO: 266128 - DNA, 129 bp, Homo sapiens
  chr13:100036956-100037085
  hypo
gagcatggcagtgacgccaggagtgtgatgccagggctgagcgtggcagtgacgccaggagtgtgatgccagggctgagcgtggcagtgacgccaggagtgtgatgccagggccgagcgtggcagtgat

SEQ ID NO: 266129 - DNA, 319 bp, Homo sapiens
  chr13:100067888-100068207
  hypo
tcaccttctagaaccgacttgaccaggcacagagccgctatctggtgcctttggaaagttgtgtgttcattttttaatttgttcaggcctcacagggcaaagagatgggactggctcctgacgcacccccaacccttggcaatgggccccccttcctgatttttcaggggcctcttccccagggcacatctcccccagcctcagctctgcctggccctcaggaattccagcctcagggttcaccgcgtgctgtggctccctgcctcagccggggtgcctcgtgccccctttgctgccaggacaccgcactagcctcgag

SEQ ID NO: 266130 - DNA, 134 bp, Homo sapiens; identical to SEQ ID NO: 215535
  chr13:100068639-100068773
  hypo

SEQ ID NO: 266131 - DNA, 192 bp, Homo sapiens; identical to SEQ ID NO: 215536
  chr13:100068977-100069169
  hypo

SEQ ID NO: 266132 - DNA, 97 bp, Homo sapiens; identical to SEQ ID NO: 215537
  chr13:100307598-100307695
  hypo

SEQ ID NO: 266133 - DNA, 185 bp, Homo sapiens
  chr13:100482066-100482251
  hypo
gtactgtttaatcatttactcgcttgagtgtataagctccgtgagagcggagagcctgtctgcccatagcacacactcaggaaatattgttgaatatgatcattgggttgatggtctcacggggtggcaccaagggggccagcatgtcaagcgtaattcacaccggagcaagctttgggtcacat

SEQ ID NO: 266134 - DNA, 37 bp, Homo sapiens
  chr13:100523138-100523175
  hypo
tttgaacatctgttcgttgtttcgtggttccgatgtt

SEQ ID NO: 266135 - DNA, 123 bp, Homo sapiens
  chr13:100575405-100575528
  hypo
aggtctgcagcttccgatctccccgcctttcccaaatatgcacgccctgtaccgccgtcccaggctccgtgccaggcggcagcagccactgtgctcacactcatgtgtcgtgtctctcctccc

SEQ ID NO: 266136 - DNA, 95 bp, Homo sapiens
  chr13:100678151-100678246
  hypo
tcggaatcataggttcgttacacacagtgctctatggaaaggattgtcaatgctgtggaagagaactgtgatagaacatcatgaaagtctgaaag

SEQ ID NO: 266137 - DNA, 91 bp, Homo sapiens
  chr13:101091896-101091987
  hypo
ttgtttgtcgttagcgttttacatactagattttcatcgtgcatagtcacgttgtttgaacatttgcaagcagagccgactaactgctgtt

SEQ ID NO: 266138 - DNA, 101 bp, Homo sapiens
  chr13:101129318-101129419
  hypo
taccgggtaatgaccgagggcacctgctttaaagtcaagtgcatactaatttactggctatttgcttggcctcatttacgctctctcggcacagtttctgg

SEQ ID NO: 266139 - DNA, 105 bp, Homo sapiens
  chr13:101160649-101160754
  hypo
attggtccagtaaacgacttaactccaagaaccacctaccagtaacacaacaaaaccttgagtacagattgattcataaatggcagcggacgagtgttgaaagtg

SEQ ID NO: 266140 - DNA, 112 bp, Homo sapiens; identical to SEQ ID NO: 215544
  chr13:101184480-101184592
  hypo

SEQ ID NO: 266141 - DNA, 260 bp, Homo sapiens
  chr13:101194463-101194723
  hypo
agagaactgaagagcaaccccgggtgcacaggagaagcagagcagccgctgacccccccagcaagaagacgggtagggtttgtttcatgggacaagatcgtccttcatgacgctgtggaaacgttggggagagcacggtttgtgccctaggacgctggccttactcttaacagatccagtccacgaaagtaaatctaaaaagcgtgttccagcctgccacgctgtcatccctcgtgcacggatttcctcatagcatctta

SEQ ID NO: 266142 - DNA, 36 bp, Homo sapiens
  chr13:101297339-101297375
  hypo
acaggcgtgagccactgcacccggcctgaacattct

SEQ ID NO: 266143 - DNA, 202 bp, Homo sapiens
  chr13:101297851-101298053
  hypo
gagcaggtgagccccgtgcaccgctccaagtccctgactgccgctgtgaggtgagccttgttcactgactgcccccgtagattaggttaggcccagctgtagtgctctaaactgccctgatcacagtctatcacaatattcctcacagagtttatcacaagcacttgattttctgtcattcccgagtcgagggtctgtccac

SEQ ID NO: 266144 - DNA, 131 bp, Homo sapiens
  chr13:101302748-101302879
  hypo
cctggcatctccaccgctcaaaactggcacgtcatgttgtgtgtgggaaccacgccaccccgacaggtggccgcgactctctctctgccagagcaacacaatgagcatcagattcgcgttccaaaagctgg

SEQ ID NO: 266145 - DNA, 209 bp, Homo sapiens; identical to SEQ ID NO: 215547
  chr13:101317803-101318012
  hypo

SEQ ID NO: 266146 - DNA, 32 bp, Homo sapiens; identical to SEQ ID NO: 215549
  chr13:103262164-103262196
  hypo

SEQ ID NO: 266147 - DNA, 38 bp, Homo sapiens
  chr13:103456537-103456575
  hypo
cccaggctggagtgcagtggcgcgatcttggctcaacg

SEQ ID NO: 266148 - DNA, 70 bp, Homo sapiens
  chr13:103523455-103523525
  hypo
taggaccccttaagatggctcgcggggctgatgaggtggcttcggcctcggggcctgggtggacacttgg

SEQ ID NO: 266149 - DNA, 44 bp, Homo sapiens; identical to SEQ ID NO: 215552
  chr13:103568843-103568887
  hypo

SEQ ID NO: 266150 - DNA, 44 bp, Homo sapiens
  chr13:103569187-103569231
  hypo
tactccagccacacagccttttcgtatttctatttatttattta

SEQ ID NO: 266151 - DNA, 92 bp, Homo sapiens
  chr13:105300810-105300902
  hypo
agttcctacacccacggctgctgtaatgcggcacagccaggcgtcacgcctcagcagatgctctaacaacaatacatcgatgaataatctgt

SEQ ID NO: 266152 - DNA, 36 bp, Homo sapiens
  chr13:106549792-106549828
  hypo
tgagccaccgcactcggcccattatcaatagttttt

SEQ ID NO: 266153 - DNA, 33 bp, Homo sapiens
  chr13:106718244-106718277
  hypo
cacaagaaaagatgcttggccgggcgcgtggct

SEQ ID NO: 266154 - DNA, 63 bp, Homo sapiens
  chr13:106739741-106739804
  hypo
ttggctctggaaacagctagcgttgggctattcagtatcaccgacttaacaactgtgatatta

SEQ ID NO: 266155 - DNA, 168 bp, Homo sapiens
  chr13:106788564-106788732
  hypo
cttgggcttgcagtcagaacatcgcagtctaaaattcattccttaactgtctactgtagttgccttaggcaagtccctacattttcttaaatttcaactttttcatctgcgaaatggagctaaaatacttaaatcttggaattgttgtaaatgcggtagtgtatatta

SEQ ID NO: 266156 - DNA, 658 bp, Homo sapiens; identical to SEQ ID NO: 215553
  chr13:106912353-106913011
  hypo

SEQ ID NO: 266157 - DNA, 268 bp, Homo sapiens
  chr13:107078199-107078467
  hypo
agcggtcccagctgcgagtcgccaaagtgacaggcggcgaggcctccaagctctctaagattcgagttgtctgcaagtccgttgcccgtgttctcaccgttattaaccagactcagaaagaaaacatcaggaaattctgcaagggcaagagatgcgagcccctgaccctgaggcctgagaagactcacgccaggcgccgccggctcaacaagccgaggagaacctgaagaccaagaagcagcagcgttaggagcggctgtactcactg

SEQ ID NO: 266158 - DNA, 131 bp, Homo sapiens
  chr13:107125447-107125578
  hypo
catggaaagctgggctgagccgtgctttttgaagggagctggtgggacacaggcccggcttgtggcagcacgctgaaatgttttctgaattgaagtcgtgtgctctcaccgcacagcagagatggcagtga

SEQ ID NO: 266159 - DNA, 42 bp, Homo sapiens
  chr13:107128750-107128792
  hypo
ctcctctctccattttacagcgagaacacttaggactgcaaa

SEQ ID NO: 266160 - DNA, 52 bp, Homo sapiens
  chr13:107229932-107229984
  hypo
ctggggtgcaacctgggtgtcgttgttttgcgggaggatgggctcacagggc

SEQ ID NO: 266161 - DNA, 168 bp, Homo sapiens
  chr13:107248708-107248876
  hypo
ttcctaaataccctgcccaccgtctcactttctcaccgtggctctcagctgcgacgcgctctccactccctctcctccgacacacctgtcagggatccagactcacgcctactccctccactgagtcttctggcacctcagccctccggtatcttctggaccttagcc

SEQ ID NO: 266162 - DNA, 40 bp, Homo sapiens
  chr13:108816275-108816315
  hypo
aaagaatttttttccggggcaggtgcggtgactcacactt

SEQ ID NO: 266163 - DNA, 37 bp, Homo sapiens; identical to SEQ ID NO: 264655
  chr13:108841825-108841862
  hypo

SEQ ID NO: 266164 - DNA, 285 bp, Homo sapiens
  chr13:109779669-109779954
  hypo
tccatgtcagtctgcgcggccgtggatggcctgggccagtgcctcgttggcccgtccatctggtctccttcgctgcactcggtgttcagcatggatgacagcagcagcctcccgtctccacggaaacagcccccgcccaagccaaagagggaccccaacacccggctgagtgcttcctatgaggctgtgagcgcctgcctctccgcggccagggaagcggccaacgaaggtcagccctggggagggacccagcctcgtgttccgggctcgcgcatgctctgactt

SEQ ID NO: 266165 - DNA, 44 bp, Homo sapiens; identical to SEQ ID NO: 215564
  chr13:109934405-109934449
  hypo

SEQ ID NO: 266166 - DNA, 116 bp, Homo sapiens; identical to SEQ ID NO: 215565
  chr13:109985085-109985201
  hypo

SEQ ID NO: 266167 - DNA, 209 bp, Homo sapiens
  chr13:110008368-110008577
  hypo
gaccagtaacaggacgggcatgctggcaccatggcggggcacgggagagcgcacgggagggcacggtactagagaagggtttctgctacattacccaggaagcctgcccttcacgcgtgtccctgccattgtgctgctccgaaaccgcacggctctcgaatgttaatgcctacctaattatatattttggcttccgttttggcaatagg

SEQ ID NO: 266168 - DNA, 177 bp, Homo sapiens
  chr13:110407325-110407502
  hypo
gagggagcagaaaacggcagaacattctgccggtcaagttcagcagttttaggtaacatctgcgagaactgccacacactggtattttcagaatactgaaaacataaaacaagggtagtcttgtccggaattttttcgacaagtaacatgtactgcgagattgcttttcttcttttt

SEQ ID NO: 266169 - DNA, 204 bp, Homo sapiens; identical to SEQ ID NO: 215566
  chr13:110408018-110408222
  hypo

SEQ ID NO: 266170 - DNA, 554 bp, Homo sapiens
  chr13:110424383-110424937
  hypo
catctgggtatgggaagtcccgaacaaagaaaggagggcagagaggctcacccggcatgcgctgggcccaggcagcgcagggcagtcatgggtgagggtggccactgagatgacgggatcgggggcggcttctgccgcagacccgggaattcacgtggtcagatggtccctgacttcagtccctattttcggtggttcatagcacggagcggtgcaggtaggtgcacgctcttcccaggtcctctgcagaaggcaaaagttcccagaggcacccaaaccttgctggggaaaaggcttctggccgattcatgaagacccccagaccacacgtctgcatcagttttcctgactaaattggtgggtgctcaacaaacccatcactgcaacacagggcgctccgaacgtggctttcttcttaacctggaagaaggtccgtaactccattcgcccggatagcaaaactgctttcctgctttgctcatccagccaggtctccaatctcacctgctgtttggtgggtcacggcgctcaccgttgggggtgctggccaggaa

SEQ ID NO: 266171 - DNA, 111 bp, Homo sapiens
  chr13:110434419-110434530
  hypo
ggacaagaagtcaatgctggcgtaggtgttggcagggggcagggcaccgggacccggccccccgcacccgccgccggtgctgccgacgcccacagcgctgatgagaccccc

SEQ ID NO: 266172 - DNA, 103 bp, Homo sapiens
  chr13:110435250-110435353
  hypo
aacggccgaggcggggggcaggcggtacagctcccccggggccggcggcggtggcggcggctgcagagacgacgacggggacgcggacggacgcgggggcaac

SEQ ID NO: 266173 - DNA, 872 bp, Homo sapiens
  chr13:110435653-110436525
  hypo
gggctcttgggctccggtggcagtgggtactcgtgcatgctgggcaggctgggcagcccctccagggacaggcgcgtgggcctcaccgcccggccgcgctggcccaagaagccctccgggcggccgccgctaggccgcacgggcgaaggcactacagggtgagggggctgcgtggggccggccccgaaggcgctggccgcctggctgggccctggcgtggcctgaggctccagacgctcctcctccaggatgcgccccacgggggagctcatgagcacgtactggtcgctgtccccgccacaggtgtagggggccttgtaggagcggggcaaggagctgtagcagcagccgggaacgcccctgagcggctccccgccggggtgcagggctgcggagaagaagtcgggcggggtgcccgtggtgaccgcgtcgctgggggacacgttgaggtagtccccgttgggcagcagcttgccatctgcatgctccatggacagcttggaaccgcaccacatgcgcatgtacccactgtcctcgggggagctctcggcgggcgagctggccttgtagccgcccccgctcgccgggaatgtcctgcccgccgcagaggtgggtgctggccccgcaggccccgcagaaggcacggcggcggcggcggcggcggcggccctgggctgcaagatctgcttgggggcggacacgctggcggggctcatgggcatgtagtcgtcgctcctgcagctgccgctcccactgcccgcgagggccgcgccgggcgtcatgggcatgtagccgtcgtctgcccccaggttgctgctggagctcctgtgggagccgatctcgatgtctccgtagtcctctgggtaggggtg

SEQ ID NO: 266174 - DNA, 114 bp, Homo sapiens
  chr13:110486578-110486692
  hypo
gtgtcactctgggaggagctcgtggaagccctgtcggcactgaccatagtaccttgactaggagaagtttctcaggtatgaccaggaagaggcgggtgatggtgatgataggca

SEQ ID NO: 266175 - DNA, 54 bp, Homo sapiens
  chr13:110525935-110525989
  hypo
tgtctccatgtgagactcaacggtgtcacacacggtggcctcagtgtggcaagg

SEQ ID NO: 266176 - DNA, 283 bp, Homo sapiens
  chr13:110804670-110804953
  hypo
tcccacttacttgaacatctcgctcctctctatggtggcgagccaaaagctgtaagcgtttgcgtagtaattgcaggtcccacggccgtgacactcgatgaatggcgcacttctaaactcctccaggcaggagccgggggacgccagggcttggccagagccttctgcaccagcgctggtgtgctgcagaacagatgcgagccgtgagtcagaggttccctccccaaacaccaggaaagagatcgatccttcccaggaaggcgccagggtgttccctctggaa

SEQ ID NO: 266177 - DNA, 221 bp, Homo sapiens
  chr13:110831442-110831663
  hypo
gagacccatgcacacgaatggccccagcaacggaaagccacgagctctaggcctctaagatttgcatcgttcgttcaacaaatacatatcaaatatactcggtaggggctctgggaatgcaaaaataagcacatcctgtcctcgaaaccctccagactgatctgcatgaagttacctctgatcccctgaagcccagggggtccgatcgctccatgttctcc

SEQ ID NO: 266178 - DNA, 65 bp, Homo sapiens
  chr13:110998869-110998934
  hypo
aatgcaggcaactcatatttcgacggggcaccctccagtgctccgagatggaaattgcctgcatt

SEQ ID NO: 266179 - DNA, 77 bp, Homo sapiens
  chr13:110999281-110999358
  hypo
tcccctgcgcttatcgtggctcactgccaagtgcgaacacctgggtccacgcctccgcatgccgggcccgtgtgcac

SEQ ID NO: 266180 - DNA, 240 bp, Homo sapiens
  chr13:111006028-111006268
  hypo
cattccaaagtgtggtacttcgggctcttgtaaatgttggaattcctaagactctctctggaggacaggtaagatgtcagtgggaacacacatacacacatgcacgtgcgtgtgtgcacgcacggctggcatgtccatggaaactgccttggcgtggaatgagcagggctgcctctcaatgaggtattccttccctcacaatatagcactggagccatcggtacatgtagaaaagtgtta

SEQ ID NO: 266181 - DNA, 42 bp, Homo sapiens
  chr13:111087191-111087233
  hypo
tggtagggcacaaaggcagccgtaaggaccatgtggcttttc

SEQ ID NO: 266182 - DNA, 34 bp, Homo sapiens
  chr13:111109170-111109204
  hypo
gcgtggaaccccaggcgtccgtggggctgatgcc

SEQ ID NO: 266183 - DNA, 103 bp, Homo sapiens; identical to SEQ ID NO: 215569
  chr13:111122538-111122641
  hypo

SEQ ID NO: 266184 - DNA, 589 bp, Homo sapiens
  chr13:111127026-111127615
  hypo
cacgtacccacacacgtgcctgtgtacactcacatgatcacacacgcacgtacccacacacgtgccgtgcacactcacacatcacacacgcacgtacccacacacgtgcctgtgtacactcacacatgatcacacatgcacgtacccacacacgtgcctgtgcatgctcaaacatgatcacacactccatacacacacgtacccacacacgtgcctatgcacactcacgatcacacacatgcacatacccacacacgtgcctgtgcacacacgatcacacacacgtacatacccacacacgtgcctgtgcacactcacacatgatcgtacactcatacacacacgtacatacccactcgtgcctatgcacgctcacacatgatcacacactcacatacacacacgtgcctatgcatgctcacacatacacatccaaccctgaaccaagccagctagagcaggttgttgggtgaaattacgaggatggggaggcctcgtgctcggccatccagatctcccctttccagtcctactgactctccaggtcatttatggaagataagatgcaaatcagcgctgtctgcagaaa

SEQ ID NO: 266185 - DNA, 170 bp, Homo sapiens; identical to SEQ ID NO: 215570
  chr13:111135308-111135478
  hypo

SEQ ID NO: 266186 - DNA, 46 bp, Homo sapiens; identical to SEQ ID NO: 215571
  chr13:111144433-111144479
  hypo

SEQ ID NO: 266187 - DNA, 195 bp, Homo sapiens
  chr13:111145418-111145613
  hypo
cacccccatgggtgaaataacgatgagtgacacccccatgggtgaaataacgatgagtgacacccccgcaggtgaaataaataacgatgagtgacacccccgcaggtgaaataaataacgatgagtgacacccccgcaggttttccgggactccgtgggatccgcggcttacacggcttgccaggcaccaagggc

SEQ ID NO: 266188 - DNA, 191 bp, Homo sapiens
  chr13:111168953-111169144
  hypo
ctgctgttcccagcactcagcgaggttctcaaggctgaacggtgtccgagggagagtgacttatgggtggcacatctcctgcacggcctgtgcccagctgtgtggggcggctacagctccgatgttgatgcacgtgtgtgtgcagctgtgcagtggcacgtgtggcacacgtacaccctccccagaaaaga

SEQ ID NO: 266189 - DNA, 385 bp, Homo sapiens
  chr13:111277409-111277794
  hypo
atccgagctagtacgtttctcatgcacgtcaccagggctgagtaatgagcgctggacgcctgtgtctggcgggtgggcagcgatgccggagcgatccctgagtcggcctcttgtgctccttcatcagggcgcagacttgtcccacgtgttctgtgccagtgcggccgcacctgtgattaaggcctacagcccggagctgatcgtccacccagttctgtgagtcgctctgcgccggcttctcgtaggttctctttccctcctgcatcatttggggttttggcactgacaccgaaagcgtcctgatggattttccatcctcagagtttctcagcaggtgctgtagaggaagtagggaaatgaaggagcccgttcttctggggtcaga

SEQ ID NO: 266190 - DNA, 894 bp, Homo sapiens
  chr13:111277824-111278718
  hypo
ggtgggggagcttgggcctgttggaaatggccggggcccagctccagaggcagggaggccctgtgggctgtgtgtgacaggtttgcagaaggtggaaacgaagggcctctgagcaataacaagacccttcctgcactcggcacatatgtctggtgccaggccctagcctgtgttccatgggtcagcgtggaactgggcaggcaaaaacctgcccccgtggggctcccccagaccgcctatgctatagagcttgctgtgtggaggtgttctctctgccgtccaggattgtggccactgagggcttgaaatgtggctgggaggtgcgggagcagagcgtttgctcttgtttacttttcattgtgtgtgtttgcaccgactggattgggctgtgctgctctggagacaagggagaggaggatgtcaggtggtgaaggaaccgtagagagcggcagcagggagggggctgtgagagtgggcagaggggcagttggggcggcagcacagtgtgatgacgcctgggtcgagcccggcctctccacaccagagaggagccggcgcggagctccaggtgcggtgctgtgatgtgtcgggtgaccaagaggtgcagggctgggccccacagggtgtggggctgctgtcagggctgtggctctggccctgagtaagcagggcagggccagtgtgggtcataaaggctcctacgcggctgtggggctgggccggaggctgtggtaaggacctgtgggagggaagggtgcagtcagatggtgagaggggccggattctgggtatgtttggaaagtttgggggtggaatttgccgacagattggattggaaaaggcaaggggcacagactccaccaagggttttggtctgagcgagtggtcactcca

SEQ ID NO: 266191 - DNA, 186 bp, Homo sapiens
  chr13:111279860-111280046
  hypo
gggtagagatgatgcgcttctcagaaatgtccaggtaatgtgtatactcactcacttccctcatgacaggcttagccttaggcgtgaagttggaacagaggcatttctcttgcattttgtgtagtgttccgtgtgcctctttgtggcatgattgagataagatttgagggacggaggagaaactga

SEQ ID NO: 266192 - DNA, 189 bp, Homo sapiens
  chr13:111280869-111281058
  hypo
ggtctctgaggctgcggggcttgaaggcggcgagtgatggagccagcagtgcaggatgagtcatctgaggggcaggcagacgcaggctgacactgcacagaccaggaaaagcggcgtggagtcagcacgggagcccgtctttgagctttaaggtcttacccgctcaccgggaaggaggaggtggccatg

SEQ ID NO: 266193 - DNA, 174 bp, Homo sapiens; identical to SEQ ID NO: 215576
  chr13:111288424-111288598
  hypo

SEQ ID NO: 266194 - DNA, 259 bp, Homo sapiens
  chr13:111289026-111289285
  hypo
gccggtggaggcctcgctcggtgttgccctgtatggttgagctgtggtttaaggtgaactctggagtgtgggctgcaggtgagggctccgtccctgggagctggtgggaggagctggaggctggcgccgccctgctcagagctgcctgcttgggctcgtctgaggcggttccgagctgcaggtgtctccaccaacctgctgtgctacacagcggggtctggggcagcctcaccactgcgtgtcttggtttcctcttctg

SEQ ID NO: 266195 - DNA, 282 bp, Homo sapiens; identical to SEQ ID NO: 215578
  chr13:111290653-111290935
  hypo

SEQ ID NO: 266196 - DNA, 226 bp, Homo sapiens; identical to SEQ ID NO: 215579
  chr13:111294870-111295096
  hypo

SEQ ID NO: 266197 - DNA, 194 bp, Homo sapiens
  chr13:111295806-111296000
  hypo
agttctctgttgagagccagcgagacatgtttggcccagagccaggccttcagcacacctgcttgggccccagtcccaagcggcgggaccctcggggtgctgggcagctggtctagagtggcagcccccgtccaggcagcagcagccgagccacaccccaaaagagccagagcgccttgtgctgagaattctac

SEQ ID NO: 266198 - DNA, 199 bp, Homo sapiens; identical to SEQ ID NO: 215580
  chr13:111301303-111301502
  hypo

SEQ ID NO: 266199 - DNA, 289 bp, Homo sapiens; identical to SEQ ID NO: 215581
  chr13:111305194-111305483
  hypo

SEQ ID NO: 266200 - DNA, 587 bp, Homo sapiens; identical to SEQ ID NO: 215582
  chr13:111305920-111306507
  hypo

SEQ ID NO: 266201 - DNA, 554 bp, Homo sapiens
  chr13:111330263-111330817
  hypo
ccccaccagggaaatccagccggccaccccggtggaagcccctccagccgccagtgggcagcacgccccaggctgtgtctcttcgaaggagccttggcttctcgttcactcctgtttcacccacgtgagggacaggagcaccggcaacgctttcacctcagatgcaccagcgcacagggagagctgggcggccgggaacccacagaggctcatttctcaggaatgtactgtggaccaggtggggttttcccatttttccttattctgtcttacgagaaatactctgcttatcagtaactgagtttcagggttgttttttccaaaaagatactaatcacacagagtgaaaggcgcgtgatcgtgtcaggtaacgcggcttatggacccgagactctgagcaaggtgcccatcaccgtgcggtgaggctgccagtggcgcatgctcaccaaaacctgctgtcccatctgcccaggacaggcacaccccatgtgcacaacgtcccaatatcaccctttccacccgggagcactgacacaggcgtccatcacctttga

SEQ ID NO: 266202 - DNA, 195 bp, Homo sapiens
  chr13:111334624-111334819
  hypo
atgtgtaagcaaagcccacacggcctgctggtagccacgcctcacacgtggctgatgtgggcgtctgtgttccggcctgtgcggggagcgggacagggcaccacggcgggggaaggaaagaacctgaggggtcagtgctatggatggttaggattcattggcacagtttatggcgcagaaagacagtgcctaaaa

SEQ ID NO: 266203 - DNA, 142 bp, Homo sapiens
  chr13:111337750-111337892
  hypo
atcctcagggcctcacgtgctcatcttacgctccaagtaggacccaggaaggacaggaacgtccagggcagtgcttcatgctttctgactcattgcaacaaacattcaatacctacgtatcttcagccgtcggctggatact

SEQ ID NO: 266204 - DNA, 37 bp, Homo sapiens
  chr13:111363566-111363603
  hypo
ttttctctttttttccggagatagtcttgctctgtcg

SEQ ID NO: 266205 - DNA, 246 bp, Homo sapiens
  chr13:111363843-111364089
  hypo
agccaccgcgtccggccaagtgttatagtcttttgtgcagaccaagtagtggccaataaatcttgtagaaactaaagtactcatttgcttttaactaggccaagactagaatagcgtgatctgtaagtaaaataacagccatttccccaaatatcaaagccaaagctctcctgctgtgtaggtgagatgaaggggcttaaaagtgaagattaaatccacttcaaagtgtaaagagtatccatccat

SEQ ID NO: 266206 - DNA, 79 bp, Homo sapiens
  chr13:111589026-111589105
  hypo
ctccaggcgcaggcggcggaagcgcgtgtctccaggtcgtcgcgtcgggctcctgggatttggcggcaactgtgggagg

SEQ ID NO: 266207 - DNA, 355 bp, Homo sapiens; identical to SEQ ID NO: 215586
  chr13:111682505-111682860
  hypo

SEQ ID NO: 266208 - DNA, 47 bp, Homo sapiens
  chr13:111738321-111738368
  hypo
gttttttgtgccaggtttgtcgatacgtaatccatatatgatagaag

SEQ ID NO: 266209 - DNA, 102 bp, Homo sapiens
  chr13:111747877-111747979
  hypo
ttcagatcagtgttcgtgtttgaagagagtcaccgtcctgccatgggaaacacttgcatcgtcttccaaccttgacaggattacgcgcgctcctggaccgca

SEQ ID NO: 266210 - DNA, 167 bp, Homo sapiens
  chr13:111773929-111774096
  hypo
gcttgacgcccacgcgtctctcactgcacgagggaggtggcagaggcacatcatccctttgggcacgcaactctaccacgtgcatcgctgggagatgggaggactggcatcccccgaacccacgggtccctgcctggagacactgggagacccggtcctctgcgtgc

SEQ ID NO: 266211 - DNA, 1049 bp, Homo sapiens
  chr13:111880805-111881854
  hypo
gaacacggcgggagcggatgaggcaggctcgatgctgaggactgctaacactgttaagagtctatacgtggtcattctctgtatgtttatgtatatttttaagtttctaaaagtttgggaaaaagtaatggcacaattataacattttcgaacaaagatcgagcgtcttagcagatcatcccttgaacaactcggaggacgtcacctgacaggagggtgcatgtggttcaggaaagcggcaggcagacactgctgagcacgggcagacacacacagacattgactctgtgaactctgagtgcgtgagtaacagccaacaaaccacgcacagagccccagcacagaaggtcggaagaggacgtgggaattccgagtttttcagggccatgtctgctctggtggttgaagccagcggtgatgattaactctggactttgctgggttggtgacacgtcacaaatgaaagcgtaaccactgaaacagagggaagcggctgggtggcttccagtcaagcggaagaggcaagtgaggactcacagaagtgtgttcttctcaaaagaggcagaaattcccagccctgtgatggtggagctgcctcggagtggggagggcattgcacctggctccccggacctggccctcgcccagctgtgcagcgttcctgtgtgtcttggtggactctggttttgctcggggctggctgtgcttcctcagcccaaggaatccagagctcttcagttccagaaaggatcttctcaaggactacttccagctcactccctgatttttctcctgaatatcttactagatgtcttattttgccctctgttttaatccgcgtattttaatctactttgcgtatctgtttgtttcactgtgctgtattatctattcctctgcctgtcagttcattaattccctcctcacggtgatactaacctgtttgtggagatttccattttagtgaccatatttatttgtagaagttttgctgcgcttcagatgttttcagtcttcatggcgccttttttattcgtcgtgattggtcc

SEQ ID NO: 266212 - DNA, 137 bp, Homo sapiens
  chr13:111884809-111884946
  hypo
catagagctgatgacgggcatgcatggtgccaggttttgtttggcaggtgtttcttcggcaggtgtttcttcagcacctgttatgcagagtaagtgtgtgttgaatggatgtggagtgaaagcggtgctgttttaaa

SEQ ID NO: 266213 - DNA, 256 bp, Homo sapiens
  chr13:111893456-111893712
  hypo
gcctctccatgcctcgtgacccccgggaagctggcactggctgagctcagctctgtgggcctttcttcagcactgtgggtcgtaaaagctgccttttctttgaaaactgcctgcgtcctctgggttcccagcgttggtgggatggagctgtggcgtccaggctgtgaggtctcatggggtcctgcagcagccagagcgtgcagaagacgaggaggggaagaaaggtggtaagtggcacccccggctgcgccccgag

SEQ ID NO: 266214 - DNA, 102 bp, Homo sapiens
  chr13:111911430-111911532
  hypo
attcctaaggtttcagcttccgggctctggctcgcagatggcatctctagacctgcccggagccaaggagaactcaccgtcctgaaggaaaggacacgtgcc

SEQ ID NO: 266215 - DNA, 240 bp, Homo sapiens
  chr13:111932740-111932980
  hypo
aggcagcttgtccccgcgtgcagattcttgcttgcgtatttcagaaggtggtgtttaagcgctgagtggaattctggggggtgtgcacgcacgtgctttttacctgtgtttccactcggcctattttttccttctctcctatagggagcatgattgagcggatattagtgtcgtgcaacaaccagcaggatctgcaggaatgggtggagcacctacagaagcaaacgaaggtcacgtctg

SEQ ID NO: 266216 - DNA, 160 bp, Homo sapiens
  chr13:111935536-111935696
  hypo
gcgccgctgacgcccgcctaccacacgctgccccacccctcccaccacggcaccccgcacaccaccatcaactggggacccctggagcctccgaaaacacccaagccctggagcctgagctgcctgcggcccgcgcctcccctccggccctcagctgctc

SEQ ID NO: 266217 - DNA, 253 bp, Homo sapiens; identical to SEQ ID NO: 215589
  chr13:111935987-111936240
  hypo

SEQ ID NO: 266218 - DNA, 150 bp, Homo sapiens
  chr13:111937757-111937907
  hypo
atcggtatttaacacgtgcttgacagttgacaccttacctgctctgttgggacttgctttgctcactttgttttttgccgtcgtcttctgtgcttgtttgaaaagctgtttgaagaggtaaggggtgggccattccgttgtgaacactct

SEQ ID NO: 266219 - DNA, 105 bp, Homo sapiens; identical to SEQ ID NO: 215590
  chr13:111940174-111940279
  hypo

SEQ ID NO: 266220 - DNA, 42 bp, Homo sapiens
  chr13:111943424-111943466
  hypo
gtctgttatgatgtagttctcgcagtctgagaacagaggtca

SEQ ID NO: 266221 - DNA, 101 bp, Homo sapiens; identical to SEQ ID NO: 215591
  chr13:111967886-111967987
  hypo

SEQ ID NO: 266222 - DNA, 98 bp, Homo sapiens
  chr13:111978024-111978122
  hypo
gtgcaggaaaataacggtgggtgtggagggaaaatgggacaccggaggaggcgcgggaggactgccgggattcgacggctgggcggtcagatgcgatg

SEQ ID NO: 266223 - DNA, 32 bp, Homo sapiens
  chr13:111980235-111980267
  hypo
tgggctctgtcgtgcgccgtgcctggcgctgc

SEQ ID NO: 266224 - DNA, 186 bp, Homo sapiens; identical to SEQ ID NO: 215592
  chr13:111980478-111980664
  hypo

SEQ ID NO: 266225 - DNA, 143 bp, Homo sapiens
  chr13:111997478-111997621
  hypo
aaggcagacaccgacgatgcctccaggaaggacgtggccttgctccaaaaagactttcttatggaagccagtgacgggctggacgctgcctacaagctgtagtcggtaaacccccaggctagagatgttagaaatgtgttttg

SEQ ID NO: 266226 - DNA, 200 bp, Homo sapiens
  chr13:112022971-112023171
  hypo
cggccaggagaagccgtgcaggctggttcccgagtctctcgggcacgtcgccatcattctccgaggatgttcctgctttgtgacaccacgcaacatcccacgtccttcccagccctggggttctccgtccctgcagggagccctggttcctgtcagtggtgcctcctttatccccaaatttgagacgctggctccggcca

SEQ ID NO: 266227 - DNA, 56 bp, Homo sapiens; identical to SEQ ID NO: 215593
  chr13:112051223-112051279
  hypo

SEQ ID NO: 266228 - DNA, 209 bp, Homo sapiens
  chr13:112062637-112062846
  hypo
ccagggccctccgccgcaccgcgcaggtgcggggcaggcacatccgcctccgggcccctgggctattgtttgctggtacagactttttttccactttaaaattgtgaagatgaaaacctattctggcgtggggtaaagattctccacagagcccgagtcaagtccaacgacgaccaccctgacagctcttggcgcgcagcgtggggtgt

SEQ ID NO: 266229 - DNA, 81 bp, Homo sapiens
  chr13:112170646-112170727
  hypo
gcatcctcacctgggccccccggcttcctgctccctgtggtactggacgcggggtgagacgcagacttgctagggccatct

SEQ ID NO: 266230 - DNA, 1008 bp, Homo sapiens
  chr13:112199983-112200991
  hypo
tggggacttcagtccttgagcggcagcaacgcaaagctccaagtgtgaacaaaagcgaactttttcttgaggccgtgatagaggaatgaccgcctcctgggacctgtggttttcttcggcgcaggagaaggcgacagggccctgtcctcggggatgggcggaggtgctggggatgaaggagggaccctgcgccttctgttctgagcaagcttccagggttccttagctccgcaatgcgttggagactccggcttccttgcacacgtcaggggaggactccacggagcctcgctcctcagaccggggtccggggaccggcggcaccggaatcgcctgggcgcctgtgggactgtcaggccccccccggtctattaaaccggacagcaggcgactgcgcgggacccagggcgactccgacagacggggagccggggggagtgtggtccggagtcgattctcagacgtgagggtgccggagagatcccctgcccggcttgtggagcccgggttgctgggcccgagggtcaggtgaggtcagggatggataaaacggaaaatgtcctcatatattgttcccggagagatgtatttcgagaagaaaatggatgaaaccacttgttaaagccgaaatgtaatggggcacgcagtgggtgtggacgtcaaactcgctgccggccagggggcttgccctgggaaccccactcccgctgaaggccagcagtgagagaggtgggacagcagtttctgcatctgttcgcagcaaggcagtctcttctgcctcgcagtctcgttcaggcaacactgcgggaattcggcgtgcatcgctggcgggccgctgctccctgccgccctcccgggttgtggctgagcccacgggaggcgcgtatttcccacgccatcgctggctgcgcttgctcctgtgggtcctgatgtctcctgagtgagcccccggccatggagcacccagccttggcgtctgctgcgggcgctgggcccctgttcctggct

SEQ ID NO: 266231 - DNA, 65 bp, Homo sapiens
  chr13:112273030-112273095
  hypo
ctgcctgcatccctgtcctccgtggggctgtgaagggccccggcggcagggccctctcctggggg

SEQ ID NO: 266232 - DNA, 198 bp, Homo sapiens
  chr13:112274814-112275012
  hypo
tcagtgaggagcaccggcgagaggaggccgctgtgcctcccaggttctcccggttctgcagcccagccttcacctgttctcaggccacagccaagctgctgaattcctggcatgttttgcttgcttccacctgggactgaaattttaaacacttgacctccatcctccttaaattcacacatcatgcaacgtgtctta

SEQ ID NO: 266233 - DNA, 282 bp, Homo sapiens
  chr13:112275480-112275762
  hypo
cgccaaggccatttcgattcatggagaagaaaacgccactggggtctaattaagccattgatttaaaacaatgctcagaaaacggttgcagagactccgtgttccctaagttacgatgagtttgttcctgcccgcagaagccgcctcgcctccgcagtgccacctctgctgcccccagccaccggcacagctgagtcaaggtacaaccgcccagcaacgctttccagcagggaacgttgccctgaacagctctgactgttgagcgcacgttagaaggcgcca

SEQ ID NO: 266234 - DNA, 122 bp, Homo sapiens
  chr13:112297655-112297777
  hypo
aggccttgtggggagccagccgctccggtgtggcgtcgggccctgcagcatagaggctgccctggctctcagccgggcgagcctggtggcctcaggcacacggtgccctcaccagacactca

SEQ ID NO: 266235 - DNA, 385 bp, Homo sapiens
  chr13:112320937-112321322
  hypo
ttgaccgagcatccgctgaggggtaaagcgcctgcggacgctatttcccatcagattttgtgcttcctgtgagcgggtgcctcagctctcaccgtgcaggcgcggagacccccgcagggcccgcggctcccccagcctcacaggccacacccgcgggctccagcccaggcccgcccctgcacaccgaatgcggtgaccttgtggctatttgggcgaatttgaggggactgacagcctctttcatgcaaaggggccattggctcagggagattgtgaacgggacccccggctccaactatagaggggcgagggaggcgtctaatacgagccagcggaagtccccacagtgaagacgctcatccccggagaactgggaagggaccct

SEQ ID NO: 266236 - DNA, 304 bp, Homo sapiens
  chr13:112321606-112321910
  hypo
aattgaatggggatctgagacgtgcgggatgagtgggactgagcctcctctggagcgtcagctccaggaaaatgctggaggtggagccgattaccaacggggtcacagttgcacccgcaatgtcttcagaagaaatagtccccttcctccctgagcatttcggagctgctctgaggcctggcgaggctccagaaggcccagtgaccttcgcaaggtctgatgtgggctcacagtgtgtggggcggtttccaggcgctcacaaggaccgctgtttcctccggccgcctgccccctgccccctgcc

SEQ ID NO: 266237 - DNA, 50 bp, Homo sapiens
  chr13:112333592-112333642
  hypo
ctgggatgcgggccgcggcttcaccgtgcaactgcggcccattgctacgt

SEQ ID NO: 266238 - DNA, 179 bp, Homo sapiens
  chr13:112334238-112334417
  hypo
tcttgcttaaaaaagagtggcgaggctgggcacacaccgacagtgcgcaggcagccatgccgaaccatgtagggacatcgggtacactcaggtcccttgcgccctaacaggaaccaagggccgtcccctgtagaaacgtttcttgcctggtgaccaacgtctggttctagatgtttgct

SEQ ID NO: 266239 - DNA, 87 bp, Homo sapiens
  chr13:112336761-112336848
  hypo
gagaaggagtttgaagactccggcagcatcaagaattttatctaaaaagccagcacctgcccgggcgtcatcccttcactgaccaac

SEQ ID NO: 266240 - DNA, 293 bp, Homo sapiens
  chr13:112559680-112559973
  hypo
agtggactagcaaggcgggaggagcacgtgtttggagtgtggccccacgtccccgcccccttctgcgtccccgcccccttccgcgtccccgcccccttccgcgtccccgcccccttccgcgtccccgcccccttctgcgtccccgcccccttccgcgtccccgccccctccaccctcagtgactgtcactttctctctcaagctgccctctcacgcctgtgtgccagtgaaggcagggtcagagctctgctcacagctctgacacttcagtggcttcacgtgacacaagtttt

SEQ ID NO: 266241 - DNA, 50 bp, Homo sapiens; identical to SEQ ID NO: 215597
  chr13:112573544-112573594
  hypo

SEQ ID NO: 266242 - DNA, 433 bp, Homo sapiens
  chr13:112610839-112611272
  hypo
tgcagcattcctgctaaaggcgggcgggaagctgtgaaaggcgtggaggccgcaggccccgaccactcgcgaaagtagcgtctgtgctgtttaagcctgcgggggaagaagtggaggccgtggaggggtgcgggggctgtgtgtgcgtttggggcggtttgggggatgagaacagcaggaactcgtcgcgcccgcatctggggtcggaaatggttgtcttcagagacaatcgtgctgtaccacgggcgcaccaggcaggctcacggtcctcctcatgccacagaaggttggggcttcttccagtctctttaggaaacgtaataatgcctgcataatcttaacgcttgttccaaaaaccgtggctcctgaccaagctctaccgttcaacccatgggccgtggcgcaggtctgtgtgagcggggacaccccctgt

SEQ ID NO: 266243 - DNA, 197 bp, Homo sapiens
  chr13:112611302-112611499
  hypo
ctggtagacctcgtcctcagcacccaggcagccctggtcaggctttgtccaacgtgaaccgtttgctgccgcagaggtgccgaacgtcaggcttagcaagactcgaaatgaagtcagttgttttcatcgcggcatgaacacctacctgagtcctcccgtaactcagcctgggcctgtgaagacgtgtgctaattcgt

SEQ ID NO: 266244 - DNA, 275 bp, Homo sapiens
  chr13:112618854-112619129
  hypo
cccgaagtgcaaagttagttttattcggaagtcttaccgcggaccatagcccagggcctgcggcctgagagcagcaccgtggagaggctctgcctgagcgctctggtccagcgtttccacccacagccggaccgctctggcacagcgttgcagcaccgcggagaggctctgcctgagcgctctggtccagcgtttccacccacagctcatacacgtgtggcagagcttccgtacgggcagaaccacatccagccggctcagaagctgcagtgatc

SEQ ID NO: 266245 - DNA, 121 bp, Homo sapiens
  chr13:112620245-112620366
  hypo
cgggctctgccccacggggttccggctctgcacccagccccgccctgctctgtggcccacacggcggcgattacctgctggaaaggggaccaagggaaggaaagagcgtgaaggcctgaag

SEQ ID NO: 266246 - DNA, 82 bp, Homo sapiens
  chr13:112625061-112625143
  hypo
cacttgggacacagcgaggccttggtgcatccttgcaagccaccaggagcactggagtcatatcctgcgccacagacacagc

SEQ ID NO: 266247 - DNA, 174 bp, Homo sapiens
  chr13:112668109-112668283
  hypo
ttccttgtactcaagcactgcgacccctggaccgtggatctgataaccaagaggccataagaggggcggggagcgtccgcagcctggagacgctggacgaagggagggttcagtcccgggagggaccaagcgggcggtgccagatttcaccacgctccccagaagggtgcacaa

SEQ ID NO: 266248 - DNA, 150 bp, Homo sapiens
  chr13:112679894-112680044
  hypo
tccatgttcttggatgacaccggcaaaagtgctggggcaaggggccctgattccatggtttgctctcagacgggttagcaagcagtggatccaaaacgaaacttcacgcatgtacatacacgcacatatagagagcgagagaatacagat

SEQ ID NO: 266249 - DNA, 90 bp, Homo sapiens
  chr13:112682967-112683057
  hypo
agccagcattgtccactggccgaggcaggagcaccgctgcgccatcgggtctggtgctctcccgagaacgggggggagaaattcctgaga

SEQ ID NO: 266250 - DNA, 248 bp, Homo sapiens
  chr13:112690651-112690899
  hypo
tgcattttcctcagcagcagggccaggcccaccgtgacggctccgcaccgacgcacccttctcagggcaagatcgacacagagtgctctccagggccacccggagatgcccagactcagaggcctgcctccagccctgcctgcctggacagcaggcctgagagccggacatgcttccgtgtggccgtcacatccccagagttgcacccgcgcaggccgtgtgtgcacgtgttcttgaatcctagggtg

SEQ ID NO: 266251 - DNA, 225 bp, Homo sapiens; identical to SEQ ID NO: 215601
  chr13:112691506-112691731
  hypo

SEQ ID NO: 266252 - DNA, 182 bp, Homo sapiens
  chr13:112786386-112786568
  hypo
tgcagggcttgacatgacagcgaacccaagcagtgaggagcgggcagggatagagcctggtgcggaggaagccgaggatgggcaggagcagcccacagagcacccggcgaacggaggcatgtgcccagcgtggatgactccaagagcaacagcactccctcgggaatgaatctgcagagtgg

SEQ ID NO: 266253 - DNA, 53 bp, Homo sapiens
  chr13:112804754-112804807
  hypo
agtccttcagctcccacatccggctcggagtgctcctgggtctaaaattcctt

SEQ ID NO: 266254 - DNA, 114 bp, Homo sapiens
  chr13:112804837-112804951
  hypo
gcaatggtcacattcacattccttaagaagatggggatggagtccttcctgccccaccccaccccaacacccacacaccacacacacgcacggcaagcacacacatacacacac

SEQ ID NO: 266255 - DNA, 137 bp, Homo sapiens
  chr13:112805011-112805148
  hypo
agcacacacacgcgcacagcaagcacacacacgcgcacacacccccacggcaagcacacacacccccccacagcaagcgcacacacacacccccacggcaagcacacacaccccccggcaagcacacacacacaccc

SEQ ID NO: 266256 - DNA, 63 bp, Homo sapiens
  chr13:112841713-112841776
  hypo
ttcctgagtcatggactggacgccgaatgtagtacctgtatcgatcagatttccccagggaaa

SEQ ID NO: 266257 - DNA, 216 bp, Homo sapiens
  chr13:112882621-112882837
  hypo
ctggccggctttcacgatcattaactacgttttgaattctgcgtggtgatgaattgctgcttttttttctttcaggacatggttctcctcggaggatacgttcacattcatttccatgtggctctgctcttctggaattcttctgtgattcaacacacagctgcatgagccctcttcaaccttcacatcttctgtgccatgcgtccacattgtttt

SEQ ID NO: 266258 - DNA, 478 bp, Homo sapiens
  chr13:112885758-112886236
  hypo
tgtattgtccgaaacgccctgctgggaggaggtgaaggacccacgccactctcaaggagtcagacttcaccagcaatgtcgccttccatcgtgggtggcacctggagaggaatgcagacaactccaagcaagttcagagaaagacgatcaagacaccgagaagacatggcattgcctcgggtgaaaggcagcggaagagactgggttccatgagaagagaatatcattgtcctcagatgctgggacacctcttgtgggaagatgagccagtgctgctcctcaaagcccaggggaggagaagtgccgtgccagcgggtgagagtcgcagagatggcattcctgctcagccagaggaggcagacgccggaggaagagggaaacctcaggacaggctgtgttcacctttagcaggctcagaccacgcatctaaaaagactgttatccgaaaagtgtgtgtgccctgcgtgtaagtcatgac

SEQ ID NO: 266259 - DNA, 150 bp, Homo sapiens
  chr13:112887634-112887784
  hypo
taggaaggcagagcagtggccgacaccccacaggcccactggccaggtgtggtgccggacagaccctcaggtgtcggctctgcccagcgtcctcttcctcagggtcggccctgctgacagcagccccaggctggcaaccggacgctgcgc

SEQ ID NO: 266260 - DNA, 52 bp, Homo sapiens
  chr13:112887814-112887866
  hypo
ctcacctcccatgagccccccagcaatcctcggtgtgcagctctgcagctgg

SEQ ID NO: 266261 - DNA, 147 bp, Homo sapiens
  chr13:112901218-112901365
  hypo
cactgtaaagctgacggcaggaggccacaggaccagacgcgcctggagtgtgtgtgtccaggcccatgcgggctccctctttgctcctgtcattgggaccccacacattttatgccccagccctcctttgaccgcagaccccaaggt

SEQ ID NO: 266262 - DNA, 152 bp, Homo sapiens
  chr13:112904339-112904491
  hypo
gcaacacccaggggacgcatgcatcgcccacctccatccgagggtctgctgctcccaaacatgagccagcacaaaatagtgatgtcagaggcactggtcgtgcccttagcgtgtctgcaccagagcgcgtgctcacacgaggatggccactg

SEQ ID NO: 266263 - DNA, 249 bp, Homo sapiens
  chr13:112906488-112906737
  hypo
tctctgcaagccaacgcagagaagtgagttagctactctcacccacagagtggacagagactagaccgggcattaaggagcccaggatttcgggtctgactttgctgttaactcaagtggagcctggcaagctgggcatcagcccgggctctcattccagggacaggcactgctacggacccaggtccgcccgggctctcattccagggacaggcactgcgacggacccaggtccgcccgggctctcat

SEQ ID NO: 266264 - DNA, 236 bp, Homo sapiens
  chr13:112927009-112927245
  hypo
aggaatcttctgtgagctgacggcttcttcagagtcggatggaggggctgctgtggagatcaggcgcatcctgacaggctggttctggtaggcacgaaaggttcagaagaaagaatttcaaaagataaaaatgcccccagcagaaacaatgaatagcaagcacacgcgtgccaccccacacgcggaagtcacacaaagctgatcgggtttcgtgtgctcctcgtgttccacggagc

SEQ ID NO: 266265 - DNA, 162 bp, Homo sapiens
  chr13:112998006-112998168
  hypo
ccttctgcaggatgaaggaccgaacacagggcctcgtctccaaaggtgctcagtaaatggtggctgccgcatgctggccgccccccaaacagccccagcgcggcgtgtcctcgccgtcaccctcctctctgtccagggctcgggggagcttattaataaata

SEQ ID NO: 266266 - DNA, 45 bp, Homo sapiens
  chr13:113008186-113008231
  hypo
tcagtgacaggtggatgggacggcgagcttagaaaacatcagcag

SEQ ID NO: 266267 - DNA, 52 bp, Homo sapiens
  chr13:113086508-113086560
  hypo
cacaaagatgtaggactccacgcattgcttcggcaccaagccacactttctg

SEQ ID NO: 266268 - DNA, 627 bp, Homo sapiens
  chr13:113098820-113099447
  hypo
gactggggtttggggtcaagcgggggtctgggaccgtgcctcaccacgggatctgtgtacacagcgatgcacccagcgtacgcgggcccttccctctgagccctcggcccctcatctgcaggatgggtgagccctggagaagcgggcagaagcagaggaggcagcgaacgcagagcatgtggcctgtgactgagcctagaaagtccgctcggcaacagaggctgcaatccagaaagccccctcggtgacagaggctacaatctagaaagctcgctcagcgacagaggctaccacctagaaagcctgctcggcgacagacactacaatctagacagcccatttggcgacagtggctacaacccagacagcccgctcagcaacagtgtctatgatctagaaagctccctcggcaacagcagctgtcatctagaaagcccgctcagcgacagaggccacaatctagaaagcctcctcagcgacagcggctgcgacccagaaagccctctcagtgacagtggctatgatcgctcgcaactctggcccctggctctgttggtcaagcctgccacagcccggaagcctctgcagcctccctgttgctgctgaaaaggacgctggttggagaag

SEQ ID NO: 266269 - DNA, 294 bp, Homo sapiens
  chr13:113107702-113107996
  hypo
acagcacggagccccgcctgacgccgcggtcgcttgacttcacaatcacaggagcgtgacgcctacagcctaatgttgccgtgtagggcacagacttcttaaaaagaatcttcaggggatgtcgccaggtgatggcgggaatcctcagtgagagggtgaggccaccggggctgctgtgtccgcagatgtggtgccacctccgagggcctccaagggtgcatgtgagccacagtcaccaccacagtgcgccgacgaccgccacagaaacagccacggcaccgcgaggaccgtcct

SEQ ID NO: 266270 - DNA, 146 bp, Homo sapiens
  chr13:113108782-113108928
  hypo
cagtccttgccgtccgaccacctctggtcatgacctgctgaggaagggcttaccctccacccacaatgaacccgcatttctgagcccccgagatcctgacaccaaagtgaagccttgcgtgaggacacgggcgataaggcatcagt

SEQ ID NO: 266271 - DNA, 42 bp, Homo sapiens
  chr13:113111904-113111946
  hypo
ccttatggtcaacacgggctcttcagccgctggccggcaggt

SEQ ID NO: 266272 - DNA, 106 bp, Homo sapiens
  chr13:113120931-113121037
  hypo
accccaggaacaccggacaccccacttggtcccagaagcggcgcctcctcccagcttctccatgcacagccccacgtggaagcgggagctcctctccccaggaccc

SEQ ID NO: 266273 - DNA, 55 bp, Homo sapiens
  chr13:113121067-113121122
  hypo
ctctccagcctgcggatggggcggcccacaccaggagggcgcagaaactgaaaca

SEQ ID NO: 266274 - DNA, 122 bp, Homo sapiens
  chr13:113163202-113163324
  hypo
cattcccttccctccagccccgcggctgctgtaaccataaaggccaacgtcaccgcacacggattattacaactggctgccctgctaatcaccacggtcgcgccccaggttcattattctca

SEQ ID NO: 266275 - DNA, 40 bp, Homo sapiens
  chr13:113174159-113174199
  hypo
ggtgccggggcggcgttcccaacacgcagagccgcagtac

SEQ ID NO: 266276 - DNA, 211 bp, Homo sapiens
  chr13:113233673-113233884
  hypo
cactgctgaatgcccgcggggccacggcatccctggggctctcgcacactgctgagtgccagcggggccacggcatccctgcagctctcccacactgctgagtgcccgcggggccacggcatccccggagctctcgcacactgctgagtgtcagggggccacggcatccctggagctctcccacactgctgagtgccggggggccacggca

SEQ ID NO: 266277 - DNA, 146 bp, Homo sapiens; identical to SEQ ID NO: 215606
  chr13:113244576-113244722
  hypo

SEQ ID NO: 266278 - DNA, 232 bp, Homo sapiens
  chr13:113255706-113255938
  hypo
gtttagtgttctcattctgtcgcccgggcttgagatgagtgtggattcattctctcggtagcgttaacagcgcttcacagttccccgcggctctggccagggctgctgtgaggactggatgaggtaacgagaagtgtgtgctgagacatctgtgttcgcccaggtggcctgtgacatctggaatgtcgggttctgaggtcagatcactctcgaaggtcaagacctttggagt

SEQ ID NO: 266279 - DNA, 206 bp, Homo sapiens
  chr13:113274714-113274920
  hypo
gagtgagtgttgttgtggcacggcctgcactcaggactgggtttatcatcaagaacctggcaggctgcctctaaagagagcgtcacctgcttatggggcccatgtacgtctttccactgcagctagacaagtcccgaattcaaatgacgattacgcatgttaaaagcttggactaggccaggtgtggtggctcatgcctgtaatct

SEQ ID NO: 266280 - DNA, 310 bp, Homo sapiens; identical to SEQ ID NO: 215607
  chr13:113291492-113291802
  hypo

SEQ ID NO: 266281 - DNA, 67 bp, Homo sapiens
  chr13:113301705-113301772
  hypo
gttttgaacaccgtcggggggaagacgccagtctgctcaagtggtgcccaaaccagaaatgccagtg

SEQ ID NO: 266282 - DNA, 241 bp, Homo sapiens
  chr13:113312401-113312642
  hypo
tttgctggagcccccgagtcgcagggcagtggcctggactatctcaccagctggaggaacactgccacctgccaatggcggcactgctaatttccggtcaccgcagtcagctaagattcatcccacctgcctaggggctaggcctcaaacccacgtcatctgcgttgtctgcagctgtcagcgtcttggaatgtgcacccacagggctcacacgctgagcgaacttggctgtgtgattaga

SEQ ID NO: 266283 - DNA, 98 bp, Homo sapiens
  chr13:113342679-113342777
  hypo
ccttatacaacctctgattgcgcctcgaccccaatcccacagtcacggtttacaaggtagaagcttagtcaaaatccggcttcagcagtcagggttct

SEQ ID NO: 266284 - DNA, 176 bp, Homo sapiens; identical to SEQ ID NO: 215608
  chr13:113346804-113346980
  hypo

SEQ ID NO: 266285 - DNA, 506 bp, Homo sapiens
  chr13:113347507-113348013
  hypo
gtttgggtgtttggatggaccggagccatgcagagatactttgtatttgtaaatggtgccgtgtttgtataccatgaggagtgcttgtgcttatggggtagtgtatgctccctggggtgatgtatgtgctctggggggcgtggggaaaagcgtgtgtgccgtggggtagtgtatgtgctgtggggtagtgtatgctccctagggtgatgtatgtgctgtcgggggcgtgaggtggtgtatgctctctggggtgatgtatgagctgtgggtacggggagaggggacggggtggagagtgtgtgtgccgtggggtggtgtatgtgctgtgggagccatggggtagcgtgtgtgccgtggactggcgtatgtgttgtggagtagtgtatgtgctatggggtagcatatgagccatggggtagtgcatgtgccatgaggtagtttgacctccatgacgtaacactttaaaagcacttctaggccaggcgcggtggctcatgcctgtaatc

SEQ ID NO: 266286 - DNA, 1385 bp, Homo sapiens
  chr13:113350355-113351740
  hypo
ttcaagttccgtctcggctgacggctgcgtggccttggcaagttggttgccccctgtacgcttggtgccccatctgcaaggtggggactatgatggtgcccacctggtgggtctgtgcagtgacgggacaggtcacggcgctcgtgcacgctgggtgcccagtgcacggggcgtctttgttgcgcgcatggacctgcggctgcatcaccgtccatgcttctgggcttcttaaggagaccgcctctcaccttgggctttccggaaccttctccccgcactcctcttcacgtggagagtgggtgaccttgccctgctctcccggggagagcggtggtcactggtgggaacgcccctgccacgcccagcagcctttctgcctctgcgcttgcctcctccggttggagcgagtgacccgttctgccgaagtccagtcccgtgtgtgctgcggccccgtctctctccctctctgagtgacactgtctgccctgctgcttgccgtcccgctgttggcaccgctttagaccccatatttcccagcggtcaccgtgctcatttttggcttccagctaccgtttttcttaggttaccccgcgtagctggcccgtccttccttctcctgtctcttctgtgcctaccgcggggggttcccttaccaaggtctccatcacccccaggcccacctccctcgggcccctctctgcccttgccctccacctcagcgactccgtggggcttttgtgatcccagctgcagttagcgagcgcccctgtgtgctcagagacacgccagtgagccgggaaggacagagacccaagtcccatccctctggggcccccttggaatgggggaggcgaacaggaaaccaccacagtgagtgttggggtgccccgcaggcgacggtgctgagaaaaagagagtggggttgggggcagtgcgtgcgcaggctggcgggtgggcgaggcgggtggaggatgcgtggggcgcagtgcttgcgcgcagtgggtggcggggtggacgaggtgagggcctggccaggtgggtgcctgcgtgtccagcctgaggggcggcccacgcagcagcctctgggagccctggggccttccgtgggctgcttcctgtggcgtcctgcgggctggccgcccctcggtgggctccggtgctggcctctgccttccccagggccacggtgggctcctagtggcctttcttccctctccatcaacatccttgtcccaggaagaggcgtccactgcctgctacacgccacccagccgtgttcatttccgtgttccagtgtcacccgtgtgcctagaacgttcctggcacagaaaagccacgcagaaaacagctgctgggccaacaccgagaccccaggtcattagtgt

SEQ ID NO: 266287 - DNA, 523 bp, Homo sapiens
  chr13:113356666-113357189
  hypo
aaaaaaaaaagaaaccactgtaagtacagacaccgtagcaaccacacggaggccccccgccccgccccccgcgtgttccagtgggaagcagagcctcggaaggcgtgcacacggggggtgcgtgatggtgtctccctctgccctcagatggccaggcctcgggcccgatgtgccagggtgggttcttgtgttccgcgggcttcttgtcccttctgtctgctgtgttgtgcgtgcgtctctctgggtggccttggccgggcttctctctctgtgagacaggcgcatctctcagggctttcttcgttctgctgatatctatcccctctcaggaccactcggtttcaaaagcggtaactaaacttgtctaacacgtgtgcatgagaggaaggcggccagaggcatgggtctgagggctttgcttgaagagcgggcggtgtgcgtgtctcgcagcgcccccacctcggtgtctcagggccttgctgtcttccgcctttttcccagcgtctcaccagcaaagtgagtt

SEQ ID NO: 266288 - DNA, 337 bp, Homo sapiens
  chr13:113358329-113358666
  hypo
tgacaaaattggaccgtgctagttggaagttgcacttgaaatgcaggtcagaacaatgggatacgctggtcctgctgtcccaggcgggggagtcacgggagggctcgagtgccacaccacccacacgtcagccaccatgtgggttcccaaggcaagcagtgagttcccaagccagctgtcgtccacctttctgggttagtgtctttttaaataatcaaaggtctttaccatccattaagtactggcccagttgttgtacgcacaactcagaggtgattgtaggttgtgactgctctcagtcggtagttagggtggcctctggcgattgttggaggaa

SEQ ID NO: 266289 - DNA, 387 bp, Homo sapiens
  chr13:113364153-113364540
  hypo
tctcttcagatattttacagagtttgactcttgttgtcaactgtctgcaaataggagctgcgcccatgagggcatagcccagttaggccgcgctgctccctgctgctgaccagcccctgttggagctgatgctgcccacatcccacagctgagagcaagggtctcaacagcacaggtcctctgcctgcactctgccctggagctgggcatcagccatggtgagggcctggaactgcgtgacacccgggtgtcaggcggccactctcagcatccacattccctcagcatcacggggaggccggctgcagtcgggaatcacgagtgtcatccatgtggtcctccctctttgcagacgtgtgtgtggccgtggtgtttaagttgtgtctg

SEQ ID NO: 266290 - DNA, 266 bp, Homo sapiens
  chr13:113366788-113367054
  hypo
agggtctgggggtgggggatcgtgaggtgagggacagcaaccccgtcctgtccttgtctaggcctctgagacaggcccgaaggacaggcttttctctctactgtgggtgatggtcccggctggtcagctagcgtccacagcccctcgactccctgcgcagagcccctctcactggaccggcgtcagtgccccacagagactggaaacctgtttccaaggtgtggctctatggccggaccacagtcggtgaggtgagggccagttcc

SEQ ID NO: 266291 - DNA, 241 bp, Homo sapiens
  chr13:113368823-113369064
  hypo
ccagggctgaggagaggtggcgtctccactcctgacctggaggcccgtctggcttctggctccagccccctctgctgccttctttgtgtgtctgtgatggaatacgcgttctgcgtgatgagactgttatggagacgcaagagaatgtgaaggtgaagcttctcgaccttgggctggagcgggtggggtgctgagagcaccgagagccccttgccacctcggcttctggcaggtcagtgag

SEQ ID NO: 266292 - DNA, 178 bp, Homo sapiens; identical to SEQ ID NO: 215613
  chr13:113369394-113369572
  hypo

SEQ ID NO: 266293 - DNA, 370 bp, Homo sapiens
  chr13:113371106-113371476
  hypo
caggtggggtgtgggtaggtcggggaggctgctggcctcccagcctccctcaatttctgcgttctaaagatggctatgtgcaaaataaaggtgaaatgatggggcagtactggatcaggtggacatccgggagctggaggcccgtgcactttccctgggacgggcagaggcttgtggtgtccacccacagacgcagacccactggcctgcagggcccatagaggctgttgttggccctggtgatgagtgggggacacgagtatgttctgaaatgagggggaggcttctgttgtgaccttgaccaggaagagaaagagaagccaggaggagagcagacacgcttccgccttgaggacggcacttgttcaag

SEQ ID NO: 266294 - DNA, 125 bp, Homo sapiens
  chr13:113375330-113375455
  hypo
gtgaaccacaggccacagtccgcagcctccaggagctactgccgccagctgagggccacagttgctgatcgggaaagggtgtatgtaaggccagtcctctgtccggtcagaagtggaagggtctg

SEQ ID NO: 266295 - DNA, 292 bp, Homo sapiens; identical to SEQ ID NO: 215614
  chr13:113379234-113379526
  hypo

SEQ ID NO: 266296 - DNA, 90 bp, Homo sapiens
  chr13:113382140-113382230
  hypo
ctccggcgctgggcgaggaactcggctccaggtgcatcttgttaaaggctgagccccatttctcacatgcgttgcggaatcgaattctcc

SEQ ID NO: 266297 - DNA, 249 bp, Homo sapiens
  chr13:113382654-113382903
  hypo
tacctgtatgtaccacgttgtcagtgtccacgtgtggaggggccatgagactgtgcggcccggctccctgtgttacctgtatgtaccacgttgtcagtatccacacgtggaggggccgtgagaccgtgcagcccgcttccctgtgttacctgtatgtaccgcgttatcagtatccacgcgtggagggggccgtgagactgtgtggcccgcctccctgtgttacctgtatgtaccgcgttgtcactatcc

SEQ ID NO: 266298 - DNA, 317 bp, Homo sapiens
  chr13:113383514-113383831
  hypo
cacgtctggttggcggtcagctcatttatgattgagcctgaccttatgacaggccacctcgttaacgattggatgttgtttttatcactctttactacgtttgctttcccacccctgctgtttccatgggtttatccgactctgcccactgaggcagcacagtcccctcgccttagcattgcgggcccagagtatctaacgcgtccgagtgcgaacagtgtcagaaggcactgaggcagcgcggttcccacctcggcattgcaggcccagagtatctaacgcgtctgcgtgtgaacagtgtcggaaggcactgaggc

SEQ ID NO: 266299 - DNA, 205 bp, Homo sapiens
  chr13:113391636-113391841
  hypo
tacccaggtgaaggctgagccgcacacccagggcaggttaggcactttgtgagcaagttatccttcggtgaaatgttcgttaaaacagatcatgactcatgtggcgttaaatattacagggaaacctccagaagggatgggcttccagggacggtttggcaagggccagctatgctgagctgccgtggtcataaagaccagaagg

SEQ ID NO: 266300 - DNA, 110 bp, Homo sapiens; identical to SEQ ID NO: 215616
  chr13:113396992-113397102
  hypo

SEQ ID NO: 266301 - DNA, 391 bp, Homo sapiens; identical to SEQ ID NO: 215617
  chr13:113398309-113398700
  hypo

SEQ ID NO: 266302 - DNA, 736 bp, Homo sapiens
  chr13:113400147-113400883
  hypo
attgagcacctccacattgtcgtgcagcggaactccagaaattctccgtcttgcaaaactcagcctctgggccgttaaactaggtgtccccacctcccctcccccaggccctggtgaccaccgttctgctttctctgtctgtgattttgaccactttagatacgtcatttcagtggactcatcctgtgtcgttttgtggcggaatcacgttctgttgtgtgtatacaccacgtttttcttgtccgttcacctgtgatggactcttgggcgtctgccgtaggccgctgtgaatgctggcggcggtgatcgtgtgctgacgtctcctccacgtactgagttcgtgtcttttggatgcgcgcccagaggtggcactgctggatcctgtgctgggtcatacctatgtttaattctctgaggaacctccgtgctgtctccatagcagccgtgtcgtttcacacttgcaccaacagtgcacagggctccggttccccacgtcctcaccgggtaactggggttccggctccccacgtcctccccgggtaactggggttccggttccccacgtcctcaccgggtaactggggttccggctccccgcgtcctccccgggtaactggggctctggttccccacgtcctcaccggcacttggcactgtctagtgttttggtagcagccatcctgctccgtgtaggtagtatctcattgtggggttttgttgttgttttttagagaca

SEQ ID NO: 266303 - DNA, 273 bp, Homo sapiens
  chr13:113401317-113401590
  hypo
aacttcctaagtggtactgacgtgtggccggggtgaaaacctctggcctaggtatggaacaggtagagggtgttaccgagatgatgagtaggagtgttcagaaggtggtagggatcacccgtctgctccggagggatcgcttgttgagatgagatgaacgctgcacttgtggacatgcagacgtcttgcaaacaagtggggtcaggatgtggtactcaggtgcagcctcagggccagggtggattcgggagcgtaagggaagggactgttgct

SEQ ID NO: 266304 - DNA, 67 bp, Homo sapiens
  chr13:113411148-113411215
  hypo
ggcctgctcccagcgcggggtctgctcccagcacgtggtctgctcccagcacggggcctgctcccag

SEQ ID NO: 266305 - DNA, 117 bp, Homo sapiens
  chr13:113413671-113413788
  hypo
cacttggcagagtccggagacttctgaccgtcatgacggtgggggttgctcccaagaccctgctctgaagacttcctaacctgcgtgctctttcaacaatagcgcgtggacacattt

SEQ ID NO: 266306 - DNA, 111 bp, Homo sapiens; identical to SEQ ID NO: 215622
  chr13:113417108-113417219
  hypo

SEQ ID NO: 266307 - DNA, 982 bp, Homo sapiens
  chr13:113419198-113420180
  hypo
cctctttccttagctcagggcgctaccagtctgggctggtagaagccccgacacttgcctcactcggatccctggaggaggattatatgggcactggggcaaggcagggacatcttggcagcctccccaccgcacgcttttcttgcaagtcctttgaacggcacctgctccttagctgctgcctggcaactttgagggtttcagtgagatggggtgagtgcttcccagccagcaaagtgcgttgacagtggctggcttgccccccctcccccccgccccggctctggaagcttctccccctgggtcttccagtctcatgtctggacacagacaggagaggtgaggaggagcagcaggggtggcccgggcagttcctgtgacctggaggcctggcaagttgttctgacggccaggcccatccttggggaggcctctgaggacgcctggaaccccaggcccgccctgccttgttttctggtcctggcctgggggggtcgtggtctcgctggtgcagcctcctccgggcaggccccgcctctgctcccttcccctcactccatctgattcggccccgtttccttgtccactccacgttcttctgagcgtgtctctgggacatggttaaggttaagaagcggcctctgaacgagggagaatgtactgaaattgcctaagtgaacttcaaacacaggaagaagcgctcagtcgatgttcatggtgagaacgagggttgatcttttgaatgagtcacgggtttgagagagacctaagaaccattcgatctgaaaactagattcactttgaacaaaatatctcaggtgctaaatactccagttagtgtggggaaatgtctctgagaacgaaagctctgactgaccggagcctgctacagtggatctgaaagatgctcacgaataattctcgctgcagagcttagtaaaccaacaatacaaacgattttctgtaacgacctcccgtaaag

SEQ ID NO: 266308 - DNA, 294 bp, Homo sapiens
  chr13:113424730-113425024
  hypo
aggaaggagagaaatccagtcgttaccatgagtgtgacgagagtggggagaaccagtggagcttctgatcctgtcccagcagatgccagtggctcggaccaaggaggacagagggatgggcgtgcccacgtgaagcctcaccccagaccccagaccctgcttacatgccgggacgaaggtgggagagaaccgtgcatctcagcacggcggtggaaacgtggtccacctgcggagggcctgtttgcgtttattacacccgagcaaggcccgcacgcccaccagaggggccagggt

SEQ ID NO: 266309 - DNA, 577 bp, Homo sapiens
  chr13:113425234-113425811
  hypo
gtacatttgaataccggccattagggagaatcgccctgtaaacattgatccagtgattgaggccggtcggcttgcttctgttctgccccgcggtgtaattcagctaataggttttgtttgtctcagctgaaatgtgaaacttccattaggtgtctaaccctggctaaaagtggttttcagcctatttttaaaaaatctcctttgtccctgcatgcattctaaccccattctaacctgatgcgggcagccacaacccaggccctaacagagttcatggtaaggatggtgaaggcgtgacccacggtggaaagttggttattttgggtaatccagcgattttctgattgaacttcgaatgcggaaacatcttgcccttactggggcaacgaggggaggcaaggcgtgcgccaggcagagacaccttggaatcccacccagcccagatgtgtctcctgggttctgggacgggcgcaggtgactgtatttgcgctggtgggaggagttgcccccttggttaaatccggaggacacagctgcatggtgcttgccctcagccgtttctctcttcttactttga

SEQ ID NO: 266310 - DNA, 120 bp, Homo sapiens
  chr13:113426549-113426669
  hypo
ctttaaaaatgttgctgacacgaaaattgagagaagcctacgtttgtgcagaagatgggcaggtagaaggttccagcggtgaggggtgctgacctggagcggctgcggtggggccatgtg

SEQ ID NO: 266311 - DNA, 92 bp, Homo sapiens
  chr13:113426947-113427039
  hypo
cccagctcccctcccgtcatgccccagcccagccctgggcagctgctaatgcaccttctgttgcccgcagatttgcccgtgtggacgcttct

SEQ ID NO: 266312 - DNA, 132 bp, Homo sapiens
  chr13:113428311-113428443
  hypo
agctcctcaaacacagtgcccgctgcctccctgcttcccgtccacctcacggggaactaggaattccctcctgtgtctggcggagagagaacctggctaagcattgcggccgaaggttgcagcctcctagga

SEQ ID NO: 266313 - DNA, 105 bp, Homo sapiens
  chr13:113435265-113435370
  hypo
tcctgccctggagagcttcccgactacccgtgtctttgctctgaatcctgaaaacagccccgtgtgatgtgaccccgtcttttgtttgtttgtttgttcgtttgt

SEQ ID NO: 266314 - DNA, 243 bp, Homo sapiens
  chr13:113445467-113445710
  hypo
actgcttagaactcagcctgcgcagcccagaggtacagagaggcaggaagcacccaggtgtccacatacggtgccattgtggacttgtagggcaggattccaggatatgggtgatgggcgtgtggaaccgcggcgccccctgcacagtgtggctcatttgagccggatgggggccgtgaaggcatcacccagcctgccccctgggagctggcttctcccttcctggggcggagctcgcccgac

SEQ ID NO: 266315 - DNA, 190 bp, Homo sapiens; identical to SEQ ID NO: 215628
  chr13:113446210-113446400
  hypo

SEQ ID NO: 266316 - DNA, 200 bp, Homo sapiens; identical to SEQ ID NO: 215629
  chr13:113461153-113461353
  hypo

SEQ ID NO: 266317 - DNA, 439 bp, Homo sapiens; identical to SEQ ID NO: 215630
  chr13:113461413-113461852
  hypo

SEQ ID NO: 266318 - DNA, 244 bp, Homo sapiens
  chr13:113466631-113466875
  hypo
cccccactggtcctcgtgcaccctgcctggctctttccaactcccacgcctccctccctcgtgcagccccactgcctccctggctgttttcccagctgagccgtaggaggtttggtgagggaggcagggagcaccccagtcctgtgcatgtggagagccaggtgcgttccagaagcctggagggagggcctccaagcagcccagccagcctgggctcagtgaacctctccggacaaggccgcag

SEQ ID NO: 266319 - DNA, 111 bp, Homo sapiens; identical to SEQ ID NO: 215631
  chr13:113472458-113472569
  hypo

SEQ ID NO: 266320 - DNA, 248 bp, Homo sapiens
  chr13:113474180-113474428
  hypo
gtccggtcagtaacgtggcttttctgtcgccaggttcgtgggtcgcatcaacgtttacagtgacctgaatgaccccgtggtgaggtgagtgcctctgcggatgccttggccacggtcacctcccttgttgcgttagaaatgcattctttgacggacaagggtttccacggcggctgctctggtagatttggaaggtggagttccgctttcccacagggccgggctccactctcgtctctggtttgtct

SEQ ID NO: 266321 - DNA, 334 bp, Homo sapiens; identical to SEQ ID NO: 215633
  chr13:113477607-113477941
  hypo

SEQ ID NO: 266322 - DNA, 37 bp, Homo sapiens; identical to SEQ ID NO: 215634
  chr13:113482707-113482744
  hypo

SEQ ID NO: 266323 - DNA, 304 bp, Homo sapiens; identical to SEQ ID NO: 215635
  chr13:113488276-113488580
  hypo

SEQ ID NO: 266324 - DNA, 153 bp, Homo sapiens
  chr13:113489720-113489873
  hypo
aaatcccttgattcggcggggctcctgggccctccgctggcaccagctgcaccctctccacagcaccctgggcttcccgggggccgcaactcactgccgttgaggctccgggtttgcagccgtggaggtagtgaggtcgtggcctagatgaga

SEQ ID NO: 266325 - DNA, 35 bp, Homo sapiens
  chr13:113493552-113493587
  hypo
cagtacacagaagaccgactcgaaagaagaaaagg

SEQ ID NO: 266326 - DNA, 576 bp, Homo sapiens; identical to SEQ ID NO: 215636
  chr13:113497161-113497737
  hypo

SEQ ID NO: 266327 - DNA, 419 bp, Homo sapiens
  chr13:113498054-113498473
  hypo
gacaggagccctttcgctcgcgagcccgtgcgtgcagcagccagagcctgtgaacttcgtggaatgctgtcgacgtgcggatcatcatctttacgttgctattaaaacagctcctggcactacaaagtagctgcgttggagccaacaggaatccataaatcagcagcaggttaaagattgttgaacttctctgtgagggatctggaaaatacatcactgacttccaccagccacagagctgcagggtgggagccgagcgggttcctctgagcagcacaagcgtcctgcgcttcgacacacaatgagcctcagtacaggggcgtgtgggggctcctgagggggcagctccatctgcagctcgctttccaatagcgcgaggctgtgctttgctgtgacgtggtcgccgtgccatgctgagc

SEQ ID NO: 266328 - DNA, 54 bp, Homo sapiens
  chr13:113499309-113499363
  hypo
agtccagttgccagccgctagcagtactagtccagttaccgggcactagccata

SEQ ID NO: 266329 - DNA, 45 bp, Homo sapiens
  chr13:113500588-113500633
  hypo
catgtactcaactgccggatgttgtctcaccgcttacaaaggctt

SEQ ID NO: 266330 - DNA, 178 bp, Homo sapiens; identical to SEQ ID NO: 215638
  chr13:113507108-113507286
  hypo

SEQ ID NO: 266331 - DNA, 159 bp, Homo sapiens
  chr13:113508785-113508944
  hypo
gagctgagcaagacggtcctgcgccacagcgggagcctgaccagagacaacctgtccgggtaggcagcgcgtccccgcccccacccccacactcccgcaaaaggggcttcagacccagtggccttcacctgcaagtcggggagccgcattgtctctact

SEQ ID NO: 266332 - DNA, 605 bp, Homo sapiens
  chr13:113513506-113514111
  hypo
tgagtggccaaaacgtggtcacatgtgcatttcagttgcccctgaaataagagaaagctttctagaacccattagtgctgttctgccgcacgctgggtgcacgtggatccctcctcccatgtggggtgggccacgtcggtaggtggcggctgcctccctctgtcccgtcaccgaactaacagttatgccttgcctttcagaacgtctgcttcatcttccctcagtttttataccagttcttctgtgggttttcacaacaggtcagtcctagggtcttcagggacaggctgtctgagccttcttttccttcccgcagtgggtggctgctgtggggaggggagacttgggaatgagcagcactccccggcaccacgagggagccagggtgcccagcagcaggcgggggtgaagggtcgggcctggggaggggggccacggagctgaggagttgccgtcctggaggccccttgttccatgtcttctgaaactgccgtggccctgagatgcgggccagtgatgatgtggtctcctcagggcccagcagtgctgggctgggcatcctgatgccactgcaagaattaactccaactcgaggtccttgtgga

SEQ ID NO: 266333 - DNA, 75 bp, Homo sapiens; identical to SEQ ID NO: 215639
  chr13:113516326-113516401
  hypo

SEQ ID NO: 266334 - DNA, 439 bp, Homo sapiens
  chr13:113534533-113534972
  hypo
cttcaggattccagcggtgcctggtagaccttccagccgagggacctcagaccctctgcctcccgcgggtgcatggcccgtccctgagcctgtcgctgtctcagttctgggctcgggcccctcatgggagcggccctgctgggacagtgttttcccaagacgccccaagccctcgccctggcagctccatgacaccccatgcagactccaacaggggcttcgagcctcttcctgctggggtcccacggatggtgcaggcagaggcccgagcactcctggtggccccgtgtggcccacgtcgctcagtatctttcctcgccttgcagaggggtgtgaagcacaaggctccagtccaggccgcacagagcagcgatgggcccctcctgaaggacctcctacggcggccaaggcgcagttagctccacgctaggtaactgtg

SEQ ID NO: 266335 - DNA, 141 bp, Homo sapiens; identical to SEQ ID NO: 215640
  chr13:113536448-113536589
  hypo

SEQ ID NO: 266336 - DNA, 180 bp, Homo sapiens; identical to SEQ ID NO: 215641
  chr13:113537191-113537371
  hypo

SEQ ID NO: 266337 - DNA, 99 bp, Homo sapiens
  chr13:113537723-113537822
  hypo
ctggaggaggagccggccctcacgcccgccccgcgccacgctgtggaacggggctccggcaagtgaaacccagagggtgtttccgaggtgctcgacagt

SEQ ID NO: 266338 - DNA, 208 bp, Homo sapiens; identical to SEQ ID NO: 215642
  chr13:113539438-113539646
  hypo

SEQ ID NO: 266339 - DNA, 84 bp, Homo sapiens
  chr13:113543111-113543195
  hypo
gtcctgaggtggacgaggactggccctgtcctgaggaggctgccggtcctttgcacgcgcagtgaacccgctcacctcgtgcag

SEQ ID NO: 266340 - DNA, 689 bp, Homo sapiens
  chr13:113544111-113544800
  hypo
acctgggagcagccgcggcctgcggggtggatccgggcctgtgcggcggtggggtggggttggaggggtgtttgaggccatggctgctccttggatgacaacctggaacacaccaggggagctcgcttgccatcggttctgagtggctcaacctgggtgactgcaatggaccgagagggtccgggtcgtccccaacccgcaaaggcatccaggaagccacccggggaccctgctcagagcaaggcagagccagacacacagcaacaggcaagccgccccgcagaggatgagccgaggcagcacgcaccaacacggggctaaagtcagcatctcactcatctcacaaggcttcctgacttcttaagacatcagtggttactctaaaagagaagagcaggccgtggcgggcaggtgacccctcaccgtcgccctgggggaaggagcgggctgtggcggccgggtgacctctcaccgtctctgtggcggcatcactgtctttctgccggccaagccatcggggcagcagaagagtctcaaacagaaacccggctcagctcttgtttctcacctccttgtttcagcaaaattctccccaaaaggtggctatatttgttgtctctgtctccgtacacaccctcatctgcctcccgatctgtggacggcttctgggccctcgtgggacggctggg

SEQ ID NO: 266341 - DNA, 200 bp, Homo sapiens
  chr13:113545811-113546011
  hypo
ctcgctgtaagtgccgcacggcttacgtggaatccacagaggcagcccgtactcccccctccatgtgcagcgcccagacacgtgtgccgaggctgcaggtgtgctacagtgcggcggccaaccggctttcccctgcagcctcagctcctgcgggatctgctcactggtaggcagtgacgccctggcgggagttgtccctg

SEQ ID NO: 266342 - DNA, 366 bp, Homo sapiens
  chr13:113553328-113553694
  hypo
ggctgctgaacctgcggagaagctggctctccctgggatccgagctcctcggggacaggagcttccctgacatttgtgtcctcggcacctgcgtcataaacgaggaccgagcaaacgagtcacaaagccgtgctgacttggtgcttccgtggggctgggccgagttctagccgcctgtgaccgtgtctgcatctgtagacagatttaattgtgtgtgtgtgtgtgcgaggcgcctcgctcagcccaggaccacaaagcccagggggcctggctctcggtccagccttcggccttcactgctgacggcttctcaaggttttgcccaggggaaagcagacgctccaagggtggcggcgcctgttgggt

SEQ ID NO: 266343 - DNA, 277 bp, Homo sapiens
  chr13:113554074-113554351
  hypo
gtggacggagggatcgctgcatcccttcctccaccatgtcagtgtgacgggccgcgcgtgccatctgcagccttcactgggtaaaagtgaaggtccctcacctggatcttttccaccgtatcttgagatcaagtggttaggaatgcttgcagggtcttgcctcatagtggagagaaacagcggaacagccccttgggttggtttctggatggggaggatgtagccctcatgcctggtgtctacagagtccagcttggggacgcgattgcagccaggg

SEQ ID NO: 266344 - DNA, 45 bp, Homo sapiens; identical to SEQ ID NO: 215644
  chr13:113555445-113555490
  hypo

SEQ ID NO: 266345 - DNA, 45 bp, Homo sapiens; identical to SEQ ID NO: 215645
  chr13:113555730-113555775
  hypo

SEQ ID NO: 266346 - DNA, 242 bp, Homo sapiens
  chr13:113565660-113565902
  hypo
ctgcagctccgcccggcaccgtccatgcagggtgtagacccagacactctcctgcctgggagagcggcccagccgctagtcctgtgcgcccaccaggttcttctctcccagcgtggccgccatgttggccgtgatccccggatcctgcctgctgcaggctcctctgggaatggcccgcccaccatgctcctctgaaaccctccctcacttccagagacctgggccccgggcctcacccaagc

SEQ ID NO: 266347 - DNA, 182 bp, Homo sapiens
  chr13:113570827-113571009
  hypo
cccttctcacccagcgtcacgccctgacccctcggctcccgtgtcctctgacttccttgcaccagcaccctgttgagctccacccctgcactggggtctgtataggtggctgtcatgtgtgccgagcatagctcagtatagctgcatgaagcgttccaccgggcagacggtgttgatcctcc

SEQ ID NO: 266348 - DNA, 132 bp, Homo sapiens
  chr13:113571418-113571550
  hypo
tgtactcagcccctcggcgatctcagtcccctggcttgtgacccacctgagtgtgatgattcctagtccacagctccagtccggacccctcccccgggcactgcaccgccctgcctccgcagagcctccacc

SEQ ID NO: 266349 - DNA, 212 bp, Homo sapiens
  chr13:113598680-113598892
  hypo
gtgctctggtgtctcggggcagcacagacgttgttactgctccatctggcctgggtgaacacctgggtctctctgtggagttgggggatgccgcctgctcaagggtcgcgttcctagtatgcgttccaggaatgctatgcaccaccagtgctaagccgcagaagagctgtcaatctgtcagtcctgtcccgctaaacctgaacttttttttt

SEQ ID NO: 266350 - DNA, 31 bp, Homo sapiens
  chr13:113599072-113599103
  hypo
tacaggcgtgagccaccgcgcccggccaaac

SEQ ID NO: 266351 - DNA, 184 bp, Homo sapiens
  chr13:113622064-113622248
  hypo
tggtgcattgttgccggatgctggaatggtgcacgcacgctctgttggacgctggaatgctggtgcattgttgccggatgctggaatggtgcacgcatgccctgttggactctggaatgctggtgcattgttgccaaatgccggaatggtacacggatgctctgttggacgctggaatgctggt

SEQ ID NO: 266352 - DNA, 341 bp, Homo sapiens; identical to SEQ ID NO: 215648
  chr13:113627845-113628186
  hypo

SEQ ID NO: 266353 - DNA, 118 bp, Homo sapiens
  chr13:113631096-113631214
  hypo
acacacaccaaaccggacacacaggcctcctgggcagcgggaaacctggagacaaggacctggtccagcagggctggcgcagaggggttggggtcgcccagtcggacagtgcggggct

SEQ ID NO: 266354 - DNA, 92 bp, Homo sapiens; identical to SEQ ID NO: 215649
  chr13:113644356-113644448
  hypo

SEQ ID NO: 266355 - DNA, 805 bp, Homo sapiens
  chr13:113648323-113649128
  hypo
acccaggacagggtcccagccgaccctccgccttcgtctttttcctgattaaaaaaaagcaccttcatgcggggtgcggcgcttgggaccccccaagctgacgtcactgtctgtgccggtgtctcgggcaggggcaggtgtggatgccaagctgacgtcactgtgccagtgtctcgggcaggggcgtggctgccaacggggcacggtgcgtgggatgccaagctgacatcactatgcaggtgtctcgggcaggggctggcgtggctgtcggcgtgacggggcgcggcgcgtgggacgccaagctgacgtcactgtctgtgccggtgtctcgggcgggggccagtgtggctgccaatggggcaaggtgcgtgggacgtcaagctgacgtcactgtctgtgccagtgtctcgggcaggggctggcagggctgcccaggaggctgtcggtggggcagttcctcatgaatctctgagctgagtttgtaaaagtgtgtgagagtggggaaaatatgggtgaaaatattttcagacatttggattcccctttggtgagctgtctcgtttcttcccgctggtcagggatgtggctgcttgaacagctgggcgcggtgaccaatgtgtggagagccgggaagcctgcggtgaggccgcgcgatgtccttcatcccgggcagtaaatccagccccgagggtggggcatcctcccgggcacaggctctcctgcctggggtcgccgctgcgggcaggacatatgggcctcccaagcggtcccatctacacaggtcgggtagagtgagtcggaaagg

SEQ ID NO: 266356 - DNA, 61 bp, Homo sapiens
  chr13:113649447-113649508
  hypo
gcactccgctgtgtcgaggcactgtgcccgtgccccgggctcccctcgttttacagactcg

SEQ ID NO: 266357 - DNA, 287 bp, Homo sapiens
  chr13:113649731-113650018
  hypo
gtatacagttgtgcttagtacgtgttggcactgcaactgctgtccttgccgctgtgtgagctgctgctgggtggcagtgtctcagggctgccacttctgccccaggagagcagaggggagctggcggccgaggtggggtcggtggtggggtgagcctgcggcgttgtggctccaaggcctgctggcctgaagtcacccccgggatgtgccccgtgtgggaccgtgcgggatgcagggaggagcgtggctctgggtgtggaggtggcgggctgctggcatcctgtcac

SEQ ID NO: 266358 - DNA, 100 bp, Homo sapiens
  chr13:113650921-113651021
  hypo
cggcatcctgcgaccgtgctcctcaggtgtgccccacgggcccgggaatgtccttcttggatgcgcccgatggtcccgagactgtcgtcctcagatgggt

SEQ ID NO: 266359 - DNA, 38 bp, Homo sapiens
  chr13:113654369-113654407
  hypo
gcatcggctggtgccgtggtgacggcgtgaggggccat

SEQ ID NO: 266360 - DNA, 119 bp, Homo sapiens
  chr13:113661971-113662090
  hypo
aaactgtgcaaacgcggttcggcggcctcagtcactgtcctttgtaagcttggggagtcggcgggagagacgtgacccactggccacttcaggcggctctgtgtcgtaaggatcagttt

SEQ ID NO: 266361 - DNA, 196 bp, Homo sapiens; identical to SEQ ID NO: 215650
  chr13:113663192-113663388
  hypo

SEQ ID NO: 266362 - DNA, 36 bp, Homo sapiens
  chr13:113666831-113666867
  hypo
acactgcaatgaggacggtggacactgcgatgagga

SEQ ID NO: 266363 - DNA, 301 bp, Homo sapiens
  chr13:113667315-113667616
  hypo
ggacggtgcccccacggtctgtgaggcaggcaggggattgaggacagtgcctcctggtttcctctcaggtcacagtcgctcctggtgagagagaaaaacttaccgtaaaatctgaacatccaactgcgcagtctaggctgccgtcggctgcaccagacacacattccagagaggtgtgcaccagtggaagtcaccttgccaggagcatgagatagtatttcatgctttactgattgactgtttctgtctttctcccacaaaagaagccatcgccgagacgtggttgcgtactgggaatggg

SEQ ID NO: 266364 - DNA, 187 bp, Homo sapiens
  chr13:113672313-113672500
  hypo
tgtgctgtctgccgcggagccatggctgccactgtgacatgtgcggtcccgtcttctccctccattgtctgtagacgcacaggtgccacgcagaaccctacagctctgtccagatcctggatccagatgaggcagcttttgaaaggcggccaagtgagggatgcgtaaacctcgggggctccggact

SEQ ID NO: 266365 - DNA, 36 bp, Homo sapiens
  chr13:113684751-113684787
  hypo
ggactctcaggtgtccgctgacgcaggtgtgggccc

SEQ ID NO: 266366 - DNA, 67 bp, Homo sapiens
  chr13:113696468-113696535
  hypo
cgcaccctgggcccgcaccccattcccacgcgtgccccatgcccgcacccacgatggtgagcatggc

SEQ ID NO: 266367 - DNA, 140 bp, Homo sapiens
  chr13:113696849-113696989
  hypo
acaggcaggccgggcggcatccagtggcatcgggcgcctttttcgtggctgcagcgtcagcctgcactgccgggtgtgaggcagacgcgcacttaacggcgtgagaagccagatgtgggaggcaccgggcactgtgggca

SEQ ID NO: 266368 - DNA, 309 bp, Homo sapiens
  chr13:113700864-113701173
  hypo
gtcattcctttccccgcacattgcctcattccttcatcttttacaagaattagaggccccatatctgctccgatgcccacaaccttcatcgttttggtgcaagcctgtccctgagccgctggttctcatcgaagtctttaggatgaggcatctccttgcacccccacggcacctctctgcccctcgccgcggcggatccccgttcctgaccctgactcaacctggcacacaccacctatggcatcgttatctgaaataattcaaaacgcttcaggatgcttccaaaaaagtagacgtgtatagaatcgg

SEQ ID NO: 266369 - DNA, 182 bp, Homo sapiens
  chr13:113703693-113703875
  hypo
tctgtccatgagccacgcactccttggagagggcagaccagggatgaccccttgggcatcttgattcagttttttggaaatggtgcagttgacctgacgtggggacaccaagtagtggctgcagcggggcacctggacgccaacccctgggctccaggccttgacagcgagctttggctggc

SEQ ID NO: 266370 - DNA, 325 bp, Homo sapiens
  chr13:113718439-113718764
  hypo
gctgcatcccatccgcacatccatccgcagtgtccaggtgcccccacccacacagccgcccgcagcatccaggcagacgtggtcctctctgtgctgctgggtgttctgctgatggggcagctcttttgggagccaacaataatcccaaacactaccacgcattccctttctcctccaggtcataatgctgagctccgtaccagacttacacggttacatcgataagtcgcagctgaccgaggacctgggtgggaccctggactactgccactcccggtggctgtgccagcgcacggtgagccgcgtcggggccagcggggctggc

SEQ ID NO: 266371 - DNA, 952 bp, Homo sapiens
  chr13:113719023-113719975
  hypo
gcacaggcgactctaggtgacgggcacacgtgtagagtgtgcctggtatgtttctgaagaggtcaaggagggcaggacgctatgggagggcgttcaccgtctttgcgtcagccggtctcacctgatgggtctgtgtgggaacggtttccgccggtgtctgctttcagggcagcaggaggtgggtgcagtgcacaaggcatgcaattgtgttttctctgtccccaaggccatcgaaagtttcgccctcatggtgaagcagacggctcagatgctgcagtccttcgggaccgagctggctgaaacagagctgcccaatgacgtccagtcgacaagctcagtgctgtgtgcgcacacagagaagaaggacaaggcgaaggtacatggggggtgctccggctggaagctgtggggggctccggtcagtcagaagctgcgcggggctccggtcggaagctgcggggggtctttcgtcccagcgggagtttgtgtcagcagcacgtaagaccaagaagtcagcaggcttgagatgccttttgatggcaattagctcggcaacctctccgacgagaacggaataaaaggagtgtaaatgaaccctgtagattgctggctgcgcctgccattctggcgttgggtcaaccattggccctgggtggccgtggcttcaggagtgggaccaggggtggctcctctcaggagcacttttggctgtctgtgcggggagctcccgaatagacatctcttgcttctgagtgtgaccgagacaggatgtctgtgccggtttctcatgccgagcaggcgatgaagtggcggttggaattcctgtttgcagaacactcccagtgctcacgtgtccacagcgcttgctggaacaaacgtattctgaggagcacgtgctccctgctctgtgctgcccctggcccaccggcacgctgctggctttgcagcaatg

SEQ ID NO: 266372 - DNA, 143 bp, Homo sapiens
  chr13:113724281-113724424
  hypo
tgagccttggggtcgcttgaacacccaccgcgctccacgttgcatggggcgccgtgggccacacagacggtcaactcctcctctttcccaggctcctggcccagctgaacgaaaccgaggctgccttcgatgagttctgggca

SEQ ID NO: 266373 - DNA, 110 bp, Homo sapiens; identical to SEQ ID NO: 215654
  chr13:113731262-113731372
  hypo

SEQ ID NO: 266374 - DNA, 96 bp, Homo sapiens
  chr13:113739496-113739592
  hypo
gctccgcggtgaccgtggcccggcctccccagcacctgctggccaggtgtctgtgccgccctggggccccgtccccatcgcgccctgcccctccca

SEQ ID NO: 266375 - DNA, 249 bp, Homo sapiens
  chr13:113776017-113776266
  hypo
tgcgtggtgcccgccgtgggaggccagcctggcgttggcatccagcatcatcagtttgtgcagtcgggtggggctcagtgagtgcctcctgtgtgccaggcacaatgacgcacaatgtgtgcacaccaggctcatgtgcaggtggctgcgagacagggcgacccatcaaggcagatgcaccatgaggcagtggccagtgctgtgggtgttaggggcattgctccccggccactacggcatagcaggcag

SEQ ID NO: 266376 - DNA, 263 bp, Homo sapiens; identical to SEQ ID NO: 215655
  chr13:113796035-113796298
  hypo

SEQ ID NO: 266377 - DNA, 360 bp, Homo sapiens
  chr13:113797733-113798093
  hypo
gaaagaattttgcagggagtcgcacacgcccagcacttgggttctcctgttggcatcctccggccagatgcattcatcccatttcgcccggcccgtttgtctctgtccatccgtcaagctttcttgacttcttggtgcattttcaggcaaaccgcagacgccaacactcccctcgctgcctgggttgctgcctggcgtccattgttcacaggcggtcacctgaggggaggccaacgctcggacagctgcgctcacctgcagatccgacccctgccgacgacgtggggcctcgccctgcaagcccgctgcccctccgggtgcccctgcgctctgcctcccggctctctgactcttctccct

SEQ ID NO: 266378 - DNA, 351 bp, Homo sapiens
  chr13:113825828-113826179
  hypo
ctccctgagaagctcgtttgagcattatgtccccttgaaaatcagactgtaaagaactgacgattgttcatgatttcagattttaacagaacgagccaagacccgctgatgatcaagataacgcacgtccatgtgcacatgcggtatgacgcggacgcgggggagaatgacctgtcactgctggagctggagtggcccatccagtgcccaggtgcggggctccccgtgtgcacccctgagaaagacttcgctgagcacctcctcatcccacgcaccaggggcctcctcagcggctgggcacgcaatggcactgacctgggcaactcgctgaccacgcggcctgtcacactt

SEQ ID NO: 266379 - DNA, 103 bp, Homo sapiens
  chr13:113866200-113866303
  hypo
gtgtatgggagctccggttccactccgccaccagcgtgtgcgtctctcccagcagtgtatgggagctccagttccactccgccaccagcgtgtggtgtcctca

SEQ ID NO: 266380 - DNA, 243 bp, Homo sapiens
  chr13:113884095-113884338
  hypo
ggtttctctctgacgactggaggttgagcctggagcggctctttccagcgctgcagttgaaactcggagaaagactgcctgctgcccgtggggtcgcagccctgaggctgtgcgtcccctgtggaatggcttgctcagcctcccggcctcctgagcacatagcactcatcgtccgtcatctttcggggactgtatacaccaggggttctggggcctttcctcagcagcgttcgcggccacgga

SEQ ID NO: 266381 - DNA, 115 bp, Homo sapiens; identical to SEQ ID NO: 215661
  chr13:113887569-113887684
  hypo

SEQ ID NO: 266382 - DNA, 115 bp, Homo sapiens; identical to SEQ ID NO: 215662
  chr13:113887885-113888000
  hypo

SEQ ID NO: 266383 - DNA, 31 bp, Homo sapiens; identical to SEQ ID NO: 215664
  chr13:113953158-113953189
  hypo

SEQ ID NO: 266384 - DNA, 290 bp, Homo sapiens
  chr13:113980176-113980466
  hypo
aacccggtgtcactccctggcggcccgcccgccccagggcccgagtgaggcgctcacctccacgggcaagatgtccacaaacaggcagatgaaccagcgggacaccagcagcgtccacagcacaccgagacgctccatcagggcccccacagccggcagcttcgcccgcaccagctccccgaggacctcctggtcggtcttcaggcccagcatggccgggctgtagtaatctgccaggcaatgtggagaaaagaccccgagacactcccgtcacctccacaagccccatt

SEQ ID NO: 266385 - DNA, 258 bp, Homo sapiens
  chr13:113983361-113983619
  hypo
cgctttatgtcccccgatccgggtgctctccagggtgtgcgtgacacgtgttgataagcgtctttttctcactcattattcagtcttcggccagtcccatgtacagagcccagctgggggacctaaggtgtacaggggaagacctttcttcctccctggccaccgacagttaaggaaggtataatccacgcataacacactctgcagtgccacggagacattgggagagagcttaaaaattaccgcattggccgggtg

SEQ ID NO: 266386 - DNA, 209 bp, Homo sapiens
  chr13:113984300-113984509
  hypo
tgggagcccgggtgcgtgcatgggagcccaggtgcgtacatggaaacccaggtgcctgcatggaaacccgggtgcgtgcatggaaacccgggtgcgtgcatggaaacccgggtgtgtgcatggaaacccgggtgtgtgcatggaaacccaggagtgtgcatggaaactcaggtgcgtgcatgggagcccaggtgcgtggatggaaaccc

SEQ ID NO: 266387 - DNA, 80 bp, Homo sapiens
  chr13:113985423-113985503
  hypo
cccgggtgtgtgcacgaaagcctaggtgtgtgcatgggaacccgggtgtgtgcatggaaaccggtcgcagctctcctgtg

SEQ ID NO: 266388 - DNA, 285 bp, Homo sapiens
  chr13:113985703-113985988
  hypo
gataccaggaggcacgggctgcagcatgggaggcggcccaggaggagatgccaagaaggcacagcaaggacagccagtgcaggagccacccgggtgcccacccagcagctgcgcacccccactgcccgagccagcctctctgcatctcttttcctgagaagacttcggcgtggcacagcccttacagggcgtgagccttctcagacgcagctcaggttacagcaaggaagctgcaaggctggttttgctgtttggtttacttttttttttttttttttttttttt

SEQ ID NO: 266389 - DNA, 37 bp, Homo sapiens
  chr13:113990086-113990123
  hypo
atgctgctgaaatgacgggattttttttttttctttt

SEQ ID NO: 266390 - DNA, 83 bp, Homo sapiens
  chr13:114002279-114002362
  hypo
cctctgtggccgagagcagacctgggaggacctgtgtggctgagcggacctgggaggacctgtctggccgagtggacccggga

SEQ ID NO: 266391 - DNA, 97 bp, Homo sapiens
  chr13:114003076-114003173
  hypo
aggcctgggacagtccgtccgtcacagcctcagaaagaacccgccccgcagacgccgcgacctcacctgccccgcagatgccgcgacctctgatgca

SEQ ID NO: 266392 - DNA, 346 bp, Homo sapiens
  chr13:114004199-114004545
  hypo
accacccatcgcgacgatgtccttccctgtcctcctagaaacgtttaagccagccacaacccctaggagcccgtgaagcacatggcctaaaatgccaggaacgcactctccaatcccggtggcagccgtgggctccaggctctcagccacggggactcacaggcagtcacgggctgtgcgcacacctggaaaccctcgtggaggccagccctgcccagatgcctgccctgccctcggcgagctcagacagactggaacagcaccaccagcgacaggcccaggcaggacacacaggctgggagactgcacggctcctggttgccctgcattccggcctgttcactcc

SEQ ID NO: 266393 - DNA, 362 bp, Homo sapiens
  chr13:114004970-114005332
  hypo
cggaatgaggtcgtcggctgctgctccctgtcctccctgctgggaaatggcgtccgagcctcaatggggcatcaggacgtggaattcatgaacagggttgacagagacgtgaggccgtcactgccgagcctgcagctgtggacagacctgtcctcacagccacctcatggcgtcagagggtcccgaggctcacctggcagtagcccactccctggttatggtgcccatatgccagcagcacattgtacagggtcctctgtaagcaggggtccgtggtcttccggaacttcacgttgtcggggaaggtccggttcaggtctgtgggaaattcagaaggaatcacccacgggtttctgttccac

SEQ ID NO: 266394 - DNA, 297 bp, Homo sapiens
  chr13:114009498-114009795
  hypo
tcatggaggaagacgtaacttcaagttaaaagcagcaggcgcaccgctcacccctggacgctgaggctagacactgggtggaaaccggttccttccggcccccgggccctgcaccagagctcgacccccaccgcctcacctgtcctgatggcgtcctccagcctggggtttctctctccctggagaagctggtggtagtagccgggattctggtccatctgcgcctgggccccactcagcaccatccagacgcgggcacggtgctccagcgggacccctttccggacatagcgcttc

SEQ ID NO: 266395 - DNA, 84 bp, Homo sapiens
  chr13:114032122-114032206
  hypo
ctggcctttagataaactctttcaaacgactgacaatctgaaaatcacctatgacctgaagcccacccccgcgtccttcaagtt

SEQ ID NO: 266396 - DNA, 867 bp, Homo sapiens
  chr13:114055641-114056508
  hypo
gggcagggactctggaggtccgtgtgcttcgtgagagaggggaccctgtcctcctagcaggggtccagcggcaccacagcaagacttctgtggccaagtacacgccatgctcagctctgcccccacccgcacccccggaccatcctgtgtgcagctgggctgccccgggacccacacgcgcgaggggcacccggtgctcaggagcctccacacacagcagctcgcacttagaacccacacgccaagcagaaacccctcgaagcgggctgggagcacggacccctgatttatagaggaggccccgggggccctgtcgggggagctgtggggaccggccccccagagctcagcacagcccggccctccttccagacaccagcactcgcatgtcccagcaggtgagggtgggtcaaacctgctggatctgaagttaattgttcgactggaaggaaacctgtgcgctccccggagcatgacgccacgccgcctccttggcgctgcagagccaaagccactggcgtctgccgggatggaccttccctggaaggagagacctcagccccgcgtgggtaggacgcgcctgctgaacgccctctcagggccgacactggaaaacaccttcctctaaaggaacatccgagtcagaaaacaggtgctcgcagcaggcaccaaagcgcctttgcgaacgcttagggctgtttcaggaaaccgctcagtagcaaaggcagaagatgccaagacaccttcaaaaagcaggaattaactttccacagggagggcaccaccaaaaacaagggtgcggggctgtagggcgacaggctgcatcggttcacgctgaaaatccagctgctccggggccactcaggc

SEQ ID NO: 266397 - DNA, 59 bp, Homo sapiens
  chr13:114056538-114056597
  hypo
gaggccaccgagtggcctgggacgatggatcgcgacacggaggtgcatggctccatcat

SEQ ID NO: 266398 - DNA, 483 bp, Homo sapiens
  chr13:114059957-114060440
  hypo
ctccgggtggcgggcgagggtcgcaatgtcctctgggtgctggacgagggccacgcctctcaggaggctcctccctgctgctccactcttgggctccaaggatcccccaggggccaggaggccgtggctgtgagggtctcgagggagagcctctcctctggggtggctttcggacaaggctctgcttccccactggcccagcgtctctggctctcccgctgtgcggtctccagggctctgggtgctgcctggcgctggtgcaggcgtggcgcggctcgcaacgctccctgcagctgccatcgccccacaggctttcatacctggtttgggtggttcatttaatgaggacagtgggttctcgcgaacatcatggctggtgatttcctcggcagccttcaggggctgagaagactctattagcagcggccttctgcattcctccagcgcaccgggcactgtcatgcccatcggggtgacaccctc

SEQ ID NO: 266399 - DNA, 220 bp, Homo sapiens
  chr13:114063699-114063919
  hypo
agggatgaggaacaaagactcgagtattacaggaaaagtcgccttcatggtgccgtttataatgttgaaaaatctagagcatcctcgatgtccaactccagggcggccgcacaatggcacgtccacatttgtgggagaagagtcggtggccggatgcggctggtgacgtggtgccaagtgaaaagctcactctaacccgattgtttttaagaagctgagg

SEQ ID NO: 266400 - DNA, 183 bp, Homo sapiens
  chr13:114064570-114064753
  hypo
tcgcccccaaaccccggtgggcatcagtggatcaagaggccttgctgagacccggattttggggccgcaccaccaacgcctctgatccacggtctggggaggggcctgggaatctgcattttaacgagtccctggtgattccgaggccgctggtccggggaccccactcggaaccactgaggc

SEQ ID NO: 266401 - DNA, 150 bp, Homo sapiens
  chr13:114065026-114065176
  hypo
ccagagtcgacaggcgcaccctcaactgcgccgtggggatggggagggcagaggagcaggccgacctcggggttgggggaccagcctgggggcattgtgctccctctgaaggctgcacccccagcgaagggtcagcggccctacctgcct

SEQ ID NO: 266402 - DNA, 710 bp, Homo sapiens
  chr13:114074574-114075284
  hypo
gccagcttttgtttacgatgcttgtggattttgtgtttgtgtgttttaatctataatcagtttgtaaatagactcactttctgattctcacggaggggtttgatttgcggatggagaccgagtccaccctgtttgaatgcagccgcgccctgctcatgcgagctggccttctcttccatacagcagggtggagagggaagcccactttccggtaagcgggcaaaacaggtactacgaccgtgttacttatgctagcaacagttccgacttaccttaattgggtttcttttcctgaaaggtaattctcagttaatttccccacacccacgggtgctgggaccacactccatggacgtgtgtgacgtgaggcccttcgcccccgtgtgcctgtctctctggttcttctgacttaaagcaccagtagcagcacagttagtccagttattcggaagctcagcacggagccacattgctgcagcatagaaggccacggattcctccatcagcatggactacacttcccacaaaacgaacggggcatctctatggaaaaagcaaagcgtgtccctatccctgggacacctctacccctgggacacacctagccccaggacccgcccacccccgggacccgctcaccccgggacaccactacccctgggacatgcccacccctgggacaaccctaccccccccgacacgccctggga

SEQ ID NO: 266403 - DNA, 168 bp, Homo sapiens
  chr13:114077019-114077187
  hypo
gtcaggcacagaccgcagtggagcctcacagagacaccctcacccaggggctgcgagagggccctacgggccccggggtggaatcggctctctagggggaaagtggcagaaatggctttacttctcctctgtggacaggcggtagagagccgcgcccaggtcctccag

SEQ ID NO: 266404 - DNA, 199 bp, Homo sapiens
  chr13:114080529-114080728
  hypo
atcgccttccccgccgtggagccaggaggtgtgcagctgcccagacccgggcccactgccctcctgcctgccttacggtgagcacccctgcccgccacaccccacctcctgctccctggcaccgcgggagccacagagggtgggagccgtgcaggccgctggtggctgtcaggcccaagggacacgtgtgccgatcaca

SEQ ID NO: 266405 - DNA, 241 bp, Homo sapiens
  chr13:114082757-114082998
  hypo
tagacggcaccttccgtggggtggaagaatcttccggaaccgtcacggatttcctagtcccatacctgctgtccctgcctctggccagcctcatggggctcctgagggaagggcccagccctgagctcgcccaaaccggcagaagcagagtttttccagggggcaccacaggtcccactcacatcccagtggctgccagtcgcttggtgccgcgggctggggtggacggggacgggtggac

SEQ ID NO: 266406 - DNA, 175 bp, Homo sapiens; identical to SEQ ID NO: 215672
  chr13:114085572-114085747
  hypo

SEQ ID NO: 266407 - DNA, 772 bp, Homo sapiens
  chr13:114107396-114108168
  hypo
gccacttttagcagcggtatcaggtaacaccatccgctgaaggaccgcactgccttcaaagctctcggaggcttactgggagaactcgagcagccagtgttccctccagcccgcacaccggagcgcggtgggcccagcctacctgtggtgagggcctcggcggttgcgatgtgcatgatggtgttgtcactcacgggccattctcctggcgagagtacgaggtggtccaggcccccggaacgttgcagctcctcctggatcttcatgcctacagtgctgttctccttgcagacatttctgtagccaagagcatcgccgacgctccccagcaacatcgcagccttaaatttctccatcccaggaggcagctcctcttccccaacagctgcggagcgtcctggcctttgtctcctcctcagcccgcctgacttttatagtggtcactgtgtcactgtcaggagcgtcctctgatggccaggcgctccttgtctatctctgcaggtggcaccaatgagaggacctttctgtcccccacgtgggaggtgtcagttttcttctgcgtctggacaggcaccagctcctcagcagaggagcctgctagcttctgccggcagccgcagcacattcagagcgttgacagagcaggggctcctctcgctgtccctggaaggagtgcgcacacttccccgtgtgtggcgtggggtgatgcgggagcagatgtgtgcaggcgtgcctgtcactgccgcccgctgcggggcgtgccctcacccct

SEQ ID NO: 266408 - DNA, 189 bp, Homo sapiens
  chr13:114115107-114115296
  hypo
ccagcctgagaggagcttcccgtgactgccaagaagccacgttctgaggaggccccggagtggccccagctcagccctgcagtctccggcaaggtgacagagccaagtggcaacctgtctggacctgcggatctttgtgtgggatgttcatctgctgaaaacctccacgtgtgagacctgaggtggatg

SEQ ID NO: 266409 - DNA, 586 bp, Homo sapiens
  chr13:114122882-114123468
  hypo
ggactcctgactggtttaaacgcgagacgtgccacgctccatcaacctctccttcagacaagcggcctatgaggacgcagcactaaagggggcgggggagggccctggacaggcggggcggaggcagcacagtgtgtaaccttccctgaatctgcgcataaaagcagatgcagcaattagaaagcaaagccaaacacccagaggcaacatttaccataaatttaggtgagaaagtatcaccacaaacccaagttgtaagctaggggatgagccactgccagcaacaggacccgtgtgttgccgtcatgccggggacgtggggggcacagggcctctgacagatgtgagaacaggagggcctcagaggtgcctacacgccgggaccaggtaaggacgagcctgaagtaggctgtggctgagggcagaggccaccaacagggaagtgcctgggagcagaacaggctgggcgggaaagggacaatggagatggaaaagagagaaaagctgaggaggggggaggagcagtgccagacaatctcagacagcaaagccgacatttctgtctactacacgcctgcacacacac

SEQ ID NO: 266410 - DNA, 206 bp, Homo sapiens
  chr13:114148519-114148725
  hypo
tactttaaactgtaaatctgcgtaagtggtaggtgttggttttgttgccttttttgggatagctacttgtgactggtgatctcctagtggccaaattccacggactctacgtttattactccttccttccacggtctcggtttcccacctctcagctcgttctgccttagtgacctttgctggccgctgtctcatcctgctttctg

SEQ ID NO: 266411 - DNA, 109 bp, Homo sapiens
  chr13:114183220-114183329
  hypo
gttgtcatgctagccggagatgacttctagttaagaggtctgagcattttccacgcacaaccagttattctcaacggagggcggactctccatacgaaacaagcagagc

SEQ ID NO: 266412 - DNA, 60 bp, Homo sapiens; identical to SEQ ID NO: 215676
  chr13:114185957-114186017
  hypo

SEQ ID NO: 266413 - DNA, 118 bp, Homo sapiens
  chr13:114187948-114188066
  hypo
gccttgctgacggtcgctggagttcgtccatcaggcgactgcggtggggcacggagagcaaccgctgcctggcggagactttgatgtgcggctgaggcctggcgaggaattttatcgt

SEQ ID NO: 266414 - DNA, 138 bp, Homo sapiens
  chr13:114188351-114188489
  hypo
tttcccagcattgtcgtggaagttctccgaatcctggttttgattggtcagattcttttttcactagcggcggtttttcttttatgtcttgttataaagaagtatctcattggaccctattatcggaagctgcacatg

SEQ ID NO: 266415 - DNA, 85 bp, Homo sapiens; identical to SEQ ID NO: 215678
  chr13:114188957-114189042
  hypo

SEQ ID NO: 266416 - DNA, 752 bp, Homo sapiens
  chr13:114189671-114190423
  hypo
agtctcagtagtcctgacagcgcacctgggcaccgtcaccattgtcccaacagtgcacctgtgcaccgtcactgttcagcccggcaggtgctcttcctgctgtttatcccagagaaatgaagccgtgttcacacagtagcctgtacacaggtgtttatagcagctttattcgtattagccataaacagtccaaaggtacttcagtgggtaaataaatgttcaacaaactgagctatgtccataccacggaacgccacccagcagtaaaaccaccggcacacacctccgagaactgcgcagagtgggcaggcagcccccaaaggctgcgtactgtgtggttctttttatgtcacatttatgaggcgagaagattctgaagttgaggaaaggctcgtggttcccaggaattgaggatgggcagtctggggaggggctggggatggcactcgctgtcttcgctgtgtctgtatcggcacctgagtgggggtctggggaggggatggggatggcattcgctgtgtttgctgtgtctatatcggcacctgagtcggggtctggggagggactggggatggatggcactcgctgtctttgctgtgtccgtatcagcacctgagtgggatcttgtgctgtaatttggcaagatgttaccattggggaaactaaagggtaatgaggactttgtattactcttaaaactgcaggttaatatataattatctcaaaataaaaagtttccggctgggcgcggt

SEQ ID NO: 266417 - DNA, 139 bp, Homo sapiens; identical to SEQ ID NO: 215682
  chr13:114192725-114192864
  hypo

SEQ ID NO: 266418 - DNA, 191 bp, Homo sapiens
  chr13:114193076-114193267
  hypo
tggccggtgtcagccgtgcgtcatccggaaggctgccataagcctgcgtttcgcagagctgcgctgaggctcccgtgtcgcggccgtccggccggcgcgctgatgtggctgcaaacctgggtatcagatcagccgccgtggacacgccgatgcttctcgctggcttcgtgccctcccggggctgttgcttg

SEQ ID NO: 266419 - DNA, 622 bp, Homo sapiens
  chr13:114202335-114202957
  hypo
ggttggggcgggggcgggggggcttgggcaaggcttattattttctgctaatgaaccgaaaggcttaattttgccttattgttcagtgtggattatttaagaggttttgcgtgtatttggtgccttcgggtgtttggagtgcttctgtgcctttccctacttgacgtgttattcagggaccatcgcagcgtgcctgtggctcgtctgggttctctgtttcgtgtgtgtttaactctgtgtgggtccagtcttcagcagtgacgtaatgaaccgctcttgcagtttctcctggcggcgctggtcctgtctctcattctgccgaggagcagccagtacatcaagtggatcgtctctgcggggcttgcccaggtcagcgagttttcctttgtcctggggagccgggcgcgaagagcgggcgtcatctctcgggaggtgagtggcttccccccgcggagcgcttctcgggcggcacgggctgcactctgggtttgagtcgggtgtggcgaaggcggctcggcagcacagcggggcctgggggcagggtcctcctccaggggggcacgcagaggcctggctgctctctgctcatccagcatgtggcgttttcagaggaaagttgcag

SEQ ID NO: 266420 - DNA, 347 bp, Homo sapiens
  chr13:114203747-114204094
  hypo
ccttatactgagtgtgaccacgctcagcctcttgctcgccccggtgctgtggagagctgcaatcacgaggtgtgtgcccagaccggagagacggtccagcctctgatggctcggagatgatggaccgtggaagggaagcgtctgtggggagtgagcgcttagatggccagcagctgctccttctgggaagctcgcaccttggcaacagaacagccctctagcagagcgtcagtgcagtcgtgttatcccggcttttacagaatattcttgtcctattttagaattttccggagtagtttatttgcagtctgttgattatgtgcagtagacccgggacactgcgtttt

SEQ ID NO: 266421 - DNA, 296 bp, Homo sapiens
  chr13:114204953-114205249
  hypo
aggctgggtgctaacgtggtagaagagcaggagagccaaccactccccagtcccctttgtgtggcagcattgattcacgagggcagattcctcctgacctaaacacctccctgcaggcctcacctcccaacgcttgcagtgcacatcgaggggacagaagcatttgaaccgtagcaggtaccgtattaggctttttcaactgcatgaatttttttaattgacagataaaagtcaacatatttattgtgtacaacatagcaagtactttaagccagggttttcgtatacctgtcagc

SEQ ID NO: 266422 - DNA, 42 bp, Homo sapiens
  chr13:114212469-114212511
  hypo
tttccctggttcccagtgggcgggggaaacataagagtgggc

SEQ ID NO: 266423 - DNA, 31 bp, Homo sapiens
  chr13:114221386-114221417
  hypo
tggtgaacaaatgccgcggccaggcaggtgg

SEQ ID NO: 266424 - DNA, 50 bp, Homo sapiens; identical to SEQ ID NO: 215688
  chr13:114237564-114237614
  hypo

SEQ ID NO: 266425 - DNA, 164 bp, Homo sapiens
  chr13:114240860-114241024
  hypo
ttcccaccgtgcatcgttttgtaactgagtgaaaggtgctgttgatgtgtttacctacttaccgcacagagttggaaagagtccgcacatgctgcctctgcctgagatacatctgtagcgaaaatgcgtccagagtgtggagccctctccgttggcgcagaggt

SEQ ID NO: 266426 - DNA, 42 bp, Homo sapiens; identical to SEQ ID NO: 215689
  chr13:114244325-114244367
  hypo

SEQ ID NO: 266427 - DNA, 145 bp, Homo sapiens; identical to SEQ ID NO: 215690
  chr13:114246191-114246336
  hypo

SEQ ID NO: 266428 - DNA, 850 bp, Homo sapiens; identical to SEQ ID NO: 215691
  chr13:114251689-114252539
  hypo

SEQ ID NO: 266429 - DNA, 85 bp, Homo sapiens
  chr13:114258210-114258295
  hypo
aatatgttaaaaacacgaagctaggccaggcgtggtagcttacacctgcttgagcccaggagttcgagaccagcctgggcagcgt

SEQ ID NO: 266430 - DNA, 244 bp, Homo sapiens
  chr13:114271765-114272009
  hypo
ctcacctgcagaaccgttcacctgcagagcccttcacctgcagaaccgttcacctgcagagcccttcacctgcagaaccattcacctgcagagccgctcacctgcagaacccttcacctgcagagccgctcacctgcagagcccttcacctgcagaacccttcacctgcagagccgctcacctgcagagccgctcacctgcagagccgctcacctgcagagccgctcacctgcagagctgctca

SEQ ID NO: 266431 - DNA, 101 bp, Homo sapiens
  chr13:114281663-114281764
  hypo
ccggcaggagcagcggcctgtgtgagcccctggggagaagcagccccccacccaggcctgtgtcccagaagtcggcatctgtggtcgcagtggcctttcct

SEQ ID NO: 266432 - DNA, 114 bp, Homo sapiens
  chr13:114283432-114283546
  hypo
cagggacagtgctgcggagacacagtgaggggagctgccacgcagggcacgcagaggaaggtgcaggcacccttgcccagcactgcatgggccggatgccgcggggccttccgc

SEQ ID NO: 266433 - DNA, 944 bp, Homo sapiens; identical to SEQ ID NO: 215693
  chr13:114283925-114284869
  hypo

SEQ ID NO: 266434 - DNA, 158 bp, Homo sapiens
  chr13:114285703-114285861
  hypo
ggagaagatgcctgtgactgacaagaggaagatgagccacattcagaaccggtggggtgatgccgtcaccgtgacaaaagcgtccaccgctggacgtttttcctgctccgtcatggctgctcactgtggttaaggaaattcagcagtggctgcggata

SEQ ID NO: 266435 - DNA, 71 bp, Homo sapiens
  chr13:114286281-114286352
  hypo
gctttgtgtctggtgtagtgggtgctctctgaagggctggcagctcttggccaagacggggagaagctggc

SEQ ID NO: 266436 - DNA, 41 bp, Homo sapiens
  chr13:114288213-114288254
  hypo
cagaaaaacataagacggcgcgtctacgatgccttaaacgt

SEQ ID NO: 266437 - DNA, 100 bp, Homo sapiens
  chr13:114290175-114290275
  hypo
tccaggccaactcctcgctgtcacgtggacgcagggagggctgtgaggacccctcgagcacaggggctgcgttcttgtgccgccacgggccacctggctc

SEQ ID NO: 266438 - DNA, 157 bp, Homo sapiens
  chr13:114290658-114290815
  hypo
ggagaataggcctcgatttgcctctcatctcatttacttcagagtttataaattctgtgaggagacactgatgactgggaaccgggaagctgtgtgtggcggtcagcgggtcagccgtcctggctccaccccagtgtgtaccgtctccgctgggaga

SEQ ID NO: 266439 - DNA, 174 bp, Homo sapiens
  chr13:114292581-114292755
  hypo
cagaacgcgtctgcggtctgggcgcaagtagttttcagaacgtgtctgcgatcacagcacacatttttcagaacgcatctgcggtcatggtgcatgtgtttttcagaatgcatctatggtcatagcgcatgtatttttcagaacgtctgccatcacggcgcacgtgtttttcag

SEQ ID NO: 266440 - DNA, 692 bp, Homo sapiens
  chr13:114293925-114294617
  hypo
tttaaacattaggaacgtagtgagctctggttggtggtaggtttttgtggtgctgccagccctctgggttctcagtccccgctgccagattcgacccacgctctggactccatcctgtcctgccccgggctctcttttttcctgttgctggttatgagtgaaagtcccggagggagggatctaatggttttacagtttgttccctctggggcactgctcctgatggaatgatgagtgagggagaggcagcgtgtggctctgctcagcctcctgtttctgtcgttatgggttccaggagacagggccagaagagaaccagacagagatggagtaagtgccagagcgttggcgtgctgtagtgcagacactcagcctccccgttctgtttgtgtgactgacaaaacccacacctgtggggcacagcctgtcatttgaccacaagccctgaggcggggggaggctgggtgggccgcctgcactgacggcgccatccgcctcctgccttgcagtgacctgaccaacggtgcagatgggatgctggccacaagctccaatgggtctcagtacagcggctccagggtggagactccggtgtcctacgtcggggaggacgacgaggaggacgatgacttcaacgagaatgacgaggacgactgacgtcctccccacttcagattcggcttcaggaaaac

SEQ ID NO: 266441 - DNA, 56 bp, Homo sapiens
  chr13:114294962-114295018
  hypo
tgccgcttatttgccgtgagtttggacggcacccctgctggcggatagcaagactc

SEQ ID NO: 266442 - DNA, 150 bp, Homo sapiens; identical to SEQ ID NO: 215696
  chr13:114295752-114295902
  hypo

SEQ ID NO: 266443 - DNA, 42 bp, Homo sapiens
  chr13:114296440-114296482
  hypo
gctcagaaaagacccgagaagaccttacgtttacacctcagg

SEQ ID NO: 266444 - DNA, 250 bp, Homo sapiens
  chr13:114300500-114300750
  hypo
gaaaataaacattggcgaggatgtggagaaggcagagccctgtacacggtggggatgtaaagagccgcagccactatgaaaaaccaaatggctgtttttcacagaattaaaaacagaattaccctatgcccggcaattctgctcagcgtatacacccagagacatttgtacacccatgtctacacgtaccactattcagggtagctaaacagtggaggcacccgaagtgtccatccgtggatgagtggac

SEQ ID NO: 266445 - DNA, 299 bp, Homo sapiens
  chr13:114302306-114302605
  hypo
ggtgtcgcacccgccggccaccgccaccctgcgtcttagacgtcccgccgcagctgtgtttccacctcatctccagcttgagtggcagccagcggcgccacctgcacacgagccccctccattcgagaagcacagactatgagtgtggccacgcgtcccatgacgtgaactcacgtctgcgccgagacctttgccggcggttttttactgacggagtaagcactggagatgcttggtacagcgtcttccatcggtaaattgatttagttaaccttacaacatatctgcaaggtttttaa

SEQ ID NO: 266446 - DNA, 161 bp, Homo sapiens; identical to SEQ ID NO: 215698
  chr13:114302635-114302796
  hypo

SEQ ID NO: 266447 - DNA, 297 bp, Homo sapiens
  chr13:114303498-114303795
  hypo
gaagaactgatactcgcgagcaggtccttcagatgtgggcgcttctctggagttcgcacactgacaacaccgttgctccaaaccactttggggatgatttggcagggaactgacgggcaaggtaagcccaaccaggagggtgtccttgagcgaccccgcaggcgtgcccaggacccctgcgcaaaccgtttcacttctcaatcttgagtttgaactccactttcccttcatacgggtcgtggggattgttgaaggtcacgtgctccgccatgaccttgcacacgatggcgacctcag

SEQ ID NO: 266448 - DNA, 186 bp, Homo sapiens
  chr13:114304566-114304752
  hypo
gggcttgggaaacacgcagaacgttccagtcaggaccggctaagtcacacctttgtttcatttttctacatgaaggggcttattgctttcctttcgctaagtgtgagaggactcagcagctgtggtgagggaagcgtggaaggaaggaacctacctgggctttcttcccgtaataagggaagtagt

SEQ ID NO: 266449 - DNA, 354 bp, Homo sapiens
  chr13:114304782-114305136
  hypo
acttgacctgcagcggctggccgagctcgcggggctggtcctggggaggagaggccactgcctgagtcaggcgggagctggtgtgtgccggtgtctgtgtgttgcgtttgtgtgcgtgtgtgcacacacgcgctgtgtaggtgcttgcataaacactttattgcatacttagcataaatcagatgcaatctttctaatcagtgctgagatctcagcaaggatatgatttgttagcatgcaaaatgcccagtgacccctccgtgtgcctctaacaacttgaaatgttggaaggatgacgcaggtgggtgaagctgggaggcggcttgcttgtctgtactcgagggtagccactgc

SEQ ID NO: 266450 - DNA, 212 bp, Homo sapiens
  chr13:114305732-114305944
  hypo
cgtgctgctgacacgctactcagatgcttctggaagccaaacaataagaaaaagccccattgtttcccttgctgggttttacccgccatggtggagctcgctgtggtgatggttcggtgtttacgtctggtttactgggccgacggctgacattcctggagagaaccaggtgggccgtgcccagcatgaaccagcacgaccctgacaagctc

SEQ ID NO: 266451 - DNA, 292 bp, Homo sapiens
  chr13:114318214-114318506
  hypo
taaacgtgcaattacgacacttttaggcatttaccccagagaaatagaaacttctattcacacaaaggcctacacagatgtttatagcagctttatagctaaacactggaaacgatccagccgtccttcaaccggtgaacggcgaaacggactgtggcactctcctctgtggagcacaccacagagacgaggagggaatggctgacacctgggaacagtgctgagtgagaaatgcaggtcctgaaaggctacatagtgtctgactccattcatgtgacgtgcttagagaagt

SEQ ID NO: 266452 - DNA, 118 bp, Homo sapiens
  chr13:114459436-114459554
  hypo
gcacacgagactcacgtccgtgtatctgcacacatgagtcacggtgtccatgtatctgcacacacgagacggtgtccatgtatctgcacacgagactcacgtccgtgtatctgcacac

SEQ ID NO: 266453 - DNA, 357 bp, Homo sapiens
  chr13:114460623-114460980
  hypo
tggaacagtgtctggtatatcgcggatgtttagtaagtcttgagaggctcactgagtgaacagtgttaattttcatggtttaaaactttatataaatggtaccatactcgctgccgtacttgctgtcgtactcgctgccgtactgtgcacttgcatttttgctccgcgttctgtttttggcatttatccacattgatccatgtagctctcatttattttaactgccatgtggtatttcgctgtatatgcccatttctttatcgcttctccccgtgttggatattcagggtgtgtccggtgctttggacacacagtgttgtgaggaatattctgtacgcatcttctagcacatgcata

SEQ ID NO: 266454 - DNA, 125 bp, Homo sapiens
  chr13:114492851-114492976
  hypo
ggactgaccatgtacgtggatgtcctagtgctgaactgaacaggcacgtggacatcctaacactgaactgaccgggcatgtggacatcctagcgctggactgactgggcacgtggacatcctagc

SEQ ID NO: 266455 - DNA, 203 bp, Homo sapiens
  chr13:114497267-114497470
  hypo
gcgcaggacaggtccgaacagactcaggcttcccctgtccctgtgtagcaccatgtgcccgagccacaggccctccctctgctgttaccgatgggttctgcttgtcactgggacctctttcccgagccgacaactcatccatcgggacggaaccaagcgagatgccaactcggggccacagttttcagcggccattcaggagg

SEQ ID NO: 266456 - DNA, 502 bp, Homo sapiens
  chr13:114497776-114498278
  hypo
caagcatgcacatgtgtgtgcgtgtgatgagcacacattagggttgggcacacgccctgccgtctggggttgcttctcagaggcgcgtgccgagggcccggggatggcaacgcccttccgtgcagaaggcgcctgggtgggtcttgcggaatagacgcgtgaggacgacccgcagggtggagtccggcctggccagggctggaagtcataggacgaaaggtagaggtgagaagaggcagttctgtgaaagaagccccgacctcgagctgggactttgaattggtttgcgtttgaaaaccggggttggtaaaagctgggcacccacacctctccttctgttgcagctggtggcagcgatcgtgtttatcagttttggcgtggtggccgccttctgctgcgccatcgtggacggcgtatttgcagcacagcacattgtgagtacattgtcattgtgtgcacagtcgctttccggggctgaaagagtcgacgtgaaaaaagtaca

SEQ ID NO: 266457 - DNA, 129 bp, Homo sapiens
  chr13:114499940-114500069
  hypo
ctcccacggaggtgcgtcatgggagctttctcagcgggtggctgggtgacttgctattctatggcttccagacggtggtttccactgtgctccaggcgcccgtggccgtggccccgccgaggagcaggg

SEQ ID NO: 266458 - DNA, 263 bp, Homo sapiens
  chr13:114502706-114502969
  hypo
gataatacatttacagtgtccgagaaacttctggatttccctgagccaccgacagcggcagtgtgacctcatttctctttccaggtgagtgagatgcggggagtaatgacccgcgggcggccgccgccttcgccaggaccgtcggagggcacagctctgtgacggcgctctctgtgtgtctcgcacctgccctgtgtggattcctggctttaactaaacgcagcctctcatcctcagcacgcgtgtcagaggaggaggagctg

SEQ ID NO: 266459 - DNA, 176 bp, Homo sapiens
  chr13:114504647-114504823
  hypo
tatgagttcatcggcgtcagcggctgccaggacgtgctgcacctgtaccgcctgctctgggcctctgcagttctgaacgtcctgggcctgttcctgggcatcatcaccgccgccgtcctgggggccttcaaggacatggtgaggccccttggtgggacccccgctgctcactggga

SEQ ID NO: 266460 - DNA, 135 bp, Homo sapiens
  chr13:114508569-114508704
  hypo
tgggtgaaacagaccgggccacgtttcttacctcggcactgtaggcattcagggctggccaaccgctgtgctggggcaccctaggtgctgagggtgctggtgggccctggcctctgcctgcggcatatcagagcc

SEQ ID NO: 266461 - DNA, 104 bp, Homo sapiens
  chr13:114515796-114515900
  hypo
gtgggtcacaggtcccgggtgggtcacaggcatcccgggtgggtcacaggtcccgagtgggtcacaggccccgggtgagtcacaggccccgggtgagtcacggg

SEQ ID NO: 266462 - DNA, 150 bp, Homo sapiens
  chr13:114517613-114517763
  hypo
ctgtctcatgtggacggatcctgtctggggccaccaagctctgccagcctgagtcacggtctgatgaaccccctctctgggctccgctggggccttctgatcccagcctcctctgcagggatgggctcccaatcccgccctcacttggtt

SEQ ID NO: 266463 - DNA, 230 bp, Homo sapiens; identical to SEQ ID NO: 215703
  chr13:114537013-114537243
  hypo

SEQ ID NO: 266464 - DNA, 176 bp, Homo sapiens
  chr13:114551825-114552001
  hypo
ttatcaggaatgaggaaacccggcttcaggatggttgtgggattcacctgggggcatgaaggtcaggattagcaggcgctggtagcattttgcagagtagcagacagaggcggtaggtacccagcgccgtctgcaacgcgcctctggcttcatgcgctggctctgcatggcctttc

SEQ ID NO: 266465 - DNA, 151 bp, Homo sapiens
  chr13:114565257-114565408
  hypo
ctcaactcccatcaccagcacgccccatgccacagtccctgtgcacgcagaatgttccgggtgaggacgctgttggaggacactgcaccagccacacgaccaaccccacagctgggcggcgactccgagcgaccagggcacacaggcccac

SEQ ID NO: 266466 - DNA, 169 bp, Homo sapiens
  chr13:114616942-114617111
  hypo
ggagatgaatcacacgtgagccgacggtggaggaggcattgatcgggagatgattcacacgtgagccaacggtggaggaggcattgatcaggagagattcacacgtgagccgacggtggaggaggcattgatcaggagagattcacgcgtgagccaacagtggaggatg

SEQ ID NO: 266467 - DNA, 189 bp, Homo sapiens; identical to SEQ ID NO: 215706
  chr13:114617343-114617532
  hypo

SEQ ID NO: 266468 - DNA, 229 bp, Homo sapiens
  chr13:114741916-114742145
  hypo
gggagcgccagctcgcagctccgtgtcagcccctcagccctgtgctctgggccagtattcaaggtgtgaggaggtgactgcagcaccatccccaggcccacaccaccgtccgttcggcacacctggaaacatctcagagtggcgagtgtggaccgacacaggggcagcctacacgtttcgcggtttagaagccaaccgtgtcaaacaccagctacgcaggttccttgct

SEQ ID NO: 266469 - DNA, 89 bp, Homo sapiens
  chr13:114747444-114747533
  hypo
tcggtacaaggatacgtcgtgctgtgtatttaaacggcgcttcccacacacctgccgtctgcatcccgggaggacgccctttgggaaag

SEQ ID NO: 266470 - DNA, 915 bp, Homo sapiens
  chr13:114748178-114749093
  hypo
gaatcaaacgaacctcgaaagtggaacagggaggccgcctcccatggctgcctggatggcaggcacagtgggagagtaatgctctgaacctcccaatgtgatgaagccgaaagccgaggcggggccagcaggcctcccgggcacagagccacagagcccagcgtcacacgcaccgtgcacgcaagacagacgtgcacgagactgacgcacacacggccggaggtgcatgtcacagtcgactagacgggccgtggctccctgaggctggctgtggtgtggctagggcacagcccacacttcctgatccttcagctgatccccagatccccacaaacaaggagcaaaaagcacagaatcaaatgacgacacgttccacagggccaggtgggctttctgcggagggcgtggcggtggtggcagcggttctgggagagggaaaccccagcgccacttgtctatgggccgggacggcgtgcatctcactttgccggctctgcgctcttccttctcttctccctcccaaaggctgcggctttgcatgggcagcttgctggcgccactgggcgcgtcccgcagactttaaatggaatgagtggaggtctcggactgctgccggatgtagttctggaagctcttgtctccgatggggtgctccctgaaaagggggatgggagagggaatgaggcacagaccccgttgcctggtgctcacccgtggctgcgggagcttttcctgttcctaaatgtgacacactcacactgcaatccacacaaaaaatagaggagccaaaggaaccacagtgcccccggaagcacccacggtgactctgatgtgtgtgcacaggtgggtcaggcgtgcaagtacatgtgcacgtgtgctctccctgtggcacgtgtgtagcgcatatacatgtgc

SEQ ID NO: 266471 - DNA, 404 bp, Homo sapiens
  chr13:114750986-114751390
  hypo
cgggcggccccacccgggagctccctgcagccccacccccactgcaatctcccgcccactacactggccgtccagggcaggcacgggagtggcactcactggcttccatatttcgtcttcttgaacttgtccctcttatactgggcgtgctcctgctccaaagccccaaccccagcgatgacttgctttagcgtcttgtaggtctcctgggggtcgtcaatgacgaacgtcgaatactcctcctgctccgggccgtcatacacagatttgctcccacaggcctctgtggagggcggaggggtcagcgcagggcaggagcccaggccaccggccccgtctccacacagctgcgtcgctgcaggccccacccacagtacacatccttccaacgcaagctcctccag

SEQ ID NO: 266472 - DNA, 168 bp, Homo sapiens
  chr13:114760878-114761046
  hypo
tgggaggattaaacggtggcccagcatggagcacagctcatcccctgcagggcccttatgcgaaagcatcacgtggccacaacaacagcgaggtgcatctcacggagcataaccagggggaccgccaggcacccaggcctcctccttaggaccggcagatatgaccca

SEQ ID NO: 266473 - DNA, 361 bp, Homo sapiens
  chr13:114764876-114765237
  hypo
tgatgcgagattccgacacaaactcaccagcacctggtgaacaacccgagtaacacgaagactctgagaagcctggagtgcagtgggtggggaagggtgagcccagggccaggtacgggaagagagcagagaaaacctggccaggcctcaacccgaaagagaggcttgggggccccacactcacgtttttcattttgaaagactcctcctccagcttctccactgccaggatgttctcgatgggaatgctgtagagaggctggtcccctgcagcagagatggactgtcagtgggtgcgggccccgctgtcccggctggggtccgggtggggctgaggggtctctgccggggggtctcccag

SEQ ID NO: 266474 - DNA, 229 bp, Homo sapiens
  chr13:114766161-114766390
  hypo
gctctgggtcaccgcggccccgggctctgcccgcagcactgaatccttcctcccctcagctctccccctgaaaaagcagactcagtcccagggcccagcacgctccagcaagagccagggaaagcgaccttgctccttacctttgcttttgtggtaggtaaattcatggttggtcaagcgaaaccatctcttcttaaaattcttcatcccaaagcgcttccgtccttgg

SEQ ID NO: 266475 - DNA, 228 bp, Homo sapiens
  chr13:114767009-114767237
  hypo
ggacctacagccgcgggctcagggtcagggcggacagtggatgcccacacaacacagaggacctacggccacaggctcggggtcagggcgggcagtggatgcccacacaacacggaggacctgcggccgtgggctcggggtcagggcaggcagcggacgctcacacacggaggacctgcggccgcgggctcggggtcagagcgggcagcagacgcccatactcagagg

SEQ ID NO: 266476 - DNA, 455 bp, Homo sapiens
  chr13:114767508-114767963
  hypo
gggccctctgaggctcggccttcattgccgggcaggggtccctgaccagaaccggcggccgagctggaggagaagaaagtggccagacagagtgactggaggacagaggtggaagctgaggacgagaagccaagctggagagacagagtggggaggtgggcgggggagacgcacctcgacaagcgcactcagaaatcggaaagaggggctttgagcagcaacacagccagatgtggccagagagctgtggacgcacaccggagggtgtggaagctgctgggagctgttcaagagagaaaagggcggggcgctgggagccgccaggacagcgcagttcacaaccagtggatgccgaacgccgttcattccagggattcacaggcaggaagtcagcccaggaggctgttgaggaccagcaggacccagtgggatgcgcagggcggggcctacacaga

SEQ ID NO: 266477 - DNA, 77 bp, Homo sapiens
  chr13:114768255-114768332
  hypo
tcggttttctaaccgggcccatcgcgcgtgtgggacggggaggcaggagccacggctaagccggaagcctcaggctg

SEQ ID NO: 266478 - DNA, 328 bp, Homo sapiens
  chr13:114769880-114770208
  hypo
ccaaaggacagggggatagacgtttttcagaagacaaatggccaacaagcatacgatataaagcccagcgtggctcatcacctgaggaatgagagccagagctgcctgtgaccccacctcacgccaggcagaacgaagccacctgcgaccccagctcacgccaggcagaatggagccgcctgaacccagctcacgccgggcagaatggctgggatcaaataaaacacggaaaaatgacagacgctgcagagctgtggaggacgtgagcgcttgcacgctgtggggaatggaaattagcgcttaaggaaacccacggagatttctcaag

SEQ ID NO: 266479 - DNA, 201 bp, Homo sapiens
  chr13:114771036-114771237
  hypo
gagcaaagagccctcgggagcctggagggaaggccagccccaagtgcgggtgtggacaacacggccagtggtacagaaatcacaaggctgctggccagcaagggaggaggctgcccccgactagggaatcttctggaatgtgctgggtgctctggggactgggggcccccatccctttctcccctccggccctgccggatg

SEQ ID NO: 266480 - DNA, 74 bp, Homo sapiens
  chr13:114773207-114773281
  hypo
aagtgagtccttccccgagggctgtggggcctctgctccccactgtgccaccccagccccggcactgccacaga

SEQ ID NO: 266481 - DNA, 281 bp, Homo sapiens
  chr13:114774839-114775120
  hypo
tcggagggtgagtcgatacttacgttcttcaccgcatcagcatatttctgctcattgaagaattcataaaatgtagccatgtaggactccttaaaactcgcctaaaatgaaacggagatcactcgaggacagcccgaagtacctcggctcacggcccaaatctgaaaaagctagaggcaagaactgtccaagcctaaatgacgataaacaggcaaagaacccggtgttaccgggcaagtgagagcccgcagggctgcccggaggacgaatcacataaatcg

SEQ ID NO: 266482 - DNA, 69 bp, Homo sapiens
  chr13:114776260-114776329
  hypo
ggggaggagggggccgcgaggggagtagggggctgcgtgacgaggagcctccagcaccgcaacgcccag

SEQ ID NO: 266483 - DNA, 163 bp, Homo sapiens
  chr13:114776887-114777050
  hypo
ggcgtcccacagtctcaggagctgctgagaccatcccgcaggcaacatccgacggcaccgcggtgacccactctctcggcccagcgtgcagggtgcatctcaaagtcgaaagcatcaggtggggtcatggctctggggcgctgagtctcggggtgctgagtct

SEQ ID NO: 266484 - DNA, 146 bp, Homo sapiens
  chr13:114777572-114777718
  hypo
tgttgactcaatacacggatgatacgccgatcatcaatactccatatgtgatgggcaggggaggagagcagggcggtgaccagcagctaaaaccctggacaaaccgtccactgcttttgtgacactgtctcgactcccccagaacg

SEQ ID NO: 266485 - DNA, 125 bp, Homo sapiens
  chr13:114778697-114778822
  hypo
ctgcagtgtacctgacgtccgggtcatctgcgggagagagaagcagggtgaccgttttcctcgggcacaatggcctcgtggggacaccatgccccggccccctgagggtccgcagggaagtccag

SEQ ID NO: 266486 - DNA, 107 bp, Homo sapiens
  chr13:114779901-114780008
  hypo
cacagaagcgtggacggctctgcaggaccatggccaccccggggtgtctgcagctgtcccgaggccacaggacacgcaaggaagagaggagccggcagcaaggccct

SEQ ID NO: 266487 - DNA, 527 bp, Homo sapiens
  chr13:114780556-114781083
  hypo
ggaactggggttcacgaccccgcagttctagtctagccagggctgcggggggttctgcctgggtgggagtcaccctgcacagcgctatggcagtttctcagcaacatgagggtgttcagggcactcaccctggaagcgcttggccgccgcctcccggagggagaagaagatgtcacacatgacggtcgggcagctcaccccagactcagtgatggcgtggaagacgcggtccacatactgccgtaggttctcctgcaacgggacacggcactgggacccactcccgaggctgcccacaggtgcgtgtagcaccagggcacgcccagggaggggcgcgtggggaggggctgagggcgggcgcagggcagctgcggcagtgagacacgtgtgaacagccactccctggaaatctgtgctgggagctgtggcaattcacgcgtgaaaatcactacacaggcaccacgtcggctccccggctcggccccgacctcgtttactgagtggggaatggacgttcactagaatgt

SEQ ID NO: 266488 - DNA, 55 bp, Homo sapiens
  chr13:114781425-114781480
  hypo
gaggaagagctggccgggaccccccaggggacgcagagcccggcacacaggccag

SEQ ID NO: 266489 - DNA, 42 bp, Homo sapiens
  chr13:114786709-114786751
  hypo
aaactcatcaagccagagctcgtcagagctacatgcaaagta

SEQ ID NO: 266490 - DNA, 243 bp, Homo sapiens
  chr13:114789849-114790092
  hypo
gaaagcgctgagaccgcggtgccaccaggcgggggtatatgcggacctaggccccgggctgccctaccctctgcgcttacccacacaccactcaagggccacaaccaggaaggcgccaggcgggattcgggattcaggcctggcttcctgagtgccagcatttcctactcacggcgcccctggaggggcagacccaggtgagacctgccccaaggctgttcacggccacggccggactctccc

SEQ ID NO: 266491 - DNA, 144 bp, Homo sapiens; identical to SEQ ID NO: 215715
  chr13:114791748-114791892
  hypo

SEQ ID NO: 266492 - DNA, 153 bp, Homo sapiens; identical to SEQ ID NO: 215716
  chr13:114799638-114799791
  hypo

SEQ ID NO: 266493 - DNA, 103 bp, Homo sapiens
  chr13:114802592-114802695
  hypo
gtacgcagcctcgggcgttaattatgagattccaccagctgtgagatcaacctgcggcattcttatttacagctttgtggagatgcaacgtctgagtcctgat

SEQ ID NO: 266494 - DNA, 48 bp, Homo sapiens
  chr13:114804554-114804602
  hypo
cgttggcaacaatccgatgagggagctggctccgagcctggcggcctg

SEQ ID NO: 266495 - DNA, 65 bp, Homo sapiens
  chr13:114804861-114804926
  hypo
ggaagccctcccgcgtcccaagggcgctgtgccacaaccctacactcagacgctcactgcggtcc

SEQ ID NO: 266496 - DNA, 204 bp, Homo sapiens
  chr13:114805211-114805415
  hypo
gggcaccgtgcgtccgtgagcagctgtgaacacaagggtctgggacatgggccccagcactggagcccccggtcttgcgtggggaggtgggacaagctccccccactggacaggaccggggtgagccccagtcagcacacagtcccggcaagccagggtgagcccctggccactttcgacaatggacacgggagaccagaacgc

SEQ ID NO: 266497 - DNA, 43 bp, Homo sapiens; identical to SEQ ID NO: 215717
  chr13:114807147-114807190
  hypo

SEQ ID NO: 266498 - DNA, 424 bp, Homo sapiens
  chr13:114807529-114807953
  hypo
atttgtacaatatacgtttacctagtatggatttatatgtgtaaattcgcatctgcaaccattattatctgcttatacgttcacctcattccagaaacattcccgaggcgcggcaaacgtgtgcccatcccatccccggcaggacagggcttgtcaggcgctgggcaccgagccatctcccatcctgcgtcccttcatggcaccaccatgtcaaccctgccagtggcctccgcacactgcggaccacgccacccaccacggtgagcacccacggcagcacatgcacctctgttgaccgatgcacgtgaactcctagggagtcgcacacacatgtgaagtctgagcccatcacagagcacacacgagagcaggagtgaggaaggaaatgttggcagactcctcacgtcttcgttctgcacccaga

SEQ ID NO: 266499 - DNA, 34 bp, Homo sapiens
  chr13:114812023-114812057
  hypo
taatttccgagtcacggggttgttcctatggaaa

SEQ ID NO: 266500 - DNA, 273 bp, Homo sapiens
  chr13:114812177-114812450
  hypo
ggtgtccgagccctgccttcagagtccagtcccgcctcctacctcagatggaagagaatacagaggccacaaacagacccacacaatgcagccaactaagctgtaaatgtgccaaagtcatcaacggaggaagggtcgtctttcagccaagggtgccggaacaaagggatgtctacatggaaaaaacagaatcccgacccttttctttgtgctataagtgaaaattagcttgaaacagatcatggaactaaatgtgaacgctgaaagcacatg

SEQ ID NO: 266501 - DNA, 228 bp, Homo sapiens
  chr13:114841890-114842118
  hypo
ccaggcctcaggtcggtcatcccatgtcagaagacaggctttccgaaggctcccaccgatgtgaagatcccacacgcagcacacgcacacacgcagcgcacacacgcagcacacgcacgcaggcagcaccgcacacacacgcagcacacgcaggcagcacacgcacacacacgcggcacacgcaggcagggtgtgtgatgagttcacaggcacgaaggggagaacatg

SEQ ID NO: 266502 - DNA, 90 bp, Homo sapiens
  chr13:114846580-114846670
  hypo
cgtggcagagggccgtccacccaaaacgcaacagtaccccagttacacgctcctggtgcaaatgaccctcctctcgtgcttggtgcaaag

SEQ ID NO: 266503 - DNA, 319 bp, Homo sapiens
  chr13:114847025-114847344
  hypo
atcctgagaaacacgactccaaaccctgtcagctggttctaactgtgctcactcttataaacaggtaataaaatatgggaaagaaggcgattgcagacaggggacctctcctccacagagacgtgtccaccaggagactgaggcaaatcctatgggttcaaaaccgaagtttcactggcggctgaaaacacccagggaataacgaggaaagagaaggcaaaggtgggctgaaatgaagccgcccttctgagttcacaaaggagcagagacacaccggtgctgcacaggaacccccagggcccccgtgttcctagcgcag

SEQ ID NO: 266504 - DNA, 270 bp, Homo sapiens
  chr13:114855474-114855744
  hypo
tgatatttcatgtcacggatggaacgcattctgtgtatttgttaatcactgatggatgtttgggctgttcccagctttcagttgttgtgaatggtgccgctgtgaagtgtgcacaagttcccatgtgaacacggacagctttgggattctcttgattatttaccaacgggtggggccgcacggcaacaggtttaattaccctaggagccacccggctgcctgcccagggccgtgccttcacacctgcctgcaaagcgcaagcgttaccat

SEQ ID NO: 266505 - DNA, 69 bp, Homo sapiens
  chr13:114861675-114861744
  hypo
tgggaagggagtgcgcaggcccaccccggcgtgctgcctgggagtccacgttctcgaaaatgcagggtg

SEQ ID NO: 266506 - DNA, 861 bp, Homo sapiens
  chr13:114867637-114868498
  hypo
agtgccagaaaacagagagacgggggctgtgaagcacaggatccacagcgggcgggtggtaggcgggcagcaggtgggcggtaggcgggcagtgggcaggcagcgggctgagaagcagagcagagccccagccaggagcccagagggcggcagagcagcgggcaccgaaccagactgtcggacctgtgctgggggagagcgagagtgaaggaggaagagagacggagacagagagacggtgagagggagagggacagagagggagtgagagcgcttcccacaagaagaaccaagctcaggtcccaccctcccccagagcctggtgcagctgcgtgggacgggcaggaggtgcgaggggccctgtctctgacgttttgtgccagcactgccctctacacacaaactctcaggaaccatcacgaccccattttgcaggagaagatgctgaggcccagggcggtgagcaggccacatggccggtggcaggggcagaagtgggactgcagcccaccaggtggtgtcacagccaaggctgcggcgtcactgcctgtcctgcctcacctacccccagggcgacgctcccgactaaaccacctctgtcctatggtctccggggcttcctgacccctggggagggcggcaaagcctgtggaggctggagtcctgtgggctggggacgacgggaagaccaagtcgtctgtataatcgccgtgggcgcagccggcagtgccacccacccacccacaaggcaacacggggcctgagtccagccccaggcaggtgggctcccagagttggggtccctgaaccaaaccacccctgctgctcgctcacccctaagagtgaggctgcgatgctgtc

SEQ ID NO: 266507 - DNA, 171 bp, Homo sapiens
  chr13:114868528-114868699
  hypo
tgcagccggccccagggggagaaatgcagctgtggctgtcgtggaggtggctgtggccaatggccgtgactgttgctgtgtctggcagagaagccaggtgcactggctctgtgcttcaaggagacctagagggtctcccccaagtccaccggaaatgtgtgcacattcgcc

SEQ ID NO: 266508 - DNA, 84 bp, Homo sapiens; identical to SEQ ID NO: 215722
  chr13:114869700-114869784
  hypo

SEQ ID NO: 266509 - DNA, 70 bp, Homo sapiens; identical to SEQ ID NO: 215723
  chr13:114881847-114881917
  hypo

SEQ ID NO: 266510 - DNA, 159 bp, Homo sapiens
  chr13:114887173-114887332
  hypo
tagccctgaggacgcgggcggccagaccagtccctgagtgcggcaccatggccgtgtgagtttatggcccattgcgctagccctgtacagtgaatgagatactagttgtttacagctgtgagcatacacaggccccccgccacacgctcaggaaggagc

SEQ ID NO: 266511 - DNA, 229 bp, Homo sapiens
  chr13:114917488-114917717
  hypo
ctgaagaagaggcataaaaccgccttgaggaacggcatcgtctgtgctgaagcaggcagcgcccagctgacgactgtcaatgcagccctagcaaacacggccacgctgccctccatccagggtcctgtccagtgctgtgctaagcacttcacgtggtgacagctagctgcacaccaggcacggtcaggtgcttagcgtttattaagtcgttcaattcttctgtaacccc

SEQ ID NO: 266512 - DNA, 244 bp, Homo sapiens
  chr13:114961696-114961940
  hypo
ggcttcctccaggggatactcggattccaaatctaagcacgagcctctttcagaacttcaggccgtgtgctgacatggaatccctggtgccacgaaagaccccagagcagcacaatctgagctcactctgtttccaatactgcgcccaggtaacgctgcctcctcatgccacaggtccagagcgcccagccgctggtagacacccgcgccccgctgacgttccgccatctccacctgaaactca

SEQ ID NO: 266513 - DNA, 41 bp, Homo sapiens
  chr13:114989885-114989926
  hypo
tggagcctgagatgccggcatcgggccgggaggagctgggc

SEQ ID NO: 266514 - DNA, 98 bp, Homo sapiens
  chr13:115024217-115024315
  hypo
tttcccctggcagccgcggttcaatatttgctaactcagtgtacacagtgactttatagaacataaatactgtggttgggtgcggtggctcccgtctg

SEQ ID NO: 266515 - DNA, 89 bp, Homo sapiens
  chr13:115025097-115025186
  hypo
ctctagctttgaaacgtgagaggcatcagaatagattgggtgattatttgaagctaggaatagtcattgggtcacggaaacaattgggc

SEQ ID NO: 266516 - DNA, 247 bp, Homo sapiens; identical to SEQ ID NO: 215726
  chr13:115052295-115052542
  hypo

SEQ ID NO: 266517 - DNA, 35 bp, Homo sapiens
  chr14:20707550-20707585
  hypo
gtacatgaaagagctggtttcggccgggcgcggtg

SEQ ID NO: 266518 - DNA, 33 bp, Homo sapiens
  chr14:21253764-21253797
  hypo
ccgtgcttggccgatttttacttttttaggggg

SEQ ID NO: 266519 - DNA, 42 bp, Homo sapiens
  chr14:21304102-21304144
  hypo
ataaaaagaacgatcgtcaccgctgcctttttcattcctgga

SEQ ID NO: 266520 - DNA, 240 bp, Homo sapiens; identical to SEQ ID NO: 215728
  chr14:21304264-21304504
  hypo

SEQ ID NO: 266521 - DNA, 274 bp, Homo sapiens
  chr14:21464749-21465023
  hypo
ctcatcgctggccccgtatcactcagcctgtccttaaacggcctcgccatgtgcattgtcacttgtgctgtccagatgggcacatgcagcatgctgtgctcacagcccgccggcacggcaggtatggggggtgtgaccaaaatcagtgggatgtggcaggaagctgcagcccacgccagcatctgtttccacagggatttgtatcgttgtgcccgtgtcagctcctggggagatcttttacctgtgcttactccgtctgcgtttcctccatcta

SEQ ID NO: 266522 - DNA, 32 bp, Homo sapiens
  chr14:21549738-21549770
  hypo
tgcactggccctgcggcgggccccagagccca

SEQ ID NO: 266523 - DNA, 555 bp, Homo sapiens; identical to SEQ ID NO: 215729
  chr14:21560014-21560569
  hypo

SEQ ID NO: 266524 - DNA, 33 bp, Homo sapiens
  chr14:21657870-21657903
  hypo
ttaaaagctttcccactggccgggcgcggtggc

SEQ ID NO: 266525 - DNA, 41 bp, Homo sapiens; identical to SEQ ID NO: 215730
  chr14:21688656-21688697
  hypo

SEQ ID NO: 266526 - DNA, 120 bp, Homo sapiens; identical to SEQ ID NO: 215731
  chr14:21689077-21689197
  hypo

SEQ ID NO: 266527 - DNA, 82 bp, Homo sapiens
  chr14:21752061-21752143
  hypo
ttataaacgtgagccaccgtgcctggcctgagatttacttgtaatcctaggtctaacatgcgaaagtacttaaactttgggg

SEQ ID NO: 266528 - DNA, 38 bp, Homo sapiens
  chr14:21789024-21789062
  hypo
gctgggattacaggcacgtgccactgtgccctgcttga

SEQ ID NO: 266529 - DNA, 112 bp, Homo sapiens
  chr14:21943010-21943122
  hypo
attttgtactctcaccgtatcccagatttgcagtttgatttgttttccatcaatgttgaccatacgagctccaaactccacacctgtcggtaaagaccgagagaaagaatgt

SEQ ID NO: 266530 - DNA, 104 bp, Homo sapiens
  chr14:21969879-21969983
  hypo
gcttgcgacagggtcgatcagcatcactggctttcatgcactcctccttggttccatagtcacagaattcttgcacttgggcccgacctcgagagcgaaatttt

SEQ ID NO: 266531 - DNA, 72 bp, Homo sapiens
  chr14:21971445-21971517
  hypo
agaccagagactaacgaactggcaaaggcagctactgtagtcgagtcctgttctgcacgccgcttctgccct

SEQ ID NO: 266532 - DNA, 266 bp, Homo sapiens
  chr14:21980069-21980335
  hypo
cacccggccatagtacagatttttaagatgaaggatcactagttccttttgacagtttggtactaacataccttttccactgaaggtggtgttggtttgtttccatgcgttcatttacaaaaaaataaaaaaataaaaaacacaacggtggtccccaatctgaggtgaggagggggcggtggtgggtgcgggcatgcttctttgtgttgacgaggcgtggggaagtggggagggctgatgaaggaaaaatccgagaggtcttcaaa

SEQ ID NO: 266533 - DNA, 35 bp, Homo sapiens
  chr14:22763726-22763761
  hypo
cttaagaaaatcactggggtcggcccggcgcagtg

SEQ ID NO: 266534 - DNA, 120 bp, Homo sapiens
  chr14:23183246-23183366
  hypo
actcccaatatcgcaggtggggaaaacaccccgcctgtgatattgttcttaatatccattaagggagcagatgatattactcccaaaattgcagtgagtgtacacccaccctgtaatatt

SEQ ID NO: 266535 - DNA, 59 bp, Homo sapiens
  chr14:23311696-23311755
  hypo
tgccacaccactgcgcttccgcgaggtgccctatgcctacatccgtgagggccatgaga

SEQ ID NO: 266536 - DNA, 250 bp, Homo sapiens
  chr14:23315014-23315264
  hypo
atgggctgcccatcgggaggccggccggatgaggggactgaggaggagacggaggtgatcatcattgaggtggacgaggagggcggcggggcggtgagcgcggctgccgtggtgctgcccgtgctgctgctgctcctggtgctggcggtgggccttgcagtcttcttcttcagacgccatgggacccccaggcgactgctctactgccagcgttccctgctggacaaggtctgacgcccaccgccggccc

SEQ ID NO: 266537 - DNA, 90 bp, Homo sapiens
  chr14:23323996-23324086
  hypo
ggtgcggtggctcacgagctcgtgcctctaatcccagcactgtggaaggccaatcatgaggtcaagagatcgagaccatcctggccaaca

SEQ ID NO: 266538 - DNA, 63 bp, Homo sapiens
  chr14:23400229-23400292
  hypo
aggaaaggaaagtcggaaaaaccaaagcatttaaaaaatgcaccatgaaggccaggctgggca

SEQ ID NO: 266539 - DNA, 328 bp, Homo sapiens
  chr14:23426912-23427240
  hypo
ctcgtttagttcttaaagcgtcctgtgagaaagtcaccattatactcattttacagagggggagaactgaggcacaaagggttaagttcgaggtcgccatttggggggtctaaacctgtcccaatagctctcggaaggaaccttcccagacctgccacccaagccgcgtcctgcgagtctcctcactaaggcctggctctgaggcgctgccgcccagcccagcccagcccagcccagcccatgccgggcaccatacagtgcttcctcagggtcaccttcctctcgaattcccaccacagactccctattagcgcgcattcctcattcg

SEQ ID NO: 266540 - DNA, 120 bp, Homo sapiens; identical to SEQ ID NO: 215732
  chr14:23470948-23471068
  hypo

SEQ ID NO: 266541 - DNA, 448 bp, Homo sapiens
  chr14:23511622-23512070
  hypo
tgcagctgacacgcgttcctcctgtggcagctatgtggcgtgtccagcctcatgcaaggtcatccctgtgcaccagcacctcctgggtaccacctctggcacctctgccgactgtgctacctggtatcgggtattacagcgggagctgcggcttcgggaactgagggagggtcagctgcccagtgtggccagtgctgccaagctcttgtcagccatgatgtctcaataccggggactggatctctgtgtggccactgccctctgcggctgggaccgctctggccctgagctcttctacgtctatagcgacggcacccgcctgcagggggacatcttctctgtgggctctggatctccctatgcctacggcgtgctagaccgtggctatcgctacgacatgagcacccaggaagcctacgccctggctcgctgcgccgtggcccacgcc

SEQ ID NO: 266542 - DNA, 33 bp, Homo sapiens
  chr14:23517722-23517755
  hypo
gcagggccgggagcgggcggcctgtctccatgt

SEQ ID NO: 266543 - DNA, 104 bp, Homo sapiens; identical to SEQ ID NO: 215733
  chr14:23518259-23518363
  hypo

SEQ ID NO: 266544 - DNA, 98 bp, Homo sapiens
  chr14:23528347-23528445
  hypo
ttttcccagctagcggcgcccaccccggtcccgcacaggtgtgctccgactccggcttctgctgtggcgcttggtgtccctgcgatccctttccctgc

SEQ ID NO: 266545 - DNA, 88 bp, Homo sapiens
  chr14:23530469-23530557
  hypo
actagtgggtatgcgtaccccatagctaagtacctacctttcttctcactcttcttttctttagacttcgcacgttccttgcggcggc

SEQ ID NO: 266546 - DNA, 41 bp, Homo sapiens
  chr14:23537841-23537882
  hypo
agggttatattttacgggcggattaccgtacatgaggtact

SEQ ID NO: 266547 - DNA, 86 bp, Homo sapiens
  chr14:23559266-23559352
  hypo
tccctcaggatggatcatctcgtcctccgactcagctgaagcttctgcaaagtacagatcgggtcggggcagggagggagtgaagg

SEQ ID NO: 266548 - DNA, 43 bp, Homo sapiens
  chr14:23577685-23577728
  hypo
agacgctccccacctcccagacggacacccatctcttaaaaaa

SEQ ID NO: 266549 - DNA, 91 bp, Homo sapiens
  chr14:23706639-23706730
  hypo
aaaatttctgaataaaggttgactttttttaattgaaatttgttagttctcaattaatatcacactgttctttgtccgcatcatttttaaa

SEQ ID NO: 266550 - DNA, 138 bp, Homo sapiens
  chr14:23707517-23707655
  hypo
gaacaaataggacaacgaagctcgtggcactgtgggatgcgtttgcgttgagctgtttattcagtacattttttatcgtaaatcttacgaagtttgtatccctcagcggttacacacacacacacatcctacgaaaag

SEQ ID NO: 266551 - DNA, 45 bp, Homo sapiens; identical to SEQ ID NO: 215734
  chr14:23719831-23719876
  hypo

SEQ ID NO: 266552 - DNA, 154 bp, Homo sapiens; identical to SEQ ID NO: 215735
  chr14:23757712-23757866
  hypo

SEQ ID NO: 266553 - DNA, 326 bp, Homo sapiens
  chr14:23776954-23777280
  hypo
cttgcctcttatagccgcccggatggcgaccccagcctcggccccagacacacgggctctggtggcagactttgtaggttataagctgaggcagaagggttatgtctgtggagctggccccggggagggcccagcagctgacccgctgcaccaagccatgcgggcagctggagatgagttcgagacccgcttccggcgcaccttctctgatctggcggctcagctgcatgtgaccccaggctcagcccaacaacgcttcacccaggtctccgatgaactttttcaagggggccccaactggggccgccttgtagccttctttgtct

SEQ ID NO: 266554 - DNA, 94 bp, Homo sapiens; identical to SEQ ID NO: 215738
  chr14:23793466-23793560
  hypo

SEQ ID NO: 266555 - DNA, 148 bp, Homo sapiens; identical to SEQ ID NO: 215739
  chr14:23815819-23815967
  hypo

SEQ ID NO: 266556 - DNA, 145 bp, Homo sapiens
  chr14:23853628-23853773
  hypo
tggtgtctggcgtccgccgcacctggtaggtgagctccttgatgcgccgctcgctcttcctcatgcccttcaccgactctgcgttgcgcttctgctcggcctccagctcaccctccagctcccgcacccgcgcttccagcttctg

SEQ ID NO: 266557 - DNA, 226 bp, Homo sapiens
  chr14:23884171-23884397
  hypo
agggctctgcctggagtcaccgcccgtcgcacctggtaggtgagctccttgatgcgccgctcgctcttcctcatgcccttcaccgactctgcgttgcgcttctgctcggcctccagctcattctccagctcccgcacccgcgcttccagcttctgcagctgcttcttgccgcccttgagggcgatctgctcggcttcgtccagccggtgctgcaggtccttaatgg

SEQ ID NO: 266558 - DNA, 146 bp, Homo sapiens
  chr14:23938090-23938236
  hypo
gacctgtgtgaccgcggtaagtcatgtaaatatgaaccgttccccaatttgtaaaacgtattcttttcatgtccccaaactggtaggagcgaagagtgtcggggcgttattggagccgtttctcagcgctccacagtgcacaccaa

SEQ ID NO: 266559 - DNA, 487 bp, Homo sapiens
  chr14:23982411-23982898
  hypo
ctccattctcccagctccatcggctgccaacctagggccatcgtctgcctccatcacccctccgcccgcccgcctacccacccaatcccaaacgggtgctggatcaggtgctgaatccggctgcctcctcgggtaccagtcactgtgcattgctgtgtgtctgccaccgctgcctggcactcatggggccgtgtgtgtgtgtatgtgtgtgtgcgcgcatgtacatgtacgcataagcgtgtgctgtatgtgagcctcctgggcatgggtgggggttggcattgcggttgccaatctagtgtacaaccagaaggacagagggatggagtggaagaaggaggggagaggcttggggtctgggaggggagaagagggtgcatgagttgcttcatgctgcctgcttacaggcattggcattgtagctgccacccttgtgcccacggagatgggaggaggcgagtggagggcgcagcggcaggagtcctgt

SEQ ID NO: 266560 - DNA, 63 bp, Homo sapiens
  chr14:24081962-24082025
  hypo
gaagtggtcagatgagagagcgcggcggagatggagagaagcggagaacttgatgcatatttt

SEQ ID NO: 266561 - DNA, 46 bp, Homo sapiens
  chr14:24108494-24108540
  hypo
aggggctgagtgtggcgggcattgtgtgccacgtggggaaggctga

SEQ ID NO: 266562 - DNA, 116 bp, Homo sapiens
  chr14:24427534-24427650
  hypo
acccctctgtgtgccaaatccggagcacaaagttgaccgagggcccgtgtactgcaacttgcccaaggcatcaaaattgccagttccgggcaaacggaaagtctggtttcagggtg

SEQ ID NO: 266563 - DNA, 38 bp, Homo sapiens
  chr14:24542844-24542882
  hypo
aaatgataccttcctcggctctacggagtgcaccttgg

SEQ ID NO: 266564 - DNA, 97 bp, Homo sapiens; identical to SEQ ID NO: 215741
  chr14:24629478-24629575
  hypo

SEQ ID NO: 266565 - DNA, 94 bp, Homo sapiens
  chr14:24722549-24722643
  hypo
ttgaaggagagaagtcgcttgcccaagggcatatagccagtaagtgctagagctgaacccgtatcattaggattccaaaacttcgcttgtgtgt

SEQ ID NO: 266566 - DNA, 502 bp, Homo sapiens
  chr14:24731055-24731557
  hypo
agcaagtccacaccgttcactactagcatgccctctgcaaggacacagctccgtgtcagtgaagccccatgaggagcccaggcccttatcattagcttcctatcccccccagaaatgccaggctgagtctctggtcccattaaagccttttagctctcagctgaggaggacagaccggcctcacctcggatggtgccatctccagctgcattgacaccgctgccccgggatacaggccggcgggagtctgagccccgggagccaggtcttcgagtgccagagctggaccctcgacccctggagtcagagggttcaggtccccagtcgtcatctgccgcatttcggcatgaacagcagccacagcagcgagcccagaaggaacggcctcctcctctgcgagagcgtccgtctggctctggctctggctctggagatggcgtggtagggggctgcaaggggttgccaccccaacggcccacatcggaacgtggcccatccatca

SEQ ID NO: 266567 - DNA, 53 bp, Homo sapiens; identical to SEQ ID NO: 215744
  chr14:24733719-24733772
  hypo

SEQ ID NO: 266568 - DNA, 62 bp, Homo sapiens
  chr14:24839212-24839274
  hypo
tgaggcggcctcccgctttggcctgggctccccgctgccctcgccccgggcctcccctcggc

SEQ ID NO: 266569 - DNA, 31 bp, Homo sapiens
  chr14:24859466-24859497
  hypo
gtgctgggattacaggcgtgagcccccgccc

SEQ ID NO: 266570 - DNA, 109 bp, Homo sapiens
  chr14:25113297-25113406
  hypo
gtggatagccagagcgcgaacttgcctgactcagccccgacctggtttgcctttttacccaccctggtagcttaacacaaaggacagaaactttcgggagtgttatgga

SEQ ID NO: 266571 - DNA, 70 bp, Homo sapiens
  chr14:26802501-26802571
  hypo
ttctctaaaatatgctcccccgaaacctgtacatggttcactctcgtacgaacttcaggtcattgcttaa

SEQ ID NO: 266572 - DNA, 37 bp, Homo sapiens
  chr14:30790494-30790531
  hypo
gggctcctgcttccccgactcacgttcaacccctgca

SEQ ID NO: 266573 - DNA, 100 bp, Homo sapiens
  chr14:31027393-31027493
  hypo
aggcgtgagccaccgcgcccggccctcaaactgtatttttgacaaaggctaaaggtatgctgtcatggtttggtttgtactgatccgtttaggtaattca

SEQ ID NO: 266574 - DNA, 84 bp, Homo sapiens
  chr14:31035127-31035211
  hypo
aagtgctggattacagacgtgagccaccacacctggccaacttcattcttatttacatggctgtctggtcgtcccaggaccatt

SEQ ID NO: 266575 - DNA, 32 bp, Homo sapiens
  chr14:31079528-31079560
  hypo
aaacagaatatggccgggcgcagtgggtcacg

SEQ ID NO: 266576 - DNA, 48 bp, Homo sapiens; identical to SEQ ID NO: 215746
  chr14:31456398-31456446
  hypo

SEQ ID NO: 266577 - DNA, 100 bp, Homo sapiens; identical to SEQ ID NO: 215747
  chr14:31456881-31456981
  hypo

SEQ ID NO: 266578 - DNA, 61 bp, Homo sapiens; identical to SEQ ID NO: 215748
  chr14:31478679-31478740
  hypo

SEQ ID NO: 266579 - DNA, 205 bp, Homo sapiens; identical to SEQ ID NO: 215749
  chr14:31484306-31484511
  hypo

SEQ ID NO: 266580 - DNA, 36 bp, Homo sapiens
  chr14:31527415-31527451
  hypo
atgaaccacctcgcctggccccgtattctactctga

SEQ ID NO: 266581 - DNA, 120 bp, Homo sapiens
  chr14:31542683-31542803
  hypo
agactccgtctcagaaaaaaaaaaaaccctcttatttgttttctcccaattatgagcttttgctatctgacttgccccctcttttcttcttccctctgctttctttttttattttttatt

SEQ ID NO: 266582 - DNA, 41 bp, Homo sapiens; identical to SEQ ID NO: 215750
  chr14:31629124-31629165
  hypo

SEQ ID NO: 266583 - DNA, 91 bp, Homo sapiens
  chr14:31632735-31632826
  hypo
gagtttgaagttgccgtaagctatgagcactccactatactccagcctgtgcgacagtgagaccctgtagctaaaacctttttttttaatt

SEQ ID NO: 266584 - DNA, 33 bp, Homo sapiens; identical to SEQ ID NO: 215751
  chr14:31648025-31648058
  hypo

SEQ ID NO: 266585 - DNA, 87 bp, Homo sapiens
  chr14:31671012-31671099
  hypo
gccatgtttacattactacattttagaactcgatacatcaggtaaaagcaaaaacgaatcttgaacgtgttttactttctggagcat

SEQ ID NO: 266586 - DNA, 41 bp, Homo sapiens
  chr14:31847700-31847741
  hypo
gaacactacttggccaggtgcggtggctcacgcctgtaatc

SEQ ID NO: 266587 - DNA, 79 bp, Homo sapiens; identical to SEQ ID NO: 215752
  chr14:31925274-31925353
  hypo

SEQ ID NO: 266588 - DNA, 78 bp, Homo sapiens
  chr14:31925653-31925731
  hypo
ctaaaattgttttaagtaatgctagatctgggaccgaattcagcagaaaaggcgagcgaatgagattttgctacactg

SEQ ID NO: 266589 - DNA, 31 bp, Homo sapiens
  chr14:32287762-32287793
  hypo
ttctttttgagttggagtctcgcactgtcac

SEQ ID NO: 266590 - DNA, 31 bp, Homo sapiens
  chr14:32288033-32288064
  hypo
gtgagctgccgtgcccagccaattgatataa

SEQ ID NO: 266591 - DNA, 84 bp, Homo sapiens
  chr14:32413188-32413272
  hypo
taatttacctggaccgttgctgtctcctgtgcacggctgcggggatgagcaccttgttgtgcgttcctccgctgggctgacgga

SEQ ID NO: 266592 - DNA, 39 bp, Homo sapiens
  chr14:32543359-32543398
  hypo
ttccatttctgtccgatatttgtgcgcgcgcatgtgtgt

SEQ ID NO: 266593 - DNA, 315 bp, Homo sapiens
  chr14:32597576-32597891
  hypo
tgcactccagcatgggctgggctcccaaacaggttcatcctcacaccaacttgcaagggcgtggcccgccttgtcaccatgagaccctgagaaagtcccttcacctcgctgggctctggtttcctcattccaaggatggctctgctatctgcgtgtcggctatcggtgctgaggctggcccgcctctgcgtgggcaggatcttggcattccttttgctccatggacgctgcctccctgggctcgccgcgcctggccgcccggcaggcagccccaggccccggctgctccatcccgctgccctgatttttcttata

SEQ ID NO: 266594 - DNA, 113 bp, Homo sapiens
  chr14:32902046-32902159
  hypo
agcagcaatcagacctggtacggtagctcctccggtatcaagtggaacccgtgtttctaccctcatgctccaccgtcctctacccgtcatacgcaaaggcctctctgggtctg

SEQ ID NO: 266595 - DNA, 73 bp, Homo sapiens
  chr14:34165621-34165694
  hypo
ggttattgggccatcgaaagacataataaacacgagagtgcttcatgaaaacatgaagcgtttcatttgaaaa

SEQ ID NO: 266596 - DNA, 99 bp, Homo sapiens
  chr14:34308655-34308754
  hypo
gaagaaactgtccgcgtacaaaggtgggctactctgggcctggagtccaggtctttctgcctccaaagcccatgttcagatccacgggatccggctcac

SEQ ID NO: 266597 - DNA, 36 bp, Homo sapiens
  chr14:34334928-34334964
  hypo
gtctggtttttggccaggctcggtggctcatgcctg

SEQ ID NO: 266598 - DNA, 37 bp, Homo sapiens; identical to SEQ ID NO: 215755
  chr14:34415281-34415318
  hypo

SEQ ID NO: 266599 - DNA, 33 bp, Homo sapiens; identical to SEQ ID NO: 215756
  chr14:34918992-34919025
  hypo

SEQ ID NO: 266600 - DNA, 41 bp, Homo sapiens
  chr14:34949999-34950040
  hypo
agaaaaagacaatagaaatgaatgaacgagtgtttcacgga

SEQ ID NO: 266601 - DNA, 42 bp, Homo sapiens
  chr14:35009569-35009611
  hypo
cacccacatccctccaacctcgcctctaacccttatgccttc

SEQ ID NO: 266602 - DNA, 161 bp, Homo sapiens
  chr14:35022415-35022576
  hypo
cctgggcgacagagcgagtcaaaaagcaacaacaaaaaaagataaccctgcaccgcgccctgggtgaaccctggctcctggctcctttctaaatattctgatttcctcttggatgacattaagaattagtccattcagaccgggcgcggtggctcacgcct

SEQ ID NO: 266603 - DNA, 341 bp, Homo sapiens
  chr14:35023176-35023517
  hypo
ataacaataaagaagaattcgtccattcaacaaccgttcactgagcgcatagcctgtgcccagacactgttccaggcctctgggagcaaaaaggcctcggtgcccgtattctagttagacaacgagaagcgcggggaggtggggggcgggggtgggagagagaaaatctacaccgggctgcataggtaaattcgtaggttaggtgctaagtgctttgaaaaagcaaacaaacacagggaaagtgagataaggagttgcggcaaggggcaggtggctgtgttaaatcgagtggttggaagaagctgctatgagaaggtaccgtatgagcaaaggacttgaag

SEQ ID NO: 266604 - DNA, 121 bp, Homo sapiens
  chr14:35032073-35032194
  hypo
ctttggacttctgagtatgacgagtgcacgatgatggaccactgtcatggggaacacagtgcggcatcacggcacacagactggcatcgcctgggcgtgcgctgctccatgtttctcagaa

SEQ ID NO: 266605 - DNA, 36 bp, Homo sapiens; identical to SEQ ID NO: 215757
  chr14:35117759-35117795
  hypo

SEQ ID NO: 266606 - DNA, 32 bp, Homo sapiens
  chr14:35136957-35136989
  hypo
aaaaaaaaaaacaaaaacggtatgtttatctt

SEQ ID NO: 266607 - DNA, 48 bp, Homo sapiens
  chr14:35147557-35147605
  hypo
aaaattttagagttcgacttgcaaattagaacccgatgaatttattca

SEQ ID NO: 266608 - DNA, 37 bp, Homo sapiens
  chr14:35266883-35266920
  hypo
tttgacaaacatctggtttccgttccaagacggccgg

SEQ ID NO: 266609 - DNA, 120 bp, Homo sapiens
  chr14:35266980-35267100
  hypo
gaggtacctggttcatctcattgggactggtgcccatggagggcgagccgaagcagggcgagccaaagcagggcgggccgaagcagggcgggcatcgcctcacccgggaagtgcaagggg

SEQ ID NO: 266610 - DNA, 48 bp, Homo sapiens
  chr14:35331322-35331370
  hypo
catcacaaatttcatgtaagcgcgaacgatgggtaaggctggtcaagt

SEQ ID NO: 266611 - DNA, 32 bp, Homo sapiens
  chr14:35389182-35389214
  hypo
tgagtgagcagtaggctgggcgcggtggctca

SEQ ID NO: 266612 - DNA, 31 bp, Homo sapiens
  chr14:35389454-35389485
  hypo
gcgagactccgtctccaaaaaaaaagaaaaa

SEQ ID NO: 266613 - DNA, 35 bp, Homo sapiens
  chr14:35507693-35507728
  hypo
cctcctcaagacttacgaatagagcgccgcccggg

SEQ ID NO: 266614 - DNA, 97 bp, Homo sapiens; identical to SEQ ID NO: 215758
  chr14:35578168-35578265
  hypo

SEQ ID NO: 266615 - DNA, 279 bp, Homo sapiens
  chr14:35808161-35808440
  hypo
ctgcctcccacaaaggataccgagctacagcgcaggtgcagttcggcaagtcccgacacaggcctcattgtacccagcccctcagcgagggccttgggacggccccacagatagggcacctccaccccatccccgggctgcagttcaggacctaggagacagaaggctgcgggtgactaagacccttaattgagccctgcaagcttgcacgatgagcctgtctacccgctaacaagcaccttgtgcctctgctcggtcggcctctgaccctggagaggg

SEQ ID NO: 266616 - DNA, 119 bp, Homo sapiens
  chr14:35866800-35866919
  hypo
agctaactggaatatgagctcgggtcccgtctctcccacctgcactccgcgctggtgcctgggctcagctcccgtgctatgggctttcatctcatcacgcctttccatgcagttgtctg

SEQ ID NO: 266617 - DNA, 393 bp, Homo sapiens; identical to SEQ ID NO: 215760
  chr14:36288873-36289266
  hypo

SEQ ID NO: 266618 - DNA, 38 bp, Homo sapiens
  chr14:36301411-36301449
  hypo
aaaaattaagtaggctgggccgggcacggtggcttacg

SEQ ID NO: 266619 - DNA, 38 bp, Homo sapiens
  chr14:36301689-36301727
  hypo
tgacggagcgagactccgtctcaaaaaaaaaaaaaaat

SEQ ID NO: 266620 - DNA, 54 bp, Homo sapiens
  chr14:36738436-36738490
  hypo
cctatgcctcagtgcgaaacaacaatgcaggcctcttgacgaattctggcgtcg

SEQ ID NO: 266621 - DNA, 34 bp, Homo sapiens; identical to SEQ ID NO: 215761
  chr14:37174263-37174297
  hypo

SEQ ID NO: 266622 - DNA, 43 bp, Homo sapiens
  chr14:37665913-37665956
  hypo
ctggggtgcagtggcgccagccatcgtagcttatttcagtctc

SEQ ID NO: 266623 - DNA, 42 bp, Homo sapiens
  chr14:37666136-37666178
  hypo
tgttgggactacaggcgtaagccaccgcgcccggcctttttc

SEQ ID NO: 266624 - DNA, 328 bp, Homo sapiens
  chr14:39648102-39648430
  hypo
ctgttaatttttttgtgtttttagtagagatggtggtgttggcttctgacttcagatgatctacctgcctctaatgtttcacgtaattagtatgtgtaataactttttatcataattgaactgaaatcatatataccttttgttgtaactatttcaacacgtaagtattaaagcaggctacttaacttttagcaaaagcggcgccaggaaattgaacaaaaacttgaagttcaggcagaagaagagagaaagcaggttgaaaatgaaaggagagaactgtttgaagagaggcgtgctaaacagacagaactgcggcttttggaacaga

SEQ ID NO: 266625 - DNA, 97 bp, Homo sapiens
  chr14:39648716-39648813
  hypo
tgttcatatgcacacgtttgttttctaaaataattatgattcagtgattggtttgctgtgtttgctttttttttttaaataagataataagatattc

SEQ ID NO: 266626 - DNA, 291 bp, Homo sapiens; identical to SEQ ID NO: 215765
  chr14:39911460-39911751
  hypo

SEQ ID NO: 266627 - DNA, 37 bp, Homo sapiens; identical to SEQ ID NO: 215766
  chr14:39914481-39914518
  hypo

SEQ ID NO: 266628 - DNA, 37 bp, Homo sapiens; identical to SEQ ID NO: 215767
  chr14:40470106-40470143
  hypo

SEQ ID NO: 266629 - DNA, 104 bp, Homo sapiens; identical to SEQ ID NO: 215768
  chr14:43839406-43839510
  hypo

SEQ ID NO: 266630 - DNA, 252 bp, Homo sapiens
  chr14:44004251-44004503
  hypo
cgctgcacgtatttcgtgacttaaaagagtttaaaaggcaatcatataatctaactctggctaccttttcgggaccccttccacactgtgggacctttttactttcactctgctcaataaagcctacagctttttctcttttggtctgtgtctctatcactcgccgcggtcagctgccgcaccaccgcatcaattctttggcatggctaggcaagaaccttaggcgttacatcttggcgagccagccaggag

SEQ ID NO: 266631 - DNA, 32 bp, Homo sapiens
  chr14:45437464-45437496
  hypo
tttatttatttattttgagacggagtttcact

SEQ ID NO: 266632 - DNA, 31 bp, Homo sapiens
  chr14:45437736-45437767
  hypo
caccgcgcccggcctggactttaatttttaa

SEQ ID NO: 266633 - DNA, 51 bp, Homo sapiens; identical to SEQ ID NO: 215770
  chr14:45579811-45579862
  hypo

SEQ ID NO: 266634 - DNA, 180 bp, Homo sapiens
  chr14:50233118-50233298
  hypo
cactcaagcctgggggacaagagcgagacttctctcgaacaaacaaaaaacaaaaacgatgatagaagggtaatgtagctggaaggaggacacagccaggaattgaagctggaaaggcaagctgggtctggaccatgctgggtcttcttgcacagcactgtgatatgaattttttttttt

SEQ ID NO: 266635 - DNA, 150 bp, Homo sapiens
  chr14:50233598-50233748
  hypo
cgagatattaattttggattctactaaggacgacgggagccagctcaaggtttttaagtgactcgatcagattcacgaggttggttcacaaggaacttcgataaccccaaagtctagtgagcataattcgactgggagaagacactgctg

SEQ ID NO: 266636 - DNA, 137 bp, Homo sapiens
  chr14:50287092-50287229
  hypo
ctcaaacctgtcagcacttacgcgttgtcctctggtcactgcatgacttcgctgaagttccttaccctctccgtttcagattctgaaagtattgtatcaagagctaataatcggctgggcgcggtggctcatgccta

SEQ ID NO: 266637 - DNA, 44 bp, Homo sapiens; identical to SEQ ID NO: 215771
  chr14:50327506-50327550
  hypo

SEQ ID NO: 266638 - DNA, 180 bp, Homo sapiens
  chr14:50333499-50333679
  hypo
gccctataatcttttgatttggtgcatcataatttatgactatttaaattgaaccactatcagtcacactaatcactttactattctatatatttcacctttattgttttatgaattagtgatcggcatagtatccagtgctaagtcagttatgcacaacctcgaatcagccgtttgctt

SEQ ID NO: 266639 - DNA, 120 bp, Homo sapiens
  chr14:50333979-50334099
  hypo
cgcccggccagccgtttgcttttttaacagtgcaaaaaacaaggccgtgtctggctatatggggctttgcttgttcaaaatgtaacctctatacggccgcgcgcagtggctcacgcctgt

SEQ ID NO: 266640 - DNA, 37 bp, Homo sapiens
  chr14:50373518-50373555
  hypo
ctcaggctatccgcccgcctctgcatcctaaagtgct

SEQ ID NO: 266641 - DNA, 35 bp, Homo sapiens
  chr14:50434016-50434051
  hypo
atttatgcataaacgatcacatgacatgttctgtt

SEQ ID NO: 266642 - DNA, 32 bp, Homo sapiens
  chr14:50540507-50540539
  hypo
tttcttagaaatatggataccggatatgaagc

SEQ ID NO: 266643 - DNA, 75 bp, Homo sapiens
  chr14:50574254-50574329
  hypo
ctcccgacctcaggagatccgtctgcctcggcatacaggcgtgagccaccgcgcgtggggcctatttgactttga

SEQ ID NO: 266644 - DNA, 40 bp, Homo sapiens
  chr14:50589170-50589210
  hypo
gaaccctggtctttaattacatcatcgagtcactgaatca

SEQ ID NO: 266645 - DNA, 37 bp, Homo sapiens
  chr14:50681833-50681870
  hypo
gtgagccaccgcgcccggcaaggttgtttcttataac

SEQ ID NO: 266646 - DNA, 39 bp, Homo sapiens
  chr14:50777877-50777916
  hypo
tccaacttctgacctcaggcgatccgcccgcctcggcct

SEQ ID NO: 266647 - DNA, 120 bp, Homo sapiens
  chr14:50828854-50828974
  hypo
ctgcagcctgccatgcctgagcctcccctccccacccccccacccccaccgtgggctcctgcgcggccgagcctccacgatcagaaccgccccctgctccgcagcacccggtcccatcga

SEQ ID NO: 266648 - DNA, 266 bp, Homo sapiens
  chr14:50903479-50903745
  hypo
tgctggaaaagtaacgccatccattaaccatagggagaggacaacagaagctccatgtttggtatttttcctggactctgccctatgtacttcttcccttggctgattttaatctatattctgtccctgttctaaacggtaatgattttaatctatattctttccctgttctaaacggtaatgatttaaatctatattttttccctgttctaaattgtaatcgtaactatgagtataactgcttccagttccgtgataccttctag

SEQ ID NO: 266649 - DNA, 34 bp, Homo sapiens
  chr14:51092388-51092422
  hypo
ggcccaacactttgggaggccgaggtgggtggat

SEQ ID NO: 266650 - DNA, 35 bp, Homo sapiens
  chr14:51123746-51123781
  hypo
ttttttttttttttttgagacggagtctcacgctg

SEQ ID NO: 266651 - DNA, 42 bp, Homo sapiens
  chr14:51148375-51148417
  hypo
ttttaggataaaacttgaagcggatatttctgttagaaagga

SEQ ID NO: 266652 - DNA, 480 bp, Homo sapiens; identical to SEQ ID NO: 215774
  chr14:51171647-51172127
  hypo

SEQ ID NO: 266653 - DNA, 41 bp, Homo sapiens; identical to SEQ ID NO: 215778
  chr14:51836280-51836321
  hypo

SEQ ID NO: 266654 - DNA, 394 bp, Homo sapiens; identical to SEQ ID NO: 215780
  chr14:52210541-52210935
  hypo

SEQ ID NO: 266655 - DNA, 90 bp, Homo sapiens
  chr14:52211309-52211399
  hypo
atgaagatccatatcgcatgggggcgggtgccaccgcgattcggggagtaatatcaccccccactcccaccctggatatgaccatccaca

SEQ ID NO: 266656 - DNA, 85 bp, Homo sapiens
  chr14:52211429-52211514
  hypo
atgcggggagtaatatcatcccccacttcccccctggctcttcttccccccctggctctttcaggaccccatcgcaggggggcga

SEQ ID NO: 266657 - DNA, 84 bp, Homo sapiens
  chr14:52216037-52216121
  hypo
caggtgttggtaaacggggacgcagtaagccgcgaggaaaagcgcaaagagaatgaacgtcaggcccggcgaaacgccgacctg

SEQ ID NO: 266658 - DNA, 89 bp, Homo sapiens
  chr14:52373771-52373860
  hypo
cgctggagaatcttttacagggactccgtgactttatcactaagccacgctggcagcacaggcatgacggctcctggattttattcagg

SEQ ID NO: 266659 - DNA, 76 bp, Homo sapiens
  chr14:52940021-52940097
  hypo
aacgctgctgctttgatttcatcaataaacatctggtgatgcttgtttatacaaagtgccacgttacatattttgc

SEQ ID NO: 266660 - DNA, 84 bp, Homo sapiens
  chr14:53196020-53196104
  hypo
gattacaggcgtgagcctccgcgcccggcccaaatcttttcaccatgggtttacaggcataacgccaccacacccagggaattt

SEQ ID NO: 266661 - DNA, 142 bp, Homo sapiens
  chr14:53259036-53259178
  hypo
gggcacaggtgagtagaggccgggaatactgcttcacgccttacagtgcgcaggacagcgccgcacaacaaagaattacctggcctgaaatgtctggagtgctgaggtttagaaacctttcgttaggagaagaaaagtgact

SEQ ID NO: 266662 - DNA, 136 bp, Homo sapiens
  chr14:53564364-53564500
  hypo
agatctggtagtaaaactaacgtgaaccaattccatattattaaatattaaacgagaacgaaatgggaaatgtatggaccatttgaccatgttttaaaattatgtaaacgctttcggaaagctagccaagatacac

SEQ ID NO: 266663 - DNA, 33 bp, Homo sapiens
  chr14:55035098-55035131
  hypo
ttgatttttctctcatgcagtttcctgggaaat

SEQ ID NO: 266664 - DNA, 31 bp, Homo sapiens
  chr14:55035161-55035192
  hypo
ttctgggtgtgtgtgttttttccttcctcct

SEQ ID NO: 266665 - DNA, 120 bp, Homo sapiens; identical to SEQ ID NO: 215783
  chr14:55517470-55517590
  hypo

SEQ ID NO: 266666 - DNA, 142 bp, Homo sapiens; identical to SEQ ID NO: 215784
  chr14:55522631-55522773
  hypo

SEQ ID NO: 266667 - DNA, 201 bp, Homo sapiens; identical to SEQ ID NO: 215785
  chr14:55590026-55590227
  hypo

SEQ ID NO: 266668 - DNA, 214 bp, Homo sapiens
  chr14:55731632-55731846
  hypo
tgagatccctaggccgatcaaacttctgaatgccatcaaggccgatcaaacttctgaatgccatcaaggaggtctgaatgacccaagaatcattgttctttggaaaaacaagttcattaatcttgtgggcagcccctgagggttaggatatgaagttaatcaattagtagtgactaccctctaccgaaatgactatgtgcgagcaatcacgcat

SEQ ID NO: 266669 - DNA, 86 bp, Homo sapiens; identical to SEQ ID NO: 215786
  chr14:55740426-55740512
  hypo

SEQ ID NO: 266670 - DNA, 880 bp, Homo sapiens
  chr14:55765280-55766160
  hypo
caaatttggcagggtggaggcggaggagggcgggcgccggagcccagccggagcgggcgttgaaggctggcgcggcgagcgctgttcggggctggagggggtaaggccggcaagggcggcctgaccctccaggaggccatccagcggctgcgggacacggaggagatgttaagcaagaaacaggagttcctggagaagaaaatcgagcagaggcacggcaccaaaaacaagcccgcggccctccaggcactgaagcgtaagaagaggtatgagaagcagctggcgcagatcgacggtacattatcaaccatcgagttccagcagcaggccctggagaatgccaacaccaataccgaggtgctcaagaacatgggctctgcagccaaggccaagaaggcggcccacgacaacatggacatcgataaagttgatgagttaatgcaggacattgctgaccagcaagaacttggggaggagatttcaacagcaatttcgaaacctgtagggtttggagaaaagtctgacgaggatgagctcatggcggaattagaagaactagaacaggaggaaccagacaagaatttgctggaagtcagtggccccgaaacagtccctctaccaaatgttccctctatagccctaccatcaaaacctgccaagaagaggaagacgacgacatgaaggatttggagaactgggctgggtccagcgcgggcaggatggatgtggtgcaggcaggttccatcgctctcgactctcactccaaagcagtagggccgcattgctgctcgctctctgcatagcatggtctgcacctagtgggatgggtgggggcgggtagaggggggttgcggggcacgggggctgtgggggagaagtg

SEQ ID NO: 266671 - DNA, 221 bp, Homo sapiens; identical to SEQ ID NO: 215789
  chr14:55817970-55818191
  hypo

SEQ ID NO: 266672 - DNA, 164 bp, Homo sapiens; identical to SEQ ID NO: 215790
  chr14:55819829-55819993
  hypo

SEQ ID NO: 266673 - DNA, 31 bp, Homo sapiens; identical to SEQ ID NO: 215791
  chr14:55894600-55894631
  hypo

SEQ ID NO: 266674 - DNA, 180 bp, Homo sapiens; identical to SEQ ID NO: 215792
  chr14:55894691-55894871
  hypo

SEQ ID NO: 266675 - DNA, 194 bp, Homo sapiens
  chr14:55981996-55982190
  hypo
ttctaaactgtctccgagatcgggctcgcagattgttaaacaccgatgtgcgctttgcatggggctcctctgggatacgcgtaatttaaattacgacatgagcatttcattttgtattggctggtacacagtaaatggagcaagcgggagccggctgatttccagagagacagaaaactcgaaaactgcagctg

SEQ ID NO: 266676 - DNA, 55 bp, Homo sapiens; identical to SEQ ID NO: 215793
  chr14:56088961-56089016
  hypo

SEQ ID NO: 266677 - DNA, 96 bp, Homo sapiens
  chr14:56608021-56608117
  hypo
gaatgttgtatgtgcgcccctgtgccctcagggcttttgtcaggacggacgttaggactggcaaggcaagattggctggcacgagaatggccagtt

SEQ ID NO: 266678 - DNA, 221 bp, Homo sapiens
  chr14:56757000-56757221
  hypo
tggaaaaaccccgacggccacatggatgggctcactactaatggcgtcctggtgatgcatccacgagggggcttcaccgaggagtcccagcccggggtctggcgcgagatctctgtctgtggagatgtgtacaccttgcgagaaaccaggtcggcccagcaacgaggaaagctggtgagtgtgcttcactctgcaagtgtgaagtacgaaactactcaagc

SEQ ID NO: 266679 - DNA, 267 bp, Homo sapiens
  chr14:57045520-57045787
  hypo
tgctggccccatgaccgtcaaggtaggtatatgttactctatagtttagtcactgtgtctctatcaaattgcgcgtaacacgtttgagattgtcactggttttcagtgtgtctttgagatacattttatgcgggttgctctcctccccgcccactccaggataattgctttaataataaaacataagcttaaaaagcttaactgcgctgttatgtagttgtccttattaacggctccgattctttttttttgcgttacagctcattg

SEQ ID NO: 266680 - DNA, 52 bp, Homo sapiens
  chr14:57052072-57052124
  hypo
caggcaagaccttacgactgtcagcatggtggtaatccgatagcagtgtggt

SEQ ID NO: 266681 - DNA, 77 bp, Homo sapiens; identical to SEQ ID NO: 215794
  chr14:57073649-57073726
  hypo

SEQ ID NO: 266682 - DNA, 151 bp, Homo sapiens
  chr14:58599586-58599737
  hypo
gccactgcgcccggccaacccttgtccttttaaggctctgccacacctcttcaaacaggacagagctcacacccctttccaggtaaaggtgtgtgtgtgtgtgtacgtgcacgcacgcgcgcgctgatggcaatgtcggctgcctcactca

SEQ ID NO: 266683 - DNA, 214 bp, Homo sapiens
  chr14:58708563-58708777
  hypo
tcttaattattaataaatattgagtgcactaggcactcaaatagtgtttatcacacacaagtaatgatgttaattaaaagattaactgatacctaaacaagttttgagtacttacggtttacctccaaggccaaaccttctgcaactattaacctttagctttcttcaacactttcttggactatcttggtctaaatccgaactccccaggaaa

SEQ ID NO: 266684 - DNA, 258 bp, Homo sapiens
  chr14:58761578-58761836
  hypo
ttcatgaggcacccacttatcgagctttttcactttttaatttgcttcaaatgctgaaggactgtagaatggtccacattgagttcttcggcaacatctcaagtagccttaagaggatcagctttgctgattgctcttaaccggtagttatcaacttctggcgaccagccactacgctcctgattttcaagactttccttccctttgcaaaatttcttgaaactgccaggcacagcggctcaagcctgtaatcccagc

SEQ ID NO: 266685 - DNA, 97 bp, Homo sapiens
  chr14:58863447-58863544
  hypo
tcagaagcagaaggcatcttcgtgttttgtaaatctctgcggcaaaatttgattagtcccttttttgttgtttttaagaggcgggccgggcttggtg

SEQ ID NO: 266686 - DNA, 34 bp, Homo sapiens
  chr14:58893192-58893226
  hypo
gattacaggcgtgagccaccgcgctcagacttta

SEQ ID NO: 266687 - DNA, 179 bp, Homo sapiens
  chr14:58922736-58922915
  hypo
taaacaattgccaccgttttttgaaaaatgccctggggatactttctcgctgagctagcagtgagtcagttcaaataaagacaaacactatgaatgagacttttaggagagcttgaaaccattctactgtctttagtggttgtgaggctgttggttttcgaggccgccacagagttggg

SEQ ID NO: 266688 - DNA, 161 bp, Homo sapiens
  chr14:59014415-59014576
  hypo
acctcatattatttcgcaaagcataaagcacgtaaatactcaggttacgcatgttgagctgaatgagcttctcctttgtgcaggtgggaaagcagtgccactctccgcttcacagatgccccctgccaagatgtcagtgatgctgccgtcagtgaacctcg

SEQ ID NO: 266689 - DNA, 243 bp, Homo sapiens; identical to SEQ ID NO: 215798
  chr14:59112403-59112646
  hypo

SEQ ID NO: 266690 - DNA, 471 bp, Homo sapiens
  chr14:59113228-59113699
  hypo
aaggggaggaagagtgggggcgggcccgaggctggtgttcccggcaggcccgcgggcgggggccacagggcggggagcagggcgcatggccacggacgggaggcggtggtggccaaacctaagcacaagcgaactgactaccggcggtggaagtcctcggccgagatttcctacgaagaggccctgaggagggcccggcgcggtcgccgggagaatgtggggctgtaccccgcgcctgtgcctctgccctacgccagcccctacgcctacgtggctagcgactccgagtactcggccgagtgcgagtccctgttccactccaccgtggtggacaccagtgaggacgagcagagcaattacaccaccaactgcttcggggacagcgagtcgagtgtgagcgagggcgagttcgtgggggagagcacaaccaccagcgactctgaagaaagcgggggcttaatttggtcccag

SEQ ID NO: 266691 - DNA, 34 bp, Homo sapiens
  chr14:59715783-59715817
  hypo
cgtgagccaccgcgcctggcccatccctcagttt

SEQ ID NO: 266692 - DNA, 34 bp, Homo sapiens
  chr14:59734888-59734922
  hypo
gatgacaggcatgagtcaccgcgcccggcgcctg

SEQ ID NO: 266693 - DNA, 306 bp, Homo sapiens
  chr14:59809360-59809666
  hypo
aaaagttaagataacgttgctgcctttgaaagcacatggctaattggagaagaaaaatgacacctgtgagaagatttgtgcgcagttcagggcttacactggtctgactgaaggacatggagcccggccatgtaggaggggcaccagcagggcttattgtagaaagtaggcctcaaaggcaaagactgttatatgacaagaggaggggccgggaaggtggtgtcaaggaggcgtgcagcagcaaagatgtgggagggacataagcacagttagtagagagccctgcaatcccggcagaaaattatc

SEQ ID NO: 266694 - DNA, 145 bp, Homo sapiens; identical to SEQ ID NO: 215799
  chr14:59810623-59810768
  hypo

SEQ ID NO: 266695 - DNA, 164 bp, Homo sapiens; identical to SEQ ID NO: 215800
  chr14:59821078-59821242
  hypo

SEQ ID NO: 266696 - DNA, 169 bp, Homo sapiens; identical to SEQ ID NO: 215801
  chr14:59935188-59935357
  hypo

SEQ ID NO: 266697 - DNA, 77 bp, Homo sapiens; identical to SEQ ID NO: 215802
  chr14:59961997-59962074
  hypo

SEQ ID NO: 266698 - DNA, 719 bp, Homo sapiens; identical to SEQ ID NO: 215804
  chr14:60193647-60194366
  hypo

SEQ ID NO: 266699 - DNA, 156 bp, Homo sapiens
  chr14:60557424-60557580
  hypo
atgaaactcagacttcttggcggtaagtgatgcttccgagatgcttaatgtggtactctgacccgcaatgagtgagcttcaatgagaaaaactatggatggaccaacagcacgttttcccatattctatcaaatcgtgaagataccaaactatgaa

SEQ ID NO: 266700 - DNA, 184 bp, Homo sapiens
  chr14:61246679-61246863
  hypo
ccatgtgtccctggccatggcgctgcagctctcccgggagcagggaatcaccctgcgtgggagtgccgaaatcgtggacgagttcttctcattcggcatcaacagcattttatatcagcgtggcatttatccatctgaaatctttactcgagtgcagaaatacggactcaccttgcttgtaact

SEQ ID NO: 266701 - DNA, 92 bp, Homo sapiens
  chr14:61929139-61929231
  hypo
attttctaatgctgagatagaggtatacaattttagttttgctgtcgttgttgccttctttgaggtttgcaaggtatcggactccacagtac

SEQ ID NO: 266702 - DNA, 79 bp, Homo sapiens
  chr14:61992777-61992856
  hypo
tccttcactgggcaggaccacgatcatcctcacccctgctcccgtcctgcgctgctacgattgcaaccttttgtaggtt

SEQ ID NO: 266703 - DNA, 66 bp, Homo sapiens
  chr14:61995224-61995290
  hypo
gccaggcataatggcgccaggcataatggtgaaccgcataaacacaatccccgccgtcatggagct

SEQ ID NO: 266704 - DNA, 148 bp, Homo sapiens; identical to SEQ ID NO: 215809
  chr14:62015169-62015317
  hypo

SEQ ID NO: 266705 - DNA, 49 bp, Homo sapiens
  chr14:62021521-62021570
  hypo
cagaaatgctcaatcgatgttggctattattatcgtcagctctcccaca

SEQ ID NO: 266706 - DNA, 54 bp, Homo sapiens
  chr14:62027306-62027360
  hypo
tgctgagtatataacgtggactgtgagaaatatggacttggaatcaggagacat

SEQ ID NO: 266707 - DNA, 86 bp, Homo sapiens
  chr14:62148150-62148236
  hypo
ctggaagcagggtgcgtaaagtaccgaagaatggagctgggatccgggagtcaatgggccataggcagagacgagatgaacaacca

SEQ ID NO: 266708 - DNA, 35 bp, Homo sapiens
  chr14:62227900-62227935
  hypo
ggtgcagtggctcacgtctgtaatcccaacacttt

SEQ ID NO: 266709 - DNA, 233 bp, Homo sapiens
  chr14:62523573-62523806
  hypo
gacggcgtcggaggacaacacgctctggacgagcgcggcgcccaagggtcagcggcagcagcgagcagggggcacgggatgcagggaggctcttcgggaggcatgaaagtcagacgtgttccgaaacgtgagccgcgctggggggcacggcgcacgaccggggacaggaggaggacactgcggtcgcaaagcccaggccgtgcaaaggccccgtggtcagccaggagcccagt

SEQ ID NO: 266710 - DNA, 121 bp, Homo sapiens
  chr14:63856997-63857118
  hypo
cactgacgcattctcgacacacacacacacacacacacacacacacacacacacacgcttgctctctacaaagcacagtgaatcttgtgaactcagcaccgggtgccgcaagaaacagagt

SEQ ID NO: 266711 - DNA, 233 bp, Homo sapiens
  chr14:64061786-64062019
  hypo
ttgaggattcctccggagacgccgtccacgtggatgtgcggcccctgacgggacgtgatgacccgctcactcttccaggtgccagctccgcggatcccttccagctccccctccagaatgccgcgcagctgggccagtactgactgcgcgctgcggccgcacggcaccccggaaagcgcggcgcgccaggcgtttccagcccacattgctcctacctcgccagagcgcacctt

SEQ ID NO: 266712 - DNA, 42 bp, Homo sapiens; identical to SEQ ID NO: 215813
  chr14:64190117-64190159
  hypo

SEQ ID NO: 266713 - DNA, 44 bp, Homo sapiens; identical to SEQ ID NO: 215814
  chr14:64191361-64191405
  hypo

SEQ ID NO: 266714 - DNA, 36 bp, Homo sapiens
  chr14:64222414-64222450
  hypo
ctatggactaggcacggtgactcacgcctgtaatcc

SEQ ID NO: 266715 - DNA, 35 bp, Homo sapiens
  chr14:64227545-64227580
  hypo
tttacaggcgtgagccaccacgcctggccttgtac

SEQ ID NO: 266716 - DNA, 147 bp, Homo sapiens
  chr14:64385260-64385407
  hypo
ctttgggagagagacgtcagatgccggatgaataatttactgtcgttgaaggtctgtgcggtgatgcatgttgggcgagcatgggagggaaaaggcagaaagagtagccacgcgcttttgctgctgtcttgtcgggtggagcagcat

SEQ ID NO: 266717 - DNA, 154 bp, Homo sapiens; identical to SEQ ID NO: 215816
  chr14:64884526-64884680
  hypo

SEQ ID NO: 266718 - DNA, 80 bp, Homo sapiens; identical to SEQ ID NO: 215817
  chr14:64888236-64888316
  hypo

SEQ ID NO: 266719 - DNA, 32 bp, Homo sapiens; identical to SEQ ID NO: 215818
  chr14:64904876-64904908
  hypo

SEQ ID NO: 266720 - DNA, 81 bp, Homo sapiens
  chr14:64905829-64905910
  hypo
tagattcctgaggaagatcacgattggacaggctccaacggagaagggtcacacacggacggtaacaatttgtccctttcc

SEQ ID NO: 266721 - DNA, 43 bp, Homo sapiens
  chr14:64992809-64992852
  hypo
acaggcatgagccaccgtgcccggccacctcaatttttttttc

SEQ ID NO: 266722 - DNA, 43 bp, Homo sapiens; identical to SEQ ID NO: 203633
  chr14:65005557-65005600
  hypo

SEQ ID NO: 266723 - DNA, 162 bp, Homo sapiens; identical to SEQ ID NO: 226555
  chr14:65005780-65005942
  hypo

SEQ ID NO: 266724 - DNA, 38 bp, Homo sapiens
  chr14:65122507-65122545
  hypo
cttgagccaccgcgcccggcccctttaactctttatct

SEQ ID NO: 266725 - DNA, 190 bp, Homo sapiens; identical to SEQ ID NO: 215820
  chr14:65150031-65150221
  hypo

SEQ ID NO: 266726 - DNA, 291 bp, Homo sapiens
  chr14:65194543-65194834
  hypo
cagcagctggttgaacgtgaaggggcccctctccccgttcaacagccgggcagcggcagggcctgcacaccacaagctcagctacctgggccgagtggtgcgggagatcgtggagacagagcgcatgtacgtacaggacctgcgcagcatcgtggaggtgcgtgtcggaggccttgcggcacagtattctagcagaagcctgtttcaccctgggagggaagctctcaaaagacctgcttcccataaagtagttggagaactggggtctcccaccctcgctgactgcactgt

SEQ ID NO: 266727 - DNA, 239 bp, Homo sapiens; identical to SEQ ID NO: 215822
  chr14:65207951-65208190
  hypo

SEQ ID NO: 266728 - DNA, 275 bp, Homo sapiens
  chr14:65209828-65210103
  hypo
gccagaggaccacctcgcctgggggccggccctccgcccggagccccctcagccccacagagaccttcagctggcccgacgtccgtgagctctgctccaagtatgcctcccgcgatgaggcacgccgagcagggggcggccggccccgcggcccacccgtcaacaggagccactcggtgccggagaacatggtagagccacctctgtcgggcagggtgggccgctgccgcagcctgagcaccaagaggggccggggaggcggagaggctgcccaa

SEQ ID NO: 266729 - DNA, 146 bp, Homo sapiens
  chr14:65215874-65216020
  hypo
gcttttgcagtgcagcgtggggcccgggggcccggcccgcgactcgactcatctcgattcgaccggcgggcggcggcgagaggaggccaaggcctgggctgcccggtctctgcgcgtcccgactccgccgcgcccgccagccccac

SEQ ID NO: 266730 - DNA, 142 bp, Homo sapiens; identical to SEQ ID NO: 215824
  chr14:65220230-65220372
  hypo

SEQ ID NO: 266731 - DNA, 448 bp, Homo sapiens
  chr14:65233320-65233768
  hypo
ggaggatggagggcggggctgcgccagctcatctcgcctccacctgggctgagcctagtaggggtgagagggctctggctgcagtgactcccaggaactagacaaacgagaccagagactgaccggggacgttctctcggtggccgcatggtgggaaactggagcctcccctgctgtctcgccttcctcctcttgaggcctaaggaagacacagtctctctttagaaacaagcacccctctgaggccagtgcctcctgcgaggcctggcttttcacctgcgcccacagggaggagcaccaaatagctccccctccagtcagccggcagcctggatggtgcttggcaaggagccgcccagcgacttcttcggaaaagccaaggcagattcttcagaagggagccaggttccaggcagaacggcctgtggggccccgtgttcaggtggct

SEQ ID NO: 266732 - DNA, 155 bp, Homo sapiens
  chr14:65236141-65236296
  hypo
ggggctccaatccccgggcctgtgtgtagccccgatctccatgagtgagagcaagacaagctcctcagaaaagctgcagctctcatctccctcccaggaggctgcctggctggcacagtggggacggagacggaggagctcgcctccatccttgc

SEQ ID NO: 266733 - DNA, 84 bp, Homo sapiens; identical to SEQ ID NO: 215826
  chr14:65237647-65237731
  hypo

SEQ ID NO: 266734 - DNA, 556 bp, Homo sapiens
  chr14:65239302-65239858
  hypo
cacccagcaggtggagctcccgctcgaaggctgtgtgcacccggtggaaggactcggccgtgctggcgtccagccccacgtcctcgggcagctcgcggtgcttctcgtcgatgaggcccaggatctcggcacccgtgtagaagtagcggtgcaggtcataggaggcggccagcagctgcatgcgcgtgtcaatgagctccaggaggtctgcccacatctcgttcagcccgtccttccactcggcgatggtggccgcctcgctgtggcccgcgtcgatgagtcgctcgatgaaggcattcacattgtccacccgctcctgcccaatcgccccggtctcccgggcaaagtcccggaacttgtcccgcagaagctaggcatggggcagacagaaatgtggttatggggggcacaggggttacaggtgtcaccagcttagccaaagactttcccaggcagcaactgcagctccgggagctgcgctgtcacaccttccccagggcaggcctgcatcggctggtcccgcctcacactggggaggttacgtcctatgcagcac

SEQ ID NO: 266735 - DNA, 54 bp, Homo sapiens; identical to SEQ ID NO: 215828
  chr14:65248987-65249041
  hypo

SEQ ID NO: 266736 - DNA, 397 bp, Homo sapiens
  chr14:65259855-65260252
  hypo
tgctgacgcaggtccgcctgggccaccacctgttggtagagctcccgcagggcctgcagccgatgggtcacatctggggaatcccgaaactcttcggggaatccctgggcctgctgctccaggtgctccatcaccccacggctctcctccagctcctccaggaagtccttgtgctttttccccagggcccgcgtggccccttcgtcctgccccacatcttcaccagagagcagccggtgggcgtcttgcagccaagccttcaggtcatccgcatcgccctggaactggaaaaagttctcagcatcctggaggttcttcttgcagaaggcagccaggtccttcagctggtcccactgtgccgacacctcctttatgcgggcctcgatctgcgggtgcc

SEQ ID NO: 266737 - DNA, 89 bp, Homo sapiens
  chr14:65266471-65266560
  hypo
gcttctccacggtgcggtaggtgctgaaggcctgcagctgctgctggacgcccgtcagcgagttggcaaacttgcggctgttcaggaca

SEQ ID NO: 266738 - DNA, 221 bp, Homo sapiens; identical to SEQ ID NO: 215829
  chr14:65271602-65271823
  hypo

SEQ ID NO: 266739 - DNA, 90 bp, Homo sapiens
  chr14:65273127-65273217
  hypo
tggagtggcctagccaggagcggggtctgcccggtcggagcaggctgtgtgctcgactgagcctcaaccgtgaaagggctggctttttaa

SEQ ID NO: 266740 - DNA, 43 bp, Homo sapiens
  chr14:65320614-65320657
  hypo
gatacttatcactggccagccgcggtggctcacgcctgtaatc

SEQ ID NO: 266741 - DNA, 207 bp, Homo sapiens
  chr14:65406252-65406459
  hypo
tggttgggaaggtgcggctgtagcgtcggaagggctctccctccggccctatgaggaacttctcaaagttccaggccacatctgagcggcgcacagggctccaaatgatgagcttgggatcggtcatgagggaaaatgggtcatcataagggtaggggagcttgtccttcaggtaggcgaagacaggatgctcgttctgcccattca

SEQ ID NO: 266742 - DNA, 128 bp, Homo sapiens
  chr14:65422098-65422226
  hypo
taacccgtgcccatcgtggctccttccctctccctgcgtggctgttggttttttccactgctgagcactgcaggacaaagtcaacacactggccttattgaggcctctgcagacggatgctttctcac

SEQ ID NO: 266743 - DNA, 34 bp, Homo sapiens; identical to SEQ ID NO: 215830
  chr14:65492492-65492526
  hypo

SEQ ID NO: 266744 - DNA, 146 bp, Homo sapiens
  chr14:65493164-65493310
  hypo
gggaggcattctcacggcgagtcagtgcagctcctcttatgtttaccgcaattaaggtgagcatgagagcagcctgcctctcttctgttctcccagccatggaagcaggctccattaaaaatgtgtttttcagccggatgcagtgg

SEQ ID NO: 266745 - DNA, 35 bp, Homo sapiens
  chr14:65532138-65532173
  hypo
tcaggtgatctcgtcgttgtgtgaacatcatggag

SEQ ID NO: 266746 - DNA, 394 bp, Homo sapiens
  chr14:65532353-65532747
  hypo
attatgatctcacgggaccactgtcgtacatgcattctgttgttaaccaaaacatgatgtggcgtgactatatacaaaactctaccaccaattagccccaagaccaaggctttacctgctgcttaaaaagtgctgaccactcttgcctcatctgcccaaacaataacccctaagacagtccctcctgttctaccgcctctcatttgatccttgactcaccttgtaaggtgggtgaagcaggcgtattacctgccttttacaactggagaaacaggttggagagcttacgtaaatcacccaaggtttcccagctgtcaagtggtggtgcctgagcccgagcccgtatctgctgcctccaaagcccatgcccttccaccaccgcaggcctctgaag

SEQ ID NO: 266747 - DNA, 34 bp, Homo sapiens
  chr14:65631813-65631847
  hypo
taagaaattccagccaggtgcggtggctcatgcc

SEQ ID NO: 266748 - DNA, 176 bp, Homo sapiens
  chr14:65746810-65746986
  hypo
cggacctgccctccggggacagctagccctcgctggaccagacatggccgtggccttcgacctttcagttcccaacatccacggagccctggccccccggccatcccctcggcggtggcggcagctgcagcggcaggccagatcgccatcctgggcctggcggggacaggaaattc

SEQ ID NO: 266749 - DNA, 218 bp, Homo sapiens
  chr14:66479541-66479759
  hypo
atttactcaagccccgccctgctcagcctcgggagcggacgaattctcagctggtggattggctgcttttgtctctttgccatcttgtggtttagggttttctgggcgtcggcgtcggtaattgaagttgcggcggtaccgacgttgaggtggctgctgaccttgggtctcatctccttgattttctttatcttcttcattgccgtcctctctaggct

SEQ ID NO: 266750 - DNA, 88 bp, Homo sapiens
  chr14:66560631-66560719
  hypo
cacactgcctcgagcgtgcacacacctgcccaggctgcgacagcgtccaggcttgactacaactttgctccaagatcagagcaagtgc

SEQ ID NO: 266751 - DNA, 61 bp, Homo sapiens
  chr14:66560926-66560987
  hypo
gacctacctccgcctcgaggcccctctctgcccgcccctccatgcccgactgtgctgctcc

SEQ ID NO: 266752 - DNA, 42 bp, Homo sapiens; identical to SEQ ID NO: 215832
  chr14:66814104-66814146
  hypo

SEQ ID NO: 266753 - DNA, 32 bp, Homo sapiens
  chr14:66976290-66976322
  hypo
ttctgctgtggttctgtaattggcaaggttta

SEQ ID NO: 266754 - DNA, 48 bp, Homo sapiens
  chr14:66976357-66976405
  hypo
tatatttggaatctgagggcttagtttggagtgaaggaaatccaagac

SEQ ID NO: 266755 - DNA, 37 bp, Homo sapiens
  chr14:66976456-66976493
  hypo
ttcccttacttctttttttaattttttctttaactgt

SEQ ID NO: 266756 - DNA, 169 bp, Homo sapiens; identical to SEQ ID NO: 215833
  chr14:67864421-67864590
  hypo

SEQ ID NO: 266757 - DNA, 92 bp, Homo sapiens
  chr14:67876365-67876457
  hypo
ctctgcttctttctcgtctgggtgggattaagagccaactctatcatgtccctgcctgtctctggcttcgctttcaccggtgatgactgctc

SEQ ID NO: 266758 - DNA, 37 bp, Homo sapiens
  chr14:67886279-67886316
  hypo
tcataaaggctgcatccaggcggggggcggtggctca

SEQ ID NO: 266759 - DNA, 96 bp, Homo sapiens
  chr14:67886556-67886652
  hypo
ctccgtctcaaaaaaaaaaaaaggctgcatccattcgctaagccacatggcagtgggtctgcatctccccagagcgggtgcttttttctattccat

SEQ ID NO: 266760 - DNA, 179 bp, Homo sapiens
  chr14:67888349-67888528
  hypo
gagggcctataggaacgatcctagccattaactcacctgttgggcttctagagatgtgcattcggagccattggtaagagcatggaattacgtggaaactgcagaggggccctccaacactttgcctctgaaatggacctaggctattgtgctttgcgggttctcggtctgctttccct

SEQ ID NO: 266761 - DNA, 142 bp, Homo sapiens
  chr14:67893184-67893326
  hypo
ccccttaaaacacaagtggccggtgcgattgccttcagcagcagcagactgtgaaatggtaggctgccgggttcgggggacagtgtggataatgtctatttttttggttttgttttgttttttttgagacagagtttcactc

SEQ ID NO: 266762 - DNA, 214 bp, Homo sapiens
  chr14:68067574-68067788
  hypo
cgtgagccaccgcacccagcccaaacccacagttttaatcatgcttttgcttggcaagccgatttctctaagccagagtgagccgcaaggagagcccacgggtattcatttcacttactcttttcctgtgccgggtagtttgaggtgcttgaggatgcagcagtgaacgatgttgatgacagtctctgccctcgggcagcttcctttctagtag

SEQ ID NO: 266763 - DNA, 82 bp, Homo sapiens; identical to SEQ ID NO: 215835
  chr14:68130375-68130457
  hypo

SEQ ID NO: 266764 - DNA, 54 bp, Homo sapiens
  chr14:68163051-68163105
  hypo
tgggaaatgaaaggcggattagacaggagaggagcggtccgaagtctgacagtt

SEQ ID NO: 266765 - DNA, 329 bp, Homo sapiens
  chr14:68265539-68265868
  hypo
attttaaaagtacagctggccgggtcccgccccgaggccaaccgggcctccccagccttttggccaccaggccccgcccccggggagggcgctgagctccgcttggcgcctctgatctttatttctcgcgccgcggtttcggtgggaggggcgggggtgatttacggatactctctgccctcagatcctgggaaaagtctattccgttcccagtgacaaagaacagagagcagtgtacgatgagcagggaacagtggacgaggactctccagtgctcacccaagacctagactaggaggcgtactggcggctactctttaaaaagatat

SEQ ID NO: 266766 - DNA, 98 bp, Homo sapiens; identical to SEQ ID NO: 215836
  chr14:68829198-68829296
  hypo

SEQ ID NO: 266767 - DNA, 42 bp, Homo sapiens
  chr14:68968539-68968581
  hypo
catggggtgggctgtgacatcggccaccactgctggattcct

SEQ ID NO: 266768 - DNA, 98 bp, Homo sapiens
  chr14:68993117-68993215
  hypo
taatgatatatttctcagaacgtgtcgttaagcgacatgtgaccgtattatacgtccagcaattgagatgaattaccgttgcacacagtgctgaagct

SEQ ID NO: 266769 - DNA, 132 bp, Homo sapiens
  chr14:69014215-69014347
  hypo
gtgttggggtccaggagccccgctcactcctcagcacccgggagcatcacggaatctaaggtgaacctccggggcaggagacacagcactggccttagagtccacaagcccgggttccttggccctgtctct

SEQ ID NO: 266770 - DNA, 99 bp, Homo sapiens
  chr14:69050653-69050752
  hypo
taatgtgtgggccacagcaccggccactccagtcaccagatgaggacctggcgggggtgagcttagccaatgaaaaccggaggaaggagctttaaaggt

SEQ ID NO: 266771 - DNA, 252 bp, Homo sapiens
  chr14:69052663-69052915
  hypo
cgtcgccaaggcaacggctcatctgctgcagatctcatcaaggccctgcaaagcatccacggcacgttacgctttgcgtttcacagtgaatcggctgcaatcagtcttcctgcagccctcccttacccccatcacctcctagcctatggaagagaagatcattaaaggcgggtgaaaaactgcaatcagaactctccgaggctggcacggagaggcagagctgcgatagtcctgttccgaggacagtagatt

SEQ ID NO: 266772 - DNA, 93 bp, Homo sapiens
  chr14:69070516-69070609
  hypo
cttcagtgtatccagccctgcggccgcgctggccccctgtccgcatgctgtcaggctacctccgtgccagacgaccaacacccagccacagtg

SEQ ID NO: 266773 - DNA, 127 bp, Homo sapiens
  chr14:69143522-69143649
  hypo
cactgactggatgacgggcgtccccgcccaggagccagagactgtgtctccacatgcaggcagggccagcgtgaggtcaggattaaccagagaagctgtgctcttcttgcagcgccacactaggctg

SEQ ID NO: 266774 - DNA, 34 bp, Homo sapiens
  chr14:69144067-69144101
  hypo
ttgcactgctgctccggcccgggcctcttcacat

SEQ ID NO: 266775 - DNA, 177 bp, Homo sapiens
  chr14:69144733-69144910
  hypo
gccatgctttatctcgttaacctgcactacaactttaagaggtggatatttttatccacattttacagataaggaatatgagactcagagataaaataacttgcccaaggttacatagctaataaatggcggggcctggatttgaaccaccacgttcttaaccgctgagctccacca

SEQ ID NO: 266776 - DNA, 43 bp, Homo sapiens
  chr14:69153995-69154038
  hypo
ctaaaaaaagttgggcgggaggccgagatgggtggatcacaag

SEQ ID NO: 266777 - DNA, 34 bp, Homo sapiens
  chr14:69154693-69154727
  hypo
gaatgaaggagggccaggtgcggtggctcatgcc

SEQ ID NO: 266778 - DNA, 93 bp, Homo sapiens
  chr14:69218775-69218868
  hypo
gtggatctggatagacgcaagttaagctgatgagtttgtctctaccacaggggtacctgcctttccccaggatcagcccgatggcaattctgg

SEQ ID NO: 266779 - DNA, 156 bp, Homo sapiens
  chr14:69245843-69245999
  hypo
aagggctaatcccttagaatcgtgggctcttagaagctatgacacctgtaccaatagaaaaatcatccattcagtaggtaagtgcctgctgagtgccaggcatcagcgttgacatgaaatagaacggtgaacaggaggctgggcgcggtggctcat

SEQ ID NO: 266780 - DNA, 229 bp, Homo sapiens; identical to SEQ ID NO: 215839
  chr14:69278051-69278280
  hypo

SEQ ID NO: 266781 - DNA, 40 bp, Homo sapiens
  chr14:69337465-69337505
  hypo
gattacaggcatgggccaccgtgcccggcccagagtcttt

SEQ ID NO: 266782 - DNA, 160 bp, Homo sapiens; identical to SEQ ID NO: 215840
  chr14:69345631-69345791
  hypo

SEQ ID NO: 266783 - DNA, 174 bp, Homo sapiens
  chr14:69347540-69347714
  hypo
tggtgtgcttgttgtcgaagatgagcgcctcctggatgagctggtggtcgccctccagctgatcaatctttggcttgtagttgacgatgctcttctcatactgccgcaggtggctgagctggtcctccagggtcccatgcatctcaatggagatcctcccgatctcctgctcac

SEQ ID NO: 266784 - DNA, 53 bp, Homo sapiens
  chr14:69352139-69352192
  hypo
acttgagctcctgtgcgatggcggcaatctgctccacacggtcctggtgggca

SEQ ID NO: 266785 - DNA, 147 bp, Homo sapiens; identical to SEQ ID NO: 215841
  chr14:69352454-69352601
  hypo

SEQ ID NO: 266786 - DNA, 252 bp, Homo sapiens; identical to SEQ ID NO: 215842
  chr14:69354666-69354918
  hypo

SEQ ID NO: 266787 - DNA, 38 bp, Homo sapiens
  chr14:69385004-69385042
  hypo
tgtgaaagttctggccgggcgcggtggctcacgcctgt

SEQ ID NO: 266788 - DNA, 192 bp, Homo sapiens
  chr14:69470454-69470646
  hypo
ctcgtcccagtgactcggccctgcctgcccctcactctgttcaccacggcactctgttgtccctccactcaacccctttggcctccttgccacacctcgtgtgtgtcaaggtccttctggcctcagaacctctgtacttgctgttctttctgcctgaaacacccttccccgcagatccgcaggtttccccat

SEQ ID NO: 266789 - DNA, 163 bp, Homo sapiens; identical to SEQ ID NO: 215845
  chr14:69550073-69550236
  hypo

SEQ ID NO: 266790 - DNA, 259 bp, Homo sapiens; identical to SEQ ID NO: 215848
  chr14:69666620-69666879
  hypo

SEQ ID NO: 266791 - DNA, 66 bp, Homo sapiens
  chr14:69824243-69824309
  hypo
attcctccagggctcggtattcttccttcgggaaggtgggtctagttggtacgggaattagtgatc

SEQ ID NO: 266792 - DNA, 253 bp, Homo sapiens
  chr14:69867591-69867844
  hypo
tgggtgcggtggggcgcgcctgtagtcctagctactcaagaggataaggtaggaggattgcttgaacccaggagttggcctgggcaacattgagactctttctcttaaaaaaaaaaaaaaagaaaataaaaatcagtgacatatagatgaggaaacggagactggataggttcatgaagtttgttagaatcagaagagaggtattttttcagtctagcttttctgactcagactagttcgtagccactaagca

SEQ ID NO: 266793 - DNA, 516 bp, Homo sapiens
  chr14:70236218-70236734
  hypo
atttgccagcctgtctgtgtcgttggccttatgacgaggagtgcctgtgggttatcctaatcgttgtcttggtcactcttggttgggcctggttgactttgccagtcagctcctacagtgatcagttggccacctctagatctgtgtttgccggtctagacgttatcggtgcacttccttgaagtgccaggttgcagcgatcccagagcgttgataacgtgatctgatccctaagttgagacctgtcttcctgtaacgcttccgaataagaggtccggtcgaaaagagttgaaagatacgaaattaggtggtcgttggaatcctgatcgcagtaaagtggtccttggtaactgctcgagtagaacatgtctgcatccgccaatagtccgctaatagggagggctgtgcgattaaaggcttccatcgattgggtagtgtccttcaagtgggtggcgaagagccagtcgggcatatgtcatgaaggtttctccgaccgattaatggtttgctgcttga

SEQ ID NO: 266794 - DNA, 87 bp, Homo sapiens
  chr14:70387802-70387889
  hypo
gagcacctgggccgcgaaccttctctcgcacagacttcccgctgcagggctggccagatgcctcctgagcatcgcctcggctgtgac

SEQ ID NO: 266795 - DNA, 40 bp, Homo sapiens
  chr14:71443359-71443399
  hypo
gattacaagcgtgagccactgcgcccggcccctttgtttc

SEQ ID NO: 266796 - DNA, 43 bp, Homo sapiens
  chr14:71811496-71811539
  hypo
gctctccaactgctgagctcaagtgatccgccagcttcagtct

SEQ ID NO: 266797 - DNA, 67 bp, Homo sapiens
  chr14:72204250-72204317
  hypo
ccgtctgtctagctcgctggctggcctgccgtaccccagctcacacttctttcggtactccactagc

SEQ ID NO: 266798 - DNA, 42 bp, Homo sapiens
  chr14:72431251-72431293
  hypo
atattcactcctggggtgtgcgattctgagctgaaaatcaat

SEQ ID NO: 266799 - DNA, 36 bp, Homo sapiens; identical to SEQ ID NO: 215851
  chr14:72939848-72939884
  hypo

SEQ ID NO: 266800 - DNA, 35 bp, Homo sapiens; identical to SEQ ID NO: 215852
  chr14:72940124-72940159
  hypo

SEQ ID NO: 266801 - DNA, 198 bp, Homo sapiens
  chr14:73029650-73029848
  hypo
tacatccccaccgccgcctgtcatccctcacgtctctgtggccacccgggtgtcactgccagcaccaggcactgctttcacgtaaaatgtccaaatcacatcttcagcaagaaagcaacctcacggattgccccgcctcaaggtctttccaccctctttgagatcagcgttcggagaggtccccgccagcccggtggc

SEQ ID NO: 266802 - DNA, 167 bp, Homo sapiens
  chr14:73146625-73146792
  hypo
agggtggaccccgacgtgccttccctgcagaatcaggagcaagcctcagctggaggccactgccacagcctgctacctcggcctagcctttaatgagggctgcgggaggagggagaggcgggctggggagacaaggcgcctgcgaggagctccggcaggcccagcgt

SEQ ID NO: 266803 - DNA, 193 bp, Homo sapiens
  chr14:73147137-73147330
  hypo
cctggaagcctggcggggaagcagacagtagggcccgctccccacaggaccctccaatcgtcagagccctcgacggcagagaactcgctctccccacaggccatcttgccaccagctctgaggacaccgtgaatatatgggaaagtaaaggggactacgctggagcggatgcggaaggcgctgaggccagggc

SEQ ID NO: 266804 - DNA, 179 bp, Homo sapiens
  chr14:73167782-73167961
  hypo
aaatatctgtcgtgcggaatcagcctgagccccaggagcgctgaagcagcagagagggtcatgccccatcttcccactccagtctccttccccgggggcaagcgcttttgcaccatgcacctctgaagccaccacccctgggaccagtcagccctgcctgtgcacgacctaaggtcctt

SEQ ID NO: 266805 - DNA, 167 bp, Homo sapiens
  chr14:73175070-73175237
  hypo
catgccacaagccccgctccacaaatcaagtttctgggggcaccgagcctttcctcccctccccgatcctacccccatccaaggacctgcaagacaactgagtgatgagcccagcttcccttccgcgacaaaggcagtgagcctgaaggccgcgttattggcttttc

SEQ ID NO: 266806 - DNA, 80 bp, Homo sapiens
  chr14:73178785-73178865
  hypo
ggcccctgctccaccgagagagggagaggaggcagcacgcatgcggacagagccaagaaagcagccgctgagacttccag

SEQ ID NO: 266807 - DNA, 38 bp, Homo sapiens
  chr14:73213601-73213639
  hypo
cccctcacatgttacggcaggcccgacaacggggcatg

SEQ ID NO: 266808 - DNA, 161 bp, Homo sapiens
  chr14:73238398-73238559
  hypo
ggagcctgcacatgcgcatgtcccaggagtggcgcagctcacctgggcctcggtgcctcttctccatccagatgtagcagttgttctgggccaccccagtctgtgagtccaggaagggaagacgcacgctgcgctctgcacacagccgtgagttgtaactc

SEQ ID NO: 266809 - DNA, 225 bp, Homo sapiens
  chr14:73302675-73302900
  hypo
caagatacacccgccggagaccacattcccagacatcccgagggccagccgtcaccacacgggtgcctcggggagatgctggagacacaagtggctttgaaattagcacaacttacatggcctccaggtctgctgtggaaatccaggtccaaagaagaagccagtgaggaacaggaggctgatcattgtgttctcagaaggggttggagcctctggggagggggc

SEQ ID NO: 266810 - DNA, 215 bp, Homo sapiens
  chr14:73302930-73303145
  hypo
catatcacatctctacttccctctccagtgatatgcttccctcactctcccattttgctccctctctcctgccaaactcccagggcaaccctggataataaagtgaccgaatgtgaatgcttccaggtggcacaccagcactccagagaaactgtcagagcagggggcaaacccctggcctactccagccactggataagcgcaccctcctccat

SEQ ID NO: 266811 - DNA, 471 bp, Homo sapiens
  chr14:73318504-73318975
  hypo
cctaccacgggcaacgggtaggcaaccgatatgcccagaaaggcggccaatgggaggacagctcgcccagcctcccgattggccaggcccgccaccagctggaaccatggcgagctttgaggacagcagagccacttgatgggattctctctctcttcaaagcatagagcaaacatcaattaatcctcaaaagacgctttcaagaagaacattatcccttttggagacgcagaagctaagaggtgccgcaggtaggtgaagggaaggcaggaagttgaagaggagaggagaaagtggagcaccgggctttcagccccagttctggttctcctgagagagtcaagttgcaggagaagaatgaacctgcagaagccgggcagggagaggtggtggagaagccgctgctcttgggtgcgcccctcaaggcttcccactgccccatcccctaggagaccacggagtgaaaaaagt

SEQ ID NO: 266812 - DNA, 88 bp, Homo sapiens; identical to SEQ ID NO: 215855
  chr14:73390960-73391048
  hypo

SEQ ID NO: 266813 - DNA, 442 bp, Homo sapiens
  chr14:73391899-73392341
  hypo
gcgtgagccactgcacccggcctgactactctttccctggcaattgctgcgtcaccaagccccaacccaccctgctgagttttccttccaagactcccctcccatccagccggcttgaaccggcctccagtcacgttgtttgttcagctagaatttttctctgccttctcttcaaggccgctcaagcttcatgaagcggttctttattctgactatgcccacttctctcatttccctcatcacccggccccgctccacatactgcatttatctataaactcctgagagccaggagtttagcctgaaatcctagcttcctggttaagagctgaaatgccttcgcacggcgtgcaatgggtgaaccccaccgcctgctttctaacgggtccaagccgcgggcaggggcctgtgttacggagccgcatgacacaccaggcctact

SEQ ID NO: 266814 - DNA, 73 bp, Homo sapiens; identical to SEQ ID NO: 215858
  chr14:73428614-73428687
  hypo

SEQ ID NO: 266815 - DNA, 335 bp, Homo sapiens; identical to SEQ ID NO: 215859
  chr14:73459712-73460047
  hypo

SEQ ID NO: 266816 - DNA, 251 bp, Homo sapiens
  chr14:73464663-73464914
  hypo
cccaaggaatttgaagaggtcgttatgcagccggtctgcatgagttcgatagatgacgaggtctgagatggccaggaccttaagcagcagccgtgttctctggcttagattcacggtggcccccaggagcccttccgtatcgatcactgctactttgtgaactgggtcataggctgcccacactcccacagtgcaggactcctgggtcggggaggttttaaagacttcacgaccataaaagaaagtgtggt

SEQ ID NO: 266817 - DNA, 180 bp, Homo sapiens
  chr14:73482390-73482570
  hypo
ctgctattttccattcctgaactccactagaataacatctcttttagtcaagtcccagtattctgagcaacactattctgggactgtaaacaagtgaggccgccaagccacacgatgggtcttcttaaagaagcagtcttgttgggcacggtggctcacgcctgtacccaagaggtggag

SEQ ID NO: 266818 - DNA, 89 bp, Homo sapiens
  chr14:73482875-73482964
  hypo
agattatagatgactcgtcagcatgaatcatttatttattatgacctctaaataatggatctgggccgggcacggtgttcacgcctgta

SEQ ID NO: 266819 - DNA, 31 bp, Homo sapiens
  chr14:73687399-73687430
  hypo
ttgtggtctctgcccgcgttacctttcctct

SEQ ID NO: 266820 - DNA, 364 bp, Homo sapiens
  chr14:73708407-73708771
  hypo
ggggcaggaaccacccagtccgagcaccttctctggatcacttatgctgtcagcggtcagtctgaacagaatgagtaaatgaataaaggtggcggcctgcgtgttcctgggcctcagcctctgctcccgtctgcacacgggtgtgcatgtgttctgtctctctcttacacacgtgcacattgggcagttgattcccctggaaacagtgcagcaggaaaggggacccctgagtggctccaggtgggagttgaaggaggcatgggtggggcgcctagcgcagcatgagacaggtgagggcaggccccaggtgaggctggctgtatcagctcattccggcttcacgccatgtcgggcagttcacggt

SEQ ID NO: 266821 - DNA, 35 bp, Homo sapiens; identical to SEQ ID NO: 215860
  chr14:73855377-73855412
  hypo

SEQ ID NO: 266822 - DNA, 37 bp, Homo sapiens
  chr14:73926314-73926351
  hypo
caactttctaataagcgggccacattataccctttat

SEQ ID NO: 266823 - DNA, 138 bp, Homo sapiens
  chr14:73967285-73967423
  hypo
ccaaacaggctgcccgccgaactgctgtgaagtcatcagagaagcagtgcaggaagcttgggagaagcttggcggtcataagcttgagctcacctatcaggtagagagcttccacacgctcctgggaatttccttgac

SEQ ID NO: 266824 - DNA, 93 bp, Homo sapiens; identical to SEQ ID NO: 215862
  chr14:74113149-74113242
  hypo

SEQ ID NO: 266825 - DNA, 32 bp, Homo sapiens
  chr14:74142425-74142457
  hypo
agttaaaattgtaggctgggcgcagtggctca

SEQ ID NO: 266826 - DNA, 1185 bp, Homo sapiens
  chr14:74184829-74186014
  hypo
ctttggacaagaacgctagcccctcccccaacgctgagaaaactttctagccctagcaaggccgccagcaagcagcaaagggagagtacctgccgcggcctccctcccaaggaggaggtggccactcaggacacggtcacgggagcagctcagacaggcctagagactgcagggacagcacaggtgtcaggctgcgccccttctcagagaagcccgcagactccctccaagagtttctttttctggggcttggggcagggccgttgcagccttcgaggtcctctggggaggagaaatgctgctccaaagtgggtgagcttgtgcttggccggccacggtggcttcctggaggccgaggggaggagggggaagcaaataaagggaaaagactgcggggcagcagagcagcagaaatcggagtgtgagaggcggtggagtccctcccgaggggaccgggactctcccggtccaggaaagcacgaggacagcttccgacagaccaaatgcaaagagagctggatcctggagcccttaacgctgctcccagggccttcataaataaaagagccgtttatgtcattgtctcatttgtttcgcagggaaaagtccctgcaatcctctcctcactccctcttgagatgccagggtgtctgcgggcgctggcggcggtgcgggaagggccgaggcccaggactgggccagcctggctcccgcgctcagcccttgtcgcccgcaccgctctcctcccgcagggcctgctggtgggcggcggcggcggcagcagcggcctctttctccttcagcctcagcgctgcagccttcttctcctgctctgcgtggctcttcatatgcgcactgcggctcttcaccttgtaaaacaccctgcagccgggtgggggttgctcagaaccggcctagcccacccgggggcccccagcgcgggtgcgcgaggagccccagccttcaccttcacccccacgctgcacagccgcggccggccagctcgcgtcattttccgaaagctgccccatgacgtcacagccctagaaacccgctgagccaaccagaaacgaggcggacaccgcctgtacctcttccccctcccctccaccccacccccgccccctccgcgcaccagcccgcgggggtcccagcggggacagcgctgcccaccttacctgccac

SEQ ID NO: 266827 - DNA, 244 bp, Homo sapiens
  chr14:74196426-74196670
  hypo
agtagaggccagagccttcccgcacagggctgaggatggggggcggcgtgtagggaggtagctcaaagctccgctcagaggggtggtcagctaggcgcacgggagagcgcaggtggctctggtatggggtgatgttggagtagacgggaggggcgatgaaagtgcccgccttggtggggatgatgaggggctcgggcctgggccgctgctttggtttccgcacggaaggctccccctccaactt

SEQ ID NO: 266828 - DNA, 262 bp, Homo sapiens
  chr14:74206017-74206279
  hypo
gccggaagacctgccggttcacctggtggccgaatgccagctggaagggttgcaggggcagtgactggtttgggggtttcttggctgcgtggaaagaattcaggggtgcctggggccgccctacctccagctgcaccttctgtggcatcattggtcgcacatagcggtccagctgtgggccccccgctttctcccgcttcagtgcctcagggtggttatagtaagtcgggactcccactccaggatgcgggctccccttggt

SEQ ID NO: 266829 - DNA, 39 bp, Homo sapiens; identical to SEQ ID NO: 215866
  chr14:74244737-74244776
  hypo

SEQ ID NO: 266830 - DNA, 99 bp, Homo sapiens
  chr14:74273409-74273508
  hypo
ttgacacacccatctcggtgccagctgggcttagagatgctgggaggagcttgtgccaaagtctgcacaaaattgagtttagaaaaaattactgccggg

SEQ ID NO: 266831 - DNA, 35 bp, Homo sapiens; identical to SEQ ID NO: 215868
  chr14:74369046-74369081
  hypo

SEQ ID NO: 266832 - DNA, 91 bp, Homo sapiens; identical to SEQ ID NO: 215869
  chr14:74418713-74418804
  hypo

SEQ ID NO: 266833 - DNA, 88 bp, Homo sapiens; identical to SEQ ID NO: 215870
  chr14:74626548-74626636
  hypo

SEQ ID NO: 266834 - DNA, 161 bp, Homo sapiens; identical to SEQ ID NO: 215871
  chr14:74628386-74628547
  hypo

SEQ ID NO: 266835 - DNA, 85 bp, Homo sapiens
  chr14:74954263-74954348
  hypo
ctggccaaaaaccgcactttatgcggaaacagctagaaagcaaatgtagagcctgaaactccgcggaggaagatcagaaatgaat

SEQ ID NO: 266836 - DNA, 94 bp, Homo sapiens; identical to SEQ ID NO: 215872
  chr14:74957659-74957753
  hypo

SEQ ID NO: 266837 - DNA, 34 bp, Homo sapiens
  chr14:74958053-74958087
  hypo
gtgagccactgtgcctggccggaatgagttatta

SEQ ID NO: 266838 - DNA, 66 bp, Homo sapiens
  chr14:75039841-75039907
  hypo
aagctggatgtttccgcacttgcctacgctcacatgccctggaggctggttcgcacaatgactata

SEQ ID NO: 266839 - DNA, 81 bp, Homo sapiens
  chr14:75062987-75063068
  hypo
gagcagaacttggtacgtgagggatggaggagacagtcgagggcccaagatccagaagaacaaggccggtgggggccactc

SEQ ID NO: 266840 - DNA, 39 bp, Homo sapiens
  chr14:75416062-75416101
  hypo
catggtgacattggccgtctccaccggcacacagtgcag

SEQ ID NO: 266841 - DNA, 71 bp, Homo sapiens; identical to SEQ ID NO: 215873
  chr14:75423075-75423146
  hypo

SEQ ID NO: 266842 - DNA, 285 bp, Homo sapiens
  chr14:75567772-75568057
  hypo
ggttgattcccagacgcttcttgtagttcccaacgcccagctgcccacacttgttgcagccaaaggtcagcagccggcctcgctctgagagagaagcaaaaagaaataacaaggcacaaatgagtcctggaacccagagaagatgcagccaagcagacttcatggattagcttccggttgttagaatatacaaatataaaactagccacatgatcctggacctaggacaaatacagtatctaggcactataaccaattagatccagtcagcgactcgatattgta

SEQ ID NO: 266843 - DNA, 41 bp, Homo sapiens
  chr14:75616514-75616555
  hypo
aacttcttttgggatgggcacggtggctcatgcctgtaatc

SEQ ID NO: 266844 - DNA, 39 bp, Homo sapiens
  chr14:75641440-75641479
  hypo
acccttttaaaaagtaaaaacgaggccaggcgcggtggc

SEQ ID NO: 266845 - DNA, 71 bp, Homo sapiens; identical to SEQ ID NO: 215876
  chr14:75747281-75747352
  hypo

SEQ ID NO: 266846 - DNA, 326 bp, Homo sapiens
  chr14:75747940-75748266
  hypo
gctggagcccctgtgcactccggtggtcacctgtactcccagctgcactgcttacacgtcttccttcgtcttcacctaccccgaggctgactccttccccagctgtgcagctgcccaccgcaagggcagcagcagcaatgagccttcctctgactcgctcagctcacccacgctgctggccctgtgagggggcagggaaggggaggcagccggcacccacaagtgccactgcccgagctggtgcattacagagaggagaaacacatcttccctagagggttcctgtagacctagggaggaccttatctgtgcgtgaaacacaccag

SEQ ID NO: 266847 - DNA, 196 bp, Homo sapiens
  chr14:75749314-75749510
  hypo
tttttattctcacaaaatcacgtggagggttattctacttcaaagatgagcaaattgaagaatggttagaataaacaactttcttgatattccgttatcggcattagaatcttcctgctcgttatcgtatccagcaggctgaactgcctcttgatacttggttaaaaaaaattttcaggccgggcgcggtggccca

SEQ ID NO: 266848 - DNA, 154 bp, Homo sapiens
  chr14:75760174-75760328
  hypo
tcatccaactggagtggcagcgctggaattagagtccaggcagtgtggcttcaatgcctgaactcttagccattagaaaggaaaaacaaagcaaaatcagtatccgcaacaaccttgcaggcacggaggccctcagaagggacaggagaggccg

SEQ ID NO: 266849 - DNA, 404 bp, Homo sapiens
  chr14:76012913-76013317
  hypo
gctcggtgctggccgccagcacgccctcgccccccgaggtggtgtacagcgcccacgcattccaccaacctcatgtcagctccccgcgcttccagccctgagcttccgatgcggggagagcagagcctcgggaggggcacacagactgtggcagagctgcgcccatcccgcagaggcccctgtccacctggagacccggagacagaggcctggacaaggagtgaacacgggaactgtcacgactggaagggcgtgaggcctcccagcagtgccgcagcgtttcgaggggcgtgtgctggaccccaccactgtgggttgcaggcccaatgcagaagagtattaagaaagatgctcaagtcccatggcacagagcaaggcgggcagggaacggttatttttctaaa

SEQ ID NO: 266850 - DNA, 63 bp, Homo sapiens
  chr14:76128639-76128702
  hypo
gtctaaataaatgttggcaggggttttttgttgtttttttttttttgagacggagttcactct

SEQ ID NO: 266851 - DNA, 175 bp, Homo sapiens
  chr14:76431242-76431417
  hypo
gcctctgacctcaggcgttccgcagttacccaaaatgggaatatgaaaggaaaagagaacttccctgaactccagagatcatcaaggctgagttccttgcaaacataatggaaaaccagaaatgactctcaacgacttcgccatctctacccaaacaccccggggacaaacaccc

SEQ ID NO: 266852 - DNA, 136 bp, Homo sapiens; identical to SEQ ID NO: 215880
  chr14:76446058-76446194
  hypo

SEQ ID NO: 266853 - DNA, 603 bp, Homo sapiens
  chr14:76446468-76447071
  hypo
gaggtctccacactgagaaccgtaagggctcctgacagagccggccttcccctttatggcacccagatgcttacagttactgatacgatcgcatgtgcaagaatacatatgtttccctggacagcacaatgtaattccaaattaaaatcagtcaaggatgtgatgtgaattcagcaagccactcagctccagggctcctggcctcccagaagcgccggctcttaacagaatggctctatctccttccccacccacctccccagccccaacggaggagcatcgcacatcctgagccttggtgctggtgaatcctggggcaccctgctgtgtggccagcactaggcccccctctgcagagctcccagctccagttcagaccctccagagcagacaccccagcgagaatttggacttactgtgctccgccagcccctggatcatgtcgaatttatggatttctttggcatagtattccgactcggtgttttcctgggtgcagccttcctccctctccccatgcatctcctccagcagctcccgggtgctgttgtaaagggccaggacctgataggggacgtgggtcatcaccgttggctcaggggg

SEQ ID NO: 266854 - DNA, 160 bp, Homo sapiens; identical to SEQ ID NO: 215883
  chr14:76447285-76447445
  hypo

SEQ ID NO: 266855 - DNA, 316 bp, Homo sapiens
  chr14:76461790-76462106
  hypo
tgttcctccgaggacgcagaactgaaagttagccagattccctcgcaggaatctgagaaatgctgctgggctcatgttcccaaattaggccaatttcctcatcccccagcagcctcactcggccggagctcccttggcactttgcattacgtctctcgccctccgcctgtccccttactggtctgccagccaggcagttattttcagcccaatagggttatctgctgaccctttttggtgacatttttcttctttctcacaaaaataactctcctgattggtcacattttccagcgtttttcatagccgctctcca

SEQ ID NO: 266856 - DNA, 114 bp, Homo sapiens
  chr14:76600679-76600793
  hypo
cccgtccatgctgccgctggcataataaatgaagacaaagtgccggcggcatagaccatctctcccactgcaccactggccgctgccagcttcattattcgcttaagttgccgg

SEQ ID NO: 266857 - DNA, 89 bp, Homo sapiens
  chr14:76628408-76628497
  hypo
ctctaaacaatgaatactttatcgcttggaatctgagagtgacttagctggatggttctggttcagtcttctcacgaggttatagtcta

SEQ ID NO: 266858 - DNA, 32 bp, Homo sapiens
  chr14:76738013-76738045
  hypo
cacaatatttacgtcggcgctacgaacaatta

SEQ ID NO: 266859 - DNA, 577 bp, Homo sapiens
  chr14:76905595-76906172
  hypo
cttcccagccaccctacctgcggggctggacccgcccaccacacccacagcaccttgctggggctgacttcccgatttgtgtccacaggctgctgaacaggatgtcctcggacgacaggcacctgggctccagctgcggctccttcatcaagactgagccgtccagcccgtcctcgggcatcgatgccctcagccaccacagccccagtggctcgtccgacgccagcggcggctttggcctggccctgggcacccacgccaacggtctggactcgccacccatgtttgcaggcgccgggctgggaggcaccccatgccgcaagagctacgaggactgtgccagcggcatcatggaggactcggccatcaagtgcgagtacatgctcaacgccatccccaagcgcctgtgcctcgtgtgcggggacattgcctctggctaccactacggcgtggcctcctgcgaggcttgcaaggccttcttcaagaggactatccaaggtgcgtggtgggcctcaaggagcctgggcgcagggttgggggtggcagccgtgcctgcgggtctggcagaagccctagg

SEQ ID NO: 266860 - DNA, 85 bp, Homo sapiens
  chr14:76998180-76998265
  hypo
accttcatggagaccgacgatgtgatcgggtttccgcttctgctgatctcacctcgcccagcagcaggcccgggcctgccccctt

SEQ ID NO: 266861 - DNA, 241 bp, Homo sapiens
  chr14:77242297-77242538
  hypo
agggaactacttccgccacatcgtgctgggggtgaacttcgcgggccgctacggtgcgctgggcatgagtcggcgcgaggacctgatgtacaagccgcccgccttccgcacgctcagcgagctcgtgctggacttcgaggccgcctacggccgctgctggcacgtgctcaagaaggtgaagctgggccagagcgtgtcacacgacccgcacagcgtggagcagatcgagtggaagcactcg

SEQ ID NO: 266862 - DNA, 91 bp, Homo sapiens
  chr14:77370516-77370607
  hypo
tgtgaatgtgtgagcggataaggatgggcatgctggagagcgagtgagagcgcgtgggagggtacgtgaggacatgcgtgtgtgtgtactt

SEQ ID NO: 266863 - DNA, 33 bp, Homo sapiens
  chr14:77426436-77426469
  hypo
ggcattacagatgtgagccgcctcacccggctt

SEQ ID NO: 266864 - DNA, 103 bp, Homo sapiens
  chr14:77433610-77433713
  hypo
ctaaggcagagggtacgcaggtgggactacagcgctttttgggggacatttggataaaatccatcccattgccgggcgcagtggctcatgcctgtaatcccag

SEQ ID NO: 266865 - DNA, 60 bp, Homo sapiens
  chr14:77434976-77435036
  hypo
agtgactagcactgcgtccggcagcgccagtcccacactcgcccgcgccatggcctccat

SEQ ID NO: 266866 - DNA, 38 bp, Homo sapiens
  chr14:77437670-77437708
  hypo
ttacaggcgtgagccactgcgttcggtctggacttcag

SEQ ID NO: 266867 - DNA, 180 bp, Homo sapiens
  chr14:77580196-77580376
  hypo
gtatccagcagtcacgtggctaaagctcccagtctgaccttcgcttcccccgccagtcctgtctgcgcatcagacagcactctccatgggttagagagcaactctcccctttcaccactgtccgctaattatagctcacctttatgggctgcagagcacctctgccgcagcccagatatc

SEQ ID NO: 266868 - DNA, 163 bp, Homo sapiens
  chr14:77769161-77769324
  hypo
ggatggagtttctgacctgtcggcgcaagagttgtacttgaccatgctcagcatggcagccatgatgaagaacatcaggatggggtcaaggaggatgtactgggacagagtgaggcatcccgtgtctgaaaaacatgagctcgctggtgaaaaagcgaggtaa

SEQ ID NO: 266869 - DNA, 31 bp, Homo sapiens; identical to SEQ ID NO: 215888
  chr14:77935683-77935714
  hypo

SEQ ID NO: 266870 - DNA, 102 bp, Homo sapiens
  chr14:77937151-77937253
  hypo
aggggtgcaaaatgacgccttttgatgaagaacctggagtctagcttgaatcaaatcaacaggcccttcctaacagactcctaacagagacgattaaaaatg

SEQ ID NO: 266871 - DNA, 101 bp, Homo sapiens
  chr14:77939354-77939455
  hypo
gctcccgccgttggcgctgctcctcacacacaggtgctcctaaagcctgcagccacctgcgcagtgtctttctcctttgcattgctcgaataaatgtaatt

SEQ ID NO: 266872 - DNA, 69 bp, Homo sapiens
  chr14:77942016-77942085
  hypo
ggagggagcacagcgtggaggcggctccagtcccccttgcacaggatccagggcgtcgtgtcgaacttg

SEQ ID NO: 266873 - DNA, 37 bp, Homo sapiens
  chr14:78152933-78152970
  hypo
gcgccttatgtaagcgttggcatttctcttagcaatt

SEQ ID NO: 266874 - DNA, 43 bp, Homo sapiens
  chr14:78165392-78165435
  hypo
ggcctgagccactgcgcttgcccttattcggtctctttagcac

SEQ ID NO: 266875 - DNA, 31 bp, Homo sapiens; identical to SEQ ID NO: 215889
  chr14:78166103-78166134
  hypo

SEQ ID NO: 266876 - DNA, 144 bp, Homo sapiens; identical to SEQ ID NO: 215890
  chr14:78189475-78189619
  hypo

SEQ ID NO: 266877 - DNA, 36 bp, Homo sapiens
  chr14:78228357-78228393
  hypo
ttttaagatcaactcttggccgggcgcagtagctca

SEQ ID NO: 266878 - DNA, 33 bp, Homo sapiens
  chr14:78247790-78247823
  hypo
aaaaataattaggtgcggccgggtgcggtggct

SEQ ID NO: 266879 - DNA, 31 bp, Homo sapiens
  chr14:78268994-78269025
  hypo
attaaaatttggttcctagccgggcgcggtg

SEQ ID NO: 266880 - DNA, 95 bp, Homo sapiens; identical to SEQ ID NO: 215891
  chr14:78335482-78335577
  hypo

SEQ ID NO: 266881 - DNA, 34 bp, Homo sapiens; identical to SEQ ID NO: 215892
  chr14:78335637-78335671
  hypo

SEQ ID NO: 266882 - DNA, 37 bp, Homo sapiens; identical to SEQ ID NO: 215893
  chr14:78388714-78388751
  hypo

SEQ ID NO: 266883 - DNA, 207 bp, Homo sapiens; identical to SEQ ID NO: 215894
  chr14:81231425-81231632
  hypo

SEQ ID NO: 266884 - DNA, 75 bp, Homo sapiens
  chr14:81439765-81439840
  hypo
aaaaaaaatctgtgtacttattctcagaggcttagagctaccaaacatactttcccgtgtcgaaaggttttaaga

SEQ ID NO: 266885 - DNA, 93 bp, Homo sapiens
  chr14:81489152-81489245
  hypo
agacttcatctcaaaagaacaaaaaaaaagatgtggggcgtttgggaggtgattgggtcatgaaggtggagcgctcattaatgagcttattaa

SEQ ID NO: 266886 - DNA, 114 bp, Homo sapiens
  chr14:81609903-81610017
  hypo
ctgtctttgcaagcgagttatcggtgtatacgctgacggtcatcaccctggagcgctggtatgccatcaccttcgccatgcgcctggaccggaagatccgcctcaggcacgcat

SEQ ID NO: 266887 - DNA, 300 bp, Homo sapiens
  chr14:81879110-81879410
  hypo
aaaaaatgaccacgcgcaaagcagtcttcgcaaaggggaaaatatgattgctttgtgacctttaaaactttctgtcaaacattaaaagctttcttcttagaggcgccacggcttccatagcgatggcagctccagccgggcgatgcttagcacctccccaggagaccgttgcagtcagccagcccccttctccatgggtaaccatgtgcgaccaaaaggccgtgatcaaaaatgcggacatgtcggaagagacgcagcagaactcggtggagtgcgctcctcaggcgctggagaaataca

SEQ ID NO: 266888 - DNA, 37 bp, Homo sapiens
  chr14:81904519-81904556
  hypo
ttgaataggtggacacgcatgggttgaacctcacctg

SEQ ID NO: 266889 - DNA, 102 bp, Homo sapiens
  chr14:82295806-82295908
  hypo
cacactcatcagcccttgggtggttgatgggacgggggggccccgaagcagggggctgcgctcgtgggagaggctcaggccgtgcaggagcccagggcttgg

SEQ ID NO: 266890 - DNA, 34 bp, Homo sapiens
  chr14:86054380-86054414
  hypo
ttctcctgcctcagcctcccgagtgatatttcag

SEQ ID NO: 266891 - DNA, 75 bp, Homo sapiens
  chr14:87963380-87963455
  hypo
aggatactgcagccacgctttatcttcttcatagtttttcttcagggcggtcatcagggtcgtttttatcctttc

SEQ ID NO: 266892 - DNA, 78 bp, Homo sapiens; identical to SEQ ID NO: 215895
  chr14:88457502-88457580
  hypo

SEQ ID NO: 266893 - DNA, 77 bp, Homo sapiens; identical to SEQ ID NO: 215896
  chr14:88457820-88457897
  hypo

SEQ ID NO: 266894 - DNA, 33 bp, Homo sapiens; identical to SEQ ID NO: 215898
  chr14:88527464-88527497
  hypo

SEQ ID NO: 266895 - DNA, 33 bp, Homo sapiens; identical to SEQ ID NO: 215899
  chr14:88527737-88527770
  hypo

SEQ ID NO: 266896 - DNA, 147 bp, Homo sapiens
  chr14:88587438-88587585
  hypo
aagaagcaagtctcccacatcgatgacaggagatactccctaagtactagcgagaataaaaaactgaacttgatagaccaagacaaagacaccaaaacaccggaagacccgttcagatgaacactcgagttgtcacagccaatggat

SEQ ID NO: 266897 - DNA, 168 bp, Homo sapiens; identical to SEQ ID NO: 215900
  chr14:88625251-88625419
  hypo

SEQ ID NO: 266898 - DNA, 36 bp, Homo sapiens; identical to SEQ ID NO: 215901
  chr14:88686789-88686825
  hypo

SEQ ID NO: 266899 - DNA, 102 bp, Homo sapiens
  chr14:88954653-88954755
  hypo
cttggcgctcttgccgcagcacccagtgtggaggcgaacactgcccactgtagtagccggctctactaagaaaacaaactacaaaagcgtgtacctgccaaa

SEQ ID NO: 266900 - DNA, 104 bp, Homo sapiens
  chr14:89291876-89291980
  hypo
acaatgtacgtgagcggtacaattctggtgggcaggtggctcctggaataggcaaaaaaggagaaaatgggagaacagaagtagcgctgcggcagtttgtcagt

SEQ ID NO: 266901 - DNA, 180 bp, Homo sapiens; identical to SEQ ID NO: 215906
  chr14:89292610-89292790
  hypo

SEQ ID NO: 266902 - DNA, 137 bp, Homo sapiens
  chr14:89579158-89579295
  hypo
gagaccaagaacccaccaattccagacacagtggggcgcactgggcatggtacaggagccctttcacctgcgcctgccgacggttgcagcagccgaggggcccgggcactgcagcctgagcccggccgtgcacccac

SEQ ID NO: 266903 - DNA, 435 bp, Homo sapiens
  chr14:89627946-89628381
  hypo
gtgcacagggccaatcttcaggcttatggcttttggaacattttcttaatttaatagagaacagaattcaatgattagcaacatcactaaaaatttaccccatttcttctccatgagtcactgacacccgatgcgcatgaacagtccaacgtccacctcgtaagatgtcatcgggcttcagggttcagaagcatcgaggactggtggccggccctctgtgctcgccgtgtgacaattccagtggctttcctggcaccatcagatgcctggtgccacaagcttgggtctgctcctagggggacgaggggttcctcctcctcctcaattgctttatgtgccttcactcagtgaacccaatgggatggacaacctgactttttaaacctaagggttgggcctgaacgatgattactttgcccacgtgccttctaggtg

SEQ ID NO: 266904 - DNA, 181 bp, Homo sapiens
  chr14:89646424-89646605
  hypo
gggccgcaggctggcggtggaccctgatccggggctgacagtggagatggagagcatggaggagagaaatgtcccaaggaagggttcatgcggtttggcagctggcctcattcttggaagcaggggaatgatgccacctgctatttatagaccacgtaccaaagctcgcctcacatctgat

SEQ ID NO: 266905 - DNA, 226 bp, Homo sapiens
  chr14:89657648-89657874
  hypo
gaaaagaacatctgccccagcgcagcgtcccagctgccctggggcgaaattcactaatagtgcggtgatgccgcgtgacagaagctgccgcctgtgccctgtccaaataaatgaagtgtgcaattgaagtcgacatcaaaatgccttcccttgcagattactgcctctgtgtccgccaaacccaatgactaatgatgggggacaaggggctcgcacttgtcagttt

SEQ ID NO: 266906 - DNA, 166 bp, Homo sapiens; identical to SEQ ID NO: 215910
  chr14:89711495-89711661
  hypo

SEQ ID NO: 266907 - DNA, 207 bp, Homo sapiens
  chr14:89720605-89720812
  hypo
atcaccaccatcatcgccatgctatcctgccttctgcaaggctgcttgaattgcctgagcctggaacgtttccccaacagaagtcagcaagcttgttccctaaccagggactcagttcaaatggctgagtgtctgtaagggaggtggggagaaggggtggtgcagggaaaggagcgagtggtcagaactgcacggccagacagacag

SEQ ID NO: 266908 - DNA, 216 bp, Homo sapiens
  chr14:89775981-89776197
  hypo
ccctctgggtgtgcgttttaacccttccacagccagccaaggcccggcctctacagcagattcccacaggggtgcgacggaaccattttctggtttaatgctgaaatggcaggcttgagcctcacctcactcagtaaaaagaatctcacttagtaatgaaaacccaattaagctctgccaagagtgaccgatggcgttggctgcctggggctctca

SEQ ID NO: 266909 - DNA, 155 bp, Homo sapiens
  chr14:89786299-89786454
  hypo
aagctcaaggatgacgctttgcatttcattactaagacaggtaaacatcagatctgctgcagaatcaaacacaattaaaactttaattaactgaaacctaactagcccccaacttcaaataaaaaacatttgcgggcagccgggaaggggaagat

SEQ ID NO: 266910 - DNA, 152 bp, Homo sapiens
  chr14:89803723-89803875
  hypo
aagagatttaaacacggattatgtatctggtagagaaagaacacaattgagtgtttgggctggcctggggtgaaaacttttcccattatgactggggcagggagagctccggcgccttacctttcaagtgccagttccgcagaaatgtacag

SEQ ID NO: 266911 - DNA, 247 bp, Homo sapiens; identical to SEQ ID NO: 215911
  chr14:89811174-89811421
  hypo

SEQ ID NO: 266912 - DNA, 40 bp, Homo sapiens
  chr14:89819261-89819301
  hypo
gccagaagctgcagcgagcggagatcgcaccatttgcact

SEQ ID NO: 266913 - DNA, 118 bp, Homo sapiens
  chr14:89875710-89875828
  hypo
gcgggagaacagctcctcccagtgtgcctcaacacagggcatccaacacccacttgtcactcccaaggctgactgatgaataatgttcccaagtctcgctgcacgccttggcgttggt

SEQ ID NO: 266914 - DNA, 207 bp, Homo sapiens
  chr14:89895064-89895271
  hypo
ttgctcgcagcagacgtcagagagacctcagcgcaggggtccaagcacctggccaaggcaccctgcgcaggcctccacgccccacgagtgcctgcagaggctacctgaggaccaaggtgggcatgccacggtgtcctggacttctggatggaggccagtcccagggagtgaatggcagagctctccggaggctgcccaggccaggtt

SEQ ID NO: 266915 - DNA, 145 bp, Homo sapiens
  chr14:89938161-89938306
  hypo
accagcacctggttcgtcatttgcacctttccctcggccacggagatgaggaatgacccatcagcttcgatccaggaatgggaataaagatgacttggaacagagtcctcatcaatcttcaacagaaatgtagagtaagcaagaa

SEQ ID NO: 266916 - DNA, 235 bp, Homo sapiens
  chr14:89956432-89956667
  hypo
ttgccacagtgctgcgcccagctggcccagtgatacggtgcccaggcgctgggaggcatgtgctttcttttttccactctttttaagggtctgaacttgcctgaattcagcagctgccgtgtcctcagcgacggctaatgaattgttagctttgctcctggttcccctgagctcaactcccagtccacttttgtttttaattctatcccaatgatatcagcgtttagcaaagagt

SEQ ID NO: 266917 - DNA, 88 bp, Homo sapiens
  chr14:90097939-90098027
  hypo
cttttttttaatacacattttccaaagtctcactttcagaaattctgagtcagtagacctgagattcggcctaggaataaacattttt

SEQ ID NO: 266918 - DNA, 39 bp, Homo sapiens
  chr14:90323676-90323715
  hypo
tgctataatcatgacgcacgaagacggaaagactggttg

SEQ ID NO: 266919 - DNA, 235 bp, Homo sapiens
  chr14:90358154-90358389
  hypo
ccgctaccaatttcgggtcgcgctgctgggggacgcggcggtgggcaagacgtcgctgctgcggagctacgtggcgggcgcgcctggcgccccacagcccaagcccgagcccacggtgggcgccgagtgctaccgccgcgcgctgcagctgcgggctgggccgcgggtcaagctgcagctctgggacaccgcgggccacgagcgcttcagctgcatcaccgggtccttttaccgg

SEQ ID NO: 266920 - DNA, 167 bp, Homo sapiens
  chr14:90429698-90429865
  hypo
tcccaggaggacctcggctggtgtctgtccagcagtgatgatgagctgcaaccagaaatgccgcagaagcaggctgagaaagtggtgatcaaaaaggagaaagacatctctgctcccaatgacggcactgcccaaagaactgaaaatcatggcgctcccgcctgcca

SEQ ID NO: 266921 - DNA, 163 bp, Homo sapiens; identical to SEQ ID NO: 215917
  chr14:90505789-90505952
  hypo

SEQ ID NO: 266922 - DNA, 91 bp, Homo sapiens
  chr14:90747429-90747520
  hypo
gaagccccaggaaccgaatctcatacaaaccatctgaagaactcagccaacaagatgctggccggacacggtggctcacgcctgtaatccc

SEQ ID NO: 266923 - DNA, 165 bp, Homo sapiens; identical to SEQ ID NO: 215920
  chr14:90754241-90754406
  hypo

SEQ ID NO: 266924 - DNA, 177 bp, Homo sapiens
  chr14:90871525-90871702
  hypo
attggtttacctcaggatgacgtgcagaaaaatgggtgaaggataaaccgttgagacgtggccccactggtaggatggtcctcttgtacttcgtgtgctccgacccatggtgacgatgacacaccctggtggcatgcccgtgtatgttggtttagcgttgtctgcattgttctagag

SEQ ID NO: 266925 - DNA, 214 bp, Homo sapiens
  chr14:90980461-90980675
  hypo
cgtgttctgtgttacgagtcccagtctcttcatttctaacaaggggctcatgcatcacgcctggctcacctggctgcgtgcgcatcaaatcagatgagtgtgtgaggacgttcattctaaactttacaagctctgagcaaacagagggagttattattgggccaagcgggcagaccagacattagagttgatgataaatcggtcgggcccctgt

SEQ ID NO: 266926 - DNA, 194 bp, Homo sapiens
  chr14:90983275-90983469
  hypo
caagccactctccagggccacgggatggcagcctgatgagtcagcgcagttacctgatcaggcagcgtcgcgccatgagaggtgatctcatgcgccagtctccagccgctcctcgctattccccaggctctgggacggtggagttagctgaccaggcagaagttggctccctggcagcacgctggtggtcccaa

SEQ ID NO: 266927 - DNA, 164 bp, Homo sapiens
  chr14:90988561-90988725
  hypo
ctgaaggcctgggccgggagggggaagaatgtccagaacaccgcctgctgggctccttgtgcggtgtgcctggtgcacagtgggtgcctgctgaacgtggcactgtgctgagtgaggtgggctcagcaattgcgctagcacagggcgctcgggctgagacccct

SEQ ID NO: 266928 - DNA, 90 bp, Homo sapiens
  chr14:90989573-90989663
  hypo
ctggccctgggttccgcagagctggtcaccaatggcctcactgatcagagaagggcgggatgcccggggctgggggcttaaagctccctc

SEQ ID NO: 266929 - DNA, 168 bp, Homo sapiens
  chr14:91007706-91007874
  hypo
cctgctcagagcacgcgggggatgatggtgaagggcacggcggggctgctggcctccagctccaaggctgtcaggaagcactccgtagccgccgcatcgttgccctgagcttggaggacctcgcccagcccgttccagacctcgtgggctgtcgagttcacctgcacc

SEQ ID NO: 266930 - DNA, 103 bp, Homo sapiens
  chr14:91077534-91077637
  hypo
agcaagtgagtccatgaacacgccatccatgaagagttgtcttcatgaaccaatgctccacacctgcgcttctaaaacccaggctgcacggaaaaatcaccca

SEQ ID NO: 266931 - DNA, 176 bp, Homo sapiens
  chr14:91091768-91091944
  hypo
tctgagggcccaccgtatgctgctcttggagccactgctctcctggctgggtttccaaagcaccccaatctcagaaggtgttatatctctgcaaacagcagcctctggtcccaggctgagtcactgtcactgaaaatcaataccgtcactggcccgacctccgccaggtgagccta

SEQ ID NO: 266932 - DNA, 131 bp, Homo sapiens; identical to SEQ ID NO: 215923
  chr14:91127198-91127329
  hypo

SEQ ID NO: 266933 - DNA, 187 bp, Homo sapiens
  chr14:91589623-91589810
  hypo
agttagacagtaaacggaggggcccagccaagcatattcccatgctgcaaagccacttgatattagcgcacatcttgaagcaataaacgctgccctggcaggccctggcaaatggcacttgtgaatatttagaaacggagcagccctgtttgggaaaactgtcatactgacgcgctaggttgggaga

SEQ ID NO: 266934 - DNA, 35 bp, Homo sapiens
  chr14:91590535-91590570
  hypo
ctgggattacaggcgtgagccaccacaccctgcca

SEQ ID NO: 266935 - DNA, 275 bp, Homo sapiens
  chr14:91691046-91691321
  hypo
tcttggtgcagcacaaagtccggagtggcgtctcgggcatcgtgggcatggaggtggatgggctgcccttccacaacacccacgccgagatgatccagaagctggtggacgtcaccacggcacaggtgtaaccgtccatgttccgtgtgagcagagtccctaccaacgggcaggtctgcatccggggagaatgcagctgcttctggcgacaatcctgctagtaaacactggtcttcggtgagcaacgaacactcgcctggcctgggaaactgcat

SEQ ID NO: 266936 - DNA, 86 bp, Homo sapiens
  chr14:91691774-91691860
  hypo
tttgtccagggtacccgtgctgtctacaccacccgcctgccagtcacccagcaggtgatcagatcgactgtcatggtattgcagtg

SEQ ID NO: 266937 - DNA, 157 bp, Homo sapiens
  chr14:91701162-91701319
  hypo
gccagaagggcagcgagcagatgtagaagaggtcggccaccgtcaggttgcacaggtacacgcccagctcgttccgggccttgatctgcaggtagccgaagtagagggacaggcagttggccgggaagcccaccaccagcacggtaacatagaccac

SEQ ID NO: 266938 - DNA, 161 bp, Homo sapiens
  chr14:91712444-91712605
  hypo
ttcctacgtcagttgcttcttgcaggccttatgttacgagcaaaggcttcagcttgttgtggtgcagtagcgtgcatttagacacacgtgctacttctgagttgcggaagtgtggctggctttccctgatgtcatataggaggacgcggggttaggagcac

SEQ ID NO: 266939 - DNA, 53 bp, Homo sapiens
  chr14:91731775-91731828
  hypo
ggctggcatagctgcgtacaccttaggacggtcagctccgcaaagcccctagc

SEQ ID NO: 266940 - DNA, 62 bp, Homo sapiens; identical to SEQ ID NO: 215925
  chr14:91739006-91739068
  hypo

SEQ ID NO: 266941 - DNA, 408 bp, Homo sapiens
  chr14:91744077-91744485
  hypo
agggttggggctggcggctggcttgcggtgacttgtcagctagtgctctagtcagcctctcatgtccaagccagtcctgtgcctaggccacgccacccccaccccatcctttctgcagctatgatcttgagccaggaagagacagagagggaagagagacgggccaagtccgtgtccggatcactcacatgggtgggggagctgcggttgctctcctccaggaactcctccaaggtgaccatctcactgctgggggaggccgagcagggccgcactccgacgtagggaggggctgtgcccctcttctgggcaccctcctgtgggagaggcccgttccgaggcaaggggtactcgtggcggccgagggcgttgcgtcccggtgtgctggcttcccggggcaaagtggcc

SEQ ID NO: 266942 - DNA, 172 bp, Homo sapiens; identical to SEQ ID NO: 215927
  chr14:91750811-91750983
  hypo

SEQ ID NO: 266943 - DNA, 287 bp, Homo sapiens
  chr14:91757479-91757766
  hypo
gtgaatttactcatcggcccagcctggaacctggtgtacccggggctggtatttttccaggattgagatgagggtgctcaccaccgtcatggtcactgagtttggaatacgggaatggtggcatgcgccgtgggttcagggagctctatgaccctgagatttactgaagcccctgggacccagctgtgagcgagctcaaggcagcaaacttctaacaatctgaaaactcacgctcggaagacccaaggattctccttccaggttgttcaagacgtgagatgctcctg

SEQ ID NO: 266944 - DNA, 112 bp, Homo sapiens
  chr14:91758193-91758305
  hypo
gcacctctgcttaccggggagaccttggccttcctcatacaaacagaaagcttctgtttgcacttagggagtcacggggctgcgcccacagtgcattcggagccgcgctgcc

SEQ ID NO: 266945 - DNA, 340 bp, Homo sapiens
  chr14:91766243-91766583
  hypo
tgtgcagggccgggcgccggcgctcacctgtccagctcgccccgcagcctctggttctcgcccatggcgagggcgtttgtcctctgctcctgctgcagcgcctctcgctcagtggtcaagaccttctcccgctcctccagctccgccttgcgcttcagcatgtcaccgtgcctgttggagggaagcacctgccgtgagtctggccagggccttcttttccgacaggtaactcacatcccagaggatctgcgtgcctcccgtgagaaaatgggattcctctggagagtctctctgcagaagtgaggggcatggggcagggaacaggcggggagcgcagcca

SEQ ID NO: 266946 - DNA, 395 bp, Homo sapiens; identical to SEQ ID NO: 215929
  chr14:91770038-91770433
  hypo

SEQ ID NO: 266947 - DNA, 100 bp, Homo sapiens; identical to SEQ ID NO: 215930
  chr14:91775792-91775892
  hypo

SEQ ID NO: 266948 - DNA, 199 bp, Homo sapiens
  chr14:91780259-91780458
  hypo
ccagcttctctgcccgctcccccttctccttggcctgctccaagtccctgtgcagctgccgcttctcaaactccaactggctgagcttgccattggcctccgtcaccgtctggtggagggctttgttctccttctccacgtctttcatgcgggcctcactgctgacctgcgacctctcccgcagcgaccacatggctcg

SEQ ID NO: 266949 - DNA, 168 bp, Homo sapiens; identical to SEQ ID NO: 215931
  chr14:91781818-91781986
  hypo

SEQ ID NO: 266950 - DNA, 32 bp, Homo sapiens
  chr14:91801071-91801103
  hypo
gtgcatcaaggtaacgccgggccttgacatga

SEQ ID NO: 266951 - DNA, 252 bp, Homo sapiens
  chr14:91801542-91801794
  hypo
tagaaagcagggctcgtgcatcaggcagacttggggccacgtagcctgagtgcttaaatgttctgaaacaccccacgccacccgcctcgtgaaaatgcttgatgggcacgatgcacgctgcacaccttccatggctgggccctgagagcccctccagcctcacctctcaccgtccacccagacacaccaggaccttgtggccctgacctcaggtgtctctcctgcacgctgctttctcgggcttccaggcct

SEQ ID NO: 266952 - DNA, 413 bp, Homo sapiens
  chr14:91804341-91804754
  hypo
tccctacctccatgcgggccttgtagaagtccacgtcgtgcagcttctccttgcagcgggtcagctccagctccagcctctccacgcggttcgccttctcccgcagggaatccagctcgtctcgataggcacgagcagaccgggcgtctgccgctagctggatgttctgcaaggtggacaaaggcaggagaacctagcttagggcatcctctaggaagggcagaaaggccattgcccttctgcatggtgtctccacgacggcccaggacaagccagctcctggtggccgggggcctccatgtgccaccaccacacgggatctccacctgctgtcactaagaaacagggtcatccccatagccgtgctcaggacaagtggctcttgtgtggcttaaaagcgctgctgttgagct

SEQ ID NO: 266953 - DNA, 1310 bp, Homo sapiens
  chr14:91805118-91806428
  hypo
aaactatgtccatccgccactcaggtctccctccctgtgtgtggggcaggtaaggagaccccagcggcagctgtaccaccccacagccaggctccacaggtgacatccatcagctgcaggaaacctgggagaacaggctcaccagattggagggaaggaggggcacctcatccctccagccaagaaaacacatcaggtgtggtcgtcccggccccaagctggagctgagcgtggactggaggctgcttctgtggacaacttgcaccgtctggacgggaggaaaccctgaagaccgggaagaatccccgcccccatccctgtgcaggcctcagaaggggaggcagctagtccgaggtcaaagagtaagctcagggcagaccccagctgactccggggcacacgtcagagctgtgccattggcagcaccacacatgtgagtcgacaccacaccagaaacatgtctgcaacacacacaaaggtaggagaagcagccggggactcacagctcctgcctgacgcgccgcagcctggccttggtgtcggccagctctacggccaggtgctgcttgtcttcgctagagaggctgctggtggggctgggagtggagtcggcgctggaggacttgatggggctgggtggatgctgtgcctgcaggtagtcccgttcctgagtgaggtccacgatcagctgcagccgggcagagagggggatggaggagaacaaacggggttaaccagcacaacgcctgagcttgaacagggtgaagaaaccgccaaaagacagatatttcagcggagactaagaaacgaggaggaaggtgggaaaaggctggcatgggttttgaaaagaggtgaaatatttagtgaaacaaaagggagtgtacgaaggaggagggccccaagctccgcgtcctgattccctgtatcctcccacaggcccgaggtgaccatgcactgcaggggccgtaaccagggaaagcacgcacgtcccacccccaccagaacctcagcagcaggaccgaggcgtctaggctgaagatgaagggagaggagatgaaggggcctaagccccttcccaggctgaccgggccaccgacccgcggacgcacctcggtgcactcgtcccgctggtcgatgagcctccgcaggtggagcaccatgctcctcgacagggcctccagctcctccggagccacgtcgggcagctccagccactgcaggtcaaacacgttctcttggttgtgagtcacctgtgggcacacatggcagggcactgcaggggcggcagagacgggcgcccacttccctca

SEQ ID NO: 266954 - DNA, 199 bp, Homo sapiens
  chr14:91808060-91808259
  hypo
ccccctagggtgggcggcctccttagctgataccacctttgccaacatcaatggcaaagggccgggaaggtcaggcctcaaaggccaggggctcctcctcctccactccgctgacgctcagtgcagagccctcccggcccctcgctggggggcctgagttggggctgggccaagtctcccaaggcggtctttctgggac

SEQ ID NO: 266955 - DNA, 104 bp, Homo sapiens; identical to SEQ ID NO: 215934
  chr14:91825112-91825216
  hypo

SEQ ID NO: 266956 - DNA, 64 bp, Homo sapiens
  chr14:91837061-91837125
  hypo
gatggtgggggaggggaaggcgggtcagtaggtggacacatccgtgcatacagaccccaacagc

SEQ ID NO: 266957 - DNA, 53 bp, Homo sapiens; identical to SEQ ID NO: 215935
  chr14:91841581-91841634
  hypo

SEQ ID NO: 266958 - DNA, 224 bp, Homo sapiens
  chr14:91841940-91842164
  hypo
cttccccgcagggccggccgagagcccacacttcaggcaaataaaagcaccctcaccagctgttcccatggccaagccaagcaggatggcagtctgtgccagccctgcctcggcagcaagtggactcttccagcccaagccacgagatgaggggagactcaaccctgtccgtgcccggagcaccttccctgtgcgaggctcctcagggcgagtggggggcaaat

SEQ ID NO: 266959 - DNA, 236 bp, Homo sapiens; identical to SEQ ID NO: 215936
  chr14:91842554-91842790
  hypo

SEQ ID NO: 266960 - DNA, 189 bp, Homo sapiens; identical to SEQ ID NO: 215937
  chr14:91848934-91849123
  hypo

SEQ ID NO: 266961 - DNA, 207 bp, Homo sapiens; identical to SEQ ID NO: 215938
  chr14:91850943-91851150
  hypo

SEQ ID NO: 266962 - DNA, 213 bp, Homo sapiens
  chr14:91871519-91871732
  hypo
cttgagcatcctagcgacacggcccacgctctttaggaaaggcctggccttccagactgtcactgctccagtgtgccgcagagaagaaggggacagttaggggcacagagccatctcctggcaaacaaaacccagagccagaatgcgcgaccttgatgtgtctaccaaaaagccacaggtgagagggaggcccgcccacgcagcaccccagtc

SEQ ID NO: 266963 - DNA, 199 bp, Homo sapiens; identical to SEQ ID NO: 215940
  chr14:92492743-92492942
  hypo

SEQ ID NO: 266964 - DNA, 43 bp, Homo sapiens
  chr14:92507492-92507535
  hypo
accaggcagtagtaattctccgtgaaagctgaatttttttttt

SEQ ID NO: 266965 - DNA, 43 bp, Homo sapiens
  chr14:92507655-92507698
  hypo
ccaagtagctgggactacaggcgcccattcttcattttactaa

SEQ ID NO: 266966 - DNA, 39 bp, Homo sapiens
  chr14:92573383-92573422
  hypo
atagctaggccgggcgaggtgcttcacgcttgtaatccc

SEQ ID NO: 266967 - DNA, 43 bp, Homo sapiens
  chr14:92825888-92825931
  hypo
gccaagatcgcaccattacactcccacccgggggactgtgaga

SEQ ID NO: 266968 - DNA, 44 bp, Homo sapiens
  chr14:92992506-92992550
  hypo
actgagctattgcccgggcgaggtggttcacgcctgtaatccca

SEQ ID NO: 266969 - DNA, 338 bp, Homo sapiens
  chr14:92994813-92995151
  hypo
aacagagtcaagaacgtagtaggcgttgtttccatggtcttctgaagggccctggttccacacccccttgtccactccactcacagtttgcactgcctcttgtgaccccgtgggggtgtggacggcatgatcatctgggaaatggggggcaggtccccagcgccaggtctgcccttgcttactgtgagacctctccgatcattgcttcttccattcatgcagtgtggagatacagggctgcactgtgtcccgggtggagtgtgagcagtgtgtagcacagcagccccgcacagtaggcacttcgcagcaggcatgaaaatgtgcggcttcatgatgtg

SEQ ID NO: 266970 - DNA, 44 bp, Homo sapiens
  chr14:93042658-93042702
  hypo
accattgcttagagcgtgagaaggagaagcgagtgtccgtcaac

SEQ ID NO: 266971 - DNA, 225 bp, Homo sapiens
  chr14:93115303-93115528
  hypo
gggcagcgcatggcacgtggaggaaggagtgaacggcagatagagtggagtgaagactcggtagatgatgccagagaagatgtgcaggggccagttcctgcagactggaatgccaggctaaagggttgaaagcgattctctacagagaaccaccaagggcctgccgtatgcccagccgaggaccccaggaggagaatggagtagagggggcggctacagccgtga

SEQ ID NO: 266972 - DNA, 129 bp, Homo sapiens
  chr14:93140294-93140423
  hypo
aaccagattttagatacagtcgttgtttcttgagtgtagtgcgtttgttaactttttccacctggttcaaaatatgagaggctattttgataaacacatatggggcacgcagttttccttttgcctcag

SEQ ID NO: 266973 - DNA, 100 bp, Homo sapiens
  chr14:93149543-93149643
  hypo
ggcactggaagggctgggcagaaaggcctttgcagtggtgggaaagcccaaggaagcaccatggaggtgggcggcgctggggacccgagagaccagggtt

SEQ ID NO: 266974 - DNA, 1094 bp, Homo sapiens
  chr14:93154116-93155210
  hypo
gctcgcggcagagacgggaaaggcgcaggtgccggactcgcagacagcttggcgcccgccacccgctatccatccagggaggggcctgggccgggagagggcgcctgaggagacagggccccgccgtgaccacaggcccctcgcgtctccgcaggacttcatctgcgtgtcgtacctggagcccgagcagcaggcgcggacgctggcgtcgcgggcggacacccaggcccaggcgctgtgcgcgcagtgcgcggagaagttcgcggtggagcggccgcaggcgcaccggctgttcgtgctggtggacgggcgctgcttccagctggcggacgacgcgctgccgcactgcatcaagggctacctgctgcgcagcgagcccaagcgcgacttccactttgtctaccggcccctggacggtggtggcggcggcggcggcgggagcccgccctgcctggtggtgcgggagcccaacttcctgtgaggccctcccggggcgcctcccctcacccccaggcgcacgtctggccccgcctctggctgcgcactcccgaccgcgacgtccacgcagcagagggacatgggccattccatgacgtgcccaggccaacgtcgcaggacagttgtgaaaataacatgacgctcgtccaaggccacttcctgagggcaagtcctaatagccctgagacaccgagacggcatgttcttcattagacggaaagggaaactgaggctcaggagagaggcgctccaggccgctgcagccaacaaaccggcgccctcttcacacgtagctcctcaggccattccccatgagtcccccacacccaccccatcctcggtctttgcaaagaagggcccgagcttagtttccccaggactggcctaggaaggagcaccggccacagctgctccccgtgccactcagggtggacccagcatctcaggagcacctcagggtgtcggttaagagacaggcctccacccctgcaccagagcctgctcttagctcccggtgcccccagaccccgcagctctgtgcccggcaagaagcagctagacacacgccagggcgccaagcacggccagctccgcgg

SEQ ID NO: 266975 - DNA, 103 bp, Homo sapiens
  chr14:93226911-93227014
  hypo
gtggggacgcctgcctgattattcaccagcattccagaggtgttcgatcactgcggggacgcctgccttgatcctccacctcggtggcaagtactaccactcc

SEQ ID NO: 266976 - DNA, 112 bp, Homo sapiens
  chr14:93415129-93415241
  hypo
cacgcccgggcgccgcccacgctccgagggacccatgcccgggcaccacccacgctccaagtccgggcgccgcccacgctccgagggacccacacccggatatcacccacgc

SEQ ID NO: 266977 - DNA, 713 bp, Homo sapiens
  chr14:93423289-93424002
  hypo
agtctgggagccacacgcccagctaggaaggccacctgccctcggaggaaaatgaacacctgcacgtttccaaagtatccacgctctgcatgtgtccatggaaagagaagaggcatctaggggaagaagggctgagagggcaaccgcagcactgcagcccctccatgccgggcggcacaccagccaggagatgtggatggccacaggcagtccccggaggagggatgccaagaggacacatctgtttgctcagctggaggtaaaacagccggcgtctgaacgcttctgatgatgtgggttccccttgctgaaagaaatgtgcagctgatttgaacaagccacagcggggcagtgagtgttctccaaagggtcctcctggaaagctacttatcccaagacactgccactgttccaaaggtttccagaacgtgccttagagatgccttcagaagccactagaacatcctttcgagcagctccactgccagcaaatctttaactcagtgtccgtttttaaaatggctgaggctggagagggcggtgagcagctggcggaaggaaggcccctcagcgcagtggggtccacaggctgctccctgggaggctgcttctcaggcccagcgacaacagcatcatgcagagaacgccctatgtgacacccacgggactcctagaccaccgtccactgactcaaaacacgctcactggcacgg

SEQ ID NO: 266978 - DNA, 400 bp, Homo sapiens
  chr14:93425270-93425670
  hypo
ttcacagatgaggacgatgaggcgctgagaggttcagtgactgctggacagtgagtgagcccgggatggaactgggtctgcacagcacccagccgcgcccctacacacggagccatgtgatactccgcaaacaacaggcctttgtgctcctggtccccgactcctctggggaaaaaggtccctgacaggaggatctggtaggggctggggtagggagtgcaggggggcagctgccaaaaccctctcagccccggccagcacgggctctgcacagggtctgctctaaggacagaggggtgggccctaggcctagccgatccagctgctggtgccagggtcatggctaatccctcagcccgcagggccccaggaaggagccaccagacggctggggctgctg

SEQ ID NO: 266979 - DNA, 211 bp, Homo sapiens
  chr14:93426323-93426534
  hypo
gtacttggcttccccgggtacccctggaatctgtgagaagcttgtcccccaacctctgccgatctggtggacagtgtccaccccagagggcacgtccctgcaatgctaacatgccccgtctgcacagagagtccgctggggtctctgagtacatgggacgtggtggcacaccttgccggcagtggacccagacagccggctggggagtaga

SEQ ID NO: 266980 - DNA, 240 bp, Homo sapiens
  chr14:93426785-93427025
  hypo
tccttcacagaagccgctaacgtctccagtcacaaatgtgatactctgggtggctgggtaatttgccaaagtcgcacaaatggcaacacacggcaccagaatcagtcccaggtctctgggattccacagccccggccctcaggccttgagtgactcgcagaagtggctccctcctcccgggctgccaggttctgagttaggcggatctactcacgttaataactacgctcgtgcttccat

SEQ ID NO: 266981 - DNA, 557 bp, Homo sapiens
  chr14:93454159-93454716
  hypo
cttcctcaccccatgactcccggactgggggagggcactggcttccacacggcagacgccaggacggcagctcacgcagactcagaccagggctagccttggtcccagctgccgcctcatgccggcaacgcacctacccggcctggtctgcagctggcgcttagccgccccagggcaggggagccacaagcacaatcctgctctgcggagcctcccctgcactgaaagggcgggtctcagcctgggtggcagacaacagccgatgtgaaaacaaaaacagtggtgctcccacacatccctgaagtccaagaaagggaaccacaaaccaagcacctcccctgagagaccctacctccctggcaccctgtcctccctcattccagacccttcgatggggcacgctgtcccctcacctcagccctgtggtctgggcaggctgacactgggggaggcatgggcaggtgcacaccaaggggtcgctctgcccgatctggggtggggccaccagctgagacgcccactcagcacgtccgaggcactggcgacccacttcccag

SEQ ID NO: 266982 - DNA, 189 bp, Homo sapiens; identical to SEQ ID NO: 215945
  chr14:93486022-93486211
  hypo

SEQ ID NO: 266983 - DNA, 181 bp, Homo sapiens
  chr14:93494484-93494665
  hypo
agaatgggagcagacgtagtgggtgcttccaggccaagctagttcaagtgtatgatgaacagcgtgccttccctagaccccattcatgtggctgacgaaaaagacttggatgacagaataacctgatggagtgaacacagattcttgagtcactgcttggagaggccgctggtctccactg

SEQ ID NO: 266984 - DNA, 136 bp, Homo sapiens
  chr14:93495039-93495175
  hypo
gctctcagaccctccggaacctcagcaatcacagttcccattggatctcccacctctaacgccaaacagtaaccgccttcaggttcagcttcggcatttctaagcctcagcgtcccaggcacgatgatggggctgt

SEQ ID NO: 266985 - DNA, 180 bp, Homo sapiens
  chr14:93510736-93510916
  hypo
catgaataagtttgtgctggcgattactgagaaagtctagcataaaaattaaaccgaagcctaggccgaacactggcatccctctgcttggctgtgaagctggtgaggatgctgcactcggcctggcagcagatggaaactctggaactcgagggccacggatgagccacagggcccccc

SEQ ID NO: 266986 - DNA, 433 bp, Homo sapiens
  chr14:93521883-93522316
  hypo
tactgggactctcccgagcctcggtgctgcctggcccagaacagatactcaagggacatacaaatgccacctgaacttctgcactcacctgcgcatgagctcgggactcctctcagctgtcccctcccatgcctccctcccacagcgcctttccaaagtccaaggacccatccttatccggtcctagccccaactgccagtcaggcctcaggtagaaactgaaggtgcccagcggtccctaccactccccgggcagagagtacaggctcttggaagaagtccagactcaagtctcagccttgtgaagccagctgactggagtggcaatgactccacagaccttcctgagcgctggctggggtctgagcacccagcagacgggaggagcagccggggcacccagtgaggtcacggctagggaggtgaatcaggc

SEQ ID NO: 266987 - DNA, 46 bp, Homo sapiens; identical to SEQ ID NO: 215946
  chr14:93525816-93525862
  hypo

SEQ ID NO: 266988 - DNA, 281 bp, Homo sapiens
  chr14:93533287-93533568
  hypo
tgcaccaggccaaacgggaaccgactgctgaggaatccagtgtttgcatccgagtttctccatctgcacccagattccctaggatcacactctgagtagcaatgctatggataccttcaccccagaatgccaggacagtcagctactttaagagcagaatcttgcttctggccctttctaaaacccccgttccatcccttcctatttcccctgtgtacttcattccatctcttttctttgcttttacgtaaaatgcttacctggcacgctccactgaggcc

SEQ ID NO: 266989 - DNA, 54 bp, Homo sapiens
  chr14:93557922-93557976
  hypo
tgggctctacacctcggttttccggcctggaaaatagcacggtggctgggcatg

SEQ ID NO: 266990 - DNA, 33 bp, Homo sapiens; identical to SEQ ID NO: 215948
  chr14:93570836-93570869
  hypo

SEQ ID NO: 266991 - DNA, 120 bp, Homo sapiens
  chr14:93630791-93630911
  hypo
caaaattttttttaaaaattaactgagtttagtgatgcatgcctataatcccagcaactggaccggatgagaccggaggattgcttgagaccgggagtttgggggttacagagagctatg

SEQ ID NO: 266992 - DNA, 156 bp, Homo sapiens
  chr14:93697028-93697184
  hypo
ggcacaccgagccacgggaggctggggaccacaggtaccacgggggcgtggctgtcttcagtctcccaaagctgaagatggacacactgtttatgggttgagttgggcggggaggatgggtcgcagctgggcatggtgagacggctgccacctatg

SEQ ID NO: 266993 - DNA, 422 bp, Homo sapiens
  chr14:93706463-93706885
  hypo
tctctttaaaaaaggagcctcgaatgcgatgcacagccgacctgcagattagtgttaactctgggagctcgggagcgtgcaccaccaccagtgtcaccgagcgcacccgcacagcagctaaccagtcaggcagcagaacgagtggcggcagtttgccggggcgtgcagacacacgacatgtttcccatcttggagactatctactgttcggcttttctaaaatgtcagattattcctgagtgtatatccacagggtaaaggaggaaaagaccgtaagagaaactatagttttgggagaaatcagcgttgttgacacccaatagaaaacctatttacttcaaagtgcatgtaattcatttacccggtagctcataaacgctccctagccctgcatagttttcgagtgagtgtgagtgattcat

SEQ ID NO: 266994 - DNA, 120 bp, Homo sapiens
  chr14:93756455-93756575
  hypo
cccaaagtgctgggattaaaggtgtttgagccaccgcacctggcaccaagaatccttttacccacttgccaaaccactctagctgtctgccaatactgccttttaatttttttttttttt

SEQ ID NO: 266995 - DNA, 85 bp, Homo sapiens; identical to SEQ ID NO: 215950
  chr14:93763605-93763690
  hypo

SEQ ID NO: 266996 - DNA, 312 bp, Homo sapiens
  chr14:93813480-93813792
  hypo
gggcgagggcagagcgccccctcgtggctggggcgcctgcgcaaaccagctgcctcacgagcactggagcttgcgttacttggcctcacctcacctgtgctgtccacgcctggctttgtctcacctgacgcgatatgcctctcctgcgtgggcgctgtcctgcccgccgccactaccgccgcttggccctgctcggcctgcagcccgctccccgcttcgcccactcggggcccccgcgccagcggcccctgtctgccgcggtgagttgaggcccagccatcatggtgggcgggaagcgcgtggccctggcgg

SEQ ID NO: 266997 - DNA, 100 bp, Homo sapiens
  chr14:94048704-94048804
  hypo
actgccggggaatgcgccacgtgcacatggcctgatgctcaaatcaccgggttcttggtttaatatcgacttgggcaaattcagacgtggtttccttagt

SEQ ID NO: 266998 - DNA, 242 bp, Homo sapiens
  chr14:94187385-94187627
  hypo
cagggagtgggctccggaccatctttcttttggctaaagggggaagcctccctgccacagtagaaagacagatccctctggcttcgccagtgcgcatgctttagacagcagctgggggcagtcgacagaccagacaccagacagggaggaggatgtggagggcctggggtggggacactgcccaggtgctgcgccgggctcagcctggtgtccgagctgcctgggcccgcaggctgaccagg

SEQ ID NO: 266999 - DNA, 351 bp, Homo sapiens; identical to SEQ ID NO: 215952
  chr14:94209923-94210274
  hypo

SEQ ID NO: 267000 - DNA, 371 bp, Homo sapiens
  chr14:94392582-94392953
  hypo
tagcatttcccaggcggccgccctcgccttcagcctcaccttccctctggccagttggtgggcagggccaacagcggctctgggctcccttgcttgctcagagtggccctgcttgcagccccgccggcgttggcacggtgacagtagccaagtgtgcaaacttgtcccattgtccgcaggccagggggagccatggaaactggctaatatgacacaggaaaatgtttgctgatggcaattctatgggctttgtccacctctttctccatcatgacgactcgatttaagtccctaactgtttgactacaaatgcaaggggaccgtgcaacgccaaccttttgtccggctgcgctgaatgggcaattcaggct

SEQ ID NO: 267001 - DNA, 58 bp, Homo sapiens
  chr14:94393219-94393277
  hypo
acactcaaggacagcgggaaaagcagcccgccccggcttaccccgtccgattgtctgt

SEQ ID NO: 267002 - DNA, 183 bp, Homo sapiens
  chr14:94404101-94404284
  hypo
cgagcagagctgcacgttgcccacgtagtccaggaggacatcgatgatgggccccgcccagcggctcacctctggggcagatacgaactcacagaactgaaagagaacatgccgggaccaagaagtgagttcatcccacctgcaagagcctgcggccagggacggcagcggatgtgtccaagc

SEQ ID NO: 267003 - DNA, 224 bp, Homo sapiens; identical to SEQ ID NO: 215953
  chr14:94404860-94405084
  hypo

SEQ ID NO: 267004 - DNA, 224 bp, Homo sapiens
  chr14:94603537-94603761
  hypo
ttggaatctatagaagatgccgtcactggaaaattaatcccaagccccaaagccttatttacgcagattagaatagcttctgttcaagtgtttgtgatgtcgccgtgtaagccctcatcgtgatgctttaaaagtcatcgttaagtcgtgttacctgctgtccggccctggcacagtgaggctacactcccacaaataatgacgaaactccctcctcccagttc

SEQ ID NO: 267005 - DNA, 175 bp, Homo sapiens
  chr14:94829568-94829743
  hypo
cgccgtcgcctctgacgggctgctttgcactcacaggtgggggcattctctcctcatgctgccactgagaacgggaggctcagcaaagtggcttttctgggtcacacagtgccacagcgttctagcactcaggccctggcctggctctctctgggtgacccgcacttggcggccg

SEQ ID NO: 267006 - DNA, 124 bp, Homo sapiens
  chr14:95538387-95538511
  hypo
tccccatcctcatccgcaggggcctccacccctggatccaattagaccgcggctcagcgggtctgaggttgcgctgaaaagccatcagtaggcgaacccattaataactcgccagtgccctgcg

SEQ ID NO: 267007 - DNA, 148 bp, Homo sapiens
  chr14:95693650-95693798
  hypo
acagaaaagggcttcgcttcaagggcaacagcgactttgaaccaaaaggcaaattattttctttgcaaactgccgcagctccttgggcaccttccaccctgagcatgacgggatcaggttactgaggctcttacggaaatgttattcc

SEQ ID NO: 267008 - DNA, 42 bp, Homo sapiens
  chr14:95701034-95701076
  hypo
aggcctggccctggctcagccgcaccagcccaaattcctagg

SEQ ID NO: 267009 - DNA, 336 bp, Homo sapiens
  chr14:95740081-95740417
  hypo
aagcctgccctctgcccttccgtgcctgagtgtctccactttgttgacacactttaggtcaacaataaaagccacacactcttaaggcctccctgcttcccaaagccaatcctatagataaaccgatcgtacatgaacctcatgaacctcattcagacctacgacacgctcctcccagccagtccagcctgcacttggaaactcacaacgctgggtcacgctcaactcagctgtctgattctgaacctggcatccccttcggttattaaacaaagaacgggtcctttaccgatgtagttctcagtgtcattacccgggttctggcttatcaatagg

SEQ ID NO: 267010 - DNA, 148 bp, Homo sapiens
  chr14:95880712-95880860
  hypo
ggctcaagcacccacgagcaccaaacgagcacattctttgtctcccttgtcggtgttccctctgtcccgccaccactgggcacctcccagggtctcctcgcctcgtctgctgtcagtacctgcccatccctcccgctcccagcttttc

SEQ ID NO: 267011 - DNA, 513 bp, Homo sapiens
  chr14:95905972-95906485
  hypo
ctcaaggcccgccacgactctgccagctccctgagctcctcctgcaccacggcagcaccctccggagaagacttctccatcaccagccagccctgcgcttccaccagggacagctgggcctccttctccgggaattctgccaccagcctctaaaggacacacggacacacagacacacacacggtgagggtggagggaggtttctgctccttggtgtgggaacgttggcctgtcaaggctgcttctttgggaagtgggtgagggaaccaccgccttacctcaaactcggcctcttgggactcggcatcccccgggcccgcctctccccggtgtgcctccagcttttgcgtggtcacaacgatccactgccgcagctccagcagctggtggctgaaggtgcagtgctcctgcacactctgccgacacctgtccacaaggtcctgcagcacagcccggggagcccagggcatcctgagtgctggccgagggggagacccccgcaccacccccacc

SEQ ID NO: 267012 - DNA, 227 bp, Homo sapiens
  chr14:95932315-95932542
  hypo
ggcatcttcgtccacgctggggtccccgatcctgttgaacagggaggctgcctcctccagcagccggtccaggagcaccgcctggttgtccacgttgtgcagcagcacctgggcgtggctcagctgccactgcttctccttcaggcccagctggagctcgatgtggggctccagtgtgaccatcatcttctggaaccagcggtagaactcatctcgggccagcaggt

SEQ ID NO: 267013 - DNA, 35 bp, Homo sapiens; identical to SEQ ID NO: 215957
  chr14:96015607-96015642
  hypo

SEQ ID NO: 267014 - DNA, 97 bp, Homo sapiens
  chr14:96054926-96055023
  hypo
ctgaactggaactgcgtggcgcggaggtgggcatcagaaagcccgggaagggggaatctggctggcatcatcacacaaaggacgaccgagtcaccga

SEQ ID NO: 267015 - DNA, 65 bp, Homo sapiens
  chr14:96152981-96153046
  hypo
gaggggaggctgtggggagggctgcgcactgacccctgcccgtgtgggaccgcggtgggggtcag

SEQ ID NO: 267016 - DNA, 80 bp, Homo sapiens; identical to SEQ ID NO: 215962
  chr14:96547952-96548032
  hypo

SEQ ID NO: 267017 - DNA, 295 bp, Homo sapiens
  chr14:96552858-96553153
  hypo
ggggggagctttcatggactcgcccaacgaggacttcagcaccgagtactccctgtttaactcctctgccaatgtccacgcggctgccaatggccagggccagccggaagatcctcctcggtcctccaacgacgccgtcttgctatggattgccatcatagctacgctggggaacatcgtggtggtgggcgtggtgtatgccttcaccttctgaggacggcacaccctgcaccaccatggggtgaggcttggcacgtagctctgacttgctgtcggcctttggcttctcctgtgt

SEQ ID NO: 267018 - DNA, 202 bp, Homo sapiens; identical to SEQ ID NO: 215963
  chr14:96653271-96653473
  hypo

SEQ ID NO: 267019 - DNA, 489 bp, Homo sapiens
  chr14:96730194-96730683
  hypo
tgttggtcttcctcctgccccggcggcaactgaacgtggcagaaatctacctggccaacctggcagcctctgatctggtgtttgtcttgggcttgcccttctgggcagagaatatctggaaccagtttaactggcctttcggagccctcctctgccgtgtcatcaacggggtcatcaaggccaatttgttcatcagcatcttcctggtggtggccatcagccaggaccgctaccgcgtgctggtgcaccctatggccagccggaggcagcagcggcggaggcaggcccgggtcacctgcgtgctcatctgggttgtggggggcctcttgagcatccccacattcctgctgcgatccatccaagccgtcccagatctgaacatcaccgcctgcatcctgctcctcccccatgaggcctggcactttgcaaggattgtggagttaaatattctgggtttcctcctaccactggctgcgatcgtcttcttca

SEQ ID NO: 267020 - DNA, 186 bp, Homo sapiens
  chr14:96745877-96746063
  hypo
tatgcggggagtgccgcaaagtttaacaaacaaaaaaaaggaaagcatgctatagtgggaaacagagaggaagggagggtggccaggctgcctgaagtggagcctccgggctgagacagcaggagcagccagagatcccgacagagcatccgagttggggcggccatagcgcgttcttgccccagg

SEQ ID NO: 267021 - DNA, 37 bp, Homo sapiens
  chr14:96822200-96822237
  hypo
acagagcataaaaacgcgcatgagctggctgagggcg

SEQ ID NO: 267022 - DNA, 78 bp, Homo sapiens
  chr14:96831096-96831174
  hypo
aacagtgtcaagaatcaggccgaaccttcaaggagtttatgttctaaaacggaagcatggtggtacctgcttgtggag

SEQ ID NO: 267023 - DNA, 141 bp, Homo sapiens; identical to SEQ ID NO: 215964
  chr14:96911952-96912093
  hypo

SEQ ID NO: 267024 - DNA, 36 bp, Homo sapiens
  chr14:96912990-96913026
  hypo
ttgctggctgggcgcggtggctcatgcctgtaatcc

SEQ ID NO: 267025 - DNA, 82 bp, Homo sapiens
  chr14:96970710-96970792
  hypo
tttcaaattcttcgcgagttagttcaagtgtgtaaaatggaagacggggccaggcgcggtggttcacgcctgtaatcccagc

SEQ ID NO: 267026 - DNA, 77 bp, Homo sapiens
  chr14:97045354-97045431
  hypo
tgtcaatgagttagccgaagcctgtcccctcttccacttgccacgacgtgctcttctgtgtgcgtggaagttcttgc

SEQ ID NO: 267027 - DNA, 92 bp, Homo sapiens
  chr14:97128737-97128829
  hypo
ttggtccctggaggcgggctgctgccccatttgggagaggacagtgcactccttgcacaacctttcaagtacgggcgcgtcagagcaacagc

SEQ ID NO: 267028 - DNA, 40 bp, Homo sapiens
  chr14:97262846-97262886
  hypo
tgattataataaacacaatgcggccgggcgcggtggctca

SEQ ID NO: 267029 - DNA, 37 bp, Homo sapiens; identical to SEQ ID NO: 215965
  chr14:97338413-97338450
  hypo

SEQ ID NO: 267030 - DNA, 140 bp, Homo sapiens
  chr14:97361314-97361454
  hypo
ctagatgaaaagaccggcagaactatttgcctgctaatttgtttccgttttcttcaaaggaaaatacttccttaagggatgctcacagctctcttgagctttgagcatgtcaggaggatagttaacgcagttcagaagaa

SEQ ID NO: 267031 - DNA, 42 bp, Homo sapiens
  chr14:97389552-97389594
  hypo
gagaatcaggggagaaggagcgcaacctcccagaagcatgcc

SEQ ID NO: 267032 - DNA, 65 bp, Homo sapiens
  chr14:97404572-97404637
  hypo
gattccctggcttccgttaactcggggggtccccaacccctgggccatggactggtactggtgga

SEQ ID NO: 267033 - DNA, 82 bp, Homo sapiens
  chr14:97524124-97524206
  hypo
gacaaaaggaggcacgaagctgccggagctactcagctttacctctaggaaagatacagcgaatcaccgccaataaaacaaa

SEQ ID NO: 267034 - DNA, 33 bp, Homo sapiens
  chr14:97589660-97589693
  hypo
aataagtggaacctcgtgcggatgatgtatgaa

SEQ ID NO: 267035 - DNA, 214 bp, Homo sapiens
  chr14:99509012-99509226
  hypo
acgagcctgccaggcggaggggaggagggtggcccagggtgagggtgcagacccaagtgaggttcagcagtcccaccaggctccatcaggagccagcgcccccccccccccacagtaaaggagcacacccgaggatctgccgctcccgccacaggcccgaggggttgttcaaacccagaccaggtctgttcagccttgacgcctccccataagc

SEQ ID NO: 267036 - DNA, 117 bp, Homo sapiens; identical to SEQ ID NO: 215967
  chr14:99651822-99651939
  hypo

SEQ ID NO: 267037 - DNA, 330 bp, Homo sapiens
  chr14:99655545-99655875
  hypo
tttgcctctgccaccgtgccaagcttcctccagccgctgctggctgccgggacgtggtcatctcgccaggcacagcctgacaccaccgaagtttccgggtgcccggatgcacagccgagctgcctggtgccgctagaacatcagaggactctaagatgcaccgaacgccaccatgggcggttatggaagagaaaagctgcacgcacactacatgcacacacacatgcaagttcacaataaaatgcagggggatgtgtgtccacgtgggcacacacgcacacccacacacacagtgtgcaggagagaaactaatgtcgacaaggagttaca

SEQ ID NO: 267038 - DNA, 97 bp, Homo sapiens
  chr14:99681714-99681811
  hypo
cctgccaaagaaaacgcaagcttgcttattttctccatggggcgcaacagtgcctatgtgtgccggcagagaatcggctggccgtgaaaagaattct

SEQ ID NO: 267039 - DNA, 77 bp, Homo sapiens; identical to SEQ ID NO: 215968
  chr14:99707131-99707208
  hypo

SEQ ID NO: 267040 - DNA, 71 bp, Homo sapiens
  chr14:99725776-99725847
  hypo
acgacgatgtaagacgtacaacgcgcacgtatgaactatgtgtgaataggtagcgacgtaggtatcgctga

SEQ ID NO: 267041 - DNA, 223 bp, Homo sapiens
  chr14:99810717-99810940
  hypo
gctctggatgatggcgaggagaagggagaagggactgatccactttaccgttacctcttccaccaagcaacagggtgcttgaagagtcagccctcatccagatggtcggactttctgcgctagctaagtctgaatgaatgaggtttacatttctactcagtcactcatcaacaacgtgccggtcaaacacaatcccctgagcagtgcccgcgaaccattcttt

SEQ ID NO: 267042 - DNA, 605 bp, Homo sapiens
  chr14:99849765-99850370
  hypo
gaaggcaggggaagggacgacgcatttggaggaagcaccatccgagccacaccccgcacagaaaaaggacccaggcccacggcaaggcgcttcttggtcctttcggaagggccgctcctaaaccaccagggctgatccgctgcttgggtggagcacaggcgggaagccctgccccgtctctttgtgagctgtgggtgcgcttggcgagtcacaagcctctctgggcccagttctttctatggaagtcatgggttgcagtgttgttgagggagccggtggtgcacgtggtgaagacctggctctgtagccggccagctgggtccccgtcacacactcacacgtgcacacatgcatgcatgcacacatcctcacacacattcatacgtgtgctctcacgctcacatgcacacattcacacacacgttcacacacccatgcgctcacatgcccatgcacgcacacgtttgcacatgtacgcgcacacacactaaacccgttgggcctcagcttactcatctgtcaagcggagaccatggcagtggctccgacaggtgcttggcacatggtaaatgcccaatacatacgacagcacttggaaatttgtc

SEQ ID NO: 267043 - DNA, 209 bp, Homo sapiens
  chr14:99880379-99880588
  hypo
caaatgaagcaggcggcgtccagccgcgctacagagggatcatcgcgctgttatgctctcatacatcactgtcaacttaatttgttgtgcccagcagccgccataaatctgcttcttcatatttcgatactagcacccacagacaacgcgcaaaacacaatttaaggtggaccgactttacaaaaggcaggcacgcctacgcgatgagc

SEQ ID NO: 267044 - DNA, 178 bp, Homo sapiens
  chr14:99889214-99889392
  hypo
gctctgtggagccccgcggcccccaaggcgcctggggacagagggtttgtggacaccagcaagtcgcagatgcactggctctgctcctccacctcaggaagctcagttacttgagggaagcagtttccagttattcatattccctccttttctctattccccacgctcaaagagtgtt

SEQ ID NO: 267045 - DNA, 205 bp, Homo sapiens; identical to SEQ ID NO: 215970
  chr14:99893210-99893415
  hypo

SEQ ID NO: 267046 - DNA, 150 bp, Homo sapiens
  chr14:99902511-99902661
  hypo
gacacgtggtgatcacgggaatgatggagattacaattcaagatgagatgggtggaaacacaaagcctaaccagatcaccaccgtacttccgccttccaagtgactcccgggaaagttcatcaaacagcttgtgtcgaatagttttctaa

SEQ ID NO: 267047 - DNA, 225 bp, Homo sapiens
  chr14:99931509-99931734
  hypo
accaaaaagaaaggcgagccattccagtgaggggcagagctctgaaggccaggtctccaagaggcacgctggactcccctgggccaacagcccgtgaagtaccttcacacaccacatctcacaaggcccttggctcattccctgagacagttattatctatgtttacgacaagaacactgagtttcggaagggttcagtaatctgccgagcggcacactgtgaaa

SEQ ID NO: 267048 - DNA, 241 bp, Homo sapiens
  chr14:99932772-99933013
  hypo
cacacgggtcctctgcgggcatgtgagaaatgatgagcatattttcacacgcagatgagaccatgtggtataggacacgccatggtgtcctgggtaaagaccctatgagataatgcttgcttgcaagtgcttttaacaataggtctcaaagaaagtaagggacatggatgtgtgaagaatggcgggggggggggggggcattcaaagacagggacaggactagaagcgtgagggaagcaca

SEQ ID NO: 267049 - DNA, 567 bp, Homo sapiens
  chr14:99969303-99969870
  hypo
caggttaagcgagccgtggtgagtgggctaaagcaggccctgggtagagcaggctttccaggtggcggcaacacctgagcactgttcccatttctaagcgagcacagggaacaccggaagcagggggtgttcgccgaaactcgcagtccgactgcttgtcggtggggagcctgaaaacaaaggtgctccaaggacaggctgcctctgagaaccaggagggggctctctgcccggctccagccctgctgcctgtttcatccctgccagggttctgaagcctgtcggtgtcgttgccgtgtcctagcagtgtcgttgtgcatgctgcttctgtgcagctgcctgaccccaaacagtggaccgtttcctgcacccaagtggtcctgaaacttagtgtttactcagaactcaccattcaggaaagctagtcattctgtcttatttggtaaatggaaagaggaagggagcagaaatgatgatctggtaggtgccgtggtttgccctgaaagttcaggctagaaataatttttgtccgaggctgttcacagtgactgccgtcgctgattctgg

SEQ ID NO: 267050 - DNA, 100 bp, Homo sapiens; identical to SEQ ID NO: 215971
  chr14:99975812-99975912
  hypo

SEQ ID NO: 267051 - DNA, 61 bp, Homo sapiens; identical to SEQ ID NO: 215972
  chr14:99976343-99976404
  hypo

SEQ ID NO: 267052 - DNA, 81 bp, Homo sapiens
  chr14:99978205-99978286
  hypo
agctggaggagcagcggcctcactgtccaccttgaggggccacggctctgtctgtggaaggggccccgactgagcccccat

SEQ ID NO: 267053 - DNA, 177 bp, Homo sapiens
  chr14:100118139-100118316
  hypo
aggtactagagggtgcggacggggtggtcagggaggatcggaggtgagccttgggcaggaacccaagttaagtgcagcagtgagctgtgctgatgtaggggcggaggcgcactgttaacacagagagggtgggtgacagtgcctcagactcttcctggcatacggcaggtgctccag

SEQ ID NO: 267054 - DNA, 120 bp, Homo sapiens
  chr14:100148281-100148401
  hypo
acgcagacagcccgccccaagggaagaatcaggggcgaagagagatgcaaccccccgggagcatgccaacctacaaaaccccgagtcaaaggtcaagccacacacttgcctctctcaagt

SEQ ID NO: 267055 - DNA, 270 bp, Homo sapiens
  chr14:100402447-100402717
  hypo
agtgggcaagtgctcggtaagcgctgacagtggacctgtcgcttctcatgcactgcgtatagtttaactaccgtggaacagtgttggcagggacttctaaggccaatgaaatgaagacagtgttttaccctcccagggtcattccagcttcattactcacctggactggtctgtaaactcacagttcctcgtgtcaaattccggagactacgaaatcctctactgtgagtaccaccccggggttgtatgaagtctcgatctcagaaagcg

SEQ ID NO: 267056 - DNA, 149 bp, Homo sapiens
  chr14:100437167-100437316
  hypo
gaactgtgtcttcttacacacggggagtgagaccctggaggatctggggtttccagccaccagtgagattcactaacctttaggaaagatggggatttaaaaaccagagacaacctggacgaactacttgacgctgtgtacggtaaatg

SEQ ID NO: 267057 - DNA, 183 bp, Homo sapiens
  chr14:100551051-100551234
  hypo
tccgtgatggtctacgatgacaccagtaagaaatgggtaccaatcaaacctggccagcagggattcagccggatcaacatctaccacaacactgccagcaacaccttcagagtcgttggagtcaagttgcaggatcagcaggtcagtgctggaattacagattatacccgtgagcctgcgcac

SEQ ID NO: 267058 - DNA, 62 bp, Homo sapiens; identical to SEQ ID NO: 215976
  chr14:100587318-100587380
  hypo

SEQ ID NO: 267059 - DNA, 230 bp, Homo sapiens
  chr14:100591084-100591314
  hypo
tacttcatttctctcgaaactgcttcatcacccgcagtgctgaattctgtaccccagggcccaatccaagctgtgtggggtcactggccgtccgggaatgggcataccgcctggcggtcggggtgtgaacagcaggggacacacacacaagcacatacacttgtcccaaggcaggaccacacacatagctgcccccagacgagaccacgtacggacggacacacacacct

SEQ ID NO: 267060 - DNA, 245 bp, Homo sapiens
  chr14:100599148-100599393
  hypo
cccactgagatgagcgcatcgccagggaggctctctggtctcaggcgaggcctttgggacatgcgtgggatgggcgcttcatcaggtgattcacaggaggggcggagggtctctgcggtgcttgtccctgcgccaccctggccccagcagcaggcctgccctcactgagcaccccctaccagacactgctccacccttggagctgcagcctgaggcgctggccgctgcaccgcagggctacctcg

SEQ ID NO: 267061 - DNA, 397 bp, Homo sapiens
  chr14:100615563-100615960
  hypo
ttgagcacctccatgcgggtcacggccttggggtggacgcagagcggccgtagtgagtagaagaagggctgcagcaccagccagagcagcttgcgggcgggtgtgcagaagaaccagccctccagacgcgtgggcacgtccacgtccagcccgtcgccgcccaggtagcggtggtggtccacgtggtacttcttgaaggaggcggcgtagggcacacccacgggcaggttggcgaacacggccagccagcggttgcgtgccgcacggcccgtgccgaaggccgcgttgtgcgagatgtcgtggatggccagcgtcagcgagtggttcacgcagccaccaaaggcgtaggcccagaacagcagccagcgccaggccagcccgcgcaccagccagcagg

SEQ ID NO: 267062 - DNA, 217 bp, Homo sapiens
  chr14:100643286-100643503
  hypo
gcaccgagtccctacggtgggaccatgcccgcagcggcagtgtggaagatgggacagacacagcgaaatgcctccagggcgtggtgggaggggccggaacagggagatggcgcgtgagtagcatctgttcttacagcaaaacctgtaaaagtaaaatatacgtaggtttgtcactaaagacgtgtctgcataaatacacccacgccgaagactgttc

SEQ ID NO: 267063 - DNA, 87 bp, Homo sapiens; identical to SEQ ID NO: 215979
  chr14:100644135-100644222
  hypo

SEQ ID NO: 267064 - DNA, 384 bp, Homo sapiens
  chr14:100644252-100644636
  hypo
gaggagggtgctttgcactcgcggttccccccccgggagcattgatacccccgcccctgggagcattgatcctcctgcccctgcagcccggagcccggagcagcccacgttgctcccgctgcggcccagcccagcccagcccagcccagcccagcccagtgccgcgcctgtcctcgaacctggcccaacgctcgccgggagcagggacctgcgtgcagctatggaaccgaggcgcgggctgcgggatcccgccctacctcccataaaccagggcccgagataagggagtcccagagggccaggggagtcgcgggcccagcgtctcagtgggcacgaatttcttactttaacctcttttctgtcgaccccatctgtccccacctg

SEQ ID NO: 267065 - DNA, 228 bp, Homo sapiens
  chr14:100681486-100681714
  hypo
acgcctttttaaagcggagaagagaagaaatgctctcatccattagcagtgggattctgggtgattaaaactcgtttttcagtgctcacctgtcgagtgaaagctgtcttatttccactcactggagagctctggagactggaagctgtgagtcttggttactgatgtattccagctccatatggtgcctggtgcttcgtatgttttgttgaccgaataagcaagtaa

SEQ ID NO: 267066 - DNA, 206 bp, Homo sapiens
  chr14:100684860-100685066
  hypo
gatgatggcctgactgatggcgtcttcagtgagcgaggtcctgcaggacagcacgtgggaggccctgcctggtcctgccgtggcctgctccacaggcttcagtctccccaccctggtcctgggcgcacccagtgagctcctgtaaactattataaaagcccacgtggaagctggcagaaatgggccctttttgttgtgactttgtt

SEQ ID NO: 267067 - DNA, 263 bp, Homo sapiens
  chr14:100747007-100747270
  hypo
ccctttcacaggatagtgtgcgcaatacctgtccgtgtttccaagcagagttcaagttcatgtcttcacaagtagatgagagtcacttccagtcgggggaagcccgcctgagcagtgttttgagagtgcgtacattggaggactgccccacgtccgtttgcactctgccttgcaaaacttactgtggagacgtgtcccagactggtctcagaccagagtttgtggcacaggaaaacctggccccctaaaaagaagttttggaa

SEQ ID NO: 267068 - DNA, 97 bp, Homo sapiens
  chr14:100747814-100747911
  hypo
gacagtaatgtgagcgcagcacttcagagttcaggcccagcaggtcctggcaagtgcattccacccgaacttttaacccaagcggtggggaaggaag

SEQ ID NO: 267069 - DNA, 249 bp, Homo sapiens
  chr14:100748315-100748564
  hypo
tgggcagcatgtacttgacacgttatcacccagtccccttgtaaaatctggaatggagcgtttaagctgagcgttagcatcaggtcagcaggcaaagcaaacctcccacaaactgggtgccgtaaggtgggaggtgacacatggagagcttcgtcctggccgagcaggcacccagccccatgtcccccgccagcattctggatgtcagaggagggtgcgtgtgatggcgtcacattcatctgaagcaca

SEQ ID NO: 267070 - DNA, 386 bp, Homo sapiens
  chr14:100749240-100749626
  hypo
cggggcagttcttgcggcttgctttctcacacacaggactgggaactcccaggatttggtctcacaccagcaagaaatgcttctgtaacctttcagctccaaggtgggctcaggagcaagagggcgttttaaagagagcctcacccactgttcagaaagcacagcccagtgaaatgcccacgcagccggacctatgagcccatgtcagccctggaagctccggagctaactgggatggactcggaagaacttgaccaaatacactgagagctacttaggatttagccaaaagcaaaatgcagagcagagcttcctccctctggttggggccttggtgtctgatgttctgcagagcaaggttcagagtgaggcgtgaagttcattat

SEQ ID NO: 267071 - DNA, 34 bp, Homo sapiens; identical to SEQ ID NO: 215984
  chr14:100754246-100754280
  hypo

SEQ ID NO: 267072 - DNA, 103 bp, Homo sapiens
  chr14:100758850-100758953
  hypo
gcgcggggcgccccgcagtccgtccgcctgcagccgcgacttgaccacgtccacaggataggtagagagccaggacacgatgcctgacgtaccgcccgccaac

SEQ ID NO: 267073 - DNA, 244 bp, Homo sapiens
  chr14:100795242-100795486
  hypo
gcccgtgaggaggggctgtgcggcctctacaagggcagctcggccctggtcttacgggacggccactcctttgccacctacttcctttcctacgcggtcctctgcgagtggctcagccccgctggccacagccggccaggtgagcaggggctggaacctggcagggcggggagcccagaaggatgaggaggtcaaggtgaggtcgtgctgcccgccagtacccgagtgggggcttgaacttggc

SEQ ID NO: 267074 - DNA, 145 bp, Homo sapiens
  chr14:100795807-100795952
  hypo
ccagaggcgctaccggggtctcctgcactgtatggtgaccagcgttcgagaggagggaccccgggtccttttcaaggggctggtactcaattgctgccgcgccttccctgtcaacatggtggtcttcgtcgcctatgaggcagtg

SEQ ID NO: 267075 - DNA, 41 bp, Homo sapiens
  chr14:100812221-100812262
  hypo
ggccctgggcacgcggctggcccagcgtgaccctgacgctg

SEQ ID NO: 267076 - DNA, 34 bp, Homo sapiens
  chr14:100843922-100843956
  hypo
aggcgtgagccaccgcgcccggtcgttttattta

SEQ ID NO: 267077 - DNA, 198 bp, Homo sapiens; identical to SEQ ID NO: 215986
  chr14:100847790-100847988
  hypo

SEQ ID NO: 267078 - DNA, 126 bp, Homo sapiens
  chr14:100910095-100910221
  hypo
aattgggagcgctccgggctgatgtgaaatgagcgcatttggaaggcatgaggaatatgtactgagtgattggagcatgagtaataataattgctgtcgtttagtgccgggcgctggctaggtgct

SEQ ID NO: 267079 - DNA, 161 bp, Homo sapiens
  chr14:100937837-100937998
  hypo
ttgtcctttctcttcgctgagtctgatctccctttctactggatctgcctttttccgcccttggtgatttggctttttcatttcaatctaattagggctccctgccaggagaaggcagtgcagggcgttctcaccgcagcgctttgggaattagtcacttg

SEQ ID NO: 267080 - DNA, 67 bp, Homo sapiens
  chr14:100940878-100940945
  hypo
ctctggagcccaaacgtgtttacggcatgtctgctattggaatggcgagttccgagtttcagaaaac

SEQ ID NO: 267081 - DNA, 42 bp, Homo sapiens
  chr14:100980664-100980706
  hypo
tgtctaacaatctcttctttcgaactaggttatttgtcctgt

SEQ ID NO: 267082 - DNA, 193 bp, Homo sapiens
  chr14:100990019-100990212
  hypo
gtttgctggtgggccgagtggtgggcagattgtagggacataacccctgcatgtgtcatgatcgatcttctgctttccccaagaccatgtccctgcatctctaccaggggcccgcagttgccagaagagtctgagtgagactcccttttggatccagctcgttaggctcgggtagcagcgtcccatgccagct

SEQ ID NO: 267083 - DNA, 1413 bp, Homo sapiens
  chr14:101003646-101005059
  hypo
agatgagcaccggccgcactggggcatcatcccggcccacccgggacgatgggccgtgggagggctcagggcggtgtggtggccacactgcgaagaatggatttttaaaacacttcatagccccgaatttgtttcagctccctcttcgtggacacaacttcagggctcccttgtcactggcttgcgggggtggtctccccacttgcagagtctggtctccacaggacaccgtccttcccttcccttccaaggggcaggccccacgcaccctcgcccaaaaaataaaggagctttgtgttgaaaacgccaaggcagccgtccagggagctggaggccaagtgcgttaagaaagaccctttttctctataaaaatagtttcgctttataaaaggggggatgctcctctcacatgggggaaggacgcgtgaaaaacgctctaagtggagttccacgggccggggccgggtggacaccgtggtgtgggggaccctcccctcaggcctacagggctggggaggagaggaggtgcggggaggaacagactcctcgttgttggccggggcaggggaacagcgggggctggggagaggtgaggccggcccttctggggcacgtgggctggcggggagcgaaccacggccaggcctgcacgcaggcgctcagttgagcaaggttccgtagagctgggccttggtgaggctgtccttgcggctcagccccgagccaccagtccgcggaaaggcctgctgggggctgaggcgggcggcaggatgcatttccggggaggcctccatggagctcggctccaaggagtccctggaaccctgctcgggctcagggctgctggcggtcccacacagctgcaccccgagcctgtccccgtcccccccctcgctgggtgcatagccgggcagtgggtcagccgagcggccgggactgaggctcaggtcgccgcccgcccgcaggaagcagggctctgccaggtggccctgggagaggtcgtccccctcggagaagctgtcggccttgtagctggcgtagagcgggctggcgcggccgtcggccttcttgcccgggctgcccccggccccgccgtagtagcgttcagagaagctgcagggtgaggcgcggccggcagcgctcacggggtaggagtaggcgccgatgtcctccacgctcaggggacgccactggcccctcatgtcctccccggggagccgggcggtccccggcttggcccgcaggctccacaggtttgggggcatcagggcctgctggggacccggagaggccgggaagcggaaggtctcggccgggtacggtgacatggtccgcccgaagcctggggccacttcggcctccagcggggccgccaccgcggccgtggccttggcaaagcgagggctgccctcg

SEQ ID NO: 267084 - DNA, 198 bp, Homo sapiens
  chr14:101005497-101005695
  hypo
gaggacaggctggcggggtccggcttctccagcaccttggcaatgacgcaggtggggacgctgtcggcgtaggccgggtggcagagcggggatggcaggctgcagccgtgcttctccatgtgcaggctcacgcgctcctggaaatccgagggcagctggaacgggtgcgaggagggggacggcgggtacagggtcact

SEQ ID NO: 267085 - DNA, 319 bp, Homo sapiens
  chr14:101060508-101060827
  hypo
ggcatttgcagtttcggtcctgggggcaaataactgggagactctgatgctggggcaccctctgtgccaggcactgagctccttgtaaagggacgcgaggtggcgggagggctgcggctgcgggatgccccatgctgcccttgttggaaatggggccacagaggcggccacaaatttgcctcactccactgggcaggaaaattgtttccgccattcttctgtgttccagccgcttctagtgcctgcaagggatctaggggctgctcagctcatggaacagtggctgcggccagcctcaaaggcacggtgtggacaggga

SEQ ID NO: 267086 - DNA, 194 bp, Homo sapiens
  chr14:101096261-101096455
  hypo
tgccgggagggatgcgctggccgtggggaccagtgcccgccgctgcagctgatcctgccctgtcccgtctccatgtgaataaagccttgttccagccagtgcctcactgcgtgtattccttggcgactcggagaccaagatccaggggtacccggacttctactcccgatagcaggcaacggatgcctcctgct

SEQ ID NO: 267087 - DNA, 110 bp, Homo sapiens; identical to SEQ ID NO: 215988
  chr14:101133882-101133992
  hypo

SEQ ID NO: 267088 - DNA, 190 bp, Homo sapiens; identical to SEQ ID NO: 215989
  chr14:101134022-101134212
  hypo

SEQ ID NO: 267089 - DNA, 136 bp, Homo sapiens
  chr14:101155083-101155219
  hypo
ttctctcctgtcagcgtgggccagcgtgggctgctgtggccccggctgctccaggttggggggattaattggcctgttgctggaggcaggcagaggctggacggcgggtaggcagagcaggcgagggggacccaag

SEQ ID NO: 267090 - DNA, 391 bp, Homo sapiens
  chr14:101198382-101198773
  hypo
tcgggcctgctcctcggccccctgtgccaacaacaggacctgcgtgagcctggacgatggcctctatgaatgctcctgtgcccccgggtactcgggaaaggactgccagaaaaaggacgggccctgtgtgatcaacgggtaaatatccttcctgtgtgtgatctaatgaatgctgcttttcatgcggccaccaaagaccctttcagcctaaccctgctggacctgtcgtctgacaaaagatgaagtaagcgctcatcctggcagccccgtaggggaccgccctggatgggagtattcacgggggaatgtgtcattgccataattttttcaaatgatcctgaaggcgatttcatattcccctgatgttctcaagtcccgatgcgtgtgagtg

SEQ ID NO: 267091 - DNA, 547 bp, Homo sapiens
  chr14:101200685-101201232
  hypo
acaagacctgcagccgcccggtgaccaactgcgccagcagcccgtgccagaacgggggcacctgcctgcagcacacccaggtgagctacgagtgtctgtgcaagcccgagttcacaggtctcacctgtgtcaagaagcgcgcgctgagcccccagcaggtcacccgtctgcccagcggctatgggctggcctaccgcctgacccctggggtgcacgagctgccggtgcagcagccggagcaccgcatcctgaaggtgtccatgaaagagctcaacaagaaaacccctctcctcaccgagggccaggccatctgcttcaccatcctgggcgtgctcaccagcctggtggtgctgggcactgtgggtatcgtcttcctcaacaagtgcgagacctgggtgtccaacctgcgctacaaccacatgctgcggaagaagaagaacctgctgcttcagtacaacagcggggaggacctggccgtcaacatcatcttccccgagaagatcgacatgaccaccttcagcaaggaggccggcgacgaggagatcta

SEQ ID NO: 267092 - DNA, 255 bp, Homo sapiens
  chr14:101250117-101250372
  hypo
attgacccggaggtcgaggcttccagagcgggccagccggcagccccaacgtgtgaggctgtgcacctgctggggagggtttttttgatggcgacggcgtgaggtgagcgggtttgctctgggcggtcgaggattagcgccgactgagagggtcaggtgcaccggggctttgttcagacctgtttgccttttgtcccccgcctgcagaaagcccaggctgcatgatgtcatttcggatgcattaagctggaacag

SEQ ID NO: 267093 - DNA, 269 bp, Homo sapiens; identical to SEQ ID NO: 215992
  chr14:101348432-101348701
  hypo

SEQ ID NO: 267094 - DNA, 723 bp, Homo sapiens
  chr14:101349270-101349993
  hypo
caggttcccaaggcgcggtggagggacactcgtaaaaggtctcgctgtgatcactgtctccagcctgctgaagctcagagggctctgattcagaaagatcatcggatccgtctgagcttggctggtcggaagtctcatcatctgcttccttcgggttaaacacgtcggccaggtctgagtatgggtgtggcagtccgggtagcaggctcatgccgtgcctctctagggcaatgcatggcgggggcgggcggaagcagttcttcaggcagtagggagagtggaaggtgcagcggcctttgatccagtcgacttcgggggcgtggactcggagccagcggatgcctaggaccacagagaagttcggtgaaggtacgatgtcaaattcgatggactcctggtggttctggtggatacacaccaggggctccgtgtagagccagacaggctcgttgccaatcagcgagccgtccacggattggaccggctgtgggtacggcttctcgtagagctcgacgtagtgctcttgggcgaacttctcatccatgaagttgccgtcagctcccgaatccaccagggcctggaccgcgacgctgtggtaggggttcactctcaccatgagcagcaggaagaggtgggcgcgattgatgtccggatggacttcgctgggcaaccagctgctgaccatccacctctctggagcaggtgagtcgatccaggtcaggt

SEQ ID NO: 267095 - DNA, 206 bp, Homo sapiens
  chr14:101377326-101377532
  hypo
tgggcgtcatgggacggggaaagggtggggtgtgcgcaggtgtgcaaggcgggctacttgagggatgggcgatagttcaggtcaccctccggttggacccacgagggcgctgcattcctcattctacaaaccgtacaagtcggggcacaagacagagaagccaggtcacgtctctgcagttacacagctcacgagtgcctgctggg

SEQ ID NO: 267096 - DNA, 441 bp, Homo sapiens; identical to SEQ ID NO: 215995
  chr14:101489766-101490207
  hypo

SEQ ID NO: 267097 - DNA, 321 bp, Homo sapiens
  chr14:101491363-101491684
  hypo
accatagaacatgcgctatctctgtgtcgtatgtaatatggtccacatcttctcaatatcaaattcagtcatagagggcttcccagagagaggcaaagtcaccttcgtgggagacacactgatctggcttcagcgccattccacagtacttggagagatggtagagcataaagcatatgcattgttgaatgacagatgtagcatggtccactcattctcagtatcagccagccctggggcttcccggaggccatgccgacttgagagccaggcctgagtggtagccagggtgcagtgcaggtcaccgggtggttggctgca

SEQ ID NO: 267098 - DNA, 204 bp, Homo sapiens
  chr14:101492084-101492288
  hypo
ggtggtccgtggcgcgttcgctttatttatggcgcacattacacggtcgacctctttgcagtatctaatcccgccttgcaagctttcctggagctaacatcaactgcgggggtgggggccactaggtctgcgctcagtgtgacccagcggggtttgtgatgtgtttgtcttgtgtgtgacgataactcacgtgtggcagccttc

SEQ ID NO: 267099 - DNA, 162 bp, Homo sapiens
  chr14:101506231-101506393
  hypo
gcggaccacccacccgccttgaggagacccctctcgcaagctgcccgctcggccaagcggctgggctccgtcgtcattttctccatgaggccgaatgctctcctctgtgctatgttacttttgtgtttgatggattgtacttaggttcgtgctttccgggat

SEQ ID NO: 267100 - DNA, 194 bp, Homo sapiens
  chr14:101515982-101516176
  hypo
ctgcctcggagggccgcccccacaggagacgtgagagtgtgtgccttgtgtgagctgagagcccctgccccggctccgtgctgcgtgagggaagcttcctggaagtgaggctggtggagggaagagccctgggttgctttgctgtgtttgctgtgaatgcgatgtgtttttgcgagttatgtgaggttccctcc

SEQ ID NO: 267101 - DNA, 490 bp, Homo sapiens
  chr14:101531750-101532240
  hypo
acctcggggaaggacgccggcatcagcaccattctggggtacggggatggatggtcgaccagttggaaagtaattgtttctaatgtacttcacctggtccactagccgtccgtatccgctgcagcctgtggggcctgcgggccggggagccgatcgcgcttcagctcagcgcctttcctggtacttgaagggagatcgaccgtgttatattcgctttattgacttcgaataatacatggttgatcttttctcagtatcaaatctcaccttggaggacccgttggagatgaagcccttttgagggtaggagcaggacgggtgctttggagtcgctgcctcagtggggcctggtcaccgagagtgggccgggcaggggtctctttcctgtctctgtgtcttctcacctttgatgtcccatccgtcctcaggactgcttcccgggggcagcgctggcaccacgggacgcggcagccacgttcttgagccgatg

SEQ ID NO: 267102 - DNA, 381 bp, Homo sapiens
  chr14:101569746-101570127
  hypo
aacttcaaatacatcgctaacgcgtcccccgcactgcagctggctccctcagcactccagcctctctgcctgggccggccactcccttccaaccaggcgtccttccacttcgctgccccgctcagctatcaccctcaccacagagcctgtccagcccacccgaggcgctccctgcctctggccagctcaggctgtgtgtggggcatgtggaaggcaccatcttcccactcaggggttgcaccgcgggggctctggttgtagggatgacatcatcattctcctccccagctcactgccgcttgaaaccagtcggccctgacctttcttaccccgacaccccgcaggacccgcggcagctgggcgccacgttactgatgtccc

SEQ ID NO: 267103 - DNA, 274 bp, Homo sapiens; identical to SEQ ID NO: 215997
  chr14:101579008-101579282
  hypo

SEQ ID NO: 267104 - DNA, 311 bp, Homo sapiens
  chr14:101592184-101592495
  hypo
aacctctctaaagtcgtggccagtgaaaccacagcgccctaccaggccccatccctggacccatcctgccatctccccgccgtctgcccagggacccatggctcctccccagctgctcctcagcacccgggtctggggcacgtcggcactcctggaggcctcttgtgactggtgtctcctccgtcaccctcctagaccatgaggaagaaatgagacccaggtgtctgcagcgtctcggaacccggttctgttgctcaccataaagctctgccgagcgccctcaggtgagcagaggcggccctggcctatca

SEQ ID NO: 267105 - DNA, 50 bp, Homo sapiens; identical to SEQ ID NO: 215998
  chr14:101638848-101638898
  hypo

SEQ ID NO: 267106 - DNA, 203 bp, Homo sapiens
  chr14:101640848-101641051
  hypo
tgtaaaatacacaccgggcagctgccttcccagcctgcaggtggaggccggcgatggctgatgcgtgggctggcacatgtctgagtgagggctcacggggacataagtggccggcggagagctcaagtgtttgctgccaccgcccacagctcccctctgccaccacaggctctggtttctgtgttccccgcagtggtgagggc

SEQ ID NO: 267107 - DNA, 519 bp, Homo sapiens
  chr14:101693619-101694138
  hypo
ccgcagacctgtgccgaaagacagaaggatgtgcacctcaagtcagacagcatgtgcccacacacgcttgcacacgcatacactcagaggatgcccagtcacacggccccgtgcggctcccaagccccggacaatctgggcaggtttgtatcggggagagatgtcgaaggtggaggaggacagggtaaggtttcttgccctccagtccacaaaccatcagccctggagagcgttctgcgtgcctgcaaaagggcagcaggaagaaataatagatgagaacaacaaagagccgtgaaggcatcgaaacaccagcttcgagggagccgcttgagagagcagccctcgggaaggctcccccaccatgtcgcctgttgctggggatgaaaccaacttggggtcagatggagggggctccatgggagggagagcccagggagaagcaggtcggggcaggagtctcggcctgatacccattggccctccctggacaccgcaggccggggacgctgtgcagaccac

SEQ ID NO: 267108 - DNA, 170 bp, Homo sapiens
  chr14:101694470-101694640
  hypo
attgctgaccgcagcgtttctcaaaattcaagcactggaggaccccggagaacggagctgcagaaccgccgggtctgtgcgaaccgcggggtctgtgcgaaccgcggggtctgtgagaaccgcggggtctgtgccgcctggtggggagcgctgagcgctgattggtgttt

SEQ ID NO: 267109 - DNA, 35 bp, Homo sapiens
  chr14:101716824-101716859
  hypo
ggtgctgactcctacggtgacgggcgttagctggg

SEQ ID NO: 267110 - DNA, 34 bp, Homo sapiens
  chr14:101727903-101727937
  hypo
cgcgagccaccacgcccagcctgtttattgtatc

SEQ ID NO: 267111 - DNA, 115 bp, Homo sapiens
  chr14:101834398-101834513
  hypo
ttagtgtgtgcccacggagggtcagggcatctgtccaaatccgtctcacactgtgccctgggttccacgtggagggcgagcgggtttctccagcacccctcgtgcacatcagtgt

SEQ ID NO: 267112 - DNA, 272 bp, Homo sapiens
  chr14:101874589-101874861
  hypo
gttctcaaggcaatcgcaccttgcctagcaactgttgctaccgaaagccaacgtccctggtattccaacaataaagcacagcgctccgactacaactcccagatattattgaaaagaaaggcaggtttatttcaaggccaggaggggagaggatctgcgtgttggaggctggagcagcagcgcattcgatggccggcctgacagcatggcgagcagcttgtgctggtgcgtcctccagaaaaagaatgcgcgctctccaggaggtgatggtc

SEQ ID NO: 267113 - DNA, 232 bp, Homo sapiens
  chr14:101970405-101970637
  hypo
tggattgaaggggacggtcgggcctctgaagagtgagagacagtggtgcttacagctgggtgatgccagagatggagagaagcagagagatcccagacatgttctggatacggacacgacagatgcagaggagcgtgaggaagaccccggggctgagccctaaccttggcttgagcagctggggctgagttggcgccatggacgtggcagcagagaacgctagtggaagggc

SEQ ID NO: 267114 - DNA, 118 bp, Homo sapiens
  chr14:101994455-101994573
  hypo
gggtctgaacccagcgaccaggccacagggagggcccaggtgggtgtggtggtttggcggcaggtgtggcagggatggtctgcatcagaggggagtttgcgcccgccggccctgccac

SEQ ID NO: 267115 - DNA, 155 bp, Homo sapiens
  chr14:102018353-102018508
  hypo
agacacagcacaggcggctccctgccgctcatgtatgggggctgctttcttcatgtgcctctgccattgcggtgagatcaggcctgggcgagtctgcagatcagaggcgtggagcagagcagagcggccaccaccccagccgggtccgccaggga

SEQ ID NO: 267116 - DNA, 305 bp, Homo sapiens
  chr14:102053854-102054159
  hypo
ccaggcactgggctcggtaatgcggctgcttaagtaacggggatttgccgttttccaagaacactaatacgataaatgctctcgcagctaaaaccgttctctgcgctgtctaatcgtgctttgacgacgccaaaggccttggaggctcgcgcagcatttcaggactgctgtaaatacccattgttcccgtacagtgagcggcggaggaaaacatgcgtgtgttgtcggggctttgttggcggtgctggttgcttagactcggatgaatgctccaccgctccgagggggcgcgggcaggatttaga

SEQ ID NO: 267117 - DNA, 494 bp, Homo sapiens
  chr14:102068308-102068802
  hypo
cgaggagcctggcacgggactggcgcttgtcagcccctcatgtgggtgtgcctgcatctgcgtccccacgtcgcacaggatagggcttatgcatggcctagcttgtcgtgtgaggttgactggcatgtcacaggcactgtcacagattctcagagcccaggagcacatcccctgaaggactcctcagccggggctgggctggaagcagggcctggagaaggtcagagaggccccgccctcctggcactcccagggcaggggacgcagcacagagcgggtgccggtcagccagggaggccgggacgggacgcagcacgaggagaacactgcgcaaggcaggcccgcagtcagtcaggacagctgcccagagtaggtggcgtttgggccaggcttcgcaagctgtgtgggggttcgcccagcagaagacgggagagggcgttccaggcagaaggctcagcatggcccaaagcacagaggcacggcaatgtccggcg

SEQ ID NO: 267118 - DNA, 278 bp, Homo sapiens
  chr14:102093963-102094241
  hypo
cgtgagccaccgctcccggcctcaccttccacattttctacaatgaacaagaagaacttggcaagtcaagagaagaagcaaagccatagagagctagccaggggcgttggccggctgtggatctgtccagacccaggccgccctcctacgcgggcctgctgcaacctgcgctggggttgaggcaggaaccaagcttggggccaaccgactgcgtgggacgtggctcccggatctgcccctcaccagctgaggacaccggagcgtctctctccaggact

SEQ ID NO: 267119 - DNA, 281 bp, Homo sapiens
  chr14:102175310-102175591
  hypo
gttaaacatttacacgtagtgcactactgtccataaggggcagcatggtcagactgcacttttaaaaggtcttgagggcaggggaaccaagaggcgttcaagtaaaggagtgaagaatcagagcgtgacgtagtttagcgacttggaccaggacacgtttgaaagcctaagtaccttagaggagccactggctgacgtccagatggcagaaagaaagccaccccaaatcaggccctctcattcagtgctgaggagcacggtctagacggctggttcaactt

SEQ ID NO: 267120 - DNA, 127 bp, Homo sapiens
  chr14:102186689-102186816
  hypo
tgtaccacatgctgcgagatgttcgcaatcagggaggtcatgtgagaggtacggaacgctctgtactagcttcacaatgattctgtgcctctagagccgtcctaaaagaaaacgtttatttaacagt

SEQ ID NO: 267121 - DNA, 384 bp, Homo sapiens
  chr14:102230011-102230395
  hypo
ccatcctggatctggtatttttaagttcatttcccacacctcaaacccagcaaccctcctgtatagattggtcttatgcagtctatggtgttgctatgttgcttttagctttagggtcatctccccaccgccacttccattgcaagctgccaggcaactcagtggttagttctttttcttccatcaccttgttttccttcaaaccacctctgctactgacgtcctgggctagctccctatttctgttgacggtcccttggcctctttctccaataatgttggtatttgaaaaaatttacctagttttggtattttattattgttcacattgtgtgtgtgtgtgtgtgtgtgtgtgggcgcgcgcacttgcgcgtcggccacttg

SEQ ID NO: 267122 - DNA, 152 bp, Homo sapiens
  chr14:102239453-102239605
  hypo
gcatgtgctgagcaccattgcgggtgcagagttcctgcactcgtggagtttgcctccagtgagggcacagaagtggagtgtggagctgcaggtgttttctgcggggcactagtgacattgggcgtgagagcgtctcacctttgcagagcaat

SEQ ID NO: 267123 - DNA, 35 bp, Homo sapiens
  chr14:102286260-102286295
  hypo
tcctttttaattttgcgtgacgaaatgcagagttc

SEQ ID NO: 267124 - DNA, 166 bp, Homo sapiens; identical to SEQ ID NO: 216001
  chr14:102293900-102294066
  hypo

SEQ ID NO: 267125 - DNA, 94 bp, Homo sapiens
  chr14:102302011-102302105
  hypo
tcttgagcaggaacggtgagaccactcttctccctgtaagggaccagtagcatgtgtgggaccacgccgcctgcacagccgtcccctcacgggg

SEQ ID NO: 267126 - DNA, 33 bp, Homo sapiens
  chr14:102306201-102306234
  hypo
ggctctcagtggtgcgctcgtccgcacacactc

SEQ ID NO: 267127 - DNA, 245 bp, Homo sapiens
  chr14:102307821-102308066
  hypo
agcttccacattgaaagacacggggccggctcgttccgtgtccagacagacactttcactctgtgcctccggagatgaggctccctgctgagcggtcagtcctcacctgaggaggtggggcgaggaaagggggttgcccacggtcactgtggtgttggtgttctttttgaaacgaaaccttccagtcgcagacacaaaagccgtagagagtaaggcagaggatcggccatgcttctgggaggcag

SEQ ID NO: 267128 - DNA, 299 bp, Homo sapiens
  chr14:102325127-102325426
  hypo
acaaagaatgacaagactcccgctggcctggttcaggtcaaatgcccgcccttgaaccgagtgtgctcccgactgcttgaaaccgcctctcgtttgtatttcacagtagcagtgtgggttactggcaccacttaggatacttaaaagcccttgaggctgtttttatagattaagtcatcattgcctctcctctccctgtcataattgtttcctaacttgattctcctcctgctgtattaacttgtttcccacccaaacctcgcgctgggctccagagcgttgccagcccctgggctccc

SEQ ID NO: 267129 - DNA, 324 bp, Homo sapiens
  chr14:102330613-102330937
  hypo
actcagaagtacttcgcattagagtggacctctccagaaatatccaaatctattgtgctggaccactgagaacgcaacctggtgtactcaatcatgcaagaaatgtgtattgcagacaccatgctacctcttggggctaccccaagaactaaaataatatagtctctacctatatggcatccacccttactggtctgggagacaagaagaggcagcagacgtaatgatacgagggccaaggactgcggtggcggtcagtgtaaggtctggtaagagcacaggcataggaggcctaaccccttgcctgggcgccccagagaagtg

SEQ ID NO: 267130 - DNA, 96 bp, Homo sapiens
  chr14:102331833-102331929
  hypo
cccaccaaaccatgcgatagagtcaaggagcaagaattccccagaagggagggagtcgtgtgcttctctgggcagatgaaacggtcggatctgtac

SEQ ID NO: 267131 - DNA, 100 bp, Homo sapiens
  chr14:102335778-102335878
  hypo
catagggatgcaatcgctaggtgaatggtaagtgtgtgttgagctttctaaggaactgccaaaccgttttccaaagtggctgccccgtgtgattccccca

SEQ ID NO: 267132 - DNA, 206 bp, Homo sapiens; identical to SEQ ID NO: 216003
  chr14:102343692-102343898
  hypo

SEQ ID NO: 267133 - DNA, 504 bp, Homo sapiens
  chr14:102355902-102356406
  hypo
ctggcacagagggtagggtgcgtgtcctggggctcccctagaagcaggcgcagtggacagagatgtctcagaggaagggagctgggtctgtcgcagatgggtgcttcagaaagatcgcacctgagacagcacggaggatgcgtgtgggtgtcagtggggaactgggcaggtagaataagaggagttcaggaatcacttctaccctttgcaggaactgtgctaaatattgcgggctttaaaattaagtaagacattggcctatgttgaaatacagcaaaaacgtaagatggattaatgaacgagtaaaagatggatgaacagatgtgcgtgtgatcaagcagatggagcacattgctcgtggtcgaatctggtggttgaaatgggtgttcactgtagaattctttccgttttcctagatgcttgaaattttccaaaataaaatattgagaaaaaaattcgtgcaagaccaagttctctgccctcgaggcatttacagctgcaggc

SEQ ID NO: 267134 - DNA, 210 bp, Homo sapiens; identical to SEQ ID NO: 216006
  chr14:102360720-102360930
  hypo

SEQ ID NO: 267135 - DNA, 245 bp, Homo sapiens
  chr14:102361139-102361384
  hypo
ctttactgtttgaacgtaaagcacttgagcggttattgtagccactaaattttagtgtgcaattcagtagtttcacatctgcttggtttgacaacatattgaactgattatgatcagaggaattatagttagggtttgaaattattgttgtactaaagaggctttaccgccttgaaaatacttcccaagttacactgtaactattttatgatcattgaatcacaagtgaacgttagattactgct

SEQ ID NO: 267136 - DNA, 153 bp, Homo sapiens
  chr14:102375768-102375921
  hypo
gaaaacaagtaacgcggaatgagcaggccttgcattttagaccttagggatcctgtgcgatgtgggactgttggaatatggagcagcctgagagtggagaggcgagggctcagcaggaatgcgtgctcccaggctcaccgtgcggttttcttt

SEQ ID NO: 267137 - DNA, 342 bp, Homo sapiens
  chr14:102391503-102391845
  hypo
tcctcttgcacgccgcaagtccgagctgcctcaggacccccacaccaagaaagccttggaagctcactgcagggccgatgagctggcctcccaggacggccgctagcctccggggcgccgcgtcggggccgggcccgccagttcttttccggattctgtagaaaatacatacttcctgtgccataccaatcagttacactcaaagctttcttggaccccgttccgtaggcaataacgtgcgtccgcctcagcgcgagattaggagttcaaacaatggtgacttcccagagcccgctggcagagccgcgggttgacgacggtgtcctcgcagtgtcgccgcca

SEQ ID NO: 267138 - DNA, 191 bp, Homo sapiens
  chr14:102392534-102392725
  hypo
tagcctaatgcaaactgcagcgcctttaagcataaagtaacacaacagcattgcacggggccggcactgccgctgccttcactgaaggctgcagtgctgttctgagagcttggaggaggcaccagcgaggatgacgtttagtggagctctttctgttgaaaagagctcacgttatcaacaccttgtaagga

SEQ ID NO: 267139 - DNA, 80 bp, Homo sapiens
  chr14:102396659-102396739
  hypo
gattccagtccagtggctcccgttcctcggaggctattgtttttttgttttgtttcgtcttgttttgtttttgagacaga

SEQ ID NO: 267140 - DNA, 161 bp, Homo sapiens
  chr14:102398577-102398738
  hypo
caaggctcccttcctgctggcgagccccctgctgactctcccttgggttcccctctgtgcgctgccctgagccggagcttccatgtctaatgcaacgcaggtgagcccgtccgccaggtacttcttgggtgtttaggtgcctgttgaaaatgggtcctcaa

SEQ ID NO: 267141 - DNA, 31 bp, Homo sapiens
  chr14:102416015-102416046
  hypo
caaaaggactctggcggccgggcgcagtggc

SEQ ID NO: 267142 - DNA, 120 bp, Homo sapiens
  chr14:102418520-102418640
  hypo
tgccttggcccaggagttgctcgcatgagccaccacgcccagtgtattcagattttcttcgtgtttcttttctcttccgggatcccatgcaggacaccacgtcgcatttagttgtccacc

SEQ ID NO: 267143 - DNA, 127 bp, Homo sapiens
  chr14:102429249-102429376
  hypo
cagtgaacactcagcgttcgctgtcagtggtgtgttattattattcattaccattaggatccttgcacaaactcatcgcagttgcctatttattttttccaggaagattactcggaactgcttaggc

SEQ ID NO: 267144 - DNA, 35 bp, Homo sapiens
  chr14:102450595-102450630
  hypo
ggattataggcatgagccaccgcgccctgcccgta

SEQ ID NO: 267145 - DNA, 314 bp, Homo sapiens
  chr14:102467327-102467641
  hypo
aaagcttccctgcccggttgcgacagtatgcgtcctatgagtttgttcagaggcttctgaaaggttacatgaaggtaggtggccagtatcgcacggtgatgagtgtccattagaaacgcacctgcacagatcactttgtttactttctccacagataaatatgctggtgattgaactgaaatccgaagcacttaaagaccgccattggaaacagctcatgaaaaggcttcacgttaattgggttgtttctgagctaacccttggccaaatctgggatgttgacttgcagaaaaatgaagcgattgtcaaggatg

SEQ ID NO: 267146 - DNA, 536 bp, Homo sapiens
  chr14:102493477-102494013
  hypo
ccttaacattgatcagttctcgtaatgtttcagaatattccgtcaacctcaaggccacttgcttctgattggtgttagtggagcaggaaaaactaccctgtctcgtttcgtcgcctggatgaacggtttgagtgtgtaccagattaaggtgcgtctggtcggtggcctcttaatcccagcaacagatgtgtgtgcagagctcagtgagtaggaatggacctaacttgcctctgcttctgtaggtccataggaagtacacaggggaagactttgatgaagatctacggacagtgttgagacgttctggctgtaaaaatgaaaagatagcatttataatggatgaatctaatgtgttagattctggattcctggagcgaatgaatacccttctggccaatggagaggtaattaggtgacgtgttgcgttgcattacgtgttaccgggggaccagtaagtcagcactgtgctgtttcccaggtgcctggtctctttgaaggagacgagtatgccaccttgatgacgcagtgcaaagagg

SEQ ID NO: 267147 - DNA, 121 bp, Homo sapiens
  chr14:102499706-102499827
  hypo
ggagcagatgatccgagacctggaagccagcatcgcccgctacaaggaggaatacgccgtcctgatctcagaggcccaggccatcaaggcagacctggcagctgtcgaggcaaaagtaaga

SEQ ID NO: 267148 - DNA, 628 bp, Homo sapiens
  chr14:102500434-102501062
  hypo
gttcattgcctacgcgggttactttgaccagcagatgcgtcagaacttgttcactacctggtcccatcacctacagcaagccaacatccaggtgagaatcacggggagttcaaaaaggatgtgcgagcagtgtgaggcaagctggtgtttagtgcacagttagagtcttgagaacagtcccatctgtggctgtgaagaggaggaaaggtaacggccttgcctttcagttccgtacagatattgccaggacggaatacctttccaatgctgatgagcgtcttcgctggcaggccagctccttgcctgctgatgacctttgcacagaaaatgccatcatgctgaaacgattcaataggtatgagctcgggtgccaaggagaggcatgggaggaatgtgggtggtgatcttgaatttttttcaaaatacacccttgtttgaagagaggaatagaaaatggggcgtgggcatacagtgctggcagcttggtgctcctctgatggtggggcgtgtgctgttctcgttattgtcaagtgtctgagttattctgcagtgaatgcttcttgtaaccttctaaaatcgattggcaggggccaggcacagtggatcacgtgaggtcaggagtttgaga

SEQ ID NO: 267149 - DNA, 108 bp, Homo sapiens
  chr14:102510267-102510375
  hypo
ccaagaacgcttacgatacgcaccactggggtggtcaaagaagtatgaatttggagagtctgacctgcggtcagcttgcgatacggtggacacgtggctggatgacac

SEQ ID NO: 267150 - DNA, 809 bp, Homo sapiens
  chr14:102516076-102516885
  hypo
gttcgtgcctgaggcgtacatcactgccaccaggcagtatgtggcccaggccaacagctggtccctggaggagctctgcctggaagtcaacgtcaccacctcacagggcgccacccttgacgcttgcagcttcggagtcacgggtgagtggagtctcacagaaaatactggctctttgcaggtgacctcggtggcctgagaccattgttcccagatacatgcacttagggtgaccggctggcagttgggtggagcctctgggcgccctgtgactggggtttgtgtagctgttgtgttcacctcagcctgggttttggcttccgcctcacaggtttgaaacttcaaggggccacgtgcaacaacaacaagctgtcactgtccaatgccatctcaaccgcccttcccctgacgcagctgcgctgggtcaagcagacaaacaccgagaagaaggccagtgtggtaaggaggcactgcctttcccaggcattctgcagggacccctgcggtaacaagggcagaggcggctcctcttctatgcctgggttccacttggaacgggaaatgaggttcacagaggaaatccatttcgcacctgtccaaacctctccttgccgggccccatcagctgtcccgggcagtcttccagttttcttacttttcccttaagccaccagtaaacccctctgcttctgcaggtaaccttacctgtctacctgaacttcacccgtgcagacctcatcttcaccgtggacttcgaaattgctacaaaggaggatcctcgcagcttctacgagcggggtgtcgcagtc

SEQ ID NO: 267151 - DNA, 122 bp, Homo sapiens
  chr14:102521602-102521724
  hypo
ctcctcctgcatcagcgccccacccaacagagccgaccaggctgggaacaccgagaccgagagcgcgtggctgtgtctacaaaggcctcctctttgagggagacacgcgaggcacgggtggg

SEQ ID NO: 267152 - DNA, 369 bp, Homo sapiens
  chr14:102523353-102523722
  hypo
cacaggtgcacacgcgcacacacatgctgcacagttgcacacacgtgcagacacgctgcgcagatgcacacgtgcacacacatgcacacccacacgctgcagttgcacacacgtgcacacgcacacccacatgcacagttgcaaacgtgcacacactgcagatgcacacacgtgcacacacatgcacagccacaagctgcatagttgcacacgtgcacacgctgcgcagatgcacacacgtgcacacatgctgcacagttgcacacacgtgcacactacacagatgcacacacgctgcacagatgcacacacgtgcacacatgcacacccacacgctgcacagttgcacacacacgctgcgcagatgca

SEQ ID NO: 267153 - DNA, 188 bp, Homo sapiens
  chr14:102530107-102530295
  hypo
aagctccggagagacgagcgggggagactggggtcccagcagacgcagaatggtctctccacaaagaggggttagcaaatgtactctccagacctgtccccaccctccacaccgtcaaagagcaaagagaaaatcttccaggcccccactccaggcatggtgggtgcgtcaggattcagaacagatga

SEQ ID NO: 267154 - DNA, 85 bp, Homo sapiens
  chr14:102592764-102592849
  hypo
atcttaggggattcttaaagcggaaaaagaatggctcctcctctcaagaaactcggagtctaaatgggtagatactgactgcatc

SEQ ID NO: 267155 - DNA, 190 bp, Homo sapiens; identical to SEQ ID NO: 216013
  chr14:102635326-102635516
  hypo

SEQ ID NO: 267156 - DNA, 292 bp, Homo sapiens; identical to SEQ ID NO: 216014
  chr14:102650992-102651284
  hypo

SEQ ID NO: 267157 - DNA, 90 bp, Homo sapiens
  chr14:102668988-102669078
  hypo
ttacaggtgtgagccactgcgccgggcctgtacggaggtttttttcagagtttcacacactcttcctccgctgcacctgcttccttggag

SEQ ID NO: 267158 - DNA, 118 bp, Homo sapiens
  chr14:102680415-102680533
  hypo
ccatggcggcggtcggtgtgcccttggctgaggtttcgttccttagcagtgagaacctccacatgcgtgggtaggggtcgggtgacctggagacgcctcctccggtctggtctgggtg

SEQ ID NO: 267159 - DNA, 271 bp, Homo sapiens
  chr14:102681974-102682245
  hypo
ctttcagtaggagctcttttcctggctagagttcattgtctgcctactcctcatcttgaatagtgtttgcttaaggctttgtgctggcgtgaggttgtcctgctgtagacaccaggcccgtcgtcggtgcagagcgcttcctacacagggcagtgggggacgttccatttgggatgagaagaactcatgatttacattgtcttactatgaaataccatccctcactcttgacagacgacgtagctgatctgagcagcgccctggcacccgc

SEQ ID NO: 267160 - DNA, 289 bp, Homo sapiens
  chr14:102685939-102686228
  hypo
ttgctctgacgggcgggctccagggagtccctggtcaagcaccctggggtcctcttgggtttttcaccggtggccaacgtgcttcctgagtgctgcagcatggggaccctgagttttgatcatgggcacattctctgcatggcgatgcattctaaaagaactgttaaccagggctgccatcaaaagggcgaagcctgctaacgggaacccccagttccgttatgccagtatggactacagaagacgagaggaggacaggtttgagggcggttgattcaagatctctctg

SEQ ID NO: 267161 - DNA, 132 bp, Homo sapiens
  chr14:102691861-102691993
  hypo
gagatggcatcactcgagatggttagtcctagctctgcctcagcccagtctgtcacccttcgctggttctggaatgcagtttgcatttggccatcactgtactaacgctgtcagatacgccccagtttactc

SEQ ID NO: 267162 - DNA, 448 bp, Homo sapiens
  chr14:102695442-102695890
  hypo
tcctaggcagctgcgcgggccgcgggtgcggcagggcgcagggcagcacccagagccccggccagcgcgaaacggacgcaggcgcatccccagccctccgtggcgtctcagcagcagatcacccaggcctggcccggtcgggcttggtgttgcctccgaagtcgagacgacggtgctgctcagttatcttccgcctttccgcactatggtgggcaggcgacactgctgcggggcaggcttaaggtccttctgcggatctgtctgtcaaagaaaaattacagacacaaaattcagtggcggcctgggctgggtcgaagagcagcgccgtcagagaagctggttccgcgctaccttcttgctcgcagggatgcacttcaagggtctcagcaccggcactcttccatttgttccagatccaagcacggactgcagcgtggggctggagtaa

SEQ ID NO: 267163 - DNA, 233 bp, Homo sapiens; identical to SEQ ID NO: 216018
  chr14:102793000-102793233
  hypo

SEQ ID NO: 267164 - DNA, 36 bp, Homo sapiens
  chr14:102900923-102900959
  hypo
aggcagtgatgtcacgggactcggagatgagccgtg

SEQ ID NO: 267165 - DNA, 143 bp, Homo sapiens
  chr14:102901395-102901538
  hypo
acattgacgtccagcgatgaggaggacatctatgcccacgggcttccttcttcatcctcagagacgagtgtgacagagctcggacctagttgctcccagcaggacctgagccggctgggtgcagaggacgccgggctgctcaa

SEQ ID NO: 267166 - DNA, 478 bp, Homo sapiens
  chr14:102909003-102909481
  hypo
tgctcaggagtgtgtcgtgtaagaagtcctgccggtgattcccacctagtttagtggaaggaaatatcacccaaggactgcaatactataggtgcgtctgtgattagtcacggagcatatttgagtactgagacctaattgcaggcctaaggtcaaggaatacagggttgtaggcgacagttggtctgtctgctcccctgggaatagcctttgagctcatttagacatactttattgacagaacacaaggaggcaaggggagagccctggacagggagccagggaccctgagctttggcctgccactgccttgcagtttgacagacctcagatttcatctgggaaattcggggtttcattttattagtggaacctcgcacccagtcagagcagagaggagccgccgtgctggagctctctgcaggaacgactgcaggcctcaggtccctgccaactccagcagcgctgcagccctctg

SEQ ID NO: 267167 - DNA, 80 bp, Homo sapiens; identical to SEQ ID NO: 216019
  chr14:102931213-102931293
  hypo

SEQ ID NO: 267168 - DNA, 108 bp, Homo sapiens
  chr14:102931755-102931863
  hypo
ggtctacacactctcgttcatcaacatcacaactggaattcgggatttgtgaagtttagagctgaacagactgttacagattatgagtcaacacgtatattttctctt

SEQ ID NO: 267169 - DNA, 638 bp, Homo sapiens; identical to SEQ ID NO: 216020
  chr14:102939182-102939820
  hypo

SEQ ID NO: 267170 - DNA, 75 bp, Homo sapiens
  chr14:102961171-102961246
  hypo
aaaaaaaactaaactagctcattcacctcactggcaggctgagacctgcagtcactccagcggcaccctgagtga

SEQ ID NO: 267171 - DNA, 352 bp, Homo sapiens
  chr14:102961892-102962244
  hypo
gtggggaggccgggcggctggggaagaaacctgccatgtctgggaagaccggttggtccttagaggacctagcagcagcaaaggcaaacactggctcaggcagtggtgactggtggtgatgtgccgacaagagcggccaccgccccgtcctccttgctgctctgtctctccatcctccatgtcctgatccactgggactggccctggggctgaggtgtgagacttggtgcccacgggaggcatttcatacatgcgttcatcagcccacagttaggggcccctgcccagagcagccggcgggtgaggatgcgggcagcctggagagggcacctcgatccgggaggtgcaggtg

SEQ ID NO: 267172 - DNA, 168 bp, Homo sapiens; identical to SEQ ID NO: 216021
  chr14:102966288-102966456
  hypo

SEQ ID NO: 267173 - DNA, 251 bp, Homo sapiens
  chr14:102968260-102968511
  hypo
cctactggggaagccggtccgtacgtaggccttgcatctcgccacctccacttctgtcctcaagaacaagtcctaggtcaagggaaacagcacagcctgtttataattaggaaacacttaaaacagcctggcatttgggaacagccatgttaacgtgagcaaattcctctcatgaaatagcctgcagctattaagaagcacgtgtgtgcaggaagcggaggcgcaggacctcaccgcgccagcgtgaagtt

SEQ ID NO: 267174 - DNA, 492 bp, Homo sapiens
  chr14:102973240-102973732
  hypo
tcccaaaatccagcgcctagggtgctccgggcctagcctttgccagtgaggtccaacggctgcaggaatgggggcagcggcagctcgtccagggcctcggggaagcggcctggagagatggcggtgaccagcacctgcatggcgcgcgcgaagagcgagggcggcgccaggcccgccagccactggaacttgtcctcacccagcagccgctgccagcgcggccggtcgcccagcagctcctggcgggccgagccggcggcacccacgggggtgtacagcgccaggaggtccagcagcagcaggcggcgctggcgcggctccccgggagctgaggcgggggctccggcggcggagggagtggccccggcgtcgcggcccagctggcgcagcagcagctcgagaggcgtgaggccgccgccgtcccgcagaccgggcgaggcgccgtggcccagcagcaggaagaggcactcggggcgcgccagctcacaggcc

SEQ ID NO: 267175 - DNA, 33 bp, Homo sapiens
  chr14:103018821-103018854
  hypo
tgttttgttttgttttgagacgaagtctcactg

SEQ ID NO: 267176 - DNA, 154 bp, Homo sapiens
  chr14:103019457-103019611
  hypo
ctcttgagagggcttctccacgtggccacaggacagactgtgcttcatccagcactgtacgctcaaacacacacacctgaaacaaaggctccacgaacaggcctgcccttacagcacaccatgctcttgtttagtcttccttatgttttttgtt

SEQ ID NO: 267177 - DNA, 95 bp, Homo sapiens; identical to SEQ ID NO: 216024
  chr14:103046497-103046592
  hypo

SEQ ID NO: 267178 - DNA, 31 bp, Homo sapiens
  chr14:103055786-103055817
  hypo
tttgttttatacagacgggatctcgctatgt

SEQ ID NO: 267179 - DNA, 36 bp, Homo sapiens; identical to SEQ ID NO: 216025
  chr14:103109324-103109360
  hypo

SEQ ID NO: 267180 - DNA, 36 bp, Homo sapiens
  chr14:103109600-103109636
  hypo
acagagcgagactccgtctcaaaaaaaagaggaatg

SEQ ID NO: 267181 - DNA, 120 bp, Homo sapiens; identical to SEQ ID NO: 216026
  chr14:103144544-103144664
  hypo

SEQ ID NO: 267182 - DNA, 39 bp, Homo sapiens
  chr14:103193874-103193913
  hypo
ttatgaaagctgcgcgttgttccgcgttctctcggtgtg

SEQ ID NO: 267183 - DNA, 202 bp, Homo sapiens
  chr14:103215840-103216042
  hypo
cacagccgggaccgcggctgtcacacgcccctgcaaggcctggaggagggtccctgaaacttcgtgcagcacccgccctctcctgcagcagagattggcgctgcgttcccagccccttcagctgcttctccccagagccaggtgcttgggtccagccgtgcggtgtggaccaggccatgcttggggacgacaatcgaggcaa

SEQ ID NO: 267184 - DNA, 168 bp, Homo sapiens
  chr14:103216357-103216525
  hypo
tgtccctgtggcctcggtccccgcggcctcggtccctgcagccgcagtggcgcctgcatggagggggccccctaatcatggtgcctcggctgtggaatgttctgggagctagtcagaacggacatggctgccgcagctgaccctcccgcctggcgaactctttctggc

SEQ ID NO: 267185 - DNA, 46 bp, Homo sapiens
  chr14:103242390-103242436
  hypo
gctgtgcctgtggcgcagacgggggtgccactgtggcctggtgagt

SEQ ID NO: 267186 - DNA, 314 bp, Homo sapiens
  chr14:103242915-103243229
  hypo
gcgcaggccccagcggcctggtggagggtgcagggggcgcaggggcagccaggaccgccgaggacgctgggggcacgtggcaaactggctaccctgtccacccgtgagcaagacaccactccgggggcgtgggagggtccaagggagggagaaaggaaagtgccaccaaactaatgtggagccctgccctctgcatgcgaaaaggggctccacggcctgagtcaccctcagccccacctgcgtgtgcgcgagggtgcgtggcctggtacgcgtgcgcacggtgttggtgagcgtgtgtgtgcgtgtccgcttga

SEQ ID NO: 267187 - DNA, 36 bp, Homo sapiens
  chr14:103277594-103277630
  hypo
gctgtctgtattagcgtccttctgagcaaacaatgg

SEQ ID NO: 267188 - DNA, 96 bp, Homo sapiens
  chr14:103277690-103277786
  hypo
cagtggctattcacaggtgctgtcgtactgccctggatgatagtacactgcagccatgaagtcctgggcttaagcagttttcgcctcagcctcctg

SEQ ID NO: 267189 - DNA, 423 bp, Homo sapiens
  chr14:103363893-103364316
  hypo
cagctggactagcacaggcccggcctgggaagccgcaggtcagcgttttcaaactgccttttctctggagagcaagcctccacccctcttccatgcctttgatctaccgttggagaaataagatgcgaagcttgtatttgttaaattagctgtttttattatttaagatttcatattgttcatgagtagttgctgtgtgcaaagtctcacttcctgcagtgaggtgctgtgcagcccagctactctgtgtgagctttccagtgacacgcgctcacccgctgggtttcactgtggaaatccacacgcacctccagaagaacaaaccagtgaacctttgctcccctgaatagaggcgatgatgtaaaggggactgatgaaatgtcgcttctcctgtcttctgtcgtcacaggtgtctgtggggtg

SEQ ID NO: 267190 - DNA, 55 bp, Homo sapiens
  chr14:103366993-103367048
  hypo
ttcactcaggctgccggcaccaccgggcttctcacagcgccgggcttgtgtgcca

SEQ ID NO: 267191 - DNA, 384 bp, Homo sapiens; identical to SEQ ID NO: 216030
  chr14:103369447-103369831
  hypo

SEQ ID NO: 267192 - DNA, 144 bp, Homo sapiens
  chr14:103391460-103391604
  hypo
gccactcctgggctgcgtcctcatcctgtcacctgcacacctgccagctcagtcactcctgagtgagggtcactggtgagctgggtcggggtgtcggctccagatgtggggtccaggcctggggcccccgcgtgtgcgggtggg

SEQ ID NO: 267193 - DNA, 92 bp, Homo sapiens
  chr14:103397491-103397583
  hypo
tggtaccaagctgctgggtgcgaaggcagatcatatggggtcacccatgtgcaagcgtgcgccactgcaccgacacagacaagggtccagcc

SEQ ID NO: 267194 - DNA, 277 bp, Homo sapiens
  chr14:103406319-103406596
  hypo
caccagggacacacgcccctccaacttcccttccctccactcccggtgcagaggaaggctcacccgagaacttgctcttgaagtagatcaagcgtggaggctcgcagttgaggaggttgagggtgccttcagagttcaggggccttatctggattggaaaccagggagggacagtaagcgcggccacgcacagactgcaccgggagaagcccgcccgcacaggagggcaccgaggccgccttaccctccgcaggccgatggtctgcacccactccat

SEQ ID NO: 267195 - DNA, 136 bp, Homo sapiens; identical to SEQ ID NO: 216032
  chr14:103407161-103407297
  hypo

SEQ ID NO: 267196 - DNA, 506 bp, Homo sapiens
  chr14:103408301-103408807
  hypo
ccaaggcggagaaccgaggaacttcaggtgtctacgccagacacgtgtggccaagattataaatacattgcactaagtgacctgggccctcttcaacgttacgctttgcaaaaatgtaaatcctgtgtggttttaaaccctgtgctggctgcctatgaagaggacagggtgttggggggtaagagtccaggacaaggggtgctgaggcagcgggactggccccttcctgcacctcaccgcaggcccacggcccagccccactgcccacacatgtctgctgtggtgtggccatcgggatggagccgggacacactgcagtaagcccgtgggtggagctggccgtgcacctcacaggcctggtgtctagccacgacgccctgggtatgatgccgtctcagcaaggctgacaatggggcagacaaaggggtttagcttcaggtaactgagggagaatgtcattccccaactcttggcctgttacccccatatgcgcggctcgtcttcct

SEQ ID NO: 267197 - DNA, 377 bp, Homo sapiens
  chr14:103409904-103410281
  hypo
tgaatgccacgccccgttctcggttcgccgagcccttctgcccaggggcctatgcccgccgacggggtcctctgctgaggcctctggaagaaccggccccatgtgctcagggagagaggttgctgagcccgcctactgctggtctgagacgtgagatctgaaccatgctctctgctgcgggctggcatggggcccacctctcccgatgctctgtgactactcaactaagggactggaagacaaaccaaagcaaaatcgaacacatgctgactgtcggtgggaaaagcagcaacagggatatgcaacagaaaacatatacatactacaggcgacaggagccgcaggccacatgagctcctgcgcgcgtgccctccggc

SEQ ID NO: 267198 - DNA, 74 bp, Homo sapiens
  chr14:103416814-103416888
  hypo
tttgtaggctgttccgatgcctcgctgcacgtccacgcccagaggcctcttggactgctcgggaggtattgggc

SEQ ID NO: 267199 - DNA, 132 bp, Homo sapiens
  chr14:103417431-103417563
  hypo
gcgtcttcagcatgcgcacagggaaagggcccatggcagaagcctgcttccatgctgtccctgccagcccgggccgcctcccacacgtgggagtttctacacggcaattcaggccagcggtcatggggacgt

SEQ ID NO: 267200 - DNA, 199 bp, Homo sapiens; identical to SEQ ID NO: 216035
  chr14:103421194-103421393
  hypo

SEQ ID NO: 267201 - DNA, 307 bp, Homo sapiens; identical to SEQ ID NO: 216036
  chr14:103423609-103423916
  hypo

SEQ ID NO: 267202 - DNA, 145 bp, Homo sapiens
  chr14:103432740-103432885
  hypo
atgttctatctcacgaagcatggctatcagggagaagccaaacaagaaggggacgttcccgccttcctcggcacacagtgacacagtgtcacgtcagctagagtgcccgcagtgtacccgttgtatacacgggatctcattgatg

SEQ ID NO: 267203 - DNA, 265 bp, Homo sapiens
  chr14:103433124-103433389
  hypo
ctgtctctgagaacgcaaggggtgtgaacggtttgccccaagtccttcagtgggttggtgggggcgtatctccacctctattccaacagaaccactgccccagacatgagaagttctggggaacagcagtgagacctgcaccccagcctgagaggcacggcctggcgtggagcacaggatcaggcagaagaggcggggcagaccccatggactgagcagggagcggattcacggccgctaatggggccgcgcacgtaccactgaa

SEQ ID NO: 267204 - DNA, 268 bp, Homo sapiens; identical to SEQ ID NO: 216039
  chr14:103433869-103434137
  hypo

SEQ ID NO: 267205 - DNA, 150 bp, Homo sapiens; identical to SEQ ID NO: 216040
  chr14:103442296-103442446
  hypo

SEQ ID NO: 267206 - DNA, 213 bp, Homo sapiens; identical to SEQ ID NO: 216041
  chr14:103444036-103444249
  hypo

SEQ ID NO: 267207 - DNA, 552 bp, Homo sapiens
  chr14:103453117-103453669
  hypo
cccagttaccctggcgaggccctgtgacgattcctactcgtctgcccacccagctaacgagcccctcctgagcatctccttggtgccaggcactgctctccagcccacccacctatgcacgtgacaacgctgcccctgccttcatgaagcctgcacacgagctgaggtcttgcaaacacaaataggcactgctgtctcaggcaggctcacacggtgcaagctctgtgctgagtaccacggaaaacaggaatgggacaaagggacagagggacacgtgtggaggaagctggctgggggctgccacacaaagagacggcagtggccagacgaggtccaggaggcaggtggcgatctgggggaagactgctgcaaaccgccccatacccccaaaactgcactttatagatgaagacatggaagctgagccaactgcccacagttacagagcagcacgtgctggagcaggaacataaacacaggtctgtcccactaacgcctgtttctaaactactttctgtgcgctctcaaacacatgtgcgggtgcagggcacc

SEQ ID NO: 267208 - DNA, 117 bp, Homo sapiens
  chr14:103459689-103459806
  hypo
ggttctcaatgagccgctccacatgggatgcgaggcttctggccaagagcacgtctattaacagcacttttggggacatctaacagactctcccacgtccaccagtttttctgcatt

SEQ ID NO: 267209 - DNA, 276 bp, Homo sapiens; identical to SEQ ID NO: 216043
  chr14:103460344-103460620
  hypo

SEQ ID NO: 267210 - DNA, 355 bp, Homo sapiens
  chr14:103467947-103468302
  hypo
agaagcccaggcaccgaggtgccactgcgtgtggagggcgatgcagagggggcggtggatgcacactgcaggcattccagagggagcggccccggcagctgacggacacacacggggccaggggagatgcggtgaacgaacggccaggccctcgggcccctaaggaaggccgtggggtcgagtcaagcccttactagctgagccccagccgcgtccacgtctgccgagaactctaagaggaggagcttcctacagcagcactgggtctgatcaacggtctcctggagcatggtctctgaggaaagctaacgcgggagctcgtgaggcagacggcggaggcccactccagaatgag

SEQ ID NO: 267211 - DNA, 67 bp, Homo sapiens
  chr14:103470286-103470353
  hypo
gcgtagtgcagcgcggtgatccactggcagtcgccgttcaccagcacatcgcgctcctctcggaagc

SEQ ID NO: 267212 - DNA, 92 bp, Homo sapiens
  chr14:103477693-103477785
  hypo
aaacagctgctattcgaccctctctgtgttttttagaaaatgccaagaagtcaaaattcaattaacaaatggagttttagaaactacgtcag

SEQ ID NO: 267213 - DNA, 43 bp, Homo sapiens
  chr14:103487486-103487529
  hypo
aagggagccctttaagaacacgtggatgtggccgcgtgcagtg

SEQ ID NO: 267214 - DNA, 34 bp, Homo sapiens
  chr14:103525032-103525066
  hypo
aggagtgggcctggcgcggtggctcacacctgta

SEQ ID NO: 267215 - DNA, 93 bp, Homo sapiens
  chr14:103525306-103525399
  hypo
cacgactccgtcttaataatagtaataataataagaagaagaagaagaagaagaggagtggctgcctatgccggagttgttgactggaacaag

SEQ ID NO: 267216 - DNA, 215 bp, Homo sapiens
  chr14:103538914-103539129
  hypo
aacagcctctgtgtgcccagcgcttccctctcacctgctcaaatagctgcacgtggccttgctcccctcctcactgtgcagataaggaaactgaggctcagagtgggcgagagactcgctcaggggcacacggtgaactgagggaggtgcctggacttcatctaagctggcgtggttggcagaggccgggcatcgcccctgagcatggagatgtc

SEQ ID NO: 267217 - DNA, 307 bp, Homo sapiens
  chr14:103539677-103539984
  hypo
ggctgagaggccagcgtgagattctgcactgagcgggggtaggggtactccacaccccaggtctccatcagtcaccaccatcgtgggtctggctcctatccctccccagcattcagaggataatctccctacatggccttggacacccagctcactgggtcgggtagcctgaggccgggatgccaggcctttgcacagagactgtctcagaggccacccctcccaccagcgctttggacctttctccacctttacaccccacccagccaacccaggctgcacacccctcgggcgcagtgttggcact

SEQ ID NO: 267218 - DNA, 169 bp, Homo sapiens
  chr14:103576354-103576523
  hypo
catgtctctgcaggcgggaccacatactggccattctggcgctgcgccgactgggccgccagcggaaccagcatctcttgcagcacactcaagacctgctgagagctgcggccggggcggcgggtgcggaggcccctcggggccgcgtgctcttcgaggagatcaaggt

SEQ ID NO: 267219 - DNA, 33 bp, Homo sapiens
  chr14:103583158-103583191
  hypo
tggcatggcaggccatggcggcgcgtgcggaca

SEQ ID NO: 267220 - DNA, 149 bp, Homo sapiens
  chr14:103594144-103594293
  hypo
gagactgggcctggacacagggataaggctggggctgggtctgcgttgctcttggaatccttaatttcctgggcctcagtcacattctgctgttggggaaactgaggcacagaaaatggtagggatttcattcacgagcgcccagtctg

SEQ ID NO: 267221 - DNA, 142 bp, Homo sapiens
  chr14:103594643-103594785
  hypo
ttaccctgtgagcccgccgcagagctggagcccctcaggtgggaggctggctgtgcagctggtacccctgctgagtacagcctcaggcgtcccttgactccatagatccctgggcgtgcccgtcattcgcacggtctgcatg

SEQ ID NO: 267222 - DNA, 407 bp, Homo sapiens
  chr14:103596229-103596636
  hypo
gcagaggagaggctcggagacagacaggacatgggcagggagcttgacgggtcttccaggtgagcgaggtgagggatagtgccccagtgacctgcccctcctcctccaggccaatgtgagggagttgatggaccgagctctggagctagaggcacggcgctgggctgaggatgtgcctccccagaggctggacggccactgccacagcgagctggccatcgacatcatccaggtactgcaatctgccccagggcacacgtaccgcccgtgcacgtgcatggggagccccacgcacattccgtcctgtgtgcatacccatgcccacctcggggcaccccctctgttcccgcctgtttcctccccgtcccctgcccccttgtccaggcgagcccctgctcagctcaccc

SEQ ID NO: 267223 - DNA, 72 bp, Homo sapiens
  chr14:103697779-103697851
  hypo
ccacaggggtccaggcggtgcgaggtgggagagactgaggagtcccgggtccttgagcgaggagacgggcgc

SEQ ID NO: 267224 - DNA, 57 bp, Homo sapiens
  chr14:103699248-103699305
  hypo
ccctccccactgaccggacctcaggtgctgacccctggggaccgggtcccccggatc

SEQ ID NO: 267225 - DNA, 53 bp, Homo sapiens
  chr14:103699526-103699579
  hypo
tcgggtctcaagttcggagctggcagccaatgccccagcgcccccagcagccc

SEQ ID NO: 267226 - DNA, 35 bp, Homo sapiens
  chr14:103802598-103802633
  hypo
ttacaaaactaccaggggaacgcatttaaagagtg

SEQ ID NO: 267227 - DNA, 167 bp, Homo sapiens
  chr14:103803090-103803257
  hypo
ggatctcatgaggcgaataagctgcaagacatgttggatggattcattaaaaaatttgttctctgtcctgaatgtgagaatcctgaaacagatttggtaagtgcttttgtggttgtcgaaagaaaaagccatatacctgcttctgtgataccgctaagtcaccttcc

SEQ ID NO: 267228 - DNA, 158 bp, Homo sapiens
  chr14:103966175-103966333
  hypo
gagtgcccgctgtgcgtgcgtggtgtgcggtgtgtgcagtgtgcagcgtgcagcggtatggcatgcaatgtgtgtgatgtatgcagtgtgcagcatggagctggcccctgtgcacacccctgcagccttgtggaagaaggtagcgctggctcagtcaa

SEQ ID NO: 267229 - DNA, 356 bp, Homo sapiens
  chr14:103977203-103977559
  hypo
gaggcgagaccctccgagcggagtccggctggttaaagggcctgcacgggtctctcacagaagaaggaaagctggtcctgagggtggagccaggggaatctgggggccacttcagcattctttgttgccattggctttggttcagtaagctttgttgatttattttgttgttgttattgttgttagagtgatggggctgattgcttataagttctgaggttcttatttgcgtttccagctccctgggtattcattcatacctggtttctggctgtggtgaaatgtcttctgaccaagtgggttgataaacagggggcttcgctggagcgggggcagggggcgcggtcactgaacag

SEQ ID NO: 267230 - DNA, 151 bp, Homo sapiens
  chr14:103977771-103977922
  hypo
ggacgctcacagcccgcccccaggacctgtggggggagttcagctgcttcggctgcttctgctgctccgcgtgcacatgggcctccttaccaccctggcagtctcctcctcttggaagttttaactattcaagactcaatggccaggcgcg

SEQ ID NO: 267231 - DNA, 439 bp, Homo sapiens
  chr14:103981303-103981742
  hypo
agaggggattcgggcgattgtgggaagcagagagcagacatgcaggtgggagccctgccccaggttaggcaaacaggcaacaaacacgtctggaggggttggtgccgtcctgagtgcaagtgggtgtggagtacctggagccactgggccaattcctctgcaagcccagcaggatcccaagccgaaccccacgctgcatgggattcatgaatggtagaacagggttgcagccccttcaccacagcaggaatgttgccagcacctcaggagttggtgccaggctgcacacacgcaggcatttcgccccacagcaccgaggacggccttgtcctcacagcctgggcagctgctggagcacgttgatacctggccacccctagctgcatgggagtcttgaaagtgtgctttcacagccaggcagctgcgtgcaggctggaaa

SEQ ID NO: 267232 - DNA, 158 bp, Homo sapiens
  chr14:103986355-103986513
  hypo
ccaccgcagccgtgtccacaccgcctggggagacagcaagtcagggcggaggaaacagggctgcccaaaggccacgggaagccgcagcacctgccctgctcacctgtgcctcgcttctgaagtcgcagccgcttaagcacctccgagaacttctcatg

SEQ ID NO: 267233 - DNA, 157 bp, Homo sapiens
  chr14:104000005-104000162
  hypo
tggctcggggaacccgcgcctgcctctgggacctgtccctttccctgcgagctcccccttctgggtccaaaggctcctggctcattcatgggcccggcatctcctgccggccacgggagcccgctggggaggatgcggcatgctcagcctctgtgcc

SEQ ID NO: 267234 - DNA, 747 bp, Homo sapiens
  chr14:104000389-104001136
  hypo
gccctggtgggaggcggcagggaggggctgtcatgctcgggctctgcttcgagtaggcgcctcctgttcccgggagcagcgacagcctctaatttcctgtgacagcagcggcccccgcaccgccccacgctgccgtgctgtcagagctgctccgggcccagagctccagcagccctgtggaaggcaggagagcagtgcccgctgtgggccaagtgagacaatggcagcgcgggcttgacccggtgcctggcacatgggagggcctggcatggctaagctgggtgacatgaacagcggcgccaggccccatggggggctgtcagttgagggccaggcccctctgccctgcagtcccagctcttggagagcttgcagtctgtgttggggctgtcttaggctggcctcagaccctagggtgggagtccagggatgctagggccagacgggccaggctctgccacccctgccctctgaccctcgggtcctgtttcccacaggcgggcgcttctgctccttctcaccgtgcatcgagcaggtgcaacgcacatgccaggcgctggcagcgcgcggcttctcagagctgagcaccctggaggtgctgccacaggtctacaacgtgcgcactgtcagcctgccaccgcccgacctgggcacaggcacagatggccctgccggctccgacaccagccccttccgcagcggcacgcccatgaaggaggccgtgggccacaccggctacctgacctt

SEQ ID NO: 267235 - DNA, 284 bp, Homo sapiens
  chr14:104012458-104012742
  hypo
tcctgcagctgcagcgacatgcgccaaggctcgctgtgggcagaggtctccgccaccaagaagcgaggctggagggcaggcactgattctccatcaccacacccagagcccccactgggaccagcgaagcacaaggcagccagtgccacagccccacaccccgcccgccagctgccctgtgtggtgtggaggcggctccgggggcggctgttcacagcagtgacccccgcctgctgcacggccacttgagctgtcctggctgctgccaacgccactgtgaagta

SEQ ID NO: 267236 - DNA, 454 bp, Homo sapiens
  chr14:104017444-104017898
  hypo
gctgagtggatgcccgcccacctggaacagtgctaggtggggatggggggggggcatcacggggcacacacaagctgtcggaagggccgatgtccacaagggacgagagtcaggggcgcggctgtgggggtggaggcggcctggaagagcaggcatggcacagcggccgctggctcatgtggactggcgaggcactgtcctgctggggccgtcccaaagggaagcatggcccgtcactccccaggctaaaaaccatccacggctgcccctcctcatggctgaagtgcagctcctaggccctaccccgacgctctcaggtccccttctctccctcaccctgtggagagcggacctgcctcctgtccctcggaggactctcaggccccagccctgccgcagcagctcgtggtccagcttggctggccctgcctggccctcccggctccagcagcag

SEQ ID NO: 267237 - DNA, 37 bp, Homo sapiens; identical to SEQ ID NO: 216056
  chr14:104041400-104041437
  hypo

SEQ ID NO: 267238 - DNA, 155 bp, Homo sapiens; identical to SEQ ID NO: 216057
  chr14:104047674-104047829
  hypo

SEQ ID NO: 267239 - DNA, 1234 bp, Homo sapiens
  chr14:104047889-104049123
  hypo
catttaatattttcagaccccactttacctcgggtaactgaaaccatggaaagaaaaaccatggatggaggggacagctgtgctgccgccatctcccttacacagttgagtaaaccgaggcacagaagaaaatgaagtagccccagatgacgtaggaaatggcagaactgaagggaaaagcagagcagggggctgtagagttaaactgttcttcattccggtggcactagacctgcccgggcggccagaggacacgtggctcctgtcctgtctgccgtgtggctaggggacagccgtgcttgtgctgtgccgtctgagtgtttgtttctgtctgtgggaataaaggggttgccagacaccctccctgctctgtggagggagggtggaatcatgcctttggccactttgcccactcccccttgggccggagcatcagcattagctgtgccacagggtggtatgcgctctgctgaaggtggcaccttcagggaaaggcagtctgccggggaggctagcgagcaccctgggtaggagctgagcgtggcctccgcgcctcctcatgggaagtgctggagatgcaggagcccctgagccagagcccagcgctcttacaagagacctcacttcctgttcggggactggggctgctaagtcagagtgcgcctcctgcacccgccaccctggatgtggttccattccctggtccctgagccatagctggggggcatgagactgtcccctgggctgctttggggaccctacttcagggcagccctgccactccctgtaacgggctgtgggtcctgccctgtggccttcctacctctcttgcgtgtgggtgagcctgagcgtggccaccgccctgggagtgccacagaggcaagcggcactggtcctcatgtgtaaacagccccaccagcacgcggggctggagtagtcaggccgggacctgtcccaggaatgggcaggctgttaacctaggatgcattcaagttaggacacatttcattcccgtgtagcggtggctcccagttcctccgcagaacctgcaggagtgtgcgtgatgaaacccgtcactcgttgtgtatggtagacatacctgcctgggtcgtaatcacttgtgaagaaaatgaattatgctgtgacctttagatacgattcacataccataaaattcaccctgccttttttttttttttttgagatggagtctccttgtcgtgccctgcctaaa

SEQ ID NO: 267240 - DNA, 176 bp, Homo sapiens
  chr14:104061735-104061911
  hypo
aacggtgtgctacagcgccttcattcctttccagagtattttcctctgtgatgcatgctctgcagtggatcagcttttgtcgtggatggctgagcgtgaggctgagccacccctgcctcctggtggatgtgggccgcacccctccagctggtcccacctgccgaccagctgttctg

SEQ ID NO: 267241 - DNA, 36 bp, Homo sapiens
  chr14:104062197-104062233
  hypo
cttttttttttttttgagaccgagtctcgctctgtc

SEQ ID NO: 267242 - DNA, 154 bp, Homo sapiens
  chr14:104121123-104121277
  hypo
tcactggagatgttggagctcggcctgagtgaggcacaggtacgagtgagaatgactcagacgttatcaggaacttttgatggtaaaatggagacttgtttgaaataagcagtttcactaaagaagaggaaagatgattatagaataacagatc

SEQ ID NO: 267243 - DNA, 114 bp, Homo sapiens; identical to SEQ ID NO: 216061
  chr14:104152224-104152338
  hypo

SEQ ID NO: 267244 - DNA, 119 bp, Homo sapiens
  chr14:104158785-104158904
  hypo
gtcctaggctgcccagaccacgctggcaggtctgctgcagacccgcactcggcccctgctcggcccctgctcctgcagagggctggggacgccgccacgtttgttcctagacagacagt

SEQ ID NO: 267245 - DNA, 380 bp, Homo sapiens
  chr14:104159177-104159557
  hypo
tctgttaacatgatgactagcgtgctgtcagtttgacactaaaacctgaagcactcggtgcagttgctcgggcctcacacagacacatcaggtttacatctgaaagtactgcctcccttccccatcacggaggccgtttgagttttcatccactccgccctttggtgtggctgtcagtgggtggccgggtgcctgtggctgctctagaacctgtttctcaggtgcctggggcccacccggcagctcgagctgttgggacttggcagtccctgcccctgtgctggtgctgagagttcgcgacagtggccaggcactgccctcccagttgtccagatccactaatcctcacagacaggccagtgccccgacctgtcccccaa

SEQ ID NO: 267246 - DNA, 406 bp, Homo sapiens
  chr14:104159872-104160278
  hypo
tttgttttttcatgcaggaacgaaataattgtctggccgactcgcgagctctgagtgccagccacactgacctggcccactgagagccagcagggctaggtaacctgtcttgggagtgtgagaccgccccgccctgccacgcccctcaccgccctgcccggaggcgccagccgcactccttggcttcctttcctagatagtgacgtccaccaaccttggaggtgccttttcaaaacacccgggaggccgtgcctcagcattctgttactcggcctgcagccccagtgccaggagccaccccgaccgcgacccggccaggctggctcagggaggccgaggtggcgctgaggtggcttcagcacgctggggattggctcctgctcacggatgctgttgcatttcctgc

SEQ ID NO: 267247 - DNA, 262 bp, Homo sapiens; identical to SEQ ID NO: 216065
  chr14:104164990-104165252
  hypo

SEQ ID NO: 267248 - DNA, 153 bp, Homo sapiens
  chr14:104169506-104169659
  hypo
caccacatcggccacgtgctcgatgaagatctggctgccaaatcggagcttctgaagcagctctcctggaacgtcagtgcgcagccgcggctgctgggccatgagctgctgcaggcgcttgtgcgggaaggcgtcttccgtgcagatgtagac

SEQ ID NO: 267249 - DNA, 131 bp, Homo sapiens
  chr14:104188353-104188484
  hypo
tccactgagcatcagagctgcggggtccagttaaaggaggcgctggtgggagcctggtctggggcccggcttgctgtcctgcgcttcctttgcggggcgtgcttactggcggggtaggtatttggcagtag

SEQ ID NO: 267250 - DNA, 679 bp, Homo sapiens
  chr14:104194175-104194854
  hypo
cagtgcgcggagtgcgccctcgtgtccctcaaggaggcggagttctacgacaagcagctcaaagtgctcctgagcggtaaggacgggtgtcctgcacagtcccgcgcgctccgccagccggctcctcgtgtctgtggcgatgctgtgggctgtgcacggggcgttctgcttctctgacgttctctcgccctccctcccttccccgttttcttctggattcgtttagaagcggttatagagccttcccttcttttcagaggcggaatgtcgtctaaaatgttggtgctgactccgctgggcacgtccatcaggtgggaggggaggccctgggcccaggcagcaccttcctccttcccccgggtggaacccggcgccggcgctcgggcgtttgcaaccactgtggctcctcggaggggccggagacctttgcccaatagcacgatgcagacccggttttgagccatctctggggacctggtgtgggagaagggcattctccaggggcatagggtgtgcctccctggaatctgaacaacgagcagcgccttctccccactgtccgtccacctctggccactgccgtcccagcctcctgtcccctgcctgcccgccgtggggtctgggaccacctgccttcctgcccacagctccatcctgtgtgaaacgggcatggtccctg

SEQ ID NO: 267251 - DNA, 72 bp, Homo sapiens
  chr14:104195243-104195315
  hypo
ggagccaccttcctcgtcacgtttggaaactcagagaaacctgaaactatgacttgtcgtctttccaataac

SEQ ID NO: 267252 - DNA, 152 bp, Homo sapiens
  chr14:104200030-104200182
  hypo
atcacctgaaccctcgtgccacagcgcagtctgggtccagaaagaagactcacagccgccggggtgagacgggtttattgtgcacatttacacagcgtcagcagcgtctgggctggcagcggccatgctcctgtggtcgggctgctctacaa

SEQ ID NO: 267253 - DNA, 485 bp, Homo sapiens
  chr14:104202356-104202841
  hypo
gcacatagccctcccggtctccaaggcgagcccaccaccactcagtctcgctttcgtccttgcgcctcaggatggtgagggcgtccccttcgtggaaggacagctcgtcactgttctgggcctcgtagtcccacagagcatacgccacacctttgttcatcacacccagcttttcctgcacccctggagccagagagcaatggtcaggcctcagcagagggtggcctgcagcaagggaccctgctcgaggaacaggacacagtcgtgctgctgccgaggctgctctcagcaggccccacagaggccagcgagggagatgagacactattgaagactagggcccccacccgatacctcccctgcccggcccagctgctgctcctgctgccggccctttctaagtcctgcaggacagacaggacaaacgagctcctgagccccagggcaagagtgtgctgttcttaaggtgacgcttagcaatcaca

SEQ ID NO: 267254 - DNA, 121 bp, Homo sapiens; identical to SEQ ID NO: 216070
  chr14:104204087-104204208
  hypo

SEQ ID NO: 267255 - DNA, 65 bp, Homo sapiens
  chr14:104222924-104222989
  hypo
agtagcacatggggaagccccgttaaccacctgtcattgtcttcgtggccctgatcagtgttttc

SEQ ID NO: 267256 - DNA, 88 bp, Homo sapiens; identical to SEQ ID NO: 216071
  chr14:104231446-104231534
  hypo

SEQ ID NO: 267257 - DNA, 82 bp, Homo sapiens
  chr14:104335355-104335437
  hypo
gggcaagctggggctcagggcggtcagggctggcctaaagacatagcgaagtcggccgggcgcggtggctcacgcctgtaat

SEQ ID NO: 267258 - DNA, 202 bp, Homo sapiens; identical to SEQ ID NO: 216073
  chr14:104335677-104335879
  hypo

SEQ ID NO: 267259 - DNA, 82 bp, Homo sapiens; identical to SEQ ID NO: 216074
  chr14:104349424-104349506
  hypo

SEQ ID NO: 267260 - DNA, 129 bp, Homo sapiens; identical to SEQ ID NO: 216075
  chr14:104353834-104353963
  hypo

SEQ ID NO: 267261 - DNA, 603 bp, Homo sapiens
  chr14:104393986-104394589
  hypo
accctcactcttctagagctcggccgggaccacctcagcctgtatctttggtccatgtgatcgcctggacctcctgtccgcacctgtttgtgtccagctgtgagtctgacaccgccgcctgagacaccggtttaggaaggaagatgaattcagttatgatccggctgcaaagaacttctcccagatcctcacctcagccatcagggccgcctgccctcccctataaccctgggtggtcctccgtctggcgcattcccccgtatcctgcaggggtctgcctggcgttactttctccgagaccttcctgaccttcttcttgcccctctccccccatattaggtgcaaggatgtcctggtacgtctgacccacgaacgcaaatcccttctctggtttgccttccatctcctcaccctgaggtgctcaagaaacgtatgtagggtcccggtccgctcaaagcgcacaaacctccgaggcagcagcctctaaatagagaggccagggagtgaccggagggcattttcttgtacacacaggggttgccacggaactcccgtgaaacagactcccgggccagccgcggcgctcaagcttcccctgaggtc

SEQ ID NO: 267262 - DNA, 381 bp, Homo sapiens; identical to SEQ ID NO: 216077
  chr14:104395206-104395587
  hypo

SEQ ID NO: 267263 - DNA, 63 bp, Homo sapiens; identical to SEQ ID NO: 216078
  chr14:104548475-104548538
  hypo

SEQ ID NO: 267264 - DNA, 231 bp, Homo sapiens
  chr14:104570011-104570242
  hypo
ggtagggaccgccccggccatcctgcccctgcagccctgagccccagccctctgcagctcccacggccctcaggctccctggggccctcaccagccagtgcagaccccgcgtggacctgagatgtctgcagtgtggccccaccagccccaggccctgtcccctgtcctccgtcgtggtgctttccagcctctcggggagtgggcagggttggggcgcggctcacagccaga

SEQ ID NO: 267265 - DNA, 111 bp, Homo sapiens
  chr14:104571681-104571792
  hypo
tcggggggagatgacgccaccctcggtggaagagcgccggccctcactgcagggcaacacgctgggcggtggggtctcctggctcctcagtctgagcggcagccaggtaat

SEQ ID NO: 267266 - DNA, 112 bp, Homo sapiens
  chr14:104600535-104600647
  hypo
tgtgccgcacactgcgtgcccgtccctgtcccgggtccacctgccgtccatccactgtcgccaaggatgaagagacgattggccattcctacccagccggtttccactacta

SEQ ID NO: 267267 - DNA, 46 bp, Homo sapiens
  chr14:104617752-104617798
  hypo
tgtacccgatcctgcggctcttgcgccccttcggtgagctcatgtg

SEQ ID NO: 267268 - DNA, 789 bp, Homo sapiens
  chr14:104618014-104618803
  hypo
tcctgcgtgtccccggccaggcggccttagctgacagtggtccggttgtccgggagccgcaaacctgccttgttagccgcaggccggggcgcttaatgacggctggggaaggtggacagttaacaaggacattgtgagcctcacgatgaagcccgatcattattttcctgctgggcttgtgtgggtgaaagtgtttgggcttattaatctgttacggatggtgcggtggccaggcgggagctcgcagcgtcatggacggtgagagtgctggtgggctctgggtgccggccctccctccccaggcactgaccctgcctttgtcccttgctgtcctcaggatccttgcctctctgccctgcttctcgacaagctaccagcacctggggccctgccagcctgtcgcccagaggccgagcgccgctgtgacgtctgcgccacacacctgcagcagctcacacgggaggccatgcacctgctgcaggcccctgccagccatgaggaccttgacgccccccatggaggccccagcctcgcaccccccagcaccacgaccagctcgagggacacgccaggaccagcgggtcctgcagggaggcagccaggacgagctgggccagacaggaccaaggggctggcctggtcccccgggcccagtgtccaggtgtctgtagcacctgcgggtcttggaggggcgctgagcacggtcaccatccaggcccagcagtgcctggagggcatgtggagtgtctcgcgggtcaacagcttcctcccgccggcgtgcctggtgag

SEQ ID NO: 267269 - DNA, 821 bp, Homo sapiens
  chr14:104623041-104623862
  hypo
cctgggtcccggggcggcttgttctgctgacgtgccgtgcctggcctctggcctgtgccacttgggacaccctgaggacgctgggccttccagaccagcccacgtcccctcagcacggggaccccagtcctctgctagcctgggtacaaaggacgcctcgggcagtggttatcgactggacacttggggccgaatgacgcttggcacctgggtgaccgtgacctgaccaggccacggtgcccaagggggtccttggagagcttggggcactgggcccttggggaaggggccggggcgaggggtggccaggctgaagcaggctgccttccctgccttgcctggggttgcatccccccacgccgcccaggaccaggtttggcctgagggttcggggtcccacgtgtctgggaatggaacgtgcggaggtggagctcacgtttgctgggctgtcccgggcgtttaattacgtttgtgcttcattatgaggaggcctccctttctgggatttatttgagctaatgagttggaaatgccagggtagtatttcagatgagggagcgccacacatcaccgtacgtggggcaattagtgttcctgccaaatagttatcgtggtttcttctctaattacgccgctgggtgctcccaggaggctcaggggtgagagggtggggggtctgtgtccatcggtcttgaccagtgtggtcgctgcgattctggagtttgatgggggagaggcggaaagtctggcttctggaccaccatctgcctccctctctgcctccaaggagtcctgctggggcagaccgcccacacaccccg

SEQ ID NO: 267270 - DNA, 35 bp, Homo sapiens
  chr14:104627959-104627994
  hypo
gtctcgttcatcctcgctcacgcgtgttctgagct

SEQ ID NO: 267271 - DNA, 110 bp, Homo sapiens
  chr14:104628658-104628768
  hypo
ccacagaggacgcccggtcccagcctctgtctaggcggcctgggccctgggtgtgcccgctgtggcccaggcatacctgagatctgtgctgcggacgctgctcctgggag

SEQ ID NO: 267272 - DNA, 260 bp, Homo sapiens
  chr14:104633624-104633884
  hypo
gtactaggttcagcgtggggcgggacagccaggtcacggggctcccagggactaaggttgggtttgatccagggaagccccttgcgtaggctccactgagacgcagccctgagggggctgggggcaggaggggactctctgctctccagagtcaccgtgtgcaggcgggcccctgccatgggaaagcgggatgcgtgatgggttgattctggcgccgcgctccacatgggaagactgccgcctgtggagggcacagggcc

SEQ ID NO: 267273 - DNA, 600 bp, Homo sapiens
  chr14:104639202-104639802
  hypo
caaagaggcccctgagatctcggtgcccctggttggcccccggggacgccagtagccataaaggctccttgcgtggtgtgtggtggggcctgacgcctgcgtggcccccaggcaagtcgtacaccatgatcgggaaggacagctcaccccagagcctgggcatcgtgccctgcgccatctcctggctcttcaggctcatcgaggagcgcagggagaggacgggcacccgcttctccgtccgggtctcagccgtggaggtgtgcgggcgcgaccagagcctgcgggacctgctggccgaggtggcccctggcagcctccaggacacccagtctccgggagtgtacctgcgggaggaccccgtgtgtggggcgcaggtgcgcctgcctactgtcccaccttgggggaggggggctgcacttggccctgagccactgaagacgccgctgcctctgcctttcctgcagctccagaaccaaagcgagctgcgggcacccacggccgagaaggcggctttctacctggatgcggccctggcggcccgcagcaccagccgagcgggctgtggcgaggacgcccgacgcagctcccacatgttgttca

SEQ ID NO: 267274 - DNA, 637 bp, Homo sapiens
  chr14:104640045-104640682
  hypo
ccggaggccgcagccgcctgcacctcatcgacctgggcagctgtgaggcggcggctggcagggccggggaggctgctgggggtcccctgtgtctgtccctgtcggccctgggcagcgtcatcttggccctggtcaacggagccaagcatgtgccgtatcggtgagtgtagggcctgggcaggtgccgaccagggtggccccttggtgacctggtaaatccgtgtctggtgtgcccggtgctgctgtggcccccagctcctcagggctttgctcctccaccacctgacaggcctcgctgcccgtgggctgcctggggccccacgctgggctggtgccggagctgggtgggaaccagactgatcccagggctgcccttggccagcctgtccccgaagctcccttcccaaggccttggcatctgaaccgcctcgacccgcagggaccacaggctcaccatgctgctgcgtgaatccctggccaccgctggctgccgcaccaccatgatcgcccacgtgtcggatgcgccagcccagcacgcagagacactcagcaccgtgcagctcgccgcccgcatccaccgcctgcgcaggaagaaggccaaggtgctccccacctcctgcccgccccatctcggggc

SEQ ID NO: 267275 - DNA, 698 bp, Homo sapiens
  chr14:104641146-104641844
  hypo
cttcccctgagactcagttccgctcccagcgtttggtgggacatggttggtggtgcctgctgtagttttcatcacagtgaccgcagcattggccctgtgctctggggagggtcggggaagcgggggcgtgtaggggagactgggctcggcagctccacttttcttcccccagtacgcctccagctcctctggcggggagagctcctgtgaggaaggccgggcccgtcggcccccgcacctgcggcccttccacccacgcactgtggccctggaccccgaccgcacgcctccctgcctgcccggtgaccccgattactcctccagcagcgagcagtcctgtgacacggtcatctacgtggggcccggtggggcggcgctgtcagaccgggagctcaccgacaacgaaggtccgcctgacttcgtgcccatcatccctgccctgagccgccaccggccctccaagggtccccgagacgcagaccacttccgctgcagcaccttcgcggagctgcaggagcggctggaatgcatggacggcaacgagggtccctcaggaggtccaggtggcaccgacggagctcaggccagccccgcccgagggggccggaagccctcgccaccagaggctgcatcccccaggaaggccgtgggcaccccgatggctgccagcacccctcgaggcagttctggtccagaca

SEQ ID NO: 267276 - DNA, 708 bp, Homo sapiens
  chr14:104642174-104642882
  hypo
cagtgaccctgcagcggccagtggagctcaacggcgaggacgagctggtgttcacggtggtggaggagctgtccctgggggcgcttgccggagctgggcggcccaccagcctggctagcttcgacagtgactgctccctgcgggccctggcctcggggtcccggccagtcagcatcatcagcagcatcaatgatgagtttgacgcctacacctctcaggcccctgagggggggcccctggagggggcagcctgggccggcagcagtcacggctcctccatcagctcctggctcagcgaggtcagcgtctgcactgccgacagccgtgaccccacgccgcagccccgcttcagccccgactcgctggcagggcttgaccctgggggcccccctgccctggatggttccctgggggatggaagctctgggttcctggggccagacagacctgacagtcctgggccaacctggggtccgtgccctggggaagtggctgcagtggccccatcccgacccggcagggagccccaggccgggccctcgcggtgggcatccgcagcccagaccatccactccagcctcccccggaaaccgaggactgcctctgccaccacccgtgtgggctgtgctcgcctgggccagagcccacctggccgtggaggcctgtttgaggacccatggctgctccgggtaggggagtgtgataccc

SEQ ID NO: 267277 - DNA, 1070 bp, Homo sapiens
  chr14:104643153-104644223
  hypo
gaagggtctggctcccaaggcgggcttcctcccgaggcccagtggggcggcccccccggccccacccacgcggaagtccagcctggagcagaggagcagcccggcctcggcccctccgcatgctgtgaacccggcgcgggtcggggctgctgctgtccttcgaggggaggaggagcccagacccagcagccgggctgaccactctgtccccagggccacgtccagcctgaaggcccgggccagcaaggtagaagcagcacaccgtcttgccggacacgcgtctctggagcggtacgaaggcctggcgcacagcagcagcaagggccgggaagcccctgggcggcctccccgggctgtacccaagctgggtgtgccaccctccagccccacacacggtccagctcccgcctgtaggagcggcgcagccaaggctgtgggggcccccaagccccctgttggtggaggcaagggccgtggcctagtggctggtgggtcgcgggctctggggccttcggtgaagctgtctacggcctctgtgacgggcaggagccctggcggccctgtggccggtcccagagcagccccacgggccgggcccagtgtcggggcgaaggctggccggggtaccgtcatgggcacaaagcaggcgctccgggctgctcacagccgcgtccatgagctgtcagccagtggagccccgggccgaggtggctcctcgtggggctcggcggactcagacagcggccatgacagcggcgtgaacgtgggggaggagcggccacccacgggcccggccctgccctccccctacagcaaggtgaccgccccacggcggccccagcgctacagcagcggccatggcagcgacaacagcagcgtgctgagtggagagctgccgcccgccatgggccgcaccgcccttttccaccacagcggtggcagcagtggctatgagagcctgcggcgcgacagcgaggccaccggcagcgcctcctccgcccctgactccatgagcgagagtggggctgcctccccaggcgcccgcacccgcagcctcaagtcccccaaga

SEQ ID NO: 267278 - DNA, 221 bp, Homo sapiens
  chr14:104645048-104645269
  hypo
gccttcagcggccccgccccaccccgagggaggcccccacccaggtagggcctttggtgggctggggtctatgacccctggtggggagcctgccgcggatggcagagtgagccatttgatgggctcgccaggcctctgggggtgtggctgggcagcccctgacctcactttctgtccacgttcctcccaggacgcaaaggtaggagcggccctgcccagcc

SEQ ID NO: 267279 - DNA, 1146 bp, Homo sapiens
  chr14:104645540-104646686
  hypo
atgcctgagcccccgcccgccctgcctcccagggtctggcgtgcgtcagtacaaggctgcggctggcggagcgcaggcagcagcggctgcgggaggtgcaggccaagcacaagcacctgtgtgaggagctggccgagacccagggccggctgatgctggagcctggccgctggctggagcagtgtgagtcccgcccgcccacggacccagcccggcccaccgtgtgccctgacagctgccctcccctcccagagccctgttgctctcctgtacctcgtggtgggaaggctggaaggcagggtcggccgggccaagatgcctttcctggggcctctggggggccaggtggctgcccccagcctcgggcctgacgcaggtgcccctcccctctcctcccctccccagttgaggtggacccggagctggagcccgagtcggccgagtacctggcggccctggagcgagccacggcggccctggagcagtgcgtgaacctgtgcaaggcgcacgtcatgatggtcacctgcttcgacatcagcgttgcagccagtgctgccatcccggggccgcaggaggtggacgtctgaggctgggcgccggacaagaggagggggcgtgcagcgggctggaggacgggacgtgggacggagcgaggatgtggtgggggctgcggggggaggatgcggaggggtttctgtgcaggacgggagtctcagagaggagacggagtgtgggggagggagggccggccacgcggtggacagagcgagggtgccagggtgaccagaagaccgtcaccacccgacagcaacgcaagtgcctttgaccttgatttggacttttctcccttttgcatttggtgctacagacttgagacaccagcagaagttgtgttcagcccggccccgctgcgcctgtccgggccggggctggcgccggttgtgtttgtgtccaccttgccttctttgcagccaagcagtttttgtggagtggagtgggacttacctgcacgccccaggggtctttcaggattcaggatgacttttcttttacaatggtttcctctcggcagagcccgggttgtgggggatctgtgtggggttctcaacgcagatccatcctggggtctcccgggcagggatggct

SEQ ID NO: 267280 - DNA, 237 bp, Homo sapiens
  chr14:104647088-104647325
  hypo
gccagcgtttgcgacgtccccgcacgacaggctcatactttctgaggatcgtgcatagcataggacgtctgaacctttgtacaaatgtgtagatgacatcttgctacagcttttatttgtgaattaaagatgcatcgatggttcccacggctgccgagttcactgggcgtcggcagactcctcacgccctggtgtgccgccctctgagggtccctggggtgacgggcagtaagcgtg

SEQ ID NO: 267281 - DNA, 193 bp, Homo sapiens
  chr14:104655996-104656189
  hypo
catgcacacacgggcgcacatgcacctagggacacacacgtgcacacacgtgcacacacgggtgcacatgcacataggggcgcacatgcacacacgggcacacatgcacctagggacacacatgtacacacatacatgcacacgggcacacaggcacgtaggggcacacccgcacacacgcatgcacacgggc

SEQ ID NO: 267282 - DNA, 96 bp, Homo sapiens
  chr14:104678739-104678835
  hypo
cagggctgagagattagcatcggcaccacctgtgttggccactgaagctgctccacaccacggcggctggagagcgcaggtccatgcaccctgggg

SEQ ID NO: 267283 - DNA, 441 bp, Homo sapiens
  chr14:104679815-104680256
  hypo
ccccatggagcctccggtgagaactcaccgcagctgacacccgattctgggctacgcagagaacccggccgtgcgggaagtccggcctgcaggtggggagctcatccatgccctggtttaagacgctaagtgtatggcttaagacgctaagtgtatgacagttgtcacacagcacaggaaatgaatacatgtccccgatgtgtttttctggaaaacacgccttgcatttggcgtcctgtggccgctgcaaccagtgatcgcaaacgatgagcagggggcatcctctcaacgccccagggtccagaggtctgaaatccgtgtccctgggccacagccaaggtgcctgcaggcattgccccctctgggtgctgctgccgggacccttccctgcctctcccggcccgtggtggccccaggcgtccttggcgtgtggccccatcc

SEQ ID NO: 267284 - DNA, 437 bp, Homo sapiens
  chr14:104695970-104696407
  hypo
gcggcctgcccgtccgcgaagtcacttagctgggatctaatcgggtttcacaggggcataaattacttggctagaggttgttcccgggtgtttccaccccgggcctgttatttacacaccgtgcggtaatgtagtcacggccttgggtgcgcagtatttatggtgtttgatcggcttccagcccaggccgcctgtccaggaacatttgttgagatgttgtgcagagccgctggggacctctgccacaggcgggcatcaatctacctggagctcctgcggcagccctgcagagcctcaaaagggcagggcgggcctgtggtgccaccctgagctggtcactgtctgcagatggcagctctaggagtgatggctgaggacgaacaagggtgcgaactgtcactgacatttccgtggggcgtggacgtgacacatcccga

SEQ ID NO: 267285 - DNA, 133 bp, Homo sapiens
  chr14:104718711-104718844
  hypo
ctttggctccctcagcctccagtcctttcttctcttttcacctccttttccaattaagagcccaccctgcctgccccacagacaccgtcaagcctggccccattatccagtcccctggcgggtggtctctgca

SEQ ID NO: 267286 - DNA, 90 bp, Homo sapiens; identical to SEQ ID NO: 216083
  chr14:104733749-104733839
  hypo

SEQ ID NO: 267287 - DNA, 604 bp, Homo sapiens
  chr14:104746283-104746887
  hypo
aggctgcttggggggttcatcgcaaccccattcatgagggaggtttagccaggtcagtggtcgggcaggcagcaggcctgggctcctcacgccgcagatacccactgatgacctgtgaggggcctggtgtccgtccaggttccaggacatccacaaaggggtggcgaaggctcctgctcaccttcaagtgtgaaatcgggtcattcacgaggaaacgggatctttgcagaaagctgtttggcgcgtgatctagaaccacaggttccgcgggggagcgggggcctgagtcggaagaggggctgcaggccgggaggcaaggaggagccattcccagggtgggagaagagggctccaagcagaggctggtgggggcgtttgctgtgttcccggaactgcggggggccgctgggacctggcaaatgatgggaagccatgggtgggttttgagcagggaccgctgtggtctgatcagattgaagggaatggcactggccagggaggaagcagggagcggagcagtgggctggggccagacgaggtggtcgcagtggacaagtgtgcacgtgtgtgtacgagtgtgtgcgtgcaagtgtgcatgtatgat

SEQ ID NO: 267288 - DNA, 70 bp, Homo sapiens
  chr14:104761170-104761240
  hypo
tccagcttactgactcggtgcaggtctgcggactcagcctccatcattgtatgagctaattcactgcaat

SEQ ID NO: 267289 - DNA, 320 bp, Homo sapiens
  chr14:104770265-104770585
  hypo
ctctgcaagctgcccgggtctggccagcgggcactagtgtgggagttcagctggcaacccccgacagccttctgagcacggcccccttaccaggtgccgccgcttcccagcctccagccccaccccacctcggggatcctgcccaaggtctgctctgcccggaagtgaaggagaagcccgttctcttccccctcgggctggggaagagctcacagcccaggtcacgccacagaaatcccctcctcatctggccctctgactccacctttccacgctgtccgtgggaccaggggctgagccgtcagcggccgtggaccttg

SEQ ID NO: 267290 - DNA, 501 bp, Homo sapiens
  chr14:104800476-104800977
  hypo
gctccccagtctctcgtgggttccgggcagtgagtggcagccggagggcccagggcaggtgctgcctgtcaggacctcagcctgtatgtgccgggggatgttcgtgcccaacagaggccacttgtctctgggccggggaggcaccgggtggccgtgcctgtcagggcctccttagacagtgccctctcgggccagccggcggctgcccaggtcgggaacagatatgtcgccggcgacaccattatctcccgggcgaacggcgacgtctccgcagccaggcagagcccaggctgccgtgtaattggaccattcagaagtaaattatctgcagctggaaacaagacactgccttttaactcgggcattataaggtcaagactcgagacatcgctgggaaaagcagttattgaaaagcgatgggaaaatgaaatttaaaattcaaagccaccatgggcggcgagcgtggcgggaggcgtgcgtcaccggcggccccaggagccg

SEQ ID NO: 267291 - DNA, 108 bp, Homo sapiens
  chr14:104812558-104812666
  hypo
actggagggcattgcgagaatgttggagatggggaatgagagagaccggcagtgaaggcggcacacccgccccaccctcaaggcaccgtgcaccgccctgtcctcgga

SEQ ID NO: 267292 - DNA, 96 bp, Homo sapiens
  chr14:104813189-104813285
  hypo
tgctgggggctgaccgtggagtagcttgacagggagcaatttcctggggccacactctttttttttagatggagtctcgctcttgtcgcccagttt

SEQ ID NO: 267293 - DNA, 36 bp, Homo sapiens
  chr14:104813345-104813381
  hypo
tccttatggggggcccattttcgtgggcttcactcc

SEQ ID NO: 267294 - DNA, 207 bp, Homo sapiens
  chr14:104824380-104824587
  hypo
tgccagtcactaaacgccacacaggccgcaggactccttcggcccagggccactgtcctgcagtggtgagaagcctgtctccacttggtaggaccgtaattaaccagtctggaagcttccgtcaagctctgtatagaatcagccccaggcaaggcaccgcacagtggccatgggcctagcgcactccatgggcggagaatacactga

SEQ ID NO: 267295 - DNA, 255 bp, Homo sapiens
  chr14:104839337-104839592
  hypo
gagagccgtcctaacggggagatggcccatccagggccaacacggcacctgtgcgttctcccatcctccttcccaagggagtcctggccaggcccctctcctgtgtccgaggagtcttgccagccctcatggtctgtgtcacgatctgcagtagctgtcccatcagggctgatctggaaggagcctttcctccacatggcttttcccaagtcagccctcaagtgctgtgagcctggaccgcgcccctgtcctcca

SEQ ID NO: 267296 - DNA, 267 bp, Homo sapiens
  chr14:104854591-104854858
  hypo
ccccttatgcttcatggccccgcagcgtctgccccaaaacaagccaagatggatgaaaaatcgctggcgaaggtcactacaggacagccgcggaccggttgattgctcggggcggccctcgccccgtcggcgactccatcggcaacttcgccgcgctctgatttatgatgggaagaaaatggtcccctgaaccgccaccggctctggtttgggattctgtgtgactctctgtgtggccggcccaccgtttattcacaccactgaagt

SEQ ID NO: 267297 - DNA, 251 bp, Homo sapiens
  chr14:104889015-104889266
  hypo
gtggggaccggcagcgggcctgccgcgcttcccgggcagcggagccggactgcgcacccagcgccccgctctgtggtgtggggtgtgtggtatctgagcccgggacgcggctcagtgactgtgatgggggctgttcagctgttgtgggactgagttacacgcatctcactggcaaagccacatcatctcaccccacaaaatacggaatttggggtgtcatgggtcaagaggctctgcgctggacagtgtgg

SEQ ID NO: 267298 - DNA, 69 bp, Homo sapiens
  chr14:104893581-104893650
  hypo
ctcccaagatgagtcgggccacgagcctggcctggggctccaatcactacagcacgctccttccccgag

SEQ ID NO: 267299 - DNA, 271 bp, Homo sapiens; identical to SEQ ID NO: 216088
  chr14:104895986-104896257
  hypo

SEQ ID NO: 267300 - DNA, 284 bp, Homo sapiens
  chr14:104897581-104897865
  hypo
tatccattcatccgtcccactgcgggcgcagcaccatatctgttcattcatctcactgcggaggcagcaccatatccattcactaattccactgcggtggcagcaccctatccattcatcgtcccactgcgggctcatctgggtcttcgtggagccacggtcctgcttcagtagatccaattttccaaagctgctctgtggattttcagcccctcccaccgtgtgtgggggccactgccttctctgtcctaaagcggccctgccatcgccgctctggagagcag

SEQ ID NO: 267301 - DNA, 85 bp, Homo sapiens; identical to SEQ ID NO: 216089
  chr14:105102963-105103048
  hypo

SEQ ID NO: 267302 - DNA, 269 bp, Homo sapiens
  chr14:105103480-105103749
  hypo
acccactgaggaacgggcaccacccgtcgcccgagacctgtgtcgccacccactgaggaacgggcaccacccgtcgcccgagacctgtgtcgccacccactgaggaacgggcaccacccgtcgcccgagacctgtgtcgccacccactgaggaacgggcaccacccgtcgtccgagacctgtgtcgccacccactgaggaacgggcaccacccgtcgtccgagacctgtgtcgccacccactgaggaacgggtacgacctgtcatccga

SEQ ID NO: 267303 - DNA, 67 bp, Homo sapiens
  chr14:105119951-105120018
  hypo
ggcgaggcggctgggcgaacctggtgtatccaggccgggcgaggcggctgggcgaacctggtgtatc

SEQ ID NO: 267304 - DNA, 304 bp, Homo sapiens
  chr14:105149126-105149430
  hypo
ggccactcctaaaatcctcacgtcccccccggacaagtctagcctccaggatggaagaaagtcagccaaccctaggattatcacgtctgggttgaactgaggggtcttctgtgcatgcagcctgcgctagtggctggggcctccgcaatgttgggtgtgcctgggatagctcagagtaacacggctatacggcactcagggttggaaggggagccaggctcctctggctctgagctcaagcggtccaccctcccgagcctcccaaagtgctgggattacaggcgtgagccactgctaccttaat

SEQ ID NO: 267305 - DNA, 114 bp, Homo sapiens; identical to SEQ ID NO: 216091
  chr14:105153068-105153182
  hypo

SEQ ID NO: 267306 - DNA, 152 bp, Homo sapiens
  chr14:105157363-105157515
  hypo
ctgtcatgggccctgcagcccggcaaaggggatgtcgctagtggggacggaccaagtggccaggtgcgactgtagcctccacagccagggctcctgagttaaccttcaggtgagcgcccactttgtggaggagctgacggctgtcaagcgaa

SEQ ID NO: 267307 - DNA, 182 bp, Homo sapiens
  chr14:105174276-105174458
  hypo
acccacccacactgcgcatgaagaagctgaactggcagaagctgccatccaacgtggcacgtggtgagggtccccagacccccaagggaagcttcccctaggacgggggctggtctctgctggggagaggggcaggtggcacatggaacttgtgtgcgcgtcctgcccgtgcgtggccaggg

SEQ ID NO: 267308 - DNA, 56 bp, Homo sapiens; identical to SEQ ID NO: 216092
  chr14:105181888-105181944
  hypo

SEQ ID NO: 267309 - DNA, 161 bp, Homo sapiens
  chr14:105182343-105182504
  hypo
caatcagccaggtccgtccacagggctggagaggccaatgcatccagctagacaggaccagcctgcactgggtggaggaggggctagagcagagaaccagaaggtccagcccggccgatcatgagctctgtgagcccaggtcgtggcgtcttccagcacct

SEQ ID NO: 267310 - DNA, 125 bp, Homo sapiens
  chr14:105195466-105195591
  hypo
tgggccaagcagacgctgtggccagaggagtcatccatggcagtaaagggcctatggactgcagggcagagaagggcagtggcaagtgggccgggagtggagggggccctggcaggtcaaaggag

SEQ ID NO: 267311 - DNA, 178 bp, Homo sapiens
  chr14:105196296-105196474
  hypo
ccctgaccctcagctcgtccccagctcacagcacagccctcccctggctgcctccaaggagtctccagttactgagtggccactccgtgccagctcagcccacccctcaccttcccagtgcctgtggaggcccaactagggtgacgctgggagaggagagggcttggaggagccacgg

SEQ ID NO: 267312 - DNA, 198 bp, Homo sapiens
  chr14:105201187-105201385
  hypo
cccacatcccagtcccgcacagacgcatcagagctggccaccaaaccagacaccccaaaatccaacagcagtgccctgcagggacagacgaagccccatgtgggtcagtccatgtccggggggtcctcagtacccaagtgccttcagctcagccgggtttctgttccaggggggcaacaacgccggccacacggtggt

SEQ ID NO: 267313 - DNA, 157 bp, Homo sapiens; identical to SEQ ID NO: 216095
  chr14:105204798-105204955
  hypo

SEQ ID NO: 267314 - DNA, 41 bp, Homo sapiens
  chr14:105214103-105214144
  hypo
gtgctgggattacaggtgggaggcaccgcgccagcgtgttt

SEQ ID NO: 267315 - DNA, 39 bp, Homo sapiens; identical to SEQ ID NO: 226556
  chr14:105218314-105218353
  hypo

SEQ ID NO: 267316 - DNA, 44 bp, Homo sapiens; identical to SEQ ID NO: 216096
  chr14:105223769-105223813
  hypo

SEQ ID NO: 267317 - DNA, 108 bp, Homo sapiens
  chr14:105225798-105225906
  hypo
agctgtgccatgttcgagacctgaggctggctcaagccggctgccttcaccgggagccacgccgtgcatggcagccttccctggacgagcgctcggtgttcacactga

SEQ ID NO: 267318 - DNA, 166 bp, Homo sapiens
  chr14:105226172-105226338
  hypo
ctcagcccagagcacgctcctccccagctcgcccagctggtaaatggggagaaaggacccaggtctggctccagggtacacaaccagtgtactagaccttcacggagagaggtgatactcgcgccccatccccagacgccactgtcatgcacgcctgatccatcac

SEQ ID NO: 267319 - DNA, 94 bp, Homo sapiens; identical to SEQ ID NO: 216097
  chr14:105236575-105236669
  hypo

SEQ ID NO: 267320 - DNA, 898 bp, Homo sapiens
  chr14:105240771-105241669
  hypo
gagacccaccctcccgccttccaccacaggcgactgtgcttttaaagcaaaggccccatctgcaggagaatcgtccccaaacacagtgacctggaactaaccaagtggctggaccctggcccccttcacagtaaatacctcctgggccaagtccccagaacaggttctgcaggacagagcccgggcctcaacaaaagcctggcaggcagggctgcagggcatggggagctggggcctcctggagcctcggcagagtgcaaggaagaccagggccacctgccccacccacctgcccgcacacgggagcagcgagcacagcccctagcccacactgggcacctccacagcctgaccctccagggcaggcctgtctcaccagcggcggagtccacggtgtgtaaagccctcacgtgcccaagaagacaggacatcgtcccctagagacagccccaggagtcgctacctggccccagcccttcagccccatctgggctcccactcactgtgaggaaggggtgcctggagttctgcaggacgcggttctcggtgagtgtgtgggccacctcgtcctgtaaagcagggctgggtgagctgccaccccgcaccctcatctccaccctgccccaccgccccggccccaccttggccacgatgacttccttcttgaggatcttcatggcgtagtagcggcctgtggccttctccttcaccaggatcaccttgccgaaagtgcccttgcccagcagcttcaggtactcaaactcgttcatggtctatgggcaggcaccagggtcagcaagcggcgctgccaacagtgcccagctggtcggcatgcgtggggtggcatgaggggccccagagtcggaggcagagccaggagaggcgtccacttcacacc

SEQ ID NO: 267321 - DNA, 142 bp, Homo sapiens; identical to SEQ ID NO: 216098
  chr14:105244208-105244350
  hypo

SEQ ID NO: 267322 - DNA, 58 bp, Homo sapiens; identical to SEQ ID NO: 216099
  chr14:105245408-105245466
  hypo

SEQ ID NO: 267323 - DNA, 204 bp, Homo sapiens
  chr14:105247293-105247497
  hypo
gacccacactcaggccctgccgccgtcggccctgccgcgtcccacccgtgggtcattcaggtacacgggaacattctccctcaagttttgcagcatcagccgtacgcaggcgttcacacttcagaatcagagcagctgtcctcggtgatagcccagcaagtaccatttttcatactgacactcggaaaaaaatgttccacttac

SEQ ID NO: 267324 - DNA, 228 bp, Homo sapiens; identical to SEQ ID NO: 87760
  chr14:105268575-105268803
  hypo

SEQ ID NO: 267325 - DNA, 37 bp, Homo sapiens
  chr14:105269022-105269059
  hypo
ctctccaactcattccggcccccaggctgtgccctgc

SEQ ID NO: 267326 - DNA, 100 bp, Homo sapiens
  chr14:105269239-105269339
  hypo
gctaggtgaattattcacatgtcagaaaagttgttggtgtgcgtcccaatggggcgctgggagggaacaggacactcctggggagcggcagcaggaaccc

SEQ ID NO: 267327 - DNA, 64 bp, Homo sapiens
  chr14:105270250-105270314
  hypo
cctggtctggagtgaaagaccgtccctagcgcatctcccacgcgccctgggctcctggtgtgct

SEQ ID NO: 267328 - DNA, 128 bp, Homo sapiens
  chr14:105273627-105273755
  hypo
aagtcccaggaattcggaattccatggcacacagggccaccggtgcctgtcccgtcagccacctgtcctgtgctcataaccatgtcactccctttcttcagcctcagcattctcgcctgtgaaatggg

SEQ ID NO: 267329 - DNA, 188 bp, Homo sapiens
  chr14:105335727-105335915
  hypo
gcaacgtgctactgccgcacatgcccgggccatgccaggctctgacgaggtgggcaggcctcaggctgtggtgaggggtcctggccatgtgcacattccctggggcagacagtgtttgtctgcctctacccagggcagccccacccgatattgctgcatgtgtcctgctgtggcgggaaggtttgtgt

SEQ ID NO: 267330 - DNA, 189 bp, Homo sapiens
  chr14:105347539-105347728
  hypo
tgcacgagggtccgcgtgggtccggtgggcacaaagggaagggaaggagcgagagtgagaaagtgcctggtggggtgtggaggggtcggggtggggtatccaagcctgaggccccagacttgagttctggttagacaggggtgtatccggggatcaggctctcggctcccacctcggtccaggaggggt

SEQ ID NO: 267331 - DNA, 67 bp, Homo sapiens
  chr14:105349524-105349591
  hypo
cacacgagatgcccacgaaggatgcagaggcaggtgggggcggagcggcccctgtggtgcagagcca

SEQ ID NO: 267332 - DNA, 155 bp, Homo sapiens
  chr14:105349621-105349776
  hypo
cagccctggcaagatgaagatcaaggaccatatcaccaagttttccctgcgccagcggcggcccccgggcaaggaggccacacctggcgagatggtgtcggctgagaccaaggtggccgactggctggtgcagaatgacccgagcctgctgcacc

SEQ ID NO: 267333 - DNA, 108 bp, Homo sapiens; identical to SEQ ID NO: 216103
  chr14:105350162-105350270
  hypo

SEQ ID NO: 267334 - DNA, 62 bp, Homo sapiens
  chr14:105351133-105351195
  hypo
gggtggaggtgatgccgggggtggcgagtgagagccctcgtggggaacgggggggtggaggt

SEQ ID NO: 267335 - DNA, 240 bp, Homo sapiens
  chr14:105352620-105352860
  hypo
tgggacgtagaggcggggagccggaggggtccctgcctgtgcgcatgcggcgacggctccctcagctgcccagtgagagggctgacagccctgcgggcccagagagcagcaggaggagtgggcctgggccaccggagctggacagtgagcagcccagccgcctcttcggccaggaggagttggatcctgacagcctcagcgatgccagtgggtcggacgggggccgaggccccgagccag

SEQ ID NO: 267336 - DNA, 71 bp, Homo sapiens
  chr14:105355231-105355302
  hypo
cctgctgtccctacccgacgtggtgcactggtggtgtttgacccaagcatgcggctcgccatcatgccccg

SEQ ID NO: 267337 - DNA, 125 bp, Homo sapiens
  chr14:105362737-105362862
  hypo
ctagcccggtccaccgggctgctgcccacccctgcatgccccagttgcccaccccgcctgcccctggacatgaagtggtcacgcttcatccacggctccttcccacccctcggcagtggctgtgc

SEQ ID NO: 267338 - DNA, 699 bp, Homo sapiens
  chr14:105457659-105458358
  hypo
ccgggaacactgtttttagagttcttaacagccatacgcctcttggcttgtgcgcgtctcggcttgcgggtaaaggccaggcgccccgctgcgtgcctcgggccgtgcctcatgatctcctcagaaggctctcaaggtcaccttttaacaagtgcatctgttttccagtaacgaatccagaaaactctggagagcccttcagagcatacacaccacgtctacttctcagcgcctctggagcgagtcccgttgccaggagaacttctttcttgttctcggaatagatgctgcgcagaaggtaggcggtttgggttgacacagggctcctgggagtgtggttgaacttcactgtcaccagtggcccttggccgcgcccaaggggtgggtgcaggcagaggtgtgggttcaggtgggttaaagccactaggtggccccataaacgtgtcagggccactggatgactcccgaatgcttgaggcaggagccagcaaagcctagagcaggaggtggggaaaggctctggaaggaacgggcctgagcctgcagcagacaacgcattcagagatgtgcaacagtgtgtgtgcactcatgccactgccgccgccacgcacatgccaccacgcacacgccgccacgcacacgccgccacacacacgcctcacacgccgccatgcacacacctcacgccaccacatgccg

SEQ ID NO: 267339 - DNA, 54 bp, Homo sapiens
  chr14:105464945-105464999
  hypo
tgaagtagcaggtgcgggaaagcagcttctctgggttggcggtgaggtacagtg

SEQ ID NO: 267340 - DNA, 95 bp, Homo sapiens
  chr14:105468472-105468567
  hypo
tcagttgcaaggaatgagctcggggatctcttgtacgcagggaccgtaatcagtaacaatggattacattcttgaaaaccactaggagagactgg

SEQ ID NO: 267341 - DNA, 300 bp, Homo sapiens; identical to SEQ ID NO: 216106
  chr14:105469615-105469915
  hypo

SEQ ID NO: 267342 - DNA, 97 bp, Homo sapiens
  chr14:105472077-105472174
  hypo
aggaggaaaatgcacggcccgtgctcctcgcagccgcacccagtgtgagcacggctgagcagctctgcgggagtggtggccccgtggtcacagggac

SEQ ID NO: 267343 - DNA, 124 bp, Homo sapiens
  chr14:105478880-105479004
  hypo
tgccaccaggaacgcgcaggggaaggactgcagggctgtatgctcatcccatgcagcgagtggtctgtgtttcgtgcacaattctccaagggacacagggtctcctggccgagcctatgtggcc

SEQ ID NO: 267344 - DNA, 38 bp, Homo sapiens
  chr14:105516268-105516306
  hypo
cccatgcaggtgctgcgtctgcccggctctgtgctctg

SEQ ID NO: 267345 - DNA, 791 bp, Homo sapiens
  chr14:105517523-105518314
  hypo
tggcgggaatggtccgtggccagcacgtagataatggggtcagccacgccgttcaccgtggacaggcacagaaacaccacagaggctgtgtacagcctttcctccaagccgcacatggcgttcctgtctcctctgtagtaggaaaaggcagcggctttgacgaggagaaccaggtggtacggggcgaagcagactaggaagatgacaaccaccgcgatggccgagtgcttcaccttggccttctgggcagcgcttaagcccatgctctgcttgatgctcctgaaaatccggtggttggtgaaggcgatgatggagagagggatggcaaagccaacggtgaacctggcgtagtagtacccggcaatcctgctgtccatctgcagcatgtcaaagcaggtctccttgtcttccgtctggaacaccgggtagtgaacgatcccgacgaggatgaagatgcaggcggagatgaggatggcggtcctccggcggcggcggccccgactctccagcgcgtacaccacggccacgaagcggtcgcaggagatgcagcacaggaagaggatgctgacgtagatgttgcagaagaagatgtaggcggtcaccttgcaggccagcaggcctagggtccagcggtgctggttgcggatatagatgacccagagtggcagcgtgcctgtgtacagcagctcgcagagtgccaggcagagcaggtagacggccagcacgttgccctgcagtacctgcagcagcgccagccacgcagtcaggcagttggccggcacccccagcgt

SEQ ID NO: 267346 - DNA, 50 bp, Homo sapiens; identical to SEQ ID NO: 216108
  chr14:105533295-105533345
  hypo

SEQ ID NO: 267347 - DNA, 173 bp, Homo sapiens; identical to SEQ ID NO: 216109
  chr14:105538393-105538566
  hypo

SEQ ID NO: 267348 - DNA, 322 bp, Homo sapiens; identical to SEQ ID NO: 216110
  chr14:105546626-105546948
  hypo

SEQ ID NO: 267349 - DNA, 33 bp, Homo sapiens
  chr14:105547474-105547507
  hypo
aagtgctgggattacaggcgtgagccaccgcgc

SEQ ID NO: 267350 - DNA, 45 bp, Homo sapiens
  chr14:105610437-105610482
  hypo
gtgtgtggccccattcgctgacacctgctccgtgatggccatccc

SEQ ID NO: 267351 - DNA, 336 bp, Homo sapiens
  chr14:105611097-105611433
  hypo
gttccacgggtctgcggcatggacagcgaggggccgcagggagacaggcctgcccgcagtccttccgcaccaggactagcctcgccagagcctctgtccagcatagccaggacctgcatagtacgggacccagggcccacccaggtgctgctccccactgggcactcaccacggccacctccacagcactggcccccgaggacgcccggtcgcaaagcaacaccagcaggcggtcccgtgccacagcccttgtggctggcagggagcggatcccggagcaaatggcgcccaccgtggtgccctgggcagagacaggcagtgcgtgggcagggcagg

SEQ ID NO: 267352 - DNA, 220 bp, Homo sapiens; identical to SEQ ID NO: 216111
  chr14:105612116-105612336
  hypo

SEQ ID NO: 267353 - DNA, 378 bp, Homo sapiens
  chr14:105612739-105613117
  hypo
gccatccaggcagcggcagctgttgcagtcttccacccaggagcttccgtgtgggaacggagtgccccgggaccagcaggatctcccgaacccgatcactgtggggagaaggggctcgagggtcagcagtgggcatctggccctcggggctgggtgtcacccatgccccccaacccgccccaacccagggcaatcacacggggcctaccttcctggcaccgggggccggctcggccgggtgggcagctacagcgatacccgttgatctcatccacacacgtggccccgtaggcacagggcgaggactggcactcgtcgatgtctgcagggagagccaccgctgctcagtgcagtgaggccaacgcccaccgcaggacc

SEQ ID NO: 267354 - DNA, 214 bp, Homo sapiens
  chr14:105616974-105617188
  hypo
tggcagtggaagccgtcggccaggtcctcgcagaggccgccgctgtggcaggggctgctggcacactcgtctcgttccagctcgcaatgccggcctccgaagccccgtgggcacacacactggtacccgttcaccaggtcctgggcgggccagccaggtgagcgtcccgcaggcaccctgacggccccgcagcacccacgccacacaccctcct

SEQ ID NO: 267355 - DNA, 324 bp, Homo sapiens
  chr14:105621962-105622286
  hypo
cgaacagagaggagcgagaggcacagctgcagccagcctggccgcaaggcctgtgcccggggccctgcccgaggccctccctgccctccacgcagcccagcggccccctcaccttccttgcactccttgcccatccagccgtccatgcaggccttgttgccgtactggtcgcaggtgtagtggccgaaaaagtcgttgcggggccggcagaacttgttgcaagtggcgctgtagtagttctcgtcgcagcgcacgcggatctgcagctccaggtgcgccacgtggccgctgaagtgcaggctcttccagcggtcctccgggttg

SEQ ID NO: 267356 - DNA, 57 bp, Homo sapiens; identical to SEQ ID NO: 216113
  chr14:105639401-105639458
  hypo

SEQ ID NO: 267357 - DNA, 668 bp, Homo sapiens; identical to SEQ ID NO: 216114
  chr14:105687721-105688389
  hypo

SEQ ID NO: 267358 - DNA, 98 bp, Homo sapiens; identical to SEQ ID NO: 216115
  chr14:105688874-105688972
  hypo

SEQ ID NO: 267359 - DNA, 442 bp, Homo sapiens; identical to SEQ ID NO: 216116
  chr14:105689523-105689965
  hypo

SEQ ID NO: 267360 - DNA, 270 bp, Homo sapiens
  chr14:105690180-105690450
  hypo
gactgagaaaagaactttcacgggaggaatgtgactcctcctccttgagctacgtgttcatttcttgaaaccacttgctgttgccacaagtagctctaaactaacccaataatgccgcacccaatagtttaacgatgtacagccaatcacgaatgaacgttactattgtaagccaatgagaattcccaacagacaactttgtatctatccaatcactgtccctttttgcctttaaaaatccatctgtagctgaggctggctcactcctgt

SEQ ID NO: 267361 - DNA, 142 bp, Homo sapiens
  chr14:105714258-105714400
  hypo
aggccccacaaggagcgagcctgcgactgcgatccacaggcagagccacagaggcagggcgcgccctggggcccaagctccagggctgcaggcccagggccagatcctgacttgcccacccgccggctgtgtgaccttcagc

SEQ ID NO: 267362 - DNA, 180 bp, Homo sapiens
  chr14:105717870-105718050
  hypo
aacctgtatgacccccgaaaagagggatggcccctcttggcacctgggagagggcatgggccgagtgtatagcctcagccggtgcccctctgctgctgcagcccgtgttgctcagtcctgttggtgacccagccccacctggtgcttctctacccaaaggacatacgctcctagatgcaa

SEQ ID NO: 267363 - DNA, 79 bp, Homo sapiens
  chr14:105720530-105720609
  hypo
ggcctttacatggaaactcacgtttaaaaagccatgtgtgcaaaacgcgtgcagtttttttgttttagtttgtttgttt

SEQ ID NO: 267364 - DNA, 444 bp, Homo sapiens
  chr14:105723693-105724137
  hypo
gcaaagccccaccacgcaagaacctcgcaagcaatcagatggttaggacgccagcccactcatccacgccctgggctggaggcccctgacctctcttgcaactccatgcagaacagcaaggcctcccaccctaagaaggtgccagggctgggtacaggggcattccgacacagagcagaacccccaggacggctgggacgtgagcggtgaggcccgtgaacaaaggtgcatctgaaggcaggcagtcccagagggccgagacaacgggcaggaccgactgcagcacagccaacagcctcacaagaggcactatgagaagaccggcggcaggggtggggccagtgacatcaaaggaaaccaaaggaaagcagtaagaactacctggggaaacgcccgtgacagccaacacacaccaacgggaaaagtgaacgaggccagaaggct

SEQ ID NO: 267365 - DNA, 424 bp, Homo sapiens
  chr14:105728096-105728520
  hypo
ggccccaccctgagcggacaccagcattcccggccccatgggactggagagggggactgcggcgcccacacggcgtgaggaccaaggagcgaaacccacaccttctggagaatgatgcccagcactgcaccggcccacggctcactgcccctacccagtgccactccccttctgcaggccccccctgctctgagtgctcctcaccggcagccaacaccacctggcacgggaacacacggcccggccgaagctccgtgtagagcagtagtgcccagccccaacccaccaagggcaaggccctggcagcactcagcatacagcactcagcggccgaccaagcacccacacaggagcccggcaggcagactgggcatcctcaggccccgcacatgcctggacggggctatgacggatcctagcttgg

SEQ ID NO: 267366 - DNA, 192 bp, Homo sapiens
  chr14:105739047-105739239
  hypo
caaaggatacgcggcgtgccctccgtacggcagaccaggtagaggcaggcagcaatcacgtgggccatcttccggccgcgggtcaggtgcctgctcacggccatcttgaagaagttgaaggcggtgtccaggcagtgctggttcagctgcagctggttccccaggtggtggatgtggcgcctccctaggaca

SEQ ID NO: 267367 - DNA, 196 bp, Homo sapiens
  chr14:105739466-105739662
  hypo
tctgagtggcgtgtgcggtgtggctgaatgtgcctctctccagggctctgaggtgcggcgtgtctggcaagggcttggtttgggctggctggcaggtgctatgcccctgactgccctgggctacagtgggaatgccccttttcctacagccacatgccccagcgccaccgccttccccaaccgcacagagtctggg

SEQ ID NO: 267368 - DNA, 94 bp, Homo sapiens; identical to SEQ ID NO: 216119
  chr14:105796585-105796679
  hypo

SEQ ID NO: 267369 - DNA, 148 bp, Homo sapiens
  chr15:22803359-22803507
  hypo
cgcggggcccaccacgcccggctaatctttgtggcttttgttttgtttttccgttaagagaccgggtttcgggccaggcgcagtgactcacgactgcaattccagcagcccgggaggccgaggccggcggatcacccgaggtgaggag

SEQ ID NO: 267370 - DNA, 440 bp, Homo sapiens
  chr15:22876756-22877196
  hypo
ccaattaaaccgcacgagcaccacagcctctggcatggctaaaataaaaagaccggcatgtcaaataattttcaaggatttagagcaactggaaattacaagatggtacaagcacttggggaaactatatggcattttcttacaaaggttaacatgtatctacccctgagaagcagcagttcacccttaggtatttatccaagaggaatttttaaatgcgtccacgcagagatttgtatctgaatattcataagagctaaaagctagaaacatcctgatgacggtgaagaggtagatggatcaacactgaagtatatgcacgcagtggaatgcagttcagctgtgaaaacacagctcatccacataacgacataagagaattccaggaactttatgtcgaaaaaaaagccagacttaaaaggatccgttattattccatt

SEQ ID NO: 267371 - DNA, 60 bp, Homo sapiens
  chr15:22920760-22920820
  hypo
ccaccactgtccagctagagcgtttcatctttccaagccgaaactctgtatccactaaac

SEQ ID NO: 267372 - DNA, 437 bp, Homo sapiens
  chr15:22927769-22928206
  hypo
cacaccgggcagggcgtctgccctgagcccttcctctgtgttcctaactgcaggtctcatggccagcaggttgttgagggctgggtggagccaaggtgtaacgcctgtggcacccctcagagatgcctgcgtgtcactgacacccctctcgcctgcagaagccatggggtgttttgggtggtcattgtggcccccagcgccgcacctcagtgtcactagcttctggcagccgtctcttggcacacaggccacagtgcttaggatagtttgtggcgctttgtctggattttagcaactggcatctgcttttcatgctagttcccccgcctgcctttgatttgccctgtgttccattgcagaacgagatgctggaggagggccaagaatatgctgtcatgctgtacacctggaggagctgctcccgggccatcccacag

SEQ ID NO: 267373 - DNA, 118 bp, Homo sapiens; identical to SEQ ID NO: 216121
  chr15:22929815-22929933
  hypo

SEQ ID NO: 267374 - DNA, 44 bp, Homo sapiens
  chr15:22930284-22930328
  hypo
gcagtcctcggtgccggtcactcgccagcgggggtccccagcac

SEQ ID NO: 267375 - DNA, 293 bp, Homo sapiens
  chr15:22933549-22933842
  hypo
tgttttcaaagggccgctcagtttttacgtaaaatggcagatccacagtccatccaggaatcgcagaatctgtccatgttcctggccaatcataacaagatcacacaggtaaggctggtgtttgcacactcaggttgatgggccaagcagccggccgggcgccgggcccatgcatgagtctcttgctctgtgtttcagtctctgcagcagcagctcgaagtgatttctggctacgaagagctcctggcagatattgtgaatctgtgtgtggattactacgagaacaggatgta

SEQ ID NO: 267376 - DNA, 52 bp, Homo sapiens
  chr15:22940780-22940832
  hypo
tgatccagatccgcgaggaccacatgcgcttcatttcggagctggcgcgcta

SEQ ID NO: 267377 - DNA, 86 bp, Homo sapiens; identical to SEQ ID NO: 216122
  chr15:22945063-22945149
  hypo

SEQ ID NO: 267378 - DNA, 33 bp, Homo sapiens
  chr15:22954802-22954835
  hypo
gcccagctctgctccgtgcggaggctgtgttct

SEQ ID NO: 267379 - DNA, 142 bp, Homo sapiens; identical to SEQ ID NO: 216123
  chr15:22966142-22966284
  hypo

SEQ ID NO: 267380 - DNA, 116 bp, Homo sapiens; identical to SEQ ID NO: 216124
  chr15:22968266-22968382
  hypo

SEQ ID NO: 267381 - DNA, 240 bp, Homo sapiens
  chr15:22968629-22968869
  hypo
ctgtgctccggccccggctgccacatcggacagtgcagcctgggcgagctccagagcagcgcacgtgagggcttgcaaggcctgtgggaacaagtgcacctgccctgccacccacacgtgcctttcagtgacttcaggcacctcagagaaagctggctcagctccaacgcccagggagatgcagccgccggctgggttatactgcagggcagggccggggctcagcgggcacatgggggg

SEQ ID NO: 267382 - DNA, 266 bp, Homo sapiens
  chr15:22977064-22977330
  hypo
ggcgtgccctaatacgattatagtcaattggaggaaaggatgcttgttggaaggatgtgcagggcaaagtctgggaggtttccatgtgcaaagctttccctgtcctcagggacgcatcaccctccgagctctgaggtgggacgctcctcagggtactgccagccaggggcgctcacttgggctgtggtgttcagtttttattggggcttcgttgcatgggcacagttgactgaatcactggccacgtagctgagctcagcctccag

SEQ ID NO: 267383 - DNA, 103 bp, Homo sapiens; identical to SEQ ID NO: 216126
  chr15:22979738-22979841
  hypo

SEQ ID NO: 267384 - DNA, 114 bp, Homo sapiens
  chr15:22994699-22994813
  hypo
tttctgccacatctcgctggtccaggcatctgtctctgacatcatagcacattgtcttgctcatcgttgctctaacatgactctcgagtccccacttgccgcgttccctgcctt

SEQ ID NO: 267385 - DNA, 35 bp, Homo sapiens; identical to SEQ ID NO: 216127
  chr15:23077086-23077121
  hypo

SEQ ID NO: 267386 - DNA, 383 bp, Homo sapiens
  chr15:23084832-23085215
  hypo
gccaccgcgcccggccgcaagatgttcttctactccggtttgtgtggtgttttcctcatgcttacgctagggccgtggattggggaggtgaggtgctttctcaggccatcctatttataaggtcacgcgcgttgaccatctcacccagtcctggggcctgtcacacggacagatgctccctgaagtgtggctgcggtgtgtgtgtatctgtgtgccttagagacagacacatctgcatccttggaaaatcatacttggttttatttaattctatttaaattgtatgggagaccactatgctttcactttaaagctaaattccttaaattatccatgattttatattttcattcgagactgtcgggccctttatctcttctctg

SEQ ID NO: 267387 - DNA, 229 bp, Homo sapiens
  chr15:25863450-25863679
  hypo
cacgtgacaggagtctgtcccggcagctcagggtgcaaactgggaacccgccctggctaggatgccatgccctcatggggagcactcacacagccacactcattcacacggggaccatggagacatggggatctgctttacctgcacggctttgggatgtgggagagaacgaagtacctggggaaacccatacagacagggggagaacgtgcaaactccacacagtggc

SEQ ID NO: 267388 - DNA, 152 bp, Homo sapiens
  chr15:25918277-25918429
  hypo
ctccagtggtcagccgtcaggatgaactggaatctcattccaacgtggagggtgggttttacaggagcagcccactccggttgagcgaggtagctcaggcaaaacctgctggactccccctatgcgctgggcaggggcggaggaggcccctg

SEQ ID NO: 267389 - DNA, 51 bp, Homo sapiens
  chr15:25940021-25940072
  hypo
ttctgcagaggcgtcgaccgacagcagaggacggagcggcactgcttggca

SEQ ID NO: 267390 - DNA, 301 bp, Homo sapiens; identical to SEQ ID NO: 216129
  chr15:25963361-25963662
  hypo

SEQ ID NO: 267391 - DNA, 158 bp, Homo sapiens
  chr15:25972184-25972342
  hypo
cagtgcgagactcgtctcaaaaaaaaaaaatgaaaaagaaaaaagaaaagaaaacagtgaggggaagtgctggagaacacagcgctgtctggcggcaggtggtgccaggtgcccgagcctacctgcgtagatgacaatgccgacgactgcgtccgtgt

SEQ ID NO: 267392 - DNA, 244 bp, Homo sapiens; identical to SEQ ID NO: 216130
  chr15:26026131-26026375
  hypo

SEQ ID NO: 267393 - DNA, 153 bp, Homo sapiens
  chr15:26234706-26234859
  hypo
ggctgaggggggcgcggcaagactccaagtagaagcggaccttgagaggcagccaggccaggcggcagccgcgcccggagggtgcggaatgaggagcgcaaggtgggcagagcgtgaaaccttcaccgactgcacctccgccctcgctgccct

SEQ ID NO: 267394 - DNA, 404 bp, Homo sapiens; identical to SEQ ID NO: 216131
  chr15:27128173-27128577
  hypo

SEQ ID NO: 267395 - DNA, 104 bp, Homo sapiens
  chr15:27494275-27494379
  hypo
ggactcaggtgatgcggctgcgggaggtggtgagcgatgctggaagctgcgtcccggccacccagataccctgggagtgcgtggcgctccggggaggctgctcc

SEQ ID NO: 267396 - DNA, 274 bp, Homo sapiens
  chr15:27959332-27959606
  hypo
tgcttctcactttttgggttcggatttccgttaaaagctgtaacactgggagagtctgcggcttcactcctaaatcaggaagaccacgaactcctcgagagaagcgaactctggacgtgacacttttaggagctgtaacacggcaaaggtctgtggcttcattcctaacgtcagagagacaacaaactcaccgggaaaaatgaacaactccggacccgccacccttaggagctgtaacacggccagggtctgcggcttcacttccgaagtaagc

SEQ ID NO: 267397 - DNA, 94 bp, Homo sapiens
  chr15:27959726-27959820
  hypo
gtctgtgaacccaagaaccctccgcaaggaaccagttccaggcccacggctagactttcttattcagcataccgggggcagggaaaaaagagat

SEQ ID NO: 267398 - DNA, 125 bp, Homo sapiens; identical to SEQ ID NO: 216132
  chr15:28356786-28356911
  hypo

SEQ ID NO: 267399 - DNA, 149 bp, Homo sapiens
  chr15:28358254-28358403
  hypo
tcctgggcagcctcgtccggccccagacgaagcgaaggaaaagagagcgctctgtgttggagaaggactccatcacctcccagaaccactggatcagcgatgcggaaggctcgatgcctttataggtggccaccgacttgagaaggtgc

SEQ ID NO: 267400 - DNA, 190 bp, Homo sapiens
  chr15:28360050-28360240
  hypo
cctcaagtgcatctcgaggctgcaagtgcatggcacacaccaagatataagaggagcaacgagagagtacttcacccaaggagctgaacgaagaattcacaattcagccaaatgcttaaaactaaccaccgagaaagttacagcaactggctagcaagggttccctccctgcagccgaggcacaacacag

SEQ ID NO: 267401 - DNA, 92 bp, Homo sapiens
  chr15:28377832-28377924
  hypo
tgccccagccggccgtagcggcctttgccccatgtgtagaggtccccggctgctgtgacacaggcgctgtgggctccgccagcagcaacatc

SEQ ID NO: 267402 - DNA, 321 bp, Homo sapiens
  chr15:28389777-28390098
  hypo
gccagtcatctaaccttgatcgccataagccccttccttaccagcagctggcatgatgggatagacggtgaagcgccagccccagccattcacagacccatcgctgatgaacttccactttaactcatcccctgggatgcgcagctcgctggaccagtcggaccactctcggcctgcgggaggaaagcgcaccccggggttagcttcactccatcatccaatcaacacaaaccttcttagacgcaaagcagaatgatttccgtcacgtgtgaagagcaagttcctccaatccaagctctcccaagccgaagtgcacagtga

SEQ ID NO: 267403 - DNA, 423 bp, Homo sapiens
  chr15:28516951-28517374
  hypo
cccagggccccgcacgcctgctcctccctcagcttgttgtccacacctgttaaggcgggagctggtaccaaacagagtgacagctcaggtgacgtgccctgcacagagcccagtacataggaaggaccaacaaagcaggccgctattttcgttgttcttttctggtatttatttaaaagtgaatgtttcaagcttggttttgtgctgacaaggaagtcagtgctcactgatccgagtcttctccacaaacaagtgacctcccacacctgtctcatctgactcgctgctattaccaccaaacacacacacgccagagaaaaacactgccgttgacatgcatgctagtcttgctttaaaagtaactagactcgagtgccacctaaacacaaagttccatcatgacactcacgtgcatgtcgccct

SEQ ID NO: 267404 - DNA, 86 bp, Homo sapiens; identical to SEQ ID NO: 216136
  chr15:28900534-28900620
  hypo

SEQ ID NO: 267405 - DNA, 33 bp, Homo sapiens
  chr15:28938356-28938389
  hypo
tttgtagggctgagcgcgggggatcacttgaga

SEQ ID NO: 267406 - DNA, 120 bp, Homo sapiens
  chr15:29029577-29029697
  hypo
atccgaccgcctcggcctccctgggtgttaggatcgcaggcgttaaccaccacgcccagcccaatttttaatcagacaggaatagatcggcctggtgtcatggctcgcgcttgtgatccc

SEQ ID NO: 267407 - DNA, 152 bp, Homo sapiens; identical to SEQ ID NO: 216137
  chr15:29101155-29101307
  hypo

SEQ ID NO: 267408 - DNA, 32 bp, Homo sapiens; identical to SEQ ID NO: 216138
  chr15:29101367-29101399
  hypo

SEQ ID NO: 267409 - DNA, 86 bp, Homo sapiens; identical to SEQ ID NO: 216140
  chr15:29111213-29111299
  hypo

SEQ ID NO: 267410 - DNA, 43 bp, Homo sapiens
  chr15:29114837-29114880
  hypo
tgtggggactctttgagaggccgcacttattcattcccaagat

SEQ ID NO: 267411 - DNA, 155 bp, Homo sapiens
  chr15:29133629-29133784
  hypo
cagctcctctccggcgctcctggctgtcctctgccacgcatacctgccccggtgactcaacaggtgtgggcctcaggtgacaccatggtccgaagtcgtggagaaacctttactgtccaggggaggagaggactggcggtcggtggggatcgaga

SEQ ID NO: 267412 - DNA, 502 bp, Homo sapiens
  chr15:29140040-29140542
  hypo
gtaagaacacaggagggtggcgggggcaggtgtctggccaaggcagctcctgcgtcattggggggctccagagcccgctccctatgttctgtaggaggcggctgctgctgccaagtcccagccttgctagtgaggacgtttaattttaccctttagagatttacaggatttctagattaacttgcccctgtttttctaaaagaacgacaaaatccatgacaaaccgttcatcacattattaactggctcacccagccttaacctgtgcagctccgccaacttaccctcggcacacagggaggcctgggtccccaggcagctccagtgtgcaggggtgtgggtgacagcgcaggtgtggcctccctgctgctggcctccggtggctggcctcagcctggctgggcacgcaggctgtccttacggggctcccagtagctttctggtcctgcgtcaggagaggggactgcacagggcttgggaaagagagcgggagcagcagtgc

SEQ ID NO: 267413 - DNA, 89 bp, Homo sapiens
  chr15:29144522-29144611
  hypo
ccaccaggatagggccatgtcgctgacttcagaggagagagactctttgtctgacgactgttgacctcgtaaccactcagcttcatggg

SEQ ID NO: 267414 - DNA, 165 bp, Homo sapiens
  chr15:29145325-29145490
  hypo
ttcccagcctcctccgcctggactcaggcttcttcgggctcatcagacctgaacagcctggcagtgtggctgtgtgggaatgggtgacaggtgctgttctccccagtgcaaatcaccaatgctgggcaccgtgcatcagcgtcgtggtgacggcagcattgggtg

SEQ ID NO: 267415 - DNA, 92 bp, Homo sapiens
  chr15:29146201-29146293
  hypo
taccaagcccagcactgttccggtggtcatttccagggatgtgcgtgaagcaagctggtgtcatgtgatgcggtcactctagaacctcagaa

SEQ ID NO: 267416 - DNA, 66 bp, Homo sapiens
  chr15:29223574-29223640
  hypo
gttccagagctaactaaagccgctgagactcagagggagtctcacgccactgcctcctgtgccccc

SEQ ID NO: 267417 - DNA, 350 bp, Homo sapiens; identical to SEQ ID NO: 216141
  chr15:29236505-29236855
  hypo

SEQ ID NO: 267418 - DNA, 38 bp, Homo sapiens
  chr15:29302743-29302781
  hypo
agccaccacacccggccgggagttctttatatagttag

SEQ ID NO: 267419 - DNA, 1187 bp, Homo sapiens
  chr15:29345750-29346937
  hypo
gtgagaagtcaggaatgagccggtaggttcctggggagaggcgtgtgtcctcgtgagttgccggtgcctcccttgactgcttttcccggagctctgtgtgccctcgttctccttggtgtggatgcgtgttgttctgatgatgagttagcgggggtggggatggcgcactgtttgaacagatgtgccctcacatggctgcgggaggacgtggtgggaggtgctgtggtgaagtggccccacacatggctgggctttgtggggttttgactctgtccttcccaatgttcctccccacagtggctgcctccgggtgatgatggctgtgtgaacgactgccatggcccaccggaagcttgagagcgtggggagcggcatgttggaccatagggtgagaccaggtcctgtccctcacagccaggagcccgagagcgaggacatggagctgcccttggagggctatgtgcccgagggcctggagctggctgccctgcggccagagagccccgcgccagaggaacaggagtgccacaaccacagccccgatggggactccagctctgactacgtgaacaacacctctgaggaggaggactatgacgagggcctccctgaggaggaggagggcatcacctactacatccgctactgccctgaggacgacagctacctagagggcatggactgcaacggggaggagtacctggcccacagtgcacaccctgtggacactgatgagtgccaggaggcggtggaggagtggacggactcggcgggcccgcacccccacggccacgaggctgaaggcagccaggactacccagacggccaactgcccattccggaggatgagccctccgtccttgaggcccatgaccaggaagaagatggtcactactgtgccagcaaagagggctaccaggactactaccccgaggaggccaacgggaacaccggcgcctccccctaccgcctgaggcgtggggatggggacctggaggaccaggaggaggacattgaccagatcgtggcagagatcaagatgagtctgagcatgaccagcatcaccagcgccagtgaggccagccccgagcatgggcctgagccagggcctgaggactctgtagaggcctgcccacccatcaaggccagctgcagccccagcaggcacgaggcgaggcccaagtcgc

SEQ ID NO: 267420 - DNA, 157 bp, Homo sapiens
  chr15:29357222-29357379
  hypo
tgtgtgtgcacgcacgcttgtatgtgagatattgacttgcattgtactcatctgccggtggggtgtctagggcagattgtggggagtgagagcattgggtatgggacccaggctgtccacgtgcgtctgcttcttgaggccccgtacctcccgttct

SEQ ID NO: 267421 - DNA, 184 bp, Homo sapiens
  chr15:29389587-29389771
  hypo
gtgcctcttacagactgcctcgagaactcacacttagctagatgatgcggccggtggcgtgcaggtagatttctgatggccagtagcatttccttctacgtggactctgggtaattgttaaaattgccgagccttccttcgagttattactttttacattgacggataaaattgtatgtatttg

SEQ ID NO: 267422 - DNA, 156 bp, Homo sapiens; identical to SEQ ID NO: 216143
  chr15:29398812-29398968
  hypo

SEQ ID NO: 267423 - DNA, 42 bp, Homo sapiens
  chr15:29403248-29403290
  hypo
tgagggcagcagcagacttgcggggcctgcagtgaggaagga

SEQ ID NO: 267424 - DNA, 430 bp, Homo sapiens
  chr15:29410106-29410536
  hypo
gtctgccccctctttaaaatcgatctacacacatccacgcacatgcgaccccgaggaaacgaaacccactctagaaaacgcgaccttggccgcacctaaagcagccagccgtgagtgcagaccccttggccagcgtggcgcagtggccctgagcagtagtggcatgtgtgtagatcaagtcggatctagtccagctcggttcattagcgatccatgtaatctgacgtcatcttgtctcgaagtctctttttttggcccaggccttgaagaatacactgtgacttaagaagccttaccacgcagtaactaaagctttaggatgactgtattcgaggagtgccgtgtgttgcatgcagctacccgtaggaagacttcgcgcatatcactaataaacctgaagtcgtgatgaaaagccgtgtgtgtgactggt

SEQ ID NO: 267425 - DNA, 172 bp, Homo sapiens; identical to SEQ ID NO: 216145
  chr15:29410566-29410738
  hypo

SEQ ID NO: 267426 - DNA, 187 bp, Homo sapiens
  chr15:29411084-29411271
  hypo
ggcggtggcctggggtccagctgggttaggctgtgggtcttggatgggcaggagccctcctctctggcctgcccacagcagcgtgagctccttgctgtgggcactgaccaccttcacggcccaggattcttggggaactgcagagtaaggagaagacttactctcacctagccgcccagagggtgtg

SEQ ID NO: 267427 - DNA, 61 bp, Homo sapiens; identical to SEQ ID NO: 216146
  chr15:29415482-29415543
  hypo

SEQ ID NO: 267428 - DNA, 294 bp, Homo sapiens; identical to SEQ ID NO: 216147
  chr15:29415573-29415867
  hypo

SEQ ID NO: 267429 - DNA, 279 bp, Homo sapiens
  chr15:29417874-29418153
  hypo
actgggtgtgagttctccagcgccgggggtgcccaagactcccggggagctactgtgaaatgcaaattcctgcgctgctggccacagggacctggtgccaggtcctaggctccagggcactgcccgcagacacagtcgcatggggcgatttttgaaagctctgggctgtgtggagagccaagctgcctgggaaatgctgctgaaaacgcacctgtgtctgcgtggggcggctccagctgatgacacccccatgcccagagctatcgttgggggtcatct

SEQ ID NO: 267430 - DNA, 128 bp, Homo sapiens; identical to SEQ ID NO: 216149
  chr15:29418534-29418662
  hypo

SEQ ID NO: 267431 - DNA, 60 bp, Homo sapiens; identical to SEQ ID NO: 216150
  chr15:29428200-29428260
  hypo

SEQ ID NO: 267432 - DNA, 109 bp, Homo sapiens
  chr15:29431470-29431579
  hypo
cggagcacactcctcgcctctctggctggaccgacccacggctgcgtgtgtttaattgtccgaaacagaggtgaatcatccgctgtgagcgggacgcatgtgcgtctgt

SEQ ID NO: 267433 - DNA, 104 bp, Homo sapiens
  chr15:29448969-29449073
  hypo
gtggaaacatgagatgcctgcgcgtgggccagggactgtgggagagaagcagtcttaacgaacacctcagcaggccaggcgcagtggctcatgcgaggcgggag

SEQ ID NO: 267434 - DNA, 65 bp, Homo sapiens
  chr15:29487547-29487612
  hypo
tcacaagcactcaaggtcaacgctttcctcctctccccagatccgaggtggctctctgcagtttc

SEQ ID NO: 267435 - DNA, 78 bp, Homo sapiens
  chr15:29697962-29698040
  hypo
cacatgagagtgaaggctgtcggcacgcacaaggttggccagcgcccacctccgggcgggagactttgtgcccatgct

SEQ ID NO: 267436 - DNA, 72 bp, Homo sapiens
  chr15:30022825-30022897
  hypo
aagaagaggcgagaacgacccccggaccgaccaaagcccgcgtgccgctgcatcccacgtccagcacctacg

SEQ ID NO: 267437 - DNA, 37 bp, Homo sapiens
  chr15:30024947-30024984
  hypo
ctccagaagtcagcacggtctccgcctgctgtttttg

SEQ ID NO: 267438 - DNA, 42 bp, Homo sapiens
  chr15:30333821-30333863
  hypo
atttcatgcgtgagccaccgcgcccagccaagatggattttt

SEQ ID NO: 267439 - DNA, 120 bp, Homo sapiens; identical to SEQ ID NO: 216156
  chr15:31188901-31189021
  hypo

SEQ ID NO: 267440 - DNA, 55 bp, Homo sapiens; identical to SEQ ID NO: 216157
  chr15:31194968-31195023
  hypo

SEQ ID NO: 267441 - DNA, 437 bp, Homo sapiens
  chr15:31220891-31221328
  hypo
cttctgcacacatccgtggctcacgcccacctgggcaccgtgtgtccacagccagcagaaaccatctctgttacggtcctttgggtcatccacaggtcaagatgataacttattttaaaaatctgagtaatagaatttaagatgtaagtatgtgaagttttaaactttaatttagcctccaccttacatttagacctttcgtataaagtaccatcagcatcagccctcccgagcacctgccgtgtcgcaggcactgtgccaaggagctcacagacatgggcacatctgcctgttcagaggtccacccagctaagcgaaaagctgtttttgcaaattattactctaaaaaacaagtttaataaattgcttttatatcaattaacttttacttatcttttgagagaaagaatgtatcggttggccggtttccaagtttt

SEQ ID NO: 267442 - DNA, 90 bp, Homo sapiens
  chr15:31239318-31239408
  hypo
acagggttgcttaccgtgctttgcttcactcgctggtgaggggagttgaacaggaaggtgccaaacagtgagatccgggtgctgtcatac

SEQ ID NO: 267443 - DNA, 34 bp, Homo sapiens; identical to SEQ ID NO: 216158
  chr15:31290000-31290034
  hypo

SEQ ID NO: 267444 - DNA, 33 bp, Homo sapiens; identical to SEQ ID NO: 216159
  chr15:31290274-31290307
  hypo

SEQ ID NO: 267445 - DNA, 210 bp, Homo sapiens
  chr15:31332301-31332511
  hypo
cgcagcacgttgcacgcaccttcaggccggggttcttccgcatccgcagtcttcccatccacatatcggtcagcagcatctggctgcaggtgtgagcaatgaagtcccggtgtttggctgccacggccagtttgaggcaggtcgagttgctccagtttttcagctcgtaggtcaggagtttcatagcgatctgctcgtcatgcttatagg

SEQ ID NO: 267446 - DNA, 157 bp, Homo sapiens; identical to SEQ ID NO: 216160
  chr15:31395008-31395165
  hypo

SEQ ID NO: 267447 - DNA, 163 bp, Homo sapiens
  chr15:31453187-31453350
  hypo
cctgctgactccctcgggtggccaggccagtggcacaggggctgccctccctgggtgggcaggagcggagccacacactcggcggcagccccacactcggcggcagccccacgcactgggcgagggggccgagatcctggggcgaggccggccggaggctggt

SEQ ID NO: 267448 - DNA, 68 bp, Homo sapiens
  chr15:31455371-31455439
  hypo
attttctgaggcctcgcagaggattggatgcagccgatgcctcatcctcaggccgtcccagtttgcct

SEQ ID NO: 267449 - DNA, 75 bp, Homo sapiens
  chr15:31490444-31490519
  hypo
gcgatggacttgatcggtttctccaatcatcctcgaattgcctggattcctaccacactccgccttcccctcctt

SEQ ID NO: 267450 - DNA, 44 bp, Homo sapiens
  chr15:31512245-31512289
  hypo
agcagaagatgagtagcaggcgcgggagcatgaccacctgagct

SEQ ID NO: 267451 - DNA, 315 bp, Homo sapiens; identical to SEQ ID NO: 216161
  chr15:31533287-31533602
  hypo

SEQ ID NO: 267452 - DNA, 40 bp, Homo sapiens; identical to SEQ ID NO: 216162
  chr15:31533632-31533672
  hypo

SEQ ID NO: 267453 - DNA, 278 bp, Homo sapiens
  chr15:31561303-31561581
  hypo
ttctcaaggggcagcgaaagccttcacagttgcaagctttctgaagtggctgctcaacgagagggttcaggggcctatccacctgtcaccaggttgtggctgtgacaaacagtaaattctcctggcagcactgcgctctctcgggcaggcccctgagggtgacttggggcatcatcctagggacacgcctgttaacagctatgctggtatttttataagtctcttagtgatgggtggggggtgcagagggacaaagtcatttgcgctgagagtctgca

SEQ ID NO: 267454 - DNA, 226 bp, Homo sapiens
  chr15:31564282-31564508
  hypo
ctcaggggatcctaggccaccggaaaggctctgcgtggcccaaggtttcagtcccagagccagcctttttgtctttggcttcgaaaacctcaatcgtaaaatggagctaataaaaacaccaagcccagattggaggacgaaatggcatatggccctggtggggactccaccgggggggaggcatggcccaaaaggcttgggttgcgtcaatgattcccattctgtt

SEQ ID NO: 267455 - DNA, 149 bp, Homo sapiens
  chr15:31571206-31571355
  hypo
ctccagtcctgcaacggtgccccatccctggcatggtccccactccaccctgccccagcaggaggccagtttgtcctggatgggaagaaggcctcacgggcaggggaggctcccacgcatgccaccccttcggccgtgccctggggttc

SEQ ID NO: 267456 - DNA, 38 bp, Homo sapiens
  chr15:31611580-31611618
  hypo
gtgtccgggaagtgaactgagtcgcaactgtggagagg

SEQ ID NO: 267457 - DNA, 50 bp, Homo sapiens
  chr15:31632061-31632111
  hypo
tgctgtgggagatgcagcagcgggctctcgtgcaggcctgacccttcacc

SEQ ID NO: 267458 - DNA, 247 bp, Homo sapiens
  chr15:31668808-31669055
  hypo
gtctgagacacattccggagacctttgtaccagaacttggatgcatagtccaccttactactgatacacgcctgagcaccctttagggcgaggcgccgcctcctgcctgctgtcctgtccctcagcatcagaagagttgaattcagcaggagacgggagcccggtgtccatgagggaagaggggtcgcgcttggtttctactgacccccatgaagatttcagacttgcagtgcggccacctggccct

SEQ ID NO: 267459 - DNA, 115 bp, Homo sapiens
  chr15:31731209-31731324
  hypo
aatatgtattcagtaggaagcggtaagatactctctcgatgccggacaccagccacgtgatcacgatggtaaacgaccttataggggactgtgcggccagacaatttgcccagct

SEQ ID NO: 267460 - DNA, 254 bp, Homo sapiens
  chr15:31774610-31774864
  hypo
caggggcccgccagcgacagtccactgtggaagtgccttcaaaggagaaatgtgagcagcctgtcctatctgctcctctatgagcaaatccaaattgtgagatgggaaccctgctttttggaccctaggtgtctttggaaagctcctgtcacctgaactgcccggcactgggagccatcgctgtacctcacggcgcccgcgagacgggtggtccagtgccctttccacggccgcccgcggcttggatggcagtg

SEQ ID NO: 267461 - DNA, 90 bp, Homo sapiens
  chr15:31775044-31775134
  hypo
tgcgcgctcgctctaagccctgggtactaccaaccgcgcacaagggaccgctacctggaagaggtcatcgctagggtaggagaaaaaaaa

SEQ ID NO: 267462 - DNA, 457 bp, Homo sapiens
  chr15:31776581-31777038
  hypo
tggccttcttctccttgccccgctcggccgagtccccgttcttgccattggcggagttggcgcggcccatcttgccgtgcaccaggccgccgaggccgcccatgtttttcttcagcttgatgcccagcgtcttgctgaagctgcccagcttgttggccacggagtcggcgcgcgtcttgtccttctccttgcgctgcttctccttctccttgtccttgccgttcttgccgttattgctgttagaattgctgcacaccgaatcgcggtccgagtccagcgagtcggccagggactgcacgtcctcccctgccgaggccgtgggagactccggctgtgccaggggcgcctgtgtggagagggagggccggatcgaaggtggttagagaagagctgtccacgcgccagcgaggaagacacaccttgcccctgtgttgccgaggctagggccctggacctt

SEQ ID NO: 267463 - DNA, 200 bp, Homo sapiens; identical to SEQ ID NO: 216164
  chr15:31851205-31851405
  hypo

SEQ ID NO: 267464 - DNA, 38 bp, Homo sapiens
  chr15:32942576-32942614
  hypo
caggcgtgagccaccacgcccggcgccccagtcttatt

SEQ ID NO: 267465 - DNA, 106 bp, Homo sapiens
  chr15:33358715-33358821
  hypo
ttggaatcagaggggccatccgctggcttagaattggaccgttcaaacacagctcttagcgactccttctcatgtctcatcttgcgcttgagagcttccagctcag

SEQ ID NO: 267466 - DNA, 133 bp, Homo sapiens
  chr15:33359132-33359265
  hypo
aaggacttctgcacaggctgcgtcaatttgagcaaagctaagtccccatcctttggtttaatttccgtgatggtctctcctccctcagcggtagcccccttcttcagcacacgaagcccactgaaaaaagctg

SEQ ID NO: 267467 - DNA, 375 bp, Homo sapiens
  chr15:33445900-33446275
  hypo
ggaggctgtttccccggctggcgactgcgatgacctatccccttgccgctccttgccctgccgcctggagccatgagccccagcctcagctcccgggagggtgagcaagtcggctttgggtacaaactcagcgtgggctgctgggcgaatggcaatcgtctccttacccttagaatgcgttttaactactctttgtacctgggaggacaggtcctgaactttggccaccactttggagacaggtttctgcttgcaagtccgcttagccggcttctccatctcatccttttctgcctctggatgcttctcagggtcctggtgactttcagacaaacctgtttgctgatgctccagcccgctcggcggcctccgaat

SEQ ID NO: 267468 - DNA, 120 bp, Homo sapiens
  chr15:33541443-33541563
  hypo
actttgtttcatttctgccctaaagctttttgtttctctttcacactccacaactcccctctaaagctttttgtttttaaattttttaaatttttaagagatggagtcgcgctctgtcgc

SEQ ID NO: 267469 - DNA, 34 bp, Homo sapiens; identical to SEQ ID NO: 216166
  chr15:33550215-33550249
  hypo

SEQ ID NO: 267470 - DNA, 118 bp, Homo sapiens
  chr15:33746678-33746796
  hypo
cattaagcatttaccgaacatatcctctctgctaggccttatcctcggcacggagatgagtcagacacagttgccatctccaaggatggaggaggcagacaagcgaaacagcggttaa

SEQ ID NO: 267471 - DNA, 125 bp, Homo sapiens
  chr15:33954376-33954501
  hypo
gtgagcaggaggacctgatgcggttccattaccacacgctgaggctctacagcgcggtgtgcgccctgggaaacagccgcgtggcctacgccctgtgcagccacgtggacctctcccagctcttc

SEQ ID NO: 267472 - DNA, 149 bp, Homo sapiens
  chr15:33969176-33969325
  hypo
tgtgcccggtactgcgcttggcacttcaccttacctcgtttgattttattctcgcaacaagcaaccaagtatagtgacctctaggctcccattttatgcactaggcaactaagcctgagggtagaaaaataattcggacaaagtcttgc

SEQ ID NO: 267473 - DNA, 98 bp, Homo sapiens
  chr15:34142220-34142318
  hypo
gcaatcatcagtaatgcctgcgtcttgttatacaggggcatgtggcctaaaagtcccagtaagaaggcagttcaatttcggccaggcacaatggttca

SEQ ID NO: 267474 - DNA, 120 bp, Homo sapiens
  chr15:34322808-34322928
  hypo
gtgagccaccacgcccagcctggtttggggggttttgttgagaaagagtctcgggctgtcatccaggctggagtgatcatagctcactgcaacctccaactcctgggttaaaaatcttcc

SEQ ID NO: 267475 - DNA, 510 bp, Homo sapiens
  chr15:34358082-34358592
  hypo
gtcttagtgtaggccgggtccttttcagtctcatttgctaagaggatggaaaattagctggtttagttgtcctgggaattagatatgtacctgagtatgggagagcttcagcctaccactgaagagcatcatcagcctctcacaggatgtcccacggaggcttcagggtagtagaatctcaggcaggacgggactggtcccttataaagacttcacgttgacatgaaacatcttgtaagcagtgcatctgctgagcctttgtaaagggcaggttgacacctgcaaagaattcggtgggaacagtaattggctcagttctccagcacagaggctttcgggcctccgtgatgccaactgggtgtgacttcatgagcaaacctgctctaccagcgccagataaacagttgagtcttcgtttaaggctttgattcctgataaagatgaaaaccccttcatgagaataggcttttaagcccatgttgggcattcaccattcgcagttgagagtga

SEQ ID NO: 267476 - DNA, 210 bp, Homo sapiens
  chr15:34395526-34395736
  hypo
cctcccgacaaaacgagtacgatttggtctgaagctatatgtactttgtgaaagtcagtctggttatgtgtggaatgcgcttgttcacacagggcctggcatgaatttgaaagattcagcggatggcctgaaatcatcacgcattgttcttaccttggtcaatgaccttcttggccaagggtattgtgtcttcctcgataactttaatat

SEQ ID NO: 267477 - DNA, 80 bp, Homo sapiens
  chr15:34467905-34467985
  hypo
aactggatccctcacgcattactacgggaatgtaaaaatacattcaaactttggaaaatgtattttccaaatattacttg

SEQ ID NO: 267478 - DNA, 44 bp, Homo sapiens
  chr15:34524063-34524107
  hypo
tacaggcgtgagtcactgcacccggcccaaaattactcaatttc

SEQ ID NO: 267479 - DNA, 82 bp, Homo sapiens; identical to SEQ ID NO: 216169
  chr15:34546026-34546108
  hypo

SEQ ID NO: 267480 - DNA, 152 bp, Homo sapiens
  chr15:34630947-34631099
  hypo
ctataaagtaccttaaacacatttgtcctactttaattttttgttgttgttcttgtccttttaataaatgctatgtccactttctagtcagactgaaagttccactaaataatacgtttttttatacctggagaagacgttgatgtattttc

SEQ ID NO: 267481 - DNA, 275 bp, Homo sapiens
  chr15:34634197-34634472
  hypo
tgagcaccttgaagcgtttcttgatggtgattcggtgtcgagagtatttgtcatctggggagaaccgagcaggatgggctgagcaggtctgttgtcccatcgggtcaaatttctgctccaggaacacagaatgtatgtcagtacaggagtgatgaaatggggtggggccagcgcgaaaaagggcaaacatgaaaatagaagatgcaatggtcaactcaaaaagttgtacaaataaatagagaaatataaaatttaaaaaggccgagcgcggtggc

SEQ ID NO: 267482 - DNA, 392 bp, Homo sapiens; identical to SEQ ID NO: 216171
  chr15:34635789-34636181
  hypo

SEQ ID NO: 267483 - DNA, 253 bp, Homo sapiens
  chr15:34873192-34873445
  hypo
cccagagctctctccgtttctctaaggaccaggctgaaacgcagggcatgtgatctctgccgaagacattgaagccacccagtgatgtgtgcagggcctcgatccccaccgaccgccagtcctgtcctcccctggacagtaaaggtttctccaagacttcagaccatggtgtcacctgaggcccacacctgttaagtcactggggcaggtatgcgtggcagaggacagcgaggagtgccggagaggagctgag

SEQ ID NO: 267484 - DNA, 120 bp, Homo sapiens
  chr15:35310622-35310742
  hypo
acaggcgtgagccactgcacccagcgtttaaagggaattctgatgtttgtttccatagacagtttttttcttagtaaggaatggatgtaggcacggtgcggtagctcacgcctgtaatcc

SEQ ID NO: 267485 - DNA, 31 bp, Homo sapiens
  chr15:35384634-35384665
  hypo
tccacaggtctcccgcgggcgtcagcagggg

SEQ ID NO: 267486 - DNA, 129 bp, Homo sapiens; identical to SEQ ID NO: 216174
  chr15:35385319-35385448
  hypo

SEQ ID NO: 267487 - DNA, 80 bp, Homo sapiens; identical to SEQ ID NO: 216175
  chr15:35414092-35414172
  hypo

SEQ ID NO: 267488 - DNA, 77 bp, Homo sapiens; identical to SEQ ID NO: 216176
  chr15:35529459-35529536
  hypo

SEQ ID NO: 267489 - DNA, 146 bp, Homo sapiens
  chr15:36870094-36870240
  hypo
tttatggccaaaaccgcagttgctcttgcaccaacctaatatttcacatagactatcctctagacaccacgctatataatcttttatttgtaccagcctgttaatcttaaaaacagcccatgcccgggcgaagtggctaatgcctg

SEQ ID NO: 267490 - DNA, 64 bp, Homo sapiens
  chr15:37783013-37783077
  hypo
gcagcgtttgaaccgggtctggggcggaaacagcactcgccgctgaagcgcctgcgcaaggcca

SEQ ID NO: 267491 - DNA, 31 bp, Homo sapiens
  chr15:38652448-38652479
  hypo
ttttttttttctttttgagacggagtttcgc

SEQ ID NO: 267492 - DNA, 84 bp, Homo sapiens; identical to SEQ ID NO: 216180
  chr15:39415395-39415479
  hypo

SEQ ID NO: 267493 - DNA, 217 bp, Homo sapiens
  chr15:39703028-39703245
  hypo
tggaagtgataaaaccggaaagatacaacagaataattgaacgcctcttcttgtatcccagcaccaccgggtcttcctcagcctattcctggacagtttaaacctcaagcaaaggctttctgtgctctgacactccaggctcacttctcctcacgacctttaacttgctgctcccctgtgcctggggtgctcccccaaaaaacggctgtggcattcc

SEQ ID NO: 267494 - DNA, 218 bp, Homo sapiens
  chr15:39742868-39743086
  hypo
tgcaggctccaaatgcgagcctcgaagacggcatgaacacggccatgacagctgaggtgggggagtggctggggtcccagagactggtgaggctgagagaatgcacgaggcgcaggagctacattcagtacactgcctcacattctacacagaaacaaacgtcaggtgaatccaacatacaaacataaaaacagtaacagccacgtaaaagtaggaaa

SEQ ID NO: 267495 - DNA, 158 bp, Homo sapiens; identical to SEQ ID NO: 216182
  chr15:39881427-39881585
  hypo

SEQ ID NO: 267496 - DNA, 142 bp, Homo sapiens; identical to SEQ ID NO: 216183
  chr15:39971426-39971568
  hypo

SEQ ID NO: 267497 - DNA, 34 bp, Homo sapiens
  chr15:39986669-39986703
  hypo
ctttatacatatttacgtgcaaagtttgaattat

SEQ ID NO: 267498 - DNA, 64 bp, Homo sapiens
  chr15:40280196-40280260
  hypo
agaagagcactttacgagacaccattgaccagggactgtatcgagacaccgtcagactctggag

SEQ ID NO: 267499 - DNA, 48 bp, Homo sapiens
  chr15:40336685-40336733
  hypo
taaggctgggagacctcccacgtcagcgggaggtggttagctctggtg

SEQ ID NO: 267500 - DNA, 172 bp, Homo sapiens
  chr15:40368064-40368236
  hypo
aagaccaggagagtggtgaacggcctcacgctcacttgacttcactcatgcagaagggctgcgggagcaagatggaagtcctgactgacgatccacactctgggtcttcagggaagtgtcagcctcagagctgcggtcagtgcgtggagccggctacctgttggggaagaag

SEQ ID NO: 267501 - DNA, 171 bp, Homo sapiens
  chr15:40377026-40377197
  hypo
gcttatttctttccaatcttcgcactgggcttagggtggcgcctcgcttcagtgccagtgactcattcagtgtacctcaccttcttaggagcagggttggcgctcgaatgagcattcgaatgctggtgacagatccccctgcagagtagcgtggagccaggggacatgtga

SEQ ID NO: 267502 - DNA, 76 bp, Homo sapiens
  chr15:40405039-40405115
  hypo
ctttatctgttatccgtctgtctgcaaaggatagttcctctcttctgagttgtagagagtgtgtgtttgtgcgcac

SEQ ID NO: 267503 - DNA, 75 bp, Homo sapiens
  chr15:40405235-40405310
  hypo
gtgcgtgggtgtgtgtgtatgcgtgtgtgcgggtgcacacacacgtatggcgggggtgcgcgcacgtgtgtgtgt

SEQ ID NO: 267504 - DNA, 324 bp, Homo sapiens
  chr15:40423135-40423459
  hypo
attatattaattatcgattgttaataataattattaatattattcctgatatccagggggtcgaggatgacattgcttcctatacctcagaacacgtacacccccatgtgatgttgttcctaataaccagggggtagaggatgacgttactccaaatatcgccgtgggtgtacatcccttctgcgatcttgttgctaatacccaggcggggagaagacgatattaatcccaatattgcagaaggtgtagacctcccctgatattcaggggaaagagcacgatattgctcccaatatcgcagtctgtgtacgcccactctgtgat

SEQ ID NO: 267505 - DNA, 182 bp, Homo sapiens
  chr15:40532013-40532195
  hypo
ctgtgttgggtgtggacccacgtgtgtgtgagtgcgagagtgtgtaagccagtgtgtgtgccgtccccctgctggggacagcagctgggtccagcagagagctggctgggggcttgacaggagtttatcctaactgatgctgggtgggcgcaggccctgagatgggcgtcagggagagggga

SEQ ID NO: 267506 - DNA, 134 bp, Homo sapiens
  chr15:40532791-40532925
  hypo
gcctgaagggagtgccgcttcctgggctagagacaagcaccagcctgcagtggagaacgcaggaccccgctgcccagaaggagcagccacggtaaggtccccactgccgctgcgtgctccggattcctgggcta

SEQ ID NO: 267507 - DNA, 85 bp, Homo sapiens
  chr15:40558266-40558351
  hypo
ctacctcagctgcaacgggggcacaccagcaggccacaagcagatgccgtggcccgagccacagagcccacgggtcctgcccaat

SEQ ID NO: 267508 - DNA, 559 bp, Homo sapiens; identical to SEQ ID NO: 216188
  chr15:40631663-40632222
  hypo

SEQ ID NO: 267509 - DNA, 215 bp, Homo sapiens
  chr15:40645375-40645590
  hypo
gaaaggaaagactgcaatttagattacagtaaattaaaagttaccttttgaacacaggtattccctgctcttactccaaaaagatggacccaggtaagcactgtggctgagaggctgggaattggaagaagggagagagcaggagagcggtaaaggcagggactatcagtcagccataactagtgcgtgccaaaaatgtacgtgcgtgtgtgttt

SEQ ID NO: 267510 - DNA, 146 bp, Homo sapiens
  chr15:40676554-40676700
  hypo
acagagcgagactccgtctcaaaaaaaaaaagattgagctctgaagtaaataggcttttctccaaaggcttaatgggttgtttgttgtcttgtgttgccgcagaacacctgaatggtaatcctggcaccagcggggactaggagtt

SEQ ID NO: 267511 - DNA, 103 bp, Homo sapiens
  chr15:40701402-40701505
  hypo
tcagattgtattttacggaagaaagaggcagttagaaatcagatgaaaatggccaggtgtggtagtgggctcctataatccgagtgactcgggaggccaaggc

SEQ ID NO: 267512 - DNA, 43 bp, Homo sapiens
  chr15:40701565-40701608
  hypo
ccccagcctggataagagagtgagagcccgcctcttgaaaaaa

SEQ ID NO: 267513 - DNA, 189 bp, Homo sapiens
  chr15:40716012-40716201
  hypo
cttttttcacttcctcgggccagccctgtccacgggccagtgtttgggagccctgaaatcaggtggtgcagagccccattcacattcctggctgtccccaacccctgcccacacttggtacccagagcctacagccacgctagtgccgagtgggagctctcctctccctgtgtgcgccacttggttact

SEQ ID NO: 267514 - DNA, 33 bp, Homo sapiens
  chr15:40766007-40766040
  hypo
agctaccacgcctggccccggaccattttcaaa

SEQ ID NO: 267515 - DNA, 33 bp, Homo sapiens; identical to SEQ ID NO: 216189
  chr15:40782124-40782157
  hypo

SEQ ID NO: 267516 - DNA, 31 bp, Homo sapiens
  chr15:40854469-40854500
  hypo
aaactgttttaagagctgttcgggtagtcac

SEQ ID NO: 267517 - DNA, 45 bp, Homo sapiens
  chr15:40856290-40856335
  hypo
ttacaggcgtgagccaccgcgcccggcccctaaattctgttttca

SEQ ID NO: 267518 - DNA, 32 bp, Homo sapiens
  chr15:40933191-40933223
  hypo
aagattgtgaggctcgtcgccaaaagattgaa

SEQ ID NO: 267519 - DNA, 69 bp, Homo sapiens; identical to SEQ ID NO: 216190
  chr15:41044231-41044300
  hypo

SEQ ID NO: 267520 - DNA, 605 bp, Homo sapiens
  chr15:41059265-41059870
  hypo
gaggaggcagggggcgtgcacttaccccagcgcccagcaagcagccagcaagtgtgagtcactacaagagtggccaggctgcctgctgcagacactagctttgtaccaggagcttgctgtgtgcccctcctcaccccccccatcctgtctctttgcagttatgaatactacgtcgatgaccctccccgcatagtcctggacaagctggaacgcaggggcttccgtgtgctgagcatgacgggggtgggccagacgctggtgtggtgtctgcacaaggagtgaccttctcatgctgatttgcagacggggcacccctgtggaggggctgctgtgggccctgacctccaagctcctgcctcaccgtctgccttgctcctctcttcccaaatcatcaccgccatgggcccagccccaaagggcagtgaatggccttctctgaaaccctgcgtcaagcagtgggagagggcagtgcccggtgccctggtgctcccagctgccctcctgcttcgggcctgggccgagggccttgtgtaggccatgttcctcgggcagctgccccgggccggagctgggcactccagcggccctggcgcgtggctcctgca

SEQ ID NO: 267521 - DNA, 150 bp, Homo sapiens; identical to SEQ ID NO: 216194
  chr15:41082365-41082515
  hypo

SEQ ID NO: 267522 - DNA, 101 bp, Homo sapiens
  chr15:41091048-41091149
  hypo
acagcgttaactcacgacttaatccttcattctggcagccgtggtgccccgccttgtgagtgtgtgtgtaagaatttggcgcttgctggctgggcgcggtg

SEQ ID NO: 267523 - DNA, 104 bp, Homo sapiens; identical to SEQ ID NO: 216196
  chr15:41120622-41120726
  hypo

SEQ ID NO: 267524 - DNA, 172 bp, Homo sapiens; identical to SEQ ID NO: 216197
  chr15:41121306-41121478
  hypo

SEQ ID NO: 267525 - DNA, 432 bp, Homo sapiens
  chr15:41165167-41165599
  hypo
tgccagtagctgccgcaaaggcccgggtgccccaggtctcagaagtctttggcctcctgcctactacttgctatgcagccatagctgctcaaacgaagcagaagaacttcttccagcggcagcgggagagggtgcgcacacctttggcattcagtttcttctccagccgggctttgtgctcaatggcactgagaatagccgagtcaaatacttccttcaagttcttctgcgtcaaggctgagcactcaaggtagcagcaggctcggatcttctcggccagaccctgagcctggggttggggcacggggccctcccggcccccctggtccagctgaattagtacgttgacatcgtccctcaggtcggcctgggtgcccaccagcagcacaggcgcctgggggttgtgcgtgcggatctcgggcagccatttct

SEQ ID NO: 267526 - DNA, 37 bp, Homo sapiens
  chr15:41235297-41235334
  hypo
ctcttgggaggggtcgcgtgtgcagtgtgcttactgg

SEQ ID NO: 267527 - DNA, 93 bp, Homo sapiens
  chr15:41253508-41253601
  hypo
tcgcctgggactctgtgctgcgcactcctggctctaaccccctgtgcctctgttcctcggcctggcactgccgtccccattttggctccatcc

SEQ ID NO: 267528 - DNA, 225 bp, Homo sapiens
  chr15:41276133-41276358
  hypo
gttaagatcattacgaccccctgtgctcaccgcccatggccttgcacccagctaggaacatgcttcacagttgaggctgctttggcttctgagaaaccaacctgtcctcatttgtttttctccttacagacctcatgtgcaacctacttcaacaaggctggagaactccaggagaagcaaagactgcccagcagtgtgtccctgctacacggtcaggacactcct

SEQ ID NO: 267529 - DNA, 166 bp, Homo sapiens
  chr15:41316660-41316826
  hypo
tgcatactctccctcgtcctacaggagctaacccctttcttgcttcattaacctctgaaactacagtaccttcaggggctgcccccttaagcgttcagcgcgtccttcctgaggacacgtatgttcctgctctagctgaaggaagcgtaaccgctccaagcgctgc

SEQ ID NO: 267530 - DNA, 33 bp, Homo sapiens; identical to SEQ ID NO: 216201
  chr15:41622889-41622922
  hypo

SEQ ID NO: 267531 - DNA, 91 bp, Homo sapiens; identical to SEQ ID NO: 216202
  chr15:41732307-41732398
  hypo

SEQ ID NO: 267532 - DNA, 118 bp, Homo sapiens
  chr15:41769414-41769532
  hypo
aactgaatgagctggaggaacgggcagaggccctggaccgccagcggaccaagaacatatccgctatcaggtgtgttatggagcctatttttggcccgcagaccttggccaaaattat

SEQ ID NO: 267533 - DNA, 215 bp, Homo sapiens
  chr15:41769812-41770027
  hypo
acgtaggcacttaacgtatacacactctctctgtatgtccacgtacatcgatataatttattcataatgaaaagcagcagtcttctgccctgtcctacctcttcccacccttagattctactccacaggtatttgttttttctcaatttctgtttcttggttgtttcccccatatctactctggtattcttgaagggaaaaggataatatgccgg

SEQ ID NO: 267534 - DNA, 41 bp, Homo sapiens
  chr15:41840741-41840782
  hypo
cacctatagtcctagcgatgcagcggcgggggaatagcttg

SEQ ID NO: 267535 - DNA, 109 bp, Homo sapiens
  chr15:41842774-41842883
  hypo
ttcatactatgtgcagatcacgtagtatgtcactatgtgcagatcacaatgagtgggcagtcgtgctccgcctccatgtgggtggagcgcctacatacattatttggaa

SEQ ID NO: 267536 - DNA, 37 bp, Homo sapiens; identical to SEQ ID NO: 216203
  chr15:42117757-42117794
  hypo

SEQ ID NO: 267537 - DNA, 384 bp, Homo sapiens
  chr15:42122290-42122674
  hypo
atccccgaggcagccgactgcaccacccccaccctcacatggctgggcaggacctgctcctcagcccagaccctctgctgcagcctgaacctcgctccctgccacatcccagaagcctgcgagcaccctgccaaaggtgcaactgggacttgtagggacttgcacttgtgagtacaaaaatactcacacatgtgcacaaagaccctgctcctgcaaactggcttcttcactgtttccggaacacaggactactaggctcatttgtttggggtggtcagagctgccatgccatatgcaccttgcccgccgccgctgtggggaaaacgtgaagaggagaggcagctggggccacatgttccacagagctggcgggaactggggaca

SEQ ID NO: 267538 - DNA, 243 bp, Homo sapiens
  chr15:42147780-42148023
  hypo
ctgtctgctgcagccgctcgatgcgtgggctgaacgcttccaggtctctcttggtggcctccagccgccgcagaagggcctgtgtggcttcagcactgtggcccatgtcctcgctgtccaggacatggccccgctcagccagccaggatcccgcctccaggagctgggggtgacagagtggagatccgttttcccggggcaccctccagggctcaggatttacagccacgattctcagcctgg

SEQ ID NO: 267539 - DNA, 120 bp, Homo sapiens
  chr15:42151063-42151183
  hypo
cctccctctccaagcgaggcgaacctcctgggagtcctgcaggaaggcctgcagctgccggagctcctccaggcgatggcggcgggtcccggcttgcctgaagagcgcctccttcctgcc

SEQ ID NO: 267540 - DNA, 146 bp, Homo sapiens; identical to SEQ ID NO: 216204
  chr15:42153325-42153471
  hypo

SEQ ID NO: 267541 - DNA, 55 bp, Homo sapiens; identical to SEQ ID NO: 216205
  chr15:42160236-42160291
  hypo

SEQ ID NO: 267542 - DNA, 174 bp, Homo sapiens
  chr15:42162018-42162192
  hypo
caaagggcaggagccctcaccgccgtgcggaagcgggccaggaggcgtgcccgctccagctgggccctgcgctgctccatgcgtcgctgcagcactgcccacgcctgcgtcacagcttgctgcctctgctgcaccgcatgggcctgaggccccggacacagcttctgcaccctg

SEQ ID NO: 267543 - DNA, 67 bp, Homo sapiens
  chr15:42162807-42162874
  hypo
tcattcctccctcccgctaggtctggtcagcccgctcctctctgagttgtatcgggacttgcccaaa

SEQ ID NO: 267544 - DNA, 71 bp, Homo sapiens; identical to SEQ ID NO: 216206
  chr15:42167406-42167477
  hypo

SEQ ID NO: 267545 - DNA, 174 bp, Homo sapiens
  chr15:42171430-42171604
  hypo
ccaatgccaccactgcgctggccgtactttacgaccacactttggaggaagtggaccctcctctccagcaccagggtcttcttctgggccagctgcagggcgtggcaggtgtcctctgagctccctggctgcagggcctccagctggaggagcacgtctcgcagctggacctgt

SEQ ID NO: 267546 - DNA, 168 bp, Homo sapiens
  chr15:42185523-42185691
  hypo
tctcctgcatctgcatgtgccgggcctgtagcttgcgaatgtggcccgtctcgtactgagagtccatggtgagacttggactgggcgggacccggagttctgtgctgggcctcctgctgcggtgccctgcagccccgaggagctcccggggactgtggggctgaccag

SEQ ID NO: 267547 - DNA, 191 bp, Homo sapiens; identical to SEQ ID NO: 216207
  chr15:42192981-42193172
  hypo

SEQ ID NO: 267548 - DNA, 101 bp, Homo sapiens
  chr15:42211495-42211596
  hypo
tgggcctcagcctcgaagagccggcggttgtccgtgttctgcaggggctgcgcccagaaggagccaatgtagacgcgcagtacctcgggcgtgttgatgac

SEQ ID NO: 267549 - DNA, 104 bp, Homo sapiens
  chr15:42232134-42232238
  hypo
taaacaggagatttagatgacgtttactcccctggaatgctatgtatttttttttttaaataaatagggatgaggtctcactatgttggccaagctggtctcta

SEQ ID NO: 267550 - DNA, 163 bp, Homo sapiens
  chr15:42232298-42232461
  hypo
gagccaccgcgcccagccactcagcttttgagggttaatcatcaaccgcacaaaggggaaaggaggagcagtggagggcagtacacaagcggccacctttcctccttcccaggcacaatgcccataagggaggcaaagacccgccaataaagtcagtggggga

SEQ ID NO: 267551 - DNA, 37 bp, Homo sapiens
  chr15:42280070-42280107
  hypo
gccatgagggaaagccgggggccgccccccatcaccc

SEQ ID NO: 267552 - DNA, 174 bp, Homo sapiens
  chr15:42284449-42284623
  hypo
atactgaggctggcccgttctgggagacgcgggactcctgtgacagccagctttggctggaggaccctccaagggccttgcagaccacatggtggtctgggatgctgccgcctgacctttcttcctctccccacccctagggtcagactcgcttcatggcgtcactgctctcca

SEQ ID NO: 267553 - DNA, 62 bp, Homo sapiens
  chr15:42302479-42302541
  hypo
aaaattgttttcctgtcattcgtccatgcctaaaattctccgataaagcccattaaataaaa

SEQ ID NO: 267554 - DNA, 99 bp, Homo sapiens
  chr15:42350764-42350863
  hypo
ggaaaaataaacaccgggaattccaaaagcggggagggagagagtgggagaagggtggacaaactgcctattgggtactatgttcgctacttgggtagg

SEQ ID NO: 267555 - DNA, 45 bp, Homo sapiens
  chr15:42362298-42362343
  hypo
ggggagaaggtggcccggagagaaccagcccggcccaggtcaatg

SEQ ID NO: 267556 - DNA, 110 bp, Homo sapiens; identical to SEQ ID NO: 216208
  chr15:42362997-42363107
  hypo

SEQ ID NO: 267557 - DNA, 64 bp, Homo sapiens
  chr15:42363982-42364046
  hypo
cagatccggggctccgggatcctcctcatcagccgtcccatgaagaactcggagccgaagagct

SEQ ID NO: 267558 - DNA, 44 bp, Homo sapiens; identical to SEQ ID NO: 216209
  chr15:42388224-42388268
  hypo

SEQ ID NO: 267559 - DNA, 192 bp, Homo sapiens; identical to SEQ ID NO: 216210
  chr15:42434610-42434802
  hypo

SEQ ID NO: 267560 - DNA, 183 bp, Homo sapiens
  chr15:42438905-42439088
  hypo
caggagcagccaggcggagtgagttatggcggaattggctgagaagtgggtgtggcgctgggcctcacttccaggtgtgggctgaaatcactttcaaaacatcctgagaacaactaaaatcactctctctggaaggggggccgaggcatgggtgtgtttgaaaagctgcgccggtgattctaa

SEQ ID NO: 267561 - DNA, 158 bp, Homo sapiens
  chr15:42446543-42446701
  hypo
gtggaaggtctcattccactcggggtcactgcagttggccactatcctagtctgggcagggcttggggacgccgtgggcagccacagttgcacatagcagtcggctttggacactgcaggtaggacagggaggggccggggcctcaagctctcattgc

SEQ ID NO: 267562 - DNA, 76 bp, Homo sapiens
  chr15:42446969-42447045
  hypo
aagctccctgagagcgcgtgctgacttgtagccacagcgggcctcacactgtcacccagggcggcactcccaggca

SEQ ID NO: 267563 - DNA, 248 bp, Homo sapiens
  chr15:42447819-42448067
  hypo
ctagtgtgagcctggtccctcgccccattgttcccctcgtcccatcatggagcagcaacctggcatagggtcactgacgtctctgtgccggggagcagggagaccttggcgggtcccaggcattgggagttcagcaccttcgtgatgtgtctggaccctggaacccatccggtctgggttcaaatctaaatccagcacggactcactgaactaacgatggctgtcacgcaccacacacctgcagctcc

SEQ ID NO: 267564 - DNA, 193 bp, Homo sapiens; identical to SEQ ID NO: 216211
  chr15:42451757-42451950
  hypo

SEQ ID NO: 267565 - DNA, 119 bp, Homo sapiens; identical to SEQ ID NO: 216212
  chr15:42452409-42452528
  hypo

SEQ ID NO: 267566 - DNA, 57 bp, Homo sapiens
  chr15:42470689-42470746
  hypo
tggaccagaagcctcggttcaaatgttcggatctcaacatatcgaggcaacactgca

SEQ ID NO: 267567 - DNA, 120 bp, Homo sapiens
  chr15:42562566-42562686
  hypo
caaaaaacaacaacaaaaaataaagtgcctcaaatcctccaaaaacaatgaaatataaacacttcaaaatacgcagttagggctgggcatagagactcatgcctgtaatcccagctactc

SEQ ID NO: 267568 - DNA, 193 bp, Homo sapiens
  chr15:42644703-42644896
  hypo
ccatgcagcattggcgctctggctgcagcagctgagttgctcaaggccagtgtccaagtggacagcagcctctggtactccccccagttatcttccacccacatggactgggcagagcagccctcttctgtgtgcactgcatacgctgcagccgtgggagttattctcccctagagatcgacttggcagcacg

SEQ ID NO: 267569 - DNA, 255 bp, Homo sapiens
  chr15:42684673-42684928
  hypo
gggccactgaaggtccgttcgtggtcgtgaggcacactttcagggagcagagtggtctgtgtcttcacagagcccggaaaatgaactagtatgaactttgcctccaagcagcagaacttctgttcccccgcccctaatgggttctctggttactgctctacagacaatcattccggttcagtatgagacaagaatggcctgcgggctggtcagaggtcacgcctactctgtcacggggctggatgaggtaagcct

SEQ ID NO: 267570 - DNA, 251 bp, Homo sapiens
  chr15:42686336-42686587
  hypo
gcagaacaccctcgcgtaagagatttgccccccagccccgtcccagccctcagcaagacagaagattccctttccagagaggctgcagagcatgagagctctttctgtgtgcttaaggtcccgttcaaaggtgagaaagtgaagctggtgcggctgcggaatccgtggggccaggtggagtggaacggttcttggagtgataggtaggtgaggggaccccacgggattggcggtggcggggaacagggtcc

SEQ ID NO: 267571 - DNA, 68 bp, Homo sapiens
  chr15:42696332-42696400
  hypo
aaagtaagctggtgccggacctggtgttgacacttggatcctccacttaccagcggggtgacctggac

SEQ ID NO: 267572 - DNA, 180 bp, Homo sapiens
  chr15:42711709-42711889
  hypo
cccgcctgagtaacataacaagaccctgtctcaaaaaaaaaaagaaaagaaaaacaaggaagcacaaagactctctgtcttggcttttccctacaggcttgttggtaaagtcttgtgattctaattcgaacacatgtttatttcttaaaagtaatgcaggccgggcactgtggctcacgc

SEQ ID NO: 267573 - DNA, 69 bp, Homo sapiens
  chr15:42742089-42742158
  hypo
ccttctctgtctcactctttcggtgaccgctaatattgcgaatgcggcgggcactattgaggtttggct

SEQ ID NO: 267574 - DNA, 137 bp, Homo sapiens
  chr15:42748435-42748572
  hypo
ttattttggcgatacgactatactatatactatacgatttatacaatgaagcttatattctaacacctttccactggaaaatttaaacgccaaataaaaacttattggtattcaaaagatttggatactggacaggt

SEQ ID NO: 267575 - DNA, 240 bp, Homo sapiens
  chr15:42784385-42784625
  hypo
ggtgtgagccaccgcgcccggccgcctatatttattattaaacttagcccatacccattccctcagaaacctaattttagtgactaagactatcagataaatgaaatgacattcaggttgataattatgtggagtgtccctcctatattattgagattataacatctctgtttaacaagaccttcaacgtctcaaataaaagtaagcagcggtggggcacagtggctcacgcctgtaatc

SEQ ID NO: 267576 - DNA, 40 bp, Homo sapiens
  chr15:42806617-42806657
  hypo
attataggcgtgagccaccgtgtctggccagacattgtga

SEQ ID NO: 267577 - DNA, 120 bp, Homo sapiens
  chr15:42819326-42819446
  hypo
tgcccggccttgatcgtttttttaaagaggaaactcttaaatgaaaaactcctacactacaggatttatgaatgaccgcttgtgtggtcaaggtacttatttgtccgctgattgtccaat

SEQ ID NO: 267578 - DNA, 91 bp, Homo sapiens
  chr15:43019854-43019945
  hypo
atggtgctcacaggcgcgggagcagcccctccgctccccccgggcagcaggttcaggaccctgggctcgaagtgtgcgactcactgctgct

SEQ ID NO: 267579 - DNA, 394 bp, Homo sapiens
  chr15:43020214-43020608
  hypo
tctgcactgctcagaacctgcgaaacagaactacagagtcaggggctaggggagggctgggtgcaacaaaggatgccagagtcgagcactgaccccgcccccacacaccctcccgcagcctcagactactccgtgcacctccccacaactgcctggcctgctagctgcaggcctccctcacacgtacggctgccggggtctcctctggaagcagcgcccgcacagccccagggctcttcctttgacagaacctaaaaggggacagatggggtcagtgatctctgggtatttcagcctggctgcagaagtaaatgccccgagtgcaccaagcccctgacctgggaggctgtaccttggaaggaggcaccgtttgccctcccgccccaccccaggt

SEQ ID NO: 267580 - DNA, 33 bp, Homo sapiens
  chr15:43124802-43124835
  hypo
ttcagttacccacagtcaaccgtggtccgaata

SEQ ID NO: 267581 - DNA, 92 bp, Homo sapiens
  chr15:43124895-43124987
  hypo
agtagtgtgatgaaatctcataccatcctgctccgtcaggcccaggacgtgaatcacccctttagtccagcgtatccacatgttgttacctg

SEQ ID NO: 267582 - DNA, 192 bp, Homo sapiens
  chr15:43300433-43300625
  hypo
agtttgcagggcagaagccccgtgctcccgggcacagctgcaactgcccagctcagaagtgcgtgttctgagcctctccgcactcccaatgcccgctccgattttggagcaaagctgtggccaagcccaggcgctgccgcggccccggccaggtgtgtgcacactaggggcggtgctgacatgtcagccccc

SEQ ID NO: 267583 - DNA, 41 bp, Homo sapiens; identical to SEQ ID NO: 216216
  chr15:43406098-43406139
  hypo

SEQ ID NO: 267584 - DNA, 104 bp, Homo sapiens
  chr15:43467795-43467899
  hypo
gtattttaaaagcacgttaatttggaaagtttagggaagcctttcagttggagtaagaggttagctgtgcgttaagaactgtagaaatagggaaagcgctggca

SEQ ID NO: 267585 - DNA, 206 bp, Homo sapiens
  chr15:43527646-43527852
  hypo
caaactgtgcacatgcgtaccttctttaggagagagtgtgatgaacgctgtgtcctgccagaatggggacagggggctgccatcgtgcagcagagactgggcactcaggttcactttgaggtccttgaactgggaggacatgttgagggccagcaggacaaagcatatatcctggcccatgttgggcgggtcgagcagcttgaatt

SEQ ID NO: 267586 - DNA, 50 bp, Homo sapiens
  chr15:43574742-43574792
  hypo
cagaacctgccacccgttgtatcctggtgggagatctttccggatcatcc

SEQ ID NO: 267587 - DNA, 128 bp, Homo sapiens
  chr15:43574822-43574950
  hypo
aggagggagtaaggagacaaggattcatgttagctgaggttttgccaggtaccaggcactatacggagtgatttatatcattgtttctttttcttactttttattaggaagtaatttcatactaaaag

SEQ ID NO: 267588 - DNA, 96 bp, Homo sapiens
  chr15:43610151-43610247
  hypo
aggggcagagtcaacgctgccggtacggccagtctgaccagcagcacattctcagaggtacttccttcaagtgccatcttgactcttccagttagg

SEQ ID NO: 267589 - DNA, 151 bp, Homo sapiens
  chr15:43661821-43661972
  hypo
tctaaatcttccacgagagtcactgcctcctctccattttctggacattgttcctgtacccaattctggatctccccaggtaagacggtcaggaactgctctagcaccaacagttctacaatctgctccttggtgcgcacctccggcctta

SEQ ID NO: 267590 - DNA, 195 bp, Homo sapiens
  chr15:43820127-43820322
  hypo
cacctggggcctgcccgacccagtctggacttccctgcttcagcctttggcttctcctcattgcagccagctcccccacagctgccctctccagctgaaccccgctcggcaccctgtggctcccttgccttctctggggatcgagctctggctctggctccaggaccccccaccagaacccggcatgatgaatac

SEQ ID NO: 267591 - DNA, 67 bp, Homo sapiens
  chr15:43941020-43941087
  hypo
gcccaggaccatgcggagcaacgctcgcccagccactcgccgcctaggccccgccccgccccgctct

SEQ ID NO: 267592 - DNA, 111 bp, Homo sapiens; identical to SEQ ID NO: 216217
  chr15:44037226-44037337
  hypo

SEQ ID NO: 267593 - DNA, 93 bp, Homo sapiens
  chr15:44037568-44037661
  hypo
aagacattgagcagtcgaccaagtggccaggcatcttcactttgtgacggcactaccaattaaaagctcattaaaaaaaaaaaaaaaaaaaaa

SEQ ID NO: 267594 - DNA, 32 bp, Homo sapiens; identical to SEQ ID NO: 216218
  chr15:44037901-44037933
  hypo

SEQ ID NO: 267595 - DNA, 285 bp, Homo sapiens
  chr15:44091896-44092181
  hypo
gagatatctgacctttctctcgacctaaacacctggggctggaaacatggcgggagagatttacagattatacctggggcaacgaaccagaacgacattagaggagaaaagaggcctgtcgtttttattggcttctgcacgtcttcctccccagcttcggccactctccccttcgcaccctctcacctgacagaagggacttttcactaggacactgctgcctccgctgtgctgctgtgccaggcccagggaggtgccggggctggggccggccttggcacccac

SEQ ID NO: 267596 - DNA, 250 bp, Homo sapiens
  chr15:44105318-44105568
  hypo
ctcttttttggtttcctcttcgacaatctggatagggagaacaattcagcttggacttccttactctcctcagacaaacctgattacactatttcttgtactcattccttgcaaccactccccagtaccttgagtgtgtacttgcgcctttcctcagccatgcgttttgcttcctgctccagctccttctgtttcaatgcttcggcttcacgttcttgaactgtcactcggtccttcctgcatcacagag

SEQ ID NO: 267597 - DNA, 42 bp, Homo sapiens
  chr15:44117884-44117926
  hypo
agtgctgggattacagaggtgagccaccgcacccggcctatt

SEQ ID NO: 267598 - DNA, 41 bp, Homo sapiens
  chr15:44435788-44435829
  hypo
ctataatagaggtatcagaacgcattactagatggtagaaa

SEQ ID NO: 267599 - DNA, 33 bp, Homo sapiens
  chr15:44523585-44523618
  hypo
aagaaatcaaagattgggcccggcacagtggct

SEQ ID NO: 267600 - DNA, 37 bp, Homo sapiens
  chr15:44823850-44823887
  hypo
aaaagaagctataaaggggccgggcgcatggctcaca

SEQ ID NO: 267601 - DNA, 36 bp, Homo sapiens
  chr15:45274984-45275020
  hypo
tacaggcgcgagccaacgcgccgggccggttgtgtc

SEQ ID NO: 267602 - DNA, 37 bp, Homo sapiens
  chr15:45391480-45391517
  hypo
tacaggcgtgagccaccgcgcccggcctgcctatttc

SEQ ID NO: 267603 - DNA, 203 bp, Homo sapiens
  chr15:45397863-45398066
  hypo
agatctccaggatgcgttcccgctgctgctttgtcacagccttcctaaatagctccttctcgctcatctcagccacatggaggcccagagcccagcgcacgcagaagtcccatagctgctgcacaaaggcgccccgttcctcttcagaactaaacagcagcacctgggtgggaggaaggcggcactgacgcagggagctcgct

SEQ ID NO: 267604 - DNA, 144 bp, Homo sapiens
  chr15:45436256-45436400
  hypo
gagccctgccggcccgtgcttgtgtacctgcagcccgggcagatccgtgtggtagatggcaggctcaccgtgctccgcaccatccagctgcagcctccacagaaggtcaacttcgtcctgtccagcaaccgtggacgccgcact

SEQ ID NO: 267605 - DNA, 196 bp, Homo sapiens; identical to SEQ ID NO: 216220
  chr15:45439952-45440148
  hypo

SEQ ID NO: 267606 - DNA, 130 bp, Homo sapiens
  chr15:45440519-45440649
  hypo
aggtggtggagtccatgttccgggagtcgggattccaggacaaggaggaactgacatgggaagattttcacttcatgctgcgggaccacaatagcgagctccgcttcacgcagctctgtgtcaaaggtgg

SEQ ID NO: 267607 - DNA, 627 bp, Homo sapiens
  chr15:45444092-45444719
  hypo
gctgttcactgaggcgcaccgagagaagttccaacgcagctgtctccaccagacggtgcaacagttcaagcgcttcattgagaactaccggcgccacatcggctgcgtggccgtgttctacgccatcgctggggggcttttcctggagagggcctactgtgagtgactttacttaccacgagccctgtccctaggcttgcaatgagtgatcgccctgggggtggggcctgcgataagtgccagccctgggtagggtaagtggagcctgtctgagtgaagactgtgcgggggaggcctgttgtgagtggcagccggccagggcctaccgcccctaaccagctctctgtcctctgcactgaccctcgcttgcctgcctgggccccctccacagactacgcctttgccgcacatcacacgggcatcacagacaccacccgcgtgggaatcatcctgtcgcggggcacagcagccagcatctctttcatgttctcctacatcttgctcaccatgtgccgcaacctcatcaccttcctgcgagaaaccttcctcaaccgctacgtgcccttcgacgccgccgtggacttccatcgcctcattgcctccaccgccatcgtcctcacaggcagg

SEQ ID NO: 267608 - DNA, 31 bp, Homo sapiens
  chr15:45450627-45450658
  hypo
cgagtgcagtggctcgcacctgtaatcccag

SEQ ID NO: 267609 - DNA, 40 bp, Homo sapiens
  chr15:45465162-45465202
  hypo
ccccaggcacacatgcgcacgtgcacgtacggacagacac

SEQ ID NO: 267610 - DNA, 302 bp, Homo sapiens
  chr15:45471640-45471942
  hypo
ctttggcccttcacttcctacgctgcccctttctcccacacaagtgggctcacggccactcctctatgcctgctgccattcatcgcacagtgaactgcaaaccacacactccgaagaggcactcaaggtgctcagggcggggcgcagctgaggacaatagaacctttctccaagctgggcttgggcttctcctgatggggcgctggctgaggcagagactgagcccggttcacccagggctgccagcaccccaggagcactgcaccactgggttgacaggcgatgacaggaggtggctccag

SEQ ID NO: 267611 - DNA, 56 bp, Homo sapiens
  chr15:45742670-45742726
  hypo
tgggtacttaatccctcactcgagacctcagtgtcgtcttctgtaaactgaatgga

SEQ ID NO: 267612 - DNA, 61 bp, Homo sapiens
  chr15:45742970-45743031
  hypo
gctgacccagcagagaggagcggagcagcctcagcgaggcggccctgggaaaagtgctagg

SEQ ID NO: 267613 - DNA, 120 bp, Homo sapiens
  chr15:45809769-45809889
  hypo
cgaactcccgatccattcttcacataacagcagagtaatctttcaaaaaggtaaatcccatcttgttactctcctgcttaaaaccttatctggttggccaggcgcggtggctcacgcctg

SEQ ID NO: 267614 - DNA, 139 bp, Homo sapiens
  chr15:45960772-45960911
  hypo
ggctttggggctgaagctcccggatgccagggcagggcctcttgactgcacgttacttcccttggctcctcagccagagccaagcactctcaggtcttggagtcctctctctccaactgcgattcgctcgggttgcttg

SEQ ID NO: 267615 - DNA, 35 bp, Homo sapiens
  chr15:48003206-48003241
  hypo
gtaaaaatgtataggcgtggccgggcgcggtggct

SEQ ID NO: 267616 - DNA, 174 bp, Homo sapiens
  chr15:48666258-48666432
  hypo
gctatctggacttgcgccatgcttgcttttcccccactacctccctcctcctccccatttctccccagacagattgtgaagtctctttgcttggtccactccctgcctgtctccaatcctctgattgcttcaccttcccccggctgccattatctgtcgcgacccaccctttcg

SEQ ID NO: 267617 - DNA, 194 bp, Homo sapiens
  chr15:48707764-48707958
  hypo
gccacacaggtaaccgccctcggtattggaacagccatagctgcagggggcctgcgcagagccacattcattgatgtcttggcatcctccactgaactgttcatactggaagccggcgggacacatgcacttgtagctccccagggtgttgtgacaggaggctcctccgcagatgtgagcgctgaggcattcgt

SEQ ID NO: 267618 - DNA, 275 bp, Homo sapiens; identical to SEQ ID NO: 216227
  chr15:49268642-49268917
  hypo

SEQ ID NO: 267619 - DNA, 137 bp, Homo sapiens
  chr15:49411763-49411900
  hypo
ctagaggtctgctgcgtaacattgtgcctgtacttaacaatactctattgtacacttaaaaatctcatgtttagtgttcttactaccaccacaaccacccaaaaaaaggactttaaaaaaaaacctttaggtcgggc

SEQ ID NO: 267620 - DNA, 139 bp, Homo sapiens; identical to SEQ ID NO: 216228
  chr15:49658851-49658990
  hypo

SEQ ID NO: 267621 - DNA, 318 bp, Homo sapiens; identical to SEQ ID NO: 216229
  chr15:49698668-49698986
  hypo

SEQ ID NO: 267622 - DNA, 217 bp, Homo sapiens; identical to SEQ ID NO: 216230
  chr15:49997486-49997703
  hypo

SEQ ID NO: 267623 - DNA, 93 bp, Homo sapiens
  chr15:50158729-50158822
  hypo
gcatcattttacctcgtgatgtttcgcgagaactgccctgtggcaggaagtttgcacctgcctagttgccaagccaaccgcgggcatccccac

SEQ ID NO: 267624 - DNA, 37 bp, Homo sapiens; identical to SEQ ID NO: 216231
  chr15:51016480-51016517
  hypo

SEQ ID NO: 267625 - DNA, 31 bp, Homo sapiens
  chr15:51059307-51059338
  hypo
catgagccaccgcacccggcctgtccagtca

SEQ ID NO: 267626 - DNA, 58 bp, Homo sapiens; identical to SEQ ID NO: 216232
  chr15:51176888-51176946
  hypo

SEQ ID NO: 267627 - DNA, 120 bp, Homo sapiens
  chr15:51182345-51182465
  hypo
tagattgggtgaaagagcaagactccgtctcagaaaaaaaagtggaatagttttcaacctaattgtacacattagggaactagaaaaagaagagcagtccaggcgcggtggctcacgcct

SEQ ID NO: 267628 - DNA, 84 bp, Homo sapiens
  chr15:51202497-51202581
  hypo
ttgcacggattgtgtagtataccgattcacagctacaaggagtttatatcttaaaaagagcacgtgttaatgtcattatttgtt

SEQ ID NO: 267629 - DNA, 185 bp, Homo sapiens; identical to SEQ ID NO: 216233
  chr15:51476314-51476499
  hypo

SEQ ID NO: 267630 - DNA, 197 bp, Homo sapiens
  chr15:51659607-51659804
  hypo
tgccgtagcccttgcgtgcaagagggctggccagggcttgtgggtggacttcaaaccaacacttggtaattatttgtttaagattttattagagaatcagggcaatgatggaggcggagcgggaaggagcactgctagaggttccacccagtctccaccaattcagtgcagctttgcagactcgattcagcaaaaca

SEQ ID NO: 267631 - DNA, 89 bp, Homo sapiens
  chr15:52000705-52000794
  hypo
attgggcctttaaaagttttcgctaagtgattttaatgtgcatcaaagtttgaaaacaactgccttgccgggcgcggaggctcacgcct

SEQ ID NO: 267632 - DNA, 41 bp, Homo sapiens
  chr15:52089410-52089451
  hypo
tgaaggtctggaggcgcctctgtttccgcactgcttctgtc

SEQ ID NO: 267633 - DNA, 89 bp, Homo sapiens
  chr15:52276808-52276897
  hypo
tatttaaatatgcagtaaatgtctaggaggatgtgtacagtgatgcgctagtaaaagcttaacaaccagttctccgggggggaagaaaa

SEQ ID NO: 267634 - DNA, 95 bp, Homo sapiens
  chr15:52310149-52310244
  hypo
tggtactcagctgacgttgttttaaatattaaaaaatataaagcattcaagctcaccccaaccacttaacttcattactctgtgatttttttttt

SEQ ID NO: 267635 - DNA, 72 bp, Homo sapiens
  chr15:52387470-52387542
  hypo
cactgcctgactgccgccatcatgggtcgcatgcatgctcctgggaagggcccgtcccggttggctttgccc

SEQ ID NO: 267636 - DNA, 36 bp, Homo sapiens
  chr15:52579878-52579914
  hypo
aaaaggaagttctggccaggcgcggtggctcacgtg

SEQ ID NO: 267637 - DNA, 35 bp, Homo sapiens
  chr15:52580154-52580189
  hypo
atgcgtgaaactccgtctcaaaaaaaaaaaaaaat

SEQ ID NO: 267638 - DNA, 223 bp, Homo sapiens
  chr15:52611441-52611664
  hypo
ggtgccctcatcggcgatactggaggttcgctttctcaaccctgtgggcttcaccccagacacgccctgaatcgtttcatgttccagcatgcctgagactgcaggagtatttcaattgttagaggagatgatgtggaagggaacctttcatgtgcacatatccatgtgcacaaacacatgcacattcaacttaggaaaattagctgggcacggtggctcacat

SEQ ID NO: 267639 - DNA, 32 bp, Homo sapiens
  chr15:52967806-52967838
  hypo
tagaaaacttagtgttaggccgggcgcggtgg

SEQ ID NO: 267640 - DNA, 31 bp, Homo sapiens; identical to SEQ ID NO: 216237
  chr15:52968138-52968169
  hypo

SEQ ID NO: 267641 - DNA, 96 bp, Homo sapiens
  chr15:54191740-54191836
  hypo
tcactgttcaccaaaatgagcgcttagctgaaaaaccagtctctctactttttttttagacggagtttcactcttgttgcccaggatctcggctca

SEQ ID NO: 267642 - DNA, 44 bp, Homo sapiens
  chr15:55074345-55074389
  hypo
agacggagatgggagacggagacgggagatggagacaagggaga

SEQ ID NO: 267643 - DNA, 33 bp, Homo sapiens
  chr15:55313741-55313774
  hypo
ctcaaaaaaaaaggtttggccgggcgcggtggc

SEQ ID NO: 267644 - DNA, 90 bp, Homo sapiens
  chr15:55699075-55699165
  hypo
agcttttttgactgaaattccgccctcagcgtaaaaggttaaaaattatgaattaacgcccgcgcggtgggtcacgcctgtaatcccagc

SEQ ID NO: 267645 - DNA, 34 bp, Homo sapiens
  chr15:55777915-55777949
  hypo
agcgcagtggctcacgcctgtaatcccagcactt

SEQ ID NO: 267646 - DNA, 161 bp, Homo sapiens
  chr15:55806739-55806900
  hypo
aattccacctgaagatcctcaaaaggagctactccgtaagcttataggccgggcagaacagtggggccttgccttgcgttctgctgtctgcaagtaacgcaccgttgtgctactgctttggcaagggctggcaagtgtagaagtaccggcctaacaacttt

SEQ ID NO: 267647 - DNA, 37 bp, Homo sapiens; identical to SEQ ID NO: 216240
  chr15:55881585-55881622
  hypo

SEQ ID NO: 267648 - DNA, 35 bp, Homo sapiens
  chr15:55893171-55893206
  hypo
attacaggcgtgagctaccgcgcccggcctccacg

SEQ ID NO: 267649 - DNA, 114 bp, Homo sapiens
  chr15:55965687-55965801
  hypo
aaaaggtactcatgcgtggtccccgggagctccagaacttggattgaattctcagtacttaggcggaaagacaagcgatacagcaccacttggccccgccgatatttggctggg

SEQ ID NO: 267650 - DNA, 42 bp, Homo sapiens
  chr15:56105143-56105185
  hypo
gggattacaggcatgagccaccatgcccggcctctcaaacac

SEQ ID NO: 267651 - DNA, 184 bp, Homo sapiens
  chr15:56140361-56140545
  hypo
ccctcactgctattgcgtagggtaaggataatgacgttatagaatcttttcaaataactgagacttggagtatgggaaatgggggagaggagagaacggccaatgtgctttcctctcaatgcctgtagggttatgcccgtgactatctgctcttgaagagacaggtgagcggacagtcccatca

SEQ ID NO: 267652 - DNA, 87 bp, Homo sapiens; identical to SEQ ID NO: 216241
  chr15:56170930-56171017
  hypo

SEQ ID NO: 267653 - DNA, 103 bp, Homo sapiens
  chr15:56363529-56363632
  hypo
ttatcgtccttgcccgcgccctcctggagcgagcagttctccaagcacccagcatccagccagacacgctgcacaccgacggaggggacgtgggcagagcagt

SEQ ID NO: 267654 - DNA, 35 bp, Homo sapiens
  chr15:57204848-57204883
  hypo
ccattacaagcacatgagtccggcactccttcctt

SEQ ID NO: 267655 - DNA, 36 bp, Homo sapiens
  chr15:57209353-57209389
  hypo
ccggttgtaccgtccgccctccgtatctggggtttc

SEQ ID NO: 267656 - DNA, 74 bp, Homo sapiens
  chr15:57565298-57565372
  hypo
acaatgccagagaacgcttacgcgtgcgggatattaatgaagcattcaaagagcttggccgaatgtgtcagctt

SEQ ID NO: 267657 - DNA, 294 bp, Homo sapiens
  chr15:57611511-57611805
  hypo
acgcggtcagcacgcggagcacaggtggggagaagcggctgacggtggcgtggccccgcgtacctgggtgtggacgccccgccgccccgcaggggaaagctcctggagtctggggtctgctgccccgagctctgggtgtccaggtaggaaacaggtagagagtatccgggtttcctacccctccgccggggtggctgtgcctccccatcctcctgctcccctccttccctccctccgcaggggagggcaaacccaacccccaggtgagggtctgttctgcgggagtgggaaaca

SEQ ID NO: 267658 - DNA, 145 bp, Homo sapiens
  chr15:57614726-57614871
  hypo
ccttcacctgaatgcgattgcaattcgctagcccttcaattcaacaaatattctggaatgattagcgtgtgctgtgacaatgacaaattccgatacgggaagacatgaattaaatgatcacgttcacccacgcgtgattagaaac

SEQ ID NO: 267659 - DNA, 255 bp, Homo sapiens
  chr15:57618465-57618720
  hypo
tacctgttctttgcgtgctgccactctataaactctcacgagggtcgccggtcggtccactaggaggtcgaaggccttcatcaggtagacgacggggttgggcagccaagtctgcgatgacagtgctggcatgtggcgcgggggcgcagggtacacatccttgtctcagctgtcccacatggcagcagtgagcgcggacttcgctcctggatgcgctgccctggcctccacctcggtcccggtccctactgattc

SEQ ID NO: 267660 - DNA, 257 bp, Homo sapiens
  chr15:57620372-57620629
  hypo
tcaacaaataaggtcgctgggaagaagtgctggcattaaatttaccgttaacgccagggtcaatttactaaacagtcatcgacgtgtggttccacaagacctctgggtaaattccagaaactgactgggaggaagatagcttgcgcatgaagtcactgaatcctggtcagtgtgactcttgatgatcatctctcagtacaccagaaagcatttccaaagacaggacgccacttggcgtggaaagcctttggaagcta

SEQ ID NO: 267661 - DNA, 184 bp, Homo sapiens
  chr15:57731150-57731334
  hypo
atgtgccatccatgccgacaacgtcaatcgtcatgaaaacagaaggtatattcccttcctgccaggaactggacgggatattgatacaggatcaattcctggtgtggatcagttaattgaaaaatttgatcaaaaacctgggcttcagagaagaggaaggtctgggaagcgaaacagaattaat

SEQ ID NO: 267662 - DNA, 129 bp, Homo sapiens; identical to SEQ ID NO: 216246
  chr15:57792923-57793052
  hypo

SEQ ID NO: 267663 - DNA, 156 bp, Homo sapiens
  chr15:57923147-57923303
  hypo
gggaagaggggctgccggtccaccgcccggtctctgtattgccgccctggggatctgctgccagttcacttggcctgccacagccatgggacagatcatctcctctgtatgttcacttctaatagggcagctcttcttttccgtgtaagagttact

SEQ ID NO: 267664 - DNA, 392 bp, Homo sapiens
  chr15:57993255-57993647
  hypo
tttaaagtatacagcgcaataagttttttttaattttctctttttatctctagaagtaagttttgacttatcaaatgattacacccatataaccatcaccgcaattaaggtattgagcatccccgtcactcccaaatgtttcctcctgcccctttgtcatccttcctcccagcctctccctgacaccccacaacatccgataatcactgatctgctttctatcactatagatgcgttcgtattttttacaattttatataaatggagtcatacggtgtgtaattttttcctggcctctttctcagtatactcgagattcatcagagttgttgcatgtaccagagtattcgatcatatgcacagactacaacgtgtttatccacttacctact

SEQ ID NO: 267665 - DNA, 226 bp, Homo sapiens
  chr15:58001325-58001551
  hypo
tgtttcaagtcaagcggaagatacttccagcagctttgacaacctgtttattgacaggttacagaggatcaccattgcggaccaaggtgaacaacagtcagaagaaaacgcaagtactaagaacttgacaggcctttccagtgggactgagaagaaacctcattacatggaagtgctagaaatgcgagccaaaaacccagtgccccagctgcgtaaatttaaaacc

SEQ ID NO: 267666 - DNA, 110 bp, Homo sapiens
  chr15:58028018-58028128
  hypo
accgtgatgaattgcgtatattacctcccgagagcctaaacgctcacatgttaaaagttagcatctgcggcaggtagtccttaatatttatgatccgctctggcattgag

SEQ ID NO: 267667 - DNA, 166 bp, Homo sapiens
  chr15:58761931-58762097
  hypo
accctaccctctactaaaaacgtggcccagtggattccagttactaacaaagctcgttgagaagatgcaagaaaggaatggaacaatggctaggacctccccgcggcagcacttcccccaagagaatagaggagctgatgggcacgtcacatttttctcaatgctg

SEQ ID NO: 267668 - DNA, 154 bp, Homo sapiens; identical to SEQ ID NO: 216248
  chr15:58839522-58839676
  hypo

SEQ ID NO: 267669 - DNA, 31 bp, Homo sapiens; identical to SEQ ID NO: 216249
  chr15:58896583-58896614
  hypo

SEQ ID NO: 267670 - DNA, 91 bp, Homo sapiens
  chr15:59158446-59158537
  hypo
gtgtgagccaccgcgcccggccccaggtttggattctttcacacagcaggtatgggccgactcactgtctggggcccgcccagcccagccc

SEQ ID NO: 267671 - DNA, 37 bp, Homo sapiens; identical to SEQ ID NO: 216250
  chr15:59158760-59158797
  hypo

SEQ ID NO: 267672 - DNA, 213 bp, Homo sapiens
  chr15:59243451-59243664
  hypo
tatgattgaactagtctggacggaagggcttgtctaggctaggttcaaagattggtgagaatgatcacgtaagtgattccttattcacgaccgaacctgtacgaaagcagtgaacaaaatatttacacgaccaaagatatgaataaatgtggttccccaaagcctacctttattcttcatggtggtacacccaaaggccgacagtctgagatg

SEQ ID NO: 267673 - DNA, 40 bp, Homo sapiens
  chr15:59291804-59291844
  hypo
gattacaggtgtcagccactgtgcccggcctattactgca

SEQ ID NO: 267674 - DNA, 61 bp, Homo sapiens
  chr15:59450930-59450991
  hypo
gagcaggttcactaatgctgcggatcaacggggttggcatgaagcccgttctggcactgac

SEQ ID NO: 267675 - DNA, 84 bp, Homo sapiens; identical to SEQ ID NO: 216251
  chr15:59454860-59454944
  hypo

SEQ ID NO: 267676 - DNA, 116 bp, Homo sapiens
  chr15:59474906-59475022
  hypo
cagagtgcggcacagcgtaaagtacagcatggaatcatgaagctggcatggcactcgagacagatccggataatcaacagagtcagttcacacctcatgcacgtatcacagggtcc

SEQ ID NO: 267677 - DNA, 74 bp, Homo sapiens
  chr15:59499025-59499099
  hypo
cacgcgcacctgccgtagagtgctgaaggtcctgccaacggctctcttggcgtctcaacgttcggatcagcagc

SEQ ID NO: 267678 - DNA, 34 bp, Homo sapiens
  chr15:59525452-59525486
  hypo
attcatccatccatccgtccgtccatatgtattc

SEQ ID NO: 267679 - DNA, 102 bp, Homo sapiens
  chr15:59561665-59561767
  hypo
tgacggtgttaagtccggataaagtaagcatatttcagtattttgaccaaataaaataaaaacctgcaactgaacataactgtttttgtacaattcaattaa

SEQ ID NO: 267680 - DNA, 86 bp, Homo sapiens; identical to SEQ ID NO: 216252
  chr15:59580024-59580110
  hypo

SEQ ID NO: 267681 - DNA, 76 bp, Homo sapiens
  chr15:59639391-59639467
  hypo
gtaagatcaaagcagcactagattcccatagaagcacaaagcccattgtgaaccgaatatacgcaggatccaggct

SEQ ID NO: 267682 - DNA, 111 bp, Homo sapiens
  chr15:59648543-59648654
  hypo
caacgaaaatgaaaggcttgcgacattcaaatcacagggtgctttcacctattcattcactcctgttcattctatcagctgagtacccacgagcagcagttttttggagta

SEQ ID NO: 267683 - DNA, 164 bp, Homo sapiens; identical to SEQ ID NO: 216255
  chr15:59685907-59686071
  hypo

SEQ ID NO: 267684 - DNA, 86 bp, Homo sapiens
  chr15:59906439-59906525
  hypo
gtcactgagaatcccagtaccgcagaaaacagcctgtggagcagggcccacgtaggggtgcagatgaccctgttaccagaaagggg

SEQ ID NO: 267685 - DNA, 45 bp, Homo sapiens
  chr15:59989017-59989062
  hypo
ccagatgaacctgttccagacggcgaaactccatctccactaaaa

SEQ ID NO: 267686 - DNA, 154 bp, Homo sapiens
  chr15:60672390-60672544
  hypo
accatctatatgccaggcatcgtgctaaatgcttcatactttacaacaatcccgtgaggtgggaactttgattagcacccctttataggcaaggaaactcagtcttagcaaagttccgtgttttccccaagtcgggtggctaatgagtgagttg

SEQ ID NO: 267687 - DNA, 92 bp, Homo sapiens
  chr15:60680001-60680093
  hypo
cagtggaagctatgcgtatgtgggaacaggggaacatgggcattctttgtattttctattcaactttgccatgaacctaaaactttcctaaa

SEQ ID NO: 267688 - DNA, 35 bp, Homo sapiens
  chr15:60694278-60694313
  hypo
ctttaaaaagaagtttttgccgggcgtggtggctc

SEQ ID NO: 267689 - DNA, 196 bp, Homo sapiens
  chr15:60865562-60865758
  hypo
agaggcagagcggccgcacagaaacccaaatcataacacagaagagacctttgccgcatccaaaaagcttttttatctcttgaaataattaagggaaaggaagatactgagaatatctgattgtttctcgtgtttcttcatgtgccttaaaaatatctggcagcctccctccgtggcctcccggcaccttcagtag

SEQ ID NO: 267690 - DNA, 52 bp, Homo sapiens
  chr15:61012492-61012544
  hypo
caagatgtagtcctcgccctgacggcaagacggcatgcgagagtcctatttg

SEQ ID NO: 267691 - DNA, 226 bp, Homo sapiens
  chr15:61231724-61231950
  hypo
catttaccactatgcgacctggagcaataatatattatgcctttcgccagagggagccgtgccagcctcagcacagggcggccgtgtcggccatcagtcaccactccccttcacaaccttttgttccccgctcattatggtgaattataacagggggacagcacatttttcaggagagtttctcctgttaagtctgagagctaactcttcccgggttgttccaagt

SEQ ID NO: 267692 - DNA, 147 bp, Homo sapiens
  chr15:61931837-61931984
  hypo
gtcccagatgtaatcggatctgccggagactgacaggattcaagaggcagccactcctcatggcgctggctcacctgtgaggcacgaggcaagaataagacagaacattatttcttagcaagtctgggcagccgatcatttccgaaa

SEQ ID NO: 267693 - DNA, 95 bp, Homo sapiens; identical to SEQ ID NO: 216260
  chr15:61932014-61932109
  hypo

SEQ ID NO: 267694 - DNA, 93 bp, Homo sapiens
  chr15:61948808-61948901
  hypo
ctcctctgttcatccgcccactgccgtgccgaaggcatcagcgggtaacttcagactttatgctcaagagaagaaaagcgccaagttcaagcg

SEQ ID NO: 267695 - DNA, 200 bp, Homo sapiens
  chr15:62367508-62367708
  hypo
agaaactgtacgttcgaatttcgatgtaatgtaatcatcattatcttggtataagatattcagaaaatatgcgggtccattaaagaaacctggaacatcaagatttttaaatattcagcgatgattccacagctttagtgttcagtaagagttactgtgtttctttccaaaactcattaatttagccatttaaaaccaat

SEQ ID NO: 267696 - DNA, 72 bp, Homo sapiens
  chr15:62591901-62591973
  hypo
gcccccagggatcccgctctgtcctcgcacacgcgcacacacgaagagcaaatgaagcggatccaaggagtg

SEQ ID NO: 267697 - DNA, 235 bp, Homo sapiens
  chr15:62747448-62747683
  hypo
caggtgaggagagaggtgctcgatggaggggacgtgatggggaactcaggaaggggttcctggaggtgcacttcagccgcgccttcagcaatctgcagaatgtcaaaaagccagtgggagagggtgttcgggatgggagagactgaataaaccaagacaaaaagatggtacagcgcagtaggagtcagatagcacaggggttggttaaagactggggcaccgcaatgtatgggga

SEQ ID NO: 267698 - DNA, 217 bp, Homo sapiens
  chr15:62750295-62750512
  hypo
tttgtatgagtcaacggtagagcctttattgctggtggctctcagcgccacctctgcagtggtgtgggcatctcgttggtgggagtgagggcttatgtagcgatgaccagtggggacaaggcttactcttgtgcccaggccttttttccagtgtctctccatgctaagggtcaggcggggtcactcctccacccctgctgcccgccgcctctccctg

SEQ ID NO: 267699 - DNA, 45 bp, Homo sapiens
  chr15:62752750-62752795
  hypo
cgtgcccggcactagccacgtggtcttgtacgaagaggcaggtgt

SEQ ID NO: 267700 - DNA, 41 bp, Homo sapiens
  chr15:62753414-62753455
  hypo
ttacaggcgtgagccaccgcgtctggccagttttgcctgtt

SEQ ID NO: 267701 - DNA, 525 bp, Homo sapiens
  chr15:62753662-62754187
  hypo
tgtatagagcaatacgaataatgttatttatgtcttcaacacggatgggtttatacctagacgtagtatttagatgtgtttgctttgcttttcctagtgcattcatttattgagtaaatagttactgagcatcactgcgggccaggctctggctcaggccctaggggtgagagcagaaataagacaagcaaggtgtgttagagggagaggagcagttgttttggatggtctctaaagagtcgacatttcagcgagggcttgaaggatgagagcaaggccaacaggtaagaggcgcctactccatgcgaggggaagagcatgcacaggagcactcacagaaattgctggtggctcaagagtggcctggtgagcgcagagtgaccagctgttggctagaccctatccaagctgaggaagtcatggcctgggacatttaacttctcattgttggagtcaggaggaagggctgtatctgtctgtacttttaactaggctgggcgtggtggctcacgcctgtaatcccag

SEQ ID NO: 267702 - DNA, 99 bp, Homo sapiens; identical to SEQ ID NO: 216266
  chr15:62776552-62776651
  hypo

SEQ ID NO: 267703 - DNA, 38 bp, Homo sapiens; identical to SEQ ID NO: 216267
  chr15:62776891-62776929
  hypo

SEQ ID NO: 267704 - DNA, 152 bp, Homo sapiens
  chr15:62779386-62779538
  hypo
gtgaatctcttctcttctgtcgttgacttactgggttgattccgtgtggtcaacttgcgtgatgtgtacataccaggctagtcagacctgccctggctgctcattcaccgattatgagattccttgtagacgtgattctgagaactcaggag

SEQ ID NO: 267705 - DNA, 32 bp, Homo sapiens; identical to SEQ ID NO: 216268
  chr15:62791806-62791838
  hypo

SEQ ID NO: 267706 - DNA, 180 bp, Homo sapiens; identical to SEQ ID NO: 216269
  chr15:62792078-62792258
  hypo

SEQ ID NO: 267707 - DNA, 180 bp, Homo sapiens; identical to SEQ ID NO: 216270
  chr15:62799429-62799609
  hypo

SEQ ID NO: 267708 - DNA, 76 bp, Homo sapiens
  chr15:62810501-62810577
  hypo
ctgggattataggcgtgagccaccaccagcacatttctttatagttatttgtgtcggaggcaggaaggagccacac

SEQ ID NO: 267709 - DNA, 81 bp, Homo sapiens
  chr15:62821544-62821625
  hypo
ggccttgtgttggtattacacgtgtgagccactgcgcccagcctttttagggcttttatcgtctactgtaaagtaactatt

SEQ ID NO: 267710 - DNA, 73 bp, Homo sapiens; identical to SEQ ID NO: 216271
  chr15:62828095-62828168
  hypo

SEQ ID NO: 267711 - DNA, 87 bp, Homo sapiens
  chr15:62832519-62832606
  hypo
cggagtgagacgccatcttaaaataaataaataaacttttttttttttttttttacatgagtaagcgtcttggccttcaaagagtgc

SEQ ID NO: 267712 - DNA, 93 bp, Homo sapiens
  chr15:62863460-62863553
  hypo
gcccatcactcctgcgagtcagtccaacttacttcatgtcatctggggggacggtgccaaactgtaatgtcaaggtgacgtgctctttgggtg

SEQ ID NO: 267713 - DNA, 40 bp, Homo sapiens; identical to SEQ ID NO: 216272
  chr15:62880086-62880126
  hypo

SEQ ID NO: 267714 - DNA, 52 bp, Homo sapiens; identical to SEQ ID NO: 216273
  chr15:62898023-62898075
  hypo

SEQ ID NO: 267715 - DNA, 97 bp, Homo sapiens; identical to SEQ ID NO: 216274
  chr15:62959085-62959182
  hypo

SEQ ID NO: 267716 - DNA, 88 bp, Homo sapiens
  chr15:62966654-62966742
  hypo
tttctgagtactatcgtgcacaggcgtgtatttaccctattctatggaaaacgatattttttttttttttgagacagagccaagacgg

SEQ ID NO: 267717 - DNA, 35 bp, Homo sapiens
  chr15:62967409-62967444
  hypo
ttgcaggagcataagaactgcggagagatgagtga

SEQ ID NO: 267718 - DNA, 184 bp, Homo sapiens; identical to SEQ ID NO: 216275
  chr15:62968124-62968308
  hypo

SEQ ID NO: 267719 - DNA, 161 bp, Homo sapiens
  chr15:62978882-62979043
  hypo
ggatcaccaaagactcggtgatgcgcgtggatgagaagaccaaggaagtgctgcaggagtggcccctcaccaccgtcaagcgctgggcagcctcacccaagagcttcacactggtagggactggcagagggcaaggagagcactagcgtggccttgagtga

SEQ ID NO: 267720 - DNA, 346 bp, Homo sapiens
  chr15:62993097-62993443
  hypo
aagggagaatttgcacgccattgagtatctcttgctccttaagaggcctgttaaggatactgtttaggataacttaagggccctgtcggtgctggcctcataagaagaatgtagccaaaatgctggtgtgattttatggcggggcttctccggtctcctgggtaattctgtgctgtgattgtgttgtgccgttgtctggctttgcaggcatctagggtatgggttcagaacaaagtcgacgaatccaaacacgaaatccattctcaagttgatgctatcacggccggaacggcttcagttgttaacctcacagctggtaagtcccggagagatttgtgctgcattg

SEQ ID NO: 267721 - DNA, 263 bp, Homo sapiens; identical to SEQ ID NO: 216277
  chr15:63000749-63001012
  hypo

SEQ ID NO: 267722 - DNA, 184 bp, Homo sapiens
  chr15:63012433-63012617
  hypo
ccattgttcatggaccgggaaaagaaatgttaagtgcgtcttctccaaagatatgatcgttctttgtggcaattgtacagttagtattgtcagtctctgtggggtgaagggtagattcattttaaggaaaataaacgaaaatattaagttgtggaaaaattcccctttacgtgcttcttatatt

SEQ ID NO: 267723 - DNA, 141 bp, Homo sapiens
  chr15:63017545-63017686
  hypo
gaagtattttatttacgaagtgggtagcaatgaggctatcatgatgcacatagaaaagattatcagcagtcattttaaaaaaacatttacttaatgcaaagcactaggatggacaacggcaaagtgcgtccatacaggaaa

SEQ ID NO: 267724 - DNA, 161 bp, Homo sapiens
  chr15:63028501-63028662
  hypo
gagactctgtctcaaaaaaaaaaaaaaaacagtaaaagtagtctaaggtaatagacgttagaatggtgattacttctggtatgaagggagcattgactggcacaactgatggtggatatgtggctgtatccatatgtaccaattcacggagctgcacatgt

SEQ ID NO: 267725 - DNA, 244 bp, Homo sapiens
  chr15:63029115-63029359
  hypo
tggcccaggccgcccgtggagtggctgcatcgacaaccgaccccgcggccgcccatgccatgttagattctgctcgagacgtgatggagggctccgccatgctcattcaagaggccaagcaggccctgattgcacctggagatgcagagcgtcaacaaagactggctcaggtgaggctaggaatgagaaattgtggttgtcatggtcatcattaacgtggacatgtggtcgggctgtctcctgg

SEQ ID NO: 267726 - DNA, 318 bp, Homo sapiens
  chr15:63030466-63030784
  hypo
cagaaggatgtggacgtggccttgaagagcatcggggagtccagcaagaagctgcttgtggattcggtgagaggttcttagattgagaaaggacactgggggactaggctcgcgttaggtgtgagtgaagtcttcttctctccatgagatctctgagcagctaacccttcctttaggagtcctgtttttcccgccagtctttgttttccatgttttgctgtctgatcaacaaagttcccaggtggagcttttaaagtttactttttctttgagcccatgttgccatttcctctcggatcgtcccggtgagacaggcaa

SEQ ID NO: 267727 - DNA, 72 bp, Homo sapiens
  chr15:63036390-63036462
  hypo
ctttcattttcttccggctccctgcgagtccctacatacctctggtcccttgctcagcgatccatcatgccc

SEQ ID NO: 267728 - DNA, 93 bp, Homo sapiens; identical to SEQ ID NO: 216279
  chr15:63059823-63059916
  hypo

SEQ ID NO: 267729 - DNA, 127 bp, Homo sapiens; identical to SEQ ID NO: 216280
  chr15:63060546-63060673
  hypo

SEQ ID NO: 267730 - DNA, 82 bp, Homo sapiens; identical to SEQ ID NO: 216281
  chr15:63062564-63062646
  hypo

SEQ ID NO: 267731 - DNA, 101 bp, Homo sapiens
  chr15:63063189-63063290
  hypo
cccttgatcttagccgcagttggtgtggcctccaagattcttgatcatcagcagcagatgacggtgctggaccagaccaagactctcgcagagtctgcctt

SEQ ID NO: 267732 - DNA, 194 bp, Homo sapiens; identical to SEQ ID NO: 216282
  chr15:63066065-63066259
  hypo

SEQ ID NO: 267733 - DNA, 346 bp, Homo sapiens
  chr15:63068833-63069179
  hypo
agaaatagaatagatcgctgtgctccattgtgggggtatggttttatattctacttttgaaggttattcttagaagactgagcaccgctctcttctgcttaaggaaatgtttcacaattcccttctcaggcacaacacacccatgacgccatcacagaggccgcccagttgatgaaggaagccgtggatgacatcatggtgacgctgaacgaagctgccagtgaagtggggctggttgggggcatggtggacgccattgcagaagccatgagcaaggtgggcatgggctctagggctctctactcccttatctccctcacccatgggcctcgcgtgcttttctcta

SEQ ID NO: 267734 - DNA, 141 bp, Homo sapiens
  chr15:63072879-63073020
  hypo
gatagccatggactcgaccattcctcaggaagtgcttcctgatggagagtctgcctcctttcccacctcatcttctggcactttgcgcttccctagaagtgtcaggctggctcccgcctccatgtacgtgaattctgttcc

SEQ ID NO: 267735 - DNA, 403 bp, Homo sapiens
  chr15:63075603-63076006
  hypo
gaccccccagggctgcgctggcgaggggctggcacactcacctgccagagggtgggccctgggcactggctccaagctgcacagcccgaacgctgagcatgtgcccactgggcccggccagaatctgtggcctgagcggggccctgcgagggctctggccttttgtgtgcaatgcagcatgggcttggcttgaattgccctctccagcatctagccccaaatgcaaggcctggccttcaccccctcaggagcttaaaagtgaatgaaaccctttggcttccagtgatattaacacatggttctcatgcgtttctctctgtgtgtgtgtgtgtgtgtgtgtgtgtcttgcttgttttctttttccagatgactaagtcggttactaacccggaggagttgggag

SEQ ID NO: 267736 - DNA, 156 bp, Homo sapiens; identical to SEQ ID NO: 216285
  chr15:63084827-63084983
  hypo

SEQ ID NO: 267737 - DNA, 654 bp, Homo sapiens; identical to SEQ ID NO: 216286
  chr15:63086976-63087630
  hypo

SEQ ID NO: 267738 - DNA, 263 bp, Homo sapiens; identical to SEQ ID NO: 216287
  chr15:63088321-63088584
  hypo

SEQ ID NO: 267739 - DNA, 770 bp, Homo sapiens
  chr15:63089567-63090337
  hypo
agccagcctgggctccgacgaccccgagacccaggtaccagcagggcctggggagtgcgtcctcccggtcttcccgtgaacgctgcacatcgggcctcagaagaggcctaaggcagaacaggaacttttgaagtagacaatgtgtgtgtgagtgtgtctggtttgaggaaccggtaggaggcagtcatccaagcgagatagtggcacagactgtggtggtggccatggggatggagacaagcggagggatttgagaagagtctagaaggaaggcttggcctggcccggtgaaggctggagcacggcatacctgagggaggggaaggagtgaaaggcggctccttgtgggccagagcagggcacaggagctccctgaagggagagctggtgtgggcagggggaggtggaggagattgaagtgccggagccacacacaggtagaactagtgagtgcgcgtgagcctgcccaggcacggggctgtgggttcagcgactgttgccatagaggtagcgactgcaaccacacgagaggaaaagccagggagtcggggcagagcctggaggaatccagcatttaggaccactttaccgtgcaagtggcacaggagacggagaagcagcagctgctgcagggaggaaagccgcgggcatcatgttgccaggatggagtgtttcaacccaccagagacagagttaagaaagagggaagactgggaactggttattggcctgttccggtaaccatcgagtgccatcgaggacattggtgt

SEQ ID NO: 267740 - DNA, 150 bp, Homo sapiens
  chr15:63091223-63091373
  hypo
tacgttgtcacatctgagatcccagtttatcttcaaagcaatttaatgaggtagatggggctagcaagctaatttcactgtggatgaggacccagagccacgcacacaggcatggcgcagtgtggaggttaagaccgtggccctcatgct

SEQ ID NO: 267741 - DNA, 181 bp, Homo sapiens
  chr15:63092761-63092942
  hypo
ttgctcatagcatgcgatccagaagtaaaaggagtaggggctggacctgagtcactgcactatctgtattcattctcccttcctatgcaggtgatggtgaccaatgtcacctcgctcctcaagactgtaaaggcagtggaggatgaggccacccggggcaccagggcgcttgaggccacaa

SEQ ID NO: 267742 - DNA, 93 bp, Homo sapiens
  chr15:63100845-63100938
  hypo
ctctgagtagcatccgggcctgtgtcttcccgcagtggtgtctcatcaaacagacgtggggccttgtgcctcaccgttcgaggcacaggggta

SEQ ID NO: 267743 - DNA, 64 bp, Homo sapiens
  chr15:63111787-63111851
  hypo
cagagctcatccaggcggcggaagccatgaaaggtaggctggattctcacgtcttggtggaggg

SEQ ID NO: 267744 - DNA, 170 bp, Homo sapiens; identical to SEQ ID NO: 216290
  chr15:63115972-63116142
  hypo

SEQ ID NO: 267745 - DNA, 172 bp, Homo sapiens; identical to SEQ ID NO: 216291
  chr15:63129979-63130151
  hypo

SEQ ID NO: 267746 - DNA, 106 bp, Homo sapiens
  chr15:63130561-63130667
  hypo
aggctgcagtgaagccggcacagcacactccaggcacacagagggagagggtatgggtagagctaagggagacaagcgaaagtgatgtctgcgccaagtcctcaag

SEQ ID NO: 267747 - DNA, 1053 bp, Homo sapiens; identical to SEQ ID NO: 216293
  chr15:63132463-63133516
  hypo

SEQ ID NO: 267748 - DNA, 266 bp, Homo sapiens
  chr15:63167175-63167441
  hypo
acccaggcttacccccactgcgaaatgggcccgcatccttgacattatggtctgggagagggaggcagcctggaatggagacctgtccgccagcgcgagctttgccatctgctgatgttgagcgcttggccaggcacccctaaggggttgggctagcgagtgtcttagagcaaaacaccatggggactccccgccagccctgagctctcagtcctgtatccggactagaatctcagggttgtctcgtcagctgagggtgggagatg

SEQ ID NO: 267749 - DNA, 89 bp, Homo sapiens; identical to SEQ ID NO: 216294
  chr15:63245891-63245980
  hypo

SEQ ID NO: 267750 - DNA, 100 bp, Homo sapiens
  chr15:63267856-63267956
  hypo
acaggcctctccctggcagacggccccgcccttctccgcactccctaggcctttgttcctacctctgtacgactgcctcgtcttcctggagatggcattc

SEQ ID NO: 267751 - DNA, 92 bp, Homo sapiens
  chr15:63282596-63282688
  hypo
attctttcccagggggccttcctatttaatggagcacattctttaagcgtttgcacatgcacacacatacacacttacgcacaacatttact

SEQ ID NO: 267752 - DNA, 47 bp, Homo sapiens; identical to SEQ ID NO: 216295
  chr15:63321676-63321723
  hypo

SEQ ID NO: 267753 - DNA, 178 bp, Homo sapiens
  chr15:63382905-63383083
  hypo
gcgtcactcagcagcggtaggtctcctgactgcagctgggatgtgctgtcacccactccagcactaaaattcaacactgattgccaattcgcctttgaagggcgcattattttctttaatgattttactcttacacttgagaaaagggaggaggaaaaaattgcgttctccagacacc

SEQ ID NO: 267754 - DNA, 144 bp, Homo sapiens
  chr15:63585219-63585363
  hypo
tgctgactacctttcggcgcagttgaatgacttgcacttctccattctctatagaccttgtttcttctcatgggtaaaattgtccttattttcgtcagccactgctgcctttatttttagttatttattttattttattttact

SEQ ID NO: 267755 - DNA, 204 bp, Homo sapiens
  chr15:63592833-63593037
  hypo
ttcatctgccatagcgtcaaaactttggaaactgtttctcttctaatttagttaaaatatctaccaccgtttactgaaataattacacgtttacaccagatataacagctttctttcatcacaacagttacgtcttttagttttgcatgttttagaattcatatcaatgaaataatacgcattttttcacgatacggttttctt

SEQ ID NO: 267756 - DNA, 234 bp, Homo sapiens
  chr15:63597954-63598188
  hypo
ttctttacaaccagcgctccagataacctcagggaaccagcacttcccaaaccgcagactacatctttagaggaagcacaactgtgcctttttctgaaaatccctttttctggtggaattgagaaagaaataaaactatgcagatatgcgttccattcacttggctttcacacaactgctctccgaaaggggtgctcagtggtgtgcgtcctggctgcacgagaatcacctggg

SEQ ID NO: 267757 - DNA, 199 bp, Homo sapiens
  chr15:63614192-63614391
  hypo
aaccctcagtctctgaaagtcgggttcgtcgtccgggtctgcgcagggcatggatcttgagcgcttggaatgtgacttaactgagaaacgctactttattttaataagtttacatctaaaagccgatcattgattccattatttggaaaacaacttctaagtgtgtttggagcaactcggatattggaatcttttaaac

SEQ ID NO: 267758 - DNA, 136 bp, Homo sapiens
  chr15:63647633-63647769
  hypo
aaaatgcagagtctcgggccccaccccaggcctaccgaaccggacactctgggggtggcgcccagcatctgccgttggacaaggctgccaggcgatgctgctgcgggctgaggctgagaagcgctgcactagactg

SEQ ID NO: 267759 - DNA, 67 bp, Homo sapiens
  chr15:63660076-63660143
  hypo
tttttacatacttgtgagaacgacccaacatcaccaaaaagtatacgtgaactgtgaattaactgca

SEQ ID NO: 267760 - DNA, 43 bp, Homo sapiens
  chr15:63665232-63665275
  hypo
cttggcgaacaccacgtcatgatgaagaggcagttaagattct

SEQ ID NO: 267761 - DNA, 104 bp, Homo sapiens
  chr15:63695754-63695858
  hypo
accatattggacagcgcagacgcgatcattcccaccattgcagacaatcctgttggaaagcatgggcctgaggctttgtttacctcgctcggctcacctctttt

SEQ ID NO: 267762 - DNA, 371 bp, Homo sapiens
  chr15:63753342-63753713
  hypo
aaaagaatgttactgcggggcctccctaaaagacaagggaggaatcaagagaattccaagaaaggcgtccgagcaggaggtaagacagtagatttgaaagcaggactgagggagcaggaatgggaagaggggcccagccccagcgggtcaggggccggactaggctagcgaggcccaagtgcggtggccccatgcagagatcctggctcggtgcaaaggagatgccgctcccaccgtctgcaggaggcaagggctccccttccccggccaggagccgggtgcaagaggagcctggggagggagctccaggcctggagcaaaggctcctcctaggggcccgcggtcggcagagagcgcgggacactcacggc

SEQ ID NO: 267763 - DNA, 45 bp, Homo sapiens
  chr15:63772320-63772365
  hypo
aactggaggccgggcgaggtggctcacatctataatgccagcact

SEQ ID NO: 267764 - DNA, 45 bp, Homo sapiens; identical to SEQ ID NO: 216297
  chr15:63772605-63772650
  hypo

SEQ ID NO: 267765 - DNA, 244 bp, Homo sapiens; identical to SEQ ID NO: 216300
  chr15:63889822-63890066
  hypo

SEQ ID NO: 267766 - DNA, 58 bp, Homo sapiens; identical to SEQ ID NO: 216301
  chr15:63901443-63901501
  hypo

SEQ ID NO: 267767 - DNA, 79 bp, Homo sapiens
  chr15:64109577-64109656
  hypo
tatctgaaaggtaaacattacgtatgtcaaggatttgatttaaaacaatccagaggccgggtgtggtcgctcacacctg

SEQ ID NO: 267768 - DNA, 96 bp, Homo sapiens
  chr15:64234750-64234846
  hypo
aaaaaaacaacaacaaaaaaaacaaaaataaaaaaacaaacaaaaaaaagaaccccagggcagggccatgtttcccccgcccgagtctcatctgtc

SEQ ID NO: 267769 - DNA, 393 bp, Homo sapiens
  chr15:64439385-64439778
  hypo
cctccgctgccgcccgcccagcccgggcccagaaaagaatccagcctctgtgccccgtggcgcccacaagctcgtggcccaggggctgtttgttttcttaacgaggttgaccaaacctcctgagcagcctttgtggcgcagcagaagccttgccggtgaaagggggctttgtgtgactgcaatggaagccagggcctgagctaaggcagggtctgtgggccagcctacccgtgcgcaggaatggggcgagtcggggtacatcttcactccccagcccttcctgccctctgctccttggttctatttccaagtggcaaactgccggctctatgcctgcatagaggagcgagtggagccaggcccccggcggggctgctgcggtaatcaggagac

SEQ ID NO: 267770 - DNA, 98 bp, Homo sapiens
  chr15:64443216-64443314
  hypo
tacacttgcctgaaggagccacgttatccctattttgcagatgagcaaaggtctacggagctcctgaaatccaggcagtctgacgtccaaatcggagt

SEQ ID NO: 267771 - DNA, 80 bp, Homo sapiens
  chr15:64481962-64482042
  hypo
aaaaaggcatttctcgtaaaaatcagagctttgtacaccagctacaatttactttttttttttttttttttttgagacgg

SEQ ID NO: 267772 - DNA, 180 bp, Homo sapiens
  chr15:64649873-64650053
  hypo
aaaaaaccttcaaaataaactttcataccgacactatggataagaaaagagacctcatttattgtgtctgggtgatttggggtttgaaaatattgggaaaatgaatggttggggtaaaagttaacaaagtaatactcgaaaaaaacaactcgtatctggaggctgggtgcggtggctcac

SEQ ID NO: 267773 - DNA, 147 bp, Homo sapiens
  chr15:64670701-64670848
  hypo
tgaggcaaccgtcccgccttcgcctccaaaagaaggaatggcatataaaagatagtgatcttttggttcacagttttcccaaaggaaccttacaggaatgcttttactactagaaaacatacagcagcagctgggcgcagtggctca

SEQ ID NO: 267774 - DNA, 240 bp, Homo sapiens; identical to SEQ ID NO: 216303
  chr15:64674683-64674923
  hypo

SEQ ID NO: 267775 - DNA, 120 bp, Homo sapiens; identical to SEQ ID NO: 216304
  chr15:64682671-64682791
  hypo

SEQ ID NO: 267776 - DNA, 79 bp, Homo sapiens; identical to SEQ ID NO: 216305
  chr15:64683091-64683170
  hypo

SEQ ID NO: 267777 - DNA, 84 bp, Homo sapiens
  chr15:64715655-64715739
  hypo
gtctcaaaaaaaaaaaaaaaaaaaaaaaaaagcaaatgggtgtggttctaattgaagagtaaagataagcgtttttatttactt

SEQ ID NO: 267778 - DNA, 88 bp, Homo sapiens; identical to SEQ ID NO: 216306
  chr15:64865096-64865184
  hypo

SEQ ID NO: 267779 - DNA, 39 bp, Homo sapiens
  chr15:65041216-65041255
  hypo
agtgtgctcctagggcggggtgcacgttgctgggatttg

SEQ ID NO: 267780 - DNA, 240 bp, Homo sapiens
  chr15:65119040-65119280
  hypo
tggcctcccgaagtcctaggattacaggcatgagcccggaccttatttttcaaatgagaaaaaagcaaggcttccagagattttactgaaggtcacatagctgatatggagagcaaaaccaaacattgaacccagattacctgctcgcttaatcactccatggggcttagctactacaccacactgctcccagtctgttagcggtagagggtgatgactgaaagttgtccaggttcttgg

SEQ ID NO: 267781 - DNA, 102 bp, Homo sapiens; identical to SEQ ID NO: 216308
  chr15:65119640-65119742
  hypo

SEQ ID NO: 267782 - DNA, 42 bp, Homo sapiens
  chr15:65127719-65127761
  hypo
aggattacgggcgtgagccaccgcgcccggcctggatttatg

SEQ ID NO: 267783 - DNA, 40 bp, Homo sapiens
  chr15:65214140-65214180
  hypo
ctgtctgcctggttcggccacttacgaatcctccagatct

SEQ ID NO: 267784 - DNA, 110 bp, Homo sapiens
  chr15:65242069-65242179
  hypo
agctatcaggagcacggccaccgaatgctgctcatttggctgcatggcgtggccacggctggtgagaaccccagcaaagcgctgttcgagggcctcgtggccattggcag

SEQ ID NO: 267785 - DNA, 78 bp, Homo sapiens
  chr15:65349771-65349849
  hypo
gaaagggtggaggtaaaccacggggagtggtgaggcctggggtcggctggagagagcgtgccccacctcaaagcattc

SEQ ID NO: 267786 - DNA, 143 bp, Homo sapiens
  chr15:65380109-65380252
  hypo
aaatggacagtccacagcatcgggagctgcacacagtcccactgaggctgccccagaacgtgtatactcaagattccagcgctccagcccggtgttggactggccttgtgtgggcaccatgcgctcaccccctagacagagga

SEQ ID NO: 267787 - DNA, 195 bp, Homo sapiens
  chr15:65538640-65538835
  hypo
cactatctccggaccgcccccaactctccttgtacctgctggaactcagccattccagaggccttgagggcacaggggtcatggaggtctccttggtctctcaggtgctctatgattctcagccacctgagccaggagcagagcgatgcgctcccagcaatatcaatcatgggaggcagacgccctccgcctgtc

SEQ ID NO: 267788 - DNA, 372 bp, Homo sapiens
  chr15:65625116-65625488
  hypo
tagcggcagggccccgccccacgggaggggaggcagctctgcctgcgcagtgaggctgccggcgacagagtgaaaatgacaagcaggcccggagtgcacaggcaggcaggtgtgagcgtggagatgccacacgtgtgaatgaaaacagcacgtgggaagacacgtgtgagcgacacaggtggggacaccagctgagatgagaaagtggaaatgactccctgggtggaggggtattgacggacccggagggcacgcagaggccggggagcatgaccaagaccatccacccattcccaacgcaagcattcctcgggaagaacgcaccgcctttggcctggcctgggggccggtgaggggcgaggggcagggcga

SEQ ID NO: 267789 - DNA, 157 bp, Homo sapiens
  chr15:65862037-65862194
  hypo
cccgtctcgataaaaaagaaaagccatggaattattaacacatgatagtagttatttataggggtcccacgtttgtagtgctctatttcttaacttgggttatataaactcaaatgtttatttggcagtattctttagactgcgtttgaacatgtgt

SEQ ID NO: 267790 - DNA, 43 bp, Homo sapiens; identical to SEQ ID NO: 216310
  chr15:65901233-65901276
  hypo

SEQ ID NO: 267791 - DNA, 42 bp, Homo sapiens
  chr15:66596944-66596986
  hypo
aagatattttatggccgggcgtgacggcttatgcctataatc

SEQ ID NO: 267792 - DNA, 42 bp, Homo sapiens
  chr15:66618556-66618598
  hypo
atcctggccaaccactgggtcgccaaaaagatctgggagagc

SEQ ID NO: 267793 - DNA, 53 bp, Homo sapiens
  chr15:66886756-66886809
  hypo
tgctgctctgccattgtcaacgccccgcctccgtcttgaggtctgaggtggct

SEQ ID NO: 267794 - DNA, 81 bp, Homo sapiens; identical to SEQ ID NO: 216311
  chr15:66929157-66929238
  hypo

SEQ ID NO: 267795 - DNA, 440 bp, Homo sapiens
  chr15:66946022-66946462
  hypo
ggacccactgagcccgaggccctggcatctctctcggggggccctgccacagcctcccagttggtgtccctgcttctgtcctcaccctccagtccattcaccacacaatggccagaggactctgaaaaacacacccgggtcatggcactccccgcctccgaccctctctctacctcctcgccaccacccctgacgtggaccactgaggcccatgccttctggcttctgccctctcctttcacgtcttgggcccctgctctgaacaaggggcctgtttttcgctctcagatctgtgggggtctcctctggcttcagcacctccacccagaagaccctcacggcccacactctcacccttcacctgggtcaacccgccctcagatctgagcaatcagtgtctcccaagggaagcctccccgaacacccgctccctgcgccca

SEQ ID NO: 267796 - DNA, 43 bp, Homo sapiens
  chr15:66951024-66951067
  hypo
agctgccatttttgcaagtcacgacttctctctgggcctcagt

SEQ ID NO: 267797 - DNA, 171 bp, Homo sapiens
  chr15:66963541-66963712
  hypo
gcccttcctctgccccgcccctctcctctgctctgctcctcccacagcttcccgctacctgccccagccactcccgcctcctggcttggttttccaggatgtccactgtgcagctgctcctcctctgttctccagcctgaggtgcccgcctcccaccgcaccgcctgctgt

SEQ ID NO: 267798 - DNA, 163 bp, Homo sapiens
  chr15:66964079-66964242
  hypo
gctgggacacagagcgagtaggtgctgtccattcgcctttgctgtgtccctccattcctaccctgggagagccggggatccccatccactaaaggcatgtcatgcaggccccagggtcacacaagggagtgatggcacagcctgcctccgcggccccaggagg

SEQ ID NO: 267799 - DNA, 90 bp, Homo sapiens; identical to SEQ ID NO: 216314
  chr15:67011791-67011881
  hypo

SEQ ID NO: 267800 - DNA, 213 bp, Homo sapiens
  chr15:67049571-67049784
  hypo
ccaatacgcagggtacgggaggaggcgtggtgtgcagccccgacgtctccctctgaaggagtgaacctggtgtctagggggtgtcagacatagcaagaaatgccgctttcctttcagcttggggatcccctccagccaccctttccttaaggaggagtcccccacaatgacagaggttcatgtggactcaggagacagcggacacattattta

SEQ ID NO: 267801 - DNA, 668 bp, Homo sapiens
  chr15:67073254-67073922
  hypo
agcagtgcccacctccgctcctcggtgcctcccacctccccacccagaataacgcggcggtccctgtgcttgtcccgcagacgccagcatgtctccggacgccaccaagccgagccactggtgcagcgtggcgtactgggagcaccggacgcgcgtgggccgcctctatgcggtgtacgaccaggccgtcagcatcttctacgacctacctcagggcagcggcttctgcctgggccagctcaacctggagcagcgcagcgagtcggtgcggcgaacgcgcagcaagatcggcttcggcatcctgctcagcaaggagcccgacggcgtgtgggcctacaaccgcggcgagcaccccatcttcgtcaactccccgacgctggacgcgcccggcggccgcgccctggtcgtgcgcaaggtgccccccggctactccatcaaggtgttcgacttcgagcgctcgggcctgcagcacgcgcccgagcccgacgccgccgacggcccctacgaccccaacagcgtccgcatcagcttcgccaagggctgggggccctgctactcccggcagttcatcacctcctgcccctgctggctggagatcctcctcaacaaccccagatagtggcggccccggcgggaggggcgggtgggaggccgcggccaccgccacc

SEQ ID NO: 267802 - DNA, 93 bp, Homo sapiens
  chr15:67088298-67088391
  hypo
tacggatgtctgcccgccccacacgcattgttcgttggacgccttagaaggcggggcggggtggggcatgcatcattccgtggagtgctgaat

SEQ ID NO: 267803 - DNA, 167 bp, Homo sapiens
  chr15:67100821-67100988
  hypo
ggtgacctgggggatcgtgctgatctccattggacaaacattgcagggctgacaagccacgtgaatgttccatttagctgctgcacccccgcctacccggtgtaccttccttcagatgccatcacctcagcggttggcctgtgaggccggagcgctggcacacagtg

SEQ ID NO: 267804 - DNA, 142 bp, Homo sapiens; identical to SEQ ID NO: 216317
  chr15:67137812-67137954
  hypo

SEQ ID NO: 267805 - DNA, 44 bp, Homo sapiens
  chr15:67149350-67149394
  hypo
aagttacttctgaagcgaatcctagatgtcgtatcatttcattc

SEQ ID NO: 267806 - DNA, 86 bp, Homo sapiens
  chr15:67368276-67368362
  hypo
tgagataagatgtatcaagtactttgccagtatcgatcataatacatagtagatgcttagtaaacgctcatttttcctttccaagg

SEQ ID NO: 267807 - DNA, 212 bp, Homo sapiens
  chr15:67457570-67457782
  hypo
gctctgtctcccccggacagttctacctcctgtgttggtgccacgccacacagagatcccggccgagttccccccactggacgactacagccattccatccccgaaaacactaacttccccgcaggcatcgagccccagagcaatattccaggtaggcacgtgggcggcacaggctggcctgggaggcaggggcagcggtcagccccgacat

SEQ ID NO: 267808 - DNA, 96 bp, Homo sapiens
  chr15:67480893-67480989
  hypo
cggaccaaagtttgcggagaggcagggctgtgtgcccccgccttctgctccacactcccccctgccagccgccagctcctgcggcagatgcagagg

SEQ ID NO: 267809 - DNA, 77 bp, Homo sapiens
  chr15:67481788-67481865
  hypo
acactatcaccacgcgggatgtcctgccagcacacccagtcctctgtggcccaccgcgtcaccgctgcctggcagca

SEQ ID NO: 267810 - DNA, 122 bp, Homo sapiens
  chr15:67482198-67482320
  hypo
ttccaaaataaggccgtagatgagaattatatcagcacattgggaaccgaaggcatgcggacactgttggcgctttgtaaaaaacacccctcaatcagacagacacacgtcatcgtcgcctg

SEQ ID NO: 267811 - DNA, 90 bp, Homo sapiens
  chr15:67545400-67545490
  hypo
tgtttactatgtgccagactcggggataagcacaatcttgcgaaaattatccctattttatagatagaaggtgaaggggccgggcgcggt

SEQ ID NO: 267812 - DNA, 341 bp, Homo sapiens
  chr15:67757461-67757802
  hypo
caggtgtgggcaaccggccttaacctcgcatatagtgaccagctggccctgactcaactcaccttatacctgacaaacggccatctggattgcagtttgagcaccctggaagtgccccgctttgttccaaaggaaaggaagaaaaccaaatgcatgagtgcgctgtcaatgccggtaagcaagaggtgcttcctgaaggttctcggtgttcagcaacacccactgccactgcctgagctctgtctaggagccaggatctttgagtacaggaagaagaaagagcctaaggcaagtcattggacttgtctgagcagggtctggaaatgcgaatgtgttggtca

SEQ ID NO: 267813 - DNA, 105 bp, Homo sapiens
  chr15:68085074-68085179
  hypo
tcttttccgccccccgctttgaccataaatcttaaaagtaatcaaactctctgcaaagaagccaaggtaaacttgggcccaaagcggccccgtatgtctttaatg

SEQ ID NO: 267814 - DNA, 547 bp, Homo sapiens
  chr15:68098612-68099159
  hypo
acagtgccaggcctcggctgactggccgtgcgagtgatgccgggcagaggaagggccaggcagagtgtgcagcgaagacaggccctcgcccttaagcaccttccaggctagtgcgagcctcaggaagaggtggcagagtctgagatgtgccagccagcactccacacgcttggtgctgactaccagtatgtcactgctcgtccctgggcctcaattatctaggccgtgaaatggagctgatagcctccctcgttacctcacagggttactggggaaagagatcagatccaggctgagggcaggccctggaaagtacaatgagcgcgggagtccgaggactgcctgtcacagcctcctcctcttccccgcagggccacccgttcatcgtgcagttcaatgatggaaatgccgccgtggtgtccatgtgggtgtgccgggcgctggaggagaggcggagccagcaggggcccccgtgaggctgccgcagggcactgaaagcccaggaccagtaaccaaggagaacaacccacccgtcgcccttctccgt

SEQ ID NO: 267815 - DNA, 105 bp, Homo sapiens
  chr15:68394333-68394438
  hypo
aaaacactgagattatgggcgtgagccacagtgcctagccaagtcaaaaacctctctgcctgactttagatttggagatttttttttcctcgaaagtttttattt

SEQ ID NO: 267816 - DNA, 233 bp, Homo sapiens; identical to SEQ ID NO: 216319
  chr15:68502839-68503072
  hypo

SEQ ID NO: 267817 - DNA, 43 bp, Homo sapiens; identical to SEQ ID NO: 216320
  chr15:68506853-68506896
  hypo

SEQ ID NO: 267818 - DNA, 185 bp, Homo sapiens
  chr15:68614578-68614763
  hypo
gcaactggtaggagtcgccgaatgcctcaggcagggaatgtcctgacagacctgcatgctgaaggctgccctggctgctgtgggagaatggagtgagaagatggaggctcgaggcagggagaccattgaggaggctgccacaacattcgggcaagagatgacgctggtgtcggtgtggtagtggg

SEQ ID NO: 267819 - DNA, 84 bp, Homo sapiens; identical to SEQ ID NO: 216321
  chr15:68624699-68624783
  hypo

SEQ ID NO: 267820 - DNA, 128 bp, Homo sapiens
  chr15:68854101-68854229
  hypo
atgtgcctgtgtgagcggagcatgtttccgtgggtctgagagtatgaggccatggttatcctgctagtgtgcttggtgagcctgtgtgcgtagttgtgcatgggaatgtcaatgagtagtaaaggggt

SEQ ID NO: 267821 - DNA, 31 bp, Homo sapiens
  chr15:68854259-68854290
  hypo
tgagtgtgtacacatgcgtatgaatgtggat

SEQ ID NO: 267822 - DNA, 127 bp, Homo sapiens
  chr15:68888207-68888334
  hypo
tgagacggagcgggcgtctgggaggaggaggtgttggagtgtggctctgaacctaggtgagggaaggagcagcgtgagcagaggccagggcagcgacgccgtggggtgctcccgagccacgagggtg

SEQ ID NO: 267823 - DNA, 116 bp, Homo sapiens; identical to SEQ ID NO: 216322
  chr15:68893750-68893866
  hypo

SEQ ID NO: 267824 - DNA, 40 bp, Homo sapiens
  chr15:68899868-68899908
  hypo
tctttgggccaggcacggtggctcatgcctgtgatcccaa

SEQ ID NO: 267825 - DNA, 114 bp, Homo sapiens
  chr15:68908914-68909028
  hypo
caagtcttccaggccgcggtcgaatgattctgacaagcggtgagtacggctgtgtcagcgcgtgggccccagcgcaagcaggcaatcccatgtcatctgcgagatctcccatgg

SEQ ID NO: 267826 - DNA, 215 bp, Homo sapiens
  chr15:68937487-68937702
  hypo
gcccctcacagatgtcctggcgtccgcaataccgtagctccaagttccggaatgtctacgggaaggtggccaaccgggagcactgcttcgatgggatccccatcaccaagaatgtgcacgacaaccacttctgtgccgtcaacacccgcttcctggccatcgtcaccgagagcgcagggggcggctccttcctcgtcatccccctggagcaggta

SEQ ID NO: 267827 - DNA, 258 bp, Homo sapiens; identical to SEQ ID NO: 216323
  chr15:69002974-69003232
  hypo

SEQ ID NO: 267828 - DNA, 93 bp, Homo sapiens; identical to SEQ ID NO: 216324
  chr15:69003955-69004048
  hypo

SEQ ID NO: 267829 - DNA, 180 bp, Homo sapiens
  chr15:69011590-69011770
  hypo
tccacagagcacaggcggctgcagcctttgccttcagcgcagctcaccccagttctccttgtctgtccccctgtttgaacttccctcccacccagcctgctggaccatcacctgacagtccatgggatcgtcagtgagagcgtttcccttgccttctttagatcccgtgctgatgtcttt

SEQ ID NO: 267830 - DNA, 250 bp, Homo sapiens
  chr15:69076663-69076913
  hypo
ctgcaaagccaaggacgagccccaaggcctcagctgggcccctgcagccctgggccgcaccctgtcacccaccatcctcatcctcctcctcatcatccaggccctccacgtagccctcagcatccgagtcaggggcctccttgtcgtcccggtcatagccgtcgagatatgtgagttgcgggaggagcttgaacacattttctcggtagtcgttcaggttggttacctcgcaattgaaaaggtctaagct

SEQ ID NO: 267831 - DNA, 489 bp, Homo sapiens
  chr15:69099731-69100220
  hypo
gctggtattcctcccgccccacctccacagaaaacgggggggggggagtctctcctttgcccagagcctccctgcccctcccctccgcttcacagctccaggcgaggcctcctcctggggcaggccgagacagctcttctcagacttgctcccaccccagcaagcaccttctggagaggggctgactccaccccacccccaccgctgaccaaacagctcattcaagccctgacgggtagaatctaaccttcagggtccgtctacaacccatacctggcataaacgatatttctttccgtgctaacaacaagctctgggaagcaggttattcaccgtttcacagatgtggcaactgaggctcagtgaggtgacctgccaacatcctcaggctcagcagttctcaagcactactgcccactgtacctgactgcctgggtctgcgcctgggcccccgcccttttacaaaaggtccacggcctctcaagagct

SEQ ID NO: 267832 - DNA, 113 bp, Homo sapiens
  chr15:69285723-69285836
  hypo
agacctgatcccatcgcggaagagtctccagacaaaatttcttcagcagctgcttgagtgtctggttcatgcgctccacttttcctgagctctgcagccggtaggctgtgtgt

SEQ ID NO: 267833 - DNA, 141 bp, Homo sapiens; identical to SEQ ID NO: 216326
  chr15:69322604-69322745
  hypo

SEQ ID NO: 267834 - DNA, 180 bp, Homo sapiens; identical to SEQ ID NO: 216327
  chr15:69322967-69323147
  hypo

SEQ ID NO: 267835 - DNA, 33 bp, Homo sapiens
  chr15:69325018-69325051
  hypo
gggattacagacgtgagccactgcactgggcac

SEQ ID NO: 267836 - DNA, 32 bp, Homo sapiens
  chr15:69369617-69369649
  hypo
agtgagattgagggccgggcgcagtggctcaa

SEQ ID NO: 267837 - DNA, 184 bp, Homo sapiens; identical to SEQ ID NO: 216328
  chr15:69387167-69387351
  hypo

SEQ ID NO: 267838 - DNA, 39 bp, Homo sapiens; identical to SEQ ID NO: 216329
  chr15:69461181-69461220
  hypo

SEQ ID NO: 267839 - DNA, 77 bp, Homo sapiens
  chr15:69481791-69481868
  hypo
catattggtggcttccaagtttgggcaattatgaataaaactgctataaacataaggacatacgttttcgactcatt

SEQ ID NO: 267840 - DNA, 37 bp, Homo sapiens
  chr15:69566086-69566123
  hypo
tacaggcgtgagccaccgcgcccggctggataaattc

SEQ ID NO: 267841 - DNA, 160 bp, Homo sapiens
  chr15:69577241-69577401
  hypo
acaacactttgccatcggcagaggtctttgggctggctctcgatgcctctgggccctggaacaagagaacaaatggaggccgcccaccatgtgtctaaatattatttaaaagttattaattaggggctgagcgcagtggctcatgcctgtaatcccagca

SEQ ID NO: 267842 - DNA, 214 bp, Homo sapiens; identical to SEQ ID NO: 216330
  chr15:69590152-69590366
  hypo

SEQ ID NO: 267843 - DNA, 78 bp, Homo sapiens; identical to SEQ ID NO: 216331
  chr15:69715405-69715483
  hypo

SEQ ID NO: 267844 - DNA, 48 bp, Homo sapiens
  chr15:69754275-69754323
  hypo
cagccctataggggcaaacacgcgcccgccatcccccaggagcctcat

SEQ ID NO: 267845 - DNA, 131 bp, Homo sapiens
  chr15:69793874-69794005
  hypo
cggttcctggcttgccgcccccaaagcacttgttataggcttaacattgtgggcatcaggcctcaggagcaggactcaggaagcagaatccctccgaccttctcctgccctcccttcggcaaccccaagcc

SEQ ID NO: 267846 - DNA, 119 bp, Homo sapiens
  chr15:69851550-69851669
  hypo
ataagcagaaggtaatagaccggcccatctctatgccggagaactttgtcttcaaaccccacagccttctctttgcgctgagggcagggctactggtcgatgcaggaggaggaggcctt

SEQ ID NO: 267847 - DNA, 200 bp, Homo sapiens
  chr15:69879205-69879405
  hypo
aaggggaagcaggggcgatgtccaccctggcacagggaatggtcttctctggatcttcaagaggcaggccctggcggtggtcagagccacagagggacttggggtccaatccttgtctgtaaacttgggaccaactgtaccgggttgtcatggagatgaaacaatgtggaggggaaggcacctgcgcgtggtaggtgctg

SEQ ID NO: 267848 - DNA, 141 bp, Homo sapiens; identical to SEQ ID NO: 216332
  chr15:69883340-69883481
  hypo

SEQ ID NO: 267849 - DNA, 34 bp, Homo sapiens
  chr15:69900972-69901006
  hypo
tgtcagagatgagacgggacgaagtgtgaacccc

SEQ ID NO: 267850 - DNA, 155 bp, Homo sapiens
  chr15:69925151-69925306
  hypo
agaaattctctctagatgttcgtttctctctccaaaactacacactcagggcagaggctagtatgcagtcacttctctgttcaggtagttcttccattgccggcatctcccctcccacctacattttctccttcgctggtggaccccactgccct

SEQ ID NO: 267851 - DNA, 150 bp, Homo sapiens; identical to SEQ ID NO: 216333
  chr15:70126641-70126791
  hypo

SEQ ID NO: 267852 - DNA, 246 bp, Homo sapiens
  chr15:70133513-70133759
  hypo
gggagcccaagaagcgaagggagcatgatcagagatggggagacaggcctcattagatagctccagtgctgcgggctctgtcgccatggcagccagcgctcgcgcaggccaggtggtttttattaccgaacttggaaaactttacggcggcaccaacaatgaatctttattctgtttttaatagcgtgtctcttattaacatgtatcttttccccttcttaataacctttacgtttccaagccaca

SEQ ID NO: 267853 - DNA, 199 bp, Homo sapiens
  chr15:70339879-70340078
  hypo
gcctggggaccgccccgggaatgggcaccagcattctcctcttcccgcccagccccccgactccctccctggggacaatgacctgcatttctgggtctgcctcttctgcaaatgcttccttctgtatcatccaaaaacacacctttgtgacctagagattgaagatctcctcgtcccacctaaacgtgttaagcttaaa

SEQ ID NO: 267854 - DNA, 116 bp, Homo sapiens; identical to SEQ ID NO: 216334
  chr15:70342264-70342380
  hypo

SEQ ID NO: 267855 - DNA, 142 bp, Homo sapiens
  chr15:70347466-70347608
  hypo
gtgtagacgtgcctcgtggggttgctgatggtcacggcacacaccacctccccgtggctgagtgtgttgatctgccgggcgtgcctcgggatgccggggcctgccagggcgtcgtgggggaagggcacgggctgcatctgcc

SEQ ID NO: 267856 - DNA, 439 bp, Homo sapiens
  chr15:70352913-70353352
  hypo
ttccatgctgtagtccgcagagccccggtgcttctcactggcccggaggctttccgagggtgacacagagttattctggaaggaaaaagagggttcggggttaaaactttctgctgcgtgtaacaattcacacatccgcacacagctaagtgcaggtgacacggaggtcaggggagggaagagaagctgaactcctctctgccctgcagatcgtggctccatcagagccttgccagggaagccttccccactcccctgagactgagtccccggggagatgccctgggcgcatccccaattctcttttgcagctctgcactgctattaaataattaaccctgcagtaagccgtctgccttctggcctgtgggactacgctctgtgagggcgagggtcacctgggtctcattcaccacccatctcgcgcttgccacactca

SEQ ID NO: 267857 - DNA, 260 bp, Homo sapiens
  chr15:70354303-70354563
  hypo
ccactttcccagaggccaagcgtggctcaggggcaagggccacttggagggaacggggctgggcagtattcggtgggaatagtgcggcaaccagcctcagaacttaatttcctttcctaagccgggttctgggcagccctacccggccaagtttctgcccgaagcaaattaaaatggcagagttatcaagccttgaagaaaaaatggaggttataatggaactgcagctcaaccttccccacagccgtgcaggagcggtg

SEQ ID NO: 267858 - DNA, 87 bp, Homo sapiens; identical to SEQ ID NO: 216336
  chr15:70355592-70355679
  hypo

SEQ ID NO: 267859 - DNA, 180 bp, Homo sapiens
  chr15:70703922-70704102
  hypo
ccaaaggctgtctctctttccgcttaggcgtctgttaatcattgacacttaattagccctgtaacatattagaaagtgctttgaaaattgtaaagtcctattcaaatatgcgggataattattacacggacctattctctccactgaccctccttaagcgtctactccaggtcatgtgct

SEQ ID NO: 267860 - DNA, 36 bp, Homo sapiens
  chr15:70707944-70707980
  hypo
aatgaaactcacagccgtaaacgagtttattattgt

SEQ ID NO: 267861 - DNA, 212 bp, Homo sapiens
  chr15:70718602-70718814
  hypo
cctcgggggcccgtcgactcactccccagaggtgcctctgcctccggcttcggttcagcgctggctcctcgaggtgccaggtggaatcccaacattttttccgccttcctcaggcctggcaagtggagcccaaaaacagatgcctagcaccttgttcttggcgagaatgacagattttcgagtccccttccaggagccgtgctcgcttcccc

SEQ ID NO: 267862 - DNA, 96 bp, Homo sapiens
  chr15:70926695-70926791
  hypo
aggcgctggatgctgcggtaaggccttggctctgtctcacaggcacagggttcaagaaggttaagcagagggtaacacagtcagatctatttcttt

SEQ ID NO: 267863 - DNA, 99 bp, Homo sapiens; identical to SEQ ID NO: 216338
  chr15:71047985-71048084
  hypo

SEQ ID NO: 267864 - DNA, 35 bp, Homo sapiens; identical to SEQ ID NO: 216339
  chr15:71124501-71124536
  hypo

SEQ ID NO: 267865 - DNA, 120 bp, Homo sapiens
  chr15:71152087-71152207
  hypo
ttaaggatgccaacgccaagctgtccgagctggaggcctctctgcaatgggccaggcaggatatggtgtggcagctgcgtgagtaccaggagctgatgaatgtcaagctggccttgggca

SEQ ID NO: 267866 - DNA, 35 bp, Homo sapiens; identical to SEQ ID NO: 216340
  chr15:71164699-71164734
  hypo

SEQ ID NO: 267867 - DNA, 31 bp, Homo sapiens; identical to SEQ ID NO: 216343
  chr15:71466447-71466478
  hypo

SEQ ID NO: 267868 - DNA, 179 bp, Homo sapiens
  chr15:71704016-71704195
  hypo
ctttggtagtaaaaggcaatcgcaaatgtgagttgaactgccaggcaatgggctaccgcttctatgtacggcaagctgagaaagtcatcgatggcaccccctgtgaccagaacggcacggccatctgtgtgtctgggcagtgcaaggtaagtgcccccgaactggggtgaattcttaag

SEQ ID NO: 267869 - DNA, 38 bp, Homo sapiens
  chr15:71880351-71880389
  hypo
gaatcttgtcatggccgggcgcggtggctcacgcctgt

SEQ ID NO: 267870 - DNA, 99 bp, Homo sapiens
  chr15:71966264-71966363
  hypo
acttttcttcttagacatcaaaagcctacctgatttaactggcacagttgtgtgttcttatggcttttgcacccaactgtctgtcggagtagttgcctc

SEQ ID NO: 267871 - DNA, 391 bp, Homo sapiens
  chr15:72039024-72039415
  hypo
tgcccagcctaggctgactttcaagcaatgctctagtaagaaactctacccatagtgattctgatgattctgtgtacgctgctgcgggctcacgctgacttcctgttgactgaaggttgtctctcactctcgctctctcattcctgaaccagctgggacatcggggagtggtctgagtgcagcaagacctgtggcctgggcatgcagcaccgccaggttctgtgccgccaggtgtacgccaaccgcagcctgacggtgcagccctaccgctgccagcacctggagaaacctgagaccaccagcacctgccaactcaagatctgcagcgagtggcagatccggaccgactggacctcggtacgcaggcagggcagcccgctctgcagctccc

SEQ ID NO: 267872 - DNA, 231 bp, Homo sapiens
  chr15:72040756-72040987
  hypo
cagtgctcggtgccctgcggcgtgggacagaggacccgtgatgtgaagtgtgtgagcaacattggggatgtggttgacgatgaggaatgcaacatgaagctccggccgaatgacattgagaactgcgacatgggaccctgtgccaagagctggttcctcaccgagtggagcgaaagggtgagtgtgatggcgggcagagcgccggggaccgaggtctgccaggtgcctcca

SEQ ID NO: 267873 - DNA, 199 bp, Homo sapiens
  chr15:72042476-72042675
  hypo
ggatcttaggagacacgatgcagcccatgagcccccaccccgtccccactcccagcatcatgagaacaacaaccatagtatctcagactcaaagaaggaccctttcacgcagtttggggatatcagcagacatgccccatacggccacattggctgactccaactggtcagtgtccattctgaccggtcaatggccacc

SEQ ID NO: 267874 - DNA, 258 bp, Homo sapiens
  chr15:72081593-72081851
  hypo
gaacttacacttaccgcgcctccacatgatcgacctcaccttgtatactcacagccacctcaacagctgggtgctgcaggtctctctgctttacagcggggaaaacaaagcctcagccaggtgagggaacttgctcgtgatcatgcaggtctcaagtgactggggactttgagcccaagtccgcctcatttcaaagcttatgctggttcctctgcatgctgcggcctttctgaaacaatcacacgaagccatcacgta

SEQ ID NO: 267875 - DNA, 287 bp, Homo sapiens
  chr15:72082357-72082644
  hypo
agtgtgctggaacttgatgccgatgtcagcctcaatgctctcaccctgacagcagaagtggcggcttctccctccacctgtgcccggacagtgccaccagtctaacttctgccaccgtccctacctgcagctcacctgagcccagaaccatgccccctgcaccctcccgacacactcaggtaatgcccccgtttgtgttatctcttgctctataacaaacaaccattttattatttctcatgattcactgggtcaggaatgtggtcgggacactggtaatagctcat

SEQ ID NO: 267876 - DNA, 123 bp, Homo sapiens
  chr15:72093246-72093369
  hypo
gtatattttaatgccaagtacgtgattcagtaaaataaatccagcatccactccactcaacatctgttttctgggtgtttgcgatatgtcaggagctctgacgcacatgagccagtgtatcag

SEQ ID NO: 267877 - DNA, 147 bp, Homo sapiens
  chr15:72109741-72109888
  hypo
atgtggcttttcctcgaaattcctcctgacccactctggggacctcatctctcctctccttcctcccctccctttcctgggagggcaccgccccagggactagtgctcagaagctggtcgtaaaactgatggcgtcctctctcctgt

SEQ ID NO: 267878 - DNA, 45 bp, Homo sapiens
  chr15:72411790-72411835
  hypo
taagatggaggtcatttagccgggcgcggtggctcacgcctgtaa

SEQ ID NO: 267879 - DNA, 224 bp, Homo sapiens
  chr15:72412075-72412299
  hypo
gagactccgtccccgcccccagaaaaaaaagatggaggtcatttaactacagagaggcttggagatggaatgagaaacttgagcggcgttatgtttggaataactggtctgggaaatgggagaaggagccactcttgcctttctcttcagcactgttcattcctcagtgtttatcaggtccaaattagttacttgtctctttgctctcccgttcccttccgtcc

SEQ ID NO: 267880 - DNA, 388 bp, Homo sapiens
  chr15:72462416-72462804
  hypo
tcacagttcagaggcagcagcgcaggcagaggttctgggatggctgacggagtaggcgggtctcacacagcgtctttcccgaaagccagaagttctgcttatgcctaggctgggaggaaaatcaacctgtctacctcatctccagtgccaggcagctcgtaggccaggctgagtgaggcctctagccccacccttgaggaggcacactgagagggaggaccctgagactcgcttatgccgagaacaaaagtgtccaaagtacccgcgcagcatgactgtaaaccatcaggttccgggaaagtaggctgagcacaggaggccttatcaaagctcaggagctgatgcgctgaaggtgtgggaggtggacgcccatcagcctacaggtgag

SEQ ID NO: 267881 - DNA, 41 bp, Homo sapiens; identical to SEQ ID NO: 216347
  chr15:72471183-72471224
  hypo

SEQ ID NO: 267882 - DNA, 37 bp, Homo sapiens
  chr15:72525047-72525084
  hypo
tgtctgggtgcagtggctcacgcctgtaatcccaaca

SEQ ID NO: 267883 - DNA, 37 bp, Homo sapiens
  chr15:72525324-72525361
  hypo
tcaaaaacaaacaaacgaaaaagttctaaatctagat

SEQ ID NO: 267884 - DNA, 182 bp, Homo sapiens
  chr15:72581555-72581737
  hypo
aatccattgaccccgatgggcgccggaagacctgggagggtgccagggccgctgccaggcggggagttggctgctgatggcggaaaaggtctgagagtcaggccgccaccccgccccgcccggcccctcccaggcgcgccccagtccctgggggccgtacctgccgcgggcaacagaggcgc

SEQ ID NO: 267885 - DNA, 80 bp, Homo sapiens
  chr15:72743819-72743899
  hypo
cccacctgcctgcatctatgcgggccaactgggccacagccccgatgattccaaacaccgccttccttctctccctaccc

SEQ ID NO: 267886 - DNA, 42 bp, Homo sapiens
  chr15:72758599-72758641
  hypo
gattatatttataagaataaagtagaacgttgtgaacagaag

SEQ ID NO: 267887 - DNA, 42 bp, Homo sapiens
  chr15:72768977-72769019
  hypo
caggcgtcagccaccgtgcccggcctgtagaagatgcacatg

SEQ ID NO: 267888 - DNA, 204 bp, Homo sapiens; identical to SEQ ID NO: 216349
  chr15:72992555-72992759
  hypo

SEQ ID NO: 267889 - DNA, 95 bp, Homo sapiens
  chr15:73147250-73147345
  hypo
tgctgggattacaggtatgagtcatcgcacccggccctgctatggtttttattctgggaattttgagtggtctcgccttctcctctccttcaagt

SEQ ID NO: 267890 - DNA, 212 bp, Homo sapiens
  chr15:73615718-73615930
  hypo
ggctatggtggtggcggctacgccagctgatggtgtgggagccgagggggagccacaggccccggggggtggggaggagctggatgagggcaggagtgggctcagtccagcgggggcagagaatccagccagctgttggatgtggaaggaggatgaagacggtgtgtccacctgggacgggctgctggcgggcgaggcggagcccagcgcag

SEQ ID NO: 267891 - DNA, 46 bp, Homo sapiens
  chr15:73616153-73616199
  hypo
ctggacgcggtgcgcgcagtgggccatctcccggtcatgctgcaca

SEQ ID NO: 267892 - DNA, 111 bp, Homo sapiens
  chr15:73616437-73616548
  hypo
tccaggcggtccagcgccacggtctcgaaggcccttcgcatcatggggtactcctccagcacctcattgaagttgtccacgctcagcgagtagaggcggcagtaggtgtcg

SEQ ID NO: 267893 - DNA, 57 bp, Homo sapiens
  chr15:73634701-73634758
  hypo
ctccaacttgcccgcgtgatttcactctctacagccagcggccgcaccttttgtcag

SEQ ID NO: 267894 - DNA, 99 bp, Homo sapiens
  chr15:73635760-73635859
  hypo
agaggcgtaacaggcgtaagaggctgaggatcttcgtgaagcggacaatgcgcagggcccgggcagtcttgtagacctccgagtcgatgcgtgtctcca

SEQ ID NO: 267895 - DNA, 84 bp, Homo sapiens; identical to SEQ ID NO: 216351
  chr15:73735440-73735524
  hypo

SEQ ID NO: 267896 - DNA, 333 bp, Homo sapiens; identical to SEQ ID NO: 216352
  chr15:73889351-73889684
  hypo

SEQ ID NO: 267897 - DNA, 180 bp, Homo sapiens
  chr15:73898087-73898267
  hypo
ggaaaatgttaaaagcaaagagaagaatcagctcacaattgaacccctcttgcattccttttgtacgtctgtcttccagggttccttcctatgatcctgaatatcctcacatggactcttaacagattgaaagctctgcctgtatgttacttatcagaaaatactatggccatcatgcgg

SEQ ID NO: 267898 - DNA, 201 bp, Homo sapiens
  chr15:74188046-74188247
  hypo
ctgtctctttacgtacgggcatggctgacatagaggactgaattgtctcctgtcagaagcatcctgaggaagggtcagctctcaggtcaagaggagggattgttcggacacctggcttgccgatgctctgctctgagaaatctgcgcaaagatgtctgtcagccaggcaggatattcttctctgcccgggctcctcactca

SEQ ID NO: 267899 - DNA, 32 bp, Homo sapiens
  chr15:74223034-74223066
  hypo
atgggtgggtggtttccaagcgcctgtcctga

SEQ ID NO: 267900 - DNA, 408 bp, Homo sapiens
  chr15:74315317-74315725
  hypo
atagtgcctttggcgcggttcacgcgcagatgcacgcggccgtcggccagctgggccgcgcgcgtgccgagaccgaggagctgatccgcgagcgcgtgcgccaggtggtagctcacgtgcgggctcaggagcgcgagctgctggaggctgtggacgcgcggtaccagcgcgactacgaggagatggccagtcggctgggccgcctggatgctgtgctgcagcgcatccgcacgggcagcgcgctggtgcagaggatgaagtgctacgcctcggaccaggaggtgctggacatgcacggtttcctgcgccaggcgctctgccgcctgcgccaggaggagccccagagcctgcaagctgccgtgcgcaccgatggcttcgacgagttcaaggtgcgcctgcaggacctca

SEQ ID NO: 267901 - DNA, 116 bp, Homo sapiens
  chr15:74333742-74333858
  hypo
ccgagttggaaaggcgagacagcagtgtgggctcacccggagcaagacgtgtgaaatcagcttttgacagcgtggctgaatgaggatctggagatgcgaggcgctgggcagactct

SEQ ID NO: 267902 - DNA, 162 bp, Homo sapiens
  chr15:74679805-74679967
  hypo
caggagggctgcccactgcccgcagggcccccggtcagggcgggagggctcggcaccgagaggtccaccgagccagaccaggcagagagagcacatggaccggcggagaccaaggtcccagagaggtggggaacaggaggcgccccctcccctgccacatga

SEQ ID NO: 267903 - DNA, 42 bp, Homo sapiens
  chr15:74688410-74688452
  hypo
tattccactgcctgcctccacgcctctgaccacgcagctcct

SEQ ID NO: 267904 - DNA, 174 bp, Homo sapiens
  chr15:74702942-74703116
  hypo
gcatgcccagcctcgggaggccctagtggaccagcaagccaagagtgagtgtgggcagcacccccagccagagggaggcggccagggcacaggcatgacccagcaggtgctcggccatgatgccgtcctcgggcagcagctgccagtgctgagcctcgcggaagtaggagccct

SEQ ID NO: 267905 - DNA, 39 bp, Homo sapiens
  chr15:74818767-74818806
  hypo
tacattaataactcctttgccgggcgcaggggctcacac

SEQ ID NO: 267906 - DNA, 38 bp, Homo sapiens
  chr15:74819046-74819084
  hypo
tgacagtgcaaggctccgtcaaaaataaataaataaat

SEQ ID NO: 267907 - DNA, 31 bp, Homo sapiens
  chr15:74839796-74839827
  hypo
tacaggcgtgagccaccgcgcctaccctgac

SEQ ID NO: 267908 - DNA, 113 bp, Homo sapiens
  chr15:74903825-74903938
  hypo
cctccggcactgcccgaagacggcttgccagctcggccctctgctgcctgctttctgccagctgctcccacaggtccttctctgcccgcctccagtcccgctcgggggccctg

SEQ ID NO: 267909 - DNA, 71 bp, Homo sapiens
  chr15:74912418-74912489
  hypo
gcggagcccatcctttggagaggactactatggaccttcacgttctcgtcatcgtcggcgatcgcgggaga

SEQ ID NO: 267910 - DNA, 125 bp, Homo sapiens
  chr15:74913937-74914062
  hypo
gggcattctgcagctgaagccggagcagccgctgaccagtctggatggttggacccaggcggggccagctgccttcttgcgccgccgttctcactgcatcttccgctctggcccaaagccacatg

SEQ ID NO: 267911 - DNA, 591 bp, Homo sapiens
  chr15:75091223-75091814
  hypo
aactacgtccagaagcgggagggcgtgaaggcgggtaccaaactcagcctcatgccgtgagtaccacgaggaggggttggggagggaaggggccttggtcctcctgaaggagcatcaggagcaagcagggaggccagagtgaggggcttgggtgttggggagggcctcaggaggaggtgcagggtgcgggtgcgggacctcacagagcagggctgggggcagaggcaggagggtggcaaagaagggacagggagcagaagaagagggcctcaaatgcctgactgagcgagtgcgagccacgggtgccaagcagagggaaccccttcagaaaggggagccagggtcagtacctttgggccaccatgacctccagccctgctgctccccagttggttccacggcaagatcacacgggagcaggctgagcggcttctgtacccgccggagacaggcctgttcctggtgcgggagagcaccaactaccccggagactacacgctgtgcgtgagctgcgacggcaaggtggagcactaccgcatcatgtaccatgccagcaagctcagcatcgacgaggaggtgtactttgagaac

SEQ ID NO: 267912 - DNA, 64 bp, Homo sapiens
  chr15:75093183-75093247
  hypo
cgagggaacaaagtcgccgtcaagtgcattaagaacgacgccactgcccaggccttcctggctg

SEQ ID NO: 267913 - DNA, 47 bp, Homo sapiens
  chr15:75093277-75093324
  hypo
ggtaggggggaggttggcctaggttaggagtgaggcaccagcttccc

SEQ ID NO: 267914 - DNA, 82 bp, Homo sapiens
  chr15:75093354-75093436
  hypo
aactgcggcatagcaacctggtgcagctcctgggcgtgatcgtggaggagaagggcgggctctacatcgtcactgagtacat

SEQ ID NO: 267915 - DNA, 183 bp, Homo sapiens; identical to SEQ ID NO: 216358
  chr15:75094768-75094951
  hypo

SEQ ID NO: 267916 - DNA, 103 bp, Homo sapiens; identical to SEQ ID NO: 216359
  chr15:75158701-75158804
  hypo

SEQ ID NO: 267917 - DNA, 42 bp, Homo sapiens; identical to SEQ ID NO: 216360
  chr15:75158924-75158966
  hypo

SEQ ID NO: 267918 - DNA, 57 bp, Homo sapiens
  chr15:75205464-75205521
  hypo
gccgtctcaaacaaaacaaacaaaaaaaagttacccagcctcaggtatccctttaca

SEQ ID NO: 267919 - DNA, 142 bp, Homo sapiens; identical to SEQ ID NO: 216361
  chr15:75221041-75221183
  hypo

SEQ ID NO: 267920 - DNA, 58 bp, Homo sapiens
  chr15:75293194-75293252
  hypo
catccttcctctgcctctttcgttccttaagtatgccgtgctattgctcttctgactt

SEQ ID NO: 267921 - DNA, 32 bp, Homo sapiens; identical to SEQ ID NO: 216363
  chr15:75413015-75413047
  hypo

SEQ ID NO: 267922 - DNA, 103 bp, Homo sapiens
  chr15:75498358-75498461
  hypo
gggcctaggagggctcgaagccttcacagcgatggcagagaagcgacccctgagaaccctggggcctgtgatgtatggcaagctgccccgcttagagacagac

SEQ ID NO: 267923 - DNA, 113 bp, Homo sapiens
  chr15:75500845-75500958
  hypo
gtctcagctgcagcgcttcgatcgcacccaccggtgccccttcccccatgtggtgcgagctggcgccatcttcgtgcccattcacctggtgaaggagcggctcttccctcggc

SEQ ID NO: 267924 - DNA, 151 bp, Homo sapiens
  chr15:75594676-75594827
  hypo
acagctctggtctggaccgtgcccctctccctggacctggtcccatagggctggttgtcatctctggcaggacaacatggccacctgtgtccccagtgccacaggagccccctgcccccatgaggcggtgcacgcacgttgttgatcatga

SEQ ID NO: 267925 - DNA, 69 bp, Homo sapiens; identical to SEQ ID NO: 216364
  chr15:75614951-75615020
  hypo

SEQ ID NO: 267926 - DNA, 215 bp, Homo sapiens
  chr15:75648427-75648642
  hypo
cccaatcccacaccgccactcacaggatggcctcctgaaccggcagcgacaagtgcagccagcagtccacgtggctgccgtgggcctcatacagcctcaggaccagcgagcggcgctgggggctgctctccgcctgcagaggaacacgtctggtgggaggggccgagggcaggcccagttcggaaccccgtccccagcacgtcccaccccttgcc

SEQ ID NO: 267927 - DNA, 104 bp, Homo sapiens; identical to SEQ ID NO: 216367
  chr15:75664801-75664905
  hypo

SEQ ID NO: 267928 - DNA, 196 bp, Homo sapiens; identical to SEQ ID NO: 216368
  chr15:75672985-75673181
  hypo

SEQ ID NO: 267929 - DNA, 36 bp, Homo sapiens; identical to SEQ ID NO: 216369
  chr15:75726682-75726718
  hypo

SEQ ID NO: 267930 - DNA, 258 bp, Homo sapiens
  chr15:75760809-75761067
  hypo
tccccacttacctcggggaccctagcaaaaatcaatagccacaatttggttttaataaggcacagtttgatagcagatgctaggaattaagaacacattgctactggccctttctagtggcaatttcaccacatttatctagccaaagggaaaggctgccttgcgtgcacacgtgtgctgggagacacaagaaagaagttgatccatggcttcagcgtaactgatggcaacctataggctcagcggtgtccagggtag

SEQ ID NO: 267931 - DNA, 205 bp, Homo sapiens
  chr15:75949260-75949465
  hypo
atcagagccctcacacgctgtcctctgctctgcctatgccaggcgccttcgccaaggtgaaggagagccaacgcatgagtgacgagggccgcatggtgcaggacgaggcagacggcattcgcaggcgctgccgcgtggtgggtttcgccctgcaggccgagatgaaccacttccaccagcgccgtgagctcgacttcaagcacat

SEQ ID NO: 267932 - DNA, 126 bp, Homo sapiens; identical to SEQ ID NO: 216370
  chr15:75981377-75981503
  hypo

SEQ ID NO: 267933 - DNA, 153 bp, Homo sapiens
  chr15:75997150-75997303
  hypo
cggatttctgctcctcgtgatgcagccaccactgcttatatcatgagtggtggtaacagccccatggtgactctggcaggtgagctgtcccacgtccctgggccctggcctccagcccccacctccagagagggactcgcgaggggttggtag

SEQ ID NO: 267934 - DNA, 263 bp, Homo sapiens
  chr15:76019477-76019740
  hypo
acacgtttggctaccggcgcccatacagagtgatggacctcaacccggctcccaaccagtaccagatgccactcttgctggggcccaacacccctgtcagccgagctgctccctgctacagtctggcctccagggacaagaactggttctacaaggaggatgtggcaggaggccctggacctaccacgtacgcccgacctgagccatccatctatcagaaccgcagccctacttacagcatggccaagcgcttcgcctaccct

SEQ ID NO: 267935 - DNA, 186 bp, Homo sapiens; identical to SEQ ID NO: 216371
  chr15:76083847-76084033
  hypo

SEQ ID NO: 267936 - DNA, 147 bp, Homo sapiens
  chr15:76197436-76197583
  hypo
tacaggcgtgagccaccgcgcccggcatgttgggccttttaagtatccacattttcactattaacaacaacgctgtgcagaaccttcccttcacctgcttcccttgaagcaactttttgttgtctgttttaccgggaagacaactgg

SEQ ID NO: 267937 - DNA, 120 bp, Homo sapiens
  chr15:76558867-76558987
  hypo
tatagcccccgataaaatccaaacttctactccctttcaatatcaaggaatgaagttagaacaaagtgctattaagcctcaaaaagttcaaatttggccgggtgcggtgactcatgcctg

SEQ ID NO: 267938 - DNA, 42 bp, Homo sapiens
  chr15:77072238-77072280
  hypo
caacgggggatcttcgaccaacatgggtgaataggaacagct

SEQ ID NO: 267939 - DNA, 120 bp, Homo sapiens
  chr15:77072340-77072460
  hypo
ggtacctggttcatctcattgtgactggttggacaggaggcgcccacaaaaggcgagccaaagcagggctgggtgccgcctcacccaggaaatacaagggatccagggatttccctttcc

SEQ ID NO: 267940 - DNA, 392 bp, Homo sapiens
  chr15:77321763-77322155
  hypo
tccccccagggtggccggggaagcttgacagtcacttcaggtctgctggggtgggccctggctcctggggcaggggcttagcgctgcttcccctctgtttcctcagagtcagaacaaagccaggcagtgcaaggactcggccaccgaggcaggtatgtgggcctggctgccccgtccgaccagggcggaggcctgggcggtactccccacacacacctcctcaccctggggacacacacactccccctggctgcacaatcatgggcgcggcgctctcattccagatatgtgccgtcaaagtaaacgctgtgttcccccattcgccagcccttcttggcgcttcatgtgttcagtcctcacagctgccctccgaggtggctgctgttactgtt

SEQ ID NO: 267941 - DNA, 34 bp, Homo sapiens
  chr15:77332740-77332774
  hypo
acaaagatcagcaagtaggccgggcacggtggct

SEQ ID NO: 267942 - DNA, 34 bp, Homo sapiens; identical to SEQ ID NO: 216373
  chr15:77333014-77333048
  hypo

SEQ ID NO: 267943 - DNA, 31 bp, Homo sapiens
  chr15:77358028-77358059
  hypo
atgagccaccgcacctggctgataagtttta

SEQ ID NO: 267944 - DNA, 183 bp, Homo sapiens
  chr15:77473436-77473619
  hypo
ttgctctgaagttggcaaagcgaggttgccctctcatgcgaatctccatggccaacagctcttcatcactctcatcccaactctcgtgctcctcctccatgttactgaaaagtacatcctcttcactctcctcgccactggaaaactctgggtaacagaaccggcccccttcattactaatca

SEQ ID NO: 267945 - DNA, 209 bp, Homo sapiens
  chr15:77880953-77881162
  hypo
tggctccctggaatgcgtcttaagcagattttgtaaactacgtggggaaggaggggtactcttccttcctggccccaaaacttgacctacgaggctatgtcggcaaagagcagggctggtcagggaggctgtcctgccagctatgtgcccttcactcttggagagtgggtgcctggctgccagcttcttctgggcgctggctgaaggaa

SEQ ID NO: 267946 - DNA, 400 bp, Homo sapiens
  chr15:77906718-77907118
  hypo
ggcgggcatggagtcgttgccgcccgcgttggccgcgatgcacaggtacgtgccgttgtcctgtacctgggcgtagcgcacctccagcgtgccatcagggaagactgtgagccgcccattgctcttggctgagaccaggtgctttcggggtgagagccagaggatggcgggcggcgggtcgccatcggcccggcacacaaactgcaccgtgtggccctcgtccacaaacacctgctgggccttgcggtcccggatgcgggcgcggcggcaggtgaagtagttgggcagtagcacatcagggaagtccttgaactccttgccctggacaaactcgggcgtggcgcacgtgggctgctgccggttgaagttgagccgccagcggcgccggaacacccacagg

SEQ ID NO: 267947 - DNA, 130 bp, Homo sapiens
  chr15:77908020-77908150
  hypo
cagcaggcgcgtctcggtggggatgccctcggggactgccacaaagcgcttgcggtggcacagcacagcgcggtcctgggcggagcactcgcagcggggcgggcagcccgtggccgagcctgacagcact

SEQ ID NO: 267948 - DNA, 204 bp, Homo sapiens
  chr15:77936322-77936526
  hypo
tccaaagagtggtgaggacacgctgggagaatccatcagagccacggggcagggcccggcactcaggagccctccaggggagagtccttgtgaccgtgaatctagctggggcagcggcatctgctttgcgaatgtatctacgctggggagtttaggaaggatacgtagctgtgttgtgttgtcgaactctgtggtatgtgtcat

SEQ ID NO: 267949 - DNA, 276 bp, Homo sapiens
  chr15:78010517-78010793
  hypo
cggaggggtcttgccgtggccctcagcttcacacgcagacctacacaggaagacacgtatgtgtgaacatgcagggacagagctggagaagtgcagcaccccagacacgcgggtttaacagccacatgtatgaatgcacacgctcatgcatacccacgcccatcccatgtatacagaggagcatgcccacgcatggctgtgcatgtgatatgcacacagcgcccacatgtatacacacacgtgtcaacatgcacacctggacgagctcacacacgc

SEQ ID NO: 267950 - DNA, 183 bp, Homo sapiens
  chr15:78159874-78160057
  hypo
tttgtgtgaatacacgcgtgcatctcctggggtgcacgtgcacctatgttccatatgggtctctatacgtgtgcactgtggggcttcacactgaaacccacccctgtgtgtacacgtctctgttggatccgtgtgcttgcaccgtgtgtctggggagttgcgcgttaccgtgcaagtctctgt

SEQ ID NO: 267951 - DNA, 151 bp, Homo sapiens
  chr15:78165453-78165604
  hypo
tcctgcaaggtcaagcgagaaccccctgagttgttcagaaggggccacgcagcagttggccagacctggaaggccgtgcctgaccttctgcaggtcacgtctctgggggcactaccacaggaaaggcaacgtcaagcgatgggactgcttc

SEQ ID NO: 267952 - DNA, 95 bp, Homo sapiens
  chr15:78181925-78182020
  hypo
tagtgaggcggaggcgtggagtgtccgtggaagagagcaagagaccctgcaggcagggccgagggcaccctggctttcgtcgccacccaggggtg

SEQ ID NO: 267953 - DNA, 340 bp, Homo sapiens
  chr15:78189972-78190312
  hypo
tccccgtggagtgccgagaccagcctggagagccggcaaccgagttctcctgccgggagttggaggccggcagcctagtctatgtccaccgcggtggccctgcacaggacttgacgttctgggtcagcgatggactgcaggccagccccccggcgacgctgaaggtgatggccatccagccggccatacagatccaccgcagcacagggctgcacctggcccaaggctctgccatgcccatcttgcccgccaacctgttggtggagaccaatgccgtggggcaggatgtgagcgtgctgttccgcgttactggagccctgaagttcggggagctgaagaa

SEQ ID NO: 267954 - DNA, 531 bp, Homo sapiens
  chr15:78191122-78191653
  hypo
catttgttgctacccgccagggcgagagcagtggtgacgtggcctgggaggaggtacggggtgtcttccgagtggccatcagccgtgaatgaccacgcccctgtgcagaccatcagccggatcttccatgtggcccagggtgggtggcggctgctgactacagactacgtggccttcagcgatgctgactcaggctttgctgacgcccagctggtgctcacccgcaaggacctccctttggcagtatcatggccatggataagcccacgcggcccatctactgcttaacccaggaggacctcaggaagaggcgagtactgttcatgcacttgggctgatcatggcgggatccagctgcaggtgtccgatgggcaacaccaggccactgtgctgctggaggtgcaggcctcggagccctacctccgtgtggccaacggctccagccttgtggtccctcaaggaggccagggcaccatcgacatggccgtgctccacctggacaccagcctcgacatccgcaatggagatgag

SEQ ID NO: 267955 - DNA, 58 bp, Homo sapiens; identical to SEQ ID NO: 216375
  chr15:78193841-78193899
  hypo

SEQ ID NO: 267956 - DNA, 172 bp, Homo sapiens
  chr15:78267623-78267795
  hypo
cagccgggcctgggccgccctccccagggcccccgcctccatgctcactgcctcgtggtgttggggctgggcagccttgtcttcgccacaccgcagcagcaggagtatgtggtggatacagatggcacctgctcatgtctgccagtttccccgccatcgctgccagggaatg

SEQ ID NO: 267957 - DNA, 171 bp, Homo sapiens; identical to SEQ ID NO: 216376
  chr15:78268339-78268510
  hypo

SEQ ID NO: 267958 - DNA, 37 bp, Homo sapiens
  chr15:78285344-78285381
  hypo
ctctccgcccagccacggcgcccgctcccgaggccat

SEQ ID NO: 267959 - DNA, 38 bp, Homo sapiens
  chr15:78295565-78295603
  hypo
gccagccgctctaccgccaccaacgctgctgacggttg

SEQ ID NO: 267960 - DNA, 93 bp, Homo sapiens
  chr15:78403530-78403623
  hypo
gaggctcatgggcacgtggacgatggggctcttcctgtagtccattgggacgaggttgggggccagctcatagaatcgcgaatgcagccttgg

SEQ ID NO: 267961 - DNA, 79 bp, Homo sapiens; identical to SEQ ID NO: 216377
  chr15:78450091-78450170
  hypo

SEQ ID NO: 267962 - DNA, 178 bp, Homo sapiens; identical to SEQ ID NO: 216378
  chr15:78463270-78463448
  hypo

SEQ ID NO: 267963 - DNA, 37 bp, Homo sapiens
  chr15:78487124-78487161
  hypo
gccctgggcagagctcgcagcccgtctggtgctgaca

SEQ ID NO: 267964 - DNA, 175 bp, Homo sapiens
  chr15:78498325-78498500
  hypo
tctggaactcacccacgctgtagcgcagaggctccccctccacccccaaggacaccagggctgcaggacagggtgctgggcagagcatggcccccgagccaggtctgtgggagcccatgatgcctgcttagcactgccctgggaagcacctggggtccctcggtggcctccgctc

SEQ ID NO: 267965 - DNA, 312 bp, Homo sapiens
  chr15:78501675-78501987
  hypo
tggcgccgttcttgcgaaatttgtgagcaaggcctgggccacaggcctggagcagcccttccattgctatggcgacccactccagggaggttgtggaaaaactgaagagatggcaacgtgtgcttccggggcgaggcctcctgtgccgggcagacagaggcgtgtgaatgctgcagaactcgtcctactgactttggatccttggttacagctctctgggatagccaggtagaagctgcctccactttgggccgcaatgttaccaaatggcccctgagctctgggttcaggcagcgacggcaaacgagggac

SEQ ID NO: 267966 - DNA, 81 bp, Homo sapiens; identical to SEQ ID NO: 216381
  chr15:78510187-78510268
  hypo

SEQ ID NO: 267967 - DNA, 78 bp, Homo sapiens
  chr15:78554709-78554787
  hypo
gtcttccatgaaactggtctctggtgccaaaaagcctgggaactggtgatcttaaggatgtgacgttgaattattaga

SEQ ID NO: 267968 - DNA, 45 bp, Homo sapiens
  chr15:78555195-78555240
  hypo
acatgcccattttacgaatgcctatggtcccgagtactaaatctg

SEQ ID NO: 267969 - DNA, 149 bp, Homo sapiens; identical to SEQ ID NO: 216382
  chr15:78566544-78566693
  hypo

SEQ ID NO: 267970 - DNA, 32 bp, Homo sapiens
  chr15:78571000-78571032
  hypo
cttttttttttgagacggagtctcgctctgtc

SEQ ID NO: 267971 - DNA, 118 bp, Homo sapiens
  chr15:78577626-78577744
  hypo
gtgaacacaagtcctcgttccaacatcccaaacttttacacttttgtcagacgaactattttaaaaagtgaacattagtatcggtttgaagttggaaggacttcgaccaaaaatcctt

SEQ ID NO: 267972 - DNA, 214 bp, Homo sapiens
  chr15:78596058-78596272
  hypo
ccaccgcgcccggccactgtttacactattgttgcagtagctgctgccatcaccgggctgcggcagggaggcacagctggggctgcatgctggtggatgcctcccccttctgagttggggagagctccccaggtgctgctgcagccgcccaaacagcagttgcagatccaggcctcctgctttacggagcaggcagggtcgccaccctcctggg

SEQ ID NO: 267973 - DNA, 97 bp, Homo sapiens
  chr15:78681251-78681348
  hypo
aacaagagcgaaacttcgtctcagaaaacaaaaacaaaaaaactccacttgagagcagatgcttaagtacgatgtagcttcacgtcccgatgaaagt

SEQ ID NO: 267974 - DNA, 188 bp, Homo sapiens
  chr15:78698064-78698252
  hypo
gctgtgaggggataccgccggggctgcatgctccacagagccaggaggagcgggcaacaggcagcagcccagccctcctgggtgcagctgcagccgcccaagttgggtttgtggacccagacttccgtgtgctcttgggggcctgggaaggccctgcactgcccttgcaggctcggaagtgcctcttt

SEQ ID NO: 267975 - DNA, 188 bp, Homo sapiens; identical to SEQ ID NO: 216383
  chr15:78699264-78699452
  hypo

SEQ ID NO: 267976 - DNA, 152 bp, Homo sapiens
  chr15:78922145-78922297
  hypo
gcagttctgctggtcgaagggaaagtacttcacctcaatcttgcaggcgctcttgtagatggcagggggcagccacaggacgctgccgttggaccggactatcaagttggtgtagacagacacctcataggtcccgtcggcgctgggcaggg

SEQ ID NO: 267977 - DNA, 71 bp, Homo sapiens; identical to SEQ ID NO: 216384
  chr15:79031606-79031677
  hypo

SEQ ID NO: 267978 - DNA, 133 bp, Homo sapiens
  chr15:79050495-79050628
  hypo
gctacattcacctttcgtccagggttgtcatacgctggagagtagaatgtgagaggtgacccctgtaggctgcagggcgagctctctgaaccttagtgtcccccacctggagaaggggcgtaacaccttccag

SEQ ID NO: 267979 - DNA, 239 bp, Homo sapiens
  chr15:79055678-79055917
  hypo
acgcccccttctgccgctggcctttgccgggctccccggccccctcaagctcgtcattcctgcctcagacttcacacctgatgtcccttcgatccctgtccttggcatcactgactcctccctcgggtctcaaccccagacccctccttggaaggccttccctgacaccacagcacacgcgccctttccttgtctgtttctccctggcaggtgtgagcaccagccgggcggggcctcgt

SEQ ID NO: 267980 - DNA, 232 bp, Homo sapiens
  chr15:79056239-79056471
  hypo
tccccccaactcaacggccaggcctcacctccctccaggaagatgtgtaccagctgaggcagggctgggccccgcagggccggtgcgcaggcggcttggcaggcccgggctgacaatggaagggccgcagtggccggaggtcccgtgtgtccacacactgcacgtcccgcactgaggaacctccgccgcagctgcgggagcactggggaccgagagacgtgtatggacacat

SEQ ID NO: 267981 - DNA, 264 bp, Homo sapiens
  chr15:79069814-79070078
  hypo
ccccgtactggaggcggcactggtggcttacatcatagaggacgccaggtggcaccgaggggaagtcgataatgtccttggcaggagggtcgtccaggcacaggccccacccacggctaaagatgggacgggaggatggaggggggcgcagcctgtgagacccatcggagaagccttggtggggccgggacaggaggagaggtgggagggggcacagagccctacaactgtaggaaactccagcctccccgctcggctcagccg

SEQ ID NO: 267982 - DNA, 188 bp, Homo sapiens
  chr15:79081980-79082168
  hypo
gcgagggtgaagctcggctctcagtgtagcaatgggggcaggcacagtacctgtgcccgagctcgtgggctacagtgaaggccagcggcaggcccgtgtcctcgttgatgctgcagctgcggtgcggctggcacatgcccgccacatgggacagtcccagggtctcacagggccggttcatggctgca

SEQ ID NO: 267983 - DNA, 273 bp, Homo sapiens
  chr15:79163906-79164179
  hypo
agtcatggagacaaaggtttgcgtaggaggataaaggtttacataggggatgcaggtaggctaagggctgtttgtggaaggatttaaataccaggctaaggactttgagatttatcgtctaaagttcattgagcacttattcattgttgggtaccgcgctaagcccgtatatgtaattctcacaataaactgacggaaatggtgctattttgcagcttagccaacaaagttgtttttgaacagggaacgacataaatccgtttgtttaggcca

SEQ ID NO: 267984 - DNA, 78 bp, Homo sapiens; identical to SEQ ID NO: 216385
  chr15:79208260-79208338
  hypo

SEQ ID NO: 267985 - DNA, 206 bp, Homo sapiens
  chr15:79218012-79218218
  hypo
gaccacggggtacagcgtggacctactcattcagtcattcacatccattccctgaggtcctctcctgggccagcagctctcacccctacacccataaacccagagtctacaaagctttgctgctagaacacaggggttataaaccatggacgggtaggtcccagatggcggtggaaacgagaagacccatccgagggctgtgtgac

SEQ ID NO: 267986 - DNA, 103 bp, Homo sapiens
  chr15:79222387-79222490
  hypo
atagcattccgcaccgcctgacctagtctagccttgactgtggtctctctgagcctgccagaatgcccgctcttccagttctgctgagcgctgtatccccagg

SEQ ID NO: 267987 - DNA, 125 bp, Homo sapiens; identical to SEQ ID NO: 216387
  chr15:79309573-79309698
  hypo

SEQ ID NO: 267988 - DNA, 133 bp, Homo sapiens
  chr15:79310062-79310195
  hypo
ttaggcatgaagggaccactcgctttcaggaacaggtgacgctactcacctggctgatgtcactggtccacgctgccttctcctgtctggacgaggccactaggatgactgtaaagggcggggaatcctttgg

SEQ ID NO: 267989 - DNA, 111 bp, Homo sapiens
  chr15:79471666-79471777
  hypo
gtaactgccccagccgcctcacagggatgtgaaatccacagcaaaatgagccaaaggtggcctcccgtaaagcacctaccacgggttacgaggcatcgctctgtgcagcca

SEQ ID NO: 267990 - DNA, 223 bp, Homo sapiens
  chr15:80216925-80217148
  hypo
gccactcaaaagtgctgggattactggcgtcagccaccgcgcgcccggtcgtgctaatcactttgaaaggcattatctcatcggttaaaacatagttttccggacttaaaagtttacagcacactggcgcagaagatggaaaaccgctgcttgcctttctccgtttattgactcacattctgctctttggatcattttcttcggaaaaagttttccaaagtgt

SEQ ID NO: 267991 - DNA, 79 bp, Homo sapiens
  chr15:80217366-80217445
  hypo
gtggagttattaacgccactcactaaacacaagtggaagttattaagagtggaggttccctcctccactcttaataaca

SEQ ID NO: 267992 - DNA, 95 bp, Homo sapiens
  chr15:80219641-80219736
  hypo
tatcattgctgtttcggaccagtctgaacatgttgccagagggttgaaaatcatgactactggccgggcgcggtggctcacgcctgtctgtaatc

SEQ ID NO: 267993 - DNA, 195 bp, Homo sapiens
  chr15:80295590-80295785
  hypo
aaaagacatacttttccaattagggtaaacgtgcgattcgcaagggagggtgggggataggagtggtccctctgctacagcacaaggcgtgttcggacatgtctgggcaagtccgggcacaacaagagcgggagggctgctcacaggctagaaacaagaaagtacaaggaggtgaggctccgaaccaaggacaag

SEQ ID NO: 267994 - DNA, 39 bp, Homo sapiens
  chr15:80434194-80434233
  hypo
acaggcgtgagtcaccgcgcccagccaatagattttatg

SEQ ID NO: 267995 - DNA, 36 bp, Homo sapiens; identical to SEQ ID NO: 216390
  chr15:80451294-80451330
  hypo

SEQ ID NO: 267996 - DNA, 202 bp, Homo sapiens; identical to SEQ ID NO: 216391
  chr15:80471843-80472045
  hypo

SEQ ID NO: 267997 - DNA, 246 bp, Homo sapiens
  chr15:80478408-80478654
  hypo
ctaggtgttggttccggtgagcccagcaactttgtgactgatccttgtcctcctctgttccagggtactgccagggggatggttaccgcatcggctttggccagtgtgctggaaaagtgctgcctgctctcctgccatcatgagattttctctgctcttctggaaacaaagggctcaagcacccctttcaaccctgtgactggggtcctccctcgggctgtaggcctggtccgccattcagtgaca

SEQ ID NO: 267998 - DNA, 162 bp, Homo sapiens
  chr15:80759864-80760026
  hypo
catgggaggaaagccggttctccagggtgtctggcgggcaagtgcggggcggtggcgtgcagccctggacctaactcatgcgtgtactgcccatgatcttacaacgcccatcagcggccagggtgcctgcccagcatcttgcaaggtcagcagcctcagcca

SEQ ID NO: 267999 - DNA, 113 bp, Homo sapiens
  chr15:80889494-80889607
  hypo
agtgtccttctagctttagccgagaaagaaaccagtcccagggaatgaatggtggtctccccactcccggcagcactttaggcagcccataagctatgcgagaatgtgaacgc

SEQ ID NO: 268000 - DNA, 235 bp, Homo sapiens
  chr15:80907144-80907379
  hypo
aatgtgcctcaatgcgtgaggataggcgaggtgagctgaggagtgacatctgatttctgggattttcttagaagagatatcctaggctcggggagtgtctaggtgaaagggaaaggacgttttacaccgactgtcgtcatgcattcttgccaagctgcctacagtgaactgactgctggatactccctcagaatctgtcgtccagcctttgagaaaatctcgtggtcacgaattt

SEQ ID NO: 268001 - DNA, 176 bp, Homo sapiens; identical to SEQ ID NO: 216393
  chr15:81041839-81042015
  hypo

SEQ ID NO: 268002 - DNA, 370 bp, Homo sapiens
  chr15:81164289-81164659
  hypo
tgggtcaggcagggcggctgttaagaggacacggccggcattgattctgggagtatcgtttcctccctcccccggcctcccaagcacacctgtgtgggaggtaccaggcagagggcccagtgtgctcctttcagtccccttgcctgtcccacctcactgaactcgcacaaagagcttcactttgaaccgaaaggtcaggggtgaccagacttttcgctaagctggttcaaagggaggagcctgggccgggtgagatagattttggcccttttctcagtgtgggagagtatctgtttgttcctgggcacaactacagtcatattcagaggagaaattgcggagatggcatagaagccgaagctggccaccg

SEQ ID NO: 268003 - DNA, 94 bp, Homo sapiens
  chr15:81199005-81199099
  hypo
aaaccaatgtacctgcacatcggggaggagatagacggcgtggacatgcgggcggaggttgggcttctgagccggaacatcatagtgatggggg

SEQ ID NO: 268004 - DNA, 229 bp, Homo sapiens
  chr15:81224341-81224570
  hypo
cataacaacgtgaccggcattgcctttgaggacgttccggtgagtgaggcgccagggcagactcccggcaaacccagactttggatggtgattcacaagtcccctgggtcccagagtttgagctattgccaccaccgcaggggttgagaagcctcctccaactaggctgggccatgtcccagtttgctcttcatccaaactggaaaagtacaagcgtaggttgccccac

SEQ ID NO: 268005 - DNA, 151 bp, Homo sapiens
  chr15:81235652-81235803
  hypo
caggcggaggcaggcgggacagccccgctgcacatgggaaggttgccctggccctcttcactacactcccagcatgatctcatcccctcccacaccttcaatacgatccaagtgctggtggctactatctccagcccggatctccttccta

SEQ ID NO: 268006 - DNA, 120 bp, Homo sapiens; identical to SEQ ID NO: 216394
  chr15:81247852-81247972
  hypo

SEQ ID NO: 268007 - DNA, 46 bp, Homo sapiens
  chr15:81262921-81262967
  hypo
tcctctctgcttcccggccccaaatgaactccgtagctaactcagc

SEQ ID NO: 268008 - DNA, 169 bp, Homo sapiens
  chr15:81342115-81342284
  hypo
tctggtgcccactccgatatcttttttggtggtggatcatcaagaagaaagcataatacgacttacaaatattcgcttttcagacaaagtagccgataagttgcatgctttggagtttggttggagatcctctggacagacacagtcagaggaacggcgattacaatgc

SEQ ID NO: 268009 - DNA, 197 bp, Homo sapiens
  chr15:81605218-81605415
  hypo
acagtcagggaaacgtggtctctgagagtgatgggcacataaagccttggtgccagagtgcatcgcatggtgtccaggccgagtctctgtcagatggttagaggcctgggtctaccctgccaggagaggcgtgtttgggtaacaggcagatggagtttggaacacatgaatggctcatcacacgccaaccctgagtg

SEQ ID NO: 268010 - DNA, 200 bp, Homo sapiens
  chr15:81605679-81605879
  hypo
tctgtgggaggtaaccgctgaggtcggtatggaagaatgtgaccaggttggtcttggtgggttccctgtgaaggcaacagcagagctgtgttatgatctgcagcagaggtgctggggacgagcgccaggcaggtgagcagagcccagcccagtggaaatggccatgatacagtgatcgcgtctcatcccttgctgtgccc

SEQ ID NO: 268011 - DNA, 43 bp, Homo sapiens
  chr15:82276016-82276059
  hypo
ggcacacgtgagggcgtgattggcaagacggggtagccagctg

SEQ ID NO: 268012 - DNA, 104 bp, Homo sapiens
  chr15:83379974-83380078
  hypo
ctgggacctgggacgagcagacacagtgcaaagtgcacacagttgctgcgcatggagtgataggatggtgggtccgcgtccgtcgcttcgctcactctgcgcag

SEQ ID NO: 268013 - DNA, 91 bp, Homo sapiens
  chr15:83440820-83440911
  hypo
tcacctgcttggtccgtcccaggtgagctgtcctgcactggccggtaggacagctgatagctctccacagtgtcgtcggagtataagctcc

SEQ ID NO: 268014 - DNA, 94 bp, Homo sapiens
  chr15:83459217-83459311
  hypo
ctgcttcttggagaacgagattaacacagtcggttggactccaaagtccatgctttcttcctggcacagagctgccatttgtgtgtgtgtgtgt

SEQ ID NO: 268015 - DNA, 95 bp, Homo sapiens
  chr15:83523581-83523676
  hypo
gggtgggtgctgtcccgtctggctccgcccgcgtggggaaggggactccgccatccctcagcacacccctggggggcccacgccctctccccaca

SEQ ID NO: 268016 - DNA, 120 bp, Homo sapiens; identical to SEQ ID NO: 216400
  chr15:83572358-83572478
  hypo

SEQ ID NO: 268017 - DNA, 60 bp, Homo sapiens
  chr15:83698963-83699023
  hypo
ccctgagacagcatcttggtcggtcaatgtattcaactcggggtttagggttgacagtaa

SEQ ID NO: 268018 - DNA, 41 bp, Homo sapiens; identical to SEQ ID NO: 216402
  chr15:83827862-83827903
  hypo

SEQ ID NO: 268019 - DNA, 217 bp, Homo sapiens
  chr15:84827426-84827643
  hypo
ctggaaaattgggccgcaccatggatgccttgcttccatctcctggcgcacagtatggttcctggatgtgttttgtttaaaccacacgttcttttgaaatttgacctggttgtcaacatttaaaacctgggagattccaccacaaattctgcattttaaagttctcttaaaacacgaggagccagccaggtgtggtggctcacgcctgtaatcccag

SEQ ID NO: 268020 - DNA, 72 bp, Homo sapiens
  chr15:85200333-85200405
  hypo
aattcctcccatgcaggatccggggatggccccagctgggccctcctgacattggagcaggggcccggctca

SEQ ID NO: 268021 - DNA, 74 bp, Homo sapiens; identical to SEQ ID NO: 216404
  chr15:85383065-85383139
  hypo

SEQ ID NO: 268022 - DNA, 82 bp, Homo sapiens
  chr15:85401076-85401158
  hypo
ctcccgccgcctcaccggcctcctggaccgtgaggtgcaggctggccgccaggcccttgctgctgcccgaggctcctggggt

SEQ ID NO: 268023 - DNA, 89 bp, Homo sapiens; identical to SEQ ID NO: 216405
  chr15:85478275-85478364
  hypo

SEQ ID NO: 268024 - DNA, 101 bp, Homo sapiens
  chr15:85680561-85680662
  hypo
ggactgagaccagacgcgtgtgtccccaggctgcacgttcttcatgtggtgcaggtgaaaggagatgctggtgtatgtgaagcatgcgtgaagggacagtg

SEQ ID NO: 268025 - DNA, 299 bp, Homo sapiens
  chr15:85680889-85681188
  hypo
tgggtgtgtttgcccgggtctgtttagcctcacgcagatgcctgctcccatctgtcactctttaaaatgctcttagtgaaagcctaaaatgtaaacagaggctgtgaaagcatatcacattcctatctttctctccagcctttgtagacctgcctgatttaatgcagcatcttgacaacaactttaaatactggaaaggactggacgaaatgaagctgcggaacctccgaccacctcctgaatagtgggagacaccacccagagccctgaagctttgttccttcggtcatttggaattc

SEQ ID NO: 268026 - DNA, 151 bp, Homo sapiens; identical to SEQ ID NO: 216408
  chr15:85695659-85695810
  hypo

SEQ ID NO: 268027 - DNA, 120 bp, Homo sapiens
  chr15:85725512-85725632
  hypo
tgttgtacatccagtcagcagtgaactctggcggaacaccaaagatgaggacaataagagaagagatacgtccaattaaaggagttaagaagagatgcttgaacttatgttttaaaaagt

SEQ ID NO: 268028 - DNA, 42 bp, Homo sapiens
  chr15:85774090-85774132
  hypo
aaaaaaaaaaaaaagtccaggtgtcttcgcctagctttgtca

SEQ ID NO: 268029 - DNA, 32 bp, Homo sapiens; identical to SEQ ID NO: 216409
  chr15:85886327-85886359
  hypo

SEQ ID NO: 268030 - DNA, 31 bp, Homo sapiens
  chr15:86095826-86095857
  hypo
gattgaggataatttatcatcgtttttttgg

SEQ ID NO: 268031 - DNA, 31 bp, Homo sapiens; identical to SEQ ID NO: 216410
  chr15:86096037-86096068
  hypo

SEQ ID NO: 268032 - DNA, 116 bp, Homo sapiens
  chr15:86220154-86220270
  hypo
ccctggcataatccgagcatgctctaatgtcttctgtgaacctccttctcagctcagcagcagatgcggccagcaaggcggatctccatcagcatctctccgctcctccttaagtc

SEQ ID NO: 268033 - DNA, 367 bp, Homo sapiens
  chr15:86284347-86284714
  hypo
cagcttgtcccgcccgagctccctcattgagcaggagaagcagcgcagcctggagaagcagcgccaggacctggccaacctgcagaagcagcaggcccagtacctcgaggagaagcgcaggcgcgagcgtgagtgggaagctcgtgagagggagctgcgggagcgggaggccctcctggcccagcgcgaggaggaggtgcagcaggggcagcaggacctggaaaaggagcgggaggagctccagcagaagaagggcacataccagtatgacctggagcgactgcgtgctgcccagaaacagcttgagagggaacaggagcagctgcgccgggaggcagagcggctcagccagcggcagacagaacgg

SEQ ID NO: 268034 - DNA, 97 bp, Homo sapiens
  chr15:86293194-86293291
  hypo
ctgcctggagtccccgctctgccacttcccagctccccgcccctccctgacagtcaccaaaaagaaagtcctggccaggcgtggtggctcacgccta

SEQ ID NO: 268035 - DNA, 166 bp, Homo sapiens
  chr15:86295446-86295612
  hypo
gtctgcaggtggcgcgcacattcgtcatgatgctgaagagatgagcagagtgcttagtctggggcccagcgcactcatctggaagcatgtcagcggagccgcgggacagctgccacggacggcagtggccccggattcatgtcccgagtctgaagagagctcctcc

SEQ ID NO: 268036 - DNA, 333 bp, Homo sapiens
  chr15:86306285-86306618
  hypo
gggttgggagtctgcgccttaaagggcctggagtacggggtgcccagtgggagagaaagagagagaaggagagaatgttcacagcaagatcacccttagtgggtaagcgggggcctcctgcagccgctggctgctatcccctaggctgtggatccaaccgcaacactggagcaaggggctgccctggaggtcgctcaggttccagctcagcaattccccgccgcttctggacggctgctggccaagcctgtgctctgtgccaggggcgcagacgtgaggatgcccgtggccagctccccagaggcgcctgcaggcaggcggcacactcagggc

SEQ ID NO: 268037 - DNA, 363 bp, Homo sapiens
  chr15:86313542-86313905
  hypo
ggattctcacatgggctgtccggctctggagcctgatctctgttcaaggtgactaatccctgcagggtttgctgtggacgcccaagcagagcctcacgtacccacttccctgctcccagcaggctctgccctgggccgggctccaagcggtactggctagacatcccccttgccttggaacaagagccgccatcaaggcccaagtgctcagtggagacatgttctctgaatccaggtgtctccacagggctctttacctagctggggcaagtgatggcttggaggtggggccgccagtgactcaccctcgagaccaacgcagaggcccaagatgacagcaggacatgccgaaccctaacggaa

SEQ ID NO: 268038 - DNA, 98 bp, Homo sapiens
  chr15:86332522-86332620
  hypo
tcagccctgcttccccgtgggaggagccatccaactggtcttgcaggctggtgctcagtcgcctcctcctgccctgctgggctcccttgagatccctt

SEQ ID NO: 268039 - DNA, 42 bp, Homo sapiens
  chr15:88493813-88493855
  hypo
aaggacacatcctcagaggccgcatttggcaatttactaaac

SEQ ID NO: 268040 - DNA, 266 bp, Homo sapiens
  chr15:89179287-89179553
  hypo
ggagaggggcctctcgccctccagtgtgagttgtctcagcctgaggccagtgctgtggatccagagagggccacagagtggccgacttgtacctgttatggtcattacaggtggtcagctgtagctggatgtgtgccttgaaaggctgacaagtttgccctgagtgactcacctactgtcacctgatccaacaagatttgtgggcgtagcctgccgatgggtgacgccagttaaaggtagagcgtcggcaccgggaaaccctggct

SEQ ID NO: 268041 - DNA, 219 bp, Homo sapiens
  chr15:89284711-89284930
  hypo
gccggcatgcccagcggcggcccagatggggcatgacatcaaaacagcacacgggaaggggcgaggctcccacggccacctcagccccaccctggcaccctggcatgcccctcacgcttcccccggcacccactgcagagtgaccatgacaaaggcaacacctttactgccttctcaggtggcggacgcccgtgaccctcagctcgagaaacccatctg

SEQ ID NO: 268042 - DNA, 136 bp, Homo sapiens
  chr15:89386710-89386846
  hypo
gacatgtgcagcgccggctggctggccgaccgcagcgtgcgctaccccatctccaaggcccggcccaactgcggtggcaacctcctgggcgtgaggaccgtctacgtgcatgccaaccagacgggctaccccgacc

SEQ ID NO: 268043 - DNA, 227 bp, Homo sapiens
  chr15:89388857-89389084
  hypo
gaagcccgaggcagcgtgatccttaccgtaaagcccatcttcgaggtctcccccagtcccctggaacccgaggagcccttcacgtttgcccctgaaataggggccactgccttcgctgaggttgagaatgagactggagaggccaccaggccctggggctttcccacacctggcctgggccctgccacggcattcaccagtgaggacctcgtcgtgcaggtgaccgc

SEQ ID NO: 268044 - DNA, 186 bp, Homo sapiens; identical to SEQ ID NO: 216411
  chr15:89404008-89404194
  hypo

SEQ ID NO: 268045 - DNA, 35 bp, Homo sapiens
  chr15:89605894-89605929
  hypo
aggcgtgagccaccgcacccagttggaattgattt

SEQ ID NO: 268046 - DNA, 139 bp, Homo sapiens
  chr15:89659579-89659718
  hypo
cccgaactcccagccgtgtttgatggagtgaagctggctgcagtggctgctgtgctgtacgtgatcgtccggtgtttgaacctgaagagccccacagccccacctgacctctacttccaggactcggggctctcacgct

SEQ ID NO: 268047 - DNA, 45 bp, Homo sapiens
  chr15:89807367-89807412
  hypo
atgctttcatttcacgtgagcaaacatagccgaacatagatgctt

SEQ ID NO: 268048 - DNA, 40 bp, Homo sapiens; identical to SEQ ID NO: 216412
  chr15:89809026-89809066
  hypo

SEQ ID NO: 268049 - DNA, 519 bp, Homo sapiens
  chr15:89876311-89876830
  hypo
cctgcccctacttaccaggccgagggggatatggccaccgccaatgtggggcaagttccctctgccaagcagacctccacgtcgaacaccagggcccgctcctcggggatggccacgggtacggcctccccctcggggccgtaccgggtccagccctccgcccaggcccaagccgggggcttcgggggcagctgggcctgcaacagcaagttggccgcctccaggtagggcaggctctgcttctgggccaggaggcggaagtgctggtccaggttgtccccgtagaggggcggcaggcgcagctccacgtcgggcaagggcacggctggctgcccccagagcccgtgcttctgcaggtgctcgacgctgcggcgcaccgcggcctcgccaggcatctcccctccttgcccgaagatttgctcgtgcagccctctcgagagcatctggatgtccaatgggttgtgccgcagctgcccgccctccgaggatagcacttgcggctgctgaggctgctgttgc

SEQ ID NO: 268050 - DNA, 68 bp, Homo sapiens; identical to SEQ ID NO: 216414
  chr15:90171832-90171900
  hypo

SEQ ID NO: 268051 - DNA, 72 bp, Homo sapiens
  chr15:90192228-90192300
  hypo
ggtatgtggctgccccggcgctgagggtcccccagggcgctgatgacgttgcccagcgccaggaggctgctg

SEQ ID NO: 268052 - DNA, 250 bp, Homo sapiens
  chr15:90192511-90192761
  hypo
ccgtgtgccgcgccgcgttgcccatctccaggaggctcagcacctcatccaggccctccacgtcgacctccttcaccccgcacagcactgcgggcacagaaggccgtgagccccagggcaggggccgccagactgaccagccaggagggcaggcagagcagaactagccccaaacctgcccttcctgacccactgctccctccccatgcccacggggtactgcccttcctagttccggcttgaggggctc

SEQ ID NO: 268053 - DNA, 58 bp, Homo sapiens; identical to SEQ ID NO: 216415
  chr15:90192966-90193024
  hypo

SEQ ID NO: 268054 - DNA, 243 bp, Homo sapiens
  chr15:90214507-90214750
  hypo
cagaaaccccacctccgtttagcttcacagggagaagaggagcctgttgtgtggccttgggagcaggcactctccgccagccttggagggtgctcaccatgggacacagacttccagtcacggcatcagcagcccctgccctctcctccctgagaggcggtgacgacagagtgcagggaggcttcgagaggtgggaagggctcaccttttcaggggggtactggagggcggggatcttttcct

SEQ ID NO: 268055 - DNA, 32 bp, Homo sapiens; identical to SEQ ID NO: 216416
  chr15:90296997-90297029
  hypo

SEQ ID NO: 268056 - DNA, 41 bp, Homo sapiens
  chr15:90317994-90318035
  hypo
gctaaatatgaattcggccaggcgcagtggctgacgcctat

SEQ ID NO: 268057 - DNA, 80 bp, Homo sapiens
  chr15:90342641-90342721
  hypo
gtggcagacactcaccgagtggtctctctgcagctgagtctgaatcttcctccagttctcttcgtcgtagttcacccggt

SEQ ID NO: 268058 - DNA, 212 bp, Homo sapiens
  chr15:90378767-90378979
  hypo
gggaactttgatgttgagatcgccaatgttgatgttccgaggaatctctggcaggttgatgtttttcacagcagacacagcccgcgcaggggctgctgaaaggccaccctaagaagaaatgagaggcgagtatgagacaaattctcactgttatctgcttaatgctaaaaaaaaaaaaaaaaaaaaagcaaaaacaaaaacaaacaagcagg

SEQ ID NO: 268059 - DNA, 136 bp, Homo sapiens; identical to SEQ ID NO: 216417
  chr15:90451518-90451654
  hypo

SEQ ID NO: 268060 - DNA, 164 bp, Homo sapiens
  chr15:90501230-90501394
  hypo
ttccgactgagcgacgtgcagtaatttgaaggaacgcattactggtgcacactcttctacctgtccggagggcctctctgccccttcctcccacatgctctaagcttggaggaggagttgctaagtgttaattgggtcctgtttggcagcggatggggtcactg

SEQ ID NO: 268061 - DNA, 129 bp, Homo sapiens; identical to SEQ ID NO: 216420
  chr15:90501636-90501765
  hypo

SEQ ID NO: 268062 - DNA, 36 bp, Homo sapiens; identical to SEQ ID NO: 216421
  chr15:90548960-90548996
  hypo

SEQ ID NO: 268063 - DNA, 92 bp, Homo sapiens
  chr15:90590718-90590810
  hypo
taaagtccatttctacgcctcacagactaatactttatcaacctggctcaaatatcacagcattttcacattgctatacaagtttcttttct

SEQ ID NO: 268064 - DNA, 159 bp, Homo sapiens; identical to SEQ ID NO: 216422
  chr15:90606083-90606242
  hypo

SEQ ID NO: 268065 - DNA, 505 bp, Homo sapiens
  chr15:90611268-90611773
  hypo
cgagaagtcctacacgtccaagtacaacctggtgacgcacatcctgggccacaacggcatcaagccacactcgtgcccacactgcagcaagctcttcaagcagcccagccacctgcagacgcacctgctgacgcaccagggcacccggccccacaagtgccaggtatgccacaaggccttcacgcagaccagccacctcaagcgccacatgctgctgcactcggaggtcaagccctacagctgccacttctgcggccgcggcttcgcctaccccagcgagctcaaggcccacgaagtgaagcatgagagtggccgctgccatgtctgcgtcgagtgcggcctggacttctccaccctgacccagctcaagcgccacctggcctcccaccagggccccaccctctaccagtgcctcgagtgtgacaagtccttccactaccgcagccagttgcagaaccacatgctcaagcaccagaacgtgcgacccttcgtgtgcactgaatgc

SEQ ID NO: 268066 - DNA, 153 bp, Homo sapiens
  chr15:90617275-90617428
  hypo
ggtgggagtgggctggggtccggggaaagcaggttccccacaggctcaggacaccgggttgatgtgttctaggtgtgcgggaagtccttcaaccgcatgtacaacctgctgggccacatgcacctgcacgccggcagcaagcccttcaagtgc

SEQ ID NO: 268067 - DNA, 32 bp, Homo sapiens
  chr15:90702246-90702278
  hypo
gcatgagccaccgcgcccggcgcataggcact

SEQ ID NO: 268068 - DNA, 146 bp, Homo sapiens
  chr15:90719188-90719334
  hypo
attacagacgtgagccaccgcacccggccggaatgcccattttatggaggagtaaactgggaggacgagcagaaatatcaaaaaagccttaagtgctgtgaaggaggctttaacgtaggaaagtcggggttgctttcccaaggagc

SEQ ID NO: 268069 - DNA, 36 bp, Homo sapiens; identical to SEQ ID NO: 216427
  chr15:90729568-90729604
  hypo

SEQ ID NO: 268070 - DNA, 254 bp, Homo sapiens
  chr15:90746124-90746378
  hypo
ggcagggccctagcggcttcaagtaaccctacctgaacccctgtctgaaatactgcagatgacctgggttcaaatgctacctcagccacttagtaaccatgtgaccttgagcaggctacttaaagtttctgggtcttgatttcttcatctgtaaaacaggtataataacagaacctacctcaaggtagtgaggattaaatcagctcgtgtttgaaaagtcgttaggacagggcctggtacgggaaccgctgaat

SEQ ID NO: 268071 - DNA, 132 bp, Homo sapiens
  chr15:90746748-90746880
  hypo
aaggcaaaactggagagcagcgaggggaatcgaggggacctgcttcccgaggagcagctagaatacttggttattattaccaatgcagctgcaggacctggtccacttctacaagcccgtgactgttcccag

SEQ ID NO: 268072 - DNA, 36 bp, Homo sapiens
  chr15:90751191-90751227
  hypo
aattttaattaggccaggtgcggtggctcacgccta

SEQ ID NO: 268073 - DNA, 232 bp, Homo sapiens
  chr15:90753833-90754065
  hypo
tgacatgacttaatccgtttaaagggctgagaaagtgctcacatactttagctctttgagggctagaggcccagaaggcatgtgagggagacacggagtgatgcttgagactgggggcacaggtacctagaggacggggtggcgtggcccgtgtctggggtctgtcagcgaggcgatccctgggctcttggcagggctggcactgctgaacgtggggctggctgaggcccaa

SEQ ID NO: 268074 - DNA, 565 bp, Homo sapiens
  chr15:90755553-90756118
  hypo
agcccctggctgaagcctgtcggggtggagggagagggttcaccctgaatgggaaaaccggccgcagcctcggcgtgccctgctttcttcatactggactaacccactggatagatggatttagaggatgtccgagcagcacaggcagcccaggagagcgagcgagacactctttgacacaagggagagcataaaagcttaagactgaccccaaggtgcgccagcccctcgcaggaagtaaagtgcagaaacacctccacccctgcacaaagagcacctaggagtgagtgcgcaagcgtggacaagccctgcggtaccgtgtacacacacacacacacacacacaccacaggcaagctcaggcagggtccttcacagacgtctgcagtcactctggaggtgacccaagcacctgggcccttagacagtaacaccactcacaccgagcacagaccagctcgcgcccacaacacgagcctgtgacacgcaagtctctgtttctgagctgatgccgtctggctttggccatgagaccctcgtgtgaccaggtgcgtgcctaagttaga

SEQ ID NO: 268075 - DNA, 151 bp, Homo sapiens; identical to SEQ ID NO: 216432
  chr15:90761175-90761326
  hypo

SEQ ID NO: 268076 - DNA, 200 bp, Homo sapiens
  chr15:90806189-90806389
  hypo
ccttgtagctgctgccgggacagctggacaccatgaggcctcaagaaattgtggaagaggaggagctggagcggatgaaggccctgctacaaagggagactctcatccgaagcctgggtattgtagagcagctcacccgtctgcagcaccctggcccccagggccagaaaaaacttcatgagagtcgggtgagggtccct

SEQ ID NO: 268077 - DNA, 374 bp, Homo sapiens; identical to SEQ ID NO: 216434
  chr15:90903997-90904371
  hypo

SEQ ID NO: 268078 - DNA, 120 bp, Homo sapiens; identical to SEQ ID NO: 216435
  chr15:91072203-91072323
  hypo

SEQ ID NO: 268079 - DNA, 37 bp, Homo sapiens; identical to SEQ ID NO: 216436
  chr15:91072383-91072420
  hypo

SEQ ID NO: 268080 - DNA, 95 bp, Homo sapiens
  chr15:91083105-91083200
  hypo
aacccagaaagcaccggaaaccttgagggtgtgatcacttacgtcgagaagaaattgaaacaagactttcattcttgaaccgttcccctacaaaa

SEQ ID NO: 268081 - DNA, 80 bp, Homo sapiens
  chr15:91162925-91163005
  hypo
atttggctttacagcgagtaagcccagctttcattgtctcttctcagattcagtccctgtcaggacgccctcgatcctgt

SEQ ID NO: 268082 - DNA, 88 bp, Homo sapiens
  chr15:91185745-91185833
  hypo
atctccgtccgcaccgaaggcgggcccggagtgggaggctcggcctggggcggcggcaccggagagggcacctcgatgcctgctctga

SEQ ID NO: 268083 - DNA, 53 bp, Homo sapiens
  chr15:91189346-91189399
  hypo
tgggccagctcccgccgtgtcccagctgctccccattccgtcccatggcccgt

SEQ ID NO: 268084 - DNA, 39 bp, Homo sapiens
  chr15:91268410-91268449
  hypo
attacaggcataagccaccacgcccggcccccagaggaa

SEQ ID NO: 268085 - DNA, 40 bp, Homo sapiens; identical to SEQ ID NO: 216437
  chr15:91311952-91311992
  hypo

SEQ ID NO: 268086 - DNA, 40 bp, Homo sapiens; identical to SEQ ID NO: 216438
  chr15:91312232-91312272
  hypo

SEQ ID NO: 268087 - DNA, 50 bp, Homo sapiens; identical to SEQ ID NO: 216439
  chr15:91312875-91312925
  hypo

SEQ ID NO: 268088 - DNA, 34 bp, Homo sapiens
  chr15:91313688-91313722
  hypo
agccaccgtgcccggccaatccccacatatttat

SEQ ID NO: 268089 - DNA, 43 bp, Homo sapiens
  chr15:91365251-91365294
  hypo
cctacctgtgcagaacgtcagtcccagccgagaaagcaagggc

SEQ ID NO: 268090 - DNA, 196 bp, Homo sapiens
  chr15:91407799-91407995
  hypo
gggttgggggatcccgcctggctgctccgccagctcttgtcctgcagaggcccccacttcgcaggtcagatgtgtggttcacctcctgtccagccttcccaggcctgcgcaggagcctaccacctgctcactggtttgtaagtcattcaggggctgggcgcttatagagtcactcaaggcggtgactcacacctgt

SEQ ID NO: 268091 - DNA, 107 bp, Homo sapiens; identical to SEQ ID NO: 216441
  chr15:91423323-91423430
  hypo

SEQ ID NO: 268092 - DNA, 285 bp, Homo sapiens
  chr15:91425022-91425307
  hypo
ggcaggaggagtgcccgtctgactcagaagaggacgagggccggggcgagaggaccgcctttatcaaagaccagagcgccctctgatgagcccactgcccaccccctcaagccaatcccctccttgggcactttttaattcaccaaagtatttttttatcttgggactgggtttggaccccagctgggaggcaagaggggtggagactgcttcccatcctaccctcgggcccacctggccacctgaggtgggcccaggaccagctggggcgtggggagggccgta

SEQ ID NO: 268093 - DNA, 92 bp, Homo sapiens
  chr15:91497739-91497831
  hypo
taatcccagctactcggtaggcgaaggttgcagtgagcccagagcgcagcctcccaaagtgtcgcctgggcgacacagcgagaccctatctc

SEQ ID NO: 268094 - DNA, 174 bp, Homo sapiens
  chr15:91500766-91500940
  hypo
attggagaagcaagcggagcgggaccccttaatgcgactgtagctgacgacggtctcccttgctcaggcatggacagctgggccatgggaccctggaggcagagctggagccacggctgttggaggcgttgcagggcctagtcatggctgaggtggccgcggggggctggcatt

SEQ ID NO: 268095 - DNA, 120 bp, Homo sapiens; identical to SEQ ID NO: 216443
  chr15:91501898-91502018
  hypo

SEQ ID NO: 268096 - DNA, 417 bp, Homo sapiens; identical to SEQ ID NO: 216444
  chr15:91503630-91504047
  hypo

SEQ ID NO: 268097 - DNA, 134 bp, Homo sapiens
  chr15:91557050-91557184
  hypo
tcactttgtatttgcgagttcggccagccaatttgtcagcattgacaagacctacagagagaaggaatgcagcccagcaagtcatgggccatctgttatgctagaaacagggaagctgccgggcacagtggttc

SEQ ID NO: 268098 - DNA, 117 bp, Homo sapiens
  chr15:91584151-91584268
  hypo
ttgacacacaggcaaatccacggagacagaaagcagatgagtggcaaccggcgcctggggaaggtgcggaattggaagtgactgcttcgtgggtacggggtttcttttggagggatg

SEQ ID NO: 268099 - DNA, 308 bp, Homo sapiens
  chr15:91840017-91840325
  hypo
aatcattgggctcacgctccttctgcccgatcgctgggctcacgctccttctgcccgatcttgggcgcacgctccttctgcccgatcgttgggcgcacgctccttctgcccgatcgttgggcgcatgctccttctgcccgatcgttgggagcacgctcattctgcccgattgttgggagcacgctccttctgcccgatcgttgggcgcacgctccttctgcccgatcgttgggcgcacgcttcttctgcctgatcgttgggcgcacgctccttctgcctgatcgttgggcgcacgctccttctgcctg

SEQ ID NO: 268100 - DNA, 319 bp, Homo sapiens
  chr15:92006743-92007062
  hypo
agccatgtgacctgcgtgctccctgccttcacctgccgccatgattggaagctttctgaggccgccttagaagccaagtagatgccaacatcaagcctctaatacagcctgcagaaccgtgagccaatgagagcctttttctttataaattacccagtgtcaggtttttctttataggaatgggagaacagaataatataccaatgtttcactgttagcattaatactacgatgaacacccttgtacagatatcttcgtatacatgtttgattattttcttaagataattactagaaatgggacgggcacggtggctca

SEQ ID NO: 268101 - DNA, 39 bp, Homo sapiens
  chr15:92021563-92021602
  hypo
gctgggattacaggtgtgagccaccgcgcccggctggga

SEQ ID NO: 268102 - DNA, 67 bp, Homo sapiens
  chr15:92459207-92459274
  hypo
tcttgcccccctcaggtgagcgtcctgaccaccctggagcgtaggttcaacctgcagagcgctgacg

SEQ ID NO: 268103 - DNA, 131 bp, Homo sapiens
  chr15:92509294-92509425
  hypo
gtcattttggcagccgcagggcatttgtgcccagcgaattatgggcagctctgatctgaagtaacaaggttgagtcgagataggttgagaaatgacccagacagaaacaggggcctcggctggcagcccca

SEQ ID NO: 268104 - DNA, 194 bp, Homo sapiens
  chr15:92987936-92988130
  hypo
cctcggtcatccagcgggcctttgaggacttggtcaatgccacgtggcgggagaagctgctgcaacggctgcacagcctcaatggcagcatcctgtggatccctgccttcatggcccggggcggcaaggagcgtgttgagtgggtcaacgagcttatcctgaagcaccacgtcaacgtgcgcactgcatacccc

SEQ ID NO: 268105 - DNA, 186 bp, Homo sapiens; identical to SEQ ID NO: 216447
  chr15:93153520-93153706
  hypo

SEQ ID NO: 268106 - DNA, 74 bp, Homo sapiens
  chr15:93176138-93176212
  hypo
ctaagactctctgcacgaaggctgcgatatgtatcagaacatggctggaaggtctaggacgccactgggaataa

SEQ ID NO: 268107 - DNA, 270 bp, Homo sapiens
  chr15:93179834-93180104
  hypo
ggtctgaaatgtgccgcggagataggctgcatggggcttgagagtatagactggaagcaactcgggaaaatcacagggcatagtgagcacatatgacccctgagagggccagggggtgctccagctgagacctccccaacaggtcgccttgagtcatccctggtatgccctgctctgtcacccccactcactcccatccaagagccccactccacgcctcaccggagttcgcagccacttgactttagcgccaaaaaactctttgccctc

SEQ ID NO: 268108 - DNA, 180 bp, Homo sapiens
  chr15:93316009-93316189
  hypo
aacaaacagctcctcgctttgtgttctccaaagctcagtgtccacgctgtgaagcccgggcaatccaaacagtgagccgtggtttatggaccatcgaggtggtcgctctgcagttctctgagctctctgtgtgcagagctctcactctgttcatctttgcagccacggtgtccgccacga

SEQ ID NO: 268109 - DNA, 120 bp, Homo sapiens; identical to SEQ ID NO: 216448
  chr15:93350343-93350463
  hypo

SEQ ID NO: 268110 - DNA, 43 bp, Homo sapiens
  chr15:93360310-93360353
  hypo
gatggatggccaggcgcggtggctcatgcctataatcccagca

SEQ ID NO: 268111 - DNA, 123 bp, Homo sapiens
  chr15:93362349-93362472
  hypo
aacttgaaaattaccggctaacactgtccctaggtgtctaaactcatgcaaaacatttgtttagtactcaaatatcacagctccgcattctgaaaaacatgaaacgtccgtcagaaattacta

SEQ ID NO: 268112 - DNA, 31 bp, Homo sapiens; identical to SEQ ID NO: 216449
  chr15:93368949-93368980
  hypo

SEQ ID NO: 268113 - DNA, 120 bp, Homo sapiens
  chr15:93399862-93399982
  hypo
aaaagagtctaacaaatctgtgagtcacgttattggttaagatagcagatgaagcacttagtgggagagatgggacaataatttttttttttttttgagacggagttttgctcttgttgc

SEQ ID NO: 268114 - DNA, 37 bp, Homo sapiens
  chr15:93432397-93432434
  hypo
taagttaaaaatttgccaggcgcggtggctcacgcct

SEQ ID NO: 268115 - DNA, 159 bp, Homo sapiens
  chr15:93433733-93433892
  hypo
cctgctatatttcttgattatgatctgtccgaatgactaaaggaatttagatttgggaagataaacagggacttgctctataatttgaaaattagtcctaaagaagcatttgggtagcatagttttaactaaaatcctaaacttcgttgccttctaaaa

SEQ ID NO: 268116 - DNA, 94 bp, Homo sapiens; identical to SEQ ID NO: 216450
  chr15:93504239-93504333
  hypo

SEQ ID NO: 268117 - DNA, 34 bp, Homo sapiens
  chr15:93505379-93505413
  hypo
gattgcaggcgtgagcccccgtgcccggaccctc

SEQ ID NO: 268118 - DNA, 77 bp, Homo sapiens
  chr15:93524851-93524928
  hypo
ttctacagtccgcacgaaggtaatcactgaagtgggctatcctatgtagagtcagtgtgtggcggaaaagaaatcac

SEQ ID NO: 268119 - DNA, 137 bp, Homo sapiens; identical to SEQ ID NO: 216451
  chr15:93546307-93546444
  hypo

SEQ ID NO: 268120 - DNA, 81 bp, Homo sapiens; identical to SEQ ID NO: 216452
  chr15:93567908-93567989
  hypo

SEQ ID NO: 268121 - DNA, 665 bp, Homo sapiens
  chr15:93588122-93588787
  hypo
ggccatggtggacacgccaggagatctgcaccccgtgggcggtcccagcccacacatggggaagccgagaggacggagcccgcgcctccctccacatctacgcgtctagcagaacacagggagcagggccaggagcgggacgagggcgcccaggaggggccggggggccaggggcagccccgcagccgccctgcctggcaggtcccgagtcctatcatacaggtgcagtttgtctttgttggagtggagcatcttgacatcctccaacgcgtagtaggcggccagtgtgaagttcacgtcgcccgtggtgaggaggtcgaagacgcaggcctggtagtacaggtcctccaccggcagcttctccttgcacttggccacggctgtctcgtatgggaaggtctcgggggctgtgggtgcagggctggcggctgccagcctgcgggcaccggtgccctcagcattggtgtggaaggcctggaagtcgatctgctggttgagggggcagccccgcaggcagaggtagagaccctggctgtcccagtcctccacagcattgaccacttcctctggcatgcggacggcaaaggtcaggtagcggcccacctggcgcaccacgatggtggtgccgatgtacttggcctggatctccacgtgctggcctgaca

SEQ ID NO: 268122 - DNA, 548 bp, Homo sapiens
  chr15:93595095-93595643
  hypo
ctgtgtccccgctccgctccgtcttcccccattcccaggcacccgaggccctctcagcctctcagtgtccacgcagggcagagacaaagggcagggctgtgccctacagccgccccctcccccttaccttgctggtggcagtggccgctgagccgggcagcacaggcgtgttggtgacctgcacgttcaggtaattattgtcgatgagcggccaggcgccctgcaccttgcaggtctggaagcggtcggtgaaagtcctgaggtgtgggtccccgaagaggccacagtgcgtgtagttgggggtggccgagtgcttgtgaaagctcttctcgtaatggcagatctcggggctgtccgagcgctcctggctgtctccggccggtgggagcgtgcgcaggcgtggctgcgaggtggggccatccttggagcagttgtgctggctcatgaggtcctctatgccatggacggccgagtggtaggccaggtcaccccggcaggtgcgggccgtccgccgcgtgcacagggcgtagctgcgcaaggctgcacag

SEQ ID NO: 268123 - DNA, 37 bp, Homo sapiens; identical to SEQ ID NO: 216456
  chr15:93642692-93642729
  hypo

SEQ ID NO: 268124 - DNA, 44 bp, Homo sapiens
  chr15:93897785-93897829
  hypo
aaaatctgcatttcctggaccgggcgcggtggctcacgcctata

SEQ ID NO: 268125 - DNA, 100 bp, Homo sapiens
  chr15:93957516-93957616
  hypo
ctcctggagtcgggctgtccagcggctgggctctcccctgactgcccccagctgaattccatgtcacccgccatccattgcctgccggcatctgccggtg

SEQ ID NO: 268126 - DNA, 32 bp, Homo sapiens; identical to SEQ ID NO: 216457
  chr15:94014475-94014507
  hypo

SEQ ID NO: 268127 - DNA, 42 bp, Homo sapiens
  chr15:94025234-94025276
  hypo
tcttttttttttttttgagacggagtctctctctgtccccca

SEQ ID NO: 268128 - DNA, 392 bp, Homo sapiens; identical to SEQ ID NO: 216458
  chr15:94048777-94049169
  hypo

SEQ ID NO: 268129 - DNA, 32 bp, Homo sapiens
  chr15:94442495-94442527
  hypo
ttacagacagcgtccatctcactggtgggtcc

SEQ ID NO: 268130 - DNA, 41 bp, Homo sapiens
  chr15:94778181-94778222
  hypo
ttaaaagccctggtggtggtcgggcacagtggctcacgcct

SEQ ID NO: 268131 - DNA, 220 bp, Homo sapiens
  chr15:94778462-94778682
  hypo
acaagagcgaaactccgtctcaaaaaaaaaaaaaaatccctggtggtttagactcattcattctcctccactgatgttcttcgagtccggcagcacctacgtacctgagattaacttgttagaaatgcacgttctcaggcaccccgcattaggagctctgcgtctagagcacagtaatctgtgctttaagaagccctccggatgattctggtgcatgcta

SEQ ID NO: 268132 - DNA, 43 bp, Homo sapiens; identical to SEQ ID NO: 216459
  chr15:94794563-94794606
  hypo

SEQ ID NO: 268133 - DNA, 76 bp, Homo sapiens
  chr15:94841669-94841745
  hypo
aggccttggccccagagggccggccttactccgggccacagtcttcctacacctcggtgcccagcagtctgtccac

SEQ ID NO: 268134 - DNA, 381 bp, Homo sapiens
  chr15:94881644-94882025
  hypo
agcattgtatcatgcgacgcacatgcatgtaacacacgcacaatacataattcatgtattatgtttgcaggcattttttttttttttttttttacttccattgatctgaaaaatgtggaggagggtctgccatcagcccttctttttgctttgggcggagtgactggagggacattattcatttcttttggcgtctgtttcaaagctcccagggaggagccgggcgggtcagcggtgtcagcactgaggccagctgagggcctggctgatgtggagttcagctgccctggctgagacaatgttggctgctttagtgcaggtgcggggacgcagcaaagaatggcaactttgtcaatttaatctctacgcctccagtttcac

SEQ ID NO: 268135 - DNA, 76 bp, Homo sapiens
  chr15:94925967-94926043
  hypo
ttggccatttgttggaacagcgtctgtccttgtgcccccaattaatttagcaagcgctgctttgtaaagtgccagt

SEQ ID NO: 268136 - DNA, 56 bp, Homo sapiens
  chr15:95019094-95019150
  hypo
ccaccaaagagggacggtctataggatgttgacatcttaaacgttcaacccgtttc

SEQ ID NO: 268137 - DNA, 212 bp, Homo sapiens
  chr15:95019400-95019612
  hypo
caacaagaaaacaactcccgccctctacctcccactgctacgtttggtccagagcctccaagcagggacttgtttgggctaatgaaggccttttcccatctgggacatttgttttcatagcagaggcggctgttaatcagcgtattccaaaaaagccaacgtgctccccagtttgagcgtgtgtttctgtcgccctgctgctgggattgtaa

SEQ ID NO: 268138 - DNA, 390 bp, Homo sapiens
  chr15:95398763-95399153
  hypo
gtttcctggggctgcggcccatttcggcggacccagcgctgaggcggcggcggcggcgaggcccaagaaataagaagtgggactggcggaggcttgcgcaggagccgctggggctggaggttgaccagttcctggaagacgtgcggctacaggggcgcatgagcggtggcttgttgagagaggccccaaatgaaaaactcttcttcgtggacaccggctccaaggaaaaagggctaagaagagaaccaaagtccagaagaagtcactgcttctcaagaaaccccttcgggttgacctcatcctcgagacacatccaaagtccctgcccccaaagacgtcctcgcccaccaggtcccgaacgccaagaagctcaggcggaaggagcagcta

SEQ ID NO: 268139 - DNA, 89 bp, Homo sapiens
  chr15:96007651-96007740
  hypo
gctacctcttgccccaacctcgctgtcccctacccctatgttctgtccaaaagaaaaatccctcagccgcaatggttgtttttattaaa

SEQ ID NO: 268140 - DNA, 34 bp, Homo sapiens
  chr15:96817336-96817370
  hypo
atctcctcctgtgagttcttcgcgagtataatcc

SEQ ID NO: 268141 - DNA, 81 bp, Homo sapiens
  chr15:96817400-96817481
  hypo
aaagaggctggctcatagttggcacttgattcggattgattaattgattagttaattaacgtatggctaaagcaattaggt

SEQ ID NO: 268142 - DNA, 212 bp, Homo sapiens
  chr15:98292427-98292639
  hypo
gtggacacgaacacccgccattgctatgcagcgggatgtctgcttagcaccagcaaagcgtttgggaataagtgagcaaaatgctttaatttgatagggttagaatcctgcaggctctggggtgaaaggtctccaacagctccgctcacactgaatatgcagaaataaaaaagtaaattgcttacatctgctgcaggcggcagggaaaatga

SEQ ID NO: 268143 - DNA, 136 bp, Homo sapiens; identical to SEQ ID NO: 216461
  chr15:98448107-98448243
  hypo

SEQ ID NO: 268144 - DNA, 56 bp, Homo sapiens
  chr15:98757743-98757799
  hypo
tctgcctgtgccaccggccgtgccgcgggggcatccatcaccgtaagtaccataag

SEQ ID NO: 268145 - DNA, 139 bp, Homo sapiens
  chr15:98947754-98947893
  hypo
cagtggcagggcaccgtgccatgccagccagcgcacataaagaaggcaaggtggggaagctgggtaggttccggtagaaacaccccatccctgcacagacacctgcgacaccatcaacctgagacgtccacccactgtc

SEQ ID NO: 268146 - DNA, 259 bp, Homo sapiens
  chr15:99055007-99055266
  hypo
ttacaggcgtcagcctcggcacccggctgagatcctgtatttctaaccagctccttggtgatgccttgctgccgggcacaggccacgctaccgagtcgcaaggcaggaaaataaggctcagagacactcaggaacttcaccagggccacccgctcctaagggtcagagccaggatctgaacccaggactaacttactacaaaacccaggtgcttccacaatggcacccatgacacaagttctgacgtcgtgctaaaaga

SEQ ID NO: 268147 - DNA, 123 bp, Homo sapiens
  chr15:99105788-99105911
  hypo
ctggccactggctgcgatgctcataaatgcccaggccaggctgggcacgtcagagcgtccgcgggagctggcgcatgtctatagagctggcagggaggcccgtctcagcgtgagaagaggcct

SEQ ID NO: 268148 - DNA, 212 bp, Homo sapiens
  chr15:99136066-99136278
  hypo
aaaaaacaaaaagaaaaccaaaggaagttagttaggctcaatcgctcctgcacctggatccctggctgctggtggggtggaggtgggaaaattgcttgagcgcaggagtttgagtccagcctggacaacatagcaaaaccctgtctctaaataaacgaataagtaaataataaaaagcgaattcctataagattttgcgcattttctgatgt

SEQ ID NO: 268149 - DNA, 180 bp, Homo sapiens
  chr15:99161542-99161722
  hypo
ctttcacagcacacgataacacatagcagtgggtcctgctgagccctgtgcacggggtatgttgaattcactcacaagatgcactcctgagaaggaggtcgagaaacacaggaacaagctggtgaaagtccgggcgaaaggcaggtaatagtggtggctgtgttgaaacaatttccagtc

SEQ ID NO: 268150 - DNA, 56 bp, Homo sapiens
  chr15:99190074-99190130
  hypo
gtattttagaattagagagtaaaagaaacctactaccttcctttacatcaggtccc

SEQ ID NO: 268151 - DNA, 45 bp, Homo sapiens
  chr15:99190189-99190234
  hypo
cttttattagctatcttaaaaaaatttattactggcatcaattag

SEQ ID NO: 268152 - DNA, 33 bp, Homo sapiens
  chr15:99190315-99190348
  hypo
tctctcctgccactgctgggctgtttccctctt

SEQ ID NO: 268153 - DNA, 223 bp, Homo sapiens
  chr15:99210728-99210951
  hypo
tagagaccatggcacgcatgctgtgtgtcgaaggccaggtccgcctgtctgcctctccagcagatactctctggggctatttttttctgcttggttgtcatcctttggtttaaccaggcgccagggctcaggcctggacctgctggattccaaagaagacttcgaggtggccgagcttgtctggcttccagaggagctttctctgtcccgcccgggggagtgg

SEQ ID NO: 268154 - DNA, 76 bp, Homo sapiens
  chr15:99215806-99215882
  hypo
aaaaaaaaaaaaagtgtaggttagcaaaagtgcctacagttcaaatgcttccatgctaaacgttgtatttcttccg

SEQ ID NO: 268155 - DNA, 37 bp, Homo sapiens; identical to SEQ ID NO: 216469
  chr15:99244847-99244884
  hypo

SEQ ID NO: 268156 - DNA, 177 bp, Homo sapiens
  chr15:99250371-99250548
  hypo
atacttggctgctgagctgtcgttcaggccttggcaactgacgctctgcagaacggaccaggagtgtgcggtggtggagtccggctggcctgggttgcagatttaactttcgcctctgcctctgtgtgcctctgggctgtaagctttagtttgcacggttaacggggatggcctctc

SEQ ID NO: 268157 - DNA, 63 bp, Homo sapiens
  chr15:99250992-99251055
  hypo
cttccccaacctcacggtcatccgcggctggaaactcttctacaactacgccctggtcatctt

SEQ ID NO: 268158 - DNA, 257 bp, Homo sapiens
  chr15:99254456-99254713
  hypo
taagatggccattcgaaaacattaagcacagaagaatcccattcaggtaatcttctgttggctggctgtagaactacggagaacatctggagaaacacgtcaagggtgtgtgtgaaatcgttgagcctactcgattttgtcgtgctgttgcgcggttttcacttggcactgtcctttaaactccttctgtgccgtgactctgcagtgtctggcagcgtagtagactctactccctctatggacgtgatccctctgtg

SEQ ID NO: 268159 - DNA, 224 bp, Homo sapiens; identical to SEQ ID NO: 216470
  chr15:99256135-99256359
  hypo

SEQ ID NO: 268160 - DNA, 124 bp, Homo sapiens
  chr15:99271450-99271574
  hypo
atgtgtcctaggagaaatcacgcctgttgttgccgctggccatcacagatcccggtgcctgtctgtgaaaggctggccgggctgggtggggatgagaatggtcgggttgtctagactcagcctg

SEQ ID NO: 268161 - DNA, 209 bp, Homo sapiens; identical to SEQ ID NO: 216471
  chr15:99276212-99276421
  hypo

SEQ ID NO: 268162 - DNA, 341 bp, Homo sapiens
  chr15:99338922-99339263
  hypo
tcatgagccactgcgcctattatgtgtttcttatagaaaatctctctaattttttaataagcatgtttttacaaatgctgtttcctgagaactgtcgcaccacatgcgacatgccatgcatgcgactggaacatgccagatatttgtgggtggtcccttcgtgtcacctgtgccttcttaccaagtaatttgaaacacccgtgtaaactacctttggcaaataggatagctaaatcaccgctaagatttataatttactttttggatatctgaaacatcaacaatacagccatccatggcgtgttcctctggagtgtggtccgtgccgtctctgcctgctc

SEQ ID NO: 268163 - DNA, 38 bp, Homo sapiens; identical to SEQ ID NO: 216472
  chr15:99340602-99340640
  hypo

SEQ ID NO: 268164 - DNA, 180 bp, Homo sapiens
  chr15:99349404-99349584
  hypo
tattactggtttaccgtgaaggctctatgtccagagtggacaggacaagtggaagagtggcacagggcgaggtgtggggggtggcgtggagctccttttcaggagtctctaagaaggtgggactccagcggcaatgccttgtccatgtgctaagccagccgagggcgcacgaagtgctgt

SEQ ID NO: 268165 - DNA, 172 bp, Homo sapiens
  chr15:99352651-99352823
  hypo
agcctcccaagttccgctggcgtgagaggcttgcctggtgccagggctctgggcattgggaacattgcctggtctaccgggcaagaaacgtgaaccaccgcagtgaactggcagcgcgttggcatttttccctccatgtttttataaaaccgctgagtagacaccagattat

SEQ ID NO: 268166 - DNA, 120 bp, Homo sapiens; identical to SEQ ID NO: 216473
  chr15:99354751-99354871
  hypo

SEQ ID NO: 268167 - DNA, 69 bp, Homo sapiens
  chr15:99364726-99364795
  hypo
ttttggaagagagtcgaaggggaaggggtggcttgccagtcagttgagtgatgcgtgagggaggcgtta

SEQ ID NO: 268168 - DNA, 159 bp, Homo sapiens; identical to SEQ ID NO: 216474
  chr15:99371126-99371285
  hypo

SEQ ID NO: 268169 - DNA, 93 bp, Homo sapiens
  chr15:99400735-99400828
  hypo
ccacgcccagcctacgtctttaaaaataaatgtaaatacccaaggctcacagttccgttcttccatctagtctagcaccgtccagtggaagtt

SEQ ID NO: 268170 - DNA, 42 bp, Homo sapiens
  chr15:99411823-99411865
  hypo
cactgaccctgaagtcaggtcgcccaggttggaattccagct

SEQ ID NO: 268171 - DNA, 136 bp, Homo sapiens
  chr15:99426895-99427031
  hypo
ctcagcgcctgccccggctaggctgtcctcctcctgtgccagccgtgggttccctgagtccctctgcagtcattcatgggtgctgaaaataaagataccctttctgtcgaaagtgttcgccgggctgcctctgcct

SEQ ID NO: 268172 - DNA, 85 bp, Homo sapiens
  chr15:99430912-99430997
  hypo
agcgggaatgtgagcgttgtttctgtaaccagttttactgaacctcacagatccattatacgacgtgaattttgtgggaataaca

SEQ ID NO: 268173 - DNA, 79 bp, Homo sapiens
  chr15:99433317-99433396
  hypo
acgaagaggcttagcggaggtggcttctaatatcctatggttctgtgggctcggagatgctactcacccacttgtcaga

SEQ ID NO: 268174 - DNA, 120 bp, Homo sapiens
  chr15:99433456-99433576
  hypo
ccagacagttaagacattctgagtcacaggatgaggttaaaggtcagcacaaaatacaggtcataaagaccttgctgatctagcagatgcagttaaagaagccggcgcaaacccaccaaa

SEQ ID NO: 268175 - DNA, 494 bp, Homo sapiens; identical to SEQ ID NO: 216475
  chr15:99434483-99434977
  hypo

SEQ ID NO: 268176 - DNA, 108 bp, Homo sapiens; identical to SEQ ID NO: 216476
  chr15:99440185-99440293
  hypo

SEQ ID NO: 268177 - DNA, 211 bp, Homo sapiens; identical to SEQ ID NO: 216477
  chr15:99451866-99452077
  hypo

SEQ ID NO: 268178 - DNA, 144 bp, Homo sapiens
  chr15:99453279-99453423
  hypo
aatcagaaccgatgcgtgtttggctttggcttgtttcgctggtgtctggatttacctggcgacacttgttgctctgggggatcttagagggaagcacgctgactgacctagggctgaacagcaggctgacgaccagcgccgcct

SEQ ID NO: 268179 - DNA, 108 bp, Homo sapiens
  chr15:99454576-99454684
  hypo
ccacgtcgaagaatcgcatcatcataacctggcaccggtaccggccccctgactacagggatctcatcagcttcaccgtttactacaaggaagcgtgagtttctgctt

SEQ ID NO: 268180 - DNA, 407 bp, Homo sapiens
  chr15:99459879-99460286
  hypo
tggcttttcttttccgagaagacaaaatccccatcaggaagtatgccgacggcaccatcgacattgaggaggtcacagagaaccccaagactgaggtgtgtggtggggagaaagggccttgctgcgcctgccccaaaactgaagccgagaagcaggccgagaaggaggaggctgaataccgcaaagtctttgagaatttcctgcacaactccatcttcgtgcccaggtacccagctcatgtgaaatttcagttggcaaaacccactgctcaggccggttctgttgcctttctccccaccaggtagtgtgtaagtcagcagctggggggtacaatacagtagccactgagacggagccgaaaaagatgacaggttcggtgaagtgagtccctgcggaagccagtcagc

SEQ ID NO: 268181 - DNA, 41 bp, Homo sapiens; identical to SEQ ID NO: 216478
  chr15:99461820-99461861
  hypo

SEQ ID NO: 268182 - DNA, 233 bp, Homo sapiens
  chr15:99465437-99465670
  hypo
aggaacaccacggccgcagacacctacaacatcaccgacccggaagagctggagacagagtaccctttctttgagagcagagtggataacaaggagagaactgtcatttctaaccttcggcctttcacattgtaccgcatcgatatccacagctgcaaccacgaggctgagaagctgggctgcagcgcctccaacttcgtctttgcaaggactatgcccgcaggtatggtatg

SEQ ID NO: 268183 - DNA, 278 bp, Homo sapiens
  chr15:99482498-99482776
  hypo
atggcatacctcaacgccaataagttcgtccacagagaccttgctgcccggaattgcatggtagccgaagatttcacagtcaaaatcggaggtgtgtccttagctttccaggtctgggcaagaactaaactcaggtgttttgaggactttgttggcattagtctgcccctggagaggttttctagtgtgtcccttgagtgcacggactccttcttgggaatgatgtgattgtctccagttgatggtcacaaacctggcacggtcggtcccaatgctga

SEQ ID NO: 268184 - DNA, 311 bp, Homo sapiens
  chr15:99497068-99497379
  hypo
gttctgcgggaatcgagtgcttgagtgggacccagacagacaggaagggcgctcctgctcagttagccccagtaagctcactgaggcacacaggccccatgtccacagccgctcctggctgaggcgtggttcctaagacgacccttactgttgagggctgccaggagggagagacacattcagccccgcaggtcctctgggaatccggtgagcgtcggcaccgggctggggccgtgctgattcccggcagcgtgtgggaatgtgcgggtgcctcgtggcctgctgacatcgcacacaggtcacagcctgtc

SEQ ID NO: 268185 - DNA, 274 bp, Homo sapiens
  chr15:99504099-99504373
  hypo
gcccagtggccggcgccgaggctcgtggcgtcacgccccccccgccagggctgtacctccgtctccctggtcctgctgctcacaggacagacggctcgctcccctcttccagcagctgctcttacaggcactgatgatttcgctgggaagtgtggcgggcagctttgcctaagcgtggatggctcctcggcaattccagcctaagtgaaggcgctcaggagcctcctgctggaacgcgacccatctctcccaggaccccggggatcttaaggtc

SEQ ID NO: 268186 - DNA, 137 bp, Homo sapiens
  chr15:99505059-99505196
  hypo
accgtgttcgtggccgacctggcctctcctggcctgtttcttaagatgcggagtcacatttcaatggtacgaaaagtggcttcgtaaaatagaagagcagtcactgtggaactaccaaatggcgagatgctcggtgc

SEQ ID NO: 268187 - DNA, 177 bp, Homo sapiens
  chr15:99506042-99506219
  hypo
cctactctggaaactgatctcggagttaaggcgaattgttcaagaacacaaactacatcgcactcgtcagttgtcagttctggggcatgactttagcgttttgtttctgcgagaacataacgatcactcatttttatgtcccacgtgtgtgtgtccgcatctttctggtcaacattg

SEQ ID NO: 268188 - DNA, 105 bp, Homo sapiens; identical to SEQ ID NO: 216482
  chr15:99512752-99512857
  hypo

SEQ ID NO: 268189 - DNA, 97 bp, Homo sapiens
  chr15:99954583-99954680
  hypo
ccacagtgtgagaacgtgcctcgactcgcctgccggtggacagcacacttggaacaggactggtgtcgccagctgccccagccgaggccaccctaga

SEQ ID NO: 268190 - DNA, 472 bp, Homo sapiens
  chr15:99966717-99967189
  hypo
ctcatggtcacttccaggtgcgcagagtccaggaactgtcccgttttccagatgaggaaatggatgcttttgagagtcacgtcacatgcacggagcacaggtgtgcccgaggccgcgccccgcagcagagctgggattagaatctagctgttttggagccatcgtcttttccgtgatgttctgaggggcctctctgtttcttttgaggagtttcatgctgattattgagacaaggtggttcaggcaagaccgctctcgagcatggacgcaggcacgtaaaagttcatgcacaatcacaccacaggcattccagagcacctcagacgggaggggcctgcgggagggtaaagtcagagggcctgggcgggcggcagatgcagtgatgaggagagagcatcccggggagctactctggggatcggcgtgggaggctggacgaagcagcgtggacggagcacagatgtggtcacag

SEQ ID NO: 268191 - DNA, 98 bp, Homo sapiens
  chr15:99984008-99984106
  hypo
aggtgtgagccactgcgcccagccaggagccgtgcccgctctttcccaaacagctgcccagcctacccctcctctcctccacgcggcctctcaagacc

SEQ ID NO: 268192 - DNA, 234 bp, Homo sapiens
  chr15:100007568-100007802
  hypo
aacaaggatgggtacgactgcgctgggtagagtgggaagaggtggttttctaggagaaaggattagcgtggacaaaggtgtgggggcagagggtcgcctggggctgaaaccagcaggcctggccggaagcatggcgcaaagccaggctgccagcgggggtcccggactgagtgtcccttgttctgcaggctgttgtgagccctggagagagtcacaagacgggtgtgtttttct

SEQ ID NO: 268193 - DNA, 92 bp, Homo sapiens; identical to SEQ ID NO: 216486
  chr15:100274190-100274282
  hypo

SEQ ID NO: 268194 - DNA, 99 bp, Homo sapiens
  chr15:100290729-100290828
  hypo
gccgacttgccgagcgtttgatgaatatataatcaactatgcctatatcccctcctcttcacatgtaacatgtggattcagtgacgtgaccgcaccctc

SEQ ID NO: 268195 - DNA, 209 bp, Homo sapiens; identical to SEQ ID NO: 216487
  chr15:100649031-100649240
  hypo

SEQ ID NO: 268196 - DNA, 204 bp, Homo sapiens; identical to SEQ ID NO: 216488
  chr15:100726606-100726810
  hypo

SEQ ID NO: 268197 - DNA, 254 bp, Homo sapiens
  chr15:100739956-100740210
  hypo
tggatgggcactccatgctgcgatcctacgccagatctgtctaacttcagcgcctagggctgggaccaggtgagccagccaggtaagacaccgagggtgcaaggtttaagaggccctgactcccctcaggcgatgcccctgcacccgcacaccctgagagggagcgcctcctcacaatgcgcatcccgggcgtgagccggggtctgtgctgggtctcgtggacagcacgccccggaaggctgcacagaatgttc

SEQ ID NO: 268198 - DNA, 102 bp, Homo sapiens; identical to SEQ ID NO: 216489
  chr15:100791527-100791629
  hypo

SEQ ID NO: 268199 - DNA, 145 bp, Homo sapiens
  chr15:100851744-100851889
  hypo
gttactaaagtggggcgggcgtgtgttgcataagagtccaggggagaactgggaagagccgacaccacttcttgtccaattcctctgtttggtggagctgcatgtgggaaaaaggattcagacacatatgcgcacacacaaaaaa

SEQ ID NO: 268200 - DNA, 177 bp, Homo sapiens
  chr15:100880285-100880462
  hypo
cagaagacagagaacccctgcggttcatgctctgggtccataccaagcttcgctgggggcagcccatctgccggccatgtgtgcggctttcggggcacgatggagaagctgagtgctcgtctgggcgccagtgtagccacatgatcaagtgtgcgcgcaggcagggcaagtgcacac

SEQ ID NO: 268201 - DNA, 42 bp, Homo sapiens
  chr15:101059359-101059401
  hypo
tctcaaaaaaaaaaaaaatccgccaaaaaatatacttggcca

SEQ ID NO: 268202 - DNA, 237 bp, Homo sapiens; identical to SEQ ID NO: 216491
  chr15:101099270-101099507
  hypo

SEQ ID NO: 268203 - DNA, 35 bp, Homo sapiens
  chr15:101194866-101194901
  hypo
cctgagcccccatggcgctacgagcccccaaagga

SEQ ID NO: 268204 - DNA, 193 bp, Homo sapiens; identical to SEQ ID NO: 216492
  chr15:101267000-101267193
  hypo

SEQ ID NO: 268205 - DNA, 106 bp, Homo sapiens
  chr15:101427825-101427931
  hypo
gctcgccatggcgccggctggatgccctgagtcgtgggcggctgctgcaccagctggctgacctggtggagagggaccgcgccaccttggccgtgagtacatgcac

SEQ ID NO: 268206 - DNA, 163 bp, Homo sapiens; identical to SEQ ID NO: 216493
  chr15:101464764-101464927
  hypo

SEQ ID NO: 268207 - DNA, 174 bp, Homo sapiens; identical to SEQ ID NO: 216494
  chr15:101469411-101469585
  hypo

SEQ ID NO: 268208 - DNA, 147 bp, Homo sapiens
  chr15:101535257-101535404
  hypo
ctgtgaccttgttgaagtaacggtcccttcagggcacgtgtgacggaggttgttgctccagccctggtacaacaagcagtcacgggccacgcgatgatgtcttagggagatcatgcatgtgccatcgtgttttttgtgtggttgagc

SEQ ID NO: 268209 - DNA, 100 bp, Homo sapiens
  chr15:101591989-101592089
  hypo
tgggcccagcacacggaccccagtgagaaatcagaggatgtgcagtacttcgacatggaagactgtgtcctgacggccatcgagcgggacttcatctcct

SEQ ID NO: 268210 - DNA, 41 bp, Homo sapiens
  chr15:101679904-101679945
  hypo
agcagtaggcagtgcgtgtgtgtgcgcgtgtgtgtgtgtgg

SEQ ID NO: 268211 - DNA, 243 bp, Homo sapiens
  chr15:101719768-101720011
  hypo
gaagcaaaagcacacgctgaaaaccctcttcacgctgctggcctcctgcgtacgaggaaggtacccctctcccaggtcttctgtggaggcaggagcgggcctgcttgctcagcacggggtctccggcaccagcacggagcttggtgcctgggggatcagaaaatgctggcagatgggaaacatgcaggacgcacagggctcaccattccaccaaccctgcctccgccccgtggcgcaggtttt

SEQ ID NO: 268212 - DNA, 107 bp, Homo sapiens
  chr15:101720485-101720592
  hypo
ggcacccgtgagtccggtcttagagcaagaattagagcagaattacaggtcctccaaagtgccgccgctgtttccaactttccttcccacaccgcttatgctcccca

SEQ ID NO: 268213 - DNA, 224 bp, Homo sapiens
  chr15:101729316-101729540
  hypo
agaagaaacaagcgcgaacacaagatcgagccggcgagcgtggcgggcgaaagagtcccagcccgggcctgccacgaagcggccaccaggcttctctcccaaggtgtttctaaacccggcccacccagcaccaggtatggccctctggcctccacgcccgtgctctctcagcaccctctccactccagtcaacacggaccacacaccagcgtcacacgtgaccc

SEQ ID NO: 268214 - DNA, 81 bp, Homo sapiens
  chr15:101739034-101739115
  hypo
ctaagctgagcagctgggagcgagatcccacggcctgcaaaaaccctaaaacatttacccgccaaccctttacacagcaca

SEQ ID NO: 268215 - DNA, 157 bp, Homo sapiens
  chr15:101785784-101785941
  hypo
taacagacaggggaacgtgaagctgccggtgcaatggaaacagtcacgcacaatccgctattgacagccacatctatccctggaatcaatccgctattgacagccacagccatccctggaaatccctggaatattgtttgagcgcttcaagatcttg

SEQ ID NO: 268216 - DNA, 170 bp, Homo sapiens
  chr15:101809434-101809604
  hypo
gaacaaggagtggccagaaacgtaggagaaagccaggcaaactcggtgttttggaagccaagggaggtgtttcttcaggagtgctcaaggaccgcaaaggatgctaacttcaggcgaggaccgaggcgacccatcaccccctgccacacgtgacctgaagagcagcttca

SEQ ID NO: 268217 - DNA, 390 bp, Homo sapiens
  chr15:101818142-101818532
  hypo
caagaaagtccccaccgatcctcaaggttctttctccaaaatcaaagccttttaggaaagaacgatcatagtaactgctctaacctgtgttgaattatactgtatcaccacaagacacgatcacagagttacttataatagtgtcctggctgtgttcctctgcctgcaacgccgtcccgcaccctcttccaccactcaaacgtcaccacctttatggtgaccataaccatcctatttgaaatgtgaccttgggtttttctggagcatttgaagtgcacatacctagctgtgtttcaaaagaagggttgggaattgggaatagaactgaaaaaataatgaataggtgacaacatccgagtgctgcgtcaccactgtcgccaggagcagtgt

SEQ ID NO: 268218 - DNA, 187 bp, Homo sapiens
  chr15:101845352-101845539
  hypo
ctgtcaggtgcagggcgccgctcctgaaacagactctggccgacagtctggaggaaggtggacggatggatggatgggagtgcctgccctctgtgggcagctaggcacccttacccggccaggaggcacgtgcggcagcagaactgaatgaagagcttccgttcgcacagccggttggacttcacca

SEQ ID NO: 268219 - DNA, 465 bp, Homo sapiens
  chr15:101850124-101850589
  hypo
tcagcgtcgggcctcggcttccacctgcagttgccaacccagcaggcctgcgtcctgacctgcatgttccaacgcagcccgtctggccacatgctccctcggagctgcctggcacagcagcagcggacggccacggcgtccaccagcattctggggcctggaggatgcctgtggttctcagctcaggctgtccaagtggggagagaccccgcagaaccaatcggaccaaggccttgcttcctttgggaggcgtccacactgacgctcttcctggggggtgcttctccaagacccggtgtgtcagccccagcactgtcagcctctgcagggccgaaagctgcccctcacctgggaacaagtacccaggaaactcctgtcctccactgcccaaagagaggtttgcggtggggctgcccgcctgctgcctcctgaggggcaaagagaggtttgcggtggggctgcctg

SEQ ID NO: 268220 - DNA, 196 bp, Homo sapiens; identical to SEQ ID NO: 216497
  chr15:101862667-101862863
  hypo

SEQ ID NO: 268221 - DNA, 116 bp, Homo sapiens
  chr15:101865103-101865219
  hypo
ctcctggtggtgatagaacccgcggcggcaagacaggcactgcgtcgcagctctgctggagcaggtctcacaccccttgtggcaccggcgacagcgtcttgctgctgtgtccccaa

SEQ ID NO: 268222 - DNA, 424 bp, Homo sapiens
  chr15:101910612-101911036
  hypo
gtgagatggaggtgcgaaccaccacgtgctccaagtagaccacccgctggtccgagtgctccgcgcaggcgctggtcagggccgtagtccgcagcacctgcactaaggggatgctcctgggggagaagggagggctcagcacttggcaccggaagcatgaagtctcacccacacagccaggagctccagcgcccgtccactctatccccactgcagcctcagggccctgcgggccccggggagccgcagcagcctctgactgcctcacgtggatgctccactgtgaactttatcacctgtcctgaagacgtttatgcctctggaatttgcttacagagatttgaaagatggttcggctgggcactgtggctcacgcctctgatcccagctctttgggaggccgaggcaccgcctgctgccaccg

SEQ ID NO: 268223 - DNA, 288 bp, Homo sapiens; identical to SEQ ID NO: 216498
  chr15:101938605-101938893
  hypo

SEQ ID NO: 268224 - DNA, 33 bp, Homo sapiens; identical to SEQ ID NO: 216499
  chr15:101949373-101949406
  hypo

SEQ ID NO: 268225 - DNA, 32 bp, Homo sapiens; identical to SEQ ID NO: 216500
  chr15:101949766-101949798
  hypo

SEQ ID NO: 268226 - DNA, 137 bp, Homo sapiens
  chr15:101966967-101967104
  hypo
gctcggtggcagaacggcagaaagtggctgcagccaccctcaccaaggctcggtggcagaacggcagaaagcggctgcaggcaccctcaccaaggctcagtggcaggatggcagtgcccccccgggaaggtggtttc

SEQ ID NO: 268227 - DNA, 42 bp, Homo sapiens
  chr15:101967391-101967433
  hypo
caagaccagacgcacgcggggcaggggcggctgctgctccgt

SEQ ID NO: 268228 - DNA, 129 bp, Homo sapiens
  chr15:101968052-101968181
  hypo
tgccccaggcccctcggctcgcaggctgccacgcccggccttacctcctattttggcattgtacgctatgcccacgatgcagtaggaattgtttgctgaagcagcaacttctcccgcacaacgagtgcc

SEQ ID NO: 268229 - DNA, 214 bp, Homo sapiens; identical to SEQ ID NO: 216501
  chr15:101974813-101975027
  hypo

SEQ ID NO: 268230 - DNA, 114 bp, Homo sapiens
  chr15:101977435-101977549
  hypo
cagcagggcaagagggccatcgtgacaagtgagagacgattacatggtttcgtgagagcccatcatggcgagatgcccaggcccacctccggcgcagcactggctcacctaggg

SEQ ID NO: 268231 - DNA, 39 bp, Homo sapiens
  chr15:101998574-101998613
  hypo
ataaacccaaatgccgtagagacccgagctgggcaatgt

SEQ ID NO: 268232 - DNA, 172 bp, Homo sapiens; identical to SEQ ID NO: 216502
  chr15:102004885-102005057
  hypo

SEQ ID NO: 268233 - DNA, 213 bp, Homo sapiens
  chr15:102017128-102017341
  hypo
taggtgggatgagacgccataaccagggacccagggcatgtggggcggggaagcagcgcagtggcagagcctcttccacctccctgcacggtcctgaccttccacagcagctgcagcactatccacctccccacgcagtgataaagaactcactgacctaaacgtcaggaaagaatgacacaaatgatgggccagctacgccaaggtacactg

SEQ ID NO: 268234 - DNA, 236 bp, Homo sapiens
  chr15:102020331-102020567
  hypo
atcactcagagcttcggtagtctgctccatttgggctgtttctgcccactctcactgagaagatggattttcccaacaaggactctagaagtgatggatgctggccggtggcagaaatacaagagcccccgaggaagattagagaactaacagtgacagcctcttcccagcccaattcagtaaatgggtccatgtgcggctgggcagagccacaggtcgggcgtggctgcggggcc

SEQ ID NO: 268235 - DNA, 283 bp, Homo sapiens
  chr15:102022132-102022415
  hypo
aggagccagtacagattccccgagacagagccatgctggtgtgcagccctttgagtctgtgcgcgttcacgcacacgcatgtgcacgcacccggtggacagagggagaaacggcggctggtggggtctccggaggttgctatgcctcttgtctgttcattctggcagaagccgaaaggcttttctgtctgatgatttacctttgtctgggaagcaggtacgaggtgacagcagtagaaggtgagtcagagggtgtggggtccggccctggcctgtcagtcact

SEQ ID NO: 268236 - DNA, 75 bp, Homo sapiens
  chr15:102030590-102030665
  hypo
gtgaacccccaggccgcgcaggtgaacccccaggccgtgcaggtgaacccccaggccgtccgcttagcctcgctg

SEQ ID NO: 268237 - DNA, 468 bp, Homo sapiens
  chr15:102043027-102043495
  hypo
ccacctcctgggcctcactccgccctatacacgcgcacacttaatgacatctctgatcatgtcttcaggacgcataccctctttgacttgaaaaagtaacaactgtttgtggccttctcacaggccgaaaagaacaagcggggtccagtggagaaaggtgaggcatgggaaggcctggcccgagcactgtgacttcagcgaggcaccctccacccctctcagctttcctggtctgaaagtagaatttcgccagagggtgagccgacaggtagagctgtttccacctgcgtgtgctgcctgtgagctggggaactgcccacactgggaggggttgggaagcgtaggagggcacctgtcgcagacgttgaggaggggctgcctttcccctccaggggctgacctcccaggtgattcccagagccagaccacaattccagaattcagtgaaaacagcgccaaatcctattc

SEQ ID NO: 268238 - DNA, 161 bp, Homo sapiens
  chr15:102070179-102070340
  hypo
tggccttctggatgctttttattttgtggttatgcagcatcaggacagccttttaacatttgagaagtgaaccgtcttagtgggaggcaaaaccctgcttccctctacagaagcctaaaaggccaagaacgtgcactccctgacaccggtggggggtagca

SEQ ID NO: 268239 - DNA, 156 bp, Homo sapiens
  chr15:102070859-102071015
  hypo
agcagcacactcatggagggcgggtggcgccctgggtgctgctgtgtgccagctgtcaatcaccgtgggctggaatgtggattacaagcctggaaggggtatcgcgcactcagggtttagccacagtatacaaacggcttttccacctttcctgtc

SEQ ID NO: 268240 - DNA, 504 bp, Homo sapiens
  chr15:102075402-102075906
  hypo
acagggccggatctcgcagccttgccgcagcctcaacactggctttgtctcgtatgggacagggagctggcggagggtagggccttcaaacagcaaagggacatgtggcttgtacgtgaaagagccaccctttccgcgtgttgaggcaagactgcaggggcacatgtgcatgcagggaggtgaggccaggcgcttgcgatgttccaggcgggaggtggtgaccacagggcccagggtggtggcaatcatgggggcaatagtggccccatggagggcgcacttccgtgtcctaaagtaatggtgtggaaggaggggagtcaagaagacgcaaatgcatggtgcgtgcgacggaactgccattctccggggtgggcgagacaaggtggagcaggggccagagacccgagaggcccaggtgtgcaggacaggccagtgggaaacgcgtgtagggttgtttgcacagatggtctttcaggccaggagaattctcggctcatgggtaga

SEQ ID NO: 268241 - DNA, 36 bp, Homo sapiens
  chr15:102076394-102076430
  hypo
ctggtcttgtggggcggggggcgggggtggacggcg

SEQ ID NO: 268242 - DNA, 580 bp, Homo sapiens; identical to SEQ ID NO: 216505
  chr15:102076807-102077387
  hypo

SEQ ID NO: 268243 - DNA, 184 bp, Homo sapiens
  chr15:102157563-102157747
  hypo
taatcgatagcgtcgtaatccatctagttaaaagtttgcagaagcaaggagagagggctggagcgagatccacggaagcaggggtttgcttccgtctcttaaccctgagccgccacaggtctacgtcgtggggccaatgttattatatctgcaaactctggccgaacttacacactacagccct

SEQ ID NO: 268244 - DNA, 152 bp, Homo sapiens
  chr15:102226031-102226183
  hypo
aaagataattgtgacgaagcgtgctatgtgctctcatgaaaaggtctgcttcgcttttaatactcaccagtgccctggacaattcatgggtttgagggcaaaagtgtccttttcaatctcaaaggtaaacatgttctcgctgtaatgctgcc

SEQ ID NO: 268245 - DNA, 174 bp, Homo sapiens; identical to SEQ ID NO: 216506
  chr15:102251172-102251346
  hypo

SEQ ID NO: 268246 - DNA, 119 bp, Homo sapiens; identical to SEQ ID NO: 216507
  chr16:84351-84470
  hypo

SEQ ID NO: 268247 - DNA, 259 bp, Homo sapiens
  chr16:91469-91728
  hypo
ctctgattccttatcaatcccgaaacatttctgggggttcatccgggattggagacgacagatttactttctcctttgcctgcggcactagagccccagggccaggggagacccagcatccaaggtgcaccacgggggagcttcacccggatagaagccggcactccccacgtcccggcgccctgtccggcagcgcaacggaaccagggatggggctgtaggatgataccagcacttcgggaaccatggtaaggagtaa

SEQ ID NO: 268248 - DNA, 391 bp, Homo sapiens
  chr16:94325-94716
  hypo
cacacacacacacacaaaatctcagaggttctccagggtgcaaataaaagcaccagtcagttttataatagacttcgtaaggcattttggttgtacactccgtttaaccctgaggctgctgaaaatcagcacatggtgaatacgacatttgtaaggcaggcccaaggagatatcgggcataaattacagaagttggaagctccgcaggcgtgaatgctactcagcttattaaagtggctaccaaggtgtacattaacggagatcaggaggctgatcagaggcttaagaaaggctaatttactagcagcagcgcttacaggaagagaagctagctttgcaagaaggcatggacgcgggcgtgaatgcagtcgtggaaaaagctaataaactg

SEQ ID NO: 268249 - DNA, 93 bp, Homo sapiens; identical to SEQ ID NO: 216509
  chr16:101672-101765
  hypo

SEQ ID NO: 268250 - DNA, 118 bp, Homo sapiens; identical to SEQ ID NO: 216510
  chr16:111055-111173
  hypo

SEQ ID NO: 268251 - DNA, 147 bp, Homo sapiens
  chr16:111739-111886
  hypo
ccccaccctcccccgggagcctccatcccaacccaggccttgcctgccacgcctacctgtggtcgtccatgtcctcgatctggcgcttgacgaagctgtcgatgcgcttgcggtaggtgcggttggtgagccgtcccaccatgccca

SEQ ID NO: 268252 - DNA, 54 bp, Homo sapiens; identical to SEQ ID NO: 216511
  chr16:112973-113027
  hypo

SEQ ID NO: 268253 - DNA, 145 bp, Homo sapiens
  chr16:114337-114482
  hypo
gggaccaagagagagactggcgctgtgggaaggccctgcgggcagcccggggacccaagaggggcagagtgtggacacgcccgaagcgtacttgtcggctgctaagaggcaagagcatccgggcggtggagacagagaaggagag

SEQ ID NO: 268254 - DNA, 275 bp, Homo sapiens
  chr16:114727-115002
  hypo
gttgcagcaccggccgccggagctcatggtggggtgaagagatgtgggctgtctcggctggcatactcacactcctcaggaaagcctgtcgcctcaggggctgggcaacagggtcatggtgagggtactggacagggggcacccacagtccctgcaggccagggcctacctgcaggaagctgggctcttctgccgtcaggggcaccgcagagggaatgtccagctttagccagggtggcttcttgcgctgcaggctgctcgtgctgtccctgcgg

SEQ ID NO: 268255 - DNA, 293 bp, Homo sapiens; identical to SEQ ID NO: 216514
  chr16:117786-118079
  hypo

SEQ ID NO: 268256 - DNA, 143 bp, Homo sapiens; identical to SEQ ID NO: 216515
  chr16:136642-136785
  hypo

SEQ ID NO: 268257 - DNA, 344 bp, Homo sapiens
  chr16:142446-142790
  hypo
acgtagcacttgcacggcaagcccccaaaaccaaggagaagcaggtggcagtgctgagggctctcagatcagaaccaacagccaggcaggtagtgcctatccactacacacctgccactctgggctccttgagcttctgtgactcacctcctgcacagcgggggccaggggattcctaaattctgacaaggagaccggcaaggagaacttggcaagaacggacggcaggtcatgagatgggaactggtgggagaactgctcggccagcggggagtacctgcaggcaggtgagcatgccagtgagtgcagcagacccccccaccgtgttctcaacactggcctca

SEQ ID NO: 268258 - DNA, 120 bp, Homo sapiens; identical to SEQ ID NO: 216517
  chr16:189554-189674
  hypo

SEQ ID NO: 268259 - DNA, 40 bp, Homo sapiens; identical to SEQ ID NO: 216518
  chr16:232125-232165
  hypo

SEQ ID NO: 268260 - DNA, 39 bp, Homo sapiens
  chr16:232585-232624
  hypo
aaaaaaaaaaaaaagaggagggggcggggggaagagcca

SEQ ID NO: 268261 - DNA, 80 bp, Homo sapiens
  chr16:233802-233882
  hypo
atgtagatacacgtcgtgccactgaactgtacactgaaaaactgttataacggcacgttttgtgtgcactttactataat

SEQ ID NO: 268262 - DNA, 89 bp, Homo sapiens
  chr16:255869-255958
  hypo
gagccactgtgctgggcccaaaatgtataaattttttaaaaaatgggagcaagcatgggctcaattaattccaacggtcaacgctgcca

SEQ ID NO: 268263 - DNA, 36 bp, Homo sapiens; identical to SEQ ID NO: 216519
  chr16:299613-299649
  hypo

SEQ ID NO: 268264 - DNA, 101 bp, Homo sapiens
  chr16:299877-299978
  hypo
tctggttcttactccgtttttttctttcctttgccaaaggaatctatgttttatttatttattatttaaaaaaaatttttctttttagacggagtctcgct

SEQ ID NO: 268265 - DNA, 100 bp, Homo sapiens
  chr16:300218-300318
  hypo
cgcgcccggccaggaatctatgttttaaacatttcacacatcccttccttggggacatggtggctagatttgctgaattaatggccgtctcctcttcttc

SEQ ID NO: 268266 - DNA, 36 bp, Homo sapiens
  chr16:310516-310552
  hypo
acatgaaccagcactcggcccgtcaggggagatcgg

SEQ ID NO: 268267 - DNA, 354 bp, Homo sapiens; identical to SEQ ID NO: 216521
  chr16:311206-311560
  hypo

SEQ ID NO: 268268 - DNA, 50 bp, Homo sapiens
  chr16:316210-316260
  hypo
gtcagggtggggagggctgccgaggaggcgagcacccccacccagacctg

SEQ ID NO: 268269 - DNA, 222 bp, Homo sapiens
  chr16:318615-318837
  hypo
atcgggggggaggccgcggcctcgaggtgggaaagcaggtgccggcgcacctgtggacaaattctggaacgcgtttggcgagggaggaataggcgcagctccggaaggcagtgacctcgaggcagcctcagcacggcactctcttgggtcctcttccaggctcacactgggcgacagcggagaggctcttggacggggcagagctcgcgccgagacctgcat

SEQ ID NO: 268270 - DNA, 204 bp, Homo sapiens
  chr16:323418-323622
  hypo
gcacgctgacccctgcgctggccagcgacccccaccctcaccgcaggtgggctcaccgggggcctgttcaccagccagtaggtctgctcctggcacgcaatgaccagcctgtcccccttgctgcgctgcttggctgccctgggaggaggaggccgagttgagggcacgccctgcacacagcagcccctccgcccccaccctcag

SEQ ID NO: 268271 - DNA, 171 bp, Homo sapiens
  chr16:332589-332760
  hypo
gctctgatgccctcgccctccctagtggacaagaccgtctacatggtgggcagctatggcccgagcgcccaggagtatgagtttgtgactccggtggaggaagcgccgaggggtgcgctggtgcggggcccctatctggtggtgtccctcttcaccgacgatgacaggacg

SEQ ID NO: 268272 - DNA, 188 bp, Homo sapiens
  chr16:334795-334983
  hypo
agccactgggcatggggggccgggccatgagggcagtgactgtgggtgggaccgggtggcctcacagggccaggcccctcaggacctgcaggacgaggacgtggccaccttcttggccttggcccaggacgccctggacatgacctttggcctcacagaccggccgcggctctttcagcagtttggcc

SEQ ID NO: 268273 - DNA, 151 bp, Homo sapiens
  chr16:337627-337778
  hypo
gtgcagtgctccgtcgccgattcacacagtggcaggcaagagacaagctgtgttgaaggcactcggtggcgcgtacaattgacagaggccctgcaggcctctgcatccgggcctgggccccacccagacctgggtacgtgggcaaatccca

SEQ ID NO: 268274 - DNA, 136 bp, Homo sapiens
  chr16:339477-339613
  hypo
gcccagggtgacagcgcggcccctcaccagggtgcggtaggggatgggttccccgcagaagtagtacgccacaacgatgctgtcacacggctgggcactcccgccgcccaccttcctctgcgatcttgtcctgggg

SEQ ID NO: 268275 - DNA, 121 bp, Homo sapiens
  chr16:341171-341292
  hypo
ccctcaggacgcacgtactctgtctcggagagctccatgtccgacacggctggtaccacgtgcagcaccggcgcgcacgctggcctgacgcaggcgcgtccccgccgcataacctcctgca

SEQ ID NO: 268276 - DNA, 382 bp, Homo sapiens
  chr16:350655-351037
  hypo
ctaaagaggacagacggatgctggagcagagccgggggacaggtgggtggtgggcatcccctggcggatgcagctatgctgcctccctttccttggttttgtaggactaaagggcccgggcactctggggagaaatcttaaccgagggtcttcctagggactaaaagtgtttggagttttgatgccgttcactgccttggccgagctccacatcggcaggaattctatcatggggctgtgaaatgttacagattaacttaaccactcggctaatggtttttgttttcttctttgtgctttaatttcccaaatttcacaatgaaaataggttatttaaaaaatctggagttcacgcctgtaatcccagcactttgggaggccg

SEQ ID NO: 268277 - DNA, 134 bp, Homo sapiens; identical to SEQ ID NO: 216522
  chr16:354255-354389
  hypo

SEQ ID NO: 268278 - DNA, 34 bp, Homo sapiens
  chr16:356089-356123
  hypo
ttatcatccccttaccggcaggcacatgcgtaca

SEQ ID NO: 268279 - DNA, 333 bp, Homo sapiens; identical to SEQ ID NO: 216523
  chr16:356183-356516
  hypo

SEQ ID NO: 268280 - DNA, 190 bp, Homo sapiens; identical to SEQ ID NO: 216524
  chr16:360132-360322
  hypo

SEQ ID NO: 268281 - DNA, 143 bp, Homo sapiens; identical to SEQ ID NO: 216525
  chr16:364475-364618
  hypo

SEQ ID NO: 268282 - DNA, 81 bp, Homo sapiens; identical to SEQ ID NO: 216526
  chr16:364964-365045
  hypo

SEQ ID NO: 268283 - DNA, 46 bp, Homo sapiens
  chr16:400402-400448
  hypo
aataaagtgagtccataaaacgggcgggatgcctacaagtatgata

SEQ ID NO: 268284 - DNA, 1723 bp, Homo sapiens
  chr16:409998-411721
  hypo
cacgcctctccgggcgctgccgcccccccgttggtgctcatctgtccttctgcccactatccccagcggccccgatacctgcacaccccagtgcccagcggttccccctcgagctggcaaggggacattaaatgggaggtgaggaagtgcggcccccagcgggcagctgcctttgccccggcccacctgcgcccccgcccacctgtgccctccgccgcctccctctgcttggctgtcccaagatgtctctctccactgcctaggaaccctgaggccgcggccaagttctgagcgtgtgactgtgtgtgctgggccccaggcccctttgtcgccgcggcgtctgtcgtggcaaacaaaagtgaaccggattagccacagtggattaaaagatttacgtctcagagtttacctaataacctaacaatcgtgtcaacgggagctttgaacccccagggcgcgcctgccaggccaactgagagctcaaggcctctgtgggcagcaggacgtggtcggggggaggagacgcagccacggctgtcctcacacccagctcggcccctgcgggctcctctgggcagaacctggggaaggcacggcctctagcaggaggtggaggcctttgaaagggtgcaggtgttgggaccaggtacccggcccaggcccccagccgcgtccacacacgtcgcacacggcagcaaggacgcaagcagtgtggaggtggccgcgtcggcgacgtatgggccccgtggtgctgcggtgcacgacctctgtgctgtcaccccacagtgtccgctcctgcacgtacacgcgtgcacgcgcacacacgtgcacacgcacacacacacaagcacgccccgctttgatctctaaaggagagtccattgacaagctcttaatcgcagctgcccttgcagggcctgtccctgaagtcccgagtaatgggatttggcgcttctgatccatcgggctggccgcttcccgtgtcataggtggacattttttttctttatatcgcttctgtttcttttttttttttctcctcgaaaaaatgctgcttaaacggcaccgacttgacatggcttgtctcctaaccttggagtggcggccgggacgccggcctggatcagtcgggggtctttgatgccgcctccatgtgaaacctgacgtggaagacccaccggggcggttttggggtccgaggtccgtcaggattcatcctgcctcaccctgctccctttgtctcttcccctgacccttcctcgggacacccggagagggtctgagggtgagggtgcgggcgctgcgtgtgggcttgcactcgagggtggggtgggccgagggcagggccgcagccgcgagaacaatgggcagaggaggcgcgtccacctgtccgcccggccgcctgcccggcttacctcacctgcctggctccgtgtgcctgctcacgccccaccgtcccgctgtccgccatgatgggcttggccgtccgtccgagcactttcagccactctgggaagcaggtccctgctcttggccactgtgtggctgggaggcagaagcgtgactctgggctgcagctcgggctcctgccgccgattggctgaggcagggaccagatgacgggcctcagaaccctatggtagccatggcaaccagcccctttagacaccgccacccccgagccactcctgactgctgagggagcaggcggcactgcccgtgg

SEQ ID NO: 268285 - DNA, 191 bp, Homo sapiens
  chr16:412824-413015
  hypo
ggcgccgggggtctcgggccgcggctgctcccccaggactctgggcgccgggggtctcgggccgcggctgctcccccaggactctgggcgccgggggtctcgggccgcggctgctcccccaggactctgggcgccgggggtctcgggccgcggctgctcccccaggactctgggtccggatccaagcttct

SEQ ID NO: 268286 - DNA, 266 bp, Homo sapiens
  chr16:422074-422340
  hypo
ggctggtcaggtggcggcagcagcaaggctgcgctcccggccagcaggatgtgccagatgctgtgggtgtagtagtagttgtcgctagtcatcatggaggtgtagatggcgatgcccacagaggccatagagacgccgggcaggaggtagaaggcccagcgctgccacgaggtggggtagcactggcgccggtgcccgcagcggtaagcctggagaaaacagccacgcaggtatcagtgcaggtggggccgcggctgcagctccca

SEQ ID NO: 268287 - DNA, 115 bp, Homo sapiens
  chr16:426699-426814
  hypo
taggcagggtgaccgggcccacggtgagacgcacggggcagcccaggctcccattggacacgcagtcccgcagctccagcagaagctcccgcgtgtaatcggggacaaagaccct

SEQ ID NO: 268288 - DNA, 755 bp, Homo sapiens
  chr16:428821-429576
  hypo
aaggggacagctgccctctgcgttccaagcgggcaaggctcctaactgtcctcagggaacgcacccacgcctggtgcggggatggagaagggcccgtgggagacatcctgctcatggccccaggcgaggactcaggctctcacccccagccccccgtgccagctccagcctcgtgcccttgcgaccttgggcatccttccctccctgggtcccagccttctcctgggtaggtcagggcggagggcacatccctttgggggcccctccctccgaggttaattaacgacaaaggcttcagaaggaaaagcacagtggacacagcagggggcgggaccctcccctctgctgcagctccccctccccacacactcaggagcgctgcctaggtctcactggagagtggctggctcaggcccaggcccctcctgaggagggagacaggtgagcagcaggctctcctgccagcctcgtgaccctcccatagaggcaccagaagaaacgatacacctgccaatagcagcctgtcggcaaatccaggccaagctccaggggaacctggcgtggcgactgggcaggggctggccaggctccacccacgacgcactccaggctttccaggtgtctgctggccaccaggtcccacccaccaggctgtggcctgataatgtgggcagagaaagctcaagtgctgggagctgaagcaggacagccccccaggaccacggtgtcccggagaaagccggcctctgcggggg

SEQ ID NO: 268289 - DNA, 92 bp, Homo sapiens
  chr16:439056-439148
  hypo
caaagtgctgggaatgacagttcagttttttgttgttttacattcagtccagctttttgttgttgttttacgttcagcggatggcagtagac

SEQ ID NO: 268290 - DNA, 78 bp, Homo sapiens
  chr16:440411-440489
  hypo
aacgggagttcaggcgcgcaccactacacccacctaatttttaaaatttttttgggccgggcgcggtggctctcgcct

SEQ ID NO: 268291 - DNA, 180 bp, Homo sapiens; identical to SEQ ID NO: 216530
  chr16:460351-460531
  hypo

SEQ ID NO: 268292 - DNA, 162 bp, Homo sapiens
  chr16:468014-468176
  hypo
gtattttctaggattttatgtaagtggagtcataaggtacgcactcttttttgtccggcttctctcactgaacctgattgctcccagagtcacctgtgatgtcgtgtgtgtcagtagtgaaatcctcttcagggttgagccgggctccgcgccgggtcctcc

SEQ ID NO: 268293 - DNA, 115 bp, Homo sapiens
  chr16:501346-501461
  hypo
acctcaccctccccacgcttcccgtatcagggagcttcttaaacacagaatggggtgttaagatgattggagggcagcagcctattggaatcccgatgaacgtggaaaggtgtca

SEQ ID NO: 268294 - DNA, 120 bp, Homo sapiens; identical to SEQ ID NO: 216531
  chr16:505065-505185
  hypo

SEQ ID NO: 268295 - DNA, 31 bp, Homo sapiens
  chr16:505485-505516
  hypo
aaagaattgagaaccgcgcacactctcacaa

SEQ ID NO: 268296 - DNA, 49 bp, Homo sapiens
  chr16:512665-512714
  hypo
tcccttccccggcaccgtcccttccccagtcccccggcaccgtcccttc

SEQ ID NO: 268297 - DNA, 305 bp, Homo sapiens
  chr16:514976-515281
  hypo
tggtacttgctgggccggctgggtggtttttatgcatgtgatgggtacgcctgagaggatgcttcttttctaatcattggtcccctgagttcatggaggtgcgagctggagactcacgttagcttggtctcagtcgcagggaggagaaaagccgctcatgaagctggtagctgtgtcgtttttgttttgtatagctgtgtttcgtcttcactcttaagtcaagaattactggatgcaggcttctaggttgatggtgagggagcccggggacccccagaactggttgtcatcggagaggcctcagt

SEQ ID NO: 268298 - DNA, 354 bp, Homo sapiens
  chr16:521799-522153
  hypo
agccagggttgtcatggtgacgtggcgtctcctgtgtctcctgtcactgtgggtcccttgttctcaacatagctggggagagggtcttcgagcacagccgtggtcgacagagcgtaaccatgtccgccggtctggagggttagattccaggagagccacgtggctgcagcagaaaatgcatgaagttgaacttgagcccttgggggccgccgggaaggtggaggtggcagccgccagtcctggtcagcctgctgccgagcaagggtaccagaagtggggctgagctgctggccggtagggcctgggcttctcatgtcagtcctctgagccctgactcctcgaaagctgaggctg

SEQ ID NO: 268299 - DNA, 328 bp, Homo sapiens
  chr16:524279-524607
  hypo
tttctctttactgggagcatcgcagtgctcacaccggggtggtcgggtaaaatgtgcagttagtcatggccgagctagtgggtctgctggctcgcactgttttcccagggatcctttcagcaggcagcttataacgggaaagttgctgctatggtgtctgagtaagtggggagagtagaaggggatggactgtggcgccgctgagttcctgggcatggtgatgtctgaggatctgagcaggtggagcccagggggtggtggggctgtttgtcgggtttctggaagagcgaagggaaagtcagggagtgtaaggcgcatctcacagaat

SEQ ID NO: 268300 - DNA, 568 bp, Homo sapiens
  chr16:525278-525846
  hypo
acgtttcaacatagcgacgttttccaagatgcactttgattttcaagcgagttcatcttaacattggtaatttgtaaaaatgttaaaaagttggtagcatagacttgatggcttctgggcaaggccaggtcctggctggctggcaaataaaataaactgccggggccggtgtgagctgttactgcattttatccaggaggccgggagtgagcaggcaccgtgctctgaggtacatttttgtctctggaaaggcaggtgatggctgccctggaaaactccatgtagggaggccttgaactgcagaaaccaacccgcagggctgaattgggaagtgagcaggtggggtggctcctgtgagcctcatgagctgtctggaacccccagggcatccagccggccaggggctctgagtatcgatggcgatggcatggaagtggacgtccacaaccccagagcaaataaaggggtgggtgcagtcaccgaagccgctgaggagtggaactgttcatctctgtgggatctacagtgcacggagccactctgcaatggcagggaggcccggcttact

SEQ ID NO: 268301 - DNA, 217 bp, Homo sapiens
  chr16:532454-532671
  hypo
gtgaggtgtggggcgttcgcagttcccctcccagcttgtgcccgctgactgctggcgcactctctcctaggccaacgaggtgacggacagcgcgtacatgggctccgagagcacctacagtgagtgtgagaccttcacggacgaggacaccagcaccctggtgcaccctgagctgcaacctgaaggggacgcagacagtgccggcggctcggccgtg

SEQ ID NO: 268302 - DNA, 141 bp, Homo sapiens; identical to SEQ ID NO: 216535
  chr16:533136-533277
  hypo

SEQ ID NO: 268303 - DNA, 163 bp, Homo sapiens; identical to SEQ ID NO: 216536
  chr16:534203-534366
  hypo

SEQ ID NO: 268304 - DNA, 158 bp, Homo sapiens; identical to SEQ ID NO: 216537
  chr16:537529-537687
  hypo

SEQ ID NO: 268305 - DNA, 62 bp, Homo sapiens
  chr16:541776-541838
  hypo
tttgcacatattgacgtgcccgttgggcatcgtgttgatttcgcttgcggtgaagcccctgg

SEQ ID NO: 268306 - DNA, 45 bp, Homo sapiens
  chr16:567191-567236
  hypo
catgacaggcctgctcgacaccgtcaaggtcggaaaacacaggaa

SEQ ID NO: 268307 - DNA, 537 bp, Homo sapiens
  chr16:571576-572113
  hypo
ccacctatgggggccgggcaggagcctctggggcctccactccgacatcaggacctgagatgaccgctgtgtggcgctctctccctgggcagggtggatgccacaggcccctctggctcccaggtgctgcttctccacaggtgcggcctggcccggcctcctaaaggccacaccctccccacgcacttcccaggccagaatccaaacatcgggaaccctgttttcttctgggtgtgtctcacttagaaatcgtggttcttccccgagggtgcatgttgcaggagggagagggcagggaagactcacagcagagcaggagggggcctgtgcttctcggggtctgcaccccaggcacagcggtgtcaccccgcaggaccgcgggcctgccccaacccccagcattcccgggtgggcccagaccccatcaccaagactggccacccgctgcgtgtgtgtgcgcgcgcgtgtacgtgtggccccacatccgccgccttccacgctaggatgtaagaggtcgcctcctattgtacatttggg

SEQ ID NO: 268308 - DNA, 65 bp, Homo sapiens
  chr16:573426-573491
  hypo
cggactgtgcatctgcggctctcgctctcccgccccccgcgcgagatgcccgcctgcctgtcact

SEQ ID NO: 268309 - DNA, 479 bp, Homo sapiens
  chr16:584707-585186
  hypo
ggtgcagttttagggcgcagtggggttgccgtggggcaaggccaggccaccagctgcctggacacaggggcccccgctttccatctgctgccccccacacccccagctcgggcaggggtgacaccggggcatccttgttggggtcgctgtggttcccatggtggcaagatggctctgtgaaagattgacggagatgtagggcccaggagcaggtgctgtgtgagtgggacacgcctgtgtcacctgcggggcaggggagggctcgggggtacagccgtgtacatgattagttagcgagacagtgaggagtgtatgcggagtggacacagctgtgggtgccgcccgcgcaaggctgggggtcgctgtgccagccctgctcccatgtgggctcccagctccccaggtagggacgctgaccccgggaggtgcctttgcctgcatccactggagcctcaggagcatgcgttccgtccccacgg

SEQ ID NO: 268310 - DNA, 72 bp, Homo sapiens; identical to SEQ ID NO: 216541
  chr16:587258-587330
  hypo

SEQ ID NO: 268311 - DNA, 165 bp, Homo sapiens; identical to SEQ ID NO: 216542
  chr16:588070-588235
  hypo

SEQ ID NO: 268312 - DNA, 67 bp, Homo sapiens; identical to SEQ ID NO: 216543
  chr16:588487-588554
  hypo

SEQ ID NO: 268313 - DNA, 591 bp, Homo sapiens
  chr16:594121-594712
  hypo
aggctgaccggcgccgggctgtggccagaccaggagactgcagcccagctcgagggaggcaccacgcctgcccctcagagcactgagcagagccccccatggtatcccccgccctgggcacagcaggaggagctgccgaccaagtctggcaccccggtgtgccccgagagctgtctgggcacaggttgcggggctgccccggccggacggggcatctgtgtttctcggtgtggcctcagggctctggtggctttgaccgaggccccgggggacagaatgcagcttcctgctcctcacttttcctaagaaaggggccgcctcccaggactggggctgcgccagtcacaggcccgcggcctccacgctccgggtgctgctgtcccggctgcttcagggcgggctctgtcttgcacgcagcgagcggcttcatcacctcccttttgaattggagctgagtgtcggcaacgcccagataactggggcgcgcgggtcttttgtgctggatttttctgtacagttgcctcgatcttccatccagcttggcctctgtgcagtaaggagcggcccgtcgcctcccccacgtcgcctccc

SEQ ID NO: 268314 - DNA, 666 bp, Homo sapiens
  chr16:595534-596200
  hypo
cctgaagtgcagacgtcttcctgacccacctgggttttgccaggatgactccgaaaggtgtctcccagcagacacaccccgctggcgattgtttggtcctggggacccgggttctcattctcctctctggagctggtgaggctgtccttgctagtcggtgacaactacagggccaaagggagggtgtgtcccaggaggcccagcccacctctgcctgcacctgcggtcagcggggtgcagagtctgtgaaggcacctcccggagtgggggctgcaaagatcatggccactgtgccacccacaggggcccaggccggacgcctgggctgtgccgcctcggcagccaggccgaggaacgtgcaggtgcggccgggagcccgccggccacagctgcatccatgcccttctccgagtggtgatggcggggagaggcctggctgtctacgggcagattgcttgggctttcacagaagcccgctgttagagcagattcccggccttgggtctctctgctccagctggacgccctgagcctcgccgggcccagtccacccccgtccactctgccaggggcagctcagagccctcgccacgcggggctgagcgcagggaaggcagcatcacggagttcgctcggctccacagaacacccgtgttgctcgcggag

SEQ ID NO: 268315 - DNA, 363 bp, Homo sapiens
  chr16:604992-605355
  hypo
ggagtgagggggcgcgtggggagaaaagtttcctgtcccctcccagcctcgtcccagggtggcctctgcccccacacgggtgctgctgagcaaagcgcccgctcggaggctctgctgtctccctggacggagttgggggctggggtgcggccggcgcggggtaagaggctgtcacgggcagcgtatcgaatgtgaaagcaattaaagccaccagcagtgttcgctccgggcgggcctcgggcggcggggagctgccagaacacatctcacctcggtgcccgcggacgccggccctgctgctccgcgactgcgccacgtcacactcctcctgtgggtgggggccgggctcgtgcccgctcctgt

SEQ ID NO: 268316 - DNA, 626 bp, Homo sapiens
  chr16:611786-612412
  hypo
cccagccaggtctgcgtgtgtcctggggagtcggtgtgtagggcctgtgtgagcatgtgagtgccgtgttggagtggtttggaaagcccccccacacctggatgggtggtgagtgtgttatcacggacaagcagccgtgttcaccgtgatggagtgtgaggtgtgtgcagccagggccccgcacttggtggcagactccgttctgagcttaggtggcacagaggtggcttctccgggcactgggtgagggctctgtgtgagcctgtgggctgtgtacacacacccaaagcccgtgtgcgcaggcgtgctgtgcaccccacacaggcgcgtgctggggcggtggacagcccaggtggcggcccagatggagtgtggcgcgcataccagcgccgtgtggggcgtggggaggagcgggtcttggctgagtgtggccgctgcaggctcggccgctgacctgcccgaagccacccagatggagctgggctgagcaggtggctgagccgtggggccatgctgggacgtccactccccacagcctggcctggccccacatgagactgaccccctaagagacccccagtgcccacctgacgccctgctagagcaggctctgtgccgcctttaga

SEQ ID NO: 268317 - DNA, 43 bp, Homo sapiens
  chr16:612885-612928
  hypo
gataaaataaaggacgcctagttaaaatcgaatttccgataaa

SEQ ID NO: 268318 - DNA, 135 bp, Homo sapiens
  chr16:613512-613647
  hypo
ctgggcgtgccgccgtggctccaccacgcctaggccccacgcacccaccccagaccgccctggggagtccgaccccggcaggcaaccccagggagcacggcccacaggtgctgcccccgcgcctgacctcgtggt

SEQ ID NO: 268319 - DNA, 654 bp, Homo sapiens
  chr16:614710-615364
  hypo
gacggggatccaggcggccctgagacccccggccctgagggccccctccccctgcagccacggggcccagtgccaggaagcccggagcatgtgggcgaggacctgacccgagccctcggtgactacgccagggtggagcagcgcctgggacagttggggcccgcggggggcctggccccgagacccctgcgggagcagctgggcaagatccgcctggagctgctcaccattcaccaggcgctggagcaggccgtgaggccgccagacgcacccctcgacctctctgtgaaacgtgcgcccgccaaggggccccaggctcttggagaggcgtgggggcggcccgagctgggtcccgtgttgaccgggggcacccccgagccacccggcatgctgggccctgcagcgccccaacccttctctggccacaccaccaagtgtgaggccgactccagcgtcccacccccagggctccccctcgcagccccagatgaccctgtcattcctggcagtggctggggcacctgtgttgcgacgaggagttcccagacccctgaggctgtctgtggcctgcagagcccccagggcgccgaggtctgacctgcagcgcctgaggtctgactgtctctgcctgcagcatgccggcccctctcctgc

SEQ ID NO: 268320 - DNA, 234 bp, Homo sapiens
  chr16:617604-617838
  hypo
gctcccggcagctccggctgcttgggtggatccgggtgcccgcaggggctgtgggagggccccggggcctgcactgctcccccgatggcctgctcttcctcacggccggggctgcaccctgtgtccacgtgctagatctggagggacgccccatctgcctcctgccctgccgcactccggggagcggggccttcgttccagaggacgtggctgtgacagcgtcagggcttgtgg

SEQ ID NO: 268321 - DNA, 785 bp, Homo sapiens
  chr16:623991-624776
  hypo
ctgtgcaacatcccgcagcccacggtgggggggcagcagcagctctgagccgagcctctcctcttctcttccagcctcccggcatggtgctcaaggccttcttccccacgtgctgcgtctcgacggacagcgggctgctggtgggacggtgggtgccggagcagagcagcgccgtggtcctggcggtcctgcactttcccttcatccccatccaggtcaagcagctcctggcccaggtgcggcaggccagccaggtgggcgtggccgtgctgggcacctggtgccactgccggcaggagcccgaggagagcctgggccgcttcctggagagcctgggtgctgtcttcccccatgagccctggctgcggctgtgccgggagagaggcggcacgttctggagctgcgaggccacccaccggcaagcgcccactgcccccggtgcccctggtgaggaccaggtcatgctcatcttctatgaccagcgccaggtgttgctgtcacagctacacctgcccaccgtcctgcccgaccgccaggctggagccaccactgccagcacggggggcctggctgccgtcttcgacacggtagcacgcagtgaggtgctcttccgcagtgaccgctttgatgagggccccgtgcggctgagccactggcagtcggagggcgtggaggccagcatcctcgcggagctggccaggcgagcctcgggacccatttgcctgctgttggccagcctgctgtcgctggtctcagctgtcagtgcctgccggtaggtgtcccgg

SEQ ID NO: 268322 - DNA, 733 bp, Homo sapiens
  chr16:643850-644583
  hypo
aggatggaacagagcgctttgcatagagtgcccctgggtgatggtggcgagttacccggcaggaattatgcttcatccaggagtgtgggtggtgcacgcggcggggaggagaaagctgcagttcaggagcgaacctgcagtcaggctccagggtgtgggccagggtggtgggcccgtgttggcccccaggaaccacccgcacagggtgcacacccttccccaagcccagccgctcccgctctgcagggggcatcgaaggtcctggattaaggcagttccaccctcggcaccgtgtccccacaaaccttcctgggagcaagttttcctcccgccacgttggtcagggtgtgtgtgcccgggtcctggaagacttcagaaggggttaatcctggcttgactttatttctctctctgctcttttggggttcagtgttggtggaagctgctgagtgacactccggtcctttgagcctggcaagttgtggggagaaacggagggaggcggttgtggacatggcgaggctaacatcacggtttgctgtggatgttggggcctggtggtcactgagatgtctgtggggccacacgctgcctgctgtacccatgggagcgagggcaccctgtgtgggtgtcccagcttcttcggcttcacgactccctgagctttctccaaacagttacaaacgtttcttctcatctggcttgaagttcgtggctccgaagtggccaattc

SEQ ID NO: 268323 - DNA, 295 bp, Homo sapiens
  chr16:660723-661018
  hypo
ctcctccctctaccccgccctgccccaccccgtcacctgcttgccctgaccctgcctggataattgagaccttccaggccaagggccccctccccaggatcctgacacctgtccctctgagagtccagaccttttccagagtgacatcctggggccctgtgtggtcagagggctccatgtggtcagtggctgtggcttgctgggaacaagacactcggctgactgtgcttagagaacaggccgctgtttgtgtctaaatggtatccatggggacgttgtttcatagtcttcttac

SEQ ID NO: 268324 - DNA, 900 bp, Homo sapiens
  chr16:666664-667564
  hypo
ccctccctaacaccaaccttggcagttcctgggctgcagtaagccgagacttggaaatacattcgccttggagaattcaacttcaaaatgcatacgaagtaggtcagggtggaaataaaggcactgccctttctccaggcacgctggagtccacgccctgcctttgcccaatgccctctgagggagaggccctgtgccttgcacccagcgcgggccacaggcggaggccccattccaggcaagccgtgcccatggagaggctggcctgctaggctgtggggcccgatggcctgacactgtatggaccacgctcctgccctgccctgccccgccctgcccgtggcccgtgtgcagaagtgggcaggcctgggttgctgggccagagccccgagatttccccctgccccactggctgagtgtgggggagctgcttctccacttccgcgtgggtcttggccctgggaggccagtggccgaggctggtctcgcgggcgctcgctccaggagtggcgcgtcccctcagcgccctgtgcttcctcgcagggatcgactacaagaccaccaccatcctgctggacggccggcgcgtgaagctggagctctggtgagttggggctgcggcacttcagttcctgggtgaggacacaaatgccgaagggagaacagaacccttagagaaacaggaaggcgtcctgtttgcatttcacttggaagagccacttacacagcccctgtttaaacatagaatggattttactccaacaggaaaaagacagtctgggacactgtgtccctagagatcgcggctcccctcctgccccggaaaacctgattccgtggtggctgtgagccccttccctccccttctgtcggcttcaccttaaaaagcatttcccagcg

SEQ ID NO: 268325 - DNA, 540 bp, Homo sapiens
  chr16:667864-668404
  hypo
tttcccagaacgtcagcgttgatgagacgtgaatgtccacagggttggggttccccagcctggcaggacagtctcctggagctcccaggctcatgtgaggagcttgctcactccccaggtgggcgggggccccttctgctgcctgcctggctcagcggcacggcgccaggctgctgtgacctgtgcagacaaagccgcttagcacagcctcattggcacctgtcctggccgccccgctcccctcaggacatccaggtgggtcggcagaggagggaaggaggtgagcctctcacagggaccacagtcccggcccctcccctccccgtatgtttcagggacacgtcgggccagggccggttctgcaccatcttcaggtcctactccaggggcgctcaggtaagaccagcaccgctctttccattgcttttcaaaggatgtttctcctgattctttctgaatgtgagttgttgtcctgtcaaactcccaaggactttctttctttataaggatattctcacattggtttgtttatttgtttgt

SEQ ID NO: 268326 - DNA, 166 bp, Homo sapiens; identical to SEQ ID NO: 216553
  chr16:670661-670827
  hypo

SEQ ID NO: 268327 - DNA, 592 bp, Homo sapiens
  chr16:671080-671672
  hypo
gagctgtcattttccacatgcgaggagcaggttacagacccaggtgcacatgttggtcctgggttgagggtgccaggtgcttccttgccccgggagaagcacctgagtctccaggcgggcctctgaccgccgtgactgagcatttgggccaccccgggagcccagccctgtcctgtgtctctcctgcctggtgagcagcggtgaggtgcgggtgcatccagccgaggtgcagagcccaggtttgcagcagggtttctcccgccgcccctgatgagacacagactagcaaggactgtctgtcccagccgggatttgtcactctgcctccctccgttagagagtggagaggcctggaaggtccccgcggcctgggtcttgcagatggcaccagcaaaggccaccggccactccccgctgccgtcacctgtcacacagcagcagtcccgcggctcttcccgcgaggcccttcacgtgccgccgaaggccgggctccctagacttcatggtcgtgtttgcatattctgttgctgtgatctgagacggcccctctcagaagcgggtgccacaacccgctggtgggatgagtgggtca

SEQ ID NO: 268328 - DNA, 96 bp, Homo sapiens
  chr16:672459-672555
  hypo
gagcagggcgagcgcgcgtcctgactcatcccctagagcactcgctcgttcttttgttttgttttttgagacacggtctggctctgtcgccaggct

SEQ ID NO: 268329 - DNA, 335 bp, Homo sapiens
  chr16:672795-673130
  hypo
gcctggccgaagtcgctagttttttaaaaatcagatcagttttagaaaacagaaggcagtggaagagtctgtttgtcccgtgctctgccccttgagacacgcagctgagggtgcttagggtgccgttcgttaggcggctgctggtcaccgagagtctccttttggtttctcactccgtggtcatttgggtccctgcggcctcactgtgacccacgccggagcaagcctccgggtcctcctgtgccatcgcccctgcccgtaacccctactcctcagacatggccatcccaggaagtgggggcccgctcagggcagcagccgggaggtgtggccag

SEQ ID NO: 268330 - DNA, 91 bp, Homo sapiens
  chr16:675966-676057
  hypo
gacggagcaggcccgcgcgtacgcagagaagaactgcatgaccttctttgaggtcagccccctgtgcaacttcaacgtcatcgagtccttc

SEQ ID NO: 268331 - DNA, 140 bp, Homo sapiens
  chr16:677347-677487
  hypo
gcctgcaggacctctgctgccgggccatcgtctcctgcacccccgtgcacctcatcgacaagcttccactgcccgtcaccatcaagagccacctcaagtccttctcgatggccaacggcatgaacgcggtcatgatgcac

SEQ ID NO: 268332 - DNA, 409 bp, Homo sapiens
  chr16:677802-678211
  hypo
gcgggaggagggggcgcggctgggctgctggtgcttccgggaatcttggtcggaaacaagccgggcctccccagctgcctgggcttgaccggcggggagcctggttggcctttcttatttatatagagaacacttcacttttttgtacatttttaaggggccttcagggaagcctgggtgtggcccggtggtggtgcactggtgacttcatggccacgccagctgcggggacgcacttgggactcctcgagaggggactcgcggccgcgatggcaaggcatcctgtgaattcatgcgctgcgagtggcggggctgcccagaggccgggggagcagacagggccggtgctccctctggaagcttgggtgaccggggccctggctcccacgggatggagggtgtggtcctg

SEQ ID NO: 268333 - DNA, 205 bp, Homo sapiens
  chr16:684417-684622
  hypo
gacaccagcaagccggcagcaggacatgctttattctgagcaggctgggcccttcggccagcggctgagagcacagactgggtggggctgtcgtccacaaggtccggcctagggaggcagggttcgtgcctcacagagcctccggcagggatgcaggtgtgcgggggtgaaggaggggcttagtttttccggaagatcaggcatt

SEQ ID NO: 268334 - DNA, 145 bp, Homo sapiens
  chr16:689010-689155
  hypo
aggaagactctgggccctgccgcccacccgccacagctccgttttcagccacagcatccctgacctctccttggagaatgtgggggccactggacacgccaggccctgatgccggcacaggcagcctcctcttgttcctggacca

SEQ ID NO: 268335 - DNA, 83 bp, Homo sapiens
  chr16:712804-712887
  hypo
gggcaccagcacacgtctcatcagtggccacaggagcaaggtgagggacttccagcctgggcagaggcggggcagccgaacct

SEQ ID NO: 268336 - DNA, 121 bp, Homo sapiens
  chr16:714161-714282
  hypo
ttcagcagctttggaaaccccgtgcgtgcctagaggaaaccccgtgcgtgcctgttcctcggtcgctccctgcttcccgcctccccagcccctggcgaccgttgagtggctttctgtgtct

SEQ ID NO: 268337 - DNA, 41 bp, Homo sapiens
  chr16:716021-716062
  hypo
ggtgacggctccctgcgcatcttcagcgtctcccgcacggc

SEQ ID NO: 268338 - DNA, 522 bp, Homo sapiens
  chr16:717199-717721
  hypo
gcacgggtggcagcgacttttaaggagggaactggcccagctgcaggccgacagcctggcagtgatggaccccctagtcccagtggcacgtggagggcacagccaggagcccttttagcaccagctcccccgaccagcatcatgcccagtggggacagtctgggtgggttgggggagccctctgagtgctgcctggtcctggccctggcccacctgcaccgtctacccacagagtgcatgctgaggctggtagactgtgccatggggactgcccaagactttgccggccacgacaacgcagtgcacctgtgcaggtttacaccgtccgccaggctgctcttcacggccgcccgcaacgagatccttgtgtgggaggtccccggcctctgagatgcagcagggactgtggtggtgggcatcacgcctggtcatgccaggcacctggacacaggcttggcagaggcgccaggttgtcaatggcctcatgctgggacaggccaggattcacgtaaatcgcctgga

SEQ ID NO: 268339 - DNA, 493 bp, Homo sapiens
  chr16:726554-727047
  hypo
caggcagctcctcacggcggtgggtggggggcttgtggatgcggggagctgggtgagcctcacaggcaggggtgccatggggaggtccgtggcccacactcaggcccctgcccccagatcagcagcaagcgctccagcagtttcaagcgggccattgctaacggacagcgggcactgccccgggacgggccgctggatgagccaggcctaggtgtctacaagcggtttgtgcgttacgtggcctacgagatcctgccttgtgaggtggaccgccgctggtacttctaccgtcaccgcagctgcccaccccccgtgttcatggcctcggtcactcttgcccaggtgggccccccggccgctgccccgggagcctcccgcgctcctggccatgaccagcctaacactcgtgtccccagatcatcgtgttcctgtgttacggggcccgcctcaacaagtgggtgctgcagacctaccaccccgagtacatgaagag

SEQ ID NO: 268340 - DNA, 119 bp, Homo sapiens; identical to SEQ ID NO: 216561
  chr16:728001-728120
  hypo

SEQ ID NO: 268341 - DNA, 252 bp, Homo sapiens
  chr16:731353-731605
  hypo
ggctgacaagctgcccggttgtggggcctctggggccaggcgggtggactggccagagagtgacgtgaagcccccgttccccagcttacagcctggccaaggagcagcggctgaacttcggggacgacatccccagcgctcttcgaatcgcgaagaagaagcgctggaacagcattgaggagcggcgcatccaccaggagagcgagctgcactcctacctctccaggctcattgccgcggagcgtgagaggt

SEQ ID NO: 268342 - DNA, 1088 bp, Homo sapiens
  chr16:734874-735962
  hypo
ggcacacatgctggcgcagcggtggcacctgggggcgggcgggagggagggtgcctcagcgggggctgctgcgctgcctgcaggcccctgccccacctcccgaccccactgccccacctgtcgcagacccagccccggctgctcatgggccgcttgcagtggctgcagttgacgtgcagggtggtggaggcctggttgaggcagctgacggcgcggctggtgctcagcttgaccacctcgttggacacgttccagaggcggaagcgctgcagcaggtcgatgtaggaagtgtaccagtgctcctgggggagggagcgcccggcagtcaggatctgggtgccaggggcggcgctgcaggggggaggccccgcccaccacacacctgggtctgctcgtcgatgtccttgcgcacccgttcacccaggacgatgagcacagacacagccatctgcacgtcgccctgctcagcgtagaagtgcagcatgtcgcgcaccagcacgccgaagaagtcgggcggcaggcggctgtcgtagagcgcgtgtgagacagacaggagcgagaaggaggagtccacgggggccagggaggccacatccgcctcgctgccgctcacgtgcggggagtcggccttgtcctgcaggtgctcgggcccgggaggcgtgtccacgatctcgtggcgcagcggaaaggcctcctgcggcagcacgcactcagggtcctcggctggaaggcagggaccagcggaggctctgagtctgtcctccatccgcctctgaaccccaccctgcccggacccccactcacggtgcgcgtgttccggatccagcaggtacagctcgtcctcctcaccttccacgtcacccagcaggtagtcggcaggtacgtcgctgccctcggtttcctcgttatctgcccgacaatggggcgggcattcagggtcgtctgggacacccccacccctctcccatcagcacccctacccaccccagcctaccctcattggtgatgagtgtggccgaggagtcgagcagaactgtgtcgctccgtgcatctcctttgctgcggtccagccgcgtctcactgcccaa

SEQ ID NO: 268343 - DNA, 137 bp, Homo sapiens; identical to SEQ ID NO: 216562
  chr16:736747-736884
  hypo

SEQ ID NO: 268344 - DNA, 44 bp, Homo sapiens
  chr16:737200-737244
  hypo
atggcagctggcacgaagggccggcgcacgtcccaaacatagat

SEQ ID NO: 268345 - DNA, 660 bp, Homo sapiens
  chr16:740889-741549
  hypo
tgagccaccgcgcctggcctgttttttaagtctcaatttcagtattttaatgccatcacctattttaatccccaggtccatcatgacatctggtcatccctagacaagttccgagtgcccccagtcttcccctccttcctcactcctcgacctcgggagcagcctcccaacggctttcctgggtccgtctttcccctttgatcagaaacccgcacagaagtcaggcaccaggtcttctgcctgaggcctctggcagctcccactatgctgtgaatgaaccccaactcctggcctccgccttcccctgcccacctccagccatggcagcctccacccccattcccagcccaccaagccctttcctgcctcagggacattgtacgtgcgtgcgatgcctcctccacagagcggacctccctgaccactgccctaatgggcttctccatcactgtggcctccacggcacttgtcaccacccattcgtttgtttactggttgttgtcggtcacatacgagtgtgaattccaccaaggcaggaatcacattctggctcaatccccaccgaatgcccagtgcctgacacacctgttcaaccagttgctctcgttcttttttttaaaaaactttttgagacggagtttcgctcttgttgcccaggct

SEQ ID NO: 268346 - DNA, 518 bp, Homo sapiens; identical to SEQ ID NO: 216565
  chr16:767027-767545
  hypo

SEQ ID NO: 268347 - DNA, 95 bp, Homo sapiens
  chr16:771678-771773
  hypo
ctgggctctggcgacggcaggatcgtaagtgcctgcgtctgggtcttcgccgccccacaccgcccacctgctggcgggcgcccctgcccacatcc

SEQ ID NO: 268348 - DNA, 583 bp, Homo sapiens
  chr16:771803-772386
  hypo
ctggcggcccacaggtgcggcctccgcccggccgtgggctacgagctgaacccctggctggtggcgctggcgcggctgcacgcctggagggccggctgtgccggcagcgtctgctatcgccgcaaggatctctggaaggtaacctggggatccctggccacccgctgacagcccaaggtgcggctgacacctgcgagggctgggggccgggactcggaagctgcgatgacccggtgcccaccaggcctctccccggccggggcgacttctcttccggcaggtgagcctgagggactgccgcaacgtgtctgtgttcctggcccctagcgtggtaggtgcggggttgccagccccgctgggaagccccagccacaccccagggtgtttgctgctctgaggcctgggcctgcctggtgggtgctaggcttggggctaggggggtgagcgcggctgttttctaccggccccgcccccgccccctctactctgctgttctctccctcagctcccgctgctggaggacaagctgcggacagagctgcctgctggggcccgcgtggtgtctgggcgcttcccactcccc

SEQ ID NO: 268349 - DNA, 162 bp, Homo sapiens
  chr16:783583-783745
  hypo
tccctggacaggacgggccctggctgtgacagaaaatgacactgacccattcccagtgtgcctgcgctccctaacagccaagtccagcggaggagaagtggccttcccacggctcgggccggctcactgcacagcagccggggaaacggatgtcacggggga

SEQ ID NO: 268350 - DNA, 162 bp, Homo sapiens
  chr16:798241-798403
  hypo
aggctgccgggccccgggctcgccggtgggtggccccgtgcagcctgttattcataaaacttggagagaaagtgcctttttgtaggaaagtgtggggtgctggcggccatttccacctgtggttggacccagactgcctccccgcgtgtggcccatgcccca

SEQ ID NO: 268351 - DNA, 260 bp, Homo sapiens
  chr16:798433-798693
  hypo
aggactcgggctctccgttggccgagcagacgttttatttgtggaacggaattgctgtcgggatgggcgtggggtcgttagcagcataatcaacacccacatccaccctgggggcagccacgtcttgtcaacaggtggaggccgtgacatgctgcaattagcagctaatgaggaggcctgtgtgacccacgcctccgtcacaggtgcgcagtgagctgtggaaacgccgacaatttaaaatagtcgaacagggccgggcg

SEQ ID NO: 268352 - DNA, 251 bp, Homo sapiens
  chr16:809245-809496
  hypo
tcaacggaccctcccgcatcggcctcccacggtgctggctgaagggtgagcccaggctggccacagcgcgttttcatcattgtccgcagcttgcagtcggctggttcagagcttagccgggcacatgggcccctctgaggctcctgttcagggctcagccgtgtctacggggccctccgagctcttcctggaccctcctcggctccttcagttcagggctcagctgggcacgtgggcgcctccttggctcc

SEQ ID NO: 268353 - DNA, 713 bp, Homo sapiens
  chr16:809696-810409
  hypo
ttacctgtgagttcccgcccaagccggctgccttctgtcccctccccagagcccttgggtaactggtttgctacaagagtgtctggaatttttcagttgttctctgcggaagggagtttttaaaaggcccttaatcccttcttgacatttgtaagttgacgcttacacctggcagccttgctgaattctgtgtgcgtgaaggtccgattccaccgcgagtcacgatagaaaacccactctgtggagagaccagagatgaccgccgcgcacacctccgttcagcacacaaacctttgcaggtgttcatagcggaggcagattccgtactggggataagagctcacgacatgctgggaggggtttcaggggcagggagggggcttctgtggccccaggtcaggaggagcagctcttccatcagcagcaggcagccagcccagatgcgtagggaagacagctcccacttcgccaggccagagagcgcccgggggcagctctgttccagtcgaccctgcgagaaaggggtgtgcgtgtgcctggagctgggccccgtcctgcctccctgacctgtgtgctcccacagccctgagacggacggctcacagccttgcgaggcccacactgcactgggggtcaggcttgtgctcccgggagtcctgtctgggctgcgtggccaccatccagagcctgctgacctgcgactgggggggcca

SEQ ID NO: 268354 - DNA, 477 bp, Homo sapiens
  chr16:816636-817113
  hypo
ccacaaggctcctcggcggcccctcccacaggtggccaccctgatcgaccgctttgtgaagggaaggggccagctagacaaagacaccctagacaccctgaccgccttctaccctgggtacctgtgctccctcagccccgaggagctgagctccgtgccccccagcagcatctggtgagtccccagaactctgcccggcaaggtgggtccgtgtgctggcgctcactgtccacccaccgtgtccccagggcggtcaggccccaggacctggacacgtgtgacccaaggcagctggacgtcctctatcccaaggcccgccttgctttccagaacatgaacgggtccgaatacttcgtgaagatccagtccttcctgggtgagccagggagtccctggccagggtgggcaacacaacgggggaagcacagactccactcgggggtgccaggcctttgcctcgccgggccgtctgctgcc

SEQ ID NO: 268355 - DNA, 270 bp, Homo sapiens
  chr16:824930-825200
  hypo
ggggtctgcggcaccgatgctggacgcgtccatgtcacacaccagggccccgagcagttgctggtcggaggcgctgagtcgcaggcgggccaccccctgcagggccagcaggtcggcgcccagcgggaggctgcctccaatgcaccgggcccatcctgcccaggcgcccaccagacaggccacagccaccccccacacgctccggcccaccccacccagcgcccaccaggcaggccacagccgcacgccacagggcgaccctctggtcgg

SEQ ID NO: 268356 - DNA, 99 bp, Homo sapiens
  chr16:830347-830446
  hypo
ggagcatgcacaggcgtgatgctgtgggtgcatgcaggcacgcacatgtaggtgacagtgtgcacgtgtaagtgacagtgtgcacgggtaggtgacagt

SEQ ID NO: 268357 - DNA, 140 bp, Homo sapiens
  chr16:834385-834525
  hypo
tcggctgagggcacggtggcagctgcctccagtcgggccccggtggggactccgggtctggaacccgcgtctcggctgaggacacggtggcagctgcctccggtctgggccccggtggggactccgggtctggaacccgc

SEQ ID NO: 268358 - DNA, 410 bp, Homo sapiens
  chr16:844997-845407
  hypo
tgtggagggtctgcgaagcctcgtggggcaggcggcaggcaggagtggagggtctgtggcgggaggtggagggtccgtggtggtgcaccttccctggggtgggcaggagctcaggggttgccggccgcctgcagggcttgtttgacaacttcctgcgtctgcggctgcgagactccagcctgggtgctgtgtgtgtggccctcgactggctggccttcgatgacctgctggcgggggctgctcatcacagccagagcttccagctgctgcgctacccacccttcctgcccgtggccttccatgtgctgtttgcttccagccacacacccaggatcaccttccccagcagccagcaggaggtgtgctcgtccctgcaccacgcctgcccccggccccgtgcccgcccccct

SEQ ID NO: 268359 - DNA, 417 bp, Homo sapiens
  chr16:845726-846143
  hypo
ctggtgtccggcatcgcgccagccacgcgcagccgggccacgccccaggccctgctcctcgatgccctctgcctgctcctggacattcttgcacccaagctccgccccgtgagtgccgtccccggggtgggggattccccgcctgctgccctcctgtcctaggtgagcacacatttgtacagcctgctcagctccctgtctgctgcctcccatcccctaggtgagcacacagctgtacagcacccgtgaaaagcaacagctggccagcctggtgggcacgatgctcgcttacagcctgacctaccgccaggagcgcacgcccgatggccagtacatctacaggctggagccgtgagtcccccagtgcctggggtgtgctccagggtcatgctccccggctgtgctccatgttcaggg

SEQ ID NO: 268360 - DNA, 143 bp, Homo sapiens
  chr16:846349-846492
  hypo
actttccaacactccgtttcccgctgtgggatggccatgggggtggtgggggtgaggcatggggcagtggccccggggtcctgctgccccagcgacggcaccaacttgcaggacgctgagtcactctccgtggcagccatcgg

SEQ ID NO: 268361 - DNA, 144 bp, Homo sapiens
  chr16:858657-858801
  hypo
cattctccagaggccgaccaatatattggagagacggattaatagacggatgatagtgggtttgtcaggggaattggcccatgcggttagggaggccgagaagtcccgggagggatgccatctgcaagccggagacctgggatg

SEQ ID NO: 268362 - DNA, 104 bp, Homo sapiens
  chr16:876966-877070
  hypo
agttttaaactaaaaaatgtaaaagccgtttcaagactcaccaggccgaggagggaggttctctgaggagcggctgtgccttcggggagcggagggtgcgcaca

SEQ ID NO: 268363 - DNA, 623 bp, Homo sapiens
  chr16:894558-895181
  hypo
cacacagtggacagcgagctccaacatgtccacgggtgaacatcagcgtggccaccaccaggtccagagcacagtagaccctgtgccgccagtgtccgtcgccttccacacgtggccgcagttctgtgcatggggccgcccgccatcctgccgcctctgacctgggctgtgggctcgtgacacgtgtctgagctttccagtcgtggccgtgacgctctgtgcggaggctccgtccgcgtgctgcctccgtcccctctgccctggacggccactcactacctttgtctctcaccctgggggtttcatgaccccggagcctccacgtcctggtacagagcctgcctctccgggactgggcttcggccgagcagacaccgcctagctgctctttgaccagcgttctctgctctgcgtctggctggcatcggcggcttgctgagtccagcctggcatctcgctggcatcggcggctcgctgggtccagcctggcgctgacacgtttctgtgctcatttcattttacaaatcaactccccaaggtgaggtgggctcgtgccagcaggtgggagccggtcgtgcacgtctgcccagctccgtgctgagtgaggacgtgttgggggcttg

SEQ ID NO: 268364 - DNA, 370 bp, Homo sapiens
  chr16:898860-899230
  hypo
aaggctcatctgagcgtcggggcctcgctcctctttgcggctgcgtaatgctcatgggtgagcacacctggtctgttcatctgggctgtccccacctctgggctgctgcaaacgttccggtgcaagcacacccaggtccccgtttcccgctctcccgggtctacatgcagatgtggagttgcggggtcacgtggttcccgtttctagctctcccaggtctacgtgcagacgtggagttgcggggtcacgtggtccccgtttctagctctcccgggtctccgtgcagacgtggagttgcggggtcacgtggtcgccgtttctagctctcccgggtctacgtgcagacgtggagttgcggggtcatgtggtc

SEQ ID NO: 268365 - DNA, 275 bp, Homo sapiens
  chr16:902049-902324
  hypo
ccattgccccacaccggcaggtgggaccctccgtcacacagaacacaggcagccgggggctgggcgtctcgcacagactctgtggagagttcagacgtgagggaagaagctgacatgcccgatgggagggctgaggcccgtgattccgtttatatgaagggtcccgaacagggacccacagaggcatgagatggattccctggggctagaggctctgtctggaagatggaaatgggctggatggaggggaggtggatgcacggcctcgggagcgc

SEQ ID NO: 268366 - DNA, 96 bp, Homo sapiens; identical to SEQ ID NO: 216575
  chr16:919967-920063
  hypo

SEQ ID NO: 268367 - DNA, 264 bp, Homo sapiens
  chr16:924504-924768
  hypo
gctggctgggcggccgggctctgcggtcactgctcttgtgcacctctccaggcaggcagcggccccagggccccgcggaaccctccggaacagctgtgtaaactgcgtgggaggagggaggctgctcatgccgcaactccccaacggaaggatcacgggaaccaggacaggctccgggggacggtgctcagatgggaacacacggaaccaggacgggatccggggaggcggcgctcagatgggaacacacggaaccaggacagg

SEQ ID NO: 268368 - DNA, 242 bp, Homo sapiens
  chr16:929544-929786
  hypo
ggcagggcgggcggcgcgggctcacctggaacaggatctgcagcaccccgtggatgatgcacgcccgccggccgaggaagaggaagaagggcaccaggagctcgatgaagtggttgctgagcgtctcgaagcgatggaaccaccagggtgagtggtgcaggtagtacgccacaggattgggcatcggctgggtctgcagggacaggaggggccgtgaggtgcctggccgatctcggggggcg

SEQ ID NO: 268369 - DNA, 239 bp, Homo sapiens
  chr16:943454-943693
  hypo
ctccaggatgagcccaaagtcggagggagcacccagtgcacacgcgtctcagccccgccccctgcggcacaaagggagccgaggcgcaggccccgtgtgtctcccacacactgcagctcgcctgctgtgaggactcctggggcacgggacaggcttccaggggcctgcagagggagccgccagcactggggaaggtgggacttgggcagagaggctgcggggctgggggttggttctgc

SEQ ID NO: 268370 - DNA, 352 bp, Homo sapiens
  chr16:945417-945769
  hypo
aacagaaaaccaaccacacacgggagggccttcggggcggccgtgggcccctagccggggccaggcaggacgggagccgccgggttctctggctacatgtgaccgagaaggcagcaggctctgctgctgtctgtgcaggacgacctgggcaggggaggggcgtgtccaattccaacgtgtttggaacatggggctcgcgagactggcgggggagtgggagagccaggagaggctgcaccgcgccctgaaggacggcacgtggctcaagtgaccgatgccgagagggacacgaatgagaaacggcaggggagtgggaccaagagcccagcccggccctacaggaacaccaagc

SEQ ID NO: 268371 - DNA, 424 bp, Homo sapiens
  chr16:946276-946700
  hypo
aggctcagccaccccgcgcactgtgaaggctgcctctggcggggccatgtctgggtccggcatcgccgtctctagggtcttgctgtacgtccctgccctcacatgccctgtgcccccaacgacagggagggcgccgaacacccgggagtgttactgtttaaagacctgaagggtgaactgttttaaaaactgagagtcaggtcttctggaggctgggtttgctcagatcacaaaagcaccggagactgtttcccgcttgggctcctgttctgcaaacaggcatgaaaacagccgagggtgtccagctgaccgggcggagaaggccccactcctcaaggcgctgcccacacccaggggagctgctgcttctgatgaaatgcacggctccaccgggcaggggcacaaccaccgccactgctccccc

SEQ ID NO: 268372 - DNA, 207 bp, Homo sapiens; identical to SEQ ID NO: 216579
  chr16:947037-947244
  hypo

SEQ ID NO: 268373 - DNA, 129 bp, Homo sapiens; identical to SEQ ID NO: 216580
  chr16:949645-949774
  hypo

SEQ ID NO: 268374 - DNA, 686 bp, Homo sapiens
  chr16:962797-963483
  hypo
ttgaggaattccagcagctgcgcggcgtgcacaagggctgccattgttctccgcctcagcgtggcggacaacgcgtccccaggaaagtcaataagcagcacgctgccagggcggcctcagcgccaaggtcagggccagggctctccagacagctctcacccagcaaacaccagcgctgcctgaagcgagccccaggcacccgaacgaggcggcaacacgcagggccacagcacacgctgccactgccggggagaggagccgtcctcgcccccgcctcagtgcctttcccgttgcgcagctgcacgcgctgcctgctgggcgccagcatctgcacgccctgctcttccccagggacctcccttccctttagccagggggacggctccgggagggcccctgctccactccacggctccggcgtcgtttccacctcgtgctgtgctgggccttccgggagactgagcacaccctgtgaggagcctgacgcgttctgcctgggtaacggggcagtagctcttgtggggaacattcacttccacggccgctgctctccttcctgcgacacagacagcgttggcccaatcagcggagaagctgcatgtgcacggtccagggagatgctcctgagccctgcccgctggacagggtgcgacacccaactcctgccctggcgcctcgcccggtgc

SEQ ID NO: 268375 - DNA, 178 bp, Homo sapiens
  chr16:966496-966674
  hypo
ctttgcactatcacggaacaggggctgtgggctacagacgcccctggggctggatgatgggggctggggagttcggctctcgctgcgcgccagtggcggggctgggcactggtaggccacacccacatggccccgggacaccaggtggccttgtctgtgatccgcccacatgcagagc

SEQ ID NO: 268376 - DNA, 126 bp, Homo sapiens
  chr16:967568-967694
  hypo
ctgcgggcaggtgccgttctaggggcttgtccaggcccgctgacccctccggctcactggagatgaccaggcagggctgccctcccctaagagacatgcctgcccccgtaccggggctgtttgcag

SEQ ID NO: 268377 - DNA, 142 bp, Homo sapiens
  chr16:967906-968048
  hypo
gagcttcacagctgcgtctgcccgctggccatgtctcacgtcctgaggacgtttcacaggagggccgcccttctgctgcccgcaagacatacaggtgcagagctggggacatggcgtcgggacgtggcgcggggcggctggc

SEQ ID NO: 268378 - DNA, 428 bp, Homo sapiens
  chr16:969055-969483
  hypo
ctgtgtgggcagtcggcatgtcggcgtggactcccaggctgcagaatcaggtgttcccctcaccacacagtctcgggggacagtctgttttcactcgcggcttttccagaccctcccctgacactcggcagtcggcgtttccaggtgtgctcagtgtggccaacaggcacgatccaccccacgtggagggtggtgtgtccaggggctatgtgagctcacacactcacagggaaggaacgtgggggttggcacacctgagaagtgggcgggaatcaccccacatgcccgcggcagggggcagggcagccctgtggcctctgcttcatctctgtcaggacctatggtggacacacacagctcctgccccaccttcatcactgctgagcccccctgggaaagctcatatctccagcgctcgcgtgaggaca

SEQ ID NO: 268379 - DNA, 35 bp, Homo sapiens
  chr16:969858-969893
  hypo
cccaccccacagctccgccccgggacccccttcct

SEQ ID NO: 268380 - DNA, 917 bp, Homo sapiens
  chr16:981463-982380
  hypo
gacacagacgcacacgcggctcggatgagctgaggaacgcacgcacaaactgcattctcccaggccgtcccgaacgaggccacaggaaaggagcctccccagaggtctcagatcaggaagcctgaccttccagtgcctttggtctaggtgttctgaggcccagcacccggagtcatacctcagtaactggcagctctatgttctccaagatcagggaagggaagacagttcaaagacgcatggctgctcggaaggcagggagagcactgccgaagctactacgagtcttctgaatttctgcgcgacagtccaaagtgacgtgctgagccgctgcagggtcagacacaacatgaaactcaggctcacgagggctctcaggcggaaaacattaacattaatgagtcaacaattcgcttctgagtccctacaattaccacctgctaccgaagaatcagttagaatgtatgacgctcacctgaaaacacccagggagacacaaacgcagaagactgacttccctgggctgggagcgcaagcgcagcccccgacggcggccacacaggctcacgtcccaccccccatgcagaccccgttgcttttgcttcagcaagtggttggggacgcgggaggctggctccagagtcacccggctcctcgactgcctctgccgctccagcactgcctctgggagtccactgccccaggcacttcccccccaccctacttagagtagagcctgtgttccccaggaggcctcacaggcgggggcacggggagggtgggctccaggccctctcatcctcagcgatgggtcctgtggccctggtgctgagacacggcagcaccgtggcctcgcaggcccatctctcacagggaacacacaagcctcagccgctgccccccgagcctgccccggc

SEQ ID NO: 268381 - DNA, 171 bp, Homo sapiens
  chr16:1014778-1014949
  hypo
cgggtgtcatctgacgaggatgccaagctacaagggctgcggtgagactcagagacacgctaccaatggcaccgcggccccacctcgccgaagcagctgccggggagacgcgataaaactgccccacgcggaaaagaaggaagggcggtgagcaggcgcacagaacagacg

SEQ ID NO: 268382 - DNA, 566 bp, Homo sapiens
  chr16:1017655-1018221
  hypo
atccccgaccacctcgggcagcctcggtcctcccaggagccgtcacggcccgagaacgccgctgcccagatgtgaaccgggtgtccaggatacgcaggctgcacagtggcgtgaatgaagggcagggctgaactccagggcctacggacaatcgctgcacagccgggccagtggctgaccctgcttcctcgctgtccactgggggtagtggcgttgtcaccaggaggtcagcaccgggcagggtgctacttcagcatctgctcaacgcagtaatcacactagggacccgagtccacacgtcaggaagacaggtgtgtcttcaactctgagccctgtgaaaatgccgctttccgctaacacactccggctcccacagcacagcagggcatgcccgacaccccaggacgcccgcggtatgcacgtctgtgtgcagtgagcacacccctagcacctacacacctcggtggcagcacatggaaacgcccaggcccgcggtgggaaggagccagccccaggacggatgcaaagtcaggttgaatgcagaggcctgtcgctggcagccggcc

SEQ ID NO: 268383 - DNA, 97 bp, Homo sapiens
  chr16:1019652-1019749
  hypo
caacgcgtgggcaacgcccggggccagcagctccggagccctctgggacggtgactgcccacgcgccccgctggctgcatctcggcctggcaggctc

SEQ ID NO: 268384 - DNA, 366 bp, Homo sapiens
  chr16:1022298-1022664
  hypo
taaagatgttgcaacgggtacgaacacacaaacatcctccgcatgctggcccagcctccgggagcgtggtgtgtgcctgagggctcggagccttggggatcgcaggaggcatcggccctggctggcgcccggcacccaagtccctccacagagcccacgacccgtacctctcctcgtgacctgggggccagcttaggaagggccggcacagcccacactgttcccctcatctgtggggaacagggagccccacaccctgggaccacgcctgcagagcgggccctgtctgggtgccaggcctgctaggggacggacggcgagagggactgccctgcgtcaggtgtggccctgcgctgtcctcaggtg

SEQ ID NO: 268385 - DNA, 221 bp, Homo sapiens
  chr16:1036853-1037074
  hypo
ctcccttggcaccgcgttcggaggacgcaccctcactcccctgctgccttcactcctttctgaccaagcaacgctaacttttgtacagatcgatttgataaaattaaacaaagtgctttttatggacgtgggctgcattttgtgtgttgctttgtgtgagcctggggctcccggggtaaagatgtccggcaaaggcaggatcaggccgtgccacgcggccg

SEQ ID NO: 268386 - DNA, 250 bp, Homo sapiens
  chr16:1037685-1037935
  hypo
ctacaattttaacacggtggcctgggtagggggccacccaccccgtctccttgcccgcctggccgccctgcccctcaccccacagtggggatcccgttccagggcctaccaagaacagcagggggaggggctgtgcggatttatgacggttccttgggggtggggtgtgccaagccccacgggcgaggaggaggctgggagggggctgccgaaagccaggttcacagacatccgtcgcctctgtggaaca

SEQ ID NO: 268387 - DNA, 192 bp, Homo sapiens
  chr16:1052510-1052702
  hypo
ggtgaaggaacccacggacgtggctcatccataccgcggaacgtgagccatgaaaaggggcagcctcggctcagccaccgcagggaaggactcgacacacgccgagcagaagaggccaggcctgagaggccacctgcgattccatctgcggaaatgccagaaagggaggtccgcagacgcaagagctggact

SEQ ID NO: 268388 - DNA, 342 bp, Homo sapiens
  chr16:1061204-1061546
  hypo
ggccagggcagagacgtaggacagagacgcagcgcagagcggccagggcagagatgcagggcagagacacagcgtagagcggccagggcagagacgcagggcagagacgcagggcagagacacagggcagagacgcagggcaaagcggcagggcagagacgcagggcaaagcggcagggcagagacgcagggcaaagcggcagggcagagacgcagggcaaagcggcagggcagagacgcagggcaaagcggcagggcagagacgtagggcagagcggcagggcagagacacagggcagagcggcagggcagagatgcagggcagagcggccaggggcccag

SEQ ID NO: 268389 - DNA, 620 bp, Homo sapiens
  chr16:1075861-1076481
  hypo
gtgttcagcacagacgcagccctccactaaaagatatattttccatctgaggttggttgaatccccaaaagtggagttcacggacgcggccggctggctatatcatgcagccataaaagggaaagacgtacagacaccccacagatgagtcccggaaacacggcgcacgatgacacgagccagacacaaaaggacgcacattgtgactccatttacacgacaggtgcagagaaggaaagtccggagacagaacggagcccattggttggcgggggctggggagtggtgggagtgcctggtggtttgggggggactccctttgcgctgataaaaatgttctgaaagcgacagtgaagacgttcgcacagccctgcgaatacggcaaaggcccctcgagctgcgtgcttccgtggctgggtggcgtgctgtgtgaatcacatctcagtagagctgttaggtaaagaatgtaagcatctcattcattatttttatattgactgcacgctgccacgataatattgtggataaactgggtgaagtgaaatattagcatgaatttgaatttcacgtcttctatttcaccttcttcgctgtggacaccagaacgttcgcagttgcac

SEQ ID NO: 268390 - DNA, 415 bp, Homo sapiens
  chr16:1077582-1077997
  hypo
ggaacagttgttcccgtgctattttttacccccgtgggctgcgagttctggaacgttccaaacgacagtgacaacggtgacggtggtgggggcagggagggtggcgtccttccgtccctaagcgcacgcgggccgggcgctgctgaccacatcaccgtagtgaatgacttctttctcacggcggctggcgtcctattggctattaaatataatcattacaataattattaaatataagaatgtcatattgtattatattcttttacggatgggcaaggtgaggaccttgggccaggcccttcctgaaggccagagaccccggcatgccctcgggggaggagggaggtggggccggttggtctggggccccgctggccggagcaggcccggccactggacacggagcggcagaggc

SEQ ID NO: 268391 - DNA, 325 bp, Homo sapiens
  chr16:1081654-1081979
  hypo
gctctgcctctgccggttactgcctctaccatacagatggggaaactgaagctcagggaggtcaggtgcccagcctcagctacccaatgcagcgctcggtgggcagtgtggggctgaccacccgccctggattgcgggcacagcggcccccacaccggctgccggggctgcacaggctctggtgggctttagggtggcaaacatgcccaggttggggcctacaccccccaggttgagggagtggctccctggggtggctgccgcccatcccggcgtttctgggcttgtggacgtgtcgccccagccctgccggtcttcacgcggc

SEQ ID NO: 268392 - DNA, 36 bp, Homo sapiens
  chr16:1095307-1095343
  hypo
tgtgctgaggggccccgccgacggtggggtccagac

SEQ ID NO: 268393 - DNA, 399 bp, Homo sapiens
  chr16:1110841-1111240
  hypo
cccgcaccacaacccgagacctagaagaccctatgccccaggcggggctgaacaggacagacctcgaagagccggtccccagatcggaccgccaacaaccaggccggattccgcgcctccagccggtcagtgccttggcaaggcaggagcgggtgaaactcccagccctcccagggagcagtcagatgatgacacatccacacccgtccacagggagggagtgcgacaaggcctgtggctttctgcgcgagaatcggccagtgtcctttggggcccgggatggggtttcagcacccactctcactaccggggctcgggagggagggctggagagcctccatctggtgccgtcggtggccactcctcagacagcgcgggcgggttcgcaggccctgggca

SEQ ID NO: 268394 - DNA, 190 bp, Homo sapiens
  chr16:1111876-1112066
  hypo
ggtcccaaaagcaacgaccggcaccttgtaaggaggctgctgacagcagggagaagtcgggcgcgtgacgtcagaggcagagactggagagaggcagcccaggaacaccacgggtggctggcagtgcggagcggtagggccctcccctggaggcttcggagggagtgtggccctgcggacacctcgatct

SEQ ID NO: 268395 - DNA, 255 bp, Homo sapiens
  chr16:1112295-1112550
  hypo
tgacggggtcgtcccggctgcagctccggccctggctccttgaggcctcgcacccttcctggcacccactggctgggctctcggggcctctggtcaccccgtgggtgctgattgaatcgggacaaacgctgtgtgcagctaaggggtgactcaaggccggccaggcccagagctgatcccaggccgggaacagcagcagtgatggtgtcggcatccaccgtgtccctcccagggcccggccgtgggagccgaggg

SEQ ID NO: 268396 - DNA, 94 bp, Homo sapiens
  chr16:1113830-1113924
  hypo
cggtgagccggcgtcgtggccacagccttcacactcccagccgctgcaggtccccgtttccgtacgtcacccagcgccacgcttctgcacccac

SEQ ID NO: 268397 - DNA, 836 bp, Homo sapiens
  chr16:1129249-1130085
  hypo
ttctgcctgacagtcatgagcgtggaccgctacctggcagtggtgcacccgctgagctcggcccgctggcgccgcccgcgtgtggccaagctggcgagcgccgcggcctgggtcctgtctctgtgcatgtcgctgccgctcctggtgttcgcggacgtgcaggagggcggtacctgcaacgccagctggccggagcccgtggggctgtggggcgccgtcttcatcatctacacggccgtgctgggcttcttcgcgccgctgctggtcatctgcctgtgctacctgctcatcgtggtgaaggtgagggcggcgggcgtgcgcgtgggctgcgtgcggcggcgctcggagcggaaggtgacgcgcatggtgttggtggtggtgctggtgtttgcgggatgttggctgcccttcttcaccgtcaacatcgtcaacctggccgtggcgctgccccaggagcccgcctccgccggcctctacttcttcgtggtcatcctctcctacgccaacagctgtgccaaccccgtcctctacggcttcctctctgacaacttccgccagagcttccagaaggttctgtgcctccgcaagggctctggtgccaaggacgctgacgccacggagccgcgtccagacaggatccggcagcagcaggaggccacgccacccgcgcaccgcgccgcagccaacgggcttatgcagaccagcaagctgtgagagtgcaggcggggggtgggcggccccgtgtcacccccaggagcggaggttgcactgcggtgacccccacccatgacctgccagtcaggatgctccccggcggtggtgtgaggacagagctg

SEQ ID NO: 268398 - DNA, 285 bp, Homo sapiens
  chr16:1154984-1155269
  hypo
cagctccgtctccacgtagtcgcccacgaggtaagggtgccagcattgctcgtggtactgcaggttgttggtggcgatggagaagggcacggtcatggtgtccgaggcatgacacagctgcggctccggggccagcagcaggcgggtctcagcggcggtgctaccacctcccactcaggctccaacttccagccgcgcgtgtcctacggctgccgcccaccctgtgtgtgtggagtccctttgtgtgcactgtgccgcggcctcggtctccgctgcccactgctg

SEQ ID NO: 268399 - DNA, 31 bp, Homo sapiens
  chr16:1173374-1173405
  hypo
cctccggcctcccgcgcgccttcacctccgg

SEQ ID NO: 268400 - DNA, 448 bp, Homo sapiens
  chr16:1187523-1187971
  hypo
cactccaccaagagtgaaaacgtccattgcactgaaagctggagcccctcgctccccaccccacccccagaagcggcccccctgctctccatcacggtgggtgaatccgaggccccaggatggcgtgtgagcgggatcagccgcatgcgctgttttcctctggcttctcccacccggcacaatggccttgacattcaccgcacttccgcgtccgcagctcactcatccctggtgcggttgagtcatgtctcatggtctgaacgtccgcggtggtttagctgttctcctgtcggtgaacacgtgggccgtttccagctcggggctactgtaagtcaagctgccacgagcactgacgtagggaacagcgtgtgacacatgcttccatttatccagggtcaacacctacccgtagagagacgggatcatgcacccaatacacatttttttt

SEQ ID NO: 268401 - DNA, 109 bp, Homo sapiens; identical to SEQ ID NO: 216588
  chr16:1198574-1198683
  hypo

SEQ ID NO: 268402 - DNA, 227 bp, Homo sapiens
  chr16:1199857-1200084
  hypo
ctcagcgaagggcgcgcatcacggcatcaccgctctcaggacgatttcccgtctcgtctcactggaccgtctgccgtttatgtcctttctcggtggaggccctcacgtcgcgttgaggtggtccccgctccggctgcgtgaacgcggcctcagctgcctcatcttccggcagatggatgttcagagcagggagcatccatgttccaggcgtgcgggcacctgtcccg

SEQ ID NO: 268403 - DNA, 155 bp, Homo sapiens
  chr16:1207052-1207207
  hypo
ggttatgtgctgcccggactcccggggttcctgactccgcgttcgcctgcgacacagctgccgccgtcccggcacacggacggggcggggcccccgggaatgcttggaggccaggaagggggaccctgcttcggtccctgcgagagcgagggagg

SEQ ID NO: 268404 - DNA, 125 bp, Homo sapiens
  chr16:1207501-1207626
  hypo
gtcacgctgctccgcgggcgtcccccgggagtgtgagagggcacccgtctggaaagggccagtcccgcctgcgcccgcctccccgggctccacgtgccccgcaggcctctcgtgggcaggacggg

SEQ ID NO: 268405 - DNA, 44 bp, Homo sapiens
  chr16:1213954-1213998
  hypo
aagaggggagaggccgtgtctggctcagccgcccctgccccagc

SEQ ID NO: 268406 - DNA, 211 bp, Homo sapiens
  chr16:1214594-1214805
  hypo
cgggcggtgccgagcgtggctacaccaggctcactgctgcacagaatggggcacagttaaaacctgggagtgaggcctttccgtcggagacccttcggatctcccttctgtgagatcttggccctcaagccccgcagaggggcctcctggggttctgtcggtggagctggggtctggtggtgctgccctcactggccgggctccggatatg

SEQ ID NO: 268407 - DNA, 176 bp, Homo sapiens
  chr16:1215009-1215185
  hypo
gtggggttctggggcgtgaaggacacctgtgcaggggtgggaacagtggcgctcacctgaccggggcaaggagggggctgatggggcaggaggagcggagaaggtgctggcatgtctgggcccgggagtgggtgggggtgcggcaggcaccagctgaccaccgtggcgcgattgct

SEQ ID NO: 268408 - DNA, 1025 bp, Homo sapiens
  chr16:1216478-1217503
  hypo
aatttatccaccacctaactcgccaatgaagggtccaattcggtcgttctccctgtatcctcgcggtggtgcagccccagcagcgatgggttccagaatgctttcctcgccccgagaggaaaccctgcagtcagctgtctcggcgtctcccgctggccttttccgtctccgaggttggcctgttctggacgttccctgtatatgggatcccacgtggtgtggactcctgcaccggcttctctcgagctttgtgcgggccggtcgtccatcctccccgcagagccctgacccttccacggttagatgcgccctcatgtagacgggctgcggtgtttatctcttcaccgctggtggatgtctgggccgtttcaccctttgctgctgttcatggcgctgccgggccgtccctgctccaggttcgggggaaaccctggcttcgtgtctcttggacgtaaatctgggagcaaaattgctgggtcaggcggaaacagtgttgagtcctcggaggaatggccaggctgttttccaaagcggtgcccacctgttgacccacctctcgcccccagcttttgggtccctgagtggtggttcagcagcagtgagtgctgacaaccacacccagccggagtccagggctgtgggagtggacacggcccttcctttcctcgccgaccctttggggcgtctcccatcgggaaatggcagcccctgacctgccccgtggggatgaaacgggctctttgcggggggcctgtggggtatgggcctcctgtcagcagcccgtcccggtgggtggggcttgccggccgcccgcgaatgtcaggaaccttggattcctgacacacgggtgcgggggcgatatcggcgcggagcgggcggggtggcgcccgggccgcgggtgggagaatctggcgtgtgtgtttgcacggcatccatccctccatccgtcctctggagaatttcaacacccacacttggaataaaaaaaaaaattattaatgagcttggtgcggttgccatgggaa

SEQ ID NO: 268409 - DNA, 236 bp, Homo sapiens
  chr16:1217939-1218175
  hypo
ccaggcctgttccccggggctgcctggaggcggccgcttgtccccaaggcctggtgaccgcacctctgtctgccctaggccttcgagttgggggacattttgtaaggagccgctgtgcctaggccagagatgttttcggaaggggtgcctgtaccccgagaggtggaccagaattcccctggggcacggtggcgggagaccagggcggcctctggtgcccccgccccctccagttg

SEQ ID NO: 268410 - DNA, 84 bp, Homo sapiens
  chr16:1231846-1231930
  hypo
acacatcacacacccacacccggacacgcgcctcaggtccccacactgcccttacacacatgcgcccctcacacatgcatgtcc

SEQ ID NO: 268411 - DNA, 1215 bp, Homo sapiens
  chr16:1236137-1237352
  hypo
ggcgggtgactagacggtcggcgtgcgtaggggccggaggcggggtgtgtgcagggccagggtgtaccgtgctggtcctcccagggctgcttggggagagcctgtttccttagtggtgttttgaataagaatgcgcggctccctcgaggtgtcccagtggggctgttcagaagctgggcccagggagccctgaaggcaggggtccagcctgccgtgaccgcacaggcccagattcctggacgtttcgctttcgtaattgcacacgcagggcctggattcgccgtgcagaaagccggacgatgccgcggcgtggggtgaacgtcaaagggtcactgtggactctgcccacgtcctgagtgccctcgtcttgtccctctccacggcgttctcatcctccggcgattccctgggaacgtctctgtacctctgcacacgtgcccacacacatgcccctcgagatggcctgcactgtggcttctgtcgtgaatgtggtcacgtgtcctccgtgactcgctcctcctgccccgtgtgccctggacctggctcggtcccgatgcccgtggcaccaccgcctcctcaacgggtggccacgtaatgcttcctggccggtgaatgtgccacggcagtggagatattctgcccttctagctcttctgtatacaagcagtgcgccctggttctcagggccgtgaccaccaccatgaccggcagacttcagggcggtccgtcccactcccgtggcctcgagggtcctttggagctgccgcggttctgagtgggggtggacacggacacagggctggttcccggggatctcctgtaccacccactgactcccagggtctgcggctggcccggcccctcctgggtctcttgatgtgggaccaaagctgttgcttcctctgcggcagaggcgatggagtccctcagagcccgcgaccgtcccctccgcactgcgggctgatagcgcctgtgggaatgggcttccccggtgaatacacataggtcgtcttcttgagcaaattggaaaagtaaggttgagcgttcctgagaatgaggggccgggaggggaggaggcggccagcgccgcgtggggccgtgggcagagcggacagggagggagcggcctcagccttggcaccctctacccagggcagggaggggtttgcccagccaggggtgggtacagagaggggagcacgtggctaagagtcc

SEQ ID NO: 268412 - DNA, 73 bp, Homo sapiens
  chr16:1247873-1247946
  hypo
tggagcgaggggcgcgtggggcttggctgacccacttgctggattaatctggagttcacgtagcccatagcac

SEQ ID NO: 268413 - DNA, 811 bp, Homo sapiens
  chr16:1248213-1249024
  hypo
ggtcatcccgagcccgagatgccacgtggtcagacctgccgcagccagttccctgcctcggccagtcccctgcctccactcctgcccctccacaccccagccctccaaaagcagcagacctgctgccctgggatggttggaggtggagacctggcgccccgctggatgcacgtcagaccccagggtgtcagtgtccctggaggccggtggtggtaggaggggagtcccgatcacactaggggtgcgggaaaatcaccagggggtggcccgagtcagtgtgcagtgggcgtggacacccactgtgaacagtggacggggctcgggggtcccgggaggggctgcagccccgaggacactcctgcagggcttagcagtgccaatcctggccctgctgcccacaggcatgcggatcctggtcactctgctgctggatacgctgcccatgctcgggaacgtccttctgctgtgcttcttcgtcttcttcattttcggcatcgttggcgtccagctctgggctggcctcctgcggaaccgctgcttcctggacagtgcctttgtcaggtgcccaggccccacccccgtgaggcccctgcccagatggccctgcccaccatgcagataacgcaccatgtggctccaccgccccacgtggctctgcccaccgtgcagtcacccgccccgccactgctgtccccgtcatggctccgtccaccatgctgtctcccgcccccaccccccatcatggctccgcccagctggcagtcaccgccccacatggctccgcccacggtgcagtcgctgcacatatgcc

SEQ ID NO: 268414 - DNA, 426 bp, Homo sapiens
  chr16:1250311-1250737
  hypo
acccgttcatctgctcctcacgccgagacaacggcatgcagaagtgctcgcacatccccggccgccgcgagctgcgcatgccctgcaccctgggctgggaggcctacacgcagccgcaggccgagggggtgggcgctgcacgcaacgcctgcatcaactggaaccagtactacaacgtgtgccgctcgggtgactccaacccccacaacggtgccatcaacttcgacaacatcggctacgcctggattgccatcttccaggtgggcggcaagatggtgggacggggaccctggggcacggcaggggagcgggtgcaggactcgccccccccagcccagaccccaggggcacggggaggaggaggaggggtcgtgcgggcccaagtcaagccactgcccccccaggtgatcacgctggaaggctggg

SEQ ID NO: 268415 - DNA, 382 bp, Homo sapiens
  chr16:1251773-1252155
  hypo
tccaacgacagcacgctggccagcttctccgagcctggcagctgctacgaagagctgctgaagtacgtgggccacatattccgcaaggtcaagcggcgcagcttgcgcctctacgcccgctggcagagccgctggcgcaagaaggtggaccccagtgctgtgcaaggccagggtcccgggcaccgccagcgccgggcaggcaggcacacagcctcggtgcaccacctggtctaccaccaccatcaccaccaccaccaccactaccatttcagccatggcagcccccgcaggcccggccccgagccaggcgcctgcgacaccaggctggtccgagctggcgcgcccccctcgccaccttccccaggccgcggaccccccgacg

SEQ ID NO: 268416 - DNA, 216 bp, Homo sapiens
  chr16:1253096-1253312
  hypo
gcgagcgagggtgccgagggtgccgggatgctgtgtgccctcatgcgctggtacccagggcgtgcagacgagtgtcgggcgcatgctcctagcccttgaattgtgggagtccagccgctgtgtgttataagaggcacacgggctccaaagacagcacgaaaacatcacaggacggctcgatggtcattttcatgtcagtttcgtgttggagtaacc

SEQ ID NO: 268417 - DNA, 83 bp, Homo sapiens
  chr16:1254185-1254268
  hypo
gtctatgaattcacgcaggacgtccggcacggtgaccgctgggaccccacgcgaccaccccgtgcgacggacacaccaggccc

SEQ ID NO: 268418 - DNA, 295 bp, Homo sapiens
  chr16:1262512-1262807
  hypo
actttccccagcccaggtaccggccctgtcccgcatgcctcaggccccgcttctgcggccgctgctcggggaagggcgggcatcccaggcctgctggggtcctccgcagggtgggcacaggcagccggaggtgctgggcgtgtggcgtgaggaggggctgcgctcgcccgccagtgtccgggctgctgtgtgcgtgcacgcgtgcggctctgcccggctcacagtctgcctgcatctccgccgtgcgccgggacacccagagcaacgaggggccgcccacacccctgcaggcttg

SEQ ID NO: 268419 - DNA, 522 bp, Homo sapiens
  chr16:1265050-1265572
  hypo
catttgggttccgtcggttcttcaaggacaggtgtgtgtggtggggccgtcttgggttctgggggcccctcagggctctgggggctgggggcaggtgaggccgcaggctttcccacggaggtctgcagaagcaacgctgctgagccgaggcggggaccccagacgtgtgcgctgagcctccggccacacaggtggaaccagctggacctggccatcgtgctgctgtcactcatgggcatcacgctggaggagatagagatgagcgccgcgctgcccatcaaccccaccatcatccgcatcatgcgcgtgcttcgcattgcccgtggtaggtgcccgcgtgcccgccaggttctctctgcgggtggagggtgggggctcagccatgggtgggagtgaggggcggggcggccagggtccccgcgcagcagggagggtccgcccagccctgctgacgctcagctcccggccctagtgctgaagctgctgaagatggctacgggcatgcgcgccctgctggacact

SEQ ID NO: 268420 - DNA, 123 bp, Homo sapiens
  chr16:1267126-1267249
  hypo
acacgcctcctgggcgtcctcacccggccctgcttccggagccttttctgcacgaggccgagtctcgtgttgacgcagaggcatgtgcccaggcttgtgacacgtgtgcggacgtgcacacag

SEQ ID NO: 268421 - DNA, 999 bp, Homo sapiens
  chr16:1267479-1268478
  hypo
agccctgcccctgccgggttccacttcaggcagcccagtccctgcagggccctcccccgggccctgtcccgacggtgggtgtggcgttgccacagtccagtgtctgtccaccaggtaagcttgattttggtcagccggcgcctactcatcccccgccacgcgcagtcacagacacacacaataatgattcttccatggcagccgccaggcctgatgagccccagcccaggtgcggcagcaggggcctcggcccaggggctccgacctcacacccagggtcaccctctgccaggcagggcgaaccgccagggcctcgtcatccacatcctccgggctatcctgcctctgggctccccaaggggcatgtggaggctgggtgcatgtcccgcctccacccggagcgggctcggctgaccgggcggggtctccctccccgcagagtgcagtgaagacaacccctgcgagggcctgagcaggcacgccaccttcagcaacttcggcatggccttcctcacgctgttccgcgtgtccacgggggacaactggaacgggatcatgaaggtacccgccgcggccatgcctctggcacctggcagccccagcggtttttcaggctctcccaggaacgggtcggatccgtccttgcagggcagggggaaggggacggcactgccagggtggcacccgcgggtgggtgtggaccccggcccacagctgtcccccaccgcaggacacgctgcgcgagtgctcccgtgaggacaagcactgcctgagctacctgccggccctgtcgcccgtctacttcgtgaccttcgtgctggtggcccagttcgtgctggtgaacgtggtggtggccgtgctcatgaagcacctggaggagagcaacaaggaggcacgggaggatgcggagctggacgccgagatcgagctggagatggcgcagggccccgggagtgcacgccgggtggacgcggacaggcctcccttgccccaggagag

SEQ ID NO: 268422 - DNA, 151 bp, Homo sapiens
  chr16:1268508-1268659
  hypo
tgcacgcaaggtgtccgtgtccaggatgctctcgctgcccaacgacagctacatgttcaggcccgtggtgcctgcctcggcgccccacccccgcccgctgcaggaggtggagatggagacctatggggccggcacccccttgggtatggta

SEQ ID NO: 268423 - DNA, 757 bp, Homo sapiens
  chr16:1270045-1270802
  hypo
agagcctggtgagaaaaccccggtgaggccggtgacccaggggggctccctgcagtccccaccacgctccccacggcccgccagcgtccgcactcgtaagcataccttcggacagcgctgcgtctccagccggccggcggccccaggcggagaggaggccgaggcctcggacccagccgacgaggaggtcagccacatcaccagctccgcctgcccctggcagcccacagccgagccccatggccccgaagcctctccggtggccggcggcgagcgggacctgcgcaggctctacagcgtggatgctcagggcttcctggacaagccgggccgggcagacgagcagtggcggccctcggcggagctgggcagcggggagcctggggaggcgaaggcctggggccctgaggccgagcccgctctgggtgcgcgcagaaagaagaagatgagccccccctgcatctcggtggaaccccctgcggaggacgagggctctgcgcggccctccgcggcagagggcggcagcaccacactgaggcgcaggaccccgtcctgtgaggccacgcctcacagggactccctggagcccacagagggctcaggcgccgggggggaccctgcagccaagggggagcgctggggccaggcctcctgccgggctgagcacctgaccgtccccagctttgcctttgagccgctggacctcggggtccccagtggagaccctttcttggacggtagccacagtgtgacccca

SEQ ID NO: 268424 - DNA, 524 bp, Homo sapiens
  chr16:1271080-1271604
  hypo
cctgacttgggtcccgtcgtgagcagaaaggcccggggaggatgacggcccaggccctggttctctgcccagcgaagcaggagtagctgccgggccccacgagcctccgtccgttctggttcgggtttctccgagttttgctaccagccgaggctgtgcgggcaactgggtcagcctcccgtcaggagagaagccgcgtctgtgggacgaagaccgggcacccgccagagaggggaaggtaccaggttgcgtcctttcaggccccgcgttgttacaggacactcgctgggggccctgtgcccttgccggcggcaggttgcagccaccgcggcccaatgtcaccttcactcacagtctgagttcttgtccgcctgtcacgccctcaccaccctccccttccagccaccaccctttccgttccgctcgggccttcccagaagcgtcctgtgactctgggagaggtgacacctcactaaggggccgaccccatggagtaacgcgcccggccccgatgcgaatcaggc

SEQ ID NO: 268425 - DNA, 39 bp, Homo sapiens; identical to SEQ ID NO: 216600
  chr16:1273470-1273509
  hypo

SEQ ID NO: 268426 - DNA, 39 bp, Homo sapiens
  chr16:1341419-1341458
  hypo
tgtggtgcgtttgccgcagtcgtgcgtgtgctcacttga

SEQ ID NO: 268427 - DNA, 133 bp, Homo sapiens
  chr16:1365759-1365892
  hypo
cggcctgttcctgcggggattggagtcctctccaaagaggcccgtggctgtggccgtggcgccctggtccgggcgatccatggagctgggagggagtgagatcacagatttggaggtcggctttgatccctga

SEQ ID NO: 268428 - DNA, 142 bp, Homo sapiens; identical to SEQ ID NO: 216601
  chr16:1367993-1368135
  hypo

SEQ ID NO: 268429 - DNA, 33 bp, Homo sapiens
  chr16:1369126-1369159
  hypo
ccagcaggcgcagcgtagcaccacggagtggct

SEQ ID NO: 268430 - DNA, 193 bp, Homo sapiens; identical to SEQ ID NO: 216602
  chr16:1369189-1369382
  hypo

SEQ ID NO: 268431 - DNA, 100 bp, Homo sapiens
  chr16:1370327-1370427
  hypo
tcccctccggacacgtgggtctgtggtcattctctgtggctgaggccgagtctcacggtgtctccctttcaaactgctcacacccgtcttgtgtttttgt

SEQ ID NO: 268432 - DNA, 83 bp, Homo sapiens
  chr16:1374351-1374434
  hypo
gaccagacttggcatcggcaacgatgttgcaggccctggcgtgggccctctgggcctgagccctcctcgcagccctgcgggac

SEQ ID NO: 268433 - DNA, 145 bp, Homo sapiens
  chr16:1390248-1390393
  hypo
gacgcatacgcacacaggctgcaggtgcacacagacacacacacaggctgcaggtgcgcacagatgcccaggcacacaggctgcaggtgcacacagacacacgcacacaggctgcaggtgcacacagacacgcacacaggttgca

SEQ ID NO: 268434 - DNA, 582 bp, Homo sapiens
  chr16:1391650-1392232
  hypo
ccaccggggccacacggctggcaacacctggcgggatcaggatttggacctgaacagcctgtctggagagcgggtgcttgtggcctggtccctgctgcttctggactccctgaccccggcctgggcagagcctcgccggggaccctcatgggcatctctgttctccttgtagcgagattgaggatgtgagcacggaccagctgcacctggacatctggtacaggcccctgcgccatgcagggcggcggggatgcacaccttttgcgggggagcaggacggactcagggcccggctgcgggctccagacaagccaggtcctcccctgtccccaccagggatcatgacgacgatgtatccctggtagaagcgtgcaggaagctgaatgaagtcatcggcctgaagggcatgggcaggtatgactgctgggacctttctacccatcacccgtgccctcagcttggtcatggggcccggcgggcagtggctccccaggagccatcagcgtgatgctcaccacctgtggtggccaggtacttcaaacagatcgtcaagtcagcccgcgcaaacgggacagcaggacc

SEQ ID NO: 268435 - DNA, 841 bp, Homo sapiens
  chr16:1397417-1398258
  hypo
gttcaaactgcagccccacacgggctgtgtccttgagcatgaggtggccccacgggcagtcaggtctccaagtgccagcgctgaccaccagcacccaggggcccctcctgatgcgcttccccctgcagaggctgaaggaggagctgcggctgcacaaatgttccacccgcgagtgcatcgagcagttctacctggacaagctcaaacaggtagggaggcgccagggacagggtgctgcctccgaggctcccagagcccagctgcgctcacccgcctttccgcagaggaccctggagcagaaccggtttggacgcctgagcgtccgttgccattacgaggcggctgagcagcggctggccgtggaggtgctgcacgccgcggacctgctccccctggacgccaacggtgagttgcagcggggacgggtcgggtggtggtgggatgggggcaggggggctcacgactgtgctcctgcaggcttaagtgacccctttgtgatcgtggagctgggcccaccgcatctctttccactggtccgcagccagaggacccaggtgaagacccggacgctgcaccctgtatacgacgaactcttctacttgtgagtgtcctaagccccagccccagccccaggctccaggctgccggagcgagactcccgactggcctctgtccgcagttccgtgcctgccgaggcgtgccgccgccgcgcggcctgtgtgttgttcaccgtcatggaccacgactggctgtccaccaacgacttcgctggggaggcggccctcggcctaggtggcgtcactggtgtcgcccggccccaggtgggcgggggtgcaagggc

SEQ ID NO: 268436 - DNA, 90 bp, Homo sapiens
  chr16:1400758-1400848
  hypo
aggaacagcaggccgccgggtcacactgctgtggggcccctggactcacctacgatgcagaaggtggcagcaaacgcttccacgcaggaa

SEQ ID NO: 268437 - DNA, 74 bp, Homo sapiens
  chr16:1406894-1406968
  hypo
cgggagtgtgcgggcgagagtgtgcgggcgggggtctgcgggcgggagtgtgcgggtggcggtctgcgggcagg

SEQ ID NO: 268438 - DNA, 224 bp, Homo sapiens
  chr16:1407319-1407543
  hypo
aacagaaggccaggccgggccagcaccccagaggtctcagtggcattagcctctgccctccgggggcgggggccaggctgagggtggccccagtgtggcatctggctcctgggctggccagattcccagggaacagtcacccagcacctcgtgtgtatttcgactttattattattattattattattattagagccgagtgtcgctgtgtcgcccaggctgga

SEQ ID NO: 268439 - DNA, 464 bp, Homo sapiens
  chr16:1407783-1408247
  hypo
gatgacagtcatgagccaccgcgcctggcctcgactttattattaatacggtaaaactacagagagtttgaaacatcagtctggggcgtcctcctctaaccagtgcacttgctgctgcagcgcaggcccttcaggggacggggatgggggccagtcccctccctgcctccacggcccaagccccagccttccccacagtcctggaggatggcccgtggctgacagtctcggtgggcgctgtgttaaggtggcgtccccagccaggtcccgactccccagcttaaagaacagggtggctgctgtggcttgactcacgagttgccactggccttgatgtgtacacgcccttgctctagcactgcctggggctggcctggctggagggtagggacgctgcacgccttccctcttcccccaggcgctggtgacactgccctgcaaccgtcagcaccatcatctccaca

SEQ ID NO: 268440 - DNA, 178 bp, Homo sapiens
  chr16:1414467-1414645
  hypo
acccacgtggcccgcggagagccaggtcgccgtaaaccacagatgcctgttcctgctcaactcctagggacagtcccagccctgagcagaagggtcaggtcatcgcggggatgcgttctcagtcacgtttctgctgcggccgaaaccacactgtcgctccaggggcagacgggacagg

SEQ ID NO: 268441 - DNA, 145 bp, Homo sapiens
  chr16:1416341-1416486
  hypo
cgtgggcccgctcccggcaggccacacactgcttggcgcggagctggaagatcacctgcagggccagaacaatgacgggctcaggaggcccctgcccaggctgggccagctggggagccggagggccttccgggcaggactcagc

SEQ ID NO: 268442 - DNA, 282 bp, Homo sapiens; identical to SEQ ID NO: 89454
  chr16:1417076-1417358
  hypo

SEQ ID NO: 268443 - DNA, 386 bp, Homo sapiens
  chr16:1417675-1418061
  hypo
gactcctcccactgccggatcttcctcttggcctcgtccagctgccgcctgacccgggccagctcagctccgtttggacttgcactcgaagaggatggggggccggcactcaggatgggggaggggctgggggagaagctgccggaaacaaagtcccagatgctcccggggacaccgttcaaacctgagtgtgaaacggtcgatgacggcccagccctgctgtgctcgcggcctggtgggattggtgggtgctatgccccaggccccaccgctacgtgggcaccctctggggctcacctgccctggcagcaggggtgcagccacgcctgccccttgccccactcctggaccccaccaggctcaggaagaggcgctgacagtgacac

SEQ ID NO: 268444 - DNA, 360 bp, Homo sapiens
  chr16:1424294-1424654
  hypo
ggccctgccctgtcgtccctgctggctgcaagttcttggaccctcactgatgcctggtactggacagtgtgctgctgaggcctgctctgagacaggcaaagccacccctgcctgtccctgaagggccctagacccccttcctcctgtcctcacctgggaccgatggtccctccatggccccaggcaaccgcaccccggggaaacctgtcagacccgaccgtgggggtcggcgcgccgggaacctccacagcctggccagcccctgcctggtgctcggttcagacaagctggggcccagcagaagcaaagaggcggtcactgccccacctacccgacatcgagtcccgccctcgcagacct

SEQ ID NO: 268445 - DNA, 1204 bp, Homo sapiens
  chr16:1424908-1426112
  hypo
gggtgacttctgaagaagaacgctgccctagccgcacatgagatttgtcgggaacacagctgtggggcacgtggcctgcacctcacccctctgcccaggcctccgcttctcctccctggaagcagctggcaccagtcagcgccacggggaccatgggagcaaccacagggtggcgggtggcccctcgcccgaggcctggcgctcggcggtcacaccccccgagccccccagggcagccggagtatcctcgtgccgcggtggtggccccagcggagcacaggcagaggctggcgtggacgtggcgcagctggcaggtccgggcctctgaacttcaccccgaatctggccgcgctcagcagccacactgtgtggagaccgtgctccaccacccagagcggcaggcgggagagaagcctggctcgggagtggacggtggactccagaggccgcaaggcagaggccacccccaccccactccaccgcacagcacgacccagactcaaccctcgtccacacgccagccgtgagggaatttccggggcgtggaggccgggctgtggcgccacctggcaacactgtccttccccatcccgtcacagaggcagcagggcccagggcagagaacctgaacccctggggcgtccgggacggcacacggcgcatgcgggagtggcctccactcccacggagacaccgttccaatgaagcttttagggactttcgaaggtcttatccagaaactagagtaacaggttgggggtcggggcagccaggccaagaccccctggggaccaggaacccacagtagcatccgaaaatgcctcagccctcaaggatgctcatcggcggagccaaaggcaggccttgggccagccgcacccagagccattcactcctctccttcccattcacaggacggtggcgtccctgagcggacatccaccctggcctgcagggtgggccagccctcccggtcgctgtcatccacttgacgttctcaggccatggctgaagagggcaagacctcaaagcctgactgaagtcgtgctgagcagcagagccgagacactgcaggcagtggcagaggaccacgcactgagcggccttggacaggtggctccaaggctgaaagtgagatctgtggcgggcagggcctcttccctcctccctccagggctggggcgctcctcctccctcactccaa

SEQ ID NO: 268446 - DNA, 556 bp, Homo sapiens
  chr16:1428212-1428768
  hypo
actgaggacaggcaccgaccccccaacccgcaggcctgcccacagccccctcatgctcccatacgggggcttgatgacgggcagggccaagcggtttgcccatagtcaggtcagccaggctcgggaacctggacctgccctctgcacccaagtcccaggatcaggatatggcagccccttcagagctcaccgcccctcacacctggcagagatccagaaactcctcatgaaaatcaaagacgcaaagaagttgggggacaggaacggaggcgccttttctccccttggagtggggtgatcccaccaggctccgtgctaagtcggcagaagcttcacccaccagctgcagagtgcgcagcatgtggaggggctaagctgccttcaatgctcacccgacaaactacggctcgcactcaactcagagggcgtcagccaccacctacctcagccaagtcacctgtgctgaagcccgggaagctgcctggagaggggacgttcagggagcgtgtgggtgcccccgagagactccggccccgcttcaaagccaagtgcccct

SEQ ID NO: 268447 - DNA, 248 bp, Homo sapiens
  chr16:1435412-1435660
  hypo
cgcgcaccccctgcgtggaggaggcagcgccacgtcggcaccctgcagaaagcaccgcgggacggcggccaacttctacgccctggcgaggcccagggagagcttcccagacccggagggactctgaccgcaccgaggagaaacaccaggacggcagggcagcgggctacggtgcacttgggacaggcacagacacctctggggagtgtctcgtgagcttttctgcagaaaacgtttcaggagtagac

SEQ ID NO: 268448 - DNA, 72 bp, Homo sapiens; identical to SEQ ID NO: 216610
  chr16:1462654-1462726
  hypo

SEQ ID NO: 268449 - DNA, 32 bp, Homo sapiens; identical to SEQ ID NO: 216611
  chr16:1465337-1465369
  hypo

SEQ ID NO: 268450 - DNA, 34 bp, Homo sapiens
  chr16:1466431-1466465
  hypo
gattacaggcgtgagctaccgcgccagccaggat

SEQ ID NO: 268451 - DNA, 120 bp, Homo sapiens; identical to SEQ ID NO: 216612
  chr16:1472168-1472288
  hypo

SEQ ID NO: 268452 - DNA, 150 bp, Homo sapiens
  chr16:1484608-1484758
  hypo
cccagccctgaaccccggcccaaaggcccaggaggccgcgccgggatccctgctgcccacctcacagcctggtacacgccccagcagttcatgggcaccaccttgccaggcgccatgtccttgatgaagacccgcggcctcaccagggat

SEQ ID NO: 268453 - DNA, 48 bp, Homo sapiens
  chr16:1487582-1487630
  hypo
agctcgggcctcacgggctgcagatgctgggccgaggctgctcagcgg

SEQ ID NO: 268454 - DNA, 233 bp, Homo sapiens
  chr16:1487860-1488093
  hypo
cggctgctcagagccgggagatggccactcagctcctttaactgcccggccagctgcgccacggatgcctccagagcccggctcttctctcggagctgcaggggacaggtgggcacggggaggcctggctgagcgcccatcccgtgtgcgtgggagaccccgttggggacatgttgcgctaccccctcaccagcaccagctctccatgcatctcctgccgggccagctcgcca

SEQ ID NO: 268455 - DNA, 316 bp, Homo sapiens
  chr16:1488497-1488813
  hypo
tcgagcactctgctcgggggaggcaaggtcattccctgctgagtcggccactgcggccccctcctgagtgggacatcaggggtccccccgcctgacagcacctgaggccccaggacacccaccaggctttctcctcggccagtaggacacggttcagcgacgcctggttctgctgcacaaacttggtcagctgggccacggcagcatccaggccctggcactgctccaggaggtggctctcctgccagggggtggaggccgccctgagacctgcaccccggccccggccccacctgcccgccgcccgcccggcccc

SEQ ID NO: 268456 - DNA, 939 bp, Homo sapiens
  chr16:1493329-1494268
  hypo
ctggacctaggcccgggtctggcacctgcccctggagtccacccagctccggcaccactggcccctgggagctctgggcctgggcagcaggggtgagctgggctccaggcccagaagcagctgcccccaacacccaggaaaggggcagctcgacctgtgggtgggggagccgctcacctccggcgcctccttttcgggggcctgggctgccggccgcgcctcctgctgcaactgcctcagctctgagccctgcagctgcacgcgggcccgcacctggagcagctcccgcagcaggctccgcgtggcgcgctcacagcgctgcttgtgctcccgcaggcaggccacctcggcctgcagctccaccaccctggccggggcgagagtgggcgagtctggcggtgcccgccgtggaggcggaggcggcggcgacgtggtcctcccccgccagcaccccctgcagggctcaccactgctccagctggttccagtgcttggcggtgtcctgctcggggacagaggccgtggatgtcggatggctggactcatacctctccgagagctcctccaggctcaagggctcggggctggccaggcctcctgccaggaggagccccaggtcttccagggtgacggctctcagctgggaaggggccgatgcccctgagggtccactgtcagccaactctacaaggaggcatcttgggagcttgccccttggggcccggcccccactggagcttacgggaacaaggccccaaacccccgcaggaccctcgcccaccacccagagctcaacgcgtctccttgggtcacacaggatccagacgggcttggctcagacaagtccagggccctgcctgaagacacacagcactgggcggcaggaacaagcgagctggagggagcccggggtcagaagcagagcggtccccaccctca

SEQ ID NO: 268457 - DNA, 849 bp, Homo sapiens
  chr16:1510691-1511540
  hypo
cacagccagcctggccgggccgcctccacctgcactggaacacgctgggctcaggacttctgcccgggactcggcccaggccacgcccccctcccaagctgcagcggccgcactgggaaggatactgcccttgatgaccctgtacttgaggccagccaggttttccaccacgatgtcaatgaagcaggccacgaggcccgtgaggatcccaatgagggcgcagatgacccagcgcttgatctccaccgtccggaaggcctgcagggcgcggtcagggcgagggtcaggcagggccctggcgcagtcactctggcagcagcaggaccgcccagaccgcctgcaggccccgggattatgaagggcccagtgtgcacggtgcgctgagtcccacaaaggacagtttctggccaacatctgaggcgcacccggggcccgagggtgactcggggaggtgggtgaattcccaacaacttcacagccagcggttgttatgctgggcaccgcatctggcggccgtaagagcagccttcttggttacggtgaccgtgaccctcccactgtctctagaaaccagacgaaccacaggcctcagaggcggagtcagaggaggagggaggaggtgcgtcacctcaccccggcagaagagcagccccaggcccggccggcaccaggccccgcaccgtggggccctgcagggagcggcgtccagctcaccgtgtgattgatccgccgctcctcctccaggaacagctggttctcactgttgtcatagtccaagctctgcaggccgggacagcaagggcagcactcagcaccgaacccacgctctgggtgcgggcacaggggacc

SEQ ID NO: 268458 - DNA, 180 bp, Homo sapiens
  chr16:1523650-1523830
  hypo
gatgtgagccaccgtgccctgccgtccttcctaatctttaagcacaagacaagtgtttaaaggactagacaagagaaaatgtaaagaataactgcaaagcagattaagacccatcaacaaaacggtccattaactcaaaagtaacacaatacggccaggcgcagtggctcacgcctgtaa

SEQ ID NO: 268459 - DNA, 36 bp, Homo sapiens
  chr16:1536441-1536477
  hypo
gtgcccaggcggccggaggccgtgcggacccagctg

SEQ ID NO: 268460 - DNA, 334 bp, Homo sapiens
  chr16:1541164-1541498
  hypo
gggtgacagagcaaagaataaagacattttcagacacacaaaggcttgagaaatttgtcctccaagcacccactgttggatgcggggcttcaggaaaagaagggaatagggaaggacggagctgccgtgggcactggcgagggctggaacccagcagcggacggaggaggagtttccgggatgatgggatgctgcctgccccatatcccatccatcagctctgcctgcagagacatgccctgagttcagctgcttctctacacccccattccgccccaagctcatcctcacaatggccacctagtcccctcgtccgtgtcgcccccctaccgtc

SEQ ID NO: 268461 - DNA, 396 bp, Homo sapiens
  chr16:1557352-1557748
  hypo
ttcgcttccacatcgatgcgtgagtggcctgtggggctgggccaggccaggggtgcaggcagacacaggggtcttattgtgggggccccgtggagcctcgaggtggctgacaggcagcctggcctggtacttcccaaataggaagtgtgccaggcagggccgcagcgtgggtggtctgccacactgaggggagtgggaggtctggggtgtggtccctgccgagctcagcccccgccttcttgccggcagctacgtgcgccaggggctgttgtcggccgtctcctccgtcctgctcagcctgcctgctgcgcgcctgctggaggacctgatggacgagctgctggaagcccggtcctggctggcgggtgagtgtcggcctgcggtgtgtgtgtgaga

SEQ ID NO: 268462 - DNA, 232 bp, Homo sapiens; identical to SEQ ID NO: 216618
  chr16:1560777-1561009
  hypo

SEQ ID NO: 268463 - DNA, 42 bp, Homo sapiens
  chr16:1575251-1575293
  hypo
gtagagctccagggacggcaggtcctccgacagcatcctggg

SEQ ID NO: 268464 - DNA, 166 bp, Homo sapiens
  chr16:1575857-1576023
  hypo
cagggaagaggccgcgagggccgcactcactaactgagggcccggctgcagtcggcgctggcctccaggtgcccggcatagcggtggtaggtgctgcgcaggtgcacgcgatcgtggtgctcggctacctggagggcctcctgccaccggcccgcagcctggtaga

SEQ ID NO: 268465 - DNA, 657 bp, Homo sapiens
  chr16:1576053-1576710
  hypo
tcctgtacagctgctcggcgtcctcctgaggaatgaggatgggcaggtgtcgtgcagcctccacacacccacgtctcaaacacactgttccacgccaggccaccggtcaccgcaccttcccacaccgccaagcacactgacacacggggccgctgtgggcacagcaaacgccacacacccacggggcatccccgtcccacggctggagagtgagatgcaccaccaaggggtaccccacctcccacagcccccctcccacagccccccctcccacagcctccccagaagtcccgtgctcagccctgctgacctgggggtctctcgggcgctctgttccaggcccacacacctgacaggcacacaccctggagagccggcggtcgcctagcctccacccacctcacctccaccgccgctgtctgcccagctctcctgggtcatgcctctcggctctgcccacatcagtgcaggctcaggccggtgggcgtgcctcctccttccccagggggccgtggctgtggcaggcgtggtgccttcccacccaccccatggcgggcgcccctcaccagcatgcccagctgcgtggccagcacggccacgcgggcctctagctccggctcctgctccgcctcacgcagcgctcgggccccgcgggca

SEQ ID NO: 268466 - DNA, 195 bp, Homo sapiens
  chr16:1578983-1579178
  hypo
cgagatggtagccccgggcaggctcggtgcacttgtgtctgagtctaggggctggacgcaggttcctgggatgggccctgcggtggtgtctgtggctgcaacgcggcatacccaggtgcccgctcccgaaagccagcaggtactttgtgcctggttttacatgtactcgggtgaattccacggacgcattccacc

SEQ ID NO: 268467 - DNA, 118 bp, Homo sapiens
  chr16:1579423-1579541
  hypo
tggcagcttcctggacgctcagtcggcgctgcggtgaaggtgacaccgggtgcatgggaccccagggaggtgccccaggcgcagcgtcctgatctccgattcgcgctcctcagtcttt

SEQ ID NO: 268468 - DNA, 381 bp, Homo sapiens
  chr16:1580445-1580826
  hypo
ttaaaaaatctcccgattgtgcacaccctctcccgaggcccaggtgtggggctggacagggctgggacctgcctctacctgccccgcgtggctcctttcctctcccttgtcctgaaaacaactggttccttccgtccacatccaattgcggtggaaaatcacaaacaagcacaggaatgtggcagctgacttgggtcccagacgggctcccctgtgctctgaacgccccgtctctcccacgcggaggccacccgtggggagcgggagagagcccgcccgtggggagcgggagagagcccgcaggccggccctggttttgctctggttcctggggcccatgtgtgaccgaggacccagccagcacaccgtcagatgcccgca

SEQ ID NO: 268469 - DNA, 67 bp, Homo sapiens; identical to SEQ ID NO: 216621
  chr16:1613977-1614044
  hypo

SEQ ID NO: 268470 - DNA, 251 bp, Homo sapiens
  chr16:1614793-1615044
  hypo
ctgccgggcagcacgacccatggctgctgaagaaggacaggacccggtgctgcaggacatgaagatcccctagtaagccactgcacccagcaatggaggtgccctcacagccacgttcggcaccagtgcagagcagagcagaaagcagggcagaggggcgagtgccatgctccagacaaggcggctctgaggcccagagagcccggggacacaagctggttcccgtgaggtgagaccggcctggtacggga

SEQ ID NO: 268471 - DNA, 127 bp, Homo sapiens
  chr16:1642685-1642812
  hypo
gtgtcccggcagagcgactggtggagggacaggtgtcccggcagagtgactggtggagggacaggtgtcccggcagagtgactggtggagggacaggtgaacaccagccacacggtgcccagcactg

SEQ ID NO: 268472 - DNA, 176 bp, Homo sapiens
  chr16:1651461-1651637
  hypo
cctaggcctcaggagagtggcgtctaagcatgtagggctgaagcatcgttatctgtgataaactcacaaatactcaggtaaaatacccacgtagctggagggaaagcagacctggcagtgggaacagcgggcgaatcgacatggagggtggatgcgtgtccttgcactgttctttc

SEQ ID NO: 268473 - DNA, 383 bp, Homo sapiens; identical to SEQ ID NO: 216622
  chr16:1652262-1652645
  hypo

SEQ ID NO: 268474 - DNA, 176 bp, Homo sapiens
  chr16:1666426-1666602
  hypo
tgagagcagctacttcaccccgttgaagtgcggctgctaaaatgaaatagtgcattggtgtgaaagcactctcagacgtgtacgtggctacttgtatgtataagtgaagtgctgctgagacgttagtgatcaggtcaatttttggcagttgggacgaggggaggcttgcttttgtt

SEQ ID NO: 268475 - DNA, 196 bp, Homo sapiens; identical to SEQ ID NO: 216624
  chr16:1668009-1668205
  hypo

SEQ ID NO: 268476 - DNA, 150 bp, Homo sapiens; identical to SEQ ID NO: 216625
  chr16:1677033-1677183
  hypo

SEQ ID NO: 268477 - DNA, 206 bp, Homo sapiens
  chr16:1678527-1678733
  hypo
tacaggcatgagtcaccgcacctggcctaacacgtttcatttctgcattgtgtgtctcatcaaaactaggtggccttctggtggggtcttgatgtgtggctgactggccggtggcaggtgtgactgtgaaccctcaagctgtggggtgacggtgactgggcacaggcctctgctctgagaagtgcggcttctgccatgttgtcatg

SEQ ID NO: 268478 - DNA, 82 bp, Homo sapiens
  chr16:1681341-1681423
  hypo
gctcctgcatcctcttctcacgtccccatcgcctgccagtgtattctcgtgtgctggtgccgtcaggcattccagactcagt

SEQ ID NO: 268479 - DNA, 440 bp, Homo sapiens
  chr16:1682397-1682837
  hypo
cccacaggcagggccggcttctgctcagagcgcagcttccagcaagcccgccggacctgctttctggcattttctcaccagccgcttggcctggggctcctcgccttgcagcgctttggctgattgtgtgctgtctaactcggtcaaaccaagttgccaggaagtggcccgtatcccatgctccagggttcttaccactgcttttctgagctatggtttgtgtgtttccagtggctctgagtgtgcgtgagttctgggtccctggctcacctgaagcctgtggtctccactgcaaatgatagcaccatggtccagcgaggggcttgggccgcaggcaccgtgcctggcgctggtcttcctgggggacggccagccttcccaggcctctcgccctctacactgggacccaggtctgcgtcggccctcgttcagtcacggga

SEQ ID NO: 268480 - DNA, 128 bp, Homo sapiens; identical to SEQ ID NO: 216627
  chr16:1701258-1701386
  hypo

SEQ ID NO: 268481 - DNA, 333 bp, Homo sapiens
  chr16:1704526-1704859
  hypo
taagtttgcagttcaggggcatttaacacgatcacattgttctgtggccaccgtctctgtccagctccagagcattttcatgacgctagaagaggccctgtgcacctcagcactcactcctctattctccattctcaccctcccacggccgccggcacctcccagtccgccttgtgtctcagtggacttgcctgctctgaacgtttcatagaaacggaatcacacgcagaggcctccgggcctggcatctttcactgggcgtgatgcttttgaggttcacccatcatagcgcatcagtacttcattccttccgctcatgtacttctccctcag

SEQ ID NO: 268482 - DNA, 143 bp, Homo sapiens; identical to SEQ ID NO: 216630
  chr16:1705539-1705682
  hypo

SEQ ID NO: 268483 - DNA, 93 bp, Homo sapiens
  chr16:1708014-1708107
  hypo
tgctccacacaggccgtcttacagcttctgagtgatgctcacttctgcctgcattccccacgcctcccgctttttttccgctcccacccccag

SEQ ID NO: 268484 - DNA, 39 bp, Homo sapiens
  chr16:1712683-1712722
  hypo
gggccgggccgcccgcgtgcgagcgtccccgtggtctgg

SEQ ID NO: 268485 - DNA, 128 bp, Homo sapiens
  chr16:1719761-1719889
  hypo
ttggatgtctggggtcttcccgcccacagttgtacggggccagggcttgtggctgggcacatcaggcatggcgggtaccatgcctgacagctctgaaccagttgggcgacctgggtctgggaggtgct

SEQ ID NO: 268486 - DNA, 123 bp, Homo sapiens
  chr16:1723672-1723795
  hypo
tcataggctctctgcgagcacttatctaaagagtgtgcgggcagacgacaggtgattgtgattctgcacagagccctgggctgccatccctagcttagcttcctgcagcgggagtcgatagga

SEQ ID NO: 268487 - DNA, 504 bp, Homo sapiens
  chr16:1724905-1725409
  hypo
taatatgattacagcgaagactttcctgataagttctcaaactcgatgtgtgactgtttggcacttgagacaaacctgcctttgcagggaaagtgtctctcacgggcattggtgtgggcgtgcctgacatacgtgttcagtcccttgcatacctttgccttgagacttctgtgtctccttcccatttgggacacccaggtgagggcccagacatctggatgtggtcagacctcaccaaatatatgccttcgtggtggtctccctccttgcgccctcttgggtggccagcgttcctactgcagacggcccaacatccagtctttccccaggacagagctaacaagggcccctttgccttctcatcctcaggagttccaggcacatgagtcaccgtccatccacatccagtgtggcctggagctgctacagaggtgttgggcaggccatgcctgtgccgccatctctcccttcctgcctcatttcatcccccgcagcagccgggat

SEQ ID NO: 268488 - DNA, 804 bp, Homo sapiens
  chr16:1730076-1730880
  hypo
tccatggaacagtgattattatgcctaggtctgcaccgatgtgggaccaggagtttaaactagtgctcagagcgaatccggtttctggttcctggtggccagagttttgcaccacccacatcagtggggggagggactgcatccccagccctgtcccagttgtgtgcatttagtacgtttcctttttgtttgtgctgcctggcactggctgcccggtaaatgatggtgtttattatcaccctgagcgacgccgatgtttttatattgactttcacgctccagaagttagctgcacagggccgcactaaagtcatactcacactaccctgggggactggtttctggacaaggtgttgagaaagggagaaaactcttccttttaggatggtgaggaaggaaagccggtctgaactggatgatgaggtatcactggaagcttctgcttggggtccaccagacgctgcacatttgccactcatctgaacggggtcgagtcgcagggcgggcgccttgtaagcgtcacatttagttttgctgtgaagcgagtcaggtggtggctgtaagattacctagccaggttttcctctcctgagacctcacatctctcctttccttgctgagggattgtcttgtgttaaaggggtttcgtaaaagcgttatgctttagccgcgattaacctgaggtcttccttcaagctggaacatttctatttgtaaggaatttaatccaagtttatttctcactgcttctctctaagcctgaccagtcccctcatcctttctgaaactcggggacaaactatt

SEQ ID NO: 268489 - DNA, 198 bp, Homo sapiens
  chr16:1731569-1731767
  hypo
tcttccaaattttggagtcccgatggcactaggcgtctgtcacgtcactcacacagacactgaaaccacctgtgcagagctctagctttcctgtttaaacttgaagctcctccggggtaaggacttgctttcctctatctacggcgtctggggaaggattgccaatgataggtgctcgagagatgtgcaagttgaact

SEQ ID NO: 268490 - DNA, 41 bp, Homo sapiens; identical to SEQ ID NO: 89515
  chr16:1732071-1732112
  hypo

SEQ ID NO: 268491 - DNA, 164 bp, Homo sapiens
  chr16:1735954-1736118
  hypo
gtttttattcagatcgtcagtgggattgaaactcttaacaaggaagaattgatctagcacacatctacatagttcttcagtatttacccaacctcctagtggttacagtaggagggactctttgaaaaaggtttcttggccaggcgcggtggctcatgcctgta

SEQ ID NO: 268492 - DNA, 800 bp, Homo sapiens
  chr16:1737555-1738355
  hypo
agcactccatggaaggcaggcggtaccactttgcccgttccacatggtctcatgcccagtggggagcccggccccttgcggttagtgagccagcctctactcctggtcacagtgtgtggtgccagccatcatggctccccatgccaggttcctgcttctcatggtccttctcacggttgttgggagttttcctatctctccagtgctcttggaagacggtttatggtatattatcaagggaagcctgaaagggaaactgctagttgtgttcaccacccaacgagatctggagtcctgccttctttctacacttagtcacacagacctagccccacagccctctagttgcagggcttgattgagaaaagtatgcagaggccgagagtgtgtgtgaccgaccacatcatagccatcgaatgtttatcaattcccattcagtgtttcagtgaatcttcagtagtctctgtgttctttgttagtcacctggtttagatgttccatgaattgttcttcctcttctagcaatgatgaccaacgtctatgaattgttaatatttaccggggactgtgctaagtgctttgcatgtgtatttttcatttggtgttcgctataactaggagtaggttgttttgctcctttcacagaggaggaaacaggcttggaaaaggtcactggcatgcataaatcccaagctagtcagtagcagagctagtcggtagcagaactagtccgtagcagagctagtcggtagcagacctagccggtagcagtgctagtcggtggcagagctagcctttga

SEQ ID NO: 268493 - DNA, 298 bp, Homo sapiens
  chr16:1739991-1740289
  hypo
gtacacatttctctgcagggcgagtcccgcatatccccaggtgttctgttaccacctgcaaaaggtagacacgcccgcccgaccccccacttgctgtgctctgttatagtcctccttgtcgctgcactctgggcccctagaactggtgtcccagaaagccaccctgctttaggccccgccgcagcagtggggccctcaagcgggtctgaagacgagcaggtgcacagacccccagccgagcctcatctccacgcaagcacacgtgggctcttcatccggttgcttctgtggagcagtg

SEQ ID NO: 268494 - DNA, 391 bp, Homo sapiens
  chr16:1741721-1742112
  hypo
tggagctcagggctggcactcggggttcctatgagaggaggtctccaaagcactgcgggggtggggtggggtggggtccggtggacgtctggttgctcagtgttctgtgatcgtttctgcagggggtaaaggaagtggtatctttgacgaatcaacccccgtgcagactcgacagcacctgaacccacctggagggaagaccagcgacatttttgggtctccggtcactgccacttcacgcttggcacacccaaacaaacccaaggtatggactgcattcagacgtgacagcgcagcagcgggtatgccaggtgctctttccaaaaaggctccaaggcagatgcgacatgtttttagggagaatcatggtgggtgccgtagattatcctgg

SEQ ID NO: 268495 - DNA, 68 bp, Homo sapiens
  chr16:1748235-1748303
  hypo
atggtgagtcaccccgggggagtgagccactgctcaggttgagcggcagacttcgactctccccacgg

SEQ ID NO: 268496 - DNA, 121 bp, Homo sapiens
  chr16:1748861-1748982
  hypo
agaaaagcaggccccgccaaggagcaggagcccatgcccacagtcgacagccatgagccccggctggggccgcggcctcgctctcacaacaaggtcctgaacccaccgggaggcaaatcca

SEQ ID NO: 268497 - DNA, 34 bp, Homo sapiens
  chr16:1750805-1750839
  hypo
aggaagaaataggacgtgacggtactgggccctg

SEQ ID NO: 268498 - DNA, 90 bp, Homo sapiens
  chr16:1751083-1751173
  hypo
aagaagagttcctgcgcatgcaagccctgctgtgtggctgtcgtttacatttgggaggtgtcctgtatgtctgtacgttggggactgcct

SEQ ID NO: 268499 - DNA, 144 bp, Homo sapiens; identical to SEQ ID NO: 216635
  chr16:1753652-1753796
  hypo

SEQ ID NO: 268500 - DNA, 106 bp, Homo sapiens
  chr16:1795484-1795590
  hypo
atagctgcagagccacaggccgtctcagacatttctacaaagccactccgggaggcgggctgcgcccgtgtgagggctctccctcggcactgctcatcttttgggg

SEQ ID NO: 268501 - DNA, 1288 bp, Homo sapiens
  chr16:1796043-1797331
  hypo
agtcccccacggtgcgccctctgagagaccacgggaacccacccagcggctgcctgggacaggcacaggagccacctgggtgcctctgaggccttgcactttcccacacctcaaggagggccgggggccacgggcaagctctgccatagcgggtgatcaggtcagctaagacgagaacgtttggggctctttttctccagctggttcagtatctttgttaggaaagaccattggaaagaatgtttgtttcgcattccgcattagtcacatagaatgcgctcctccctagcgagcttcctgaggtagacggctggttgcggtttctcgtaatccgggctgcccccaccctccagaatgtcttggtggcgtccctttctgtgagcagggattgtggtttctttgcgcttgctcatgttcaggggtgagctctggtccagtcaagccacagggtcagcaccttctggtcactccctggccctgacctgagcccggggaggaacgtggggcaggcgcgggtgggcccagcctcgagctcttcagcacagtgatggtgacggggcagcggtggcggcacagccagcccttcttgggtccccagtcagagccctctgccctacctgggctggacttgtttctgaacagccacaagctacagggggctgccgctgtgtccctggcgaggcactggcccattacaagcaatcgtctggggagggcaccagtggaaagccccgttccaagccatttcaggagggtggccctgcttccgaggagccggagtcagtggccggataagcagagccactcgggagtggtgaggcccggaagggttagcccggtgggcggcagaggagctctggcccgcagggtgtcgggcgaggcaaagtgcaaagcattggtgcgcggggcctcaggcagccacggcggagccgcaggccagggacctgcagtgactcgctctccctcctccctgtgtttggccttagtgtccacaggatgaaatgtccgagtcaggccagtcctcggcggccgccacacccagcaccacaggcaccaagtccaacacgcccacatcctccgtgccctcggccgccgtcacacccctcaacgagagcctgcagcccctgggggactatggcgtgggctccaagaacagcaagcgtgcccgggagaagcgcgacagccgcaacatggaagtacaggtcacccaggagatgcgcaacgtcagtataggtgggtgcccacctccgggactctgggctccctcgggcaggaggcagggcttggt

SEQ ID NO: 268502 - DNA, 105 bp, Homo sapiens; identical to SEQ ID NO: 216636
  chr16:1804798-1804903
  hypo

SEQ ID NO: 268503 - DNA, 164 bp, Homo sapiens; identical to SEQ ID NO: 216637
  chr16:1805218-1805382
  hypo

SEQ ID NO: 268504 - DNA, 34 bp, Homo sapiens
  chr16:1807114-1807148
  hypo
ttttttaattgaggcggagtcttgctctgtcgcc

SEQ ID NO: 268505 - DNA, 704 bp, Homo sapiens
  chr16:1807725-1808429
  hypo
tgcggtgtctccctcgccgctctctccctcgcccacgctggggggcttttggagactgggtacctgccacaccctgccacacacactctcctcttcacaggcctgcatcatgggggctgcggggggcctgccctcctgatgggcgatgggagcagagggcagcaggcttccgggtcagggctcggcaacacagccctgggctggaccacggcgcctgggcctggttccctgcaggcctctgcctgggcacacggggcaccgggacctgctggaggctgctccctctctctcctgccctgcaacatgggagcagccgaatcattgctgggttttctgtaataagaatgtattgttagttccagtccctaattgacctttgtcccttccttcccctgcctctctgtgcgtcgctggactcgccaggggagttctcaggtgagtatctcactctcctgtctgtctcccctctgtgtgacggggggagtgggtggacgggggatgccccgagctatcccgtcaccgtggctgtgtggactgccccccacgtcgccgcagcgcctctgcttctgctcgcagccaccgccgctcggaagcttgttcggtttgctccaccagccacttgacaatgacctggatatccaacccccccagcctgaggagtcccccgcgggccatttctgaaggccctgcggagccctaagcca

SEQ ID NO: 268506 - DNA, 123 bp, Homo sapiens
  chr16:1810314-1810437
  hypo
ggcaaggccccttcacgtacctgtatgccgcgcccgtggcactcccatctttctgctttttcaaagaaacgccttgaatgtggtgaagaatgacctgattgccaaggtcgaccagctgtccgg

SEQ ID NO: 268507 - DNA, 358 bp, Homo sapiens
  chr16:1812259-1812617
  hypo
agatccacctatacgtgtaggcaccccaggaggaagcaggtgtcacccggcctccgagggctggctgagcctctgtgcccctccctccgcaggacaaaatccccatggcccagcgccgccgcttcacgcgggtggagatggcccgtgtgctcatggagcggaaccagtacaaggagcggctgatggagctgcaggaggctgtgcggtggactgagatgatcaggtgggagttgcggccaccccaggaggggctgcgggatcatccctgacggcaggactgcggctccctcctctgcacctccctgtcttctggggggactgaagtgcgctgggtgcttcctggcgggagccagagagt

SEQ ID NO: 268508 - DNA, 65 bp, Homo sapiens
  chr16:1812931-1812996
  hypo
gcttcagccagcgccgcaaccatgccatgtgcccgatctcggcaggcagccggcccctggaattc

SEQ ID NO: 268509 - DNA, 1217 bp, Homo sapiens
  chr16:1813285-1814502
  hypo
ctgcagcaaggagccgtttcaggcgtctgtccagcagggagtcgctggtcatgcctgtgccccggcggcactccaggtcccggtctgtggaaccctcagtgactgtggcagcagagcagcctctgggtcgagcaggggccagctgtggcctccaagcccaggggcatagccggtgccaggaaagccacccttcccagctgggcacccagtgccgggaaagccacccttcccagctgggcacccggtggccgggaaaaggcgaggatgggcccaggcgggcctccctgccgtgacctcccccaggacaagcctggggcactgtgggggccgctcaccctggacagagacatcacccatcattcttccactcagcgactgcacgtcctccgcccgtcgagagcagaagcgcgagcagtaccgccaggtgcgtgagcacgtgcgtaacgacgacggccgtctgcaggcctgcggctggagcctgcccgccaagtacaagcaggtgcgggcgggcgctgcggggaccgggcggggccccgcagaggcggggcgggggtaaggggcggggcgctgtggggcggggagagggcggggcagtgctagggggtgggagaggacggcgggtggggcggggcctggcaggttcctagtgagcctcctgggcaggggtctggagggtcggagaaggagccccgcggctcccacgcccccacctgcctccagtcttgaagtggctgtgccgccagaagctggcagccctacctgtctcagatttctggagggatgggtaggagccagggttcgtgcccacggcgcctccctgctccctgcagctgagtcccaacgggggccaggaggacacgcggatgaagaacgtgccggtgccggtgtactgccgccctctggtggagaaggaccccaccatgaaggtgagcccgcgaggaccccgctcaggctggctgggcgagcgggaggctggggagtgccggtgacacccgacctcggccctgcccttgcagctgtggtgtgccgcgggcgtcaacctgagcgggtggaggcccaatgaggacgacgctgggaatggagtcaagccagcgccaggccgcgatcccctgacctgcgaccgcgaaggagacggcgagcccaagagcgcccacacgtctcccgagaagaagaaggtgagcatggccgaggccaccgggcaccctccctggcttagt

SEQ ID NO: 268510 - DNA, 73 bp, Homo sapiens
  chr16:1815140-1815213
  hypo
tctgcaacgcgcacgtgctgtgcatctccagcatccccggtgagcagctggagtgggcgtttccactcgggcg

SEQ ID NO: 268511 - DNA, 307 bp, Homo sapiens; identical to SEQ ID NO: 216642
  chr16:1818407-1818714
  hypo

SEQ ID NO: 268512 - DNA, 227 bp, Homo sapiens
  chr16:1827934-1828161
  hypo
ggcctcacgcacccgtgtaggagaggccccagctgtcctcatccctgcccagcaggctgcagaacgtgtggcggtatttgtccaggtccacatccgacgtcccgatgcccaccatctaggaacaggggccaggcagagggcgcggggctgggctgccggagccaggttccccagaagcaccctgggccgaagcaacttaccatgtcggtgccgtagacgggagaggt

SEQ ID NO: 268513 - DNA, 241 bp, Homo sapiens
  chr16:1831184-1831425
  hypo
gagtcttactgaatgcggtgcatccaggagacaggcccaggtttggactggtcctctagcctcagaagcatctttttctccgactgattccgtgttcaggtaatgtctgcctgcctgcctagggcatctccacaccttaggccagccacgtccgcctcgcccgctggaacctacctgcccatcagagtcgtagccccagttagtggagcctgctagagccacggcccgggcatctgcgtct

SEQ ID NO: 268514 - DNA, 94 bp, Homo sapiens
  chr16:1835078-1835172
  hypo
aaatatatttgtccaccacgtggaatgatctggatttgctaacccataaagctgaccgggactcattgtccatggagagcgcactcgccttcct

SEQ ID NO: 268515 - DNA, 65 bp, Homo sapiens
  chr16:1839100-1839165
  hypo
ccccctaagggggcgaactgacctcaggcatgttttgtaactgtagaggcgcctgccattaaacg

SEQ ID NO: 268516 - DNA, 37 bp, Homo sapiens
  chr16:1881727-1881764
  hypo
tgagcattcccgcccgagttctgcttcccgtcagatc

SEQ ID NO: 268517 - DNA, 37 bp, Homo sapiens
  chr16:1881884-1881921
  hypo
tcctgaaaccatccccgccccccgacccggcaatccg

SEQ ID NO: 268518 - DNA, 104 bp, Homo sapiens
  chr16:1889555-1889659
  hypo
tgttcagtgctatgcggtctacaagacagtcgtaaaaaacagtaaaacacactttctacgcagccattctcaggagtcatctgaaactgcgtacaccagtcctc

SEQ ID NO: 268519 - DNA, 31 bp, Homo sapiens
  chr16:1895226-1895257
  hypo
acatatataagggaccgggcgcagtggctca

SEQ ID NO: 268520 - DNA, 36 bp, Homo sapiens
  chr16:1938628-1938664
  hypo
tcgagcgggctctgccgccaacggctgatgctttag

SEQ ID NO: 268521 - DNA, 32 bp, Homo sapiens
  chr16:1944317-1944349
  hypo
ctgccccttctgccatgcgaggacagtgaaaa

SEQ ID NO: 268522 - DNA, 390 bp, Homo sapiens
  chr16:1946679-1947069
  hypo
ctgcacctggcctacacggcttttaaatcttacattgtgcaccagagaagagtcaaacaaagcaaaattagcggcagaaagcacccccttgcttctctgtacacacgacccaggtgtatcgcagagcaaacacagtgaaagtgtgcacgctcgggaaaggcgcaggaactgacattttaccaaggtctctgaaggggcagaaaacaggccccgagaggcacagatgccaacaatgattgtcaggaatcaatgggaaagcgtgtttgtgcagcgctattggcatctgatgtgtttgttataattggctcccgccagccctgtctcctttattaattgcacatattcctcttgacgaaagtgacatgccgatggcagcgttgtgggcttgaa

SEQ ID NO: 268523 - DNA, 199 bp, Homo sapiens
  chr16:1960052-1960251
  hypo
aggctaagaggctattaatccgtctccctgtgcacacacccaacactcgctgacctcaccaacactcaggcaattccacaaggctccagaaggaagcgtccactgcgcacctggattccggatgagccaaggtggtgggtgcggacccgactttaatcctgccccaccactccacagcgaggcctgcagcctcactttc

SEQ ID NO: 268524 - DNA, 100 bp, Homo sapiens
  chr16:1985415-1985515
  hypo
agtcggcttctgtctatttcacttctgggaacaccatgatccacaagtcaacgctgtgggtctctgtgagtcagactattgtgatcgctggttcacctct

SEQ ID NO: 268525 - DNA, 379 bp, Homo sapiens
  chr16:1989198-1989577
  hypo
cggaaagccgggcgcgggggcggtggaaagccagggtaggggcagaaagcaagtcactgcaaggcagagcttcaggtgccgttccctgcgctttcacactctgccctggcctgcaggccacaggggagctgaaaagaccagatgcccgactcaggggagtctgtgtaccccattttgttctgacatccacaggagaacccagaatctcttctccctccactcacacggaggacaaataacaacaaaaggacgaaaacatcgcaggtttaccacgcaccagatcctgacaggctgctcgctcaaccccacagcacggtgatggccacaagcgtgtgctgttaacagccccatttcaggcgaggcagtggctcaagcctgt

SEQ ID NO: 268526 - DNA, 85 bp, Homo sapiens
  chr16:1994702-1994787
  hypo
aggcagcaggcaaggtgaaccccttgggcggttacacagcgctctgagacctcgcaggaagagtcgcctccggcctttgttagac

SEQ ID NO: 268527 - DNA, 110 bp, Homo sapiens; identical to SEQ ID NO: 216644
  chr16:1997451-1997561
  hypo

SEQ ID NO: 268528 - DNA, 418 bp, Homo sapiens
  chr16:2000529-2000947
  hypo
cttacgctggaaaccgaagagaggtgaccagccctccacacagcacacttggctggggacccggctcttcagggcgtgccagggtcttagttgactagccggcgtggctgatgcccctggcaccccagaaggcaccgatgcctttcagcagccatgcctggggctgcacgtggccagcgaggctggtcagccgctcctctgggtctgtgccgaggctcgggtatttttaggctgacatttgccacagctcctggaagctggggtgagggagcgtggtcctagggactgaccgacagcggagggccgggggctgacctgagtgtggacaatgacccgaatgaccttgcagtacttcttcatggcggcgaagtccttctgtagctgctttttcccgtctgtgtcccgccacctcttgcag

SEQ ID NO: 268529 - DNA, 515 bp, Homo sapiens
  chr16:2003499-2004014
  hypo
cgtgagccaccatgcccggcctgcattatttcttacaactacttgtgaatctacgattaaaacaacaaaaactaactatatacataggcgtacatatgaaataatggtacatgaaatagacccgaaatggccaaaaagtgcagatgtcctggcaggtggtttgaaccgagggcttggggcgctggcctttgaatcctagctcctgcgcttaccgccccggtgactggaccaggttcctcactgctttgtgcctcaatgtcctcatctgcgagctggggccatgacagaacccgcccggaagccctgcctgtgctcagcgtccaccccaattcccgggggcgaggcctggtgctccctgggactgtggccctgtctggaccaaaagcgtgagttctggctccgagcatctggaaggttcagccctccccctcccccaagggtcccaactgtgactcactgagccccggccggtgcacctcccgcagggtgtgggtcatgcccgccttgtagcccag

SEQ ID NO: 268530 - DNA, 120 bp, Homo sapiens
  chr16:2007511-2007631
  hypo
aatgaagctacagaccttcgcggtgttacagctcttaaggcgccgcgcgtctggagttgttcatcctgccagtgggctcgtaatctcactggcttcaggagtgaagctgcaaatcttcgc

SEQ ID NO: 268531 - DNA, 120 bp, Homo sapiens
  chr16:2012608-2012728
  hypo
tgggtgcagggatgaggcgtaccagcacagagccgcagcggcctgtcacctggtgagggaaggagtcaggagacgggggcccgagggagcctgccccacggcaggcccatcacctgccac

SEQ ID NO: 268532 - DNA, 216 bp, Homo sapiens
  chr16:2012908-2013124
  hypo
gcctgcgaaaagatgtgtgtgaggcagctggtggccctacacccaatcactgcccaccgcccagggcctgttgcacccctcaaggaaagagaggccacagtaaggcccatccgaggtcctgaggagatcttttctctctctccccgttacgaaagtcacacgggtgaagccaagtgcaactatgcagagccgagagagtcccggcaagcccagcgc

SEQ ID NO: 268533 - DNA, 208 bp, Homo sapiens
  chr16:2016682-2016890
  hypo
gtgtgagccaccgcgcctggctacctgtgatccttcagagaagggggcaagggctgggctgtacggggtctctgggtcctgaaccagggttgtgactggcttgagctggacaatgctattgtgatgtcagcccacacccactgtgaaatgcaggctcctgagctctgggggcctgtggagctgctgtctagacgcagatcatggtgag

SEQ ID NO: 268534 - DNA, 368 bp, Homo sapiens
  chr16:2024265-2024633
  hypo
gggggccgtgctgcggagtctggagcaggtgagggcagcctgggtgggtgaggggcaagtggagagggcagcccactcacaccgtgctcggcacaccactctttctcctaggaggaccaggaggacatcactgcctttgacctcagccctgacaacgaggtatgtggggcggggcctggaggggacccgctccagcgcctccctcccagactgagtccaggaagatgtgagcagggtattgctgcccctctgctgacctgtaccctcccccaggtgctggtgacagccagtcgggcattgctgctggctcagtgggcctggcaagagggcagcgttacccgcctgtggaaggcgatacacacggcccc

SEQ ID NO: 268535 - DNA, 625 bp, Homo sapiens
  chr16:2028552-2029177
  hypo
agcggcactttcagcggctcagcaggaccctccaggccgccgctttcttggacttcctgtggcacaacatgaagctccctgtgccggccgccgcccccaccccctgggaaacccataaaggcgcactgccctagccggtccggcctctctccagtccatcctgaacccctggaaaacccataaaggccgctctcctggccggctctgtctctctggactgcagtccagccccccaccctggccaacaccctacctagccagccagaagggcactggagctgatggtctcggccctgccacgcccatcccgcaccctggcctggcagagatccagcccgcggctccgcacgcttagacggtgggggtcatgcagaacaagctttactcagaggaacagcaaatggccccctcccatccctgctggccagggagatccgccctccccgctcctccccagccctgggatggcgcggtccatcccctcatcgggatcctcgcgctcactgctccgtcgtggggtgcggcacagagtccacgcaccctcgagggcggccctggcgccgtgggcgccgctccagggccctgcgtgtgacggtgcagcagcggctctggatggcgcccggcg

SEQ ID NO: 268536 - DNA, 308 bp, Homo sapiens
  chr16:2035675-2035983
  hypo
gagttcatcacacccggggagctgcagggtcagccctgttctgggagtgcctgtaccttggagcataagggcactcccaggtgtagttcacagcagtgccccagctctccttccttgacagcagacagggaactggcaggggcagtggagccgctgcgtcctctcattctttacctgctctccctacacaggctgtgcaggaaccacccagacacccgcacccgggcatgcttcacacagtggctgtgccacctgcacaatgaagtgaaccgcaagctgggcaagcctgacttcgactgctcaaaagt

SEQ ID NO: 268537 - DNA, 245 bp, Homo sapiens
  chr16:2043001-2043246
  hypo
acctaccagagcccgcccttcaccgagaccctggacaccagccccaaagggtaccaggtgcccgcctactagcggctggcaggcacagaccagggctccaaggccaccccaccaacgcaggccccagggtctccgggacctcccttgggtccttccagctcagtgccgcggacagagtaggtggccgctttgcgccatccggggccaagagggggtggacccgcgtgtctgggctgcccctgcca

SEQ ID NO: 268538 - DNA, 308 bp, Homo sapiens; identical to SEQ ID NO: 216649
  chr16:2049434-2049742
  hypo

SEQ ID NO: 268539 - DNA, 140 bp, Homo sapiens
  chr16:2099383-2099523
  hypo
ggctaggtcgttatcttttatgtgtgtttgtgtctttgtcacacatgcctggcattgtgttttgcccatgagtaaatgctgaatttttgcacttgtaaagttttctacttagaaacaactaaaacgttcatcaactgatg

SEQ ID NO: 268540 - DNA, 917 bp, Homo sapiens
  chr16:2104668-2105585
  hypo
tctctggggcttggggcctccgaacacctctgcaacggcaggagctgggcgagttctgtcactgggaggtggtgctgctgacttggtctcaaccggagcgtactggtcccgtcttcctcctcctttctccactttgtggaccttcctcctgccatcctgtggtgggaggtttccattagtcttgggtctctgtgtcatgattctgggaagtagagaaagaggaggaagagatcggtctgactctggctttgctgttctgtcgcccagaaaagggcctcagtggctgggctgcctgcaggacaggtgccggccaggtgcctaccgtcaggtttcctgtctgaggtgacgtggccggcagccaagtgtgcacacgtctcctccgagccactctctgctgggggtggggaacgcccaggagtctggtgatgtcggcgtctcccagcctcgggttgggccctgagtgtacggcatacacacttctgctgccgcctcggcacagaccctctgtgcagccccaggggcggtagatcctagtgtccgtgcgtagccggcctgccctgggctcccctgagcctcttcgggcccagtgcgtggtctgtctgttgctgccgggggactgatgatggggtttctggcagtgacgggtttggacacactgtcctgcggcgggagggggaggtgagtgggagatgtagattcggcgtcctcgcaaactgccgccgcttctcccccagctgactttgtcctgcagtggatggatgttggcttgtcctcggaattccttctggtgctggtgaacttggtcaaattcaatagctgttacctcgacgagtacatcgcaaggatggttcagtaagaaaagaattgagatcctgttctgataatggtcctaagttcagctccgcagtgaataaagt

SEQ ID NO: 268541 - DNA, 250 bp, Homo sapiens
  chr16:2106519-2106769
  hypo
gggtgccatggcagcggggagaggtggcagcgcaggctgaaggaggtgggaaggaagcctgggtgtcctctcctgtggggaggagctggggtaggacgggcgtgagccgtctccctctccaccaggtctccctgcaggtgctggacgccgtggtctgctacaactgcctgccggctgagagcctcccgctgttcatcgttaccctctgtcgcaccatcaacgtcaaggagctctgcgagccttgctggaa

SEQ ID NO: 268542 - DNA, 524 bp, Homo sapiens
  chr16:2106973-2107497
  hypo
gggaggagatggtggcgagctggccggaccttgggtggctatagggcagcagccaggcggggccagcagcgggactggggctgggggcagggcttatgcctgccagcccctgacacgcattgtgtctcgcagctgatgcggaacctccttggcacccacctgggccacagcgccatctacaacatgtgccacctcatggaggacaggtgagtgtggtgggtggggcgcagggcagtggaggccagcacagccctcggggcagctccagtgtcccttgccaagcacacactggcttagagagtccttgtcctctcgggcagctgttccagaggctgccactagagcgaggcccatgacttctaggatccagcccctgtcctctccttcctctgtcagttcaacagaatatccacacccagctcagtgcctgccccatgctcggacgtcctccagcggtgctccccaactacttagcctgttacaaggcgaggctcggggtcttggcttgacgttgcccttgccct

SEQ ID NO: 268543 - DNA, 459 bp, Homo sapiens; identical to SEQ ID NO: 216656
  chr16:2108517-2108976
  hypo

SEQ ID NO: 268544 - DNA, 166 bp, Homo sapiens
  chr16:2124089-2124255
  hypo
acttgctaagcctcggctgttctcccggtggagcactcgaggttggcgaggggtaggcgaggctgcctctgctgcaagcgggtggggcctgaggtgtcctgtctcctgcagcgcgagatggtctactgcctggagcagggcctcatccaccgctgtgccagccagt

SEQ ID NO: 268545 - DNA, 148 bp, Homo sapiens; identical to SEQ ID NO: 216657
  chr16:2125861-2126009
  hypo

SEQ ID NO: 268546 - DNA, 172 bp, Homo sapiens
  chr16:2126990-2127162
  hypo
catttcatttgaacggctttctcctcctgtcccccaccttcctgcccgagctattttggctttccctagatgggaatacggcattttccagcgtgacctcaactcggaagctgttgtctccagcccctgggggccgggggccaagctcggccattacggccagagactactt

SEQ ID NO: 268547 - DNA, 1180 bp, Homo sapiens
  chr16:2128599-2129779
  hypo
ctgcctgagggtgacggtggaaggccacatggggatcccagacctctgtgtgcttgccggaggcagcctgcgggcagaatgcaatctgggcctgtctgtgtggcctccgcctctctgcatgactacaccgtttcgccaggaggccgtaacctagtgctcccgtgggcttcggtgagggggatgtcggtctctagcctcctgagtctgctccgaccagtaggcctggtcttccccacccagcgtctccccgttctctgggacaatgtggtccacgtgattctcaagctgaggctcgctgggccgcccacgccctgttggggtctttccgagcgaggtcctcagccgtgcatgcgttgagctttggcccttggtgataggtggctcggcccgccctacctggcaccctgaccctggtcacggcctctccctccagcaggatacagacgtccctcaccagtgccagcttggggtctgcagatgagaactccgtggcccaggctgacgatagcctgaaaaacctccacctggagctcacggaaacctgtctggacatgatggctcgatacgtcttctccaacttcacggctgtcccgaagaggtccaggcggcactacagggctgggcgggcctgcgggagctccacgggcaagctgggtttcacgctccctgtcttctaggtctcctgtgggcgagttcctcctagcgggtggcaggaccaaaacctggctggttgggaacaagcttgtcactgtgacgacaagcgtgggaaccgggacccggtcgttactaggcctggactcgggggagctgcagtccggcccggagtcgaggtgactgcaccttcctttcctccgcgcctgccagcctcgacaccggctgtcccgagcccaggcccacgtggcaccctcgtaccagcctggggactaagtccaccctgtgcgtgggattctcttctcagctccagccccggggtgcatgtgagacagaccaaggaggcgccggccaagctggagtcccaggctgggcagcaggtgtcccgtggggcccgggatcgggtccgttccatgtcgggtgagccttggccccagccacctccacacaggcaccggggctccctcagttgctgctggtcccagtgttcaggaaggccccgagcccaggggccggggtggctggcttc

SEQ ID NO: 268548 - DNA, 341 bp, Homo sapiens
  chr16:2131437-2131778
  hypo
ggccgtcagagcagcgctggctccgacatcgtggtcctgaggattgtgggagggagcatgagggcaaaaccagggcccaggccaggaggcccctggggggccagagatgggtaaggggaggtactggcctcaggccaaaggtgctgccgcctccgcagggaacaccagctggctgatgagcctggagaacccgctcagccctttctcctcggacatcaacaacatgcccctgcaggagctgtctaacgccctcatggcggctgagcgcttcaaggagcaccgggacacagccctgtacaagtcactgtcggtgccggcagccagcacggccaaaccccctc

SEQ ID NO: 268549 - DNA, 39 bp, Homo sapiens
  chr16:2134065-2134104
  hypo
ggcagtgctgctgcgtcaacgggcgggggccgtagcctg

SEQ ID NO: 268550 - DNA, 212 bp, Homo sapiens
  chr16:2134434-2134646
  hypo
ggccgacgtgggccggctgagccctgaggttaaggcccggtcacagtcagggaccctggacggggaaagtgctgcctggtcggcctcgggcgaagacagtcggggccagcccgagggtcccttgccttccagctccccccgctcgcccagtggcctccggccccgaggttacaccatctccgactcggccccatcacgcaggggcaagagag

SEQ ID NO: 268551 - DNA, 414 bp, Homo sapiens
  chr16:2135230-2135644
  hypo
tcacagtcctttgagcggtcggtgcagctcctcgaccagatcccatcatacgacacccacaagatcgccgtcctgtatgttggagaaggccaggtgaggctgcggggccggcctaggtgcctggacagggccagctgggcctcagcctgcagtgggtagggagtctgggcccccaacgccccacagagctcaacactgccgggtcccctacagcatgaagtgctcattgagctctgtgccaggtgctgctctgagtgctggggaccccggtgcgagtgacaggttagcgtgggagcacccggcacaccaaggagtgggaaggactgggcgggtggcaccggtcgcagggctggggagggcgctgttggtcagtgagctgacagctgagtggtgagggagcgggcagggggagcc

SEQ ID NO: 268552 - DNA, 1200 bp, Homo sapiens
  chr16:2141840-2143040
  hypo
gctcaggcccagctcctgcacgtagcccccgctgtcatacacggcacaggagccccaggaccatgccctgccggagaggggtggcgtgggtgccgcaccccagcccttccggcaccccggagccaggctggtcaggaggccgcggcactcctggagaactactcccttgtccttggcgtagacgcccggggccctcgctctgctcaccccagcagatccggcgctgaataggcccacgtccccgagccattgtgaggactctcccagccaacgtcgtaatcgctggtgctgaagcctcctgcggccgagcacgtgtggaccctggggccgggagggtctgggtagagtgctgaaacacacagagccccaggccggggccagggcctcatcaaaacccaacaggagtgtttcctgctggccagctcgcctgagctctggttcggcgccaccccagggaaccctcccagcagccatcaattagacaacgttaccatctctcatatacagagaaggaaacggcggtgttaagagggcaaaggtcacacagctagggagcagggctgatgccagagctccgctaaaggctgctctctcaacaagaggaacgatttaagtcttggggcacgccctgccagctcaccttcctgcagccgcacctgccgcagccgtgggggccccagctctgggctggactggttcccgtggacgtagggcagcagcacgtgggccatccatggccagagctcctcagacctgccacagcatcagtcacacgctccagcccctactgccccatgcccgcctcgagtgagcggccaccagagacccagggaacatggctcccactgccctgctggccacggctagacctgggcttctcagccttatcctggggatgttctggggcagacagttgtctgtcatgggcccgtcctgtgcactgcaagacacggacctgtgtccctcccctctgcctactgatgccagcagcacctacctccagttctagcagccacaaaggtatctacacatgtccacatgtcccctagggtctggctggactaaaggcaaaactaaagcccagaagacagaccagtgcaccggatgcccgtaccgcgtgatggccaggaaggcccggctgtgcagctcctgcttgatggcgctttgcagacggtaggcgtgcccatggcatgaggcatc

SEQ ID NO: 268553 - DNA, 71 bp, Homo sapiens
  chr16:2144843-2144914
  hypo
aactgcgagacgccgagtcccgggctctcaggacgctctcccgtacctgcgccctcgtcagcccatcaccg

SEQ ID NO: 268554 - DNA, 331 bp, Homo sapiens
  chr16:2145547-2145878
  hypo
agggaatgccagggcagaggcgccgccaggacggagggtgcaggctcaggcgcagggaaggccgtgctctgcgttgggaaaggagccacgggacgcgctggaggctgcagtgaggaaggacgcagaggggtccaggacaaacccaagcctccgacctggtcagcccgaagcactgtccgagcaagggacggccaagggttgaggaagccgggagggtgagggccacgcgctctgtgtggatgcggagtctgagctgccgtcagaaatccccgcggaagcactgaatctggatttcacagagctttgggccggagatacctggggctggtca

SEQ ID NO: 268555 - DNA, 344 bp, Homo sapiens
  chr16:2146181-2146525
  hypo
caaatgtcacagggcgtagttacccaaacccagacaccgcagcccctgtgcatgcaggccctgtggtgtggcctgtggctccggggcaccgcacctgcactgcatgccactgcactgaatcctgcaggcagctgcagtgcaacggcagggccgtgtggacctcagcacacctgagcataggagggcatggcagagcccggggtcacacgcgtgggaacacgccgtgggtgcgctccgccgccggctgccatgtgcgtgactatgtgcgtgactacatacaaggtaacctctatatgaccatttgttgataagttacaaaacaaccaagaaattgaggaattttt

SEQ ID NO: 268556 - DNA, 36 bp, Homo sapiens
  chr16:2147116-2147152
  hypo
aatcccccctcccccgagagccggacactcacaggc

SEQ ID NO: 268557 - DNA, 67 bp, Homo sapiens
  chr16:2147356-2147423
  hypo
ggccagggagaagccgtcctcctctgggcccagcccatggcccgcctggccccgtgccagctgccgc

SEQ ID NO: 268558 - DNA, 56 bp, Homo sapiens; identical to SEQ ID NO: 216666
  chr16:2193200-2193256
  hypo

SEQ ID NO: 268559 - DNA, 383 bp, Homo sapiens
  chr16:2211793-2212176
  hypo
tggccagctctccccgaccttcctgccgggagctgctggagacgggatagacatgtgccagggcagagcagccttgtagacacaccacgaccacacctctgtcccagggctgactcctctgagcctggctgcaggtgtgtggcactgcccacactcaggagcccctgcctcttccacaagagaagtcccccgagagcctagtctgggtcacacagggccaagcccctcgagtcgcagtggggcctggggaaggccgagggaggctttggccaggccccatctcccgagaccatgggacgcaaagatcaggtggggccaggtagctcgtggcgctgccaactgcaggggctgagatgtcgggttgagcccgagtcctgaaggct

SEQ ID NO: 268560 - DNA, 243 bp, Homo sapiens
  chr16:2212716-2212959
  hypo
cctcatggggtgctgcgcatgggcctcgaggtggacagtgcaggtgggcccggggcaggagtcctgggcacgtggccttcctccccacagggagctcagcttcaagccggggctcggctgcgctatccgctgccagcaggagacagggctgtcccagctgcattctgccaggctcctggcttccaggctgcccaagtcctgaaagtgggacctgctcgggaggaggggcgcctgctgacagag

SEQ ID NO: 268561 - DNA, 763 bp, Homo sapiens
  chr16:2213241-2214004
  hypo
gtgggtgacctgcacgggttccaggggcgggctcatctctctcctgtgcttttttccgtgcagtgcggtttgtgtggagttgggctccggtgactcaccctgcaggttctttctctggggtgtggctggtgtctccccgctgcagcctggtgctggctgggtcctgaccgcacctgtcgtggcaggaaacacattcgtcgtgccttggctggtccctgtgtgactgcgtcccgccacgtgggccacaccctgggcctacccaccaaggcccagccttggccccagggacattcagcctggaggtgactggctgtgactcaggacccagaggagtagagggagccaggcaggggtccctccacctcggggaagagctggatgggctcttcgggagctcagaaaggctaagccttgagggacggtgacgcagagccgcctgcctgcccgggcctctgcatacctgggatcggggtgaaggacctttgcctcctagaggcctgcctgagccggggctggtggtggaaggctgctgcggcggccccacggtgccccacagcaggtctgcacacttgcagcagcccgtctgactcacaggggcctgggctccatctctcaagcccctcatttgtgctccacccacaggaggtgcttcccaaggaccgtagatgcctctctagagcatgagctcaggcaagagtgcccgctacaaccgcttctccggggggcccagcaatcttcccaccccagacgtcaccacaggggt

SEQ ID NO: 268562 - DNA, 54 bp, Homo sapiens
  chr16:2226066-2226120
  hypo
caaggagcaggtgcggaccctcacgggccacgtgggcaccgtgtatgccctggc

SEQ ID NO: 268563 - DNA, 390 bp, Homo sapiens
  chr16:2226419-2226809
  hypo
tgcacaggatggagcgggggtggggacgaggagctggcagccccagcacaaagtggtggagggcaggtacgtgtggcaggtgtggctggggcagggcagccggccgcaggacatcctggtgaagcagccctttctctgcaggtttggacttgctaacaggatccaggccaggctgtggtttcccctgaaccagccctggacctttctgagccaggctggccacatggggtggtctcggggtttctgcctgccccgtgggcataggtggacaggctctggcagccgggcagtgccctccccgtcccatgctcggcgagcctccctctactcggcactgtccttgctgcccagcccctctctgggtgccaggtacgacgcttgccccggccc

SEQ ID NO: 268564 - DNA, 1784 bp, Homo sapiens
  chr16:2229595-2231379
  hypo
gggctgccagggcctggcagcggcaccttcttggaggtgggtgtgggcgagccctggagcttgggcacaggctgcgtcaggacgggcttgggagagacaggcggcttggccggcttccgggcttcgccctcgggcgggggcaatgggggtaggtgcgccaggtcggtgggcgggggttcggcaggcgggggcggtggaggcagctccggaggcccagcctgctccgaggccggtcggcggcgcacggtgccagtgccattatggtacacggacagtggcggtggtggctcaggcccggcctcccgctccttggccttgggcctgcgcttgaccgtgtcagactcggtcaggatgaacttgacgttctcctgctggttctgcttggcccggatgcgcctcttgagtgtggcgctggcttccaccttggccaagggcgggccttcgacacccgcctcgcccttggagggaccccgaggccgctgccggccagtgccatcctccacaaaggggcctgggtctgccgactccccaggcccccggcgggcagtggccagaagtccggtgactggcccgctgagcgtgcggcgccggttcaccacctccccgccaggcccgatggcctctttgtgtttcactgaggccagcacggtggccacccggcccggctctgggctggcagggcggggagtggggtggccctcaggaggcctgcgggcagcccggcccccacccccaatggaggacagctccagcatggccgcgatgctcttcacactgccggcactacccgtgtccacgctgccggccaggtcactggcccgccggcactgtgcccggacccccagcaggccatcctcaggctcggcgtcaggcaccggctcatccgccaggttggcactagccagggccgagctggagcgcttgggtgggggcggcgggggccccttctttcggggccgcacggcaaaggactggctgcggttgacgttcttgtcggcacctgcgggcgccctcactgagtggctgcggcccacgcgccgctggaccgtggcataggggccggcagccgcaggcaccagcagctcgtcccgctccggctcgctgtcggacgccgcatagcgattcaggctgtgggcccgcttcttgggccgccccggctccgcgtcggcctcagggggcaggcacagtgtgggcacagccgtcggcacgggtgggggcgcaggccccggggcagccggccccacctcgccctccacgggctggggcagcacgtaggcaaagccgcggtgcgtcggtgactgaggcagggagcggggtgacatggggcgctctgtcggcggcagcagctgcggggtgggcttcaccttggccgtagctggggctggaccatgaggtcccccaagggcctggggagagcctggtcgggttttggtgggcgtctgggggggcgtgaagtggctagtgcctggtgggaggacctgccgtggcttgccaggcacggggggcacgctggccctcttgatgctgtggccgtggcggccgggccgggcctccctgggcggggtgccgggggcggggccctcatccaggaggtactcctggcttcgagacatggggctgctgggcccagggggcccatctcccagcagctcctgcgagctgctcatgtgccgtgcccgaccacccaggctggagtcctgccgcgtggtggccctcggggtgggtggcaggtggctggagggcttctcagtggtgggccccacctcagccgggccagtcatggc

SEQ ID NO: 268565 - DNA, 42 bp, Homo sapiens
  chr16:2232746-2232788
  hypo
accttcttcaggcccggaacccatcccactgcacaggcacct

SEQ ID NO: 268566 - DNA, 101 bp, Homo sapiens
  chr16:2233088-2233189
  hypo
cacctccgtgttaatgacgattggccatggcgtgtgcaggtatcgctgagaatgggggtgtcagctattggtgagggccacacgtgcggtggagcatgtgt

SEQ ID NO: 268567 - DNA, 758 bp, Homo sapiens
  chr16:2234442-2235200
  hypo
cgtgcccatgcacacgctgcaccatctcatacccatccccttccacctgtacacagacacgcgtgcccagctcgcagtcccaccatcacacacacacacgcacacacagaggcacaggttggcccacacgcacagcctgcacaatgacgacacccgtacacacaggcagacacacacacaacacacagactgacagacagaggagagggtctggcctggcaatgcccccgaccccgccgctgccaggccaggcaggccgtgtaagcacccatcagcccatcggccttacagcctctccccggagcccacgctgagaacacccccaagccctgtaccttgccctccgatgctggctccagcttcttgggcggctgctccccatagacctgcccggcgtgggccactggaggctgggaccgggccacacctgaggacgagagtgggtgggggacaagggctgtcgggctgctttcctccatcgggctgcgtggcagcacccttgctcttacctgcagagccttccggaggcttggcggggctgtcccccgggccggactcagagacggacttctgggaaagcaccgttgccaggagctgcaacccagaaaccccggcttgtcacctgctcccagccctggccaccctggccctggccactaccccacctaccttgacgccttcagagcccgcgtgtagggcgtgacccccgctgccccggccgccagccatgccgctaatgctgccgcttcggtccccac

SEQ ID NO: 268568 - DNA, 65 bp, Homo sapiens
  chr16:2235438-2235503
  hypo
tgggccagcgatggcgggtactgacgcaggggaggcaggacagagactggcgcagccacagccgg

SEQ ID NO: 268569 - DNA, 242 bp, Homo sapiens
  chr16:2239261-2239503
  hypo
ccaggtccaggggcgtcttccccgagttgtccaccatgcacgggttagactggtgctgtagcagcatctcagactgggggccaagggcgcagtcaggtccgcacatcctcaggccgcgctgccccgcccccgctgccccgcccccgctcgggcctcaccacatcatagtgaccatgctgggccgccaggtgcagggggatgtggccctcatcagacgggatgttcacggccgagcccgcctt

SEQ ID NO: 268570 - DNA, 341 bp, Homo sapiens
  chr16:2260756-2261097
  hypo
gctgcaggagtaacgggaggcactcacccctgtaggcccaggtttggggcgctcagcacagcagcttgctggttccatcctgcagcccctgctcacaatgtgccgattgtctgcgtcccttgtctgcagccttggccaggggaaactcagaacagaacccctcccctcctgaccctgcgcctccccctcagctctggatctgatatccaggtcagagccaggacagcccctcctcccacctgggggatgcctgtcaccaggcccggctccagacacctggcctgtgcagactggagctcagggtctgggaggcgtagggctcggccgcgtggaaatccagt

SEQ ID NO: 268571 - DNA, 494 bp, Homo sapiens
  chr16:2278291-2278785
  hypo
gggctggaggaaaagccagacggagccctggctgcccagcctccgccttcccaggccctgctgacagcaggctcgttgcagatgaggacgatgtgcacagatgcggccgctgccaggcagagttcaccgccttggaggattttgttcagcacaagattcagaaggcctgccagcgggcccctccggaggccctgcctgccacccctgccaccacagcgttgctgggccaggaggtgagccctcacccactcccccatcccctcccgggttcacctgacaggtgggggaggtggccgcgcttcaggatggacctgtgcagccggttccgggggccacgtgggcgggcagagggcaggcacctggctgcggtgtgggagggtccgggtgtgtgagcctgtggtgctctggggcgtcctggagggcctgcggtggcccagccttcttggcagcctctggtcgaagcccgtgctgttgggggccgggatctcttcttt

SEQ ID NO: 268572 - DNA, 972 bp, Homo sapiens
  chr16:2280801-2281773
  hypo
tgtgggaggtggggcgggctctggccttgacctggcgtttggtttctgggatggtggcgtcacctgggagcatgaactccttaggttctggcggggtctctgggctgggtctctggccagccaggcccctttccacccacctaaactctagcagcctccagccctaggctcagcacccctccctgtgcttcagcagcccctcttggcacccctgccactctggcacccctgggattttcccctttgcgggcatcctgggtactctgtgtgtgcccttggccagtcagcaggcccggtgggcttagtccagggctgctagctctcctgttggcctctagtggagatggcagagggtcctgcctgctggtggccaagggctggggcgtgccaggtcctgtctttgcgggtgcaggggtgcggtcagctgtgtgggcagttggaacccacctccaggccctcctgccgcttcgcggaaaaagttcgcgtctcctctggcctcgcagcagccatgttcccccaggtcctccccatcagaggcctctgtcctttggaagatcactcctggggcatcgagcgtgtaagggctcgggcaggagaggctcttaattgtttctgagtcaccacgcttttgtcgtgtttcaagagaacagcttgtcaaaacaagacgccagccggactgaggtggtttctaagcagtggcttcacagctgtttcccacttgtcatctttatgagcagaaaacctgaactgtgtttacaacctagctttgcacattgtcagatttttcccagcatcctccagaagtgcaaaagcccagcttcctcgcctcaggctgtcccgggtgtctggagagcgttcactctcccaggccaagcctgccttgggacggggctctggccaggcctgcctgccctgctgcagtggcccagcccatctcctccgatggaagagtggccccggacgcacatcctc

SEQ ID NO: 268573 - DNA, 881 bp, Homo sapiens
  chr16:2282269-2283150
  hypo
gggctcgcaggggagggtgagcaggcccaggtgaagctactggtgaacaaggatggccgctatgtgtgtgcgctgtgccacaagaccttcaagacggtgagccggcgtgcggggagccagtgtgtgggtggcaggccccctcctgttcccccaggagggccctgagctgccacgccctcccccacagggcagcatcctcaaggcccacatggtcactcacagcagccgcaaggaccacgagtgcaagctctgtggggcctccttccgcaccaagggctcactcatccggcaccaccggcggcacacgggtgagctggccgcacctcgggctggagcccggtagcaccccgatggttggccctggggtgccccagcctcgcattccccagctttgggggatgaggcgggggcccctgcctgccttcgccttgtcaccttgtcgccagcctgctggggctgcccggggctgactaggttctctctgcagatgagcgcccctacaagtgctccaagtgtggaaagagcttccgggagtcgggtgcactgacccggcacctcaagtctctcaccccctgcacagagaaaatccgcttcagtgtgagcaaggacgtggttgtcagcaaagaggacgcacgtgcaggtcagcatggtgcgggcagctgcctggtcctgggggctggctgtggacgcagccgccactggggtgtgtgagggatcttcactccctcactccaccttgaaggttctggagctggagctgccggcttggggacagccacatcatcggtgacaggcgagcctatagagacttcacccgtgattcacctggtgacagatgccaagggcaccgtcatccacgaagtccacgtccagatgcagga

SEQ ID NO: 268574 - DNA, 188 bp, Homo sapiens
  chr16:2284111-2284299
  hypo
gcaggcggcctggcgggcccgcgggtgatgggcttggcctgatgctgtgtgtggctgcagggccgaggccgttcgcctgcgcgcagtgtggcaaggccttccccaaggcctacctgctcaagaagcaccaggaggtgcacgtgcgtgagcgccgcttccgctgtggcgactgcgggaagctctacaag

SEQ ID NO: 268575 - DNA, 95 bp, Homo sapiens
  chr16:2286027-2286122
  hypo
agcctcggcctccaccgcagggtgagcaggtggagcagcagcaggagatgctgggtagggagtgtggctggtcctacctgcgctgccttgctttc

SEQ ID NO: 268576 - DNA, 50 bp, Homo sapiens
  chr16:2294342-2294392
  hypo
tgtcccaccccctggcgctggcccagaacagccagcgaggccacctggga

SEQ ID NO: 268577 - DNA, 120 bp, Homo sapiens
  chr16:2306144-2306264
  hypo
acagaaataacatcatgactaatgtttcatgaggaaaagaggcataaaaactaacaggacacaccaatctccacgtgtcgaggcagcctcccaggtcaagagtcatccaagtcaagagct

SEQ ID NO: 268578 - DNA, 94 bp, Homo sapiens; identical to SEQ ID NO: 216677
  chr16:2314153-2314247
  hypo

SEQ ID NO: 268579 - DNA, 185 bp, Homo sapiens
  chr16:2338097-2338282
  hypo
agctgggaggtcccgggaactgagaagggcacgacggttctgccgtactcgcccaaggtcagcctcagcatggggtcgtcgaagagctccgaggagtagttgatggccaggagggccagggtgacgcaggtcagaggcaccaggacctgtgccgccaccattttccactcgcgccagctgtatgc

SEQ ID NO: 268580 - DNA, 160 bp, Homo sapiens
  chr16:2339391-2339551
  hypo
ctcgcccttcccccgccacccgcccacccacctgggcactcaccccagtgttgagcttgacagcggtgcgctcctcctcgatgagggctccaatgccgtcggaggggtccatggccccacagaggttgctgtccacagcccagtcgctggcgcgcctctc

SEQ ID NO: 268581 - DNA, 396 bp, Homo sapiens
  chr16:2347405-2347801
  hypo
cagcaggtcagcctcgtccatgaagtgggtggtcagcacgatggtgcggtcacttttctgccgctgaagaagatcccagatggccctcctggagatggcgtccatgcccgaggtgggctcgtccagtatcagcacctggagggagagacacagtctcgcgacgctggtagagccacaccccgggcccaggctggccttgcggtaggccccatcgaggggttcgcggagccggcttgagtcctccaaggatggtgatggccttgtctggggtgtcaagggccaaggtgcccgggccatggcggaagggccatcccaggtcgagcaggaggggaacccactgcctccagtcccaccgccacaccttggagcctgcgatgagggcgatgccgatggaga

SEQ ID NO: 268582 - DNA, 540 bp, Homo sapiens
  chr16:2358232-2358772
  hypo
acctcctgctgtgccgtggagctgggcttccctcgcccggggccgtgtccagctatccagcccacactcagcgctgtatgcggatgctgctgccttcagtggtcccaactgcctgccaaccgtcccaggtggagccttgctgctggcggctcttgtggttgggtgctctcgaaggttactgattcggaaagaacaggctggacaaggcaaacactcacctttcgcctcaaatttcccaatgagctgggctcccattgccatggcgacattagacaggaggcaggagcagagcttctggctcagagtcatccagttgtaccgaggggccacgaagaagtaggggatgtaggtgaagaagtagaggaagcctccgaaggctgctgccatgttggctgcaggtgttggaagacccggggggcgtgagcgtcagtgccctcaaaaggggcttgggctccccgaggtacaggcaaccccctactcctggggccgagccacccaacctgctcctggcacttgccatctacacgggacacaagctcc

SEQ ID NO: 268583 - DNA, 54 bp, Homo sapiens
  chr16:2369672-2369726
  hypo
tactggatggccacgaggaaggggtctgcgatgaacggcgggtacgggaacctc

SEQ ID NO: 268584 - DNA, 621 bp, Homo sapiens
  chr16:2382128-2382749
  hypo
gttgtcagctcaagagccatcggctgtgccagttaacaagcgctgtggctcttcaggcggccagtgctcagcagcaaattggagaaatcccaaactcctccatttcttttttttttttccttgaaactttaaaatccttcaaaatctgtttattatacaggtgaattttgatagtcacgatgggcttatcggtaggatttctagtagcgagcacaggcaccagggcttctaaactttttggactcgcagggacggggatcagctaccagcagggtccggtcatacaggatgaggatgtctttgatctccttcttggaagcctcatccatatacttctggtaataggccaccagggctttggagatggactgacgggtagcataaatctgggccacatgaccaccaccctccacacggacacgaatgtccacaccagcaaatcgctccttgctgagaagcaaaactggctccagcagcttgtactgtagcgtgggcggctcaatcttctccaggggccgcccgttcaccttgatgagaccattgccgcgtttgcagtgtgccacagctgtggctgtcttcttgtgtccaaagacccgcaccgattgcctcctccatttcttt

SEQ ID NO: 268585 - DNA, 149 bp, Homo sapiens
  chr16:2475885-2476034
  hypo
cctgggtttccagggcgtacagaggcagctctcgacctagctagctcagcacagggctgtccccctaactgcagtgcacggagcagagtggggcccactggagaacttaagaggcccgctggagaacccaggtgcgtttccttagaaag

SEQ ID NO: 268586 - DNA, 226 bp, Homo sapiens
  chr16:2477161-2477387
  hypo
cctctcttctgagacgggctccatcccgtggcctttctctctctgtggagttcactctgccccttgccacaggcccctcagctcctctctgggaagtgcagatgctggtctctgccccttctcagccaggactcaggaaagggtcatgcacaggccttgcctatggttcctgcaccccttgcccagaacaacggcgttgcacacccatggtcgccaacccaccctc

SEQ ID NO: 268587 - DNA, 510 bp, Homo sapiens; identical to SEQ ID NO: 216679
  chr16:2485934-2486444
  hypo

SEQ ID NO: 268588 - DNA, 331 bp, Homo sapiens
  chr16:2497819-2498150
  hypo
accagccatctcacaccccacgctgggctctcattggccactgacatcttgtctttttggcgtctgcagcccccacgctggcaggtgtagtccctgcgcctcttgtcctcttggtcaagtgaatgacgcatgcaacctgcagagtccccaggacagagcagccaagggacttggcctcagtccaaggggaaggtgccttgcggggggccgctggagcagcgtgttccctgatagttggcgctggttgacaacagagaacagggtgaccatcgcctagagacagtcaggattcctgcggccacacagtgccgggcacagactttccaacaac

SEQ ID NO: 268589 - DNA, 108 bp, Homo sapiens
  chr16:2501133-2501241
  hypo
atgaagtccctaccgtggtccaggcgctgggggagagggcaggacagagagttcagaggtcaggtcgtgacgagagaaacagcaggcaggcgcgcggggcaggtggcg

SEQ ID NO: 268590 - DNA, 115 bp, Homo sapiens
  chr16:2505252-2505367
  hypo
accggcatcttcttcgtagcagaacctttgggagcacgtggtgacaggctggggcacgcgggtgttagaggcaggtgtggagggcctggcctcccagcgccgccgtccatgactg

SEQ ID NO: 268591 - DNA, 99 bp, Homo sapiens; identical to SEQ ID NO: 216680
  chr16:2508556-2508655
  hypo

SEQ ID NO: 268592 - DNA, 263 bp, Homo sapiens
  chr16:2531017-2531280
  hypo
ctgtcctttgaccacgctgtctctatcccttctgaggctaaggcttcctcacactgcaagatccagccgaggcaggccttggcgctgggaaagcaccgtgtcacagcacctgcaccttgaattggcatcgtcagtacacctgacccgggctggggtggggccatgcctctgtactcctctgcactcaggtacctggcacactggcattcgggaagcatgtcttgaatgcctattaaaatgattaggaccgggcgtggtggctc

SEQ ID NO: 268593 - DNA, 100 bp, Homo sapiens
  chr16:2531772-2531872
  hypo
cccctgctcaggctccgagcagcaggctcagcagccacagttaggcacgtttgcacttccaaccatcacaggcaggcgggccaaccggcccatggtgtgg

SEQ ID NO: 268594 - DNA, 47 bp, Homo sapiens
  chr16:2539901-2539948
  hypo
ccagtttcccactgcgcttggaatataatccacgggggcttgtgggt

SEQ ID NO: 268595 - DNA, 576 bp, Homo sapiens
  chr16:2540427-2541003
  hypo
ttcatggcgagcagcgattcgctcggaccccagaggccacaggaagatggcttcccccacaggaggcaccctcacagggccctgctggcactgtctgccttgggctgcctgaacccggagagagagtgggatagactgttcatggggtgtcacccttatgtcacctgcaccccaccctgtcagtccagagtgaggctcaacccacaggggttgcttgggaactgttgcccgtgaggagttgggtgttattatcggctccgctctgcagacatggcaaccgcaggttagggaagatgcacggcttgtccgcatttcaagcaaacaagtggcagagctggactttgtggccaggcctgtctaactgcaaagctgccccgtttccacagtagcccctgcctcccctctcactccctccccggccaccgcctccggctctgcacctttgtcaggggttgggggactgcagggaacagaggaggccttgtttgctgcgtaggagcaggtgcggcttatgatgtacagcagcagccagccagcagatagacaacagggaaagccactcggccgtgaaagctc

SEQ ID NO: 268596 - DNA, 176 bp, Homo sapiens
  chr16:2544810-2544986
  hypo
gtatactccaaagtttgtaacggcttctcaaaagtcacttatcttaagtggaagcccttctaatacttacacaaagattaaggcaaataatgtggctgcgcaacgtgactctcactcgtaattccagcatggtgggaagatcacttgaggcctgcggttcaaggccaacctgggtg

SEQ ID NO: 268597 - DNA, 931 bp, Homo sapiens
  chr16:2546128-2547059
  hypo
cctcccgagcacagcggcgctatggactctccaggatacaactgcttcgtggacaaagacaagatggacgctgccatccaggacctggggcccaaggagctgagctgcactgaactgcaggaactgaagcagctggcgcgccagggctactgggcccaaagccacgccctgcggggaaaggtgtaccagcgcctgatccgggacattccctgccgcacggtcacgcctgacgccagcgtgtacagcgacatcgtgggcaagatcgtgggcaagcacagcagcagctgcctgccgctgcccgagttcgtggacaacacgcaggtgcccagctactgcctgaatgcacgcggcgagggggccgtgcgcaagatcctcctgtgcctggccaaccagttccccgacatctccttctgccccgccctgccggccgtggtggccctgctgctgcactacagcatcgacgaggccgagtgcttcgagaaggcctgccgcatcctggcctgcaatgaccccggcaggaggctgatcgaccagagcttcctggcctttgagtcgtcctgcatgacgtttggggacctggtgaacaagtactgccaggcggcccacaagctgatggtggccgtgtcggaggatgtcctgcaggtctatgcggactggcagcgctggctgtttggggagctgcccctctgctacttcgcccgggtctttgacgtcttcctggtggagggctacaaggtgctgtaccgcgtggcgctggccatcctcaagttcttccacaaggtgagggccgggcagccgctggagtcggacagcgtgaagcaggacatccgcacgttcgtcagagacatcgcgaagacggtgtcccctgagaagctgctggagaaagcgttcgccatccgcctcttctcccgcaaggagatccagctcctgc

SEQ ID NO: 268598 - DNA, 145 bp, Homo sapiens; identical to SEQ ID NO: 216688
  chr16:2579464-2579609
  hypo

SEQ ID NO: 268599 - DNA, 390 bp, Homo sapiens
  chr16:2642768-2643158
  hypo
tgtgctctagatgccgccagtggagctttgcccgcagtctctgtccatgcaccctgggccaccggggagtggaattgtccatttcattgtctctctcaggggatgctggcgcgggggtgggtggcgcctgtccgtggggcccttgcctgcctccccgtggtgctggcgtgttctgtcactgagccactctggggcttcagtgtccctggcatgggtgacactgctgggagtgcctctgggctccttgcctgtggcctttttttttctcaggatggatttctggaagcgaggctacttctcagtactatttccgaatcgcttcctcagtgagtcctccccaggctgcaggtgccgagcgggagcaccactcctgcacgcccgtgcctgtgg

SEQ ID NO: 268600 - DNA, 465 bp, Homo sapiens
  chr16:2645427-2645892
  hypo
gggaggcagttctgcgcctcaccacagctttgttaaggcagcaatgacctgtgtcacctgcccgtttctacagcacggtcctcccccaccttttccccgctgtgtggatgtcactggcagtgagggggcaacaggcactgtgtctggtatctgcaggctccgttgcaaatacggattaaggctctctgcgtggcagtgctgtatgtgctgggttacatgtggcgaacgttctctgctcatcccaaagtgaggctggctctgtgaggggcaggccgaggctatggggagttcgtgtggcaggaggagcgtggagaatttctgtttgtgattgtcatgggagcatctctttcttgtttctttccacaggcaccagtttgtagaaaataatttaatactaaagatgggcccagtggataagcggaaggtgagtggtcagtggtcccgctgctccgcacggacacctgc

SEQ ID NO: 268601 - DNA, 122 bp, Homo sapiens
  chr16:2647311-2647433
  hypo
aatgggagggctttgcaccacgtgggaagcagccacaggccttggccagagggagcagcggggatcggggcagctgcctcgccctttccgacatcccagacgcccacactagtggctcagtc

SEQ ID NO: 268602 - DNA, 249 bp, Homo sapiens; identical to SEQ ID NO: 216691
  chr16:2648042-2648291
  hypo

SEQ ID NO: 268603 - DNA, 66 bp, Homo sapiens
  chr16:2716589-2716655
  hypo
ccgacactgccagtcggcaagggaccaaaaacacctgtaggaacagcaatacgtggctctccaggc

SEQ ID NO: 268604 - DNA, 209 bp, Homo sapiens
  chr16:2716878-2717087
  hypo
gagggggctggggccggcccctcatcccgtttccctgatttttaaaaggccgtacaggattgccatcaatatcaaatctggaatggcattgagatgcccagtgaagacccttttggcttcgtgggcatacagcagaaggtggggtgtcttgttgctgaaaagtttctttttgttgttggtggtgatgtaaaggacggccacctgcacgc

SEQ ID NO: 268605 - DNA, 101 bp, Homo sapiens
  chr16:2725742-2725843
  hypo
ccagcctgggcaataagagcaagactccgtcccccaccccccgaaaaaaaatgcagctagaactgagtcatctaaaggctagagcacggccgaaggatgca

SEQ ID NO: 268606 - DNA, 36 bp, Homo sapiens
  chr16:2731315-2731351
  hypo
attctttttttttcttgagacggagtctcactctgt

SEQ ID NO: 268607 - DNA, 517 bp, Homo sapiens
  chr16:2764192-2764709
  hypo
cagggccacgtcagcgctggaggccgtgccctggtacagggggttgctctccacctgcctcacccgggcatacatagcgtgtggtcccggctgcactagctgccttgcccccagcaggacctggtacagggacgtctcagaggtgctggcgggagaaacagagaggcggcgtgaggcggcccctcgtgtggggacaggcccgggaggggctggggctcctctggccaccaccgtgccccacacctctctctgcacaatgtcttcgagagtcatctctaggacagccaggtgcagcggtgatgcgtgttgacattgaagccagaccgcccgactcagatttccacctccacccctggccgctgtgtggccttgggcaagtcacttaacaagttctctgtgatgcagctttctcacctgtgctgtggggacagtcacagtgcctacctgaaaggctggctcggagagaaccaccctccaggtgcagcagggccagccccacctgcgggcctctggcagg

SEQ ID NO: 268608 - DNA, 497 bp, Homo sapiens
  chr16:2770028-2770525
  hypo
agtagggggctgagccggagccccaggcagtgcagcggagcctggtgggggactgcaccaccaggaccctgcaccttcacgactcaccaaaacacagcagcagcaggagcggcaccgccgccggccgcctcatgtcctcaggcctggctggggcgcagggccgtggtcggcggtggcagaagcgttggagcacgagcgaggtgcaggctccatgaagtggagttttatgctggagatgagcacaggcccggctatgcggcccaacccgtcggcccggcctgcccagctcctctcctcaggaaggaagcgcccagagccgactcctccgtgacctagccctgaaccccgagaccccagggcagacccctcaccccagcgcagcacggggtgccgttggcctcggttcctggaccctgagctgacccagaccccccagcagaccccgagctgaccgcggtgcacgcgaagtccgtccagcttcattcattattattatt

SEQ ID NO: 268609 - DNA, 43 bp, Homo sapiens
  chr16:2782315-2782358
  hypo
cagtaaagtcctggcgcggtggctcacgtctgtaatcccagca

SEQ ID NO: 268610 - DNA, 343 bp, Homo sapiens
  chr16:2806256-2806599
  hypo
gcagggacttgggtgtggggcggtaagtggttagtttggggccaggggcctgacccgtgtctccccgctccccctcaggagcggtggtgccccccccgggcacggggccatgtacaacgggatcgggctgccgacgccccggggcagcggcaccaacggctacgtccagcgcaacctgtccctggtgcggggccgccggggtgagcggcctgactacaagggagaggaggaactgcggcgcctggaggctgccctggtgaagcggcctaatcctgacatcctggaccacgagcgcaagcggcgcgtcgagctgcgatgcctcgagctggaggagatgatggaa

SEQ ID NO: 268611 - DNA, 194 bp, Homo sapiens
  chr16:2819593-2819787
  hypo
tggccaccatcatcttctcccgactctgtccacagcctcctccctgtctccccgtctccacgccattctcttccacatgtagccagagggacctttctaaaacgcacatctggctacttccctccactccacaaatccttcgggacgccctgtggcctgcaggacaaagccccacctctgcgggagtggcgtgt

SEQ ID NO: 268612 - DNA, 347 bp, Homo sapiens
  chr16:2849308-2849655
  hypo
acggtccagctgggcgagctgacttccaggccaactccttggaacctgcgggcctacagcagtcgttacaaagtgcaggacatcattgtgaaccctgacgcacttggggttttacgcaatgacattgccctgctgagactggcctcttctgtcacctacaatgcgtacatccagcccatttgcatcgagtcttccaccttcaacttcgtgcaccggccggactgctgggtgaccggctgggggttaatcagccccagtggcagtgaggctggggatagaccgggtggggtgatgggggtgcggggtgagcattaccctctacccctgttcccgctacacaagcacag

SEQ ID NO: 268613 - DNA, 35 bp, Homo sapiens
  chr16:2959166-2959201
  hypo
cactttgggaggctgcggcgggtgaataacttgag

SEQ ID NO: 268614 - DNA, 223 bp, Homo sapiens
  chr16:2974621-2974844
  hypo
gaatgtgtaccctacgctcctgccacgctgtgggtcacgcaacccccccaggctagtcaaggttcaggcaggtggagacaaagcccggttgctgaggggcctgtggactttaacgggcggagtggcggtgggtcagcatctaccatccaagagcctgaacgggcaagagtgggaacgggtcctcagccttccacaagccggcggtcagggccttttcttgtat

SEQ ID NO: 268615 - DNA, 232 bp, Homo sapiens
  chr16:2975080-2975312
  hypo
gcaggaccagctggcggggtgaacagtgtgcgagtcactgtgccagcctgcatagtctgggaggcctctgtcaggagcaacctggcgtccccatgcctcgccctggctgggagggaggccgggaatcacggcagttctcagggaggtgcctccccaggaacaaaggggactttctccagagggcgggggcctcgcgggacctgggctggggggaccccgggagggtgcaggg

SEQ ID NO: 268616 - DNA, 379 bp, Homo sapiens
  chr16:3021542-3021921
  hypo
tggcctgcaggccctggctgcgcccggctgccctggtgggctacactgtgttgtcgggtgtggccggctggcgtgctctcaccgccccctccaccagtgctcggctccgggcatttggatggcaggctgctgcccgcctactggtatttggggcccggggagtgggtctgggttcaggggctccaggctccctgccctgctacctgcgcatggacgcactggcgctgcttgggggactggtaaatgtagcccgtctgcccgagcgctggggacctggccgctttgactactggggcaactcccaccagatcatgcacctgctgagcgtgggctccatcctgcagctgcacgccggcgtcgtgcccgacctgctctgggc

SEQ ID NO: 268617 - DNA, 65 bp, Homo sapiens
  chr16:3051091-3051156
  hypo
gaacgagggccatcacggactcagttctccatactctgtccctctccccccggtcctctgagaaa

SEQ ID NO: 268618 - DNA, 136 bp, Homo sapiens
  chr16:3052305-3052441
  hypo
tccctaaatattttgcgtgccttaaatgcctgattaacgaaatagccttagacatctcaaacaacaattagaaacataatcgacttgactctcttgattctctctctcttttttttttttttgagacggagtctcg

SEQ ID NO: 268619 - DNA, 35 bp, Homo sapiens
  chr16:3053165-3053200
  hypo
ctccacatcggtggcgtcggggggcgggcgcggtg

SEQ ID NO: 268620 - DNA, 48 bp, Homo sapiens; identical to SEQ ID NO: 216697
  chr16:3062887-3062935
  hypo

SEQ ID NO: 268621 - DNA, 1431 bp, Homo sapiens
  chr16:3139013-3140444
  hypo
gggacattcctgcaggcctccgctgtggaggaccccgggtaggtggcgcagggcgcggctggcggaaggcgggccaagctagtacagcgtctcgcgggcgtgggtgcgcaggtggcgcagcaggtgggagttgcggctgaagctgcggccacactgcgtgcaggagtagggcctggcgcccgtgtgcaccagcaggtgtcgcagcagattgcagctgcggctgaagctcttcccgcactccacgcactcctgcgggggctcggcctgctcctgcccgggctccgcatgggtagccaggtgccgccgcagatgcgcgttgcgccggaagctgcgaccgcacgtctgacagctgtagggccgctcgcccgtgtggctgcggcgatggcgggccaggttggagctattgcggaaacggtggccgcaggtgtcgcaggcgtggggcttctcccctgtgtggatgcgctggtggcgcgccaggtgggcgctctggctgaagccctcaccgcactcgctgcagcggcagggcttctcgcccgtgtggctgcgctggtggcgggccagatcctgggtctggccgaaactcttcccgcactgggtgcagtggtggggccgagggccaccgtgggtcagcaggtggcgggcaaggctggcccggcgcacaaagcgcttcccgcactgcggacaggcgtagggcttctcgcccgtgtgcacccgttggtggctgaccagctgcgagctctgcgtgaagctgcggccgcaagcctggcaggagaagggccgctcgcccgtgtgcaccctccggtgggccaccaggtgctcgctgcgccggaaggccttgccgcagtcgctgcacacgaagggcctccggtcggagtcccggcggcggctgccggagccttcggaggaccggcggtccttgtccctggcgtggatccgcaggtggcgcttgaggctggagcggcgctggaagctctggccgcagtgggagcacaggacatcggtcagtggcggcgcttcggccttactctcaggagcgcagggcggcttctggtcctgggcgtgcgccagcaggtgctgcacaaggctggcgcggcgctggaagccgcggccgcactctgcgcacaggaaggcgggttcggaggagtgggtcagcaggtgcttgctcaggtgcgagctctggcggaagcggtggccgcacaggtggcaggcgtgcggccgctcgtccgtgtgagtgcgcatgtgcagcttgagaatggagctgcggccgaagctcttcccgcagcaaaggcacaggaaggagcgcccagccgggtgcgagcgcagctggtgcgccttcaggcgagacagctgcgggaagctcaccccgcagtccgcgcagatgaactgcaactccggattgggctcggggacgccctcagccactttgacctc

SEQ ID NO: 268622 - DNA, 61 bp, Homo sapiens
  chr16:3165156-3165217
  hypo
ccggcactgtggaggcggcttggtgaatattcctcctcttgccgcccgtccttgctggggt

SEQ ID NO: 268623 - DNA, 133 bp, Homo sapiens
  chr16:3167169-3167302
  hypo
ctgccccaggaagtccgcttttcctgggttcatccgcagggctcactcctatagctccatcttcctttccaagccccaacttcagaggtgtctgagcagcaagcttggcttcggggcccgagggctgcttgcc

SEQ ID NO: 268624 - DNA, 67 bp, Homo sapiens
  chr16:3169009-3169076
  hypo
tgcacaggtgagggacgggcgcgcgcctttgtctgcgggagtggggcgcagacgcaggccttctggc

SEQ ID NO: 268625 - DNA, 439 bp, Homo sapiens
  chr16:3169370-3169809
  hypo
aggaagcagcctgcggccggagctcagggccggccaaagactccgggcagccggctgagccagatcgcaccccggatgcagctccgccagaccccagtcccacggagccccaggagtaccgcgtcccggagaagcccaacgaggaggagaagggcgccccggagagtggcgaggagggcctggcccctgacagtgaggtgggcaggaagagctaccggtgcgagcagtgcggcaagggcttcagctggcactcgcacctggtgacgcaccggcgcacgcacacgggcgagaagccctacgcctgcactgactgcgggaagcgcttcggccgcagctcgcacctcatccagcaccagatcatccacacgggcgagaagccctacacctgccccgcctgccggaagagcttcagccaccactccacgctgattcagcacca

SEQ ID NO: 268626 - DNA, 128 bp, Homo sapiens; identical to SEQ ID NO: 216700
  chr16:3170504-3170632
  hypo

SEQ ID NO: 268627 - DNA, 187 bp, Homo sapiens; identical to SEQ ID NO: 216701
  chr16:3189117-3189304
  hypo

SEQ ID NO: 268628 - DNA, 44 bp, Homo sapiens
  chr16:3189704-3189748
  hypo
ggctcctcagtttccgactgtgacggttgggaaaaattttcttt

SEQ ID NO: 268629 - DNA, 327 bp, Homo sapiens
  chr16:3193319-3193646
  hypo
tgatcatccaggcacgacccctccttccacccatgctggttccttctctttcacctgctagtggcctcagggcccctggctgaggggaggcgggggccggtggacaagacgctctggtcccttggtaacaggtgtgcatgtgccagccctctctgcccctaggcctttcttagccaaccttccatgcacacatcatcctgcggtcactgtcatggtctccgtttcccgtaagaagcaagcaaggtctcgctgtggacaaggctgattccagttggtgatttttacctctgggggcctggtgctgtgtgcatgcgtgtggcgggtggc

SEQ ID NO: 268630 - DNA, 213 bp, Homo sapiens
  chr16:3211536-3211749
  hypo
acaggtggcaggggcgtggttgtcaaataatcaaaatgatcaggcacttcaggtccccgggaaagcgggcacagaggtggccacccctgttcccctcctggcaccatgatggtcaggaccgccgggagcccatgcccacctccctcagctcccgtggtgcgcccgggggaaatgtggttggaaatcgcggcggccgggcatggtggctcacgc

SEQ ID NO: 268631 - DNA, 120 bp, Homo sapiens
  chr16:3211809-3211929
  hypo
cccagcctggacaacgtagtgaaaccccacctctgcaaaacaattttaaaagttagcagggcgtggtggtgcgcgcctgtgatccaagctactcctgtgtctgaggcaggaggatcgctt

SEQ ID NO: 268632 - DNA, 183 bp, Homo sapiens
  chr16:3286265-3286448
  hypo
atccacactcggttcgttccccagtgacgcactgatcagggttcggacaacttgtgggcagggatggccttatttctcgatgtaataccagcctccagaaagttgacaaaagtaaaaatataaatgaatgcctcttcttaaagttaattatacctgactaatggctgacgatggcttaaaata

SEQ ID NO: 268633 - DNA, 87 bp, Homo sapiens; identical to SEQ ID NO: 216706
  chr16:3315530-3315617
  hypo

SEQ ID NO: 268634 - DNA, 42 bp, Homo sapiens
  chr16:3492713-3492755
  hypo
ctgtggtatgcgcgcctctcagatactcgagaggctgaggcg

SEQ ID NO: 268635 - DNA, 137 bp, Homo sapiens; identical to SEQ ID NO: 216707
  chr16:3515977-3516114
  hypo

SEQ ID NO: 268636 - DNA, 110 bp, Homo sapiens
  chr16:3537863-3537973
  hypo
ggagtaggggtggacgctggtgccctgggaggccaggcagctgggcgcgctggacccatgtccaaagccatggggtgagtgaaaccagattaacccgctgagcttgccca

SEQ ID NO: 268637 - DNA, 145 bp, Homo sapiens
  chr16:3542403-3542548
  hypo
aacatcaacagagtcgagtggagacaccccggcacagaggaagcccacacctgggtgcgcagagtctggtccggctgggaggagaagggctgtgctcatcctgcccagagggacctgggagctggggtcccgcggagcagtgacc

SEQ ID NO: 268638 - DNA, 88 bp, Homo sapiens; identical to SEQ ID NO: 216708
  chr16:3552081-3552169
  hypo

SEQ ID NO: 268639 - DNA, 37 bp, Homo sapiens; identical to SEQ ID NO: 216709
  chr16:3552775-3552812
  hypo

SEQ ID NO: 268640 - DNA, 181 bp, Homo sapiens
  chr16:3599033-3599214
  hypo
ctccttctccaaccctgtgacgtggcgagggtgcccgtcagcccaggctcggtgtgggtgtggtcatggcatgaacagcctgtggagtcacaggcccccaccacgtactccaggttcttcagggtgctgttggcgcagagggcatgagcgatggcctgggctccctcgggactgatggagt

SEQ ID NO: 268641 - DNA, 118 bp, Homo sapiens
  chr16:3635039-3635157
  hypo
tcccaatgatagcatcggtgacacgcactgaggaccacaccttgtataacacgggtgccgggtgaacagagctcctggggccactgaacccaacagcccggcacgtgactaaaactta

SEQ ID NO: 268642 - DNA, 408 bp, Homo sapiens
  chr16:3696477-3696885
  hypo
acctggggccatggcgggtgtaggggttgggtggggagaggatgtcctctgaaaaggtgacatttaagctgaaactggaatgacaagaaggccccagctctgcaggcagagcggaaggctcagagcttagaatcacgtaggtcatggaaagcattggatttcgtgttagggacaatgagaaactggtgacagattttaagtaggggaataaagagatctaattacacatttgcgagatgttctgagagctgtggggacggctgggacatgtacctggaagcagggcagccaaagggagaggcagtgatgacgggtggtatggaggctgcagaatctggaggacgtgcaggctcagggtgcatggtgcgggcggggctgagggggagcggggcctaggatgatctcagg

SEQ ID NO: 268643 - DNA, 121 bp, Homo sapiens
  chr16:3704780-3704901
  hypo
ttttctgcactctcaggtgacggctcacatttgccccagggaaggtcacagctgcctgaacttttaaaactcccagacacgcactgcctgtgcaggatccggagcccagcagcactgccag

SEQ ID NO: 268644 - DNA, 77 bp, Homo sapiens
  chr16:3706729-3706806
  hypo
gtcaggttcttctcccggttcacaggtgggtgctgcctgggccagggtggggctcggcttggcgcttatggcctcca

SEQ ID NO: 268645 - DNA, 165 bp, Homo sapiens; identical to SEQ ID NO: 216710
  chr16:3707025-3707190
  hypo

SEQ ID NO: 268646 - DNA, 383 bp, Homo sapiens; identical to SEQ ID NO: 216711
  chr16:3741882-3742265
  hypo

SEQ ID NO: 268647 - DNA, 282 bp, Homo sapiens
  chr16:3772842-3773124
  hypo
caatttagatcaacggcaaagcactgtcatctactcatcaaagctcctcagaatctactttgctagtctgggcattacactcacttaaatttcttcagtatcttataagggacctatgttttcccacctctgcctatttattatgaagtgtatacaagtaattcatgtggaattaacacataaaatccatacgtccatgaggctgcgatgtcttcatggtctgagatgaagttattctcctgcctacatgcccctgcccgtctgttacggcgctgtgggcgc

SEQ ID NO: 268648 - DNA, 354 bp, Homo sapiens; identical to SEQ ID NO: 216712
  chr16:3776074-3776428
  hypo

SEQ ID NO: 268649 - DNA, 146 bp, Homo sapiens
  chr16:3777135-3777281
  hypo
tagatgtgtgtgggtgtgtacgtgtgtgcacgccggagtcaattcctatcatccagggtaatactgggagacgcccacagagttcactatagaaaaaaatcttcccgaaacatcacaaagttatcgggatacattataagcttgca

SEQ ID NO: 268650 - DNA, 131 bp, Homo sapiens
  chr16:3781042-3781173
  hypo
ccttctgccttgtgacgctgtcctagttctggaggagtcagtgcagccaccatcaggtacagacaccaacccgggcacccatgcaaagggacaggatgcttcgtcagaccccaggccggctgtgggggtgg

SEQ ID NO: 268651 - DNA, 61 bp, Homo sapiens
  chr16:3781555-3781616
  hypo
gcctgcagaataggcaggtggctgagcctgatggccctgatgccttgggatggaacaaaat

SEQ ID NO: 268652 - DNA, 766 bp, Homo sapiens
  chr16:3781796-3782562
  hypo
tggcatacagcttctgggacaggtcattggacacgttgggcatgctgggcttcttcttgttggcgcggctgatgctgcttttgttcttgttggttttcttgttgttcttcttcttggcattcttgctgtcgccctgactgccctgcaacaacacgcaaggctgtgagaccaggcaagtgcccctccacacttggcacggacgcccagctcccaggccgtgggcatcaggaagctcaggccaaagtaggtcaccaccaggcagaccccatacgtgaacggctacaggtggctgtaggtgctgcagccttcgggacagagcagggcctgtcctcggccaggctggtgtcattatcagctttatgccacgctgcctctaaaggggaaaagagacccagagtgcgagttcagaaattaacaaatgagggcagtgggggctgtttccactgtgccacaaccagatgcggaagattccacgtcacaactgtggtcagcagctgtctgccttgaggaaggctctacacacccgagaaagcatgagagcttccaggagacaggaaagctgctgatgggaaaagcagctgccccatcaagagcagggactctgaggcccctgcggggtccactcaaggcccacggagagcaggctggctccctgctggggccatcagtgctgcgcctgactggctgaaggtgggcttgctctcagcccacaggctcctcctctggaaagaacgcaggattaccactcacttacactttaacagag

SEQ ID NO: 268653 - DNA, 924 bp, Homo sapiens; identical to SEQ ID NO: 216714
  chr16:3784366-3785290
  hypo

SEQ ID NO: 268654 - DNA, 182 bp, Homo sapiens; identical to SEQ ID NO: 216715
  chr16:3785796-3785978
  hypo

SEQ ID NO: 268655 - DNA, 152 bp, Homo sapiens; identical to SEQ ID NO: 216716
  chr16:3802012-3802164
  hypo

SEQ ID NO: 268656 - DNA, 44 bp, Homo sapiens
  chr16:3803030-3803074
  hypo
agtgtcaggtagcgacggcagcacgaatgcggtttagtgctcaa

SEQ ID NO: 268657 - DNA, 207 bp, Homo sapiens; identical to SEQ ID NO: 216717
  chr16:3811572-3811779
  hypo

SEQ ID NO: 268658 - DNA, 209 bp, Homo sapiens; identical to SEQ ID NO: 216718
  chr16:3812494-3812703
  hypo

SEQ ID NO: 268659 - DNA, 265 bp, Homo sapiens
  chr16:3821348-3821613
  hypo
cgtgagccaccgcgcccagccaaatgtatgggaatttaatcacattttcttgggagtgttctgcttgtgaaaattcatcgagctatacacttgtaatgggcactcctcaataacggtaaaactacacacgtttcttatagtctgatttatataattaaaacaaccattgaaacttatggcttaaacacacacatctacagcagtcccctcatatccactcggatacattccaagacccccagtcttggaacgcctgaaactgcgg

SEQ ID NO: 268660 - DNA, 42 bp, Homo sapiens
  chr16:3870817-3870859
  hypo
gccactgtgtacacacacacacagccacgaccagaatgtgac

SEQ ID NO: 268661 - DNA, 50 bp, Homo sapiens
  chr16:3873408-3873458
  hypo
tcacaacgtggccgcgtaacctgtcaagctttgctcgaatgccttatacc

SEQ ID NO: 268662 - DNA, 148 bp, Homo sapiens; identical to SEQ ID NO: 216719
  chr16:3900218-3900366
  hypo

SEQ ID NO: 268663 - DNA, 78 bp, Homo sapiens
  chr16:3925259-3925337
  hypo
accttcatccctgacgacctttgaatggggccaccgctctcacccctctcagttattcaaaaacgaagcacggtcatg

SEQ ID NO: 268664 - DNA, 77 bp, Homo sapiens
  chr16:3931903-3931980
  hypo
ccagagttaacatcccgaaaagagagggagaaaatctgtttaaaacaactccctggccaggcgcggtggcagatcac

SEQ ID NO: 268665 - DNA, 148 bp, Homo sapiens
  chr16:3998689-3998837
  hypo
tccaaacctatcatgagatacgccagcactgacaagaatcctcactgcggcattgttcatcgcgccccaaactggaaacagctcaatcgatcctcagcggaacggagaaatcatggcctcttcacgcgatgaaatattatgctgcaat

SEQ ID NO: 268666 - DNA, 75 bp, Homo sapiens
  chr16:4016326-4016401
  hypo
gcccatggttgaagccgacgcggagcttgaagttgaaccacagcatgttgttgttgaagtcgtccaccacgcgca

SEQ ID NO: 268667 - DNA, 237 bp, Homo sapiens
  chr16:4021225-4021462
  hypo
tggaggaattaagcccatcccgtgtgactctaccgggagaggactcttggaagctggtgccggcttcctccaaacgtcaactcacacacccttccctttgctgattctgccttatgtcttttcgctgtaatcacagcggtgagagagcagattgcggagtcctgagtccacctggggctggtcttgggagccctgatacgggctttgtgactcaacgcctatgaccaggaaccaaga

SEQ ID NO: 268668 - DNA, 138 bp, Homo sapiens
  chr16:4029240-4029378
  hypo
gtgcaggccatgacgtcctccaggaagaacaccatcctgcgagaggcatgggggttagcaggagcgacggggcccggggtgggtcatcggccaggagacaggtgcgaggccgcagccagcgccgccctctgctctctc

SEQ ID NO: 268669 - DNA, 218 bp, Homo sapiens
  chr16:4030046-4030264
  hypo
caaacccgcacacgcgtgccgtctgcatctgggctgtcatgttcatcgtgcatgttcacctctagctggcggcttcaggactctccagacagcggggctctgttgtacgtgaggtccagcaccacgtatttcattttaaaagactttgtccttctaagcagagcgactgtattcactgactccttttgcaggcgtgtgtctagcgggcttcgtttcag

SEQ ID NO: 268670 - DNA, 144 bp, Homo sapiens
  chr16:4092823-4092967
  hypo
ccactccgtttggacgattccggttttggtctgctaacttatcaactgtatgatttgggcaagttcctaaacttctctgtgcttcgtttctcccctttgtaaaacaggactaaaaatattaaaactcggccgggcgcagtggct

SEQ ID NO: 268671 - DNA, 39 bp, Homo sapiens
  chr16:4097830-4097869
  hypo
attacaggcgtgagccaccgcatccggccagagtgtgtt

SEQ ID NO: 268672 - DNA, 273 bp, Homo sapiens
  chr16:4160070-4160343
  hypo
agcaggagccccctctaaagcgctccccactcccgaacatactccacaacatttttaactgtgagctcacggaggttgggaactattaacgcaggtcagacgcgccccaaagtggggccgagcccaagagggttcttggctttgcccaggaaataattcaagggtgagccggtggcaggaaagaaaacacctttattgaagaggcaggcagtgttatacggctccatgactgctcctgcagagctgggctttcccaaaggcggaaagtagcag

SEQ ID NO: 268673 - DNA, 110 bp, Homo sapiens
  chr16:4164065-4164175
  hypo
aggcatggtcggcccggggctcgggacagcccgccacgcagtagtaacagtctcccagggtgctgattttctcacacttggtctcctcacacaggcggtcgaagcgaccg

SEQ ID NO: 268674 - DNA, 554 bp, Homo sapiens
  chr16:4164399-4164953
  hypo
cttcattaagtcatcggctatgattcttggcatcacggaatgaatcatcctctctttgagggctttttccacttccaggtccttcccgtgcataatggattgccccaccttgaggaaggtgctcctggacctcacctgggacatgacgaacaggtggaccccgatggcgtggatgcagccgtggagcagccccctgctcagcagctcccagtgcagggccccggctccgggcgaggggaagcaggcttcatcccggaaatggtagccaaaggtctcgaaaaggacagagtaggccacccccagacacaaactcaggtacaaaggtaagtgcatgacggtatagagcaaaaagagcacttcgatgcacatggagaagctccccacttgagataagcaagtatctgtgggccgggctgtggccgtaaggttggagctgtcgccgcgtcctgagacaggcgtcaagacctggaactgcgcagccagggtcagggcgaacaccagcagggtgagagccagcgaggtccacgcgtaatgccgggcgtacagcttggtga

SEQ ID NO: 268675 - DNA, 85 bp, Homo sapiens
  chr16:4174071-4174156
  hypo
gcaggcttgttaggaagatgcgtgtttattttagccacggggtagtaccaaaataccattaacattactcaaaaataagtttgcc

SEQ ID NO: 268676 - DNA, 79 bp, Homo sapiens
  chr16:4183952-4184031
  hypo
gctccttaagtctcccgagaaggtgcaaattgcgttaattgccactgctgaggccaggccatggcgccctgctgggggc

SEQ ID NO: 268677 - DNA, 87 bp, Homo sapiens
  chr16:4203551-4203638
  hypo
gcgcctgtgtgcagcgctggagacctgagtcctgttgtgtgtgaaggtggggcagggcagcagggcaaatgccgaaaacaaaaactg

SEQ ID NO: 268678 - DNA, 258 bp, Homo sapiens
  chr16:4203944-4204202
  hypo
actgatcaatgagccgccagatgccgagcaccacaccggcaagggctgcggatcgtgaacactggagattcaaacagcagagagaccacctcacaccattctgtcaacccgtgccaagtgcccaggcctgtgccaacgcttggcacacaatgattcaacagaggcagcctcatgcttcacggcccgatgctcgcttgttgtctatggccgtaggctaacctgcaaataaagaactggactgcacggaggtggtcattc

SEQ ID NO: 268679 - DNA, 549 bp, Homo sapiens
  chr16:4257893-4258442
  hypo
ggggcccgcgctggcggcagacgcgggggtcttcttggggctctcggcctccctgccatctgggtagtgaaggagcagtttcttgtcttgaggggctgtgtctgcataaagcgccctttctttctcctctagacttgcgtctccagcagagaaatgattctccaacaaattgccaacatcttctgtgccacccgacgcggagacttgcagttctaaatgattagaacatgattggtcagtttcacagggttggcaccggctctgtttctcaagagtctataataacctagctcccgtcttctgggatgtggtgttggcctggtgtgcagtgttacgcccaccaacctgggtcttcaggactacctcgtgcgtagcgagcagaataggtgttattctgcctccctcccaagatgtagaagctgtggatcagggagttaaaggactgacccgttgtccatcactaacgaagtgagcagctgtgctaacccgagaaccgcccccgcaccgcgaccctggccctgaccttcaagcttccgggcttggtcctga

SEQ ID NO: 268680 - DNA, 482 bp, Homo sapiens
  chr16:4268166-4268648
  hypo
ggcctcccctttccccaccacgtcccatcccttctgtccagtcactgaagtgaggtgaccccgcacttcaccccaacgcaaacgcgcactcaggaagtttaaacagacccattctaagggccacgtctttctgagaatgggagggaagccctttccgaaggcagaggaccggtaagggcccttcaaagctctctgaaacagcaacacggtcggagggaggtcattagcagtgctgtgtggcttcctcatcctcatggtaagtgagcactgggagtaagacaatcagcccttcagaaaccactcgggcctggagaacgcagccagggctgagccacagagatggggcaggagcagttctggcctccaatatacagcggcgctttgctcctctcgcacaagtgaaatcacagctgatgtctccatggctttgaagagcctcacacacaggcccgctggaccacgtgggccctgctcctccatca

SEQ ID NO: 268681 - DNA, 493 bp, Homo sapiens
  chr16:4310354-4310847
  hypo
agaagcagagaggacgtggcctagggagaggcttccgccattcaagatcacctgtccccttcccggtccccagagcccactcccgggcgcctcctgctcacctgggtccgcagctgctgctgttcccgctccagcttctcctggtgcagcagcctcacctgttcctgctgctgctgcagctgcacctgctgcgcaatcaccttgagcttttccgggtacatgtgggcctccagcgagcgcacctggaggcaggacaacctgggctcagggccaaggccgggagcacaccctgccctgtcagtctcacagcagctcattcactcctgctgaaaaccctagcacagggcgggcccctctcaacagaggccagaagcctttccagagcccttcagcccccggctcctctcgcctcccacctcggcctccactggaccatgctccctcctgcccgagtctttgcctatgctattccctctgccgggaacacctttct

SEQ ID NO: 268682 - DNA, 52 bp, Homo sapiens; identical to SEQ ID NO: 216728
  chr16:4312582-4312634
  hypo

SEQ ID NO: 268683 - DNA, 153 bp, Homo sapiens
  chr16:4313275-4313428
  hypo
gagcttagaaactatgcagacgacgggtgctggccccagcgtctgactagcaggcccggtggggcccagaaacgtgcgtggtgtgattctgatgcacgcgggatgcagacgacattcagggacgctgtccccgctcctggaacacttctgagt

SEQ ID NO: 268684 - DNA, 462 bp, Homo sapiens
  chr16:4372512-4372974
  hypo
gcaggcatgctgaccgggcgccgacccgcagggctcccacctccccaaggctcttcaccccatatccatgaggctgacccggatctgtgcccaaccccctgcaggagcagccccccccctacactgtttctcccaccccaccttggtcggggcaccctcaaggtccggttcgatctagcagggcctggcgttggaatgcatgaatgcgtggttggagaaccgaggcaggagggcaggccaaggtccaccgcccgccttacccactcctgctctcggagttggcgggtgccgttcccagtggacctggtacctggccccaggcaggggaggcgtgggccacgggcctgccccgaccccccaggacttaggagctccttgtgggatctgcctgcagccaggcgtggcttgggaggcgcggtgtttccttcgctctggggacccggcctcatccctgctctcccc

SEQ ID NO: 268685 - DNA, 306 bp, Homo sapiens
  chr16:4382286-4382592
  hypo
ctccctggacgagccgctcgacctgaagctgagtatcaccaagctccgggcggcaagagagaagcgggagaggacgctgggtgtggtccggccccgtgctctgcacagggagctgggcctggtggatgacagccccacacctggctctccaggctccccgccctcaggtactggccctgggcagggcagggggacttagccctgatccagtcatggtgacagggagaatggccaagtgtgtccaccagcatgtagctgcagcccctctcggcttccggttcatgggaagcccgcacgcttgtcctt

SEQ ID NO: 268686 - DNA, 285 bp, Homo sapiens
  chr16:4385112-4385397
  hypo
accatgtcaagcccgagaaggatgcggggtactgctgccactgggagggctgcgcccgccatggccgaggtttcaacgccaggtgaggtgggggagagaggggtagagggaggactggggtctccagtgagctgagccgtgccccccgccctccctggagcaggtacaagatgctcatccacatccgcacacacaccaacgagaagccacaccgctgtccgacctgcagcaagagcttctcccgcctggagaacctgaagatccacaaccggtcgcacacaggta

SEQ ID NO: 268687 - DNA, 70 bp, Homo sapiens
  chr16:4395410-4395480
  hypo
cacagcagtcactacgcagggtcccggggtctgaaggtagggcacctgggcaagccgacaagtatcaaga

SEQ ID NO: 268688 - DNA, 44 bp, Homo sapiens
  chr16:4414173-4414217
  hypo
gagacactgtctcaaaaaaaaaaaaaggccgttcagccggtgaa

SEQ ID NO: 268689 - DNA, 116 bp, Homo sapiens
  chr16:4428515-4428631
  hypo
caggccgcacccgccgtcctctgagtcagtgagggtggagcgggtcccatgggggaagagaaggctaggggtgtggccccagggccttaggtcatcagacacgagcccccctgggg

SEQ ID NO: 268690 - DNA, 42 bp, Homo sapiens
  chr16:4429224-4429266
  hypo
gctcttgtgtgagctgcaggcgccactgggcaggatgcttcc

SEQ ID NO: 268691 - DNA, 1719 bp, Homo sapiens
  chr16:4430996-4432715
  hypo
cccgccaggggaccacggtgccccgagacgtgccacccgacacggtggggctgtacgtctttgagaacggcatcaccatgctcgacgcaggcagctttgccggcctgccgggcctgcagctcctggacctgtcacagaaccagatcgccagcctgcccagcggggtcttccagccactcgccaacctcagcaacctggacctgacagccaacaggctgcatgaaatcaccaatgagaccttccgtggcctgcggcgcctcgagcgcctctacctgggcaagaaccgcatccgccacatccagcctggtgccttcgacacgctcgaccgcctcctggagctcaagctgcaggacaacgagctgcgggcactgcccccgctgcgcctgccccgcctgctgctgctggacctcagccacaacagcctcctggccctggagcccggcatcctggacactgccaacgtggaggcgctgcggctggctggtctggggctgcagcagctggacgaggggctcttcagccgcttgcgcaacctccacgacctggatgtgtccgacaaccagctggagcgagtgccacctgtgatccgaggcctccggggcctgacgcgcctgcggctggccggcaacacccgcattgcccagctgcggcccgaggacctggccggcctggctgccctgcaggagctggatgtgagcaacctaagcctgcaggccctgcctggcgacctctcgggcctcttcccccgcctgcggctgctggcagctgcccgcaaccccttcaactgcgtgtgccccctgagctggtttggcccctgggtgcgcgagagccacgtcacactggccagccctgaggagacgcgctgccacttcccgcccaagaacgctggccggctgctcctggagcttgactacgccgactttggctgcccagccaccaccaccacagccacagtgcccaccacgaggcccgtggtgcgggagcccacagccttgtcttctagcttggctcctacctggcttagccccacagagccggccactgaggcccccagcccgccctccactgccccaccgactgtagggcctgtcccccagccccaggactgcccaccgtccacctgcctcaatgggggcacatgccacctggggacacggcaccacctggcgtgcttgtgccccgaaggcttcacgggcctgtactgtgagagccagatggggcaggggacacggcccagccctacaccagtcacgccgaggccaccacggtccctgaccctgggcatcgagccggtgagccccacctccctgcgcgtggggctgcagcgctacctccaggggagctccgtgcagctcaggagcctccgtctcacctatcgcaacctatcgggccctgataagcggctggtgacgctgcgactgcctgcctcgctcgctgagtacacggtcacccagctgcggcccaacgccacttactccgtctgtgtcatgcctttggggcccgggcgggtgccggagggcgaggaggcctgcggggaggcccatacacccccagccgtccactccaaccacgccccagtcacccaggcccgcgagggcaacctgccgctcctcattgcgcccgccctggccgcggtgctcctggccgcgctggctgcggtgggggcagcctactgtgtgcggcgggggcgggccatggcagcagcggctcaggacaaag

SEQ ID NO: 268692 - DNA, 176 bp, Homo sapiens
  chr16:4437960-4438136
  hypo
gcccacctgcgtgccgcagctcctacccaagcgaggtgtccaaggtgagggaggccagggcgctggagaagaaccgcgtgtcccacagcttcacttcgcgctcacgcatctgcagggagggcgagagaggggctcagaggggcctgtccctcagccccacccggggggctcccagg

SEQ ID NO: 268693 - DNA, 99 bp, Homo sapiens
  chr16:4438391-4438490
  hypo
gaggctctgagacccggcagcacagccaggccgtatatggacaggcctggaactggccctcagtcccccgcctcccattggtttcgtccccgcccaaag

SEQ ID NO: 268694 - DNA, 493 bp, Homo sapiens
  chr16:4442609-4443102
  hypo
agggcaggcggccccgctccctgacccccagccacaccccactaggcaggaaggaggattgccagagaaggagctcccagaaggcctctccctcgagccggcccctcggctcacaccggccctggctgccagcagcggttttcctaatagaagccaggtgtgggccagatgccctgggcggaagtggggggcagggccacacggagagcggcattccaggcctgctgcccccgcaccagggcccgagcacaggccccagccagcagctggaaggggtgggagccacccacgctcttcccaggtctcctcgccccaaagccccgcaggggggctccctccagaaccagatcctctccctctctcttcgaggagctgggagccccttggatagcagccactctatccccacctcggcatcagtcaccgccccagccctgctggaagaggaggggagaggaggaggaaggctggaaagagggggcggaggagggga

SEQ ID NO: 268695 - DNA, 397 bp, Homo sapiens
  chr16:4461759-4462156
  hypo
agagactgggcccgcggccgctgcagctggacagtgagaggcgaggccagctgggctgctctgcctccatctgaggcgagcaaactgttccctcgaggcggacagcctgccaggcaggctgctggacgcccccagaagcagctgcggcacacaaaaggtctctttgtgagggcccatctccacccctgcagcccaacacagcgacctccttggagggccccgagcggctgggctggggaggatgcctggtggagaggggactccagcagaagacggagggctcagagccatccaacgtggagtcctcggcagggacagggagccagcatcagcctggagcctggggcggccactgcacaccccgctccatccagctcacaaccggagcacacagctt

SEQ ID NO: 268696 - DNA, 197 bp, Homo sapiens; identical to SEQ ID NO: 216734
  chr16:4478613-4478810
  hypo

SEQ ID NO: 268697 - DNA, 249 bp, Homo sapiens; identical to SEQ ID NO: 216735
  chr16:4511753-4512002
  hypo

SEQ ID NO: 268698 - DNA, 248 bp, Homo sapiens
  chr16:4513532-4513780
  hypo
acgttgacgatgaacgaatgaatttagatgtactgcccagaggtgtgggcagccctggacacaccctccctacgggagctagaaagccctgacaaggatgcctgagtcacctggggcgggaggcccaccttggcatcgtgcacgaccttgcgggtgtgcttggtgagcagggcagcgtactcctcggccgtgtgcctgcaagtgctcagcccgatgttctggccgacgtatttttctggcatcttcaa

SEQ ID NO: 268699 - DNA, 92 bp, Homo sapiens
  chr16:4527578-4527670
  hypo
tgttttgttgatggcgctacaaaccagacaaggtggagtgtgattgaagaaagaaacgctggccggtgcagtggctcactcctgtaatccca

SEQ ID NO: 268700 - DNA, 144 bp, Homo sapiens
  chr16:4557896-4558040
  hypo
gctgcccagaagtacgtggagcggatccactacatagggcagaacgagccggagctactggtggcccatgcatacacccgctacatgggggatctctcggggggccaggtgctgaagaaggtggcccagcgagcactgaaactc

SEQ ID NO: 268701 - DNA, 45 bp, Homo sapiens
  chr16:4606718-4606763
  hypo
ctcagcaatgtcttcgaccacgtggtgagccgcctcgacaagttg

SEQ ID NO: 268702 - DNA, 116 bp, Homo sapiens
  chr16:4644648-4644764
  hypo
ttcgggggcagatcgggtcgggggctccctaacccgggacctgggccatccaacaggccgaggtggacatcctgggcgtggatgggatcctgtacaaaggccgcgtgaacagccag

SEQ ID NO: 268703 - DNA, 152 bp, Homo sapiens
  chr16:4644981-4645133
  hypo
ggggagggagaccgcgggagcgaggatctgctgttcccgagatcaacagctgaccagagagagggccgtggccacaggaccatggcctgtgacgaaggacgatgagctaggaaaggtgctgggctggtgccaagggacgccagtccacggag

SEQ ID NO: 268704 - DNA, 246 bp, Homo sapiens
  chr16:4665340-4665586
  hypo
cacggatggaggtccgcaggcgggggcctcaggttcgtgcataggcgtttttgccaaggcccaggaacggtgtctgaaaactgagtgcctaatgtgtgcaggcgcctgagctgggaccagagccagtcacgtccacgtcgccctcgttgctctcggtggcacccacgcccctgctctggcgggaattaggagcccagaggccggggccacagatctgtgcatgggcgcaaacgccaggccacagac

SEQ ID NO: 268705 - DNA, 100 bp, Homo sapiens
  chr16:4671351-4671451
  hypo
atctcaaaaaaaataaaataaataaataaataaataaaaataaatgaatccactcagatgttgataatggaacttggaccaaatcgggaagggcctgtct

SEQ ID NO: 268706 - DNA, 92 bp, Homo sapiens; identical to SEQ ID NO: 216736
  chr16:4689936-4690028
  hypo

SEQ ID NO: 268707 - DNA, 526 bp, Homo sapiens; identical to SEQ ID NO: 216737
  chr16:4704660-4705186
  hypo

SEQ ID NO: 268708 - DNA, 455 bp, Homo sapiens
  chr16:4717781-4718236
  hypo
tttttagagctttgcggttccctgtgtgtgcaccactgtgcgtgctcccgctctgtctttctaactcagccgggcctgggagagcaggaagctgttttgtctgtcttgattcttgctgccaggtgatacttctcggtgtgcaggaggcccttgtccatcatctgaacttggctgattggcattcagcttgagtgtgcttgagaccaaccgaggagagttgggttctgtgggtcagcagagggtccccgggctgtgtgttctggaggcctcagatagttgcacagccaggcctgaggccgtgttttcagaaatcccggctctttcgctgtcaagtggccccacccttttttttttttttcttttttctttttccagctgtgggcatggattggctggggcagggtggccaacccaggcggccacgcaggggtgctcagaggcgccagcttgaccac

SEQ ID NO: 268709 - DNA, 100 bp, Homo sapiens
  chr16:4719477-4719577
  hypo
tagagctctaagctctgggacgacgggtccctgtcttgggtgagcatatatgttttgcgtgcccgccatgtacagggacgcctgcaggccctgagttctg

SEQ ID NO: 268710 - DNA, 138 bp, Homo sapiens
  chr16:4723493-4723631
  hypo
ggcagccctcggacgacgagaacagcgacaacagcaacgagtgtgtggtgtgcctgtccgacctgcgggacacgctgatcctgccctgccgccacctgtgcctctgtacctcctgcgccgacacgctgcgctaccagg

SEQ ID NO: 268711 - DNA, 226 bp, Homo sapiens
  chr16:4731810-4732036
  hypo
tgtgtggtggcgcgcgtgcggagcgggtgtctttgtggtttcaaatcagtttgtgatgtgttctgtgtggcgattccccagaaggactcggagaccccgtatcaggttagactcatgggtaaagtttattacggcaaagaacgcagcagacgaggcaggaagagcgtccgggcagctggaggctttgatcccccgaccagggccacaccggcgtgcaggcgcatac

SEQ ID NO: 268712 - DNA, 67 bp, Homo sapiens
  chr16:4748493-4748560
  hypo
aggtcctcgcgggcgcggtcctgctccagcaggcagctctccaccacggcgcgcagctcctgctcct

SEQ ID NO: 268713 - DNA, 101 bp, Homo sapiens
  chr16:4748901-4749002
  hypo
gggcaatggcggacgtcatcttcctcttgggcccaaacagcctgcggggggaatgtgaccaggatatgcctcagcgtcccaagagcgcttacatgagtggg

SEQ ID NO: 268714 - DNA, 336 bp, Homo sapiens
  chr16:4779953-4780289
  hypo
gagaggaagttccccgagatctcttaccgctgcacacactccttcaccacttcatactggccaatggaagcagctgtgtgaagatccagggggacatccagctcctccccgctgacctgtgtcccgagcccgtgccacatggacaagctgcggttcaggagttccggctcgctggcttcatcgctgagctcggacatcactgaggaggaaggcccaagggttagatctttcctggctggttgttccagggcatgaaacaggctggtcctgcccctgctacaccactgcactagcagactgataacccagtgcagtcaaccccgggagtaactcaga

SEQ ID NO: 268715 - DNA, 291 bp, Homo sapiens; identical to SEQ ID NO: 216740
  chr16:4787716-4788007
  hypo

SEQ ID NO: 268716 - DNA, 142 bp, Homo sapiens
  chr16:4795507-4795649
  hypo
gggccccagggtcccgtaaggcccctctatatgcctgccctccccacactttggttgctccgcacttgaggaatctgagaaccagtgaatcccttttcacctgaccagcagtgggtttctgtgtctggaaaccaaaagtacc

SEQ ID NO: 268717 - DNA, 592 bp, Homo sapiens
  chr16:4802455-4803047
  hypo
tgcttgtgcaggtcggtgccccggcggaagccccggccacaggccgggcaggtgtagggcttctcacctgtgtgcgtccggcggtgggcgctgaagtgcgagctgttgttgaagcgcttcccgcactgggtgcaggcatagggccgctccccgctgtgtgtcctgcggtggatgaccaggctggagctctggctgaagcgcttcccacactcggggcacgggtagggcttctcgcctgtgtgcaccctctggtgcgtgctgaagttggagcggtcgctaaagcccttcccacagactaggcacttgtaaggccgctcgcccgtgtgtgtgcgctggtgcttggtcaagtgggacgtcttgctgaagcctttgccacattcggggcaggtgtacggcttgtcagccccatgggaagcccgtcttcctggtggggggccgcctcttggctgatcaggcctgaccaagcccctgactggggctggcctctgacctgggagcgggtggccaggcccctggcatcgtgccgagagcactcggtaccactccattctcaacggggcatcctccctgccatcaccgccgtcctccaact

SEQ ID NO: 268718 - DNA, 134 bp, Homo sapiens
  chr16:4841348-4841482
  hypo
tggatggaatcacacgtcaacacggcgataatagcacagggcattcagtgcacgtttctgtgagccttccatcatgcttcgacggctctgacatcgatgatcagttcatttcatcctcacgacactgggaggag

SEQ ID NO: 268719 - DNA, 93 bp, Homo sapiens; identical to SEQ ID NO: 216743
  chr16:4845270-4845363
  hypo

SEQ ID NO: 268720 - DNA, 455 bp, Homo sapiens
  chr16:4845962-4846417
  hypo
ctgctgctgctggtcgtcgcccactgctgctgctgcagctcccccgggccccgcagggaaagccccaggaaggtgagcccctggaaggtgagccctgccggcctctgggacctgcacggaactgtactgggggtggaggcggaaggtgaggggagtggcgggaagggtgctcatccccctagggaacaacgagcgaacctgcttggtcccgctgtgcttctcgtgcaggaaagacccaagggagtggataacttggccctggaaccctgaccctgtgtctcctgcccggtggcagtaacaaagccttctgtctgcccagagcctgagtctgcagtgtcttccagtccccgtctgggtgggtgacgcgggactcgccgccccactcaggtggccacctggcctctccaagccttcagtcagcacgactgtgccaggtcatcctcagtcacctagct

SEQ ID NO: 268721 - DNA, 34 bp, Homo sapiens
  chr16:4846717-4846751
  hypo
aaaaaaaaaaaaaaagactcggtggcccaaagtc

SEQ ID NO: 268722 - DNA, 32 bp, Homo sapiens
  chr16:4887144-4887176
  hypo
catacatgtagggcccggtgcggtggctcatg

SEQ ID NO: 268723 - DNA, 243 bp, Homo sapiens
  chr16:4900508-4900751
  hypo
gatttatttccacaacccagcgcatcacaaatatcctgagggccttggagatttcttttagggaaatctcctttaacatcttagtacgtgttgggagatggtcttttgcagcgccagcctgttacactgctaatcgttttgccgcctgattagaattattttaactcttcatttgtagatattttgttcccttatgtgatgttataagttgattttgtgatcataattcgacaaatgaatatt

SEQ ID NO: 268724 - DNA, 765 bp, Homo sapiens
  chr16:4920096-4920861
  hypo
acaagacagggtttgactgccgttggctcctagctttcctctccacgtacggtgagctgatgaagacaggagttgcagtgagctgcagccggtggtgactgtgttttgttcttcagcatagaggcgcagactcgggagctgagcagtcaggtccgctctggggtgtatgcctatcttgcgtcattcctgccctgcagcaaggatgccctgctcaagcgtgctcggaaacttcacctctatgaacaggtgggtgactctagagtgaagccctttggctttggggtcctggcggaggggtgactgagtcttaagcaatgatgcgtctgctgccccactgcctccttgtgatcaccccatcatgcgtcctgagcgtaagagcgatgtgtaaacctgccttgaattgtgtcccgctcttcgcaggggggccgtctgaaggagcctctccagaagctcaaggaagccattggcagggcgatgccagagcagatggccaagtaccaggacgaatgccaggcacacacgcaggcaaaggttgccaagtaagtttgtcctggcgcttgcaggtgcaaccctcccgtcttgcctcttcccctcccgtttctcggtgtgtactgccgtttcccaaggagcctcttggctcttctttggccttttctccttctctgtgaagtcccagtagtgcagagtgaggggagaggcggtgggcaggagcaccttggggccccatgtaattctattcaccccgtaggatgctggaagaggaga

SEQ ID NO: 268725 - DNA, 158 bp, Homo sapiens
  chr16:4931479-4931637
  hypo
tccagctaagtgatcaggcacgttgagagtatacggtgtcctcagcacatacacctgtgggaaaacggaccgctcttggctcctgactcccagggtacagcgcccagtaactcatccttcattcagaggtttgctggccttcccggtttcccaaggag

SEQ ID NO: 268726 - DNA, 347 bp, Homo sapiens
  chr16:4931953-4932300
  hypo
cccacgtaccattgcgcgtgcagctggagcagaataccctcatttttaggaatctagtgatgcctcttgcctcagggaaacgtttctttgatggggagtttgagatttcttttccttgtttatgctttatttgtggtaatgaaagagcgaatgactgaacagccatggcaaggcagacctacaggcgaggccgcagcagagggtggggcagagcagcctcggggtctgggggctgcaggggtttccctggcgcagcgaaagtctctgagcacttaccgggcgtgaccgtttcttaggtgtgagaggggctgtggcttttgtgcagcgactatgttggtgttaggggt

SEQ ID NO: 268727 - DNA, 511 bp, Homo sapiens
  chr16:4933220-4933731
  hypo
gtgcctgtctcatatgtgggcgggactctgagcagcctggcagcgagggtatgtataaaatgcttggcctgcaccagggcaagggagaggacgacaccaaggaggtcactgcgtcgtaggagagggccagcgtctgccgttacgaagagttgcaagagctgtgcctacttctgcccagataccaagaccgccagctcctggatggacatatccttgttgacatagcggtcatactgagcaggggtcagcctgccactctgcagggcctcttcgatggagaacttcttgccagacttcctgtcgtgtatcactgaggactccccattgggacccttcactgagatctcctcccagtcgcactcctggcttctgagtttcacgaacatgttccagtcaatgagcccggcacggtgggcttcctccggggacagctcgcggcctgtgtcagggtggatgactacgatggagcgccgcaggtggttctcccgctgctcccgcttgacggccacgg

SEQ ID NO: 268728 - DNA, 80 bp, Homo sapiens
  chr16:4960036-4960116
  hypo
caacccaatcgcaccgggctggcgctggtggaaggtttaaagagaaggtgaccattccagcggctcgtgagtccctcagg

SEQ ID NO: 268729 - DNA, 157 bp, Homo sapiens; identical to SEQ ID NO: 216751
  chr16:4971735-4971892
  hypo

SEQ ID NO: 268730 - DNA, 167 bp, Homo sapiens; identical to SEQ ID NO: 216752
  chr16:4980311-4980478
  hypo

SEQ ID NO: 268731 - DNA, 366 bp, Homo sapiens
  chr16:4981429-4981795
  hypo
gaagagagctttgtcccacccggaggcagaaaggggcaccaggtggcctcccgggctccagaggctgcagcacagcaacccatcagaagccgggagaacaaagaccagaggccgtttccccattcgctcccaagacaggccggggcaggcaggctgggaggatgcaaggtggtgccggtaacaccggcacagacctgccgggagcagagagcagctgcacgctgggaagccagggttctcttccccagacgaggagctttggaagctctctaaagcagcttctcccccaggtcccctacttccagggcctcccccaaccacacccttagggtattgcttaaagggtgtggacggagctgagtctct

SEQ ID NO: 268732 - DNA, 207 bp, Homo sapiens
  chr16:5084818-5085025
  hypo
cttgatactgttgcggtcttgccagtgcaccttaatatagcagtttctccttgtctgaactagtcccggggttctttgtcctacctccaagaaaactaaggagcgtggacacaagggtggggttggagcgaacgtttaataagggaaagaagaaagctctccaaagtggagacgggagtccgagtggattgtcgggttacagctgaa

SEQ ID NO: 268733 - DNA, 204 bp, Homo sapiens
  chr16:5406087-5406291
  hypo
tctcaagtaaaaataaaggaagacgtgaggcatagacaggcacagaggggaaggccgtgtgcaggtggatgcagagactggagtgacgcatctaacagccaaggggtggcaaggatttttggcagccaccaggagccaggagggaggcatggaatggatgctccctcagagcctccagaaggaatcatccgtgatgacaccttg

SEQ ID NO: 268734 - DNA, 78 bp, Homo sapiens
  chr16:5481660-5481738
  hypo
accgtgcccagccgctggtttattttttattattatttgccactgcgattgtcttgcgggactacccatagtcatgca

SEQ ID NO: 268735 - DNA, 206 bp, Homo sapiens; identical to SEQ ID NO: 216754
  chr16:5628622-5628828
  hypo

SEQ ID NO: 268736 - DNA, 380 bp, Homo sapiens
  chr16:5703273-5703653
  hypo
gtggggtgctgagccgtgtgctgggcttcagtgcagaaggtggggtgctgagttgtgtgctgggcctttgtgcggaaggtggggtgtggagccatgtgctgggcctatatgcggaaggtggggtgctgagccgtgtgctgggtttctttgaggcaggtggggtgtggagccgtgtgctccacctttgtacggaaggtggggtgctgagccgtgtgctgcgtctttgaggaagttggggtgcggagccgtgtgctgcgcctttgtgcagaaggtggggtgctgagccgtatgcgggcctggggtgattgcctctccctgacctcctttgcctctccctccgctaacagaccagaagcctgttctgccgcatgtgcagctgc

SEQ ID NO: 268737 - DNA, 31 bp, Homo sapiens
  chr16:6838744-6838775
  hypo
ggattacaggtgtgagcgaccgtgcccggcc

SEQ ID NO: 268738 - DNA, 99 bp, Homo sapiens
  chr16:6860826-6860925
  hypo
gtgccgggaaaggtcgccatgatccaatcacaagcctccctcaacatgtggggattacggttcaagagctgatttgggtggagacggagccaaatcata

SEQ ID NO: 268739 - DNA, 34 bp, Homo sapiens
  chr16:6885177-6885211
  hypo
aggcgtgagccaccacgcccgaccggcctgactt

SEQ ID NO: 268740 - DNA, 32 bp, Homo sapiens
  chr16:8410251-8410283
  hypo
tttttttttagacagagtctcgctttgtcgcc

SEQ ID NO: 268741 - DNA, 252 bp, Homo sapiens; identical to SEQ ID NO: 216755
  chr16:8722899-8723151
  hypo

SEQ ID NO: 268742 - DNA, 297 bp, Homo sapiens
  chr16:8870109-8870406
  hypo
cttcaagagaggaggcggggcgcctggggtaagtgactcctgcagggtgtgcatgtgtgtgaagccttccaacacccgttcctcattccagccctaccggatcttcaacacctggctgggggacccgtccaagaacctgttgctggctgaggtcatcaacatcatcaagcgggaggacctgctaaataatgcagcccatgccgggaaggccctgctcacaggactgctggacctccaggtaacaccccctcccctgccccgcccccaccacccatggctccccgcagcagcctccgg

SEQ ID NO: 268743 - DNA, 442 bp, Homo sapiens
  chr16:8995949-8996391
  hypo
aacttgggtaaggtcgctccactagcagccagctcgggatcaactgtttccaggaatattgtccaagggttttcattatcactgagctcaatcatctatttccaaaagagacgctgattttagaagagtctaatggcttaggtgacagagcgaaaaactacagtcaagtattgaagaaaacgtccaattctagttaagtggaccaaaagggaaacaagctgcactaagtgcagaggactaacgccttctgcacggttccaaaccagatacgctattaacaatatttactgttttattgccgtcggcttcattatctaacattgctggtcgttttgttccattactccttgcttgcatgggccacaatcgaatttgatcttgtggaaatccctgaaaaaaatattaagagtagattaaaataaaaacacgctcatattttagt

SEQ ID NO: 268744 - DNA, 536 bp, Homo sapiens
  chr16:9005257-9005793
  hypo
taacattaagagtgaaagggcgagccacatgctgagtgacaagctctcaatccaacacggaattgtatatccagagtgtatggagagctcgtcctgctccggtcatgaaggaaaaacgcaactgcacaacactgaaaacagcgctgtcacgctccggacacatgcggtacaggacagggatccctgaagggacaaatgagagccccgtgatgggcccagctctgctgaaagtttacaggctgcagcccggagaaggcaaacccagacagagccaagaagtgagaatgagaggagctcaagggagcgggaacctgctgggcagagtagcctaaagcagaatgctgcccagaaagcgagatctggggatgtgcagtttcttccgaagctgtcagtgagaactgatcagtgaactcgaggaaattacctggggcaaggaaaagaaccagcaagaggatgaggattggggggaacaaccttcagagctcacgacaggctgggaagtctgtgttcccaccagccaccgtggaaaaaccgct

SEQ ID NO: 268745 - DNA, 199 bp, Homo sapiens
  chr16:9009860-9010059
  hypo
gtgtgtgtgcttctgcgtcttttatcacaactggaagaatgaggatttgctagtgattagtgatggcgcggggagagtaatcaccgcatgctgaggtctgctcaatgagaacctcgctgcacaggaggggtctggacactggagtaacaacagaagtcaccactgtacagtgactcaggaccaacgggacagccaacaa

SEQ ID NO: 268746 - DNA, 129 bp, Homo sapiens
  chr16:9013680-9013809
  hypo
ggagacacctactgcgcagtaccattcaccagcaccttgccactccaggggttagctcccagccttggaaacactcaaatacacctaacggccttgtcacccctctttactcctcgctcaccatgttag

SEQ ID NO: 268747 - DNA, 31 bp, Homo sapiens
  chr16:9016042-9016073
  hypo
cattaaagaaaatgaaagtacggccaggtgc

SEQ ID NO: 268748 - DNA, 120 bp, Homo sapiens
  chr16:9062111-9062231
  hypo
aaccttttctaattctggattcttatcagggaaatgggaaaacagtctacctgaaaccataaaatatcaaacgcttcaaaatccacaggttggccagtgcattcgctcacgcctgtaatc

SEQ ID NO: 268749 - DNA, 135 bp, Homo sapiens
  chr16:9218839-9218974
  hypo
gtgaaaaagctaaggattaccgagtgcttaatgcctttgccaaccccatcgggcaggttctgatatctccattcacgcgatgagacggtctgtgtgacccaacggcgcccctacgtggccccaggctggatactg

SEQ ID NO: 268750 - DNA, 80 bp, Homo sapiens; identical to SEQ ID NO: 216760
  chr16:9222467-9222547
  hypo

SEQ ID NO: 268751 - DNA, 175 bp, Homo sapiens
  chr16:10031818-10031993
  hypo
tgcaaggtgtgcatcgggacctctggcctctccatctgcccgtagcagctggccttggcctcggggatgtaggagaacttctccagcatagaagatgcagcggtggttaggatgccaatgccgtccctcactctcgcctccaggctgtagtcccagtcatcgtaggagacagaaa

SEQ ID NO: 268752 - DNA, 97 bp, Homo sapiens
  chr16:10517770-10517867
  hypo
ttgttccggcacacgcatagaaatatagagtgtggagcaggaatcggggctgatagccttcatagctgagagccacgaagagttttacccacatatt

SEQ ID NO: 268753 - DNA, 186 bp, Homo sapiens; identical to SEQ ID NO: 216761
  chr16:10631325-10631511
  hypo

SEQ ID NO: 268754 - DNA, 103 bp, Homo sapiens
  chr16:10823580-10823683
  hypo
agcaccctccaacccgcccaggagcagctacacagcctcactcatccctgttcacccagccccagatccctgcaagcacgggaggcaacgtgatattccgagg

SEQ ID NO: 268755 - DNA, 257 bp, Homo sapiens; identical to SEQ ID NO: 216763
  chr16:10868652-10868909
  hypo

SEQ ID NO: 268756 - DNA, 38 bp, Homo sapiens
  chr16:10913111-10913149
  hypo
agcactggtgccatcgtagctcactgtggcctcaaact

SEQ ID NO: 268757 - DNA, 38 bp, Homo sapiens
  chr16:10913329-10913367
  hypo
ttacaggagtgagccaccacacccggcctcacctgcct

SEQ ID NO: 268758 - DNA, 199 bp, Homo sapiens
  chr16:11000393-11000592
  hypo
tatggtgccgagcccgcaggcccggatggcatcctagtggaggtggatctggtgcaggccaggctggagaggagcagcagcaagagcctggagcgggaactggccaccccggactgggcagaacggcagctggcccaaggaggcctggctgaggtgctgttggctgccaaggagcaccggcggccgcgtgagacacgag

SEQ ID NO: 268759 - DNA, 62 bp, Homo sapiens
  chr16:11037115-11037177
  hypo
atgcatcgcttaatcggaggtatacaaggcagtgtagtatgtatgtgcgtactttttacaga

SEQ ID NO: 268760 - DNA, 54 bp, Homo sapiens
  chr16:11072431-11072485
  hypo
actgaggctttgagccggagggagactcctttcaaagcacgctgcttttccttt

SEQ ID NO: 268761 - DNA, 314 bp, Homo sapiens
  chr16:11072844-11073158
  hypo
ctcctggaggcctctcctgccggggcgtccagtgccccagctggtacaaatgaacgtgcttggtaacttaaggagcaagttctcgtgggtcagcctctcatccgtgagtaatggtgaaaggtttctcagatggaaaaatagtgtccttgcaaacagtattgagtgggattttgcggagtggacttttgagtagcaccaagaaaggacagccctagggccgtggaggaagtcagtgggacaggacgcctttgttcacacagaaggcttttggctttgtgtattttgtgctgctcgcttgtgtgacctgatctctc

SEQ ID NO: 268762 - DNA, 196 bp, Homo sapiens
  chr16:11085470-11085666
  hypo
gaaggagactggaacctcttcgtctttgtgtccccatgtctagcatggttcctgcagtcaacgttgattgtcttgatgtgacaagtctcggtacgggaatcaaacacatatctctaatgagcggtggacatccggtcttggccagtgtcagagtccttgaaactggttttgctgcgggatgctttgcctgatggga

SEQ ID NO: 268763 - DNA, 285 bp, Homo sapiens
  chr16:11118477-11118762
  hypo
tcccctctggatagcggcttccgcaggcagagcctgtctctcatttgtctgtgtcctcagtgcgtggtgctggaccaggcacacagttgtggcctaaagagctgtgtcaaaggcagctagcaccccatgtgcaggttagagaggggaggtgttcacccttgtgcaccgtgaggctcatacatgcccctcctcttttccagacccttcctggatatggtgtaccacgcgctggacagcccggatgatgattaccatgccctgttcgtgctctgcctcctctatgcc

SEQ ID NO: 268764 - DNA, 356 bp, Homo sapiens; identical to SEQ ID NO: 216768
  chr16:11151037-11151393
  hypo

SEQ ID NO: 268765 - DNA, 53 bp, Homo sapiens
  chr16:11157538-11157591
  hypo
agcagcaggtctctcggctgggtgtgacagccgagctccggctgtcataaaag

SEQ ID NO: 268766 - DNA, 186 bp, Homo sapiens; identical to SEQ ID NO: 216769
  chr16:11174343-11174529
  hypo

SEQ ID NO: 268767 - DNA, 807 bp, Homo sapiens
  chr16:11178512-11179319
  hypo
tagtcttctgaactcgccggctatatgagtcatctccactgtggagggaggcaattttaaactggaaaggtcaatcgacatgtcagaatatctagtaaatcattcgcgttccacctggtgccccttccattcccctgaaaaagcctgcccttgttcagcgcctctcgaagacactgtggagaaagaggtagccggggctgggtggtgatttacctcgaggaaaattaatatggtgccatcaattctgaaggcagaaagggcccatggccagaaggctgcacgcaggctggaataactcacggcccatgagggccctgagtttggggaggcctctccttggccctggatataaatcagcagcccttttgcagagagagagtcggagttttgtcaggcctgggggaagggagccagcaccagaagcccctcttccccaggagcctgtcgttgtctgaagggttgaaaggcacctctgtgccacccttctcggccagcaccaagcactggactcatttacagacgaggccatgaagcccccaccctgggttccaggaggatcacgggaagggggctttcagcctggctgtcagagaagaatgtgacaggcccattttcactccacaggccttaattggatggtcagagggcacatctgtggcttataagaaacagatggcgggatgggttagtgaaggagaaagcacgcttgcttcaggttgagtgcccgtggaggtgctggggcagcacgctggcaagcaggcagactcggccaagacccagctttgtcacgtgcgtgaggccttggct

SEQ ID NO: 268768 - DNA, 234 bp, Homo sapiens
  chr16:11192355-11192589
  hypo
tcctaagagctgagcgtgagggcgttagtgtggccatccataatggtatttgggatctgacaagtctccaaaccacttgtccatagaccctccagggccctgcaccctgagaaccagcctggtggggctggagtcctaaaatctgcactttgtcccagtaccgggtgccccaggctgccaatgggcctcccttcgaggaaccctggatctctcccaagacgctgtgtgtgagct

SEQ ID NO: 268769 - DNA, 346 bp, Homo sapiens; identical to SEQ ID NO: 216772
  chr16:11192848-11193194
  hypo

SEQ ID NO: 268770 - DNA, 616 bp, Homo sapiens
  chr16:11219553-11220169
  hypo
agcttccattccactcgaggagcccaggctcaaacccctttctccttggtctcaaccttggcccgaagccctcacttggcttccgcttgtgcgttgagcctcagtgggaactttgatgttccactggtctctgcagcttgaggctgcctgccgcccacttggcgtctcccaagtgatgtgcctggcagggccacagccactacgatgtccccccccccaaattctcaccacccccctctatcccacatgctcagagtgaaccatgctattgtttgaccgtagccctcctggacctcccaatccagcccaccactgaagtcctggggtttggactcggctcctccacctccactcagcacctgcctttccgcttctacgaccaggggcgccggggcagcagcgaccccacagtgcagcgctccgtgtttgcatcggtggacaaggtgccaggtgagccagccccccgccctgcgccacagctcgttcatcatggtgggcgttcaaggtctttctctctgtggagcctgtgtgagctgcccttcctctctcagaagccccgtcggctggcagcaccagcttcttagaatttgtcaaagcacagcgcaagattaaacac

SEQ ID NO: 268771 - DNA, 41 bp, Homo sapiens
  chr16:11225773-11225814
  hypo
agggcctctgttttcgtgcttccctccgcctggagccctct

SEQ ID NO: 268772 - DNA, 333 bp, Homo sapiens
  chr16:11232440-11232773
  hypo
gtgatgcccgtgggcggatgagaaaagtcccacaggctggggtgcggccttccttacctttctctggccatttgccacttacttgtactataggattatattgcttgtttcaaaaaacctaaatgaccactgttttcactcaacagcgtatcctggagtgtttttcattttagttcgcaggcgcaccctcattcgattttgactgctgcgatcatctggtcaaaccactgttcattgagccagtcccctactgatggatgtttaggtggtggccaattttttgtcctttaacaaataggcatctccaagtgcccttgcgcaagggtttcctca

SEQ ID NO: 268773 - DNA, 213 bp, Homo sapiens
  chr16:11249099-11249312
  hypo
tgctttcatcctcacgaaccctgtaaggtgtggtggtgtcactctgctttagagtgacaacagtgctttagaggacacaggctcgtggggtgaacaggtcccctgctgtcacatgcccagagccacggcactctcctcaccaccgtatcctgtagccagagtaaaagtgacaagcctaaagccaagttgctgctcttcaggtttctcccctgc

SEQ ID NO: 268774 - DNA, 49 bp, Homo sapiens
  chr16:11249342-11249391
  hypo
ggttagccatgtcccacaggtctgccagggcagacgtcaacagagccct

SEQ ID NO: 268775 - DNA, 226 bp, Homo sapiens
  chr16:11249644-11249870
  hypo
ccaccctgcaaagtcggagtcctggcgaacacaagcaaatggaatgggtccacaggcatggtgctctctgccttgggtgcatactaagtatgtgtcaacggcaggtgccttttgcagagaatcaagactaattccctggcccctttgtacagtgccacctcctagaacacacggagcaggccaaacatgtcagtgtaggatacacactgtacggcctccctgcttc

SEQ ID NO: 268776 - DNA, 104 bp, Homo sapiens; identical to SEQ ID NO: 216776
  chr16:11265077-11265181
  hypo

SEQ ID NO: 268777 - DNA, 134 bp, Homo sapiens
  chr16:11267978-11268112
  hypo
ttctatgatctgtcgctgtgttttccctctagtcaggagtggcaggaaaggacgccgacgagtgttcagcctgtcggaggccgacagtcatggcggccactgggtttagtgctccgaacggcagctgccacggc

SEQ ID NO: 268778 - DNA, 393 bp, Homo sapiens
  chr16:11272123-11272516
  hypo
cacagggcgcagtgcgacggggtgtctcaagggctcagtgtgtttccggtttttctcccccaatccagatgcccccatgagtccagaactgcctaagcctcaccttcctgaccagttggtaatcgtcaacgaaacggaagcagactctaagcccagcaagaacgtggccaggagcgcagccgtggagacagccagcctgtcccccagcctcgtccctgcccggcagcccaccatttccctgctctgcgaggacacggctgacacgctgagcgtcgaatcgctgacccttgtccccccagttgacccccacagcctccgcagcctcaccggcatgcccccgctgtccacgccggctgccgcctgcacagagcccgtgggcgaagaggctgcatg

SEQ ID NO: 268779 - DNA, 596 bp, Homo sapiens
  chr16:11275089-11275685
  hypo
cctcatagctggggcgctcccagacaggccagtccagacaggacacgctgggcccctggcatccagaggaagagccaggagtgtgggaaggcccacagtgggggctgtggcttctgacactcaggtcatagcctcagaggtctgaggtcagcccccacagacccatccggcccgccccccaagtccctgcagagagcacttagagttatggcccaggccctggtccacccttcccctgtgcacctccggctgggtttgccaagtcagggagcagggctggccgcaggaactcccaaaccttggctttgaatattgttgtggaggtgtgctcgtccctttctggacgtgcaaggtacctgtcccagcaggtcagatggggccagctgaggcgctcccccaggcaggaagggccagccttcaccatcgcgtgggattgggaggaggggcctccgtgagcagcccctcctctgccgctgtcccagcccagtccctctcccggagccttggcagcctcccacaacccagacacttgcgttcacaagcaacctaaggggcaggtgaagaagcgcagccctgccagacgcgctagattcctc

SEQ ID NO: 268780 - DNA, 173 bp, Homo sapiens
  chr16:11282895-11283068
  hypo
tttgcatgccccagcggatggtaggaaccactccgcttgttcattcaatccccgtgtttgttctttggctccactctgcagcactagctcccgggccaggctgggcgtggcgtagatggaagatggtaaagaagccagctagaaaggcaggaacgcagcgtgacggtgccata

SEQ ID NO: 268781 - DNA, 119 bp, Homo sapiens
  chr16:11323718-11323837
  hypo
ttattcccatttttcagctgcgacgcaagagctcaagaagtgaactggctcccattggcacggcagaaggagccgtggtgggactctgatgtggagccgccttgagctgcagagccagg

SEQ ID NO: 268782 - DNA, 119 bp, Homo sapiens
  chr16:11344316-11344435
  hypo
tctacaggaccccacgtgcccgggcccctgcccatccctcccgcttcttcacccctcccactctgccagccttcttgaacgggccgaactccttcctgactgagcgcctttgcactcgc

SEQ ID NO: 268783 - DNA, 52 bp, Homo sapiens; identical to SEQ ID NO: 216777
  chr16:11370335-11370387
  hypo

SEQ ID NO: 268784 - DNA, 387 bp, Homo sapiens
  chr16:11398035-11398422
  hypo
ctcccccacccctccacatgcgttatgtttcagttgccggaattgaaatcacgttgccgttccctctgcctggaatgcttttctgcattagggcatggctgatgccttcctagcttccagatctcagcaaagtgtcctggggctgctgtgcctggaagggacacattttgggtgcctccttacattatccgcccataccactggacaatcgggtgctctgtcttgcctctctgtgtgctagctgcttctctccaccaaatcacaatatccttaagaacaaggacgttgttttgttcatggcttcagtcccagcacctagcaagtcgtaagtgcttagaaaataatgtgttcagaggccaggcgcggtggctcacacctgtaatccca

SEQ ID NO: 268785 - DNA, 47 bp, Homo sapiens
  chr16:11443253-11443300
  hypo
aatttgtcccatcgcgtgccttcgagttcatccggctggctgtgtgt

SEQ ID NO: 268786 - DNA, 121 bp, Homo sapiens
  chr16:11541944-11542065
  hypo
ggctgaagagagggacgggccagcaggaccaagctgcagacctgccttgcaggaaggcaagaggtagccccccacaacctgcccatcacccccagaaatgactatccgagaatggctactg

SEQ ID NO: 268787 - DNA, 160 bp, Homo sapiens; identical to SEQ ID NO: 216779
  chr16:11622039-11622199
  hypo

SEQ ID NO: 268788 - DNA, 161 bp, Homo sapiens
  chr16:11641619-11641780
  hypo
gccgccatcaatgacgcctattgggttccaatagcctcatgttcaaatctgactcgttagcaaatccacccaactcaacatcggtcatcttgacattgcaggatattcagcaagtctgaagtttttaatcgggaaggattttctaccgttactgaacaaat

SEQ ID NO: 268789 - DNA, 138 bp, Homo sapiens
  chr16:11703386-11703524
  hypo
atgggtgaattgtccggtatgtaaattacgtatccaaaacactcttggaaaaaagaaaaagggataaagggagcaaaggattcaggctgcaggactggctgtgccacttcccggctgcgtgaccgtgagcaagttact

SEQ ID NO: 268790 - DNA, 158 bp, Homo sapiens
  chr16:11712391-11712549
  hypo
cttgatgggctccccgggctttcgctgtgtgcgatgggctaatagcaagatagtttctctctggccatggagccactggccattgtccccgcctcccagtgggtggagcatttctgggggtggggagggggcgcttcatagagctgcaaattaaaaac

SEQ ID NO: 268791 - DNA, 274 bp, Homo sapiens
  chr16:11770050-11770324
  hypo
gacgaggagagcatcgtgggggatggggagaccaaggaacccttcctgctggtgcagtattcggccaagggaccgtgcgtggagagaaaggccaagctgatgactcccaacggcccggaagtccacggctgagccaggatgcaaggctcctggtcctgtttgcagccggccaagaggcgctgggaggggcaaaaccatacggatgcgctgctgtctgagaggaagggctgacacttgctggcatggcctctgcgggcttcgtcatcgcatgcac

SEQ ID NO: 268792 - DNA, 186 bp, Homo sapiens; identical to SEQ ID NO: 216781
  chr16:11770870-11771056
  hypo

SEQ ID NO: 268793 - DNA, 214 bp, Homo sapiens; identical to SEQ ID NO: 216782
  chr16:11775050-11775264
  hypo

SEQ ID NO: 268794 - DNA, 72 bp, Homo sapiens
  chr16:11786030-11786102
  hypo
tccatggtcaactccggttcaaaaatactaaatggaaaattccagaaataaacaagtcgtaagttttaaact

SEQ ID NO: 268795 - DNA, 187 bp, Homo sapiens; identical to SEQ ID NO: 216783
  chr16:11792617-11792804
  hypo

SEQ ID NO: 268796 - DNA, 213 bp, Homo sapiens
  chr16:11793450-11793663
  hypo
cagcatctgggctacgagagatatgcagaagccagggcgactggcaagcaagggggcacccctggagtgggcccaacagcccctccgaaggcacaagacttagacattgtgccaaggggggcgcaggttttaaaggctgggtacactgggtgcagggaaattgatctgtatatgacctgtaagttactgacagtgatgcgagagagacagaat

SEQ ID NO: 268797 - DNA, 31 bp, Homo sapiens
  chr16:11809451-11809482
  hypo
taaaatctttctcacgcgtcctttaccagtc

SEQ ID NO: 268798 - DNA, 180 bp, Homo sapiens; identical to SEQ ID NO: 216784
  chr16:11831275-11831455
  hypo

SEQ ID NO: 268799 - DNA, 45 bp, Homo sapiens
  chr16:11851041-11851086
  hypo
tggcaaaatttgttcccagccgggcacggtggctcacgcctgtaa

SEQ ID NO: 268800 - DNA, 183 bp, Homo sapiens
  chr16:11853076-11853259
  hypo
gaaaacctccatcacggagaatgcattcttgaataccatcaacctacttgtctgtatgaggtataaatcctagtacaactaattattagcttatcttagtttgtgcttcaacggcagctggccctacattatttagcttacgtggcattaaatgcttagcatctgtcacgtttttcagagttt

SEQ ID NO: 268801 - DNA, 44 bp, Homo sapiens
  chr16:11853664-11853708
  hypo
ttctttaagaaaaaaggtcccgggccgggcacggtggctcacgc

SEQ ID NO: 268802 - DNA, 153 bp, Homo sapiens
  chr16:11879768-11879921
  hypo
ctggccgttttgtgtttttttaaagtgacgggtaggtatatatattgacatatgcttgtgtaaacataaaatagtcccagatggaatcatgggagactacagcagtagtagaagactgaggctggaaaaggggtaggacgaggtcttttcaat

SEQ ID NO: 268803 - DNA, 39 bp, Homo sapiens; identical to SEQ ID NO: 216786
  chr16:11900211-11900250
  hypo

SEQ ID NO: 268804 - DNA, 40 bp, Homo sapiens; identical to SEQ ID NO: 216787
  chr16:11968754-11968794
  hypo

SEQ ID NO: 268805 - DNA, 89 bp, Homo sapiens; identical to SEQ ID NO: 216788
  chr16:11974694-11974783
  hypo

SEQ ID NO: 268806 - DNA, 44 bp, Homo sapiens
  chr16:11989479-11989523
  hypo
tttacacctttttttccccacgagacggaatcttgctccgttgc

SEQ ID NO: 268807 - DNA, 180 bp, Homo sapiens; identical to SEQ ID NO: 216789
  chr16:12011433-12011613
  hypo

SEQ ID NO: 268808 - DNA, 39 bp, Homo sapiens
  chr16:12012093-12012132
  hypo
ttatcggtgtgagccaccacacccggcagagtttgcctc

SEQ ID NO: 268809 - DNA, 120 bp, Homo sapiens
  chr16:12018078-12018198
  hypo
ggattacaggcgtgagccactgcgcctggccgattgccaattgccaatgcctcaacaccttctttcatgttttaaataaacaatttttttatttaaataaataaatgagaaataaaacaa

SEQ ID NO: 268810 - DNA, 36 bp, Homo sapiens
  chr16:12042328-12042364
  hypo
taaaatggaaacttactgggcgcagtggctcacacc

SEQ ID NO: 268811 - DNA, 120 bp, Homo sapiens
  chr16:12068910-12069030
  hypo
gacagagcgagatgccgtctcaaaaacaaaacaaaacaaaagaacgttgtgaatgtgtcacacttgtgttcacactcaatccatcaccttttttttttttttttttttttttgagacgga

SEQ ID NO: 268812 - DNA, 224 bp, Homo sapiens; identical to SEQ ID NO: 216790
  chr16:12084473-12084697
  hypo

SEQ ID NO: 268813 - DNA, 148 bp, Homo sapiens
  chr16:12118317-12118465
  hypo
tgaccagtagatacgtgctcagatccaaactggaggtggaaagggcatatggggagggtgttaagtagaacggcctttggcgaggaaggcatcatagtgatctaattaaaagactagcatccacctgggtattcgtgcagtgttaggt

SEQ ID NO: 268814 - DNA, 608 bp, Homo sapiens
  chr16:12132239-12132847
  hypo
gttaacaggtgccccggggcagctcttctcaacaccccttcctggcacttgttcttgttggcattcggctttcaggtgtttggagaaccagaagcccttgcccgctttttgacttaaccccatgtttcaaagcagatcagtgtatatccctaaattaaattacggacaccgcaggcgctaattggcaggtgagctgcgctttaaatagaccacattaattctggcagtggaagcggaaccctgctgggataattcttatcatcatcagcatcaccctgactagctttaaaaggattctgtagcagtaagcaatttgcagaattgaaaggtgaaaacacactttaaagcgttcatgtagattcaaggtcggagggaggtgactgcatttttcaagacaggctgcaggtgagagtcacttgactggaaatgtgatggacgtaccgacaatggtctggggtatttcgaaatacgttgttggccagctggcccagggtgttgttgtcgccagattccccgtcctggtttcttgagtgaggcggagaatggaaggaaggctgttttgtacagttgtgtggagtagactgatcggatgagcttgggaagtggat

SEQ ID NO: 268815 - DNA, 78 bp, Homo sapiens; identical to SEQ ID NO: 216792
  chr16:12136759-12136837
  hypo

SEQ ID NO: 268816 - DNA, 111 bp, Homo sapiens; identical to SEQ ID NO: 216793
  chr16:12142577-12142688
  hypo

SEQ ID NO: 268817 - DNA, 33 bp, Homo sapiens
  chr16:12157506-12157539
  hypo
attataggcatgagccaccgtgcccggcctttt

SEQ ID NO: 268818 - DNA, 479 bp, Homo sapiens
  chr16:12172489-12172968
  hypo
gttacaaataaattttagtgcgtagatgaatttccaaatacggaatctgcagataacgaggcctgactaatttccaatgactgcctctatcccttctagtagaggtaccggagtaaaccgacctctgctagtttttggaatggtgagggtgtgtactttcagtggccgagtgtaacttcctcctgcctgctttttcctagtgtggaagccagctctccaggccacggaagtcctctgagcagcctgttaccttctgcctcagtgccagagtccatgacaattagtaagtactttcgcagccccctccaccagctctgggatgacttctggcccacgtctcatggcggtgcctttgtgcttctaaccctgtgactgtgggttcacgtcaggtgtgtacgtccctggttgtagactggaggtgtggtacgtgcttgtggatatccagaaccgtggttaatgcgtggcgcttgggcgtgtgc

SEQ ID NO: 268819 - DNA, 382 bp, Homo sapiens
  chr16:12210602-12210984
  hypo
atgcttcaacacagatgaaccgtggaaacaggcttagtcaatacctgcttcaacgcggacgaaccgtggaaacaggcttagtcaatacgtgcttcaacgaggacgaaccatggaaacaggcttagtcaatacctgcttcaacgcggacgaaccgtggaaacaggcacggtcaatacgtgcttcaacgaggacgaaccatggaaacaggagtggtcaatacgtgcttcaatgcggatgaaccatggaaacaggcgtggtcaatacgtgcttcagtgcggacgaaccatggaaacaggcgtgttcaatacgtgcttcaatgcggacgaaccatggaaacaggcgtggtcaatacgtgcttcagtgcggacgaaccatggaaaca

SEQ ID NO: 268820 - DNA, 45 bp, Homo sapiens
  chr16:12211296-12211341
  hypo
tggtcaatacgtgcttcaacgcggacgaaccgtggaaacaggctt

SEQ ID NO: 268821 - DNA, 196 bp, Homo sapiens
  chr16:12237125-12237321
  hypo
ttacaggcatgagccactgcgcctggccggccacaagcaaagattttaaccttcagtctgacagctccaggagttccattttcgtggggctactctgagcaggaagtgtcgtatggggcaggtgtggacttgagtcctgcttctcagggttagggcaagggtgagacaagtgaggcacctacgctgcttaatttaa

SEQ ID NO: 268822 - DNA, 181 bp, Homo sapiens
  chr16:12264697-12264878
  hypo
gtgtatgaggagtgtctgtgcgcgcgcgcgtgctgtttacagggcctccgagacatcccggaggccctgatggctggagagagagccgtaggatttactgacgacctggagcccaggagaaaaatcccggccagcgtgtttagggtgttaggggcgcagcgtgattttacatatcttagat

SEQ ID NO: 268823 - DNA, 54 bp, Homo sapiens
  chr16:12272503-12272557
  hypo
tccagggtatggcccgggccctctctgttatcgtgcatacgcaatgctcttagt

SEQ ID NO: 268824 - DNA, 85 bp, Homo sapiens
  chr16:12286197-12286282
  hypo
tgtctccatgtgcacggctacctcttcggtcctctcagttctggccaccatcgtttcttgcctggatgaccgtaatggcctccta

SEQ ID NO: 268825 - DNA, 137 bp, Homo sapiens
  chr16:12289443-12289580
  hypo
atctgtgcaggagtcttaaccgcccaagagattctgcagacctgtgctcgttttctcacgcaatttttcaaggccttacgttttcaatgttgccctgttcacttaattcgctaaacgtgtataatgtaataggagac

SEQ ID NO: 268826 - DNA, 188 bp, Homo sapiens
  chr16:12293539-12293727
  hypo
ggtgagggggagcctgagcccgggttgggaggggccgggcttttccattaacacctgtacgtggcacgcaatagacactcaatgtgtgacgagtgcatatgtggatggattagaataatggtgctgctcagcgttccagaaaattaatcaggtggaaaacctgatgcgtatccctgcaacatgcataa

SEQ ID NO: 268827 - DNA, 83 bp, Homo sapiens
  chr16:12327925-12328008
  hypo
acaagttgtgtggacgtgtttttcatttctctcgggtataacctaggagtgggattgctgggtcaaagcggctgtaccttccc

SEQ ID NO: 268828 - DNA, 101 bp, Homo sapiens
  chr16:12331021-12331122
  hypo
aggacaggagggtgcgaagctctgtccacccccgactcctcacccccaccagcataaaacagaaaaagggagtttctgaagcccagcggtgtttcctctca

SEQ ID NO: 268829 - DNA, 169 bp, Homo sapiens
  chr16:12377985-12378154
  hypo
acaacaatgtgaagtgttggcgacattcggactttgggcctgcatcactttgtcgctgccttctgcagcctggtgacttggaaagcacatgtatcgcgtgtcagactgagttcagatttgccacttactgccgtatgttcctgggcacgccccctaacctctctaagcc

SEQ ID NO: 268830 - DNA, 84 bp, Homo sapiens
  chr16:12390747-12390831
  hypo
gacattttggaccacataatcgtttgtcatgggggctttcctgtgtgtagtaggatgtttcacggcatgcctggctgctgcccg

SEQ ID NO: 268831 - DNA, 82 bp, Homo sapiens
  chr16:12399116-12399198
  hypo
aagtcttggcagaggtgtgacgaggttagactcaggtgttgcgaagatcccccccggccacggagtggtatcaggactggag

SEQ ID NO: 268832 - DNA, 358 bp, Homo sapiens
  chr16:12412005-12412363
  hypo
tcttccagagagggcggcagagccaggattgaaattcacatcttgctccgagctcatgcacacctgggagcctgcatgttcttgctagattttacagccagcaggcctttgttgaaccgtaagcagcagcggccttgatcaggctggtttttctgcccagaggcccctttggcatcgtgactcaaaattttctctgggtattttgccttcttgctgatgcatcgtttgccggatgggaaccagcaggtagagagtgttggctttctgcctccggtcagagtcgggaacgtgacttggatacaaactcagcatggagggaggcatgacttgggagggcagaacccggcagcttcattcc

SEQ ID NO: 268833 - DNA, 92 bp, Homo sapiens
  chr16:12415815-12415907
  hypo
atcaaagcacctgtcgtggttcacgtgatggtgaagtccaggtaaggggggattccagaggaggttcaggctgtcgtcggggtcccggtcct

SEQ ID NO: 268834 - DNA, 80 bp, Homo sapiens
  chr16:12497524-12497604
  hypo
gcccagaggccttgccgaagaagtctgtggctttcagttgggcagggggatacggtgggcctcttcgtgccagtcaggct

SEQ ID NO: 268835 - DNA, 135 bp, Homo sapiens
  chr16:12498045-12498180
  hypo
tggatactggacaagcgggacctgtagacatcgcctctgcttccttggggtacggatagccgcacccaggtgggcattgagtgtctggggcagcgaaatgtgtgtctgcttaggaggtgattttacccaatcaag

SEQ ID NO: 268836 - DNA, 323 bp, Homo sapiens
  chr16:12529998-12530321
  hypo
gattaaagctcttttcctggcgatgcccgagacccctgctatgctctgctgcagcccccggaacagtattggcacaggtgagggccacgcctcctccctgggcccaggcatcaggcgctggctctccacaggaggccgcagcttaaggagctcacagacgtttctattcggagagaggggaaggaacgaagacaggaacacagcaccgtttttagtaccaggagacagcgacagcttggcgtcagtgcgatgcgtgacatttccgtgtgtaaggtgtgctgctgcctggtggagtggcgcgcgagcacctggctgctttcctc

SEQ ID NO: 268837 - DNA, 327 bp, Homo sapiens
  chr16:12579140-12579467
  hypo
ttaggtaaaggactcgtttttgatgatgttactaaagtctgcattatggctcagggagcgaatgagaatagagagactgtcattccttcttaggataatagattccgtctccaaaagttcatttggcattaaggcaaggcaaatcactttccctggagccacagataattcaacttgttggagaaattatgcattaaaatcctcattaaaaacacatacacccgtgtgtggtagaggaaccgactggtactcgccgagccgtgggaagcccctttgcaacttcttgggaggtgccattggaaacacagccctcgagacggcagggtc

SEQ ID NO: 268838 - DNA, 272 bp, Homo sapiens
  chr16:12609442-12609714
  hypo
tcttcaggtgacctccgaagtcacctcctcccaggtgccttcctgtcctagccacccaagccaagtccatctctgtgccagcactctttatgatgtattcacgtatctgcttgttggctctactggatctaagctccggagggcaggggtcacatctgtttgccaatacgttccttcaaggcacggtgccttggacatatgcaggcatgcggcagatagtcactgagtgaaccatgcaggagccagcacaattaacgcgagtgccagtaacc

SEQ ID NO: 268839 - DNA, 150 bp, Homo sapiens
  chr16:12758795-12758945
  hypo
gctcatctagactgtagtatcggtgaacaattttctcggcggtgaccaccacgactcggagcccgtgggggtctctgcccagctggcatccaatggcagatgacaccaccatgtcgaggttctggtaggtacccccggcattcctgtggt

SEQ ID NO: 268840 - DNA, 56 bp, Homo sapiens
  chr16:12777325-12777381
  hypo
atcatttcccagccaacaatcggttcctaggcttcgtggacctctcttctggacat

SEQ ID NO: 268841 - DNA, 35 bp, Homo sapiens
  chr16:12782489-12782524
  hypo
agcccctactccacgacttctgcattaagtgtaat

SEQ ID NO: 268842 - DNA, 91 bp, Homo sapiens
  chr16:12800830-12800921
  hypo
ctgggggttcattcacctaccgtctgcatcgaaggtgccattgattgacattgcttctttagccgaacccggactgcaggcatctgtgctg

SEQ ID NO: 268843 - DNA, 128 bp, Homo sapiens
  chr16:12850875-12851003
  hypo
aggaccctattatagcacctcgaggtgaccaactaagttatagcacctcgaggatgaccaactaagttacagcaccttgagggtgaccaactaagttacagcacctcgagggtgaccaattaagttat

SEQ ID NO: 268844 - DNA, 102 bp, Homo sapiens
  chr16:12867590-12867692
  hypo
atacataaaaatacacaaataaataataaaataaaaagtgtctgtctcagccacccacgtgaacaatctgtggtgatttggcatcaccgcgattcctgactc

SEQ ID NO: 268845 - DNA, 126 bp, Homo sapiens
  chr16:13157454-13157580
  hypo
ctttctttacatcaggaaagcgagatatttctattgattgcgcaatggcattgacagctcaccactttccagcgagagtcagtgatggtatccaaggaagggtgcgtatactgcaaagactataac

SEQ ID NO: 268846 - DNA, 80 bp, Homo sapiens
  chr16:13643878-13643958
  hypo
caaaaaaaaaaaaaataaagtatatatattagagctgagaactcaatgatgagaaggagtgaccccgggaagatctagaa

SEQ ID NO: 268847 - DNA, 45 bp, Homo sapiens
  chr16:13740878-13740923
  hypo
gaagcacagaattgggaggccgaggcgtgcggatcactaggtcag

SEQ ID NO: 268848 - DNA, 206 bp, Homo sapiens
  chr16:13977142-13977348
  hypo
tcccgcagtgagagacgaatctctattctcctgctgatacatccatcagcatccttaatcatcctccttccgcggaggtttatcatccttctagttattctattactcactctgctattaagagggcaagaaccatttcatttttatgttgcctgatcatatcattcagctggaaaacatcgttaaggaaccgcagcgtaaaagcc

SEQ ID NO: 268849 - DNA, 83 bp, Homo sapiens
  chr16:14494054-14494137
  hypo
gaatccacaggccccgggctgaacgtggaactaatttgggaggcaatgagaaagagcggaacataacgcggagcccgggaggc

SEQ ID NO: 268850 - DNA, 35 bp, Homo sapiens
  chr16:14525417-14525452
  hypo
aagcccgctgggcgcggtggctcaagcctgtaatc

SEQ ID NO: 268851 - DNA, 95 bp, Homo sapiens
  chr16:14525692-14525787
  hypo
acactctgtctaaaaaaagaaaaaaagaaagaaaataagcaagccatacattgggactaaatatttgcaaaacaactatccgacagaggactgat

SEQ ID NO: 268852 - DNA, 77 bp, Homo sapiens
  chr16:14632542-14632619
  hypo
ataggccctaaaaccgaagtcgccaatctgtactgatctatgttccctggcatgttaggaaccaggctgcacagcag

SEQ ID NO: 268853 - DNA, 69 bp, Homo sapiens
  chr16:14692498-14692567
  hypo
tccaactttctattcgactttaatcgccccacttacttgagcaagagaagtcctcgtgagccaaccctc

SEQ ID NO: 268854 - DNA, 180 bp, Homo sapiens
  chr16:14725660-14725840
  hypo
agacctattttcaaaatctatctcagccacttattagttctggaatgcattaaaccttcctaaacctcaatttcctgggattgtattgaggctcagtggtgctaatgaatgtgaactgggaagcagcgtattaataaatctgtataaataactgtttaatgggggcctggcgccatgact

SEQ ID NO: 268855 - DNA, 101 bp, Homo sapiens
  chr16:14728323-14728424
  hypo
ttctgttaataatgccgatcagccccacacagcaaactttgagtacctgtagatagtttgtcatctaaacctcacagcagggcggggctccgcagctcacg

SEQ ID NO: 268856 - DNA, 40 bp, Homo sapiens
  chr16:14728484-14728524
  hypo
gaccaacctaggcaacatagggagacgctgtctcttaaaa

SEQ ID NO: 268857 - DNA, 86 bp, Homo sapiens
  chr16:14734691-14734777
  hypo
ctgccttctagaaacatggacgtaccatacacaaacgcaagcgtggcacagaattcagacttcccgaggcatctctccagatacca

SEQ ID NO: 268858 - DNA, 38 bp, Homo sapiens; identical to SEQ ID NO: 216801
  chr16:14735318-14735356
  hypo

SEQ ID NO: 268859 - DNA, 401 bp, Homo sapiens
  chr16:14761337-14761738
  hypo
taggcagaggtctcaggcaccggggacagaagacaaggacattcagcacgggcagccatgctcttcccagcacccagaaaaggcccagggcccggactcctgggtgtggtcatgagaagcgcctccgattcagcctcttctcttcttgtttcaggaccgtgcctcagaggatgtggagccatttctggaaagtatcaacgcaggggctttttgtggccatgttctggcccctcatccctcagtttgtttgcaactgtttgttttactgggccctgtactttaacccaattattaacattgatcttgtggtcaaggaactccggcggctggaaacccaggtgttgtgactggcactgcccaggctgagactcttcaagtcccgctgacgtctgagctttgat

SEQ ID NO: 268860 - DNA, 152 bp, Homo sapiens; identical to SEQ ID NO: 216803
  chr16:14763027-14763179
  hypo

SEQ ID NO: 268861 - DNA, 38 bp, Homo sapiens
  chr16:15055595-15055633
  hypo
ttgatgttgagatgaagtctcgctctattccccagtct

SEQ ID NO: 268862 - DNA, 234 bp, Homo sapiens
  chr16:15122678-15122912
  hypo
tttttttggtcagccgtgtttctgggagtgactccctttctgtgttttggtgtcagatccggtgtttaaagccgtcccagtgcccaacatgacaccttcaggagtcggccgggagaggcactcgtgtgacgcgctgaatcgctgggtgagaatggcagtcacccccctttcctttcaggtccccgtccatcaccatccgacctgctggtgagggtgacgcgtgctcgtgtatgg

SEQ ID NO: 268863 - DNA, 142 bp, Homo sapiens; identical to SEQ ID NO: 216804
  chr16:15129342-15129484
  hypo

SEQ ID NO: 268864 - DNA, 76 bp, Homo sapiens
  chr16:15191479-15191555
  hypo
cagagtgagactccgtctccaaaaaaaaaaaaaagaacataatgaacacctgtgaacatatcgcccaatttaagaa

SEQ ID NO: 268865 - DNA, 191 bp, Homo sapiens
  chr16:15541440-15541631
  hypo
ctcagtaaatggtggcgatcatgttaatagaagaggatgtgaagtgggaattgacctgatagtatctgaatagttggagagaaggaagagagagaagttaaatttaagtgggtgaacctcaaggaagaatggaggtgacgatgagcgtggagatttctggaggcgtgcatgagcttcgctgcattggagga

SEQ ID NO: 268866 - DNA, 93 bp, Homo sapiens
  chr16:15602903-15602996
  hypo
gagcctggcaccaccgcctccatcctcccccggggatggaggtaaaatgccagttcctgggatgtgattaattctcttcgtcccacgcctcgc

SEQ ID NO: 268867 - DNA, 75 bp, Homo sapiens
  chr16:15604261-15604336
  hypo
ttgctggcttatggcgaggattaaaagaggtgatgggcagagcaggtgcggcggtcataacgagggcaattgcaa

SEQ ID NO: 268868 - DNA, 103 bp, Homo sapiens
  chr16:15606081-15606184
  hypo
tactgagaatccaacgtctgctgaacaactcagggccgggagagtcccacaggtggacaaatgcatcaggtggactcctagaagagggcgctgttctatctag

SEQ ID NO: 268869 - DNA, 314 bp, Homo sapiens; identical to SEQ ID NO: 216805
  chr16:15606940-15607254
  hypo

SEQ ID NO: 268870 - DNA, 120 bp, Homo sapiens; identical to SEQ ID NO: 216806
  chr16:15607783-15607903
  hypo

SEQ ID NO: 268871 - DNA, 162 bp, Homo sapiens; identical to SEQ ID NO: 216807
  chr16:15608920-15609082
  hypo

SEQ ID NO: 268872 - DNA, 43 bp, Homo sapiens
  chr16:15626664-15626707
  hypo
gtgttgggattacaggcgtgagccaccgcgcctggccagatcc

SEQ ID NO: 268873 - DNA, 91 bp, Homo sapiens; identical to SEQ ID NO: 216808
  chr16:15649666-15649757
  hypo

SEQ ID NO: 268874 - DNA, 68 bp, Homo sapiens; identical to SEQ ID NO: 216809
  chr16:15693241-15693309
  hypo

SEQ ID NO: 268875 - DNA, 247 bp, Homo sapiens
  chr16:15704142-15704389
  hypo
tcaatgttctgcaggagcaccgtttaagaaccagataatagaaggaggatacgaccatacagtcaccccttggtgttctcaagggatcgggtccaggaccctgcctggataccaaaatccgcacctactcaagtcttgcggtctgccccgcggaaactgcagacacgaaaaattggcccccagtatccatgagtttcgcatccctcaaatactgtactttctacccgtaactggacctgtgcagttc

SEQ ID NO: 268876 - DNA, 83 bp, Homo sapiens; identical to SEQ ID NO: 216811
  chr16:15707174-15707257
  hypo

SEQ ID NO: 268877 - DNA, 82 bp, Homo sapiens; identical to SEQ ID NO: 216812
  chr16:15707963-15708045
  hypo

SEQ ID NO: 268878 - DNA, 45 bp, Homo sapiens
  chr16:15710353-15710398
  hypo
cctcctcacgtttacgtttctaaaatgtagcgcaaacacacattt

SEQ ID NO: 268879 - DNA, 260 bp, Homo sapiens; identical to SEQ ID NO: 216813
  chr16:15723202-15723462
  hypo

SEQ ID NO: 268880 - DNA, 104 bp, Homo sapiens
  chr16:15728112-15728216
  hypo
aagggtgaagctgttactgtcgttgattttgagttaacgctgcattaacatctgatttaatattttaaaaatgttttcaaaacgtcgcattaactactttttag

SEQ ID NO: 268881 - DNA, 127 bp, Homo sapiens; identical to SEQ ID NO: 216814
  chr16:15729537-15729664
  hypo

SEQ ID NO: 268882 - DNA, 181 bp, Homo sapiens
  chr16:15729933-15730114
  hypo
tctaacagtgcgcccgggtgaatcaagctactggtacctccgctaccgccaccaccaccaccaaaacgcattggcgaagtggagggttcattagggcaatgagcacagcagcttactttggggacagaagaaagctgtattttaggctgctgaagagaacgaatatcaggaagtgggactg

SEQ ID NO: 268883 - DNA, 43 bp, Homo sapiens
  chr16:15738994-15739037
  hypo
tcgaactcctagcctcaagtgatcctcccgcctcggcctcttt

SEQ ID NO: 268884 - DNA, 101 bp, Homo sapiens
  chr16:15746763-15746864
  hypo
ccttccgcctcagcctcccaacgtgccggggtgggagagagccaccgcgcctggcctaagctttttaaaatctctaaagcgatctatgcttactgtatata

SEQ ID NO: 268885 - DNA, 99 bp, Homo sapiens; identical to SEQ ID NO: 216815
  chr16:15747494-15747593
  hypo

SEQ ID NO: 268886 - DNA, 94 bp, Homo sapiens
  chr16:15762690-15762784
  hypo
ttgacattggagcccggatcatcctccgttgggagggactgaggtttgctttgtgggttttttgtttgtttgttttgtatttttgagatggagt

SEQ ID NO: 268887 - DNA, 109 bp, Homo sapiens
  chr16:15767615-15767724
  hypo
cacctgaggtgctgggattgcggcatgaggcaccgcacctggctctgggtgtttggtgaaggaaagtaatttggaagcagagcaggaatagaatcgagagagcacggga

SEQ ID NO: 268888 - DNA, 55 bp, Homo sapiens
  chr16:15798699-15798754
  hypo
tggattattttattaaattgagatgaggtcttgatattgttgcccaggctggtct

SEQ ID NO: 268889 - DNA, 82 bp, Homo sapiens; identical to SEQ ID NO: 216817
  chr16:15799467-15799549
  hypo

SEQ ID NO: 268890 - DNA, 78 bp, Homo sapiens
  chr16:15808722-15808800
  hypo
ctggcctgagagacggggtcctcccgggccacgggctcctcacctgagcttgctcttgagtgcgttcacctcgcggcc

SEQ ID NO: 268891 - DNA, 336 bp, Homo sapiens
  chr16:15820529-15820865
  hypo
gtttttttaatatttaattgaacagggagatcatcgcctctcctccaggaacgcaactagaggaaaggacttgccttgcagcaagagagacctcagcgagccgggaagaggctcctccccacagaactgggcaccacccagcactgcccaccacaccaccgcgccacctcctcacctgcagcttgtggactttgtcattgagctccgcccgggcccgctccccatcgctgcacttggactgcagctcctgcacctgcgcctccagcttcttcttcttatgttccacctcctgcttggcctggcccaggacccgcagctccccggccaggtctgcgt

SEQ ID NO: 268892 - DNA, 141 bp, Homo sapiens
  chr16:15843925-15844066
  hypo
ggggacgctgtgaccgcttgggacagccctggcttctgggagccccagggtctgggcggcgggcctcaccctcttctcgtggttggggatgatgcagcgcacgaagttgggcgtggtgttgcgtagcgtggtcatcagctt

SEQ ID NO: 268893 - DNA, 83 bp, Homo sapiens
  chr16:15979202-15979285
  hypo
aaacctttgataatccacaacgctttagggagtgaaaaggtgttgggtttttcattgttgttattttgaaacaatctcgctct

SEQ ID NO: 268894 - DNA, 42 bp, Homo sapiens
  chr16:15991506-15991548
  hypo
ctcacttaaaatattttacccggcacttgaagaaaacatttg

SEQ ID NO: 268895 - DNA, 76 bp, Homo sapiens
  chr16:16019074-16019150
  hypo
cctgtgcaacgtggcaaaaccagagtggggccttgtctcattttaaaaagtaataagagaccgagcacgggaactc

SEQ ID NO: 268896 - DNA, 31 bp, Homo sapiens
  chr16:16022603-16022634
  hypo
cacacgcacacgcacacgcgcgcgcgcacac

SEQ ID NO: 268897 - DNA, 35 bp, Homo sapiens
  chr16:16041979-16042014
  hypo
aaatttacactctgcggcctcgccctagctcctct

SEQ ID NO: 268898 - DNA, 39 bp, Homo sapiens
  chr16:16090901-16090940
  hypo
aagcctctgttggagggagccgggagctggggaggacat

SEQ ID NO: 268899 - DNA, 195 bp, Homo sapiens; identical to SEQ ID NO: 216819
  chr16:16103293-16103488
  hypo

SEQ ID NO: 268900 - DNA, 234 bp, Homo sapiens
  chr16:16180668-16180902
  hypo
gtctctccccagggcgtgaacctgtctgggggccagaagcagcgcgtgagcctggcccgggccgtgtactccaacgctgacatttacctcttcgatgatcccctctcagcagtggatgcccatgtgggaaaacacatctttgaaaatgtgattggccccaaggggatgctgaagaacaaggtgcctgctggcggggtggggcttggtgttgggccgtctcgccctttggttaag

SEQ ID NO: 268901 - DNA, 77 bp, Homo sapiens
  chr16:16188313-16188390
  hypo
tgtggccttttgtacgtgcatacctttgatggcctgggcgctttcaggagtgttctttttctttttcttttttttga

SEQ ID NO: 268902 - DNA, 306 bp, Homo sapiens; identical to SEQ ID NO: 216820
  chr16:16208594-16208900
  hypo

SEQ ID NO: 268903 - DNA, 206 bp, Homo sapiens; identical to SEQ ID NO: 216821
  chr16:16219544-16219750
  hypo

SEQ ID NO: 268904 - DNA, 224 bp, Homo sapiens
  chr16:16227959-16228183
  hypo
tctagtaacttataaaaagccgagtcattccttttgggagcctggcaaagggaagagagtccttcttgaccttcggccgaaacacccttaaaggagtgtctctgggcagcgcgcaagggagagggctgtcgagttgggttgaccagatgactgatgcctgaggtggggccgagatgagggcactttggggcagggacaagtccggatgccagcattcccaccac

SEQ ID NO: 268905 - DNA, 43 bp, Homo sapiens
  chr16:16245755-16245798
  hypo
aagtgtgtgggtggcggggcacggcggctcacacctgtaatcc

SEQ ID NO: 268906 - DNA, 279 bp, Homo sapiens
  chr16:16259432-16259711
  hypo
tgagttgacctcagccggtcccggaagcctccctgacctctccgtacctgaaacccagcgtagaggagaaacagtggcaggatggccacagtggccagtggggtagccactgccaccaccaggctgacctccaggagtccaaaggcgtacatcagcagggaccggagtttgtctggaatgtccacgtcaaccgtgtctgtctccttggagaagcggtttagcaggtgaccaatgggtgtccgctcaaagaagctgatgggagatcgcaccacatcccac

SEQ ID NO: 268907 - DNA, 186 bp, Homo sapiens; identical to SEQ ID NO: 216823
  chr16:16282899-16283085
  hypo

SEQ ID NO: 268908 - DNA, 42 bp, Homo sapiens
  chr16:17054605-17054647
  hypo
ttgagtcatttgcccaaggtcgcacctctagcaggtgtgggg

SEQ ID NO: 268909 - DNA, 75 bp, Homo sapiens
  chr16:17294379-17294454
  hypo
tggccttgaacatgcgctgcaactgccgagaggcacggccgtggaccaccaggacaaaggcgattctgaccgggt

SEQ ID NO: 268910 - DNA, 138 bp, Homo sapiens
  chr16:17357449-17357587
  hypo
agaggcgcagtcagcgagaattggaggcctgagaatttctgtccctcagagtcactgtcattttctatagtgactgcggcgttctctctggcttccccccttcaattcatttttttcttttcttttcttttttgagat

SEQ ID NO: 268911 - DNA, 42 bp, Homo sapiens; identical to SEQ ID NO: 216824
  chr16:17754966-17755008
  hypo

SEQ ID NO: 268912 - DNA, 37 bp, Homo sapiens
  chr16:18036046-18036083
  hypo
ctagatcccttgcacgtgcagttcacacagggttcct

SEQ ID NO: 268913 - DNA, 50 bp, Homo sapiens
  chr16:18076376-18076426
  hypo
tcatcagaggcaagacgctaggcccagcccatactcgaggggaggaaatc

SEQ ID NO: 268914 - DNA, 204 bp, Homo sapiens
  chr16:18802483-18802687
  hypo
ttttaattaaaaagttaagttcagacaaaagtcacccaacagttgtttactgagcacccatgtaccagacgctagcaaggccctggggtacgaggtgcccacacaggcaccatttagccagttctgtccctgccggttcttccagcttcgtcctctctcacacgtcaatgcccctgctcattcgttgcatttcctcttccctct

SEQ ID NO: 268915 - DNA, 249 bp, Homo sapiens
  chr16:18804300-18804549
  hypo
aaaagcaagaattcaattaacgctgggtaagaaaagtcaaaacactaatgagttgtccatgaagccaactgctaagaacgcgctcaactatacgcgacatgaagacactatgcacgaagccttacttggcgagtctgaatttctattaactaagggcagagtgagggagaacaaagagctacttccgtaacattttagtatccagatagtacagcagaaacggttcccggggcaatgggtgctgcatta

SEQ ID NO: 268916 - DNA, 43 bp, Homo sapiens; identical to SEQ ID NO: 216826
  chr16:18884774-18884817
  hypo

SEQ ID NO: 268917 - DNA, 33 bp, Homo sapiens
  chr16:18950992-18951025
  hypo
gtcaccgtgcccggccctcctgcaactttaaat

SEQ ID NO: 268918 - DNA, 160 bp, Homo sapiens
  chr16:19051022-19051182
  hypo
atactttaaattgcccgtttatacagaatacatgggtcttcttatacatccctttaataaatccagtagatcctggttttcttcctgcacagtactagatacctctttttgaatatctgaagaaggagatggcggccgggcgaggtggctcatgcctgta

SEQ ID NO: 268919 - DNA, 36 bp, Homo sapiens
  chr16:19085558-19085594
  hypo
aaaaaaaggccgggcgtgatggctcacacctgtaat

SEQ ID NO: 268920 - DNA, 42 bp, Homo sapiens; identical to SEQ ID NO: 216827
  chr16:19184226-19184268
  hypo

SEQ ID NO: 268921 - DNA, 355 bp, Homo sapiens; identical to SEQ ID NO: 216828
  chr16:19185277-19185632
  hypo

SEQ ID NO: 268922 - DNA, 89 bp, Homo sapiens
  chr16:19252128-19252217
  hypo
cctcctcagcctccccgtcatacttgctggcacccaaagtctggaaggggccgaggcatcagggggctgtcatgtcagcactaccccaa

SEQ ID NO: 268923 - DNA, 158 bp, Homo sapiens; identical to SEQ ID NO: 216829
  chr16:19431054-19431212
  hypo

SEQ ID NO: 268924 - DNA, 31 bp, Homo sapiens; identical to SEQ ID NO: 90082
  chr16:19456420-19456451
  hypo

SEQ ID NO: 268925 - DNA, 81 bp, Homo sapiens
  chr16:19485545-19485626
  hypo
cttgtggagaggtacgagatgccacggcacgaagtctacgttctcctgatccggtaggtgatgtgtcgcgcccaacaccag

SEQ ID NO: 268926 - DNA, 130 bp, Homo sapiens
  chr16:19528378-19528508
  hypo
caaatgtcaaatcacacaatcgcccagtcccatcagtcgtcctatctactgtgttatcgtgcattaagacaggaatcccgtcagaagtaaactcaatgtccaactccacgcctgttgctccattcttagc

SEQ ID NO: 268927 - DNA, 45 bp, Homo sapiens
  chr16:19568731-19568776
  hypo
ttgagacggagtctcgcccaggcttgattgcagtggcgtgatctt

SEQ ID NO: 268928 - DNA, 257 bp, Homo sapiens
  chr16:19606512-19606769
  hypo
agaggagggaggtgatcccacgtgggatttaacaggctccgtgttgagactagactgtagggcgggggtagagcccggagcctgtggcagcacttgcggtgagaggcaggggtggcttggccccgggaggcggtggagatggtgaggagagacccaggatggatgagggctttaggttctcaggttagatgtcaaatcatacactgctggtccttgacgtgtccatgcacacagcttaccttcggcgagtgtgaggc

SEQ ID NO: 268929 - DNA, 33 bp, Homo sapiens
  chr16:19630525-19630558
  hypo
atcacagacaagagccaccgtgcccagccgccc

SEQ ID NO: 268930 - DNA, 92 bp, Homo sapiens
  chr16:19665686-19665778
  hypo
cactaggacaggcacgtgtcttcattgtgtgtaggtcaacatggaactttctcctactgcttgctttggtaagaatgatgggttatcgggag

SEQ ID NO: 268931 - DNA, 86 bp, Homo sapiens
  chr16:19706325-19706411
  hypo
tcagaaaaaaaaaaaaaaaagacagagctcaagtgatccgcccaccttggccttgggctcccaaagtgctgcggattctgggcgta

SEQ ID NO: 268932 - DNA, 241 bp, Homo sapiens
  chr16:19708367-19708608
  hypo
atgaaggcagagcaggtggtcgccagccagtttgcgagtccgtgcccagcaggtgccagcccgcgtgccctgtgccaaagcgcttttctcttgtagcccgcgggcctgggcgcccacagcacaacctgctccctgatgattgggctctttgccgtcggctctgctgcttctgtgactgtcgctgctctaggctgttgccaaggcaggctcaattttgcccggagtggggaggggaggtgcc

SEQ ID NO: 268933 - DNA, 224 bp, Homo sapiens; identical to SEQ ID NO: 216832
  chr16:19719066-19719290
  hypo

SEQ ID NO: 268934 - DNA, 100 bp, Homo sapiens
  chr16:19743742-19743842
  hypo
gaacaggcagagagtcggtattttgggattgggcggtggcggcaggagggtctctaaatcaactttttctttctttctttttgagacagggtcttactct

SEQ ID NO: 268935 - DNA, 185 bp, Homo sapiens; identical to SEQ ID NO: 216833
  chr16:19845505-19845690
  hypo

SEQ ID NO: 268936 - DNA, 146 bp, Homo sapiens
  chr16:19883198-19883344
  hypo
gtcctcctcgaaggccgtctcccgcatcctgggctgcgacgtgtcgaagtagttgggcgtgttctcctgcagggctggcagaagggtgcagtggatctcagggatggcgtggaagatgacgaagacccagccgctggccgccagcg

SEQ ID NO: 268937 - DNA, 343 bp, Homo sapiens; identical to SEQ ID NO: 216834
  chr16:19904164-19904507
  hypo

SEQ ID NO: 268938 - DNA, 83 bp, Homo sapiens
  chr16:20335323-20335406
  hypo
cgtctgtctggcatcggtgcacctggacacaggtctccgacatccttactcctccttcccctacaaagcggtaccagccgctc

SEQ ID NO: 268939 - DNA, 35 bp, Homo sapiens
  chr16:20702408-20702443
  hypo
ttctgataaagaccggcagcgcagctgtgaagggg

SEQ ID NO: 268940 - DNA, 164 bp, Homo sapiens; identical to SEQ ID NO: 216835
  chr16:20754570-20754734
  hypo

SEQ ID NO: 268941 - DNA, 39 bp, Homo sapiens; identical to SEQ ID NO: 216836
  chr16:20803222-20803261
  hypo

SEQ ID NO: 268942 - DNA, 79 bp, Homo sapiens
  chr16:20816394-20816473
  hypo
gaaatatgcacagcgcatccaggaatcagggaggacacaataattcatattgtgaattaaaaggatcactaggccaggc

SEQ ID NO: 268943 - DNA, 39 bp, Homo sapiens
  chr16:20817451-20817490
  hypo
aaaataggcaggcactggctcaaggccacacagtcaagg

SEQ ID NO: 268944 - DNA, 75 bp, Homo sapiens
  chr16:20822044-20822119
  hypo
taacaatgagaaacccgacacccaacatcttcagtatatttgatcaatccttattgctgccgctgacccaccctc

SEQ ID NO: 268945 - DNA, 100 bp, Homo sapiens; identical to SEQ ID NO: 216838
  chr16:20823438-20823538
  hypo

SEQ ID NO: 268946 - DNA, 139 bp, Homo sapiens
  chr16:20966046-20966185
  hypo
cgcaagcttaaacacgcacctggaaacacacctatatgtgtctgatatcctttccctcaggccactcaggtgcactgtcatcgcttacctagggggccgaagtttcttctctcttgaacaacggcgtggaagaaacaaa

SEQ ID NO: 268947 - DNA, 157 bp, Homo sapiens
  chr16:21174564-21174721
  hypo
aaggatgaaacaggaaggctcggtgtcaccttgcttgacctcagctgggaatgtacgtggcaggtgactccactttttgctgttgtggacgtgtccactaatgacctcaaaagcactgcaggccaggcgtggtagctcacacctgtaatcctagtac

SEQ ID NO: 268948 - DNA, 53 bp, Homo sapiens; identical to SEQ ID NO: 216839
  chr16:21178770-21178823
  hypo

SEQ ID NO: 268949 - DNA, 31 bp, Homo sapiens; identical to SEQ ID NO: 216840
  chr16:21179024-21179055
  hypo

SEQ ID NO: 268950 - DNA, 120 bp, Homo sapiens; identical to SEQ ID NO: 216841
  chr16:21515406-21515526
  hypo

SEQ ID NO: 268951 - DNA, 89 bp, Homo sapiens
  chr16:21526521-21526610
  hypo
aaataaataaataaataaaataaatcactttctatggcttttcactgctccaggaacaatgtccacagatcaaacgccgagcctctcct

SEQ ID NO: 268952 - DNA, 233 bp, Homo sapiens
  chr16:21535692-21535925
  hypo
agcgctgctttcttcggctactttgccccgcctctcagttttggggacagtggctgcagggcagatgccattcaaccaggtcaaatttccatgtgaggatggaaatttgtaggttataattcaattctctattttgaaaaatatccaggtggatattgtttaccaccaaaacaatgacttctattgtgtgggcccgaaaaccaggctgatgcatgctacggcatgggtgtgtg

SEQ ID NO: 268953 - DNA, 191 bp, Homo sapiens
  chr16:21539168-21539359
  hypo
gaccaatggcgctgcgagcttctggggcgtgggctgggcccagcatgtcagtgcgacccacagcggggctggagctgctgaatgtgcacaacacacttcaccccgggcctggttcaggagcgggcaaggcagctgtacaccctgtccttcagcaaactcctcttgatcgatggaatcgaagtcaggagcat

SEQ ID NO: 268954 - DNA, 40 bp, Homo sapiens
  chr16:21541461-21541501
  hypo
tgatccagacccgacgcggtgactcatgccagtaatctca

SEQ ID NO: 268955 - DNA, 92 bp, Homo sapiens
  chr16:21566648-21566740
  hypo
agacaatacagcatgggggcaggagtggggtctggagtcggacgcacgttcagaggctggggtcacttctcccaaaccgtgtgcagtcggac

SEQ ID NO: 268956 - DNA, 92 bp, Homo sapiens
  chr16:21567013-21567105
  hypo
ggggcaaaggctctcgctggccaggttctggcgtgtcccgggcaccacgcatcctgtccatgagctcacgtcgttgtcgtgatggagaaggc

SEQ ID NO: 268957 - DNA, 623 bp, Homo sapiens
  chr16:21569156-21569779
  hypo
aaaattgctatcatcactggcatcgtcatcatctcactacagcagagatccgcagttccccgaaacaaataccacgagtctcaaggtaagacctgcacgtaaggatgtcgaaagataaatatgtcttaagaacatgtccatgagaaggggctttgccagccatgcaagcataaaagaagaaaagtccctcattcatccaaaaacacccgctgagtttctcccgcgtgccgggcaccacgctcagtacgggggacagagggaggaggctctaggctctgacttgcccttgcagagcttggaatccaggagtgtcagacggtggtagagataaaaagctgtgtgtctgagaggtgagggcgtgggctttggggccctaaacttgcttgggacgcccgggagggcccccgtggaagcggcgtttcagtggagccctgaagatgggtttctatttgtcaggtgaagataatggcagctccaggcagaaagggacgaccagcggaaaggaccctggtgagagcagccaccacgacggaacaggcagaagcaccagctggcaaaggcactgtcaggggcagcgggagatgggattggaagggcaacagggttggcgcccgtggtggcaa

SEQ ID NO: 268958 - DNA, 40 bp, Homo sapiens; identical to SEQ ID NO: 216844
  chr16:21633194-21633234
  hypo

SEQ ID NO: 268959 - DNA, 80 bp, Homo sapiens; identical to SEQ ID NO: 216845
  chr16:21635698-21635778
  hypo

SEQ ID NO: 268960 - DNA, 127 bp, Homo sapiens
  chr16:21666678-21666805
  hypo
tacctgtgtgaaggcgacatgtataatgactactacgttctggatgacgctgtctttgttctcaaaccagtataaacacgtggaggtcgaagtcttcagagtccgcaccctccgggatgtgcccttg

SEQ ID NO: 268961 - DNA, 80 bp, Homo sapiens; identical to SEQ ID NO: 216847
  chr16:22083799-22083879
  hypo

SEQ ID NO: 268962 - DNA, 80 bp, Homo sapiens; identical to SEQ ID NO: 216848
  chr16:22084119-22084199
  hypo

SEQ ID NO: 268963 - DNA, 43 bp, Homo sapiens
  chr16:22216593-22216636
  hypo
tttttgtttttgtttttttgcgacggagtctcattccttcacc

SEQ ID NO: 268964 - DNA, 42 bp, Homo sapiens
  chr16:22216816-22216858
  hypo
ctcaggtgatctgccggcctcggcctcccaaagtgctgggaa

SEQ ID NO: 268965 - DNA, 123 bp, Homo sapiens
  chr16:22236967-22237090
  hypo
cttgtaggaccttcgcctctgcatttgtccagtaactctggctgtgccggatactgcttgggtaaaacgggcaccccaggaacatggcagacgaagatctcatcttccgcctggaaggcgttg

SEQ ID NO: 268966 - DNA, 90 bp, Homo sapiens; identical to SEQ ID NO: 216849
  chr16:22285049-22285139
  hypo

SEQ ID NO: 268967 - DNA, 189 bp, Homo sapiens
  chr16:22324533-22324722
  hypo
ggaaatccaggtgtgtggggcgggacagtaaggctgagctggccgaggcctggagggtaaacagcagggcgaatttgatgaggattagctgcctagtgttgcaaagcgagcagctggggagaggggcgtggaaccagactgggaggtgggactgaaggaagtggcttcgaacagaagagtccaggttcc

SEQ ID NO: 268968 - DNA, 769 bp, Homo sapiens
  chr16:22325983-22326752
  hypo
gtttggaagcccttgaggaccggggaacacgggcgtaatggacatggaggtggcgcagggagctcatcctgttctctccgtagcttattaggaccttagaaactcccttccgctctggggaacttagaaaaggcatcctgggcctgtctgctttaaggactctgctggctctggcgcctgggactctaatccccctcaagcctctgggctgggcaggcacgagcaagtataagccgttccctggcgtgtgcaggcagctctgggagggacacggttggaacggaatttaaacgacctgtgctaggaaaggaagggagagtggaaaacccctatacggagttctctggtcttctggcaggggctgagacggcagtccagcaagggtcacaggcctgacggtatgacctcttccccttcccaccgcaggtgcggttctcccggccggagtcagagcaggcccgccagcgccgtgtgcagtcctatgagttcctgcagaagaagcacgcagaggagccctgggtccacctgcattactatggcctgagggtgagcggggcttcgtggggtcctgggggaaacacctcggtgcccggaagggtcatggtgtggcctccgtgtctcaccttgaacttaagtcaaattcatgagtcatagccacagatagaggatcgagtcctgtgggcagtttacacttcactccagccgagccacttagcgtgggccccaggagagcaagaggaaaagatgcgagtccttggttccctgggtg

SEQ ID NO: 268969 - DNA, 192 bp, Homo sapiens; identical to SEQ ID NO: 216852
  chr16:22358431-22358623
  hypo

SEQ ID NO: 268970 - DNA, 79 bp, Homo sapiens; identical to SEQ ID NO: 216853
  chr16:22398761-22398840
  hypo

SEQ ID NO: 268971 - DNA, 89 bp, Homo sapiens
  chr16:22411852-22411941
  hypo
ctcctacctcagcctcccaagtacctttaataatcttaagtggcttcttattgctttcagggtatttcgaaatgatgacattatgatgt

SEQ ID NO: 268972 - DNA, 153 bp, Homo sapiens
  chr16:22792389-22792542
  hypo
ccagcatgtctctaaattttaaagatgcgtatatatttgtggtaaaaatactgagatattcacgggaaagatccacaccaacttcagggttatgcttacatctgaggcggaaggtcgggaggagactagggcggagtatgtgcctggggtgac

SEQ ID NO: 268973 - DNA, 42 bp, Homo sapiens
  chr16:23093841-23093883
  hypo
tacagtgtgggcaacgccaggcatcatcgggggcaagctgaa

SEQ ID NO: 268974 - DNA, 34 bp, Homo sapiens
  chr16:23157624-23157658
  hypo
atctcagctgggcacggtggctcacgcctgtaat

SEQ ID NO: 268975 - DNA, 33 bp, Homo sapiens
  chr16:23331328-23331361
  hypo
aagtgctcagattacaggcgtgagccaccttgc

SEQ ID NO: 268976 - DNA, 96 bp, Homo sapiens
  chr16:23332278-23332374
  hypo
aacttgagagtggtggtggccggatctagatgagtgagcttaaggagatcagagattatgaattgctgaattctcttcctggactttattttattt

SEQ ID NO: 268977 - DNA, 184 bp, Homo sapiens; identical to SEQ ID NO: 216855
  chr16:23402109-23402293
  hypo

SEQ ID NO: 268978 - DNA, 155 bp, Homo sapiens
  chr16:23402871-23403026
  hypo
gcaaaacaagagccagaagccggttgagcctggctcagccctgtggtcactgaggacgaagctctggctgtgtccccagggagctgatctttcaggcttctaccacccgctctcctgaccaccccgagaggtgcgttaggctaaagagcagacaa

SEQ ID NO: 268979 - DNA, 359 bp, Homo sapiens
  chr16:23410367-23410726
  hypo
gggagtgactccggcggtcatgtaggaactgctgtctgcagccacctgatgttggatccggttgcctgatcctttaagtagcattccgggaaaggaatgaccatgtccaaccctgggctcccagcccaggctcagcctcggcagccctccccgtgctctctagcgcccacttgattcggtcttattttctttgatgtaaatgagctcttttcttccccaccccaggtgcccccaacccttgtcctacagttttctagactctttgttcttgcctgcgaatgctcttttgtctcaaaagagcctacattttttccagctaactcccaatccagcgagaaggaacacgccaaccatccaca

SEQ ID NO: 268980 - DNA, 53 bp, Homo sapiens
  chr16:23444901-23444954
  hypo
aagcaaggcatcatagagtccggtaagctgccggtccagggataggtcacttt

SEQ ID NO: 268981 - DNA, 49 bp, Homo sapiens
  chr16:23481441-23481490
  hypo
ttctgaatccattccggtcatacacaatgagaggcggcaggctgcctgg

SEQ ID NO: 268982 - DNA, 200 bp, Homo sapiens
  chr16:23496842-23497042
  hypo
tacccataagaaatgaaaatcgatgttcacacaaaatcccgtacaaaattgtttacagtagcatgattcacaatcacccaaagctggaaacaacgcaaggcccatcaacaggtacatgctgtggtacatccaggtgacgggacagtacccggcaataagaaacaagctactgctacacacagcaacgtgaatggatctcg

SEQ ID NO: 268983 - DNA, 128 bp, Homo sapiens
  chr16:23497824-23497952
  hypo
gagaagtacggcagcgggatttctggttccaatcaccaccttgctgcccttgagggagactatggctgttccccagagttcagggctaggagccactctttctcccaggcaaccgttcctctacccct

SEQ ID NO: 268984 - DNA, 35 bp, Homo sapiens
  chr16:23510926-23510961
  hypo
atcccagaactttgagaggccgaggcgggaagatc

SEQ ID NO: 268985 - DNA, 72 bp, Homo sapiens
  chr16:23511603-23511675
  hypo
caagggaaggcccaagctaccggagaggagccaggagccgagctgcctcacggggaacatgctgagctgttg

SEQ ID NO: 268986 - DNA, 256 bp, Homo sapiens
  chr16:23539149-23539405
  hypo
aggcgtgagtcaccgcgcccagcaaaggatgatcgttcttactgcatcatctctatgttcggaatgtttgtgttcccctaaattcatatgttgaaattttaacccccaaggggacagtattcacaggtgtgggctttgggaggtgaacaggtcatgcaggccgagcccttatgcacagatgagtgcctttataaaagacaccccagagagtccctcgtccctccaccacgtgaggatgcagcgaagggctggaaaa

SEQ ID NO: 268987 - DNA, 35 bp, Homo sapiens
  chr16:23551963-23551998
  hypo
acataaaggtttgggctgagcgcagtggctcatgc

SEQ ID NO: 268988 - DNA, 384 bp, Homo sapiens
  chr16:23577993-23578377
  hypo
ttcttggatatttattaaccatcagacttttaaaaaataatcccagggaagatacaattctgccctcagagacctttactataccattgccaaacccagtttcccacttgctcctacggagttcccagctcccacacgaagccctatgtgcactggtcagaagaccctgtcgtgttgtccccagagggcatggcgccagtcacttgagtttactgtagatcccgcagccaccagccctgatgagggactgctgagtcagagaagttagaacaggagggccctttgaataatcactgtaatccctctcaacttagagcggactgagaaattgcccatgggctccataaaaaatgtggtcagtgaacctatcgaaggacatgaaga

SEQ ID NO: 268989 - DNA, 210 bp, Homo sapiens
  chr16:23595588-23595798
  hypo
aaaaaaagaaacccagtgcccgtcagcagtcactccccatcctccctagctctggcaaccacccgtgtactttctatctctggatttgcctcttcttgacatttcatgtaaatggtatataacgtgtcatcttctgtgtctggcttctttcactcggcacgttctcaaggttcgtgtgctgtaacacacgtcacccatgcattttttttt

SEQ ID NO: 268990 - DNA, 85 bp, Homo sapiens
  chr16:23606211-23606296
  hypo
tatcctaccttaagacggttatttttattcccaactgcacttcagagtcatctggagaacttagaaaacaacaaaaaaaaggcag

SEQ ID NO: 268991 - DNA, 41 bp, Homo sapiens; identical to SEQ ID NO: 216856
  chr16:23689211-23689252
  hypo

SEQ ID NO: 268992 - DNA, 172 bp, Homo sapiens
  chr16:23702179-23702351
  hypo
ctcctggcctctgagtctggcgggtagtagggcaggaagaggctctcagaggcgcagctcctcatggctcggtgcgtgtggaggagcagccgtgggaagcggtttgtgaagtactggacgaagccatcagggacttggccgagtgcctgtcgcacctcaactgggagctccc

SEQ ID NO: 268993 - DNA, 91 bp, Homo sapiens
  chr16:23716302-23716393
  hypo
gtgtctcgagccagcgtgagatgcggcagctggcgcaggccgtcctggtgccaggtgtagacgcccatcacaggcacgcccaggtcctgtg

SEQ ID NO: 268994 - DNA, 86 bp, Homo sapiens
  chr16:24079284-24079370
  hypo
gagagagagagctgaggaagaggttattttccatgcaggttggggtcacccttctggtggtgatcgagctcactgtgtgctggttt

SEQ ID NO: 268995 - DNA, 142 bp, Homo sapiens; identical to SEQ ID NO: 216859
  chr16:24118921-24119063
  hypo

SEQ ID NO: 268996 - DNA, 121 bp, Homo sapiens
  chr16:24131552-24131673
  hypo
tgatggaaatgttccgcgtcttgtttggggtttgggttacatgggtgtgcacatttgtcaaaatctacagaactgtgcacgtgagattggtgcactttgcggtgcccacctcaagtttcaa

SEQ ID NO: 268997 - DNA, 42 bp, Homo sapiens
  chr16:24288802-24288844
  hypo
aaggtaaagggagctgagtgcggtggcttacacccgtgatcc

SEQ ID NO: 268998 - DNA, 342 bp, Homo sapiens
  chr16:24372758-24373100
  hypo
tatggttggtccttttatttcggagccttctctttcatcatcgcagaaattgtaggagtggttgccgtgcacatctatattgaaaaacatcagcagttacgagccaaatcccactcggagttcctgaagaaatctacttttgcccgcctcccaccctacaggtatcgattccggaggcggtcaagttctcgctccaccgagcccagatcccgagacctgtcccccatcagcaaaggcttccacaccatcccttccactgacatctcgatgttcaccctctcccgggacccctcaaagatcaccatggggaccctcctcaactccgaccgggaccacgctttt

SEQ ID NO: 268999 - DNA, 41 bp, Homo sapiens
  chr16:24587543-24587584
  hypo
gctggcattataggtgtgagtcactgcgccagccagtcatc

SEQ ID NO: 269000 - DNA, 34 bp, Homo sapiens
  chr16:24707390-24707424
  hypo
cgagagcggtggctcgcccctgtaatcccagcac

SEQ ID NO: 269001 - DNA, 163 bp, Homo sapiens
  chr16:24739330-24739493
  hypo
gtcataatcagttaacgttttggtgcatatgtttcatgactttctgtgcattcattcactagcttaacctatcggagaggacaggaacccaacatgtctagggaagttttgtttgtttttaacgggagagattcaagcatgttgtaaagccagttgaagctgg

SEQ ID NO: 269002 - DNA, 80 bp, Homo sapiens; identical to SEQ ID NO: 216861
  chr16:24772184-24772264
  hypo

SEQ ID NO: 269003 - DNA, 761 bp, Homo sapiens; identical to SEQ ID NO: 216862
  chr16:24837123-24837884
  hypo

SEQ ID NO: 269004 - DNA, 247 bp, Homo sapiens
  chr16:24849492-24849739
  hypo
ccctactaggaatacggaagatggtcattaaaatagtagcacacagttatttagcacttacggaagaaagctcaacagtttacaggtgttacctcattgaaggctcgccactattctgtgaaggaggtgttgttatttctccctcgtttagcggataatgaagcagatttgcagaggtgaagtaacttgcccacgtcacacacctactgagccgtgaagtctaaagacaaagcgtgtgtctctgcaa

SEQ ID NO: 269005 - DNA, 153 bp, Homo sapiens; identical to SEQ ID NO: 216863
  chr16:25006925-25007078
  hypo

SEQ ID NO: 269006 - DNA, 125 bp, Homo sapiens
  chr16:25009670-25009795
  hypo
aggggaggctggcaaggcagcgcccaggacagcggcacaggtggcggggccttggacagagggtggggtccaggcaggtgggtggtgacggcaaccatgaccacgggtcaacctgggcctcagac

SEQ ID NO: 269007 - DNA, 120 bp, Homo sapiens
  chr16:25071330-25071450
  hypo
tcattcttgaagggagttgtggcgtgctccctttccagctgtggcaaaactgcttattttctcaccaacacagtttgttataaaacttgttaatcaccgggcgcggtggctcacgcctgt

SEQ ID NO: 269008 - DNA, 84 bp, Homo sapiens
  chr16:25168834-25168918
  hypo
ctgggtgatacaatgcaacgctgtctcaaaaaaaaccagcaacaacaataaaaaaaaaactgattaggacgataaagtatataa

SEQ ID NO: 269009 - DNA, 185 bp, Homo sapiens
  chr16:25266495-25266680
  hypo
cactaggcgtgctccgagtcttccctcttaccattcttgggtaagggccgacgttctcgctttcggttcagctgttcctggtgtcctgagtggaggcttccaggttcctcccgagacaccgccctgggttgggtctccacctgctctggctggaagtctgccacctcccacgctgctccaagtgg

SEQ ID NO: 269010 - DNA, 31 bp, Homo sapiens
  chr16:25290985-25291016
  hypo
ttgaaataggcttgcgcgctggcgcttgctg

SEQ ID NO: 269011 - DNA, 307 bp, Homo sapiens
  chr16:27052120-27052427
  hypo
ccatatttccaaacagaatgcgacggttccaggcaaagcaaatcaatattgtgctccgccattcatcttcattcgcgccacatccgcgcgctatccccggcgcttctcgcccaggctcctggtaatgggttcccggacgctgacaaataggattctcggaggcagccacgccacgttagcagattaaatcattaatacccgcatcggtcatttttacgagcctgccttaccccgaactcctcaccaccccggtgttgagtacactgttagtgatgcaggcagacacggagaggatgaaattgccact

SEQ ID NO: 269012 - DNA, 158 bp, Homo sapiens
  chr16:27063490-27063648
  hypo
agaatgccgggagccgaatcactgccgtgctggtaataagtccaaatgaaagatattatgtcaccgcgtttgaattaaacagatgaactatagtcctagaccattacaaatgaaccaatctgctggacggcttccaagtgctccgcgctgagcgcccc

SEQ ID NO: 269013 - DNA, 35 bp, Homo sapiens
  chr16:27219620-27219655
  hypo
cctggctacaaagccgcacacgtgaggccaccttg

SEQ ID NO: 269014 - DNA, 37 bp, Homo sapiens
  chr16:27220819-27220856
  hypo
ttacaggcgtgagccaccatgccggccttctcgaata

SEQ ID NO: 269015 - DNA, 32 bp, Homo sapiens
  chr16:27242669-27242701
  hypo
gcctgtggccgggcacgctggctcacgcctgt

SEQ ID NO: 269016 - DNA, 477 bp, Homo sapiens
  chr16:27244720-27245197
  hypo
gtcgccttgcctcacggctggcctcggaggcagtgagagagagacacggcaggcaggaaccgctggggaagacaggttcctgcacacgcaggtgtgtgctcagctcagcacctgctcctcaaccttggtggctaataatccccaggagaagatctaaaaggaatgattccaccgcctggttctcagagatttggattcaacagatcgtgagtggggctgaaatgtctgaattatttttcacctctgcagttattatcattgcatctaggcctgagaaccactcttagccatgtgtttgagcagaaggctgagcaaatagctctgaagcctggtagaacagtacctgtcaaatgtgcacgtgcaaaggattcagtgggcacctggcaaaaatgcagattcggactcagcagtctagagtggggactgggaccgggcctttctaacaagctcccaggcgatgctgctgctgctgccttt

SEQ ID NO: 269017 - DNA, 165 bp, Homo sapiens
  chr16:27268604-27268769
  hypo
ttagaaagatgggcccgtgtaagattgtgaagaggcttgaatgctcagctcaggagtaccggttaacaagttacatggtattgtacctatgtcactggtccctgatcaacacagcaccagagcgccctgggaacagggaaacggtactcacggtcatggaccttg

SEQ ID NO: 269018 - DNA, 36 bp, Homo sapiens; identical to SEQ ID NO: 216868
  chr16:27309235-27309271
  hypo

SEQ ID NO: 269019 - DNA, 179 bp, Homo sapiens
  chr16:27356584-27356763
  hypo
aagtgcccaggaaggcgtattgagatgaggtgtgcttgctggaaggcatgcctgctgctgattgaaaaccgaactgggaacattccttccattctgtgtccactggtcagctgctgcggctttggatggtcttgaccgtggaaggctgaccttcttctggtacccggagtccctgcagg

SEQ ID NO: 269020 - DNA, 81 bp, Homo sapiens; identical to SEQ ID NO: 216869
  chr16:27475124-27475205
  hypo

SEQ ID NO: 269021 - DNA, 73 bp, Homo sapiens; identical to SEQ ID NO: 216870
  chr16:27475235-27475308
  hypo

SEQ ID NO: 269022 - DNA, 574 bp, Homo sapiens; identical to SEQ ID NO: 216871
  chr16:27475618-27476192
  hypo

SEQ ID NO: 269023 - DNA, 188 bp, Homo sapiens
  chr16:27506624-27506812
  hypo
cagaggaggacggccggacgcctgccctgcctgactcctgctttatcgttctccgttcactgatgaagcttggcttctccacggtgttgctggcagggtgcccgtagatgaggtaccacagaaacatgtggaccacccgcaggcgaggcattttgggcagaaatcctagagaacgccccagtccggga

SEQ ID NO: 269024 - DNA, 338 bp, Homo sapiens; identical to SEQ ID NO: 216872
  chr16:27510216-27510554
  hypo

SEQ ID NO: 269025 - DNA, 238 bp, Homo sapiens
  chr16:27517091-27517329
  hypo
ggcaggcctcggcacgcagcactctcgctgtggatgattccactgtgatcatgtgattcctaaacacagaaacgatgaggccacagactccttcttggagacagctccctccctctgcatgcactgacctttgggttttccatccggacctcctcgatcacagctatgtcaccactgttgctgtccgcacagtgggagacaaaggacacgttgggttctgagacgctgctggtatcta

SEQ ID NO: 269026 - DNA, 276 bp, Homo sapiens
  chr16:27523016-27523292
  hypo
ttgactcaaattctcgggatccatatccaagctggcatgggaacaagacttactgaggtcgtaggtctgtgtgagcatatcccgctcgaacacaatgtccactggaggcactgtcttggagatgacctcctcgtcctcgtcatcatcatggtcattccgtttaaattccttcagcagcttgaggcaccgaaccatgacgtcggtccctggcaacacaagcacgggtttgccagcaatgagtgaaagcagtgctgcgtgggggaggtgaggggttct

SEQ ID NO: 269027 - DNA, 68 bp, Homo sapiens; identical to SEQ ID NO: 216873
  chr16:27523536-27523604
  hypo

SEQ ID NO: 269028 - DNA, 37 bp, Homo sapiens; identical to SEQ ID NO: 216874
  chr16:27539546-27539583
  hypo

SEQ ID NO: 269029 - DNA, 55 bp, Homo sapiens; identical to SEQ ID NO: 216875
  chr16:27539976-27540031
  hypo

SEQ ID NO: 269030 - DNA, 160 bp, Homo sapiens
  chr16:27568346-27568506
  hypo
atttcagtgccttccgtgcattggaattcagagatgccaaaatgagtaagattgaatccaggtgaaggcgatatgggaattcattgtactattcttgacatttttctgtgaagttgatttttttttttttttttgaggtggagtctcactttgtagccca

SEQ ID NO: 269031 - DNA, 103 bp, Homo sapiens
  chr16:27640048-27640151
  hypo
tctgtctatgtcaacggtgccaattcggagctgaaatcatcaccgcggaaagctattcactctgacttctccagaagtgcctcccacacggaggggacacacg

SEQ ID NO: 269032 - DNA, 113 bp, Homo sapiens
  chr16:27735234-27735347
  hypo
gttgcgaggcacctcgagtcaggaaactaacaggacaggcagccccggccagctgtgtgtacgcacagtgctgcccagagctttctctgatttctgatcgttgaggttgtttg

SEQ ID NO: 269033 - DNA, 543 bp, Homo sapiens
  chr16:27748861-27749404
  hypo
gagagcaagggaagagcactcgggaggcctaggactgagccctgggcagcctagtcgttcaaagtgcagccgaagaaaaggaagcaacccaggagtcgggcaggctcagccagcgaggcaggaggaaagccaggtgggtgcagagccacacaagccccagggaggaaagtcatcgcaaaggaggggaagctgccgagtactgccgagccgccacacccacccactcctaggagaaattcctattgcgtatggcagtcagctggaccctgtaatttactttaggaaccagacacttctgagagtcattagtaatgacaccaggataacagatataaatcagaattgtcccagacaaactaggatggcccgtcaccctagttacaggtgcccgggccaggtgggttccatgtggaggtggaggcagaagcccaacgggaggaggaacaaggggtagtgggaggaggagcccacggggacagtgacactcagagattcactgacggggtgacggacagatcatgcggggggccctgcaatggaata

SEQ ID NO: 269034 - DNA, 218 bp, Homo sapiens
  chr16:27750004-27750222
  hypo
gtgaagaaatcatccggagaacttgttctgagtccagaagttacctacaggctgccttgaggcagtggtcctcacacggcatcctcctggctcccttccaactgcagctgccgtgaacatgggacagtccccgcatgtggacagtgccctgcctcaggtgctcgtggggtgctctgccgtgggagcacactcagctcgtgcatgtgttggggcatcag

SEQ ID NO: 269035 - DNA, 635 bp, Homo sapiens
  chr16:27780834-27781469
  hypo
actagtggtgcacatggaagcgcctgagtccatgcccttgacctccatctcatgccgccccaggccgctgcagctgttgaggtgggcgaggccttggccaagtcacgtgccacccctgaaagccgtggaccagtgtccgctgtagcagggggctcgcctgtcttgtcctctgctacctgcccagcgcccacacagcacctgatatgggaaatggacctcggtcaggtggctctgcgaaaggctccccatggtgagcacagctgccagcagctccggtcacgtcagcaccgcttctgtccccacatggcctgcctcccttcagtcatgttatttcttttgtttgccaggccaagattgtccacgtctccctggatggcctgtgcgtctccccgccagagggctttctcatccggaaggggccaggcaactgccactttgattttgctcaagaaatcctcttcgtggactacctacgggctcagctgctgccccagccggccaggaggtgaggagaaagtgggcgccacacacagcccctcccggcccctgggcccgcttgctttgcaagttgctctgatgtacattccgaaagggttttgaaacgatgatcaaacgcattgcttttcaacttagtc

SEQ ID NO: 269036 - DNA, 243 bp, Homo sapiens
  chr16:27790983-27791226
  hypo
ccccttcagccacttcccagcgagttggaaatgtgccttgcacccccagccgagtgaagcccagaacgcatctatatgcatcgatgtaacaagctcggatcagggacctaattggtttcccagtagtgggtaatttctcgttgcaaatattaatccgttgtttttctggcgcccagcccggcccgccgcagtactgtactcgaggtacgttcctatgcaaccgagagccccggcaaatacttc

SEQ ID NO: 269037 - DNA, 42 bp, Homo sapiens
  chr16:27945907-27945949
  hypo
tttccaaggaaaggagaatacggaagagagagtggagaagtt

SEQ ID NO: 269038 - DNA, 172 bp, Homo sapiens; identical to SEQ ID NO: 216876
  chr16:28043670-28043842
  hypo

SEQ ID NO: 269039 - DNA, 94 bp, Homo sapiens
  chr16:28093979-28094073
  hypo
gccacacccatttgttagtgttctccgtggctgcagttcatgctccggtggcagagttgagcattcgagacagagacaacggcctgcaaagcct

SEQ ID NO: 269040 - DNA, 440 bp, Homo sapiens
  chr16:28104122-28104562
  hypo
ggattacaggcgtgaaccactgtgcccaaccaaaacctgagtgtctttaaaaaaaaaatctacctgttgccaaaatgcctgccgcctacgtcaggtctgtggatctctgggacgtttcattgaaatacttaactttccaacccaccccttggtacctgactgacccagggaaagcttctgccacccttcagaggcccctgggggctctgagtcaggctctgaccagcaccacggagctctctctgcccaccccaggaggccgcataacccggcctgctctcaatgcctgcccccactcagcacctccaagccctgaggcaattaattaacaaggcttttaaaagatgttttcaaatgatacaaacagggaagggcggaaaagggagtccttgagctacagaaattcttcactgaagagcctttcacgtaagtgcttttcc

SEQ ID NO: 269041 - DNA, 156 bp, Homo sapiens; identical to SEQ ID NO: 216878
  chr16:28116153-28116309
  hypo

SEQ ID NO: 269042 - DNA, 164 bp, Homo sapiens; identical to SEQ ID NO: 216879
  chr16:28128687-28128851
  hypo

SEQ ID NO: 269043 - DNA, 88 bp, Homo sapiens
  chr16:28183883-28183971
  hypo
ggaaggaaagcggtcggtttcaatttcgattacttctccaggagcctagaaagggtataaccaacccaccgcacgtaaggctgggtta

SEQ ID NO: 269044 - DNA, 141 bp, Homo sapiens; identical to SEQ ID NO: 216880
  chr16:28332354-28332495
  hypo

SEQ ID NO: 269045 - DNA, 111 bp, Homo sapiens
  chr16:28585539-28585650
  hypo
tgctgaggtccagtgcggtgtttaaccttgatcctaggacattctaggaccaaggctggcccttttcccatgattcttccctcacggcgagctgcccgcatgcacagtgtg

SEQ ID NO: 269046 - DNA, 120 bp, Homo sapiens; identical to SEQ ID NO: 216881
  chr16:28822780-28822900
  hypo

SEQ ID NO: 269047 - DNA, 129 bp, Homo sapiens
  chr16:28845818-28845947
  hypo
tcttccaggctcccttcctccgcagcgctcggaccaacaccagccagcctcagccccgccgatgatgcaggccgccgcggctgctggcccgcctctggtggctgccacgccctattcttcctacatccc

SEQ ID NO: 269048 - DNA, 218 bp, Homo sapiens
  chr16:28878637-28878855
  hypo
ttctcctgacttaggcctctcggccccgactcagcatcccctgctcttctatcacagacgtccggacaaccacagccctggagatgcctgaccgggagaacacgtttgtggttaaggtaggaattcaacttcccagccgccggcagtgcttgtgttaaggagaaagccctcagcgcatttaagcaagtggcgtcgccgaaaggaggtatatatatgtg

SEQ ID NO: 269049 - DNA, 58 bp, Homo sapiens
  chr16:28887787-28887845
  hypo
cgccaaaagccttggcgggtgtgagcctgagtccagcggagacggtgggtgctgggcc

SEQ ID NO: 269050 - DNA, 203 bp, Homo sapiens
  chr16:28911981-28912184
  hypo
tgacgccgggatccgggtgatcatgatcactggggacaacaagggcacagccattgccatctgccggcgaattggcatctttggggagaacgaggaggtggccgatcgcgcctacacgggccgagagttcgacgacctgcccctggctgaacagcgggaagcctgccgacgtgcctgctgcttcgcccgtgtggagccctcgc

SEQ ID NO: 269051 - DNA, 231 bp, Homo sapiens; identical to SEQ ID NO: 216883
  chr16:28914705-28914936
  hypo

SEQ ID NO: 269052 - DNA, 74 bp, Homo sapiens; identical to SEQ ID NO: 216884
  chr16:28915762-28915836
  hypo

SEQ ID NO: 269053 - DNA, 530 bp, Homo sapiens
  chr16:28922055-28922585
  hypo
ccctcttacctacctggcaccggttccagggtgtggcctgagcagctggggacaggacaggttccttgacttcccacgtgcccccttccaccacgtgcaactgattcctgctggactcctcgccctcctgccctagggcccccaggtactcaccatctgcagctgcacccgctcctgggcctggctcacggtcccttgcagggtccgcagcagctgctctgagttctggacctgggccaggagcacctgcatctgggttggagggagggcgaaagtgagggcaagggcatgtcagggggcggcaggtagccagaggccggctggggctgcagcagcggcagggacccacctgcttggcacagtcctcattgctccgtctcaggccctcttggagctcgtcccgctcgcgactgacgctctccaggtccttctgcagctgtcggccctgccacagaccctgccttcagcctgcatctcccaggaacttggcccccctcaccacacttctcgtggcccacctctgcagggag

SEQ ID NO: 269054 - DNA, 116 bp, Homo sapiens; identical to SEQ ID NO: 216886
  chr16:28925776-28925892
  hypo

SEQ ID NO: 269055 - DNA, 113 bp, Homo sapiens; identical to SEQ ID NO: 216887
  chr16:29001662-29001775
  hypo

SEQ ID NO: 269056 - DNA, 99 bp, Homo sapiens
  chr16:29023076-29023175
  hypo
ctcccaggcctcctcgccctacctctgggcctgactcctgttccaccagccttgcgtggagctcctcccacccacctgctgcgtcggggtgaagggagt

SEQ ID NO: 269057 - DNA, 178 bp, Homo sapiens
  chr16:29118743-29118921
  hypo
aggcacgcaggtagcggccccatcggagggtggcagaggtgggacggtgctgccgggccaccagaggcagcaagcccggcggacaaacaccctggctgccacgccctggcccggcccccccgacctcaccttccctcggggcccaggcggagccagctagaggcgggcacctggggtg

SEQ ID NO: 269058 - DNA, 217 bp, Homo sapiens
  chr16:29150831-29151048
  hypo
gcttctgaggcagccggacacagctcttgacgcagaaggttgattttgtttggatctctcttgaccagacaaggtagggttaagtgtgtgaagggggagaagggaatgcagacctcctggaacttgaaacttcccagcccagagccagccagtgcgtggagacgcagccccaacgtgctgctgctgctgcggacacctggggcgtggagccagggca

SEQ ID NO: 269059 - DNA, 264 bp, Homo sapiens
  chr16:29153227-29153491
  hypo
aatcctctgtggcacgcgggggggggtgtggaataatcctccgtggcacgagggggtggtggaataatcctccgtggcacggggggtggaataatcctccgtggcatgagggggcggtggaataatcctccgtggcacgagggggcagtggtataatcctctgtggcacgaggggtcggcggtataatcctccgtggcacgaggatggtcaccgcattcgtcactcttagctgcagtgcgtgtgacagtcgccagggctgctgt

SEQ ID NO: 269060 - DNA, 444 bp, Homo sapiens
  chr16:29169932-29170376
  hypo
gccagagggctgggaaacagcggagatggcgcgccccacctgggagaacacaggcagctggaggacgtcggcggtgttactgtcacggtcacctggactgggcggttgcaggcggccggatgctggacccgcagcgtgagctccacggccgcagcagggaggcgagagccctcaaccagggacggagccgccctgtccacggagcctccagacccaccagaacgcctgggtcaccgcggctcccgggcgggcctcactgcgctgggacacgtcaggacacgtggcagctcccagcgcggtggaaggcctgagccctgggaacactggctggaaaatggaactcggaggacagagcttgtcgacggcgtctcgtatgaatcctggaggagacgcccgtgtcgagggcaattagaatccaggcgtgagccccggctggctgcgtcc

SEQ ID NO: 269061 - DNA, 187 bp, Homo sapiens
  chr16:29198308-29198495
  hypo
gtatggggggatggcgtgagggttccctcccacgacaggatatttctttctgaactcctgctgccctgggcaggttggtggggccgggggtgtggacagtgcccagcacaggctggacagggtatcccatttccagcccaatctcgttctctctgcacccctggaatgcaggcgaaggggccgagtg

SEQ ID NO: 269062 - DNA, 35 bp, Homo sapiens
  chr16:29229643-29229678
  hypo
gaattccggggtcacggcagcgtggcacccagcct

SEQ ID NO: 269063 - DNA, 218 bp, Homo sapiens
  chr16:29230253-29230471
  hypo
tgcggggacacgtgcgtgcacacagacacggactcacataaatgcaatccacatgcactcacaataggctcttatgcacagaccctcacactcatgtgaacacactcatgcacacgcaagacttacatattcacactcacacccgtgggcacacccagacatggatacacactcatacaggcacacacgtatccagacacccacgcacagacacactc

SEQ ID NO: 269064 - DNA, 105 bp, Homo sapiens
  chr16:29231513-29231618
  hypo
ctgctgttcctggtccgtcttactgtggagtgtattagactgcgggggcgtccacaaggggggtgtgggtgggcccggagacctttcttccgggaggccaagttt

SEQ ID NO: 269065 - DNA, 181 bp, Homo sapiens
  chr16:29231867-29232048
  hypo
ctcccatcacgtgccgggagctgatcttggcaggtcgcgtcctcccgaagcctgcacttcagccccagggttttccgaccgcctctgctcccagaggggaccctcaggggcgaagaggccgaagacagcaccgagacctcagtgtcgggcgcgggtgctcccaaagcgcagcgggcccacc

SEQ ID NO: 269066 - DNA, 77 bp, Homo sapiens
  chr16:29262666-29262743
  hypo
tattagttttccattcgcccaatcatttctaatgtggatcattttctttcaaatgataagagcgatgtttacttttc

SEQ ID NO: 269067 - DNA, 173 bp, Homo sapiens
  chr16:29324695-29324868
  hypo
ttgcctcaggggatcgtgaatggaaatctgatcttgaaacagggcgagcgaggtggagcactcagcgtccgggatctcagcgtgcggggggcctccgggatctcagcgtgcggggggcgtccaggatctcagcgtgcggggggcatccgggatctcagcgtgtgggggctgct

SEQ ID NO: 269068 - DNA, 34 bp, Homo sapiens
  chr16:29420290-29420324
  hypo
tacttgcggctgggcgtggtggctcatgtcccag

SEQ ID NO: 269069 - DNA, 99 bp, Homo sapiens
  chr16:29697748-29697847
  hypo
gcttcttttcttcgcgagcacgcctaccctgtgctagacagtgttcctaagggctttcaaacataaagtcttttgttttttgtttttgagacgcagtct

SEQ ID NO: 269070 - DNA, 180 bp, Homo sapiens
  chr16:29703876-29704056
  hypo
gactatctccaaaaaaaaaaaaaaagtgtgggtatatagtaggtgtatatatttatggggtgcacattgataaaggcatgcaatgcataataatcacatcatgggctagatgcggtggctgacgccgagatcgcgcctctgcagtcgccaggccactgcaggcgccacagtggcgacaga

SEQ ID NO: 269071 - DNA, 413 bp, Homo sapiens; identical to SEQ ID NO: 216893
  chr16:29755602-29756015
  hypo

SEQ ID NO: 269072 - DNA, 84 bp, Homo sapiens
  chr16:29797109-29797193
  hypo
ggcaaagggtgtccacgtgggatagactggcatagcttcctggccacccatggtgctccattatctcttcgaggaccccttctc

SEQ ID NO: 269073 - DNA, 31 bp, Homo sapiens
  chr16:29820500-29820531
  hypo
aactgggttgagaccgcggggcactggaggg

SEQ ID NO: 269074 - DNA, 225 bp, Homo sapiens
  chr16:29820788-29821013
  hypo
taggagatcagccccgtctctggggtctccgcctggctgacccccgccccatcccaatccaccccccaataggcttcaccacggcagcatacctgcgcatccacgcggtgaaggaccacgggctccaggccccgcgggctgaccgcatcctgtgcaagctgtgcagcgtgcactgcaagacccctgcccagctggccggccacatgcagacccatctgggggggg

SEQ ID NO: 269075 - DNA, 83 bp, Homo sapiens
  chr16:29821043-29821126
  hypo
agccacagcccacctgctgagggggacccccgcacccaccaggcaaggcgtggggcatggctggggggcgggatggggggtgt

SEQ ID NO: 269076 - DNA, 123 bp, Homo sapiens
  chr16:29825625-29825748
  hypo
gtgcctccacccctcgccctaaccccagtcccggaacagcctgcagcagggggacgtggacggggcccagcgtctgggccgggtagccaagctcttaagcatcgtggcgctggtggggggagt

SEQ ID NO: 269077 - DNA, 219 bp, Homo sapiens
  chr16:29830866-29831085
  hypo
cttctccaggaagctcagcccggagccagaaacgggaggcccgcctggacaaggtgctgtcggacatgaagagacacaagaagctggaggagcagatccttcgtaccgggagggacctcttcagcctggactcggaggaccccagccccgccagccccccactccgatcctccgggagtagtctcttccctcggcagcggaaatactgattcccactgc

SEQ ID NO: 269078 - DNA, 34 bp, Homo sapiens
  chr16:29834879-29834913
  hypo
attaagagtcagaggccaggcgcggtggctcacg

SEQ ID NO: 269079 - DNA, 120 bp, Homo sapiens; identical to SEQ ID NO: 216895
  chr16:29835153-29835273
  hypo

SEQ ID NO: 269080 - DNA, 217 bp, Homo sapiens
  chr16:29853060-29853277
  hypo
ctccagcccttggcgccccggaacaagacccgtgtggtcagctaccgcgtgccccacaacgctgcggtgcaggtgtacgactaccgagagaagcgagcccggtgagtgctggcagcgcagggtgtagggggtggctctccatgggtctggctctgaccctcggctgtctctgcagcgtggtcttcgggcctgagctggtgtcgctgggtcctgagga

SEQ ID NO: 269081 - DNA, 207 bp, Homo sapiens; identical to SEQ ID NO: 216897
  chr16:29857083-29857290
  hypo

SEQ ID NO: 269082 - DNA, 34 bp, Homo sapiens
  chr16:29866930-29866964
  hypo
cgcctgccaccacgcctggcgttctatgcaacca

SEQ ID NO: 269083 - DNA, 161 bp, Homo sapiens
  chr16:29873348-29873509
  hypo
gcctgaatggacttgtattcagagagacctccagcagcgccaccgccatgtcatgtcttgctaatccacacctctcacaagcagtgagttctcaagagctagcttaaattccttttgctacaaaatcagtccattcttgctgggcgcggcactttgggagc

SEQ ID NO: 269084 - DNA, 561 bp, Homo sapiens
  chr16:29912776-29913337
  hypo
tgggtagagtgaggcgggcagctcagggtggcccaggccctgggagagggccaggggtcctaggtattcagcgcccaggcctgcttttcctaccagacctgccttcagccccctttgtgccgcgggacgcccagcggcacgacgtggagctcctggagagcagcttccctgccattttgcgggacttcggggctgtgagctgggacttctcagggactacccctccgcctcggggctggtccccacctctggcccccgggtgctaccagctcctgctgtaccaagcaggccggtgccaacccagcaactgccgccggtgcccgggggcctatcgggcactgagggggcttcgaagctttatgagtgccaacaccttcggcaatgccggcttttccgttctcctgcctggggcccggctcgagggccgctgtgggcccaccaatgcccgggtcagatgccatctgggtaagtagctgccgcctactgacaacctccttgcctcgatgatttcccccccagacccttctctccgccagagccgtctgctgtctggttctcatt

SEQ ID NO: 269085 - DNA, 104 bp, Homo sapiens
  chr16:29971777-29971881
  hypo
cctgttgtgtccttcgatgcacagaaaagactcttttctctactgaacgcccacagcacccttgtcaaaaatcatttgactagtcagggcacagtggctcacgc

SEQ ID NO: 269086 - DNA, 215 bp, Homo sapiens
  chr16:29997641-29997856
  hypo
gcacgaggccacgcgggagctggagctgcggcagctccaggccgtgcagcgcacgcgggctgagctcacccgcctgcagcaccagacggagctgggcaaccagctggagtacaacaagcggcgtgagcaagagttgcggcagaagcatgcggcccaggttcgccagcagcccaagagcctcaaagtacgtgcaggccagcgccccccgggccttc

SEQ ID NO: 269087 - DNA, 170 bp, Homo sapiens
  chr16:30000466-30000636
  hypo
cttgttctcgtgcacgttctcatatttgctcacgtgcttctgtctctaggtcacagtctctccctctttgcctggtcagagcttccaagatcctcagttccctgtccagtaactccgatgttctttctcgtgggtatcgcacccaactccgtgcacgtgctcttggaacc

SEQ ID NO: 269088 - DNA, 287 bp, Homo sapiens; identical to SEQ ID NO: 216901
  chr16:30000930-30001217
  hypo

SEQ ID NO: 269089 - DNA, 766 bp, Homo sapiens
  chr16:30017148-30017914
  hypo
cctctgaacctcccctaatccgacctcctccctgttgggggagagggacggggcagcgtggagaggcaggagtgaggagcgcgggggcctggggccgggctctgagcactgcccgggtgtgcagatgatggggggtttgcatatttgcagggactagcgagtcaggcaggaggtttgcatatgtgaatatagaactccgcagcccctcatgagcagacagacccgggtcacggagactcacaaaaataggtagtgcagggtgggggcagcccaccctgtgtaaacgtgcaacacactcgtgcgaaggttgggtactggacccggctcgatgggcctgtgccgggacactgctgtccactcaggctgaggacagagccccggccgcagggggcagctcactggtcagggtgtgccagcgctccagggctgcgtccggctgctgcaggcagtcactccagtgcttccgagcctcgcctcgggcacctggccccagggacacgccacctggggagcaggtgggcagggtcagggccacctccctgccacttgcccgccctcaacacccgcagccagctcctccctcaccaatgaagtcattggatttgccaatgtcatagtcccagacggtgacttccagggtcttggtggccagagtggagagctctatctcgtagaaaaactcctagggacaaggccggccacccgttcgtgagccagctccccagcccctccctggcctccctccatgtcccgtcccctcctgggt

SEQ ID NO: 269090 - DNA, 37 bp, Homo sapiens
  chr16:30018172-30018209
  hypo
ctaccagcagtccccggcgccgcgagctgtagctgag

SEQ ID NO: 269091 - DNA, 123 bp, Homo sapiens
  chr16:30018455-30018578
  hypo
gccccctcccctggcgcccctgcagcccccacacagaccgggacctggcgctcgaggcagatgttaaaatgcttcttctgcgaaggcttgaggcggcggaggggcacgcggatctccccaata

SEQ ID NO: 269092 - DNA, 121 bp, Homo sapiens
  chr16:30040914-30041035
  hypo
acgactgcgctttgcgttcagccacttctcgggccagtccttgcctgccttcgcccaaggctgggctgcctgaggtgtgccccaccacaggtacctcacggctctccggcccgctcggctg

SEQ ID NO: 269093 - DNA, 204 bp, Homo sapiens; identical to SEQ ID NO: 216903
  chr16:30061414-30061618
  hypo

SEQ ID NO: 269094 - DNA, 120 bp, Homo sapiens
  chr16:30073149-30073269
  hypo
ggattacaggcatgagccaccatgtctaaccatccattttctcttttgtaaagaagcccattactcaggattctggtaattaaaaaatataaggctgggcgcggtggctcacacctgtaa

SEQ ID NO: 269095 - DNA, 33 bp, Homo sapiens
  chr16:30079668-30079701
  hypo
gccaccatgcccggcttaagtaactaaatattt

SEQ ID NO: 269096 - DNA, 201 bp, Homo sapiens
  chr16:30116121-30116322
  hypo
acaacgatgtgatcgaaaggcaaatatttatttttcaggaagagaaacaggagacctcgaggcttctggacttaggaggtccgggcagctggtccatggttgtccaggtagtgccgcagggctgtgggataatccgttatgacgccagtggctcccacgctgaaggctgcttcaaaatccgactcttcattaaggcaccaa

SEQ ID NO: 269097 - DNA, 49 bp, Homo sapiens
  chr16:30124065-30124114
  hypo
tgtcagctgacagtcgagctccaggaggtccgagcgctgggccatggag

SEQ ID NO: 269098 - DNA, 360 bp, Homo sapiens
  chr16:30124534-30124894
  hypo
cacaccctgccctgccacttcgctctccttctctcttggtccctgccccgtttctagcatgcccccttggacctacccctctgtgctgtccactttggcacctgttctcacccctacccggctcacctcctcggtgggcccccaggcggatgcggaaggtgggagccctgggcgtgtgcagcagatgaggccggcgcaggaagaagatggagagcatggcatagctgcccagggcagggagggcatagtacagcaaaaggctcatgaccgtactcccacagaagctcctgcagccacacgctcagccgtccgcgggactgtgctgcctgcctagccagtgtgggccggctctactactgg

SEQ ID NO: 269099 - DNA, 127 bp, Homo sapiens; identical to SEQ ID NO: 216905
  chr16:30125291-30125418
  hypo

SEQ ID NO: 269100 - DNA, 155 bp, Homo sapiens; identical to SEQ ID NO: 216906
  chr16:30169920-30170075
  hypo

SEQ ID NO: 269101 - DNA, 43 bp, Homo sapiens
  chr16:30195390-30195433
  hypo
gggcttggagacaggaaggggttgagagcaaaacaagaaaaga

SEQ ID NO: 269102 - DNA, 403 bp, Homo sapiens; identical to SEQ ID NO: 216907
  chr16:30199143-30199546
  hypo

SEQ ID NO: 269103 - DNA, 198 bp, Homo sapiens
  chr16:30354617-30354815
  hypo
ctcttccaggtggaatttgacgatgccaccaaggcatcaggtgagtgccagctggggctcgaggactttctcctctccgctccctgttctgggagcagggtcaggggcttcgcggagaaggcggaggagagctggaaggtgctgctttccttgtgctgctggcgcgccactgcacttcagcctgggagacagagcgag

SEQ ID NO: 269104 - DNA, 157 bp, Homo sapiens
  chr16:30402328-30402485
  hypo
ggattagaggcgtgagccactgcgcccggccgaataaacttacattctatcttcatctttcactgctttcctaatatgtaaactcacggcacattaaaacggaactattctctattttcctctctgaagataggtcgtaatccatagtcatctttgg

SEQ ID NO: 269105 - DNA, 63 bp, Homo sapiens
  chr16:30430047-30430110
  hypo
ttgtgttggttggaggtgatcgcacacttggcccttggttacgtcctcataaccttagacctg

SEQ ID NO: 269106 - DNA, 52 bp, Homo sapiens
  chr16:30442022-30442074
  hypo
tccactcacaccagggaatacgcgaggtggcgagtcacagggttgctgcttt

SEQ ID NO: 269107 - DNA, 39 bp, Homo sapiens
  chr16:30506741-30506780
  hypo
aatgctgggattacaggcgtgagccgctgcacctggtag

SEQ ID NO: 269108 - DNA, 850 bp, Homo sapiens
  chr16:30566778-30567628
  hypo
cccgcagtccgggcacgggtagggcttctcgccggtgtgggtgcgcacgtggcgccgcaggtccgaggggtaggcgaaggcgcggccacagtccgggcaggggaagggggtctcgccgctgtgcacgcgccggtgctggtagagggcagagctctggctgaagcggcggccacagtcggcgcagccatagggtttctcgccggtgtggacgcgcaggtgcgaagtcagcgccgagcgctgcgtgaaggcccggccacactccagacagcggtggggccgctccccacgatggatggcccggtgtttgctcagggaggaagcgtggccgaagcccttgccgcagtcagtgcagtggaagggcttctcgccagtgtgactgtagacgtgctccaccagtgtggagcgccaggcaaagctcttcccgcacacgtagcagccatgacgctggtcagctcgggggacaggggggtgggcacagagggaggggcgtccccggtgcggtgccttggacagctgctcccaaccataagggggcccggccgagggggcttggggagacttcagcccaggagacccggcggccacagggtcgggcttctccagggctcccgtcccttccctttgtctttcctttttcttgtttctggaatctgctgagagataaagaggggagagttcaggctcggctcatcctggtccttgaatcccacagcccgcgtggacagggacaggcctgctggatccccggctgctcctgggagatggaggagtgacacctgttcctcggctgcagagccagacagagccgggagggagagaacagcccattccgcctcggggctggggaaat

SEQ ID NO: 269109 - DNA, 111 bp, Homo sapiens
  chr16:30567840-30567951
  hypo
agcctgcaggtgaacggcaggggtgggtcctgaggtggaggtagagtcaacagagtttaagagactgggcgtgggggctcaaggcggtaatcccagcgctttgggaggtag

SEQ ID NO: 269110 - DNA, 38 bp, Homo sapiens
  chr16:30609413-30609451
  hypo
attataggcgtgcaccctgtgcccggtcgacaagctat

SEQ ID NO: 269111 - DNA, 33 bp, Homo sapiens
  chr16:30610867-30610900
  hypo
attacagacgtgagccaccgcgcccggccatgt

SEQ ID NO: 269112 - DNA, 47 bp, Homo sapiens
  chr16:30737305-30737352
  hypo
acttagaacctttccgtggccccaaaaagaaacgctgcacctgttag

SEQ ID NO: 269113 - DNA, 115 bp, Homo sapiens; identical to SEQ ID NO: 216909
  chr16:30780232-30780347
  hypo

SEQ ID NO: 269114 - DNA, 56 bp, Homo sapiens; identical to SEQ ID NO: 216910
  chr16:30784032-30784088
  hypo

SEQ ID NO: 269115 - DNA, 68 bp, Homo sapiens
  chr16:30790407-30790475
  hypo
ttcctaccgcaagacgcctgaccctacgaactgtgcgctcacatcatccatcccgtacaagagccaag

SEQ ID NO: 269116 - DNA, 100 bp, Homo sapiens; identical to SEQ ID NO: 216911
  chr16:30794665-30794765
  hypo

SEQ ID NO: 269117 - DNA, 39 bp, Homo sapiens
  chr16:30803841-30803880
  hypo
attacaggcgtgaaccaccatgcccggcccaatgctctt

SEQ ID NO: 269118 - DNA, 198 bp, Homo sapiens
  chr16:30826379-30826577
  hypo
gggattttggttggttggttggatggagccttacagtttggatgtggtgagcatgaaatgcatacgttcaagaagctgagccgacaaagggcttactctaggtggactgaaaattcgatgtttccaattcaaaacatctgctctccgaggtgtgggtgaaggtatggggggtccaaaaatgtccgagtcccaccacct

SEQ ID NO: 269119 - DNA, 41 bp, Homo sapiens
  chr16:30831399-30831440
  hypo
ggattacaggtgtgagccattgtacccggcctagtttttaa

SEQ ID NO: 269120 - DNA, 118 bp, Homo sapiens
  chr16:30833278-30833396
  hypo
gagccctctgtatcgtggcctgccgcaaagcagatactcctccggactctgggcttgttgccgttgttggctgcagccatggatgccctccctgccacacagcgcctgctggacaccg

SEQ ID NO: 269121 - DNA, 47 bp, Homo sapiens; identical to SEQ ID NO: 216913
  chr16:30835266-30835313
  hypo

SEQ ID NO: 269122 - DNA, 660 bp, Homo sapiens
  chr16:30845547-30846207
  hypo
ctccacgcctccacccgaggcgggcgcctgggctgaaaggccgcttgtccacatgggttcccaggttggcctgctaggctgacaccctggtggaaccacttgccgtatgtcctcgggcgctggaggtctcccagcgctggcatacataagccctggcgtgcggggcggcttctgcgctggggtctctgcgcgtgcacgggcctcaacatatgcatggacgtccaggtgccacgtgggcatctcgtggtgctgcagaaggcgggaggccggcgggtcccctgcgcttgtccccgccacggcccttgcccgctgtggacccggaggctcagtgccggcaggactcgggactcggcgcctctcccggggtggcaggcgcctcgcatggcacactcagaccgctgggagggtggccgcatgggtgcgtgaggaggtgggcgaggcagcccagtgcacccctcccctaggcctctagcaaggcggcctcaggcactggatgtggtccgagttctgccctaagcccttcccatgcattcgggcgccagtggcgagccagatgggtgctgtggccttaggttcgggcaggtgtggggccgctcgccctccgatgttaccgcggtgggtgagctgggaagctctttccgccctcggggcacaggtagt

SEQ ID NO: 269123 - DNA, 284 bp, Homo sapiens
  chr16:30906986-30907270
  hypo
tccagcaattgctcacggcaatacacacacccactcacacgaacacacgcacacacatgcacgcgcacatgcacacacgcgcacacctgcacactcacacgcacacaaatccactcgcacacacgcatgctcacacgcacacacgtccgcatgcacgcacacacgcagacacacgcaagcgcacacacacacgggcctcctcgtcttcattcacaaaccccattagcttctgttgtctatgggcttcctcgacagaccgcgagcccctcgcgggggccagaaac

SEQ ID NO: 269124 - DNA, 42 bp, Homo sapiens
  chr16:30938666-30938708
  hypo
ggaggctgggaaggaggacacggtggagggagaggaagagaa

SEQ ID NO: 269125 - DNA, 146 bp, Homo sapiens
  chr16:30939038-30939184
  hypo
ctcacccccagcttctgtcccgcctaggattcaggtgaggggcctggccgccgtagggccgacaacggcgaggagggcgccagcttggggagcggatggaagctgacagaggagccaccgcttccaccgcccccgcccaggcgcaa

SEQ ID NO: 269126 - DNA, 198 bp, Homo sapiens
  chr16:30939779-30939977
  hypo
cctggtaggtgaaaggaggccgagagaggcacctgaagaaggtgggtggagacgcctgcctcctccgaggatcggacccaggcggcccgggcctgctgccccccagggttctgaatccgagccaggctttctcatcctgccaccctgggctccctcccgagaactgggaggtgtgccggggacctcctccctcccctt

SEQ ID NO: 269127 - DNA, 458 bp, Homo sapiens
  chr16:30958051-30958509
  hypo
gcaaacagagagccgtggtcggctgcagggggtggcagaactgcgtctggcaggtttggagctgacagatgcctccctgcgtctcctgctgcgtcacgcaccccagctgagcgccctggacctgagccactgcgcccacgtcggggaccccagtgttcacctcctcacggcccccacgtccccactccgcgagaccctggtgcacctcaatcttgctggtaagcacggtcccccatccgtcctgccagcctgtggatccccacggccagtgccaaccccttgctcacctgcctggtctcagctccactgccccatccccaggttgccaccgcctaacggaccactgcctcccgctgttccgccgctgccctcgtctacgccgcctagacctgcgctcctgccgccagctctcacccgaagcttgtgcccggctggcagctgccgggccccctggcccc

SEQ ID NO: 269128 - DNA, 250 bp, Homo sapiens
  chr16:30964630-30964880
  hypo
tctgctgccccacattgaagctgtgagcaacatccacaacctcaactctgtccaccagtcgccacaccagagactgcaccgctacgtggagctggcctggggcttctccactgccctgggcacctttctcttccttgctgaagttgtcctggttggttgggtcaagtttgtgcccattggggctcccttggacacaccgacccccatggtgcccacatcccgggtgcccgggactctggcaccagtggct

SEQ ID NO: 269129 - DNA, 64 bp, Homo sapiens; identical to SEQ ID NO: 216919
  chr16:30968112-30968176
  hypo

SEQ ID NO: 269130 - DNA, 226 bp, Homo sapiens
  chr16:30991260-30991486
  hypo
gggagggcgccctccggaggcgcagcctccgctcccacgcccggcgccgccgccctccgcccccacccccgccgccaccgccccgcgcctacgagccacgcagtgagtttgaacagatgaccatcctgtatgacatttggaactcgggcctggactcagaggacatgagttacctgcggcttacgtacgagcggctgctgcagcagacaagcggggctgactggct

SEQ ID NO: 269131 - DNA, 253 bp, Homo sapiens
  chr16:30991713-30991966
  hypo
tgggtatgctcagcggcgtgggccccgccctctcctttggctgggacgcaggtggccagagaggagccgttctcttccttaacaccctgcactcaccaacctgaccaccccaaaacgcaagcggcggccccaggatgggccccgggagcaccagacaggctcagcccgcagcgaaggctactaccccatcagcaagaaggagaaggacaagtacctggacgtgtgcccagtctcggcccggcagctggagggc

SEQ ID NO: 269132 - DNA, 148 bp, Homo sapiens; identical to SEQ ID NO: 216920
  chr16:30993851-30993999
  hypo

SEQ ID NO: 269133 - DNA, 204 bp, Homo sapiens; identical to SEQ ID NO: 216921
  chr16:30995028-30995232
  hypo

SEQ ID NO: 269134 - DNA, 150 bp, Homo sapiens
  chr16:30999438-30999588
  hypo
tcgtgggaggatagccggacccgtaccattctctgggtacaggccgctacgggttcagcccagtgacggtggggctggggcctggaggcccagatacagcacatccacccaggtcccgagccctcacaccctggacgggaagggacagct

SEQ ID NO: 269135 - DNA, 210 bp, Homo sapiens
  chr16:31000909-31001119
  hypo
tacatcacgtgacacgccagtgacacagaaacacacgccaacgcacacggctgcacagcgggcaggggcggttaggggaaagggagccggggccacccatcttgtcctctgcagggcgggctggggggcagggtgaatgcatagaacacatcatgtgtacacgctcagggcgtggcaagagcgtgtgtcgacccacgggtacatgggatg

SEQ ID NO: 269136 - DNA, 63 bp, Homo sapiens
  chr16:31009764-31009827
  hypo
tggcccagggatattggaatcggctggcccagattggggcccgactgtcagccttggggctgg

SEQ ID NO: 269137 - DNA, 142 bp, Homo sapiens
  chr16:31012794-31012936
  hypo
ctggggctgggtgctggggctggggctggggctgggggccttggaggcccattacctgttcaaagaactcatccatgaagtggtcccgatccacgtggaccacctcctcttcatcatcactgtctttcgcctggggacaagg

SEQ ID NO: 269138 - DNA, 104 bp, Homo sapiens
  chr16:31013740-31013844
  hypo
cacacaggaataggcccccccgacacccacacggagatgcactgatgctggcgttcacccgcacgcagactcacagctgagccgcactgacatgtgtggacaca

SEQ ID NO: 269139 - DNA, 37 bp, Homo sapiens
  chr16:31039944-31039981
  hypo
cttgttgcccccagcgtacaatggcgcagtcttggct

SEQ ID NO: 269140 - DNA, 108 bp, Homo sapiens
  chr16:31073553-31073661
  hypo
ctcttcccgcactcggagcagaggaaggggcgctcgccggtgtgggacctgcgggggtgtggaggacttggcatgaaggcgacagacccataacgtgaccccactgcc

SEQ ID NO: 269141 - DNA, 230 bp, Homo sapiens
  chr16:31099849-31100079
  hypo
acaggccccgccaacgcaaactgcagctggcccgagaaaatctcatccatgttgacacaggtggccacatataccaccccacagagtcctacggagttacatccccactggtggactgtcgcccacaggcggtccccccaccaagaagcagggactgctggggcagagatggcccctgagcccccaccaggccacacccataccccagcacatggcggcttaccctccat

SEQ ID NO: 269142 - DNA, 319 bp, Homo sapiens; identical to SEQ ID NO: 216925
  chr16:31131559-31131878
  hypo

SEQ ID NO: 269143 - DNA, 425 bp, Homo sapiens
  chr16:31138387-31138812
  hypo
cttggagaaggagcatgaggcggtaagtggggctgggaagctgcctgcaggtcccccgtctccccttgccgaggagcccctgctgagccgtgcactgtgcctcactcccaccctgcctgcagatcaccaaggtgaagtatgtggacaagatccacatcgggaactacgaaattgatgcctggtatttctcaccattccccgaagactatgggaaacagcccaagctctggctctgcgagtactgcctcaagtacatgaaatatgagaagagctaccgcttccacttggtgaggctgggccggccgggccgagctgggcaggggcccggtgagaggcagaggcaggcatggagactgagggcggctgcgccggcagctccagggaggagacaggcccaaaggagcgagtacagggaagagctgctg

SEQ ID NO: 269144 - DNA, 306 bp, Homo sapiens
  chr16:31142700-31143006
  hypo
aggggaggccaagagcggatgttcttcatttcacttcacacatgcacggcaagttgtgctcaaacattttaatcatttctgccctgttactcccaccccagatccaagcgccagcccagttccggtgggggctcagtcctccggagtccaggagtcagggctcgggggcgctcagcggccagtgggcaagattggggcctttcctgtcctcgaagctgcacaaaggtggccccagcccagaacacagggagagggcagagagatgtgctcatcagtctgggcaggcgggccgggagcagtcttcca

SEQ ID NO: 269145 - DNA, 110 bp, Homo sapiens
  chr16:31384660-31384770
  hypo
accttctcccaccccgcaggactgtcctaccgctacgtggcagagggccaggtgcaccctctggggaaggaggaggaggcagggctgggcgttagcgtagattcccgtgc

SEQ ID NO: 269146 - DNA, 114 bp, Homo sapiens
  chr16:31415513-31415627
  hypo
ctcacctcctctcccgcatccctcacccctgcgcaccccctgtgctacccaggcactcaccgtgggcctgccccgtgcacatgcagtctattcctaaaacgatgtaggaggtgg

SEQ ID NO: 269147 - DNA, 306 bp, Homo sapiens
  chr16:31422484-31422790
  hypo
actatgagcagacccgagggggccaggtgtccgtgtgtcccttgcctaggggggtgagtggctgatgggacctaggctgggtggggtccggtgtgagtggaggcgtcacctggattggggtctgacactgcttgtgttcagcagagggtgcagtggcagtgtgacgctgttctccgtggtgagcagggccacccctggggccgctttggggcagccctgacagtgttgggggatgtgaatgaggacaagctgatagacgtggccattggggccccgggagagcaggagaaccggggtgctgtctac

SEQ ID NO: 269148 - DNA, 50 bp, Homo sapiens
  chr16:31438631-31438681
  hypo
ggctcccatgggggctctgccgagctgccggaacttggacaagtcattta

SEQ ID NO: 269149 - DNA, 576 bp, Homo sapiens
  chr16:31446854-31447430
  hypo
cccacctcggtctcttaaagcgctgggattacaggtgtgagtcaccgcccgcagccgcacctgcctaaatcccttaatgtataagggaaaggagcgagaattcaggggaaaaaaaacaaacaaaatagcccccagcacttctgagaaagatctgccatacagaaaagccgtcctgagcgggtctgtgtggagggaggggactgcatctcagatccacagtccaccggcggctgcaacaattccacccagggctgcagcacgctggttcttcagtgtcgggccaggttggacctccggctggaggccttccacaccggaaacactggtagggctcctctccagtgtgggttcgagggcggtggaggagctcggcactgtcgctgaagcctggccctggcctcgccgagcggtccggccgctctgtgctgcgaggccttccgggctggctcagggtagcctggggcctgaaccgcctcccgcgagtcccgtcccgcgctcgcacagcttctgggccccatcgccccctcctgctgagctgccggctgggtggctggcggaacctgggcaacttccagg

SEQ ID NO: 269150 - DNA, 202 bp, Homo sapiens
  chr16:31464579-31464781
  hypo
cgctgggaatacaggcgtgagccaccgtaccaagacatcccacagcaccagcctgtgtgtgtctcgccaggctcagagctgggaacctggaacccaggactgggtgagctcagagacataactgtgactgtactggagtcagtcttatgcccagagctaagcagaagcagggccagcccagaggagacgatgttaccgactc

SEQ ID NO: 269151 - DNA, 351 bp, Homo sapiens
  chr16:31475825-31476176
  hypo
cccgacctcgctgcgggcaccacgcacccaacgcactccgggccgcagccccgccgccgccatcgaggagccttggggacgcgaagggccagccctgctgctgctgtcgcgcttttcccaggcccctgacccaagtggggcacttgtgaccggcccggcgctgtacggcctgctgacctatgtgaccggcgcaccgggcccgcccagcccacgtgcactgcgcattctgtcacgcctcacctgcaaccctgcctgcctcgaggccttcgtgcgcagctatggcgcggcgctgctgcgggcctggctggtgctgggggtggcgcctgacgattggccggcaccacgtgcccg

SEQ ID NO: 269152 - DNA, 215 bp, Homo sapiens
  chr16:31487139-31487354
  hypo
gtcaatcctggagcgcagctggaagacggaacacgggagctagatctccatcgcttacaggctgcgtgatctcgaacactggattctttattctgatcgctcagagaggactcgaaaaacgccgcgtaaatcttgcctcactgggcatgtggttgtcagagccgctctgacccgcctcacctcccactcgcaggtggtgacggctctgggccgcg

SEQ ID NO: 269153 - DNA, 152 bp, Homo sapiens
  chr16:31497941-31498093
  hypo
gtggggcctgaggtcagatgcggaccagagtaggcagggcttggtgccaaggcccgcttgagggacccacctccagaaggaacggaactgagtataggaccttagacaatcatcctctcctacgatgacgcagaaaaaactggggccggctg

SEQ ID NO: 269154 - DNA, 513 bp, Homo sapiens
  chr16:31500252-31500765
  hypo
caggcggcacagggcgggcagctcttcgattacatccaggcagtctctagctacctggcaccgcccgtgtccgccgtcttcgtgctggcgctcttcgtgccgcgcgttaatgagcaggtgagcggcacgcgcgtggtgacggcagggctgggcttgcacatcctcagcaggctgacctgtttccttcgcagggcgccttctggggactcatcgggggcctgctgatgggcctggcacgcctgattcccgagttctccttcggctcgggcagctgtgtgcagccctcggcgtgcccagctttcctctgcggcgtgcactacctctacttcgccattgtgctgttcttctgctctggcctcctcaccctcacggtctccctgtgcaccgcgcccatccccagaaagcacgtgagtggccaggtgccccaggcaagcactgtgggacacagcacctaccctctgcttcctggagtgcccagctgggaggacctgaatttctcgactgagggttggg

SEQ ID NO: 269155 - DNA, 164 bp, Homo sapiens
  chr16:31508122-31508286
  hypo
cccttcccctccccactccacgccctccctccagctctggcactcacctggctgctgtccttggctgacacgtcagccatgttgttcctccgagcctggtgcacggtcagggcagcccgagtggccccaccagcaacactcacgatgcactgggtgggagggga

SEQ ID NO: 269156 - DNA, 37 bp, Homo sapiens; identical to SEQ ID NO: 216934
  chr16:31557995-31558032
  hypo

SEQ ID NO: 269157 - DNA, 60 bp, Homo sapiens
  chr16:31607115-31607175
  hypo
acacataagaacacactccacgtgtttgcaaattctcacgtttgcaaattcattttagta

SEQ ID NO: 269158 - DNA, 125 bp, Homo sapiens
  chr16:31725813-31725938
  hypo
ggtaggttttagagctcgctagatgcttgtggagagctgatgagatgggaagaaggcaccccacctcgatggacctgaaagagagagcctgcgaattgagaagcgggtgtgtggaataaccctga

SEQ ID NO: 269159 - DNA, 198 bp, Homo sapiens
  chr16:32485424-32485622
  hypo
ctcgggatggcgcccggcctgagggctgagggcccgggaaaggcacacggtggcggtggggtctctctcaggaaggcgctggctctgcagacagctccgcctggtgacccctctttggcactgagctgggaacatggtgtccgcactcccggctagcaagcagaggcccgtgtggtcaggtggcggctggcagtgtag

SEQ ID NO: 269160 - DNA, 36 bp, Homo sapiens
  chr16:32649134-32649170
  hypo
atgggagggtaggacggggtgcggtaagggcagggt

SEQ ID NO: 269161 - DNA, 175 bp, Homo sapiens
  chr16:34986007-34986182
  hypo
ctggggcttggatgtgggaccgcctggggagaccgggctctggaggcttttggcttcccgctttcttcaggctttctctcgctcgttggcgcaattcccaaccgctccctgactctggctccctcatttctgcccggaccttctcctccgccacgatcctgggcctccaggtggg

SEQ ID NO: 269162 - DNA, 542 bp, Homo sapiens; identical to SEQ ID NO: 216935
  chr16:46683291-46683833
  hypo

SEQ ID NO: 269163 - DNA, 97 bp, Homo sapiens; identical to SEQ ID NO: 216936
  chr16:46717908-46718005
  hypo

SEQ ID NO: 269164 - DNA, 48 bp, Homo sapiens
  chr16:46721678-46721726
  hypo
cggatgcaaaagtgcgacaccaagaagactaagcgagctgcctaaatt

SEQ ID NO: 269165 - DNA, 109 bp, Homo sapiens; identical to SEQ ID NO: 216937
  chr16:46781699-46781808
  hypo

SEQ ID NO: 269166 - DNA, 303 bp, Homo sapiens; identical to SEQ ID NO: 216938
  chr16:46934654-46934957
  hypo

SEQ ID NO: 269167 - DNA, 93 bp, Homo sapiens
  chr16:46941061-46941154
  hypo
cctagacactactgcagcctcgatttctgtccggagtgcacaccagcaggtccagctgcagagaagccgggggacacccgagggtagccactg

SEQ ID NO: 269168 - DNA, 137 bp, Homo sapiens; identical to SEQ ID NO: 216939
  chr16:46945509-46945646
  hypo

SEQ ID NO: 269169 - DNA, 78 bp, Homo sapiens; identical to SEQ ID NO: 216940
  chr16:46952490-46952568
  hypo

SEQ ID NO: 269170 - DNA, 34 bp, Homo sapiens; identical to SEQ ID NO: 216941
  chr16:46992085-46992119
  hypo

SEQ ID NO: 269171 - DNA, 44 bp, Homo sapiens; identical to SEQ ID NO: 216942
  chr16:47001892-47001936
  hypo

SEQ ID NO: 269172 - DNA, 40 bp, Homo sapiens; identical to SEQ ID NO: 216944
  chr16:47288965-47289005
  hypo

SEQ ID NO: 269173 - DNA, 189 bp, Homo sapiens; identical to SEQ ID NO: 216945
  chr16:48177832-48178021
  hypo

SEQ ID NO: 269174 - DNA, 107 bp, Homo sapiens
  chr16:48209332-48209439
  hypo
ggggcaagaaacaagcggggcctcagtttcctgcatctgcactagcggaagcacagatcgcacctggcgatcacacctgacccgctgccctccgtggcccattcttc

SEQ ID NO: 269175 - DNA, 45 bp, Homo sapiens; identical to SEQ ID NO: 216946
  chr16:48290944-48290989
  hypo

SEQ ID NO: 269176 - DNA, 214 bp, Homo sapiens
  chr16:48291761-48291975
  hypo
gcgggaacagagagcggcctgtgctccgacaaatcactagtgagagttggttgagtgcttctgttctcttgtgtatgtaaacatttaatattttgaacctataatttgtttagatctaatatgaaaacacattctgggcttcaagagagtaattcccagaaagagttgacgtcaactgtgtgtctggttttttcatcttaaaaacacacagctt

SEQ ID NO: 269177 - DNA, 351 bp, Homo sapiens; identical to SEQ ID NO: 216947
  chr16:48381406-48381757
  hypo

SEQ ID NO: 269178 - DNA, 97 bp, Homo sapiens
  chr16:48420736-48420833
  hypo
tgagatgtgtttctcgcccccagaacccctgggccgctctgcaagcagtgaaatggatacggactaagagagaacttgccaacgtggcgattaaagt

SEQ ID NO: 269179 - DNA, 153 bp, Homo sapiens
  chr16:48530539-48530692
  hypo
gccggctgagggccgcagctctgccgggatcaggcttcacggtggcgcggccgctgtcccggatgctgcgccggctcctaaggtccaacgccacggagctgcagctcacgggttccggtgatgccgccccgcccgggcgagtccccgcaagct

SEQ ID NO: 269180 - DNA, 86 bp, Homo sapiens; identical to SEQ ID NO: 216948
  chr16:48530910-48530996
  hypo

SEQ ID NO: 269181 - DNA, 99 bp, Homo sapiens
  chr16:48535068-48535167
  hypo
gcacccggtctcggacgcattttcattaggtgccctctgacgtcagcagctggttgaaggtttaatggcttagagtgcgcacagagtggggtgggaact

SEQ ID NO: 269182 - DNA, 156 bp, Homo sapiens; identical to SEQ ID NO: 216949
  chr16:48577583-48577739
  hypo

SEQ ID NO: 269183 - DNA, 142 bp, Homo sapiens
  chr16:48641646-48641788
  hypo
ggatagctggggagaatggacgaaggggaatgcgccttagaccagctgtctgcaatccaactgactaaaaaagttaagcccaggaaagcaaacttggttctatatctacaatgctggctttctgatttgttttgttttgttt

SEQ ID NO: 269184 - DNA, 120 bp, Homo sapiens
  chr16:48642028-48642148
  hypo
aacatacatcctttctttctgacattctccgagcgttttattactattaatggtttttttccgattctcaagaacacggttttcaccgtgtgacacaggacagtctcaatctcctgatct

SEQ ID NO: 269185 - DNA, 147 bp, Homo sapiens
  chr16:48663529-48663676
  hypo
atggggcccggaaccgcagcacagacctcactcaagagcttgttagaaatgcacagtgctggctgggcgcggtggctcacacctgtaatgggaggccgaggcgggcggatctcctgagctcagaagttcggaatgaccctgggcaac

SEQ ID NO: 269186 - DNA, 114 bp, Homo sapiens
  chr16:49465046-49465160
  hypo
taccctcgacatcccgaatcctgatgtcaccactctaaacaaaacatttaccagcaccctcccatggcggcaccgtgactgcccgcacaagggcccccacgtgtgagttctccc

SEQ ID NO: 269187 - DNA, 124 bp, Homo sapiens
  chr16:49577674-49577798
  hypo
gtgggaactcaggcacagagcgccagctccagacgcaagccggagtcatatgaccccggtcacagcgaccgccactcacgggctggctgaccttgggcaagtcgctgacctctctgaatctcag

SEQ ID NO: 269188 - DNA, 221 bp, Homo sapiens
  chr16:49670789-49671010
  hypo
tcccagttgcaggccgtgcagcggtacatcttcttctcattgctgtgcttcaccgccaggtgcacctggatggacaccttggagtcgaagacctcctgacacagggtgcagtggtacaacacaaaggtgtgcatgtccagcaggtgcttctgcaggtcatccaccgaggaaaattgcttgtcgcagctctcgcacacatagtgggtcgacgtggtcatgta

SEQ ID NO: 269189 - DNA, 107 bp, Homo sapiens
  chr16:49671511-49671618
  hypo
gaaagcattattaccgtcagaggggttggcgttggggccgcagtgggagacgcggatgtgctcctgcaggctattgatgtcggcgaacatctcggggcagtagttgc

SEQ ID NO: 269190 - DNA, 128 bp, Homo sapiens
  chr16:49671878-49672006
  hypo
ttctgcccccgcagcggcttcaaggtggagtccggggtggagccacgctccacagaggcgctggagtcgggtgtggcgctgctcatggaggccacgctgcccagtacagggtcgggactgacactgtg

SEQ ID NO: 269191 - DNA, 388 bp, Homo sapiens
  chr16:49672243-49672631
  hypo
gctgaaggtgtcctcgcagtagtcgcacatgaagtcgtccttcttggcttccttctccgacttggccagatgctccttgttctttttgtgggcctgcatgtggctctgcagcgagctggtggaggagaagccgcgcttgcacacagtgcacttgaagggcttgctggagctgtgggtcttcaggtggatcttgaggtggtcgctgcgggagaaggctgcctcgcactcgtggcagtgatacttcttgtcgcccgtatgcagcttgatgtgccggtcacggctcctcttgtgcttgaagaggcggctgcagtaggtgcacttgaacggcagcttgtcgctgtggatctgctcgtgcctcttcaagtagctcaagcggatgaaggacttg

SEQ ID NO: 269192 - DNA, 346 bp, Homo sapiens
  chr16:49766756-49767102
  hypo
gcttccttccaaggcggggaacgttgcacgacacgccgcctggaactgcgcggaggcagtaaaaatcaatgtttccatttgtggcccatcaaaacatctctcttcttaccaattaagggatgtacagtttttaggttcttttattatcagaacgcgccaactcctggcaatacagaaatcccattaaaagtcaggcagcatatttatctcagggaatctgatctgccgctgcagtgagggtaagaaatagaaagcaaagaaatgagaaatatcatttggagccttcgatattgtaagtcatcatacaaccatggttacacagtcaagtgcccgtctccgaaattcc

SEQ ID NO: 269193 - DNA, 31 bp, Homo sapiens
  chr16:50070329-50070360
  hypo
ataagccaccgtgcctggcctctttaataat

SEQ ID NO: 269194 - DNA, 32 bp, Homo sapiens; identical to SEQ ID NO: 216951
  chr16:50218668-50218700
  hypo

SEQ ID NO: 269195 - DNA, 44 bp, Homo sapiens; identical to SEQ ID NO: 216952
  chr16:50227517-50227561
  hypo

SEQ ID NO: 269196 - DNA, 87 bp, Homo sapiens
  chr16:50272245-50272332
  hypo
ctctgtcccccccccaaaaaaaaaaaaaaagaatttctgctgtaatttctattctttggaaaagtcttttctcggggctggggttct

SEQ ID NO: 269197 - DNA, 143 bp, Homo sapiens
  chr16:50285663-50285806
  hypo
gccttgcctgtcattgtccccgcctggcctccgggggctcccagttcactgtcctaggaagtgatcgcagggtgctgggccacaaagcttgggttctccccttccccggcctgctcccccacgcagagggcatagcattgcac

SEQ ID NO: 269198 - DNA, 652 bp, Homo sapiens
  chr16:50335358-50336010
  hypo
ggagctaatccgagcgaggccttcacagtgcgcctggcacgtcacagcattctatgtattctcgtcactcttggtttattttccatgaggtggttattaatctcccagatttccgagagacacactttcaaaacaagctttggatgaaactcaggaaagcagggagtggcctgggagccactgggcaggagcctctgagtgtcctgggtgctgactgcaggtcccctggtggctccaggaccccacggtggaggaggcagttccactgccctggccaggtggggcccgccttggcctgtctgctgcccgaccctggcctgcttcagggagtccggcacgtctggccacttctctgtgaatcatccatgaggcttgctcaagaatgtcggcccagccagcgagtggctcctttcactctggtcctcgctatgccttggggctggcccgactgccagaccctgggggaccaagggctggcctgtgagcctccctacacatctgctggcctcactctgcccccagcacccccagtgctgcaccatccatactgagccagcatctgggaaaacccctgccggtacctgtgtcccattccaccaccctcctagaatagggccctgatcctcgccctgtaccccggccctggccccgc

SEQ ID NO: 269199 - DNA, 562 bp, Homo sapiens
  chr16:50336215-50336777
  hypo
gcagccccccaccccgtgctgagatggatgcccggctcgaagctagtgctcagatagcccttgaatgagtgaagcagagctcctcacccaggaggctccaaaatccacccccgcaggctgccaggttgagcagggaaaactgcaggctgcctgggccgacttgaatttcagataactgtaaatcatgtttcgcataagtgttgcacgcagtactcaactggacagttgtatttatttggcggccccaccttccccccaccccaccctaccccaccctcttttttgtttaacttcatttatccacgcagttgaaagttcaaaaggtgtgaagggcgtgttgtagaaagactccttgtccccagccggcacatctcagaggggacctgtgcagtgagtttcttgtattccctccacagggattttcacggacaccgagtgaactgcgagtccccccacccttcttgctaaggtggcagtggcgggccccatggtcgcgcaccctgcatttttcctaccttggggacatccctcctgtgtgcagggtgctcgtctgtagctcctg

SEQ ID NO: 269200 - DNA, 116 bp, Homo sapiens
  chr16:50346833-50346949
  hypo
gtcatgtttgcctccgtgccggacttcaaagtgttctacacagagtgcgatgtcaacaaagaagggctggagtgcctacgcctgctcaatgagatcattgccgacttcgacgaggt

SEQ ID NO: 269201 - DNA, 277 bp, Homo sapiens
  chr16:50425278-50425555
  hypo
gtggggatgaaaggcgcgctggcataattatgggcgagggtgcgcgggggcgggcgggcggctttaccttgccgccagcgctattaatgatgaggctccctctttttcttctctagaaggggtgcctttggttttcgggaatggggtggggcaccgtgcgccgaggctgacatttggcgcaggtggtggggatgcgatgcattgctcagtgcagaggtgcttgggagccacagcgccctcgtggctgccaaggccctgtcatcgtgagaaggaggca

SEQ ID NO: 269202 - DNA, 183 bp, Homo sapiens; identical to SEQ ID NO: 216957
  chr16:50633343-50633526
  hypo

SEQ ID NO: 269203 - DNA, 72 bp, Homo sapiens
  chr16:50666332-50666404
  hypo
gcaccctgcaatgggcgatgagggcagggcgtggctggacgggccaggcgggccgtgcgggtggtgttcact

SEQ ID NO: 269204 - DNA, 57 bp, Homo sapiens; identical to SEQ ID NO: 216959
  chr16:50897229-50897286
  hypo

SEQ ID NO: 269205 - DNA, 578 bp, Homo sapiens
  chr16:51025075-51025653
  hypo
gggaggacaagctacggatggccggcacaagcctggaggcccgccgagcgccaggctggctgaggcccctcccttggcagcggcggcacctctgggaccttgcggtgggctgagctccttgcagacccagggtctaagggaggaggggaaggcaaggagacattgctgtggttttgcggccaaggagggaacgtacttaggatatttaggggatggacagggaaccggctccacttccctgcagcctctgcctgccagcgctcacccactggaacatgccatttgagaaatgtcttcattttctctgtcattggccaggttcccgccacactcgttgggagcgggaagaggggggcaggagagggaaggtaggggtcatagaccggagcgaaggattggaaaactggctcctaagagctctctgcacaaagaaaacaccatgggtcctgccaaatctgcccgctgcatggtctgacacccacacgtggccccctgagctccctcccgccatcccacaggaagtcccatttctccctggcccatggcccgatgggggcacacctcgaaccgaggcccaa

SEQ ID NO: 269206 - DNA, 93 bp, Homo sapiens
  chr16:52498848-52498941
  hypo
agatttgatgctgttcgcttacttagagaagtattatatctcaagacctaagtaagtcttaatgcattctttttttttttttttttttttttt

SEQ ID NO: 269207 - DNA, 191 bp, Homo sapiens
  chr16:53337682-53337873
  hypo
ctaggactttgtatcgcattgaacttctaaggaaagtacgggaacaggcccttcgacatccacagttgtttgaacgcttgaagctttgccatccaaatccagatttaccagtctggtgggaatgtggccctcatgatagggatttgcttattggtgctgccaaacacggggtgagccgaacagactatcac

SEQ ID NO: 269208 - DNA, 120 bp, Homo sapiens
  chr16:53448476-53448596
  hypo
gggcctggcccgaaaccgggtctcttaagggaaaaacaaaaaccacaaagattagccgggcgtggtgggccgcacaggtagtcccagctactctgaaggctgattgaggaggattgcttg

SEQ ID NO: 269209 - DNA, 101 bp, Homo sapiens
  chr16:53467355-53467456
  hypo
aaaaaaaaaaaaaaagtttaattcacgcagagccagctgaacggcagacaggagtttggttattcaaatcagcctaccagaaaattcggagactggggttt

SEQ ID NO: 269210 - DNA, 483 bp, Homo sapiens
  chr16:53563449-53563932
  hypo
caaatccttcatatagcaatcggctcctcttatcccccaggcaactggctgcctttcacctccgcggcacagcaattatgtggtgtaatggaggcagcgcaaataagcagaaagattttattaaaccaaatgagcaaatcatctgcgtattattgcgatttgattgacactgacaagtgtcgagcagacgcggatgtgaatatgatacagaagcttgcagcaaagctcttgataatgttactcttgataaagttgcctggccaccctctctaagtaaataaaggggagaggaatatgacgcatattaattcacccagtttgcagcctactggaggacgagaggggaaaaaaaagttgcaatgggttcagcgcgtggcattttatatgaataccaaaattgcattcatgattcacatagactttacgataatatattaatattaaaactaaaggtcattccacgtaacagttaagctgcctgag

SEQ ID NO: 269211 - DNA, 240 bp, Homo sapiens; identical to SEQ ID NO: 216964
  chr16:53659274-53659514
  hypo

SEQ ID NO: 269212 - DNA, 82 bp, Homo sapiens; identical to SEQ ID NO: 216965
  chr16:53825645-53825727
  hypo

SEQ ID NO: 269213 - DNA, 198 bp, Homo sapiens
  chr16:54128645-54128843
  hypo
tggagtggcctaggacgccaccgaagaggcgtaagatattttgcttcatcaaacgaatactgtgtgtaggtagagcatagaagtttagtctcatgagatgactccattcctaagggaatctagaggctttctgcggagcaccgtgacatagatcatatcatcctcctgcttaaaaccctccggcggttccccatctca

SEQ ID NO: 269214 - DNA, 35 bp, Homo sapiens
  chr16:54198162-54198197
  hypo
aagaaagttctggctgggtgcggtggttcatgcct

SEQ ID NO: 269215 - DNA, 95 bp, Homo sapiens
  chr16:54441923-54442018
  hypo
ctgataaggttgaacgtgataattaaaaatgtatttgccgttcctgcctgatggtatcagtgagaatcacctttctcaacatccagtgtttgaaa

SEQ ID NO: 269216 - DNA, 212 bp, Homo sapiens
  chr16:55052638-55052850
  hypo
aaagaaaggcagcttcgaggagtgaaaagttcccactctggcaggggcagaggtagaatttggcaggggcagaggtagaatttgaacccaggtccctcggcctctaaatgtcatgcagcagagtttcctctctggccaagaggttgcaggcagtggcctgcgtcacgccctcccttccccgggcactgcacccactccgggcccttttgaag

SEQ ID NO: 269217 - DNA, 46 bp, Homo sapiens; identical to SEQ ID NO: 216967
  chr16:55053597-55053643
  hypo

SEQ ID NO: 269218 - DNA, 35 bp, Homo sapiens
  chr16:55215532-55215567
  hypo
aaaaaaatttttttttgagacgagtctcgctctgt

SEQ ID NO: 269219 - DNA, 34 bp, Homo sapiens
  chr16:55215807-55215841
  hypo
cgtgtgccaccgcgcctggccaaaaatttttaat

SEQ ID NO: 269220 - DNA, 210 bp, Homo sapiens; identical to SEQ ID NO: 216969
  chr16:55739211-55739421
  hypo

SEQ ID NO: 269221 - DNA, 254 bp, Homo sapiens
  chr16:56309852-56310106
  hypo
gaagatggcttctccggagaagacgtgaaacagtacaagcctgttgtctacagcaacactatccagtccctggcagccatcgtccgggccatggacactttgggcatcgaatatggtgataaggagagaaaggtaggcccctgagcccataagcacagcaacaagaggttctgtctgtgttaccccactgcctcctctttatagtgctgggctgccttaaatgaacgagaagagactccgctatgtttgaaaga

SEQ ID NO: 269222 - DNA, 54 bp, Homo sapiens
  chr16:56345486-56345540
  hypo
cccacctggccctgcgctgaactgagaacccgaggagcgcgtcccctccctcct

SEQ ID NO: 269223 - DNA, 57 bp, Homo sapiens
  chr16:56368403-56368460
  hypo
cccgggagctgcatgcgtagcccttttggctgtgaatgagtgcgtgaggccaagacc

SEQ ID NO: 269224 - DNA, 165 bp, Homo sapiens
  chr16:56368690-56368855
  hypo
agcaggacatcctccgaaccagggtcaaaaccactggcatcgtagaaacccacttcacattcaagaacctccacttcaggtgaggcccagagaggcccccaggccctggcgagggctaagatgggacatgcccagcctctcagcgcattgcgtttacagcgccca

SEQ ID NO: 269225 - DNA, 253 bp, Homo sapiens
  chr16:56370683-56370936
  hypo
ggatccattgcttcgaggacgtcacggccatcattttctgtgtcgcgctcagcggctatgaccaggtgctccacgaagacgaaaccacggtgagtggcctgggccccccgggcagggggcagcgctgaggagacggccgcaggataggccagccctctgagcactgggcctcgggtgcccacaatggctctggggtccagccagctgttgtggttagaggtttccatcatggacaggccgtgccggcactcca

SEQ ID NO: 269226 - DNA, 365 bp, Homo sapiens
  chr16:56397996-56398361
  hypo
gtccagtggcacacgctcggtctggacacggggcaggaagcaaggaggcagctgtgagcacaggcctccctcctaagcaggttcctcacctacagggcaccccagacacggctgttctggacgcaaagagaaggctgctgccaagcagggaggcagaaactaggaaccacaagctacggataatggagcagcagcttccctgagggcaggcctgctgcctatggcttgagtagtactaagaacaggacctgactcacacagaatgttcggcatcagagggtaagtaaatgattaccagcatgaaaaacgtaagcaccttcaagctgcactcttagaatacgctaccaacacgacaaccgtgagtt

SEQ ID NO: 269227 - DNA, 189 bp, Homo sapiens; identical to SEQ ID NO: 216975
  chr16:56398931-56399120
  hypo

SEQ ID NO: 269228 - DNA, 194 bp, Homo sapiens
  chr16:56407221-56407415
  hypo
gatcaaagctgcaccgaccggagggaactccagtccactcgaaccatcctgtcccacaggaggaggggaaactgagaagtagattgaagttcacagtccagagcatgggctcactaaaagacggagccctaatcccaggactacagcatgcttctttccctcccccgacacctacatcacgacaggcctgttca

SEQ ID NO: 269229 - DNA, 135 bp, Homo sapiens; identical to SEQ ID NO: 216976
  chr16:56782260-56782395
  hypo

SEQ ID NO: 269230 - DNA, 74 bp, Homo sapiens
  chr16:56812017-56812091
  hypo
agactgaatgagagcgacacaggattctaaatgccatgggaattcagaggcgtggaagcggttaataacgaatg

SEQ ID NO: 269231 - DNA, 114 bp, Homo sapiens; identical to SEQ ID NO: 216977
  chr16:56857028-56857142
  hypo

SEQ ID NO: 269232 - DNA, 311 bp, Homo sapiens; identical to SEQ ID NO: 216978
  chr16:56857408-56857719
  hypo

SEQ ID NO: 269233 - DNA, 40 bp, Homo sapiens
  chr16:56869746-56869786
  hypo
tgtcctgttaccagccgggcgcggtggctcacgcctgtaa

SEQ ID NO: 269234 - DNA, 43 bp, Homo sapiens
  chr16:56902581-56902624
  hypo
agctgcactctggccgggcacggtggctcacgctttgggaggc

SEQ ID NO: 269235 - DNA, 266 bp, Homo sapiens; identical to SEQ ID NO: 216979
  chr16:56928223-56928489
  hypo

SEQ ID NO: 269236 - DNA, 78 bp, Homo sapiens
  chr16:56951555-56951633
  hypo
gaaggatttctgggcagcagcggtagcttgagcaaaagacagagtgaggattgccccgggcatgtctggagaacaaga

SEQ ID NO: 269237 - DNA, 39 bp, Homo sapiens
  chr16:56953540-56953579
  hypo
acacgcaggctgggcgcggtgcctcatgcttgtaatccc

SEQ ID NO: 269238 - DNA, 199 bp, Homo sapiens
  chr16:57222226-57222425
  hypo
tggttttccaaatatcgggcaatcatttcctgggatggtatcttgctttgtagatccctctatgagattgtaagagacttgtgtccctgtatgacattttactagtgtttggttcgtcgtacttgttagagatggttttccaaatatcgggcaatttatatgggattttttccgaagtaatttagttgtgtttttggtt

SEQ ID NO: 269239 - DNA, 168 bp, Homo sapiens
  chr16:57289764-57289932
  hypo
cacttgtgagaataaaaggccgtgctattctatttatgccagcacaaacagcataaaccaggactgttccagacccagcaagcaggaagtataggcagccttcctccggtcaaagagttcgcaggtggtgctgaacgactccagaacgtgaactgccctacagcaggc

SEQ ID NO: 269240 - DNA, 373 bp, Homo sapiens
  chr16:57298909-57299282
  hypo
ccagggaaggtgtcccgctctccagggctcagcacctgctcctccccacactggggtgaagctccagggatccaccccccaacacacagcaccctgccagcctctgctgcccgtcagcactctcaccgccgcaagcaggccaggtgagggtaggcaggtgaggaagccagggcggagccacagggccttgcccgctgtcacacaccaagctgggggcagagcccttacgagtgtggacccagggcaggatgtctcagaacaacaccctgccagaaacagacacacctggagaggccacgaacccccagagctggggggaggccagtgttctgaaggagaacaaacacttcgggcagcacgcctccgtcccttc

SEQ ID NO: 269241 - DNA, 94 bp, Homo sapiens
  chr16:57304016-57304110
  hypo
ggtttttagaaacaacgtaacggccaaaggggccaaggcagcaaatccttccatggcccccgagtccaaacacagtccccgagtctatccacaa

SEQ ID NO: 269242 - DNA, 84 bp, Homo sapiens
  chr16:57304959-57305043
  hypo
gctatggcaggaggacgatgctggaggtgggggctcagacctggtcctcctccaaggcgttcattgtatcgcttgttattcctg

SEQ ID NO: 269243 - DNA, 31 bp, Homo sapiens; identical to SEQ ID NO: 216981
  chr16:57326589-57326620
  hypo

SEQ ID NO: 269244 - DNA, 316 bp, Homo sapiens
  chr16:57416036-57416352
  hypo
taactcgaaatggcggcaccttcgagaagcagatcggcgaggtgaagcccaggaccacccctgccgccgggggaatggacgagtctgtggtcctggagcccgaagccacaggcgaaagcagtagcctggagccgactccttcttcccaggaagcacagagggccctggggacctccccagagctgccgacgggcgtgactggttcctcagggaccaggctccccccgacgccaaaggctcaggatggagggcctgtgggcacggagcttttccgagtgcctcccgtctccactgccgccacgtggcagagttctgc

SEQ ID NO: 269245 - DNA, 274 bp, Homo sapiens
  chr16:57537288-57537562
  hypo
cagcacaggctgcccgcacaaccgtgaagctggccttcttggcaagtctcttcctcccagaaaagaggtcttgcaggcgtggagcagcagagaggaggtaagcgtgggaggccagctcggggagcagcccagcccagccatggctcactgccgggtagccggagagcctctggggcctccttgaggctgcctgtcaggctgatggagtggatagatgcggtagaagcagatggggccggtgacctggcagacaggtgcgcgcataacacctctg

SEQ ID NO: 269246 - DNA, 287 bp, Homo sapiens; identical to SEQ ID NO: 216982
  chr16:57559708-57559995
  hypo

SEQ ID NO: 269247 - DNA, 188 bp, Homo sapiens
  chr16:57601801-57601989
  hypo
aacctgcatgcctccgtgctgctcctgaacatcgccttcctgctgagccccgcattcgcaatgtctcctgtgcccgggtcagcatgcacggctctggccgctgccctgcactacgcgctgctcagctgcctcacctggatggccatcgagggcttcaacctctacctcctcctcgggcgtgtctacaa

SEQ ID NO: 269248 - DNA, 59 bp, Homo sapiens
  chr16:57657365-57657424
  hypo
gtcttggacctggtcatgctcgcccctcctgtgtgcccggcctttcattctatcatctg

SEQ ID NO: 269249 - DNA, 108 bp, Homo sapiens
  chr16:57674290-57674398
  hypo
aacttgacctccctgggcctcgctggccttatttgttgagtgggtgtgatggtacttgtctcaagggttttgaggaagcttaaatgcgtgaacatgtgtaaaaagctc

SEQ ID NO: 269250 - DNA, 57 bp, Homo sapiens
  chr16:57686683-57686740
  hypo
gccgccttagtaggccgcccacgctacctgggcagaggggcccgagcctggagtcag

SEQ ID NO: 269251 - DNA, 101 bp, Homo sapiens; identical to SEQ ID NO: 216983
  chr16:57697546-57697647
  hypo

SEQ ID NO: 269252 - DNA, 224 bp, Homo sapiens; identical to SEQ ID NO: 216984
  chr16:57734046-57734270
  hypo

SEQ ID NO: 269253 - DNA, 75 bp, Homo sapiens
  chr16:57737538-57737613
  hypo
agagaagatggagcacgagctccgccatggcttttggcttcaaaagcctctggctgggcacggtggctcattttg

SEQ ID NO: 269254 - DNA, 207 bp, Homo sapiens
  chr16:57759978-57760185
  hypo
gaaaatcacagagcggttcttccgcaacccagcgaagcccgcggaggaggacgtggcagagcgcgtgtttctggtcgcggaggagcgcatccagctgcgctaccactgccgtgaggaccacatcacggcctccaagcgcgagttcctgcggcgcaccgaggtggacagcaaaggcaacaagatcatcatgacgcccgacatgtgcat

SEQ ID NO: 269255 - DNA, 537 bp, Homo sapiens
  chr16:57935116-57935653
  hypo
catgaagccgcagacgctcttctccctccccaacaatctcgctctgccctgggctggcaggcacccctccagctcagttccttgaaagccagggggatggtgaaccccagatcccgtggtggctgccaggccagctcaccttcttgcacacatagtcgttgggcaggtagacaacagagcgaagcctcttcagcatgtcaaagatcatctgccggtcacagccctgtcccggtgaggaagggaaaggaactttttagagaagattgggcttggagcctcccacagccctgagcgtgagggcaccaaaaggtgtacctgaaagagtgcgactttgctaacgatgttgtagttcacgtcgatggcgaggtccagccgcatcttgtctggaagctgcaccatcagctctgactcatctgtgaacaaggcctggcaagggtcagaggcaaggccgggccccaccccagacatacataccggccaagtgcccacctactggctcaccagggcacaccattgccctgccgcatggaaccactc

SEQ ID NO: 269256 - DNA, 56 bp, Homo sapiens
  chr16:57937697-57937753
  hypo
ggtggctgccagggcgtgaccatcttacccagcatgccttgcgagtgccaggtgta

SEQ ID NO: 269257 - DNA, 1325 bp, Homo sapiens; identical to SEQ ID NO: 216986
  chr16:58030194-58031519
  hypo

SEQ ID NO: 269258 - DNA, 147 bp, Homo sapiens
  chr16:58062996-58063143
  hypo
ggtgccaccaccaccaaaaccgatccacccgcctttcctcaacaggcccacgagtatcttcctagcccctacccagccactgagtagatgaggcagcgggggtgggggcgttgggagggggtcagcgtgaattaccattttgacctt

SEQ ID NO: 269259 - DNA, 67 bp, Homo sapiens; identical to SEQ ID NO: 216988
  chr16:58076202-58076269
  hypo

SEQ ID NO: 269260 - DNA, 151 bp, Homo sapiens
  chr16:58077138-58077289
  hypo
agcgaacctggagcccggctacccacagccgctgaccagctatggcctgggcatcccctatgaccgcattgacacggccatctggtgggagcccacaggccacaccttcttcttccaagaggacaggtgagcagtgcgtccctcccctaag

SEQ ID NO: 269261 - DNA, 174 bp, Homo sapiens
  chr16:58078935-58079109
  hypo
caaatactggaaattcgacaatgagcgcctgcggatggagcccggctaccccaagtccatcctgcgggacttcatgggctgccaggagcacgtggagccaggcccccgatggcccgacgtggcccggccgcccttcaacccccacgggggtgcagagcccggggcggacagcgc

SEQ ID NO: 269262 - DNA, 212 bp, Homo sapiens
  chr16:58119931-58120143
  hypo
aggcactaatgtcccggtggtcctctgacaccttccgtgtggcgctggttggaagttatgggcttgctgttgagaggctgcgtgcccctgggcaaatatacattattaaccgtggtgtttatactgggaggagcgggcagagatgagcgctggggaaggcctgagtccctctgagcagcctgtgggatccatgaatccgaacagggatccat

SEQ ID NO: 269263 - DNA, 306 bp, Homo sapiens
  chr16:58120758-58121064
  hypo
agcagcacctgcctcgaaggttgctatgagagcaattggtagctaagagaaccgagacatgttcctgcccctttccacgttggcttctctgtgacacatcagccctagggaagcagggccagtgccaccccacatgcaggtggcaacactgaggctccagggggtcgattcaggccggtttctttccccgtttatacaccctgcttctctccagcatccacgactacaggtgatggccacgctactcccatgtcctcacatgcacctgggttacgtcagcggcagccatgcgtgcacatgcacact

SEQ ID NO: 269264 - DNA, 141 bp, Homo sapiens
  chr16:58192179-58192320
  hypo
gtgatctctctatacgcgttaagacgtttgatttggttcttgttctgcttatggaaaagtgggagaaccgcaacagacctggggaaagagacgggaggagggaaagacgtcattaatcaacctgagcgggcgaggggaggc

SEQ ID NO: 269265 - DNA, 97 bp, Homo sapiens
  chr16:58548289-58548386
  hypo
gtattatcttagtttcgcaggtgaggagactaaggttcaggaaaaaggatttgcctgagtaacagaccaggccgcgcgcggtggctcacgcctgtaa

SEQ ID NO: 269266 - DNA, 101 bp, Homo sapiens; identical to SEQ ID NO: 216990
  chr16:58558294-58558395
  hypo

SEQ ID NO: 269267 - DNA, 79 bp, Homo sapiens
  chr16:58633212-58633291
  hypo
aaggccagcgagagcgagtcaagattcattgctggttggggcggaagcaggcggccgagcccggcgcaaaatcaccatt

SEQ ID NO: 269268 - DNA, 133 bp, Homo sapiens; identical to SEQ ID NO: 216991
  chr16:61615418-61615551
  hypo

SEQ ID NO: 269269 - DNA, 290 bp, Homo sapiens
  chr16:66420654-66420944
  hypo
cactcacacacagccactgccgcccattcccagctcacgtcacctcttcttttctagatcaagtcaagcgtgagtcgcaagaatgccaagtacctgctcaaaggagaatatgtgggcaaggtcttccgggtcgatgcagagacaggagacgtgttcgccattgagaggctggaccgggagaatatctcagagtaccacctcactgctgtcattgtggacaaggacactggcgaaaacctggagactccttccagcttcaccatcaaagttcatgacgtgaacgacaactg

SEQ ID NO: 269270 - DNA, 161 bp, Homo sapiens
  chr16:66514521-66514682
  hypo
gctgtatgtccccacggacgcaccaccaccctactcgctgactgattcctgccccacgctggatggcacctccgactcaggcagcggccacagccctggccgacaccagcaggagcagaggaccccggcccaaggtggccttcacacggtctccatggaca

SEQ ID NO: 269271 - DNA, 116 bp, Homo sapiens
  chr16:66542831-66542947
  hypo
gggacattacggtacgggatgggaatggtgagggtgaggatgagggtgggatgacgtgggggcagaggggagagggaggtgaagcccaaaggaccccacggcgctgatgccaggtc

SEQ ID NO: 269272 - DNA, 159 bp, Homo sapiens
  chr16:66579299-66579458
  hypo
agaaacttgcccaaacgtctaacaactggcaagtggataaacaaagtgcactacagccacgccatgaatactattcagctataggaaaaaatgacatactaatacgtgctacaaggcagatgcatgtcaaaatattatgctaagcaaccaggagcggtg

SEQ ID NO: 269273 - DNA, 618 bp, Homo sapiens
  chr16:66600011-66600629
  hypo
aggaagagatttccgaagtctgcaccccgcgcagagcactactgtaacttccaagggagcgctgggagcagcgggatcgggttttccggcacccgggcctgggtggcagggaagaatgtgccgggatccgcctcagggatctttgaatctctttactgcctggctggccggcagctccgaggtgtggggttgcagagattttgagttctcgggctaggcggtggcattgcaccccctgtggcaatgagggtggctgaagggctcggcttgtcggtggggcagcgagagccgggtgcacgcgccggggaggtagccaacagccgttgggacgcgacgctggttcccaggggagagccagccgctgccgcggcactggttcagacggccaggccctagggacccaccatggatcctgaacacgccaaacctgagtcatccgaggcaccttcagggaacttgaaacaaccggagactgccgcagccctggcaagtagcggcagcgtagtgagttctgtacccaaggcacagcgcaacatctcagcgaagaccgcaccccggaagcaccccgcagtctcaattcgcagtgcgcagtccgcagccgccgcacgtccccaaggc

SEQ ID NO: 269274 - DNA, 483 bp, Homo sapiens
  chr16:66652463-66652946
  hypo
acgcctgggccacacgcaggacatggcacccactagggttgttcaggtctcattcactgcaagcaagaattcacgtacatgagtgcacaaaggtgttggagcttggtctcctcaggcttaacccaaggctgactcactaggacagcttccaagaaccacagatgtaactgcaaacttgaagagagtcagaatgttttcaactgagtcacgaagctgtcccagaagcacccgacatagggtggaggtcagacacattccctggctgcccacaggcgtgagccttcctgccaggggacagtaacagggcccgaagggctgggggtgccgctggcttcccagggccaagcgctcagagctgggccggacttgcccatgctggcttcagctcacattgccaaggaagatgtgtattggggctgtgcaggctgccacattcttgctttttctgtagacaaaagtcacctccctcggatggctgtttac

SEQ ID NO: 269275 - DNA, 64 bp, Homo sapiens
  chr16:66752187-66752251
  hypo
cagcagcacacagctgcttacgaccacagatgaaaacactctcgattgatacattttccccatc

SEQ ID NO: 269276 - DNA, 180 bp, Homo sapiens; identical to SEQ ID NO: 216996
  chr16:66781286-66781466
  hypo

SEQ ID NO: 269277 - DNA, 757 bp, Homo sapiens
  chr16:66835306-66836063
  hypo
gggcctgacggggcggtaagacatcctggccggcccaacccgccttacacaggcgccaacatacagagtttccaagcgcggtaaggcaggacaacaacgcgcgggagcggaggccgtggcgtctaccctcaagcgggagcttccgccctttcttcatcaccgctcacctgccacgacgcacgacagggtttcccgcccagccgaccaggctcacgtccgtgggcgggacttccggccggcagccccgccgcccctgcaaggtgtcttacgcttccgcgggtgccctaggttgccaagggcaatggggtggtcggtgtcccggccgcaagattttttaaaaagctacaatttgaaagagaaatctcaccgcccccggtttttagggtttttacctcagacgagcattagccccaaaattaggggactgtgcacgcggttgacgaggcctggctatgggacggtggccgcgaagcacaggacggcgaagccccaacctcccctccacctggcatctgtgctgtgtgttctcccttttgttgggcacctcgctaatcgtcaccacagccccacaggggcagccaggcctccacctcaccagggggcttccggagttcagtccaggaggacttctccgcgcctggaccaaaggatcagagtggggccaaggcctgtcccttgccgcctctgccgtaaaatgcagcccatgggactgctaggcgatgaaggcgaggggaaggtccccgatacagtgaagaac

SEQ ID NO: 269278 - DNA, 81 bp, Homo sapiens; identical to SEQ ID NO: 216998
  chr16:66942966-66943047
  hypo

SEQ ID NO: 269279 - DNA, 120 bp, Homo sapiens
  chr16:66986333-66986453
  hypo
catgcccataatccccgcacttttggatgccgaggtgggcctcctgaacttgagcccaggactttgacgctagcctaggcagcttggagaaacgccatctctacaaaaaaaaaattcaaa

SEQ ID NO: 269280 - DNA, 190 bp, Homo sapiens; identical to SEQ ID NO: 217000
  chr16:67006195-67006385
  hypo

SEQ ID NO: 269281 - DNA, 43 bp, Homo sapiens
  chr16:67138796-67138839
  hypo
gattacaggcgtgagccaccacgcctgggctggtgtgttgctt

SEQ ID NO: 269282 - DNA, 144 bp, Homo sapiens; identical to SEQ ID NO: 217001
  chr16:67175552-67175696
  hypo

SEQ ID NO: 269283 - DNA, 208 bp, Homo sapiens
  chr16:67213017-67213225
  hypo
gttctttctctggccggtcagggcctgaccagccttgcccgcactgttgggagaagtcggagaggaagtggagagagaaaaatatacccgaaaggaccaagagatgagagcgagcccagagcatgggcaggcatgttctggcctacctctgtaagcagagggcgggaggtggctgctcaggaagggaaagccccgacctcaggaggga

SEQ ID NO: 269284 - DNA, 194 bp, Homo sapiens; identical to SEQ ID NO: 217004
  chr16:67221091-67221285
  hypo

SEQ ID NO: 269285 - DNA, 101 bp, Homo sapiens
  chr16:67222915-67223016
  hypo
tgcccaccttgaggcgcgattccagggagcaggtacgctgcacctcgcggctgcggtactggcctagcctggccagctgctccggccggtagaagatgcct

SEQ ID NO: 269286 - DNA, 251 bp, Homo sapiens
  chr16:67235496-67235747
  hypo
ggggctgctggagccgcgcatgcggacgcccctggacccctacagccaggtgtgtgtctttggtgaggacaaggcagggggtggcttagagcttggccttgaatctataatcttgatcccctcccccgccacccaacactgaccccaggagcagcgggagcagctgcaggtcctacgccaggctgccttcgaggtggagggggagtcctcgggtgccgggctaagtgctgaccgtcgccgttccctctgtg

SEQ ID NO: 269287 - DNA, 32 bp, Homo sapiens
  chr16:67241298-67241330
  hypo
ggggcctgtggcagcgacgtgtagctggaaag

SEQ ID NO: 269288 - DNA, 247 bp, Homo sapiens
  chr16:67241530-67241777
  hypo
cccctcccacgaagcgggactggacacaggacacctggggcagctgggcttggaagcgtctgacggcggccatgttgatgccagggcacgtggccacatccaacacccggagctgcctgcacgcctgcccaatagcatccagtgtcctgtggggaggccacctgatgagtgcctggcccggtgtgggacccagcccagcccctgcaccgtggctccatctgcctggtgtcatcggacacacttactg

SEQ ID NO: 269289 - DNA, 231 bp, Homo sapiens; identical to SEQ ID NO: 217005
  chr16:67270958-67271189
  hypo

SEQ ID NO: 269290 - DNA, 343 bp, Homo sapiens
  chr16:67313745-67314088
  hypo
agggacacccttaacgttattccctcttcccaggcctgaattgcagttcctgtgccctggcactaagactggcacctcctgcggcccatgcccttcgcctgcattgcccactgagtcccactcgactgtcttcagcgcggttcacactgagacccagccctctcccgctggccccgagcaggcccacctttaggagggcgtgatggaaaggcccctggagaatggggatgagtccccagactctcagggccatgccaccgactggagatttgctgtgtgcagtttcagggatgcctgggaagaggaggaacctgcttcccagatgcacgttaaggacccaggt

SEQ ID NO: 269291 - DNA, 69 bp, Homo sapiens
  chr16:67337018-67337087
  hypo
cccccaccccaccccggacagagcaatcaccaatgaagcggaactcgctgcactcgcactcgatgaggg

SEQ ID NO: 269292 - DNA, 368 bp, Homo sapiens; identical to SEQ ID NO: 217008
  chr16:67469689-67470057
  hypo

SEQ ID NO: 269293 - DNA, 49 bp, Homo sapiens; identical to SEQ ID NO: 217009
  chr16:67470488-67470537
  hypo

SEQ ID NO: 269294 - DNA, 122 bp, Homo sapiens; identical to SEQ ID NO: 217010
  chr16:67470863-67470985
  hypo

SEQ ID NO: 269295 - DNA, 79 bp, Homo sapiens; identical to SEQ ID NO: 217011
  chr16:67472275-67472354
  hypo

SEQ ID NO: 269296 - DNA, 79 bp, Homo sapiens; identical to SEQ ID NO: 217012
  chr16:67472414-67472493
  hypo

SEQ ID NO: 269297 - DNA, 218 bp, Homo sapiens
  chr16:67478341-67478559
  hypo
ggtcgccccccagcgggtccacaaaccccaccctgatgcgctgatgctgacaccactgcccacctcccatgaccaccacagcggctcaccaagaggcgtgtccaccagaatggcattgtagagctcagcaggtgtctgagcaatgttcacggcctccatctgctcgaagctgcctagtgggtggcacttgggcacgagctcagcgatggagcgctggt

SEQ ID NO: 269298 - DNA, 41 bp, Homo sapiens; identical to SEQ ID NO: 217013
  chr16:67511577-67511618
  hypo

SEQ ID NO: 269299 - DNA, 64 bp, Homo sapiens; identical to SEQ ID NO: 217014
  chr16:67518130-67518194
  hypo

SEQ ID NO: 269300 - DNA, 66 bp, Homo sapiens
  chr16:67574479-67574545
  hypo
agatctgcatgaaatatgggcgtcagcgctggaaactacggggccgaattgagggtagtggaaagc

SEQ ID NO: 269301 - DNA, 179 bp, Homo sapiens
  chr16:67578535-67578714
  hypo
gagcacgatcctcccgagccctaccctgaggcctgagctacttggccacccatgttctccagaaactgggcacatttgggcccctgcgctgccaggaggcatgggccctggagcggctgctgcgggaagcccgagtactggaggcagtatgcgagttcagcaggcggtgggagatcccg

SEQ ID NO: 269302 - DNA, 199 bp, Homo sapiens
  chr16:67681427-67681626
  hypo
tggcccaggcgctggcgggacactcaagctctgggctgcgggagctcagcctcgcggggaacctgctggatgaccgaggtatgactgagcctggggaccgcaggggtgggcagcaggaggaggtgagacccacgtggctgttcccaccccccaaggcatgactgcactcagcagacacctcgagcgttgtccaggagcc

SEQ ID NO: 269303 - DNA, 289 bp, Homo sapiens; identical to SEQ ID NO: 217017
  chr16:67709089-67709378
  hypo

SEQ ID NO: 269304 - DNA, 99 bp, Homo sapiens
  chr16:67848821-67848920
  hypo
ctaccatgttcactccggatctctccgccattcctcttttttaaagtttgtatataaaaatgaatgctgtaccaaaggtatcagaagagaaatgaaatt

SEQ ID NO: 269305 - DNA, 202 bp, Homo sapiens; identical to SEQ ID NO: 217018
  chr16:67920022-67920224
  hypo

SEQ ID NO: 269306 - DNA, 140 bp, Homo sapiens; identical to SEQ ID NO: 217019
  chr16:67965742-67965882
  hypo

SEQ ID NO: 269307 - DNA, 307 bp, Homo sapiens
  chr16:67981967-67982274
  hypo
gatagtacttgaaccggggccgccagttgggggtcctcaggagtgtctgcaccgcacaggcgaggttcacgaacaggtagcacatcagaaagaacctgcggcacagagggcggttggcgaagagcagcctcctcggcagctggggacctgatgtcaggctgggcctggcccagaaacggggcgtggcccggccctgccctgcatggctcagcaaggtcttctcaacctcattgctgccacctccatggcctgaggcaatgagactactgtggaggagtcctcggagccagatcgcagaggatgggca

SEQ ID NO: 269308 - DNA, 39 bp, Homo sapiens
  chr16:68250713-68250752
  hypo
gtgtgagccactacacccggccaagaagaggtttcttaa

SEQ ID NO: 269309 - DNA, 39 bp, Homo sapiens
  chr16:68385561-68385600
  hypo
gccgttcaggctcctcgctgtgcacgtgttcatttactc

SEQ ID NO: 269310 - DNA, 308 bp, Homo sapiens
  chr16:68386060-68386368
  hypo
actgagtggcctgttgcttccgtgttcctgttaacactcctggaccgagccctactgacacctgggccctgcttctcgcccattcaccaggtctctctcctcctgggcgagccgttcttcactaccagcctgctgccgtggcacaacctctacttctggtacgtgcggaccgctgtggaccagcacctggggccaggtgccatggtgatgccccaggcagcctcgctgcacgctgtggttgtggagttcagggtaggccacccaggggatgttggagaaaaaagcagaggaggcgggtggggaacctt

SEQ ID NO: 269311 - DNA, 260 bp, Homo sapiens
  chr16:68525540-68525800
  hypo
attcaccttcaaaacgctacgtgagtccaggggggcagcgaagaagaggccgaaggagcagtggggcaggggtcgcgggtctctgtggtgtggagggggcagcgccgggaatgtgcggggaagcctggaggcctgggtcccaagcccctgtgccaattgctgggggcccatgagactcactccaccttgctgagctgattctggaccctgatcacaagggactgcaaatccgtgttctcgtgccttcaatctgggcctgc

SEQ ID NO: 269312 - DNA, 231 bp, Homo sapiens
  chr16:68526075-68526306
  hypo
gctgggagggcacttagacacgtccaccgaaacctttatttgatatatgaaatggagatcccgaggggaggaacagccaccgaggccctggctagaagtggtcaagcttgtccgcatgggctccgagggctcccagggaccgcaacgcttcagccttctaggccacactgcagggtacacccagtggtcgctgccctggtcactgccaccgccttggcctgttccttgccc

SEQ ID NO: 269313 - DNA, 35 bp, Homo sapiens
  chr16:68697407-68697442
  hypo
attacaggcgtgagccaccacgcctggccgaaagt

SEQ ID NO: 269314 - DNA, 191 bp, Homo sapiens; identical to SEQ ID NO: 217030
  chr16:68737004-68737195
  hypo

SEQ ID NO: 269315 - DNA, 34 bp, Homo sapiens; identical to SEQ ID NO: 217031
  chr16:68739594-68739628
  hypo

SEQ ID NO: 269316 - DNA, 120 bp, Homo sapiens; identical to SEQ ID NO: 217032
  chr16:68743256-68743376
  hypo

SEQ ID NO: 269317 - DNA, 45 bp, Homo sapiens
  chr16:68755703-68755748
  hypo
ccttgttggccaggcgtggtggctcacgcctgtaattctagcact

SEQ ID NO: 269318 - DNA, 120 bp, Homo sapiens
  chr16:68770617-68770737
  hypo
ccaggctgggcaatacagggagacacagcgcccccactgcccctgtccgccccgacttgtctctctacaaaaaggcaaaagaaaaaaaaattagcctggcgtggtggtgtgcacctgtac

SEQ ID NO: 269319 - DNA, 88 bp, Homo sapiens
  chr16:68782327-68782415
  hypo
ttaatttctgtgggtacaaagttggtgtgtatatttatggggtacgttcttttattttctttttatagctatgcggtatggatgcacc

SEQ ID NO: 269320 - DNA, 37 bp, Homo sapiens
  chr16:68838288-68838325
  hypo
tacaggtgtgagccactgcgcccggccctatctgcct

SEQ ID NO: 269321 - DNA, 167 bp, Homo sapiens; identical to SEQ ID NO: 217033
  chr16:68849366-68849533
  hypo

SEQ ID NO: 269322 - DNA, 140 bp, Homo sapiens
  chr16:68854968-68855108
  hypo
ctgttgttttgtatccgtatcgtatactaatattgatgatagttccctgggtaccaatttttcctactaccatatgctccgtgttgtgtcaagatataaaagaaatgcaaacagaagtgtggatgggctgggcgcagtgg

SEQ ID NO: 269323 - DNA, 224 bp, Homo sapiens
  chr16:68856757-68856981
  hypo
gtaaaaccctgggtgcgatggaagtcactctggccctggagaagaacctgaactggacccttttggatcttcatgccttgggttccacctgcacagacccccatatctgtgacttcctggagagccacttcctagatgaaaaagtaaaactcatcaagaagataggtgaccacctgaccaaccttcacaggccagccggcctccaggccgggctgggcaaaaag

SEQ ID NO: 269324 - DNA, 154 bp, Homo sapiens
  chr16:68876700-68876854
  hypo
aaacagaacacagatcgaacttttactgggaactttactaagttcactgaaaaaaaaaatcatattacccataacaacatttgtagctttacattcacgatggatatatatgcgtgtgtacgtctgtacttaggttttgtttgtttgtttgttt

SEQ ID NO: 269325 - DNA, 77 bp, Homo sapiens; identical to SEQ ID NO: 217036
  chr16:68942210-68942287
  hypo

SEQ ID NO: 269326 - DNA, 34 bp, Homo sapiens
  chr16:69077094-69077128
  hypo
cttcagtctgggcgacagagagagactctgtaag

SEQ ID NO: 269327 - DNA, 134 bp, Homo sapiens; identical to SEQ ID NO: 217037
  chr16:69129258-69129392
  hypo

SEQ ID NO: 269328 - DNA, 138 bp, Homo sapiens
  chr16:69133540-69133678
  hypo
ttttaaagaaaacaacaacataaatgcaggtatgcatacataacgattgtgtctcctgttcgttacttaacactgcatcgtaggtgtctggagtattcctccattgtcctcatgaacgtgtttttttagtagctgcac

SEQ ID NO: 269329 - DNA, 251 bp, Homo sapiens
  chr16:69134520-69134771
  hypo
tcactaggagacagcggagcagaaccgtgggacgatggagcacctgggtcctggcaaggttgctctgcagcttccggcactggtgatgacagagaggttacgggtgcaggatatttgagcatttcgtgagtttggatttggaatttcattgaaaggtgaaatctttgtggaactgtcagcttcagttacctccaacctgctaaagctttgagaaaggccccttgaactctctgcaccgtcgagtacttttc

SEQ ID NO: 269330 - DNA, 796 bp, Homo sapiens
  chr16:69143278-69144074
  hypo
ctcctgccttctctcgccagatgccggtgcagctgacgacagccctgcgtgtggtgggcaccagcctgtttgccctggcagtgctgggtggcatcctggcagcctatgtgacgggctaccagttcatccacacggaaaagcactacctgtccttcggcctgtacggcgccatcctgggcctgcacctgctcattcagagcctttttgccttcctggagcaccggcgcatgcgacgtgccggccaggccctgaagctgccctccccgcggcggggctcggtggcactgtgcattgccgcataccaggaggaccctgactacttgcgcaagtgcctgcgctcggcccagcgcatctccttccctgacctcaaggtggtcatggtggtggatggcaaccgccaggaggacgcctacatgctggacatcttccacgaggtgctgggcggcaccgagcaggccggcttctttgtgtggcgcagcaacttccatgaggcaggcgagggtgagacggaggccagcctgcaggagggcatggaccgtgtgcgggatgtggtgcgggccagcaccttctcgtgcatcatgcagaagtggggaggcaagcgcgaggtcatgtacacggccttcaaggccctcggcgattcggtggactacatccaggtaagggcgcctccctaggagcgtgtgtacatggggataagtctggacagcctggcaaactctccgccaagaatctgaggtctggtctaggtcccttgggttgtgcacacacctgtgcacttaagaaggcaacaaggtgg

SEQ ID NO: 269331 - DNA, 278 bp, Homo sapiens
  chr16:69264949-69265227
  hypo
cccgtttcttatgcaaactgcctttctcattgcggctggcttagtgaaaatgaaattaaataaagtcttatcttttctaatcctatatagagtctaaacttttttactgtcactgtcaacaatcttctcatttgctttgtgtgttttgaagtaagcagaaggatacaaaacaagttgtaacattgtttcacataaagcagtgctgctttttaggggagagaagtataaagcgtagaattgacttttaaaaaagatgtggcccgcggacgaggtggctc

SEQ ID NO: 269332 - DNA, 56 bp, Homo sapiens
  chr16:69334742-69334798
  hypo
cctgcactcttgtccgaagccgattgtatttgtgttgcacacgtttttatcggcca

SEQ ID NO: 269333 - DNA, 35 bp, Homo sapiens
  chr16:69344404-69344439
  hypo
tgtttcttaatttagcgacgaggtcttactatgtt

SEQ ID NO: 269334 - DNA, 34 bp, Homo sapiens
  chr16:69344499-69344533
  hypo
tggaattacaggcgtgggccagtacacccagccc

SEQ ID NO: 269335 - DNA, 815 bp, Homo sapiens
  chr16:69352180-69352995
  hypo
tgtgagagccactgcaggtggcctcccagagtatgaggtgtgagtcaccgcacctggcctgggctgctctttaagtccagctgaagcacatttcccttacggccttcaggagagggccgacccggattcccatctgctccgcgaagaaacagggcgggttataggagtgtttgctgggggggtcctgaagtgagctgctgagagcattggcccaaatgtccctgaagtacttgcttgagtcacacggcactgttaagccaggaaggcttcgttccttaaccagtgtgcaggcagcggagcctggacttgctgggagcacctctgtgctccaggctgaagggccagcttgtgactttccgtctcccttcccagcagtgacagtgacagtgaaggggataatccggagaaaaagaaactgcaagaacagctgatgggtaagtggctcgcggccctgtggcagcggcaggggatgagagtgggtccgctgctgggttggctcatgccccttggccgggcccgggcccgggccggcctccctctcgcaggtgccgtcgtgatggagaagcccaacatacggtggaacgacgtggccgggctggagggggccaaggaggccctcaaagaagctgtcattttgccaatcaaattcccacacttgttcacaggtgagagttgagccatttcaaaccccaatgtaaaaattccaggcttccgcagggctggcactccgaggcacccgggagtcagtggcgactcagcccccggggcctgcagagggccaggcctggctgctcgctggtgtccacaacactgct

SEQ ID NO: 269336 - DNA, 584 bp, Homo sapiens
  chr16:69354734-69355318
  hypo
tgctgctggcagcccgggtgcagcctggccccttttccctggagtcttcccgtctgcctgccaagcagagccctttgtgaggctggcttgttgaggatgtgccgccagcatcactggcccatgaaatgcgtccgtttcactcaaatcttcgtgcctccccttccgtgaataccattccatcatccgctgtcaactcctgccgtgtgctgggctctctaggtttgaaaaacgaatttatatccccttgccggaggaagctgcccgcgcccagatgttccggttgcatctcgggagcactccccacaacctcacggatgcaaacatccacgagctggcccggaagacggaaggctactcgggcgcggacatcagcatcatcgtgcgggactctctcatgcagcccgtgaggaaggtgcagtcggccacacacttcaaaaaggtgagtgcccgcggccactgctgagaaaaatctcatagtaagagcgggatgttcggttttttttttcccagctcctggtcctgctccccggctgctcaggtgacacagtctctgaggcctcctggagagccgagggccagtgcca

SEQ ID NO: 269337 - DNA, 126 bp, Homo sapiens; identical to SEQ ID NO: 217046
  chr16:69358551-69358677
  hypo

SEQ ID NO: 269338 - DNA, 185 bp, Homo sapiens; identical to SEQ ID NO: 217048
  chr16:69383486-69383671
  hypo

SEQ ID NO: 269339 - DNA, 100 bp, Homo sapiens
  chr16:69391672-69391772
  hypo
gtgctttacaaacaggcatccgtaaatgctggctagtgatgcgtttcaagctcttcagtaaaatcaacatcgttttcttttttttttttttttttttgag

SEQ ID NO: 269340 - DNA, 32 bp, Homo sapiens
  chr16:69397588-69397620
  hypo
cagttgggagcagtggctcacgtctgtaatcc

SEQ ID NO: 269341 - DNA, 36 bp, Homo sapiens; identical to SEQ ID NO: 217049
  chr16:69439224-69439260
  hypo

SEQ ID NO: 269342 - DNA, 230 bp, Homo sapiens
  chr16:69446265-69446495
  hypo
aaaaacacgagttgcgtgcgttggaaagaagacaaggccatatctgaatcatcagccttacaataatgtgaacgtcattatggcagcatttcaaacaaaaggctatgaagctgttgcgcagggctgcaggtgccattgtgctcactaatggtatgtgctccatgcgtgtgggcttcagcggtctggaagcactgaagaggatctgtgctccagagcggggtggggcctgc

SEQ ID NO: 269343 - DNA, 84 bp, Homo sapiens; identical to SEQ ID NO: 217050
  chr16:69495121-69495205
  hypo

SEQ ID NO: 269344 - DNA, 145 bp, Homo sapiens
  chr16:69557041-69557186
  hypo
gaaggcctgatttaaaggtccgatttagtcctggggtgggaggaaagacgttcctgctgtcgatgaaagcggcattctacagccactagactggctgcagctctttcaaagaattgaaaacatcgagaaactgaagggacccaga

SEQ ID NO: 269345 - DNA, 275 bp, Homo sapiens; identical to SEQ ID NO: 217051
  chr16:69557609-69557884
  hypo

SEQ ID NO: 269346 - DNA, 134 bp, Homo sapiens
  chr16:69560823-69560957
  hypo
cctgccaatccaggcgtgccaggagggcgtatggaattgccaggttgtcattgcacaaggggaggggtgtacggctcagaattgagggaaatgctaagggtcactcataggcttgagcacgaagctcaccaggt

SEQ ID NO: 269347 - DNA, 41 bp, Homo sapiens
  chr16:69613048-69613089
  hypo
ttacaggcgccggccactgcgcctggccataagttttaata

SEQ ID NO: 269348 - DNA, 38 bp, Homo sapiens; identical to SEQ ID NO: 217052
  chr16:69642741-69642779
  hypo

SEQ ID NO: 269349 - DNA, 240 bp, Homo sapiens; identical to SEQ ID NO: 217053
  chr16:69757714-69757954
  hypo

SEQ ID NO: 269350 - DNA, 87 bp, Homo sapiens
  chr16:69759428-69759515
  hypo
aaacggatccagtacgatctgatcaggtttgcctaatccaagggcctcaatggaaaatgcctcccaaggccaggcacggtggctcac

SEQ ID NO: 269351 - DNA, 240 bp, Homo sapiens; identical to SEQ ID NO: 217054
  chr16:69761437-69761677
  hypo

SEQ ID NO: 269352 - DNA, 182 bp, Homo sapiens; identical to SEQ ID NO: 217055
  chr16:69825950-69826132
  hypo

SEQ ID NO: 269353 - DNA, 439 bp, Homo sapiens; identical to SEQ ID NO: 217056
  chr16:69833662-69834101
  hypo

SEQ ID NO: 269354 - DNA, 124 bp, Homo sapiens; identical to SEQ ID NO: 217057
  chr16:69906918-69907042
  hypo

SEQ ID NO: 269355 - DNA, 207 bp, Homo sapiens; identical to SEQ ID NO: 217058
  chr16:69921952-69922159
  hypo

SEQ ID NO: 269356 - DNA, 139 bp, Homo sapiens; identical to SEQ ID NO: 217059
  chr16:69922446-69922585
  hypo

SEQ ID NO: 269357 - DNA, 159 bp, Homo sapiens
  chr16:69955523-69955682
  hypo
tttgcttgcttcaccgttgcagtttctttttgccgtcttgtgtcgtgttcctgctgggacccactgaagatgcctggcacagccttgcacattgtgctgttgtgacgggactatcacacggccgacaatttctggggcatctctctctgcagtattgaa

SEQ ID NO: 269358 - DNA, 150 bp, Homo sapiens; identical to SEQ ID NO: 217061
  chr16:70151413-70151563
  hypo

SEQ ID NO: 269359 - DNA, 160 bp, Homo sapiens
  chr16:70185997-70186157
  hypo
ctgtgtattctcctcgtcctgccgcattctgtgggtctcctgcacccaccttggctgattcaggtgtttcccttacacacataccacaggcgagtgttgcatgcaatagcttggattccttttttccacatttaaagttgtcttcccggcacggtggctc

SEQ ID NO: 269360 - DNA, 289 bp, Homo sapiens; identical to SEQ ID NO: 217062
  chr16:70196488-70196777
  hypo

SEQ ID NO: 269361 - DNA, 130 bp, Homo sapiens; identical to SEQ ID NO: 217063
  chr16:70286315-70286445
  hypo

SEQ ID NO: 269362 - DNA, 176 bp, Homo sapiens; identical to SEQ ID NO: 217064
  chr16:70328602-70328778
  hypo

SEQ ID NO: 269363 - DNA, 54 bp, Homo sapiens; identical to SEQ ID NO: 217065
  chr16:70399211-70399265
  hypo

SEQ ID NO: 269364 - DNA, 410 bp, Homo sapiens
  chr16:70433887-70434297
  hypo
ccgcccctcttctctcgactgtggattatcgatgaggtattgctgggtccactcaatgaaccatgaacagtcctgtcagctccgccgttgggggagaacctggctgtgtcaggaggtgtggttgctgggcttggtcctgcccccggacagccctgagggcagttgtctacatccatctgtacattatggacaaagtgaatgccagcgtccctggtagcactgacagcctgaggccccatgctgcccttgcaggcaagaacagggagaaaaggccacttgtaggcagtttgggtctcagccataaggaaaggagctcagatccatgccaagcgtgagggagccacaccaggtgagaggaacgctgagaagggaacccctgagcactggctgtgtgccgtgggaatcttgca

SEQ ID NO: 269365 - DNA, 55 bp, Homo sapiens
  chr16:70442006-70442061
  hypo
cctctgagcattttcgggggatagcctctcatttagtatgcgcaggagtcccagg

SEQ ID NO: 269366 - DNA, 46 bp, Homo sapiens
  chr16:70442308-70442354
  hypo
ggggtgggggtgggcgcaggtggccagttaccgaaagcccctccct

SEQ ID NO: 269367 - DNA, 120 bp, Homo sapiens
  chr16:70479294-70479414
  hypo
gcgagcactctagtgttaattttttgaagagcaccatactgtttcccgtatctgctgcaccattctccactcccaccaacagtggacaggcttccaatttctccacaccttcactaacac

SEQ ID NO: 269368 - DNA, 50 bp, Homo sapiens; identical to SEQ ID NO: 217067
  chr16:70507080-70507130
  hypo

SEQ ID NO: 269369 - DNA, 40 bp, Homo sapiens; identical to SEQ ID NO: 217068
  chr16:70508778-70508818
  hypo

SEQ ID NO: 269370 - DNA, 102 bp, Homo sapiens; identical to SEQ ID NO: 217069
  chr16:70595195-70595297
  hypo

SEQ ID NO: 269371 - DNA, 177 bp, Homo sapiens
  chr16:70595530-70595707
  hypo
aggtattggccatgtcaagccgctcatggttgagctattcttaccaatctcgcttccatctcaccccactgtcttacgagacactggaatttgcatcgggttttgcctcggaacagtgtcccgagggcattgtggccatctccaccaacaccctacggtgagtgagtctcatgtttg

SEQ ID NO: 269372 - DNA, 432 bp, Homo sapiens
  chr16:70680609-70681041
  hypo
tgccatgggacttgcggccaccgccccccggctgtcctccacgctgccgggcagataagggcagctgctgcccttggggcacctgctcactcccgcagcccagccactcctccagggccagcccttccctgactgagtgaccacctctgctgccccgaggccatgtaggccgtgcttaggcctctgtggacacactgctggggacggcgcctgagctctcagggggacgaggaacaccaccatgccccggggcttcacctggctgcgctgtgagtactggggggtccctagggacctgcattgggaggccttggcctagatccaggatctgccgtaaccatagcaaccagggcattcttgctggtgagaagttgcgatgcttcccagccggactgcagacaccctctgagattcccacggccgccgtctgcc

SEQ ID NO: 269373 - DNA, 349 bp, Homo sapiens
  chr16:70727987-70728336
  hypo
tctaggatccaggcgactcagggctgggacggtgttgggcgagaccagggtgtgtctctcctgttaccctgccccagcaaagccctgggcttgaggagaaggtgcttggagttcctccagggtcagggagggagggcagtcatcctagggatgcttctggaatgccaagaatgtacaactggagagatgagtcaggacagaccagcagcaggagcagggtctttttaggatctgacctcaggcggccgtgtgggtgcctgtgtccctgggaggccctcggggaagtgtcacgctgggcacacctgggacaggctttagcgcactctgcggagagcagggtctcccccct

SEQ ID NO: 269374 - DNA, 187 bp, Homo sapiens
  chr16:70754253-70754440
  hypo
agacatccaggcatcgagcctggagggagttgaggctgccacaccgctttgatcaggacgaggaaagaagacacatctggggtgctgaagcatgtgttatgtggtaagaaagggagaacgcttcccggggagacggcaagaccaagctgaaaacaagacagtgtctcgggcacggtggagcttccaa

SEQ ID NO: 269375 - DNA, 398 bp, Homo sapiens
  chr16:70754644-70755042
  hypo
ctggggtactgaggaggccccgatggccccatgttggggctatccgcccatgtggtctggagctggagctcaagactggggccggggcaggtcacaccccttctgagggaataaagagacacaaaacttagcacttaaggaagcagcttgcgaaaaaggaaagtgagagacggggctcaaaacagactggtggaggaccagaaaaaatgagcgctgacttgagtgcacttgaatcatctcagcttggcttcaaagaggccaaagtggatgatgcgagccactgcgataagccaggggaaaaacacatccctgagaagagggggtgacacatgtcctattgagcaagagtcaaaagggagattcagacctggagagatgttcaccgtcaaagtgccagg

SEQ ID NO: 269376 - DNA, 148 bp, Homo sapiens; identical to SEQ ID NO: 217072
  chr16:70783611-70783759
  hypo

SEQ ID NO: 269377 - DNA, 141 bp, Homo sapiens
  chr16:70794492-70794633
  hypo
tgcaggcccacaagacgtgccccaaaaccctgacaacatttggcacttcagcaaatcgagtttccacagccacagcctgaacagcgctgtttaatggactgcatctccgcctgctccctttcaatgcgcacacacaaaaac

SEQ ID NO: 269378 - DNA, 116 bp, Homo sapiens
  chr16:70795368-70795484
  hypo
atggagggatgggatgctgccgtgcaatgggcacgcgcagctgcaaaccctgccgcttggctgggaggcaggggaacccggtaaaggaacaccacgcaatgggcatggctgagaat

SEQ ID NO: 269379 - DNA, 37 bp, Homo sapiens
  chr16:70796478-70796515
  hypo
gggaaagaggctgtccgtgtgccggaacatctggagg

SEQ ID NO: 269380 - DNA, 393 bp, Homo sapiens
  chr16:70807992-70808385
  hypo
caaacccagaaggttaacttcgatacactaccattaactaaatgattaccctaatttgaacatcacgagtttttccattcctggccttttgttccaggatctcacactgcatttagctaaactgtcttctttgtctcctccaatctgttgcagcccctcaatctgtgtgtctttcataaacttgacacttttgaagcgctggtcactctgcagaatgtctccccgtttgggttggtctcacgttttctcacgagtagggagttgcgcatcattggagggatgtcacggaagtgctgcgcctcagtgcaccctatcgggggaacgtgttgtctgttagcctcattactggtgacgttaacctcatcgcctgacgcacagtgtctgctgggtttc

SEQ ID NO: 269381 - DNA, 322 bp, Homo sapiens
  chr16:70811508-70811830
  hypo
aggccaagggggagtcggagcaagtgaagaggcacagatgaggggctgccctgactggaggtcctgtggttagaggaggagggagaagatgcggaggtggggcaggggtgcaaatatgcacacacacaaaggttcttgcccggaggtgtgccatgaggaacgtggtgctgtcggcggatcagcacaagtaaacaaagaaggccaggcatgaggtcctgtctccagccaggtggaccagagtgggaacagagggagcagagagggaagagtgagcaggagaggctgtgatgaacttgtccctgaccagcgaagctatctgtcc

SEQ ID NO: 269382 - DNA, 96 bp, Homo sapiens
  chr16:70829399-70829495
  hypo
aaaaaaaaaaaaaaaaaaaagaatgcatccctctgaagcgatacatgactctggcaccttccccacagaggtggtaggctccgaagaaccaggtca

SEQ ID NO: 269383 - DNA, 45 bp, Homo sapiens; identical to SEQ ID NO: 217075
  chr16:71324585-71324630
  hypo

SEQ ID NO: 269384 - DNA, 182 bp, Homo sapiens
  chr16:71537485-71537667
  hypo
ccgtgttagggagcacgtacggatataggagtaggatgctgtccaatgatctaacaatgcacctgtggagattgccactcacggtgttctccgctttcctagagtctggagactctctcttcttactttcacagctctttggccatccacaaatccatttgcccacacgcttcctggttcct

SEQ ID NO: 269385 - DNA, 92 bp, Homo sapiens
  chr16:71661396-71661488
  hypo
actccgtctcaaaaaaaaaaaaaaaagtcagatgggagacgctacatttttaaccaaagaacaaagtctacgtaaaattctcccactgaagg

SEQ ID NO: 269386 - DNA, 148 bp, Homo sapiens
  chr16:71674493-71674641
  hypo
tgatatacggtggcgtggctgtttctctgggtctgggggtcctcaccatgggtgttttactccaaggagccaagagtcgaacaatgttgtcagggaagtggctcctcacggaggccgccttcagcctcctagcggcagtgggctactg

SEQ ID NO: 269387 - DNA, 170 bp, Homo sapiens
  chr16:71715646-71715816
  hypo
cacatacttgtagagtgtatcgaggcctccgggtctttctaactgcatgaagttgtgtcgcaagttgaggtaggtaatatcttgactatagaagagatgctcaggaacctcctcgaggctgtaacacgagagatccacggtactgattcgctgggacaccacctgaataa

SEQ ID NO: 269388 - DNA, 42 bp, Homo sapiens; identical to SEQ ID NO: 217077
  chr16:71716353-71716395
  hypo

SEQ ID NO: 269389 - DNA, 136 bp, Homo sapiens; identical to SEQ ID NO: 217078
  chr16:71748846-71748982
  hypo

SEQ ID NO: 269390 - DNA, 137 bp, Homo sapiens; identical to SEQ ID NO: 217079
  chr16:71754750-71754887
  hypo

SEQ ID NO: 269391 - DNA, 35 bp, Homo sapiens
  chr16:71756040-71756075
  hypo
aaaactgtatgaggccgggcgtggtggctcatcct

SEQ ID NO: 269392 - DNA, 45 bp, Homo sapiens; identical to SEQ ID NO: 217080
  chr16:71870744-71870789
  hypo

SEQ ID NO: 269393 - DNA, 89 bp, Homo sapiens
  chr16:71878716-71878805
  hypo
ccgcgcctggcccaattgttatttattgaacagagtttgaagaaactgaaagtctccatttcggtggccaaaaccgcaattacttttgc

SEQ ID NO: 269394 - DNA, 230 bp, Homo sapiens
  chr16:71894094-71894324
  hypo
cctcctcttgagccgcttggcctctcgctctcggatgagccgggcctgccgcttttccggggtttcattggcccgcttcagcctcatggcctcccgatcccgctgcagccggcgtgcccgctgctcgtctgtctcctgcatgcgctgcaagcgcttggcttcacggtccctcatgcgcctcacctcccgctcctcgggggtctcattgtcccgccggctcttcttggccg

SEQ ID NO: 269395 - DNA, 34 bp, Homo sapiens
  chr16:71948332-71948366
  hypo
gattacagatgtgagccgccgcacccagcaagga

SEQ ID NO: 269396 - DNA, 38 bp, Homo sapiens
  chr16:72018727-72018765
  hypo
agcctgggcgacagatcgagaatctgtctcaaaaaaag

SEQ ID NO: 269397 - DNA, 32 bp, Homo sapiens
  chr16:72032871-72032903
  hypo
tgaaaacactttgtaagggccgggcgcggtgg

SEQ ID NO: 269398 - DNA, 163 bp, Homo sapiens
  chr16:72038611-72038774
  hypo
gtgaaaccctgtctctatttcatatttatcctttcccatgtaaatagcgcaggcagatgaattaacgctgctgctggtgaagtagaacaccatgatgctggcgggggtgcggtgactccaccgtggagcagcagcgttcaactgtggcggttgcctggtcccc

SEQ ID NO: 269399 - DNA, 548 bp, Homo sapiens
  chr16:72459581-72460129
  hypo
agagtgtgccaagcggctggcgtctgtaccctgtgggaaaagttaactgtaattcttcggcttttaaaatcaattaacccgagtgttaattaacgtcaagtcgacgggaggaggagaagaagaaggggagggagggagaaaagaaaaaagctgcaagggcggatggcagaagagttggcaccgtgccatccattcaggggcaacgccacagtttcgtgtgatagcagcagcgggtatatgatacggggccctgtatgcgggccagacagtgcggtaaagccaagggagattatccagacccccaggagcgaacagcaagcagcaaccgaaggcgcaagtgccaggattacagcctaggctgctccaactatgagcccttcctcggaccctgggactcggctacttggggtttgggggtcttccacaccacagaggcacaaagctgactttaatcactttttttcctttaaacttgattctgccgcagtggagccagcacagcggatgttttcacacccagcaagacaaaggccgtcgtctccgccatg

SEQ ID NO: 269400 - DNA, 528 bp, Homo sapiens
  chr16:72461254-72461782
  hypo
tgcaaaagggtttcagggaacggctggtacttacgttgtctgcgttgctgtggatcctgaaaggtgttctgttggcaccgggcgctgagccaggggcaggcgctggaaacaaaagggagagacaaaaaaataaagtgattcaatgggaatattaattgctgctcttgtggattttacaaaacacataaactgttttctttttctttcttaaaaaaaaatgtggattggcgcgtgtcccttttgcatggaatatacaagtagtatgggatttacagcccagttacgggactcaggattagctgcgctggcatcttttgggcatattcttccttttaatgaatgagctttcgctgttaatgaggaataatcgtttggctaatgagctttgaaacattaagagaaaagaggttttttccgttaatcgctctggtgcgactgcatggatggattacaaaagacagcaataggaacgcagtacaaagggggggacctctcctgcagtgggagaagcaccgagatgggtgatgt

SEQ ID NO: 269401 - DNA, 148 bp, Homo sapiens
  chr16:72906617-72906765
  hypo
aaagtgctcagattagaggcatgggccacgtgcctggccatgtatttgttttaaataaatctatgatattcacactcacctacacgcctttcaaaagatggtggggggtgggggatgggcaaaactagacttccgaaagatggaagaa

SEQ ID NO: 269402 - DNA, 198 bp, Homo sapiens
  chr16:72916141-72916339
  hypo
tctcccagtgggcagcgttgggcacgtgctgccacccactcatgaagatagcatggaagacagcctggagcccttgaccaagaacaacactaaccagaagggcagtgtacagctggtgccacgtgtcatatgctgaaacaacacgcacaaaaccctggtagcttcatcatcccagaaaaataacgcaacgaatgaatg

SEQ ID NO: 269403 - DNA, 115 bp, Homo sapiens; identical to SEQ ID NO: 217086
  chr16:72945691-72945806
  hypo

SEQ ID NO: 269404 - DNA, 212 bp, Homo sapiens; identical to SEQ ID NO: 217087
  chr16:72949233-72949445
  hypo

SEQ ID NO: 269405 - DNA, 193 bp, Homo sapiens
  chr16:72957739-72957932
  hypo
catcctactttgaattgcctcgtcctaccacgttcaagacgcggctactgggcaggtccacgtctttaagttgtgtacaatgcctggttcacaacacgattactcattacatgtcaaaataataattatcacagatggcgaattcacaagtgggttagccgtcggctgtaacgggctagctagcacttgcccc

SEQ ID NO: 269406 - DNA, 174 bp, Homo sapiens
  chr16:72958495-72958669
  hypo
ccacagagaggccgcggctgggtgcgcagaactacgacaccagccctaagaagccaacaggctgttgaatgccaagcctgaactattaatttgcatatgacatcaattctgctgtcagtgtgttaatgtgtgattaattctgtcatgggttagagcaaggagaattagttaatt

SEQ ID NO: 269407 - DNA, 410 bp, Homo sapiens
  chr16:72958709-72959119
  hypo
tccctttaacttccttttttctcttcttattaaactaacctcctgggttttcttcctctgggcacttctgtcctatgggacttcagtcccatttcctcctaccctttacagaaacgcacctatagacccaaaaacggagaaggcagatgggtcttactccggcgccccagctggcaagtctgaactctgtccaggcagtcacgggggtggtttgggaaggccttacaacggggacacacaggtcccattcatatttgcggtcaactgccaatgccagtgatacctggatacattgtacaatctgtgctttgtgtgctgtgcaaataacctgtggggctggagcaagctggaatgtggagttaacacaaagccattgctgtgctatcgaaatcggtcgtgaggctgcccac

SEQ ID NO: 269408 - DNA, 104 bp, Homo sapiens
  chr16:72963492-72963596
  hypo
tgtgttctgaaaggtggcctcgccctgtggctcttgccccagaggatgcctggggccacgcgggctgcgacagggccctccacgcaagctggctgtacataaac

SEQ ID NO: 269409 - DNA, 101 bp, Homo sapiens; identical to SEQ ID NO: 217089
  chr16:72984703-72984804
  hypo

SEQ ID NO: 269410 - DNA, 413 bp, Homo sapiens
  chr16:72991203-72991616
  hypo
tacacaaaaaccactcgagaagaccagagtcaactgaatccacaggactatctcaccctattcaccattctccctggttaaactcctatcatgaaaacagacaaacacgtagtcatcctcacctagagcaggcgtcatggcggccatgggcccggcgggatccagctggaatccgctcatcatgaactgggcgtccgaggcagcactgtccatcttcaggttgggcaggttcatgttctgggccaggtagtattggtagagctcggcctcggcgggtgagggcaggctgccgaggcccaggtggcggttgtgttggatctgggtcatgttctgttgcagtaacatcatgttatgcatgtgcttctcactggtcatgtgaatgcggaggttcctggccacgttggtctcataat

SEQ ID NO: 269411 - DNA, 488 bp, Homo sapiens
  chr16:72991939-72992427
  hypo
acacaggagccccccggctccgggtgcttctccttcatgtgtgcctccagggtctgctggtacttatagtgccagttgcacttggggcacttgagtgtcttacacgagttacgagaatgcatcatggtcatgtggccgcccagcgagcgggaggagcccaggaccgtgtcgcatttggggcactccacgccactccccgaggggcactccccaaccccaagctcgcagagggagccagcgtgctggtgatggggaacgaagcccccatcgtcaccctctgtgctttcatttggttctggtgctgtggcattgtctttattggcactttcgtcagcgaagtccagcctcctgccgccctctgccacattggccctgacgccctcactgttaaagcttaaacgattcctcctgttcgcaccatcaaagacaacaaaggaagaagcagaattagaactagtagaagctgtgcccctcgacagggtctggag

SEQ ID NO: 269412 - DNA, 1013 bp, Homo sapiens
  chr16:72993525-72994538
  hypo
agagttcaggaaaagcgaggggagaggcccactgccactgccactcccacaggcgcccccgccctgggtcagctggctcaggctctccacaatgtacgcggagccgtccggctggtagacgatctccccggccaggttctccacgtcactctcctcgtccccctcctcaccggtgtcgctggcgctctcctctctcaggggtggcggggggcgcgcgctggggcagtggtgctccatgtaggtctggaggctggcaaaggaggccgaacattcgttgcaggtgacctccttgctggcgggctcggaggggggcccggccgacgcggtgctctccgcgaggcgctcattgaagggggccctcaggctgtccaagggcccgtggctctcgcctgtggactgctccatgctactgggtttgtcagggaggtgggtgctgttgagttcagtccattgctggtgctgagggataccgcacccattgtccttccccgagacgacgggcgagtcacagccttccatggtaaggcctgcgtggagctttcattgcacccagtacggaggctcggacctgaagggcagaggcaaggggggaggagggagagaggggaaagagagagagaaaggaaagaggttaggagggccgaggctgaggtcctaccgcacggagcgctctaagaggcttctgtccacaacacagagacacagggcggagggcgggcctggggacactgccccacacggtccagcacacaggggtggcatggccgggtcaacagcctgagcgagggatatggggaaagaaggccaggaacagccctcttcggcttcgaattgtcaccgctctgcccctgaagactagcgggaatttccattctttgccagcatagcttcgatgggccacagtggagaacggacgcgtcatctctccagccctctacgaggtcacagccacagccctaccacttatggacagctcacacgaagtcagccccgactccgcgcactgtctgtgg

SEQ ID NO: 269413 - DNA, 192 bp, Homo sapiens
  chr16:72997030-72997222
  hypo
aacccagtgggtccccgcacttttccaagcagccctgccagcctgacacgcacacctctcttcaggctccctccacgttctgtgccccttcccagtacttccctagtgccagggctagctggtacaggttcacacccctcctcccttcctgcagcccgcttctctgctggtggcacccggaactccctctaa

SEQ ID NO: 269414 - DNA, 86 bp, Homo sapiens; identical to SEQ ID NO: 217092
  chr16:73007796-73007882
  hypo

SEQ ID NO: 269415 - DNA, 96 bp, Homo sapiens
  chr16:73029802-73029898
  hypo
gctccagaatttctcgatgttctgctcaggaggcactgtcctatcttggtaattatgaaggcatattcatacgttcttttactgccaggtgcggtg

SEQ ID NO: 269416 - DNA, 47 bp, Homo sapiens
  chr16:73047783-73047830
  hypo
acaacccccgaagacgcccacatcctaatatccgtaacctacaaata

SEQ ID NO: 269417 - DNA, 94 bp, Homo sapiens; identical to SEQ ID NO: 217095
  chr16:73208571-73208665
  hypo

SEQ ID NO: 269418 - DNA, 36 bp, Homo sapiens
  chr16:73222730-73222766
  hypo
ttacagggaggctagcgtctggatatttctttttct

SEQ ID NO: 269419 - DNA, 211 bp, Homo sapiens
  chr16:73675853-73676064
  hypo
ggcagggatggagacgctggtccacatgctcctccgactcctccctgcagagaatactgaattcaggcagtgtgagggacgcttccaccaaatttgtttctctttaaggcagctgcttaaagagggaaggtggtccgtggcctcgaggacatcaggtcacattggttcatgaactcagacttaattcccagtctctcgtgaaagcagctct

SEQ ID NO: 269420 - DNA, 35 bp, Homo sapiens
  chr16:74408512-74408547
  hypo
ctgggattacaggcttgagccgtggcacccggccc

SEQ ID NO: 269421 - DNA, 89 bp, Homo sapiens; identical to SEQ ID NO: 217096
  chr16:74490377-74490466
  hypo

SEQ ID NO: 269422 - DNA, 45 bp, Homo sapiens
  chr16:74511568-74511613
  hypo
agaataaaaattaaatgttgcggccaggtgcggtggctcacgcat

SEQ ID NO: 269423 - DNA, 43 bp, Homo sapiens
  chr16:74540183-74540226
  hypo
acatctcaagaggccaggagcggtggctcacacctgtaatccc

SEQ ID NO: 269424 - DNA, 205 bp, Homo sapiens
  chr16:74554955-74555160
  hypo
agaaggaaaatgaatagccacgaaagatgaatgttccatgtggaaagaatagcgaatgcaaaagtcccgagtcaggaacattttctgagtatctgaagaatagcaaggaggacactgtggcttaagtagaggtggcaaggggcaacggtcgtaggagaagaggtcagagagttggtatttgcacgcttgcagggcacaaagattt

SEQ ID NO: 269425 - DNA, 108 bp, Homo sapiens
  chr16:74659412-74659520
  hypo
aaaaaaaaaaaaaggacagaccaggcgcaatggctcacgcctataatccaaccttttttcttctgccattgacttgttgtggaagccagatcagctgtcttatagaac

SEQ ID NO: 269426 - DNA, 32 bp, Homo sapiens; identical to SEQ ID NO: 217098
  chr16:74694094-74694126
  hypo

SEQ ID NO: 269427 - DNA, 32 bp, Homo sapiens; identical to SEQ ID NO: 217099
  chr16:74694366-74694398
  hypo

SEQ ID NO: 269428 - DNA, 435 bp, Homo sapiens
  chr16:74752677-74753112
  hypo
agcttgatgctgcacacccacgctgtccccgcctggcttaggttcggatgcccaacccagttgccccgtgagtcacatcaaacgtcccgtccctcccaacccacagccagactcccaggaggctccgcagcacctgaagctgcggctggctgccgggccctctcgggctgcacatgctaggtccgggctgggaccccgccccgctcaccttgtggtgctggccgtgcatgacgaagtgcagcatgatgaggtaatagctgtcgctggggggcttcatgtggaacaggaagcggtggatgaggtactcgatgaggctccagaggaatgtccccagcatgaagagcccggggaacatggacttgggcactgccaccgtgtactctgcagggtggcagggagagcgaggtgaggaccggtgcatagcagcctggtagc

SEQ ID NO: 269429 - DNA, 447 bp, Homo sapiens
  chr16:74782379-74782826
  hypo
aagtgattgctggacgggcggggggagcacacagcagcccactccgagggctgttcccgggaaggttcctcacagtagcctcctttctcccctcgtggaggactctctgggaggtccccaagcccccagcttcctccagggtcccagaccctgtcctccctagagagggtttgcttggacggcgcacgggggagagaacagagaagaacaacagaaagtctgcgctctgcaccacaaacaaacaagtccaccatagaggccgcgtgaaaggaggcagtgtgcggcgggcgggggctgggggcgggggcgccggcataaaggcatgttgttcgggaaagctggggctgggcaccgcgggacggacagatggccttttatcccatagcctggattttgcctgaaaaccctttttctgaaagggaatggttgcctcgggccttgggtcca

SEQ ID NO: 269430 - DNA, 149 bp, Homo sapiens
  chr16:74872626-74872775
  hypo
ctgagaatggatcacgctggtccgcctccagtttgttgaacccaggttcctgtgttcccgctgcctttggccagcagccctgagtcaccctttatctgtcaaagaacaggttttcttcattcaatgagcaaataaactattgtttcctt

SEQ ID NO: 269431 - DNA, 138 bp, Homo sapiens
  chr16:74901400-74901538
  hypo
cccttctctttgccaaaccacgcatacagtaaggaagagacagcatggcgccagccaggcaaagaccccatctccataataagattacggtggggtgcccagcttcctcttgtgctaaacgtcacacctggtccaccc

SEQ ID NO: 269432 - DNA, 146 bp, Homo sapiens
  chr16:74901700-74901846
  hypo
ttaacctcaccccatgtgtgtccgtgtccttgatttccttggcatgaggcaatgacatgccaagacacgcccgggaccacaacaccgcttcatttctggggttcattcccttttattgctgagtagcattccgcaggacagaggct

SEQ ID NO: 269433 - DNA, 335 bp, Homo sapiens
  chr16:74908780-74909115
  hypo
gcccagcctgtttttttttgttttttttacaccagaactccttcttctgagccactgcacccagctgctgagtactgtattttctcaggggctccgcatggaaacccagtgccctacagcagggggcagctgcgtctgatgcctcttcccaccccgacggctggcagggcctggcacgcaggaggtgttgaacaggtatcagctgaaagaactgaatgactcagcagtaacacttcagcagagggcagactggctttaccaacgcctgctactgcccactcgccactggcccaagtcaggacaccgggatgccgctccaccgccgggcggggact

SEQ ID NO: 269434 - DNA, 103 bp, Homo sapiens
  chr16:74917222-74917325
  hypo
accccggtttttaatctcactgtcaaagccacgtccagaggtccctgagccacgtgagggttctgcagtgttttgtacttccgacaacagttcagggttcagc

SEQ ID NO: 269435 - DNA, 127 bp, Homo sapiens; identical to SEQ ID NO: 217103
  chr16:74984548-74984675
  hypo

SEQ ID NO: 269436 - DNA, 148 bp, Homo sapiens
  chr16:75019626-75019774
  hypo
cgtctcggaaaaaaaaagaaaaaagaaaaatcaaagctcgtgcaaaccgaagatacctcttctcctgatgcctatcccatcgagatatttaaaagtctgaatgtgcaatttattgtttcatacaatacagcagcgcctcccgtaacaa

SEQ ID NO: 269437 - DNA, 43 bp, Homo sapiens; identical to SEQ ID NO: 217106
  chr16:75057287-75057330
  hypo

SEQ ID NO: 269438 - DNA, 32 bp, Homo sapiens
  chr16:75075662-75075694
  hypo
attctctcaggagttcgagaccagcctggcca

SEQ ID NO: 269439 - DNA, 44 bp, Homo sapiens; identical to SEQ ID NO: 217107
  chr16:75113037-75113081
  hypo

SEQ ID NO: 269440 - DNA, 44 bp, Homo sapiens; identical to SEQ ID NO: 217108
  chr16:75113381-75113425
  hypo

SEQ ID NO: 269441 - DNA, 40 bp, Homo sapiens; identical to SEQ ID NO: 217109
  chr16:75113750-75113790
  hypo

SEQ ID NO: 269442 - DNA, 195 bp, Homo sapiens; identical to SEQ ID NO: 217110
  chr16:75127914-75128109
  hypo

SEQ ID NO: 269443 - DNA, 379 bp, Homo sapiens; identical to SEQ ID NO: 217111
  chr16:75136326-75136705
  hypo

SEQ ID NO: 269444 - DNA, 297 bp, Homo sapiens; identical to SEQ ID NO: 217112
  chr16:75138821-75139118
  hypo

SEQ ID NO: 269445 - DNA, 804 bp, Homo sapiens
  chr16:75148497-75149301
  hypo
gtcccgcatggtgccgtagcggaccgcgttggtccccgacgccccggtggccgccatgccacagagagaggcgtccgcgcctgggtctggagggcggcgtacagaaggcagcctcagggaccggaggtcctttccctcgggctgggggaggaaggtcccctgaaccccagacacagccctgctcccacggtgccctcagggtcccaggaaaggttcgcgagtcctacccacgggaaaccagaggccgctgtcccgcaggtgggcgttgagggctttgcgggtgacacctggctccaccaccacagagaagtcctcctggttcagctccaggattcggtccatatgcgtcaggttaacgcagacgccgccctggttggggcaggtgctaagaccactgcagacctgggtctctgacctggccacgtccccggaccacaccccgcgggtgtccccccagcagccagaccagacccccagaggcaggcagcccacgggcgggagcagacccaaggtgccgtgtgtggcgggggaggcagccacaggtgtgccaaggtgtgctgggaccatcctcgggccgggcgagggagccccactgtacctgcacagcacagacgccaccctcaagcccggtgccggtgccgaatgggatgatgggcacaccttggcgatagcacagggctgccagccggctgacctgctccacgttctggggccacaccacagcatcaggaggttcgcacctagaaccagaccctcagcgatttagcggggcgtgacaccctctggtcccgaggtgttgcaggg

SEQ ID NO: 269446 - DNA, 35 bp, Homo sapiens
  chr16:75171634-75171669
  hypo
attacaggcatgagccaacacgcccggccccaaaa

SEQ ID NO: 269447 - DNA, 220 bp, Homo sapiens
  chr16:75222815-75223035
  hypo
tagccagttgtacccgtgacattttgatggcccatatgggaagtgctcgcggactgcttagggagtcctcccctcctctctccctttcttctccaactccagcctctcagtggacagcgcccaagcctggagacaactgaaggtccccagccaggtctactccctagtggaccagaaggtcccggtggagagatgcctgaccacccgaccaccgaccacc

SEQ ID NO: 269448 - DNA, 249 bp, Homo sapiens
  chr16:75226944-75227193
  hypo
ttgcatacatatctcctttacgtcatctccggtcaatgcatacttgagtctattcctgaggaagacgatcagcggaagacattccctcagcttgtggggacctgtcgatggacgaggtgcaaatataccctttagtttgtcgagcatccaatgcttcggcactgcagcacgcttcaagtgctccttagggccccaggccatggtgaaaccctgcgacggaagatcagcgctcttttgaagtgccttgta

SEQ ID NO: 269449 - DNA, 95 bp, Homo sapiens
  chr16:75258689-75258784
  hypo
acctccagccctggcgtgtacgcccgtgtcaccaagctcataccttgggtgcagaagatcctggctgccaactgagcccgcggctccctccgacc

SEQ ID NO: 269450 - DNA, 34 bp, Homo sapiens
  chr16:75263537-75263571
  hypo
ggccacgatgccgcgcaggaggtcgcacagcagg

SEQ ID NO: 269451 - DNA, 64 bp, Homo sapiens
  chr16:75263751-75263815
  hypo
gtggtcaggttggcctcacactgctccaggtagaagagcagcagctgccggtccgagggcccca

SEQ ID NO: 269452 - DNA, 41 bp, Homo sapiens; identical to SEQ ID NO: 217116
  chr16:75458366-75458407
  hypo

SEQ ID NO: 269453 - DNA, 163 bp, Homo sapiens
  chr16:75469090-75469253
  hypo
gtgagccaccgcgccgggcaccttcaaggttttgttaattttggataatgctacaatccattgctgcaaagaactcgaaaatgcacacgccaacataggagttctttttatgcccccaaacactaagtctctcatccaacccctcaatcggggcataataaaa

SEQ ID NO: 269454 - DNA, 44 bp, Homo sapiens
  chr16:75479780-75479824
  hypo
atgtcagatttatggccaggcgcggtggctcacgcctgtaatcc

SEQ ID NO: 269455 - DNA, 76 bp, Homo sapiens; identical to SEQ ID NO: 217117
  chr16:75495229-75495305
  hypo

SEQ ID NO: 269456 - DNA, 457 bp, Homo sapiens
  chr16:75513119-75513576
  hypo
cgcgcaccaggtgcacgatgcgtaggttgagcgcggggtcgctgagcagcgggtagagcacctgcaggttgaagaagcgcacctccttgagcaccacgtggctgtaggagcggcaggcctcccgggccagggtgaaggactgccgcgcgcacagtggcttgcacacggcctcgctgctgatggcgcctcggggaaaggcactgcaggcgggtggcgagcacagtgcacggctcacggcccactggaagaggtcggacaggttgcggcgccaaggcagataggcatcaaacacgtccatgtcgcacaggaagacggagcgcaccaggtcgcgcacagccatgtgcagcgttgcggcgctgccctgcgacagggtggtccacacgtgccacgcgggctccattaggtagaagacgtcggggtgctggttgaagagttggcccacgaaggacgagcccga

SEQ ID NO: 269457 - DNA, 34 bp, Homo sapiens
  chr16:75527396-75527430
  hypo
agagcgagactccgtatcaaaaaaaaaaaaaaaa

SEQ ID NO: 269458 - DNA, 35 bp, Homo sapiens
  chr16:75549847-75549882
  hypo
aagagctaaactccgtctcaaaaataaataaataa

SEQ ID NO: 269459 - DNA, 404 bp, Homo sapiens
  chr16:75563100-75563504
  hypo
cagggtgaggtcacgctgctggtccgcagagtacacaggccggtagcccagcagctgcagcgcgccggcgcacacctcctgcacgcgcaggatcttagtgaagggcaacgcgtggcgccaggcctgggagacgttgcgcgcattcctagacgaagtatggaaggcctcgattggcttgccgatccccgacccgtgggtgatgttgtggatccaggcctcgagctgtggcgtgagggtcaggccggtgaaggcgtagagtgcgcggatctctgccagcggctcccgcgccaggtcctcgaagcgcaccaggcggtagcggccgcgcaggaagggtggcggcttgagtgtggcggcctcggcgatgcgcacgtggctgcggcacacctcgcgaatcaggcgcaggt

SEQ ID NO: 269460 - DNA, 138 bp, Homo sapiens; identical to SEQ ID NO: 217120
  chr16:75606235-75606373
  hypo

SEQ ID NO: 269461 - DNA, 88 bp, Homo sapiens; identical to SEQ ID NO: 217121
  chr16:75622685-75622773
  hypo

SEQ ID NO: 269462 - DNA, 313 bp, Homo sapiens; identical to SEQ ID NO: 217122
  chr16:77227371-77227684
  hypo

SEQ ID NO: 269463 - DNA, 580 bp, Homo sapiens; identical to SEQ ID NO: 217123
  chr16:77228259-77228839
  hypo

SEQ ID NO: 269464 - DNA, 43 bp, Homo sapiens; identical to SEQ ID NO: 217124
  chr16:77229453-77229496
  hypo

SEQ ID NO: 269465 - DNA, 370 bp, Homo sapiens
  chr16:77232998-77233368
  hypo
catagcacatgcacgtctgtcccagactttgacaacctgcacaagacaagcagcctaaagcaggagagacctccctagggttttgtgtgtgtgcacactaccctcactccccaactggccattaccctagttctgcccttgtttgtggagttacagcctcaaggttgtagcatgtgtgctggcaatcagggccgcagtgtgttctgcgcctgcccagagctgactcctgatttaaccgctggcgtaaccgcgggttgcacgcatgcgtgctgaaaagcctttcaccctcacgtggtttcttttttaaccagtcatcaagcgaggctcgcgcgcaggccccgcgttggaaaatggcggggaagctgaaacc

SEQ ID NO: 269466 - DNA, 129 bp, Homo sapiens
  chr16:77247660-77247789
  hypo
atgcctcatgccaaggcgggaggtgaggctgcacttcgctgtgtttgaggagacgtctggagaaggccggcgtggtagagtggaatgaggtagagtgggatgggagacgacactggagagttgccaagg

SEQ ID NO: 269467 - DNA, 151 bp, Homo sapiens
  chr16:77747179-77747330
  hypo
actcatgctattctcgcgatctttccgctaatagcagtcaatcacagtggctgtacattctgtgtgtacaccctgtgatgttacgcaggataccctcgcaatctttttactaatatctatcaatcacaatggctgcacaccctgtgtgtac

SEQ ID NO: 269468 - DNA, 291 bp, Homo sapiens; identical to SEQ ID NO: 217129
  chr16:77752653-77752944
  hypo

SEQ ID NO: 269469 - DNA, 767 bp, Homo sapiens
  chr16:77753304-77754071
  hypo
tataaatataacaccgatatttccttaatatcatgatgtgtaaacactagatattataaatattgcatcgatatttcattaatatcatggcgtgtaaacactatgtgtgaacactggatattagaaatatcacaacatttcattaatatcacggtgtgcaaacactgtgtgtaaacaatggatattatgaaaatcacagcgatatttcattaatgtcacagtgtgtaagcactgtgtgcaaacactggatattatgaatatcatagcgatattttattaatatcgcagtgtgtaagcactgtgtggaaacactggatattatgaatatcacagcgatatttcgttaatgtcacagtgcgtaagcactgtgtgtaaatactggatattatgaatatcacagtgatatttcattaacgtaacagcgtgtaagcactgtgtaaacactggatattatgagtgtcacagtgatatttcattaatttcacacgggatattataaaaatcacaacgatatttaacatcatagtgtgtaaacactttgtgtaaacatcgggtattataaatatcacagcgatgtttcatcggtatcacagtttgtaaaccttggatattataaacatcacagcgatatttcatttatatcacgatgtgtaaacactggatactataaatatcacagcgatgtttgcttaatatcacggtgtgtaaacactgtatattacaaatatcacagccatattttattaatatcacggtgtgtacacact

SEQ ID NO: 269470 - DNA, 33 bp, Homo sapiens; identical to SEQ ID NO: 217132
  chr16:78159169-78159202
  hypo

SEQ ID NO: 269471 - DNA, 238 bp, Homo sapiens
  chr16:78322973-78323211
  hypo
aaatggagtggaaggcagccctggctggaagtcttgctgggaacctggagcgctgggaggtaaaactttacttggtgctggcagcgtcactatgccagtctgtttcttcccgagcttcaggccatgctgatgttcaagttgaataaatgagagctaatgattttttaaggcgtttttagtgaattgccgtgggaatgctaagttggcaagaataaaacctaggcgaggagagttgatt

SEQ ID NO: 269472 - DNA, 174 bp, Homo sapiens
  chr16:78409036-78409210
  hypo
tctgaaagatttatctctttcgattcatctgtaaagtaaaaataaccgtcgtcgtcatttctcaagcgtgacgatactgttacacgtttactgcatattctgcataccaagcacatatccgtcacacgcagtgtggccaacttccgagaggccggcattcagccaaacagcctg

SEQ ID NO: 269473 - DNA, 206 bp, Homo sapiens
  chr16:78519525-78519731
  hypo
gaaagagcactgcccgccgcgtgaaggacatctgctcacaagtgagcaattgtgcttctgatttggggcagcacctttgcttgaacgctggctccagatgaaagaacagattgccgcggagccgcttttccaaggatccctctccccagcatggggcttcatacattattgagagcaaacctactttccaccgccactcctggatg

SEQ ID NO: 269474 - DNA, 493 bp, Homo sapiens
  chr16:79263218-79263711
  hypo
tggccttgtgggcgcgaggctcctccggaaagcaggcattgtgcagggtgtctctttgatggtcttttaaagagctttccctgttagctagagcagtttcaccttcagatagagctgcctttccgttgtccgtggaattcactgcacatttcgagggaccgcctgtcctggcagagagcaagggactcataaaagtgtcagaacattatgaacagcccgaagatgggctgtgagcggggataagtgaagcgcggcgtggaggccgttcggtaactccatccatctgtggacaggggcgtgaggacaaggcgaacagactcgtggcgagcagcacctgggcaagccagcaggtgcttgagccacggggctggctcctcgttgagctatctagaggagtgcaccgagcaaagcgcctgctgaaaatactttgtacctccgggattccttctcttcacttcgaagtgaaagatgcggagtttaatcctaacctagt

SEQ ID NO: 269475 - DNA, 526 bp, Homo sapiens
  chr16:80641602-80642128
  hypo
agctttctctagtcatcttccggatgggttcaatactttttatccttattggccgctgcttctcgtttctttgaaagctatagatgttttgcgtttttgtggtgtttaggactttctttgaaagcagtgacgctaccctagagtatccatctctcctgtgaggtttctctgcctggagatgatggacaatttgtaataatgctgactgtctccctctgattgaagctgtcaatactgagaaaaggcatttgttaaattgcaaagggtcttttgcttattccctgtgcgacctctagcaagtcagtgaagccctctgagccttgctgtcttcatgtgtaaaatgggtctatcaaaaggacaagcacgcaggaggcgcaggaactcaccacggcactgcaggatgccatctccttgacccgcagcatgacctcctggctgaacgtggtgggccagaagacctgcgacaccagccccctgctgcaggcctcctgggcggtgagcttccgcccacagaacagcatctcat

SEQ ID NO: 269476 - DNA, 396 bp, Homo sapiens
  chr16:80646291-80646687
  hypo
aggaataattgagacgccatgcagagtgcatggtccatacactgacatcatcgccatcttctcaggccgggctactccatctggcactgaaggtgtgaaggacatgaggcagccaagccaatctgcaggctgacaacaccctcaggtttctagccccatgaagagcccctaaacccaaggcagaggaaggatcctgctgggacccgaatccaggtatcacaggaggcttaccagcgcgacgcccaggatctgggggaaggtgtaggaggagcagccagcaggcgtgaggcggatggtggcgtagggcgtctggaaccaggccttctcactggcccacacgatgtcacagaggggcaggatggaggcacccaggcccagggccggcccattgatggc

SEQ ID NO: 269477 - DNA, 81 bp, Homo sapiens
  chr16:80654697-80654778
  hypo
gtcgctggacaaccggccaattaggtaggaataatccaggccgctgcagaacacgctccccactgcgctgaggagcagcag

SEQ ID NO: 269478 - DNA, 158 bp, Homo sapiens
  chr16:80714339-80714497
  hypo
ctcctagttagggacgtttcacagagtaaaggctcgtgtgaatccatagaacactgatgctttggcctgtttagacgagtgctaagcagttcaccaaggcagaaccacagcaagggttagcaaacccaccagcttttctgtaccgatgaaactcgcgt

SEQ ID NO: 269479 - DNA, 36 bp, Homo sapiens
  chr16:80931968-80932004
  hypo
aaaccaaggaacaaacgggaccgtggcaaggcagcg

SEQ ID NO: 269480 - DNA, 35 bp, Homo sapiens
  chr16:81042210-81042245
  hypo
aagtgatacaccacgcccggcgcgctcccggcccc

SEQ ID NO: 269481 - DNA, 134 bp, Homo sapiens
  chr16:81087464-81087598
  hypo
gagacctaaaagagcgagccgatgaccatggcaggtgtaaataagaccttgctccaaacgtggcgtcttcttactgcttctgcttgcagcgtttgactctctgctttctggtgatccgccgcttttccatgtcc

SEQ ID NO: 269482 - DNA, 115 bp, Homo sapiens
  chr16:81309505-81309620
  hypo
gggcttagcagtggcggggtgtggctgggaggggtgtgggcaggggtgggtcatctggaccttggccctgccctggtgctgcagggcgctgtgtgaggcccgaggttcgtgtgca

SEQ ID NO: 269483 - DNA, 198 bp, Homo sapiens; identical to SEQ ID NO: 217137
  chr16:81315519-81315717
  hypo

SEQ ID NO: 269484 - DNA, 201 bp, Homo sapiens; identical to SEQ ID NO: 217138
  chr16:81323324-81323525
  hypo

SEQ ID NO: 269485 - DNA, 191 bp, Homo sapiens
  chr16:81335173-81335364
  hypo
ctttctgtgtgcatgcgtgttctcaaggacagtagaatccacagcttgcttcagattctcaatagggaagtgaagcacttctgcactgccccagctctgaggattcggtgattctgtgactggtgatatatggctgaaattcacaggccgcacacagctcagaaaggaaaggcggtcgtgtgacaggtgtg

SEQ ID NO: 269486 - DNA, 127 bp, Homo sapiens
  chr16:81361632-81361759
  hypo
agttgctgcgtcatcgttttaatcgtctttgaactcttaaaattttaacatgcattttcaaaccttgtcttttaagagagaaattttattgactgctttactttcaaaatgacgcgaactagattta

SEQ ID NO: 269487 - DNA, 41 bp, Homo sapiens; identical to SEQ ID NO: 217139
  chr16:81453688-81453729
  hypo

SEQ ID NO: 269488 - DNA, 188 bp, Homo sapiens; identical to SEQ ID NO: 217140
  chr16:81492930-81493118
  hypo

SEQ ID NO: 269489 - DNA, 42 bp, Homo sapiens
  chr16:81493362-81493404
  hypo
cctgcctttgatcccccactcgggtctgcagtgacagagcac

SEQ ID NO: 269490 - DNA, 250 bp, Homo sapiens; identical to SEQ ID NO: 217141
  chr16:81505617-81505867
  hypo

SEQ ID NO: 269491 - DNA, 113 bp, Homo sapiens
  chr16:81520548-81520661
  hypo
aggcgcacggcaggcgataaccgcactgggcgttgagcgccgtgagggaagcttctggagggagcgtgggactggggtgggggcagctggcgcagcttcgtttctctggacac

SEQ ID NO: 269492 - DNA, 254 bp, Homo sapiens; identical to SEQ ID NO: 217142
  chr16:81533315-81533569
  hypo

SEQ ID NO: 269493 - DNA, 317 bp, Homo sapiens
  chr16:81556854-81557171
  hypo
ttgcctttttccaccctatccgacgatgctcatgtgttggagatctctccgttgattcctgaatatctagttcatttcttttgattactgtggagtcactccctgtttgccatcttgttccatctgagtgcgaggcctgaatgggggacagactcaccccctgtcacacagaaggacgtggggcccacagtcacacggccgcaaggtgggtctggtaccctcccagcacattttggttggactccagaagcagggcttccctcacgatacctcaagcttacctgggccccggccaagcaactgactcatccagtctg

SEQ ID NO: 269494 - DNA, 407 bp, Homo sapiens
  chr16:81557201-81557608
  hypo
aaccgtggttgcctcatttagatcccagccaaacccccttcccgcgaaaagccatggtggcctagaacgaagtctggaaaagaaccaagaggacagcatcttttgtctggagagcaccgtgcctgttctccaaccacctcgtagcccctggtggagcctccctcctcccccaggaagaaggtgagctgagtcaccaccaggtaaccctgaacctcgctcagacacagcttcctttagctaggagcctggatgtaacacccagctcatcccttggctccctccaaacgtcaaggcgtcttgaactaaaagccagcgcctgcacaccggcagaactttgcagctcctggctcctgagttgtaggtgtttttgccaggtgtgcctgtacgtgtgtatgtgtgcccatggg

SEQ ID NO: 269495 - DNA, 883 bp, Homo sapiens
  chr16:81563919-81564802
  hypo
aatcccagtaaaggtggatccggatccctcagggacctaggtgcagttcctgttcctcccgtctcgcctctgttgcgctgcaaggtggggtgtgtagtgagtatcactgtaacctgtacttttctaaagtcaaacagatttctcttggtgggaggacgtgtcttttgtgggatcggtgtagcccgtctgagtcagtgactcacctggcacccctggcagctgactttcctggcagttcactcgagtctcttgcctctgctcacaaaagcctgcgcctttattcagctttcctcaccgcttcccaaggcagagcagagcctctcccgcccgcctcccacatctctcccttagctgggtgcccgcgtggctgctacctccgaggcttctgtgtcaccgggtagtggaaatgtcaccgagtgtcagagcttcgagcctcctccagatccatccaaggtggcatcactaagtggcatttgtgtgctaggcacgtaccctcttttacatacattatcttcgatcagttcagcttcttctgcataaaaaagaaatttctctaccgtcccagggagaataattggaaaagcgagccctgagtactcagcccacccgcccttctcctgctgaactgtcgaacgtagccaccagctagcctgagcttgttctgatgtcttctgggatcgtcattgttatgggttgaactgtagccttcaaaaggcacgtttacgctgtagtctctgtacctgtgagcatgaccttctttggaaatagggactttgcagatgcgaccaagttaagatcatgctggaggtcatgcgggaggtcatgctggaggagagtgggcccaaatccagtgactgtgtccgtaaaagatgagggaaactta

SEQ ID NO: 269496 - DNA, 640 bp, Homo sapiens; identical to SEQ ID NO: 217148
  chr16:81565569-81566209
  hypo

SEQ ID NO: 269497 - DNA, 158 bp, Homo sapiens; identical to SEQ ID NO: 217149
  chr16:81580487-81580645
  hypo

SEQ ID NO: 269498 - DNA, 31 bp, Homo sapiens
  chr16:81581959-81581990
  hypo
aactcctgagctgaagcggtcctcttgtctc

SEQ ID NO: 269499 - DNA, 262 bp, Homo sapiens
  chr16:81620081-81620343
  hypo
tacctagtgtctcccgtactaggagaattaaatcccagtaagccctcacattcctcagtgatccggtgtaactccaagcactgtagcctgccacgcaaggctctctgtaatcgagatttaatcagtttttatgactcacctccttcaacttctctctctctgcccaataaactcctattcatccttcaaagcccaactcaaacatcgcatactctctgaagtattcgtcccactttccctcgggctcctctgcctccacacc

SEQ ID NO: 269500 - DNA, 418 bp, Homo sapiens
  chr16:81626931-81627349
  hypo
gtaggcttggttgagattggcgagaggtggtgttgtgcctagcctggggggttggagggcggggggagtttctgctctgcagccctgtgatgcgcaggtgccatcgggtctctgaccccaggccatcaagagctgtgcgacctgcttgccatccatcatgtggagctggtcggtcaccccatgcaccaggccgactccaagccggagctttcctctccgctcttttcggagtaatccgtggatgatggaggagcttggcaagcatttcagcaaagctcttttttcttgttgaggcttgaaagtaatcgcctccgtgtattgagtgcccgccgaccacctggcgcgtctgggcattgagctcattggccgctggcacaaatggatcctcgcctcacccggtgcctgcctgtagcctctc

SEQ ID NO: 269501 - DNA, 226 bp, Homo sapiens
  chr16:81632815-81633041
  hypo
agtaataataacaacagccccggggcaaggagaggtcatattacctgagggaaaccaggggagggagagtgtgaacggcatttgagatttcttctgggaccaaggcccaaaccggcccttctaggatcatatcgttacctgccactttgcgtttgctgtatgactttccgtttgtgagattaaaaagaacatgaaatattttgacgggccttccccaaatgagcat

SEQ ID NO: 269502 - DNA, 46 bp, Homo sapiens
  chr16:81654530-81654576
  hypo
ggtaagtactgactcggttgcttgtttaaagcgactcaggcagtgg

SEQ ID NO: 269503 - DNA, 44 bp, Homo sapiens
  chr16:81655118-81655162
  hypo
ccccatggctcaggcgatggaaaccttgacgtcaggaccagggc

SEQ ID NO: 269504 - DNA, 108 bp, Homo sapiens
  chr16:81655707-81655815
  hypo
accctcaccacaaccgcataaggttgatgattatcgttgttgccattttccatacgggaaagatgaggctcagactggagtccaagctcccatcgttaggaaggggct

SEQ ID NO: 269505 - DNA, 142 bp, Homo sapiens; identical to SEQ ID NO: 217152
  chr16:81684997-81685139
  hypo

SEQ ID NO: 269506 - DNA, 127 bp, Homo sapiens
  chr16:81688957-81689084
  hypo
ggagctgctaaggacgcaaaacagttccgagaaagaactgtccgtccaccagcaaagcaaagctggctgtccccaccctcccaggcctttgttgagttgcgtgtaaagtggccgcttagctcgagag

SEQ ID NO: 269507 - DNA, 540 bp, Homo sapiens
  chr16:81694540-81695080
  hypo
tcttttgcaaggtacgggattgctgagctggggctgtggctgcaggaagtaacctccctctgtgcgcataccagggattgggtttgcacagaaaggccaaaaacctgggccccaccgtcttgggtcacggtcccagacacaggcggagagggcatgcccggcacccattcttagggctacacccacgtctctgccagacaggtgacaaagagtcacaaggggaacatcttgcttttccttggaatcacttcccggctgtcttaggagacaggttgctgcagatttcctgggctcatgacgtcagagctgggttattattagccaaggttcctctgcgcagtggctggcccacggtggggtgcggctgtggggctttccctgaacacgggaggcagcacggtgctccaggttagcttagaggagctgtggagcagggcatccgctgccgggcacccggcgccagccttgcagtgggattcacataggacatgtccagggcacatctttgtggctcaggccgaaccatcacacaaacctgtt

SEQ ID NO: 269508 - DNA, 164 bp, Homo sapiens
  chr16:81700317-81700481
  hypo
cacaccatgagcggcggcggcagaggagaactgctgggaggaccgaggaggatccgcctctcgtgtagaagaacagactgtattaaacagtgattatggccatgccaggcacaggaagacctgacctcatggaatcctaacaacacaggcggtgggcgagagag

SEQ ID NO: 269509 - DNA, 128 bp, Homo sapiens
  chr16:81700925-81701053
  hypo
aattcgccaaactgcgttctgaagaatgaccatgtatctctgtgcccccacgccactcggagtgttcttgtggcaaaggaggcgagaagacacggctgtggtccccagtggaccgtcaagtaacctaa

SEQ ID NO: 269510 - DNA, 400 bp, Homo sapiens
  chr16:81703540-81703940
  hypo
tcagagtggaagcgcgggtgtcgcagtgctattctttgaagtagacgccacctgtgctttccagagggttggtgtctccccattgccttccacatcaacagctccaggcagagctcggtcccgcccttctttctggtgtcctggctgccctgggctcctgccctgcctagcaccgtcccgactcctgtcctctgctgtctccacaggactttgggaagtgcccgcgactgaggctgtttactcaggagtacatccttgccttgaacgagctcaacgcggggatggaagtggtgaagaagttcattcagaggtgggtctccggcgcgacgtccctctgtggcctaggagccactttcctctcggatcctgtttactcagatatccacggggggctgtcgtg

SEQ ID NO: 269511 - DNA, 453 bp, Homo sapiens
  chr16:81737255-81737708
  hypo
gccttggaacaccccgctggtgcctcagggtgtgagtcacagcactggaggctttctcctccgcctggcagctgtcgtccatgggatgcgtggcagcccctccctctctggccacccccttggcccatcccaccgagctgtgcccccatctcagctcctgggatttaccgccccccaggaacagctctctgtagggcgaggggagaggaggaggataggggataggagggctcagggtctcgggaactcccagcagcaccctcaggcctctcccccgtctgcccgcaggacgctgacttggctcgtttgctgagctccggctccttcggaaacctggagaacctcagtttggccttcaccaatgtaaccagtgcctgcgccgagcacctcatcaaactgccttcgctcaagcagctgaacctgtggtccactcaggtacgtcctcccgccctg

SEQ ID NO: 269512 - DNA, 359 bp, Homo sapiens
  chr16:81741576-81741935
  hypo
tcctgccgccagggcgtgctcactggggcatcctccagatgcttctggagcctctgctgtgtaccaggcccatgtcagggacagggacaccgaggtgtggctgccacagtccccttccgggggatagtccctcctggcaggcacaggcaagctcagcaaaccaaggcgggcagagggcctggtggggccaggagggacagtcggtagagagcgaggtccaagagaggacgtatgggacacagaaggtggcaggggcacagccagcagatcacccatcccagcgtttagacctcagccctcagggtggcgtctgcagaccagcaccctcggcaccactcgggggccaacagaaatgcagg

SEQ ID NO: 269513 - DNA, 59 bp, Homo sapiens
  chr16:81765482-81765541
  hypo
gtcagtgccgaagccgttgtgatgaagcctgcgttagtgagacccggcctgcacaggag

SEQ ID NO: 269514 - DNA, 377 bp, Homo sapiens
  chr16:81924958-81925335
  hypo
cctgttgatttcccgcatcagagctgttcttcccccctggtgggcgcagaccagaaacaagcagacaccatcctgcccgtcaacgtgatgattcggtcttcgtgtttgactcttttagttcctcacgtacctgttttcacgagaaaacagcatctgggatgagaagtatgacgcggtggacatgcaggacatgaacaaccccctgtctcattactggatctcctcgtcacataacacgtgagtttcagatgagcctgtgatgggttgggcagcacagagcacgtgagggttgaggcaggggtccgatacgccgctccggtgagccctgttgtgaagcaggtggagggtgtagcaccgcattccttggactaaaatac

SEQ ID NO: 269515 - DNA, 255 bp, Homo sapiens
  chr16:81929225-81929480
  hypo
ttgcattatgtaagcgcacagggaaccctgcggatacagggaaagccatgtcctcgtgttggcagccgaatggagggagtgtgggtgtccttgtctagtaactgaactggtgtgtgggccgggggctgacctcggggctgtcagtgaacacacgtggtattgaggctgccgcgtttctccctgtagtggactgctgggacgggcccgatgggaagccggtcatctaccatggctggacgcggactaccaagatca

SEQ ID NO: 269516 - DNA, 197 bp, Homo sapiens
  chr16:81942077-81942274
  hypo
aagaggacgagtgccgagaagttgctgcaggaatactgcatggagacggggggcaaggatggcaccttcctggttcgggagagcgagaccttccccaatgactacaccctgtccttctggtaatgcccccgacccagggaacgcctaccttcttctccatgccaaccgatgaggcagggtggcgagtggttctagct

SEQ ID NO: 269517 - DNA, 173 bp, Homo sapiens
  chr16:81958725-81958898
  hypo
acaggcagttctctgaatttcgaaggctcttgtcttaagagactgtcagaagtccctttggcaagggactgtgggcaaaccgcccagcggctgtggtcaattcctctctctgatggcagtagtgctacctagggggccgcctgggtgaaaccggcttttttgcatacttccaa

SEQ ID NO: 269518 - DNA, 207 bp, Homo sapiens; identical to SEQ ID NO: 217153
  chr16:82172390-82172597
  hypo

SEQ ID NO: 269519 - DNA, 44 bp, Homo sapiens
  chr16:83862928-83862972
  hypo
taagtgatgggattacaggcctgagccaccgctcctggccctcg

SEQ ID NO: 269520 - DNA, 453 bp, Homo sapiens; identical to SEQ ID NO: 217154
  chr16:83863590-83864043
  hypo

SEQ ID NO: 269521 - DNA, 217 bp, Homo sapiens
  chr16:83934482-83934699
  hypo
cctgaaattcagagcgaaaagctcttgctgatcacccaccctaatccagggttatttgcactacgctttatatcactgtcttaccgttaatcagatgtttattagaaactttcttttttggctacttagatgcataaaattgggcataattaagtatgggattaatgtcaagagtgacaacagtggccatgatttgattccccgtgatagctggtta

SEQ ID NO: 269522 - DNA, 150 bp, Homo sapiens; identical to SEQ ID NO: 217155
  chr16:83941759-83941909
  hypo

SEQ ID NO: 269523 - DNA, 383 bp, Homo sapiens
  chr16:83945610-83945993
  hypo
acccccaggcacgcggtggagtcgcctcctccagagagttttcaaaacagagcagcttttaggctctgtagcctgaaccccagctggggagccgaggtctcttccagctccttcagtgctctgagaattgtcttctcgtcccagcaacaggcttgcctcgtgggctgcagagcggccaggccacccttagaaccatcgttggtgttttccaggcaatcgtgaaggaacatcctccatcagaaacagaagagaagaacaaaatcactgctgcgatcttttattccatcagcttgacccagcagggactccaaggggtggagctgggaacattcctcataaagcgagtcgtcaaggagttgcaggtaagcgacacgcagggagcc

SEQ ID NO: 269524 - DNA, 468 bp, Homo sapiens
  chr16:83957599-83958067
  hypo
cttctctcaaacccgggcatgcacagtgctggccgtatcggtccgagccctcggctgccagggagagaagctgagctcccaccaaagcataaaatccaggccagcgaggggcagccagaccacgggaagacaggaggaacccggacctggctctcgtgcaggaagcaggcagtgcacagctccgccgccacagagacagcctcctctcatgaccccagactcagcccgggccgtggtgggaacgatggttggcccggtttggagatgggggatctggccctgtggtgagtgcacccagagcaggtgtctctccggagcagttgagtagaacagctggcgtcacctcttcatgttgacgaggggagatgagtggcccaggcagttcctagagcgggggagatggagtgggccgtatcccacccagcaggagcgcttgcttctgaagctcccgtgcgtctgtgacagagg

SEQ ID NO: 269525 - DNA, 418 bp, Homo sapiens
  chr16:83968815-83969233
  hypo
gcgggagggagttccggtttcatgcagggagcgctggcctggctgagaagacgctggagcacagacctgaattcactgaggcagcgtcgtgtgggcgtctgagggaacagtgttccaggcacagggaacagccagtacaaaggccctggggtaagagtcaatcaggagcagggaggagcccagggagatggagacggggacaagggacccagctcagcggtgacttgtcgatatccggcgtggtcagcagagggctttgttctggtgtgggtgtcccggccgctgtgtggagggtgtgttgggggcaccgttcagctgggaggctttgcagcaacccagggtcacagggaggggcccaggggtcagaatccaaatctatttgcaggtggagctggtgggttcgcgaagggactggggt

SEQ ID NO: 269526 - DNA, 142 bp, Homo sapiens
  chr16:83974849-83974991
  hypo
ggcacaagagagaacgtcctgcgcggttccatctatgccaacatcgagaacaggcacaactgatgtatgggacggaagtcagaaaaggggttgactgctgagccgggcccggtggctcacgcttgtaatcccagcacgggag

SEQ ID NO: 269527 - DNA, 41 bp, Homo sapiens; identical to SEQ ID NO: 217157
  chr16:83999491-83999532
  hypo

SEQ ID NO: 269528 - DNA, 39 bp, Homo sapiens; identical to SEQ ID NO: 217158
  chr16:84004407-84004446
  hypo

SEQ ID NO: 269529 - DNA, 180 bp, Homo sapiens
  chr16:84017889-84018069
  hypo
gcgcccggcggaatatttttaaacaaaactgccctgggcatagtcgtttttacaatcagtcatgcatggaatgttttatgattatttttaaaaatctaaaacattgtttgacacacgcaggcacttaatgcacattaagttcaataaaagatctgctgccgctcacggtggctcacgcct

SEQ ID NO: 269530 - DNA, 196 bp, Homo sapiens
  chr16:84074762-84074958
  hypo
aagagcgcggcgtccgcgcttccccaaaagggaattctggctttgcacccggcaggcaggagagcggaacatccgacaccaggcaaggccggcccggctctgtgtggggagtgtgggagtgtcacaccagttttaggctcaatctgcacacaggagtcgagctttgtttttgtgtgtttaagacagagtctcactc

SEQ ID NO: 269531 - DNA, 152 bp, Homo sapiens
  chr16:84085875-84086027
  hypo
gggctgcgtgtgacgccctacacccttgggacagcaacgaatgcctcaggggacctcagcaacacattcggattctcgaagcaatgtgggcagagtgcagtgagagctgcaagatgagcacgtgacctgccgcggacgaaaagaactgcaag

SEQ ID NO: 269532 - DNA, 353 bp, Homo sapiens
  chr16:84129122-84129475
  hypo
atgtctggactttccgcgccttccctgggtaatagcacacacctgtatatcccataagcaccttccctgggtaatagcacacacctgtatatcccatctgccagagcacatctgcctgcagtgtctgggcaacctggcgcgggatggctctcagcagccgtctgctcgaatgccttcccgtagcatgccagaagccagagcccagggagaggctggctcttcgcaggggacgtgatgattgccacttctggctccaccgggtttcattgcagggtactgtggggtcagctacaggcaagggagagaaagatcagaacagaagagcaaaacgaactacacgatacccgccaggc

SEQ ID NO: 269533 - DNA, 619 bp, Homo sapiens
  chr16:84132212-84132831
  hypo
aaaaaaataaataaataaaaaggaaaagaaaaaataaaacacacactgagagaagcgaaatgcaaggaagaagcagacacaaggacgcgtctttcagcacgagaaggcggccgcagccttgaagtctgaaggctttgagatgaagctggcgaaaatcgcttccaacagaaacaaagatcactaccatctactactgcaaaccctcagattttcttctaccagaacagtacgaagtctctttttaaaaaataattctgcccccccaacaccgaccctgcgcactaaacaaaactaaactaaaaaattcctaccaggaaaatgttcacaattagcaaactagatggaaggatgcggatactcactgtactatttttcaactactctgcagtttgagattttcaaagtaaacagcagagagaaatttgcctacagtcacaatactcacattcagcatacttgagggaacgaaagacttttcgttggggcgtgacccgtttgatgtttggatgatcttcaagtgttagcagccccgctttctgtttttcttttatctgaatcacctcaaaatcactagggtagtcactggatggattgtttcgaggtataattctccaattgt

SEQ ID NO: 269534 - DNA, 236 bp, Homo sapiens
  chr16:84153001-84153237
  hypo
caaggaggtgttctcgggcaagatcgcacctgagtcactgctgctcaatccgcacccagaggagacgtccctggagacgtctccagcctctcgctatactcactgcagcctcgcccaccagcacatctcaggtgtcagtggctttttcaaggacaacttcatgctcctggtgctggagctctgccacctgagacctctcatggagttgcacacggggagagcgctaagcctgaggg

SEQ ID NO: 269535 - DNA, 123 bp, Homo sapiens
  chr16:84170876-84170999
  hypo
gaaaggctcggcaccgtcaagggtctggcctactcgggaaacattaggaagtcccccgcatgcacagcacaggctgtgctgtcctgtgtgacgccccatgtgtgcaggcgcacaggcgtgaag

SEQ ID NO: 269536 - DNA, 156 bp, Homo sapiens
  chr16:84191396-84191552
  hypo
tagtttagaactgcagcacacggtgagaatagaaagctctattatattataatccccccgtttgttcgtttttgttttggctggggttgccataagtaccgggtggcttaaccaatacaaatttattttctcgtggccaggcacagtggctcacgc

SEQ ID NO: 269537 - DNA, 208 bp, Homo sapiens
  chr16:84224887-84225095
  hypo
cgcctggctgcatcgttgcagatcagcccccagccccgcccctggcgaccgctacccgcccaggcccaaagtgcctgggggcccgcgcccgcgcccgcgacgtatcgcgcggagggcgggtggccccaggtctcggtgttgagggacagtgggcctggggcaggggccggagtcggggaactgggggcagcccgggcgtgggaaaact

SEQ ID NO: 269538 - DNA, 150 bp, Homo sapiens
  chr16:84270371-84270521
  hypo
gacacacaggctgacggctgtggtggccacgaagaggatggagaggcaagcgaagaccttcccgggcagcccggactgcgggttttccaccatctcgcgcagccggttcatgcacaggccccagcgcgaggagtgcgaggcggggcggcg

SEQ ID NO: 269539 - DNA, 194 bp, Homo sapiens
  chr16:84296330-84296524
  hypo
tgggtctgtagcaagcggatcagtaaatgttgacctccattattgttgccaagggtagagcgtcaaagggtgaccctcaaaagatgtgtccacctagaatgccagaatgtgagattttccatccaagtactaaccaggcctgaccctgcttcgcttccgggatcagatgagattgggcacgttcagggtggtat

SEQ ID NO: 269540 - DNA, 195 bp, Homo sapiens
  chr16:84343757-84343952
  hypo
ttctattaagacaccgagaaagagtgacaagggagggtgggtgtgggacatagaagcgggggtggtgtggccctaaccctggcctgggagggctggtgtcaccgaagcacatcccagccttgagcgctgatttgagtctcggggaatggtccctctggaagacctgaaggaacgggcattcggcagaggatcagc

SEQ ID NO: 269541 - DNA, 113 bp, Homo sapiens; identical to SEQ ID NO: 217160
  chr16:84423862-84423975
  hypo

SEQ ID NO: 269542 - DNA, 412 bp, Homo sapiens
  chr16:84483332-84483744
  hypo
gagacaatctggcacgtgggtggcagctgcttttgtcatggttgatacgaccaagccattcagtagctccctgttcttgtcacatcacgcctctgctgacgaaatggctcacttaagagtggacacgttagtaagtaaacatcccacgtggcactggcctctaaatctgcacctggcacttgggccccacttgtgtgctgggcaccaggttaagtgcctgtgtgaggccacgccctgaatccccaccgggcagaggagccggcccaggtgacacagccctgcctagtgcagccagcgccttcgcccggatgtctgctgcggagcgtaatgacgcgttccagggacttgctccaggccttgcgggagagcgtaatgagaacgggtcagtggcggaggagcagtgagacctttt

SEQ ID NO: 269543 - DNA, 133 bp, Homo sapiens
  chr16:84496272-84496405
  hypo
tttctctgaagctgcggttatggcaggcatggggcaaggggagggagccagggacaagtcatcgaccccacccttttccccagtgtgctgagagccaaccccaacccggaatagaggacgagggaggccagtg

SEQ ID NO: 269544 - DNA, 273 bp, Homo sapiens
  chr16:84535207-84535480
  hypo
aggaaaggcttggacgcagagccaggctggcaacgccactttttcaagcaggagagaggaggttgcatgggaggccccagtaggaaccccagggctggtgccagtgaggtgggaaggtgggcagcccctaagaacacagcgctgtccacagcactgccattcttagtacctgcagagtgctggtgaagggacacgtctcagaacggctcaaggacagcccgtctcctttgagagccccgtgccaggcaagataaagaaatggcaatggtgtgg

SEQ ID NO: 269545 - DNA, 212 bp, Homo sapiens; identical to SEQ ID NO: 217164
  chr16:84535780-84535992
  hypo

SEQ ID NO: 269546 - DNA, 255 bp, Homo sapiens
  chr16:84537368-84537623
  hypo
gggtggacagggaccgattgtctgcaggatggcccccaaggttcccactagtatcctaggaatggcttagtcacctcctgctcagagcttctccaacaggctgttacatggctgcttcccaccctggctgccaagctccaactctctactccaagggccccgcatccctagagccacacaagggtccctccgtacccccacaagctggggagattccaactgcctcatctggacaggcttcgaagtcctgtctgt

SEQ ID NO: 269547 - DNA, 32 bp, Homo sapiens
  chr16:84553146-84553178
  hypo
ctcccctgtccgtacgccgcagtaaaacctgt

SEQ ID NO: 269548 - DNA, 169 bp, Homo sapiens
  chr16:84593079-84593248
  hypo
gactccctcagagacgattaaaagggtggaggactcagggtaacggggtcaagcagctgggttggaagagccagacaggtggacaggcgcacgggatagctgtcctccagggccagccctggggcagagccagaggcaagagccagcacccaggcggagaaagccagaa

SEQ ID NO: 269549 - DNA, 104 bp, Homo sapiens
  chr16:84602924-84603028
  hypo
caaaataaataaataaacataaaaaggttcattttatgttaaatgaattccaccacaattaaaaaataaaaaacaaaaaagtcgccatattgccaagaatgatg

SEQ ID NO: 269550 - DNA, 388 bp, Homo sapiens
  chr16:84607793-84608181
  hypo
acccagagaggggacgcagttcatcccaggggacacagcaacttcccggcagggccctggggatgcgttcctggtgccagccccactttctccccacatcccgcctccaggggctgctctagactgccaagccctcgaggcagctgccacaacctgccagagactgcacagcaacatgtgtcagtctgggggcaccgtcacctgtggctgaagaaagctctttgttttgtctgggaactcggtgtcgctctctcatagctgccagacgggggacttctcttttcttgccaaagcaggattttcttccaagggcctcatccgacgaagtctcactccaagcggctgaagctgcttgaatggtttggaattatgcaaccagcaagtggaa

SEQ ID NO: 269551 - DNA, 123 bp, Homo sapiens
  chr16:84617727-84617850
  hypo
tctgtcctgggcaccagccgggtacttctgtgtggcagacaacagctgtggccagccagccgtgcgtgctgtgcgttcagcgcattccccggactggagtctgggcatcgcaatcgccctgcc

SEQ ID NO: 269552 - DNA, 254 bp, Homo sapiens
  chr16:84683895-84684149
  hypo
tttttaaagtgtgatactctcgaacccgggcctcattcagcagcgtgtcatggtgatggatccaggttttgaagctggacagaccgaggcgtgattctcggccgtttactagctttgtgaccatgagatcaatatcctcatctgtgaaatgaaataagtgatatcagcctggccaagtataatctttgtgggggttaaatgagatggcacacttaagtcacttagcttggttcgagggctgtagtctgggctcc

SEQ ID NO: 269553 - DNA, 218 bp, Homo sapiens
  chr16:84695419-84695637
  hypo
tcgacgtgctgggcgtggaggcctacagcccgcagtgcaaccagtggacccgcgtggcgccgctgctgcacgccaacagcgagtcgggcgtggcagtgtgggagggccgcatctacatcctgggcggctacagctgggagaacactgccttctccaagaccgtgcaggtgtacgaccgcgaggccgacaagtggagcaggggcgtcgacctgcccaag

SEQ ID NO: 269554 - DNA, 102 bp, Homo sapiens
  chr16:84717283-84717385
  hypo
ttaccatgtagcaggcatctcgaaaagcacttcgcatttcatatctcaatatgtattcctcgctactgtgctgggaggtgcgtcttgttatcacaaaattac

SEQ ID NO: 269555 - DNA, 41 bp, Homo sapiens
  chr16:84735938-84735979
  hypo
aggcgtgagccactactgcgcctggccgatttctcataatt

SEQ ID NO: 269556 - DNA, 185 bp, Homo sapiens; identical to SEQ ID NO: 217167
  chr16:84749467-84749652
  hypo

SEQ ID NO: 269557 - DNA, 143 bp, Homo sapiens
  chr16:84780618-84780761
  hypo
cagggtcaggagcatcaagacgccactaggcggcaggacgtttcagttccactagaatcttgtgggaccatcatacgtgcggctcattgttgaccgaaatgttacgccgcgcgtgactgtacgtacctaagaagcagaagctg

SEQ ID NO: 269558 - DNA, 231 bp, Homo sapiens
  chr16:84800549-84800780
  hypo
ccgcctttcttccccggtgccacctttgctaaaacacaggaccactgaatcaagagggcttcttgattctccaccagctctcatgagcggtttccccactactgtatccctctccagaaccaggggaactgttgtcactgaagtcttcaaactgtaaaggagcatggagatgcgtaattaaaccctggacagaaaagcttttagcgagctcttcaccgcatctgttctgga

SEQ ID NO: 269559 - DNA, 63 bp, Homo sapiens; identical to SEQ ID NO: 217169
  chr16:84812705-84812768
  hypo

SEQ ID NO: 269560 - DNA, 362 bp, Homo sapiens; identical to SEQ ID NO: 29529
  chr16:84813521-84813883
  hypo

SEQ ID NO: 269561 - DNA, 617 bp, Homo sapiens
  chr16:84822975-84823592
  hypo
aaatgagaggggcgcgggaggtgatggaacacaaaaccatgagccatggctttgctggggaatgctgtggatctggtgtgtgatagagagagagtgtgtgtgcgtgtgtgtgtgtgtatggcaaagtgcacaaatcgcacgtgtacacctcagtggctttttacacatttagacgtgtgtaagtgtatagagcatttccacaccccagaggccccgagctcactccctcccgctctccccatccctgacgctaacctgatgcctgttgtcgtacatcagcttctcaacctcggcactattgattgccatttggggccaataattctagggggtggtggctgtggtgggcactgtaggatgtttcctgtgtccctggccctgacctactagatactagatgcacccaccctctccatcgtgacaaccaaacgtctccagacattgctaaatacaccctggggacacagtcaccctggctgagaaccagagcgtgggtcactgtgacttccgcgcttcctctccatggcatcgcacggtgccatgtgtcctgccctccgtgttcttctctctacgctgcttctctgaaatccctccagcggtggcgggtgccaggagtt

SEQ ID NO: 269562 - DNA, 450 bp, Homo sapiens
  chr16:84824664-84825114
  hypo
tctgcaatggacagtttttacgtttcaaacgggaaactcttttctccttccgtgtctccatgcaagcccagagacgccagcatcatgtctgtctcccatcctccacttctctgacgaccaaaggtcctgggttctctgaggcctgcgcctgggccttgttacaacccagcaggcttatcttgattccagtaattgagaggcacatttgccaagtttatataccctcttgaaactcaagtactggtttgtggattaatgcgagattcagttgcatgcatttgaaatgcaagcgtctaattccgcgtgtaaaatacggggccacagacctcttgggcattgcacaccattccattcagatgagcgcagcaaaagcaaactgtaacccctaggattaaattctcctttaaatactcacgggtttttagcttcgggggaaaatatgtctgggaa

SEQ ID NO: 269563 - DNA, 69 bp, Homo sapiens
  chr16:84868032-84868101
  hypo
gcagtgtgggccagggctgccgggcactgcccctgtgaactgggcctcggccaattggtttgtggcttt

SEQ ID NO: 269564 - DNA, 148 bp, Homo sapiens
  chr16:84886291-84886439
  hypo
gggggattcccaacccgacaaggggtggggtgggtgtgtacacagagggccttgtgtgtgagggaaggtacttcacggtgctattcaaaaattaaggagactggccagtgcggtggctcatgcctgtaatcccagcctcctttggccg

SEQ ID NO: 269565 - DNA, 158 bp, Homo sapiens
  chr16:84904248-84904406
  hypo
tccaaatattcttcacgcacttcatgcttagtgactgcctgatactctgacacacgactgtacatgaatgtgtttagccattgctttgccacctgctggcttatttccagcttttcaccattataaacagttgcggccaggtacggtggctcaagcct

SEQ ID NO: 269566 - DNA, 45 bp, Homo sapiens
  chr16:84954215-84954260
  hypo
gatccacatccacagcgagacctctgtgaccgaccatgtcatctg

SEQ ID NO: 269567 - DNA, 182 bp, Homo sapiens; identical to SEQ ID NO: 217171
  chr16:84965070-84965252
  hypo

SEQ ID NO: 269568 - DNA, 198 bp, Homo sapiens
  chr16:84974274-84974472
  hypo
tggagagatggcctgcggcgaggccccatgcatcccagggaaggttccggaacaccctgcacacgcacagtctccaccatcctctctaggcctggcctcgcatcagacagggcccttgtgagagctgcctcaaatgtgacatttccaccagagccccggcccccgtgcccgccttgccagcctcggcctgtgggggct

SEQ ID NO: 269569 - DNA, 277 bp, Homo sapiens
  chr16:84987803-84988080
  hypo
ttgccatagggagggtaacccgggtcatccaggtggacctaatcgagtcacacgagtccttagaatcagagaacctttctgagctgcggtcggagggagccgtggtggaacctttctgagctgtggtcagagggagccgtgatagaacctttccgagggtgctgtgattaccgaagcagcagcagagatgcaacattgccggctctgaaggtggacgaagcggccaggagccatgggatgccagtgacctctggacgctggaaaaggcagggaaaca

SEQ ID NO: 269570 - DNA, 41 bp, Homo sapiens
  chr16:84997910-84997951
  hypo
ttcattcactatgccgtgctaggaggcgataccgcgaggaa

SEQ ID NO: 269571 - DNA, 314 bp, Homo sapiens; identical to SEQ ID NO: 217173
  chr16:84998380-84998694
  hypo

SEQ ID NO: 269572 - DNA, 244 bp, Homo sapiens
  chr16:85001517-85001761
  hypo
tactgggtggataacggcgatacaggcgcaaacacgtgatgctgtcgtgttctgccataaaaaggcatgaagtctggacacgcgctaccacatgggcagaacctgaaagcataatgccgagtgaaagaagccagacacagaaggacacgttttgcaagattccgtttctatgaaatgtccagaacagacagattcatagaaacagagtagacgagtcggggccaggggccgggggaggagacgg

SEQ ID NO: 269573 - DNA, 566 bp, Homo sapiens
  chr16:85007507-85008073
  hypo
ccggctcaggtgtgcgcctccgtgttcgagtctccttctcatttccgcgtgtctggaatgccaccaggagccccaaggcacagcacgtgcgaggcagggctgcggcacacactgaccatctggcctctgaaaggtaagcgaggcagggctgcggcacacactgaccatctggcctctggaaggtaagtgggcattttggttccctcagtgcaaatgttagacaaatttgttgaatgaattaaaatcaaattgtaggtacttgagattctgaactgtggagattttgaaacattgtttttatttcaacgtgcactaaaaaaaggactaagtaaaacgatgggagtcgaattaaacattcaacaagcaacagtactcactgggcaacatttgtgagtcgcgcttgagtgcccaggtcacttgtcatgggcacaaaagcatttagagtttctggaaactgtttgggagtgaccttaacagcctggggctgggcccacgaagcacggaaaggcaccccctgaaaacaccaccatccaggaagaacgggcgctttggaagccatttgagaa

SEQ ID NO: 269574 - DNA, 143 bp, Homo sapiens; identical to SEQ ID NO: 217177
  chr16:85008291-85008434
  hypo

SEQ ID NO: 269575 - DNA, 186 bp, Homo sapiens
  chr16:85008678-85008864
  hypo
aggcaaggccccacgaggggagctgttggctttctggcataattttaagctccgcaccaaggatcctattttatcacctgtgccgtgggtggagaagaaaacgtaaaagctaaccaaaaactccaacaagagggcgccatcctggccattcccgactggagcgctgcctgcggtggcacagtcgcc

SEQ ID NO: 269576 - DNA, 341 bp, Homo sapiens
  chr16:85009390-85009731
  hypo
tcttccggggcagcggggagtgtgccggaagccaccttcactgttcagtgcacagatcttttgcaacttcagtgcaaagcatcggagctaatcgagaccaaaacgtctttctatgtaaacgccctgctgtgatccggggagtgcactgctgagtggcggggtcagcaggagccccctgaaatgactgcttggagaatccctgttcactggattcactgtttttcttcatgattggaaacagcagctcaggacccaggatttgaataacccatgtaataacccgaagtattctccacagaagccccagctctgcaggaggccacggcgtttggcttcttcgt

SEQ ID NO: 269577 - DNA, 474 bp, Homo sapiens
  chr16:85009949-85010423
  hypo
cacactgagaactccgggccaccttttctgggtctcgtgggcagtcgcctaaatcggaagcccacaaagggattcatccagaggagtgaggggggccccccaaagacggacttcatcccttcccatcgcagcctccgctcccatgtgggcttctcacttttcaatcgctcgatctcctggaagcagaaagaaaagcaagtggcagcggctccaggaagctcggcagaccccaccaagcctcagaatcacaccgtgctcaagcacagtgtgggctcgatggagggtaggtgagtgaactctccttcccagctctgccccgatccagaccccgtggcctctgtgagcccagcccggctgcagccacgtggccagcccagactaccacaatggccctcccagccaggcaccaacatttgtcgctcgttagttactgtgtacagacatttactgagcgccactccaggcctgcagagc

SEQ ID NO: 269578 - DNA, 118 bp, Homo sapiens
  chr16:85011214-85011332
  hypo
gcatatctaaggtaggataacgagcacctattttcactacacttgcttagggtcggtcactcacgtaagcaacgtgaagcctgctttgaacaatggcgagctagctgaccagcagaca

SEQ ID NO: 269579 - DNA, 120 bp, Homo sapiens
  chr16:85013863-85013983
  hypo
cccgcccatagcgtcaccttcttcttattcattgaccttggctccctgcccgacctccacagcacctgacttccaaaacattcccattttatcttcaacagatttattgaagtataattt

SEQ ID NO: 269580 - DNA, 97 bp, Homo sapiens
  chr16:85015385-85015482
  hypo
ctacggtggtgggcgcactctggtttaatacagcagcacacgtacccgcagtggcggatgcgctcgggtttaatacagcagcgcacgtacctgcagt

SEQ ID NO: 269581 - DNA, 458 bp, Homo sapiens
  chr16:85019752-85020210
  hypo
ggggaggggaacggcgtgggcgaggccaccacatgatgtggtgacaagctcaaggtggagcgctcttttcttcctaccgtgcacatttggaatttcccataagaagtgaaattttcgaggccggggctctgaagatagacaatctggttcaaatcccagcctggcctcttactggcacagcgaggcctcgtgttctcacacggatgctacacctacgtcccagcactgctgtgacggtgggaggaaagcacgcttttggcagagctcctggacagcagtcgcggccccatgaaggctacctccggaaggcactcgcacggctgccgagaaggctcgtaggcatccacggggctggcattgaagacacaggctctaacaagtaaagggatgcagggcccagggccgtgggtggccttcctccctcccagccctctcacgatcccaaagtgaagcctggg

SEQ ID NO: 269582 - DNA, 143 bp, Homo sapiens
  chr16:85024470-85024613
  hypo
aaaacctatctatggccagccgtggccacatacaaagattatggaaagcacaagctagacgcgaagtcccagcactgggttccccggcagcgtggagaggagctctgctgtatcactgctgcgcctgctcccctgagccccac

SEQ ID NO: 269583 - DNA, 93 bp, Homo sapiens
  chr16:85026076-85026169
  hypo
ccagaaacaaaaagaaaaaagtgcacttttcctggtaactgttttgactgcttctttgattgtacgcccttctcttatcggtgtttgctctga

SEQ ID NO: 269584 - DNA, 185 bp, Homo sapiens
  chr16:85028159-85028344
  hypo
cacctgagccagctcagctccgccttcctggttcaggtcctggtaagacctccacggagtgcaggatgctgctgtggctccatgcctgacctgggggtgcggatggcaggcacagctgtgtaaggagagcgcccacagacaccaaacactggccatggcaggacgttcctataagcacatattag

SEQ ID NO: 269585 - DNA, 147 bp, Homo sapiens
  chr16:85029250-85029397
  hypo
aaccaaaccactttccatttcaggtggaaagcggggtattcccctcatcttgtgatactggccaagaactcatcaattcaattcatggagtcccctccacagatacaccctccttttaggaccggaaggcagcgggtgaaaaggaag

SEQ ID NO: 269586 - DNA, 42 bp, Homo sapiens
  chr16:85030031-85030073
  hypo
aggccctgctgtgggaggggcgaggaggtgaaggaagacagt

SEQ ID NO: 269587 - DNA, 39 bp, Homo sapiens
  chr16:85032152-85032191
  hypo
aacccgagatggctcgctgtctcccgccctagtgtgcca

SEQ ID NO: 269588 - DNA, 266 bp, Homo sapiens
  chr16:85033742-85034008
  hypo
tctaaaataaaataaaataaaattgtgcatttcactgtacattaatcatgcctcaattaaaaacatgagcaggagaaaaaatacccagcacaggtatgtacggccggtgtgatagtgcaagggtgcggcacaaggcaagtcccagcgagcagtggagtcacttttcttcctggataacccgcgttcctgagtccagaccctgtcttggatttacttgtatctgtaacttcaagcaagtgtcttaagctcttcgcctttactttttt

SEQ ID NO: 269589 - DNA, 85 bp, Homo sapiens
  chr16:85037000-85037085
  hypo
ccctcaactcacaaaaggagcgcagcactcagctgacccactgcagtgagctgatggcgactgcgctcctaagtgctcttgccat

SEQ ID NO: 269590 - DNA, 255 bp, Homo sapiens
  chr16:85083543-85083798
  hypo
ttaagagtggaaggccaagtcggtctctgtccgagttgaattcagctgtcccggagtcagccgctgtgtccttttgtgaaagaagtacagcccgtcacccagggagggcgcgccttatggcgggttctaacacgcagttgcaatggaaccaactcagtcaatggtgatcgctgatggtaaacaacccctcaccctgcactgtctcggtgcctgaaactcaagggcccagccctcgactcaggaattacctaggac

SEQ ID NO: 269591 - DNA, 46 bp, Homo sapiens; identical to SEQ ID NO: 217182
  chr16:85147115-85147161
  hypo

SEQ ID NO: 269592 - DNA, 162 bp, Homo sapiens
  chr16:85151028-85151190
  hypo
caggcgtgagccatcgcgccctgcatctgccgctgcctctgttttgtaagactctctaccctagatgcttctaggccaccttttcccacatgacataatttccagcctcctcccaccacccatctgcagagcgtcagtcccagaggccgcccaccgcctgga

SEQ ID NO: 269593 - DNA, 208 bp, Homo sapiens; identical to SEQ ID NO: 217183
  chr16:85196722-85196930
  hypo

SEQ ID NO: 269594 - DNA, 173 bp, Homo sapiens; identical to SEQ ID NO: 217184
  chr16:85214271-85214444
  hypo

SEQ ID NO: 269595 - DNA, 374 bp, Homo sapiens
  chr16:85216377-85216751
  hypo
cagtggattgttgacggctgcatgagatgggagtgaagcccctcctgccccagcatccacagggtggggtagttttgcccccaccactcctctgacccacacaccccagcacacccgcctccctctcgcacacacgcaccttgcacctccttctcctgcaccacgctcgcacacttgtatgcgtacacgttcacatgcaaacccacccacacacttgtatgcatactcactgttacacatgcggtcacatgcattcatacatgcatcactcccgtgcacactcatacactgtctcacacctgtgcccacacactcacatgcgtgctcttccatgcacacctgtaccctcaccccctcaccgccacattcgcact

SEQ ID NO: 269596 - DNA, 88 bp, Homo sapiens
  chr16:85241883-85241971
  hypo
cactccgccacgtcgctggcggaaggaatcatcagtgctccctgaacggtctgcggagttctcagccatcgcccgtggcatctcggct

SEQ ID NO: 269597 - DNA, 200 bp, Homo sapiens; identical to SEQ ID NO: 217185
  chr16:85245559-85245759
  hypo

SEQ ID NO: 269598 - DNA, 45 bp, Homo sapiens
  chr16:85283528-85283573
  hypo
gcgatgccagctgggcgcttctccatgcctcggtttccttgtctg

SEQ ID NO: 269599 - DNA, 187 bp, Homo sapiens
  chr16:85305676-85305863
  hypo
gatggccccagacccgtatcctgcgttcccatcatcgtcaccatgcggccgccattagctgggtgcacacgcaggcccgaggaagcctaggctcccttttctaacaggctccgctttggatgtctgagtttgggctgcacacttcctagcgtggagcggataggggcccctgtctttggccgtgctc

SEQ ID NO: 269600 - DNA, 43 bp, Homo sapiens
  chr16:85305893-85305936
  hypo
ttttccatgtctgaaggagcctcaggcccgcagaggtgtcggg

SEQ ID NO: 269601 - DNA, 221 bp, Homo sapiens
  chr16:85317768-85317989
  hypo
gcgggtcgggaggccgggagaattgagaatctgcccggcgggtcgtgctttagctgtcgctgtagggcgactcttggcgtgtaatcacagcatgtggcgcgaggacaaagaacatgacagcagagaaggatcagacagggagaaggcgggagagggcagagcaggccgagggaaagagagagaggtctcccggcgggggccgggcgcgagagcctctgctt

SEQ ID NO: 269602 - DNA, 235 bp, Homo sapiens
  chr16:85318200-85318435
  hypo
tgtattcgagccagcgagggggtggtgagaacctgctaactggatattaaacgcccgctgctgggagagtcgtggtccacagtaggatgtgatcgttcaggctggagggatcgtggggaaaatggtggctcatggaatactaaggggaaggctgtcaggtgcgggcggggctggcacacacagctcaccttcagctgaggaagctgcctgctccgctgccgtcctggcagtcagt

SEQ ID NO: 269603 - DNA, 84 bp, Homo sapiens; identical to SEQ ID NO: 217187
  chr16:85321496-85321580
  hypo

SEQ ID NO: 269604 - DNA, 169 bp, Homo sapiens; identical to SEQ ID NO: 217188
  chr16:85327232-85327401
  hypo

SEQ ID NO: 269605 - DNA, 319 bp, Homo sapiens
  chr16:85328798-85329117
  hypo
cttcccagggcctccgcacacaccggtccaccttctgcctgaggatggcctgtgctgggcatttcctgggaatggaatcctgcagtacaagctcttttgtggcttctctcactcgggaccagcctggggcgaaaccctgtctctactaaaaatacaaacaaatcagttttcaaggttcacgcgtgctgcagcgcgggtcagcacatcagcccttttatggctgagtgattattccaccgtgcgcgtagaccgcgtcctttttgcccatccaccgccgatggccgtttgggctgtctccacctttcggctgctgtcacgt

SEQ ID NO: 269606 - DNA, 172 bp, Homo sapiens
  chr16:85329623-85329795
  hypo
accacagctctcctcggagccagtttggatcagctttgcaggctgagaaccaggaggccggcttgggaaatgtagggatgaaagctgtttcaaggctgaggggggatgtgggagcggagaggaggtgatttctgaactgcacaaggtacgaaaggcacgctagggaagggga

SEQ ID NO: 269607 - DNA, 44 bp, Homo sapiens; identical to SEQ ID NO: 217189
  chr16:85332745-85332789
  hypo

SEQ ID NO: 269608 - DNA, 226 bp, Homo sapiens
  chr16:85336379-85336605
  hypo
attcttggccttggccttgtcgaggtgcggtgtgctgggcagggtgggtgaggtcagcggctgtcacaagtaaccctgcgtcttcagtggcgtgatgcagccgaagcgcattctccttcaatcgggtccaacggggtgctcagtgggtcttccacaaggtgactcggggtccggtttcccggagcctcggcctccccactgctagtgatgagcagaggatggcaca

SEQ ID NO: 269609 - DNA, 95 bp, Homo sapiens; identical to SEQ ID NO: 217190
  chr16:85336635-85336730
  hypo

SEQ ID NO: 269610 - DNA, 194 bp, Homo sapiens
  chr16:85351334-85351528
  hypo
ctgcgctggctcattcgctttcctgccgcgctgcccaccagtgtatccagcactcccctcctaagtgtgggacctgagctctgagctcagctccttgcctcgtccgcttctgggagagcccagactaagagggaaactatcgtgtgaatcgtcaggtgttttggacatctgcctcagcccggggttcctggggg

SEQ ID NO: 269611 - DNA, 83 bp, Homo sapiens
  chr16:85369411-85369494
  hypo
gtctgaggcctccaagcagccgggcgcgctgggagcagggcgggacacccttcagacctgacgtccagtgtggagtttccctg

SEQ ID NO: 269612 - DNA, 208 bp, Homo sapiens
  chr16:85377785-85377993
  hypo
cggccagccctgcccggcgggggagctagggatagtgcccaggggaaagggtacggtccctggctgaggaggaggcagagaacatttctgggagaaaggcagggggcattttatgatgggaggggactcctaggcagttggcaaggtttgtgagcagcccgcgcgttgcttttgcccggaaccctgggccgagcggggtcctgcccgg

SEQ ID NO: 269613 - DNA, 157 bp, Homo sapiens
  chr16:85389787-85389944
  hypo
cgggcagttggcgtcgtcaccatcagcatccccatcatcgtcgtcgtcatggtagttcttgctcgcctcgggaccagtgagcccaggtgcacgcaggatggagaggcacgttttgcagttcctgcaaaagtgccctgaggcccggggctgcaccctt

SEQ ID NO: 269614 - DNA, 114 bp, Homo sapiens
  chr16:85399704-85399818
  hypo
gcttgggcctccaccgccgggaaggcgggactgcgctcgggtactgggctccggcctcccgaagtccttggtaagccttgcctgtagcggctccgctgccgagtgctttgacac

SEQ ID NO: 269615 - DNA, 298 bp, Homo sapiens; identical to SEQ ID NO: 217193
  chr16:85407686-85407984
  hypo

SEQ ID NO: 269616 - DNA, 161 bp, Homo sapiens; identical to SEQ ID NO: 217194
  chr16:85410442-85410603
  hypo

SEQ ID NO: 269617 - DNA, 153 bp, Homo sapiens; identical to SEQ ID NO: 217195
  chr16:85417768-85417921
  hypo

SEQ ID NO: 269618 - DNA, 116 bp, Homo sapiens; identical to SEQ ID NO: 217196
  chr16:85423785-85423901
  hypo

SEQ ID NO: 269619 - DNA, 171 bp, Homo sapiens; identical to SEQ ID NO: 217197
  chr16:85426317-85426488
  hypo

SEQ ID NO: 269620 - DNA, 111 bp, Homo sapiens; identical to SEQ ID NO: 217198
  chr16:85428081-85428192
  hypo

SEQ ID NO: 269621 - DNA, 285 bp, Homo sapiens
  chr16:85428653-85428938
  hypo
cgcggggaatggggcgggcagagactggggcacctaagcatagggaggttgtaggctgcagccacacaaagctgaggatgaggaggaaggatggtctggggcaagctggggtaggccttgcatgccaggctattggcttctcgaacgttaccctgaatccctgggaatggaatggaaccgaatgaacaggtaaaatctatacgaggcccagaaaaatccaagccccgagctgctgaggtgtcagggcagtggcgcctgctgagcgtgttagaaaggagggagaag

SEQ ID NO: 269622 - DNA, 94 bp, Homo sapiens; identical to SEQ ID NO: 217199
  chr16:85432465-85432559
  hypo

SEQ ID NO: 269623 - DNA, 100 bp, Homo sapiens
  chr16:85453278-85453378
  hypo
gcctcgggtgcagtcgtgtgcaacggtgaatgcacgttggaatcagctggggatctctaaaaacccctctgatgcctgcctcccccgccccgcccccacc

SEQ ID NO: 269624 - DNA, 144 bp, Homo sapiens
  chr16:85454710-85454854
  hypo
cacagagcccggcacgcagtgggcgctgtgaaagtgtgtgttaaaccaagagaaacaggaagggcagggctgggcagttcggagtgcaagcaggcaccctcctgtctcctggacggggacccccgccagcgatttgggcccaag

SEQ ID NO: 269625 - DNA, 32 bp, Homo sapiens
  chr16:85457902-85457934
  hypo
cttgaggttcttggcgacggcagggtcgccgc

SEQ ID NO: 269626 - DNA, 38 bp, Homo sapiens
  chr16:85458421-85458459
  hypo
gcctgtgtttccagcgctgcccgcgcagctgtcactta

SEQ ID NO: 269627 - DNA, 142 bp, Homo sapiens
  chr16:85464227-85464369
  hypo
gcatggaacggggacgcctggtgccacccccagaggctctggcttgatagtccccaggtacgggctgggcacagggcggcggcagtctagggcattcgtctgaagggcaccgctggggaaatcctgacgtaggcacacacgt

SEQ ID NO: 269628 - DNA, 201 bp, Homo sapiens; identical to SEQ ID NO: 217200
  chr16:85465097-85465298
  hypo

SEQ ID NO: 269629 - DNA, 291 bp, Homo sapiens
  chr16:85485676-85485967
  hypo
tgaagatgcatctttgtccccgccagagagacccgtgtccggcgcgaataattggattttaatgaaacgaatgggagtgctgaagccgtttgccaccctggcctgcatcggggccccgcaattaagccgattatgttttgagagtcaagctgtctgactcctcgcgtccctaatgtgatgatgtttgatggccctgccagcgcggttatttatttatttacccaaccctcatgagctgggacgtgccagtgggccccggtaattaacagcgggtgctgagcctgtgtgttc

SEQ ID NO: 269630 - DNA, 137 bp, Homo sapiens
  chr16:85492605-85492742
  hypo
gtattggccgctttcgctcctgccaccctgtgcctagggccttggcagggactgagactttccgtcggctgctgcctgtggtgcctcggctcatcatcctctgcttacacagtggcctctgacgccgcctgtgctca

SEQ ID NO: 269631 - DNA, 308 bp, Homo sapiens
  chr16:85497297-85497605
  hypo
aactcctggcatcaaggcctcgcatcactggcacagttaggcagcgagagggtaagagtcacagagcccgccgagggtggggagcgccatgagtcccatcggagagagggtgagcgggactctgaggcctggggcagtgccacaggtgcgggtgtgaagctggcggtgggccactgaggtcctcaggctgaggggcggccagagtgagggatggagagaagccttccatgaacagcaactcaggctaccaaggtccctttggggtggctccagtgacagagaatgggcggggacgctggcctcaggac

SEQ ID NO: 269632 - DNA, 82 bp, Homo sapiens
  chr16:85498189-85498271
  hypo
gggtgatggtcatgccggttgcacagggtactcacgaagcctcgggaatgtgccaccatctcccgggcggagggtatacctg

SEQ ID NO: 269633 - DNA, 148 bp, Homo sapiens
  chr16:85498783-85498931
  hypo
ccggctgcatgcagcggttgggtgggaatcctgggctcctccatgggctgcccccgcccacctggagctcctgcctccccagctctcctgccaaccgaatctcatgctgcttctgtgccacgccctggcccttcgcatctctgcttgg

SEQ ID NO: 269634 - DNA, 59 bp, Homo sapiens
  chr16:85506194-85506253
  hypo
tatgggaggcatagcgcagcccggcacagctccaagttcagcagcggctcaggacccgg

SEQ ID NO: 269635 - DNA, 629 bp, Homo sapiens
  chr16:85517149-85517778
  hypo
ctcccttctcttccaccaggcgatgcccaggcccccggccactgtctccgccctcttggtaggccctgtgggatcaagtgtctccgaggcggcgggctgagacggatgggcctcctggccgcacacctgagaacatgctggcaaaagcgtttgcttaattaattgactttgagcgagggagcccgtccccgtgtaaacctagcagcaggctcggtgcttgccgccgggatgctgcgaatgcaaggctagactttaaataagggtgtgattattgtgtgaataattgaagaatgttggggagcttgcagtcctcggtgtaccgtcccctgccagcaggcctctgggccctgcccgtcacgggtacaactctgctgccatcctctcagctgggacagtgggggactttcagacctaagcgttggaggaaacctcctcagcgaccctccccgagaggtgcgtccctgttttccagatggggaaactgaggcagagctggggttaccccagaagaccctcagattcgcggtaggatgacgtcccacacttggtgactttatgtggctcccggaccagttatgccgtgcaggaatatgccccttcatagaaccgcagtgaggtttttccatcct

SEQ ID NO: 269636 - DNA, 141 bp, Homo sapiens
  chr16:85520266-85520407
  hypo
gaggatggtgggagcgccgtcccgccctctctcctgccgcctccagcagcctctccatgcccgggacggagcgggcatctgtcctgttgcacaggctgttctcgggggttcccccagccccccgttcgtggcttgtgagaa

SEQ ID NO: 269637 - DNA, 41 bp, Homo sapiens; identical to SEQ ID NO: 217207
  chr16:85523184-85523225
  hypo

SEQ ID NO: 269638 - DNA, 413 bp, Homo sapiens
  chr16:85529540-85529953
  hypo
cctggggtgattcatcgagcatccctcggtctcagactcctcatttgtcaaaagccgcggggggacctgcctcagagcgtcacagggaacctcgggaatcgattgttctgcaagccagagctggatcccgggtgcagaatccatccgagcactctgtatgggggcacagctcggagcagggtctccggcttcatttccccagggcccgagcctgcggtgacagtgacttgacctcgctccccagaggtgagaggtgcccactttgcagccaatggcaattcccagaaccatccatctcccgccaccccgtgcctccaaggccgtcgtcagggatgagcgatgggccgcccctcgcgggcccgaccgggatggttacaacaggtttatgctgcgtgagcgatggcgtttgcatg

SEQ ID NO: 269639 - DNA, 107 bp, Homo sapiens; identical to SEQ ID NO: 217209
  chr16:85535588-85535695
  hypo

SEQ ID NO: 269640 - DNA, 344 bp, Homo sapiens
  chr16:85537318-85537662
  hypo
gtcgaagcaaacctcgccgatgacagaccctgtaattagaaactgtagtgtccccgagactggtctttaaaactgtcagaagccaagcggccgtcatttgatacaagactatcatcacccgtgaacccattagctgcaggtaaataacatattatgccagggacggaaagcagccaggctggggaattcgccggcgcttaattaggaccggcagtgcggaagatagatggtcatcctttttgctcccttcattaggagggagggtcaggtgtggcggtggtcaccggagcccgggctgccgaccctgcagaaaagcgccatcctccgcccgccctctgcctccc

SEQ ID NO: 269641 - DNA, 321 bp, Homo sapiens; identical to SEQ ID NO: 217211
  chr16:85541368-85541689
  hypo

SEQ ID NO: 269642 - DNA, 196 bp, Homo sapiens; identical to SEQ ID NO: 217212
  chr16:85543126-85543322
  hypo

SEQ ID NO: 269643 - DNA, 70 bp, Homo sapiens
  chr16:85543643-85543713
  hypo
ttaggccaagccgcgctgagcaggtggggccccgggggccaagcacccccatgccgccaccatcagatgt

SEQ ID NO: 269644 - DNA, 279 bp, Homo sapiens
  chr16:85554503-85554782
  hypo
ggcctggtcccgcccgccaccctctgacagctggccagcactgccctggatggaggtggcttggcagacagaccggtccaacaggtctttgcttggggccggaaagtctcagccggggttgaggagcctttgggagcccaacgagccggtttgtctgggttcttcgtgaagatctcagggatcaacatgctcatgctgacaccctgacctccgggctgcacctccgtcttgactagtgctgggaggccttggactcctgaccaccgattgccatccgct

SEQ ID NO: 269645 - DNA, 133 bp, Homo sapiens
  chr16:85555419-85555552
  hypo
ccggagcgcgctggcgctcagcccagggggtcgtggagggttcccacacgactcttgtaagatcctctgctaatgaggtcccggcagtgccaagtgttcccgtgacagagcgtgccagcgtgaagctgggccc

SEQ ID NO: 269646 - DNA, 281 bp, Homo sapiens
  chr16:85566453-85566734
  hypo
gccgtgaagtgggccgcccctgcaagtcctgcgcctgtggcccctggtttggtggttgtcatcagcacacttcagggacttgagattttccccagaacatgccccacgtactccaaaaccagcacaaaccagcccgctccctacctcctgttctgccggaggtgtcggccgctgcctgtcaacagtgttgatctggtctccaaggtgaggacagcaacccagtgggctctggaagaaaatgctagaactcaatgtgtcttgtcttttagaaatttctctgt

SEQ ID NO: 269647 - DNA, 41 bp, Homo sapiens
  chr16:85586223-85586264
  hypo
caccgcgctcagtctcaggtggacctcgatggctgtctcca

SEQ ID NO: 269648 - DNA, 521 bp, Homo sapiens
  chr16:85616219-85616740
  hypo
tgacacccagttcccccttacgcagccgcctggggtgcctggagctcagtcctccccgtgttgataaattgagcttctcttctccacggttcagggcgtcggggtggggacggggccatcctgcacaaccccccctcgcctcttaatgccttttcacccctgagagcctgtctgcacagcctgcggttggtcggccgccttgtcatttagctgttccgagccagtgatcgggaggcagcacaaactgtggcatttgctgagcgtaaaaattcaattaattccagaaggcagattaaatataagtgagttttaataatttgctgtaaagtcggaggattactgtgggcacggggagggaagccacacatgcgtgcttgagcaggctggcacagtctcggggatgccagccagggtggcttcctggagccactcattcctccccgcagggtacacccccagctctccagaggacaccctcctgcgagggtggtgtcctgggggtctcccgctggaattctggg

SEQ ID NO: 269649 - DNA, 140 bp, Homo sapiens
  chr16:85617678-85617818
  hypo
ggcacgcatggggacggggacacaggctcgccagctgcacagcccgcagactggccttgggtctttgtgtgcgtgcgtgccggtgcgtgggcccctgtctgtttggagaccttcctccccctctgcgtgttccccaagat

SEQ ID NO: 269650 - DNA, 172 bp, Homo sapiens; identical to SEQ ID NO: 217215
  chr16:85618049-85618221
  hypo

SEQ ID NO: 269651 - DNA, 70 bp, Homo sapiens
  chr16:85643877-85643947
  hypo
ggcacctacctagctccttccaggcaaatgggagtggagggtgggaaggaggtccagggaaagagagctg

SEQ ID NO: 269652 - DNA, 63 bp, Homo sapiens
  chr16:85644011-85644074
  hypo
gagaggaggaggagcaggcctggagggaaatggagggaggccagccttagccccagtgctggg

SEQ ID NO: 269653 - DNA, 528 bp, Homo sapiens
  chr16:85661248-85661776
  hypo
gagcttgtacagtgcggagacagcccccggccccccggccccccggccctcatccgtcacaggccttcacacggtggagcgtattcccagctgttaggataatgaatttacatgagctgataatgtagacaagaattcagtcaatgtccaggagcgcagaagttaataaatacctctctaatgagggcagcaggggggtgtgctctcccagggcctccctctccccgccatccctgtgtcccccacggacaccttggcacctgcactgacctcagccagagaacacctgcacgggaggaggcccgcatcggtctccctggggagggctgggggcttcgtgccgaggcctcgggggcagcagccttgaagtgatccccaccaggcctggaggggcaggaggcacgtgggccctggaggctgtgtccattcacagcaggcccagggggacccctccaaggatctcggggttccccggctcttggcctcctgtcctggcctcaagggagctgcgcccggctgctgcggccc

SEQ ID NO: 269654 - DNA, 262 bp, Homo sapiens
  chr16:85671083-85671345
  hypo
gcagtggctatgtatcgagtccccccttgatcgcggcagtggctatgtattgagtccccccttgatcgcggcagtggctgtgtatcgagcgcctgctgtgcccctggcgggctcgctgtgcttctcacacacccttcgcctctggtggatgagaactgagcctccggcttgcccgggtcccacgttgtaagtggcatggggaattccaatccccagcttgtgcctgagactccatagacccctgccccgcaggtgtagcctc

SEQ ID NO: 269655 - DNA, 444 bp, Homo sapiens
  chr16:85671745-85672189
  hypo
ttcgccatctgactgcgattgcctccgcgtctctcctctcattgtgtctcaagggtgtagtttaaaaattcaattcagacgaagctgtggcatgcgctgccctgggagaaaggctgggaaggagaggaagaggaggccctcgctgggatttatttttctggaggcgctgagacgtcttctcttcttcaaagctcagtcacccgcccaccagcgcgggccagacacccttccccagggccagcctgaccctttaacctactcacctactcactgccgaggctggggcgctttgggcaagggcagacgcttgcgaatcgccgatgcatgccccagcactttccttccttgctgtgtgatccgggcaggccgctttgcctctctgagcttccactttttcttgggtgaggagcaggtctctacctcatgaatcgtggggactgggtg

SEQ ID NO: 269656 - DNA, 327 bp, Homo sapiens
  chr16:85672904-85673231
  hypo
cctcctcggaatggcggcctggccaccgcctccctccctgcctctcctaccaggacctcttctgcacagacacccaaccacccccataggcatctgaaacctcagcctaggagtcccaagactggggggatgggtcccagccctgtgtcccaccccctgcgctggacagattctgactcccctctaagcctcctgggcgccaggcctagcctgccttgcgggtgtgtcgggatccccccatcatcccttgtccttggaggtgcttgttgactgactgaataagaggtgtttgccccgagggtgccccgggaacgcctgtgcgtggag

SEQ ID NO: 269657 - DNA, 996 bp, Homo sapiens
  chr16:85673486-85674482
  hypo
cgggggcggaggtacggggagccttgcgtgtcctcagctgctccaggaggcacaggcagcacctgggaccaggcaccccctccctgggaaacagttgggggcgatcgtgctgcgggcctttgctctgggaggccggcgctttgggaacagggtggctccagagccttcccaggtgggctggagagccgccgtctggaggacagttctgagcaggtgctcctggctggcgaggaagccccacctcaccccagcaccacccatggtgcagggagctggggttgggcgcacaagagtctgagcccgttcccaccccgcctccttgtcaccagcccggtggccgggactcatggcttccctgcccacacttcgctcccttaacaccggccgggggctcatggtacctgccctggaagctgccagaggcctctccaagcaggtgttggccgctgtgttacctgcggcaggggtggcccagccacccatagcccggcttgggccacagggacggggccgacaggtggtggcagtggggctggaactgctctcttgtcatcgaggcccgcggggccctgtgccgccttcccctggtggtgtctgctggctgcctgcctcgtcttgtcactggctttgcaggcaagaggggaggcagatccggttactgtcctgtccctggtgccacctgaaaccgagatcccagctgagtgagtggggactacgtgtgcggggaccacggagcagggaccacagacccatcctcatgagctgccgtgggaatgcttccaccgtggagccggcctgggcgggggagaggctccccctttctgccgctgcctcggaaatctgcctctcaaagaaaacagcaaaacaaacacggaggaaggatcccgcctggcaggcgcgcctcgcgtgggtgtcagtctgcggcggcggcggctctgcaggcgtctggagcccgtctgtctcccgcgcaggtgtgagcgccgcgggcgtcctcat

SEQ ID NO: 269658 - DNA, 70 bp, Homo sapiens
  chr16:85678358-85678428
  hypo
agaaccgtggggccgcgcgctgggtgggtgaattacgcgggatggaatcatagctcggtgaagctataac

SEQ ID NO: 269659 - DNA, 140 bp, Homo sapiens
  chr16:85678695-85678835
  hypo
tggatctagtagcccgccggcacagtgcccagtcccaggtgttggcccggtcgacttggggtggtggagttctcagggtgtgggcagtggttggctagtccatctgggggtctggggttgggtcacgcctcaggggcagc

SEQ ID NO: 269660 - DNA, 437 bp, Homo sapiens
  chr16:85679146-85679583
  hypo
gttctgtttccacatcgggatgcctgtggggcctctgcctcctggtcacgccactaaggccactttggctgcctgaggcctctgggcaccccctgtgagcagcagttttctttggtgaatgtgcgcgtgcccactccggacacagtgaaggggagatgaggctgcttctgcccccggaaccaaggccaggtctgaacagaagtcgggcaggatgccgggagctgatgggctggggtcctccttctggaaagggcatctacctgcttctaccacgcattctacctgcttctaccacgcttcctatgcatgcattctacctgcttctaccatgcttcctatgcatgcattctaccatgcttctaccatgctttctatgcatgcattctgcctgcttctaccacgcattctacctgcttctaccacgcattctacctgct

SEQ ID NO: 269661 - DNA, 337 bp, Homo sapiens
  chr16:85682220-85682557
  hypo
ccagcacacccaagcgcgtgcccatgggccctatcatcgtcccccctgggggccacagcgtgcccagcaccccccccgtggtgaccatcgctccaaccaaaaccgtgaatggtgtctggaggagtgagagccggcaggtgagtggggcggggcagggagcctagcgtcctctaagtggggaggctggattcaggcatccattgggggctctggagctttcgaggttgagtttacattccagacaccccctcccccaccctgagtttccgtctccttctctgcaacgtgagggtgacagcggcaccctcctggaggccctgtgcgggtgagtacatcg

SEQ ID NO: 269662 - DNA, 433 bp, Homo sapiens
  chr16:85682761-85683194
  hypo
acaccagtcagctggtttagcgcccaccctaatgtccttattctcattcggtcacctctttaaagaccgtgtctccaaatgcagttccgttctgaggccctgggcatcagggctctaacacggatttgggcgggggtggcagtccagttcaagctgtgaaagtggtgtttgcacgctgagcacccggcacactagctgtgactgtcatagtctgtgaactgaacaaagaattgaggtaggaaagatcccagcccagacgctatcagaacaagacatctggtgggttttgtgtttctgtcttacttttggggctcccagcggaggcccctccccaagttttcggggctccttatgtctgtgggcccctcgctctgcactgactggggcctgcctgtgtggaaggagctggcactgggagctgctcttctgccgc

SEQ ID NO: 269663 - DNA, 88 bp, Homo sapiens; identical to SEQ ID NO: 217226
  chr16:85683224-85683312
  hypo

SEQ ID NO: 269664 - DNA, 636 bp, Homo sapiens
  chr16:85683912-85684548
  hypo
ggccctgaatcacccgactcaaacagctgaggctccttgcgccccactggtggggcctggctgctggtgccagcgcccgcagctcatgggaggccacttccctgccccagcctggaccaggagcttctaccagccaggaccctgcacccagccactgccttgaccccgaccagagctcctggcctagacccaggacgcctcgaggggattccagcgccttttccggcgactcctccgctctgagctggtccctcctcggagggtccttaccgcctcgggaacattgagctaccccagagcagagcaggggcgcgacaggcccgccccagcagtgtaccaccgcggcgcttaatggaacacggtgccgccagggaaggcgcggggccggcagctggattagcaggtgatgtacggctcctcgctcgggcacagaggctcagcggggcatttaatcctctcggagtggggaggcagagagaggattcccctcccacccggcccaaagctgtggccatgagtctccgaggctgcggacgtgggtggcagttgccgggccggaggcttctcggccccttctcggggtcacccctctctcccaggtgtagtgggagctgcgagaggagaaatgagatgaaa

SEQ ID NO: 269665 - DNA, 152 bp, Homo sapiens
  chr16:85693787-85693939
  hypo
aaagtgcggatgagcgcttgcccttaggggaattcacgcaagcaggtgggaaaatcgaccgaaactggatctgtcccaggcctgagagggtctctgccttccctagcagcttaggctgggagcctccctatcctcttggagcagcctgcaca

SEQ ID NO: 269666 - DNA, 444 bp, Homo sapiens
  chr16:85699441-85699885
  hypo
tacttaaatgttccccgggtcttggttctttgcgctaggtctttgttaagtgtaagctctagagaccaggatctgcgtgctggacactcagcctgttaacttgcatttcttaatattttccttcactttgtctctaaaagaaccagccacgcagcaagcctctctggatgtggagaagccggttggtgttgctgcttccttgtctgacatcccaaaggccgcggagcctgggaagctggaacaggtccggccccaggagctgtcgagagtccaggagctagctcctgccagcggggagaaggccaggctgagcgaggcccctggaggcaaaaagagtctgagcatgcttcactatatccggggcgctgcacccaaggacattcctgtgccgctgtcccacagcaccaatgggaagagcaagccgtgggagccctttgtggcaga

SEQ ID NO: 269667 - DNA, 79 bp, Homo sapiens; identical to SEQ ID NO: 217230
  chr16:85704416-85704495
  hypo

SEQ ID NO: 269668 - DNA, 80 bp, Homo sapiens
  chr16:85721549-85721629
  hypo
aggactcccagcgccgaggcgcctccctcatactgaaaacgcaaagccgggcgggcgcgggggctcacaatccagctact

SEQ ID NO: 269669 - DNA, 230 bp, Homo sapiens
  chr16:85731400-85731630
  hypo
gtggagtgcgggagcgtcacctgaggttggatccccaaacaggatccaagtggaagtggtttattcggaatgcagtcccaggaagggaggttgagaccgggaacttgagaaggagctggttcaggttagcgagaaggtttctatggccggcaaccagggctcagttccaccgggaacctctgggcagctatgacgcctcgctcctcagtgtggcccgtggaccatcggca

SEQ ID NO: 269670 - DNA, 207 bp, Homo sapiens
  chr16:85741387-85741594
  hypo
aggtgtcagaggtccggtccactcagcggggcctgggaaacactgttctggaagtggacaggctggattcctcgctggtcctgccacgtctctctgagcggaggcccgggttcgctcagttcccatccagggtattcagcacacctgctccaggcagccacgcccccggacacctgaagccgggccgctggagcaggagccagccag

SEQ ID NO: 269671 - DNA, 234 bp, Homo sapiens
  chr16:85743824-85744058
  hypo
gatgatgtcgggcacgtccaggtgcttgtcgttcaggacgggggcctcgtcgtggctgctgctgctgctgctgacacacatttgaaagcctgagaagccaggcgtggagcacacacgcacgtacacacgacagagagacaggcatcagtggccgccgggaaccgcgggcgccaccctcccttcactatcacctgggtcctgacgcctcgcagcaaggagcgcagctgtccccgc

SEQ ID NO: 269672 - DNA, 60 bp, Homo sapiens
  chr16:85847019-85847079
  hypo
catcactcttgccacgcaacagactgcctccctaccgctcccgctcgctcccccgggctg

SEQ ID NO: 269673 - DNA, 137 bp, Homo sapiens
  chr16:85849284-85849421
  hypo
tcacacagcactgtgctttgcgtgggagaccactagagcctgaacgtgcaggtcagggagccggtggctagaagtatgagtggctccactcacgatcacccataataaccacttacgtgatttatttatgtttatta

SEQ ID NO: 269674 - DNA, 37 bp, Homo sapiens
  chr16:85954880-85954917
  hypo
ccgtctaagtgcgtcgcttgggcgccccaccccgtct

SEQ ID NO: 269675 - DNA, 420 bp, Homo sapiens
  chr16:85966401-85966821
  hypo
ttggccctgtcaatcgagagggccggtctcccacgggtcgccctagtgcacacggtaatgggcagcacgagggtttccgtggctccgtatcctcactaacactcagtactttcagtcgtttatgttttagccatcctggtgggcggagcggtgctcattttggtttaaatttgcacttttccgatgaccggtggggttgggctccttgcctgtttcttggtgaagtgccgctttaggctgtccagcttctccactgcatttcatccttccctggtggacacatgggtgttcccggggatcagaaagggggcccacaccgtgctgcagagctggcatctgctcgagtggctgctgcctgcagctaagtattttgaatatccgcctgcctactctgtgtgcgtcctcttggtaaatagaagc

SEQ ID NO: 269676 - DNA, 215 bp, Homo sapiens
  chr16:85985997-85986212
  hypo
gaggtgcgccaggccggctgctcccacagctgctcgaagcctggggactggacatcagggtggcaatgggttggcaccaacccccacatcactctctcggagataaaagtagctgccatctgcagggtgcttctgacgtgccaaatgctgctgagcactgcgtatgcatgcgttcatttcatacccacaaccctagcaggcgtacgagccagctt

SEQ ID NO: 269677 - DNA, 297 bp, Homo sapiens
  chr16:86096353-86096650
  hypo
tccctggcgaaggccgggatggcgccacgtggtcctagaagcacaaggacggttctctgaagagagttccaggtgaggcccacagaaacagaaacacacaggagctggggaaggaacaggcaaaaaccttcacagggatctgggtcacgtgggtggagcccgatagtgtctgtgccatcagtttctagaacgctcaccgccactaggattttagcgctcccgggtggctgtactgttcacagctgagcccccggaagcaaggacacatgtgccaccggtttgctgggtgactttatt

SEQ ID NO: 269678 - DNA, 484 bp, Homo sapiens
  chr16:86101896-86102380
  hypo
agggtcatgtcacacgtatttcatacggttattgtgggcattaggcacagtaaccgaagtttcaggagtggaacgttacgtgtgagtagacgttagcacagtctctcgtttgtggggtgggaacagggtcttgtcacaggtatttcatacagttattgtgggcattagacacagtaaccgaagtttcaggagtggaaccgctacgtggaagtagacgttagcacagtctctcgtttgtggggtgggaacagggtcatgtcacacgtatttcatacagttattgtggggattagacacaaataactgaagttttgggagtggaactgctacgtggaagtaggcgtgagcactgacatcgttaacattatgtcgtcgctctcaaaatgctaaatgtagttgctctcggagccaacaattccccttctgggtttctgggagatgcgaaaacaagaggaacgcaaatatccatcgtcccagaaactcg

SEQ ID NO: 269679 - DNA, 109 bp, Homo sapiens
  chr16:86244209-86244318
  hypo
gctgccattcctggcggtctctccgcctctcctcacctcagtttccaaatggggctactaaatcctagttgaagggctttccttagcacagagccgggaacatagcggg

SEQ ID NO: 269680 - DNA, 357 bp, Homo sapiens
  chr16:86560978-86561335
  hypo
tattccctttttaatggaaacgatggcctccgagtccctttgtgactcctgtatgaacatgtccaccacggctagcacgtgtctcaagatgctgatgttcggcagctccttgttgcctgctcgtatctgtagacgaggcccagactcctgccacaggtgtgtggagaagccctggctcagatgctgcctccgcagcccagggacgtcctcctgtcgtgtttctgaatgctggtgcggtcttgccttccacaccgggcttggctgtggcttgccaccgcctggtctccagaactctcgtcttactgctcacagattttctttctccctacacatcacgtcttctaatacaaatgttga

SEQ ID NO: 269681 - DNA, 48 bp, Homo sapiens
  chr16:86561824-86561872
  hypo
caacccggaggggcccgtttccagttcagtgaccggccatctgagggc

SEQ ID NO: 269682 - DNA, 122 bp, Homo sapiens
  chr16:86562411-86562533
  hypo
agggatgaagcagctgccaccgcacacccaccgcaccacacggcggcagcactgacgctgaaagccacgtctgctggcttccgaagctcctgttgttaatcgtggctatgtttcaaaactgc

SEQ ID NO: 269683 - DNA, 189 bp, Homo sapiens
  chr16:86570329-86570518
  hypo
gcttccatctgcacgccttggctcctgcctggccctcattgcgaggcccgcgggagtggctgcctccctccccctgctccgcacagagtcctgcatgggaccagcagctcctgtctcacttccgcacttggggtttcagccctcggagaagagcagccgcgtggttcccctcacgcagacatgcttgag

SEQ ID NO: 269684 - DNA, 327 bp, Homo sapiens
  chr16:86665870-86666197
  hypo
ctcctccctccctgtgcctccgcacaagcccatgactgtgacgttagccacgcagtgacggctaaggctaagccatcaaagacctccaaccggacatgttgcgatgctcacttttggaaagtagccaccgtgctgtgaggagggcacgctgccacacggaaaggccacctacaggtgtcctgatgcacgggaggtcccggccaacacgaaccagtagccaggagagtgaggggaccttcggatgattccagcttccagccttgaggagtccttgggtgacactgagtcaggcagagatgagctgtccctgcccggccccgcccgatt

SEQ ID NO: 269685 - DNA, 155 bp, Homo sapiens
  chr16:86740874-86741029
  hypo
ctgatttaactctgcgaaacactaaggggtacaacctttctttaaataaactccctactccactgcggcatgctcctgaatccgtcctggcttcgagcagaaccaagtgagcgccgtccattcatgcccttcgtggagtgcgtgactgcagtgat

SEQ ID NO: 269686 - DNA, 160 bp, Homo sapiens
  chr16:86741299-86741459
  hypo
gctccctcttttcacgcacagaaacttactggaaatccagatatgaaacagtgcaatcccaaggagaggctcgtggattgcaggccgtctacaccaaatgcgctctgcacggccccgtgacggaaacccaggctgctgagtcagacgtgaccggagaaga

SEQ ID NO: 269687 - DNA, 398 bp, Homo sapiens
  chr16:86878236-86878634
  hypo
ttctatagtcctttcgtctctctaaagtgggtaagagggaaaggtcaacacaaaaccagccatggcacaggcctcgaggagaaggctgaccgtccatggacagcaggcccatggctgctctagctccgctctgctgctgggagtgagtggccgggtggcaggcgccctccagggcatggatgaaacctcacaaatggcgctttgtcgtcccgccgagagatctgggacatcccgtgagttggaatatataacgcccactggattaagagccgtcagactggttcccaaagcaaacactgagctaatttttccagcatatgcctttcatgtctgggctgcttcaggctttgctgggtcactgggctctttgttgctgcctccgccgaagtccctggccc

SEQ ID NO: 269688 - DNA, 71 bp, Homo sapiens
  chr16:86903435-86903506
  hypo
tgcgtagaggtgacggcggcgcaggcgcagtttagaactgcggagaggtgatggccgcgcaggcgcagttt

SEQ ID NO: 269689 - DNA, 196 bp, Homo sapiens
  chr16:87022632-87022828
  hypo
aaatgctatgacacaggtgacgtgcgtgacgcaccatccagagtgctgctgctgctctgcggggctcctgtgacaccccgacctcccccggcccccggcactgggggcaggtcttgatagaggcagagctgcgctgtgtaactggtggcctcgcaaagatgtcccaagagagggcggcccccaggttggctgtagg

SEQ ID NO: 269690 - DNA, 224 bp, Homo sapiens
  chr16:87092443-87092667
  hypo
ttacccttcagcgacgcagtgcacttaagtggtgaaaggagattcactggttggaaaaacactccagggcgaagggccagcgtgtgcaaaagcaccgaagcatgaccgagcgcgggcattcccgccagccaccagtgggccacgcatcccaacatgtgagtgccgcaaggatacaagtgcctaatgtgaacctccaagtggacgatcattcagtactgactttg

SEQ ID NO: 269691 - DNA, 35 bp, Homo sapiens
  chr16:87146940-87146975
  hypo
cagagcaagactccgtctcaaaaaaaacaaataaa

SEQ ID NO: 269692 - DNA, 397 bp, Homo sapiens
  chr16:87157397-87157794
  hypo
aaggtcgcagcgtccgcagcagccctgagagcctggcgagtgtgagtcccagccaggcctgccaggcttgctgcgtgatctcaggctgcttggccccataagcccctggttccctgtcggttagacagccaggatgcaaacttccatgcaccttacagagttgtcatgaaggtggaatgagatgccatggggatgtttcatttcaccagcatcgctactgtcgctagtcagcacatggggcaaaacccattgaaagccaattaaatcacgccccaaaccaagccctgggaccttcccagcaagccagagcagctggttctcactatcacgtggggatagaccgttccttcctcacataagcacaagcagtggccagaaaaggcgcaagaaaaatgca

SEQ ID NO: 269693 - DNA, 126 bp, Homo sapiens
  chr16:87177254-87177380
  hypo
gccgccctccatcacgcaggctctgacacatcccagggaagttacaagtccccgctgcttccaaaaccatggcgctccacgccccactgcagcccagcatgcgaggccgggcggaggtttccatat

SEQ ID NO: 269694 - DNA, 117 bp, Homo sapiens; identical to SEQ ID NO: 217239
  chr16:87219677-87219794
  hypo

SEQ ID NO: 269695 - DNA, 59 bp, Homo sapiens
  chr16:87249907-87249966
  hypo
cgtgtacacacactcgtctgactcacacctcatcctccctttcgcttcagctggggaag

SEQ ID NO: 269696 - DNA, 215 bp, Homo sapiens
  chr16:87249996-87250211
  hypo
ggtaatttgcccaagaatgcagcgagcaaacatcttaaaacaccacggagagcctctgaaaactgattagaaccatttgtgtggccaacaagaatgagggccgccgagaactggaagccggggacaatatctgctctgttctggcgcatagcagatgccagcgcggcttctgactttatagctttttcttggcctgtgcggatgaaggaggctga

SEQ ID NO: 269697 - DNA, 137 bp, Homo sapiens
  chr16:87250241-87250378
  hypo
agcctccccgaatgtggcacaggaccttgcagccaggctgtcctcctcgccgactctggctccgctggccacgcacgacaggcgggcggatctctcactctctcgggctcgacgacgggaccccaggccaggctgag

SEQ ID NO: 269698 - DNA, 209 bp, Homo sapiens
  chr16:87289526-87289735
  hypo
agccaccctaacctcggctcggaagaaggacccctgagatgcgcagacaccccaatctcggctcggaagaaggaccccgcctgaggggcccagcccagctgagcaggtgcctcgttttgttactgcagtgcctcctgggaaggaccctactccaggctgaagcaacacagctcctcattgcaaccctcgattgttccataaaatgcaaa

SEQ ID NO: 269699 - DNA, 37 bp, Homo sapiens; identical to SEQ ID NO: 217240
  chr16:87310542-87310579
  hypo

SEQ ID NO: 269700 - DNA, 218 bp, Homo sapiens
  chr16:87311853-87312071
  hypo
aacaggaccaacatcccagtcgaagcaggggtgtcccaggcagcaggccaggaccacgccgcatgttcacaggctcagttatagccgtcgaccacgccacggcgcccaaccacgccacggagcccgaccacgcctcgaccatgccacggcgcctgaacttttatctccatttctcaggtgaggacctgaggctcgggtggccccgtcactttcctagg

SEQ ID NO: 269701 - DNA, 369 bp, Homo sapiens
  chr16:87356524-87356893
  hypo
gatgtgtctgtgatcggggcagccccaagagcacgtatcccgggacatgatgtgttgtggtctgtgtggggtcagagccgtcagtgttcactgccgcgtgcccagtgcttagcactgtttgccgcatgggagatgcaggtcacaacccggtagcgcctagtggcccgggggacacctggcttgtctgggcctgttggctgacaggtaggagggactgccatccattgttggggcaaaggatgctgctcaacctcccacaacgcatggagcggcccggcgcacgactcacccggccccaaacaccaactgtgccgaggtgatgccctgccctgaggcgagcgtacaaggcttgagcgtcgagaacactgc

SEQ ID NO: 269702 - DNA, 104 bp, Homo sapiens; identical to SEQ ID NO: 217241
  chr16:87391987-87392091
  hypo

SEQ ID NO: 269703 - DNA, 141 bp, Homo sapiens
  chr16:87420752-87420893
  hypo
aaagaaaagaatgaccgtgagcgcttcagcaatacctgttggtgggaaggaacccaaggggaaagacagtgccagcagaaaactactacacattgaatcctgacagctgaatacgtccttggaacacgtttacaatccttt

SEQ ID NO: 269704 - DNA, 48 bp, Homo sapiens; identical to SEQ ID NO: 217244
  chr16:87443507-87443555
  hypo

SEQ ID NO: 269705 - DNA, 308 bp, Homo sapiens
  chr16:87444919-87445227
  hypo
aaatcatcatggccgttttagacccaacagcagtccttctggggacctcacggcctatcatgaagatttccacgcgctttcaaagagcattcgaaaaattatttgctttacaaagaaagaagtttactcttcataaaaaccaagcatttgtgtgcactggtcctgcgggagcctggtgggcgcggccatggcgcgcgcttacctggccggttgaagtccatggacggctgtttgcagtcctgggcgcggtgaccagtggccccgcagttgtaacaagataggttcccgctctttttgtgactggaacc

SEQ ID NO: 269706 - DNA, 47 bp, Homo sapiens; identical to SEQ ID NO: 217246
  chr16:87447846-87447893
  hypo

SEQ ID NO: 269707 - DNA, 178 bp, Homo sapiens
  chr16:87465351-87465529
  hypo
aggaaggtgtcacacgcgaccactgcaaaatgtcagcaaatacctaggatcactgggaccgctgctgggttccagggcactcagagggcccctgtggtctttccctgggctccgcctgggctgcacgacatgagacccagaaactccgtgggcgccgagactccggcactaccatcac

SEQ ID NO: 269708 - DNA, 141 bp, Homo sapiens
  chr16:87465771-87465912
  hypo
atgacgctgggaaccgaccttcaagagcagtcagcactcgatgcacatgtggtccaaggagaatgtccccctgtcagggttcctgacagagccctgactgggagctcggcaccatcagccgggacacatttcccagccttt

SEQ ID NO: 269709 - DNA, 118 bp, Homo sapiens
  chr16:87471742-87471860
  hypo
acagcaaccgggcacgcgctccaatgctgtggtaccgcagcactgcgtggcacacagagcccactgcacaggaggaatgcacgccccgacccagccggctggacggcgtgcacggggg

SEQ ID NO: 269710 - DNA, 95 bp, Homo sapiens
  chr16:87493948-87494043
  hypo
aacacgggcgcttacgtcttgtggctggggttcatcgggtgcacagaaactatggtagccaaagaggccgggcacggtggctcacgcctgttatc

SEQ ID NO: 269711 - DNA, 239 bp, Homo sapiens
  chr16:87594871-87595110
  hypo
agagcctggttttcacagggcgccttcatctttcgtcaacatctgtccaaatagtacctttaaaaatcattgccaaagcgtttgctcctaaggattggaaacgaccatcggcaggggacgggttaaaccgattaaggtgactgacaccgcgcagtgatgcgcagccagtgtaacggccctgtggaggacatctaggtgcatcgtctggtagaaggtacgagggcagacagcatggtctg

SEQ ID NO: 269712 - DNA, 169 bp, Homo sapiens
  chr16:87625740-87625909
  hypo
cacccccacatcagcgaggacgctggatgcccccacaccggcaaggatgctgaatgctcccacactggcgagaacgctggatggacgccctcacaccggcaaggatgctggacgccctcacactggtgaggacactggatggacgccctcacaccggtgaggagactgg

SEQ ID NO: 269713 - DNA, 310 bp, Homo sapiens
  chr16:87681106-87681416
  hypo
ccatgctccctggcaggttgcggcttgccttctgcactggcggagtccgagctgactccgtcccttcgcccgagcgggcgtcgcggggagggaggtggttcctgcttccgcatgcgcacaactggggtcttggatcgtagctcctttgtgagaaagggactggctcacccgccatgtcctgctgtccacacacacggctctgcacaccactcacggcctcctcaccgctgtgcacagccagcacgtccatgcgcacctgtggagccagggtgtacggctgcacaggtgcgcctaggtggaggtctccagg

SEQ ID NO: 269714 - DNA, 252 bp, Homo sapiens
  chr16:87723113-87723365
  hypo
ttgcctgcagcctttcggtgagtgggaagcgcctctgctgccctgaggttccctctggcgccctggcccggggaccgcggcctcgctgtggaatgtgctgggtaacgccgtctggcgtcgtcttgtgtccccatacagggctggagtaccagaggccgaagcgtcagacctcctgtgacgacatcgaggtgctgtccaccgggacacccctgcagcaggagagccccgagctgtaccgcaagggcaccactc

SEQ ID NO: 269715 - DNA, 100 bp, Homo sapiens
  chr16:87724407-87724507
  hypo
atccctgcgctccccgcaacgtgctcaaccccagctgctccaagagtctgtgcccctggtcagtagccttgggccgtgagatgaccgcttgagtgtcctg

SEQ ID NO: 269716 - DNA, 537 bp, Homo sapiens
  chr16:87738500-87739037
  hypo
catcctcacacagagcatggcgcgcatgggcggcagggggagcatggagaacaagacgattcatcctttaaaatcccacaaagccctgcgaggaggagctgtggccctgctgccaagcgggccggccagagtgcctcccctggtacgcccgcccaccctgcagtcaggggtctgggggccgtgtgggagggccgcagccgagggaaaggcttcctaacagccagcagctcaccacagcgaggaactgggcaagaacgtggcaccgagtacggcgtgtcccagccgcgccgcgccagcagctcccgggagacagaggccctgggctttcgtgccggccgctcacgccctacggtggctatctggccaccaagtagttcggtaaactgggccccggcagacagagcagaccacaggcccgtggggcaggcagagctccgcccaggaatccaccaccctgtgttgtgttccgcgtctcccacggttccacactgaaggggccctgttttcatcacggccgtgacagccactccatgctgg

SEQ ID NO: 269717 - DNA, 754 bp, Homo sapiens
  chr16:87739314-87740068
  hypo
agcaggagggaagaaagaaccggccacacaatggcgtccatcttctggacaagggctggagccgcagagccgggcagggcctgggcgggggcgggggcgggggcgctgctgcctgcgctctggcttctcaaccctgtccgagcctcttccaaccagcttagctgagagtgtgaggaaaggaccttgattgcccagcactcagacaaagtgcccagaccggccgccaaagccggcgcaacgcaacacaagctgcagccctgtgcggggtcggtgcaacacaaacacaagctgcagctctcagggggttggcacaaggcaacacaacctgcagcctgaggggaggaggggtcggcggaacgcaaacacaagctgtagcccttgcggggggcgggcgggctgccggcgcaaaagcaaacacaagctgcagccctcgcgggggggtcagcgtaatgcaaacacaagctgcagccctcgggggggggtcagcgtaatgcaaacacaagctgcagccctcgggggggggtcagcgcaatgcaaacacaagctgcagcccttgagggggtcggtggcggggaggggggtgagctggcacaacccaaacacaagctgcagccctcggagagggggaagttggcgcaatgcaaacacaagctgcagcccttgggggggtcggcgtgggggggttggtcggcacaacacaacacaagctgcagcctccaggggggtcggcggagggggccggcacaacgcaaac

SEQ ID NO: 269718 - DNA, 165 bp, Homo sapiens
  chr16:87740743-87740908
  hypo
aattatgcaaatccgaattggccttcagtcttggactggagcaggcctaggttgggagttagcgcaccacagccttcgggggcaaggaggccgcagcgctgaagccaggaggagctggatggggacacctggtggcagccatgtggggacgttgggagccctcgc

SEQ ID NO: 269719 - DNA, 443 bp, Homo sapiens
  chr16:87744569-87745012
  hypo
ggccggggaggtcccgggcacctcagcccagggcaactggcttctgaggtagcagccccgccagcatccaggacagactaaggggaccgtgaccaagggctctccaagcctagtcacccaggacagtcagagacggaaccctcgcccctcttgagagagctcatgggctttgggggccccaataccaaaaggtgctggaggaaggcagtggtggcagggacccaagttagggctgcgcaccacggcgcatgctactcagaggttgcactaccttcagctgtccctcaaaccaacggttcctggtggcgtcgtagaagtacagatcgttgaagaactcgcccgacaggctctcctcctcttcctcgtcacagacacccccgaagaacagtgtctggtgattcggggccatggccacggaaaagccagaccgtggggtgggcttg

SEQ ID NO: 269720 - DNA, 178 bp, Homo sapiens
  chr16:87756599-87756777
  hypo
tctggcctgggccgcgcagcagcacagcacagctgggtcatgccaagaggacagagcatggcgggtgagggtgtaatggcgccagagcaaggacgagcttcccccagccccaagctcaggtacgggccatgtaccaaagtttctatcagttcgtgcacactgccgcttcagccatggc

SEQ ID NO: 269721 - DNA, 221 bp, Homo sapiens; identical to SEQ ID NO: 217256
  chr16:87776440-87776661
  hypo

SEQ ID NO: 269722 - DNA, 97 bp, Homo sapiens; identical to SEQ ID NO: 217257
  chr16:87782716-87782813
  hypo

SEQ ID NO: 269723 - DNA, 150 bp, Homo sapiens
  chr16:87784654-87784804
  hypo
agagttttaaactatcatctcgggaagactattcaatgccacagaataatcctacaataatacatcaacggtaaaaaacactatagaaagaacacatacatgcacgctccagttagcgtgaaatagatgcatagaaatatgaactggctg

SEQ ID NO: 269724 - DNA, 35 bp, Homo sapiens
  chr16:87807642-87807677
  hypo
atgtcaacaactgcgagccagggattggctctgag

SEQ ID NO: 269725 - DNA, 160 bp, Homo sapiens
  chr16:87856804-87856964
  hypo
gctggctttcatggcgcagttgagttcccacttgcagaacatactcaccctgtggctataaggcaaagcgctggggcttgtaggcactggaccccaagcagtgaacaggtcagtgcagggcctgtttggtgtggctgcacaagcgcgagaaacaggaatg

SEQ ID NO: 269726 - DNA, 189 bp, Homo sapiens
  chr16:87864417-87864606
  hypo
ggcaagtgcgtgccgtcgagaggccgccggctccctgtatccttgaggcatgtccacgtcccagagcaggaggttggaacagaacggcatcccgaggacccctagccgaggcgggaaggtaagaggctgacgtcgtgcgtgggccccgccggccccagtgggaagcagtggtgcgtgcctccagggagc

SEQ ID NO: 269727 - DNA, 215 bp, Homo sapiens
  chr16:87874192-87874407
  hypo
ctgggctggaaagcggacctggagtgggagggagctcagcctcctgcgtgttccggggggtccctgctaccccttccaggccctcccgcacattccctgcctgttcgccctactggggtgattctcaggtccctgtgaggcccgcctgagcgcaggagtcaggctggggacctggaggaaaggggccgcagggctcagccgcctccacctgccac

SEQ ID NO: 269728 - DNA, 151 bp, Homo sapiens; identical to SEQ ID NO: 217259
  chr16:87895432-87895583
  hypo

SEQ ID NO: 269729 - DNA, 82 bp, Homo sapiens
  chr16:87911934-87912016
  hypo
cagaactgtgctcccagggccggccgaatgcctggcttccaccctcagactttctttccaatgtgggcgaagggaacacgga

SEQ ID NO: 269730 - DNA, 231 bp, Homo sapiens
  chr16:87916177-87916408
  hypo
ccccagaccaacggcgctgcgagcttctggggcgtgggctgggcccaacatgtcagtgcgacccacagcggggctggagctgctgaatgtgcacaacacacttcacccgggcctggttcaggagcgggcgaggcagccgtacaccctgtccttcagcagactcctcttgatcgatggaatcgaagtcaggcgcagcagcttagagcagaacagaaacgtgcccatttcccc

SEQ ID NO: 269731 - DNA, 167 bp, Homo sapiens
  chr16:87934227-87934394
  hypo
cagctgatcttggagaaaggcgacactgttgtccccaccatcttttcgagctgcgctggatacagggaagcctatggatcgctgggcggagagctgcggtttgggcaggtttctctccgcccttgggcttggggtcggacagggacgttcaaggagagtgctgggtg

SEQ ID NO: 269732 - DNA, 45 bp, Homo sapiens
  chr16:87934808-87934853
  hypo
ctgagtgacagagggagactcctcgaaaaaataaaaaagaaaaga

SEQ ID NO: 269733 - DNA, 120 bp, Homo sapiens
  chr16:87962653-87962773
  hypo
cgtgagccaccgcgcccagccttggattattttcttcttacaaattcctaaccacagaatcactaggtcaaagggtgcatccaacagaagtctagaaaacaaggataaagatgtatagcc

SEQ ID NO: 269734 - DNA, 37 bp, Homo sapiens
  chr16:87983755-87983792
  hypo
tacaggcgtgagccgccgcgcccggccagcattttct

SEQ ID NO: 269735 - DNA, 32 bp, Homo sapiens
  chr16:88004307-88004339
  hypo
cacacaaggcaaggcgtcctcagacagaactc

SEQ ID NO: 269736 - DNA, 364 bp, Homo sapiens; identical to SEQ ID NO: 217262
  chr16:88037886-88038250
  hypo

SEQ ID NO: 269737 - DNA, 293 bp, Homo sapiens
  chr16:88047709-88048002
  hypo
gtcagagtctcctgcggtgctgaaaaaggccaggaagaagtgttgaggcctggacgaggccactggttgtggagggagggctcattgtgacctgcagtgcaggaggagtcacccagagctggggcagctccgtgtggggtggagggcacggccagccttgggtgcactgggtctggacatttgcacactggccctcagtgagtcctgagcctgccagaggatgagcttagcggctgccccgacactgccttgaggtggagcctggggaggacggaggtggtgggtggcagcac

SEQ ID NO: 269738 - DNA, 150 bp, Homo sapiens
  chr16:88048979-88049129
  hypo
cggaccacgctgggcgtgggcgcctgctttctgcccaggtgactgggccctgcttggttctccaccctctcctgtccctcgtctgccctatgttccctgctctggccacgctggttcccttaccttcctggagcacgtggcccctcctgg

SEQ ID NO: 269739 - DNA, 300 bp, Homo sapiens; identical to SEQ ID NO: 217263
  chr16:88049613-88049913
  hypo

SEQ ID NO: 269740 - DNA, 146 bp, Homo sapiens
  chr16:88056264-88056410
  hypo
caggcttgtgttctcgtgcaggtttggaggccagatgcctgggatgaaggtgtgggcagggccacgctgcctgagaaggccctttccctctcccagcttctggtggtggccgcatccctccagtctctggccgcatccccctcggc

SEQ ID NO: 269741 - DNA, 98 bp, Homo sapiens
  chr16:88056979-88057077
  hypo
gcctggaggctggacgtttgaggtgcatggggcgtgagctgtgtatgcttcccccgggagggagcatgtcagctggcttccatcgggcagaggccttt

SEQ ID NO: 269742 - DNA, 282 bp, Homo sapiens; identical to SEQ ID NO: 217264
  chr16:88073665-88073947
  hypo

SEQ ID NO: 269743 - DNA, 49 bp, Homo sapiens; identical to SEQ ID NO: 217265
  chr16:88078972-88079021
  hypo

SEQ ID NO: 269744 - DNA, 50 bp, Homo sapiens
  chr16:88084706-88084756
  hypo
agccaagctgttgaccgcagcacccgggtccctcccgtgtagtggcgggc

SEQ ID NO: 269745 - DNA, 471 bp, Homo sapiens
  chr16:88091519-88091990
  hypo
ttccgacaagccaggcgccgaggctcggtgtgggcccgtgggcctgattgaagtcacactcctgcccccttaaactatgaaacggcggagttacacgggaagaaagggttcaagcgtaatataatttcctacctttttttcactctgagagtgaaccgctgagtggctgttaaattcattgtgtatttacgaggaatctttcatctagagactgtagatgcaggactgtgcccgtgcctggttaaaacgttgaagctggtgctaaagtgtgttgaggtgcctgaaagagaagcttttgttttttgactcactggcctttgggaaactgaaggacagtgcgaacaaagatccctttcttcctcaaatgggagcttgggatttgttgggtttcacgcaggtgggcccgaggaggacggcaggcagggccgggacgtgctgatgtcaggcgccttcgtcgactgagctccttcc

SEQ ID NO: 269746 - DNA, 366 bp, Homo sapiens
  chr16:88096550-88096916
  hypo
gtagggaccctggcgtgacctcatttttgctgcttcacgtttaagatctgactgctgagttgtcctcatcaccaatttcaaatcaagcccaaatccacaaactatatctcagcctcctgtgtgttttaagaggctgcgccgtgcatggaggtgccctcagcctgcagcagcgcagccaagcggagggcgcaccgcggccttctgtgtgactgttctcagagcacgctgtgccttcatttctgcgtgtttcacggcgttgcccttgtggtatctgctgaccccggttcccttatttctaggcccagtgcctcggctttcgcctctcagccctcccctcccctccccggtgtggatgctttctgccct

SEQ ID NO: 269747 - DNA, 301 bp, Homo sapiens
  chr16:88097580-88097881
  hypo
ttttagaaatgagcgaaacacttaatgtacacttaagattcgaagaaagaggtaccggggcttttgtggggaacaaaggcacagacattgttgctgccttggaacaaggtgtgggggccaaccacaagcaggcaccggcgctgggggaccagggtcagggggctctcttcagagacggcagagcacgaggctggggcaggaggtgtcgggggcttgagaggcgcaggggagcagggggggagagtggacagcgaggcggtggatgttgaggcagttgtgcgtccacggcggggcctgcctc

SEQ ID NO: 269748 - DNA, 845 bp, Homo sapiens
  chr16:88101488-88102333
  hypo
agccttgccttcccgcagttacacgttgcacggggcctccccgtagcatccactgtgtcaatgccccctccgtccccaacagacccgccctccccccactgtctgcctccttgtgtcgtcagtccgtgacacgccacgtgtgtgatgaggaggtgcttggagtggcactgctctgcgtgtggccacgcacttcgtttccattttcacacgtagttcagagctgggtgtccgacagaggtgcccgaggtggaaagcgtcgtgcactcgtcccacctgtggcccctgcagagctccggctgtgtggcacgggctcctgagagctggggatggaggaggtgcgggcttaccgtgtgctcctctgctgctcgccccaggcttgggtttcctggcggtcacctggttggcgtgaaccttgggcgtgcgccagggtccctgtgctgtcgtggagtgcaggcaggtgggcaggcgcttgggagttaccagtcaagtccctgcaccgcgcagaccattgcctggtgttcaggagttttcaaggcctcggcctggtgggaatagttgagaaacgctggttcaggcagcttgctttattcacagccctgagacacctctgggacagcccctgaggatatttttcccggaactttctcggggccaggagtgtgcctgtgctgtgatgagtgggaaacgcagtttgtgcagggcctcacagaagagcccactggtgcgggtgctggctgcctcctccagtgggcgccagctcggggtctgtggcaggaacgtgggtggctgcggatccacccaggacagagtgactgcctgggcgcgtggtggaactgagtgcagaa

SEQ ID NO: 269749 - DNA, 370 bp, Homo sapiens
  chr16:88106132-88106502
  hypo
agcatgggggcccctttagccggagagctccctgccccactcgttgaaggtctcagctcggggcagagccagtacctcgggctgctgtggccctagcgtccacgaaaacaaagcgcagggctgctgtgctctgtggatggcccagcgggcccaggccagcatctccatacctcgcaggcagaagcccccgagggtgaggccgtgccgaaatctccagcgtggccgaggcccagacaagagccccgtgatgccgtgggctgtttgctctgaacactggaggcagaaggtggccctgcatccgggagcagtcttggccccgcagcctccgtgccacctgctttgggaacgtgcccagcggggacgttgtcct

SEQ ID NO: 269750 - DNA, 133 bp, Homo sapiens
  chr16:88106973-88107106
  hypo
gtgcccatgggcacggtggcccctgcagaggcacgccctgtactctgcccatgggcgcggtggcccccgcagaggcgcgccctgtactctgcgtggtgtttggttccacattgtcgccgacctcactggagat

SEQ ID NO: 269751 - DNA, 568 bp, Homo sapiens
  chr16:88109979-88110547
  hypo
gagcctccctgggcgccagggtcgtgggcgcgtcgttccgctgggagccaggcgttgtgtaccaagtcgggtgagccttggggccgtcagggctccttcgcgctcctgtgtgcgtgtttctcattctgccttaaagtcactggctgttcatgacaccccctggccatgcagtgctgggtatttttctagaaagtccctcctttctcccttttgcagacggccgaagccctgcagcccacgctacagccggagatgcagctcgagcacggggccatccagattcagtgagcggtgcccatggcaccaggagcccctcgccggctccgcctacggcccggcccccacgcgccctgctctcacggcctcggcacaggcagcggctgcacgtgttctgctgaagtgcgtctgaaggccgctgcctccgcggggaacagcatcctatcaactgaaagagcagccgccgccgcccccagccggagacccctttcgtttgagtcctgctgttggtgtcggagcacgaggggaggcacggtgcggagagcgtcgcatatgcgcgggaaatcaagaa

SEQ ID NO: 269752 - DNA, 369 bp, Homo sapiens
  chr16:88111278-88111647
  hypo
ttgaatccctggtgaccagccgggcctggactgcttcacctacaccgttgtggcagttgcgttaggggcttgggaagggcctacgtgaagccgtgttcgctgacttagagcggggcctctctgggctttctctgggaggagttccgcgttgccatccagacggtcgtagctccagcctgctccaccccgtcaggatcctgggctgggtccccttgggggtgagggtctgggatgagctgctctcgaaagggggatggcgctcatgggttctgcgtctccatcgtggtggggccgcctctgaagatggccaccacaaggagccgggccgaggcctcccaggaggtcaccggagcttggccactctccagg

SEQ ID NO: 269753 - DNA, 87 bp, Homo sapiens
  chr16:88151480-88151567
  hypo
ggctccacacactgcgcccgtcagcagagcaggaggaggagcacgaggggaggcgccatactgtgattttatttctttgtttttttg

SEQ ID NO: 269754 - DNA, 387 bp, Homo sapiens
  chr16:88164301-88164688
  hypo
aactctgtgtcaaaaaaaaaaaaaaaaaaaaagaggcacctaataaaaacggcagcgcagcctcccacgcactcagtggttcagacacacgaagacagcaatacagatgttacctcggctggtctcagcgcagcaccggcgctgggaaacgacgctgcctgggatggcgggcgcgtgggaaggccccgcggagtgggggtgtgaagtggccgcggggtgtcggcagagacaggcggaagtggcgtcccgatgaggacgaggtgcccgggcagccggggacgggggtgcgaggggcgtgtgcttctcctgttcctgcgtggctcggttccacggcgggcagcgcggcgttcgcctggcatttctggcgggtgaaattgcacaaaggta

SEQ ID NO: 269755 - DNA, 147 bp, Homo sapiens
  chr16:88233713-88233860
  hypo
aggagtgcccggcacggccgaagagaacacggcagtggggtgtgtgtcagcagcagtggcaccaccaaaccccggcaggcttcacgcagaaggcggcatttggggagaagttaaaggctgagcaggagccagcgggtgaagtgggaa

SEQ ID NO: 269756 - DNA, 91 bp, Homo sapiens
  chr16:88237696-88237787
  hypo
cagccggaggtgccccgtaaccccacagagcagccggaggcgctccgtaaccccatagagcagccggaggcgccccgtaaccccacagagc

SEQ ID NO: 269757 - DNA, 71 bp, Homo sapiens; identical to SEQ ID NO: 217272
  chr16:88260676-88260747
  hypo

SEQ ID NO: 269758 - DNA, 327 bp, Homo sapiens; identical to SEQ ID NO: 217273
  chr16:88338949-88339276
  hypo

SEQ ID NO: 269759 - DNA, 236 bp, Homo sapiens
  chr16:88356032-88356268
  hypo
tcagtgtcccggccgtgttcatcctgaagctccacagccgcagccacccatggcagtggggagccaactgcagtatgctctgatcaaaccgtatctcatggctccagcacagatggcgggagctacggcaagtccggtgatgctggagggggtgtgactgacgaggagggtttgtgccagagcaggcggcaccaccactcctcggagactgtgtgggacccgagcgacccctccat

SEQ ID NO: 269760 - DNA, 129 bp, Homo sapiens
  chr16:88361636-88361765
  hypo
cccggcacacacggcgactcccacagacacagaagggcacacgccatgggagccacggtcctaaagctgggatgaggtcgaggaatccgcaggtcccagggaaggaggagctgccgagtctgtgcttct

SEQ ID NO: 269761 - DNA, 250 bp, Homo sapiens; identical to SEQ ID NO: 217274
  chr16:88368369-88368619
  hypo

SEQ ID NO: 269762 - DNA, 268 bp, Homo sapiens
  chr16:88385554-88385822
  hypo
aagggaggcccctccgccccgaggagaaatatgatggtgacgctcaccacgacacagagaaacctgcaggtggtgcagccacaacaggccacacatggtgggattccgtttctagggaacacccggaacaggcacacacagaaagcgggtccatgggtgcgaggggctgggggcgggggatggagagtgactacccagaggaacaggtttccttctagggttaggaaaaagctccaaaaccagcgagaggggacgggtgcacaatgcc

SEQ ID NO: 269763 - DNA, 76 bp, Homo sapiens
  chr16:88442479-88442555
  hypo
cagggcgggcggcacgcaggcccaggtgctgggagaaggacgccgctgttcacggcgcagccgggccacaagggcc

SEQ ID NO: 269764 - DNA, 90 bp, Homo sapiens
  chr16:88458614-88458704
  hypo
tcgcgtgcgctctgcgcttgtaccgtgtcttgattctggccagcgatgtgcaaacgctccgtggccacgtatgcccgcagctgctgcacg

SEQ ID NO: 269765 - DNA, 501 bp, Homo sapiens
  chr16:88460215-88460716
  hypo
aaccacaagtggggcggacgctgccccaccggtctccggccagcagctttgagggcatgtgtccaggagacgtcatcggggaccccaaagggcgagccatgctggggcctcaggaaggaggggctcatgctacacctctgctgtccgacaggaggggggtttgacacgtctacacctgtgctatccgagaggagcggggtttgacacgtctacacctgtgctgtccaagaggagcagggtttgacacgtctacacctgcgctgcctgagaggagcagggtttgacacgactacacctgcgctgtctgagaggagcggggtttgacacgcctacacctgcgctgtccgagagggatggggtttgacaggtctacacctgcgctgcctgggaggagcggagtttgacacatgtacacctgtgctgtccaagaggagcagggtttgacacgtctacacctgcgctgcctgagaggagcagggtttgacacgtctacacctgtgc

SEQ ID NO: 269766 - DNA, 635 bp, Homo sapiens
  chr16:88479696-88480331
  hypo
ctccaggacagacccgctctgtctctcccctcagcctctctcttcccttcaccctcaaaacacccacctgtgggccctggaggtggcaggaggaacgcaggagtgaggagacagcaaaggagaggcccagcaggccgaggcccggcgcaccgtggctttcccagcacagatgtgttttctgtgtttttctgaaagcagggagccctgggctctgtggcagccctgctcagccccactgggccccgccgtcctgcctgcctgtgaacccaggcctctggagaagtgattccgtccagagtgagcctcggagggtgtcctgcagagctgggggcagcgttatagcaaggttcagtcagtcccgccattgcctctagctgggcgttgaactcggttttctcagctctgaaatggggtgactgtggcagtgctgactgcagctgtggtccggagggtgcaggacccagggacatcccagctcctgggctccgcgcctcagggcctgggcagtgccacagaggcctctgcagcctccgcagcagtggggagagcgaccgggccagcccccagggctgtgtgagtgtggtggcaggtgccatggaggcaggtgccatggaagcaggcgctatggtggcact

SEQ ID NO: 269767 - DNA, 1016 bp, Homo sapiens
  chr16:88480664-88481680
  hypo
acggccacagatcacggccacggatcccatcacgcccgggcttcagtctccaacacaaacacctgctgggcatcgggaaacgggaacaaactttggtgtggggtggaggcatctggcctcgggggcacctggaggaggccacagtctcgttacctccaccccaaagagccctggggaccgcagactcgagttgttggaggcccagggatgctgtggcgccgggatttgaaaggtggcagcctcccgggagagagccgtgagggcagaggcccccaggcccggcagagctgccctggattgggagcaagctatggctgggagcgggccccacggcaggagggtccgagggagaggcaggccctgtggcctcaggttggcaccgtagaggcctcctctgtcctggctgtggcctcctgctctcgagaacaggccgaacccagaaggacgtcccagtggggggtaacttcccctgccccagggaacagggctcttcagtgcccgggcggcacagggccacccctcaccaggccactgtggccagaggtccacgcaggacagccccgcccagacgtccactgccacccggccctgccttcccagggccatgggtcagccagttagggcggggcagaggggagcacggccaggcctccagtttccagctgcccagagaccagctgaggccacacagcgagtgggaacagcagggtcagccgcgccagggcccaggtagcctcgaggaggcacctgcaacagggaagggcactgcctcggcctcgcagagactccggtcccgggtgccacttcccactgtgtggccttggaaaagtcccttcccctctctgagcctcggtttctcgtctgagcaatggggaggaacagaaccaccttgtggggccttgagaggattcatgaggcagtgctggcccggtgaccacccggaacatcagggaccctccgggatctcaggatctgtcaggccagtgccggtcacagctgagcgaggtcctggagag

SEQ ID NO: 269768 - DNA, 189 bp, Homo sapiens; identical to SEQ ID NO: 217277
  chr16:88493599-88493788
  hypo

SEQ ID NO: 269769 - DNA, 50 bp, Homo sapiens
  chr16:88495629-88495679
  hypo
gggagcctcccccagcgagtccccactgccgtcaccggccaccaacacgg

SEQ ID NO: 269770 - DNA, 118 bp, Homo sapiens
  chr16:88498087-88498205
  hypo
gccagggatgccccgccggccagcagctcctgcctttgccaggacggcgaggatgccggttccctcgagccacagctgccaaggagcccacctggcaccgctgagacggagccaggca

SEQ ID NO: 269771 - DNA, 540 bp, Homo sapiens
  chr16:88498235-88498775
  hypo
catccctcttcccagacctgccggtggacagattcgacccacccctctatggcagcctgtctgcgaacagggactccggtctgccgttcgcatgtgccgaccctccccagaagacggtgccgtcagatccaccgtacccctcttttttgctgcttgaggaagtatccccgatgctgcctagccattttcctgatctctcggggggaaaggtgctcagtaagacgtgtccccctgaacggacagtggttcccggcgccgccccatctttgcctgggaaggggagtggatgtagcgttgctcttatgagtcacctgtccgaggatgaactggagatccagaaattggtcaccgaattagaaagtcagctgcaaaggagcaaagacacacgtggggccccgagagagcttgcagaagctgagtcggtgggcagggtggagctcggcacaggcacagagccaccctcccaacggcgcacctgccaggccaccgtgccccacgaggacacgttctcggcagctgacctcacgcgcgttggagaat

SEQ ID NO: 269772 - DNA, 69 bp, Homo sapiens
  chr16:88501887-88501956
  hypo
ttacgcagcctctccgagccactgcctctctgtggaaggagggcctgaggctgacggggagcagccgcc

SEQ ID NO: 269773 - DNA, 242 bp, Homo sapiens
  chr16:88504073-88504315
  hypo
cgccgctgtatgcctgcgagctctgcgccacggttatgcgcatcatcaagaagtccttcgcctgcagctcctgcaactacaccttcgccaagaaggagcagttcgaccgccacatgaacaagcacctcaggggggggcggcagcccttcgcgttccgcggcgtgcggaggccgggagcgccgggacagaaggcccgggccctcgagggcacactgcccagcaaacggcgcagggtggccatg

SEQ ID NO: 269774 - DNA, 415 bp, Homo sapiens
  chr16:88512481-88512896
  hypo
ccaggtgtggctgaggccatcgagtcattcctccggtgaagtatgcccgtgcgtcggggtgcagggcacggggtgtaggacaaatgctaccaatgcccctgtcgggaactgggaggagggtggcacatgtccgtcactgccacaggcggttccgaagcccgggccctgccccgtacagtgactgtgctgttagcccggccacctggggcctggctctgcactggcgtgtcctctcctcgaggcggctgagtctgccgttcggggacctccctcgctcccctgcctggtgtcctctcctcgaggcggccgagtctgccgttcagggacctccctcgctcccctgcctggtgaaggtcatggggtcccgggcctcttcaccctctgtgttgtctccgcctccttccatctcatctca

SEQ ID NO: 269775 - DNA, 83 bp, Homo sapiens
  chr16:88513364-88513447
  hypo
cagccactgcgtcccgcagctgtgcgcagcccctgcctccgctcacccacgttcgtctgcaccatctacgcccgtgtcacaaa

SEQ ID NO: 269776 - DNA, 45 bp, Homo sapiens; identical to SEQ ID NO: 217281
  chr16:88537675-88537720
  hypo

SEQ ID NO: 269777 - DNA, 205 bp, Homo sapiens
  chr16:88538054-88538259
  hypo
aagatgaccgtggccgcggtggctcccacacacagtggaggggtcagggctcccggctctaaagccacatggcctgggcatgaattcctgcccaccacttactcacactgggatctgccacagacacctgagcctgtgactaagactaaggctgtgtgtccatctctgtgaaatcggggcgaggcccccgcgggctgggagggct

SEQ ID NO: 269778 - DNA, 394 bp, Homo sapiens; identical to SEQ ID NO: 217282
  chr16:88545423-88545817
  hypo

SEQ ID NO: 269779 - DNA, 404 bp, Homo sapiens
  chr16:88547819-88548223
  hypo
accacccccacccccaccaccgctgcctcctcgccgggggccgtggacagggcagctcgcaagtcggccttgctgggccttggtttactcacctgtaaagtgggaatgacctggcttcccactgtgggtattgggatgtggttggcgagtgggatttccacgatggctgcccccaaggtcctgcttacgctactccactccaccctgccacagccgtcaccgagtccccgtactgtcctcataccccctcctccatgcaccctgtccccctgcactttcctgaccgcccctacctgctgaggtctgtgtgggctgccaccctctacaccccaggttccccatctgaaatgaaattggaagaccatctcgctggactacgtgggtgggggcggttaagggtgggc

SEQ ID NO: 269780 - DNA, 203 bp, Homo sapiens
  chr16:88550287-88550490
  hypo
gctgcatggaacggcggggtcagccttggacatcagcctgaaactcagtcacagcatttctccttctctcgcatcttcgggggtctctgacatgagcctctgaacctggcgttggacgctggcgggtggcacgtttcttactggctgggcaggtgtttcgggcgttagcaggctccacctccgaccagcccatctccctccca

SEQ ID NO: 269781 - DNA, 977 bp, Homo sapiens
  chr16:88550903-88551880
  hypo
gctgtgaccatggggcttggcggccgcaggacctggggtctgggctcaggagggccacggcccctcccactcctgagtgtgtcgggaggctctgcccccatcgtgcttcacacaggacagtagaaggctgggcgggtcaggccttgtggagtatgggtgcagagggggcagtcgcagcacgcaggctgagtcagggcctggggacctggggagcagtcaaacaggatatggaagggcacctctgtcctctgttcacactggacaccatcacccatcaccagccccgccggcggatgtcagcacacacacctgcactcagcgccactccacagccactgtggggtccggagcagctgcccccgcacttgggccgcgtggccttgtctcagtctgccttgtcacctgtcaggtggactcctggagttcccccaccccgatgtgtgagtctctgagggacccaggccctgaggcactccacccccaggtgctgcagacacctgtgccctgcttggtttgttcgctcgacaagtctgtgagcgcctcctttgtgctgggtgagggtgtcaccccagggagttcccagaccgagggaatgagtgtgagggaagtgcacggggactgggcccctgggcggggcactggcaggtgatgccaggcggaggccgtggcgacggcgaccctcagggcctggatggacgctgggcctacagtacagggagggcccactcgcagctccagggctgccagagcaggtgggggcctgtcccctggtgctggggggagcaggtgggaaagagacacggggtccgcggcccttctctggcaagagtggaatccgtgggcgtggtggaggccaagggtcacggcaggtaagggtgggcggaggcgaccctgcagctttggaaatgttgcagagggtgggggttcgtcaagaatcatcaggtcttttttttttttttttgaaacagaggtctcac

SEQ ID NO: 269782 - DNA, 214 bp, Homo sapiens
  chr16:88596786-88597000
  hypo
cagtgtcctgggaacgctgcttcggaaggacaccaccgtgagccacacatcttgttgacatacctgagtcctgccctagcacttctgcggctgccagggcacggccgacgcttgtctgctgctctggaagagccgcaggaaccaattccagggtcagatccagtttcattcttgagcctccggcactctgggcccatctcgcctgtgaagcggg

SEQ ID NO: 269783 - DNA, 45 bp, Homo sapiens
  chr16:88624843-88624888
  hypo
agtcgcgcatccccccgtcggggggtgagtcgcccgtccccccgt

SEQ ID NO: 269784 - DNA, 44 bp, Homo sapiens; identical to SEQ ID NO: 217285
  chr16:88642725-88642769
  hypo

SEQ ID NO: 269785 - DNA, 113 bp, Homo sapiens
  chr16:88644982-88645095
  hypo
atggggagtcattgcggtgaagagtgtctgccgagagtatctctctgatgtcatgctctgggttgaggcaggtaaaggctgccagttagatgtgtaaccgccggtttgccttg

SEQ ID NO: 269786 - DNA, 144 bp, Homo sapiens; identical to SEQ ID NO: 217286
  chr16:88645407-88645551
  hypo

SEQ ID NO: 269787 - DNA, 39 bp, Homo sapiens; identical to SEQ ID NO: 217287
  chr16:88647117-88647156
  hypo

SEQ ID NO: 269788 - DNA, 185 bp, Homo sapiens; identical to SEQ ID NO: 217288
  chr16:88647913-88648098
  hypo

SEQ ID NO: 269789 - DNA, 198 bp, Homo sapiens; identical to SEQ ID NO: 217289
  chr16:88649040-88649238
  hypo

SEQ ID NO: 269790 - DNA, 258 bp, Homo sapiens
  chr16:88664686-88664944
  hypo
ggtgccccgcctctcggacctcacccgctgatgcccgccaacccttgggtgcgtgatgcctcttctttcattgttagcacatcagccaactgagctgtgtctgaatctcaagcttaagacaagtcactgtgccttagcacaggctcagtgccccctttcggctgcttctgtcgtcccgagtggaagcaggcctcggctttccgaggacggagtgaggcttggtggaaggagagcggccacacacggccggcttgtgtt

SEQ ID NO: 269791 - DNA, 493 bp, Homo sapiens
  chr16:88673630-88674123
  hypo
ctcctccttctggccgccggttttcatgtgctgcgatggcactggcttaattatacaggctttttaggatgtttaatgtctcagagggcgtgtctggcgtgtcttttcatttccagggttttcttggctgttcttggggtgcgatttttcatgtgaacttgggtgtcagcttgtctggctccttaaagaagctcattggtgtttttgctgggattgtgttaaatttatcagtcagtgtaggaaggactgacttgtgggcgattccgagctgcgctctcccagtgcaagaggcgtctccccattattcatgcacgctttgtgtcaggtttcaaaacccccatttattcatgcacactttgtatcaggcgtctccccatttattcacacgcttcatgtctctcaggcgtctccccatttattcacaggcttcatgtcacgtgtctccccatttattcacacacgcttcatgtctctcaggcgtctccccatttat

SEQ ID NO: 269792 - DNA, 225 bp, Homo sapiens
  chr16:88683207-88683432
  hypo
ctaccaagcagaacacgaatgaggggctctgcagtgtccagcacggctgcaccagggctaggccttgcatgggggctacaccctagtgaagcgcagtcacttttgtttggtctgaagcgcggcccaggctcgttatagcaggcacttcaccaccccaagcttcacgagagggggcacagtcgtgcagcgggaggagcgagagtcggccactgtttgggtgccatg

SEQ ID NO: 269793 - DNA, 240 bp, Homo sapiens
  chr16:88683702-88683942
  hypo
cctgcggctggagacggagttgtgccgctctctccgtcctagtttgccttttgaggcttacccactcctccacctgggctgttttaaaatgattagagcagaacctttcaatcaattctatcaaatgcatctgtagagctaagggggcggtcccttatgtgaaacctaatctttatagctaggccgatgggtgtgctcaccgccgaggcacgtcattacgatgctctttggctagtcatt

SEQ ID NO: 269794 - DNA, 36 bp, Homo sapiens
  chr16:88684167-88684203
  hypo
tccctggtaagttccggacaccgcagagtccgcacc

SEQ ID NO: 269795 - DNA, 64 bp, Homo sapiens; identical to SEQ ID NO: 217291
  chr16:88689149-88689213
  hypo

SEQ ID NO: 269796 - DNA, 38 bp, Homo sapiens; identical to SEQ ID NO: 217292
  chr16:88690944-88690982
  hypo

SEQ ID NO: 269797 - DNA, 124 bp, Homo sapiens; identical to SEQ ID NO: 217293
  chr16:88698502-88698626
  hypo

SEQ ID NO: 269798 - DNA, 163 bp, Homo sapiens
  chr16:88699819-88699982
  hypo
ctgcagtgactgtctctttacggccaggagcggacaggtgagcccaccacagctcaacggccaggagcagacaggtgaacccaccacagctcacctgtggactgggaccaggcgaggtcccctctgcggctgctcagcccccggccacagccctaggcacctc

SEQ ID NO: 269799 - DNA, 447 bp, Homo sapiens
  chr16:88702316-88702763
  hypo
ggtgctgcggcctgcgaccacctgagccaggcaggtgatgctaatgcgcctcagggcagccctggcactggagctgctatcatcccactgtacccatggggagagccgctctcctccctcctttttccattctgtgttatttacagagcaccctcctgtatgccctgcactactctcaaccctgggtacacagatggggctgccacagacgtggccctcaaggcgctcaggccgccttttggggagggccgtgaggggctggaatttttctgagacagccaagcgcccgtgcagagaggcctgtatcagcccagcctaaggcagggccaacccacacaggagcacctgtcctgctggggatgcagtgggttctgctgtgtcctggaaaaggctctacccacaccctaacccaacctgtgaacgcgcgctcatttggaaaaggggctt

SEQ ID NO: 269800 - DNA, 711 bp, Homo sapiens
  chr16:88711755-88712466
  hypo
ctgcacctttcccacgcacacacactagaagacgcacagcaaggggagggcagttgcctctgcgggcaggagggacttggctctatggacaaaaggatttaaataagcaaagtctgagggctctgtccacccagagacccccgcagtgagaggtggcctgcagccgtctgttccggagcccagggcaggcagagggcatttcacccaaggcctggccaggctgcgccctgtcctcccacccatccctggcctctcagagagatcactgtatcccatgggatgggcagccttctaacagggtgcagcagtcataaaccaaacgcaggtgtcggcagtttaagaaaatgtctgcgtcctggcaccgcccatgaatcagcgcgaatagggtttaggtgagaaaagcctgataatgggacccaagcgcaggcacggtcttcggccggctgcgtgaccccaggccagtcacagcacctccctgagcctccgcatctttgtctgtaaagtggggaccccagtacccctcccagggctgtggtgcgggttaatgaggaaatgcaaggaaatgacccgacacactagacacgccaaaaatggcagcagcaaccgctgcgtccccgccgtgctgtgagcacacgcccaggctcacacttgctcccagccttggctcagcctacagagccggcttcaagggccatgcgtgtccgagggtgt

SEQ ID NO: 269801 - DNA, 669 bp, Homo sapiens
  chr16:88722261-88722930
  hypo
gcctgaccacagaggcctcccggccacagcaggggtgacgcaggggcaacttccagatcccagcgggtggtggcgcccgccgcatgggagcggttcctgagcactcaaccacgcttctgttccttcagcccccgctgaccccaggagccaagcaaagcctggatggacgccttcgctcctgctcccggcagcagccctgactagggacagaggccaccgggctgctgctccacccgccccaccccactcaccacaaggatgagcacgcggagttcaggccagtgtgactcgggggccacttgccgagcgatgctgtccttcccgtcggcctgctctcccatctgccactccacaaagcccccatacaggctccggcaggcgctgcctgagccccggcgagccacttctgagaggtcactctccacgccgtagacacgggccagggtgtaggctgcaggcatgcggattcagggagggtcctcagagctgcctgcgctgtgctccctgacagctcaccgccccaggaacgtcccacaccccacggcaaatggggatttccagatgacagggcttctgggccatcagcctttgaggccagcattcaccggcccagccgtctgtcccccacctccgctagttccactctcggacactctctgttcacggcct

SEQ ID NO: 269802 - DNA, 192 bp, Homo sapiens
  chr16:88722960-88723152
  hypo
aaaaggtacctgcggcagagcaggaagccccatggaaggcgggagaaaggcccccgaggacacccaagctgggctttgagggtgggaaggaattttaaggctgtgtggggcagggaccgatgccaggacagagctggactccacaagacgcgccccctgcccacccagcacgggagccaccttctcccctcc

SEQ ID NO: 269803 - DNA, 510 bp, Homo sapiens
  chr16:88725339-88725849
  hypo
ggccagccaacctccgtccccgctccccattccttcatcgcttctactccagcatccgtgagtgcccaggtgcggatcgctcccaccgcggcctgcctcccctccaccttcccaaacaaaaggagcccagctctgagaactcctcacatctcactgctcatatgccccaggaacatccaggataaacccctttctgcccagcacggccatgggacagcacgtgaaatcaaacttccagaaagcccgaaaggaaacgtttgccctgggagcgctgcgtggtgcttcagctgaagtcttattccacggcggcttcgctaagcacaccatctgctcggttttgtgcgaggggaggtctctgaggatggcggacagttccaggggtgataaacgcggacacctggcagagaaccacgccctgcagctcgcgaggctctttcacgcacagcactgagcggccccccttgcaggcggacgccgctgccctgacaggccgggcgaacctctgctttc

SEQ ID NO: 269804 - DNA, 127 bp, Homo sapiens; identical to SEQ ID NO: 217300
  chr16:88738306-88738433
  hypo

SEQ ID NO: 269805 - DNA, 54 bp, Homo sapiens
  chr16:88756879-88756933
  hypo
ctcacactggcagacgccccgtggctcctgtctgattcacgtccaggttatgcc

SEQ ID NO: 269806 - DNA, 265 bp, Homo sapiens
  chr16:88757466-88757731
  hypo
gcaagggagagtgaccggtgctgaggggagcccttgggcctgcggcagatgaggtgagacttgagccatcaagcagcgaggcagcgtgcgtgtgagtctgcaggccacaggcgtgttcgtgcgtgtgtccatgggcgtatgcgtgtgggaagtcgcagtagctgctctgaggtgacatggaggctgggcatcagcgggtaagtcccgggcaccaggagagggatctgtggggtccccggcatcgtcctgccgagttggatacctg

SEQ ID NO: 269807 - DNA, 322 bp, Homo sapiens
  chr16:88776937-88777259
  hypo
acagcgcgtgtgtgcggcccactctcagatgtgtttacagcaggtgcacaaatcagaagctgggtccacagtgcgtgtgtgcggcccactctcagatgtgtttacagcaggtgcaccaatcagaagctgggtccagagtgcgtgtgtgcggcccacttgacttctgtccatttgctcaacctgcgtagaaacacagtcagtggaaagctgcatcttggctcagccatgtgtgacccgagggaagattgggaaaggggcgggggtttgccaggagaagcaaagggagcagcgtttgaggtggaggcggcggcccgcgcaggga

SEQ ID NO: 269808 - DNA, 31 bp, Homo sapiens
  chr16:88780638-88780669
  hypo
tgggtgtgtgtgggtgtgtgcggggggtgcg

SEQ ID NO: 269809 - DNA, 38 bp, Homo sapiens
  chr16:88780699-88780737
  hypo
gtggtgagctcaccactcgtgctcaggccagggcttag

SEQ ID NO: 269810 - DNA, 177 bp, Homo sapiens
  chr16:88780767-88780944
  hypo
ctcctcccacaatccggccacaggacaagtgagaagctggtgaagggcccccgggatggccctgctgctggcgactccggcccccgctgcctcctctgcatgtgtgccctggacgtcgacgccgctggtctgtgtttcatgctcttggggtgatgcggggagggagccagggagtgg

SEQ ID NO: 269811 - DNA, 38 bp, Homo sapiens
  chr16:88785880-88785918
  hypo
gggcctccagcaccacgggttctcgtggcagcagtgcc

SEQ ID NO: 269812 - DNA, 101 bp, Homo sapiens; identical to SEQ ID NO: 217303
  chr16:88787977-88788078
  hypo

SEQ ID NO: 269813 - DNA, 62 bp, Homo sapiens; identical to SEQ ID NO: 217304
  chr16:88788384-88788446
  hypo

SEQ ID NO: 269814 - DNA, 746 bp, Homo sapiens
  chr16:88791425-88792171
  hypo
ggtccagccagggccgccaccactgcctccgtggcggggaggagccccctggactgtcgggccctgtggaggggcagggtgagcatgaggcagcagtcaagccaccaggaggggtcggggctgtgagtgctcccgtcttggagacaggataggtggagacagacacggacacccacagtgacgggggccgtgtggggccatggggctcagagcccatgtgcgtggacggacagtcacagggcggccatggggcctgccagacagagggtgatcatgcggacaggacaggcgggctgggagccctgtgggacgtcacatgggcacagacgcagcacacgccagcaggcacagacatgctggacacggggccctgggtgcccgactccagctgcactcacctggctccaggccggggtccttggggcccagggtgtcctgggggcgactgcggtccacccggccctgcctgtgcttctcctgcttggcacggatacgctccatcctgtggtggggaaaggtggggtatgctgagcattggggggaggagccggggagtccccgccccagaggcacctactgtcttttcagctgggccagggacttctcctctatcctgcggtgaaagtcaatgctcttgaggttggcagcgttgtagagggcgaagcccctgtagggaggcggggatggggtgtgagcaccaggcactcgaccccagcaacatgggcagccgccgctccccgctcagc

SEQ ID NO: 269815 - DNA, 1397 bp, Homo sapiens
  chr16:88792744-88794141
  hypo
atggctaaggaagacgcggcgctgcagcagcaggaagaagaagcagacgctgtcccagatgatgccagcctcctccacaggcagcaggcagtcctggtctctgtccatcatctccttggctgcaaggcaggcaccggcaagggtcaggcccagggcccaggagcagggggcttccccacgccctcccccgccaccgtcctggccactcacggtcatagtagcccttgacggtgcatacaaggctgaagagctggatgacccagcagaagccggtctgcatctgctccacgaagacgcaggccaggagctgggggagagcagggtcagcggggccagcggggccccagggcggtgggtgcgggggggccggaggctcaccgacagcatgttcttggagatgatgacggtgacgttgtacagaatgaggcagtcccacagcacgaggcgggcccgtgtgtccctctgcagcagggccgtgccgaagagcagcaggtagaagcaggccagcaggtagcccagcccgaagatgctgatgcgggtggcccccgtgacaaacaccaccaccagcaccagccagaacaggtatcggaagacggccaccttcagcatgtcaaggtaggacctgccaggccggagcgtcagggcgggcgccccggccacccctcccagaaggttccccgtggagggtgacgtggaacccacctgcagtggataaagttgggcacggggttgggctccccccgcagcggctccaggcggtcggtgttgacgccagccatgcgctgccactcctctgtgcgctcagctgagaacacctgccactgctgggaggcgcacagcagcaggagaaagtcgcctgcaggacacaggagccgccgctgtgccacacggggacccacacgaggtgggcacggcgcataaatcccacctcccaccccaggcctgtcggcgtgcagccgctgggagcggacacacgtctgcctgggtgagtggccgggtgtccctgggggagccccggtgtgagggcatctgcacaagggctgccgtgcacacaggctgaggtctgcgtgcgtgcgtgcgaggtcagggcctgcaggccgccatgtgcctgaccacacctccgcccgtgcacgcctgtgtgcacacttgtgagcagatttgggggcgtgaatgtactctgagggtcctctgcagaggcgggggtggtggggggcactcactgatgaggttggtggagttgggggcccggaagaaatcaggcaggtacagccacttgatgagtgcggagttcatggggacggcccggctccagcgccagggataatctgggggaaggggtgtcatgtcaggaagggccgggcctgcctggggcctgagacacccggtccccacccgtt

SEQ ID NO: 269816 - DNA, 446 bp, Homo sapiens
  chr16:88794360-88794806
  hypo
atgataggacagtgcgtgtgataggacagctctgaaaacaacggccagaagctgcacggacgcctgcagccaggaaaagttcaacctgcagcaaccacagctgggaacgcgctgctcagcacgtgggaccgggatccatgcgacagcctagacagacctcagtgtgctctgccaagtgaaagaagccagacctaaaggccacctgctgggagtcctgctgacgtggcgttctgataggaccacgtgctggggatgggagcggccggggcctgctggggagggagccgtggcactgccggcccccggccacacttcctgggaggcgtgtgaggcagggagggtcggtccctaaggactgagggcatggatgtgactccacgcatctgcgaaacccacagccccatctgccacagagggaacctcgcgacacaaaaacaaagtgaccc

SEQ ID NO: 269817 - DNA, 34 bp, Homo sapiens
  chr16:88796722-88796756
  hypo
ggcgtggcagctcacgcctgtaatcccaggaggg

SEQ ID NO: 269818 - DNA, 437 bp, Homo sapiens
  chr16:88797397-88797834
  hypo
ccctgagccggccacgtgcacaaatgtgactccccatctcagaccgcagggtgctgtgtgccttgagcagacctgcagcaccaggacagccacgcaaatccagtctcacggcgtcagcaacgctaccggcctccctccggaacttcccaagagacaggagaggcgggggcggcttagacccaagacaagagactagagcaaacatcagaccagatcccgtctgaaaaccaaatggccacaaagaagggtgctgaggccggggctgtttgaatgcagaggacacgtttgacgatggcactgccaggagacgggaccacgggtgtggggctgtgggctcagacaccctcacccaggagacgcatgctcgaggcagcacttgggtgtgaggcatcacggccgacccgcacggggcccggagaggacgcagtgctccttgt

SEQ ID NO: 269819 - DNA, 220 bp, Homo sapiens
  chr16:88798778-88798998
  hypo
gtacttgaggcagccgagcagatcctggtccagctgctggcgggtgccgctggcaaacacggcctgggcaggcagcggggccagctggtgctgccggcggtagtgctcctggcgccggtacacgatggcctcgaataccagcagcagcagcacttgcaggtggttctgcggagggcaagggtcagggggcagccgggtactcgcccgcccagccgcccac

SEQ ID NO: 269820 - DNA, 201 bp, Homo sapiens
  chr16:88799617-88799818
  hypo
ggagggtcgggctgcgaatacagagttgcctggagcttcctcccgtcccagccctcgggggccggtacctcggtgcagttgctggaatactcctgggggttgacaaccttgagctggtacagcatcttacacacgatgatgacgcaggtccacacggtggacaggcaggaggccatgggccggaagcgtgggtagggcagg

SEQ ID NO: 269821 - DNA, 316 bp, Homo sapiens
  chr16:88800048-88800364
  hypo
gctccagcagccgccgcaggaacacctgcacgcgtgagaggacgtccgagaagccggctgccagctccagcagccgctcagccaccaggccccacttggctgcccctgtgatggtgtgagggtcagtgcggggcacaaacggggattcccgggtcccctgtgaggaagaggctctggagcccagaggggactctgccaacgccccccgagctgggacatggcacagcagactgggtggcagctgtgctctgcccgcccaacccaccttcaggcacctgcgtggcctggtggggagtggccacgcccagcccctcgt

SEQ ID NO: 269822 - DNA, 602 bp, Homo sapiens
  chr16:88800570-88801172
  hypo
gtgcacagctgtgtcgcaactcatgcccactgtccctgtgacctccacgctactgccatccccttggtatgagcaaatgccccttgggatctgaaggtggaagatgtggctcctgtccaactcccacctggctccctccctggcccaggaggctacacctctccagggccggacagggagggcggggccgcacctgtgagcccagcgcgggaggcgcgtgccaggcagggacacgtgctccatgtcggtgagctgcatgaagggcctgtggaagtagtgcagctgcaggatgcaggccaggaggaagaagccgggcaccaggatgctggagaagagctcggacacgctgaactgctccaggcccaggtcccccagcctgtggaggggcagcatcagcaccggcccggcccccggcagagccgctgcagccccggggaagtgcacggggtttcggcgcccctgccccaccgccccagcctggactcactgctcgtcggtgaagccagtgaggttgcgccagtaggcagggaagtcctggaactggaaggtgtagacggcgatgaggaccagcatggtgtaggccaccacgagccaccagaagg

SEQ ID NO: 269823 - DNA, 152 bp, Homo sapiens
  chr16:88801433-88801585
  hypo
tgcaacagcgtctgcgtccgcgtgggctctgtgggccaagccaggggcaggcgatggcatcagggcgggcaggcaggagggcaacccccgcctctggcccaccactcacctgtgtctgccacggtgacctccgtcagcgcagctggagactc

SEQ ID NO: 269824 - DNA, 992 bp, Homo sapiens
  chr16:88802331-88803323
  hypo
acaggggtggtgcccgtgccaacacaaggttgtctgtttattcagtcaacaaacgctcactgagaagctactctgggctggctctgggtgggcagaaggggacagacagacacatctgccttcttggcgctgccactcccccgggcaagtggacattgaacaggacgacaaccctgatgggtctgcgcacccaggcacccccggatgtggtggtgcacactcaccatggcaccaaggtccagacaggggtagcgggtgtgctccagccccagctggcgcaggctgacggggcccagggtggtgggcagctcagggcgcaggtccatggcccacacgtagcgtaggcagcacagcgtcatcccatacagcaggatgcagggcgagcacagcatggccagttggtggcggctgcgcaccgtccagatgaggcaggcccagagcagcagtacgaaggtcagccagctgtggtaggtgatgctccatacctgcgcggcagagagggctgcacagctgcccagcgcaccccacccaggcgatgccccacacctgcgcggcagagggggctgcacagctgcccagcgcaccccacccaggcgatgccccacacctgcgcggcagagggggctgcacagctgcccagcgcaccccacccaggcgatgccccacacctgcgcggcagagggggccgcccaccccaacccccacagccgcctaccatcatggcaatgagcgcgcacacatagctctggtccatgatgaggtggcccaggctgtggagcggagacgcctccctgggctcagcccgcttgggccgcactgcaggtggggacagcggtcagcttcggcaggttgatctgcaggcctccccaccctgactatgccctaaaatctgggccctgggcaagcacacagcaggagagacaggcccccggtgggctatgggcagaacacgagggctccggcaattgggctgacaccgtccctgagcgtca

SEQ ID NO: 269825 - DNA, 885 bp, Homo sapiens
  chr16:88805797-88806682
  hypo
caggtgtggtggaaagaacacggctgtcgtcagatgccctggctctggcctggctgccaccggcccagtgtccccatctgtgactcgggggctctcctggtggctgaggcgccaggtgcccgggctgagaccgcaggctgtggggctggacgataggccccaccccagctctgacagtctccgtgctctgcaggccgaggcaagtcacagcctctcggagcctattccccttctgtcaaatgggatgggggcttgacgggacagatgaaccagaccagtcctgtcctcacaggcctccagggctgcaggggctgctgggaggctccgaggccagggtaacagggagatcagggcaggagaggcccaggccctgagcccacccctctcagagaccacacagcagctgggggcgaggctggatcagaacgcagggcgccatcgctcaccccacccacagcctggccctggccctggccctgggaaatcttctgagcagagccgtgaaaaatgagcatttctgggagtggaaagaacagaggcagctgctgtgagagaacaggtgtgaggccaccgaggggcaggcccggccctgacttggggtatgaggccaccgaggggcaggcccggccctgacttggggtgtgaggccaccgaggggcaggcccggccctgacttgggccccacgtgccgcagccatgctgcagacgcccctcaccctcctctagcggccagcacccctcgggctggctggcacactccgtcgcatgcctgcaaacacgtgtgtgtgttgcccatatgtgggagtgagggtcgcccgggggccctgccaggccgggtcatggggcttctagatctttcggaacggtatcctgcaggtgcctggt

SEQ ID NO: 269826 - DNA, 80 bp, Homo sapiens
  chr16:88810535-88810615
  hypo
ccagccaggggccccgcgcccccgcctctgtacagcagggtcaccgtggggtgacatgagaacaccgacccagggaatgg

SEQ ID NO: 269827 - DNA, 382 bp, Homo sapiens
  chr16:88821278-88821660
  hypo
gagctgggggcatcgtgtgaacgaacgccccggcgtgccgtcccgctccacgcctgcacaggagctgaaagctggggccccaggcccagcagctgaacctcccacccgaggacacctgttgcgccccagggagaggagaggcctaaccagagggtggacacacctgcggccatcaggtcaccgccgcggccatcacgtcaccgccgcccccagtgcaggcacggggctgggtgatctgtcccgtacagtcctgtggcactagccgaggaccacgactgtcacctccacattgcagacgaggagatggagcaagcctgggatgcggcgaacagccgcccccgccgcccccgccatgtggctcgggcctagctggctgtgggga

SEQ ID NO: 269828 - DNA, 41 bp, Homo sapiens
  chr16:88823488-88823529
  hypo
aaacaaaaaatgggtggctggggagccgcactggccctcgg

SEQ ID NO: 269829 - DNA, 114 bp, Homo sapiens; identical to SEQ ID NO: 217312
  chr16:88826508-88826622
  hypo

SEQ ID NO: 269830 - DNA, 486 bp, Homo sapiens
  chr16:88826974-88827460
  hypo
cgaggggaacgacccgcctttaaggcagcaggacccagggagcccaggacaggcaggggcccgaggggagccacccgtcttcgaggcagcagcacccaggaagcccaggacaggcagggtcccaagcggagacacccgcctttgacgcagcagcacccagggggcccgggacaggcaggggcccgaggggagccacccgccttcgacgcagcaggaggtaaacggaatgttcctcacctacttggagcccggccagcagcctggggcactgaggagcttctggaccatttaattagctcggtgtccaggtttaattagctcagtgtccaggaaactcagttttatggctcatctgacctacacggggcagggtcctgcaggcctggtggctgctgtgggctgggcacccaccgcacctgccacagccatctgctctcagacctgctggcgtggagagtcaggacaccctcccggacacactcagcc

SEQ ID NO: 269831 - DNA, 268 bp, Homo sapiens
  chr16:88831171-88831439
  hypo
aaaagaaagaaaaaaggaatgcccctgccacggcctgcctttgactcccagcatcatgccgtgacctcccaaaacgaggactccgccctcggcaccaggggcagacactggcgaccactccaaccatggccccagcaactcaccccagagaggcaacaagggcttcctaagaagcctggccattgaaaacctcccggtagccgcctctcaggagcactgccttctcaacacagctacctggccctggcagacccggctgcccactgtg

SEQ ID NO: 269832 - DNA, 105 bp, Homo sapiens
  chr16:88831981-88832086
  hypo
ccaggtgagcacctcgtatagctggcaaggggctggacagcagcgcctggagcctggctccctggtctctagagagcccaagtcgttatctctaatttttttttt

SEQ ID NO: 269833 - DNA, 65 bp, Homo sapiens
  chr16:88871937-88872002
  hypo
ggcggagatgttccgcagcatggacaccatcgtgggcatgctccacaaccgctccgagacgccca

SEQ ID NO: 269834 - DNA, 943 bp, Homo sapiens
  chr16:88883069-88884012
  hypo
tctcctgttacatccgccggcccacgctgtggctccctggctgttcagagccaccaccttccttcccacggcacggcgggcacccagcggctcccacgctgcagccgggtctggccctggaaagaggcttcagctgggccttttcgcccgcacagcaggagcccaggctgaagtctgcagctgccgaggggccttcttcccgaatcctgcgcggcagatccaggggctgtgggcagccacgcccagcccgtgtaaacaggtgagcgacggcccaggggcctcgaggctgggctcggccatctccactgtgctcggtgggctctgggcacccaggagcgacaccgcagacctgtgtgtggctcgtttttgccgactagagcgagggccgcacgtgtcccatctgaaggagctgtgaagacctgccctgctgggacccacatcagctgtgctgggaaacaggcctttgcggccactgcacacgcgggatggctgggccgtccacatgccaccctatgggacccccaagcaggggacagaaaagctgctcctgagaggccctgactgctgcggcccccagggctggacaagacgacgacgcatcctttgtggcctgaacacagacttcagtgaaactttggaggcacgtctgtgcttgtgtttctggccgatgctggcgtgatgaggccgtttctctactggaggtgaacaaggcctggtcttgtcaggctgcacggaggtgctgctctgggtgggtgcctatgagtgagatcaggtctgatgcgaaggtctctggggctggcccagcatgaaggaggcacaaatgagaacctcgcaggtgggccctggggccgccgccactcaacagtgcccaccagcccacccgggacccaccgggcagtgccgttcctgcctcggtgccttcagagcccgggagtttggaggt

SEQ ID NO: 269835 - DNA, 295 bp, Homo sapiens
  chr16:88884238-88884533
  hypo
tgcctcccgaatcccggacgccgccgcgtgtgctctgaggcacgagggcctcaccactgacggaggcggggaagcacgcctgcctctgccctgtgctggccacggttcatcctgggccccgggtgggtggctgcagccccggcaaagagacggccgcccacacaccagccacttaccatgaccgcccagttgcacacgttgagctggggctgcgcggggaccaaggcctcctggtgctgctggacgaccgaggtgatcctgctgagggcctcctggtactcggcgctggcaaagc

SEQ ID NO: 269836 - DNA, 157 bp, Homo sapiens
  chr16:88892177-88892334
  hypo
acgcagctgggcaccgtctctccccacagtgaccaaccacttgtgccaggtctcgagaggggacaagtgagcaaaactccctctacccggccccagatagccggaggcggcagctgccttgggccgtccccaccttgcttcccgttgagcctttgga

SEQ ID NO: 269837 - DNA, 254 bp, Homo sapiens
  chr16:88892588-88892842
  hypo
gaacaggggtggggcgggcaggggcggcgtgtgcccaggtacaggcaggcaacaggggtggggcaggcaggggtggcatgtgcccgggctgcaggcagggaacaggggtggggcggacaggggcggcgtgtgtctgggtacaggcagggaacaggggtgcggcggacaggggtggcgtgtgtctgggtacaggcagggaacaggggtggggcgggcaggggcggcatgtgcccgggtacaggcagggatgaggc

SEQ ID NO: 269838 - DNA, 66 bp, Homo sapiens
  chr16:88894327-88894393
  hypo
ggggcaccctcgccgcctgcagccagctcctcgctagggcagacggcgatcgccagcttctccaac

SEQ ID NO: 269839 - DNA, 46 bp, Homo sapiens; identical to SEQ ID NO: 217317
  chr16:88897188-88897234
  hypo

SEQ ID NO: 269840 - DNA, 682 bp, Homo sapiens
  chr16:88898119-88898801
  hypo
ggagagcggtgaggccgagcacggggtgcgtggggaggagagcggtgaggccgagcacggggtgcgtggggaggagagcggtgaggccgagcacggggagcgtggggaggagggtggtgaggctgagcatggggtgcgtggaggctgagcacagggtgcgtggggaggagagcggtgaggatgagcacggggtgcatgggggaggtggccagtgaggggcgcacacaccctgggatggctgcaggcctggacctgctgcccggcagaccggtggacgctgactcacctggcctgcagtgacgtgccctggccaccatgcgagggcaggctccctcatccctccttcaaacgtggtctgcttcccacacagaaaggggccgttgctgccacctgggagagaggggcccttgtcaggccactgggaccagatgtccccaggccctccccctccctccccactgagtcactgagactggtcatagggacaaagggcccggccaaggcactctggctggagtgcatgatccgagcctcggggtggctctccaggggctcatctgagatgccgcggctgcaaagtctcctggagaaagtggggacatcatgcccactgaggaaatggaaacacaaccatacggtgtcagcaagactcagagaggtacactcccgcagcagaggccct

SEQ ID NO: 269841 - DNA, 263 bp, Homo sapiens
  chr16:88910570-88910833
  hypo
cccaagcaggaggacgggtgagcacagggcaggaagcacggaggctggggtgatgccaggaggccggggtgatgccaggtgtgatggcaccagcacagcaaatgcccacggcaaactccggaggtgagtggcagcggcggtgttcactgaaaacttcttcaaattttacagtgtgtattgttggaaaaaagtgcttttaaacaggcagtgggccaggactttgctctagaaggagaaggggagggcaccgcctggggctttgg

SEQ ID NO: 269842 - DNA, 239 bp, Homo sapiens; identical to SEQ ID NO: 217319
  chr16:88927321-88927560
  hypo

SEQ ID NO: 269843 - DNA, 149 bp, Homo sapiens; identical to SEQ ID NO: 217320
  chr16:88933926-88934075
  hypo

SEQ ID NO: 269844 - DNA, 161 bp, Homo sapiens
  chr16:88935301-88935462
  hypo
gtgagcggagggtaacgttagctctgtcctttgtcccatacctgggaagataagctgctagatcacactatctgggtgggatccagcagaactgtttcagagccaagatcttgggacccacaaggaatttccctgtaagcgcgatgcgaggaggcacaggc

SEQ ID NO: 269845 - DNA, 52 bp, Homo sapiens; identical to SEQ ID NO: 217321
  chr16:88942321-88942373
  hypo

SEQ ID NO: 269846 - DNA, 527 bp, Homo sapiens
  chr16:88943135-88943662
  hypo
tgtcaggaggtctccgcgcggaatcattaggtagctgaggcaggtgcactgaatgcggttttgttggttctgtgtcttctttcggagaggggcagtagcagcagtgactaattggtcggctcccccaggtcaggcggggcgcagtgtctggcaggccaggcatcggaggccaggcacagcatccggtgggcctggagctgggtggggttggcacggtgctgtgtccggcaggccaggggccagtggggtcagcggggcacggtgtccagtgggccaggtgggctgggggagccggggcgagaaggccccgcagagccggcttcgctggggctggcagcacccacaggcagggaggggcccaggctgtgggcggcttcgggcggtccaggcaccgggtcggccaccacggctgtggggccctgcaggctctggccacacacgtggtgatgcttctcccagtcccgatgctggcagaaggacccgcagtagcgtgccgcgttgcagccgctgcacgtctcactggcttt

SEQ ID NO: 269847 - DNA, 87 bp, Homo sapiens
  chr16:88944985-88945072
  hypo
ggagccgggcgcctcggacgccacctggggccctcacagctctcctggatcctcctgttctcacaggctagagaacacgggtttcag

SEQ ID NO: 269848 - DNA, 856 bp, Homo sapiens
  chr16:88945516-88946372
  hypo
ctgataaagcacagtgtgggcggggatggcgtgcctgctgcaggatgcccgtgacaactgtgctgatgccacgtggaggctcagaatcctcatgggggtggcgtgggaccgcacgggagccgaggcaggggatgggtgtcagcgtggccgggtggccctacctcgctggagtcctcctgctggttgatgaccgtcagggcgtcctcggaggcctgccgcttcgcctcggccagggcccgctccatcttggcacgctccgtggtgatgagctcgtgcgctttgcgctccgcgtccgacacggctttctgcagctccgacatggcctgccgcttcacctcattcacggcctcttctgcaaaggacatgggcagggctggcggtcacatgggccatcccagatgggtctctggacttcctacgcgtggccacaacctggggacaggggctgtgtgcagctgaacacacgtaccatctgtgcacacaaaggcacatgttgatggggctgtaggcagctgaacacacgtagcatctgtgcacacacagacacacgttgatggccctcatgcctgtgcagacaagtgcatgcaaataaacacaggcatcccaggcatgtgtgtgcaaagctgggtcacgtggtgtcacaagtcaaagcttgcactctaccgcagcggctccccaggcactgcacccctgcagggcaagggcgaggcccaccccagggcctggtcagccaggggcgcacccggaatctgcattcctaacgcgagccgggggagctgctgctgacctgaagcacttggataactctgccgttccgccttcacctctggccccacccagacgcagcccaggaagc

SEQ ID NO: 269849 - DNA, 307 bp, Homo sapiens
  chr16:88948324-88948631
  hypo
tgaggagcccagttccgggccgtccccgaacacgtcctgcctcaaagaggcctcggcactgcttttgcccacacttcttgcaagactcaggatagactctgggaagagccagtgagcagaaagtaagtggagggaagcaaggcccgccatgagggttttaggaatcctcctccctgggcctctcgagatgcctgggctgcgctgacagctgggaggaggggggctcaggtgaaggacccagccgctgcgcagggacggcgcaggccacacaggagggcactgagctcaggggcgcccacacagccct

SEQ ID NO: 269850 - DNA, 87 bp, Homo sapiens
  chr16:88950305-88950392
  hypo
cacgcttctggggctgaggtctccctcttggggcccttttcagcccctaaagatctcctagcctccgaacctgaaatggctccccca

SEQ ID NO: 269851 - DNA, 451 bp, Homo sapiens
  chr16:88952174-88952625
  hypo
gcccactggggtgtccgcccgtgcagccaccaagcctgctggccctagtacacctcgccacgctccctcagcccgagagagccggccgggctggctgcagccccagaggaggttccctctcttacccagaggggagcagggtgagccgcgtgtccacggcacccccagcccagatccccggagcccacaggtacctgtcgggcgtcctcctcttgccgttctcgttgacttccagtagcagctctgaggagtcgatgggggaggaggcgctggcgtccagcaggagctgctcatgctgggccaagtactgggcgggcgtctgcttggccaggcgtgcacagtgcaggagctcccgctgcagcaagggcaggtttgcctgtggggtggggaaggagggcctgggtagcatgcaggggtgcacagccctgctcaggtccgagcagagggggcc

SEQ ID NO: 269852 - DNA, 172 bp, Homo sapiens
  chr16:88955196-88955368
  hypo
actggccccgggccccgggtgggggcacgaggtgggctggccctgagctccagctaccccacacaggccgtgggatcccctgtgtaccaaggggagactgaggtggacacggccctcacgagagccgggccgcgggcggcacctgctggggcgtggccgggggacaccaggg

SEQ ID NO: 269853 - DNA, 987 bp, Homo sapiens
  chr16:88956088-88957075
  hypo
cactcctcctcctccagggacgacaccccgcgattcctcctcctccagggacacttcaaatccctggacgacgccccgcgattcctcctcctccagggacgacgccacgcgattcctcctcctccagggacacttcaaatccctggacgatgccccgcgattcctcctcctccagggacacttcaaatccctggacgacgccccgcgattcctcctccttcagggacgacgccccgcgattcctcctcctccagggacgacgccgtgcgattcctcctcctccagggacgacgccccgtgattcctcctcctccaggggacgtttcaaatccctggacgatgccccgcgattcctcctcctccaggggacgtttcaaatccctggacgatgccccgcgattcctcctcctccaggggacgtttcaaatccctggacgatgccccgcgtgaatctagaacatgcctcacctccctgtagtccccgctacctgggaggctgaggtggaagattcccctgagcccgggagtgaggccccgttctttccgcgtgtccctccacgctgtctcctcaacagcctgaggatgattccattttgcagatacagaaaccgaagcacagaggaactggcctcacccaggggccaacagctgctaagtggcaggctcgggctcaagccagggagcatctggtctggtctgtcctctggacccccgaggggaggcctggcccagcagagatggagcccacagcagtacgggcagtgctcaggctgggcccgaaggtgtggccaggctggcagctcccaactaagctccacggaaccctgaccccaacacgtgctcggcagagaaggtcacatggtcagacacatttggggaacctttcctcagctcctgctagagatgtgcagccgtcttggggaaatggagacccgcagagatggcagtctgactccacggcactcccgtgcccgtcccgtctgtgtg

SEQ ID NO: 269854 - DNA, 619 bp, Homo sapiens
  chr16:88957369-88957988
  hypo
cctcagactggcatctttaaaaatgcaggctctgattcagcaggtttgggccgggccgagagcctgcaaagctgacaagccccgcgtgctgccaccctggtccacggttgatctgggtgtgaccatctgacctgctttcacctgacacctcttcatccatcggcctgcgcagccacagaagccccttcccgcctgtctaccgccctcacctcccgccctcacctctgctctctccaccccacgtattctgttccagtcacactgacccctctgctgttcctcaagcacagcgggcgccccatacctcagggcctctgcacgtgcagttactgctgtctggaaaaccctgcgctggctctgcacctagctccgccctcatcctcagccctcaccaacacgcctccaagcaaaggactttcggaatacttctccaccacgtgcagctgcagatttgagagtggctgtggaccgaacgccttcccaccccagggtgctggctccaggagggacctgctgcatgtcctgggccctatccccgagccttgcccccacactggcacgtcgtcagtgctcaaaaatcacccgtggagtgagcgagcacattcggccaacggcaacc

SEQ ID NO: 269855 - DNA, 763 bp, Homo sapiens
  chr16:88958253-88959016
  hypo
aggctcccgcagcacgggggacgggtttcgcattaccttcaggaagggaatgacaaacggccgcagagggaagttggtggcctcctgaagcttggaatgaaactcctcgatcgtcaatgtcgagttctgcaggggagaaaacccacctcacatcagcaccgctcggcatgtgagccagcgccgacccacccatgcctgaggaggaggcttccgtgttggaggcaggcaggcagcccaggagctgggcacggcctgagagggtgcaggtggcatcgtgggagcgggtccacgcccggttgtcagcgtggagcccatgtaaggagtggccgtggctgcaacctcattaaacggagggaatatgcatgtcccaaggccccggctgtccctgcccaactcaccaccaggcccagcaccagtgtgcgcacgcgctccccaatctctggggagatgtcgctgccaaactgctgcagtgtggtgaggaagcgcttgagcttgctgagctgccgggccccgcaggctgggggcaggtgctgtgtggacaaggaggctgtggacgaggtggccgggccattgctgaagccgttgggtgtgcacggtgcaccattgatggctgttggtgagtggctgctgccgttcatcactgcaggagggaagcggacatgaggacacaaaggtgatggtgacaacacaacccagacggcggcgacagtgagggaagcagcgactaaggtgacaatgtcaaaagtgacggcaacaatgatga

SEQ ID NO: 269856 - DNA, 279 bp, Homo sapiens
  chr16:88959983-88960262
  hypo
gacacgcagatgcccgtgcacacaggccagtgcatgttgaggacaagcaggtgacataaggaacagctgatgagcgcgctgcagggccgcctgttggccactgagacgtgactgcctggctggccctgctattggggtcagtgttccaggggcctggcagacatggggctgctatggaaagtcccagggccgggcctcaccccttttctcaggtgacagagctaaggccaagcctcttgcaaggcggccagcgcacccctcctgcgcctgggacacccg

SEQ ID NO: 269857 - DNA, 385 bp, Homo sapiens
  chr16:88961769-88962154
  hypo
ctgcgaagtgcgcccgggtcaggaagctgtgctgtggcccgggctgggctctacacctgcacacaggctgcgcggttatcacacacatcccatgcggcaaatgggctccgaggaaccgaagacacacagcagggcagcccggctcccccagattgcctcccgtccccggcaggccccacacaccgagcaaacagcgctgggcacagtggcacaggggggaggccggccctgtgctctggatgttcttggtggagcggggggaacaggtgtgcccacgactgcctcccccggggcccagcgctcactctgctctcactccagcctgggcctcacagatacccactgcaggggctgtgggaggccaggagggcgggggatgctacag

SEQ ID NO: 269858 - DNA, 298 bp, Homo sapiens
  chr16:88962658-88962956
  hypo
tgttgctggggccgcgaacctccacacgctgttctgagcggctgctcccctcaaccgggcaacctgcacagggggtagcctgtctgcgcccctggcttgaacgatcttagcagcgccttcctgggctcaggatggacgcaccggccctctggagcgcgcggcaccgataacggcgtcgtattctggggctttccctcttctggggggacagtggacgctgacacaggatgcaccgagcccctggtctctcgccttctgagcctctgtccggaggaccccaccgcgctgccgagtttcc

SEQ ID NO: 269859 - DNA, 575 bp, Homo sapiens
  chr16:88963178-88963753
  hypo
gggcccctgcccaccgccccggccagcctgggcctggccctcccttaggtgcgcttaccagccttgccccgggtgcctggtccttccggcggcctgctcgccctcgcctgcccgcgcactccctcccgcgctgctgggcagtctcagcagctaaagagacgccaaaaataaccccggcacaagcgctttcattcccacgacaggtgtgttcctaagttagaccgcacacgtgtccccagctgaggattgggggcacacgcgagcacccccgcggctcccccagcctcagagccttggtgggggggtcagatgcgacagaggcaccctaacgcagcccctcctgtcacccctgctccttgctgtgggggctccgggatctgggattcaccaactttgccatccataagatcacagagtggatgacaagagccactgtccaggagctgcacgccaggcgcgagtgcgtggccaggcccatcacagaataatggctgtgaaaaggacagccctgtgcaacagaaacaacgcacagttgttctgctgccctcgttcttagagccgggagtgccacgaca

SEQ ID NO: 269860 - DNA, 90 bp, Homo sapiens
  chr16:88965557-88965647
  hypo
cggccctcaagtctccgttcagactcagtctcccatcagcttggctcagaggccagtccccggggaggagcctcccggcagggctctgca

SEQ ID NO: 269861 - DNA, 629 bp, Homo sapiens
  chr16:88966223-88966852
  hypo
tggtccgtcctgagcgtttcctcccccggggctggggtatactgcaaatttaacacagcagcggtctccctctacctatgtgggctcggtgtggtcgcaagctgcctggtagagagacggcccgtggtttgtaccagaccggagggctcttccgaagagagggaagggtgatcccagcccggccacatcgccgtgtgacaaggacatgtgagaaaaagcccagccagcctctcactagaaaccgtggccagctccgcagagccaggacctgcacgctgggcccgccgtcccccaggacctgcaaaatcgtgagtgcggcgtcccgactctctgaggcagggccggccccgcgggtgcagggagtagccgttaggctgtttggctcctactgagtgccgggcacatttccagctgtacctgcctctgggcggcacacctgggggcaccccattgctgggccaccccattccccaaccaagtcgggaggctgactcggagccaacatcctacaaacagggccgcaaatctgctgcctgaccgcacagccagtgctctctccagatggaggggagatgatggccaaagccctcggcggagcaggcccccagcctcagcggcagagccaggga

SEQ ID NO: 269862 - DNA, 297 bp, Homo sapiens
  chr16:88968001-88968298
  hypo
gcgtcttcacctccgctggggagtccggcatcgctgaggccttagctttcctgtccactggggctgcgaccaacggagaaagaaagagtcggtgaagcaggctaagtgcaaaggccagggcccgcagccccacggttcccagcgaaggccccactgagtgtccgcccagcgctggggcagtctgccccaggtgtcctgacaggtggctgacgtcccacgtgcaggatcacgggggcagaaccaggccggaggacgggcttgggccagctcatctgaggtggccggccaggctggagc

SEQ ID NO: 269863 - DNA, 173 bp, Homo sapiens
  chr16:88968647-88968820
  hypo
caggccatttagggcggcaaaacctctattttaaccgtcttctgccccggtgattcacaggacagccaagacagaggcggcattgacttcaggatggccgaggcctggctgcgctgggcgcagcccccggcaggtggtaacgccaggacacgtgattaatgagaacctgcagc

SEQ ID NO: 269864 - DNA, 80 bp, Homo sapiens
  chr16:88968850-88968930
  hypo
cctgaagtctgagaagctccacccagggccagctgtgtccggagacggcaggaaaacgctcaaggcgctggtgggccggg

SEQ ID NO: 269865 - DNA, 170 bp, Homo sapiens
  chr16:88970443-88970613
  hypo
ggccgtcatgccacggcgcaaggagtcaccacagccgtcacccaacaagggctcatggccaccacctgcgtgctcacggccaccacctgcgtgctcgtgacactctggatcccgaagctagagcagacagtgccctgccggcgccctgagcagtcggggacttcatgtgg

SEQ ID NO: 269866 - DNA, 588 bp, Homo sapiens
  chr16:88978019-88978607
  hypo
gggaatggggatggaattcccgcagaatcacggagggacgaagtacatgagctcacgaaaagcgtctagaacagagcgcctggccgctcgccctggccacccagctgtcatgcttcgggctatctgtccggccacaacggccgcgtggagctggtgcaggtggggcttgtctttggcactgtgcccagagctggcccataggtgacactgagcatcagtgttggggaaggggacccatcggagagcctctggggcacagtgaagaccccccctcctgcctcgcagctgtgtgggggaagctctgttgcccagagttggctggcagggcccagactgcccaccggctgccatcaccaacacgaacaggtacccagggcatgccttcagccggcctgggtgcagaggtcccgtctgtcacagaagtgctgctgaaccgtagcagacgaaaatctcacaaactccctccgggccccggcccagggcttcccgttggaaggtgcacaggccggcctctgcctgcaggctgggcccacccgcgcctccccaacccactacgtggctccaggcggacctggccttgcctcttcc

SEQ ID NO: 269867 - DNA, 199 bp, Homo sapiens
  chr16:88993193-88993392
  hypo
ttgggctggtgcctcggtgcaccgtgggctcccaggagctcacaaggccttccgtgcctgtcccttgtgccccacctcacagcgaggtccttgcagcagcagggcagccccgtccggcccccgctgcctccctgccctcatctcctttctctgagacaaggctcctcactggtcctggaggtggcggcacactcctgcc

SEQ ID NO: 269868 - DNA, 586 bp, Homo sapiens
  chr16:88994147-88994733
  hypo
gctggccgtccgcccgtgcggacacccgggagccaacactgacccgaagacaggtcagccagacttcccacctgctccctcaggaggtgggatccggtcccctcctgctgggctgcacgggccacgatggaaaggcgcctcgtgacacgctgcggtcagctcagaaaagccgcagatgctgacacgggcaaccctgcccagtgtggggcgtcctctgaagtgggagccgcagggagggcctcacggaggcctctgtccacaggcagcggctcccggcacccaccgctgctgaccgagcccctggcacccccaagccgagcctttgaaccccagcagggaaggccacctggccgagaccctggccaccacggggccatcactgtcccacggggctctgttccgactccttggcccgagggtctctgagcaccaccagggttgcctcacgcctctgagtttggggtggtttgttcggcagcactggggcccggggcagcttcttgcccggcgtgtggcacagctgtccttgttgggggcgtttctgggatcctgtggtttcggggacgctcccctactccctggcctt

SEQ ID NO: 269869 - DNA, 173 bp, Homo sapiens
  chr16:88997823-88997996
  hypo
cgctcacaaggaccggtctgtggcaagtgacaagtgacctttccaacccgaaggtctcctcggcagaagccccttcatgtgccaaggacgagccagaggtggagaagggccgtgggccggccccgtggacgagccagaggtggagaagggccgtgggccggccccgtggatga

SEQ ID NO: 269870 - DNA, 38 bp, Homo sapiens
  chr16:89004837-89004875
  hypo
tggagtgactgtacctctcccggcgtcggagacgggga

SEQ ID NO: 269871 - DNA, 48 bp, Homo sapiens
  chr16:89004905-89004953
  hypo
gacgcgacagtgcgtgtaagccccagcgctgttgtaggctctaagacc

SEQ ID NO: 269872 - DNA, 403 bp, Homo sapiens
  chr16:89010085-89010488
  hypo
tgtgcggatgctcccggaacgcccattttacaggtggagaggctgagcctctcagccacaccgacttcctgctgccttatccaagaactggtttcttgccctggatgcggccaagtcacagctcctgggcatttcgaggggacatttaaggaggagactaccagccctatgtgaaagatgtctgcagtctgtccgacaaggccagcgtcacctgtgcgggagacagaccacgggcgagcaggacctcggagggccacactcagggctcgggagggggcagagccgtggaggagggagctcgagggtgtgcccatggagctcccagtgtgtcgctgtctgtagaggcaggagctcaattcacttaaaagaaaccaccacggccgggtgcggtgggtcacgcctg

SEQ ID NO: 269873 - DNA, 143 bp, Homo sapiens
  chr16:89012313-89012456
  hypo
gaagcgactgagaccgccttcaacaggtgaatacataaaatactgtggcatatgtagacgatagagtgttatccatgacaaaagtagtgagctatcaagccatggaaagtgaacattgatggccgggcgtggtggctcacacc

SEQ ID NO: 269874 - DNA, 294 bp, Homo sapiens
  chr16:89016745-89017039
  hypo
cccctggaccggcaccgccacagagggtcagagtgttggcacctgtcttccgggtcagttcacccgtcccctggaccggcaccggcacagagggtcagagtgttggcacctgtcttccggatctgttcacccctcccccggaccggcaccgccacagagggtcaggagtgttggcacctgtcttccgggtcagttcacccgtcccctggaccggcaccgccacagagggtcaggagtgttggcacctgtcttccggatctgttcacccgtcccctggaccggcaccgccacaga

SEQ ID NO: 269875 - DNA, 333 bp, Homo sapiens
  chr16:89025782-89026115
  hypo
gaggtggagggaacacgcatgcacgcccagggctggaggcacgtgggtgttcagggcctgtgaggaggcccgggcaccaaggcagcacccagcgcttacagagcctgcaggtcttggacagaggtgcaggcagaggcaggaggtggcatgggtcataccacctgtaaaagccaggcgcagtagagaatgttctagaaataaatgtgatgctgcgattgcctgagagggaacccaggtgcaggagagggaaggtcccggggaaaccctccttttcctcctccttcctcccagcagctgggaaaggcgatggagagaaaacgggagcagggcaga

SEQ ID NO: 269876 - DNA, 200 bp, Homo sapiens
  chr16:89027649-89027849
  hypo
cgcacggggagtgacggaaccttctgtaggaactgacacacagcactggagatttccactgcatagtaaccgacactcacccctgggcattcccaccacatagtgactgaccctcagcactgggcattcccactccatagcaactgaccctcagcgctggacattcccactccatagtaaccgacctcagcgctggacat

SEQ ID NO: 269877 - DNA, 166 bp, Homo sapiens
  chr16:89028919-89029085
  hypo
gcctgtcgtgagtcccgaaggagaggcccagggcccaggccactctgcaccctgagggcacgtggtggggccagatcaccaaagggcacatttgggaggactgaacacagatgccgagtcccctggaccacgtttcggggggagacagccacgtagccggagccag

SEQ ID NO: 269878 - DNA, 45 bp, Homo sapiens
  chr16:89055410-89055455
  hypo
acccactcagtgtctcgtgcatggcacacacgtgtcctgcgggcc

SEQ ID NO: 269879 - DNA, 53 bp, Homo sapiens
  chr16:89072218-89072271
  hypo
aaatgccacgggtccgggtgccacgagagtgggtgccacgggagcaggcacgt

SEQ ID NO: 269880 - DNA, 277 bp, Homo sapiens
  chr16:89072550-89072827
  hypo
aggcaggagtccaccgccagtgccaaccaggggcctcggggcaccgctccaggagcaaccccagagtgcatccacctcctcccgggtgggccacgccttgaggtgctgacggcgccccaaactccactccccggaatcggcccaggctcagccacatcggcccgggctcctacagaagccgacctggagacgaggaactgacctggagacgaggaactgacctggagacaaggaactgactgcaagtggaccatttgcagggcgaccccaagggcag

SEQ ID NO: 269881 - DNA, 164 bp, Homo sapiens
  chr16:89089219-89089383
  hypo
tggaagtcaagtcacgctctgggaaagaagagtgggaagtgctgcgccagcctaacccctgcccagagactcacatgtggacgcaggatcttgtatgtgcacacacaccctgcatcctgcgaccgacacgcatacacacctcccaccacacccggcaaattttt

SEQ ID NO: 269882 - DNA, 224 bp, Homo sapiens
  chr16:89089443-89089667
  hypo
tgctcacatgcacccacagtcacactcacacacacgctcacactcacacgctcacaggcacgtcacatacacacactcacacgctcacaggcacagtcacatacacacactcacacgctcacaggcacagtcacacgtgcacccacagtcacacacacacacactcacaccctcacaggcacagtcacatacacacactcacactcatacgctgacaggcacag

SEQ ID NO: 269883 - DNA, 108 bp, Homo sapiens
  chr16:89103370-89103478
  hypo
gggcctgtgccctgcgcagtcctgagctcgtctgcgcggggctgctggcctctagcaaggtgcaccggggtgtgaggtgcaggcggagaggtgcgggcaggctagggg

SEQ ID NO: 269884 - DNA, 154 bp, Homo sapiens
  chr16:89103808-89103962
  hypo
tggcttcgacatgacgcagggtaggggggtgaatgtgctttaaggaggccccggccctaggtggacacaggcgcacagagaagacagggccccagagggtctcagtgatctgtccaggacctgggcccgtgggctgtggcgccgaggctggaca

SEQ ID NO: 269885 - DNA, 421 bp, Homo sapiens
  chr16:89109380-89109801
  hypo
agtgggcccaggcatgagggcgtcttggaactcatctaacccaggtggcaaacaggggccgcccgactgccagggagaattgacgagcagtggcgtcctggaattcccgtgaggtggcgggagaagattctatgattgatccgtcatgcctgccgtggctcaggatgggaccggcctctcaagctacagatcaagaaactgagaagggagtagcctaaagtcaccatgagagtggccaggtctgggccggcctggcctccaccccgcagagaccatctcagctctgctcgctcagcctcgtccccgcctctgacatccttccattcccgctcatggccctctctgtctgccaccaccctccccgccatgggtgcttaaagcccccggcagctgccctcccgtcccccaacatggcccttcc

SEQ ID NO: 269886 - DNA, 102 bp, Homo sapiens
  chr16:89115645-89115747
  hypo
ctggtgggggctggcgtgaatacctggagcgcaaggctgggcaggttttgctcaacgtcatgaagtctgatctccacgcacagaacccggcgtggtgcccac

SEQ ID NO: 269887 - DNA, 32 bp, Homo sapiens
  chr16:89119942-89119974
  hypo
gttggggacagagccggcggtcatagcctcca

SEQ ID NO: 269888 - DNA, 683 bp, Homo sapiens
  chr16:89120181-89120864
  hypo
tgcagagagaaggccgggcgggtgctggggggcccatctccccgagccttgcaaatagtgcagtgcagggagaaggccgggcgggtgctggggggcccgtctccctgtgactcgtggacggtgcggtgcagggagaagggcgggcaggtgctggaggactgagtgaggcccctccaggatggctccctgcccctccatgcgctgggtcctcgggccaggacaggttgcatctgggtcaccagccccctcacacccgctcgcctgaaggcggccgaccctggccactggtcgcctggtggcagaagcctcttctgggcattttcaggcaccgcaatgctcttcacagcgttaactttttttttatccaaccaaggacaacctcagcttcagaaagccctggaatgccccacaatggacaagcaaggaacaccctccgggacggaccgcgagactcggccctgagatgcctcaataccctggacaccccagaacctcagattgcgtggctggggctcctgcggccaccctgctccccagaacctcgtcgtcttcccggtgccctgcggcaggaacacagggctggagccgacccccagggcatggctgggagctgcgggagtgaacggggagttaacccccagggcatggctgggagctgcgggagtgaacggggagctgcctgt

SEQ ID NO: 269889 - DNA, 137 bp, Homo sapiens
  chr16:89122410-89122547
  hypo
cgcctgtgtgtgtgcgtgagcgtgggtggacttccaagtgtgtgcagagtcacatgcgggtgatcctaggcgtgcatccgcctgtgagcacgtgggagagtgcgccacccgtgtgtgtggtccgtgagcatccacca

SEQ ID NO: 269890 - DNA, 418 bp, Homo sapiens
  chr16:89129270-89129688
  hypo
gtggtcacctttgacccctgcggcctggctgctcctgacagcatgagttgattcaaggacaaagccaggacccctggcttggagggacagtcccacaacccctgggtcccaggctggcacacgtgcctcctgggccacccccacctgccccccaccgctagcaccccactctctaccctcccaggccagcgcactgcctcctgggccagcacccccacctgcccccaccgccggcgccccgctctctaccctcccaggccagcacacatgactcctgggccagcacccccgtccccgccggcacttcactttctacctttgctcttcttccccggccatgtctcctgctctggtcctggggccggaagtcagcgctctgtgcagatgagcttggggcagcccacgccctgcaaaccct

SEQ ID NO: 269891 - DNA, 793 bp, Homo sapiens
  chr16:89130512-89131305
  hypo
ggggcacagaggagcctccccgggcctcagcctgggtcttgcctctgggctgcgggagccggggagcctcggccgtgttctgggctccacacagtcccgagccccacaagatcagccctggcttggttctgtacgttgcttcctgcaggggaggggagggggaggggaatggccaacagctggtgttcagggtgccctgtgggatggcatggcccctcaggtatcagggagtcccgttagactaggctcctaaccaggacctgggcaggggagcatcacagcgctggggccccagactgctgcccaccggctgcctgggttcctctctgaacctcagtctcctcatcggcctggcgggaacagctgctcgctcctgttctttccccgtcaggcgtgtgagacgtgtctcctttctctccgccaagagtgaactccctttgaccaggcctcgtggtggttcagggagagatgttcgtgaagcaagggcgtcccgtgagcctggcccgtcacccgacctctaggcttcacaaaccttcagatctgagcaacacacagtcgtgaccctgtggctccagagctccctctccaagtggcttctccgggtcccgcagagcaggccctgcagatccaaggccaacctcctaggaccccggcctcccacccacaggagggttttccctcggtcctaagcggccctccttccagcacggcagggagacctggggctgcagggatttgccgggagagcccggggccaccagcaccgtcctgcgaaggatgtagcctcaggcca

SEQ ID NO: 269892 - DNA, 277 bp, Homo sapiens
  chr16:89132011-89132288
  hypo
cagagggagcattgattctgcggccaatcagagggagcgttgattctgcggccaatcagagggagcgtttggcgcccgagggatgggtttccacctgggcttccaggttccccggaggcctcttgggggcatggctgccgtgggtagggtctggtggccagggcccctgttctcagcactccacgagtcttcactcagcaccctgagaggcagctgtcctttttactaacccctccccttttcaggacaggaaaccgaggcacagaggcagagtcag

SEQ ID NO: 269893 - DNA, 251 bp, Homo sapiens
  chr16:89137879-89138130
  hypo
agatggaacaggagcgaggtcgcctgtatcctccgggaaatgctcctggaggtcagggcagccgggtgagcactgggtccggctgctctccccagcttctcttctccagtcagccaacccagcctccgcgagagacagaggaaagacagacacggcgttggctgcgcgggggcctgcatccctcccgaccttctcatttgatcctcctgccctatgcggttggtgccaacgttcatcccattttacagatg

SEQ ID NO: 269894 - DNA, 252 bp, Homo sapiens
  chr16:89139240-89139492
  hypo
gctgctgggaggacgagtaagaaaagcgggtgaagcacagagcccaaggctccgtgtggcccccccagtcagctgaagtcgtgaccctcaccgcagcctccgccccgcgccaagcctgactgtggtggcttccgatgggtgtcctcctgggcttcccaaagcaggaggtgaggtgcaggacaacgctggcgcaggctggctcagaggcacagcagagccgggtcctgcacggccaggcgcatcgggagtggc

SEQ ID NO: 269895 - DNA, 1240 bp, Homo sapiens
  chr16:89139898-89141138
  hypo
agccgccgcacccggcctctcacatggttcttctcacgggcgctccccacatgtgcggacccctccttcgtggcctccagcttctatttagagagggtgtgacacgctgagatctttcacacgggtggtgacgggactgaatcgagttgcaggacgccagcgggtatgagagctgctgctgtggagaacggcagcaccatttccacacccacgtgtggcacttggtcacggcccatgcgggaaacaactacacccacctatttccctcccagaaaacctacgtttttcttcccaagacagacactgtgtgctcacaacaccctgttgctgcctttcctgagtagtatgtgtgcaggagtcctcacagcagccgtgtcgcagggagcaggcgccacggccttggaagccagcacagtcagcgaaattccgtagggagctgggactgacacggcccagtcatgtcatggatgagccatgtcatgaacgactcatgcatgcaccagtcacgtgaggacctgtcacgtgtggacctgtcatacatgcaccagttgagtgtggacctgtcatgtgtgaacttgtcacgtgaagacctgtcacatgtgaacctgtcacgaggacctgtcacgtgtggacctgtcacgtgtggacctgtcacgtgaggacctgtcacgtgtggacctgtcacgtgaggatctgtcgtgtggtcctgtcgtctgtgggcctgtcacgtgaggacctgtcatgtgtggactgtcacgtgtggacctgtcacgtgtggactgtcacgtgtggacctctcatacatgcaccagtcacgtgtagacctgtcacgtgtgaacctgtcgtgtggtcctgtcgtctgtgggcctgtcacgtgtggatctgtcacgtgtggacctgtcatacatgcaccagtcacgtgtggacctgtcgtgtggtcctgtcatctgtgggcctgtcacgtgtggacctgtcacgtgaggacctgtcacgtgtggatctgtcacgtatggactctcacgtgtggacctgtcatacatgcaccagtcacgtgtggacctgtcacgtgtgaacctgtcgtgtggtcctgtcgtctgtgggcctgtcacgtgtggatctgtcacgtgtggactgtcacgtgtggacctgtcatacatgcaccagtcacgtgtggacctgtcgtgtggtcctgtcgtctgtgggcctgtcacgtgtggacctgtcacgtgaggacctgtca

SEQ ID NO: 269896 - DNA, 420 bp, Homo sapiens
  chr16:89141696-89142116
  hypo
ctcatccctgctaccgggtacctgccgtagctatgtccagcccaggtcactgagtgtgtaaacacacctcacgtccgcgtcgagaaggcgtcaccagtgcctgctgaacaaagaaggtctggcccagtgtggctgcagccaggaggccaaggagaccagtgagagcaccgccctcgccactgacgctcttgctgggctcattgttgtgctgggcccagtggagcaaaagacaggcctccagccggggcacctcccaacaactctgcacccttgattgaaatgcaatgtctgcggctgacggccacgtgactgcaacccaccctcccggctgccgattaattttaccttttgtgctgccagctgcagtgggttcatggtgagagctgagttgatgcatgcgagtgcgagggtgtgttaatg

SEQ ID NO: 269897 - DNA, 240 bp, Homo sapiens
  chr16:89147081-89147321
  hypo
cccccatcgtgcccgtgtccagtgtgtggccccaacagtcagcgttgttgacgtcaccttctgggagggaggtcggcctcggggccaatggcccggagcttgtgtgtatggctctgtgtgcgtgtgcaatgcactcagcatctaagctacggtcaggccctctggaggctcctgcaaactttgagggcctgcccagaactctctccaagcccaggtggggcaaacgcttccaggtcaaat

SEQ ID NO: 269898 - DNA, 37 bp, Homo sapiens
  chr16:89149007-89149044
  hypo
gtgagccaccgcgcccggctagaattaaagattttaa

SEQ ID NO: 269899 - DNA, 153 bp, Homo sapiens
  chr16:89162716-89162869
  hypo
tgatggggagccccacggtagaaggggtcccagtggttgaaaggtgaggttctctctgaggaagctggggtgcctctggaccgggaggtgtgcaggaagaccgcgcacagccatctgccctgagtaggctctgtctgcgtgttcgaggcaggg

SEQ ID NO: 269900 - DNA, 106 bp, Homo sapiens
  chr16:89163233-89163339
  hypo
ctctcctcatagcgcgtgggctctctgggagctgggaccatgtcacacggggccagtcacatctgtcacctcccaggggctggtggcaggagtgcccacccacagg

SEQ ID NO: 269901 - DNA, 424 bp, Homo sapiens
  chr16:89165356-89165780
  hypo
acttgactacgcttcggccacaggcctgggacgctgtcagaccgagggccgctgagtgcccagtggcagcagagcccagagggtgcttcccccaggaagggaggcagaccagcctattcttactgtgagtcgagcaaagctttgattataaagggccagggatgcaggagcctcgtggagagtgccaccccttcttctcgctctggaatgcgggggctgtgcccctggcctgtgtccgcatcctggggcggtgtcccgtgggcagtgtcctctggctgcagaatgcatgttgcagaattggaccagccctcacgcgtcaggagcgttgggcccacaggcggaggcaccctggcttcttctcggtctcctttctctgaatgaagaattccagtggacggcgggcccgcgcgacccctcccaggga

SEQ ID NO: 269902 - DNA, 327 bp, Homo sapiens; identical to SEQ ID NO: 217347
  chr16:89169088-89169415
  hypo

SEQ ID NO: 269903 - DNA, 626 bp, Homo sapiens; identical to SEQ ID NO: 217348
  chr16:89169475-89170101
  hypo

SEQ ID NO: 269904 - DNA, 570 bp, Homo sapiens
  chr16:89172068-89172638
  hypo
aacctctgttgggggctgcccgggcgctgacggtggctggtctaccatggtcacttgggcagaggcagcaacggccattgtcgtggaccgtgccagggcgagatgcagctggcaggggcagaggcagaacatctcccagggagctgagggcaggttggttccatcgtcccggagggcaggttggttccatcctcccaagtaaagagtgtgttaccctcagggcgagaggcaggtgggtgtgggtgctggcgcaggccagctgtcaaggatctgggctttctggtcttgctgcttctccagcactgcatgaatgacaccacctggccctttccagtgcccacaggcacacggcttgggagctgctgctgcggcgtctctgcccaggggcatctgccagggggtccctgccttggggtctgtgtcccaagggcgtctgcccagggatttctgctccgagagtgtctaccctggggtctctgcctggggatctgctgtcatcttccagacactgcagactggctcattaatggacacgggaaagcctcagaccttcaacggacacgggaaagc

SEQ ID NO: 269905 - DNA, 324 bp, Homo sapiens
  chr16:89179513-89179837
  hypo
agtgagtcttcacacgcatcacaggcccgcacctccagcagagtcgtgggtggggtattttttctttttgtgagagggaggggtggcgtggagggtgcactgcaggaactgaaggctccactgccatccagtttccagtgggatgtgtgtgtctgtggctgccgcgcgctcctcccagtccccaggaagtgcacagggaagcggcacctttgttcctggagagaattccgggttgtccaaggcacatgtctgaaccgcttcgctctctttgccgttcccttgccccttttctgtgaggccaccggagcccatggttttgctgct

SEQ ID NO: 269906 - DNA, 210 bp, Homo sapiens
  chr16:89189485-89189695
  hypo
tgctgacagcaggcccgggaacatttccagttcagccaaggagtcggtgcagcaggtggagtacagctgccctgcggggcctggctccaccaggggccaagacccttcgtggggaggagcacagcctgagggcctcagggtttgtgccctccgacacctgagattcagggctcccagaggggtgggtgggcgccccaggacaaccaggtg

SEQ ID NO: 269907 - DNA, 64 bp, Homo sapiens
  chr16:89189926-89189990
  hypo
ccgatccactcttgtctgtgccgaggcgtgggtcccggccagcgtccctccccagaaggtctcc

SEQ ID NO: 269908 - DNA, 363 bp, Homo sapiens; identical to SEQ ID NO: 217351
  chr16:89198318-89198681
  hypo

SEQ ID NO: 269909 - DNA, 836 bp, Homo sapiens
  chr16:89202505-89203341
  hypo
gtaaaagctgaagacgttttcttctttgaaagcacaggaaccacagccctgtggattttgcgagtcgcggggctcccggagccgctgggagggcagccgtgtgagatgcggggctgcgagcgtggaaacactcgcagtcgccagtgctgaggcatgtttcagccggggcggaatcacatgcattaattattgtacagagatgtctttagtagaaaatgattttgaaattcagtttaatttcattgtaatgtgctgcaaacaggaagggagtatgtgtgtttaattggctctcgggggtaaggcctggaagccgcatgtctttgtcacaggccattagcgatgctgctgcataatgagagcctgcaatcagctcacagctgccgctcctgccgggagagcatgatattaaatagaaatcaggagaaattaaacttaaccctttccctggccagcccctcctgccacacggattctggcataagccggcgggcacaggggacagccagggatggctggacacagctgaggatggccgaggccggcctgcagctccccaacggcctcctccgggtcaggatgagaggagaggttgccagctttgatgccagccgctcctgcctcccccacctgcctctgtgcctacagcccgcttctgcctcaagatcacacagcgggcttgtgaggccaggggtctccgctgctgctcaaggagatggcaaaggtctgtttcaggtaactcctctgacggccacaacgatgtcttcagacgtcaaaggtctgtctcaggtaactcctctgacggccacaacgatgtcttcagacgtcaaaggtctgtc

SEQ ID NO: 269910 - DNA, 487 bp, Homo sapiens
  chr16:89216567-89217054
  hypo
gttccctctctggacgcaccctcctgcctccaccctgacttgccgtctcctgagcactgaagatatttttggcttgtccgatgtgactccacagacagcagaaacgcttgcttgatcagggcagcatcagggcaccacacatgcctgggcttgcacaacacagcgggagcactgccactcagcagcagctgctgctttcattaaacagttaccttgagaagaaaagataggtgtcgagggctgagagctgtgctagagtttcagggtccgagttggcaggaactgaagtcccgatgctcctcagcccttggctgtcctcagggctgccctctgcgtggggacaccaggccgcccctgcccagggacaccaggccgcctgctcctgctctgtgcatctctcacatcaggctcctcacccagcattgtttgggctatgacagtggctgtgacaagaccctaagacgggaagctgcgtgcagggcacttg

SEQ ID NO: 269911 - DNA, 443 bp, Homo sapiens
  chr16:89219255-89219698
  hypo
ctggcccaggcaacagtgagatcctgtcctagaaagaaaagagaaaaaaagaaaaatgcgatttggaaatgtggaggtcgaggttgacagcgacaccgaggtcgaagccagttgcccctggagagcgagagactgggctgggccgactcccacctctgtcgcgagaggcctacgggcaggggcaggtgggcagggggactgtgctgggtctctggccgcgtctggacggcaggcgacactttctccacaaaaagcgtcaagaaaccacgacacttggtttctggacttttccgcggaacagtaaccagaacaatcgccatgaaggttcgtttctgtcatggctcagtgcagcctggacgccctggaccagcccctcctgcgcctgggccacggccgctgccttcagggcatcactggtgggcggcacaaccatcctccctttg

SEQ ID NO: 269912 - DNA, 766 bp, Homo sapiens
  chr16:89220238-89221004
  hypo
gcccaaggcctgcacgcaccatggcttctgtggtaccagtgataacaccatgccgggcacctcctgcagtcaccacccctgggctgctagggcagagacagctgcggtggcccggtgcacctgcctggcctcaggatggccgaggcgcctggcaaggctgcagggtcccaggggcacctgtccgtactgctgggcgcctgagttcctcctgctgggcactgtcagggcagtgcgcctcaggctgtgcttgtctctgcagaaatgtcctggccccgtacgcggtgccctcggagctggtgctggtggaggagatcccgcggaaccagatgggcaagattgacaagaaggcgctcatcaggcacttccacccctcatgacccggcagactgggactgcgggtctggtggggagcagcagacgtccccttcacaccgagaaccacgggggcccgtccaagacctggcctcccttaaacctgaaccccccaaatcaggtcacgtagaatcaagaactgtttgggatgaaatcaccatgtggggtccccagcctcgggccagttgttgcagctcaaggagaccgtccctggtgtcacctctgcctggtcaccgccgacctcatctgtgcagcgcggtgcagccagcccctggccccacgtgctgaggcacctcccgccccacagtgccctgcagttgccaggctctccagggcaggtcccagaggtttcccacaaaaaacaaagactccactggaggaaacaagcccctgt

SEQ ID NO: 269913 - DNA, 597 bp, Homo sapiens
  chr16:89225782-89226379
  hypo
tctgagcaggaagcccgtaggtccccacaggcgggtgcacggaaggggtgggtcctgggcccaacaggcaccccctgagcaccagcccgtctgagggtgggcggagggcgctgccgcaggtccccacatacccagcgcacgctcaccccacactggaggcacctgccgggttctgacacccctcgaggtgccttcccagggttctcacacccactgaaggcagcgcgctcagcctgctttgcacatgagccgctgaggcaggcgagttgagggcgagggtgtgaatcacgagcttggggccaaagcccaaggtcgtcccctctggccggcaagctcaggctcacacggggagccaccaggctggactgggtgcagcttacggacgtggcgcgtgctgtgggcgtcgggccgcggctcctccatgcagtacttacactgctgtctgcagatcgcacccaatcaggagggaatggtccaggcaggtgggcaaggccacggtttggccaggtaaggctgggagggcccaggatgattgtgcgttgagccaggcagatctggagaggcggagggatggggacggagcgccatgcagaggcc

SEQ ID NO: 269914 - DNA, 624 bp, Homo sapiens
  chr16:89245121-89245745
  hypo
cgctgtatgaattacggatacatctccagctgctcttgatggactggagctgaactctcgcatcccggggttcagttcccacaaagcagcctggagaggtggagggggacgggcactttcctgcaggcacctcccctgccgctcccccggaccctccacagccagcccactgtgcccacaggcaccgccactggcttcttggggtcattccgtgtcaggaccccacgctctccccagccctggctggcccaggggctttccgtgtgcaccgctaccctggcacctggggcgaggctgtgtccccgccgggtgaatctcaggtgtccctcccagccagaggcctggaaccctagcgctacctcccagtggcccatgcactcgccaggggctgcagacagcctggctgctgagtgggcccagtaggagactcgggggcagctggatgggggctttgagggccagtacttggggtgtggccaccaaggccctggctcagtccgacgggggcggggctcacgtgcctttgcccttgtgctacgcagccccgtgtgtggaagccgccttgcgccaatgggcaccgacccgtgggctgagggaaacactgcgccccgtggcctcctcacc

SEQ ID NO: 269915 - DNA, 398 bp, Homo sapiens
  chr16:89254515-89254913
  hypo
ggaggccatagaggccgtcagcggagtggatgtgggacgcctggaagtggaggacagggacctgccaggctccccaaactgggtggccaggttcaccatcctggaaggcgaccccgatgggcagttcaccatccgcacggaccccaagaccaacgagggtgttctgtccattgtgaaggtgagcggcccccggctggcacacagatgccggcagacgcagatgccgacacacacagatgcccacacacagatgccggcacacacagatgcccacacacagatgccggcacacacacatgccggcacacacagatgcccacacacagatgccggcacacacacatgccggcacacacagatgcccacacacagatgccggcacacacagatgccggcac

SEQ ID NO: 269916 - DNA, 98 bp, Homo sapiens; identical to SEQ ID NO: 217359
  chr16:89255153-89255251
  hypo

SEQ ID NO: 269917 - DNA, 377 bp, Homo sapiens; identical to SEQ ID NO: 217360
  chr16:89260393-89260770
  hypo

SEQ ID NO: 269918 - DNA, 35 bp, Homo sapiens
  chr16:89279952-89279987
  hypo
acaccccagcccttcgggaggccaaggtaggagga

SEQ ID NO: 269919 - DNA, 80 bp, Homo sapiens
  chr16:89292227-89292307
  hypo
cagacacacatcagcgcacacatgacgaggtcttgagatcgcagagctgttttgtgcgcacagacttttcgaagttagag

SEQ ID NO: 269920 - DNA, 42 bp, Homo sapiens
  chr16:89347101-89347143
  hypo
actcaacgggctcctcggtgatgacggcgctgaagggaccct

SEQ ID NO: 269921 - DNA, 143 bp, Homo sapiens
  chr16:89351879-89352022
  hypo
ctgtcctgctcgtcgtcctcatcaaactcatactcgtccttgacgggggccgtggccttctgtggctctgggttcttggccttgtgcttgaggcctttttcgaactcggagtccgtgttgttgccgtcgactgaactggaagg

SEQ ID NO: 269922 - DNA, 63 bp, Homo sapiens; identical to SEQ ID NO: 217362
  chr16:89354320-89354383
  hypo

SEQ ID NO: 269923 - DNA, 240 bp, Homo sapiens
  chr16:89354780-89355020
  hypo
acagagggcacagctcggccttgagggtgggcaaggcgaaaactcgctttcctgtgccccacatcatggaaccggctagctacggggaaacaaagctacagaaccacccagatgccaggacaggccggatgtgtgaagaacggggggatgccaaccttgtagtgcccgttgttggcagcgtcgtgcaaaggcgtgtcgtcatctaggcccttggtgttcacctccgcacctgcagccagc

SEQ ID NO: 269924 - DNA, 293 bp, Homo sapiens; identical to SEQ ID NO: 217363
  chr16:89357463-89357756
  hypo

SEQ ID NO: 269925 - DNA, 314 bp, Homo sapiens; identical to SEQ ID NO: 217364
  chr16:89359017-89359331
  hypo

SEQ ID NO: 269926 - DNA, 195 bp, Homo sapiens
  chr16:89360166-89360361
  hypo
gggaggagctggggcggtgttggggctgcagtatgtttacatcccgaagtgcaggcgttgccatgctcttaagttatcaaaggaccctaggaggcgtgtgtcagaggaacaggcagaggcaaaggcgttccttagaagtcagtctttaggctggcaggccaggagcccacgctgcgtccccgctctgaggggcag

SEQ ID NO: 269927 - DNA, 100 bp, Homo sapiens
  chr16:89366815-89366915
  hypo
tggccagaggctcccaggggcgccatgctctccaggcacctgccccgcctgcgagcacagcctggcccctgctgcactctgctctctctgcccgctcggg

SEQ ID NO: 269928 - DNA, 43 bp, Homo sapiens
  chr16:89366945-89366988
  hypo
tcttcaacttcacacacttgtcgcctctagcactgggcaaggt

SEQ ID NO: 269929 - DNA, 31 bp, Homo sapiens
  chr16:89387488-89387519
  hypo
aaccatccaggcaccgcgccctccccctccg

SEQ ID NO: 269930 - DNA, 51 bp, Homo sapiens
  chr16:89389596-89389647
  hypo
acagggagagaagtctccaacggactgagcggaggaaaaaagaaaaaagga

SEQ ID NO: 269931 - DNA, 500 bp, Homo sapiens
  chr16:89409898-89410398
  hypo
gtgtgagtgagtgagcgagcaaatgagacagagctcgaggtgggctggaggcatgtgagggtgcacgcgaaacacagtgcctcctcttggagttgccagaattcacctcgttcagaacctcaccccagtcagaaaacacaaggcagcaactggccggaacttggtcagtcacatccataaaccaccaattaccttcacagaccacgactaacaggtttattacagatgagtcacagctcatgttttcaaggaagggtctccaactgagcagtcaccagtgcagcctgcgtcagggcgcgcctccctccagcggtccccgcgtcgcccatgtctgacacagtttatgcttcgcaggcggtaaggctccgctcctcactcccatggaccaacagagtagggaaaacgaaggcacgttggaaactacggatcacgggctgttttgggtgtgggaaatccacccacccacactcacggccagctctgaccgactgaacccaggg

SEQ ID NO: 269932 - DNA, 197 bp, Homo sapiens
  chr16:89437347-89437544
  hypo
gaaccaagccctgcggacaccacgagacaaccctagggctccgtcccttgcttgagctctcctagttgagaaaaatgtgtttggcaatgttatagctgccccgtctcatgacgaaggggacttgttcaggtgagaaacgttcaactgcgcgctcgcttactgaaaaccgccgagggggaagacgggacgagcgtctt

SEQ ID NO: 269933 - DNA, 45 bp, Homo sapiens; identical to SEQ ID NO: 217367
  chr16:89437574-89437619
  hypo

SEQ ID NO: 269934 - DNA, 324 bp, Homo sapiens
  chr16:89438583-89438907
  hypo
ggaggaaaagcagcggcagcgcacggcaagatggatcctgacactcagagctggggaaagagccacacgtcctcctgcagcccgagcctctcactgagattaagaggggctctggggcaggcggaggcggcggcagcgcccagcgacggatgcggccaccactgcagggcctgccgccggtgtggagagcccgagtcacggagccccatgctgcccctcacagcacggacggggtcgacaaggcagtggcaggcggagtgagaggcggctcagggcaccagctgcccactgagtcactgtgagaagagcgaaggccaaggcttg

SEQ ID NO: 269935 - DNA, 120 bp, Homo sapiens; identical to SEQ ID NO: 217368
  chr16:89442145-89442265
  hypo

SEQ ID NO: 269936 - DNA, 136 bp, Homo sapiens; identical to SEQ ID NO: 217369
  chr16:89442325-89442461
  hypo

SEQ ID NO: 269937 - DNA, 295 bp, Homo sapiens; identical to SEQ ID NO: 217370
  chr16:89445365-89445660
  hypo

SEQ ID NO: 269938 - DNA, 84 bp, Homo sapiens; identical to SEQ ID NO: 217371
  chr16:89446069-89446153
  hypo

SEQ ID NO: 269939 - DNA, 77 bp, Homo sapiens
  chr16:89461030-89461107
  hypo
tgtctccaaaaaaaaaaaaacaaacaaccttttgtggaaaaacgagtgtattttccactcctcgtctcaataaaacc

SEQ ID NO: 269940 - DNA, 40 bp, Homo sapiens
  chr16:89468177-89468217
  hypo
cactgagctgtgcacgcagggagaacgctgggtgaagagg

SEQ ID NO: 269941 - DNA, 518 bp, Homo sapiens
  chr16:89468448-89468966
  hypo
gtggtgatttatcacggcagccccgaaagacccccacaccaagtttcactctctgtccatggacctctttaatggaaatcctgacttttccataaggcactgaatctgtgtaacttttagagtaaggaggacgacctacagttcactgcatgaaagcacagcccttccaacaaaggcaggcgaaatgtggaaccaattatatctgggtgcctacacgtgacgtacgccagttctttgtagaaagaacgaggcttgtctcagcgatactaatgtacagttcacatgaactcctaaccttagccagccacaataaggtatctgggattgagcgcttatttaaatcggtaggcacatcaatttaaatttaggtagtagctcagcctgtacctaacacatgaggaagccgaggcgggaagatcggttgactccaagagttcaagagcatcctgggaatgacagggagaccccgcctctagaaaaacatttaaaaattgctgcgtatggtgccgcacaccagc

SEQ ID NO: 269942 - DNA, 70 bp, Homo sapiens
  chr16:89471629-89471699
  hypo
ggaaggaggtaccacatatgcggtctgttgtggaacaaaatgccgttacgtggggcatgactgtattctg

SEQ ID NO: 269943 - DNA, 241 bp, Homo sapiens; identical to SEQ ID NO: 217372
  chr16:89500005-89500246
  hypo

SEQ ID NO: 269944 - DNA, 76 bp, Homo sapiens; identical to SEQ ID NO: 217373
  chr16:89504486-89504562
  hypo

SEQ ID NO: 269945 - DNA, 208 bp, Homo sapiens
  chr16:89531901-89532109
  hypo
tgtgccacaccgcccgcccgcacacatccgcggaaagcctgctttcagctgctcagcaggtgggaacacttgctcctccagcattccaccatgagacaaaggaaaaagtcgcttctgtgtgtccaccagcacacgactcccatgtactcctgcacgtcacgtggacgagctaaagaagactcctctgctccacagccaccatcacact

SEQ ID NO: 269946 - DNA, 37 bp, Homo sapiens; identical to SEQ ID NO: 217374
  chr16:89545055-89545092
  hypo

SEQ ID NO: 269947 - DNA, 99 bp, Homo sapiens; identical to SEQ ID NO: 217375
  chr16:89548161-89548260
  hypo

SEQ ID NO: 269948 - DNA, 32 bp, Homo sapiens
  chr16:89553884-89553916
  hypo
aaaaaggcacaaaaagaggccgggcgcggtgg

SEQ ID NO: 269949 - DNA, 190 bp, Homo sapiens
  chr16:89558582-89558772
  hypo
ttctctaggcagccagatttcgggctccacccacaactagtcacgccattggatgaggggtgagcgcctgataaaaacagccggcgtatgcgctgatgtgcgttcacgaagaggtgatccaagtgtttccatatttgcctcactggacgaagtatttggtaaaattgacgaaattcagagtcctggaccc

SEQ ID NO: 269950 - DNA, 146 bp, Homo sapiens
  chr16:89575952-89576098
  hypo
cggccataaaacatatttaaatgggaaaatgtttatcttgaaaggagaactctgaaagtatatacttgttaactggtttggtacctggaaatgttctacaaggagccactctctggtgacagcaggagccccgtgtctgggcagcc

SEQ ID NO: 269951 - DNA, 100 bp, Homo sapiens; identical to SEQ ID NO: 217376
  chr16:89577032-89577132
  hypo

SEQ ID NO: 269952 - DNA, 39 bp, Homo sapiens
  chr16:89584297-89584336
  hypo
attataggcgtgagccaccacgcccggccaagtgattgt

SEQ ID NO: 269953 - DNA, 208 bp, Homo sapiens
  chr16:89588832-89589040
  hypo
cggctgctgggtccgtggcggtttgtccgcaggcgcaggtgttctggaaatgacgtcgttaccaccgctgggtctgtggcggtttgtccgcaggcgctggtgttctggaaatgacgtcgttcccgccgctgggtccgtggcgctgtgtccgcaggcgcaggggcgcaggtgttctggagatgatgtcgttcccgctgctgtgtccgtg

SEQ ID NO: 269954 - DNA, 159 bp, Homo sapiens
  chr16:89597145-89597304
  hypo
tcagcttcaaagacgtggcaggaatgcacgaagccaaactggaagtccgcgagtttgtggattatctgaaggtgaaagcagcgtgggccgggagggaggtgtgagcagaggccggccgtcctcctctcccagaagggctcctgcgggacctggaattcc

SEQ ID NO: 269955 - DNA, 113 bp, Homo sapiens
  chr16:89603719-89603832
  hypo
gcactggaggcaccgccggcgatggacgtccaggtcccggctcctgtgctggaaagcgttgatggggagcgtcggcgctgaccacacgcgggagctgcggaagcccagcggtt

SEQ ID NO: 269956 - DNA, 35 bp, Homo sapiens
  chr16:89614907-89614942
  hypo
ggctgctgccgcccgtggctgtggagggacagccg

SEQ ID NO: 269957 - DNA, 48 bp, Homo sapiens
  chr16:89615122-89615170
  hypo
tgaggagagaggaccaaactgggaatcggagctgctggaggtttccat

SEQ ID NO: 269958 - DNA, 117 bp, Homo sapiens; identical to SEQ ID NO: 217379
  chr16:89647543-89647660
  hypo

SEQ ID NO: 269959 - DNA, 300 bp, Homo sapiens; identical to SEQ ID NO: 217380
  chr16:89647764-89648064
  hypo

SEQ ID NO: 269960 - DNA, 56 bp, Homo sapiens; identical to SEQ ID NO: 217381
  chr16:89649562-89649618
  hypo

SEQ ID NO: 269961 - DNA, 255 bp, Homo sapiens
  chr16:89649648-89649903
  hypo
ggacatgctgggcgtgagggtccggggccgtttgagctgcctcgcctctgcttctgcgggttctcacctgggcctggagagggtcagggcagccctgcttacctgtggaggggcgtccgccacacctgtgcaggtgcaggccagctgggctgtgagctgcttcctggcttccacctgagcctgtttcctcacctggtaaataggtatgatgacctctgcctcccctgggcgactgctggcgccgtgaggtggtgg

SEQ ID NO: 269962 - DNA, 588 bp, Homo sapiens
  chr16:89650277-89650865
  hypo
gggtctgcaggagccggcagctacacagccccgggggtacacagacacctcctctcaggccccgctgggtggggtcagccagcctggggcctctggtcccccacggtggggtcaggccccacctggccaagcctggagcccgggcgtccccctgccaggtgatcgccgaggacatctcggggaacaacggctacgtggagctctccttccgggccaggaagctggacgacaaggtgagtgcaggtgccgggcacgcctggctcaggctgaggtccgggaaccggttcgaaaacccggtccctgcccagcgctgacctcgcgtggctatgtcccgtgtgagacgtgtgcggagtgtgcctggggctgggcgtgctgccgtcacggtcgccatcatcactgtcaccgccattagctctcccgcccctcctggcagctgggctggggctggggcagctccctcctgtggggaccactcatgaccctgctcagggatggggaaataggcccagcacccccgaggccactgtcgtgacaggaggaactggaacagcgcgcggttctgcgggctcgtcacgtgggtgggcagaa

SEQ ID NO: 269963 - DNA, 256 bp, Homo sapiens
  chr16:89663896-89664152
  hypo
gtgaggactgtggacgtgatgcaggggtgccaggagcctcccacatggcctgcaccgcagggagctgggctggagggtgaagcctccatgtgatgttcgtggagccggggcatctcccacctgctgggacctcctcgccctgagtttgagatttcccctgaatgatcttgcctgagaaaaacaaattgtcctaaccctgaatccaggcccacccatccccacatcggtccatccacccacccatccgtccacccat

SEQ ID NO: 269964 - DNA, 233 bp, Homo sapiens
  chr16:89674365-89674598
  hypo
cttaattcctctagcgccgctgggttagggtctccacagccgagctggtctcagcacagtggcccttgacgtttgcggggatgggttccgggaccccagtagatcatacaatccatggatgctcaagtccctgatagaaactggtgtcatctttgcacgtaactgtctctgtgtgtgtcccgtcgtcttcagctcggaggtgctcgtggctagcgggacgcccgcactgcact

SEQ ID NO: 269965 - DNA, 253 bp, Homo sapiens
  chr16:89688046-89688299
  hypo
tgagtgtgggctcccgtccctcgcacatgcaaggaagggctcaggtgagcaggtgcgcgtgtgcggctcacctgtgcatgcacgtgtgtctgtgtgcacgtggaggtatctgagtgtgcgtttactcatcccgtgggaaagtctgcacatgtctgttctaggtacgcggacgtatctgaccgtgtgggcttgcgatgcgcccaggtgttctcgtctgcgatgatctgtgtgtggggggcgtgggtaggtccgc

SEQ ID NO: 269966 - DNA, 146 bp, Homo sapiens; identical to SEQ ID NO: 217383
  chr16:89697117-89697263
  hypo

SEQ ID NO: 269967 - DNA, 600 bp, Homo sapiens
  chr16:89704274-89704874
  hypo
tatccagacctgatcgctgagctgctcaggaggaactggacggaggcggaggtcaagggcgcactggctgacaacctgctgagggtcttcgaggctgtggaacaggtgaggatggggtggccacctgagtctcccccaccaccaccagcaggcaggctgccccacccgtgtctgtctgtccccaggccagcaacctcacacaggctcccgaggaggagcccatcccgctggaccagctgggtggctcctgcaggacccattacggctactcctctggggcttccagcctccatcgccactgggggctcctgctggcctccctcgctcccctggtcctctgtctgtctctcctgtgaaacctgggagaccagagtcccctttagggttcccggagctccgggaagacccgcccatcccaggactccagatgccaggagccctgctgcccacatgcaaggaccagcatctcctgagaggacgcctgggcttacctggggggcaggatgcctggggacagttcaggacacacacacagtaggcccgcaataaaagcaacaccccttcacatcctggggtacgtgtcatcggcatccggctcag

SEQ ID NO: 269968 - DNA, 342 bp, Homo sapiens
  chr16:89713325-89713667
  hypo
atgcctgctgccgcgggtggacatctttccacacctctgcatgcttgtctgccatccgagcctccccacaaggagccaggtgcctgcaggaggcccccgccgccctgcccaccctacctgtcagggtcctggcagggacccagcacagaggatgcttggtgacgtcagggagcaaccacaggtatgcagagacagcacgtcagcctgtgagccacccctcccgatgagctgcccacacacgctccttgtccccaggccacagccccaagggtaggggccacataccgatgtatggacgtccaggttctgcacctgctgctcgaacctgtccatcactgagga

SEQ ID NO: 269969 - DNA, 47 bp, Homo sapiens; identical to SEQ ID NO: 217386
  chr16:89715825-89715872
  hypo

SEQ ID NO: 269970 - DNA, 65 bp, Homo sapiens; identical to SEQ ID NO: 217387
  chr16:89755908-89755973
  hypo

SEQ ID NO: 269971 - DNA, 97 bp, Homo sapiens
  chr16:89762087-89762184
  hypo
ctgtaaaccctgacggtgggcctggcacacgcctgtattcccacaccaggtcttccgatcagtggtgtctgtgaagggtgccgcgagccaggctgac

SEQ ID NO: 269972 - DNA, 933 bp, Homo sapiens
  chr16:89763776-89764709
  hypo
tgtccatctgtgcacgctgtagccacaagcgccgctgggcgtcgccaagcagcacacgcagcgagtggcctggacggcaggcgggcagggctgcacagtgggcagcatgcagctggcgacaggtgtcgcagcagagggtgggcagggcgccaggggacaggcagctgtgtgcctggtagcctgggggctccgagacagacctataggctgaggctggtaccccctctgcccgaatacgcctcgggctggccgctgcagagctttcaggggtggccaggtccccaggcctactcagctcacggcgcagagagaggaaggagaaggcggaaggttcaggttccagcccctcctccaaggccccatatggtgggctgctggcctgcggcagctcctcagctgggggctcccaggcccggcccccagtgccccacagtttggcactctgctcccagagtggtggcctgtaggccagctccgccgggggcgagtcagggcctggtgacggctccccatacaggctggcgtcctccgacccctcgtcttcctgcaagtcccggtataagtccagtggggccctgtaagcagcaggggagcctcgggggggcaggggtggcggctcctcatcctgggccagccgctgctgcagccaggccacacaggaggccacgtccccgctggcacgccgtgcctgcagcagctcctcagctggcagcacactggtgcccagctgggccagcacctcacccaggatctcacactccagccggagggcgaagcagcccagggccacctgcaccagctggcaggcggggggcagggcggtcaccatgagccgatggctgtctctgcgtacgtagcccatcttctggaagctcttcaggaggaggtcgtctgagagcacacccttcagcacgtgcacgtagcccccagaga

SEQ ID NO: 269973 - DNA, 180 bp, Homo sapiens
  chr16:89770174-89770354
  hypo
agcatggggacggactaacacaccctcagaacccagccactagagtgagaaggccacggccgtgtgcagagcttttggcctgcaacttcgacctgcgactcacattcacctgcagcctattcttgggacttttttggaaatagtttttccagacaaaaatcaagatgagtttgttctggg

SEQ ID NO: 269974 - DNA, 75 bp, Homo sapiens; identical to SEQ ID NO: 217390
  chr16:89800299-89800374
  hypo

SEQ ID NO: 269975 - DNA, 85 bp, Homo sapiens; identical to SEQ ID NO: 217391
  chr16:89807744-89807829
  hypo

SEQ ID NO: 269976 - DNA, 39 bp, Homo sapiens
  chr16:89809822-89809861
  hypo
tttaaataagctgggcatgacggttcacatctgcaatca

SEQ ID NO: 269977 - DNA, 102 bp, Homo sapiens; identical to SEQ ID NO: 217392
  chr16:89815125-89815227
  hypo

SEQ ID NO: 269978 - DNA, 36 bp, Homo sapiens
  chr16:89824587-89824623
  hypo
ctatacacataaagaaacaaccgatgcaggaagctt

SEQ ID NO: 269979 - DNA, 38 bp, Homo sapiens; identical to SEQ ID NO: 217393
  chr16:89830047-89830085
  hypo

SEQ ID NO: 269980 - DNA, 131 bp, Homo sapiens
  chr16:89845487-89845618
  hypo
cagagagtggactgcgagggctcactccaaagccacgatgcattatgaagtcttcttgtgcacagttccgggacaaggcatgtgtagggcaggccgtgctagcccagccctgagtccgtgggaatcaggac

SEQ ID NO: 269981 - DNA, 286 bp, Homo sapiens
  chr16:89846018-89846304
  hypo
cccgtatcccttaacggcaggatcctcgattcacagccctgactcctgtctctctctgaatagacagtggccaacctgccccatgtggctctgggcagaaatgggacacactccaaagagccccagacgctggcaggcatcagagcggagtctgcacaccctgcaggcatcagagcagagtctgcacatactgcaggcatcagagcgcggtctgcacacactgcagctgctagaggccttttcggcagcccagcctacctggcctccatgacggtgactgggatgt

SEQ ID NO: 269982 - DNA, 162 bp, Homo sapiens
  chr16:89846596-89846758
  hypo
gaccccgtgatgtgcggccctcctcgagagctcagctctgctgagagcctgccgtgagcctctttcctgcctccaggaaagagttgaaagtaaagatttctaggtgggaaggagtagagacttaatttttgagattaaaagaaattacgagggctgggtgcc

SEQ ID NO: 269983 - DNA, 325 bp, Homo sapiens
  chr16:89871398-89871723
  hypo
gcgccactgtactccagcctgggcgacagaaggaagcagctgcggtcactctatgggaaaggtgaatggaaacacttaaactcatgtcaaggccgacttactagtatttccacatcagtcaagtaaaatgcaaccccacaacaggctgagactgggagtctgtcatgccaggttcccacggccacggagagacaggctgttctgcctcgcagagctcttgagagcagaaggcattatcacagatcaaaatgagttttacccaagaacccgcatcttgtcatgaacgcaccagaaagcatggccctggcgacgtcagcatgctggc

SEQ ID NO: 269984 - DNA, 317 bp, Homo sapiens
  chr16:89884022-89884339
  hypo
aggccctggagacccgtccgcatcctctggcagtggccttggaaccaccgaagggattcagccgaagggccgcgttcccggcaggcgtctttattgtgttgattacgtagatggcgtagatgacgtagatgacgttcagcaccacaaacgaagagccgaggcacagagtggggccttggattcatgagatggggatggagcagaaatgagaattcggagtccatgaaacccccacaaagactcctgcacggcccgactcggacactttgcaatctgctggttgagggggatggtgtgaactcagggaacagcctgag

SEQ ID NO: 269985 - DNA, 1755 bp, Homo sapiens
  chr16:89899919-89901674
  hypo
caggttcagctcagcccctacgccctgctgggctcaggggcaggttcagctcaggcctacggcctgctgggcttgagaagcttcgcctttgtgcctcggtttccttctccgtgaaatgggaggtgcagcgtggtgctaacgtctgtgcagccctgggcacgcctggctccggaagcactggccagtggaggtggcagcaagggatctgcacctgtgcactcgctggacctgccttggggagcagcacgtgtgggtccaggctgcgaatcccgaccggattctcagggaggggttctgcaaggtgcacccggtgggggctgggagctcctccggggcgtgtttccctgtgacgtaaaatgacctctatccctgagccctcccatgtagaaagcgggaaggaggctggccgctgtgtgtgggtgtgggtgtgagctgggtgtgtctctgtgtgagctggggtttgtttgtagatggcattcccgatatagtctcacctctgagcaagggttacctcacaggaaggcagtcctgcagcaagactcttctctttacggagacatctgtgaacctgcctgcgctcgcggttggccgtcgtagaagcatggataagcatagcccgtgtgaatctgtgaacctgcctgcgctcgcggttggccgtcgtagaagcctggataagcatagcccgtgtgaatctgtgaacctgcctgtgctcacggttggccgtcgtagaagcatggataagcatagcccgtgtgaatctgtgaacctgcccgcgctcgcggttggccgtcgtagaaggccccataagcatagcccgtgtgaatctgtgaacctgcctgtgctcacggttggccgtcgtagaagcctggataagcatagcccgtgtgaatctgtgaacctgcccgcactcgcggttggccatcgtagaagcctggataagcatagcccgtgtgaatctgtgaacctgcccgcactcgcggttggccatcgtagaagtgtggataagcatagcccatgtgaatctgtgaacctgcccgcattcgcggttggccgtcgtagaaggccccataagcatagcccgtgtgaatctgtgaacctgcccgcactcgcggttggccgttgtagaagcctggataagcatagcccgtgtgaatctgtgaacctgcccgcactcgcggttggccgtcgtagaagcctggataagcatagcccgtgtgaatctgtgaacctgcccgcactcgcggttggccatcgtagaagtgtggataagcatagcccatgtgaatctgtgaacctgcccgcattcgcggttggccgtcgtagaaggccccataagcatagcccgtgtgaatctgtgaacctgcccgcactcgcagctggccgtcgtagaaggccccacaagcatagcccgtgtgaatctgtgaacctgcccgcactcgcggctggccgtcgtagaaggccccataagcatagcccgggtgaatctgtgaacctgcccgcactcgcggttggccgtcgtagaagcgtggataagcatagcccgtgtgaatctgtgaacctgcccgcactcgcagttggccgtcgtagaagcctagataagcatagcccgtgtgaatctgtgaacctgcccgcactcacggttggccgtcgtagaagcgtggataagcatagcccgtgtgaatctgtgaacctgcctgcgctcgcggttggccgtcttagaagcgtggataagcatagcccgtgtgatttttcgct

SEQ ID NO: 269986 - DNA, 106 bp, Homo sapiens
  chr16:89918308-89918414
  hypo
cctggccagcttcccgaaccctctgagcctttgcaggtggttttgacgccgggtggcagcctgagctgctcggcctcatctgcagcccaagcgtgtgccaaggttg

SEQ ID NO: 269987 - DNA, 64 bp, Homo sapiens
  chr16:89920072-89920136
  hypo
tagagttgggacttcgtgacagcagaggctgcgtgccaccgagatcgtgcgtgacggaggcagc

SEQ ID NO: 269988 - DNA, 87 bp, Homo sapiens
  chr16:89926090-89926177
  hypo
ggagccgtgtgtccgtggggagccggctgggctcgcagcacatggctctggaacctgagccgtgattccttcgactccttttcgcgc

SEQ ID NO: 269989 - DNA, 213 bp, Homo sapiens; identical to SEQ ID NO: 217397
  chr16:89947431-89947644
  hypo

SEQ ID NO: 269990 - DNA, 183 bp, Homo sapiens
  chr16:89949813-89949996
  hypo
gtgcgctcacagacgctgtggcaccagggaacaaaggaaggggtcagcgtggaaacacagagagcaagacggatggagatgacaccgagacagtgccctcagagcaggtggggggctgagtggtgaggaggtggcatcagacgggagagttccaaggcacccagccacgtgtatcctgtgctg

SEQ ID NO: 269991 - DNA, 208 bp, Homo sapiens; identical to SEQ ID NO: 217398
  chr16:89960587-89960795
  hypo

SEQ ID NO: 269992 - DNA, 310 bp, Homo sapiens; identical to SEQ ID NO: 217399
  chr16:89966590-89966900
  hypo

SEQ ID NO: 269993 - DNA, 37 bp, Homo sapiens
  chr16:89970851-89970888
  hypo
ggtgccaggcgtggcggcacatgcctgtaatctcagc

SEQ ID NO: 269994 - DNA, 96 bp, Homo sapiens
  chr16:89971008-89971104
  hypo
gagcaaacacaggagaaagtgcacgccttggggtcatcccctggccctccagggctcgccctgtgtgcacgcagatggacccgccctgggtgcatt

SEQ ID NO: 269995 - DNA, 1572 bp, Homo sapiens
  chr16:89971726-89973298
  hypo
gttcccgggtgcctcgggctggagtggtgccttcgggtcttgcagtgtttccacatgagctgtgagatgatgacgagtctctcacagcagcatcttgggagtaaagaaatctggcagagacgagaaagagtctcctgtcctgtgtgtgaacacttcggaggctcatgccctaatatgctgcaactgacaggcatccccttgctgttcttgtctcgtttgtctgcgcccttggccctgtgctagttctgtgcatcagcaccgtggctctgtgcagtggtgtggccaggctcaggaccgcctgggagtggtgcccatttgcatctccacagtgaagtctgtgtgccgcggacatgaggtgtgcccgggggtgcccaagaggcgctggtgcccccagccgctggcagtcatgggcccgtccgcgtgtctgctgtccccactggactggacattctcatggacaggagcattttgttccctgtactgctctccaagagcgatttccagcagggaccagtgcctgtgcctgtagccgtagcagtgacgatggtgacacacccaggtgtcccttcatggagatgaactcagtgacttcccacaagaagccactggctacggctctcatcgttcttgttctttggatgaagaggctgagtcactggccatgtggctgggattggtccccagaggctccccagccgcaggccagggaccagccatggtgcctctgctcgagagtaaagtgtacagtttttgcagccaccagagatgcagcgagatgcctcgtgctgggtgggggtgggggccgaggctccatggcggttaccatttcatttgctgtgctttatctgctgtgccttgtttctccccggccctaggcggaaggtgctctaccagcgtgcacccaggaatatccaccgccatgtgatcctctctgagatcaaggaagccgtcgctgccctgcccccggtaagggagaaaggctgaaatgggagctctgtgtaagccggtcacatgcacgtcccttctgctccgggcggtccacatgcaggcgtgcgtggtgcgggctccctcagcagcccagccccgccacggcaggggcagggtctagtgcagagggctcctcctttcctggcagcccgggttcggatgcttgttgttttgagagagaaatcctttggggctcagagcacaagctgagtcgtcaccgtggtgagctgctccatccgtggtcttgtgagcgcgtggtgcggctgctgggggattctctgtagtcgtggggtgtagtcctgctctgacgcctcctgtgctggaggtgccgtttctgtctcaaaacctaaggagtttgtactgttgttaagggataagatagaacgagtgagaaaaccagcaagtcagagggtcgcaggaccgtggaccgtccactggggacagcttagtgcctcctggtttaacttcagctgctctgcgggcccttatgaccggcatggctggctttgtctggggctgtgagcttctgactctcctcagtagagtggcagcacgtggcactgtgcaacccgagggcagctcagg

SEQ ID NO: 269996 - DNA, 69 bp, Homo sapiens
  chr16:89982538-89982607
  hypo
agccaccggcataggcgaatctcagccagagagagtgaactgggacaccattcacgtgatgggccagat

SEQ ID NO: 269997 - DNA, 381 bp, Homo sapiens
  chr16:89985819-89986200
  hypo
agcttggtggagaacgcgctggtggtggccaccatcgccaagaaccggaacctgcactcacccatgtactgcttcatctgctgcctggccttgtcggacctgctggtgagcgggagcaacgtgctggagacggccgtcatcctcctgctggaggccggtgcactggtggcccgggctgcggtgctgcagcagctggacaatgtcattgacgtgatcacctgcagctccatgctgtccagcctctgcttcctgggcgccatcgccgtggaccgctacatctccatcttctacgcactgcgctaccacagcatcgtgaccctgccgcgggcgcggcgagccgttgcggccatctgggtggccagtgtcgtcttcagcacgctc

SEQ ID NO: 269998 - DNA, 495 bp, Homo sapiens
  chr16:90037382-90037877
  hypo
tatcagaaaggtcgctcaaatttacagagtggcatgacgcactgtctagtatgagcagtgctttgttggtgagattattttgggcactgtatttttcaacggcaaaaaaagtaagtgaaccattcatgaaagatgctcctggtcacccaagcctttctgttggagcgccaaatcacgggcaaactgggcttcaagaacccttcagagccttgcgggtttctgagcggtacaccagtaagggcttcaacttaaagtccccagctgcactgccaccaagcagcagcatcaagcgatctttggatgacttaaaccctggctcagcattctcttcctcggaaataaacgttcctttgggcattctcttccaatcaagtctcgtctcatctacgttaaagacacctggggggtgtactcaccttcttcgatgatgcttttcagcatttctgtgtacatgtccttgttgctgggagctgcgctgttcatcttgaagtgggg

SEQ ID NO: 269999 - DNA, 102 bp, Homo sapiens; identical to SEQ ID NO: 217404
  chr16:90044787-90044889
  hypo

SEQ ID NO: 270000 - DNA, 95 bp, Homo sapiens; identical to SEQ ID NO: 217405
  chr16:90053009-90053104
  hypo

SEQ ID NO: 270001 - DNA, 189 bp, Homo sapiens; identical to SEQ ID NO: 217406
  chr16:90053307-90053496
  hypo

SEQ ID NO: 270002 - DNA, 123 bp, Homo sapiens
  chr16:90057596-90057719
  hypo
accagtagcaaaaccgattctgggtgggttcctgtttcaggttcatgacatgtttgcaatggcccgaaaaaaacgctccatgtatcttattcattgatgagattgatgcgattggcaggaagc

SEQ ID NO: 270003 - DNA, 135 bp, Homo sapiens; identical to SEQ ID NO: 217407
  chr16:90059132-90059267
  hypo

SEQ ID NO: 270004 - DNA, 505 bp, Homo sapiens
  chr16:90066540-90067045
  hypo
ggccaggtgtccttcgacttttcccgacacggcaagaccctggtggagaagctgtacggcgaggcaagcgcccagctccttgatgacgaggtccggcacctcgtcagtgccacctacaggtgcaccctggacctgctgacacggtgccgggagcatgtggagaaggtgagtgtggcctctgcccagacaggtcgtgggtcccatgttgagtcacggtcatgccacacccgaaggccacacccgtccttcagcttgcttaggtttgggctgtgatcatgtcctcagagccgtctgacaggtgggccgttgtttccaggtgggccagcggctcctggagaaggaagtactggagaaggcagacatggtggagctgctgggcccccggcccttctcggagaagtctacctatgaggagtttgtagagggcgtgggcagcctggaggaggacacatcccttcccgaggggctgaagggttggaaccgcggacaggaggaggaagatgtg

SEQ ID NO: 270005 - DNA, 284 bp, Homo sapiens
  chr16:90068123-90068407
  hypo
ctttctgcagcacacgacctgcctccaggactcgctggggtcagcaacagcagggcagtgtcagcctcaaccactgccttggggtgggtggatgcgtgtctaggtcacctgggatgagacctggggaagacgcccatttgcatatgtcctgggtgagcggccggaggaggaggccctgcttgtgggtcagctgggatgggacctgggaagatgcccgtttgcagatgtcctgggtgaacagcgggaggaggaggccctgcttgctgccccgggcactgtttgtt

SEQ ID NO: 270006 - DNA, 461 bp, Homo sapiens
  chr16:90072249-90072710
  hypo
agccactaccaaacccgcctctggcttctgagcttggcagcacaggaaaacgcggaggttggagcacccccaggagttcctggagtggctgtcacaggcctgggtccccttcaccccaaggccgccgtgggccactccattcctcagcacgttcctggcagtgactccgtgacgctgtcttcctgactcggggcccaggaacgagctggacgtaaggccactgggctgtgcttgtgctggggctcccagaggcatccgggggccccgtgtgtcccccaggaaagccggctggtctccaagtgaggcgaagacccgtgcccagcagacaaggccggtctcggggctggcagagagctgcccccagggtgtgtgtcaggaggtgacggctggagcctcgtgggcgggtgaagtgtgtctgctgggtcagcactgcccagatctgccatcgtgttcggacccca

SEQ ID NO: 270007 - DNA, 206 bp, Homo sapiens
  chr16:90109929-90110135
  hypo
ctcacccatggtgtccctgtcgctcccttccctgggtgccgcacgtccagcctgtgtccaggcctactccctggtctcacctccgaccacagtcggcggcaccttctcagagtgccccgcactcacctgggggttggggcagtgccgcgctgtgctgcctgtcttcgcgccactgttgtcccaccgaatggacagctttgcaggtg

SEQ ID NO: 270008 - DNA, 81 bp, Homo sapiens
  chr16:90115266-90115347
  hypo
ggaaacgctgcacccgcatgatggtggactggctgtcctgctctgggatctgggaactttttttttttttgagacggagtc

SEQ ID NO: 270009 - DNA, 221 bp, Homo sapiens
  chr17:401102-401323
  hypo
gcccctgtggctctcgggcattagcctgtaggtcttctgctgcaaagcgcctctcacccctcctggttgcgtgggtggggtggtcctgaagccccgtggcttcctttatttctgccttctctgtagaattcaaacatgaaccctgcagggctagaccaagacacaaatatcaatttctaaaaacacccctttgagggttgggcacggcggctcacgcctgt

SEQ ID NO: 270010 - DNA, 152 bp, Homo sapiens; identical to SEQ ID NO: 217412
  chr17:512963-513115
  hypo

SEQ ID NO: 270011 - DNA, 41 bp, Homo sapiens
  chr17:523202-523243
  hypo
ggcgtgcgccaccacgccccgctagtatttccttttctgac

SEQ ID NO: 270012 - DNA, 131 bp, Homo sapiens
  chr17:523544-523675
  hypo
cagcccgattcacccgcttcacctgctctgaggctggtctcatgggacaaagagggaattgcactgaagtctcagggttttaggaccagaagggtaggagctagagaaggtggcagaggtgaaggttgaac

SEQ ID NO: 270013 - DNA, 265 bp, Homo sapiens
  chr17:536283-536548
  hypo
ggccagtactcaacagtggccgtgagtgtactaggagctcaagaactgtgcgtgtacttgaatgcaagggcagaaaggagaagcggctaggatggaaagcggctatggatcataccccacgatcaatcacgccccgcaatggatcaggccccgcaatcacgtcccgcaatcgatcacgccccacaatcgatcgcatgctgtgcatcccccacgagctgcctgatgttggtggccaccgtgcaccggccagccttgcagagagaga

SEQ ID NO: 270014 - DNA, 71 bp, Homo sapiens
  chr17:576772-576843
  hypo
ctgtcggactctcacagccacagatggctgcacgtctacagctctttgcttccctacgtgtccgagaactc

SEQ ID NO: 270015 - DNA, 49 bp, Homo sapiens; identical to SEQ ID NO: 217417
  chr17:591791-591840
  hypo

SEQ ID NO: 270016 - DNA, 152 bp, Homo sapiens; identical to SEQ ID NO: 217418
  chr17:597509-597661
  hypo

SEQ ID NO: 270017 - DNA, 278 bp, Homo sapiens
  chr17:633611-633889
  hypo
gcctttacttgctattttctatacatgaaacatcggttgttttgttttcaactcataaagatgccttacagcttcttgtgtaggggagactggttcccaccactcaaaggtgccagcatactcactgccaagctgctgctccctttaaggagggaaggcagggaggacttgtaaccacctgtcactctctggaaacactggcgctggaggtcactgtgataaatgcttaggaaagagacagtggactgcacagagtcgttttcctggagagaatggag

SEQ ID NO: 270018 - DNA, 263 bp, Homo sapiens; identical to SEQ ID NO: 217419
  chr17:634276-634539
  hypo

SEQ ID NO: 270019 - DNA, 140 bp, Homo sapiens
  chr17:641127-641267
  hypo
catgatctatgactcgtacgccatgtacctctgtgaatggtgccgaaccagagaccagaaccgtgcgccctccctcactcttcgaaacttcctaagtcgaaaccgcctcatgatcacacatcatgcggtcattctctttg

SEQ ID NO: 270020 - DNA, 257 bp, Homo sapiens; identical to SEQ ID NO: 217422
  chr17:662966-663223
  hypo

SEQ ID NO: 270021 - DNA, 137 bp, Homo sapiens; identical to SEQ ID NO: 217423
  chr17:663955-664092
  hypo

SEQ ID NO: 270022 - DNA, 36 bp, Homo sapiens
  chr17:684166-684202
  hypo
tttttttttttgagacggagttttgctttcgtcatc

SEQ ID NO: 270023 - DNA, 441 bp, Homo sapiens
  chr17:692538-692979
  hypo
gaatcctatgaaaggaatgacgtcagcagctctgaatcctaatgtcattgtgatccgtttcccttagattcccttagcctcagcgtgggtcacatgccccgcacacaaattcgcctcattacatttctgtctcttctcatcagaaatagggattaataggcttggctctaaacagactttcctcacagttggagcacgcctaaaatgtctcttacaccttgggaggtggaggggacagagagtaccattcatcagaaacaccccagccaccattaaaagtaaactaatagtggcacccgttgttgagacttgcctaaattgctgctcgcagctctttctcagtcacgccttgctagaatacgtttctgtgccagtgtgagagctacgtgctggggttctgtgatcagtacccgcttactcgccccattatttagtgctctg

SEQ ID NO: 270024 - DNA, 464 bp, Homo sapiens; identical to SEQ ID NO: 217426
  chr17:693367-693831
  hypo

SEQ ID NO: 270025 - DNA, 198 bp, Homo sapiens
  chr17:710849-711047
  hypo
gcttccccgaggaacggctcctcctaagacgaggtgtgccgggacgggccgtgttgggccgcgtgactgtctgcataagcagaaaccaacttgggcccaaggaagccactcgtgttcggcccctgcacgggggaaagcacccatgtctgctgtgccaggctgcctcccctcagctggtcctgacgagcttggcctaca

SEQ ID NO: 270026 - DNA, 103 bp, Homo sapiens
  chr17:730082-730185
  hypo
ttggctgtgcacacggtcagaggtccagggtctaagaggaataaagctgacaaaatgtcaatgcaaagcccagggctggaagccaagcgtgggcggcctctgt

SEQ ID NO: 270027 - DNA, 33 bp, Homo sapiens
  chr17:744617-744650
  hypo
cggtgcatctcacgccggcgagcaggtcccccc

SEQ ID NO: 270028 - DNA, 34 bp, Homo sapiens
  chr17:797966-798000
  hypo
tggtgtccgcagggacgggcggagacatgacgga

SEQ ID NO: 270029 - DNA, 96 bp, Homo sapiens
  chr17:817716-817812
  hypo
agattctttttaaggcgagaagtatgcaatgagacagtagaggcaaggtcaaaggcaaacaccgaggtctgtaattggtagcgcaagcaaggttcc

SEQ ID NO: 270030 - DNA, 150 bp, Homo sapiens
  chr17:835883-836033
  hypo
cagcagcaaggacccatcaccggaagaggcttctgagaggcaccgacttttgccatcagtgggcagcgagtgggctgtgtggtccccggacaagcagctgagtgggtggggagtgccttgttgtggccggcttcgcataagtcatctgcg

SEQ ID NO: 270031 - DNA, 150 bp, Homo sapiens; identical to SEQ ID NO: 217428
  chr17:836153-836303
  hypo

SEQ ID NO: 270032 - DNA, 409 bp, Homo sapiens
  chr17:839511-839920
  hypo
agaaacgtcccctgcgacaaagcctttggttttgctttgtgttcttctcccgtggggtggaagagccgccctccctctgaggcactgcagcgacgggtgccctggtgagtgtccacggtgaggtggtgagtgtgcaccacacacaacccggccagcatctgcccaggtcaagcccatcctgtcagtgcacacgccgcgtgctgccaccacccagctcgatgattctctccttccacaccttccggtccccaaaagtgactgaaagcaggattctgctgcggaaaaactggacttggaggaagggcaggagagaagggcgaggtgtgtcggcctgcctcaggtctggggtgcccaattctggttgtgcaaacagtgagggaaaaaaagggtgctacgatgtctggctaaa

SEQ ID NO: 270033 - DNA, 46 bp, Homo sapiens
  chr17:850336-850382
  hypo
ctcactcttaggcttgtcatgatcatgcaccggcagcgtccccctc

SEQ ID NO: 270034 - DNA, 245 bp, Homo sapiens
  chr17:851784-852029
  hypo
cgctggggacctagcggtgaacaagcagcctgggaaaggaatgtttaaaagctcccgggcgactgaagatcagccaggggtgaaaaccatcactcggtgcttcacggaacaaacgcttgaggcaaaacctaagacagctgggtcccaacgcggggcctcaccccggcccgtcccgccccagcgctcggaggctgagagcagcattctcagatggtactaaatccacatcccgggacacgaggaaa

SEQ ID NO: 270035 - DNA, 32 bp, Homo sapiens; identical to SEQ ID NO: 217431
  chr17:864608-864640
  hypo

SEQ ID NO: 270036 - DNA, 180 bp, Homo sapiens
  chr17:874468-874648
  hypo
agccaccgcgcgtggccgagtctcttttaatagactcagatatttgacatttcaaaaatggagagtcaagctttttcctatttttgagcacagaatcacacggcaatccagttgcacaagaagctgctgggactcacccagctgtgacatccatttgctcatttagtcctctttaaaaca

SEQ ID NO: 270037 - DNA, 152 bp, Homo sapiens
  chr17:876752-876904
  hypo
ttcccaggcttcgtcgatcagcagcagtctggagcgtcattggcagatagaaatacagagctcagtaagtatcagtaatatcccgggactttaaggcactgtatttgttgtttcattcttctaggtctttcttcgcagttataatctcttat

SEQ ID NO: 270038 - DNA, 459 bp, Homo sapiens
  chr17:915565-916024
  hypo
gggccagggtggtggtgaaccgggggacacgtgccctttcccgaggggccgccagtccccgttggtgccgagcccaaacgtaggcccccggctgacagagcttcccgcttgttacgaggagcagacgatctgggatctcacaagagaccttccagcgtttaggtgctggctcgcgtgcttctgaagtgtcctgtgagcgcctctgcggccactctagatccacaccggccatctgccaccgccgagcggggggtaactgattaggtgccaggatgggcaccggcggggagggctggggggcccgggctgggggggacccggggcaccgacgccaggactgggagacccgaggcagcacctacttcgtcaccacgctgatcttcacaccgaagacgccggtctgctttttggacggggtcctcttcaggctcatatctcggctggtgaatttcatggaaa

SEQ ID NO: 270039 - DNA, 64 bp, Homo sapiens; identical to SEQ ID NO: 217432
  chr17:916258-916322
  hypo

SEQ ID NO: 270040 - DNA, 525 bp, Homo sapiens
  chr17:929504-930029
  hypo
tcccaccggcctggcgccctgtcttctctggcaccttgtgccacatgagcctgaggggctggggaccccggaggcctccccgagcacagccacggcatccaggcatcggatgggaagggcgctgtggatgtcacggctctggctgtgccggtcatcggtaccagccccggctggggtcacggtccagaaaggagatccctccagatttcggctcaggagctggttccgctgtcttgaagcgggactggggaagtctctgtggggatcctggggcctcctggcctctctacagaagcccaggaccagctccacgggcccctcccgcctctccagggcccatcctggagggccaagggtctacggctcactggacccaggactgacgctgcgtttctccccagggtggggcaggcaggtcacaggcgcaggggactgtctgttcctcgaaggtgctggggggccgtcaggacacaaacatcttcctgccccagcatgagttcacaggggaaacgaggtcaaagaaca

SEQ ID NO: 270041 - DNA, 564 bp, Homo sapiens
  chr17:951705-952269
  hypo
tgcttcctgctaaaaagcatcgttcagctccctgttgtagacggagccatcgcagcctgcgcctggatcacctcttgggccacggtcaagaagctcggcgcccagctgcgcctggatcacgtccggggccacggtcaagaagctcggcgcccagctgcgcctggatcacgtccggggccacggtcaagaagctcggcgcccagctgccgcctggatcacctccggggccacggtcaagaagctcggcgcccagctgcgcctggatcacgtccggggccacggtcaagaagctcggcgcccagctgcgcctggatcacgtccggggccacggtcaagaagctcggcgcccagctgtgcctggatcacgtctgcggccactgtcaagaagctcagcacgcccaacgcccgaggctcaacctcagtacgggtcagttaccgtctcccttcatttcatggtcacagaatctacccccaaaccagaccacttgcggcacagcacgaggccacacgaggtaccagacgggagtgtgagcggctccaccacgtcacgccttttcccgctcc

SEQ ID NO: 270042 - DNA, 66 bp, Homo sapiens
  chr17:952745-952811
  hypo
cccagagtccccacccgaagccacagactcccaacgcagctgagtaaggtccggccaccctaacaa

SEQ ID NO: 270043 - DNA, 496 bp, Homo sapiens
  chr17:972915-973411
  hypo
gaaaaaaaaccaacaaagttgctgaaggctccatgggtggcagggtccggcctccctcccccgccctgtgccactggactcacacactcaccccgcagaggtcaggaccccctcccccgcccctggactcacacactcacctcgcagaggtccggaccccctcccccgcccctggactcgcacactcaccccgcagaggtcaggaccccctcccccgccccggactcgcacactcaccccgcagaggtccggaccccctcccccgccccgtgcccctggactcacacactcaccctgcagaggtcttcttcagcttggcacacagtaggacatctgtaaagaggaagacgtgccgcagcttccgggagctctctgacacttccaccaggaagccgtccttcaccagctgtcgcgtctgagggagatggcagaccccccagcctgctcagaggggaatgcggccgagggcagagcctgcacacgggggcacggccag

SEQ ID NO: 270044 - DNA, 89 bp, Homo sapiens
  chr17:978612-978701
  hypo
tcccagcgtgaacacgcacgccctagccgggccccaaacctgatagttctccaaagcctgagatataaataccccgtgcgcggctaagc

SEQ ID NO: 270045 - DNA, 288 bp, Homo sapiens
  chr17:995006-995294
  hypo
gatcttgtagaagatggtctcgatctgctggatggtgagcacgggctgggaggtggtggcggtggccttcaggggtttcatgggctgggagaaacagaggaagaaagagcagaggtcgggggtaaacaaaccagagtgtcggcaggccccggggccgatcgttagcccttcccgctgcccaagtcctgcccagacaaggctgccaaaggcagggcactgaaacgagctttgtatcaaggagccactgccacaggccccaacaagccgcacactcgacagcaggaacct

SEQ ID NO: 270046 - DNA, 338 bp, Homo sapiens
  chr17:1028626-1028964
  hypo
gtctctgagccctccgggggccccttctgctcctcattcccctctccgtcgtactcgtccgtcccgtagctgaagtctgagacaaggaacaagaaaggccactgagaatcctccaccagagctgccagggactggtagcgtagtgggcgccggcggcggcccccggcagccatggccccggccgcaccatccacgcctggcccgggcgggggctgtgcgggggcctgggcctggtgaggggcgggggagagccagcaggcaccgggccctgcccgctccggggctgctgggaggcggggaggagcggctctgctgttgctacccgatgaagagcatgt

SEQ ID NO: 270047 - DNA, 65 bp, Homo sapiens
  chr17:1043599-1043664
  hypo
gtggatctgggaggccggcaaccctgaaccagggaactggccagcggaagcgaggctgccacttc

SEQ ID NO: 270048 - DNA, 110 bp, Homo sapiens
  chr17:1053213-1053323
  hypo
cctgggagagacaccgagaggaaggccagcttgcccggtgtcttctcaagggctgacacacttctcaaagcgctgagattacagacgtgagccaccgcgcccggcctgtg

SEQ ID NO: 270049 - DNA, 59 bp, Homo sapiens
  chr17:1053672-1053731
  hypo
ccgggcatggcaagcgcactgccccctctcactcctccggcggccgccgtccactccca

SEQ ID NO: 270050 - DNA, 137 bp, Homo sapiens
  chr17:1094003-1094140
  hypo
gcagtttctaggtgggtgcccgtcccgtctgctctcgccgtctgctgggattccgagaaagaagatgctggttgctcacggtatgctcaacccctctgccccacggcgctgcaggcgaagctgtgagtcaccagctc

SEQ ID NO: 270051 - DNA, 42 bp, Homo sapiens
  chr17:1158236-1158278
  hypo
agtgctgggattacaggcgtgagccaccgcacccagccacga

SEQ ID NO: 270052 - DNA, 217 bp, Homo sapiens
  chr17:1193058-1193275
  hypo
ctgcatgctgggaccggtttatccaagtccagctacatactcatggcaccccgcacctctgcccaaatacaagtccaaacactgcacggccctcttcctgagtcccagctggaggaagggcacctccactcatccagcacccaagctgggaacctgggaatcattcgagtcacgttcctcccagcacccaagccgggaaccccggaatcgtctgaat

SEQ ID NO: 270053 - DNA, 53 bp, Homo sapiens
  chr17:1208267-1208320
  hypo
acagtctgcgaggccgtcctgggcagacctgcccgctacgccttgttggggtc

SEQ ID NO: 270054 - DNA, 214 bp, Homo sapiens
  chr17:1240771-1240985
  hypo
ccatccaaccattccgccatttatccacaagaaaggaacgacatgcccatataaagacttatacgcaaacacttacaggtgctttatttgtcatggacaaaaactggaaacacccaaatgtccatcaaataggtgaataaacaaattgaggtatatcaaacaatggaatacgtctcagcaataaaaggaatgaaaggaataaaaggaataaact

SEQ ID NO: 270055 - DNA, 214 bp, Homo sapiens
  chr17:1241045-1241259
  hypo
agggtgagattccatctcaaaaaaaaaaaaaatgttaatagctccccagatcgatttatagatttaataaaatcataagcaaaatcccagcaggtttctgttgttgctggtctgttactgaaatcgacaaactgattcttaaatgtatgcggaaatgcaaaaaccaataaaatcttgaacagcaaacctggaggcctcacgttaccgaatattg

SEQ ID NO: 270056 - DNA, 98 bp, Homo sapiens
  chr17:1244357-1244455
  hypo
ctaatacactggtgaatatgcgtattgcagcttttccaagacacgtattaatcatgaaacatgtactgacctcgaaaatgtggccgcgcgcggtagct

SEQ ID NO: 270057 - DNA, 94 bp, Homo sapiens; identical to SEQ ID NO: 217433
  chr17:1244961-1245055
  hypo

SEQ ID NO: 270058 - DNA, 87 bp, Homo sapiens
  chr17:1255769-1255856
  hypo
agcctcaagcaacgcgacatatgttttatgtttcagcctaagaaacgttatctcttttttttttttttagatggagtcttcctctgt

SEQ ID NO: 270059 - DNA, 44 bp, Homo sapiens
  chr17:1298785-1298829
  hypo
gcactccagcctgggggacagagcccagtcgtagaagggatttt

SEQ ID NO: 270060 - DNA, 208 bp, Homo sapiens
  chr17:1352363-1352571
  hypo
catgtagctcttcactacctcgagggagtatcacaaactattaccaccctagcttctgtcccacgccttcaaaatgaagcacgttttatgcccccctccacccactagcgcaacaggtcggatgagcaggtaacaggaggcaccatcttatttccaagtgctggacccgaggtcctttcacacttacggatgcactccacccaggcac

SEQ ID NO: 270061 - DNA, 204 bp, Homo sapiens
  chr17:1373309-1373513
  hypo
gactccatctcaaaaaaaaaagagaccttacttttcactgctcagctctggtccgggccctccgtgagccctccctgaccaatcctttggcccgaagaaatcagacccttctgctgtgtactatgatggtccctaacttggcagggggtgcccacagacctcacgcagggcaggtgggggcgtgggccacgaggtgtccaggac

SEQ ID NO: 270062 - DNA, 235 bp, Homo sapiens
  chr17:1375239-1375474
  hypo
ccggctctgcgcacgcgcaggttttccaacagccccaggtacttcacctggtggcggatcagcacctcgtcaaagcggcctggggtagggggagcgccgtggtcagcgggctggcgctgacggcctgtctcctgcaggggaggcccggccccgaagtcccccgtgggaggggcctaccgggctgtttggcatcattgggtttgatgcagcggacgtaggcgggctccttagactg

SEQ ID NO: 270063 - DNA, 81 bp, Homo sapiens; identical to SEQ ID NO: 217435
  chr17:1376039-1376120
  hypo

SEQ ID NO: 270064 - DNA, 235 bp, Homo sapiens
  chr17:1386238-1386473
  hypo
cagcagcctcttggtggcctcggtcttgcctgccccgctctccccagagatcatcacagcctggtcccgacgctccgtgcgcagtgctcggtacacagtgtccgccacggcaaacctggggcggaggctcgtcagggagtttggggaggggggccaagcagagccccacgagagtcccgctcccacatctgggtggagtcctcttgtgggagtcgaatacacccttgaggatggg

SEQ ID NO: 270065 - DNA, 135 bp, Homo sapiens; identical to SEQ ID NO: 217436
  chr17:1386690-1386825
  hypo

SEQ ID NO: 270066 - DNA, 116 bp, Homo sapiens; identical to SEQ ID NO: 217437
  chr17:1387481-1387597
  hypo

SEQ ID NO: 270067 - DNA, 294 bp, Homo sapiens
  chr17:1407885-1408179
  hypo
ttccaatcctcgtgcgatgaagaagcctgttactccttacttatatattctttgagactcagttgctttccttgtaaacaggcaataataacactgtttacctaacgaggacatggtaggaactgatacaggcaaagccttggcgcacacctgcacgccaatcacaatgagctgttatttggaaataggtgcgtgcctcctccttagcgggagtctgccttcctcaccgtgccatcctttttcctcttgctggcaaggatgaccatgaatcctgaggtacgatgggcttgagga

SEQ ID NO: 270068 - DNA, 164 bp, Homo sapiens; identical to SEQ ID NO: 217439
  chr17:1410272-1410436
  hypo

SEQ ID NO: 270069 - DNA, 313 bp, Homo sapiens
  chr17:1412248-1412561
  hypo
gcgtggggcagagggcggggaacagtctgcagacccaggctcactcgtggcggtcagcgtggggcagagggcggggaacagtctgcagacccaggctcactcgtgggggtcagcgtggggcagagggcggggagcggtctgcagacccaggctcactcgtgggggttagtgggggttagcgtggggcagagggcggggaacggtctgccagacccaggctcactcgtggtccaggatgtttgggatgtctcgcccctcacaattctgcatctccaggatccggtcaaagtgctccagccgctggtaattgttg

SEQ ID NO: 270070 - DNA, 67 bp, Homo sapiens
  chr17:1437270-1437337
  hypo
tagcagacactgacgtgttcccagaactacaggatggtgctctcggtgaagcgccccagcaaaacag

SEQ ID NO: 270071 - DNA, 65 bp, Homo sapiens; identical to SEQ ID NO: 217442
  chr17:1451501-1451566
  hypo

SEQ ID NO: 270072 - DNA, 324 bp, Homo sapiens; identical to SEQ ID NO: 217443
  chr17:1454051-1454375
  hypo

SEQ ID NO: 270073 - DNA, 224 bp, Homo sapiens
  chr17:1462629-1462853
  hypo
acctattggagaagccgtggccggcaaagtctccgccagggccagaaccccacagaggtgccagggctagcagcacttctccaggtgccgtgcatgtgaaatgcagaccaagagccacccccagttcaaagctgtgaggcgggagagctaagacaaaaactcttggttttacccatacaagtccagccagtttccaagcttagacgttcggtccccagaccctt

SEQ ID NO: 270074 - DNA, 249 bp, Homo sapiens
  chr17:1494364-1494613
  hypo
cggggttggcgctgcggtggggtcacctcttgggtgaaatcaggcaaatccctttccctcccccaggccttcctgagcgcctctgcagaacagggcgggcggggccgcctccccttttggggtgaggtgggaatggggtgagccgatacccacagagcactccctgcccgtcgcccggctgcggtctcaggcgggtacctgcggcatccggctggcacttcacctccaggtcgacggtggacaggcaca

SEQ ID NO: 270075 - DNA, 197 bp, Homo sapiens
  chr17:1523771-1523968
  hypo
tcccatcttttaccctggagcgactacacacaggggcagggaccttgcacgtaggccaacagccttctcgtcttaaacaaatccctgccgatggggccaccaggccctctgcccggccgcctgcctccaggccgtcccgtccagcaacagaggcgcctggggccggggaggtgagcggcttctccttctgcttgtgg

SEQ ID NO: 270076 - DNA, 204 bp, Homo sapiens
  chr17:1527254-1527458
  hypo
aggagccacatctccgctgctgttctagctcctggcgccctgctttcttgggggcccgaccaccccctggaattatacgggttacacaggtatgcgtgtgatgacttgtttcctctgcacccagcacggcaccttcgtcaatgtttactgaatgtttaggttacaagaaagaggggattaacgatccacatgtaggcctggagc

SEQ ID NO: 270077 - DNA, 120 bp, Homo sapiens
  chr17:1544473-1544593
  hypo
gacagcgtagagatgaccagcaggggagcctgaccgcctgagctccgctgccagccagatcagtggtggcctcagattctcataggagcgccagtcctattgtgaactgcgcacgggagg

SEQ ID NO: 270078 - DNA, 143 bp, Homo sapiens
  chr17:1546299-1546442
  hypo
tttcccctttctcgttcctctgctttgtatgttttttgagaggagcaccgcgaagccctgacccctcctcccggcgccccgccgcggccacctgtctccgctccgccccgcccgctcacaggtctccgcgcagcctcgctcac

SEQ ID NO: 270079 - DNA, 39 bp, Homo sapiens
  chr17:1562742-1562781
  hypo
ggcccgggcgtagcgctcaatgtcgtgggaatcatagtc

SEQ ID NO: 270080 - DNA, 120 bp, Homo sapiens
  chr17:1694044-1694164
  hypo
gtgatccacccaccttggcctcccaaagtgctggctaagccatgcccatccctggtgcatttaaactgggattcaagtaaagaaaaaagattcatgccgggcgcggtggctcacgcctgt

SEQ ID NO: 270081 - DNA, 156 bp, Homo sapiens; identical to SEQ ID NO: 217446
  chr17:1694900-1695056
  hypo

SEQ ID NO: 270082 - DNA, 180 bp, Homo sapiens
  chr17:1695176-1695356
  hypo
tctcaaaaacaaacaaaaaaccactaattgaaattacaaaaggaatacgtggtagtcagaaaaaaatttaaaaattgaacattacagagaaaatgacagttgcttgtaatgccatcaggcagatataacatgttatctttaaatcctaacctaaaatacattttttttttttttgagacg

SEQ ID NO: 270083 - DNA, 220 bp, Homo sapiens
  chr17:1703829-1704049
  hypo
gtcccatttgctgtctaggccgtgatgcggtggtggcagttctcctgggttgagaacactcacaaaagcatcctcctgcaccaggagctctcctgggagaatatcttttgtggcaacgagacagcgaccttttaaaggatctacgcataagccgatggatgatgaggcattggaaagttgttcattctcctccctcagcgctgcatcctcaagggttttg

SEQ ID NO: 270084 - DNA, 204 bp, Homo sapiens; identical to SEQ ID NO: 217448
  chr17:1756126-1756330
  hypo

SEQ ID NO: 270085 - DNA, 297 bp, Homo sapiens; identical to SEQ ID NO: 217449
  chr17:1775556-1775853
  hypo

SEQ ID NO: 270086 - DNA, 402 bp, Homo sapiens; identical to SEQ ID NO: 217450
  chr17:1783887-1784289
  hypo

SEQ ID NO: 270087 - DNA, 119 bp, Homo sapiens; identical to SEQ ID NO: 217451
  chr17:1784821-1784940
  hypo

SEQ ID NO: 270088 - DNA, 161 bp, Homo sapiens; identical to SEQ ID NO: 217452
  chr17:1792141-1792302
  hypo

SEQ ID NO: 270089 - DNA, 466 bp, Homo sapiens; identical to SEQ ID NO: 217453
  chr17:1801623-1802089
  hypo

SEQ ID NO: 270090 - DNA, 58 bp, Homo sapiens
  chr17:1802318-1802376
  hypo
taccaggacaggacgtgtccagggaacgctgacacctgtcctcgcgccttctcagtgg

SEQ ID NO: 270091 - DNA, 281 bp, Homo sapiens
  chr17:1817208-1817489
  hypo
gcggtcgtctgtttcggcagccccgggaacacaggcagcctattgtgtctgtcatcttgaattaccctgtgtcctttcggctgggtcagtggagaagccgtgggttcactcaggtttccattgtattcattcgtaactgggatccctcactccggggctgtcgggttcgaatcctcacggcccagctcgccttccttcaccccccagtgccttcttctgcgtcaggtatggctgcacccttagtgactggggttcttatcacttatcggcatctgatccag

SEQ ID NO: 270092 - DNA, 255 bp, Homo sapiens
  chr17:1824435-1824690
  hypo
agtggaggagtagacgattgggtcgaaaccaaattggtcaaaaggacaaactggtcaagagcgactatttccgccgcagccttggctgttccacaagccggttctgccaaggactcgtcatccccaggcggagtgccacctacatgccaggtgggaggcggcgttgcggaggagccgctgagggtgaaacgaaggagtccgggccagttcttagcctttttcaggatctgatgaaaaggccgtgctggcctgcac

SEQ ID NO: 270093 - DNA, 52 bp, Homo sapiens; identical to SEQ ID NO: 217454
  chr17:1837750-1837802
  hypo
